United States Patent Application Publication US 2019/0048337 A1 - sequence listing, part 23

SEQ ID NO: 767185 - RNA, 17 nt, Artificial Sequence
  Synthetic
aaaaaaaaauacuaacu

SEQ ID NO: 767186 - RNA, 17 nt, Artificial Sequence
  Synthetic
uaauugcccuccuaacu

SEQ ID NO: 767187 - RNA, 17 nt, Artificial Sequence
  Synthetic
uguaguccuggcuaacu

SEQ ID NO: 767188 - RNA, 17 nt, Artificial Sequence
  Synthetic
cuagcuggcuucuaacu

SEQ ID NO: 767189 - RNA, 17 nt, Artificial Sequence
  Synthetic
aauucaaauuucuaacu

SEQ ID NO: 767190 - RNA, 17 nt, Artificial Sequence
  Synthetic
ccaguugaaaaguaacu

SEQ ID NO: 767191 - RNA, 17 nt, Artificial Sequence
  Synthetic
cagccucccgaguaacu

SEQ ID NO: 767192 - RNA, 17 nt, Artificial Sequence
  Synthetic
uuucucauuuaguaacu

SEQ ID NO: 767193 - RNA, 17 nt, Artificial Sequence
  Synthetic
uuucaggugagguaacu

SEQ ID NO: 767194 - RNA, 17 nt, Artificial Sequence
  Synthetic
uuuguuuugauguaacu

SEQ ID NO: 767195 - RNA, 17 nt, Artificial Sequence
  Synthetic
uugguuaauauguaacu

SEQ ID NO: 767196 - RNA, 17 nt, Artificial Sequence
  Synthetic
uaugaaguuguguaacu

SEQ ID NO: 767197 - RNA, 17 nt, Artificial Sequence
  Synthetic
agguuuggcuuguaacu

SEQ ID NO: 767198 - RNA, 17 nt, Artificial Sequence
  Synthetic
ugagacacuuuguaacu

SEQ ID NO: 767199 - RNA, 17 nt, Artificial Sequence
  Synthetic
acugucauuuuguaacu

SEQ ID NO: 767200 - RNA, 17 nt, Artificial Sequence
  Synthetic
aauacaaaaaauuaacu

SEQ ID NO: 767201 - RNA, 17 nt, Artificial Sequence
  Synthetic
auguagaaaaauuaacu

SEQ ID NO: 767202 - RNA, 17 nt, Artificial Sequence
  Synthetic
aauuauuuaaauuaacu

SEQ ID NO: 767203 - RNA, 17 nt, Artificial Sequence
  Synthetic
aggaaagagaauuaacu

SEQ ID NO: 767204 - RNA, 17 nt, Artificial Sequence
  Synthetic
auucuugauaauuaacu

SEQ ID NO: 767205 - RNA, 17 nt, Artificial Sequence
  Synthetic
cagcaaaaugauuaacu

SEQ ID NO: 767206 - RNA, 17 nt, Artificial Sequence
  Synthetic
uugaacaaauauuaacu

SEQ ID NO: 767207 - RNA, 17 nt, Artificial Sequence
  Synthetic
uaaaguacuuauuaacu

SEQ ID NO: 767208 - RNA, 17 nt, Artificial Sequence
  Synthetic
cagguaccuuauuaacu

SEQ ID NO: 767209 - RNA, 17 nt, Artificial Sequence
  Synthetic
aauugaagcaguuaacu

SEQ ID NO: 767210 - RNA, 17 nt, Artificial Sequence
  Synthetic
ugacuaaucaguuaacu

SEQ ID NO: 767211 - RNA, 17 nt, Artificial Sequence
  Synthetic
ugacuacuuaguuaacu

SEQ ID NO: 767212 - RNA, 17 nt, Artificial Sequence
  Synthetic
uauguagaagguuaacu

SEQ ID NO: 767213 - RNA, 17 nt, Artificial Sequence
  Synthetic
aacuuugaggguuaacu

SEQ ID NO: 767214 - RNA, 17 nt, Artificial Sequence
  Synthetic
aaauucaaauguuaacu

SEQ ID NO: 767215 - RNA, 17 nt, Artificial Sequence
  Synthetic
auaaauccauguuaacu

SEQ ID NO: 767216 - RNA, 17 nt, Artificial Sequence
  Synthetic
aauuuuauguguuaacu

SEQ ID NO: 767217 - RNA, 17 nt, Artificial Sequence
  Synthetic
aaaauuuaaauuuaacu

SEQ ID NO: 767218 - RNA, 17 nt, Artificial Sequence
  Synthetic
aaauucucccuuuaacu

SEQ ID NO: 767219 - RNA, 17 nt, Artificial Sequence
  Synthetic
uuaaaguagcuuuaacu

SEQ ID NO: 767220 - RNA, 17 nt, Artificial Sequence
  Synthetic
uuauuuccuguuuaacu

SEQ ID NO: 767221 - RNA, 17 nt, Artificial Sequence
  Synthetic
aaauucuucuuuuaacu

SEQ ID NO: 767222 - RNA, 17 nt, Artificial Sequence
  Synthetic
agggaguacaaaacacu

SEQ ID NO: 767223 - RNA, 17 nt, Artificial Sequence
  Synthetic
cccuuauccaaaacacu

SEQ ID NO: 767224 - RNA, 17 nt, Artificial Sequence
  Synthetic
agcaaaugcaaaacacu

SEQ ID NO: 767225 - RNA, 17 nt, Artificial Sequence
  Synthetic
aaaaaccucaaaacacu

SEQ ID NO: 767226 - RNA, 17 nt, Artificial Sequence
  Synthetic
aacuuuaagaaaacacu

SEQ ID NO: 767227 - RNA, 17 nt, Artificial Sequence
  Synthetic
auaguauggaaaacacu

SEQ ID NO: 767228 - RNA, 17 nt, Artificial Sequence
  Synthetic
ugaacaaugaaaacacu

SEQ ID NO: 767229 - RNA, 17 nt, Artificial Sequence
  Synthetic
uccagagugaaaacacu

SEQ ID NO: 767230 - RNA, 17 nt, Artificial Sequence
  Synthetic
uccgcauuuaaaacacu

SEQ ID NO: 767231 - RNA, 17 nt, Artificial Sequence
  Synthetic
ucacauuaagaaacacu

SEQ ID NO: 767232 - RNA, 17 nt, Artificial Sequence
  Synthetic
uuuaucugagaaacacu

SEQ ID NO: 767233 - RNA, 17 nt, Artificial Sequence
  Synthetic
uauuuauuggaaacacu

SEQ ID NO: 767234 - RNA, 17 nt, Artificial Sequence
  Synthetic
uuucaauaugaaacacu

SEQ ID NO: 767235 - RNA, 17 nt, Artificial Sequence
  Synthetic
aagaaucuauaaacacu

SEQ ID NO: 767236 - RNA, 17 nt, Artificial Sequence
  Synthetic
aacacuuguuaaacacu

SEQ ID NO: 767237 - RNA, 17 nt, Artificial Sequence
  Synthetic
cuaguaaucccaacacu

SEQ ID NO: 767238 - RNA, 17 nt, Artificial Sequence
  Synthetic
uugugauucucaacacu

SEQ ID NO: 767239 - RNA, 17 nt, Artificial Sequence
  Synthetic
caaaaaucgucaacacu

SEQ ID NO: 767240 - RNA, 17 nt, Artificial Sequence
  Synthetic
aagugguaaagaacacu

SEQ ID NO: 767241 - RNA, 17 nt, Artificial Sequence
  Synthetic
ugagcaaugagaacacu

SEQ ID NO: 767242 - RNA, 17 nt, Artificial Sequence
  Synthetic
uccaauaauggaacacu

SEQ ID NO: 767243 - RNA, 17 nt, Artificial Sequence
  Synthetic
cgugcuucaugaacacu

SEQ ID NO: 767244 - RNA, 17 nt, Artificial Sequence
  Synthetic
uucucuuuaugaacacu

SEQ ID NO: 767245 - RNA, 17 nt, Artificial Sequence
  Synthetic
caaaacaacugaacacu

SEQ ID NO: 767246 - RNA, 17 nt, Artificial Sequence
  Synthetic
cuggaaaagauaacacu

SEQ ID NO: 767247 - RNA, 17 nt, Artificial Sequence
  Synthetic
cagaugaggauaacacu

SEQ ID NO: 767248 - RNA, 17 nt, Artificial Sequence
  Synthetic
agucuaggaaacacacu

SEQ ID NO: 767249 - RNA, 17 nt, Artificial Sequence
  Synthetic
acagacacacacacacu

SEQ ID NO: 767250 - RNA, 17 nt, Artificial Sequence
  Synthetic
aggcaacaucacacacu

SEQ ID NO: 767251 - RNA, 17 nt, Artificial Sequence
  Synthetic
ugauugagaaccacacu

SEQ ID NO: 767252 - RNA, 17 nt, Artificial Sequence
  Synthetic
ucuuuucccaccacacu

SEQ ID NO: 767253 - RNA, 17 nt, Artificial Sequence
  Synthetic
uaaaaccaccccacacu

SEQ ID NO: 767254 - RNA, 17 nt, Artificial Sequence
  Synthetic
uugugcuucagcacacu

SEQ ID NO: 767255 - RNA, 17 nt, Artificial Sequence
  Synthetic
aaacaaaaaugcacacu

SEQ ID NO: 767256 - RNA, 17 nt, Artificial Sequence
  Synthetic
aauuucaccugcacacu

SEQ ID NO: 767257 - RNA, 17 nt, Artificial Sequence
  Synthetic
cacaaaggcugcacacu

SEQ ID NO: 767258 - RNA, 17 nt, Artificial Sequence
  Synthetic
auggccuugcucacacu

SEQ ID NO: 767259 - RNA, 17 nt, Artificial Sequence
  Synthetic
caagugucauucacacu

SEQ ID NO: 767260 - RNA, 17 nt, Artificial Sequence
  Synthetic
uguuaccucuucacacu

SEQ ID NO: 767261 - RNA, 17 nt, Artificial Sequence
  Synthetic
agucaauaaaagacacu

SEQ ID NO: 767262 - RNA, 17 nt, Artificial Sequence
  Synthetic
auaucaaccaagacacu

SEQ ID NO: 767263 - RNA, 17 nt, Artificial Sequence
  Synthetic
cuaccacugcagacacu

SEQ ID NO: 767264 - RNA, 17 nt, Artificial Sequence
  Synthetic
aaacagucagagacacu

SEQ ID NO: 767265 - RNA, 17 nt, Artificial Sequence
  Synthetic
caggaacaauagacacu

SEQ ID NO: 767266 - RNA, 17 nt, Artificial Sequence
  Synthetic
uucauuccugggacacu

SEQ ID NO: 767267 - RNA, 17 nt, Artificial Sequence
  Synthetic
auuggucgauggacacu

SEQ ID NO: 767268 - RNA, 17 nt, Artificial Sequence
  Synthetic
cuagugugaaugacacu

SEQ ID NO: 767269 - RNA, 17 nt, Artificial Sequence
  Synthetic
uuuaacuucaugacacu

SEQ ID NO: 767270 - RNA, 17 nt, Artificial Sequence
  Synthetic
acaaggucccugacacu

SEQ ID NO: 767271 - RNA, 17 nt, Artificial Sequence
  Synthetic
uucauagcgcugacacu

SEQ ID NO: 767272 - RNA, 17 nt, Artificial Sequence
  Synthetic
aguggucugcugacacu

SEQ ID NO: 767273 - RNA, 17 nt, Artificial Sequence
  Synthetic
uccauuggggugacacu

SEQ ID NO: 767274 - RNA, 17 nt, Artificial Sequence
  Synthetic
ugcaucuuauugacacu

SEQ ID NO: 767275 - RNA, 17 nt, Artificial Sequence
  Synthetic
agguauagaaauacacu

SEQ ID NO: 767276 - RNA, 17 nt, Artificial Sequence
  Synthetic
acaauuuuagauacacu

SEQ ID NO: 767277 - RNA, 17 nt, Artificial Sequence
  Synthetic
uuucuacaaccuacacu

SEQ ID NO: 767278 - RNA, 17 nt, Artificial Sequence
  Synthetic
acauggcuagcuacacu

SEQ ID NO: 767279 - RNA, 17 nt, Artificial Sequence
  Synthetic
augcuaacuucuacacu

SEQ ID NO: 767280 - RNA, 17 nt, Artificial Sequence
  Synthetic
agucacaugcguacacu

SEQ ID NO: 767281 - RNA, 17 nt, Artificial Sequence
  Synthetic
cuugguggugguacacu

SEQ ID NO: 767282 - RNA, 17 nt, Artificial Sequence
  Synthetic
caaaauuuuuguacacu

SEQ ID NO: 767283 - RNA, 17 nt, Artificial Sequence
  Synthetic
aacucaguuauuacacu

SEQ ID NO: 767284 - RNA, 17 nt, Artificial Sequence
  Synthetic
uuuaugugaaaaccacu

SEQ ID NO: 767285 - RNA, 17 nt, Artificial Sequence
  Synthetic
aacagauaacaaccacu

SEQ ID NO: 767286 - RNA, 17 nt, Artificial Sequence
  Synthetic
aguuaauguuaaccacu

SEQ ID NO: 767287 - RNA, 17 nt, Artificial Sequence
  Synthetic
aacuuuuugacaccacu

SEQ ID NO: 767288 - RNA, 17 nt, Artificial Sequence
  Synthetic
aaguaaaagucaccacu

SEQ ID NO: 767289 - RNA, 17 nt, Artificial Sequence
  Synthetic
cacugagcuagaccacu

SEQ ID NO: 767290 - RNA, 17 nt, Artificial Sequence
  Synthetic
agagcagcaguaccacu

SEQ ID NO: 767291 - RNA, 17 nt, Artificial Sequence
  Synthetic
aaauguuugguaccacu

SEQ ID NO: 767292 - RNA, 17 nt, Artificial Sequence
  Synthetic
agugccugcuuaccacu

SEQ ID NO: 767293 - RNA, 17 nt, Artificial Sequence
  Synthetic
uucuuccugaacccacu

SEQ ID NO: 767294 - RNA, 17 nt, Artificial Sequence
  Synthetic
caagguaaacacccacu

SEQ ID NO: 767295 - RNA, 17 nt, Artificial Sequence
  Synthetic
aguacuuuuuacccacu

SEQ ID NO: 767296 - RNA, 17 nt, Artificial Sequence
  Synthetic
aaaaaaaaaaccccacu

SEQ ID NO: 767297 - RNA, 17 nt, Artificial Sequence
  Synthetic
aacacagaguccccacu

SEQ ID NO: 767298 - RNA, 17 nt, Artificial Sequence
  Synthetic
cacacagaguccccacu

SEQ ID NO: 767299 - RNA, 17 nt, Artificial Sequence
  Synthetic
cacauagaguccccacu

SEQ ID NO: 767300 - RNA, 17 nt, Artificial Sequence
  Synthetic
aucucaagucgcccacu

SEQ ID NO: 767301 - RNA, 17 nt, Artificial Sequence
  Synthetic
uggaguuuaaucccacu

SEQ ID NO: 767302 - RNA, 17 nt, Artificial Sequence
  Synthetic
aauuuguugaucccacu

SEQ ID NO: 767303 - RNA, 17 nt, Artificial Sequence
  Synthetic
ucuaguaauaucccacu

SEQ ID NO: 767304 - RNA, 17 nt, Artificial Sequence
  Synthetic
uuaaauuaccucccacu

SEQ ID NO: 767305 - RNA, 17 nt, Artificial Sequence
  Synthetic
auuaugcuucucccacu

SEQ ID NO: 767306 - RNA, 17 nt, Artificial Sequence
  Synthetic
auguguauaaagccacu

SEQ ID NO: 767307 - RNA, 17 nt, Artificial Sequence
  Synthetic
cuguaaucccagccacu

SEQ ID NO: 767308 - RNA, 17 nt, Artificial Sequence
  Synthetic
cuguagucccagccacu

SEQ ID NO: 767309 - RNA, 17 nt, Artificial Sequence
  Synthetic
cuaaaugaauagccacu

SEQ ID NO: 767310 - RNA, 17 nt, Artificial Sequence
  Synthetic
uugugcucuuagccacu

SEQ ID NO: 767311 - RNA, 17 nt, Artificial Sequence
  Synthetic
agagucuaaaggccacu

SEQ ID NO: 767312 - RNA, 17 nt, Artificial Sequence
  Synthetic
uaacucacaaggccacu

SEQ ID NO: 767313 - RNA, 17 nt, Artificial Sequence
  Synthetic
ucuagaguuaggccacu

SEQ ID NO: 767314 - RNA, 17 nt, Artificial Sequence
  Synthetic
ucaacuacugggccacu

SEQ ID NO: 767315 - RNA, 17 nt, Artificial Sequence
  Synthetic
uauugcuuugggccacu

SEQ ID NO: 767316 - RNA, 17 nt, Artificial Sequence
  Synthetic
auacccagauggccacu

SEQ ID NO: 767317 - RNA, 17 nt, Artificial Sequence
  Synthetic
uucucaugguggccacu

SEQ ID NO: 767318 - RNA, 17 nt, Artificial Sequence
  Synthetic
acuuuccaaaugccacu

SEQ ID NO: 767319 - RNA, 17 nt, Artificial Sequence
  Synthetic
uuucuguuaaugccacu

SEQ ID NO: 767320 - RNA, 17 nt, Artificial Sequence
  Synthetic
uuuugacaauugccacu

SEQ ID NO: 767321 - RNA, 17 nt, Artificial Sequence
  Synthetic
caaaauucacauccacu

SEQ ID NO: 767322 - RNA, 17 nt, Artificial Sequence
  Synthetic
aguuucagacauccacu

SEQ ID NO: 767323 - RNA, 17 nt, Artificial Sequence
  Synthetic
aacagcaugcauccacu

SEQ ID NO: 767324 - RNA, 17 nt, Artificial Sequence
  Synthetic
cuucucacagcuccacu

SEQ ID NO: 767325 - RNA, 17 nt, Artificial Sequence
  Synthetic
aacauuaguucuccacu

SEQ ID NO: 767326 - RNA, 17 nt, Artificial Sequence
  Synthetic
uuuuuuuuuucuccacu

SEQ ID NO: 767327 - RNA, 17 nt, Artificial Sequence
  Synthetic
ugucuauuaaguccacu

SEQ ID NO: 767328 - RNA, 17 nt, Artificial Sequence
  Synthetic
auugcuaaauguccacu

SEQ ID NO: 767329 - RNA, 17 nt, Artificial Sequence
  Synthetic
uuauugagaguuccacu

SEQ ID NO: 767330 - RNA, 17 nt, Artificial Sequence
  Synthetic
acuaauuuaguuccacu

SEQ ID NO: 767331 - RNA, 17 nt, Artificial Sequence
  Synthetic
auuguuguuguuccacu

SEQ ID NO: 767332 - RNA, 17 nt, Artificial Sequence
  Synthetic
uuuccagcauuuccacu

SEQ ID NO: 767333 - RNA, 17 nt, Artificial Sequence
  Synthetic
auuacagccuuuccacu

SEQ ID NO: 767334 - RNA, 17 nt, Artificial Sequence
  Synthetic
aucgauuauuuuccacu

SEQ ID NO: 767335 - RNA, 17 nt, Artificial Sequence
  Synthetic
uuuacuuauuuuccacu

SEQ ID NO: 767336 - RNA, 17 nt, Artificial Sequence
  Synthetic
aguucagcuuuuccacu

SEQ ID NO: 767337 - RNA, 17 nt, Artificial Sequence
  Synthetic
cagccucccaaagcacu

SEQ ID NO: 767338 - RNA, 17 nt, Artificial Sequence
  Synthetic
uggccucccaaagcacu

SEQ ID NO: 767339 - RNA, 17 nt, Artificial Sequence
  Synthetic
ucugcuggcaaagcacu

SEQ ID NO: 767340 - RNA, 17 nt, Artificial Sequence
  Synthetic
aagcccagccaagcacu

SEQ ID NO: 767341 - RNA, 17 nt, Artificial Sequence
  Synthetic
uagacaagggaagcacu

SEQ ID NO: 767342 - RNA, 17 nt, Artificial Sequence
  Synthetic
cuaugguuugaagcacu

SEQ ID NO: 767343 - RNA, 17 nt, Artificial Sequence
  Synthetic
ccuguaaucccagcacu

SEQ ID NO: 767344 - RNA, 17 nt, Artificial Sequence
  Synthetic
ucucugcugucagcacu

SEQ ID NO: 767345 - RNA, 17 nt, Artificial Sequence
  Synthetic
caguaagugucagcacu

SEQ ID NO: 767346 - RNA, 17 nt, Artificial Sequence
  Synthetic
aaauauuuuucagcacu

SEQ ID NO: 767347 - RNA, 17 nt, Artificial Sequence
  Synthetic
ucuaaaauaagagcacu

SEQ ID NO: 767348 - RNA, 17 nt, Artificial Sequence
  Synthetic
ucaucaugucuagcacu

SEQ ID NO: 767349 - RNA, 17 nt, Artificial Sequence
  Synthetic
uguccgcagguagcacu

SEQ ID NO: 767350 - RNA, 17 nt, Artificial Sequence
  Synthetic
cuuuccguauuagcacu

SEQ ID NO: 767351 - RNA, 17 nt, Artificial Sequence
  Synthetic
agugaauccuuagcacu

SEQ ID NO: 767352 - RNA, 17 nt, Artificial Sequence
  Synthetic
aguaaagcuuuagcacu

SEQ ID NO: 767353 - RNA, 17 nt, Artificial Sequence
  Synthetic
aguucuuacuacgcacu

SEQ ID NO: 767354 - RNA, 17 nt, Artificial Sequence
  Synthetic
auuacauugggcgcacu

SEQ ID NO: 767355 - RNA, 17 nt, Artificial Sequence
  Synthetic
auggaagcacaggcacu

SEQ ID NO: 767356 - RNA, 17 nt, Artificial Sequence
  Synthetic
uuguucaucuaggcacu

SEQ ID NO: 767357 - RNA, 17 nt, Artificial Sequence
  Synthetic
ugcacuugaagggcacu

SEQ ID NO: 767358 - RNA, 17 nt, Artificial Sequence
  Synthetic
uauaguagaugggcacu

SEQ ID NO: 767359 - RNA, 17 nt, Artificial Sequence
  Synthetic
aaugaaaugcuggcacu

SEQ ID NO: 767360 - RNA, 17 nt, Artificial Sequence
  Synthetic
auuugcuuucuggcacu

SEQ ID NO: 767361 - RNA, 17 nt, Artificial Sequence
  Synthetic
uuuaucccauuggcacu

SEQ ID NO: 767362 - RNA, 17 nt, Artificial Sequence
  Synthetic
augaaauuauuggcacu

SEQ ID NO: 767363 - RNA, 17 nt, Artificial Sequence
  Synthetic
auaacauuuaaugcacu

SEQ ID NO: 767364 - RNA, 17 nt, Artificial Sequence
  Synthetic
auuuaaccccaugcacu

SEQ ID NO: 767365 - RNA, 17 nt, Artificial Sequence
  Synthetic
uauuguucccaugcacu

SEQ ID NO: 767366 - RNA, 17 nt, Artificial Sequence
  Synthetic
caaauuucguaugcacu

SEQ ID NO: 767367 - RNA, 17 nt, Artificial Sequence
  Synthetic
aaccuugcuuaugcacu

SEQ ID NO: 767368 - RNA, 17 nt, Artificial Sequence
  Synthetic
cccuugucuucugcacu

SEQ ID NO: 767369 - RNA, 17 nt, Artificial Sequence
  Synthetic
cuuuuagguagugcacu

SEQ ID NO: 767370 - RNA, 17 nt, Artificial Sequence
  Synthetic
auaaacaagauugcacu

SEQ ID NO: 767371 - RNA, 17 nt, Artificial Sequence
  Synthetic
aaaugaagcuuugcacu

SEQ ID NO: 767372 - RNA, 17 nt, Artificial Sequence
  Synthetic
uaauucuuuuuugcacu

SEQ ID NO: 767373 - RNA, 17 nt, Artificial Sequence
  Synthetic
uccuuuaagaaaucacu

SEQ ID NO: 767374 - RNA, 17 nt, Artificial Sequence
  Synthetic
ugcuuccaacaaucacu

SEQ ID NO: 767375 - RNA, 17 nt, Artificial Sequence
  Synthetic
ucauuuguucaaucacu

SEQ ID NO: 767376 - RNA, 17 nt, Artificial Sequence
  Synthetic
caugaauaagaaucacu

SEQ ID NO: 767377 - RNA, 17 nt, Artificial Sequence
  Synthetic
ugcacguuagaaucacu

SEQ ID NO: 767378 - RNA, 17 nt, Artificial Sequence
  Synthetic
ugugcccaugaaucacu

SEQ ID NO: 767379 - RNA, 17 nt, Artificial Sequence
  Synthetic
ugucacuuugaaucacu

SEQ ID NO: 767380 - RNA, 17 nt, Artificial Sequence
  Synthetic
uauauaaaaacaucacu

SEQ ID NO: 767381 - RNA, 17 nt, Artificial Sequence
  Synthetic
acuaccaagacaucacu

SEQ ID NO: 767382 - RNA, 17 nt, Artificial Sequence
  Synthetic
ugcacugugacaucacu

SEQ ID NO: 767383 - RNA, 17 nt, Artificial Sequence
  Synthetic
acaccuuccucaucacu

SEQ ID NO: 767384 - RNA, 17 nt, Artificial Sequence
  Synthetic
uuagaguauucaucacu

SEQ ID NO: 767385 - RNA, 17 nt, Artificial Sequence
  Synthetic
ccaguaaugggaucacu

SEQ ID NO: 767386 - RNA, 17 nt, Artificial Sequence
  Synthetic
uagucauuaugaucacu

SEQ ID NO: 767387 - RNA, 17 nt, Artificial Sequence
  Synthetic
uuauuaaucauaucacu

SEQ ID NO: 767388 - RNA, 17 nt, Artificial Sequence
  Synthetic
uaaaacugucuaucacu

SEQ ID NO: 767389 - RNA, 17 nt, Artificial Sequence
  Synthetic
acucuacaaguaucacu

SEQ ID NO: 767390 - RNA, 17 nt, Artificial Sequence
  Synthetic
uaaaucuaguuaucacu

SEQ ID NO: 767391 - RNA, 17 nt, Artificial Sequence
  Synthetic
auuuggaacaacucacu

SEQ ID NO: 767392 - RNA, 17 nt, Artificial Sequence
  Synthetic
uuuguuuuauacucacu

SEQ ID NO: 767393 - RNA, 17 nt, Artificial Sequence
  Synthetic
uccuucccuaccucacu

SEQ ID NO: 767394 - RNA, 17 nt, Artificial Sequence
  Synthetic
cuacccaaccccucacu

SEQ ID NO: 767395 - RNA, 17 nt, Artificial Sequence
  Synthetic
cuuucucuccccucacu

SEQ ID NO: 767396 - RNA, 17 nt, Artificial Sequence
  Synthetic
uuuguccaguccucacu

SEQ ID NO: 767397 - RNA, 17 nt, Artificial Sequence
  Synthetic
ucuggauaguccucacu

SEQ ID NO: 767398 - RNA, 17 nt, Artificial Sequence
  Synthetic
uugauagcuuccucacu

SEQ ID NO: 767399 - RNA, 17 nt, Artificial Sequence
  Synthetic
cuggcuguuuccucacu

SEQ ID NO: 767400 - RNA, 17 nt, Artificial Sequence
  Synthetic
uccuucaaaaucucacu

SEQ ID NO: 767401 - RNA, 17 nt, Artificial Sequence
  Synthetic
acccggcucaucucacu

SEQ ID NO: 767402 - RNA, 17 nt, Artificial Sequence
  Synthetic
ucuguguugaucucacu

SEQ ID NO: 767403 - RNA, 17 nt, Artificial Sequence
  Synthetic
uucaauuaccucucacu

SEQ ID NO: 767404 - RNA, 17 nt, Artificial Sequence
  Synthetic
ugagacagagucucacu

SEQ ID NO: 767405 - RNA, 17 nt, Artificial Sequence
  Synthetic
aaacgguaaaagucacu

SEQ ID NO: 767406 - RNA, 17 nt, Artificial Sequence
  Synthetic
cagcacucaaagucacu

SEQ ID NO: 767407 - RNA, 17 nt, Artificial Sequence
  Synthetic
uaaauuugagagucacu

SEQ ID NO: 767408 - RNA, 17 nt, Artificial Sequence
  Synthetic
uacuuagcuuagucacu

SEQ ID NO: 767409 - RNA, 17 nt, Artificial Sequence
  Synthetic
cccccaacauggucacu

SEQ ID NO: 767410 - RNA, 17 nt, Artificial Sequence
  Synthetic
agcauuuguaugucacu

SEQ ID NO: 767411 - RNA, 17 nt, Artificial Sequence
  Synthetic
ccuguaaucgugucacu

SEQ ID NO: 767412 - RNA, 17 nt, Artificial Sequence
  Synthetic
aguuagucugugucacu

SEQ ID NO: 767413 - RNA, 17 nt, Artificial Sequence
  Synthetic
ugaaauuguuugucacu

SEQ ID NO: 767414 - RNA, 17 nt, Artificial Sequence
  Synthetic
aacacaguuaauucacu

SEQ ID NO: 767415 - RNA, 17 nt, Artificial Sequence
  Synthetic
uuaaguguuaauucacu

SEQ ID NO: 767416 - RNA, 17 nt, Artificial Sequence
  Synthetic
uuuuggaccuauucacu

SEQ ID NO: 767417 - RNA, 17 nt, Artificial Sequence
  Synthetic
cugcccuguuauucacu

SEQ ID NO: 767418 - RNA, 17 nt, Artificial Sequence
  Synthetic
uucuucauuuauucacu

SEQ ID NO: 767419 - RNA, 17 nt, Artificial Sequence
  Synthetic
cauuauuuuuauucacu

SEQ ID NO: 767420 - RNA, 17 nt, Artificial Sequence
  Synthetic
uugagaaagacuucacu

SEQ ID NO: 767421 - RNA, 17 nt, Artificial Sequence
  Synthetic
aauuguuugacuucacu

SEQ ID NO: 767422 - RNA, 17 nt, Artificial Sequence
  Synthetic
aucuguugcccuucacu

SEQ ID NO: 767423 - RNA, 17 nt, Artificial Sequence
  Synthetic
ugguuucuuucuucacu

SEQ ID NO: 767424 - RNA, 17 nt, Artificial Sequence
  Synthetic
aaauauagaaguucacu

SEQ ID NO: 767425 - RNA, 17 nt, Artificial Sequence
  Synthetic
aauucuuucaguucacu

SEQ ID NO: 767426 - RNA, 17 nt, Artificial Sequence
  Synthetic
uacaagaagaguucacu

SEQ ID NO: 767427 - RNA, 17 nt, Artificial Sequence
  Synthetic
uuuuuauggaguucacu

SEQ ID NO: 767428 - RNA, 17 nt, Artificial Sequence
  Synthetic
agugauuaauguucacu

SEQ ID NO: 767429 - RNA, 17 nt, Artificial Sequence
  Synthetic
agcccuguucuuucacu

SEQ ID NO: 767430 - RNA, 17 nt, Artificial Sequence
  Synthetic
aagagaguaguuucacu

SEQ ID NO: 767431 - RNA, 17 nt, Artificial Sequence
  Synthetic
agagguaauguuucacu

SEQ ID NO: 767432 - RNA, 17 nt, Artificial Sequence
  Synthetic
ugauaaaauuuuucacu

SEQ ID NO: 767433 - RNA, 17 nt, Artificial Sequence
  Synthetic
cguuuucauuuuucacu

SEQ ID NO: 767434 - RNA, 17 nt, Artificial Sequence
  Synthetic
aucauuuauuuuucacu

SEQ ID NO: 767435 - RNA, 17 nt, Artificial Sequence
  Synthetic
uuuuucacaaaaagacu

SEQ ID NO: 767436 - RNA, 17 nt, Artificial Sequence
  Synthetic
acuuugagaaaaagacu

SEQ ID NO: 767437 - RNA, 17 nt, Artificial Sequence
  Synthetic
cagaauuguaaaagacu

SEQ ID NO: 767438 - RNA, 17 nt, Artificial Sequence
  Synthetic
ucacaauaacaaagacu

SEQ ID NO: 767439 - RNA, 17 nt, Artificial Sequence
  Synthetic
uggaacucacaaagacu

SEQ ID NO: 767440 - RNA, 17 nt, Artificial Sequence
  Synthetic
ucacaauagcaaagacu

SEQ ID NO: 767441 - RNA, 17 nt, Artificial Sequence
  Synthetic
uuacaauagcaaagacu

SEQ ID NO: 767442 - RNA, 17 nt, Artificial Sequence
  Synthetic
uuacaguagcaaagacu

SEQ ID NO: 767443 - RNA, 17 nt, Artificial Sequence
  Synthetic
uuugccucagaaagacu

SEQ ID NO: 767444 - RNA, 17 nt, Artificial Sequence
  Synthetic
uccuuaguggaaagacu

SEQ ID NO: 767445 - RNA, 17 nt, Artificial Sequence
  Synthetic
ucuuuugaugaaagacu

SEQ ID NO: 767446 - RNA, 17 nt, Artificial Sequence
  Synthetic
uagaaaggguaaagacu

SEQ ID NO: 767447 - RNA, 17 nt, Artificial Sequence
  Synthetic
aagaaauacccaagacu

SEQ ID NO: 767448 - RNA, 17 nt, Artificial Sequence
  Synthetic
ucacaaggggcaagacu

SEQ ID NO: 767449 - RNA, 17 nt, Artificial Sequence
  Synthetic
uucuagaaugcaagacu

SEQ ID NO: 767450 - RNA, 17 nt, Artificial Sequence
  Synthetic
agcaaaaacagaagacu

SEQ ID NO: 767451 - RNA, 17 nt, Artificial Sequence
  Synthetic
uuugucguuagaagacu

SEQ ID NO: 767452 - RNA, 17 nt, Artificial Sequence
  Synthetic
uuucguaaaggaagacu

SEQ ID NO: 767453 - RNA, 17 nt, Artificial Sequence
  Synthetic
caucugaugggaagacu

SEQ ID NO: 767454 - RNA, 17 nt, Artificial Sequence
  Synthetic
aagacuuugggaagacu

SEQ ID NO: 767455 - RNA, 17 nt, Artificial Sequence
  Synthetic
caguaucuaugaagacu

SEQ ID NO: 767456 - RNA, 17 nt, Artificial Sequence
  Synthetic
cauauaacuugaagacu

SEQ ID NO: 767457 - RNA, 17 nt, Artificial Sequence
  Synthetic
ugauguugaauaagacu

SEQ ID NO: 767458 - RNA, 17 nt, Artificial Sequence
  Synthetic
aaccugaauauaagacu

SEQ ID NO: 767459 - RNA, 17 nt, Artificial Sequence
  Synthetic
acaaaguaccuaagacu

SEQ ID NO: 767460 - RNA, 17 nt, Artificial Sequence
  Synthetic
aaaugaaagcuaagacu

SEQ ID NO: 767461 - RNA, 17 nt, Artificial Sequence
  Synthetic
auuagacuuguaagacu

SEQ ID NO: 767462 - RNA, 17 nt, Artificial Sequence
  Synthetic
ccaggcaugaacagacu

SEQ ID NO: 767463 - RNA, 17 nt, Artificial Sequence
  Synthetic
acaaaauaccacagacu

SEQ ID NO: 767464 - RNA, 17 nt, Artificial Sequence
  Synthetic
uccggggggcacagacu

SEQ ID NO: 767465 - RNA, 17 nt, Artificial Sequence
  Synthetic
uagauaggagacagacu

SEQ ID NO: 767466 - RNA, 17 nt, Artificial Sequence
  Synthetic
ucugugacuuacagacu

SEQ ID NO: 767467 - RNA, 17 nt, Artificial Sequence
  Synthetic
ccacugcacuccagacu

SEQ ID NO: 767468 - RNA, 17 nt, Artificial Sequence
  Synthetic
uugcaauacuccagacu

SEQ ID NO: 767469 - RNA, 17 nt, Artificial Sequence
  Synthetic
uucaaauuuuccagacu

SEQ ID NO: 767470 - RNA, 17 nt, Artificial Sequence
  Synthetic
uguaaauuuuccagacu

SEQ ID NO: 767471 - RNA, 17 nt, Artificial Sequence
  Synthetic
ucagaaauaagcagacu

SEQ ID NO: 767472 - RNA, 17 nt, Artificial Sequence
  Synthetic
cuucauauuagcagacu

SEQ ID NO: 767473 - RNA, 17 nt, Artificial Sequence
  Synthetic
auagagcaaugcagacu

SEQ ID NO: 767474 - RNA, 17 nt, Artificial Sequence
  Synthetic
acucuggacaucagacu

SEQ ID NO: 767475 - RNA, 17 nt, Artificial Sequence
  Synthetic
uuuucccaagucagacu

SEQ ID NO: 767476 - RNA, 17 nt, Artificial Sequence
  Synthetic
caaagugcugucagacu

SEQ ID NO: 767477 - RNA, 17 nt, Artificial Sequence
  Synthetic
cagaggugguucagacu

SEQ ID NO: 767478 - RNA, 17 nt, Artificial Sequence
  Synthetic
ugagucauuuucagacu

SEQ ID NO: 767479 - RNA, 17 nt, Artificial Sequence
  Synthetic
uggacuaugaagagacu

SEQ ID NO: 767480 - RNA, 17 nt, Artificial Sequence
  Synthetic
aaggaaugccagagacu

SEQ ID NO: 767481 - RNA, 17 nt, Artificial Sequence
  Synthetic
cuguuuuaucagagacu

SEQ ID NO: 767482 - RNA, 17 nt, Artificial Sequence
  Synthetic
uauuuuuacuagagacu

SEQ ID NO: 767483 - RNA, 17 nt, Artificial Sequence
  Synthetic
uauuuuuaguagagacu

SEQ ID NO: 767484 - RNA, 17 nt, Artificial Sequence
  Synthetic
aagaaauacccgagacu

SEQ ID NO: 767485 - RNA, 17 nt, Artificial Sequence
  Synthetic
aagacauacccgagacu

SEQ ID NO: 767486 - RNA, 17 nt, Artificial Sequence
  Synthetic
aagaacugcccgagacu

SEQ ID NO: 767487 - RNA, 17 nt, Artificial Sequence
  Synthetic
aagaaauagccgagacu

SEQ ID NO: 767488 - RNA, 17 nt, Artificial Sequence
  Synthetic
uaaagaccaucgagacu

SEQ ID NO: 767489 - RNA, 17 nt, Artificial Sequence
  Synthetic
cauuucaacaggagacu

SEQ ID NO: 767490 - RNA, 17 nt, Artificial Sequence
  Synthetic
aauauuuccaggagacu

SEQ ID NO: 767491 - RNA, 17 nt, Artificial Sequence
  Synthetic
uaauggcaagggagacu

SEQ ID NO: 767492 - RNA, 17 nt, Artificial Sequence
  Synthetic
uccauaagugggagacu

SEQ ID NO: 767493 - RNA, 17 nt, Artificial Sequence
  Synthetic
ugugcuuaauggagacu

SEQ ID NO: 767494 - RNA, 17 nt, Artificial Sequence
  Synthetic
ucacaguucuggagacu

SEQ ID NO: 767495 - RNA, 17 nt, Artificial Sequence
  Synthetic
aaugggcuuuggagacu

SEQ ID NO: 767496 - RNA, 17 nt, Artificial Sequence
  Synthetic
uaguaagaaaugagacu

SEQ ID NO: 767497 - RNA, 17 nt, Artificial Sequence
  Synthetic
aagacauacaugagacu

SEQ ID NO: 767498 - RNA, 17 nt, Artificial Sequence
  Synthetic
augagagcacugagacu

SEQ ID NO: 767499 - RNA, 17 nt, Artificial Sequence
  Synthetic
aagaaauaccugagacu

SEQ ID NO: 767500 - RNA, 17 nt, Artificial Sequence
  Synthetic
aagacauaccugagacu

SEQ ID NO: 767501 - RNA, 17 nt, Artificial Sequence
  Synthetic
aagaacuaccugagacu

SEQ ID NO: 767502 - RNA, 17 nt, Artificial Sequence
  Synthetic
agaacuucccugagacu

SEQ ID NO: 767503 - RNA, 17 nt, Artificial Sequence
  Synthetic
acaaaaugccugagacu

SEQ ID NO: 767504 - RNA, 17 nt, Artificial Sequence
  Synthetic
aagaacugccugagacu

SEQ ID NO: 767505 - RNA, 17 nt, Artificial Sequence
  Synthetic
aagacauaucugagacu

SEQ ID NO: 767506 - RNA, 17 nt, Artificial Sequence
  Synthetic
cuguuuugucugagacu

SEQ ID NO: 767507 - RNA, 17 nt, Artificial Sequence
  Synthetic
uuuuguauucugagacu

SEQ ID NO: 767508 - RNA, 17 nt, Artificial Sequence
  Synthetic
cacauuugggugagacu

SEQ ID NO: 767509 - RNA, 17 nt, Artificial Sequence
  Synthetic
aagacauacuugagacu

SEQ ID NO: 767510 - RNA, 17 nt, Artificial Sequence
  Synthetic
uuuuuuuuuuugagacu

SEQ ID NO: 767511 - RNA, 17 nt, Artificial Sequence
  Synthetic
ugagaucacaauagacu

SEQ ID NO: 767512 - RNA, 17 nt, Artificial Sequence
  Synthetic
aaauaaugccauagacu

SEQ ID NO: 767513 - RNA, 17 nt, Artificial Sequence
  Synthetic
aaguaaucucauagacu

SEQ ID NO: 767514 - RNA, 17 nt, Artificial Sequence
  Synthetic
ugaucucaagauagacu

SEQ ID NO: 767515 - RNA, 17 nt, Artificial Sequence
  Synthetic
caaggcuaggauagacu

SEQ ID NO: 767516 - RNA, 17 nt, Artificial Sequence
  Synthetic
aagaagugauauagacu

SEQ ID NO: 767517 - RNA, 17 nt, Artificial Sequence
  Synthetic
uaugucaaugguagacu

SEQ ID NO: 767518 - RNA, 17 nt, Artificial Sequence
  Synthetic
cauaauaaaauuagacu

SEQ ID NO: 767519 - RNA, 17 nt, Artificial Sequence
  Synthetic
aaaccccggauuagacu

SEQ ID NO: 767520 - RNA, 17 nt, Artificial Sequence
  Synthetic
cccaucuaacuuagacu

SEQ ID NO: 767521 - RNA, 17 nt, Artificial Sequence
  Synthetic
cuaccccaaguuagacu

SEQ ID NO: 767522 - RNA, 17 nt, Artificial Sequence
  Synthetic
auuauuauuuuuagacu

SEQ ID NO: 767523 - RNA, 17 nt, Artificial Sequence
  Synthetic
uauuuugaaagacgacu

SEQ ID NO: 767524 - RNA, 17 nt, Artificial Sequence
  Synthetic
uuugugcagaggcgacu

SEQ ID NO: 767525 - RNA, 17 nt, Artificial Sequence
  Synthetic
auuacaaguuugcgacu

SEQ ID NO: 767526 - RNA, 17 nt, Artificial Sequence
  Synthetic
auuuaaggaaaaggacu

SEQ ID NO: 767527 - RNA, 17 nt, Artificial Sequence
  Synthetic
ugaaaguugaaaggacu

SEQ ID NO: 767528 - RNA, 17 nt, Artificial Sequence
  Synthetic
ugcuuuauuaaaggacu

SEQ ID NO: 767529 - RNA, 17 nt, Artificial Sequence
  Synthetic
aaacuuucucaaggacu

SEQ ID NO: 767530 - RNA, 17 nt, Artificial Sequence
  Synthetic
ugucaccuucaaggacu

SEQ ID NO: 767531 - RNA, 17 nt, Artificial Sequence
  Synthetic
uaagagcuggaaggacu

SEQ ID NO: 767532 - RNA, 17 nt, Artificial Sequence
  Synthetic
caugaaguuacaggacu

SEQ ID NO: 767533 - RNA, 17 nt, Artificial Sequence
  Synthetic
ugugcggcaucaggacu

SEQ ID NO: 767534 - RNA, 17 nt, Artificial Sequence
  Synthetic
cuaagagcuagaggacu

SEQ ID NO: 767535 - RNA, 17 nt, Artificial Sequence
  Synthetic
auaaccuuucuaggacu

SEQ ID NO: 767536 - RNA, 17 nt, Artificial Sequence
  Synthetic
uucaggacuguaggacu

SEQ ID NO: 767537 - RNA, 17 nt, Artificial Sequence
  Synthetic
aucuugguuuuaggacu

SEQ ID NO: 767538 - RNA, 17 nt, Artificial Sequence
  Synthetic
aacuaaacucacggacu

SEQ ID NO: 767539 - RNA, 17 nt, Artificial Sequence
  Synthetic
auuccaguucagggacu

SEQ ID NO: 767540 - RNA, 17 nt, Artificial Sequence
  Synthetic
ugugcagccuagggacu

SEQ ID NO: 767541 - RNA, 17 nt, Artificial Sequence
  Synthetic
ugggucgaguggggacu

SEQ ID NO: 767542 - RNA, 17 nt, Artificial Sequence
  Synthetic
agcugggaguggggacu

SEQ ID NO: 767543 - RNA, 17 nt, Artificial Sequence
  Synthetic
ucucuggggaugggacu

SEQ ID NO: 767544 - RNA, 17 nt, Artificial Sequence
  Synthetic
ugguguucugugggacu

SEQ ID NO: 767545 - RNA, 17 nt, Artificial Sequence
  Synthetic
uagaagaaaaauggacu

SEQ ID NO: 767546 - RNA, 17 nt, Artificial Sequence
  Synthetic
uaggaaucaaauggacu

SEQ ID NO: 767547 - RNA, 17 nt, Artificial Sequence
  Synthetic
auuuggauacauggacu

SEQ ID NO: 767548 - RNA, 17 nt, Artificial Sequence
  Synthetic
ucuaagaauucuggacu

SEQ ID NO: 767549 - RNA, 17 nt, Artificial Sequence
  Synthetic
ugcugguggcuuggacu

SEQ ID NO: 767550 - RNA, 17 nt, Artificial Sequence
  Synthetic
agccaugauguuggacu

SEQ ID NO: 767551 - RNA, 17 nt, Artificial Sequence
  Synthetic
augccaaguguuggacu

SEQ ID NO: 767552 - RNA, 17 nt, Artificial Sequence
  Synthetic
agaugaaacuuuggacu

SEQ ID NO: 767553 - RNA, 17 nt, Artificial Sequence
  Synthetic
agaugagacuuuggacu

SEQ ID NO: 767554 - RNA, 17 nt, Artificial Sequence
  Synthetic
aacuuuaauuuuggacu

SEQ ID NO: 767555 - RNA, 17 nt, Artificial Sequence
  Synthetic
ccaccucuaaaaugacu

SEQ ID NO: 767556 - RNA, 17 nt, Artificial Sequence
  Synthetic
uauguagagaaaugacu

SEQ ID NO: 767557 - RNA, 17 nt, Artificial Sequence
  Synthetic
aaaggagaagaaugacu

SEQ ID NO: 767558 - RNA, 17 nt, Artificial Sequence
  Synthetic
cucccuuucuaaugacu

SEQ ID NO: 767559 - RNA, 17 nt, Artificial Sequence
  Synthetic
ugacaaagaacaugacu

SEQ ID NO: 767560 - RNA, 17 nt, Artificial Sequence
  Synthetic
uauaguuccacaugacu

SEQ ID NO: 767561 - RNA, 17 nt, Artificial Sequence
  Synthetic
cacagucucacaugacu

SEQ ID NO: 767562 - RNA, 17 nt, Artificial Sequence
  Synthetic
uaaaucucuacaugacu

SEQ ID NO: 767563 - RNA, 17 nt, Artificial Sequence
  Synthetic
aaccaaauuacaugacu

SEQ ID NO: 767564 - RNA, 17 nt, Artificial Sequence
  Synthetic
ucauguuggagaugacu

SEQ ID NO: 767565 - RNA, 17 nt, Artificial Sequence
  Synthetic
acuaugaagugaugacu

SEQ ID NO: 767566 - RNA, 17 nt, Artificial Sequence
  Synthetic
ucagaacuuauaugacu

SEQ ID NO: 767567 - RNA, 17 nt, Artificial Sequence
  Synthetic
caacagcuuauaugacu

SEQ ID NO: 767568 - RNA, 17 nt, Artificial Sequence
  Synthetic
aaagagaucuuaugacu

SEQ ID NO: 767569 - RNA, 17 nt, Artificial Sequence
  Synthetic
uuggaauuagacugacu

SEQ ID NO: 767570 - RNA, 17 nt, Artificial Sequence
  Synthetic
ugagccaauuacugacu

SEQ ID NO: 767571 - RNA, 17 nt, Artificial Sequence
  Synthetic
ucuauaagccccugacu

SEQ ID NO: 767572 - RNA, 17 nt, Artificial Sequence
  Synthetic
cucccaccauccugacu

SEQ ID NO: 767573 - RNA, 17 nt, Artificial Sequence
  Synthetic
ccccgugccuccugacu

SEQ ID NO: 767574 - RNA, 17 nt, Artificial Sequence
  Synthetic
aaaguuccuuccugacu

SEQ ID NO: 767575 - RNA, 17 nt, Artificial Sequence
  Synthetic
aagugaauuuccugacu

SEQ ID NO: 767576 - RNA, 17 nt, Artificial Sequence
  Synthetic
aggaccacaagcugacu

SEQ ID NO: 767577 - RNA, 17 nt, Artificial Sequence
  Synthetic
ugaaagcagagcugacu

SEQ ID NO: 767578 - RNA, 17 nt, Artificial Sequence
  Synthetic
cuuccagggggcugacu

SEQ ID NO: 767579 - RNA, 17 nt, Artificial Sequence
  Synthetic
agugaacgaaucugacu

SEQ ID NO: 767580 - RNA, 17 nt, Artificial Sequence
  Synthetic
uucugccuuaucugacu

SEQ ID NO: 767581 - RNA, 17 nt, Artificial Sequence
  Synthetic
aaguaaggagucugacu

SEQ ID NO: 767582 - RNA, 17 nt, Artificial Sequence
  Synthetic
ccuacacuuuucugacu

SEQ ID NO: 767583 - RNA, 17 nt, Artificial Sequence
  Synthetic
auuaaggagaagugacu

SEQ ID NO: 767584 - RNA, 17 nt, Artificial Sequence
  Synthetic
aaaauguggaagugacu

SEQ ID NO: 767585 - RNA, 17 nt, Artificial Sequence
  Synthetic
uuaugaucauagugacu

SEQ ID NO: 767586 - RNA, 17 nt, Artificial Sequence
  Synthetic
agauaagauuagugacu

SEQ ID NO: 767587 - RNA, 17 nt, Artificial Sequence
  Synthetic
uaaugcauuuagugacu

SEQ ID NO: 767588 - RNA, 17 nt, Artificial Sequence
  Synthetic
ucauaguuugggugacu

SEQ ID NO: 767589 - RNA, 17 nt, Artificial Sequence
  Synthetic
uucacaagaaugugacu

SEQ ID NO: 767590 - RNA, 17 nt, Artificial Sequence
  Synthetic
uuuccucaacugugacu

SEQ ID NO: 767591 - RNA, 17 nt, Artificial Sequence
  Synthetic
aagcuagcucugugacu

SEQ ID NO: 767592 - RNA, 17 nt, Artificial Sequence
  Synthetic
cuaauuaaaaauugacu

SEQ ID NO: 767593 - RNA, 17 nt, Artificial Sequence
  Synthetic
acugcugacaauugacu

SEQ ID NO: 767594 - RNA, 17 nt, Artificial Sequence
  Synthetic
cucugauauaauugacu

SEQ ID NO: 767595 - RNA, 17 nt, Artificial Sequence
  Synthetic
uuggcucaggauugacu

SEQ ID NO: 767596 - RNA, 17 nt, Artificial Sequence
  Synthetic
uuggcuuaggauugacu

SEQ ID NO: 767597 - RNA, 17 nt, Artificial Sequence
  Synthetic
uuugcuuaggauugacu

SEQ ID NO: 767598 - RNA, 17 nt, Artificial Sequence
  Synthetic
uccaggucugauugacu

SEQ ID NO: 767599 - RNA, 17 nt, Artificial Sequence
  Synthetic
ccagaaacauauugacu

SEQ ID NO: 767600 - RNA, 17 nt, Artificial Sequence
  Synthetic
ugguggugcuauugacu

SEQ ID NO: 767601 - RNA, 17 nt, Artificial Sequence
  Synthetic
ugugcaucaacuugacu

SEQ ID NO: 767602 - RNA, 17 nt, Artificial Sequence
  Synthetic
cauaugauggcuugacu

SEQ ID NO: 767603 - RNA, 17 nt, Artificial Sequence
  Synthetic
uaugcacaugcuugacu

SEQ ID NO: 767604 - RNA, 17 nt, Artificial Sequence
  Synthetic
aagaaagcugcuugacu

SEQ ID NO: 767605 - RNA, 17 nt, Artificial Sequence
  Synthetic
aaaauuaaaaguugacu

SEQ ID NO: 767606 - RNA, 17 nt, Artificial Sequence
  Synthetic
acauuuucagguugacu

SEQ ID NO: 767607 - RNA, 17 nt, Artificial Sequence
  Synthetic
ugccucucuuguugacu

SEQ ID NO: 767608 - RNA, 17 nt, Artificial Sequence
  Synthetic
cagugauagauuugacu

SEQ ID NO: 767609 - RNA, 17 nt, Artificial Sequence
  Synthetic
uuauguuuccuuugacu

SEQ ID NO: 767610 - RNA, 17 nt, Artificial Sequence
  Synthetic
ucccauucucuuugacu

SEQ ID NO: 767611 - RNA, 17 nt, Artificial Sequence
  Synthetic
uaaaaaauauuuugacu

SEQ ID NO: 767612 - RNA, 17 nt, Artificial Sequence
  Synthetic
ucauccucuaaaauacu

SEQ ID NO: 767613 - RNA, 17 nt, Artificial Sequence
  Synthetic
aaugcuuuuaaaauacu

SEQ ID NO: 767614 - RNA, 17 nt, Artificial Sequence
  Synthetic
uaaacggaacaaauacu

SEQ ID NO: 767615 - RNA, 17 nt, Artificial Sequence
  Synthetic
accacaccacaaauacu

SEQ ID NO: 767616 - RNA, 17 nt, Artificial Sequence
  Synthetic
uguacgugacaaauacu

SEQ ID NO: 767617 - RNA, 17 nt, Artificial Sequence
  Synthetic
uugcacuaucaaauacu

SEQ ID NO: 767618 - RNA, 17 nt, Artificial Sequence
  Synthetic
uaaaggacucaaauacu

SEQ ID NO: 767619 - RNA, 17 nt, Artificial Sequence
  Synthetic
uagacaauucaaauacu

SEQ ID NO: 767620 - RNA, 17 nt, Artificial Sequence
  Synthetic
ccaaaaugugaaauacu

SEQ ID NO: 767621 - RNA, 17 nt, Artificial Sequence
  Synthetic
uaucaauuuuaaauacu

SEQ ID NO: 767622 - RNA, 17 nt, Artificial Sequence
  Synthetic
acacuuaaaacaauacu

SEQ ID NO: 767623 - RNA, 17 nt, Artificial Sequence
  Synthetic
aaaaaaaugccaauacu

SEQ ID NO: 767624 - RNA, 17 nt, Artificial Sequence
  Synthetic
aaugcacaaagaauacu

SEQ ID NO: 767625 - RNA, 17 nt, Artificial Sequence
  Synthetic
augaaaauaagaauacu

SEQ ID NO: 767626 - RNA, 17 nt, Artificial Sequence
  Synthetic
cuaggauguagaauacu

SEQ ID NO: 767627 - RNA, 17 nt, Artificial Sequence
  Synthetic
uugugcuaucgaauacu

SEQ ID NO: 767628 - RNA, 17 nt, Artificial Sequence
  Synthetic
caaaagguuugaauacu

SEQ ID NO: 767629 - RNA, 17 nt, Artificial Sequence
  Synthetic
aggaugaagauaauacu

SEQ ID NO: 767630 - RNA, 17 nt, Artificial Sequence
  Synthetic
auuuagaaucuaauacu

SEQ ID NO: 767631 - RNA, 17 nt, Artificial Sequence
  Synthetic
uaaauguaucuaauacu

SEQ ID NO: 767632 - RNA, 17 nt, Artificial Sequence
  Synthetic
cguuaaaaauuaauacu

SEQ ID NO: 767633 - RNA, 17 nt, Artificial Sequence
  Synthetic
uuuuaguguuuaauacu

SEQ ID NO: 767634 - RNA, 17 nt, Artificial Sequence
  Synthetic
uuaaaauuaaacauacu

SEQ ID NO: 767635 - RNA, 17 nt, Artificial Sequence
  Synthetic
acuuuaguacacauacu

SEQ ID NO: 767636 - RNA, 17 nt, Artificial Sequence
  Synthetic
aaaauugaccacauacu

SEQ ID NO: 767637 - RNA, 17 nt, Artificial Sequence
  Synthetic
uaacccuuucccauacu

SEQ ID NO: 767638 - RNA, 17 nt, Artificial Sequence
  Synthetic
aaguaucuagccauacu

SEQ ID NO: 767639 - RNA, 17 nt, Artificial Sequence
  Synthetic
cacucuugcagcauacu

SEQ ID NO: 767640 - RNA, 17 nt, Artificial Sequence
  Synthetic
aauugaucucucauacu

SEQ ID NO: 767641 - RNA, 17 nt, Artificial Sequence
  Synthetic
uaaacacaagucauacu

SEQ ID NO: 767642 - RNA, 17 nt, Artificial Sequence
  Synthetic
aucagugaugucauacu

SEQ ID NO: 767643 - RNA, 17 nt, Artificial Sequence
  Synthetic
uagaagggauucauacu

SEQ ID NO: 767644 - RNA, 17 nt, Artificial Sequence
  Synthetic
cuguaaucccagauacu

SEQ ID NO: 767645 - RNA, 17 nt, Artificial Sequence
  Synthetic
aagucuucauagauacu

SEQ ID NO: 767646 - RNA, 17 nt, Artificial Sequence
  Synthetic
uggauuuaguagauacu

SEQ ID NO: 767647 - RNA, 17 nt, Artificial Sequence
  Synthetic
uacaaauaaaugauacu

SEQ ID NO: 767648 - RNA, 17 nt, Artificial Sequence
  Synthetic
agaacugaacugauacu

SEQ ID NO: 767649 - RNA, 17 nt, Artificial Sequence
  Synthetic
cagauucaagugauacu

SEQ ID NO: 767650 - RNA, 17 nt, Artificial Sequence
  Synthetic
aggcacuaagugauacu

SEQ ID NO: 767651 - RNA, 17 nt, Artificial Sequence
  Synthetic
uuuuucuuuuugauacu

SEQ ID NO: 767652 - RNA, 17 nt, Artificial Sequence
  Synthetic
auuucaacuaauauacu

SEQ ID NO: 767653 - RNA, 17 nt, Artificial Sequence
  Synthetic
caucaagaucauauacu

SEQ ID NO: 767654 - RNA, 17 nt, Artificial Sequence
  Synthetic
ugugauuuggauauacu

SEQ ID NO: 767655 - RNA, 17 nt, Artificial Sequence
  Synthetic
auggagagauauauacu

SEQ ID NO: 767656 - RNA, 17 nt, Artificial Sequence
  Synthetic
ccuggcugguauauacu

SEQ ID NO: 767657 - RNA, 17 nt, Artificial Sequence
  Synthetic
uuucuuuccacuauacu

SEQ ID NO: 767658 - RNA, 17 nt, Artificial Sequence
  Synthetic
caaggcaucccuauacu

SEQ ID NO: 767659 - RNA, 17 nt, Artificial Sequence
  Synthetic
cuuagagcugcuauacu

SEQ ID NO: 767660 - RNA, 17 nt, Artificial Sequence
  Synthetic
uuuaagaaaaguauacu

SEQ ID NO: 767661 - RNA, 17 nt, Artificial Sequence
  Synthetic
uuuguucagaguauacu

SEQ ID NO: 767662 - RNA, 17 nt, Artificial Sequence
  Synthetic
uaacaauaacguauacu

SEQ ID NO: 767663 - RNA, 17 nt, Artificial Sequence
  Synthetic
agugucuacuguauacu

SEQ ID NO: 767664 - RNA, 17 nt, Artificial Sequence
  Synthetic
auuugcuuuauuauacu

SEQ ID NO: 767665 - RNA, 17 nt, Artificial Sequence
  Synthetic
uauguagggcuuauacu

SEQ ID NO: 767666 - RNA, 17 nt, Artificial Sequence
  Synthetic
ugugggaaaguuauacu

SEQ ID NO: 767667 - RNA, 17 nt, Artificial Sequence
  Synthetic
aggguacugguuauacu

SEQ ID NO: 767668 - RNA, 17 nt, Artificial Sequence
  Synthetic
uaauuagccuuuauacu

SEQ ID NO: 767669 - RNA, 17 nt, Artificial Sequence
  Synthetic
uguacugggaaacuacu

SEQ ID NO: 767670 - RNA, 17 nt, Artificial Sequence
  Synthetic
cuguaaucccaacuacu

SEQ ID NO: 767671 - RNA, 17 nt, Artificial Sequence
  Synthetic
ccacacacucaacuacu

SEQ ID NO: 767672 - RNA, 17 nt, Artificial Sequence
  Synthetic
aauuuaggguaacuacu

SEQ ID NO: 767673 - RNA, 17 nt, Artificial Sequence
  Synthetic
ccagcaaucccacuacu

SEQ ID NO: 767674 - RNA, 17 nt, Artificial Sequence
  Synthetic
ugcucccugccacuacu

SEQ ID NO: 767675 - RNA, 17 nt, Artificial Sequence
  Synthetic
acagcaauuccacuacu

SEQ ID NO: 767676 - RNA, 17 nt, Artificial Sequence
  Synthetic
aaaaaauaaauacuacu

SEQ ID NO: 767677 - RNA, 17 nt, Artificial Sequence
  Synthetic
cugugaaauuuacuacu

SEQ ID NO: 767678 - RNA, 17 nt, Artificial Sequence
  Synthetic
aggguuaguuuacuacu

SEQ ID NO: 767679 - RNA, 17 nt, Artificial Sequence
  Synthetic
uaaggcugagaccuacu

SEQ ID NO: 767680 - RNA, 17 nt, Artificial Sequence
  Synthetic
acuuuuaaauaccuacu

SEQ ID NO: 767681 - RNA, 17 nt, Artificial Sequence
  Synthetic
aagcagucugcccuacu

SEQ ID NO: 767682 - RNA, 17 nt, Artificial Sequence
  Synthetic
auugauauuuuccuacu

SEQ ID NO: 767683 - RNA, 17 nt, Artificial Sequence
  Synthetic
uugacuucaaagcuacu

SEQ ID NO: 767684 - RNA, 17 nt, Artificial Sequence
  Synthetic
cuugaaucacagcuacu

SEQ ID NO: 767685 - RNA, 17 nt, Artificial Sequence
  Synthetic
cuguaguaccagcuacu

SEQ ID NO: 767686 - RNA, 17 nt, Artificial Sequence
  Synthetic
cuauaaucccagcuacu

SEQ ID NO: 767687 - RNA, 17 nt, Artificial Sequence
  Synthetic
cucuaaucccagcuacu

SEQ ID NO: 767688 - RNA, 17 nt, Artificial Sequence
  Synthetic
cuguaaucccagcuacu

SEQ ID NO: 767689 - RNA, 17 nt, Artificial Sequence
  Synthetic
uuguaaucccagcuacu

SEQ ID NO: 767690 - RNA, 17 nt, Artificial Sequence
  Synthetic
uuuuaaucccagcuacu

SEQ ID NO: 767691 - RNA, 17 nt, Artificial Sequence
  Synthetic
ccuguaucccagcuacu

SEQ ID NO: 767692 - RNA, 17 nt, Artificial Sequence
  Synthetic
cuagagucccagcuacu

SEQ ID NO: 767693 - RNA, 17 nt, Artificial Sequence
  Synthetic
cuauagucccagcuacu

SEQ ID NO: 767694 - RNA, 17 nt, Artificial Sequence
  Synthetic
uaguagucccagcuacu

SEQ ID NO: 767695 - RNA, 17 nt, Artificial Sequence
  Synthetic
cgguagucccagcuacu

SEQ ID NO: 767696 - RNA, 17 nt, Artificial Sequence
  Synthetic
cuguagucccagcuacu

SEQ ID NO: 767697 - RNA, 17 nt, Artificial Sequence
  Synthetic
uuguagucccagcuacu

SEQ ID NO: 767698 - RNA, 17 nt, Artificial Sequence
  Synthetic
cuguggucccagcuacu

SEQ ID NO: 767699 - RNA, 17 nt, Artificial Sequence
  Synthetic
cuguaaugccagcuacu

SEQ ID NO: 767700 - RNA, 17 nt, Artificial Sequence
  Synthetic
aagggacaucagcuacu

SEQ ID NO: 767701 - RNA, 17 nt, Artificial Sequence
  Synthetic
cuguaaucucagcuacu

SEQ ID NO: 767702 - RNA, 17 nt, Artificial Sequence
  Synthetic
cuguagucucagcuacu

SEQ ID NO: 767703 - RNA, 17 nt, Artificial Sequence
  Synthetic
caguaauccuagcuacu

SEQ ID NO: 767704 - RNA, 17 nt, Artificial Sequence
  Synthetic
cuguaauccuagcuacu

SEQ ID NO: 767705 - RNA, 17 nt, Artificial Sequence
  Synthetic
caacacuuuuagcuacu

SEQ ID NO: 767706 - RNA, 17 nt, Artificial Sequence
  Synthetic
cuguagaccuggcuacu

SEQ ID NO: 767707 - RNA, 17 nt, Artificial Sequence
  Synthetic
auuuagaucuggcuacu

SEQ ID NO: 767708 - RNA, 17 nt, Artificial Sequence
  Synthetic
uauagccaacugcuacu

SEQ ID NO: 767709 - RNA, 17 nt, Artificial Sequence
  Synthetic
cuguaguuccugcuacu

SEQ ID NO: 767710 - RNA, 17 nt, Artificial Sequence
  Synthetic
cuguagucucugcuacu

SEQ ID NO: 767711 - RNA, 17 nt, Artificial Sequence
  Synthetic
uuacaggaguugcuacu

SEQ ID NO: 767712 - RNA, 17 nt, Artificial Sequence
  Synthetic
uuucuggguuugcuacu

SEQ ID NO: 767713 - RNA, 17 nt, Artificial Sequence
  Synthetic
aaugagaccaaucuacu

SEQ ID NO: 767714 - RNA, 17 nt, Artificial Sequence
  Synthetic
aacacugguaaucuacu

SEQ ID NO: 767715 - RNA, 17 nt, Artificial Sequence
  Synthetic
cuucuuagacaucuacu

SEQ ID NO: 767716 - RNA, 17 nt, Artificial Sequence
  Synthetic
cuguaguuccaucuacu

SEQ ID NO: 767717 - RNA, 17 nt, Artificial Sequence
  Synthetic
cuuacuggguaucuacu

SEQ ID NO: 767718 - RNA, 17 nt, Artificial Sequence
  Synthetic
auaaagcccacucuacu

SEQ ID NO: 767719 - RNA, 17 nt, Artificial Sequence
  Synthetic
cagagagaaccucuacu

SEQ ID NO: 767720 - RNA, 17 nt, Artificial Sequence
  Synthetic
cuucucacagcucuacu

SEQ ID NO: 767721 - RNA, 17 nt, Artificial Sequence
  Synthetic
aaagaauuugcucuacu

SEQ ID NO: 767722 - RNA, 17 nt, Artificial Sequence
  Synthetic
uaugucagaagucuacu

SEQ ID NO: 767723 - RNA, 17 nt, Artificial Sequence
  Synthetic
uauucucccugucuacu

SEQ ID NO: 767724 - RNA, 17 nt, Artificial Sequence
  Synthetic
auauuguuuguucuacu

SEQ ID NO: 767725 - RNA, 17 nt, Artificial Sequence
  Synthetic
cacauuuuauuucuacu

SEQ ID NO: 767726 - RNA, 17 nt, Artificial Sequence
  Synthetic
aguucaguaaaaguacu

SEQ ID NO: 767727 - RNA, 17 nt, Artificial Sequence
  Synthetic
cagccucccaaaguacu

SEQ ID NO: 767728 - RNA, 17 nt, Artificial Sequence
  Synthetic
cggccucccaaaguacu

SEQ ID NO: 767729 - RNA, 17 nt, Artificial Sequence
  Synthetic
cuccuuuaucaaguacu

SEQ ID NO: 767730 - RNA, 17 nt, Artificial Sequence
  Synthetic
uuuguucaauaaguacu

SEQ ID NO: 767731 - RNA, 17 nt, Artificial Sequence
  Synthetic
cccaaguucuaaguacu

SEQ ID NO: 767732 - RNA, 17 nt, Artificial Sequence
  Synthetic
aauuaauauacaguacu

SEQ ID NO: 767733 - RNA, 17 nt, Artificial Sequence
  Synthetic
aaaucuguuccaguacu

SEQ ID NO: 767734 - RNA, 17 nt, Artificial Sequence
  Synthetic
uaguaaaucagaguacu

SEQ ID NO: 767735 - RNA, 17 nt, Artificial Sequence
  Synthetic
ucuaggaaaggaguacu

SEQ ID NO: 767736 - RNA, 17 nt, Artificial Sequence
  Synthetic
ucuggcuacugaguacu

SEQ ID NO: 767737 - RNA, 17 nt, Artificial Sequence
  Synthetic
uuguuuaacuuaguacu

SEQ ID NO: 767738 - RNA, 17 nt, Artificial Sequence
  Synthetic
ucgaccugguuaguacu

SEQ ID NO: 767739 - RNA, 17 nt, Artificial Sequence
  Synthetic
auaacaaaauucguacu

SEQ ID NO: 767740 - RNA, 17 nt, Artificial Sequence
  Synthetic
cuguaaucccagguacu

SEQ ID NO: 767741 - RNA, 17 nt, Artificial Sequence
  Synthetic
acuguaugcuagguacu

SEQ ID NO: 767742 - RNA, 17 nt, Artificial Sequence
  Synthetic
aauaacuaauggguacu

SEQ ID NO: 767743 - RNA, 17 nt, Artificial Sequence
  Synthetic
aacauauuuuggguacu

SEQ ID NO: 767744 - RNA, 17 nt, Artificial Sequence
  Synthetic
aacuaauauaauguacu

SEQ ID NO: 767745 - RNA, 17 nt, Artificial Sequence
  Synthetic
uuuaggaagcauguacu

SEQ ID NO: 767746 - RNA, 17 nt, Artificial Sequence
  Synthetic
cuuguucaucauguacu

SEQ ID NO: 767747 - RNA, 17 nt, Artificial Sequence
  Synthetic
uacuaauuucauguacu

SEQ ID NO: 767748 - RNA, 17 nt, Artificial Sequence
  Synthetic
aaugccuacuauguacu

SEQ ID NO: 767749 - RNA, 17 nt, Artificial Sequence
  Synthetic
uugcaagagacuguacu

SEQ ID NO: 767750 - RNA, 17 nt, Artificial Sequence
  Synthetic
cuuaugucuacuguacu

SEQ ID NO: 767751 - RNA, 17 nt, Artificial Sequence
  Synthetic
aaugggggcccuguacu

SEQ ID NO: 767752 - RNA, 17 nt, Artificial Sequence
  Synthetic
aucugacaggcuguacu

SEQ ID NO: 767753 - RNA, 17 nt, Artificial Sequence
  Synthetic
uuguuuuuguguguacu

SEQ ID NO: 767754 - RNA, 17 nt, Artificial Sequence
  Synthetic
acaagaauuguuguacu

SEQ ID NO: 767755 - RNA, 17 nt, Artificial Sequence
  Synthetic
aggaauucaaaauuacu

SEQ ID NO: 767756 - RNA, 17 nt, Artificial Sequence
  Synthetic
ccuuuuggcaaauuacu

SEQ ID NO: 767757 - RNA, 17 nt, Artificial Sequence
  Synthetic
uaaguuccacaauuacu

SEQ ID NO: 767758 - RNA, 17 nt, Artificial Sequence
  Synthetic
accaaguaccaauuacu

SEQ ID NO: 767759 - RNA, 17 nt, Artificial Sequence
  Synthetic
uuuguuguagaauuacu

SEQ ID NO: 767760 - RNA, 17 nt, Artificial Sequence
  Synthetic
agagucccugaauuacu

SEQ ID NO: 767761 - RNA, 17 nt, Artificial Sequence
  Synthetic
uaacuuuuugaauuacu

SEQ ID NO: 767762 - RNA, 17 nt, Artificial Sequence
  Synthetic
agaacucaguaauuacu

SEQ ID NO: 767763 - RNA, 17 nt, Artificial Sequence
  Synthetic
ccagccaucccauuacu

SEQ ID NO: 767764 - RNA, 17 nt, Artificial Sequence
  Synthetic
ucagccaucccauuacu

SEQ ID NO: 767765 - RNA, 17 nt, Artificial Sequence
  Synthetic
ccggccaucccauuacu

SEQ ID NO: 767766 - RNA, 17 nt, Artificial Sequence
  Synthetic
cuagugaucccauuacu

SEQ ID NO: 767767 - RNA, 17 nt, Artificial Sequence
  Synthetic
ccagcuaucccauuacu

SEQ ID NO: 767768 - RNA, 17 nt, Artificial Sequence
  Synthetic
ccagcaaugccauuacu

SEQ ID NO: 767769 - RNA, 17 nt, Artificial Sequence
  Synthetic
cuguucaugccauuacu

SEQ ID NO: 767770 - RNA, 17 nt, Artificial Sequence
  Synthetic
uaccuaaaugcauuacu

SEQ ID NO: 767771 - RNA, 17 nt, Artificial Sequence
  Synthetic
ccagcaaucucauuacu

SEQ ID NO: 767772 - RNA, 17 nt, Artificial Sequence
  Synthetic
uagagauggucauuacu

SEQ ID NO: 767773 - RNA, 17 nt, Artificial Sequence
  Synthetic
cucuuagguucauuacu

SEQ ID NO: 767774 - RNA, 17 nt, Artificial Sequence
  Synthetic
auuugcuuuagauuacu

SEQ ID NO: 767775 - RNA, 17 nt, Artificial Sequence
  Synthetic
ugcccucugggauuacu

SEQ ID NO: 767776 - RNA, 17 nt, Artificial Sequence
  Synthetic
agagugaguggauuacu

SEQ ID NO: 767777 - RNA, 17 nt, Artificial Sequence
  Synthetic
agaaggaaaugauuacu

SEQ ID NO: 767778 - RNA, 17 nt, Artificial Sequence
  Synthetic
aaguaaaacauauuacu

SEQ ID NO: 767779 - RNA, 17 nt, Artificial Sequence
  Synthetic
caaguagugauauuacu

SEQ ID NO: 767780 - RNA, 17 nt, Artificial Sequence
  Synthetic
caguaaauacuauuacu

SEQ ID NO: 767781 - RNA, 17 nt, Artificial Sequence
  Synthetic
aaauauugcguauuacu

SEQ ID NO: 767782 - RNA, 17 nt, Artificial Sequence
  Synthetic
uauguucauguauuacu

SEQ ID NO: 767783 - RNA, 17 nt, Artificial Sequence
  Synthetic
uaaauauuuguauuacu

SEQ ID NO: 767784 - RNA, 17 nt, Artificial Sequence
  Synthetic
aacggaauauuauuacu

SEQ ID NO: 767785 - RNA, 17 nt, Artificial Sequence
  Synthetic
cuauauaucuuauuacu

SEQ ID NO: 767786 - RNA, 17 nt, Artificial Sequence
  Synthetic
acaugagguuuauuacu

SEQ ID NO: 767787 - RNA, 17 nt, Artificial Sequence
  Synthetic
cuuagcuaacacuuacu

SEQ ID NO: 767788 - RNA, 17 nt, Artificial Sequence
  Synthetic
caaagauuacacuuacu

SEQ ID NO: 767789 - RNA, 17 nt, Artificial Sequence
  Synthetic
uuguucugcuacuuacu

SEQ ID NO: 767790 - RNA, 17 nt, Artificial Sequence
  Synthetic
aaaccauucaccuuacu

SEQ ID NO: 767791 - RNA, 17 nt, Artificial Sequence
  Synthetic
agacuguagaccuuacu

SEQ ID NO: 767792 - RNA, 17 nt, Artificial Sequence
  Synthetic
uucugauugaccuuacu

SEQ ID NO: 767793 - RNA, 17 nt, Artificial Sequence
  Synthetic
uuagaauuugccuuacu

SEQ ID NO: 767794 - RNA, 17 nt, Artificial Sequence
  Synthetic
cagucagacuccuuacu

SEQ ID NO: 767795 - RNA, 17 nt, Artificial Sequence
  Synthetic
ugcuaguuaugcuuacu

SEQ ID NO: 767796 - RNA, 17 nt, Artificial Sequence
  Synthetic
agauuugaaaucuuacu

SEQ ID NO: 767797 - RNA, 17 nt, Artificial Sequence
  Synthetic
uuagcaaccaucuuacu

SEQ ID NO: 767798 - RNA, 17 nt, Artificial Sequence
  Synthetic
auuuuuguauucuuacu

SEQ ID NO: 767799 - RNA, 17 nt, Artificial Sequence
  Synthetic
uuccacgcuuucuuacu

SEQ ID NO: 767800 - RNA, 17 nt, Artificial Sequence
  Synthetic
uuccaagaacaguuacu

SEQ ID NO: 767801 - RNA, 17 nt, Artificial Sequence
  Synthetic
aagaaaguacaguuacu

SEQ ID NO: 767802 - RNA, 17 nt, Artificial Sequence
  Synthetic
cuguaaucccaguuacu

SEQ ID NO: 767803 - RNA, 17 nt, Artificial Sequence
  Synthetic
uuucaaagucaguuacu

SEQ ID NO: 767804 - RNA, 17 nt, Artificial Sequence
  Synthetic
uuaacugacgaguuacu

SEQ ID NO: 767805 - RNA, 17 nt, Artificial Sequence
  Synthetic
uaaggauuuuaguuacu

SEQ ID NO: 767806 - RNA, 17 nt, Artificial Sequence
  Synthetic
uaaagcaugagguuacu

SEQ ID NO: 767807 - RNA, 17 nt, Artificial Sequence
  Synthetic
agcgauucuggguuacu

SEQ ID NO: 767808 - RNA, 17 nt, Artificial Sequence
  Synthetic
agguugaaaugguuacu

SEQ ID NO: 767809 - RNA, 17 nt, Artificial Sequence
  Synthetic
aagagagauugguuacu

SEQ ID NO: 767810 - RNA, 17 nt, Artificial Sequence
  Synthetic
uugauaguuugguuacu

SEQ ID NO: 767811 - RNA, 17 nt, Artificial Sequence
  Synthetic
uuucacacaauguuacu

SEQ ID NO: 767812 - RNA, 17 nt, Artificial Sequence
  Synthetic
ugcacugcaauguuacu

SEQ ID NO: 767813 - RNA, 17 nt, Artificial Sequence
  Synthetic
ugauaagagauguuacu

SEQ ID NO: 767814 - RNA, 17 nt, Artificial Sequence
  Synthetic
cugaugcugauguuacu

SEQ ID NO: 767815 - RNA, 17 nt, Artificial Sequence
  Synthetic
auaucacuuauguuacu

SEQ ID NO: 767816 - RNA, 17 nt, Artificial Sequence
  Synthetic
ucagaacagguguuacu

SEQ ID NO: 767817 - RNA, 17 nt, Artificial Sequence
  Synthetic
uaacuaaauuuguuacu

SEQ ID NO: 767818 - RNA, 17 nt, Artificial Sequence
  Synthetic
acagaccuuuuguuacu

SEQ ID NO: 767819 - RNA, 17 nt, Artificial Sequence
  Synthetic
cuucuauuuuuguuacu

SEQ ID NO: 767820 - RNA, 17 nt, Artificial Sequence
  Synthetic
uaaauaaccaauuuacu

SEQ ID NO: 767821 - RNA, 17 nt, Artificial Sequence
  Synthetic
agaagaggacauuuacu

SEQ ID NO: 767822 - RNA, 17 nt, Artificial Sequence
  Synthetic
uuuaugaaccauuuacu

SEQ ID NO: 767823 - RNA, 17 nt, Artificial Sequence
  Synthetic
cugccuaaauauuuacu

SEQ ID NO: 767824 - RNA, 17 nt, Artificial Sequence
  Synthetic
ucucuuaacuauuuacu

SEQ ID NO: 767825 - RNA, 17 nt, Artificial Sequence
  Synthetic
auauucuccuauuuacu

SEQ ID NO: 767826 - RNA, 17 nt, Artificial Sequence
  Synthetic
uuuauguucuauuuacu

SEQ ID NO: 767827 - RNA, 17 nt, Artificial Sequence
  Synthetic
uuuuuacaaacuuuacu

SEQ ID NO: 767828 - RNA, 17 nt, Artificial Sequence
  Synthetic
cucuuugugacuuuacu

SEQ ID NO: 767829 - RNA, 17 nt, Artificial Sequence
  Synthetic
uccugaguuacuuuacu

SEQ ID NO: 767830 - RNA, 17 nt, Artificial Sequence
  Synthetic
agugaguuaucuuuacu

SEQ ID NO: 767831 - RNA, 17 nt, Artificial Sequence
  Synthetic
aauggugcuucuuuacu

SEQ ID NO: 767832 - RNA, 17 nt, Artificial Sequence
  Synthetic
ccaagcuuuucuuuacu

SEQ ID NO: 767833 - RNA, 17 nt, Artificial Sequence
  Synthetic
uucuaauuuaguuuacu

SEQ ID NO: 767834 - RNA, 17 nt, Artificial Sequence
  Synthetic
ucccuucucuguuuacu

SEQ ID NO: 767835 - RNA, 17 nt, Artificial Sequence
  Synthetic
accugcuucuguuuacu

SEQ ID NO: 767836 - RNA, 17 nt, Artificial Sequence
  Synthetic
augaauggaauuuuacu

SEQ ID NO: 767837 - RNA, 17 nt, Artificial Sequence
  Synthetic
uaucuuuagauuuuacu

SEQ ID NO: 767838 - RNA, 17 nt, Artificial Sequence
  Synthetic
cugcaauaccuuuuacu

SEQ ID NO: 767839 - RNA, 17 nt, Artificial Sequence
  Synthetic
acagugguccuuuuacu

SEQ ID NO: 767840 - RNA, 17 nt, Artificial Sequence
  Synthetic
aguuacucaguuuuacu

SEQ ID NO: 767841 - RNA, 17 nt, Artificial Sequence
  Synthetic
acauccgauguuuuacu

SEQ ID NO: 767842 - RNA, 17 nt, Artificial Sequence
  Synthetic
ugaacugauuuuuuacu

SEQ ID NO: 767843 - RNA, 17 nt, Artificial Sequence
  Synthetic
uggagaugcaaaaaccu

SEQ ID NO: 767844 - RNA, 17 nt, Artificial Sequence
  Synthetic
caguauacuaaaaaccu

SEQ ID NO: 767845 - RNA, 17 nt, Artificial Sequence
  Synthetic
cuaacuaguaaaaaccu

SEQ ID NO: 767846 - RNA, 17 nt, Artificial Sequence
  Synthetic
aaaaauuuuaaaaaccu

SEQ ID NO: 767847 - RNA, 17 nt, Artificial Sequence
  Synthetic
acauccucacaaaaccu

SEQ ID NO: 767848 - RNA, 17 nt, Artificial Sequence
  Synthetic
auguaacuucaaaaccu

SEQ ID NO: 767849 - RNA, 17 nt, Artificial Sequence
  Synthetic
uucgugaaagaaaaccu

SEQ ID NO: 767850 - RNA, 17 nt, Artificial Sequence
  Synthetic
aucgcagaagaaaaccu

SEQ ID NO: 767851 - RNA, 17 nt, Artificial Sequence
  Synthetic
acccuagaagaaaaccu

SEQ ID NO: 767852 - RNA, 17 nt, Artificial Sequence
  Synthetic
acucuagaagaaaaccu

SEQ ID NO: 767853 - RNA, 17 nt, Artificial Sequence
  Synthetic
uugugcagagaaaaccu

SEQ ID NO: 767854 - RNA, 17 nt, Artificial Sequence
  Synthetic
uaccuacaugaaaaccu

SEQ ID NO: 767855 - RNA, 17 nt, Artificial Sequence
  Synthetic
caggaaacugaaaaccu

SEQ ID NO: 767856 - RNA, 17 nt, Artificial Sequence
  Synthetic
aggucaggugaaaaccu

SEQ ID NO: 767857 - RNA, 17 nt, Artificial Sequence
  Synthetic
uguaccuacacaaaccu

SEQ ID NO: 767858 - RNA, 17 nt, Artificial Sequence
  Synthetic
auuuguacuccaaaccu

SEQ ID NO: 767859 - RNA, 17 nt, Artificial Sequence
  Synthetic
aaauuuuuuccaaaccu

SEQ ID NO: 767860 - RNA, 17 nt, Artificial Sequence
  Synthetic
ucaauuucagcaaaccu

SEQ ID NO: 767861 - RNA, 17 nt, Artificial Sequence
  Synthetic
ccacaaaaugcaaaccu

SEQ ID NO: 767862 - RNA, 17 nt, Artificial Sequence
  Synthetic
cucuuucuugcaaaccu

SEQ ID NO: 767863 - RNA, 17 nt, Artificial Sequence
  Synthetic
agccuggguucaaaccu

SEQ ID NO: 767864 - RNA, 17 nt, Artificial Sequence
  Synthetic
uagaaguacagaaaccu

SEQ ID NO: 767865 - RNA, 17 nt, Artificial Sequence
  Synthetic
uguuauugcagaaaccu

SEQ ID NO: 767866 - RNA, 17 nt, Artificial Sequence
  Synthetic
agcuugaauugaaaccu

SEQ ID NO: 767867 - RNA, 17 nt, Artificial Sequence
  Synthetic
augucaggaauaaaccu

SEQ ID NO: 767868 - RNA, 17 nt, Artificial Sequence
  Synthetic
ugggaauuaauaaaccu

SEQ ID NO: 767869 - RNA, 17 nt, Artificial Sequence
  Synthetic
auuuuuacccuaaaccu

SEQ ID NO: 767870 - RNA, 17 nt, Artificial Sequence
  Synthetic
uaaccuuccuuaaaccu

SEQ ID NO: 767871 - RNA, 17 nt, Artificial Sequence
  Synthetic
uacauuaauuuaaaccu

SEQ ID NO: 767872 - RNA, 17 nt, Artificial Sequence
  Synthetic
aaauguaguuuaaaccu

SEQ ID NO: 767873 - RNA, 17 nt, Artificial Sequence
  Synthetic
aauuuucaccacaaccu

SEQ ID NO: 767874 - RNA, 17 nt, Artificial Sequence
  Synthetic
aacaaggcucacaaccu

SEQ ID NO: 767875 - RNA, 17 nt, Artificial Sequence
  Synthetic
uauuucaaauacaaccu

SEQ ID NO: 767876 - RNA, 17 nt, Artificial Sequence
  Synthetic
uaacuuguauacaaccu

SEQ ID NO: 767877 - RNA, 17 nt, Artificial Sequence
  Synthetic
agcaaugauaccaaccu

SEQ ID NO: 767878 - RNA, 17 nt, Artificial Sequence
  Synthetic
ccacugcacuccaaccu

SEQ ID NO: 767879 - RNA, 17 nt, Artificial Sequence
  Synthetic
ccacugcgcuccaaccu

SEQ ID NO: 767880 - RNA, 17 nt, Artificial Sequence
  Synthetic
ccacuggauuccaaccu

SEQ ID NO: 767881 - RNA, 17 nt, Artificial Sequence
  Synthetic
caucuuacuuccaaccu

SEQ ID NO: 767882 - RNA, 17 nt, Artificial Sequence
  Synthetic
aaguucaagagcaaccu

SEQ ID NO: 767883 - RNA, 17 nt, Artificial Sequence
  Synthetic
uuaccuuaaggcaaccu

SEQ ID NO: 767884 - RNA, 17 nt, Artificial Sequence
  Synthetic
cuucaggagggcaaccu

SEQ ID NO: 767885 - RNA, 17 nt, Artificial Sequence
  Synthetic
agacaugcaaucaaccu

SEQ ID NO: 767886 - RNA, 17 nt, Artificial Sequence
  Synthetic
agacauggaaucaaccu

SEQ ID NO: 767887 - RNA, 17 nt, Artificial Sequence
  Synthetic
auguggccccucaaccu

SEQ ID NO: 767888 - RNA, 17 nt, Artificial Sequence
  Synthetic
acuuaauuguucaaccu

SEQ ID NO: 767889 - RNA, 17 nt, Artificial Sequence
  Synthetic
uuccuucauuucaaccu

SEQ ID NO: 767890 - RNA, 17 nt, Artificial Sequence
  Synthetic
augcuguccaagaaccu

SEQ ID NO: 767891 - RNA, 17 nt, Artificial Sequence
  Synthetic
uuguuauugcagaaccu

SEQ ID NO: 767892 - RNA, 17 nt, Artificial Sequence
  Synthetic
uaaaaauugaggaaccu

SEQ ID NO: 767893 - RNA, 17 nt, Artificial Sequence
  Synthetic
aguggguuagggaaccu

SEQ ID NO: 767894 - RNA, 17 nt, Artificial Sequence
  Synthetic
caaauguccaugaaccu

SEQ ID NO: 767895 - RNA, 17 nt, Artificial Sequence
  Synthetic
caaagaaaagugaaccu

SEQ ID NO: 767896 - RNA, 17 nt, Artificial Sequence
  Synthetic
auuagcugugugaaccu

SEQ ID NO: 767897 - RNA, 17 nt, Artificial Sequence
  Synthetic
gagaaucgcuugaaccu

SEQ ID NO: 767898 - RNA, 17 nt, Artificial Sequence
  Synthetic
cagaauugcuugaaccu

SEQ ID NO: 767899 - RNA, 17 nt, Artificial Sequence
  Synthetic
uagugaguguugaaccu

SEQ ID NO: 767900 - RNA, 17 nt, Artificial Sequence
  Synthetic
uaaaggauuuugaaccu

SEQ ID NO: 767901 - RNA, 17 nt, Artificial Sequence
  Synthetic
cauuuuaaaaauaaccu

SEQ ID NO: 767902 - RNA, 17 nt, Artificial Sequence
  Synthetic
agcaaguuaaauaaccu

SEQ ID NO: 767903 - RNA, 17 nt, Artificial Sequence
  Synthetic
cagcaucagcauaaccu

SEQ ID NO: 767904 - RNA, 17 nt, Artificial Sequence
  Synthetic
ugcuaccuucauaaccu

SEQ ID NO: 767905 - RNA, 17 nt, Artificial Sequence
  Synthetic
acccuagaagauaaccu

SEQ ID NO: 767906 - RNA, 17 nt, Artificial Sequence
  Synthetic
uaguaauuguauaaccu

SEQ ID NO: 767907 - RNA, 17 nt, Artificial Sequence
  Synthetic
accacugcuuauaaccu

SEQ ID NO: 767908 - RNA, 17 nt, Artificial Sequence
  Synthetic
aucuuugauacuaaccu

SEQ ID NO: 767909 - RNA, 17 nt, Artificial Sequence
  Synthetic
cucuucacugcuaaccu

SEQ ID NO: 767910 - RNA, 17 nt, Artificial Sequence
  Synthetic
ccauugcacucuaaccu

SEQ ID NO: 767911 - RNA, 17 nt, Artificial Sequence
  Synthetic
ucacaguggaguaaccu

SEQ ID NO: 767912 - RNA, 17 nt, Artificial Sequence
  Synthetic
uuccuaacuaguaaccu

SEQ ID NO: 767913 - RNA, 17 nt, Artificial Sequence
  Synthetic
caagcaguggguaaccu

SEQ ID NO: 767914 - RNA, 17 nt, Artificial Sequence
  Synthetic
agcaucagugguaaccu

SEQ ID NO: 767915 - RNA, 17 nt, Artificial Sequence
  Synthetic
uuuucucuucuuaaccu

SEQ ID NO: 767916 - RNA, 17 nt, Artificial Sequence
  Synthetic
aagggggaaaaacaccu

SEQ ID NO: 767917 - RNA, 17 nt, Artificial Sequence
  Synthetic
cagcaucaugaacaccu

SEQ ID NO: 767918 - RNA, 17 nt, Artificial Sequence
  Synthetic
cacacacacacacaccu

SEQ ID NO: 767919 - RNA, 17 nt, Artificial Sequence
  Synthetic
uagccuacuacacaccu

SEQ ID NO: 767920 - RNA, 17 nt, Artificial Sequence
  Synthetic
auuucaacaagacaccu

SEQ ID NO: 767921 - RNA, 17 nt, Artificial Sequence
  Synthetic
aaaugagggagacaccu

SEQ ID NO: 767922 - RNA, 17 nt, Artificial Sequence
  Synthetic
cuucugccuggacaccu

SEQ ID NO: 767923 - RNA, 17 nt, Artificial Sequence
  Synthetic
ucccucccaugacaccu

SEQ ID NO: 767924 - RNA, 17 nt, Artificial Sequence
  Synthetic
ccucuccuuugacaccu

SEQ ID NO: 767925 - RNA, 17 nt, Artificial Sequence
  Synthetic
cuguucagcauacaccu

SEQ ID NO: 767926 - RNA, 17 nt, Artificial Sequence
  Synthetic
cuguuggauauacaccu

SEQ ID NO: 767927 - RNA, 17 nt, Artificial Sequence
  Synthetic
uucagcaaaguacaccu

SEQ ID NO: 767928 - RNA, 17 nt, Artificial Sequence
  Synthetic
uggcucauuaaccaccu

SEQ ID NO: 767929 - RNA, 17 nt, Artificial Sequence
  Synthetic
uuucuggcauaccaccu

SEQ ID NO: 767930 - RNA, 17 nt, Artificial Sequence
  Synthetic
augcaacccacccaccu

SEQ ID NO: 767931 - RNA, 17 nt, Artificial Sequence
  Synthetic
ucaugauccacccaccu

SEQ ID NO: 767932 - RNA, 17 nt, Artificial Sequence
  Synthetic
aagugauccacccaccu

SEQ ID NO: 767933 - RNA, 17 nt, Artificial Sequence
  Synthetic
ucgugauccacccaccu

SEQ ID NO: 767934 - RNA, 17 nt, Artificial Sequence
  Synthetic
aggugauccacccaccu

SEQ ID NO: 767935 - RNA, 17 nt, Artificial Sequence
  Synthetic
uccucccacccccaccu

SEQ ID NO: 767936 - RNA, 17 nt, Artificial Sequence
  Synthetic
auucugcccgcccaccu

SEQ ID NO: 767937 - RNA, 17 nt, Artificial Sequence
  Synthetic
aagugauccgcccaccu

SEQ ID NO: 767938 - RNA, 17 nt, Artificial Sequence
  Synthetic
ucgugauccgcccaccu

SEQ ID NO: 767939 - RNA, 17 nt, Artificial Sequence
  Synthetic
aggugauccgcccaccu

SEQ ID NO: 767940 - RNA, 17 nt, Artificial Sequence
  Synthetic
uugugauccgcccaccu

SEQ ID NO: 767941 - RNA, 17 nt, Artificial Sequence
  Synthetic
aagcaaucugcccaccu

SEQ ID NO: 767942 - RNA, 17 nt, Artificial Sequence
  Synthetic
ucaugaucugcccaccu

SEQ ID NO: 767943 - RNA, 17 nt, Artificial Sequence
  Synthetic
aagugaucugcccaccu

SEQ ID NO: 767944 - RNA, 17 nt, Artificial Sequence
  Synthetic
ucgugaucugcccaccu

SEQ ID NO: 767945 - RNA, 17 nt, Artificial Sequence
  Synthetic
aggugaucugcccaccu

SEQ ID NO: 767946 - RNA, 17 nt, Artificial Sequence
  Synthetic
aaucgauaaucccaccu

SEQ ID NO: 767947 - RNA, 17 nt, Artificial Sequence
  Synthetic
ugaugacagucccaccu

SEQ ID NO: 767948 - RNA, 17 nt, Artificial Sequence
  Synthetic
ugcaaccuccgccaccu

SEQ ID NO: 767949 - RNA, 17 nt, Artificial Sequence
  Synthetic
auucuagugugccaccu

SEQ ID NO: 767950 - RNA, 17 nt, Artificial Sequence
  Synthetic
auucaccuuauccaccu

SEQ ID NO: 767951 - RNA, 17 nt, Artificial Sequence
  Synthetic
agagugaaacuccaccu

SEQ ID NO: 767952 - RNA, 17 nt, Artificial Sequence
  Synthetic
agauuuuaaaagcaccu

SEQ ID NO: 767953 - RNA, 17 nt, Artificial Sequence
  Synthetic
uauacuccacagcaccu

SEQ ID NO: 767954 - RNA, 17 nt, Artificial Sequence
  Synthetic
aauucaaaaaggcaccu

SEQ ID NO: 767955 - RNA, 17 nt, Artificial Sequence
  Synthetic
auauucaugaggcaccu

SEQ ID NO: 767956 - RNA, 17 nt, Artificial Sequence
  Synthetic
cauggcauuaggcaccu

SEQ ID NO: 767957 - RNA, 17 nt, Artificial Sequence
  Synthetic
acggugagagggcaccu

SEQ ID NO: 767958 - RNA, 17 nt, Artificial Sequence
  Synthetic
accacuggugggcaccu

SEQ ID NO: 767959 - RNA, 17 nt, Artificial Sequence
  Synthetic
cgguuuugucugcaccu

SEQ ID NO: 767960 - RNA, 17 nt, Artificial Sequence
  Synthetic
uuuauuugugugcaccu

SEQ ID NO: 767961 - RNA, 17 nt, Artificial Sequence
  Synthetic
cagcagcagcaucaccu

SEQ ID NO: 767962 - RNA, 17 nt, Artificial Sequence
  Synthetic
caugagugucaucaccu

SEQ ID NO: 767963 - RNA, 17 nt, Artificial Sequence
  Synthetic
agauuauuucaucaccu

SEQ ID NO: 767964 - RNA, 17 nt, Artificial Sequence
  Synthetic
acgggguuucaucaccu

SEQ ID NO: 767965 - RNA, 17 nt, Artificial Sequence
  Synthetic
aauggaugcuaucaccu

SEQ ID NO: 767966 - RNA, 17 nt, Artificial Sequence
  Synthetic
aggugauccacucaccu

SEQ ID NO: 767967 - RNA, 17 nt, Artificial Sequence
  Synthetic
uugucccaggcucaccu

SEQ ID NO: 767968 - RNA, 17 nt, Artificial Sequence
  Synthetic
ucaguuuuuagucaccu

SEQ ID NO: 767969 - RNA, 17 nt, Artificial Sequence
  Synthetic
ugugcaaugcgucaccu

SEQ ID NO: 767970 - RNA, 17 nt, Artificial Sequence
  Synthetic
uagaccaaaguucaccu

SEQ ID NO: 767971 - RNA, 17 nt, Artificial Sequence
  Synthetic
acaaauuaaguucaccu

SEQ ID NO: 767972 - RNA, 17 nt, Artificial Sequence
  Synthetic
ucaugauccguucaccu

SEQ ID NO: 767973 - RNA, 17 nt, Artificial Sequence
  Synthetic
aggugauccguucaccu

SEQ ID NO: 767974 - RNA, 17 nt, Artificial Sequence
  Synthetic
ccuauguuauuucaccu

SEQ ID NO: 767975 - RNA, 17 nt, Artificial Sequence
  Synthetic
auuuaagccuuucaccu

SEQ ID NO: 767976 - RNA, 17 nt, Artificial Sequence
  Synthetic
cacaaaccuuuucaccu

SEQ ID NO: 767977 - RNA, 17 nt, Artificial Sequence
  Synthetic
aagagucccaaagaccu

SEQ ID NO: 767978 - RNA, 17 nt, Artificial Sequence
  Synthetic
ugggugugucaagaccu

SEQ ID NO: 767979 - RNA, 17 nt, Artificial Sequence
  Synthetic
aaaggugcugaagaccu

SEQ ID NO: 767980 - RNA, 17 nt, Artificial Sequence
  Synthetic
uaccaacucuaagaccu

SEQ ID NO: 767981 - RNA, 17 nt, Artificial Sequence
  Synthetic
aaaagcuacacagaccu

SEQ ID NO: 767982 - RNA, 17 nt, Artificial Sequence
  Synthetic
cauuauuccacagaccu

SEQ ID NO: 767983 - RNA, 17 nt, Artificial Sequence
  Synthetic
auguuaaggccagaccu

SEQ ID NO: 767984 - RNA, 17 nt, Artificial Sequence
  Synthetic
uuuuugcaaucagaccu

SEQ ID NO: 767985 - RNA, 17 nt, Artificial Sequence
  Synthetic
uggccucccagagaccu

SEQ ID NO: 767986 - RNA, 17 nt, Artificial Sequence
  Synthetic
caaaauaacugagaccu

SEQ ID NO: 767987 - RNA, 17 nt, Artificial Sequence
  Synthetic
uaacuuugcauagaccu

SEQ ID NO: 767988 - RNA, 17 nt, Artificial Sequence
  Synthetic
aauacuaaacuagaccu

SEQ ID NO: 767989 - RNA, 17 nt, Artificial Sequence
  Synthetic
ccacugcacuccgaccu

SEQ ID NO: 767990 - RNA, 17 nt, Artificial Sequence
  Synthetic
aagaugagaaaggaccu

SEQ ID NO: 767991 - RNA, 17 nt, Artificial Sequence
  Synthetic
ucuugaucuccggaccu

SEQ ID NO: 767992 - RNA, 17 nt, Artificial Sequence
  Synthetic
uaggaacucugggaccu

SEQ ID NO: 767993 - RNA, 17 nt, Artificial Sequence
  Synthetic
augaaaaauugggaccu

SEQ ID NO: 767994 - RNA, 17 nt, Artificial Sequence
  Synthetic
aaaaaaauuauggaccu

SEQ ID NO: 767995 - RNA, 17 nt, Artificial Sequence
  Synthetic
aucuuucuccuggaccu

SEQ ID NO: 767996 - RNA, 17 nt, Artificial Sequence
  Synthetic
cagucugaaguggaccu

SEQ ID NO: 767997 - RNA, 17 nt, Artificial Sequence
  Synthetic
auuaggacuuuggaccu

SEQ ID NO: 767998 - RNA, 17 nt, Artificial Sequence
  Synthetic
caauaucagcaugaccu

SEQ ID NO: 767999 - RNA, 17 nt, Artificial Sequence
  Synthetic
cuuuuaagauaugaccu

SEQ ID NO: 768000 - RNA, 17 nt, Artificial Sequence
  Synthetic
uucuagcucuaugaccu

SEQ ID NO: 768001 - RNA, 17 nt, Artificial Sequence
  Synthetic
ucuuggcaguaugaccu

SEQ ID NO: 768002 - RNA, 17 nt, Artificial Sequence
  Synthetic
uagguuuccacugaccu

SEQ ID NO: 768003 - RNA, 17 nt, Artificial Sequence
  Synthetic
uuuaauuucucugaccu

SEQ ID NO: 768004 - RNA, 17 nt, Artificial Sequence
  Synthetic
aagaagcacagugaccu

SEQ ID NO: 768005 - RNA, 17 nt, Artificial Sequence
  Synthetic
uuuuagcuuggugaccu

SEQ ID NO: 768006 - RNA, 17 nt, Artificial Sequence
  Synthetic
uuaucaccaugugaccu

SEQ ID NO: 768007 - RNA, 17 nt, Artificial Sequence
  Synthetic
aggguggcaugugaccu

SEQ ID NO: 768008 - RNA, 17 nt, Artificial Sequence
  Synthetic
uauuuaagaauugaccu

SEQ ID NO: 768009 - RNA, 17 nt, Artificial Sequence
  Synthetic
aaccuccuccuugaccu

SEQ ID NO: 768010 - RNA, 17 nt, Artificial Sequence
  Synthetic
accaucacuuuugaccu

SEQ ID NO: 768011 - RNA, 17 nt, Artificial Sequence
  Synthetic
aagagaauaaaauaccu

SEQ ID NO: 768012 - RNA, 17 nt, Artificial Sequence
  Synthetic
cuuaucaugaaauaccu

SEQ ID NO: 768013 - RNA, 17 nt, Artificial Sequence
  Synthetic
ucuaucugccaauaccu

SEQ ID NO: 768014 - RNA, 17 nt, Artificial Sequence
  Synthetic
uaccaggauuaauaccu

SEQ ID NO: 768015 - RNA, 17 nt, Artificial Sequence
  Synthetic
uacuacgcuuaauaccu

SEQ ID NO: 768016 - RNA, 17 nt, Artificial Sequence
  Synthetic
uaguuggcuuaauaccu

SEQ ID NO: 768017 - RNA, 17 nt, Artificial Sequence
  Synthetic
uaacauuguacauaccu

SEQ ID NO: 768018 - RNA, 17 nt, Artificial Sequence
  Synthetic
auaugaagcccauaccu

SEQ ID NO: 768019 - RNA, 17 nt, Artificial Sequence
  Synthetic
ucugaguuaucauaccu

SEQ ID NO: 768020 - RNA, 17 nt, Artificial Sequence
  Synthetic
cacauuugcagauaccu

SEQ ID NO: 768021 - RNA, 17 nt, Artificial Sequence
  Synthetic
aagaagaacugauaccu

SEQ ID NO: 768022 - RNA, 17 nt, Artificial Sequence
  Synthetic
agaaaauucugauaccu

SEQ ID NO: 768023 - RNA, 17 nt, Artificial Sequence
  Synthetic
acagguuggugauaccu

SEQ ID NO: 768024 - RNA, 17 nt, Artificial Sequence
  Synthetic
acuaaguugugauaccu

SEQ ID NO: 768025 - RNA, 17 nt, Artificial Sequence
  Synthetic
cgaucaccaauauaccu

SEQ ID NO: 768026 - RNA, 17 nt, Artificial Sequence
  Synthetic
cacauauaccuauaccu

SEQ ID NO: 768027 - RNA, 17 nt, Artificial Sequence
  Synthetic
augauacauguauaccu

SEQ ID NO: 768028 - RNA, 17 nt, Artificial Sequence
  Synthetic
uauaaugcuuuauaccu

SEQ ID NO: 768029 - RNA, 17 nt, Artificial Sequence
  Synthetic
ugcagccauuacuaccu

SEQ ID NO: 768030 - RNA, 17 nt, Artificial Sequence
  Synthetic
cagguccuuuacuaccu

SEQ ID NO: 768031 - RNA, 17 nt, Artificial Sequence
  Synthetic
uuaauuuuaaccuaccu

SEQ ID NO: 768032 - RNA, 17 nt, Artificial Sequence
  Synthetic
aagugauccaccuaccu

SEQ ID NO: 768033 - RNA, 17 nt, Artificial Sequence
  Synthetic
cagaaccucaccuaccu

SEQ ID NO: 768034 - RNA, 17 nt, Artificial Sequence
  Synthetic
aagcaauacuccuaccu

SEQ ID NO: 768035 - RNA, 17 nt, Artificial Sequence
  Synthetic
aaaaguuuguccuaccu

SEQ ID NO: 768036 - RNA, 17 nt, Artificial Sequence
  Synthetic
ccaauaaacagcuaccu

SEQ ID NO: 768037 - RNA, 17 nt, Artificial Sequence
  Synthetic
uguagucccagcuaccu

SEQ ID NO: 768038 - RNA, 17 nt, Artificial Sequence
  Synthetic
cagaggaaucgcuaccu

SEQ ID NO: 768039 - RNA, 17 nt, Artificial Sequence
  Synthetic
uaccaugcucgcuaccu

SEQ ID NO: 768040 - RNA, 17 nt, Artificial Sequence
  Synthetic
acaaauaucaucuaccu

SEQ ID NO: 768041 - RNA, 17 nt, Artificial Sequence
  Synthetic
ucucucuuuuucuaccu

SEQ ID NO: 768042 - RNA, 17 nt, Artificial Sequence
  Synthetic
cagccucccaaguaccu

SEQ ID NO: 768043 - RNA, 17 nt, Artificial Sequence
  Synthetic
cagccuccgaaguaccu

SEQ ID NO: 768044 - RNA, 17 nt, Artificial Sequence
  Synthetic
uacuaugcucaguaccu

SEQ ID NO: 768045 - RNA, 17 nt, Artificial Sequence
  Synthetic
cagaagaguagguaccu

SEQ ID NO: 768046 - RNA, 17 nt, Artificial Sequence
  Synthetic
ucugguaccauguaccu

SEQ ID NO: 768047 - RNA, 17 nt, Artificial Sequence
  Synthetic
ugguccgaacuguaccu

SEQ ID NO: 768048 - RNA, 17 nt, Artificial Sequence
  Synthetic
aagaauugcuuguaccu

SEQ ID NO: 768049 - RNA, 17 nt, Artificial Sequence
  Synthetic
ucuagcauuaauuaccu

SEQ ID NO: 768050 - RNA, 17 nt, Artificial Sequence
  Synthetic
aucuauauacauuaccu

SEQ ID NO: 768051 - RNA, 17 nt, Artificial Sequence
  Synthetic
uugaauccccauuaccu

SEQ ID NO: 768052 - RNA, 17 nt, Artificial Sequence
  Synthetic
cauagauaagauuaccu

SEQ ID NO: 768053 - RNA, 17 nt, Artificial Sequence
  Synthetic
auauuuucagauuaccu

SEQ ID NO: 768054 - RNA, 17 nt, Artificial Sequence
  Synthetic
uauaaaugcuauuaccu

SEQ ID NO: 768055 - RNA, 17 nt, Artificial Sequence
  Synthetic
uuuuaucucccuuaccu

SEQ ID NO: 768056 - RNA, 17 nt, Artificial Sequence
  Synthetic
uuauugauuccuuaccu

SEQ ID NO: 768057 - RNA, 17 nt, Artificial Sequence
  Synthetic
auuuucuuuucuuaccu

SEQ ID NO: 768058 - RNA, 17 nt, Artificial Sequence
  Synthetic
uaauauaauaguuaccu

SEQ ID NO: 768059 - RNA, 17 nt, Artificial Sequence
  Synthetic
acauugcacuguuaccu

SEQ ID NO: 768060 - RNA, 17 nt, Artificial Sequence
  Synthetic
aucaguauuuguuaccu

SEQ ID NO: 768061 - RNA, 17 nt, Artificial Sequence
  Synthetic
uguaauuaacuuuaccu

SEQ ID NO: 768062 - RNA, 17 nt, Artificial Sequence
  Synthetic
cagucauuucuuuaccu

SEQ ID NO: 768063 - RNA, 17 nt, Artificial Sequence
  Synthetic
aagauuuauuuuuaccu

SEQ ID NO: 768064 - RNA, 17 nt, Artificial Sequence
  Synthetic
uacuaccauaaaacccu

SEQ ID NO: 768065 - RNA, 17 nt, Artificial Sequence
  Synthetic
aaucaaccccaaacccu

SEQ ID NO: 768066 - RNA, 17 nt, Artificial Sequence
  Synthetic
uaagcuccccaaacccu

SEQ ID NO: 768067 - RNA, 17 nt, Artificial Sequence
  Synthetic
uuaaguaaguaaacccu

SEQ ID NO: 768068 - RNA, 17 nt, Artificial Sequence
  Synthetic
ucuuaucagacaacccu

SEQ ID NO: 768069 - RNA, 17 nt, Artificial Sequence
  Synthetic
cgccuuuucugaacccu

SEQ ID NO: 768070 - RNA, 17 nt, Artificial Sequence
  Synthetic
uaacauaaccuaacccu

SEQ ID NO: 768071 - RNA, 17 nt, Artificial Sequence
  Synthetic
ucucuaagucuaacccu

SEQ ID NO: 768072 - RNA, 17 nt, Artificial Sequence
  Synthetic
agaguuucaguaacccu

SEQ ID NO: 768073 - RNA, 17 nt, Artificial Sequence
  Synthetic
cucacgucuguaacccu

SEQ ID NO: 768074 - RNA, 17 nt, Artificial Sequence
  Synthetic
auuucuagacacacccu

SEQ ID NO: 768075 - RNA, 17 nt, Artificial Sequence
  Synthetic
uuccauuucuacacccu

SEQ ID NO: 768076 - RNA, 17 nt, Artificial Sequence
  Synthetic
ucucuucagcccacccu

SEQ ID NO: 768077 - RNA, 17 nt, Artificial Sequence
  Synthetic
aauggcacugccacccu

SEQ ID NO: 768078 - RNA, 17 nt, Artificial Sequence
  Synthetic
agcaauuuuagcacccu

SEQ ID NO: 768079 - RNA, 17 nt, Artificial Sequence
  Synthetic
uuuauuuggggcacccu

SEQ ID NO: 768080 - RNA, 17 nt, Artificial Sequence
  Synthetic
cuuuuuccccucacccu

SEQ ID NO: 768081 - RNA, 17 nt, Artificial Sequence
  Synthetic
uuuaagcuggucacccu

SEQ ID NO: 768082 - RNA, 17 nt, Artificial Sequence
  Synthetic
aauuucuuuuucacccu

SEQ ID NO: 768083 - RNA, 17 nt, Artificial Sequence
  Synthetic
uucacucagaagacccu

SEQ ID NO: 768084 - RNA, 17 nt, Artificial Sequence
  Synthetic
ugcuuauuagagacccu

SEQ ID NO: 768085 - RNA, 17 nt, Artificial Sequence
  Synthetic
cgggaacaauagacccu

SEQ ID NO: 768086 - RNA, 17 nt, Artificial Sequence
  Synthetic
ucagaauguuagacccu

SEQ ID NO: 768087 - RNA, 17 nt, Artificial Sequence
  Synthetic
uuuucaguaaggacccu

SEQ ID NO: 768088 - RNA, 17 nt, Artificial Sequence
  Synthetic
auuugaagcuggacccu

SEQ ID NO: 768089 - RNA, 17 nt, Artificial Sequence
  Synthetic
ucacuauuuuggacccu

SEQ ID NO: 768090 - RNA, 17 nt, Artificial Sequence
  Synthetic
caguuucacaugacccu

SEQ ID NO: 768091 - RNA, 17 nt, Artificial Sequence
  Synthetic
agucugggacugacccu

SEQ ID NO: 768092 - RNA, 17 nt, Artificial Sequence
  Synthetic
uuaaccuuucugacccu

SEQ ID NO: 768093 - RNA, 17 nt, Artificial Sequence
  Synthetic
uauuuauaauugacccu

SEQ ID NO: 768094 - RNA, 17 nt, Artificial Sequence
  Synthetic
aaauuuaaauauacccu

SEQ ID NO: 768095 - RNA, 17 nt, Artificial Sequence
  Synthetic
ccagauguuuauacccu

SEQ ID NO: 768096 - RNA, 17 nt, Artificial Sequence
  Synthetic
accuguuguucuacccu

SEQ ID NO: 768097 - RNA, 17 nt, Artificial Sequence
  Synthetic
ugguaauuuuguacccu

SEQ ID NO: 768098 - RNA, 17 nt, Artificial Sequence
  Synthetic
uuccucgucuuuacccu

SEQ ID NO: 768099 - RNA, 17 nt, Artificial Sequence
  Synthetic
ucuuuuaauccaccccu

SEQ ID NO: 768100 - RNA, 17 nt, Artificial Sequence
  Synthetic
aucaaagggagaccccu

SEQ ID NO: 768101 - RNA, 17 nt, Artificial Sequence
  Synthetic
ucuuuccuaauaccccu

SEQ ID NO: 768102 - RNA, 17 nt, Artificial Sequence
  Synthetic
cccaaagacuuaccccu

SEQ ID NO: 768103 - RNA, 17 nt, Artificial Sequence
  Synthetic
uucuaacccuuaccccu

SEQ ID NO: 768104 - RNA, 17 nt, Artificial Sequence
  Synthetic
aaaaacugcuuaccccu

SEQ ID NO: 768105 - RNA, 17 nt, Artificial Sequence
  Synthetic
ugccucagucacccccu

SEQ ID NO: 768106 - RNA, 17 nt, Artificial Sequence
  Synthetic
ucuuuaucaugcccccu

SEQ ID NO: 768107 - RNA, 17 nt, Artificial Sequence
  Synthetic
uaagaucaugucccccu

SEQ ID NO: 768108 - RNA, 17 nt, Artificial Sequence
  Synthetic
uucaauuacuucccccu

SEQ ID NO: 768109 - RNA, 17 nt, Artificial Sequence
  Synthetic
aaguaaagucagccccu

SEQ ID NO: 768110 - RNA, 17 nt, Artificial Sequence
  Synthetic
auauguaaagagccccu

SEQ ID NO: 768111 - RNA, 17 nt, Artificial Sequence
  Synthetic
uguuaccuggagccccu

SEQ ID NO: 768112 - RNA, 17 nt, Artificial Sequence
  Synthetic
ugauagagguugccccu

SEQ ID NO: 768113 - RNA, 17 nt, Artificial Sequence
  Synthetic
uaauuugaacauccccu

SEQ ID NO: 768114 - RNA, 17 nt, Artificial Sequence
  Synthetic
aaucaaagccauccccu

SEQ ID NO: 768115 - RNA, 17 nt, Artificial Sequence
  Synthetic
caacaauaguauccccu

SEQ ID NO: 768116 - RNA, 17 nt, Artificial Sequence
  Synthetic
ccaccuucuucuccccu

SEQ ID NO: 768117 - RNA, 17 nt, Artificial Sequence
  Synthetic
ucaaauucaaguccccu

SEQ ID NO: 768118 - RNA, 17 nt, Artificial Sequence
  Synthetic
cacuugcugaguccccu

SEQ ID NO: 768119 - RNA, 17 nt, Artificial Sequence
  Synthetic
agaagguugaguccccu

SEQ ID NO: 768120 - RNA, 17 nt, Artificial Sequence
  Synthetic
aucucugauauuccccu

SEQ ID NO: 768121 - RNA, 17 nt, Artificial Sequence
  Synthetic
auuauaagaaaagcccu

SEQ ID NO: 768122 - RNA, 17 nt, Artificial Sequence
  Synthetic
aauaaguuaaaagcccu

SEQ ID NO: 768123 - RNA, 17 nt, Artificial Sequence
  Synthetic
aaaagcaccuaagcccu

SEQ ID NO: 768124 - RNA, 17 nt, Artificial Sequence
  Synthetic
acugauuccacagcccu

SEQ ID NO: 768125 - RNA, 17 nt, Artificial Sequence
  Synthetic
caaggguccccagcccu

SEQ ID NO: 768126 - RNA, 17 nt, Artificial Sequence
  Synthetic
cgaucccucucagcccu

SEQ ID NO: 768127 - RNA, 17 nt, Artificial Sequence
  Synthetic
acacaggaaggagcccu

SEQ ID NO: 768128 - RNA, 17 nt, Artificial Sequence
  Synthetic
ucaacuaacugagcccu

SEQ ID NO: 768129 - RNA, 17 nt, Artificial Sequence
  Synthetic
uucuuuacccuagcccu

SEQ ID NO: 768130 - RNA, 17 nt, Artificial Sequence
  Synthetic
aggaauuagcuagcccu

SEQ ID NO: 768131 - RNA, 17 nt, Artificial Sequence
  Synthetic
auuucuccuuuagcccu

SEQ ID NO: 768132 - RNA, 17 nt, Artificial Sequence
  Synthetic
uuaaguccuaacgcccu

SEQ ID NO: 768133 - RNA, 17 nt, Artificial Sequence
  Synthetic
agcucaggcaaggcccu

SEQ ID NO: 768134 - RNA, 17 nt, Artificial Sequence
  Synthetic
uacucagggaaggcccu

SEQ ID NO: 768135 - RNA, 17 nt, Artificial Sequence
  Synthetic
uuaugcaagcaggcccu

SEQ ID NO: 768136 - RNA, 17 nt, Artificial Sequence
  Synthetic
aacucacuugcggcccu

SEQ ID NO: 768137 - RNA, 17 nt, Artificial Sequence
  Synthetic
auaaccugaagggcccu

SEQ ID NO: 768138 - RNA, 17 nt, Artificial Sequence
  Synthetic
auaaucuuaagggcccu

SEQ ID NO: 768139 - RNA, 17 nt, Artificial Sequence
  Synthetic
uacgccaccagggcccu

SEQ ID NO: 768140 - RNA, 17 nt, Artificial Sequence
  Synthetic
ugaaaacgcagggcccu

SEQ ID NO: 768141 - RNA, 17 nt, Artificial Sequence
  Synthetic
aagggacuuagggcccu

SEQ ID NO: 768142 - RNA, 17 nt, Artificial Sequence
  Synthetic
agguaccacugggcccu

SEQ ID NO: 768143 - RNA, 17 nt, Artificial Sequence
  Synthetic
cauauguugcuggcccu

SEQ ID NO: 768144 - RNA, 17 nt, Artificial Sequence
  Synthetic
ucauagacagaugcccu

SEQ ID NO: 768145 - RNA, 17 nt, Artificial Sequence
  Synthetic
augagaacaacugcccu

SEQ ID NO: 768146 - RNA, 17 nt, Artificial Sequence
  Synthetic
aaggcuauagcugcccu

SEQ ID NO: 768147 - RNA, 17 nt, Artificial Sequence
  Synthetic
ccaagaaaugcugcccu

SEQ ID NO: 768148 - RNA, 17 nt, Artificial Sequence
  Synthetic
auccuguucucugcccu

SEQ ID NO: 768149 - RNA, 17 nt, Artificial Sequence
  Synthetic
caucuauuuucugcccu

SEQ ID NO: 768150 - RNA, 17 nt, Artificial Sequence
  Synthetic
ugagugagaagugcccu

SEQ ID NO: 768151 - RNA, 17 nt, Artificial Sequence
  Synthetic
uccaggugaagugcccu

SEQ ID NO: 768152 - RNA, 17 nt, Artificial Sequence
  Synthetic
aguaggguccuugcccu

SEQ ID NO: 768153 - RNA, 17 nt, Artificial Sequence
  Synthetic
cauggaacuguugcccu

SEQ ID NO: 768154 - RNA, 17 nt, Artificial Sequence
  Synthetic
acaauggagaaaucccu

SEQ ID NO: 768155 - RNA, 17 nt, Artificial Sequence
  Synthetic
uuuuuccaugaaucccu

SEQ ID NO: 768156 - RNA, 17 nt, Artificial Sequence
  Synthetic
uuuuuuuuugaaucccu

SEQ ID NO: 768157 - RNA, 17 nt, Artificial Sequence
  Synthetic
ucccuccccucaucccu

SEQ ID NO: 768158 - RNA, 17 nt, Artificial Sequence
  Synthetic
aaguaggcuucaucccu

SEQ ID NO: 768159 - RNA, 17 nt, Artificial Sequence
  Synthetic
aagugggcuucaucccu

SEQ ID NO: 768160 - RNA, 17 nt, Artificial Sequence
  Synthetic
aaguuggcuucaucccu

SEQ ID NO: 768161 - RNA, 17 nt, Artificial Sequence
  Synthetic
uuuuugcaaagaucccu

SEQ ID NO: 768162 - RNA, 17 nt, Artificial Sequence
  Synthetic
cgugcgugcagaucccu

SEQ ID NO: 768163 - RNA, 17 nt, Artificial Sequence
  Synthetic
uuuuuuaauggaucccu

SEQ ID NO: 768164 - RNA, 17 nt, Artificial Sequence
  Synthetic
uuuggaagcugaucccu

SEQ ID NO: 768165 - RNA, 17 nt, Artificial Sequence
  Synthetic
cuaaauuucauaucccu

SEQ ID NO: 768166 - RNA, 17 nt, Artificial Sequence
  Synthetic
agcugaaauauaucccu

SEQ ID NO: 768167 - RNA, 17 nt, Artificial Sequence
  Synthetic
aagagggauuuaucccu

SEQ ID NO: 768168 - RNA, 17 nt, Artificial Sequence
  Synthetic
acuggagcuuuaucccu

SEQ ID NO: 768169 - RNA, 17 nt, Artificial Sequence
  Synthetic
uuccugugccacucccu

SEQ ID NO: 768170 - RNA, 17 nt, Artificial Sequence
  Synthetic
acaaauuuucacucccu

SEQ ID NO: 768171 - RNA, 17 nt, Artificial Sequence
  Synthetic
cagggaacauacucccu

SEQ ID NO: 768172 - RNA, 17 nt, Artificial Sequence
  Synthetic
cccacaguguacucccu

SEQ ID NO: 768173 - RNA, 17 nt, Artificial Sequence
  Synthetic
uugcaaguuaccucccu

SEQ ID NO: 768174 - RNA, 17 nt, Artificial Sequence
  Synthetic
uauuaaacucccucccu

SEQ ID NO: 768175 - RNA, 17 nt, Artificial Sequence
  Synthetic
uuauuaacaagcucccu

SEQ ID NO: 768176 - RNA, 17 nt, Artificial Sequence
  Synthetic
cucugacugggcucccu

SEQ ID NO: 768177 - RNA, 17 nt, Artificial Sequence
  Synthetic
cucuuggauggcucccu

SEQ ID NO: 768178 - RNA, 17 nt, Artificial Sequence
  Synthetic
aaaacucccaucucccu

SEQ ID NO: 768179 - RNA, 17 nt, Artificial Sequence
  Synthetic
aaugccauccucucccu

SEQ ID NO: 768180 - RNA, 17 nt, Artificial Sequence
  Synthetic
aguaguccucucucccu

SEQ ID NO: 768181 - RNA, 17 nt, Artificial Sequence
  Synthetic
auaaggcuucucucccu

SEQ ID NO: 768182 - RNA, 17 nt, Artificial Sequence
  Synthetic
ccagcuggugucucccu

SEQ ID NO: 768183 - RNA, 17 nt, Artificial Sequence
  Synthetic
ucuucccauuucucccu

SEQ ID NO: 768184 - RNA, 17 nt, Artificial Sequence
  Synthetic
cagggcaccuagucccu

SEQ ID NO: 768185 - RNA, 17 nt, Artificial Sequence
  Synthetic
uaauccaauuagucccu

SEQ ID NO: 768186 - RNA, 17 nt, Artificial Sequence
  Synthetic
uacagaaaaaugucccu

SEQ ID NO: 768187 - RNA, 17 nt, Artificial Sequence
  Synthetic
cauuuccaaaugucccu

SEQ ID NO: 768188 - RNA, 17 nt, Artificial Sequence
  Synthetic
cagaaggccaugucccu

SEQ ID NO: 768189 - RNA, 17 nt, Artificial Sequence
  Synthetic
cuuugucuucugucccu

SEQ ID NO: 768190 - RNA, 17 nt, Artificial Sequence
  Synthetic
auauacuucuugucccu

SEQ ID NO: 768191 - RNA, 17 nt, Artificial Sequence
  Synthetic
aguaaccuguugucccu

SEQ ID NO: 768192 - RNA, 17 nt, Artificial Sequence
  Synthetic
uguuaucuuuugucccu

SEQ ID NO: 768193 - RNA, 17 nt, Artificial Sequence
  Synthetic
aaagaacugaauucccu

SEQ ID NO: 768194 - RNA, 17 nt, Artificial Sequence
  Synthetic
ucugccugccauucccu

SEQ ID NO: 768195 - RNA, 17 nt, Artificial Sequence
  Synthetic
ugugagagagauucccu

SEQ ID NO: 768196 - RNA, 17 nt, Artificial Sequence
  Synthetic
agaccaggagauucccu

SEQ ID NO: 768197 - RNA, 17 nt, Artificial Sequence
  Synthetic
aaauguugcuauucccu

SEQ ID NO: 768198 - RNA, 17 nt, Artificial Sequence
  Synthetic
auacuugucuauucccu

SEQ ID NO: 768199 - RNA, 17 nt, Artificial Sequence
  Synthetic
auguaaacguauucccu

SEQ ID NO: 768200 - RNA, 17 nt, Artificial Sequence
  Synthetic
aaauaaguaacuucccu

SEQ ID NO: 768201 - RNA, 17 nt, Artificial Sequence
  Synthetic
uuacugauuacuucccu

SEQ ID NO: 768202 - RNA, 17 nt, Artificial Sequence
  Synthetic
auguguugcccuucccu

SEQ ID NO: 768203 - RNA, 17 nt, Artificial Sequence
  Synthetic
uucagaaguccuucccu

SEQ ID NO: 768204 - RNA, 17 nt, Artificial Sequence
  Synthetic
aaucuuuuggcuucccu

SEQ ID NO: 768205 - RNA, 17 nt, Artificial Sequence
  Synthetic
aggauaggaucuucccu

SEQ ID NO: 768206 - RNA, 17 nt, Artificial Sequence
  Synthetic
auacacuuaucuucccu

SEQ ID NO: 768207 - RNA, 17 nt, Artificial Sequence
  Synthetic
aacaucaacucuucccu

SEQ ID NO: 768208 - RNA, 17 nt, Artificial Sequence
  Synthetic
cuccccaauucuucccu

SEQ ID NO: 768209 - RNA, 17 nt, Artificial Sequence
  Synthetic
ucuauuauuucuucccu

SEQ ID NO: 768210 - RNA, 17 nt, Artificial Sequence
  Synthetic
ucugaggaauguucccu

SEQ ID NO: 768211 - RNA, 17 nt, Artificial Sequence
  Synthetic
uucauaaccuguucccu

SEQ ID NO: 768212 - RNA, 17 nt, Artificial Sequence
  Synthetic
aucauuuaaauuucccu

SEQ ID NO: 768213 - RNA, 17 nt, Artificial Sequence
  Synthetic
auugagugaauuucccu

SEQ ID NO: 768214 - RNA, 17 nt, Artificial Sequence
  Synthetic
uuggcuuugauuucccu

SEQ ID NO: 768215 - RNA, 17 nt, Artificial Sequence
  Synthetic
ucuugaacuguuucccu

SEQ ID NO: 768216 - RNA, 17 nt, Artificial Sequence
  Synthetic
aaucgaauauuuucccu

SEQ ID NO: 768217 - RNA, 17 nt, Artificial Sequence
  Synthetic
uuguuuugguuuucccu

SEQ ID NO: 768218 - RNA, 17 nt, Artificial Sequence
  Synthetic
accaaucuuaaaagccu

SEQ ID NO: 768219 - RNA, 17 nt, Artificial Sequence
  Synthetic
uauuaccugcaaagccu

SEQ ID NO: 768220 - RNA, 17 nt, Artificial Sequence
  Synthetic
cauuccagucaaagccu

SEQ ID NO: 768221 - RNA, 17 nt, Artificial Sequence
  Synthetic
uacacguuucaaagccu

SEQ ID NO: 768222 - RNA, 17 nt, Artificial Sequence
  Synthetic
auccuauaagaaagccu

SEQ ID NO: 768223 - RNA, 17 nt, Artificial Sequence
  Synthetic
ccacagcacuaaagccu

SEQ ID NO: 768224 - RNA, 17 nt, Artificial Sequence
  Synthetic
aaggaaguuuaaagccu

SEQ ID NO: 768225 - RNA, 17 nt, Artificial Sequence
  Synthetic
uuucaaacuccaagccu

SEQ ID NO: 768226 - RNA, 17 nt, Artificial Sequence
  Synthetic
ccacugcacucaagccu

SEQ ID NO: 768227 - RNA, 17 nt, Artificial Sequence
  Synthetic
ccuugggcuucaagccu

SEQ ID NO: 768228 - RNA, 17 nt, Artificial Sequence
  Synthetic
uucaaacaaagaagccu

SEQ ID NO: 768229 - RNA, 17 nt, Artificial Sequence
  Synthetic
cugaguggcagaagccu

SEQ ID NO: 768230 - RNA, 17 nt, Artificial Sequence
  Synthetic
auguuuuauguaagccu

SEQ ID NO: 768231 - RNA, 17 nt, Artificial Sequence
  Synthetic
aucuccucacacagccu

SEQ ID NO: 768232 - RNA, 17 nt, Artificial Sequence
  Synthetic
ccacugcacuacagccu

SEQ ID NO: 768233 - RNA, 17 nt, Artificial Sequence
  Synthetic
agcuaugucuacagccu

SEQ ID NO: 768234 - RNA, 17 nt, Artificial Sequence
  Synthetic
acaaaucuguacagccu

SEQ ID NO: 768235 - RNA, 17 nt, Artificial Sequence
  Synthetic
aaguuugagaccagccu

SEQ ID NO: 768236 - RNA, 17 nt, Artificial Sequence
  Synthetic
ccacugcaccccagccu

SEQ ID NO: 768237 - RNA, 17 nt, Artificial Sequence
  Synthetic
ccauugcaccccagccu

SEQ ID NO: 768238 - RNA, 17 nt, Artificial Sequence
  Synthetic
caacugaaauccagccu

SEQ ID NO: 768239 - RNA, 17 nt, Artificial Sequence
  Synthetic
ucaugccacuccagccu

SEQ ID NO: 768240 - RNA, 17 nt, Artificial Sequence
  Synthetic
acacuccacuccagccu

SEQ ID NO: 768241 - RNA, 17 nt, Artificial Sequence
  Synthetic
ccacuccacuccagccu

SEQ ID NO: 768242 - RNA, 17 nt, Artificial Sequence
  Synthetic
ucacagcacuccagccu

SEQ ID NO: 768243 - RNA, 17 nt, Artificial Sequence
  Synthetic
ccaccgcacuccagccu

SEQ ID NO: 768244 - RNA, 17 nt, Artificial Sequence
  Synthetic
ccacugcacuccagccu

SEQ ID NO: 768245 - RNA, 17 nt, Artificial Sequence
  Synthetic
ucacugcacuccagccu

SEQ ID NO: 768246 - RNA, 17 nt, Artificial Sequence
  Synthetic
cuacugcacuccagccu

SEQ ID NO: 768247 - RNA, 17 nt, Artificial Sequence
  Synthetic
ccgcugcacuccagccu

SEQ ID NO: 768248 - RNA, 17 nt, Artificial Sequence
  Synthetic
cugcugcacuccagccu

SEQ ID NO: 768249 - RNA, 17 nt, Artificial Sequence
  Synthetic
acauugcacuccagccu

SEQ ID NO: 768250 - RNA, 17 nt, Artificial Sequence
  Synthetic
ccauugcacuccagccu

SEQ ID NO: 768251 - RNA, 17 nt, Artificial Sequence
  Synthetic
agauugcacuccagccu

SEQ ID NO: 768252 - RNA, 17 nt, Artificial Sequence
  Synthetic
cuguugcacuccagccu

SEQ ID NO: 768253 - RNA, 17 nt, Artificial Sequence
  Synthetic
ugcacucacuccagccu

SEQ ID NO: 768254 - RNA, 17 nt, Artificial Sequence
  Synthetic
ccaccucacuccagccu

SEQ ID NO: 768255 - RNA, 17 nt, Artificial Sequence
  Synthetic
ccacuucacuccagccu

SEQ ID NO: 768256 - RNA, 17 nt, Artificial Sequence
  Synthetic
ccacuguacuccagccu

SEQ ID NO: 768257 - RNA, 17 nt, Artificial Sequence
  Synthetic
ccaguguacuccagccu

SEQ ID NO: 768258 - RNA, 17 nt, Artificial Sequence
  Synthetic
ccauuguacuccagccu

SEQ ID NO: 768259 - RNA, 17 nt, Artificial Sequence
  Synthetic
ccacugcccuccagccu

SEQ ID NO: 768260 - RNA, 17 nt, Artificial Sequence
  Synthetic
ccacugcgcuccagccu

SEQ ID NO: 768261 - RNA, 17 nt, Artificial Sequence
  Synthetic
ccauugcgcuccagccu

SEQ ID NO: 768262 - RNA, 17 nt, Artificial Sequence
  Synthetic
ccacugugcuccagccu

SEQ ID NO: 768263 - RNA, 17 nt, Artificial Sequence
  Synthetic
cacauaaaguccagccu

SEQ ID NO: 768264 - RNA, 17 nt, Artificial Sequence
  Synthetic
ccacugcauuccagccu

SEQ ID NO: 768265 - RNA, 17 nt, Artificial Sequence
  Synthetic
ccauugcauuccagccu

SEQ ID NO: 768266 - RNA, 17 nt, Artificial Sequence
  Synthetic
uaguuuuauuccagccu

SEQ ID NO: 768267 - RNA, 17 nt, Artificial Sequence
  Synthetic
uuccaagauggcagccu

SEQ ID NO: 768268 - RNA, 17 nt, Artificial Sequence
  Synthetic
aaucucaacugcagccu

SEQ ID NO: 768269 - RNA, 17 nt, Artificial Sequence
  Synthetic
ccugcuaugugcagccu

SEQ ID NO: 768270 - RNA, 17 nt, Artificial Sequence
  Synthetic
ucauacacacucagccu

SEQ ID NO: 768271 - RNA, 17 nt, Artificial Sequence
  Synthetic
agguaugaagucagccu

SEQ ID NO: 768272 - RNA, 17 nt, Artificial Sequence
  Synthetic
ccacugcacuucagccu

SEQ ID NO: 768273 - RNA, 17 nt, Artificial Sequence
  Synthetic
aagugauccuucagccu

SEQ ID NO: 768274 - RNA, 17 nt, Artificial Sequence
  Synthetic
aguucauguuucagccu

SEQ ID NO: 768275 - RNA, 17 nt, Artificial Sequence
  Synthetic
uagcaaaaaaagagccu

SEQ ID NO: 768276 - RNA, 17 nt, Artificial Sequence
  Synthetic
cuggagucaaagagccu

SEQ ID NO: 768277 - RNA, 17 nt, Artificial Sequence
  Synthetic
cuuuugaaagagagccu

SEQ ID NO: 768278 - RNA, 17 nt, Artificial Sequence
  Synthetic
acguaguucucgagccu

SEQ ID NO: 768279 - RNA, 17 nt, Artificial Sequence
  Synthetic
augaaaacucggagccu

SEQ ID NO: 768280 - RNA, 17 nt, Artificial Sequence
  Synthetic
cagugcugugggagccu

SEQ ID NO: 768281 - RNA, 17 nt, Artificial Sequence
  Synthetic
uucuagcuugggagccu

SEQ ID NO: 768282 - RNA, 17 nt, Artificial Sequence
  Synthetic
aucugaaaauggagccu

SEQ ID NO: 768283 - RNA, 17 nt, Artificial Sequence
  Synthetic
aacacgcacaugagccu

SEQ ID NO: 768284 - RNA, 17 nt, Artificial Sequence
  Synthetic
uuuaugaugaugagccu

SEQ ID NO: 768285 - RNA, 17 nt, Artificial Sequence
  Synthetic
uaggaucuccugagccu

SEQ ID NO: 768286 - RNA, 17 nt, Artificial Sequence
  Synthetic
aaguccaaggugagccu

SEQ ID NO: 768287 - RNA, 17 nt, Artificial Sequence
  Synthetic
aaggaucacuugagccu

SEQ ID NO: 768288 - RNA, 17 nt, Artificial Sequence
  Synthetic
uguacacuguugagccu

SEQ ID NO: 768289 - RNA, 17 nt, Artificial Sequence
  Synthetic
agguuaaaucauagccu

SEQ ID NO: 768290 - RNA, 17 nt, Artificial Sequence
  Synthetic
acuucuagucauagccu

SEQ ID NO: 768291 - RNA, 17 nt, Artificial Sequence
  Synthetic
ugagccucagauagccu

SEQ ID NO: 768292 - RNA, 17 nt, Artificial Sequence
  Synthetic
acacggagagauagccu

SEQ ID NO: 768293 - RNA, 17 nt, Artificial Sequence
  Synthetic
uaaguaacaacuagccu

SEQ ID NO: 768294 - RNA, 17 nt, Artificial Sequence
  Synthetic
caagucuauccuagccu

SEQ ID NO: 768295 - RNA, 17 nt, Artificial Sequence
  Synthetic
cagaaaacugcuagccu

SEQ ID NO: 768296 - RNA, 17 nt, Artificial Sequence
  Synthetic
aaauauaaaucuagccu

SEQ ID NO: 768297 - RNA, 17 nt, Artificial Sequence
  Synthetic
ccacuacacucuagccu

SEQ ID NO: 768298 - RNA, 17 nt, Artificial Sequence
  Synthetic
ccacugcacucuagccu

SEQ ID NO: 768299 - RNA, 17 nt, Artificial Sequence
  Synthetic
aucaucuuagguagccu

SEQ ID NO: 768300 - RNA, 17 nt, Artificial Sequence
  Synthetic
cauuaaaguuguagccu

SEQ ID NO: 768301 - RNA, 17 nt, Artificial Sequence
  Synthetic
auaaauugaauuagccu

SEQ ID NO: 768302 - RNA, 17 nt, Artificial Sequence
  Synthetic
uucaaagcccuuagccu

SEQ ID NO: 768303 - RNA, 17 nt, Artificial Sequence
  Synthetic
auaacuuugguuagccu

SEQ ID NO: 768304 - RNA, 17 nt, Artificial Sequence
  Synthetic
ccacugcacuuuagccu

SEQ ID NO: 768305 - RNA, 17 nt, Artificial Sequence
  Synthetic
uuugaugguuuuagccu

SEQ ID NO: 768306 - RNA, 17 nt, Artificial Sequence
  Synthetic
agaugauccacccgccu

SEQ ID NO: 768307 - RNA, 17 nt, Artificial Sequence
  Synthetic
ucgugauccacccgccu

SEQ ID NO: 768308 - RNA, 17 nt, Artificial Sequence
  Synthetic
aggugauccacccgccu

SEQ ID NO: 768309 - RNA, 17 nt, Artificial Sequence
  Synthetic
uugugauccacccgccu

SEQ ID NO: 768310 - RNA, 17 nt, Artificial Sequence
  Synthetic
ccuguggucacccgccu

SEQ ID NO: 768311 - RNA, 17 nt, Artificial Sequence
  Synthetic
ucgugaucagcccgccu

SEQ ID NO: 768312 - RNA, 17 nt, Artificial Sequence
  Synthetic
ucaugauccgcccgccu

SEQ ID NO: 768313 - RNA, 17 nt, Artificial Sequence
  Synthetic
uuaugauccgcccgccu

SEQ ID NO: 768314 - RNA, 17 nt, Artificial Sequence
  Synthetic
aagugauccgcccgccu

SEQ ID NO: 768315 - RNA, 17 nt, Artificial Sequence
  Synthetic
ucgugauccgcccgccu

SEQ ID NO: 768316 - RNA, 17 nt, Artificial Sequence
  Synthetic
uggcaguccgcccgccu

SEQ ID NO: 768317 - RNA, 17 nt, Artificial Sequence
  Synthetic
ucaugaucugcccgccu

SEQ ID NO: 768318 - RNA, 17 nt, Artificial Sequence
  Synthetic
ucgugaucugcccgccu

SEQ ID NO: 768319 - RNA, 17 nt, Artificial Sequence
  Synthetic
uugugaucugcccgccu

SEQ ID NO: 768320 - RNA, 17 nt, Artificial Sequence
  Synthetic
aaaugaugugcccgccu

SEQ ID NO: 768321 - RNA, 17 nt, Artificial Sequence
  Synthetic
ccacugcucucccgccu

SEQ ID NO: 768322 - RNA, 17 nt, Artificial Sequence
  Synthetic
cuuuuuguuugccgccu

SEQ ID NO: 768323 - RNA, 17 nt, Artificial Sequence
  Synthetic
uguuuuaaugagcgccu

SEQ ID NO: 768324 - RNA, 17 nt, Artificial Sequence
  Synthetic
aagauacugcaaggccu

SEQ ID NO: 768325 - RNA, 17 nt, Artificial Sequence
  Synthetic
uucuaacucuaaggccu

SEQ ID NO: 768326 - RNA, 17 nt, Artificial Sequence
  Synthetic
uagaucucuuaaggccu

SEQ ID NO: 768327 - RNA, 17 nt, Artificial Sequence
  Synthetic
caccucgcgacaggccu

SEQ ID NO: 768328 - RNA, 17 nt, Artificial Sequence
  Synthetic
cagcuauucucaggccu

SEQ ID NO: 768329 - RNA, 17 nt, Artificial Sequence
  Synthetic
cauaggaccagaggccu

SEQ ID NO: 768330 - RNA, 17 nt, Artificial Sequence
  Synthetic
ccuccaucuggaggccu

SEQ ID NO: 768331 - RNA, 17 nt, Artificial Sequence
  Synthetic
uggaugagaugaggccu

SEQ ID NO: 768332 - RNA, 17 nt, Artificial Sequence
  Synthetic
ugcuugaaaauaggccu

SEQ ID NO: 768333 - RNA, 17 nt, Artificial Sequence
  Synthetic
cugacccauguaggccu

SEQ ID NO: 768334 - RNA, 17 nt, Artificial Sequence
  Synthetic
auuguuggauuaggccu

SEQ ID NO: 768335 - RNA, 17 nt, Artificial Sequence
  Synthetic
aagaauuaguacggccu

SEQ ID NO: 768336 - RNA, 17 nt, Artificial Sequence
  Synthetic
agaagaaacaccggccu

SEQ ID NO: 768337 - RNA, 17 nt, Artificial Sequence
  Synthetic
agaugagaagagggccu

SEQ ID NO: 768338 - RNA, 17 nt, Artificial Sequence
  Synthetic
cccauauuuuagggccu

SEQ ID NO: 768339 - RNA, 17 nt, Artificial Sequence
  Synthetic
aaccaugggaggggccu

SEQ ID NO: 768340 - RNA, 17 nt, Artificial Sequence
  Synthetic
uggaagaaauggggccu

SEQ ID NO: 768341 - RNA, 17 nt, Artificial Sequence
  Synthetic
uagggcuuuuggggccu

SEQ ID NO: 768342 - RNA, 17 nt, Artificial Sequence
  Synthetic
caagaaaugaugggccu

SEQ ID NO: 768343 - RNA, 17 nt, Artificial Sequence
  Synthetic
uucacaucucugggccu

SEQ ID NO: 768344 - RNA, 17 nt, Artificial Sequence
  Synthetic
caugugguguugggccu

SEQ ID NO: 768345 - RNA, 17 nt, Artificial Sequence
  Synthetic
cagaagcaaaauggccu

SEQ ID NO: 768346 - RNA, 17 nt, Artificial Sequence
  Synthetic
uuacucugcccuggccu

SEQ ID NO: 768347 - RNA, 17 nt, Artificial Sequence
  Synthetic
uuaaaaaugccuggccu

SEQ ID NO: 768348 - RNA, 17 nt, Artificial Sequence
  Synthetic
uuucugaguccuggccu

SEQ ID NO: 768349 - RNA, 17 nt, Artificial Sequence
  Synthetic
uggcaaaaagcuggccu

SEQ ID NO: 768350 - RNA, 17 nt, Artificial Sequence
  Synthetic
aguacuggaucuggccu

SEQ ID NO: 768351 - RNA, 17 nt, Artificial Sequence
  Synthetic
ucuuagguaucuggccu

SEQ ID NO: 768352 - RNA, 17 nt, Artificial Sequence
  Synthetic
auguuagccucuggccu

SEQ ID NO: 768353 - RNA, 17 nt, Artificial Sequence
  Synthetic
agguugcuuaguggccu

SEQ ID NO: 768354 - RNA, 17 nt, Artificial Sequence
  Synthetic
augauguguauuggccu

SEQ ID NO: 768355 - RNA, 17 nt, Artificial Sequence
  Synthetic
caucucaucuuuggccu

SEQ ID NO: 768356 - RNA, 17 nt, Artificial Sequence
  Synthetic
aucacuucuuuuggccu

SEQ ID NO: 768357 - RNA, 17 nt, Artificial Sequence
  Synthetic
uuuuaagaaaaaugccu

SEQ ID NO: 768358 - RNA, 17 nt, Artificial Sequence
  Synthetic
aagagaauaaaaugccu

SEQ ID NO: 768359 - RNA, 17 nt, Artificial Sequence
  Synthetic
uuauguaacaaaugccu

SEQ ID NO: 768360 - RNA, 17 nt, Artificial Sequence
  Synthetic
aucagucccaaaugccu

SEQ ID NO: 768361 - RNA, 17 nt, Artificial Sequence
  Synthetic
uaucaagccaaaugccu

SEQ ID NO: 768362 - RNA, 17 nt, Artificial Sequence
  Synthetic
auaacauccaaaugccu

SEQ ID NO: 768363 - RNA, 17 nt, Artificial Sequence
  Synthetic
uguguuugcaaaugccu

SEQ ID NO: 768364 - RNA, 17 nt, Artificial Sequence
  Synthetic
ccugaaugguaaugccu

SEQ ID NO: 768365 - RNA, 17 nt, Artificial Sequence
  Synthetic
aagaaauuguaaugccu

SEQ ID NO: 768366 - RNA, 17 nt, Artificial Sequence
  Synthetic
ugcagauuuuaaugccu

SEQ ID NO: 768367 - RNA, 17 nt, Artificial Sequence
  Synthetic
ccuuucuagacaugccu

SEQ ID NO: 768368 - RNA, 17 nt, Artificial Sequence
  Synthetic
auauuauuuacaugccu

SEQ ID NO: 768369 - RNA, 17 nt, Artificial Sequence
  Synthetic
caagucuguucaugccu

SEQ ID NO: 768370 - RNA, 17 nt, Artificial Sequence
  Synthetic
acuuuucucagaugccu

SEQ ID NO: 768371 - RNA, 17 nt, Artificial Sequence
  Synthetic
cuauacuguggaugccu

SEQ ID NO: 768372 - RNA, 17 nt, Artificial Sequence
  Synthetic
aagaccuucugaugccu

SEQ ID NO: 768373 - RNA, 17 nt, Artificial Sequence
  Synthetic
caaguaauuugaugccu

SEQ ID NO: 768374 - RNA, 17 nt, Artificial Sequence
  Synthetic
uucacuauaauaugccu

SEQ ID NO: 768375 - RNA, 17 nt, Artificial Sequence
  Synthetic
aucauuuuuuuaugccu

SEQ ID NO: 768376 - RNA, 17 nt, Artificial Sequence
  Synthetic
cuccuauaaaacugccu

SEQ ID NO: 768377 - RNA, 17 nt, Artificial Sequence
  Synthetic
ucgugauccaacugccu

SEQ ID NO: 768378 - RNA, 17 nt, Artificial Sequence
  Synthetic
uacuaugcucacugccu

SEQ ID NO: 768379 - RNA, 17 nt, Artificial Sequence
  Synthetic
aauauauaggacugccu

SEQ ID NO: 768380 - RNA, 17 nt, Artificial Sequence
  Synthetic
ugcucauaugacugccu

SEQ ID NO: 768381 - RNA, 17 nt, Artificial Sequence
  Synthetic
cuuugggcauacugccu

SEQ ID NO: 768382 - RNA, 17 nt, Artificial Sequence
  Synthetic
uacaaauuauacugccu

SEQ ID NO: 768383 - RNA, 17 nt, Artificial Sequence
  Synthetic
ucaugauccaccugccu

SEQ ID NO: 768384 - RNA, 17 nt, Artificial Sequence
  Synthetic
ucgugauccaccugccu

SEQ ID NO: 768385 - RNA, 17 nt, Artificial Sequence
  Synthetic
aggugauccaccugccu

SEQ ID NO: 768386 - RNA, 17 nt, Artificial Sequence
  Synthetic
ucaugauccgccugccu

SEQ ID NO: 768387 - RNA, 17 nt, Artificial Sequence
  Synthetic
ucgugauccgccugccu

SEQ ID NO: 768388 - RNA, 17 nt, Artificial Sequence
  Synthetic
aggugauccgccugccu

SEQ ID NO: 768389 - RNA, 17 nt, Artificial Sequence
  Synthetic
aaaugaucugccugccu

SEQ ID NO: 768390 - RNA, 17 nt, Artificial Sequence
  Synthetic
uagugaucugccugccu

SEQ ID NO: 768391 - RNA, 17 nt, Artificial Sequence
  Synthetic
ucgugaucugccugccu

SEQ ID NO: 768392 - RNA, 17 nt, Artificial Sequence
  Synthetic
ccacugcacuccugccu

SEQ ID NO: 768393 - RNA, 17 nt, Artificial Sequence
  Synthetic
acacgauccuccugccu

SEQ ID NO: 768394 - RNA, 17 nt, Artificial Sequence
  Synthetic
cauuuuugguccugccu

SEQ ID NO: 768395 - RNA, 17 nt, Artificial Sequence
  Synthetic
auugucuuuuccugccu

SEQ ID NO: 768396 - RNA, 17 nt, Artificial Sequence
  Synthetic
aauggaaaaggcugccu

SEQ ID NO: 768397 - RNA, 17 nt, Artificial Sequence
  Synthetic
aggugaucaggcugccu

SEQ ID NO: 768398 - RNA, 17 nt, Artificial Sequence
  Synthetic
cugaaugagggcugccu

SEQ ID NO: 768399 - RNA, 17 nt, Artificial Sequence
  Synthetic
cagccugccaucugccu

SEQ ID NO: 768400 - RNA, 17 nt, Artificial Sequence
  Synthetic
caauguucccucugccu

SEQ ID NO: 768401 - RNA, 17 nt, Artificial Sequence
  Synthetic
ucaguucaugucugccu

SEQ ID NO: 768402 - RNA, 17 nt, Artificial Sequence
  Synthetic
ucgugauccuucugccu

SEQ ID NO: 768403 - RNA, 17 nt, Artificial Sequence
  Synthetic
acguucucuuucugccu

SEQ ID NO: 768404 - RNA, 17 nt, Artificial Sequence
  Synthetic
uucaaccuuuucugccu

SEQ ID NO: 768405 - RNA, 17 nt, Artificial Sequence
  Synthetic
aaucaauaaaagugccu

SEQ ID NO: 768406 - RNA, 17 nt, Artificial Sequence
  Synthetic
aagagaauaaagugccu

SEQ ID NO: 768407 - RNA, 17 nt, Artificial Sequence
  Synthetic
aucaucaaauagugccu

SEQ ID NO: 768408 - RNA, 17 nt, Artificial Sequence
  Synthetic
uguccuguauggugccu

SEQ ID NO: 768409 - RNA, 17 nt, Artificial Sequence
  Synthetic
uuccauuugaugugccu

SEQ ID NO: 768410 - RNA, 17 nt, Artificial Sequence
  Synthetic
augaacuuuaugugccu

SEQ ID NO: 768411 - RNA, 17 nt, Artificial Sequence
  Synthetic
uuugucuuucugugccu

SEQ ID NO: 768412 - RNA, 17 nt, Artificial Sequence
  Synthetic
aagugauucuugugccu

SEQ ID NO: 768413 - RNA, 17 nt, Artificial Sequence
  Synthetic
cugcugucuuugugccu

SEQ ID NO: 768414 - RNA, 17 nt, Artificial Sequence
  Synthetic
aaucgaguuuugugccu

SEQ ID NO: 768415 - RNA, 17 nt, Artificial Sequence
  Synthetic
agugugaccaauugccu

SEQ ID NO: 768416 - RNA, 17 nt, Artificial Sequence
  Synthetic
ugcccaugacauugccu

SEQ ID NO: 768417 - RNA, 17 nt, Artificial Sequence
  Synthetic
caauuuucccauugccu

SEQ ID NO: 768418 - RNA, 17 nt, Artificial Sequence
  Synthetic
uuugagaagcauugccu

SEQ ID NO: 768419 - RNA, 17 nt, Artificial Sequence
  Synthetic
uaucaauggcauugccu

SEQ ID NO: 768420 - RNA, 17 nt, Artificial Sequence
  Synthetic
ccuauucaagauugccu

SEQ ID NO: 768421 - RNA, 17 nt, Artificial Sequence
  Synthetic
aggugggaggauugccu

SEQ ID NO: 768422 - RNA, 17 nt, Artificial Sequence
  Synthetic
uggguggaauauugccu

SEQ ID NO: 768423 - RNA, 17 nt, Artificial Sequence
  Synthetic
caauggggcuauugccu

SEQ ID NO: 768424 - RNA, 17 nt, Artificial Sequence
  Synthetic
auuaaaugcuauugccu

SEQ ID NO: 768425 - RNA, 17 nt, Artificial Sequence
  Synthetic
ccugaaugguauugccu

SEQ ID NO: 768426 - RNA, 17 nt, Artificial Sequence
  Synthetic
agucuacuuuauugccu

SEQ ID NO: 768427 - RNA, 17 nt, Artificial Sequence
  Synthetic
aggucagaaacuugccu

SEQ ID NO: 768428 - RNA, 17 nt, Artificial Sequence
  Synthetic
cauuugaaagcuugccu

SEQ ID NO: 768429 - RNA, 17 nt, Artificial Sequence
  Synthetic
ucuuuuuaaucuugccu

SEQ ID NO: 768430 - RNA, 17 nt, Artificial Sequence
  Synthetic
aagcaauccucuugccu

SEQ ID NO: 768431 - RNA, 17 nt, Artificial Sequence
  Synthetic
aucuuauauuguugccu

SEQ ID NO: 768432 - RNA, 17 nt, Artificial Sequence
  Synthetic
uguggguguauuugccu

SEQ ID NO: 768433 - RNA, 17 nt, Artificial Sequence
  Synthetic
aggugauccguuugccu

SEQ ID NO: 768434 - RNA, 17 nt, Artificial Sequence
  Synthetic
ccccuacuuguuugccu

SEQ ID NO: 768435 - RNA, 17 nt, Artificial Sequence
  Synthetic
auaaaucaguuuugccu

SEQ ID NO: 768436 - RNA, 17 nt, Artificial Sequence
  Synthetic
accauuccaaaaauccu

SEQ ID NO: 768437 - RNA, 17 nt, Artificial Sequence
  Synthetic
acuauuccaaaaauccu

SEQ ID NO: 768438 - RNA, 17 nt, Artificial Sequence
  Synthetic
acuuuaugcaaaauccu

SEQ ID NO: 768439 - RNA, 17 nt, Artificial Sequence
  Synthetic
uugaguaugaaaauccu

SEQ ID NO: 768440 - RNA, 17 nt, Artificial Sequence
  Synthetic
ucagcuucccaaauccu

SEQ ID NO: 768441 - RNA, 17 nt, Artificial Sequence
  Synthetic
acagucagaacaauccu

SEQ ID NO: 768442 - RNA, 17 nt, Artificial Sequence
  Synthetic
ccccagcccccaauccu

SEQ ID NO: 768443 - RNA, 17 nt, Artificial Sequence
  Synthetic
uuauuauuaucaauccu

SEQ ID NO: 768444 - RNA, 17 nt, Artificial Sequence
  Synthetic
augaaauucucaauccu

SEQ ID NO: 768445 - RNA, 17 nt, Artificial Sequence
  Synthetic
acuauaccuucaauccu

SEQ ID NO: 768446 - RNA, 17 nt, Artificial Sequence
  Synthetic
uguuuguauagaauccu

SEQ ID NO: 768447 - RNA, 17 nt, Artificial Sequence
  Synthetic
uuugugcguggaauccu

SEQ ID NO: 768448 - RNA, 17 nt, Artificial Sequence
  Synthetic
uacuuaaucauaauccu

SEQ ID NO: 768449 - RNA, 17 nt, Artificial Sequence
  Synthetic
cagucuuuucuaauccu

SEQ ID NO: 768450 - RNA, 17 nt, Artificial Sequence
  Synthetic
cuagccucuguaauccu

SEQ ID NO: 768451 - RNA, 17 nt, Artificial Sequence
  Synthetic
uucucaaaauuaauccu

SEQ ID NO: 768452 - RNA, 17 nt, Artificial Sequence
  Synthetic
uuuuucagaaacauccu

SEQ ID NO: 768453 - RNA, 17 nt, Artificial Sequence
  Synthetic
ugccagugcaacauccu

SEQ ID NO: 768454 - RNA, 17 nt, Artificial Sequence
  Synthetic
cuaagcuauaacauccu

SEQ ID NO: 768455 - RNA, 17 nt, Artificial Sequence
  Synthetic
uaauaggaacacauccu

SEQ ID NO: 768456 - RNA, 17 nt, Artificial Sequence
  Synthetic
acagacuggaccauccu

SEQ ID NO: 768457 - RNA, 17 nt, Artificial Sequence
  Synthetic
uuuuauguuaccauccu

SEQ ID NO: 768458 - RNA, 17 nt, Artificial Sequence
  Synthetic
acauucaaagccauccu

SEQ ID NO: 768459 - RNA, 17 nt, Artificial Sequence
  Synthetic
caguggugagccauccu

SEQ ID NO: 768460 - RNA, 17 nt, Artificial Sequence
  Synthetic
cuuccuagaaucauccu

SEQ ID NO: 768461 - RNA, 17 nt, Artificial Sequence
  Synthetic
augccaaccaucauccu

SEQ ID NO: 768462 - RNA, 17 nt, Artificial Sequence
  Synthetic
uggagaaccaucauccu

SEQ ID NO: 768463 - RNA, 17 nt, Artificial Sequence
  Synthetic
caccuuggacucauccu

SEQ ID NO: 768464 - RNA, 17 nt, Artificial Sequence
  Synthetic
uuuuuuuuccucauccu

SEQ ID NO: 768465 - RNA, 17 nt, Artificial Sequence
  Synthetic
uuauugggucucauccu

SEQ ID NO: 768466 - RNA, 17 nt, Artificial Sequence
  Synthetic
aaggcuagggucauccu

SEQ ID NO: 768467 - RNA, 17 nt, Artificial Sequence
  Synthetic
caagugggcuucauccu

SEQ ID NO: 768468 - RNA, 17 nt, Artificial Sequence
  Synthetic
aagauauuaaagauccu

SEQ ID NO: 768469 - RNA, 17 nt, Artificial Sequence
  Synthetic
uuuuuuuuuaagauccu

SEQ ID NO: 768470 - RNA, 17 nt, Artificial Sequence
  Synthetic
uaguauucccagauccu

SEQ ID NO: 768471 - RNA, 17 nt, Artificial Sequence
  Synthetic
ucuguuuuccggauccu

SEQ ID NO: 768472 - RNA, 17 nt, Artificial Sequence
  Synthetic
aucauuuacuggauccu

SEQ ID NO: 768473 - RNA, 17 nt, Artificial Sequence
  Synthetic
ugaaauuauaugauccu

SEQ ID NO: 768474 - RNA, 17 nt, Artificial Sequence
  Synthetic
aaccaaacagugauccu

SEQ ID NO: 768475 - RNA, 17 nt, Artificial Sequence
  Synthetic
cagacugaggugauccu

SEQ ID NO: 768476 - RNA, 17 nt, Artificial Sequence
  Synthetic
acugguugugugauccu

SEQ ID NO: 768477 - RNA, 17 nt, Artificial Sequence
  Synthetic
uuuucuagaaauauccu

SEQ ID NO: 768478 - RNA, 17 nt, Artificial Sequence
  Synthetic
uuaacaggaaauauccu

SEQ ID NO: 768479 - RNA, 17 nt, Artificial Sequence
  Synthetic
ucucucccucauauccu

SEQ ID NO: 768480 - RNA, 17 nt, Artificial Sequence
  Synthetic
cucaaguuugauauccu

SEQ ID NO: 768481 - RNA, 17 nt, Artificial Sequence
  Synthetic
uuguauacaacuauccu

SEQ ID NO: 768482 - RNA, 17 nt, Artificial Sequence
  Synthetic
ccuucccugaguauccu

SEQ ID NO: 768483 - RNA, 17 nt, Artificial Sequence
  Synthetic
auuuucauugguauccu

SEQ ID NO: 768484 - RNA, 17 nt, Artificial Sequence
  Synthetic
uuucucagauguauccu

SEQ ID NO: 768485 - RNA, 17 nt, Artificial Sequence
  Synthetic
cuggaggccauuauccu

SEQ ID NO: 768486 - RNA, 17 nt, Artificial Sequence
  Synthetic
aucauagcaguuauccu

SEQ ID NO: 768487 - RNA, 17 nt, Artificial Sequence
  Synthetic
caagaacccuuuauccu

SEQ ID NO: 768488 - RNA, 17 nt, Artificial Sequence
  Synthetic
ccuggcagaaaacuccu

SEQ ID NO: 768489 - RNA, 17 nt, Artificial Sequence
  Synthetic
ugcagccucaaacuccu

SEQ ID NO: 768490 - RNA, 17 nt, Artificial Sequence
  Synthetic
uucccuuucaaacuccu

SEQ ID NO: 768491 - RNA, 17 nt, Artificial Sequence
  Synthetic
ugcagccaccaacuccu

SEQ ID NO: 768492 - RNA, 17 nt, Artificial Sequence
  Synthetic
uguaaccuccaacuccu

SEQ ID NO: 768493 - RNA, 17 nt, Artificial Sequence
  Synthetic
ugcagccucgaacuccu

SEQ ID NO: 768494 - RNA, 17 nt, Artificial Sequence
  Synthetic
acuggucucgaacuccu

SEQ ID NO: 768495 - RNA, 17 nt, Artificial Sequence
  Synthetic
ccuugaacugaacuccu

SEQ ID NO: 768496 - RNA, 17 nt, Artificial Sequence
  Synthetic
ugcagccuugaacuccu

SEQ ID NO: 768497 - RNA, 17 nt, Artificial Sequence
  Synthetic
uauuaauuuuaacuccu

SEQ ID NO: 768498 - RNA, 17 nt, Artificial Sequence
  Synthetic
aguaguuuuacacuccu

SEQ ID NO: 768499 - RNA, 17 nt, Artificial Sequence
  Synthetic
aaguccuccccacuccu

SEQ ID NO: 768500 - RNA, 17 nt, Artificial Sequence
  Synthetic
ccagcaaccucacuccu

SEQ ID NO: 768501 - RNA, 17 nt, Artificial Sequence
  Synthetic
ccacucuggucacuccu

SEQ ID NO: 768502 - RNA, 17 nt, Artificial Sequence
  Synthetic
uuccuggguucacuccu

SEQ ID NO: 768503 - RNA, 17 nt, Artificial Sequence
  Synthetic
agauuuugcagacuccu

SEQ ID NO: 768504 - RNA, 17 nt, Artificial Sequence
  Synthetic
uuuggacuuggacuccu

SEQ ID NO: 768505 - RNA, 17 nt, Artificial Sequence
  Synthetic
acuguuucuauacuccu

SEQ ID NO: 768506 - RNA, 17 nt, Artificial Sequence
  Synthetic
uaucugugccuacuccu

SEQ ID NO: 768507 - RNA, 17 nt, Artificial Sequence
  Synthetic
auagaauugcuacuccu

SEQ ID NO: 768508 - RNA, 17 nt, Artificial Sequence
  Synthetic
aauuuuaacaaccuccu

SEQ ID NO: 768509 - RNA, 17 nt, Artificial Sequence
  Synthetic
agaaugcccaaccuccu

SEQ ID NO: 768510 - RNA, 17 nt, Artificial Sequence
  Synthetic
auauuggucaaccuccu

SEQ ID NO: 768511 - RNA, 17 nt, Artificial Sequence
  Synthetic
ugauuuucuaaccuccu

SEQ ID NO: 768512 - RNA, 17 nt, Artificial Sequence
  Synthetic
auaaauucccaccuccu

SEQ ID NO: 768513 - RNA, 17 nt, Artificial Sequence
  Synthetic
agcaaccuccaccuccu

SEQ ID NO: 768514 - RNA, 17 nt, Artificial Sequence
  Synthetic
cgcaaccuccaccuccu

SEQ ID NO: 768515 - RNA, 17 nt, Artificial Sequence
  Synthetic
ugcaaccuccaccuccu

SEQ ID NO: 768516 - RNA, 17 nt, Artificial Sequence
  Synthetic
cgcaagcuccaccuccu

SEQ ID NO: 768517 - RNA, 17 nt, Artificial Sequence
  Synthetic
ugcaagcuccaccuccu

SEQ ID NO: 768518 - RNA, 17 nt, Artificial Sequence
  Synthetic
cuuuacuagcaccuccu

SEQ ID NO: 768519 - RNA, 17 nt, Artificial Sequence
  Synthetic
cauguaagucaccuccu

SEQ ID NO: 768520 - RNA, 17 nt, Artificial Sequence
  Synthetic
ugccgccuugaccuccu

SEQ ID NO: 768521 - RNA, 17 nt, Artificial Sequence
  Synthetic
ugcaacuucuaccuccu

SEQ ID NO: 768522 - RNA, 17 nt, Artificial Sequence
  Synthetic
accucugucccccuccu

SEQ ID NO: 768523 - RNA, 17 nt, Artificial Sequence
  Synthetic
auuagugguccccuccu

SEQ ID NO: 768524 - RNA, 17 nt, Artificial Sequence
  Synthetic
uuucauaaugcccuccu

SEQ ID NO: 768525 - RNA, 17 nt, Artificial Sequence
  Synthetic
aaguggccugcccuccu

SEQ ID NO: 768526 - RNA, 17 nt, Artificial Sequence
  Synthetic
ugcaaccucucccuccu

SEQ ID NO: 768527 - RNA, 17 nt, Artificial Sequence
  Synthetic
uuucaucuuucccuccu

SEQ ID NO: 768528 - RNA, 17 nt, Artificial Sequence
  Synthetic
ugguaccucagccuccu

SEQ ID NO: 768529 - RNA, 17 nt, Artificial Sequence
  Synthetic
agcaaccuccgccuccu

SEQ ID NO: 768530 - RNA, 17 nt, Artificial Sequence
  Synthetic
ugcaaccuccgccuccu

SEQ ID NO: 768531 - RNA, 17 nt, Artificial Sequence
  Synthetic
ugcagccuccgccuccu

SEQ ID NO: 768532 - RNA, 17 nt, Artificial Sequence
  Synthetic
ugcaagcuccgccuccu

SEQ ID NO: 768533 - RNA, 17 nt, Artificial Sequence
  Synthetic
ucugccuuaugccuccu

SEQ ID NO: 768534 - RNA, 17 nt, Artificial Sequence
  Synthetic
agcaaccucugccuccu

SEQ ID NO: 768535 - RNA, 17 nt, Artificial Sequence
  Synthetic
ugcaaccucugccuccu

SEQ ID NO: 768536 - RNA, 17 nt, Artificial Sequence
  Synthetic
ugcagccucugccuccu

SEQ ID NO: 768537 - RNA, 17 nt, Artificial Sequence
  Synthetic
acagaggggugccuccu

SEQ ID NO: 768538 - RNA, 17 nt, Artificial Sequence
  Synthetic
ugcaaccuuugccuccu

SEQ ID NO: 768539 - RNA, 17 nt, Artificial Sequence
  Synthetic
acuucagagauccuccu

SEQ ID NO: 768540 - RNA, 17 nt, Artificial Sequence
  Synthetic
caaaacuuuauccuccu

SEQ ID NO: 768541 - RNA, 17 nt, Artificial Sequence
  Synthetic
auaugcauaaagcuccu

SEQ ID NO: 768542 - RNA, 17 nt, Artificial Sequence
  Synthetic
uauggaaaagagcuccu

SEQ ID NO: 768543 - RNA, 17 nt, Artificial Sequence
  Synthetic
cuucggcaagcgcuccu

SEQ ID NO: 768544 - RNA, 17 nt, Artificial Sequence
  Synthetic
uuaaauucugcgcuccu

SEQ ID NO: 768545 - RNA, 17 nt, Artificial Sequence
  Synthetic
uacauuuagaggcuccu

SEQ ID NO: 768546 - RNA, 17 nt, Artificial Sequence
  Synthetic
aaaaucugugggcuccu

SEQ ID NO: 768547 - RNA, 17 nt, Artificial Sequence
  Synthetic
aaguuaaaauggcuccu

SEQ ID NO: 768548 - RNA, 17 nt, Artificial Sequence
  Synthetic
uugauuuuauggcuccu

SEQ ID NO: 768549 - RNA, 17 nt, Artificial Sequence
  Synthetic
uauagccuaaugcuccu

SEQ ID NO: 768550 - RNA, 17 nt, Artificial Sequence
  Synthetic
cuacauuuaaugcuccu

SEQ ID NO: 768551 - RNA, 17 nt, Artificial Sequence
  Synthetic
acuccuacacugcuccu

SEQ ID NO: 768552 - RNA, 17 nt, Artificial Sequence
  Synthetic
uacagcauauugcuccu

SEQ ID NO: 768553 - RNA, 17 nt, Artificial Sequence
  Synthetic
uauagccuauugcuccu

SEQ ID NO: 768554 - RNA, 17 nt, Artificial Sequence
  Synthetic
cuccaucagaaucuccu

SEQ ID NO: 768555 - RNA, 17 nt, Artificial Sequence
  Synthetic
uuuguugaacaucuccu

SEQ ID NO: 768556 - RNA, 17 nt, Artificial Sequence
  Synthetic
aacugcucacaucuccu

SEQ ID NO: 768557 - RNA, 17 nt, Artificial Sequence
  Synthetic
ugcaacuuccaucuccu

SEQ ID NO: 768558 - RNA, 17 nt, Artificial Sequence
  Synthetic
agcccagcucaucuccu

SEQ ID NO: 768559 - RNA, 17 nt, Artificial Sequence
  Synthetic
aggcuuuuucaucuccu

SEQ ID NO: 768560 - RNA, 17 nt, Artificial Sequence
  Synthetic
uucauuuaagaucuccu

SEQ ID NO: 768561 - RNA, 17 nt, Artificial Sequence
  Synthetic
cucuccaggacucuccu

SEQ ID NO: 768562 - RNA, 17 nt, Artificial Sequence
  Synthetic
aaauggcucccucuccu

SEQ ID NO: 768563 - RNA, 17 nt, Artificial Sequence
  Synthetic
uuugcuaguccucuccu

SEQ ID NO: 768564 - RNA, 17 nt, Artificial Sequence
  Synthetic
accucucuuccucuccu

SEQ ID NO: 768565 - RNA, 17 nt, Artificial Sequence
  Synthetic
aucucucuuccucuccu

SEQ ID NO: 768566 - RNA, 17 nt, Artificial Sequence
  Synthetic
uauaagcccucucuccu

SEQ ID NO: 768567 - RNA, 17 nt, Artificial Sequence
  Synthetic
ugauuaucuucucuccu

SEQ ID NO: 768568 - RNA, 17 nt, Artificial Sequence
  Synthetic
agaaaggccagucuccu

SEQ ID NO: 768569 - RNA, 17 nt, Artificial Sequence
  Synthetic
ugaucugucagucuccu

SEQ ID NO: 768570 - RNA, 17 nt, Artificial Sequence
  Synthetic
uuaaaauugagucuccu

SEQ ID NO: 768571 - RNA, 17 nt, Artificial Sequence
  Synthetic
auauuuucuagucuccu

SEQ ID NO: 768572 - RNA, 17 nt, Artificial Sequence
  Synthetic
ugucuauuaggucuccu

SEQ ID NO: 768573 - RNA, 17 nt, Artificial Sequence
  Synthetic
uugagacagggucuccu

SEQ ID NO: 768574 - RNA, 17 nt, Artificial Sequence
  Synthetic
ugcaaccucugucuccu

SEQ ID NO: 768575 - RNA, 17 nt, Artificial Sequence
  Synthetic
ugaaugagaauucuccu

SEQ ID NO: 768576 - RNA, 17 nt, Artificial Sequence
  Synthetic
ccuuuucauauucuccu

SEQ ID NO: 768577 - RNA, 17 nt, Artificial Sequence
  Synthetic
uuuauucuacuucuccu

SEQ ID NO: 768578 - RNA, 17 nt, Artificial Sequence
  Synthetic
ucaguuaaauuucuccu

SEQ ID NO: 768579 - RNA, 17 nt, Artificial Sequence
  Synthetic
cuaucuugcuuucuccu

SEQ ID NO: 768580 - RNA, 17 nt, Artificial Sequence
  Synthetic
uuuuaaauguuucuccu

SEQ ID NO: 768581 - RNA, 17 nt, Artificial Sequence
  Synthetic
cagcucucuuuucuccu

SEQ ID NO: 768582 - RNA, 17 nt, Artificial Sequence
  Synthetic
ugguaaauaaaaguccu

SEQ ID NO: 768583 - RNA, 17 nt, Artificial Sequence
  Synthetic
uggacucccaaaguccu

SEQ ID NO: 768584 - RNA, 17 nt, Artificial Sequence
  Synthetic
cggccucccaaaguccu

SEQ ID NO: 768585 - RNA, 17 nt, Artificial Sequence
  Synthetic
uggccucccaaaguccu

SEQ ID NO: 768586 - RNA, 17 nt, Artificial Sequence
  Synthetic
aucuggggggaaguccu

SEQ ID NO: 768587 - RNA, 17 nt, Artificial Sequence
  Synthetic
ugguggaucuaaguccu

SEQ ID NO: 768588 - RNA, 17 nt, Artificial Sequence
  Synthetic
cauuuuauaacaguccu

SEQ ID NO: 768589 - RNA, 17 nt, Artificial Sequence
  Synthetic
aguuggaauacaguccu

SEQ ID NO: 768590 - RNA, 17 nt, Artificial Sequence
  Synthetic
uauuuuaugccaguccu

SEQ ID NO: 768591 - RNA, 17 nt, Artificial Sequence
  Synthetic
aauagguuggcaguccu

SEQ ID NO: 768592 - RNA, 17 nt, Artificial Sequence
  Synthetic
auccauucugcaguccu

SEQ ID NO: 768593 - RNA, 17 nt, Artificial Sequence
  Synthetic
ccucagugcucaguccu

SEQ ID NO: 768594 - RNA, 17 nt, Artificial Sequence
  Synthetic
aauuuguugagaguccu

SEQ ID NO: 768595 - RNA, 17 nt, Artificial Sequence
  Synthetic
uuauuuaaaauaguccu

SEQ ID NO: 768596 - RNA, 17 nt, Artificial Sequence
  Synthetic
uaacccccacacguccu

SEQ ID NO: 768597 - RNA, 17 nt, Artificial Sequence
  Synthetic
uuucuuucaaugguccu

SEQ ID NO: 768598 - RNA, 17 nt, Artificial Sequence
  Synthetic
agagaguuaaugguccu

SEQ ID NO: 768599 - RNA, 17 nt, Artificial Sequence
  Synthetic
aucuggggccugguccu

SEQ ID NO: 768600 - RNA, 17 nt, Artificial Sequence
  Synthetic
ugaauccgucugguccu

SEQ ID NO: 768601 - RNA, 17 nt, Artificial Sequence
  Synthetic
ugaugacauuugguccu

SEQ ID NO: 768602 - RNA, 17 nt, Artificial Sequence
  Synthetic
cuacugcauuugguccu

SEQ ID NO: 768603 - RNA, 17 nt, Artificial Sequence
  Synthetic
augcacaaaaauguccu

SEQ ID NO: 768604 - RNA, 17 nt, Artificial Sequence
  Synthetic
cuauaugugaauguccu

SEQ ID NO: 768605 - RNA, 17 nt, Artificial Sequence
  Synthetic
aaauguuauaauguccu

SEQ ID NO: 768606 - RNA, 17 nt, Artificial Sequence
  Synthetic
cugccuacugauguccu

SEQ ID NO: 768607 - RNA, 17 nt, Artificial Sequence
  Synthetic
agggaaaaauauguccu

SEQ ID NO: 768608 - RNA, 17 nt, Artificial Sequence
  Synthetic
caaacuguaacuguccu

SEQ ID NO: 768609 - RNA, 17 nt, Artificial Sequence
  Synthetic
aaauaauugucuguccu

SEQ ID NO: 768610 - RNA, 17 nt, Artificial Sequence
  Synthetic
uuaaacuucaguguccu

SEQ ID NO: 768611 - RNA, 17 nt, Artificial Sequence
  Synthetic
ugcuagauuuguguccu

SEQ ID NO: 768612 - RNA, 17 nt, Artificial Sequence
  Synthetic
cuuucuauucuuguccu

SEQ ID NO: 768613 - RNA, 17 nt, Artificial Sequence
  Synthetic
aacccaccauuuguccu

SEQ ID NO: 768614 - RNA, 17 nt, Artificial Sequence
  Synthetic
uuugcauacaaauuccu

SEQ ID NO: 768615 - RNA, 17 nt, Artificial Sequence
  Synthetic
aguuguuccaaauuccu

SEQ ID NO: 768616 - RNA, 17 nt, Artificial Sequence
  Synthetic
cuacaaaauaaauuccu

SEQ ID NO: 768617 - RNA, 17 nt, Artificial Sequence
  Synthetic
auucuuguacaauuccu

SEQ ID NO: 768618 - RNA, 17 nt, Artificial Sequence
  Synthetic
uugcaguagcaauuccu

SEQ ID NO: 768619 - RNA, 17 nt, Artificial Sequence
  Synthetic
agcugaguucaauuccu

SEQ ID NO: 768620 - RNA, 17 nt, Artificial Sequence
  Synthetic
ugguuaaacgaauuccu

SEQ ID NO: 768621 - RNA, 17 nt, Artificial Sequence
  Synthetic
aagcagauuuaauuccu

SEQ ID NO: 768622 - RNA, 17 nt, Artificial Sequence
  Synthetic
ugccaugaaacauuccu

SEQ ID NO: 768623 - RNA, 17 nt, Artificial Sequence
  Synthetic
agcaccagcacauuccu

SEQ ID NO: 768624 - RNA, 17 nt, Artificial Sequence
  Synthetic
ucuuagaguacauuccu

SEQ ID NO: 768625 - RNA, 17 nt, Artificial Sequence
  Synthetic
ucagaaagggcauuccu

SEQ ID NO: 768626 - RNA, 17 nt, Artificial Sequence
  Synthetic
uuguaaguugcauuccu

SEQ ID NO: 768627 - RNA, 17 nt, Artificial Sequence
  Synthetic
uuucuauucucauuccu

SEQ ID NO: 768628 - RNA, 17 nt, Artificial Sequence
  Synthetic
auccacuguucauuccu

SEQ ID NO: 768629 - RNA, 17 nt, Artificial Sequence
  Synthetic
uaauaaugcagauuccu

SEQ ID NO: 768630 - RNA, 17 nt, Artificial Sequence
  Synthetic
ucagagaugagauuccu

SEQ ID NO: 768631 - RNA, 17 nt, Artificial Sequence
  Synthetic
cacuuugaaggauuccu

SEQ ID NO: 768632 - RNA, 17 nt, Artificial Sequence
  Synthetic
uuguaaguuggauuccu

SEQ ID NO: 768633 - RNA, 17 nt, Artificial Sequence
  Synthetic
caucuagguugauuccu

SEQ ID NO: 768634 - RNA, 17 nt, Artificial Sequence
  Synthetic
uaacagcuaauauuccu

SEQ ID NO: 768635 - RNA, 17 nt, Artificial Sequence
  Synthetic
aucaaauccauauuccu

SEQ ID NO: 768636 - RNA, 17 nt, Artificial Sequence
  Synthetic
uacacaaguauauuccu

SEQ ID NO: 768637 - RNA, 17 nt, Artificial Sequence
  Synthetic
uuugcuucucuauuccu

SEQ ID NO: 768638 - RNA, 17 nt, Artificial Sequence
  Synthetic
uugcaaguuguauuccu

SEQ ID NO: 768639 - RNA, 17 nt, Artificial Sequence
  Synthetic
uucuaaguuguauuccu

SEQ ID NO: 768640 - RNA, 17 nt, Artificial Sequence
  Synthetic
uuguaaguuguauuccu

SEQ ID NO: 768641 - RNA, 17 nt, Artificial Sequence
  Synthetic
aauguguuauuauuccu

SEQ ID NO: 768642 - RNA, 17 nt, Artificial Sequence
  Synthetic
uauuauuuauuauuccu

SEQ ID NO: 768643 - RNA, 17 nt, Artificial Sequence
  Synthetic
uuuguugagcacuuccu

SEQ ID NO: 768644 - RNA, 17 nt, Artificial Sequence
  Synthetic
uauugcauucacuuccu

SEQ ID NO: 768645 - RNA, 17 nt, Artificial Sequence
  Synthetic
ugcagccucgacuuccu

SEQ ID NO: 768646 - RNA, 17 nt, Artificial Sequence
  Synthetic
uuucuucaugacuuccu

SEQ ID NO: 768647 - RNA, 17 nt, Artificial Sequence
  Synthetic
acagcccuugacuuccu

SEQ ID NO: 768648 - RNA, 17 nt, Artificial Sequence
  Synthetic
uuugcuguauacuuccu

SEQ ID NO: 768649 - RNA, 17 nt, Artificial Sequence
  Synthetic
uccuacugguacuuccu

SEQ ID NO: 768650 - RNA, 17 nt, Artificial Sequence
  Synthetic
aucucuugcaccuuccu

SEQ ID NO: 768651 - RNA, 17 nt, Artificial Sequence
  Synthetic
cagacaucacccuuccu

SEQ ID NO: 768652 - RNA, 17 nt, Artificial Sequence
  Synthetic
cauaaguuacccuuccu

SEQ ID NO: 768653 - RNA, 17 nt, Artificial Sequence
  Synthetic
aggcagagagccuuccu

SEQ ID NO: 768654 - RNA, 17 nt, Artificial Sequence
  Synthetic
uacauagcugccuuccu

SEQ ID NO: 768655 - RNA, 17 nt, Artificial Sequence
  Synthetic
aaccauuuugccuuccu

SEQ ID NO: 768656 - RNA, 17 nt, Artificial Sequence
  Synthetic
aagcaguccuccuuccu

SEQ ID NO: 768657 - RNA, 17 nt, Artificial Sequence
  Synthetic
aagcaauucuccuuccu

SEQ ID NO: 768658 - RNA, 17 nt, Artificial Sequence
  Synthetic
uauagcccuuccuuccu

SEQ ID NO: 768659 - RNA, 17 nt, Artificial Sequence
  Synthetic
uccuaccucagcuuccu

SEQ ID NO: 768660 - RNA, 17 nt, Artificial Sequence
  Synthetic
ccaacuauuagcuuccu

SEQ ID NO: 768661 - RNA, 17 nt, Artificial Sequence
  Synthetic
ugcaaccuccgcuuccu

SEQ ID NO: 768662 - RNA, 17 nt, Artificial Sequence
  Synthetic
cugagguaaggcuuccu

SEQ ID NO: 768663 - RNA, 17 nt, Artificial Sequence
  Synthetic
ccucagagaugcuuccu

SEQ ID NO: 768664 - RNA, 17 nt, Artificial Sequence
  Synthetic
uuucauucuugcuuccu

SEQ ID NO: 768665 - RNA, 17 nt, Artificial Sequence
  Synthetic
aauuuuaugaucuuccu

SEQ ID NO: 768666 - RNA, 17 nt, Artificial Sequence
  Synthetic
uuugaagcccucuuccu

SEQ ID NO: 768667 - RNA, 17 nt, Artificial Sequence
  Synthetic
aaucuguuccucuuccu

SEQ ID NO: 768668 - RNA, 17 nt, Artificial Sequence
  Synthetic
cuucugguucucuuccu

SEQ ID NO: 768669 - RNA, 17 nt, Artificial Sequence
  Synthetic
uccugcuuucucuuccu

SEQ ID NO: 768670 - RNA, 17 nt, Artificial Sequence
  Synthetic
aagggcuaagucuuccu

SEQ ID NO: 768671 - RNA, 17 nt, Artificial Sequence
  Synthetic
auuuaaauuuucuuccu

SEQ ID NO: 768672 - RNA, 17 nt, Artificial Sequence
  Synthetic
aucucugaaaaguuccu

SEQ ID NO: 768673 - RNA, 17 nt, Artificial Sequence
  Synthetic
ugcuuccuccaguuccu

SEQ ID NO: 768674 - RNA, 17 nt, Artificial Sequence
  Synthetic
aaggucccagaguuccu

SEQ ID NO: 768675 - RNA, 17 nt, Artificial Sequence
  Synthetic
cauauucacagguuccu

SEQ ID NO: 768676 - RNA, 17 nt, Artificial Sequence
  Synthetic
ugcauucaaauguuccu

SEQ ID NO: 768677 - RNA, 17 nt, Artificial Sequence
  Synthetic
acuuccuccauguuccu

SEQ ID NO: 768678 - RNA, 17 nt, Artificial Sequence
  Synthetic
ugaauccaucuguuccu

SEQ ID NO: 768679 - RNA, 17 nt, Artificial Sequence
  Synthetic
uuugcgcaauuguuccu

SEQ ID NO: 768680 - RNA, 17 nt, Artificial Sequence
  Synthetic
agagacagauuguuccu

SEQ ID NO: 768681 - RNA, 17 nt, Artificial Sequence
  Synthetic
uccuaaccaaauuuccu

SEQ ID NO: 768682 - RNA, 17 nt, Artificial Sequence
  Synthetic
aaaugacagaauuuccu

SEQ ID NO: 768683 - RNA, 17 nt, Artificial Sequence
  Synthetic
auuaaaaauaauuuccu

SEQ ID NO: 768684 - RNA, 17 nt, Artificial Sequence
  Synthetic
auuauaauuaauuuccu

SEQ ID NO: 768685 - RNA, 17 nt, Artificial Sequence
  Synthetic
aauuuuauuaauuuccu

SEQ ID NO: 768686 - RNA, 17 nt, Artificial Sequence
  Synthetic
agucuaccagauuuccu

SEQ ID NO: 768687 - RNA, 17 nt, Artificial Sequence
  Synthetic
auuggaaaauauuuccu

SEQ ID NO: 768688 - RNA, 17 nt, Artificial Sequence
  Synthetic
aguucauucuauuuccu

SEQ ID NO: 768689 - RNA, 17 nt, Artificial Sequence
  Synthetic
ccagaauaguauuuccu

SEQ ID NO: 768690 - RNA, 17 nt, Artificial Sequence
  Synthetic
cgauacuuuuauuuccu

SEQ ID NO: 768691 - RNA, 17 nt, Artificial Sequence
  Synthetic
ucuucagcaccuuuccu

SEQ ID NO: 768692 - RNA, 17 nt, Artificial Sequence
  Synthetic
auagauacuccuuuccu

SEQ ID NO: 768693 - RNA, 17 nt, Artificial Sequence
  Synthetic
acaucauuggcuuuccu

SEQ ID NO: 768694 - RNA, 17 nt, Artificial Sequence
  Synthetic
ugcuuaagugcuuuccu

SEQ ID NO: 768695 - RNA, 17 nt, Artificial Sequence
  Synthetic
auuucuacuucuuuccu

SEQ ID NO: 768696 - RNA, 17 nt, Artificial Sequence
  Synthetic
cuucucucuucuuuccu

SEQ ID NO: 768697 - RNA, 17 nt, Artificial Sequence
  Synthetic
auuucuagaaguuuccu

SEQ ID NO: 768698 - RNA, 17 nt, Artificial Sequence
  Synthetic
uuuauauucaguuuccu

SEQ ID NO: 768699 - RNA, 17 nt, Artificial Sequence
  Synthetic
ugcuauuucaguuuccu

SEQ ID NO: 768700 - RNA, 17 nt, Artificial Sequence
  Synthetic
aagguuuucaguuuccu

SEQ ID NO: 768701 - RNA, 17 nt, Artificial Sequence
  Synthetic
uucuguauucguuuccu

SEQ ID NO: 768702 - RNA, 17 nt, Artificial Sequence
  Synthetic
aggcaaaaugguuuccu

SEQ ID NO: 768703 - RNA, 17 nt, Artificial Sequence
  Synthetic
cuguaucaugguuuccu

SEQ ID NO: 768704 - RNA, 17 nt, Artificial Sequence
  Synthetic
aauacccuugguuuccu

SEQ ID NO: 768705 - RNA, 17 nt, Artificial Sequence
  Synthetic
ccacagcacuguuuccu

SEQ ID NO: 768706 - RNA, 17 nt, Artificial Sequence
  Synthetic
ucccuacaguguuuccu

SEQ ID NO: 768707 - RNA, 17 nt, Artificial Sequence
  Synthetic
ccagagugguguuuccu

SEQ ID NO: 768708 - RNA, 17 nt, Artificial Sequence
  Synthetic
uauguauuuuguuuccu

SEQ ID NO: 768709 - RNA, 17 nt, Artificial Sequence
  Synthetic
ucauuuggaauuuuccu

SEQ ID NO: 768710 - RNA, 17 nt, Artificial Sequence
  Synthetic
cuucuaugaauuuuccu

SEQ ID NO: 768711 - RNA, 17 nt, Artificial Sequence
  Synthetic
aaguaaaacauuuuccu

SEQ ID NO: 768712 - RNA, 17 nt, Artificial Sequence
  Synthetic
aacuuugccauuuuccu

SEQ ID NO: 768713 - RNA, 17 nt, Artificial Sequence
  Synthetic
uuguggcuacuuuuccu

SEQ ID NO: 768714 - RNA, 17 nt, Artificial Sequence
  Synthetic
uuugaagcccuuuuccu

SEQ ID NO: 768715 - RNA, 17 nt, Artificial Sequence
  Synthetic
cacucauuucuuuuccu

SEQ ID NO: 768716 - RNA, 17 nt, Artificial Sequence
  Synthetic
uugaauauaguuuuccu

SEQ ID NO: 768717 - RNA, 17 nt, Artificial Sequence
  Synthetic
cugaaagaauuuuuccu

SEQ ID NO: 768718 - RNA, 17 nt, Artificial Sequence
  Synthetic
aaaccuaccuuuuuccu

SEQ ID NO: 768719 - RNA, 17 nt, Artificial Sequence
  Synthetic
cuucuaggcuuuuuccu

SEQ ID NO: 768720 - RNA, 17 nt, Artificial Sequence
  Synthetic
ugaugugucuuuuuccu

SEQ ID NO: 768721 - RNA, 17 nt, Artificial Sequence
  Synthetic
auacuauuguuuuuccu

SEQ ID NO: 768722 - RNA, 17 nt, Artificial Sequence
  Synthetic
aauguauuuuuuuuccu

SEQ ID NO: 768723 - RNA, 17 nt, Artificial Sequence
  Synthetic
cuaacucccaaaaagcu

SEQ ID NO: 768724 - RNA, 17 nt, Artificial Sequence
  Synthetic
uuugcucucaaaaagcu

SEQ ID NO: 768725 - RNA, 17 nt, Artificial Sequence
  Synthetic
aggcagcugaaaaagcu

SEQ ID NO: 768726 - RNA, 17 nt, Artificial Sequence
  Synthetic
aggcagaauaaaaagcu

SEQ ID NO: 768727 - RNA, 17 nt, Artificial Sequence
  Synthetic
accaauggacaaaagcu

SEQ ID NO: 768728 - RNA, 17 nt, Artificial Sequence
  Synthetic
uuuguccuccaaaagcu

SEQ ID NO: 768729 - RNA, 17 nt, Artificial Sequence
  Synthetic
cccaguaaagaaaagcu

SEQ ID NO: 768730 - RNA, 17 nt, Artificial Sequence
  Synthetic
uagugcuaugaaaagcu

SEQ ID NO: 768731 - RNA, 17 nt, Artificial Sequence
  Synthetic
caaaauaauacaaagcu

SEQ ID NO: 768732 - RNA, 17 nt, Artificial Sequence
  Synthetic
uaaccuuguacaaagcu

SEQ ID NO: 768733 - RNA, 17 nt, Artificial Sequence
  Synthetic
uggcaguugccaaagcu

SEQ ID NO: 768734 - RNA, 17 nt, Artificial Sequence
  Synthetic
aacacacacgcaaagcu

SEQ ID NO: 768735 - RNA, 17 nt, Artificial Sequence
  Synthetic
caguuuuaaucaaagcu

SEQ ID NO: 768736 - RNA, 17 nt, Artificial Sequence
  Synthetic
acauuaucaucaaagcu

SEQ ID NO: 768737 - RNA, 17 nt, Artificial Sequence
  Synthetic
aauaugauaucaaagcu

SEQ ID NO: 768738 - RNA, 17 nt, Artificial Sequence
  Synthetic
ugucuggguucaaagcu

SEQ ID NO: 768739 - RNA, 17 nt, Artificial Sequence
  Synthetic
uauacuucaauaaagcu

SEQ ID NO: 768740 - RNA, 17 nt, Artificial Sequence
  Synthetic
uauuguuuuauaaagcu

SEQ ID NO: 768741 - RNA, 17 nt, Artificial Sequence
  Synthetic
uuguuaugacuaaagcu

SEQ ID NO: 768742 - RNA, 17 nt, Artificial Sequence
  Synthetic
caaaaguagaacaagcu

SEQ ID NO: 768743 - RNA, 17 nt, Artificial Sequence
  Synthetic
cugaagauuaacaagcu

SEQ ID NO: 768744 - RNA, 17 nt, Artificial Sequence
  Synthetic
acaaauuaccacaagcu

SEQ ID NO: 768745 - RNA, 17 nt, Artificial Sequence
  Synthetic
ugcuuacaugccaagcu

SEQ ID NO: 768746 - RNA, 17 nt, Artificial Sequence
  Synthetic
auuguaaaagucaagcu

SEQ ID NO: 768747 - RNA, 17 nt, Artificial Sequence
  Synthetic
uuauuuauuuucaagcu

SEQ ID NO: 768748 - RNA, 17 nt, Artificial Sequence
  Synthetic
uggaauuggaagaagcu

SEQ ID NO: 768749 - RNA, 17 nt, Artificial Sequence
  Synthetic
uaucauugggagaagcu

SEQ ID NO: 768750 - RNA, 17 nt, Artificial Sequence
  Synthetic
ucagccucugagaagcu

SEQ ID NO: 768751 - RNA, 17 nt, Artificial Sequence
  Synthetic
aaagauuccuagaagcu

SEQ ID NO: 768752 - RNA, 17 nt, Artificial Sequence
  Synthetic
aucagguaguagaagcu

SEQ ID NO: 768753 - RNA, 17 nt, Artificial Sequence
  Synthetic
aguugagaagggaagcu

SEQ ID NO: 768754 - RNA, 17 nt, Artificial Sequence
  Synthetic
uaacuuucagggaagcu

SEQ ID NO: 768755 - RNA, 17 nt, Artificial Sequence
  Synthetic
cagcacuuugggaagcu

SEQ ID NO: 768756 - RNA, 17 nt, Artificial Sequence
  Synthetic
agagcaggcuggaagcu

SEQ ID NO: 768757 - RNA, 17 nt, Artificial Sequence
  Synthetic
aagagaggcuggaagcu

SEQ ID NO: 768758 - RNA, 17 nt, Artificial Sequence
  Synthetic
ucacaaaucuggaagcu

SEQ ID NO: 768759 - RNA, 17 nt, Artificial Sequence
  Synthetic
aguucugauuggaagcu

SEQ ID NO: 768760 - RNA, 17 nt, Artificial Sequence
  Synthetic
cuucuagaaaugaagcu

SEQ ID NO: 768761 - RNA, 17 nt, Artificial Sequence
  Synthetic
auugggaguaugaagcu

SEQ ID NO: 768762 - RNA, 17 nt, Artificial Sequence
  Synthetic
uaaaaacugcugaagcu

SEQ ID NO: 768763 - RNA, 17 nt, Artificial Sequence
  Synthetic
accuucuccgugaagcu

SEQ ID NO: 768764 - RNA, 17 nt, Artificial Sequence
  Synthetic
uacugaaaaaauaagcu

SEQ ID NO: 768765 - RNA, 17 nt, Artificial Sequence
  Synthetic
augccuuacaauaagcu

SEQ ID NO: 768766 - RNA, 17 nt, Artificial Sequence
  Synthetic
cuuacauugcauaagcu

SEQ ID NO: 768767 - RNA, 17 nt, Artificial Sequence
  Synthetic
uuuccuaauuauaagcu

SEQ ID NO: 768768 - RNA, 17 nt, Artificial Sequence
  Synthetic
auaguagaugcuaagcu

SEQ ID NO: 768769 - RNA, 17 nt, Artificial Sequence
  Synthetic
acuuuuauuucuaagcu

SEQ ID NO: 768770 - RNA, 17 nt, Artificial Sequence
  Synthetic
uaagucaagaguaagcu

SEQ ID NO: 768771 - RNA, 17 nt, Artificial Sequence
  Synthetic
cauguuuaagguaagcu

SEQ ID NO: 768772 - RNA, 17 nt, Artificial Sequence
  Synthetic
agcagcaccgguaagcu

SEQ ID NO: 768773 - RNA, 17 nt, Artificial Sequence
  Synthetic
agaaaagaauguaagcu

SEQ ID NO: 768774 - RNA, 17 nt, Artificial Sequence
  Synthetic
auguagggaauuaagcu

SEQ ID NO: 768775 - RNA, 17 nt, Artificial Sequence
  Synthetic
cuagaaaugauuaagcu

SEQ ID NO: 768776 - RNA, 17 nt, Artificial Sequence
  Synthetic
uucuugaagcuuaagcu

SEQ ID NO: 768777 - RNA, 17 nt, Artificial Sequence
  Synthetic
uuaacaacaaaacagcu

SEQ ID NO: 768778 - RNA, 17 nt, Artificial Sequence
  Synthetic
cuauaauguaaacagcu

SEQ ID NO: 768779 - RNA, 17 nt, Artificial Sequence
  Synthetic
aauauucaaacacagcu

SEQ ID NO: 768780 - RNA, 17 nt, Artificial Sequence
  Synthetic
aauaccaacacacagcu

SEQ ID NO: 768781 - RNA, 17 nt, Artificial Sequence
  Synthetic
uacaguuccacacagcu

SEQ ID NO: 768782 - RNA, 17 nt, Artificial Sequence
  Synthetic
cucaaggucacacagcu

SEQ ID NO: 768783 - RNA, 17 nt, Artificial Sequence
  Synthetic
ucacaggugacacagcu

SEQ ID NO: 768784 - RNA, 17 nt, Artificial Sequence
  Synthetic
ccauaaccaccacagcu

SEQ ID NO: 768785 - RNA, 17 nt, Artificial Sequence
  Synthetic
uuggcuuccccacagcu

SEQ ID NO: 768786 - RNA, 17 nt, Artificial Sequence
  Synthetic
cuggaagaaucacagcu

SEQ ID NO: 768787 - RNA, 17 nt, Artificial Sequence
  Synthetic
cuucggugaagacagcu

SEQ ID NO: 768788 - RNA, 17 nt, Artificial Sequence
  Synthetic
auuaaauuaagacagcu

SEQ ID NO: 768789 - RNA, 17 nt, Artificial Sequence
  Synthetic
uugagcagcagacagcu

SEQ ID NO: 768790 - RNA, 17 nt, Artificial Sequence
  Synthetic
uuuauucacugacagcu

SEQ ID NO: 768791 - RNA, 17 nt, Artificial Sequence
  Synthetic
caaugguucugacagcu

SEQ ID NO: 768792 - RNA, 17 nt, Artificial Sequence
  Synthetic
aguguguugugacagcu

SEQ ID NO: 768793 - RNA, 17 nt, Artificial Sequence
  Synthetic
uggcuugggguacagcu

SEQ ID NO: 768794 - RNA, 17 nt, Artificial Sequence
  Synthetic
uuaaguuaauuacagcu

SEQ ID NO: 768795 - RNA, 17 nt, Artificial Sequence
  Synthetic
ugcuccccaaaccagcu

SEQ ID NO: 768796 - RNA, 17 nt, Artificial Sequence
  Synthetic
caauauuccaaccagcu

SEQ ID NO: 768797 - RNA, 17 nt, Artificial Sequence
  Synthetic
aacagcaggcaccagcu

SEQ ID NO: 768798 - RNA, 17 nt, Artificial Sequence
  Synthetic
cacuuuuuucaccagcu

SEQ ID NO: 768799 - RNA, 17 nt, Artificial Sequence
  Synthetic
auucuuagguaccagcu

SEQ ID NO: 768800 - RNA, 17 nt, Artificial Sequence
  Synthetic
caaacugcaacccagcu

SEQ ID NO: 768801 - RNA, 17 nt, Artificial Sequence
  Synthetic
aguccccacucccagcu

SEQ ID NO: 768802 - RNA, 17 nt, Artificial Sequence
  Synthetic
cuuuacuuaagccagcu

SEQ ID NO: 768803 - RNA, 17 nt, Artificial Sequence
  Synthetic
augaauaagagccagcu

SEQ ID NO: 768804 - RNA, 17 nt, Artificial Sequence
  Synthetic
uuuuuuaacauccagcu

SEQ ID NO: 768805 - RNA, 17 nt, Artificial Sequence
  Synthetic
aucgcggcacuccagcu

SEQ ID NO: 768806 - RNA, 17 nt, Artificial Sequence
  Synthetic
accacugcacuccagcu

SEQ ID NO: 768807 - RNA, 17 nt, Artificial Sequence
  Synthetic
accauugcacuccagcu

SEQ ID NO: 768808 - RNA, 17 nt, Artificial Sequence
  Synthetic
uuuguaggacuccagcu

SEQ ID NO: 768809 - RNA, 17 nt, Artificial Sequence
  Synthetic
uggucacugcuccagcu

SEQ ID NO: 768810 - RNA, 17 nt, Artificial Sequence
  Synthetic
caagaugucuuccagcu

SEQ ID NO: 768811 - RNA, 17 nt, Artificial Sequence
  Synthetic
accuuugcaaagcagcu

SEQ ID NO: 768812 - RNA, 17 nt, Artificial Sequence
  Synthetic
cggccucccaagcagcu

SEQ ID NO: 768813 - RNA, 17 nt, Artificial Sequence
  Synthetic
uagcacuaccagcagcu

SEQ ID NO: 768814 - RNA, 17 nt, Artificial Sequence
  Synthetic
cagccuccagagcagcu

SEQ ID NO: 768815 - RNA, 17 nt, Artificial Sequence
  Synthetic
cauccucccgagcagcu

SEQ ID NO: 768816 - RNA, 17 nt, Artificial Sequence
  Synthetic
uagccaugauagcagcu

SEQ ID NO: 768817 - RNA, 17 nt, Artificial Sequence
  Synthetic
cagcacuccuagcagcu

SEQ ID NO: 768818 - RNA, 17 nt, Artificial Sequence
  Synthetic
cggagcucaccgcagcu

SEQ ID NO: 768819 - RNA, 17 nt, Artificial Sequence
  Synthetic
acuggaaugaggcagcu

SEQ ID NO: 768820 - RNA, 17 nt, Artificial Sequence
  Synthetic
ucuccaaaauggcagcu

SEQ ID NO: 768821 - RNA, 17 nt, Artificial Sequence
  Synthetic
uccacaauauggcagcu

SEQ ID NO: 768822 - RNA, 17 nt, Artificial Sequence
  Synthetic
accacugcacugcagcu

SEQ ID NO: 768823 - RNA, 17 nt, Artificial Sequence
  Synthetic
agcccccuucugcagcu

SEQ ID NO: 768824 - RNA, 17 nt, Artificial Sequence
  Synthetic
aaauacaaaaaucagcu

SEQ ID NO: 768825 - RNA, 17 nt, Artificial Sequence
  Synthetic
aauuacaaaaaucagcu

SEQ ID NO: 768826 - RNA, 17 nt, Artificial Sequence
  Synthetic
cacacaauccaucagcu

SEQ ID NO: 768827 - RNA, 17 nt, Artificial Sequence
  Synthetic
ccaaucagaacucagcu

SEQ ID NO: 768828 - RNA, 17 nt, Artificial Sequence
  Synthetic
ccuugacugacucagcu

SEQ ID NO: 768829 - RNA, 17 nt, Artificial Sequence
  Synthetic
uucuugcucccucagcu

SEQ ID NO: 768830 - RNA, 17 nt, Artificial Sequence
  Synthetic
cuucuccugccucagcu

SEQ ID NO: 768831 - RNA, 17 nt, Artificial Sequence
  Synthetic
cugugauaugcucagcu

SEQ ID NO: 768832 - RNA, 17 nt, Artificial Sequence
  Synthetic
aaaacuguaucucagcu

SEQ ID NO: 768833 - RNA, 17 nt, Artificial Sequence
  Synthetic
aauggagaaagucagcu

SEQ ID NO: 768834 - RNA, 17 nt, Artificial Sequence
  Synthetic
ucaguauauagucagcu

SEQ ID NO: 768835 - RNA, 17 nt, Artificial Sequence
  Synthetic
uuuauguggcuucagcu

SEQ ID NO: 768836 - RNA, 17 nt, Artificial Sequence
  Synthetic
uaauuaguaguucagcu

SEQ ID NO: 768837 - RNA, 17 nt, Artificial Sequence
  Synthetic
auuccaaaauuucagcu

SEQ ID NO: 768838 - RNA, 17 nt, Artificial Sequence
  Synthetic
uucaugaauuuucagcu

SEQ ID NO: 768839 - RNA, 17 nt, Artificial Sequence
  Synthetic
agcuaaauuuuucagcu

SEQ ID NO: 768840 - RNA, 17 nt, Artificial Sequence
  Synthetic
cggccucacaaagagcu

SEQ ID NO: 768841 - RNA, 17 nt, Artificial Sequence
  Synthetic
uguucccccaaagagcu

SEQ ID NO: 768842 - RNA, 17 nt, Artificial Sequence
  Synthetic
aacagaggcaaagagcu

SEQ ID NO: 768843 - RNA, 17 nt, Artificial Sequence
  Synthetic
agauuggugaaagagcu

SEQ ID NO: 768844 - RNA, 17 nt, Artificial Sequence
  Synthetic
auuuaguuggaagagcu

SEQ ID NO: 768845 - RNA, 17 nt, Artificial Sequence
  Synthetic
agacacaguuaagagcu

SEQ ID NO: 768846 - RNA, 17 nt, Artificial Sequence
  Synthetic
aagcaaagaacagagcu

SEQ ID NO: 768847 - RNA, 17 nt, Artificial Sequence
  Synthetic
ucuauagcuacagagcu

SEQ ID NO: 768848 - RNA, 17 nt, Artificial Sequence
  Synthetic
ugauugaaaccagagcu

SEQ ID NO: 768849 - RNA, 17 nt, Artificial Sequence
  Synthetic
auaguauacccagagcu

SEQ ID NO: 768850 - RNA, 17 nt, Artificial Sequence
  Synthetic
aaagaaccagcagagcu

SEQ ID NO: 768851 - RNA, 17 nt, Artificial Sequence
  Synthetic
aguuaaguggcagagcu

SEQ ID NO: 768852 - RNA, 17 nt, Artificial Sequence
  Synthetic
uagaaaaagagagagcu

SEQ ID NO: 768853 - RNA, 17 nt, Artificial Sequence
  Synthetic
uuuuacccaugagagcu

SEQ ID NO: 768854 - RNA, 17 nt, Artificial Sequence
  Synthetic
aggaaagccugagagcu

SEQ ID NO: 768855 - RNA, 17 nt, Artificial Sequence
  Synthetic
uaaauaaagcuagagcu

SEQ ID NO: 768856 - RNA, 17 nt, Artificial Sequence
  Synthetic
ucugauucaguagagcu

SEQ ID NO: 768857 - RNA, 17 nt, Artificial Sequence
  Synthetic
uguggguuaguagagcu

SEQ ID NO: 768858 - RNA, 17 nt, Artificial Sequence
  Synthetic
aucaggcuuuuagagcu

SEQ ID NO: 768859 - RNA, 17 nt, Artificial Sequence
  Synthetic
aaaagauggaaggagcu

SEQ ID NO: 768860 - RNA, 17 nt, Artificial Sequence
  Synthetic
accucuugacaggagcu

SEQ ID NO: 768861 - RNA, 17 nt, Artificial Sequence
  Synthetic
uggucaguccaggagcu

SEQ ID NO: 768862 - RNA, 17 nt, Artificial Sequence
  Synthetic
aaaggggcaagggagcu

SEQ ID NO: 768863 - RNA, 17 nt, Artificial Sequence
  Synthetic
ugucugccuugggagcu

SEQ ID NO: 768864 - RNA, 17 nt, Artificial Sequence
  Synthetic
cccgccuuuugggagcu

SEQ ID NO: 768865 - RNA, 17 nt, Artificial Sequence
  Synthetic
cacauugugauggagcu

SEQ ID NO: 768866 - RNA, 17 nt, Artificial Sequence
  Synthetic
uucucugguauggagcu

SEQ ID NO: 768867 - RNA, 17 nt, Artificial Sequence
  Synthetic
ccagcuaaacuggagcu

SEQ ID NO: 768868 - RNA, 17 nt, Artificial Sequence
  Synthetic
acagggacacuggagcu

SEQ ID NO: 768869 - RNA, 17 nt, Artificial Sequence
  Synthetic
accaacacccuggagcu

SEQ ID NO: 768870 - RNA, 17 nt, Artificial Sequence
  Synthetic
ucaagagaucuggagcu

SEQ ID NO: 768871 - RNA, 17 nt, Artificial Sequence
  Synthetic
aaggcuacuguggagcu

SEQ ID NO: 768872 - RNA, 17 nt, Artificial Sequence
  Synthetic
auuuaggauuuggagcu

SEQ ID NO: 768873 - RNA, 17 nt, Artificial Sequence
  Synthetic
cccuuguagaaugagcu

SEQ ID NO: 768874 - RNA, 17 nt, Artificial Sequence
  Synthetic
auacggaaagaugagcu

SEQ ID NO: 768875 - RNA, 17 nt, Artificial Sequence
  Synthetic
cugggaagagaugagcu

SEQ ID NO: 768876 - RNA, 17 nt, Artificial Sequence
  Synthetic
ucccuaggagaugagcu

SEQ ID NO: 768877 - RNA, 17 nt, Artificial Sequence
  Synthetic
acauauaaauaugagcu

SEQ ID NO: 768878 - RNA, 17 nt, Artificial Sequence
  Synthetic
auuaacuacccugagcu

SEQ ID NO: 768879 - RNA, 17 nt, Artificial Sequence
  Synthetic
ugaggaaaagcugagcu

SEQ ID NO: 768880 - RNA, 17 nt, Artificial Sequence
  Synthetic
cuguugguuucugagcu

SEQ ID NO: 768881 - RNA, 17 nt, Artificial Sequence
  Synthetic
uugauaguaauugagcu

SEQ ID NO: 768882 - RNA, 17 nt, Artificial Sequence
  Synthetic
caagaaccgcuugagcu

SEQ ID NO: 768883 - RNA, 17 nt, Artificial Sequence
  Synthetic
uucacuacuuuugagcu

SEQ ID NO: 768884 - RNA, 17 nt, Artificial Sequence
  Synthetic
aaaaaaaaaaaauagcu

SEQ ID NO: 768885 - RNA, 17 nt, Artificial Sequence
  Synthetic
aauacaaaaaaauagcu

SEQ ID NO: 768886 - RNA, 17 nt, Artificial Sequence
  Synthetic
aaauacaaaaaauagcu

SEQ ID NO: 768887 - RNA, 17 nt, Artificial Sequence
  Synthetic
cagccucccaaauagcu

SEQ ID NO: 768888 - RNA, 17 nt, Artificial Sequence
  Synthetic
aaaaaaaagaaauagcu

SEQ ID NO: 768889 - RNA, 17 nt, Artificial Sequence
  Synthetic
ugauauuuacaauagcu

SEQ ID NO: 768890 - RNA, 17 nt, Artificial Sequence
  Synthetic
cagccuccugaauagcu

SEQ ID NO: 768891 - RNA, 17 nt, Artificial Sequence
  Synthetic
agcugcaaaacauagcu

SEQ ID NO: 768892 - RNA, 17 nt, Artificial Sequence
  Synthetic
aaaccauagccauagcu

SEQ ID NO: 768893 - RNA, 17 nt, Artificial Sequence
  Synthetic
ccaguaaugggauagcu

SEQ ID NO: 768894 - RNA, 17 nt, Artificial Sequence
  Synthetic
agcaacacaguauagcu

SEQ ID NO: 768895 - RNA, 17 nt, Artificial Sequence
  Synthetic
ucuaccaaaaacuagcu

SEQ ID NO: 768896 - RNA, 17 nt, Artificial Sequence
  Synthetic
uccaaaaaggacuagcu

SEQ ID NO: 768897 - RNA, 17 nt, Artificial Sequence
  Synthetic
cagagacaaagcuagcu

SEQ ID NO: 768898 - RNA, 17 nt, Artificial Sequence
  Synthetic
aacgccugcagcuagcu

SEQ ID NO: 768899 - RNA, 17 nt, Artificial Sequence
  Synthetic
ucucguuuuaucuagcu

SEQ ID NO: 768900 - RNA, 17 nt, Artificial Sequence
  Synthetic
ucucaagauuucuagcu

SEQ ID NO: 768901 - RNA, 17 nt, Artificial Sequence
  Synthetic
cuuauugauuucuagcu

SEQ ID NO: 768902 - RNA, 17 nt, Artificial Sequence
  Synthetic
caaccucccaaguagcu

SEQ ID NO: 768903 - RNA, 17 nt, Artificial Sequence
  Synthetic
cagccucccaaguagcu

SEQ ID NO: 768904 - RNA, 17 nt, Artificial Sequence
  Synthetic
uagccucccaaguagcu

SEQ ID NO: 768905 - RNA, 17 nt, Artificial Sequence
  Synthetic
cagcuucccaaguagcu

SEQ ID NO: 768906 - RNA, 17 nt, Artificial Sequence
  Synthetic
cagacugccaaguagcu

SEQ ID NO: 768907 - RNA, 17 nt, Artificial Sequence
  Synthetic
cagccuuccaaguagcu

SEQ ID NO: 768908 - RNA, 17 nt, Artificial Sequence
  Synthetic
augagucagaaguagcu

SEQ ID NO: 768909 - RNA, 17 nt, Artificial Sequence
  Synthetic
cagccuccuaaguagcu

SEQ ID NO: 768910 - RNA, 17 nt, Artificial Sequence
  Synthetic
cagccugcuaaguagcu

SEQ ID NO: 768911 - RNA, 17 nt, Artificial Sequence
  Synthetic
ucugucuuccaguagcu

SEQ ID NO: 768912 - RNA, 17 nt, Artificial Sequence
  Synthetic
cagccuccagaguagcu

SEQ ID NO: 768913 - RNA, 17 nt, Artificial Sequence
  Synthetic
cagccuaccgaguagcu

SEQ ID NO: 768914 - RNA, 17 nt, Artificial Sequence
  Synthetic
cagccucccgaguagcu

SEQ ID NO: 768915 - RNA, 17 nt, Artificial Sequence
  Synthetic
uagccucccgaguagcu

SEQ ID NO: 768916 - RNA, 17 nt, Artificial Sequence
  Synthetic
ccuccucccgaguagcu

SEQ ID NO: 768917 - RNA, 17 nt, Artificial Sequence
  Synthetic
caggcucccgaguagcu

SEQ ID NO: 768918 - RNA, 17 nt, Artificial Sequence
  Synthetic
cagcuucccgaguagcu

SEQ ID NO: 768919 - RNA, 17 nt, Artificial Sequence
  Synthetic
ucagccuccgaguagcu

SEQ ID NO: 768920 - RNA, 17 nt, Artificial Sequence
  Synthetic
cagccucucgaguagcu

SEQ ID NO: 768921 - RNA, 17 nt, Artificial Sequence
  Synthetic
cagccucaggaguagcu

SEQ ID NO: 768922 - RNA, 17 nt, Artificial Sequence
  Synthetic
cagccuccugaguagcu

SEQ ID NO: 768923 - RNA, 17 nt, Artificial Sequence
  Synthetic
uagccuccugaguagcu

SEQ ID NO: 768924 - RNA, 17 nt, Artificial Sequence
  Synthetic
caggcuccugaguagcu

SEQ ID NO: 768925 - RNA, 17 nt, Artificial Sequence
  Synthetic
cagcguccugaguagcu

SEQ ID NO: 768926 - RNA, 17 nt, Artificial Sequence
  Synthetic
cagccaucugaguagcu

SEQ ID NO: 768927 - RNA, 17 nt, Artificial Sequence
  Synthetic
cagccucuugaguagcu

SEQ ID NO: 768928 - RNA, 17 nt, Artificial Sequence
  Synthetic
cagccucccuaguagcu

SEQ ID NO: 768929 - RNA, 17 nt, Artificial Sequence
  Synthetic
cagccucccccguagcu

SEQ ID NO: 768930 - RNA, 17 nt, Artificial Sequence
  Synthetic
cagccucccagguagcu

SEQ ID NO: 768931 - RNA, 17 nt, Artificial Sequence
  Synthetic
ucagccucccgguagcu

SEQ ID NO: 768932 - RNA, 17 nt, Artificial Sequence
  Synthetic
cagccuuucggguagcu

SEQ ID NO: 768933 - RNA, 17 nt, Artificial Sequence
  Synthetic
agaugccugggguagcu

SEQ ID NO: 768934 - RNA, 17 nt, Artificial Sequence
  Synthetic
cagccuccuggguagcu

SEQ ID NO: 768935 - RNA, 17 nt, Artificial Sequence
  Synthetic
cagcuuccuggguagcu

SEQ ID NO: 768936 - RNA, 17 nt, Artificial Sequence
  Synthetic
cagacucccauguagcu

SEQ ID NO: 768937 - RNA, 17 nt, Artificial Sequence
  Synthetic
cagccucccguguagcu

SEQ ID NO: 768938 - RNA, 17 nt, Artificial Sequence
  Synthetic
uuucucuuuguguagcu

SEQ ID NO: 768939 - RNA, 17 nt, Artificial Sequence
  Synthetic
aaaaaaaaaaauuagcu

SEQ ID NO: 768940 - RNA, 17 nt, Artificial Sequence
  Synthetic
auacaaaaaaauuagcu

SEQ ID NO: 768941 - RNA, 17 nt, Artificial Sequence
  Synthetic
aauacaaaaaauuagcu

SEQ ID NO: 768942 - RNA, 17 nt, Artificial Sequence
  Synthetic
aaauacaaaaauuagcu

SEQ ID NO: 768943 - RNA, 17 nt, Artificial Sequence
  Synthetic
aacuacaaaaauuagcu

SEQ ID NO: 768944 - RNA, 17 nt, Artificial Sequence
  Synthetic
aauaccaaaaauuagcu

SEQ ID NO: 768945 - RNA, 17 nt, Artificial Sequence
  Synthetic
aaaauacaaaauuagcu

SEQ ID NO: 768946 - RNA, 17 nt, Artificial Sequence
  Synthetic
aaauaguaaaauuagcu

SEQ ID NO: 768947 - RNA, 17 nt, Artificial Sequence
  Synthetic
acaucugaagauuagcu

SEQ ID NO: 768948 - RNA, 17 nt, Artificial Sequence
  Synthetic
ccugacaaggauuagcu

SEQ ID NO: 768949 - RNA, 17 nt, Artificial Sequence
  Synthetic
aaauaaaaaacuuagcu

SEQ ID NO: 768950 - RNA, 17 nt, Artificial Sequence
  Synthetic
aauacaaaaacuuagcu

SEQ ID NO: 768951 - RNA, 17 nt, Artificial Sequence
  Synthetic
aagaaaacguguuagcu

SEQ ID NO: 768952 - RNA, 17 nt, Artificial Sequence
  Synthetic
cauccaggguguuagcu

SEQ ID NO: 768953 - RNA, 17 nt, Artificial Sequence
  Synthetic
auucagaauuguuagcu

SEQ ID NO: 768954 - RNA, 17 nt, Artificial Sequence
  Synthetic
auuucuucuuguuagcu

SEQ ID NO: 768955 - RNA, 17 nt, Artificial Sequence
  Synthetic
uaagaaacaauuuagcu

SEQ ID NO: 768956 - RNA, 17 nt, Artificial Sequence
  Synthetic
uggcuugccauuuagcu

SEQ ID NO: 768957 - RNA, 17 nt, Artificial Sequence
  Synthetic
aaaugucugauuuagcu

SEQ ID NO: 768958 - RNA, 17 nt, Artificial Sequence
  Synthetic
aaaccacugcuuuagcu

SEQ ID NO: 768959 - RNA, 17 nt, Artificial Sequence
  Synthetic
ccaucuccucuuuagcu

SEQ ID NO: 768960 - RNA, 17 nt, Artificial Sequence
  Synthetic
uucaccaccuuuuagcu

SEQ ID NO: 768961 - RNA, 17 nt, Artificial Sequence
  Synthetic
ucaauuuaaaaaacgcu

SEQ ID NO: 768962 - RNA, 17 nt, Artificial Sequence
  Synthetic
uacacagaguaaacgcu

SEQ ID NO: 768963 - RNA, 17 nt, Artificial Sequence
  Synthetic
cuucucauagcuccgcu

SEQ ID NO: 768964 - RNA, 17 nt, Artificial Sequence
  Synthetic
cagccucccaaagcgcu

SEQ ID NO: 768965 - RNA, 17 nt, Artificial Sequence
  Synthetic
cggccucccuaagcgcu

SEQ ID NO: 768966 - RNA, 17 nt, Artificial Sequence
  Synthetic
cagaaaacacaugcgcu

SEQ ID NO: 768967 - RNA, 17 nt, Artificial Sequence
  Synthetic
uagggguggguugcgcu

SEQ ID NO: 768968 - RNA, 17 nt, Artificial Sequence
  Synthetic
aauuacugauaaucgcu

SEQ ID NO: 768969 - RNA, 17 nt, Artificial Sequence
  Synthetic
uuuucucacccaucgcu

SEQ ID NO: 768970 - RNA, 17 nt, Artificial Sequence
  Synthetic
agggugggguuuucgcu

SEQ ID NO: 768971 - RNA, 17 nt, Artificial Sequence
  Synthetic
aaaaucugaaaaaggcu

SEQ ID NO: 768972 - RNA, 17 nt, Artificial Sequence
  Synthetic
cacuuaagcaaaaggcu

SEQ ID NO: 768973 - RNA, 17 nt, Artificial Sequence
  Synthetic
aggaagauacaaaggcu

SEQ ID NO: 768974 - RNA, 17 nt, Artificial Sequence
  Synthetic
agccagagagaaaggcu

SEQ ID NO: 768975 - RNA, 17 nt, Artificial Sequence
  Synthetic
cagcuacccgaaaggcu

SEQ ID NO: 768976 - RNA, 17 nt, Artificial Sequence
  Synthetic
aggcugcaggaaaggcu

SEQ ID NO: 768977 - RNA, 17 nt, Artificial Sequence
  Synthetic
aauaaaaucccaaggcu

SEQ ID NO: 768978 - RNA, 17 nt, Artificial Sequence
  Synthetic
uagcuguuuccaaggcu

SEQ ID NO: 768979 - RNA, 17 nt, Artificial Sequence
  Synthetic
uucucaauggcaaggcu

SEQ ID NO: 768980 - RNA, 17 nt, Artificial Sequence
  Synthetic
agguuuaaugcaaggcu

SEQ ID NO: 768981 - RNA, 17 nt, Artificial Sequence
  Synthetic
auugccaucucaaggcu

SEQ ID NO: 768982 - RNA, 17 nt, Artificial Sequence
  Synthetic
uaaaguuauucaaggcu

SEQ ID NO: 768983 - RNA, 17 nt, Artificial Sequence
  Synthetic
aaaacauugagaaggcu

SEQ ID NO: 768984 - RNA, 17 nt, Artificial Sequence
  Synthetic
aggaaaucaggaaggcu

SEQ ID NO: 768985 - RNA, 17 nt, Artificial Sequence
  Synthetic
agaagcgggggaaggcu

SEQ ID NO: 768986 - RNA, 17 nt, Artificial Sequence
  Synthetic
uccuccuggggaaggcu

SEQ ID NO: 768987 - RNA, 17 nt, Artificial Sequence
  Synthetic
ugcauauugugaaggcu

SEQ ID NO: 768988 - RNA, 17 nt, Artificial Sequence
  Synthetic
aaaagccuaauaaggcu

SEQ ID NO: 768989 - RNA, 17 nt, Artificial Sequence
  Synthetic
cucuuaauucuaaggcu

SEQ ID NO: 768990 - RNA, 17 nt, Artificial Sequence
  Synthetic
ccucagaacuuaaggcu

SEQ ID NO: 768991 - RNA, 17 nt, Artificial Sequence
  Synthetic
acaguuacauacaggcu

SEQ ID NO: 768992 - RNA, 17 nt, Artificial Sequence
  Synthetic
cucuuguugcccaggcu

SEQ ID NO: 768993 - RNA, 17 nt, Artificial Sequence
  Synthetic
caaaaauuagccaggcu

SEQ ID NO: 768994 - RNA, 17 nt, Artificial Sequence
  Synthetic
acccaagacuccaggcu

SEQ ID NO: 768995 - RNA, 17 nt, Artificial Sequence
  Synthetic
uaaaggaagagcaggcu

SEQ ID NO: 768996 - RNA, 17 nt, Artificial Sequence
  Synthetic
aguuaauguugcaggcu

SEQ ID NO: 768997 - RNA, 17 nt, Artificial Sequence
  Synthetic
uaugacugucucaggcu

SEQ ID NO: 768998 - RNA, 17 nt, Artificial Sequence
  Synthetic
aaaaguggcaagaggcu

SEQ ID NO: 768999 - RNA, 17 nt, Artificial Sequence
  Synthetic
caugguuaacagaggcu

SEQ ID NO: 769000 - RNA, 17 nt, Artificial Sequence
  Synthetic
cauuauuuacagaggcu

SEQ ID NO: 769001 - RNA, 17 nt, Artificial Sequence
  Synthetic
auucaaaaccagaggcu

SEQ ID NO: 769002 - RNA, 17 nt, Artificial Sequence
  Synthetic
uauagauaccagaggcu

SEQ ID NO: 769003 - RNA, 17 nt, Artificial Sequence
  Synthetic
cccauugagcagaggcu

SEQ ID NO: 769004 - RNA, 17 nt, Artificial Sequence
  Synthetic
ugacaaccagagaggcu

SEQ ID NO: 769005 - RNA, 17 nt, Artificial Sequence
  Synthetic
ugcauuagagagaggcu

SEQ ID NO: 769006 - RNA, 17 nt, Artificial Sequence
  Synthetic
ugagcuggagagaggcu

SEQ ID NO: 769007 - RNA, 17 nt, Artificial Sequence
  Synthetic
cagcgcuuugggaggcu

SEQ ID NO: 769008 - RNA, 17 nt, Artificial Sequence
  Synthetic
ucacaguucuggaggcu

SEQ ID NO: 769009 - RNA, 17 nt, Artificial Sequence
  Synthetic
uuauaguucuggaggcu

SEQ ID NO: 769010 - RNA, 17 nt, Artificial Sequence
  Synthetic
ucaccguucuggaggcu

SEQ ID NO: 769011 - RNA, 17 nt, Artificial Sequence
  Synthetic
aaaaaauuuuggaggcu

SEQ ID NO: 769012 - RNA, 17 nt, Artificial Sequence
  Synthetic
uuuaguggcaugaggcu

SEQ ID NO: 769013 - RNA, 17 nt, Artificial Sequence
  Synthetic
agggacgagaugaggcu

SEQ ID NO: 769014 - RNA, 17 nt, Artificial Sequence
  Synthetic
uuguaaauguugaggcu

SEQ ID NO: 769015 - RNA, 17 nt, Artificial Sequence
  Synthetic
agaaagauguugaggcu

SEQ ID NO: 769016 - RNA, 17 nt, Artificial Sequence
  Synthetic
cgcuuuuaaaauaggcu

SEQ ID NO: 769017 - RNA, 17 nt, Artificial Sequence
  Synthetic
uaacaaugauauaggcu

SEQ ID NO: 769018 - RNA, 17 nt, Artificial Sequence
  Synthetic
cucugauuuaguaggcu

SEQ ID NO: 769019 - RNA, 17 nt, Artificial Sequence
  Synthetic
cauguugaagguaggcu

SEQ ID NO: 769020 - RNA, 17 nt, Artificial Sequence
  Synthetic
cacgcacucuguaggcu

SEQ ID NO: 769021 - RNA, 17 nt, Artificial Sequence
  Synthetic
accaaauugguuaggcu

SEQ ID NO: 769022 - RNA, 17 nt, Artificial Sequence
  Synthetic
auaaugaaauuuaggcu

SEQ ID NO: 769023 - RNA, 17 nt, Artificial Sequence
  Synthetic
aauucauuauuuaggcu

SEQ ID NO: 769024 - RNA, 17 nt, Artificial Sequence
  Synthetic
acuguauagaaccggcu

SEQ ID NO: 769025 - RNA, 17 nt, Artificial Sequence
  Synthetic
aaggcacaacuccggcu

SEQ ID NO: 769026 - RNA, 17 nt, Artificial Sequence
  Synthetic
agagaguaaaaucggcu

SEQ ID NO: 769027 - RNA, 17 nt, Artificial Sequence
  Synthetic
cauggagaaccucggcu

SEQ ID NO: 769028 - RNA, 17 nt, Artificial Sequence
  Synthetic
aaaauguucucucggcu

SEQ ID NO: 769029 - RNA, 17 nt, Artificial Sequence
  Synthetic
aaacaucaauuucggcu

SEQ ID NO: 769030 - RNA, 17 nt, Artificial Sequence
  Synthetic
ucuucugcaaaagggcu

SEQ ID NO: 769031 - RNA, 17 nt, Artificial Sequence
  Synthetic
aagagucugaaagggcu

SEQ ID NO: 769032 - RNA, 17 nt, Artificial Sequence
  Synthetic
uuaccaccucaagggcu

SEQ ID NO: 769033 - RNA, 17 nt, Artificial Sequence
  Synthetic
uacuaccacacagggcu

SEQ ID NO: 769034 - RNA, 17 nt, Artificial Sequence
  Synthetic
ucuguggccccagggcu

SEQ ID NO: 769035 - RNA, 17 nt, Artificial Sequence
  Synthetic
agguguuggccagggcu

SEQ ID NO: 769036 - RNA, 17 nt, Artificial Sequence
  Synthetic
ccucagaguucagggcu

SEQ ID NO: 769037 - RNA, 17 nt, Artificial Sequence
  Synthetic
ugaaauagaugagggcu

SEQ ID NO: 769038 - RNA, 17 nt, Artificial Sequence
  Synthetic
uuucaacacugagggcu

SEQ ID NO: 769039 - RNA, 17 nt, Artificial Sequence
  Synthetic
cauaauuuuauagggcu

SEQ ID NO: 769040 - RNA, 17 nt, Artificial Sequence
  Synthetic
ccccucacccuagggcu

SEQ ID NO: 769041 - RNA, 17 nt, Artificial Sequence
  Synthetic
uauaugauccuagggcu

SEQ ID NO: 769042 - RNA, 17 nt, Artificial Sequence
  Synthetic
uaguuucuuuuagggcu

SEQ ID NO: 769043 - RNA, 17 nt, Artificial Sequence
  Synthetic
aauaaaauucacgggcu

SEQ ID NO: 769044 - RNA, 17 nt, Artificial Sequence
  Synthetic
caaaaauuagccgggcu

SEQ ID NO: 769045 - RNA, 17 nt, Artificial Sequence
  Synthetic
acaaaauuagccgggcu

SEQ ID NO: 769046 - RNA, 17 nt, Artificial Sequence
  Synthetic
agugguuuccaggggcu

SEQ ID NO: 769047 - RNA, 17 nt, Artificial Sequence
  Synthetic
uaaauagugcaggggcu

SEQ ID NO: 769048 - RNA, 17 nt, Artificial Sequence
  Synthetic
uuuuaaaaagaggggcu

SEQ ID NO: 769049 - RNA, 17 nt, Artificial Sequence
  Synthetic
caucuugaauaggggcu

SEQ ID NO: 769050 - RNA, 17 nt, Artificial Sequence
  Synthetic
cggucaguuuaggggcu

SEQ ID NO: 769051 - RNA, 17 nt, Artificial Sequence
  Synthetic
caucuguuggcggggcu

SEQ ID NO: 769052 - RNA, 17 nt, Artificial Sequence
  Synthetic
ucaggggguggggggcu

SEQ ID NO: 769053 - RNA, 17 nt, Artificial Sequence
  Synthetic
ucgugggguggggggcu

SEQ ID NO: 769054 - RNA, 17 nt, Artificial Sequence
  Synthetic
cccgaggauugggggcu

SEQ ID NO: 769055 - RNA, 17 nt, Artificial Sequence
  Synthetic
aagcugcaaguggggcu

SEQ ID NO: 769056 - RNA, 17 nt, Artificial Sequence
  Synthetic
uagaugccaguggggcu

SEQ ID NO: 769057 - RNA, 17 nt, Artificial Sequence
  Synthetic
uuaauagugguggggcu

SEQ ID NO: 769058 - RNA, 17 nt, Artificial Sequence
  Synthetic
aggugccuauuggggcu

SEQ ID NO: 769059 - RNA, 17 nt, Artificial Sequence
  Synthetic
ugcaagguauuggggcu

SEQ ID NO: 769060 - RNA, 17 nt, Artificial Sequence
  Synthetic
ugauucugcuuggggcu

SEQ ID NO: 769061 - RNA, 17 nt, Artificial Sequence
  Synthetic
caucuaggcacugggcu

SEQ ID NO: 769062 - RNA, 17 nt, Artificial Sequence
  Synthetic
cuuuuggggccugggcu

SEQ ID NO: 769063 - RNA, 17 nt, Artificial Sequence
  Synthetic
ccuccaccuccugggcu

SEQ ID NO: 769064 - RNA, 17 nt, Artificial Sequence
  Synthetic
acugacucagcugggcu

SEQ ID NO: 769065 - RNA, 17 nt, Artificial Sequence
  Synthetic
uaggcauauucugggcu

SEQ ID NO: 769066 - RNA, 17 nt, Artificial Sequence
  Synthetic
caaugauguucugggcu

SEQ ID NO: 769067 - RNA, 17 nt, Artificial Sequence
  Synthetic
aaauaaagcagugggcu

SEQ ID NO: 769068 - RNA, 17 nt, Artificial Sequence
  Synthetic
acagagagaggugggcu

SEQ ID NO: 769069 - RNA, 17 nt, Artificial Sequence
  Synthetic
cagcuaaugggugggcu

SEQ ID NO: 769070 - RNA, 17 nt, Artificial Sequence
  Synthetic
aauugauacugugggcu

SEQ ID NO: 769071 - RNA, 17 nt, Artificial Sequence
  Synthetic
uuaaagauccuugggcu

SEQ ID NO: 769072 - RNA, 17 nt, Artificial Sequence
  Synthetic
cccugucacuuugggcu

SEQ ID NO: 769073 - RNA, 17 nt, Artificial Sequence
  Synthetic
ccccuugacuuugggcu

SEQ ID NO: 769074 - RNA, 17 nt, Artificial Sequence
  Synthetic
aaggauuuguuugggcu

SEQ ID NO: 769075 - RNA, 17 nt, Artificial Sequence
  Synthetic
cuuaauucacaauggcu

SEQ ID NO: 769076 - RNA, 17 nt, Artificial Sequence
  Synthetic
augcuauauuaauggcu

SEQ ID NO: 769077 - RNA, 17 nt, Artificial Sequence
  Synthetic
cacaguuccacauggcu

SEQ ID NO: 769078 - RNA, 17 nt, Artificial Sequence
  Synthetic
cucuauuguacauggcu

SEQ ID NO: 769079 - RNA, 17 nt, Artificial Sequence
  Synthetic
cacaguucagcauggcu

SEQ ID NO: 769080 - RNA, 17 nt, Artificial Sequence
  Synthetic
cauaguucagcauggcu

SEQ ID NO: 769081 - RNA, 17 nt, Artificial Sequence
  Synthetic
caccauucugcauggcu

SEQ ID NO: 769082 - RNA, 17 nt, Artificial Sequence
  Synthetic
cacugguuugcauggcu

SEQ ID NO: 769083 - RNA, 17 nt, Artificial Sequence
  Synthetic
ugagucgagggauggcu

SEQ ID NO: 769084 - RNA, 17 nt, Artificial Sequence
  Synthetic
ccaguaaugggauggcu

SEQ ID NO: 769085 - RNA, 17 nt, Artificial Sequence
  Synthetic
cacaguucaauauggcu

SEQ ID NO: 769086 - RNA, 17 nt, Artificial Sequence
  Synthetic
agcaaauggauauggcu

SEQ ID NO: 769087 - RNA, 17 nt, Artificial Sequence
  Synthetic
uaucauguacuauggcu

SEQ ID NO: 769088 - RNA, 17 nt, Artificial Sequence
  Synthetic
ucagaagcucuauggcu

SEQ ID NO: 769089 - RNA, 17 nt, Artificial Sequence
  Synthetic
uugguuccuguauggcu

SEQ ID NO: 769090 - RNA, 17 nt, Artificial Sequence
  Synthetic
uguucucacuuauggcu

SEQ ID NO: 769091 - RNA, 17 nt, Artificial Sequence
  Synthetic
agggaguacuuauggcu

SEQ ID NO: 769092 - RNA, 17 nt, Artificial Sequence
  Synthetic
uucauuguguuauggcu

SEQ ID NO: 769093 - RNA, 17 nt, Artificial Sequence
  Synthetic
uagauuuuggacuggcu

SEQ ID NO: 769094 - RNA, 17 nt, Artificial Sequence
  Synthetic
uccauuuuauacuggcu

SEQ ID NO: 769095 - RNA, 17 nt, Artificial Sequence
  Synthetic
ucaaaagucuacuggcu

SEQ ID NO: 769096 - RNA, 17 nt, Artificial Sequence
  Synthetic
uuauaauaauccuggcu

SEQ ID NO: 769097 - RNA, 17 nt, Artificial Sequence
  Synthetic
uaaacagacagcuggcu

SEQ ID NO: 769098 - RNA, 17 nt, Artificial Sequence
  Synthetic
uuaaaacguagcuggcu

SEQ ID NO: 769099 - RNA, 17 nt, Artificial Sequence
  Synthetic
cuuugcugccgcuggcu

SEQ ID NO: 769100 - RNA, 17 nt, Artificial Sequence
  Synthetic
aaagaucacaucuggcu

SEQ ID NO: 769101 - RNA, 17 nt, Artificial Sequence
  Synthetic
agugucugaaaguggcu

SEQ ID NO: 769102 - RNA, 17 nt, Artificial Sequence
  Synthetic
cagccucccaaguggcu

SEQ ID NO: 769103 - RNA, 17 nt, Artificial Sequence
  Synthetic
uuggcaaaccaguggcu

SEQ ID NO: 769104 - RNA, 17 nt, Artificial Sequence
  Synthetic
uauuuucaucaguggcu

SEQ ID NO: 769105 - RNA, 17 nt, Artificial Sequence
  Synthetic
cagccuccagaguggcu

SEQ ID NO: 769106 - RNA, 17 nt, Artificial Sequence
  Synthetic
aaacugagagaguggcu

SEQ ID NO: 769107 - RNA, 17 nt, Artificial Sequence
  Synthetic
ccauggcuggaguggcu

SEQ ID NO: 769108 - RNA, 17 nt, Artificial Sequence
  Synthetic
uuccuacuugaguggcu

SEQ ID NO: 769109 - RNA, 17 nt, Artificial Sequence
  Synthetic
cagccucuuuaguggcu

SEQ ID NO: 769110 - RNA, 17 nt, Artificial Sequence
  Synthetic
aagagaugcugguggcu

SEQ ID NO: 769111 - RNA, 17 nt, Artificial Sequence
  Synthetic
caguaucuuauguggcu

SEQ ID NO: 769112 - RNA, 17 nt, Artificial Sequence
  Synthetic
aggauucuuauguggcu

SEQ ID NO: 769113 - RNA, 17 nt, Artificial Sequence
  Synthetic
aagagaugacuguggcu

SEQ ID NO: 769114 - RNA, 17 nt, Artificial Sequence
  Synthetic
uuaaaacuaguguggcu

SEQ ID NO: 769115 - RNA, 17 nt, Artificial Sequence
  Synthetic
ugcauuccuguguggcu

SEQ ID NO: 769116 - RNA, 17 nt, Artificial Sequence
  Synthetic
cagaacucuguguggcu

SEQ ID NO: 769117 - RNA, 17 nt, Artificial Sequence
  Synthetic
cacaguucuguguggcu

SEQ ID NO: 769118 - RNA, 17 nt, Artificial Sequence
  Synthetic
uagauguuuuuguggcu

SEQ ID NO: 769119 - RNA, 17 nt, Artificial Sequence
  Synthetic
cuccuuuuuuuguggcu

SEQ ID NO: 769120 - RNA, 17 nt, Artificial Sequence
  Synthetic
agaaagaugaauuggcu

SEQ ID NO: 769121 - RNA, 17 nt, Artificial Sequence
  Synthetic
cauucuggacauuggcu

SEQ ID NO: 769122 - RNA, 17 nt, Artificial Sequence
  Synthetic
acuuauacccauuggcu

SEQ ID NO: 769123 - RNA, 17 nt, Artificial Sequence
  Synthetic
cuuuccccccauuggcu

SEQ ID NO: 769124 - RNA, 17 nt, Artificial Sequence
  Synthetic
cuacaugcugauuggcu

SEQ ID NO: 769125 - RNA, 17 nt, Artificial Sequence
  Synthetic
uugcuugucuauuggcu

SEQ ID NO: 769126 - RNA, 17 nt, Artificial Sequence
  Synthetic
uaagcaaaguauuggcu

SEQ ID NO: 769127 - RNA, 17 nt, Artificial Sequence
  Synthetic
caugugucaacuuggcu

SEQ ID NO: 769128 - RNA, 17 nt, Artificial Sequence
  Synthetic
ucugaaggaacuuggcu

SEQ ID NO: 769129 - RNA, 17 nt, Artificial Sequence
  Synthetic
uauguguuaacuuggcu

SEQ ID NO: 769130 - RNA, 17 nt, Artificial Sequence
  Synthetic
uacgguuccacuuggcu

SEQ ID NO: 769131 - RNA, 17 nt, Artificial Sequence
  Synthetic
cuuuucuuaccuuggcu

SEQ ID NO: 769132 - RNA, 17 nt, Artificial Sequence
  Synthetic
uaaaauaguccuuggcu

SEQ ID NO: 769133 - RNA, 17 nt, Artificial Sequence
  Synthetic
cccuuccuuccuuggcu

SEQ ID NO: 769134 - RNA, 17 nt, Artificial Sequence
  Synthetic
agcccucuuccuuggcu

SEQ ID NO: 769135 - RNA, 17 nt, Artificial Sequence
  Synthetic
agcccuuuuccuuggcu

SEQ ID NO: 769136 - RNA, 17 nt, Artificial Sequence
  Synthetic
acaccaagugcuuggcu

SEQ ID NO: 769137 - RNA, 17 nt, Artificial Sequence
  Synthetic
uccuuuacaucuuggcu

SEQ ID NO: 769138 - RNA, 17 nt, Artificial Sequence
  Synthetic
agaugcaagucuuggcu

SEQ ID NO: 769139 - RNA, 17 nt, Artificial Sequence
  Synthetic
aacauaucaaguuggcu

SEQ ID NO: 769140 - RNA, 17 nt, Artificial Sequence
  Synthetic
ugccuuauaaguuggcu

SEQ ID NO: 769141 - RNA, 17 nt, Artificial Sequence
  Synthetic
cuggggacgaguuggcu

SEQ ID NO: 769142 - RNA, 17 nt, Artificial Sequence
  Synthetic
uagugagcauguuggcu

SEQ ID NO: 769143 - RNA, 17 nt, Artificial Sequence
  Synthetic
uuuugaagauguuggcu

SEQ ID NO: 769144 - RNA, 17 nt, Artificial Sequence
  Synthetic
cacggcuucuguuggcu

SEQ ID NO: 769145 - RNA, 17 nt, Artificial Sequence
  Synthetic
cuugcuauuuguuggcu

SEQ ID NO: 769146 - RNA, 17 nt, Artificial Sequence
  Synthetic
cccagaaagauuuggcu

SEQ ID NO: 769147 - RNA, 17 nt, Artificial Sequence
  Synthetic
aaauguuuacuuuggcu

SEQ ID NO: 769148 - RNA, 17 nt, Artificial Sequence
  Synthetic
aggacugcuguuuggcu

SEQ ID NO: 769149 - RNA, 17 nt, Artificial Sequence
  Synthetic
aaauaucaauuuuggcu

SEQ ID NO: 769150 - RNA, 17 nt, Artificial Sequence
  Synthetic
ccuuagucauuuuggcu

SEQ ID NO: 769151 - RNA, 17 nt, Artificial Sequence
  Synthetic
caugauauauuuuggcu

SEQ ID NO: 769152 - RNA, 17 nt, Artificial Sequence
  Synthetic
uggccuccaaaaaugcu

SEQ ID NO: 769153 - RNA, 17 nt, Artificial Sequence
  Synthetic
aacuuaaccaaaaugcu

SEQ ID NO: 769154 - RNA, 17 nt, Artificial Sequence
  Synthetic
cccauauccaaaaugcu

SEQ ID NO: 769155 - RNA, 17 nt, Artificial Sequence
  Synthetic
aauaucuucaaaaugcu

SEQ ID NO: 769156 - RNA, 17 nt, Artificial Sequence
  Synthetic
ugcucccauaaaaugcu

SEQ ID NO: 769157 - RNA, 17 nt, Artificial Sequence
  Synthetic
aagggauaccaaaugcu

SEQ ID NO: 769158 - RNA, 17 nt, Artificial Sequence
  Synthetic
ucucaaugugaaaugcu

SEQ ID NO: 769159 - RNA, 17 nt, Artificial Sequence
  Synthetic
ccuggcaacuaaaugcu

SEQ ID NO: 769160 - RNA, 17 nt, Artificial Sequence
  Synthetic
cugccaaucuaaaugcu

SEQ ID NO: 769161 - RNA, 17 nt, Artificial Sequence
  Synthetic
uuuuaaucaacaaugcu

SEQ ID NO: 769162 - RNA, 17 nt, Artificial Sequence
  Synthetic
agaggcuuaacaaugcu

SEQ ID NO: 769163 - RNA, 17 nt, Artificial Sequence
  Synthetic
uccuuaaaugcaaugcu

SEQ ID NO: 769164 - RNA, 17 nt, Artificial Sequence
  Synthetic
ucagcaugaagaaugcu

SEQ ID NO: 769165 - RNA, 17 nt, Artificial Sequence
  Synthetic
agaagaugaagaaugcu

SEQ ID NO: 769166 - RNA, 17 nt, Artificial Sequence
  Synthetic
uaagagccaugaaugcu

SEQ ID NO: 769167 - RNA, 17 nt, Artificial Sequence
  Synthetic
acucuucuuguaaugcu

SEQ ID NO: 769168 - RNA, 17 nt, Artificial Sequence
  Synthetic
aaaucaggacacaugcu

SEQ ID NO: 769169 - RNA, 17 nt, Artificial Sequence
  Synthetic
uguuguguguacaugcu

SEQ ID NO: 769170 - RNA, 17 nt, Artificial Sequence
  Synthetic
uuuuuaaauuacaugcu

SEQ ID NO: 769171 - RNA, 17 nt, Artificial Sequence
  Synthetic
auacuuagagccaugcu

SEQ ID NO: 769172 - RNA, 17 nt, Artificial Sequence
  Synthetic
aaauuuaaaagcaugcu

SEQ ID NO: 769173 - RNA, 17 nt, Artificial Sequence
  Synthetic
aauuguaccagcaugcu

SEQ ID NO: 769174 - RNA, 17 nt, Artificial Sequence
  Synthetic
ugacaauuuagcaugcu

SEQ ID NO: 769175 - RNA, 17 nt, Artificial Sequence
  Synthetic
aauagcuaaugcaugcu

SEQ ID NO: 769176 - RNA, 17 nt, Artificial Sequence
  Synthetic
uuauuacagugcaugcu

SEQ ID NO: 769177 - RNA, 17 nt, Artificial Sequence
  Synthetic
agcucugcuugcaugcu

SEQ ID NO: 769178 - RNA, 17 nt, Artificial Sequence
  Synthetic
cagaauuuuugcaugcu

SEQ ID NO: 769179 - RNA, 17 nt, Artificial Sequence
  Synthetic
ugauugaaaaucaugcu

SEQ ID NO: 769180 - RNA, 17 nt, Artificial Sequence
  Synthetic
ucacaggccaucaugcu

SEQ ID NO: 769181 - RNA, 17 nt, Artificial Sequence
  Synthetic
ugccacaaauucaugcu

SEQ ID NO: 769182 - RNA, 17 nt, Artificial Sequence
  Synthetic
aauagucaauucaugcu

SEQ ID NO: 769183 - RNA, 17 nt, Artificial Sequence
  Synthetic
aauacaguuuucaugcu

SEQ ID NO: 769184 - RNA, 17 nt, Artificial Sequence
  Synthetic
ucuaaguaaaagaugcu

SEQ ID NO: 769185 - RNA, 17 nt, Artificial Sequence
  Synthetic
aaacaaaucgagaugcu

SEQ ID NO: 769186 - RNA, 17 nt, Artificial Sequence
  Synthetic
uugggauuauagaugcu

SEQ ID NO: 769187 - RNA, 17 nt, Artificial Sequence
  Synthetic
cuguaguccuagaugcu

SEQ ID NO: 769188 - RNA, 17 nt, Artificial Sequence
  Synthetic
acuguguucuagaugcu

SEQ ID NO: 769189 - RNA, 17 nt, Artificial Sequence
  Synthetic
uuccugggggcgaugcu

SEQ ID NO: 769190 - RNA, 17 nt, Artificial Sequence
  Synthetic
uaucaugaauggaugcu

SEQ ID NO: 769191 - RNA, 17 nt, Artificial Sequence
  Synthetic
acacaucccuggaugcu

SEQ ID NO: 769192 - RNA, 17 nt, Artificial Sequence
  Synthetic
aguaacagaaugaugcu

SEQ ID NO: 769193 - RNA, 17 nt, Artificial Sequence
  Synthetic
auuuaagacaugaugcu

SEQ ID NO: 769194 - RNA, 17 nt, Artificial Sequence
  Synthetic
caucagaauaugaugcu

SEQ ID NO: 769195 - RNA, 17 nt, Artificial Sequence
  Synthetic
cuauugaaggugaugcu

SEQ ID NO: 769196 - RNA, 17 nt, Artificial Sequence
  Synthetic
cuagcucccuugaugcu

SEQ ID NO: 769197 - RNA, 17 nt, Artificial Sequence
  Synthetic
aaaauaaaguugaugcu

SEQ ID NO: 769198 - RNA, 17 nt, Artificial Sequence
  Synthetic
uucagaggaaauaugcu

SEQ ID NO: 769199 - RNA, 17 nt, Artificial Sequence
  Synthetic
cuuugugauaauaugcu

SEQ ID NO: 769200 - RNA, 17 nt, Artificial Sequence
  Synthetic
aggguaggccauaugcu

SEQ ID NO: 769201 - RNA, 17 nt, Artificial Sequence
  Synthetic
aaucucugugauaugcu

SEQ ID NO: 769202 - RNA, 17 nt, Artificial Sequence
  Synthetic
auuucuuuaccuaugcu

SEQ ID NO: 769203 - RNA, 17 nt, Artificial Sequence
  Synthetic
uugccaggagcuaugcu

SEQ ID NO: 769204 - RNA, 17 nt, Artificial Sequence
  Synthetic
augccaggcaguaugcu

SEQ ID NO: 769205 - RNA, 17 nt, Artificial Sequence
  Synthetic
auggaggucaguaugcu

SEQ ID NO: 769206 - RNA, 17 nt, Artificial Sequence
  Synthetic
auaacauacuguaugcu

SEQ ID NO: 769207 - RNA, 17 nt, Artificial Sequence
  Synthetic
aagguaggacaacugcu

SEQ ID NO: 769208 - RNA, 17 nt, Artificial Sequence
  Synthetic
augcugguguaacugcu

SEQ ID NO: 769209 - RNA, 17 nt, Artificial Sequence
  Synthetic
aaguaguauuaacugcu

SEQ ID NO: 769210 - RNA, 17 nt, Artificial Sequence
  Synthetic
aaguaguguuaacugcu

SEQ ID NO: 769211 - RNA, 17 nt, Artificial Sequence
  Synthetic
ucuaucuguacacugcu

SEQ ID NO: 769212 - RNA, 17 nt, Artificial Sequence
  Synthetic
ccagcaaucccacugcu

SEQ ID NO: 769213 - RNA, 17 nt, Artificial Sequence
  Synthetic
cacuagucuccacugcu

SEQ ID NO: 769214 - RNA, 17 nt, Artificial Sequence
  Synthetic
cugugccaggcacugcu

SEQ ID NO: 769215 - RNA, 17 nt, Artificial Sequence
  Synthetic
uaagagggggcacugcu

SEQ ID NO: 769216 - RNA, 17 nt, Artificial Sequence
  Synthetic
ccugucauggcacugcu

SEQ ID NO: 769217 - RNA, 17 nt, Artificial Sequence
  Synthetic
cugcaagcuucacugcu

SEQ ID NO: 769218 - RNA, 17 nt, Artificial Sequence
  Synthetic
cccugaaguucacugcu

SEQ ID NO: 769219 - RNA, 17 nt, Artificial Sequence
  Synthetic
ucauuggcaugacugcu

SEQ ID NO: 769220 - RNA, 17 nt, Artificial Sequence
  Synthetic
cuugaguucugacugcu

SEQ ID NO: 769221 - RNA, 17 nt, Artificial Sequence
  Synthetic
uugauuuaaauacugcu

SEQ ID NO: 769222 - RNA, 17 nt, Artificial Sequence
  Synthetic
auucacguauuacugcu

SEQ ID NO: 769223 - RNA, 17 nt, Artificial Sequence
  Synthetic
agcagcggcaaccugcu

SEQ ID NO: 769224 - RNA, 17 nt, Artificial Sequence
  Synthetic
aaauauauacaccugcu

SEQ ID NO: 769225 - RNA, 17 nt, Artificial Sequence
  Synthetic
cagcccuuccaccugcu

SEQ ID NO: 769226 - RNA, 17 nt, Artificial Sequence
  Synthetic
agucugacaucccugcu

SEQ ID NO: 769227 - RNA, 17 nt, Artificial Sequence
  Synthetic
cugucugacucccugcu

SEQ ID NO: 769228 - RNA, 17 nt, Artificial Sequence
  Synthetic
aauacaaugagccugcu

SEQ ID NO: 769229 - RNA, 17 nt, Artificial Sequence
  Synthetic
ugcaaccuccgccugcu

SEQ ID NO: 769230 - RNA, 17 nt, Artificial Sequence
  Synthetic
cuuguucuaugccugcu

SEQ ID NO: 769231 - RNA, 17 nt, Artificial Sequence
  Synthetic
agaagccacugccugcu

SEQ ID NO: 769232 - RNA, 17 nt, Artificial Sequence
  Synthetic
uuuaagagacuccugcu

SEQ ID NO: 769233 - RNA, 17 nt, Artificial Sequence
  Synthetic
aacucccuccuccugcu

SEQ ID NO: 769234 - RNA, 17 nt, Artificial Sequence
  Synthetic
ccaugauaucuccugcu

SEQ ID NO: 769235 - RNA, 17 nt, Artificial Sequence
  Synthetic
agucaggugaagcugcu

SEQ ID NO: 769236 - RNA, 17 nt, Artificial Sequence
  Synthetic
cugugguaccagcugcu

SEQ ID NO: 769237 - RNA, 17 nt, Artificial Sequence
  Synthetic
uuaguuccccagcugcu

SEQ ID NO: 769238 - RNA, 17 nt, Artificial Sequence
  Synthetic
cucuaaucccagcugcu

SEQ ID NO: 769239 - RNA, 17 nt, Artificial Sequence
  Synthetic
cuguagucccagcugcu

SEQ ID NO: 769240 - RNA, 17 nt, Artificial Sequence
  Synthetic
auagcauucccgcugcu

SEQ ID NO: 769241 - RNA, 17 nt, Artificial Sequence
  Synthetic
uuaaaacacaggcugcu

SEQ ID NO: 769242 - RNA, 17 nt, Artificial Sequence
  Synthetic
uuaauauaugggcugcu

SEQ ID NO: 769243 - RNA, 17 nt, Artificial Sequence
  Synthetic
uuguuauguaugcugcu

SEQ ID NO: 769244 - RNA, 17 nt, Artificial Sequence
  Synthetic
ugguuugaacugcugcu

SEQ ID NO: 769245 - RNA, 17 nt, Artificial Sequence
  Synthetic
auagauucacugcugcu

SEQ ID NO: 769246 - RNA, 17 nt, Artificial Sequence
  Synthetic
augaaaacagugcugcu

SEQ ID NO: 769247 - RNA, 17 nt, Artificial Sequence
  Synthetic
uugagaggauugcugcu

SEQ ID NO: 769248 - RNA, 17 nt, Artificial Sequence
  Synthetic
acccuuuuauugcugcu

SEQ ID NO: 769249 - RNA, 17 nt, Artificial Sequence
  Synthetic
agauacugcuugcugcu

SEQ ID NO: 769250 - RNA, 17 nt, Artificial Sequence
  Synthetic
ucuuuccauuugcugcu

SEQ ID NO: 769251 - RNA, 17 nt, Artificial Sequence
  Synthetic
auccuucuuuugcugcu

SEQ ID NO: 769252 - RNA, 17 nt, Artificial Sequence
  Synthetic
aaggaauuaaaucugcu

SEQ ID NO: 769253 - RNA, 17 nt, Artificial Sequence
  Synthetic
auaguauuccaucugcu

SEQ ID NO: 769254 - RNA, 17 nt, Artificial Sequence
  Synthetic
uaaacuuauuaucugcu

SEQ ID NO: 769255 - RNA, 17 nt, Artificial Sequence
  Synthetic
acacuguucccucugcu

SEQ ID NO: 769256 - RNA, 17 nt, Artificial Sequence
  Synthetic
uggaaaaccucucugcu

SEQ ID NO: 769257 - RNA, 17 nt, Artificial Sequence
  Synthetic
aaaauuauuucucugcu

SEQ ID NO: 769258 - RNA, 17 nt, Artificial Sequence
  Synthetic
acucacucacgucugcu

SEQ ID NO: 769259 - RNA, 17 nt, Artificial Sequence
  Synthetic
uacuguauaugucugcu

SEQ ID NO: 769260 - RNA, 17 nt, Artificial Sequence
  Synthetic
uaaugucuuugucugcu

SEQ ID NO: 769261 - RNA, 17 nt, Artificial Sequence
  Synthetic
ccucaguuuugucugcu

SEQ ID NO: 769262 - RNA, 17 nt, Artificial Sequence
  Synthetic
auugagggaauucugcu

SEQ ID NO: 769263 - RNA, 17 nt, Artificial Sequence
  Synthetic
ucugagauaauucugcu

SEQ ID NO: 769264 - RNA, 17 nt, Artificial Sequence
  Synthetic
ugauucuugauucugcu

SEQ ID NO: 769265 - RNA, 17 nt, Artificial Sequence
  Synthetic
ccaguguagcuucugcu

SEQ ID NO: 769266 - RNA, 17 nt, Artificial Sequence
  Synthetic
ucaagggaucuucugcu

SEQ ID NO: 769267 - RNA, 17 nt, Artificial Sequence
  Synthetic
aagcaguuucuucugcu

SEQ ID NO: 769268 - RNA, 17 nt, Artificial Sequence
  Synthetic
accaugaggguucugcu

SEQ ID NO: 769269 - RNA, 17 nt, Artificial Sequence
  Synthetic
aauagccacuuucugcu

SEQ ID NO: 769270 - RNA, 17 nt, Artificial Sequence
  Synthetic
uuuacuugcuuucugcu

SEQ ID NO: 769271 - RNA, 17 nt, Artificial Sequence
  Synthetic
auaacuucaaaagugcu

SEQ ID NO: 769272 - RNA, 17 nt, Artificial Sequence
  Synthetic
cagccacccaaagugcu

SEQ ID NO: 769273 - RNA, 17 nt, Artificial Sequence
  Synthetic
cagacucccaaagugcu

SEQ ID NO: 769274 - RNA, 17 nt, Artificial Sequence
  Synthetic
uggacucccaaagugcu

SEQ ID NO: 769275 - RNA, 17 nt, Artificial Sequence
  Synthetic
cagccucccaaagugcu

SEQ ID NO: 769276 - RNA, 17 nt, Artificial Sequence
  Synthetic
aggccucccaaagugcu

SEQ ID NO: 769277 - RNA, 17 nt, Artificial Sequence
  Synthetic
cggccucccaaagugcu

SEQ ID NO: 769278 - RNA, 17 nt, Artificial Sequence
  Synthetic
uggccucccaaagugcu

SEQ ID NO: 769279 - RNA, 17 nt, Artificial Sequence
  Synthetic
cugccucccaaagugcu

SEQ ID NO: 769280 - RNA, 17 nt, Artificial Sequence
  Synthetic
cauccucccaaagugcu

SEQ ID NO: 769281 - RNA, 17 nt, Artificial Sequence
  Synthetic
caggcucccaaagugcu

SEQ ID NO: 769282 - RNA, 17 nt, Artificial Sequence
  Synthetic
cagcuucccaaagugcu

SEQ ID NO: 769283 - RNA, 17 nt, Artificial Sequence
  Synthetic
uagccuuccaaagugcu

SEQ ID NO: 769284 - RNA, 17 nt, Artificial Sequence
  Synthetic
cggccuuccaaagugcu

SEQ ID NO: 769285 - RNA, 17 nt, Artificial Sequence
  Synthetic
cggccucgcaaagugcu

SEQ ID NO: 769286 - RNA, 17 nt, Artificial Sequence
  Synthetic
cagccucucaaagugcu

SEQ ID NO: 769287 - RNA, 17 nt, Artificial Sequence
  Synthetic
cggccucucaaagugcu

SEQ ID NO: 769288 - RNA, 17 nt, Artificial Sequence
  Synthetic
uggucucucaaagugcu

SEQ ID NO: 769289 - RNA, 17 nt, Artificial Sequence
  Synthetic
cagcauccgaaagugcu

SEQ ID NO: 769290 - RNA, 17 nt, Artificial Sequence
  Synthetic
cagccuccuaaagugcu

SEQ ID NO: 769291 - RNA, 17 nt, Artificial Sequence
  Synthetic
cacacacaccaagugcu

SEQ ID NO: 769292 - RNA, 17 nt, Artificial Sequence
  Synthetic
cggccuccccaagugcu

SEQ ID NO: 769293 - RNA, 17 nt, Artificial Sequence
  Synthetic
ugagugugagaagugcu

SEQ ID NO: 769294 - RNA, 17 nt, Artificial Sequence
  Synthetic
uuaauauuagaagugcu

SEQ ID NO: 769295 - RNA, 17 nt, Artificial Sequence
  Synthetic
uggccucccgaagugcu

SEQ ID NO: 769296 - RNA, 17 nt, Artificial Sequence
  Synthetic
uggccucccuaagugcu

SEQ ID NO: 769297 - RNA, 17 nt, Artificial Sequence
  Synthetic
agaguuuauuaagugcu

SEQ ID NO: 769298 - RNA, 17 nt, Artificial Sequence
  Synthetic
caguaccuuuaagugcu

SEQ ID NO: 769299 - RNA, 17 nt, Artificial Sequence
  Synthetic
uagccucccacagugcu

SEQ ID NO: 769300 - RNA, 17 nt, Artificial Sequence
  Synthetic
uggccucccacagugcu

SEQ ID NO: 769301 - RNA, 17 nt, Artificial Sequence
  Synthetic
acugcacguccagugcu

SEQ ID NO: 769302 - RNA, 17 nt, Artificial Sequence
  Synthetic
acagcaaaagcagugcu

SEQ ID NO: 769303 - RNA, 17 nt, Artificial Sequence
  Synthetic
uuaaacacagcagugcu

SEQ ID NO: 769304 - RNA, 17 nt, Artificial Sequence
  Synthetic
auuucuggggcagugcu

SEQ ID NO: 769305 - RNA, 17 nt, Artificial Sequence
  Synthetic
ugagaacaugcagugcu

SEQ ID NO: 769306 - RNA, 17 nt, Artificial Sequence
  Synthetic
uauauguuugcagugcu

SEQ ID NO: 769307 - RNA, 17 nt, Artificial Sequence
  Synthetic
cggccucccagagugcu

SEQ ID NO: 769308 - RNA, 17 nt, Artificial Sequence
  Synthetic
uguacuagcugagugcu

SEQ ID NO: 769309 - RNA, 17 nt, Artificial Sequence
  Synthetic
aaggcauaaauagugcu

SEQ ID NO: 769310 - RNA, 17 nt, Artificial Sequence
  Synthetic
cagccucccauagugcu

SEQ ID NO: 769311 - RNA, 17 nt, Artificial Sequence
  Synthetic
uauuuuuaaaacgugcu

SEQ ID NO: 769312 - RNA, 17 nt, Artificial Sequence
  Synthetic
aguuuacaguccgugcu

SEQ ID NO: 769313 - RNA, 17 nt, Artificial Sequence
  Synthetic
aaucuuaaacaggugcu

SEQ ID NO: 769314 - RNA, 17 nt, Artificial Sequence
  Synthetic
aggaaacaucaggugcu

SEQ ID NO: 769315 - RNA, 17 nt, Artificial Sequence
  Synthetic
uaaaaagaggaggugcu

SEQ ID NO: 769316 - RNA, 17 nt, Artificial Sequence
  Synthetic
aauaauugugaggugcu

SEQ ID NO: 769317 - RNA, 17 nt, Artificial Sequence
  Synthetic
acucaauaaacggugcu

SEQ ID NO: 769318 - RNA, 17 nt, Artificial Sequence
  Synthetic
auuuaauaaacggugcu

SEQ ID NO: 769319 - RNA, 17 nt, Artificial Sequence
  Synthetic
auuuaauaaauggugcu

SEQ ID NO: 769320 - RNA, 17 nt, Artificial Sequence
  Synthetic
auucaguaaauggugcu

SEQ ID NO: 769321 - RNA, 17 nt, Artificial Sequence
  Synthetic
cuucaaccaauggugcu

SEQ ID NO: 769322 - RNA, 17 nt, Artificial Sequence
  Synthetic
ucagaagagauggugcu

SEQ ID NO: 769323 - RNA, 17 nt, Artificial Sequence
  Synthetic
cuuggagugauggugcu

SEQ ID NO: 769324 - RNA, 17 nt, Artificial Sequence
  Synthetic
cauaaagugguggugcu

SEQ ID NO: 769325 - RNA, 17 nt, Artificial Sequence
  Synthetic
uggccucccaaugugcu

SEQ ID NO: 769326 - RNA, 17 nt, Artificial Sequence
  Synthetic
agaaagauagaugugcu

SEQ ID NO: 769327 - RNA, 17 nt, Artificial Sequence
  Synthetic
cuucuacucuaugugcu

SEQ ID NO: 769328 - RNA, 17 nt, Artificial Sequence
  Synthetic
agugauucuuaugugcu

SEQ ID NO: 769329 - RNA, 17 nt, Artificial Sequence
  Synthetic
aagcucaaaccugugcu

SEQ ID NO: 769330 - RNA, 17 nt, Artificial Sequence
  Synthetic
cugaagguuccugugcu

SEQ ID NO: 769331 - RNA, 17 nt, Artificial Sequence
  Synthetic
agcucgagugcugugcu

SEQ ID NO: 769332 - RNA, 17 nt, Artificial Sequence
  Synthetic
agcucauuugcugugcu

SEQ ID NO: 769333 - RNA, 17 nt, Artificial Sequence
  Synthetic
agauguuuuucugugcu

SEQ ID NO: 769334 - RNA, 17 nt, Artificial Sequence
  Synthetic
acuccaauaagugugcu

SEQ ID NO: 769335 - RNA, 17 nt, Artificial Sequence
  Synthetic
caaaaaaaaguugugcu

SEQ ID NO: 769336 - RNA, 17 nt, Artificial Sequence
  Synthetic
uuauuacguguugugcu

SEQ ID NO: 769337 - RNA, 17 nt, Artificial Sequence
  Synthetic
uguaugaaguuugugcu

SEQ ID NO: 769338 - RNA, 17 nt, Artificial Sequence
  Synthetic
auuagcuguuuugugcu

SEQ ID NO: 769339 - RNA, 17 nt, Artificial Sequence
  Synthetic
agguacuuuuuugugcu

SEQ ID NO: 769340 - RNA, 17 nt, Artificial Sequence
  Synthetic
agucuauuaaaauugcu

SEQ ID NO: 769341 - RNA, 17 nt, Artificial Sequence
  Synthetic
uagccucccaaauugcu

SEQ ID NO: 769342 - RNA, 17 nt, Artificial Sequence
  Synthetic
cggccucucaaauugcu

SEQ ID NO: 769343 - RNA, 17 nt, Artificial Sequence
  Synthetic
aaaaucaagcaauugcu

SEQ ID NO: 769344 - RNA, 17 nt, Artificial Sequence
  Synthetic
ccaagagugcaauugcu

SEQ ID NO: 769345 - RNA, 17 nt, Artificial Sequence
  Synthetic
uugaguuuauaauugcu

SEQ ID NO: 769346 - RNA, 17 nt, Artificial Sequence
  Synthetic
uauaaaauuuaauugcu

SEQ ID NO: 769347 - RNA, 17 nt, Artificial Sequence
  Synthetic
auugacugcacauugcu

SEQ ID NO: 769348 - RNA, 17 nt, Artificial Sequence
  Synthetic
ccaguaauggcauugcu

SEQ ID NO: 769349 - RNA, 17 nt, Artificial Sequence
  Synthetic
aggauucaugcauugcu

SEQ ID NO: 769350 - RNA, 17 nt, Artificial Sequence
  Synthetic
cuauaccacagauugcu

SEQ ID NO: 769351 - RNA, 17 nt, Artificial Sequence
  Synthetic
caaguaaugagauugcu

SEQ ID NO: 769352 - RNA, 17 nt, Artificial Sequence
  Synthetic
uuaaaauugagauugcu

SEQ ID NO: 769353 - RNA, 17 nt, Artificial Sequence
  Synthetic
agucccacuagauugcu

SEQ ID NO: 769354 - RNA, 17 nt, Artificial Sequence
  Synthetic
augagaaguagauugcu

SEQ ID NO: 769355 - RNA, 17 nt, Artificial Sequence
  Synthetic
ccaauaaugggauugcu

SEQ ID NO: 769356 - RNA, 17 nt, Artificial Sequence
  Synthetic
ccaguaaugggauugcu

SEQ ID NO: 769357 - RNA, 17 nt, Artificial Sequence
  Synthetic
ucaguaaugggauugcu

SEQ ID NO: 769358 - RNA, 17 nt, Artificial Sequence
  Synthetic
caggauaggugauugcu

SEQ ID NO: 769359 - RNA, 17 nt, Artificial Sequence
  Synthetic
ugcuggaguauauugcu

SEQ ID NO: 769360 - RNA, 17 nt, Artificial Sequence
  Synthetic
uuuuagcugcuauugcu

SEQ ID NO: 769361 - RNA, 17 nt, Artificial Sequence
  Synthetic
cagauagcaguauugcu

SEQ ID NO: 769362 - RNA, 17 nt, Artificial Sequence
  Synthetic
uucugccuuguauugcu

SEQ ID NO: 769363 - RNA, 17 nt, Artificial Sequence
  Synthetic
uuuucuuuuguauugcu

SEQ ID NO: 769364 - RNA, 17 nt, Artificial Sequence
  Synthetic
agaaagccauuauugcu

SEQ ID NO: 769365 - RNA, 17 nt, Artificial Sequence
  Synthetic
cacaaaaaggacuugcu

SEQ ID NO: 769366 - RNA, 17 nt, Artificial Sequence
  Synthetic
ugccugcccaccuugcu

SEQ ID NO: 769367 - RNA, 17 nt, Artificial Sequence
  Synthetic
uaugucacuaccuugcu

SEQ ID NO: 769368 - RNA, 17 nt, Artificial Sequence
  Synthetic
cuagcccuucccuugcu

SEQ ID NO: 769369 - RNA, 17 nt, Artificial Sequence
  Synthetic
aaaaaaauguccuugcu

SEQ ID NO: 769370 - RNA, 17 nt, Artificial Sequence
  Synthetic
auuuuccucagcuugcu

SEQ ID NO: 769371 - RNA, 17 nt, Artificial Sequence
  Synthetic
cucaucucuagcuugcu

SEQ ID NO: 769372 - RNA, 17 nt, Artificial Sequence
  Synthetic
cugucugccugcuugcu

SEQ ID NO: 769373 - RNA, 17 nt, Artificial Sequence
  Synthetic
cauacagucugcuugcu

SEQ ID NO: 769374 - RNA, 17 nt, Artificial Sequence
  Synthetic
aagcuuuuaaucuugcu

SEQ ID NO: 769375 - RNA, 17 nt, Artificial Sequence
  Synthetic
uuggcugucaucuugcu

SEQ ID NO: 769376 - RNA, 17 nt, Artificial Sequence
  Synthetic
auucugauggucuugcu

SEQ ID NO: 769377 - RNA, 17 nt, Artificial Sequence
  Synthetic
uguuggccugucuugcu

SEQ ID NO: 769378 - RNA, 17 nt, Artificial Sequence
  Synthetic
ucuccaucauucuugcu

SEQ ID NO: 769379 - RNA, 17 nt, Artificial Sequence
  Synthetic
aguauagaguucuugcu

SEQ ID NO: 769380 - RNA, 17 nt, Artificial Sequence
  Synthetic
aauuugcugaaguugcu

SEQ ID NO: 769381 - RNA, 17 nt, Artificial Sequence
  Synthetic
ucauucucccaguugcu

SEQ ID NO: 769382 - RNA, 17 nt, Artificial Sequence
  Synthetic
caaccuccagaguugcu

SEQ ID NO: 769383 - RNA, 17 nt, Artificial Sequence
  Synthetic
uaggaagcagaguugcu

SEQ ID NO: 769384 - RNA, 17 nt, Artificial Sequence
  Synthetic
cuuuuagccuaguugcu

SEQ ID NO: 769385 - RNA, 17 nt, Artificial Sequence
  Synthetic
auucauuuuggguugcu

SEQ ID NO: 769386 - RNA, 17 nt, Artificial Sequence
  Synthetic
ucugauacacuguugcu

SEQ ID NO: 769387 - RNA, 17 nt, Artificial Sequence
  Synthetic
ugcagugaaguguugcu

SEQ ID NO: 769388 - RNA, 17 nt, Artificial Sequence
  Synthetic
ugagugagaguguugcu

SEQ ID NO: 769389 - RNA, 17 nt, Artificial Sequence
  Synthetic
uuaugguucuuguugcu

SEQ ID NO: 769390 - RNA, 17 nt, Artificial Sequence
  Synthetic
acagcugggaauuugcu

SEQ ID NO: 769391 - RNA, 17 nt, Artificial Sequence
  Synthetic
uuugcuuuccauuugcu

SEQ ID NO: 769392 - RNA, 17 nt, Artificial Sequence
  Synthetic
uuuguuuuccauuugcu

SEQ ID NO: 769393 - RNA, 17 nt, Artificial Sequence
  Synthetic
uggcacaggcauuugcu

SEQ ID NO: 769394 - RNA, 17 nt, Artificial Sequence
  Synthetic
aaagaauaucauuugcu

SEQ ID NO: 769395 - RNA, 17 nt, Artificial Sequence
  Synthetic
ugaaucauuuauuugcu

SEQ ID NO: 769396 - RNA, 17 nt, Artificial Sequence
  Synthetic
cuguuuugcccuuugcu

SEQ ID NO: 769397 - RNA, 17 nt, Artificial Sequence
  Synthetic
uucaaauuugcuuugcu

SEQ ID NO: 769398 - RNA, 17 nt, Artificial Sequence
  Synthetic
acuugcaucucuuugcu

SEQ ID NO: 769399 - RNA, 17 nt, Artificial Sequence
  Synthetic
uuucuaaguucuuugcu

SEQ ID NO: 769400 - RNA, 17 nt, Artificial Sequence
  Synthetic
cuaacucugcguuugcu

SEQ ID NO: 769401 - RNA, 17 nt, Artificial Sequence
  Synthetic
auugguugagguuugcu

SEQ ID NO: 769402 - RNA, 17 nt, Artificial Sequence
  Synthetic
ugccaauccuguuugcu

SEQ ID NO: 769403 - RNA, 17 nt, Artificial Sequence
  Synthetic
ugugccauguguuugcu

SEQ ID NO: 769404 - RNA, 17 nt, Artificial Sequence
  Synthetic
ccuugacaaauuuugcu

SEQ ID NO: 769405 - RNA, 17 nt, Artificial Sequence
  Synthetic
uuuuacacuauuuugcu

SEQ ID NO: 769406 - RNA, 17 nt, Artificial Sequence
  Synthetic
auauccuuucuuuugcu

SEQ ID NO: 769407 - RNA, 17 nt, Artificial Sequence
  Synthetic
acagaguugguuuugcu

SEQ ID NO: 769408 - RNA, 17 nt, Artificial Sequence
  Synthetic
ucuuauauauuuuugcu

SEQ ID NO: 769409 - RNA, 17 nt, Artificial Sequence
  Synthetic
uuuccagguuuuuugcu

SEQ ID NO: 769410 - RNA, 17 nt, Artificial Sequence
  Synthetic
caaagagaaaaaaaucu

SEQ ID NO: 769411 - RNA, 17 nt, Artificial Sequence
  Synthetic
uauuuagaaaaaaaucu

SEQ ID NO: 769412 - RNA, 17 nt, Artificial Sequence
  Synthetic
aaagagacaaaaaaucu

SEQ ID NO: 769413 - RNA, 17 nt, Artificial Sequence
  Synthetic
agccaaggaaaaaaucu

SEQ ID NO: 769414 - RNA, 17 nt, Artificial Sequence
  Synthetic
auaagaauaaaaaaucu

SEQ ID NO: 769415 - RNA, 17 nt, Artificial Sequence
  Synthetic
agcacacacaaaaaucu

SEQ ID NO: 769416 - RNA, 17 nt, Artificial Sequence
  Synthetic
uaaugccauaaaaaucu

SEQ ID NO: 769417 - RNA, 17 nt, Artificial Sequence
  Synthetic
aguugaaaacaaaaucu

SEQ ID NO: 769418 - RNA, 17 nt, Artificial Sequence
  Synthetic
auccaguaacaaaaucu

SEQ ID NO: 769419 - RNA, 17 nt, Artificial Sequence
  Synthetic
uuccuaaggcaaaaucu

SEQ ID NO: 769420 - RNA, 17 nt, Artificial Sequence
  Synthetic
uguuggagucaaaaucu

SEQ ID NO: 769421 - RNA, 17 nt, Artificial Sequence
  Synthetic
aaggaaugucaaaaucu

SEQ ID NO: 769422 - RNA, 17 nt, Artificial Sequence
  Synthetic
ucuuaaccagaaaaucu

SEQ ID NO: 769423 - RNA, 17 nt, Artificial Sequence
  Synthetic
ucugaagaugaaaaucu

SEQ ID NO: 769424 - RNA, 17 nt, Artificial Sequence
  Synthetic
acuuuuaaauaaaaucu

SEQ ID NO: 769425 - RNA, 17 nt, Artificial Sequence
  Synthetic
auccuagaauaaaaucu

SEQ ID NO: 769426 - RNA, 17 nt, Artificial Sequence
  Synthetic
cccaaguuauaaaaucu

SEQ ID NO: 769427 - RNA, 17 nt, Artificial Sequence
  Synthetic
uaaaugaauuaaaaucu

SEQ ID NO: 769428 - RNA, 17 nt, Artificial Sequence
  Synthetic
aaguuccauuaaaaucu

SEQ ID NO: 769429 - RNA, 17 nt, Artificial Sequence
  Synthetic
cauauuauuuaaaaucu

SEQ ID NO: 769430 - RNA, 17 nt, Artificial Sequence
  Synthetic
cugacuuccacaaaucu

SEQ ID NO: 769431 - RNA, 17 nt, Artificial Sequence
  Synthetic
uggaagcugccaaaucu

SEQ ID NO: 769432 - RNA, 17 nt, Artificial Sequence
  Synthetic
auuaaaacuccaaaucu

SEQ ID NO: 769433 - RNA, 17 nt, Artificial Sequence
  Synthetic
agguugcuuccaaaucu

SEQ ID NO: 769434 - RNA, 17 nt, Artificial Sequence
  Synthetic
cucucuagggcaaaucu

SEQ ID NO: 769435 - RNA, 17 nt, Artificial Sequence
  Synthetic
acaacaguggcaaaucu

SEQ ID NO: 769436 - RNA, 17 nt, Artificial Sequence
  Synthetic
auggcaucugcaaaucu

SEQ ID NO: 769437 - RNA, 17 nt, Artificial Sequence
  Synthetic
uaaggcauuucaaaucu

SEQ ID NO: 769438 - RNA, 17 nt, Artificial Sequence
  Synthetic
auuuauauuggaaaucu

SEQ ID NO: 769439 - RNA, 17 nt, Artificial Sequence
  Synthetic
uacauccucugaaaucu

SEQ ID NO: 769440 - RNA, 17 nt, Artificial Sequence
  Synthetic
uauauccucugaaaucu

SEQ ID NO: 769441 - RNA, 17 nt, Artificial Sequence
  Synthetic
ucuaugaugugaaaucu

SEQ ID NO: 769442 - RNA, 17 nt, Artificial Sequence
  Synthetic
uaauccuucauaaaucu

SEQ ID NO: 769443 - RNA, 17 nt, Artificial Sequence
  Synthetic
acgcuaguuauaaaucu

SEQ ID NO: 769444 - RNA, 17 nt, Artificial Sequence
  Synthetic
accagaggacuaaaucu

SEQ ID NO: 769445 - RNA, 17 nt, Artificial Sequence
  Synthetic
agcacuaggcuaaaucu

SEQ ID NO: 769446 - RNA, 17 nt, Artificial Sequence
  Synthetic
cugauuaugcuaaaucu

SEQ ID NO: 769447 - RNA, 17 nt, Artificial Sequence
  Synthetic
uggguaauucuaaaucu

SEQ ID NO: 769448 - RNA, 17 nt, Artificial Sequence
  Synthetic
uugcugacuguaaaucu

SEQ ID NO: 769449 - RNA, 17 nt, Artificial Sequence
  Synthetic
agcagaccauuaaaucu

SEQ ID NO: 769450 - RNA, 17 nt, Artificial Sequence
  Synthetic
agauuuuauuuaaaucu

SEQ ID NO: 769451 - RNA, 17 nt, Artificial Sequence
  Synthetic
uuguuuuaaaacaaucu

SEQ ID NO: 769452 - RNA, 17 nt, Artificial Sequence
  Synthetic
cauuagacaaacaaucu

SEQ ID NO: 769453 - RNA, 17 nt, Artificial Sequence
  Synthetic
aaaugugauaacaaucu

SEQ ID NO: 769454 - RNA, 17 nt, Artificial Sequence
  Synthetic
ucaaaaaggcacaaucu

SEQ ID NO: 769455 - RNA, 17 nt, Artificial Sequence
  Synthetic
augcaauggcacaaucu

SEQ ID NO: 769456 - RNA, 17 nt, Artificial Sequence
  Synthetic
uugcaauggcacaaucu

SEQ ID NO: 769457 - RNA, 17 nt, Artificial Sequence
  Synthetic
auuaccagucacaaucu

SEQ ID NO: 769458 - RNA, 17 nt, Artificial Sequence
  Synthetic
uccuaaauagacaaucu

SEQ ID NO: 769459 - RNA, 17 nt, Artificial Sequence
  Synthetic
cuaaauuuagacaaucu

SEQ ID NO: 769460 - RNA, 17 nt, Artificial Sequence
  Synthetic
aagaagcccuacaaucu

SEQ ID NO: 769461 - RNA, 17 nt, Artificial Sequence
  Synthetic
acuuaaauguacaaucu

SEQ ID NO: 769462 - RNA, 17 nt, Artificial Sequence
  Synthetic
uauaaauuacccaaucu

SEQ ID NO: 769463 - RNA, 17 nt, Artificial Sequence
  Synthetic
cugggacaauccaaucu

SEQ ID NO: 769464 - RNA, 17 nt, Artificial Sequence
  Synthetic
uuuaacuaaagcaaucu

SEQ ID NO: 769465 - RNA, 17 nt, Artificial Sequence
  Synthetic
ugaacguacugcaaucu

SEQ ID NO: 769466 - RNA, 17 nt, Artificial Sequence
  Synthetic
gugcaguggugcaaucu

SEQ ID NO: 769467 - RNA, 17 nt, Artificial Sequence
  Synthetic
ugcuggcugugcaaucu

SEQ ID NO: 769468 - RNA, 17 nt, Artificial Sequence
  Synthetic
aguuugcuuugcaaucu

SEQ ID NO: 769469 - RNA, 17 nt, Artificial Sequence
  Synthetic
uuuuuuuuugucaaucu

SEQ ID NO: 769470 - RNA, 17 nt, Artificial Sequence
  Synthetic
cugagaucaaagaaucu

SEQ ID NO: 769471 - RNA, 17 nt, Artificial Sequence
  Synthetic
uaauaaaugaagaaucu

SEQ ID NO: 769472 - RNA, 17 nt, Artificial Sequence
  Synthetic
auuauaauuaagaaucu

SEQ ID NO: 769473 - RNA, 17 nt, Artificial Sequence
  Synthetic
uaugguacacagaaucu

SEQ ID NO: 769474 - RNA, 17 nt, Artificial Sequence
  Synthetic
acuaccagucagaaucu

SEQ ID NO: 769475 - RNA, 17 nt, Artificial Sequence
  Synthetic
agagagagagagaaucu

SEQ ID NO: 769476 - RNA, 17 nt, Artificial Sequence
  Synthetic
cccuuauccuagaaucu

SEQ ID NO: 769477 - RNA, 17 nt, Artificial Sequence
  Synthetic
agaaauacguagaaucu

SEQ ID NO: 769478 - RNA, 17 nt, Artificial Sequence
  Synthetic
acuugcuuuacgaaucu

SEQ ID NO: 769479 - RNA, 17 nt, Artificial Sequence
  Synthetic
uuuccaaaggggaaucu

SEQ ID NO: 769480 - RNA, 17 nt, Artificial Sequence
  Synthetic
uccugcuaggggaaucu

SEQ ID NO: 769481 - RNA, 17 nt, Artificial Sequence
  Synthetic
cuuguaugauggaaucu

SEQ ID NO: 769482 - RNA, 17 nt, Artificial Sequence
  Synthetic
acuugcuuuaugaaucu

SEQ ID NO: 769483 - RNA, 17 nt, Artificial Sequence
  Synthetic
uuaaacauacugaaucu

SEQ ID NO: 769484 - RNA, 17 nt, Artificial Sequence
  Synthetic
auagaguuucugaaucu

SEQ ID NO: 769485 - RNA, 17 nt, Artificial Sequence
  Synthetic
uuguaauuggugaaucu

SEQ ID NO: 769486 - RNA, 17 nt, Artificial Sequence
  Synthetic
ccucaucucuugaaucu

SEQ ID NO: 769487 - RNA, 17 nt, Artificial Sequence
  Synthetic
uuccuguaaaauaaucu

SEQ ID NO: 769488 - RNA, 17 nt, Artificial Sequence
  Synthetic
uauagcucaaauaaucu

SEQ ID NO: 769489 - RNA, 17 nt, Artificial Sequence
  Synthetic
ucaugcaguaauaaucu

SEQ ID NO: 769490 - RNA, 17 nt, Artificial Sequence
  Synthetic
aaagaaguugauaaucu

SEQ ID NO: 769491 - RNA, 17 nt, Artificial Sequence
  Synthetic
aaagucaaaacuaaucu

SEQ ID NO: 769492 - RNA, 17 nt, Artificial Sequence
  Synthetic
cuguuuuugccuaaucu

SEQ ID NO: 769493 - RNA, 17 nt, Artificial Sequence
  Synthetic
aacauguaaucuaaucu

SEQ ID NO: 769494 - RNA, 17 nt, Artificial Sequence
  Synthetic
uaauaguuugguaaucu

SEQ ID NO: 769495 - RNA, 17 nt, Artificial Sequence
  Synthetic
uauuuauauuguaaucu

SEQ ID NO: 769496 - RNA, 17 nt, Artificial Sequence
  Synthetic
uauguugcuuguaaucu

SEQ ID NO: 769497 - RNA, 17 nt, Artificial Sequence
  Synthetic
caacucauuuguaaucu

SEQ ID NO: 769498 - RNA, 17 nt, Artificial Sequence
  Synthetic
cuaguuucaauuaaucu

SEQ ID NO: 769499 - RNA, 17 nt, Artificial Sequence
  Synthetic
cccuucucccuuaaucu

SEQ ID NO: 769500 - RNA, 17 nt, Artificial Sequence
  Synthetic
uuauugacucuuaaucu

SEQ ID NO: 769501 - RNA, 17 nt, Artificial Sequence
  Synthetic
ucuuuaugguuuaaucu

SEQ ID NO: 769502 - RNA, 17 nt, Artificial Sequence
  Synthetic
cuuuugaauuuuaaucu

SEQ ID NO: 769503 - RNA, 17 nt, Artificial Sequence
  Synthetic
ucaggaaggaaacaucu

SEQ ID NO: 769504 - RNA, 17 nt, Artificial Sequence
  Synthetic
agaacaccuaaacaucu

SEQ ID NO: 769505 - RNA, 17 nt, Artificial Sequence
  Synthetic
cucauuuuuaaacaucu

SEQ ID NO: 769506 - RNA, 17 nt, Artificial Sequence
  Synthetic
ugucauuugcaacaucu

SEQ ID NO: 769507 - RNA, 17 nt, Artificial Sequence
  Synthetic
uagaaauaagaacaucu

SEQ ID NO: 769508 - RNA, 17 nt, Artificial Sequence
  Synthetic
aagaguaaaccacaucu

SEQ ID NO: 769509 - RNA, 17 nt, Artificial Sequence
  Synthetic
uauuuacaaucacaucu

SEQ ID NO: 769510 - RNA, 17 nt, Artificial Sequence
  Synthetic
ugagguagaagacaucu

SEQ ID NO: 769511 - RNA, 17 nt, Artificial Sequence
  Synthetic
caaaaagagagacaucu

SEQ ID NO: 769512 - RNA, 17 nt, Artificial Sequence
  Synthetic
auguguacaugacaucu

SEQ ID NO: 769513 - RNA, 17 nt, Artificial Sequence
  Synthetic
ucccucccaugacaucu

SEQ ID NO: 769514 - RNA, 17 nt, Artificial Sequence
  Synthetic
cauccuacuauacaucu

SEQ ID NO: 769515 - RNA, 17 nt, Artificial Sequence
  Synthetic
augccuauuauacaucu

SEQ ID NO: 769516 - RNA, 17 nt, Artificial Sequence
  Synthetic
cuucuacgucuacaucu

SEQ ID NO: 769517 - RNA, 17 nt, Artificial Sequence
  Synthetic
uagauuacaguacaucu

SEQ ID NO: 769518 - RNA, 17 nt, Artificial Sequence
  Synthetic
uuuuugguuguacaucu

SEQ ID NO: 769519 - RNA, 17 nt, Artificial Sequence
  Synthetic
aauaauccuuuacaucu

SEQ ID NO: 769520 - RNA, 17 nt, Artificial Sequence
  Synthetic
aggguaaccaaccaucu

SEQ ID NO: 769521 - RNA, 17 nt, Artificial Sequence
  Synthetic
caacaucagcaccaucu

SEQ ID NO: 769522 - RNA, 17 nt, Artificial Sequence
  Synthetic
aguugauuucaccaucu

SEQ ID NO: 769523 - RNA, 17 nt, Artificial Sequence
  Synthetic
acaggguuucaccaucu

SEQ ID NO: 769524 - RNA, 17 nt, Artificial Sequence
  Synthetic
acgguguuucaccaucu

SEQ ID NO: 769525 - RNA, 17 nt, Artificial Sequence
  Synthetic
aguugggcagaccaucu

SEQ ID NO: 769526 - RNA, 17 nt, Artificial Sequence
  Synthetic
aguaggauguaccaucu

SEQ ID NO: 769527 - RNA, 17 nt, Artificial Sequence
  Synthetic
aggugauccacccaucu

SEQ ID NO: 769528 - RNA, 17 nt, Artificial Sequence
  Synthetic
aaucucuuuacccaucu

SEQ ID NO: 769529 - RNA, 17 nt, Artificial Sequence
  Synthetic
agaugaucugcccaucu

SEQ ID NO: 769530 - RNA, 17 nt, Artificial Sequence
  Synthetic
cgaauuuugagccaucu

SEQ ID NO: 769531 - RNA, 17 nt, Artificial Sequence
  Synthetic
auaccuaguggccaucu

SEQ ID NO: 769532 - RNA, 17 nt, Artificial Sequence
  Synthetic
cucccaggcugccaucu

SEQ ID NO: 769533 - RNA, 17 nt, Artificial Sequence
  Synthetic
acauuuuauugccaucu

SEQ ID NO: 769534 - RNA, 17 nt, Artificial Sequence
  Synthetic
agcugggccauccaucu

SEQ ID NO: 769535 - RNA, 17 nt, Artificial Sequence
  Synthetic
ccaaacaagauccaucu

SEQ ID NO: 769536 - RNA, 17 nt, Artificial Sequence
  Synthetic
agagugagacuccaucu

SEQ ID NO: 769537 - RNA, 17 nt, Artificial Sequence
  Synthetic
ugaugguaucuccaucu

SEQ ID NO: 769538 - RNA, 17 nt, Artificial Sequence
  Synthetic
ccucaguuucuccaucu

SEQ ID NO: 769539 - RNA, 17 nt, Artificial Sequence
  Synthetic
aggacuuaaguccaucu

SEQ ID NO: 769540 - RNA, 17 nt, Artificial Sequence
  Synthetic
ugagaacacguccaucu

SEQ ID NO: 769541 - RNA, 17 nt, Artificial Sequence
  Synthetic
uggugugaguuccaucu

SEQ ID NO: 769542 - RNA, 17 nt, Artificial Sequence
  Synthetic
cucuauggccagcaucu

SEQ ID NO: 769543 - RNA, 17 nt, Artificial Sequence
  Synthetic
cagccucccgagcaucu

SEQ ID NO: 769544 - RNA, 17 nt, Artificial Sequence
  Synthetic
cugcugagcaggcaucu

SEQ ID NO: 769545 - RNA, 17 nt, Artificial Sequence
  Synthetic
uuuccauaugggcaucu

SEQ ID NO: 769546 - RNA, 17 nt, Artificial Sequence
  Synthetic
uguguuuuuuggcaucu

SEQ ID NO: 769547 - RNA, 17 nt, Artificial Sequence
  Synthetic
aaaaauugauugcaucu

SEQ ID NO: 769548 - RNA, 17 nt, Artificial Sequence
  Synthetic
accuuacagaaucaucu

SEQ ID NO: 769549 - RNA, 17 nt, Artificial Sequence
  Synthetic
uuuugguaacaucaucu

SEQ ID NO: 769550 - RNA, 17 nt, Artificial Sequence
  Synthetic
caaaauugacaucaucu

SEQ ID NO: 769551 - RNA, 17 nt, Artificial Sequence
  Synthetic
accuuucagcaucaucu

SEQ ID NO: 769552 - RNA, 17 nt, Artificial Sequence
  Synthetic
uuauuuaaugaucaucu

SEQ ID NO: 769553 - RNA, 17 nt, Artificial Sequence
  Synthetic
uccgggcaauaucaucu

SEQ ID NO: 769554 - RNA, 17 nt, Artificial Sequence
  Synthetic
auuauugucucucaucu

SEQ ID NO: 769555 - RNA, 17 nt, Artificial Sequence
  Synthetic
uauuugcuuucucaucu

SEQ ID NO: 769556 - RNA, 17 nt, Artificial Sequence
  Synthetic
ccaucaacccgucaucu

SEQ ID NO: 769557 - RNA, 17 nt, Artificial Sequence
  Synthetic
accauugauggucaucu

SEQ ID NO: 769558 - RNA, 17 nt, Artificial Sequence
  Synthetic
aacuuccucugucaucu

SEQ ID NO: 769559 - RNA, 17 nt, Artificial Sequence
  Synthetic
aucuuuuauugucaucu

SEQ ID NO: 769560 - RNA, 17 nt, Artificial Sequence
  Synthetic
uucuuuaguugucaucu

SEQ ID NO: 769561 - RNA, 17 nt, Artificial Sequence
  Synthetic
uacccccagauucaucu

SEQ ID NO: 769562 - RNA, 17 nt, Artificial Sequence
  Synthetic
uacaagucccuucaucu

SEQ ID NO: 769563 - RNA, 17 nt, Artificial Sequence
  Synthetic
aaagugaagcuucaucu

SEQ ID NO: 769564 - RNA, 17 nt, Artificial Sequence
  Synthetic
uccauacaucuucaucu

SEQ ID NO: 769565 - RNA, 17 nt, Artificial Sequence
  Synthetic
auugcacugguucaucu

SEQ ID NO: 769566 - RNA, 17 nt, Artificial Sequence
  Synthetic
acgucauuuguucaucu

SEQ ID NO: 769567 - RNA, 17 nt, Artificial Sequence
  Synthetic
cuauuugcauuucaucu

SEQ ID NO: 769568 - RNA, 17 nt, Artificial Sequence
  Synthetic
uuccacagauuucaucu

SEQ ID NO: 769569 - RNA, 17 nt, Artificial Sequence
  Synthetic
agucaaaaaaaagaucu

SEQ ID NO: 769570 - RNA, 17 nt, Artificial Sequence
  Synthetic
uuuaaggggaaagaucu

SEQ ID NO: 769571 - RNA, 17 nt, Artificial Sequence
  Synthetic
uagguaaugaaagaucu

SEQ ID NO: 769572 - RNA, 17 nt, Artificial Sequence
  Synthetic
uugauucuagaagaucu

SEQ ID NO: 769573 - RNA, 17 nt, Artificial Sequence
  Synthetic
acuuuaccauaagaucu

SEQ ID NO: 769574 - RNA, 17 nt, Artificial Sequence
  Synthetic
ugccaacuuuaagaucu

SEQ ID NO: 769575 - RNA, 17 nt, Artificial Sequence
  Synthetic
uuuaaacaaccagaucu

SEQ ID NO: 769576 - RNA, 17 nt, Artificial Sequence
  Synthetic
uccaauuuggcagaucu

SEQ ID NO: 769577 - RNA, 17 nt, Artificial Sequence
  Synthetic
aguacacagucagaucu

SEQ ID NO: 769578 - RNA, 17 nt, Artificial Sequence
  Synthetic
aaucuauguucagaucu

SEQ ID NO: 769579 - RNA, 17 nt, Artificial Sequence
  Synthetic
augcaguggugagaucu

SEQ ID NO: 769580 - RNA, 17 nt, Artificial Sequence
  Synthetic
ucugauucaguagaucu

SEQ ID NO: 769581 - RNA, 17 nt, Artificial Sequence
  Synthetic
gugcaauggcacgaucu

SEQ ID NO: 769582 - RNA, 17 nt, Artificial Sequence
  Synthetic
gugcaguggcacgaucu

SEQ ID NO: 769583 - RNA, 17 nt, Artificial Sequence
  Synthetic
gugcaguggcgcgaucu

SEQ ID NO: 769584 - RNA, 17 nt, Artificial Sequence
  Synthetic
gugcaauggugcgaucu

SEQ ID NO: 769585 - RNA, 17 nt, Artificial Sequence
  Synthetic
gugcaguggugcgaucu

SEQ ID NO: 769586 - RNA, 17 nt, Artificial Sequence
  Synthetic
aacaaucccaaggaucu

SEQ ID NO: 769587 - RNA, 17 nt, Artificial Sequence
  Synthetic
caucuuuggaaggaucu

SEQ ID NO: 769588 - RNA, 17 nt, Artificial Sequence
  Synthetic
cuaacuucuaaggaucu

SEQ ID NO: 769589 - RNA, 17 nt, Artificial Sequence
  Synthetic
acuaugagucaggaucu

SEQ ID NO: 769590 - RNA, 17 nt, Artificial Sequence
  Synthetic
ugcugaggguaggaucu

SEQ ID NO: 769591 - RNA, 17 nt, Artificial Sequence
  Synthetic
acucaugcaagggaucu

SEQ ID NO: 769592 - RNA, 17 nt, Artificial Sequence
  Synthetic
ugaaaaaugauggaucu

SEQ ID NO: 769593 - RNA, 17 nt, Artificial Sequence
  Synthetic
auuccucugauggaucu

SEQ ID NO: 769594 - RNA, 17 nt, Artificial Sequence
  Synthetic
cccagaauuguggaucu

SEQ ID NO: 769595 - RNA, 17 nt, Artificial Sequence
  Synthetic
aagaacuaaaaugaucu

SEQ ID NO: 769596 - RNA, 17 nt, Artificial Sequence
  Synthetic
cuauaaaccaaugaucu

SEQ ID NO: 769597 - RNA, 17 nt, Artificial Sequence
  Synthetic
aagcaagagaaugaucu

SEQ ID NO: 769598 - RNA, 17 nt, Artificial Sequence
  Synthetic
aacacauguaaugaucu

SEQ ID NO: 769599 - RNA, 17 nt, Artificial Sequence
  Synthetic
agaguuuuucaugaucu

SEQ ID NO: 769600 - RNA, 17 nt, Artificial Sequence
  Synthetic
ucaccaggcccugaucu

SEQ ID NO: 769601 - RNA, 17 nt, Artificial Sequence
  Synthetic
aauauuugcccugaucu

SEQ ID NO: 769602 - RNA, 17 nt, Artificial Sequence
  Synthetic
ccccgugaugcugaucu

SEQ ID NO: 769603 - RNA, 17 nt, Artificial Sequence
  Synthetic
ccacucuuaucugaucu

SEQ ID NO: 769604 - RNA, 17 nt, Artificial Sequence
  Synthetic
aggaaaaugggugaucu

SEQ ID NO: 769605 - RNA, 17 nt, Artificial Sequence
  Synthetic
cuugcuuuuggugaucu

SEQ ID NO: 769606 - RNA, 17 nt, Artificial Sequence
  Synthetic
uggucuagaugugaucu

SEQ ID NO: 769607 - RNA, 17 nt, Artificial Sequence
  Synthetic
ugucauaccugugaucu

SEQ ID NO: 769608 - RNA, 17 nt, Artificial Sequence
  Synthetic
accuucaucugugaucu

SEQ ID NO: 769609 - RNA, 17 nt, Artificial Sequence
  Synthetic
uguacaauuugugaucu

SEQ ID NO: 769610 - RNA, 17 nt, Artificial Sequence
  Synthetic
uuccagccccuugaucu

SEQ ID NO: 769611 - RNA, 17 nt, Artificial Sequence
  Synthetic
uuugacuugcuugaucu

SEQ ID NO: 769612 - RNA, 17 nt, Artificial Sequence
  Synthetic
ugcugaugucuugaucu

SEQ ID NO: 769613 - RNA, 17 nt, Artificial Sequence
  Synthetic
cauaauaguguugaucu

SEQ ID NO: 769614 - RNA, 17 nt, Artificial Sequence
  Synthetic
uuucuuguuguugaucu

SEQ ID NO: 769615 - RNA, 17 nt, Artificial Sequence
  Synthetic
ugcugguauuuugaucu

SEQ ID NO: 769616 - RNA, 17 nt, Artificial Sequence
  Synthetic
ucuuguccuuuugaucu

SEQ ID NO: 769617 - RNA, 17 nt, Artificial Sequence
  Synthetic
cuucauaguuuugaucu

SEQ ID NO: 769618 - RNA, 17 nt, Artificial Sequence
  Synthetic
cuuuguaguuuugaucu

SEQ ID NO: 769619 - RNA, 17 nt, Artificial Sequence
  Synthetic
caaaaaauaaaauaucu

SEQ ID NO: 769620 - RNA, 17 nt, Artificial Sequence
  Synthetic
uauaaaauaaaauaucu

SEQ ID NO: 769621 - RNA, 17 nt, Artificial Sequence
  Synthetic
uugugucacaaauaucu

SEQ ID NO: 769622 - RNA, 17 nt, Artificial Sequence
  Synthetic
uguuugaccaaauaucu

SEQ ID NO: 769623 - RNA, 17 nt, Artificial Sequence
  Synthetic
aaggcuaggaaauaucu

SEQ ID NO: 769624 - RNA, 17 nt, Artificial Sequence
  Synthetic
uaauacuuuaaauaucu

SEQ ID NO: 769625 - RNA, 17 nt, Artificial Sequence
  Synthetic
uuugguucagaauaucu

SEQ ID NO: 769626 - RNA, 17 nt, Artificial Sequence
  Synthetic
uuuucaauagaauaucu

SEQ ID NO: 769627 - RNA, 17 nt, Artificial Sequence
  Synthetic
caauuagaauaauaucu

SEQ ID NO: 769628 - RNA, 17 nt, Artificial Sequence
  Synthetic
uacuaggcuuaauaucu

SEQ ID NO: 769629 - RNA, 17 nt, Artificial Sequence
  Synthetic
ugcugggcuuaauaucu

SEQ ID NO: 769630 - RNA, 17 nt, Artificial Sequence
  Synthetic
aaagcucucacauaucu

SEQ ID NO: 769631 - RNA, 17 nt, Artificial Sequence
  Synthetic
agguugauuccauaucu

SEQ ID NO: 769632 - RNA, 17 nt, Artificial Sequence
  Synthetic
uaaaaacaaugauaucu

SEQ ID NO: 769633 - RNA, 17 nt, Artificial Sequence
  Synthetic
augcuguauugauaucu

SEQ ID NO: 769634 - RNA, 17 nt, Artificial Sequence
  Synthetic
aaugagaugauauaucu

SEQ ID NO: 769635 - RNA, 17 nt, Artificial Sequence
  Synthetic
uauauauauauauaucu

SEQ ID NO: 769636 - RNA, 17 nt, Artificial Sequence
  Synthetic
aaguugauucuauaucu

SEQ ID NO: 769637 - RNA, 17 nt, Artificial Sequence
  Synthetic
aauuaaacuguauaucu

SEQ ID NO: 769638 - RNA, 17 nt, Artificial Sequence
  Synthetic
uuuuauuguguauaucu

SEQ ID NO: 769639 - RNA, 17 nt, Artificial Sequence
  Synthetic
aaagccgaauuauaucu

SEQ ID NO: 769640 - RNA, 17 nt, Artificial Sequence
  Synthetic
agucauauauuauaucu

SEQ ID NO: 769641 - RNA, 17 nt, Artificial Sequence
  Synthetic
uuuuaucuauuauaucu

SEQ ID NO: 769642 - RNA, 17 nt, Artificial Sequence
  Synthetic
acugcuucuuuauaucu

SEQ ID NO: 769643 - RNA, 17 nt, Artificial Sequence
  Synthetic
auuuacauaaacuaucu

SEQ ID NO: 769644 - RNA, 17 nt, Artificial Sequence
  Synthetic
ucuaccaugaacuaucu

SEQ ID NO: 769645 - RNA, 17 nt, Artificial Sequence
  Synthetic
uacuauguucacuaucu

SEQ ID NO: 769646 - RNA, 17 nt, Artificial Sequence
  Synthetic
uaguuaauagacuaucu

SEQ ID NO: 769647 - RNA, 17 nt, Artificial Sequence
  Synthetic
auacauuucuacuaucu

SEQ ID NO: 769648 - RNA, 17 nt, Artificial Sequence
  Synthetic
caugaaguuuacuaucu

SEQ ID NO: 769649 - RNA, 17 nt, Artificial Sequence
  Synthetic
uuuuacuguaccuaucu

SEQ ID NO: 769650 - RNA, 17 nt, Artificial Sequence
  Synthetic
uucuuaugccccuaucu

SEQ ID NO: 769651 - RNA, 17 nt, Artificial Sequence
  Synthetic
aacauuaacuccuaucu

SEQ ID NO: 769652 - RNA, 17 nt, Artificial Sequence
  Synthetic
uuacauaagaucuaucu

SEQ ID NO: 769653 - RNA, 17 nt, Artificial Sequence
  Synthetic
auaggggaacucuaucu

SEQ ID NO: 769654 - RNA, 17 nt, Artificial Sequence
  Synthetic
ugggcugagcucuaucu

SEQ ID NO: 769655 - RNA, 17 nt, Artificial Sequence
  Synthetic
uacauuucaaaguaucu

SEQ ID NO: 769656 - RNA, 17 nt, Artificial Sequence
  Synthetic
caaacucccaaguaucu

SEQ ID NO: 769657 - RNA, 17 nt, Artificial Sequence
  Synthetic
aaggccuugcaguaucu

SEQ ID NO: 769658 - RNA, 17 nt, Artificial Sequence
  Synthetic
cauuauuaagaguaucu

SEQ ID NO: 769659 - RNA, 17 nt, Artificial Sequence
  Synthetic
uuggacacagaguaucu

SEQ ID NO: 769660 - RNA, 17 nt, Artificial Sequence
  Synthetic
augucuguggaguaucu

SEQ ID NO: 769661 - RNA, 17 nt, Artificial Sequence
  Synthetic
cagccuccugaguaucu

SEQ ID NO: 769662 - RNA, 17 nt, Artificial Sequence
  Synthetic
cggccuccugaguaucu

SEQ ID NO: 769663 - RNA, 17 nt, Artificial Sequence
  Synthetic
aauuugaauuaguaucu

SEQ ID NO: 769664 - RNA, 17 nt, Artificial Sequence
  Synthetic
cauguucuuucguaucu

SEQ ID NO: 769665 - RNA, 17 nt, Artificial Sequence
  Synthetic
agaucauagagguaucu

SEQ ID NO: 769666 - RNA, 17 nt, Artificial Sequence
  Synthetic
aauuauaguagguaucu

SEQ ID NO: 769667 - RNA, 17 nt, Artificial Sequence
  Synthetic
uaugaacauggguaucu

SEQ ID NO: 769668 - RNA, 17 nt, Artificial Sequence
  Synthetic
auaaaaguuauguaucu

SEQ ID NO: 769669 - RNA, 17 nt, Artificial Sequence
  Synthetic
caaaguuauguguaucu

SEQ ID NO: 769670 - RNA, 17 nt, Artificial Sequence
  Synthetic
uuuccaauuguguaucu

SEQ ID NO: 769671 - RNA, 17 nt, Artificial Sequence
  Synthetic
cauuuucaauuguaucu

SEQ ID NO: 769672 - RNA, 17 nt, Artificial Sequence
  Synthetic
aagaaaauauuguaucu

SEQ ID NO: 769673 - RNA, 17 nt, Artificial Sequence
  Synthetic
uacaaaaaaaauuaucu

SEQ ID NO: 769674 - RNA, 17 nt, Artificial Sequence
  Synthetic
acgacaaaaaauuaucu

SEQ ID NO: 769675 - RNA, 17 nt, Artificial Sequence
  Synthetic
aauuuuaaaaauuaucu

SEQ ID NO: 769676 - RNA, 17 nt, Artificial Sequence
  Synthetic
agucuguaaaauuaucu

SEQ ID NO: 769677 - RNA, 17 nt, Artificial Sequence
  Synthetic
uuuucuuucaauuaucu

SEQ ID NO: 769678 - RNA, 17 nt, Artificial Sequence
  Synthetic
uacaucaguaauuaucu

SEQ ID NO: 769679 - RNA, 17 nt, Artificial Sequence
  Synthetic
uaaguguguaauuaucu

SEQ ID NO: 769680 - RNA, 17 nt, Artificial Sequence
  Synthetic
auuuguauccauuaucu

SEQ ID NO: 769681 - RNA, 17 nt, Artificial Sequence
  Synthetic
aaccucucagauuaucu

SEQ ID NO: 769682 - RNA, 17 nt, Artificial Sequence
  Synthetic
cuugaauuugauuaucu

SEQ ID NO: 769683 - RNA, 17 nt, Artificial Sequence
  Synthetic
agaagcagcuauuaucu

SEQ ID NO: 769684 - RNA, 17 nt, Artificial Sequence
  Synthetic
ccagugcucuauuaucu

SEQ ID NO: 769685 - RNA, 17 nt, Artificial Sequence
  Synthetic
ucaaguccuuauuaucu

SEQ ID NO: 769686 - RNA, 17 nt, Artificial Sequence
  Synthetic
uaccaugcuuauuaucu

SEQ ID NO: 769687 - RNA, 17 nt, Artificial Sequence
  Synthetic
aagaugugaacuuaucu

SEQ ID NO: 769688 - RNA, 17 nt, Artificial Sequence
  Synthetic
uguguugauacuuaucu

SEQ ID NO: 769689 - RNA, 17 nt, Artificial Sequence
  Synthetic
uugugaagagcuuaucu

SEQ ID NO: 769690 - RNA, 17 nt, Artificial Sequence
  Synthetic
ccacaagaugcuuaucu

SEQ ID NO: 769691 - RNA, 17 nt, Artificial Sequence
  Synthetic
cccuaaucaucuuaucu

SEQ ID NO: 769692 - RNA, 17 nt, Artificial Sequence
  Synthetic
ccaacagucucuuaucu

SEQ ID NO: 769693 - RNA, 17 nt, Artificial Sequence
  Synthetic
augacuagaaguuaucu

SEQ ID NO: 769694 - RNA, 17 nt, Artificial Sequence
  Synthetic
cuugagucugguuaucu

SEQ ID NO: 769695 - RNA, 17 nt, Artificial Sequence
  Synthetic
auacagaaaauuuaucu

SEQ ID NO: 769696 - RNA, 17 nt, Artificial Sequence
  Synthetic
ccugagaacauuuaucu

SEQ ID NO: 769697 - RNA, 17 nt, Artificial Sequence
  Synthetic
ugggaagggauuuaucu

SEQ ID NO: 769698 - RNA, 17 nt, Artificial Sequence
  Synthetic
ugccagagccuuuaucu

SEQ ID NO: 769699 - RNA, 17 nt, Artificial Sequence
  Synthetic
aagcauucucuuuaucu

SEQ ID NO: 769700 - RNA, 17 nt, Artificial Sequence
  Synthetic
aaauuuuuucuuuaucu

SEQ ID NO: 769701 - RNA, 17 nt, Artificial Sequence
  Synthetic
cucugacauuuuuaucu

SEQ ID NO: 769702 - RNA, 17 nt, Artificial Sequence
  Synthetic
aaagcuuuuuuuuaucu

SEQ ID NO: 769703 - RNA, 17 nt, Artificial Sequence
  Synthetic
cauucauagaaaacucu

SEQ ID NO: 769704 - RNA, 17 nt, Artificial Sequence
  Synthetic
aucaacuagaaaacucu

SEQ ID NO: 769705 - RNA, 17 nt, Artificial Sequence
  Synthetic
ucucacuugaaaacucu

SEQ ID NO: 769706 - RNA, 17 nt, Artificial Sequence
  Synthetic
uagacuuauaaaacucu

SEQ ID NO: 769707 - RNA, 17 nt, Artificial Sequence
  Synthetic
acugaauguaaaacucu

SEQ ID NO: 769708 - RNA, 17 nt, Artificial Sequence
  Synthetic
cucaguuuccaaacucu

SEQ ID NO: 769709 - RNA, 17 nt, Artificial Sequence
  Synthetic
cucccaauucaaacucu

SEQ ID NO: 769710 - RNA, 17 nt, Artificial Sequence
  Synthetic
acugacacagaaacucu

SEQ ID NO: 769711 - RNA, 17 nt, Artificial Sequence
  Synthetic
aguaaaucagaaacucu

SEQ ID NO: 769712 - RNA, 17 nt, Artificial Sequence
  Synthetic
aaaacacuagaaacucu

SEQ ID NO: 769713 - RNA, 17 nt, Artificial Sequence
  Synthetic
uaacagaaauaaacucu

SEQ ID NO: 769714 - RNA, 17 nt, Artificial Sequence
  Synthetic
ugaaguugcuaaacucu

SEQ ID NO: 769715 - RNA, 17 nt, Artificial Sequence
  Synthetic
accaaugaaacaacucu

SEQ ID NO: 769716 - RNA, 17 nt, Artificial Sequence
  Synthetic
aaaugcugaacaacucu

SEQ ID NO: 769717 - RNA, 17 nt, Artificial Sequence
  Synthetic
ccacuucacucaacucu

SEQ ID NO: 769718 - RNA, 17 nt, Artificial Sequence
  Synthetic
cuggaaaauucaacucu

SEQ ID NO: 769719 - RNA, 17 nt, Artificial Sequence
  Synthetic
aacaagaggagaacucu

SEQ ID NO: 769720 - RNA, 17 nt, Artificial Sequence
  Synthetic
uuugaaucaggaacucu

SEQ ID NO: 769721 - RNA, 17 nt, Artificial Sequence
  Synthetic
aagaugagaggaacucu

SEQ ID NO: 769722 - RNA, 17 nt, Artificial Sequence
  Synthetic
ucugcccuaggaacucu

SEQ ID NO: 769723 - RNA, 17 nt, Artificial Sequence
  Synthetic
acugagccuugaacucu

SEQ ID NO: 769724 - RNA, 17 nt, Artificial Sequence
  Synthetic
auggguucuugaacucu

SEQ ID NO: 769725 - RNA, 17 nt, Artificial Sequence
  Synthetic
auuuugcaaauaacucu

SEQ ID NO: 769726 - RNA, 17 nt, Artificial Sequence
  Synthetic
cuauuacagauaacucu

SEQ ID NO: 769727 - RNA, 17 nt, Artificial Sequence
  Synthetic
cuaguaaaauuaacucu

SEQ ID NO: 769728 - RNA, 17 nt, Artificial Sequence
  Synthetic
ugggaacaucacacucu

SEQ ID NO: 769729 - RNA, 17 nt, Artificial Sequence
  Synthetic
uugacaacagacacucu

SEQ ID NO: 769730 - RNA, 17 nt, Artificial Sequence
  Synthetic
uuuauguaugacacucu

SEQ ID NO: 769731 - RNA, 17 nt, Artificial Sequence
  Synthetic
cuccccaacuacacucu

SEQ ID NO: 769732 - RNA, 17 nt, Artificial Sequence
  Synthetic
uuuuuuuuucccacucu

SEQ ID NO: 769733 - RNA, 17 nt, Artificial Sequence
  Synthetic
aauaggacauccacucu

SEQ ID NO: 769734 - RNA, 17 nt, Artificial Sequence
  Synthetic
ccaucagucuccacucu

SEQ ID NO: 769735 - RNA, 17 nt, Artificial Sequence
  Synthetic
uguaaucccagcacucu

SEQ ID NO: 769736 - RNA, 17 nt, Artificial Sequence
  Synthetic
cccagcaauugcacucu

SEQ ID NO: 769737 - RNA, 17 nt, Artificial Sequence
  Synthetic
ccaacaaggaucacucu

SEQ ID NO: 769738 - RNA, 17 nt, Artificial Sequence
  Synthetic
cugcuacuccucacucu

SEQ ID NO: 769739 - RNA, 17 nt, Artificial Sequence
  Synthetic
uaaaauaaucucacucu

SEQ ID NO: 769740 - RNA, 17 nt, Artificial Sequence
  Synthetic
uaugucagagucacucu

SEQ ID NO: 769741 - RNA, 17 nt, Artificial Sequence
  Synthetic
ugccucuucuucacucu

SEQ ID NO: 769742 - RNA, 17 nt, Artificial Sequence
  Synthetic
uuuguuuucuucacucu

SEQ ID NO: 769743 - RNA, 17 nt, Artificial Sequence
  Synthetic
cuuccgucuuucacucu

SEQ ID NO: 769744 - RNA, 17 nt, Artificial Sequence
  Synthetic
agagccauuuucacucu

SEQ ID NO: 769745 - RNA, 17 nt, Artificial Sequence
  Synthetic
ugucucuuuuucacucu

SEQ ID NO: 769746 - RNA, 17 nt, Artificial Sequence
  Synthetic
agauagcacaagacucu

SEQ ID NO: 769747 - RNA, 17 nt, Artificial Sequence
  Synthetic
uuguuaaccaagacucu

SEQ ID NO: 769748 - RNA, 17 nt, Artificial Sequence
  Synthetic
agacagucagagacucu

SEQ ID NO: 769749 - RNA, 17 nt, Artificial Sequence
  Synthetic
cagagaggggagacucu

SEQ ID NO: 769750 - RNA, 17 nt, Artificial Sequence
  Synthetic
acacuuuacuagacucu

SEQ ID NO: 769751 - RNA, 17 nt, Artificial Sequence
  Synthetic
caaguagcugggacucu

SEQ ID NO: 769752 - RNA, 17 nt, Artificial Sequence
  Synthetic
cuaucacaaaugacucu

SEQ ID NO: 769753 - RNA, 17 nt, Artificial Sequence
  Synthetic
acuccauuccugacucu

SEQ ID NO: 769754 - RNA, 17 nt, Artificial Sequence
  Synthetic
auuuaaaaauugacucu

SEQ ID NO: 769755 - RNA, 17 nt, Artificial Sequence
  Synthetic
acauuauuauugacucu

SEQ ID NO: 769756 - RNA, 17 nt, Artificial Sequence
  Synthetic
aucaucccacauacucu

SEQ ID NO: 769757 - RNA, 17 nt, Artificial Sequence
  Synthetic
uuauuuuaauauacucu

SEQ ID NO: 769758 - RNA, 17 nt, Artificial Sequence
  Synthetic
aagacuccauauacucu

SEQ ID NO: 769759 - RNA, 17 nt, Artificial Sequence
  Synthetic
acauacauauauacucu

SEQ ID NO: 769760 - RNA, 17 nt, Artificial Sequence
  Synthetic
aaaagagaaacuacucu

SEQ ID NO: 769761 - RNA, 17 nt, Artificial Sequence
  Synthetic
aagaauuuaacuacucu

SEQ ID NO: 769762 - RNA, 17 nt, Artificial Sequence
  Synthetic
aaaccuccugcuacucu

SEQ ID NO: 769763 - RNA, 17 nt, Artificial Sequence
  Synthetic
aaaccaggaucuacucu

SEQ ID NO: 769764 - RNA, 17 nt, Artificial Sequence
  Synthetic
ucugcagggucuacucu

SEQ ID NO: 769765 - RNA, 17 nt, Artificial Sequence
  Synthetic
ugguuaauguguacucu

SEQ ID NO: 769766 - RNA, 17 nt, Artificial Sequence
  Synthetic
uaugcuuacauuacucu

SEQ ID NO: 769767 - RNA, 17 nt, Artificial Sequence
  Synthetic
agaucggugauuacucu

SEQ ID NO: 769768 - RNA, 17 nt, Artificial Sequence
  Synthetic
aucuauucaaaaccucu

SEQ ID NO: 769769 - RNA, 17 nt, Artificial Sequence
  Synthetic
acaauaaagcaaccucu

SEQ ID NO: 769770 - RNA, 17 nt, Artificial Sequence
  Synthetic
cuaaaucaagaaccucu

SEQ ID NO: 769771 - RNA, 17 nt, Artificial Sequence
  Synthetic
aagcaaagugaaccucu

SEQ ID NO: 769772 - RNA, 17 nt, Artificial Sequence
  Synthetic
uucaggaauuaaccucu

SEQ ID NO: 769773 - RNA, 17 nt, Artificial Sequence
  Synthetic
aguuuguucacaccucu

SEQ ID NO: 769774 - RNA, 17 nt, Artificial Sequence
  Synthetic
uccuccauuacaccucu

SEQ ID NO: 769775 - RNA, 17 nt, Artificial Sequence
  Synthetic
cagacccccagaccucu

SEQ ID NO: 769776 - RNA, 17 nt, Artificial Sequence
  Synthetic
aucuucaucagaccucu

SEQ ID NO: 769777 - RNA, 17 nt, Artificial Sequence
  Synthetic
uugccuccuagaccucu

SEQ ID NO: 769778 - RNA, 17 nt, Artificial Sequence
  Synthetic
aagagcaaacgaccucu

SEQ ID NO: 769779 - RNA, 17 nt, Artificial Sequence
  Synthetic
uucuuccuuauaccucu

SEQ ID NO: 769780 - RNA, 17 nt, Artificial Sequence
  Synthetic
agagacuguguaccucu

SEQ ID NO: 769781 - RNA, 17 nt, Artificial Sequence
  Synthetic
cacauucaauuaccucu

SEQ ID NO: 769782 - RNA, 17 nt, Artificial Sequence
  Synthetic
ucuucuacauuaccucu

SEQ ID NO: 769783 - RNA, 17 nt, Artificial Sequence
  Synthetic
aagcuaugcuuaccucu

SEQ ID NO: 769784 - RNA, 17 nt, Artificial Sequence
  Synthetic
agaaagugguuaccucu

SEQ ID NO: 769785 - RNA, 17 nt, Artificial Sequence
  Synthetic
ccucucaacaacccucu

SEQ ID NO: 769786 - RNA, 17 nt, Artificial Sequence
  Synthetic
acuguaacacacccucu

SEQ ID NO: 769787 - RNA, 17 nt, Artificial Sequence
  Synthetic
ugagugcaccacccucu

SEQ ID NO: 769788 - RNA, 17 nt, Artificial Sequence
  Synthetic
auugccucccacccucu

SEQ ID NO: 769789 - RNA, 17 nt, Artificial Sequence
  Synthetic
ugccuauguaccccucu

SEQ ID NO: 769790 - RNA, 17 nt, Artificial Sequence
  Synthetic
uuauuuccagccccucu

SEQ ID NO: 769791 - RNA, 17 nt, Artificial Sequence
  Synthetic
ugacugugggccccucu

SEQ ID NO: 769792 - RNA, 17 nt, Artificial Sequence
  Synthetic
cuggcaggugccccucu

SEQ ID NO: 769793 - RNA, 17 nt, Artificial Sequence
  Synthetic
caauuuuuuuccccucu

SEQ ID NO: 769794 - RNA, 17 nt, Artificial Sequence
  Synthetic
auuuuuaucagcccucu

SEQ ID NO: 769795 - RNA, 17 nt, Artificial Sequence
  Synthetic
augugagugagcccucu

SEQ ID NO: 769796 - RNA, 17 nt, Artificial Sequence
  Synthetic
caucucaugugcccucu

SEQ ID NO: 769797 - RNA, 17 nt, Artificial Sequence
  Synthetic
aaaucaauuugcccucu

SEQ ID NO: 769798 - RNA, 17 nt, Artificial Sequence
  Synthetic
uacuaaaaaaucccucu

SEQ ID NO: 769799 - RNA, 17 nt, Artificial Sequence
  Synthetic
cagggauaaaucccucu

SEQ ID NO: 769800 - RNA, 17 nt, Artificial Sequence
  Synthetic
auauaguaccucccucu

SEQ ID NO: 769801 - RNA, 17 nt, Artificial Sequence
  Synthetic
agcauauuugucccucu

SEQ ID NO: 769802 - RNA, 17 nt, Artificial Sequence
  Synthetic
ucaccugacuucccucu

SEQ ID NO: 769803 - RNA, 17 nt, Artificial Sequence
  Synthetic
uguuccauguucccucu

SEQ ID NO: 769804 - RNA, 17 nt, Artificial Sequence
  Synthetic
ucucuaagaaagccucu

SEQ ID NO: 769805 - RNA, 17 nt, Artificial Sequence
  Synthetic
caaauucaucagccucu

SEQ ID NO: 769806 - RNA, 17 nt, Artificial Sequence
  Synthetic
cuguaaucucagccucu

SEQ ID NO: 769807 - RNA, 17 nt, Artificial Sequence
  Synthetic
aagacuugagagccucu

SEQ ID NO: 769808 - RNA, 17 nt, Artificial Sequence
  Synthetic
auagucucugagccucu

SEQ ID NO: 769809 - RNA, 17 nt, Artificial Sequence
  Synthetic
ucauuuuuugagccucu

SEQ ID NO: 769810 - RNA, 17 nt, Artificial Sequence
  Synthetic
caauuaaucacgccucu

SEQ ID NO: 769811 - RNA, 17 nt, Artificial Sequence
  Synthetic
cugcgaccuccgccucu

SEQ ID NO: 769812 - RNA, 17 nt, Artificial Sequence
  Synthetic
uuuccuuuuaggccucu

SEQ ID NO: 769813 - RNA, 17 nt, Artificial Sequence
  Synthetic
acaaggcauuggccucu

SEQ ID NO: 769814 - RNA, 17 nt, Artificial Sequence
  Synthetic
agaauaucaaugccucu

SEQ ID NO: 769815 - RNA, 17 nt, Artificial Sequence
  Synthetic
ugagugucacugccucu

SEQ ID NO: 769816 - RNA, 17 nt, Artificial Sequence
  Synthetic
auauacaggcugccucu

SEQ ID NO: 769817 - RNA, 17 nt, Artificial Sequence
  Synthetic
cugccaccucugccucu

SEQ ID NO: 769818 - RNA, 17 nt, Artificial Sequence
  Synthetic
cugcaacuucugccucu

SEQ ID NO: 769819 - RNA, 17 nt, Artificial Sequence
  Synthetic
ccccuuuuucugccucu

SEQ ID NO: 769820 - RNA, 17 nt, Artificial Sequence
  Synthetic
cacagacuguugccucu

SEQ ID NO: 769821 - RNA, 17 nt, Artificial Sequence
  Synthetic
aauuagcuguugccucu

SEQ ID NO: 769822 - RNA, 17 nt, Artificial Sequence
  Synthetic
agauaaucucauccucu

SEQ ID NO: 769823 - RNA, 17 nt, Artificial Sequence
  Synthetic
auaauauacuauccucu

SEQ ID NO: 769824 - RNA, 17 nt, Artificial Sequence
  Synthetic
uuaaguuucuauccucu

SEQ ID NO: 769825 - RNA, 17 nt, Artificial Sequence
  Synthetic
acagugccugcuccucu

SEQ ID NO: 769826 - RNA, 17 nt, Artificial Sequence
  Synthetic
acacgacauucuccucu

SEQ ID NO: 769827 - RNA, 17 nt, Artificial Sequence
  Synthetic
uggaacaacauuccucu

SEQ ID NO: 769828 - RNA, 17 nt, Artificial Sequence
  Synthetic
augauuucuauuccucu

SEQ ID NO: 769829 - RNA, 17 nt, Artificial Sequence
  Synthetic
augaauucucuuccucu

SEQ ID NO: 769830 - RNA, 17 nt, Artificial Sequence
  Synthetic
uagaagagaaaagcucu

SEQ ID NO: 769831 - RNA, 17 nt, Artificial Sequence
  Synthetic
auucaaccuaaagcucu

SEQ ID NO: 769832 - RNA, 17 nt, Artificial Sequence
  Synthetic
ugaaaauaccaagcucu

SEQ ID NO: 769833 - RNA, 17 nt, Artificial Sequence
  Synthetic
auugagcaggaagcucu

SEQ ID NO: 769834 - RNA, 17 nt, Artificial Sequence
  Synthetic
acaaaguacuaagcucu

SEQ ID NO: 769835 - RNA, 17 nt, Artificial Sequence
  Synthetic
cuuuuauuuuaagcucu

SEQ ID NO: 769836 - RNA, 17 nt, Artificial Sequence
  Synthetic
ugguaagaagcagcucu

SEQ ID NO: 769837 - RNA, 17 nt, Artificial Sequence
  Synthetic
auaaucacaucagcucu

SEQ ID NO: 769838 - RNA, 17 nt, Artificial Sequence
  Synthetic
ccugaugaaggagcucu

SEQ ID NO: 769839 - RNA, 17 nt, Artificial Sequence
  Synthetic
uagucuuaaggagcucu

SEQ ID NO: 769840 - RNA, 17 nt, Artificial Sequence
  Synthetic
auucucuauggagcucu

SEQ ID NO: 769841 - RNA, 17 nt, Artificial Sequence
  Synthetic
augagggccugagcucu

SEQ ID NO: 769842 - RNA, 17 nt, Artificial Sequence
  Synthetic
cccaguggcauagcucu

SEQ ID NO: 769843 - RNA, 17 nt, Artificial Sequence
  Synthetic
ucugauuuacuagcucu

SEQ ID NO: 769844 - RNA, 17 nt, Artificial Sequence
  Synthetic
ugugaacauguagcucu

SEQ ID NO: 769845 - RNA, 17 nt, Artificial Sequence
  Synthetic
auggaggauuacgcucu

SEQ ID NO: 769846 - RNA, 17 nt, Artificial Sequence
  Synthetic
aucccucugaaggcucu

SEQ ID NO: 769847 - RNA, 17 nt, Artificial Sequence
  Synthetic
aaaauaauccaggcucu

SEQ ID NO: 769848 - RNA, 17 nt, Artificial Sequence
  Synthetic
agagaugaucaggcucu

SEQ ID NO: 769849 - RNA, 17 nt, Artificial Sequence
  Synthetic
uguaaucaaagggcucu

SEQ ID NO: 769850 - RNA, 17 nt, Artificial Sequence
  Synthetic
caaagcauaagggcucu

SEQ ID NO: 769851 - RNA, 17 nt, Artificial Sequence
  Synthetic
auauuccucagggcucu

SEQ ID NO: 769852 - RNA, 17 nt, Artificial Sequence
  Synthetic
uuuccuucuagggcucu

SEQ ID NO: 769853 - RNA, 17 nt, Artificial Sequence
  Synthetic
uugaguaguagggcucu

SEQ ID NO: 769854 - RNA, 17 nt, Artificial Sequence
  Synthetic
cauagcaggggggcucu

SEQ ID NO: 769855 - RNA, 17 nt, Artificial Sequence
  Synthetic
agagugaaaauggcucu

SEQ ID NO: 769856 - RNA, 17 nt, Artificial Sequence
  Synthetic
uagguagggcuggcucu

SEQ ID NO: 769857 - RNA, 17 nt, Artificial Sequence
  Synthetic
uacgggucuguggcucu

SEQ ID NO: 769858 - RNA, 17 nt, Artificial Sequence
  Synthetic
ugcacacaauuggcucu

SEQ ID NO: 769859 - RNA, 17 nt, Artificial Sequence
  Synthetic
uacacauaauuggcucu

SEQ ID NO: 769860 - RNA, 17 nt, Artificial Sequence
  Synthetic
cugcauuucuuggcucu

SEQ ID NO: 769861 - RNA, 17 nt, Artificial Sequence
  Synthetic
cauuauauuuuggcucu

SEQ ID NO: 769862 - RNA, 17 nt, Artificial Sequence
  Synthetic
ugguuacuuuuggcucu

SEQ ID NO: 769863 - RNA, 17 nt, Artificial Sequence
  Synthetic
auaaggcauaaugcucu

SEQ ID NO: 769864 - RNA, 17 nt, Artificial Sequence
  Synthetic
caaaauauacaugcucu

SEQ ID NO: 769865 - RNA, 17 nt, Artificial Sequence
  Synthetic
aaggcuagauaugcucu

SEQ ID NO: 769866 - RNA, 17 nt, Artificial Sequence
  Synthetic
aauaguagauaugcucu

SEQ ID NO: 769867 - RNA, 17 nt, Artificial Sequence
  Synthetic
uuaagaaucacugcucu

SEQ ID NO: 769868 - RNA, 17 nt, Artificial Sequence
  Synthetic
cuuucuuucccugcucu

SEQ ID NO: 769869 - RNA, 17 nt, Artificial Sequence
  Synthetic
ucccuggugccugcucu

SEQ ID NO: 769870 - RNA, 17 nt, Artificial Sequence
  Synthetic
uuugaaauagcugcucu

SEQ ID NO: 769871 - RNA, 17 nt, Artificial Sequence
  Synthetic
uugcugaccucugcucu

SEQ ID NO: 769872 - RNA, 17 nt, Artificial Sequence
  Synthetic
agucuucucagugcucu

SEQ ID NO: 769873 - RNA, 17 nt, Artificial Sequence
  Synthetic
aacuuuguuagugcucu

SEQ ID NO: 769874 - RNA, 17 nt, Artificial Sequence
  Synthetic
agugcucuaggugcucu

SEQ ID NO: 769875 - RNA, 17 nt, Artificial Sequence
  Synthetic
uucucugaaugugcucu

SEQ ID NO: 769876 - RNA, 17 nt, Artificial Sequence
  Synthetic
cuuaggauaauugcucu

SEQ ID NO: 769877 - RNA, 17 nt, Artificial Sequence
  Synthetic
aacagacuucuugcucu

SEQ ID NO: 769878 - RNA, 17 nt, Artificial Sequence
  Synthetic
uggagccugguugcucu

SEQ ID NO: 769879 - RNA, 17 nt, Artificial Sequence
  Synthetic
auaucauaaaaaucucu

SEQ ID NO: 769880 - RNA, 17 nt, Artificial Sequence
  Synthetic
auaaaaacaaaaucucu

SEQ ID NO: 769881 - RNA, 17 nt, Artificial Sequence
  Synthetic
aaagccagccaaucucu

SEQ ID NO: 769882 - RNA, 17 nt, Artificial Sequence
  Synthetic
aacggaccagaaucucu

SEQ ID NO: 769883 - RNA, 17 nt, Artificial Sequence
  Synthetic
cacauaccagaaucucu

SEQ ID NO: 769884 - RNA, 17 nt, Artificial Sequence
  Synthetic
acuaaaucagaaucucu

SEQ ID NO: 769885 - RNA, 17 nt, Artificial Sequence
  Synthetic
uauuuauuugaaucucu

SEQ ID NO: 769886 - RNA, 17 nt, Artificial Sequence
  Synthetic
uuuaaaauguaaucucu

SEQ ID NO: 769887 - RNA, 17 nt, Artificial Sequence
  Synthetic
cuuuuuguuuaaucucu

SEQ ID NO: 769888 - RNA, 17 nt, Artificial Sequence
  Synthetic
cugguugucacaucucu

SEQ ID NO: 769889 - RNA, 17 nt, Artificial Sequence
  Synthetic
agcauauucacaucucu

SEQ ID NO: 769890 - RNA, 17 nt, Artificial Sequence
  Synthetic
acugaaucagcaucucu

SEQ ID NO: 769891 - RNA, 17 nt, Artificial Sequence
  Synthetic
agagccugaucaucucu

SEQ ID NO: 769892 - RNA, 17 nt, Artificial Sequence
  Synthetic
accucuuugucaucucu

SEQ ID NO: 769893 - RNA, 17 nt, Artificial Sequence
  Synthetic
uuagaagauucaucucu

SEQ ID NO: 769894 - RNA, 17 nt, Artificial Sequence
  Synthetic
auuuuccuuucaucucu

SEQ ID NO: 769895 - RNA, 17 nt, Artificial Sequence
  Synthetic
aaauuccacagaucucu

SEQ ID NO: 769896 - RNA, 17 nt, Artificial Sequence
  Synthetic
aaguuccacagaucucu

SEQ ID NO: 769897 - RNA, 17 nt, Artificial Sequence
  Synthetic
aauuuccacagaucucu

SEQ ID NO: 769898 - RNA, 17 nt, Artificial Sequence
  Synthetic
acuaacagcggaucucu

SEQ ID NO: 769899 - RNA, 17 nt, Artificial Sequence
  Synthetic
uauccuuaaugaucucu

SEQ ID NO: 769900 - RNA, 17 nt, Artificial Sequence
  Synthetic
uagggaacgugaucucu

SEQ ID NO: 769901 - RNA, 17 nt, Artificial Sequence
  Synthetic
uaaaaugaaauaucucu

SEQ ID NO: 769902 - RNA, 17 nt, Artificial Sequence
  Synthetic
uauauauauauaucucu

SEQ ID NO: 769903 - RNA, 17 nt, Artificial Sequence
  Synthetic
uguacaugauuaucucu

SEQ ID NO: 769904 - RNA, 17 nt, Artificial Sequence
  Synthetic
uagcuaugcuuaucucu

SEQ ID NO: 769905 - RNA, 17 nt, Artificial Sequence
  Synthetic
uuagcaaucuuaucucu

SEQ ID NO: 769906 - RNA, 17 nt, Artificial Sequence
  Synthetic
ccauuuauaaacucucu

SEQ ID NO: 769907 - RNA, 17 nt, Artificial Sequence
  Synthetic
ucucucucucacucucu

SEQ ID NO: 769908 - RNA, 17 nt, Artificial Sequence
  Synthetic
acaguccuugacucucu

SEQ ID NO: 769909 - RNA, 17 nt, Artificial Sequence
  Synthetic
agcuuccucaccucucu

SEQ ID NO: 769910 - RNA, 17 nt, Artificial Sequence
  Synthetic
auucuauugaccucucu

SEQ ID NO: 769911 - RNA, 17 nt, Artificial Sequence
  Synthetic
uuccacccgcccucucu

SEQ ID NO: 769912 - RNA, 17 nt, Artificial Sequence
  Synthetic
uagcuuccagccucucu

SEQ ID NO: 769913 - RNA, 17 nt, Artificial Sequence
  Synthetic
cauucuuauuccucucu

SEQ ID NO: 769914 - RNA, 17 nt, Artificial Sequence
  Synthetic
ugugucagaagcucucu

SEQ ID NO: 769915 - RNA, 17 nt, Artificial Sequence
  Synthetic
uacacuaucagcucucu

SEQ ID NO: 769916 - RNA, 17 nt, Artificial Sequence
  Synthetic
aucaggagcugcucucu

SEQ ID NO: 769917 - RNA, 17 nt, Artificial Sequence
  Synthetic
aggcuuaauugcucucu

SEQ ID NO: 769918 - RNA, 17 nt, Artificial Sequence
  Synthetic
aauagucauugcucucu

SEQ ID NO: 769919 - RNA, 17 nt, Artificial Sequence
  Synthetic
uucucucagaucucucu

SEQ ID NO: 769920 - RNA, 17 nt, Artificial Sequence
  Synthetic
ccuuuaaaacucucucu

SEQ ID NO: 769921 - RNA, 17 nt, Artificial Sequence
  Synthetic
uuaucuugggucucucu

SEQ ID NO: 769922 - RNA, 17 nt, Artificial Sequence
  Synthetic
cuuugacuggucucucu

SEQ ID NO: 769923 - RNA, 17 nt, Artificial Sequence
  Synthetic
cuagauuccuucucucu

SEQ ID NO: 769924 - RNA, 17 nt, Artificial Sequence
  Synthetic
uucauaaauuucucucu

SEQ ID NO: 769925 - RNA, 17 nt, Artificial Sequence
  Synthetic
cuaauuuuuuucucucu

SEQ ID NO: 769926 - RNA, 17 nt, Artificial Sequence
  Synthetic
ccauucaacaagucucu

SEQ ID NO: 769927 - RNA, 17 nt, Artificial Sequence
  Synthetic
uuuuaaucugagucucu

SEQ ID NO: 769928 - RNA, 17 nt, Artificial Sequence
  Synthetic
ugagagcaguagucucu

SEQ ID NO: 769929 - RNA, 17 nt, Artificial Sequence
  Synthetic
uguaaucccaggucucu

SEQ ID NO: 769930 - RNA, 17 nt, Artificial Sequence
  Synthetic
ucucuuuguaggucucu

SEQ ID NO: 769931 - RNA, 17 nt, Artificial Sequence
  Synthetic
ucagugguagggucucu

SEQ ID NO: 769932 - RNA, 17 nt, Artificial Sequence
  Synthetic
uugauucaaaugucucu

SEQ ID NO: 769933 - RNA, 17 nt, Artificial Sequence
  Synthetic
aucugguuuaugucucu

SEQ ID NO: 769934 - RNA, 17 nt, Artificial Sequence
  Synthetic
ugagcagcagugucucu

SEQ ID NO: 769935 - RNA, 17 nt, Artificial Sequence
  Synthetic
cuggauuuguugucucu

SEQ ID NO: 769936 - RNA, 17 nt, Artificial Sequence
  Synthetic
ugaugguuuuugucucu

SEQ ID NO: 769937 - RNA, 17 nt, Artificial Sequence
  Synthetic
ccucuugaaaauucucu

SEQ ID NO: 769938 - RNA, 17 nt, Artificial Sequence
  Synthetic
uuuccauugaauucucu

SEQ ID NO: 769939 - RNA, 17 nt, Artificial Sequence
  Synthetic
ucauuuuuacauucucu

SEQ ID NO: 769940 - RNA, 17 nt, Artificial Sequence
  Synthetic
auuggauuucauucucu

SEQ ID NO: 769941 - RNA, 17 nt, Artificial Sequence
  Synthetic
uacacgaaauauucucu

SEQ ID NO: 769942 - RNA, 17 nt, Artificial Sequence
  Synthetic
caaauauauuauucucu

SEQ ID NO: 769943 - RNA, 17 nt, Artificial Sequence
  Synthetic
uggaauaguuauucucu

SEQ ID NO: 769944 - RNA, 17 nt, Artificial Sequence
  Synthetic
agaacugcaacuucucu

SEQ ID NO: 769945 - RNA, 17 nt, Artificial Sequence
  Synthetic
ucuuucguaacuucucu

SEQ ID NO: 769946 - RNA, 17 nt, Artificial Sequence
  Synthetic
ugagaucagacuucucu

SEQ ID NO: 769947 - RNA, 17 nt, Artificial Sequence
  Synthetic
cuuuuucaagcuucucu

SEQ ID NO: 769948 - RNA, 17 nt, Artificial Sequence
  Synthetic
auuggcauggcuucucu

SEQ ID NO: 769949 - RNA, 17 nt, Artificial Sequence
  Synthetic
agaucauuaucuucucu

SEQ ID NO: 769950 - RNA, 17 nt, Artificial Sequence
  Synthetic
uaaggacucucuucucu

SEQ ID NO: 769951 - RNA, 17 nt, Artificial Sequence
  Synthetic
agaucacugucuucucu

SEQ ID NO: 769952 - RNA, 17 nt, Artificial Sequence
  Synthetic
uuacgguuuucuucucu

SEQ ID NO: 769953 - RNA, 17 nt, Artificial Sequence
  Synthetic
cuuccauuuaguucucu

SEQ ID NO: 769954 - RNA, 17 nt, Artificial Sequence
  Synthetic
uacagguuggguucucu

SEQ ID NO: 769955 - RNA, 17 nt, Artificial Sequence
  Synthetic
uagauaaaauguucucu

SEQ ID NO: 769956 - RNA, 17 nt, Artificial Sequence
  Synthetic
acugucaaauguucucu

SEQ ID NO: 769957 - RNA, 17 nt, Artificial Sequence
  Synthetic
uauuugugauguucucu

SEQ ID NO: 769958 - RNA, 17 nt, Artificial Sequence
  Synthetic
uucucaacaauuucucu

SEQ ID NO: 769959 - RNA, 17 nt, Artificial Sequence
  Synthetic
uuuuuucacauuucucu

SEQ ID NO: 769960 - RNA, 17 nt, Artificial Sequence
  Synthetic
uuauucuugcuuucucu

SEQ ID NO: 769961 - RNA, 17 nt, Artificial Sequence
  Synthetic
cauccugauguuucucu

SEQ ID NO: 769962 - RNA, 17 nt, Artificial Sequence
  Synthetic
ugagguuauguuucucu

SEQ ID NO: 769963 - RNA, 17 nt, Artificial Sequence
  Synthetic
uuaacucuuguuucucu

SEQ ID NO: 769964 - RNA, 17 nt, Artificial Sequence
  Synthetic
cacaugaaauuuucucu

SEQ ID NO: 769965 - RNA, 17 nt, Artificial Sequence
  Synthetic
auuacuauauuuucucu

SEQ ID NO: 769966 - RNA, 17 nt, Artificial Sequence
  Synthetic
cuccuaugguuuucucu

SEQ ID NO: 769967 - RNA, 17 nt, Artificial Sequence
  Synthetic
uaaagcauguuuucucu

SEQ ID NO: 769968 - RNA, 17 nt, Artificial Sequence
  Synthetic
aacugaaaaaaaagucu

SEQ ID NO: 769969 - RNA, 17 nt, Artificial Sequence
  Synthetic
uacuccaggaaaagucu

SEQ ID NO: 769970 - RNA, 17 nt, Artificial Sequence
  Synthetic
caaaauuggaaaagucu

SEQ ID NO: 769971 - RNA, 17 nt, Artificial Sequence
  Synthetic
ugucaguuucaaagucu

SEQ ID NO: 769972 - RNA, 17 nt, Artificial Sequence
  Synthetic
uucccuggagaaagucu

SEQ ID NO: 769973 - RNA, 17 nt, Artificial Sequence
  Synthetic
uuagaacuagaaagucu

SEQ ID NO: 769974 - RNA, 17 nt, Artificial Sequence
  Synthetic
uucccuuuggaaagucu

SEQ ID NO: 769975 - RNA, 17 nt, Artificial Sequence
  Synthetic
uuccccuacuaaagucu

SEQ ID NO: 769976 - RNA, 17 nt, Artificial Sequence
  Synthetic
cuuacuaucuaaagucu

SEQ ID NO: 769977 - RNA, 17 nt, Artificial Sequence
  Synthetic
uaugcgcauuaaagucu

SEQ ID NO: 769978 - RNA, 17 nt, Artificial Sequence
  Synthetic
aaagcucuuuaaagucu

SEQ ID NO: 769979 - RNA, 17 nt, Artificial Sequence
  Synthetic
uucagagaugcaagucu

SEQ ID NO: 769980 - RNA, 17 nt, Artificial Sequence
  Synthetic
auaugggucagaagucu

SEQ ID NO: 769981 - RNA, 17 nt, Artificial Sequence
  Synthetic
uuguuuaaaugaagucu

SEQ ID NO: 769982 - RNA, 17 nt, Artificial Sequence
  Synthetic
uucuucuacugaagucu

SEQ ID NO: 769983 - RNA, 17 nt, Artificial Sequence
  Synthetic
uauccauguugaagucu

SEQ ID NO: 769984 - RNA, 17 nt, Artificial Sequence
  Synthetic
uucuuuagaauaagucu

SEQ ID NO: 769985 - RNA, 17 nt, Artificial Sequence
  Synthetic
caacauaaucuaagucu

SEQ ID NO: 769986 - RNA, 17 nt, Artificial Sequence
  Synthetic
ccaguccaucuaagucu

SEQ ID NO: 769987 - RNA, 17 nt, Artificial Sequence
  Synthetic
uuugaauaauuaagucu

SEQ ID NO: 769988 - RNA, 17 nt, Artificial Sequence
  Synthetic
ugugacacacacagucu

SEQ ID NO: 769989 - RNA, 17 nt, Artificial Sequence
  Synthetic
aauuggacccacagucu

SEQ ID NO: 769990 - RNA, 17 nt, Artificial Sequence
  Synthetic
agccaguggcacagucu

SEQ ID NO: 769991 - RNA, 17 nt, Artificial Sequence
  Synthetic
ucagauuuagacagucu

SEQ ID NO: 769992 - RNA, 17 nt, Artificial Sequence
  Synthetic
uaaaaaugguacagucu

SEQ ID NO: 769993 - RNA, 17 nt, Artificial Sequence
  Synthetic
aaguuugagaccagucu

SEQ ID NO: 769994 - RNA, 17 nt, Artificial Sequence
  Synthetic
uagaaauuacccagucu

SEQ ID NO: 769995 - RNA, 17 nt, Artificial Sequence
  Synthetic
cauaaauuacccagucu

SEQ ID NO: 769996 - RNA, 17 nt, Artificial Sequence
  Synthetic
uauaaauuacccagucu

SEQ ID NO: 769997 - RNA, 17 nt, Artificial Sequence
  Synthetic
aauacauuacccagucu

SEQ ID NO: 769998 - RNA, 17 nt, Artificial Sequence
  Synthetic
uguaaauugcccagucu

SEQ ID NO: 769999 - RNA, 17 nt, Artificial Sequence
  Synthetic
uaacaaguggccagucu

SEQ ID NO: 770000 - RNA, 17 nt, Artificial Sequence
  Synthetic
uauaaauuauccagucu

SEQ ID NO: 770001 - RNA, 17 nt, Artificial Sequence
  Synthetic
cuacuguacuccagucu

SEQ ID NO: 770002 - RNA, 17 nt, Artificial Sequence
  Synthetic
agagucaucuccagucu

SEQ ID NO: 770003 - RNA, 17 nt, Artificial Sequence
  Synthetic
aaccugagaggcagucu

SEQ ID NO: 770004 - RNA, 17 nt, Artificial Sequence
  Synthetic
uuuauauauggcagucu

SEQ ID NO: 770005 - RNA, 17 nt, Artificial Sequence
  Synthetic
uauauaccaugcagucu

SEQ ID NO: 770006 - RNA, 17 nt, Artificial Sequence
  Synthetic
agaacaaagaucagucu

SEQ ID NO: 770007 - RNA, 17 nt, Artificial Sequence
  Synthetic
uguuuauugaucagucu

SEQ ID NO: 770008 - RNA, 17 nt, Artificial Sequence
  Synthetic
uuauggugacucagucu

SEQ ID NO: 770009 - RNA, 17 nt, Artificial Sequence
  Synthetic
cuguugcaggucagucu

SEQ ID NO: 770010 - RNA, 17 nt, Artificial Sequence
  Synthetic
uauaaauuauucagucu

SEQ ID NO: 770011 - RNA, 17 nt, Artificial Sequence
  Synthetic
cuguuuuccaagagucu

SEQ ID NO: 770012 - RNA, 17 nt, Artificial Sequence
  Synthetic
cuauuccucaagagucu

SEQ ID NO: 770013 - RNA, 17 nt, Artificial Sequence
  Synthetic
cugaaauuccagagucu

SEQ ID NO: 770014 - RNA, 17 nt, Artificial Sequence
  Synthetic
cagagaagggagagucu

SEQ ID NO: 770015 - RNA, 17 nt, Artificial Sequence
  Synthetic
ugccuaaaguagagucu

SEQ ID NO: 770016 - RNA, 17 nt, Artificial Sequence
  Synthetic
auauuuaguuagagucu

SEQ ID NO: 770017 - RNA, 17 nt, Artificial Sequence
  Synthetic
ucaaaagccaggagucu

SEQ ID NO: 770018 - RNA, 17 nt, Artificial Sequence
  Synthetic
uuacuuucuaggagucu

SEQ ID NO: 770019 - RNA, 17 nt, Artificial Sequence
  Synthetic
aggggucuuaggagucu

SEQ ID NO: 770020 - RNA, 17 nt, Artificial Sequence
  Synthetic
augaaaacagggagucu

SEQ ID NO: 770021 - RNA, 17 nt, Artificial Sequence
  Synthetic
acauccacugggagucu

SEQ ID NO: 770022 - RNA, 17 nt, Artificial Sequence
  Synthetic
cuccaagccuggagucu

SEQ ID NO: 770023 - RNA, 17 nt, Artificial Sequence
  Synthetic
ucauucagcuggagucu

SEQ ID NO: 770024 - RNA, 17 nt, Artificial Sequence
  Synthetic
uucuuuucaaugagucu

SEQ ID NO: 770025 - RNA, 17 nt, Artificial Sequence
  Synthetic
cauuggcauaugagucu

SEQ ID NO: 770026 - RNA, 17 nt, Artificial Sequence
  Synthetic
uacuuggcuuugagucu

SEQ ID NO: 770027 - RNA, 17 nt, Artificial Sequence
  Synthetic
aucaaauauaauagucu

SEQ ID NO: 770028 - RNA, 17 nt, Artificial Sequence
  Synthetic
auuccuuaggauagucu

SEQ ID NO: 770029 - RNA, 17 nt, Artificial Sequence
  Synthetic
uacuggauuuauagucu

SEQ ID NO: 770030 - RNA, 17 nt, Artificial Sequence
  Synthetic
acuaugguuuauagucu

SEQ ID NO: 770031 - RNA, 17 nt, Artificial Sequence
  Synthetic
caauuaacaucuagucu

SEQ ID NO: 770032 - RNA, 17 nt, Artificial Sequence
  Synthetic
uuauuucauaguagucu

SEQ ID NO: 770033 - RNA, 17 nt, Artificial Sequence
  Synthetic
auaaauuuacuuagucu

SEQ ID NO: 770034 - RNA, 17 nt, Artificial Sequence
  Synthetic
ugguacuaucuuagucu

SEQ ID NO: 770035 - RNA, 17 nt, Artificial Sequence
  Synthetic
agcccuugucuuagucu

SEQ ID NO: 770036 - RNA, 17 nt, Artificial Sequence
  Synthetic
ugacuagcaguuagucu

SEQ ID NO: 770037 - RNA, 17 nt, Artificial Sequence
  Synthetic
ucuuccugguuuagucu

SEQ ID NO: 770038 - RNA, 17 nt, Artificial Sequence
  Synthetic
caucagaagccacgucu

SEQ ID NO: 770039 - RNA, 17 nt, Artificial Sequence
  Synthetic
uucauuguugaccgucu

SEQ ID NO: 770040 - RNA, 17 nt, Artificial Sequence
  Synthetic
ucgugauccgcccgucu

SEQ ID NO: 770041 - RNA, 17 nt, Artificial Sequence
  Synthetic
caucugucaggccgucu

SEQ ID NO: 770042 - RNA, 17 nt, Artificial Sequence
  Synthetic
auacacuagguucgucu

SEQ ID NO: 770043 - RNA, 17 nt, Artificial Sequence
  Synthetic
auuucuccaaaaggucu

SEQ ID NO: 770044 - RNA, 17 nt, Artificial Sequence
  Synthetic
agaugcagaaaaggucu

SEQ ID NO: 770045 - RNA, 17 nt, Artificial Sequence
  Synthetic
cuauucccaagaggucu

SEQ ID NO: 770046 - RNA, 17 nt, Artificial Sequence
  Synthetic
cacagacccagaggucu

SEQ ID NO: 770047 - RNA, 17 nt, Artificial Sequence
  Synthetic
acuuaaaagcgaggucu

SEQ ID NO: 770048 - RNA, 17 nt, Artificial Sequence
  Synthetic
ucuaauuggggaggucu

SEQ ID NO: 770049 - RNA, 17 nt, Artificial Sequence
  Synthetic
uauaaauuacccggucu

SEQ ID NO: 770050 - RNA, 17 nt, Artificial Sequence
  Synthetic
acuagacucuagggucu

SEQ ID NO: 770051 - RNA, 17 nt, Artificial Sequence
  Synthetic
ugagagguuuagggucu

SEQ ID NO: 770052 - RNA, 17 nt, Artificial Sequence
  Synthetic
acauggaugccgggucu

SEQ ID NO: 770053 - RNA, 17 nt, Artificial Sequence
  Synthetic
ccugagaacaggggucu

SEQ ID NO: 770054 - RNA, 17 nt, Artificial Sequence
  Synthetic
aagaggucugggggucu

SEQ ID NO: 770055 - RNA, 17 nt, Artificial Sequence
  Synthetic
ccucugaaauggggucu

SEQ ID NO: 770056 - RNA, 17 nt, Artificial Sequence
  Synthetic
ugugauucagugggucu

SEQ ID NO: 770057 - RNA, 17 nt, Artificial Sequence
  Synthetic
aacagagauuugggucu

SEQ ID NO: 770058 - RNA, 17 nt, Artificial Sequence
  Synthetic
cuggugggaaauggucu

SEQ ID NO: 770059 - RNA, 17 nt, Artificial Sequence
  Synthetic
ugcaagccacauggucu

SEQ ID NO: 770060 - RNA, 17 nt, Artificial Sequence
  Synthetic
uugaaaaucacuggucu

SEQ ID NO: 770061 - RNA, 17 nt, Artificial Sequence
  Synthetic
ucauaccauccuggucu

SEQ ID NO: 770062 - RNA, 17 nt, Artificial Sequence
  Synthetic
aauaaauuuucuggucu

SEQ ID NO: 770063 - RNA, 17 nt, Artificial Sequence
  Synthetic
uuccuuaaauguggucu

SEQ ID NO: 770064 - RNA, 17 nt, Artificial Sequence
  Synthetic
uaaccuguuuguggucu

SEQ ID NO: 770065 - RNA, 17 nt, Artificial Sequence
  Synthetic
cuccaugacauuggucu

SEQ ID NO: 770066 - RNA, 17 nt, Artificial Sequence
  Synthetic
ugaaaagaaguuggucu

SEQ ID NO: 770067 - RNA, 17 nt, Artificial Sequence
  Synthetic
ucugugucaguuggucu

SEQ ID NO: 770068 - RNA, 17 nt, Artificial Sequence
  Synthetic
uccugguuauuuggucu

SEQ ID NO: 770069 - RNA, 17 nt, Artificial Sequence
  Synthetic
ccugauucaaaaugucu

SEQ ID NO: 770070 - RNA, 17 nt, Artificial Sequence
  Synthetic
aagaauguaaaaugucu

SEQ ID NO: 770071 - RNA, 17 nt, Artificial Sequence
  Synthetic
uguuugaccaaaugucu

SEQ ID NO: 770072 - RNA, 17 nt, Artificial Sequence
  Synthetic
uacaguuagaaaugucu

SEQ ID NO: 770073 - RNA, 17 nt, Artificial Sequence
  Synthetic
uguugucuuaaaugucu

SEQ ID NO: 770074 - RNA, 17 nt, Artificial Sequence
  Synthetic
uggaauuuuaaaugucu

SEQ ID NO: 770075 - RNA, 17 nt, Artificial Sequence
  Synthetic
uagcauuuuaaaugucu

SEQ ID NO: 770076 - RNA, 17 nt, Artificial Sequence
  Synthetic
aaaaagaaagaaugucu

SEQ ID NO: 770077 - RNA, 17 nt, Artificial Sequence
  Synthetic
aaaaacuacgaaugucu

SEQ ID NO: 770078 - RNA, 17 nt, Artificial Sequence
  Synthetic
ccuaaaauauaaugucu

SEQ ID NO: 770079 - RNA, 17 nt, Artificial Sequence
  Synthetic
cuucauuguuaaugucu

SEQ ID NO: 770080 - RNA, 17 nt, Artificial Sequence
  Synthetic
aacgccaaaacaugucu

SEQ ID NO: 770081 - RNA, 17 nt, Artificial Sequence
  Synthetic
cacaauguaucaugucu

SEQ ID NO: 770082 - RNA, 17 nt, Artificial Sequence
  Synthetic
ucaguuauaagaugucu

SEQ ID NO: 770083 - RNA, 17 nt, Artificial Sequence
  Synthetic
aaucaugaaggaugucu

SEQ ID NO: 770084 - RNA, 17 nt, Artificial Sequence
  Synthetic
uuaaaauacugaugucu

SEQ ID NO: 770085 - RNA, 17 nt, Artificial Sequence
  Synthetic
uugacccagugaugucu

SEQ ID NO: 770086 - RNA, 17 nt, Artificial Sequence
  Synthetic
auuguuaguugaugucu

SEQ ID NO: 770087 - RNA, 17 nt, Artificial Sequence
  Synthetic
ugauagacucuaugucu

SEQ ID NO: 770088 - RNA, 17 nt, Artificial Sequence
  Synthetic
caugauucuguaugucu

SEQ ID NO: 770089 - RNA, 17 nt, Artificial Sequence
  Synthetic
aauggugcauuaugucu

SEQ ID NO: 770090 - RNA, 17 nt, Artificial Sequence
  Synthetic
cuugggagaaacugucu

SEQ ID NO: 770091 - RNA, 17 nt, Artificial Sequence
  Synthetic
cacuagagccacugucu

SEQ ID NO: 770092 - RNA, 17 nt, Artificial Sequence
  Synthetic
acauucuaucacugucu

SEQ ID NO: 770093 - RNA, 17 nt, Artificial Sequence
  Synthetic
accauuuuauacugucu

SEQ ID NO: 770094 - RNA, 17 nt, Artificial Sequence
  Synthetic
ucuuguaugaccugucu

SEQ ID NO: 770095 - RNA, 17 nt, Artificial Sequence
  Synthetic
auauauauccccugucu

SEQ ID NO: 770096 - RNA, 17 nt, Artificial Sequence
  Synthetic
uggcuuucagccugucu

SEQ ID NO: 770097 - RNA, 17 nt, Artificial Sequence
  Synthetic
ucgugaucugccugucu

SEQ ID NO: 770098 - RNA, 17 nt, Artificial Sequence
  Synthetic
acuuuucuauccugucu

SEQ ID NO: 770099 - RNA, 17 nt, Artificial Sequence
  Synthetic
cccauuuuauccugucu

SEQ ID NO: 770100 - RNA, 17 nt, Artificial Sequence
  Synthetic
aauguucccuccugucu

SEQ ID NO: 770101 - RNA, 17 nt, Artificial Sequence
  Synthetic
auaauugagagcugucu

SEQ ID NO: 770102 - RNA, 17 nt, Artificial Sequence
  Synthetic
cugcagugcugcugucu

SEQ ID NO: 770103 - RNA, 17 nt, Artificial Sequence
  Synthetic
cuccaggauaucugucu

SEQ ID NO: 770104 - RNA, 17 nt, Artificial Sequence
  Synthetic
cccuucucucucugucu

SEQ ID NO: 770105 - RNA, 17 nt, Artificial Sequence
  Synthetic
ugguugagcuucugucu

SEQ ID NO: 770106 - RNA, 17 nt, Artificial Sequence
  Synthetic
cagcuuucccagugucu

SEQ ID NO: 770107 - RNA, 17 nt, Artificial Sequence
  Synthetic
uuaauaacucagugucu

SEQ ID NO: 770108 - RNA, 17 nt, Artificial Sequence
  Synthetic
acuaugauagagugucu

SEQ ID NO: 770109 - RNA, 17 nt, Artificial Sequence
  Synthetic
aaugacacuuagugucu

SEQ ID NO: 770110 - RNA, 17 nt, Artificial Sequence
  Synthetic
cuuagaaguuagugucu

SEQ ID NO: 770111 - RNA, 17 nt, Artificial Sequence
  Synthetic
aaauuccucuggugucu

SEQ ID NO: 770112 - RNA, 17 nt, Artificial Sequence
  Synthetic
cagcagauuuggugucu

SEQ ID NO: 770113 - RNA, 17 nt, Artificial Sequence
  Synthetic
cugacaauuaugugucu

SEQ ID NO: 770114 - RNA, 17 nt, Artificial Sequence
  Synthetic
ccgauuauuaugugucu

SEQ ID NO: 770115 - RNA, 17 nt, Artificial Sequence
  Synthetic
cagccuccagugugucu

SEQ ID NO: 770116 - RNA, 17 nt, Artificial Sequence
  Synthetic
ugaaaaucacauugucu

SEQ ID NO: 770117 - RNA, 17 nt, Artificial Sequence
  Synthetic
uugaaguuacauugucu

SEQ ID NO: 770118 - RNA, 17 nt, Artificial Sequence
  Synthetic
caucuuccccauugucu

SEQ ID NO: 770119 - RNA, 17 nt, Artificial Sequence
  Synthetic
cauuuuucccauugucu

SEQ ID NO: 770120 - RNA, 17 nt, Artificial Sequence
  Synthetic
acagccaaagauugucu

SEQ ID NO: 770121 - RNA, 17 nt, Artificial Sequence
  Synthetic
acaugcacagauugucu

SEQ ID NO: 770122 - RNA, 17 nt, Artificial Sequence
  Synthetic
uuggcucaggauugucu

SEQ ID NO: 770123 - RNA, 17 nt, Artificial Sequence
  Synthetic
uuuacuuaggauugucu

SEQ ID NO: 770124 - RNA, 17 nt, Artificial Sequence
  Synthetic
cauacuuccuauugucu

SEQ ID NO: 770125 - RNA, 17 nt, Artificial Sequence
  Synthetic
uuugcuccugcuugucu

SEQ ID NO: 770126 - RNA, 17 nt, Artificial Sequence
  Synthetic
ccucacuuuucuugucu

SEQ ID NO: 770127 - RNA, 17 nt, Artificial Sequence
  Synthetic
uuucucagcaguugucu

SEQ ID NO: 770128 - RNA, 17 nt, Artificial Sequence
  Synthetic
aguuaaacaauuugucu

SEQ ID NO: 770129 - RNA, 17 nt, Artificial Sequence
  Synthetic
uuuuagcugauuugucu

SEQ ID NO: 770130 - RNA, 17 nt, Artificial Sequence
  Synthetic
aaugaauaaguuugucu

SEQ ID NO: 770131 - RNA, 17 nt, Artificial Sequence
  Synthetic
uacagacuuguuugucu

SEQ ID NO: 770132 - RNA, 17 nt, Artificial Sequence
  Synthetic
auuucuugcuuuugucu

SEQ ID NO: 770133 - RNA, 17 nt, Artificial Sequence
  Synthetic
caccuaugcaaaauucu

SEQ ID NO: 770134 - RNA, 17 nt, Artificial Sequence
  Synthetic
ugauugcucaaaauucu

SEQ ID NO: 770135 - RNA, 17 nt, Artificial Sequence
  Synthetic
agauuuuggaaaauucu

SEQ ID NO: 770136 - RNA, 17 nt, Artificial Sequence
  Synthetic
aauuguaguaaaauucu

SEQ ID NO: 770137 - RNA, 17 nt, Artificial Sequence
  Synthetic
acugaaacagaaauucu

SEQ ID NO: 770138 - RNA, 17 nt, Artificial Sequence
  Synthetic
aaugaaucagaaauucu

SEQ ID NO: 770139 - RNA, 17 nt, Artificial Sequence
  Synthetic
aucuauucugaaauucu

SEQ ID NO: 770140 - RNA, 17 nt, Artificial Sequence
  Synthetic
aguuuaugugaaauucu

SEQ ID NO: 770141 - RNA, 17 nt, Artificial Sequence
  Synthetic
aagaaccaauaaauucu

SEQ ID NO: 770142 - RNA, 17 nt, Artificial Sequence
  Synthetic
uaucaguacacaauucu

SEQ ID NO: 770143 - RNA, 17 nt, Artificial Sequence
  Synthetic
ccaagauccacaauucu

SEQ ID NO: 770144 - RNA, 17 nt, Artificial Sequence
  Synthetic
aaugaagggacaauucu

SEQ ID NO: 770145 - RNA, 17 nt, Artificial Sequence
  Synthetic
auaaauuucucaauucu

SEQ ID NO: 770146 - RNA, 17 nt, Artificial Sequence
  Synthetic
aaggugcagucaauucu

SEQ ID NO: 770147 - RNA, 17 nt, Artificial Sequence
  Synthetic
uuuaaauagagaauucu

SEQ ID NO: 770148 - RNA, 17 nt, Artificial Sequence
  Synthetic
acuuagaauggaauucu

SEQ ID NO: 770149 - RNA, 17 nt, Artificial Sequence
  Synthetic
ucaaacuccugaauucu

SEQ ID NO: 770150 - RNA, 17 nt, Artificial Sequence
  Synthetic
uacauccucugaauucu

SEQ ID NO: 770151 - RNA, 17 nt, Artificial Sequence
  Synthetic
auuccccuccuaauucu

SEQ ID NO: 770152 - RNA, 17 nt, Artificial Sequence
  Synthetic
uuuuauuugcuaauucu

SEQ ID NO: 770153 - RNA, 17 nt, Artificial Sequence
  Synthetic
aucaguauucuaauucu

SEQ ID NO: 770154 - RNA, 17 nt, Artificial Sequence
  Synthetic
uugaaaugaguaauucu

SEQ ID NO: 770155 - RNA, 17 nt, Artificial Sequence
  Synthetic
auuuuaccuaacauucu

SEQ ID NO: 770156 - RNA, 17 nt, Artificial Sequence
  Synthetic
uuuggacaacacauucu

SEQ ID NO: 770157 - RNA, 17 nt, Artificial Sequence
  Synthetic
ugauccauugacauucu

SEQ ID NO: 770158 - RNA, 17 nt, Artificial Sequence
  Synthetic
aaauggauuuacauucu

SEQ ID NO: 770159 - RNA, 17 nt, Artificial Sequence
  Synthetic
auuauacuuuacauucu

SEQ ID NO: 770160 - RNA, 17 nt, Artificial Sequence
  Synthetic
cuaugaaaacccauucu

SEQ ID NO: 770161 - RNA, 17 nt, Artificial Sequence
  Synthetic
uuuuguuucuccauucu

SEQ ID NO: 770162 - RNA, 17 nt, Artificial Sequence
  Synthetic
uuuucuccaagcauucu

SEQ ID NO: 770163 - RNA, 17 nt, Artificial Sequence
  Synthetic
aaaaggaagagcauucu

SEQ ID NO: 770164 - RNA, 17 nt, Artificial Sequence
  Synthetic
accagaugaugcauucu

SEQ ID NO: 770165 - RNA, 17 nt, Artificial Sequence
  Synthetic
cuucaacugugcauucu

SEQ ID NO: 770166 - RNA, 17 nt, Artificial Sequence
  Synthetic
ucuuagaagaucauucu

SEQ ID NO: 770167 - RNA, 17 nt, Artificial Sequence
  Synthetic
cuaucucugcucauucu

SEQ ID NO: 770168 - RNA, 17 nt, Artificial Sequence
  Synthetic
ucuaugugucucauucu

SEQ ID NO: 770169 - RNA, 17 nt, Artificial Sequence
  Synthetic
aaauaauaauucauucu

SEQ ID NO: 770170 - RNA, 17 nt, Artificial Sequence
  Synthetic
uaaaccauauucauucu

SEQ ID NO: 770171 - RNA, 17 nt, Artificial Sequence
  Synthetic
cuccucucccagauucu

SEQ ID NO: 770172 - RNA, 17 nt, Artificial Sequence
  Synthetic
cagggcauucagauucu

SEQ ID NO: 770173 - RNA, 17 nt, Artificial Sequence
  Synthetic
aauuaggaugagauucu

SEQ ID NO: 770174 - RNA, 17 nt, Artificial Sequence
  Synthetic
uguuguugauagauucu

SEQ ID NO: 770175 - RNA, 17 nt, Artificial Sequence
  Synthetic
ccuguguguuagauucu

SEQ ID NO: 770176 - RNA, 17 nt, Artificial Sequence
  Synthetic
uuuauugaaacgauucu

SEQ ID NO: 770177 - RNA, 17 nt, Artificial Sequence
  Synthetic
uguguacacacgauucu

SEQ ID NO: 770178 - RNA, 17 nt, Artificial Sequence
  Synthetic
caacuccugacgauucu

SEQ ID NO: 770179 - RNA, 17 nt, Artificial Sequence
  Synthetic
ucuauuuuagcgauucu

SEQ ID NO: 770180 - RNA, 17 nt, Artificial Sequence
  Synthetic
ugaaugaagaggauucu

SEQ ID NO: 770181 - RNA, 17 nt, Artificial Sequence
  Synthetic
agagguacauggauucu

SEQ ID NO: 770182 - RNA, 17 nt, Artificial Sequence
  Synthetic
uugaugucauggauucu

SEQ ID NO: 770183 - RNA, 17 nt, Artificial Sequence
  Synthetic
uaugcccucuggauucu

SEQ ID NO: 770184 - RNA, 17 nt, Artificial Sequence
  Synthetic
ccucccaggaugauucu

SEQ ID NO: 770185 - RNA, 17 nt, Artificial Sequence
  Synthetic
caaaucucuaugauucu

SEQ ID NO: 770186 - RNA, 17 nt, Artificial Sequence
  Synthetic
cccauuuuacugauucu

SEQ ID NO: 770187 - RNA, 17 nt, Artificial Sequence
  Synthetic
cuuugggcagugauucu

SEQ ID NO: 770188 - RNA, 17 nt, Artificial Sequence
  Synthetic
uauucuauagugauucu

SEQ ID NO: 770189 - RNA, 17 nt, Artificial Sequence
  Synthetic
uuacuugguuugauucu

SEQ ID NO: 770190 - RNA, 17 nt, Artificial Sequence
  Synthetic
cuuuuccuuuugauucu

SEQ ID NO: 770191 - RNA, 17 nt, Artificial Sequence
  Synthetic
aaaugauaaaauauucu

SEQ ID NO: 770192 - RNA, 17 nt, Artificial Sequence
  Synthetic
caaagcaggaauauucu

SEQ ID NO: 770193 - RNA, 17 nt, Artificial Sequence
  Synthetic
aguucagggaauauucu

SEQ ID NO: 770194 - RNA, 17 nt, Artificial Sequence
  Synthetic
uaacccgguaauauucu

SEQ ID NO: 770195 - RNA, 17 nt, Artificial Sequence
  Synthetic
uuccacuguaauauucu

SEQ ID NO: 770196 - RNA, 17 nt, Artificial Sequence
  Synthetic
agcuucaaacauauucu

SEQ ID NO: 770197 - RNA, 17 nt, Artificial Sequence
  Synthetic
ugucugauccauauucu

SEQ ID NO: 770198 - RNA, 17 nt, Artificial Sequence
  Synthetic
ccaaauaggcauauucu

SEQ ID NO: 770199 - RNA, 17 nt, Artificial Sequence
  Synthetic
acaugaagucauauucu

SEQ ID NO: 770200 - RNA, 17 nt, Artificial Sequence
  Synthetic
ucugacuuucauauucu

SEQ ID NO: 770201 - RNA, 17 nt, Artificial Sequence
  Synthetic
aacauagaagauauucu

SEQ ID NO: 770202 - RNA, 17 nt, Artificial Sequence
  Synthetic
uggaccaauuauauucu

SEQ ID NO: 770203 - RNA, 17 nt, Artificial Sequence
  Synthetic
cauaaagcuuauauucu

SEQ ID NO: 770204 - RNA, 17 nt, Artificial Sequence
  Synthetic
uugcauucuuauauucu

SEQ ID NO: 770205 - RNA, 17 nt, Artificial Sequence
  Synthetic
caccuacauccuauucu

SEQ ID NO: 770206 - RNA, 17 nt, Artificial Sequence
  Synthetic
uuucaagaagcuauucu

SEQ ID NO: 770207 - RNA, 17 nt, Artificial Sequence
  Synthetic
aaggcuuuagcuauucu

SEQ ID NO: 770208 - RNA, 17 nt, Artificial Sequence
  Synthetic
ucaucugugucuauucu

SEQ ID NO: 770209 - RNA, 17 nt, Artificial Sequence
  Synthetic
cucuguuugucuauucu

SEQ ID NO: 770210 - RNA, 17 nt, Artificial Sequence
  Synthetic
aaucagauuucuauucu

SEQ ID NO: 770211 - RNA, 17 nt, Artificial Sequence
  Synthetic
uaaaaagaaaguauucu

SEQ ID NO: 770212 - RNA, 17 nt, Artificial Sequence
  Synthetic
aaaaggaacaguauucu

SEQ ID NO: 770213 - RNA, 17 nt, Artificial Sequence
  Synthetic
uucuucuggaguauucu

SEQ ID NO: 770214 - RNA, 17 nt, Artificial Sequence
  Synthetic
uaucucauucguauucu

SEQ ID NO: 770215 - RNA, 17 nt, Artificial Sequence
  Synthetic
agcauuugguguauucu

SEQ ID NO: 770216 - RNA, 17 nt, Artificial Sequence
  Synthetic
ucccaguuguguauucu

SEQ ID NO: 770217 - RNA, 17 nt, Artificial Sequence
  Synthetic
ccauucucuuguauucu

SEQ ID NO: 770218 - RNA, 17 nt, Artificial Sequence
  Synthetic
uaucacagaauuauucu

SEQ ID NO: 770219 - RNA, 17 nt, Artificial Sequence
  Synthetic
ugaguuuuaauuauucu

SEQ ID NO: 770220 - RNA, 17 nt, Artificial Sequence
  Synthetic
uggucaaacauuauucu

SEQ ID NO: 770221 - RNA, 17 nt, Artificial Sequence
  Synthetic
uggacagaucuuauucu

SEQ ID NO: 770222 - RNA, 17 nt, Artificial Sequence
  Synthetic
aauaaauagguuauucu

SEQ ID NO: 770223 - RNA, 17 nt, Artificial Sequence
  Synthetic
auccguuagguuauucu

SEQ ID NO: 770224 - RNA, 17 nt, Artificial Sequence
  Synthetic
aaaugaaguguuauucu

SEQ ID NO: 770225 - RNA, 17 nt, Artificial Sequence
  Synthetic
cauauaggauuuauucu

SEQ ID NO: 770226 - RNA, 17 nt, Artificial Sequence
  Synthetic
acauuugacuuuauucu

SEQ ID NO: 770227 - RNA, 17 nt, Artificial Sequence
  Synthetic
cccuugcucuuuauucu

SEQ ID NO: 770228 - RNA, 17 nt, Artificial Sequence
  Synthetic
uuuaaauucuuuauucu

SEQ ID NO: 770229 - RNA, 17 nt, Artificial Sequence
  Synthetic
caggauaauuuuauucu

SEQ ID NO: 770230 - RNA, 17 nt, Artificial Sequence
  Synthetic
uucccagauuuuauucu

SEQ ID NO: 770231 - RNA, 17 nt, Artificial Sequence
  Synthetic
uucuaaacuuuuauucu

SEQ ID NO: 770232 - RNA, 17 nt, Artificial Sequence
  Synthetic
aaauuaaaaaaacuucu

SEQ ID NO: 770233 - RNA, 17 nt, Artificial Sequence
  Synthetic
aacauagaaaaacuucu

SEQ ID NO: 770234 - RNA, 17 nt, Artificial Sequence
  Synthetic
agcaaggaaaaacuucu

SEQ ID NO: 770235 - RNA, 17 nt, Artificial Sequence
  Synthetic
acuggucucaaacuucu

SEQ ID NO: 770236 - RNA, 17 nt, Artificial Sequence
  Synthetic
uauuuuaauaaacuucu

SEQ ID NO: 770237 - RNA, 17 nt, Artificial Sequence
  Synthetic
acuuccuuuaaacuucu

SEQ ID NO: 770238 - RNA, 17 nt, Artificial Sequence
  Synthetic
aauguaaaccaacuucu

SEQ ID NO: 770239 - RNA, 17 nt, Artificial Sequence
  Synthetic
ucucugauucaacuucu

SEQ ID NO: 770240 - RNA, 17 nt, Artificial Sequence
  Synthetic
uuagcuaaggaacuucu

SEQ ID NO: 770241 - RNA, 17 nt, Artificial Sequence
  Synthetic
uucaaagccuaacuucu

SEQ ID NO: 770242 - RNA, 17 nt, Artificial Sequence
  Synthetic
agauuuaucacacuucu

SEQ ID NO: 770243 - RNA, 17 nt, Artificial Sequence
  Synthetic
ccagaaaucccacuucu

SEQ ID NO: 770244 - RNA, 17 nt, Artificial Sequence
  Synthetic
ccaauaauuccacuucu

SEQ ID NO: 770245 - RNA, 17 nt, Artificial Sequence
  Synthetic
ugucaaauaucacuucu

SEQ ID NO: 770246 - RNA, 17 nt, Artificial Sequence
  Synthetic
ugugauauuucacuucu

SEQ ID NO: 770247 - RNA, 17 nt, Artificial Sequence
  Synthetic
aaaaaaaaaagacuucu

SEQ ID NO: 770248 - RNA, 17 nt, Artificial Sequence
  Synthetic
aucgggggaagacuucu

SEQ ID NO: 770249 - RNA, 17 nt, Artificial Sequence
  Synthetic
accacaauaagacuucu

SEQ ID NO: 770250 - RNA, 17 nt, Artificial Sequence
  Synthetic
accaccauaagacuucu

SEQ ID NO: 770251 - RNA, 17 nt, Artificial Sequence
  Synthetic
ccauguaugagacuucu

SEQ ID NO: 770252 - RNA, 17 nt, Artificial Sequence
  Synthetic
cuggguacaugacuucu

SEQ ID NO: 770253 - RNA, 17 nt, Artificial Sequence
  Synthetic
cauucugugugacuucu

SEQ ID NO: 770254 - RNA, 17 nt, Artificial Sequence
  Synthetic
cagaugagacuacuucu

SEQ ID NO: 770255 - RNA, 17 nt, Artificial Sequence
  Synthetic
cugggcugccuacuucu

SEQ ID NO: 770256 - RNA, 17 nt, Artificial Sequence
  Synthetic
aauaggacaguacuucu

SEQ ID NO: 770257 - RNA, 17 nt, Artificial Sequence
  Synthetic
ccccaaacauuacuucu

SEQ ID NO: 770258 - RNA, 17 nt, Artificial Sequence
  Synthetic
auaauguuauuacuucu

SEQ ID NO: 770259 - RNA, 17 nt, Artificial Sequence
  Synthetic
ccucuuuucuaccuucu

SEQ ID NO: 770260 - RNA, 17 nt, Artificial Sequence
  Synthetic
cacaucuuuuaccuucu

SEQ ID NO: 770261 - RNA, 17 nt, Artificial Sequence
  Synthetic
cagacaaggccccuucu

SEQ ID NO: 770262 - RNA, 17 nt, Artificial Sequence
  Synthetic
cgugacaaagcccuucu

SEQ ID NO: 770263 - RNA, 17 nt, Artificial Sequence
  Synthetic
aaaaaaaaaucccuucu

SEQ ID NO: 770264 - RNA, 17 nt, Artificial Sequence
  Synthetic
uuuccccacucccuucu

SEQ ID NO: 770265 - RNA, 17 nt, Artificial Sequence
  Synthetic
uagggacauggccuucu

SEQ ID NO: 770266 - RNA, 17 nt, Artificial Sequence
  Synthetic
aauggccuuggccuucu

SEQ ID NO: 770267 - RNA, 17 nt, Artificial Sequence
  Synthetic
ucuccccacugccuucu

SEQ ID NO: 770268 - RNA, 17 nt, Artificial Sequence
  Synthetic
auuuccuucugccuucu

SEQ ID NO: 770269 - RNA, 17 nt, Artificial Sequence
  Synthetic
cugaugauaauccuucu

SEQ ID NO: 770270 - RNA, 17 nt, Artificial Sequence
  Synthetic
ccuucuuacauccuucu

SEQ ID NO: 770271 - RNA, 17 nt, Artificial Sequence
  Synthetic
uaaaucccuauccuucu

SEQ ID NO: 770272 - RNA, 17 nt, Artificial Sequence
  Synthetic
aaauauuaccuccuucu

SEQ ID NO: 770273 - RNA, 17 nt, Artificial Sequence
  Synthetic
auggucauccuccuucu

SEQ ID NO: 770274 - RNA, 17 nt, Artificial Sequence
  Synthetic
cgucaaaugguccuucu

SEQ ID NO: 770275 - RNA, 17 nt, Artificial Sequence
  Synthetic
uauggaagauuccuucu

SEQ ID NO: 770276 - RNA, 17 nt, Artificial Sequence
  Synthetic
aaucaguauuuccuucu

SEQ ID NO: 770277 - RNA, 17 nt, Artificial Sequence
  Synthetic
aagacaaguuuccuucu

SEQ ID NO: 770278 - RNA, 17 nt, Artificial Sequence
  Synthetic
ccuacagcccagcuucu

SEQ ID NO: 770279 - RNA, 17 nt, Artificial Sequence
  Synthetic
cacuuaagcaugcuucu

SEQ ID NO: 770280 - RNA, 17 nt, Artificial Sequence
  Synthetic
cucuccagacugcuucu

SEQ ID NO: 770281 - RNA, 17 nt, Artificial Sequence
  Synthetic
auuacacuacugcuucu

SEQ ID NO: 770282 - RNA, 17 nt, Artificial Sequence
  Synthetic
cucaggugguugcuucu

SEQ ID NO: 770283 - RNA, 17 nt, Artificial Sequence
  Synthetic
acuauuuacaaucuucu

SEQ ID NO: 770284 - RNA, 17 nt, Artificial Sequence
  Synthetic
cgaucauuuaaucuucu

SEQ ID NO: 770285 - RNA, 17 nt, Artificial Sequence
  Synthetic
uaguaauacuaucuucu

SEQ ID NO: 770286 - RNA, 17 nt, Artificial Sequence
  Synthetic
aggguguacuaucuucu

SEQ ID NO: 770287 - RNA, 17 nt, Artificial Sequence
  Synthetic
ugccuagguuaucuucu

SEQ ID NO: 770288 - RNA, 17 nt, Artificial Sequence
  Synthetic
acuugauguuaucuucu

SEQ ID NO: 770289 - RNA, 17 nt, Artificial Sequence
  Synthetic
cuugguagcacucuucu

SEQ ID NO: 770290 - RNA, 17 nt, Artificial Sequence
  Synthetic
aaacagcauccucuucu

SEQ ID NO: 770291 - RNA, 17 nt, Artificial Sequence
  Synthetic
ucuggauauccucuucu

SEQ ID NO: 770292 - RNA, 17 nt, Artificial Sequence
  Synthetic
uugcauuuuccucuucu

SEQ ID NO: 770293 - RNA, 17 nt, Artificial Sequence
  Synthetic
ucaagauaggcucuucu

SEQ ID NO: 770294 - RNA, 17 nt, Artificial Sequence
  Synthetic
uucaacuccucucuucu

SEQ ID NO: 770295 - RNA, 17 nt, Artificial Sequence
  Synthetic
aguucucuuucucuucu

SEQ ID NO: 770296 - RNA, 17 nt, Artificial Sequence
  Synthetic
acacaauuuucucuucu

SEQ ID NO: 770297 - RNA, 17 nt, Artificial Sequence
  Synthetic
acuggaugaagucuucu

SEQ ID NO: 770298 - RNA, 17 nt, Artificial Sequence
  Synthetic
aauuuguuaauucuucu

SEQ ID NO: 770299 - RNA, 17 nt, Artificial Sequence
  Synthetic
caauguauucuucuucu

SEQ ID NO: 770300 - RNA, 17 nt, Artificial Sequence
  Synthetic
aaagcaacuguucuucu

SEQ ID NO: 770301 - RNA, 17 nt, Artificial Sequence
  Synthetic
aagagcugauuucuucu

SEQ ID NO: 770302 - RNA, 17 nt, Artificial Sequence
  Synthetic
acacacuuauuucuucu

SEQ ID NO: 770303 - RNA, 17 nt, Artificial Sequence
  Synthetic
uaauagcaguuucuucu

SEQ ID NO: 770304 - RNA, 17 nt, Artificial Sequence
  Synthetic
ugccuagguuuucuucu

SEQ ID NO: 770305 - RNA, 17 nt, Artificial Sequence
  Synthetic
uucagucagcaaguucu

SEQ ID NO: 770306 - RNA, 17 nt, Artificial Sequence
  Synthetic
uauauacuugaaguucu

SEQ ID NO: 770307 - RNA, 17 nt, Artificial Sequence
  Synthetic
aauuauacuuaaguucu

SEQ ID NO: 770308 - RNA, 17 nt, Artificial Sequence
  Synthetic
augaguacuuaaguucu

SEQ ID NO: 770309 - RNA, 17 nt, Artificial Sequence
  Synthetic
auuauacuuuaaguucu

SEQ ID NO: 770310 - RNA, 17 nt, Artificial Sequence
  Synthetic
auuuuacuuuaaguucu

SEQ ID NO: 770311 - RNA, 17 nt, Artificial Sequence
  Synthetic
uuuaaauuuuaaguucu

SEQ ID NO: 770312 - RNA, 17 nt, Artificial Sequence
  Synthetic
uagccucccacaguucu

SEQ ID NO: 770313 - RNA, 17 nt, Artificial Sequence
  Synthetic
ugucaaaggacaguucu

SEQ ID NO: 770314 - RNA, 17 nt, Artificial Sequence
  Synthetic
cuuaagccuccaguucu

SEQ ID NO: 770315 - RNA, 17 nt, Artificial Sequence
  Synthetic
agagaaguugcaguucu

SEQ ID NO: 770316 - RNA, 17 nt, Artificial Sequence
  Synthetic
uuagcaaucucaguucu

SEQ ID NO: 770317 - RNA, 17 nt, Artificial Sequence
  Synthetic
cucacugucucaguucu

SEQ ID NO: 770318 - RNA, 17 nt, Artificial Sequence
  Synthetic
aagccacugucaguucu

SEQ ID NO: 770319 - RNA, 17 nt, Artificial Sequence
  Synthetic
aagacauugucaguucu

SEQ ID NO: 770320 - RNA, 17 nt, Artificial Sequence
  Synthetic
uuucacgauucaguucu

SEQ ID NO: 770321 - RNA, 17 nt, Artificial Sequence
  Synthetic
aaagcuugaugaguucu

SEQ ID NO: 770322 - RNA, 17 nt, Artificial Sequence
  Synthetic
auuuggacuauaguucu

SEQ ID NO: 770323 - RNA, 17 nt, Artificial Sequence
  Synthetic
ucaugcugccuaguucu

SEQ ID NO: 770324 - RNA, 17 nt, Artificial Sequence
  Synthetic
augguauuucuaguucu

SEQ ID NO: 770325 - RNA, 17 nt, Artificial Sequence
  Synthetic
acuccuauuuuaguucu

SEQ ID NO: 770326 - RNA, 17 nt, Artificial Sequence
  Synthetic
uugaguuuuaacguucu

SEQ ID NO: 770327 - RNA, 17 nt, Artificial Sequence
  Synthetic
auuauacuuuacguucu

SEQ ID NO: 770328 - RNA, 17 nt, Artificial Sequence
  Synthetic
uuaaaauccaccguucu

SEQ ID NO: 770329 - RNA, 17 nt, Artificial Sequence
  Synthetic
aaaauauguuucguucu

SEQ ID NO: 770330 - RNA, 17 nt, Artificial Sequence
  Synthetic
aacaguggcaagguucu

SEQ ID NO: 770331 - RNA, 17 nt, Artificial Sequence
  Synthetic
aauguguuucagguucu

SEQ ID NO: 770332 - RNA, 17 nt, Artificial Sequence
  Synthetic
auuuuccauuagguucu

SEQ ID NO: 770333 - RNA, 17 nt, Artificial Sequence
  Synthetic
accagucgagggguucu

SEQ ID NO: 770334 - RNA, 17 nt, Artificial Sequence
  Synthetic
aagaacaucuggguucu

SEQ ID NO: 770335 - RNA, 17 nt, Artificial Sequence
  Synthetic
ugguaugguaugguucu

SEQ ID NO: 770336 - RNA, 17 nt, Artificial Sequence
  Synthetic
uauuuaguuuugguucu

SEQ ID NO: 770337 - RNA, 17 nt, Artificial Sequence
  Synthetic
ugacaaagaaauguucu

SEQ ID NO: 770338 - RNA, 17 nt, Artificial Sequence
  Synthetic
cuauggagaaauguucu

SEQ ID NO: 770339 - RNA, 17 nt, Artificial Sequence
  Synthetic
cacgagggaaauguucu

SEQ ID NO: 770340 - RNA, 17 nt, Artificial Sequence
  Synthetic
uuuauauccaauguucu

SEQ ID NO: 770341 - RNA, 17 nt, Artificial Sequence
  Synthetic
augccagggaauguucu

SEQ ID NO: 770342 - RNA, 17 nt, Artificial Sequence
  Synthetic
uaaagcuagcauguucu

SEQ ID NO: 770343 - RNA, 17 nt, Artificial Sequence
  Synthetic
uauacuuuagauguucu

SEQ ID NO: 770344 - RNA, 17 nt, Artificial Sequence
  Synthetic
auuuucaaugauguucu

SEQ ID NO: 770345 - RNA, 17 nt, Artificial Sequence
  Synthetic
uaauggugguauguucu

SEQ ID NO: 770346 - RNA, 17 nt, Artificial Sequence
  Synthetic
uccccacuguauguucu

SEQ ID NO: 770347 - RNA, 17 nt, Artificial Sequence
  Synthetic
ugguuucauuauguucu

SEQ ID NO: 770348 - RNA, 17 nt, Artificial Sequence
  Synthetic
uugagaaacacuguucu

SEQ ID NO: 770349 - RNA, 17 nt, Artificial Sequence
  Synthetic
uuaaaauaggcuguucu

SEQ ID NO: 770350 - RNA, 17 nt, Artificial Sequence
  Synthetic
uuuuuugcugcuguucu

SEQ ID NO: 770351 - RNA, 17 nt, Artificial Sequence
  Synthetic
ccugucuuaucuguucu

SEQ ID NO: 770352 - RNA, 17 nt, Artificial Sequence
  Synthetic
uguucaaagucuguucu

SEQ ID NO: 770353 - RNA, 17 nt, Artificial Sequence
  Synthetic
uuguucuguucuguucu

SEQ ID NO: 770354 - RNA, 17 nt, Artificial Sequence
  Synthetic
uguauuuacaguguucu

SEQ ID NO: 770355 - RNA, 17 nt, Artificial Sequence
  Synthetic
cuauuuaggaguguucu

SEQ ID NO: 770356 - RNA, 17 nt, Artificial Sequence
  Synthetic
aggaucuacuguguucu

SEQ ID NO: 770357 - RNA, 17 nt, Artificial Sequence
  Synthetic
caugaagaaauuguucu

SEQ ID NO: 770358 - RNA, 17 nt, Artificial Sequence
  Synthetic
acugaguucauuguucu

SEQ ID NO: 770359 - RNA, 17 nt, Artificial Sequence
  Synthetic
uuagaaaagauuguucu

SEQ ID NO: 770360 - RNA, 17 nt, Artificial Sequence
  Synthetic
caagauaauauuguucu

SEQ ID NO: 770361 - RNA, 17 nt, Artificial Sequence
  Synthetic
uugauuguacuuguucu

SEQ ID NO: 770362 - RNA, 17 nt, Artificial Sequence
  Synthetic
uuaaguccauuuguucu

SEQ ID NO: 770363 - RNA, 17 nt, Artificial Sequence
  Synthetic
auuuagucauuuguucu

SEQ ID NO: 770364 - RNA, 17 nt, Artificial Sequence
  Synthetic
uaaauuauguuuguucu

SEQ ID NO: 770365 - RNA, 17 nt, Artificial Sequence
  Synthetic
ugcugagagaaauuucu

SEQ ID NO: 770366 - RNA, 17 nt, Artificial Sequence
  Synthetic
uaggauguccaauuucu

SEQ ID NO: 770367 - RNA, 17 nt, Artificial Sequence
  Synthetic
acugaaucagaauuucu

SEQ ID NO: 770368 - RNA, 17 nt, Artificial Sequence
  Synthetic
aaaauugacuaauuucu

SEQ ID NO: 770369 - RNA, 17 nt, Artificial Sequence
  Synthetic
uggugcuucacauuucu

SEQ ID NO: 770370 - RNA, 17 nt, Artificial Sequence
  Synthetic
ucucaaaugacauuucu

SEQ ID NO: 770371 - RNA, 17 nt, Artificial Sequence
  Synthetic
cuauucacuacauuucu

SEQ ID NO: 770372 - RNA, 17 nt, Artificial Sequence
  Synthetic
aaaugaacaccauuucu

SEQ ID NO: 770373 - RNA, 17 nt, Artificial Sequence
  Synthetic
ugugaggacccauuucu

SEQ ID NO: 770374 - RNA, 17 nt, Artificial Sequence
  Synthetic
ccagcaaucccauuucu

SEQ ID NO: 770375 - RNA, 17 nt, Artificial Sequence
  Synthetic
cugggagucccauuucu

SEQ ID NO: 770376 - RNA, 17 nt, Artificial Sequence
  Synthetic
cccagggcagcauuucu

SEQ ID NO: 770377 - RNA, 17 nt, Artificial Sequence
  Synthetic
uuaucuuacgcauuucu

SEQ ID NO: 770378 - RNA, 17 nt, Artificial Sequence
  Synthetic
uuuagaacugcauuucu

SEQ ID NO: 770379 - RNA, 17 nt, Artificial Sequence
  Synthetic
agccugccugcauuucu

SEQ ID NO: 770380 - RNA, 17 nt, Artificial Sequence
  Synthetic
ucuaguucaucauuucu

SEQ ID NO: 770381 - RNA, 17 nt, Artificial Sequence
  Synthetic
uugugaagaucauuucu

SEQ ID NO: 770382 - RNA, 17 nt, Artificial Sequence
  Synthetic
ugugucaagucauuucu

SEQ ID NO: 770383 - RNA, 17 nt, Artificial Sequence
  Synthetic
ugguuuaaaagauuucu

SEQ ID NO: 770384 - RNA, 17 nt, Artificial Sequence
  Synthetic
auggcaaucagauuucu

SEQ ID NO: 770385 - RNA, 17 nt, Artificial Sequence
  Synthetic
uuugaaaauagauuucu

SEQ ID NO: 770386 - RNA, 17 nt, Artificial Sequence
  Synthetic
aauaugaguagauuucu

SEQ ID NO: 770387 - RNA, 17 nt, Artificial Sequence
  Synthetic
auccuuuguagauuucu

SEQ ID NO: 770388 - RNA, 17 nt, Artificial Sequence
  Synthetic
uuucugcuuggauuucu

SEQ ID NO: 770389 - RNA, 17 nt, Artificial Sequence
  Synthetic
aacaauaugugauuucu

SEQ ID NO: 770390 - RNA, 17 nt, Artificial Sequence
  Synthetic
acugaccuuugauuucu

SEQ ID NO: 770391 - RNA, 17 nt, Artificial Sequence
  Synthetic
ugcuccuaaauauuucu

SEQ ID NO: 770392 - RNA, 17 nt, Artificial Sequence
  Synthetic
uaguaguaaauauuucu

SEQ ID NO: 770393 - RNA, 17 nt, Artificial Sequence
  Synthetic
ccuucuguaauauuucu

SEQ ID NO: 770394 - RNA, 17 nt, Artificial Sequence
  Synthetic
uacuuuguaauauuucu

SEQ ID NO: 770395 - RNA, 17 nt, Artificial Sequence
  Synthetic
uucaagaacauauuucu

SEQ ID NO: 770396 - RNA, 17 nt, Artificial Sequence
  Synthetic
caggcagacauauuucu

SEQ ID NO: 770397 - RNA, 17 nt, Artificial Sequence
  Synthetic
cauagucccauauuucu

SEQ ID NO: 770398 - RNA, 17 nt, Artificial Sequence
  Synthetic
ucuccagucauauuucu

SEQ ID NO: 770399 - RNA, 17 nt, Artificial Sequence
  Synthetic
accuuaaaacuauuucu

SEQ ID NO: 770400 - RNA, 17 nt, Artificial Sequence
  Synthetic
cuuuugcuccuauuucu

SEQ ID NO: 770401 - RNA, 17 nt, Artificial Sequence
  Synthetic
uucccuacucuauuucu

SEQ ID NO: 770402 - RNA, 17 nt, Artificial Sequence
  Synthetic
acaugauacguauuucu

SEQ ID NO: 770403 - RNA, 17 nt, Artificial Sequence
  Synthetic
cucuuuaucguauuucu

SEQ ID NO: 770404 - RNA, 17 nt, Artificial Sequence
  Synthetic
cuguuaacuguauuucu

SEQ ID NO: 770405 - RNA, 17 nt, Artificial Sequence
  Synthetic
auucauuguguauuucu

SEQ ID NO: 770406 - RNA, 17 nt, Artificial Sequence
  Synthetic
aggagcuaauuauuucu

SEQ ID NO: 770407 - RNA, 17 nt, Artificial Sequence
  Synthetic
uaugugagcuuauuucu

SEQ ID NO: 770408 - RNA, 17 nt, Artificial Sequence
  Synthetic
augcuagguuuauuucu

SEQ ID NO: 770409 - RNA, 17 nt, Artificial Sequence
  Synthetic
cuggaaguuuuauuucu

SEQ ID NO: 770410 - RNA, 17 nt, Artificial Sequence
  Synthetic
cucaaauuuuuauuucu

SEQ ID NO: 770411 - RNA, 17 nt, Artificial Sequence
  Synthetic
ugugacuccaacuuucu

SEQ ID NO: 770412 - RNA, 17 nt, Artificial Sequence
  Synthetic
cuuagagauaacuuucu

SEQ ID NO: 770413 - RNA, 17 nt, Artificial Sequence
  Synthetic
cuacacaaacacuuucu

SEQ ID NO: 770414 - RNA, 17 nt, Artificial Sequence
  Synthetic
cagaucuuucacuuucu

SEQ ID NO: 770415 - RNA, 17 nt, Artificial Sequence
  Synthetic
uuauuucaauacuuucu

SEQ ID NO: 770416 - RNA, 17 nt, Artificial Sequence
  Synthetic
uaguuuucuuacuuucu

SEQ ID NO: 770417 - RNA, 17 nt, Artificial Sequence
  Synthetic
caaguuaguuacuuucu

SEQ ID NO: 770418 - RNA, 17 nt, Artificial Sequence
  Synthetic
agucacauaaccuuucu

SEQ ID NO: 770419 - RNA, 17 nt, Artificial Sequence
  Synthetic
uugaaaagcaccuuucu

SEQ ID NO: 770420 - RNA, 17 nt, Artificial Sequence
  Synthetic
aaaaucaugcccuuucu

SEQ ID NO: 770421 - RNA, 17 nt, Artificial Sequence
  Synthetic
ucugagcaugccuuucu

SEQ ID NO: 770422 - RNA, 17 nt, Artificial Sequence
  Synthetic
uuacaaauuuccuuucu

SEQ ID NO: 770423 - RNA, 17 nt, Artificial Sequence
  Synthetic
cauaugcaaagcuuucu

SEQ ID NO: 770424 - RNA, 17 nt, Artificial Sequence
  Synthetic
uuagauaagggcuuucu

SEQ ID NO: 770425 - RNA, 17 nt, Artificial Sequence
  Synthetic
uucuaccauggcuuucu

SEQ ID NO: 770426 - RNA, 17 nt, Artificial Sequence
  Synthetic
aacgucauuggcuuucu

SEQ ID NO: 770427 - RNA, 17 nt, Artificial Sequence
  Synthetic
uuaagaaaaugcuuucu

SEQ ID NO: 770428 - RNA, 17 nt, Artificial Sequence
  Synthetic
aauaaagacugcuuucu

SEQ ID NO: 770429 - RNA, 17 nt, Artificial Sequence
  Synthetic
cucagaaucugcuuucu

SEQ ID NO: 770430 - RNA, 17 nt, Artificial Sequence
  Synthetic
cugaaauucugcuuucu

SEQ ID NO: 770431 - RNA, 17 nt, Artificial Sequence
  Synthetic
ccaagccaaaucuuucu

SEQ ID NO: 770432 - RNA, 17 nt, Artificial Sequence
  Synthetic
auaacccuuaucuuucu

SEQ ID NO: 770433 - RNA, 17 nt, Artificial Sequence
  Synthetic
aaaauugaacucuuucu

SEQ ID NO: 770434 - RNA, 17 nt, Artificial Sequence
  Synthetic
acauucuuugucuuucu

SEQ ID NO: 770435 - RNA, 17 nt, Artificial Sequence
  Synthetic
cuugaugaauucuuucu

SEQ ID NO: 770436 - RNA, 17 nt, Artificial Sequence
  Synthetic
auuuuccauuucuuucu

SEQ ID NO: 770437 - RNA, 17 nt, Artificial Sequence
  Synthetic
aggggaauuuucuuucu

SEQ ID NO: 770438 - RNA, 17 nt, Artificial Sequence
  Synthetic
acaauauuuuucuuucu

SEQ ID NO: 770439 - RNA, 17 nt, Artificial Sequence
  Synthetic
ucagaacucaaguuucu

SEQ ID NO: 770440 - RNA, 17 nt, Artificial Sequence
  Synthetic
caucgaauucaguuucu

SEQ ID NO: 770441 - RNA, 17 nt, Artificial Sequence
  Synthetic
aaauaaagagaguuucu

SEQ ID NO: 770442 - RNA, 17 nt, Artificial Sequence
  Synthetic
cuacuuuucuaguuucu

SEQ ID NO: 770443 - RNA, 17 nt, Artificial Sequence
  Synthetic
cuacugcaaagguuucu

SEQ ID NO: 770444 - RNA, 17 nt, Artificial Sequence
  Synthetic
aagacuuaaagguuucu

SEQ ID NO: 770445 - RNA, 17 nt, Artificial Sequence
  Synthetic
cuucaucugagguuucu

SEQ ID NO: 770446 - RNA, 17 nt, Artificial Sequence
  Synthetic
aggccucugagguuucu

SEQ ID NO: 770447 - RNA, 17 nt, Artificial Sequence
  Synthetic
caagauaauggguuucu

SEQ ID NO: 770448 - RNA, 17 nt, Artificial Sequence
  Synthetic
uuucaggcuggguuucu

SEQ ID NO: 770449 - RNA, 17 nt, Artificial Sequence
  Synthetic
uugcaugcuggguuucu

SEQ ID NO: 770450 - RNA, 17 nt, Artificial Sequence
  Synthetic
aaauaguucugguuucu

SEQ ID NO: 770451 - RNA, 17 nt, Artificial Sequence
  Synthetic
cgaugguucugguuucu

SEQ ID NO: 770452 - RNA, 17 nt, Artificial Sequence
  Synthetic
cucucaacaauguuucu

SEQ ID NO: 770453 - RNA, 17 nt, Artificial Sequence
  Synthetic
caaaacagaauguuucu

SEQ ID NO: 770454 - RNA, 17 nt, Artificial Sequence
  Synthetic
uagcaacaucuguuucu

SEQ ID NO: 770455 - RNA, 17 nt, Artificial Sequence
  Synthetic
uuuuuauuguuguuucu

SEQ ID NO: 770456 - RNA, 17 nt, Artificial Sequence
  Synthetic
aaguuuucuuuguuucu

SEQ ID NO: 770457 - RNA, 17 nt, Artificial Sequence
  Synthetic
aaauaauuuuuguuucu

SEQ ID NO: 770458 - RNA, 17 nt, Artificial Sequence
  Synthetic
caccgcuuaaauuuucu

SEQ ID NO: 770459 - RNA, 17 nt, Artificial Sequence
  Synthetic
aauaagcacaauuuucu

SEQ ID NO: 770460 - RNA, 17 nt, Artificial Sequence
  Synthetic
aucagacagaauuuucu

SEQ ID NO: 770461 - RNA, 17 nt, Artificial Sequence
  Synthetic
aaaaaacgccauuuucu

SEQ ID NO: 770462 - RNA, 17 nt, Artificial Sequence
  Synthetic
cgggaauggcauuuucu

SEQ ID NO: 770463 - RNA, 17 nt, Artificial Sequence
  Synthetic
uuuguccugcauuuucu

SEQ ID NO: 770464 - RNA, 17 nt, Artificial Sequence
  Synthetic
aaaccguaucauuuucu

SEQ ID NO: 770465 - RNA, 17 nt, Artificial Sequence
  Synthetic
cuugcuuaggauuuucu

SEQ ID NO: 770466 - RNA, 17 nt, Artificial Sequence
  Synthetic
cuuuuagcugauuuucu

SEQ ID NO: 770467 - RNA, 17 nt, Artificial Sequence
  Synthetic
aacgaaacauauuuucu

SEQ ID NO: 770468 - RNA, 17 nt, Artificial Sequence
  Synthetic
uagcucucauauuuucu

SEQ ID NO: 770469 - RNA, 17 nt, Artificial Sequence
  Synthetic
cuuuuaacuuauuuucu

SEQ ID NO: 770470 - RNA, 17 nt, Artificial Sequence
  Synthetic
caaacauguuauuuucu

SEQ ID NO: 770471 - RNA, 17 nt, Artificial Sequence
  Synthetic
cacuguuggacuuuucu

SEQ ID NO: 770472 - RNA, 17 nt, Artificial Sequence
  Synthetic
aucccaucuacuuuucu

SEQ ID NO: 770473 - RNA, 17 nt, Artificial Sequence
  Synthetic
uauaauauuacuuuucu

SEQ ID NO: 770474 - RNA, 17 nt, Artificial Sequence
  Synthetic
uaaauguuuacuuuucu

SEQ ID NO: 770475 - RNA, 17 nt, Artificial Sequence
  Synthetic
ucucaaaucccuuuucu

SEQ ID NO: 770476 - RNA, 17 nt, Artificial Sequence
  Synthetic
auacaagaggcuuuucu

SEQ ID NO: 770477 - RNA, 17 nt, Artificial Sequence
  Synthetic
cucuuucuaucuuuucu

SEQ ID NO: 770478 - RNA, 17 nt, Artificial Sequence
  Synthetic
ugaacucagucuuuucu

SEQ ID NO: 770479 - RNA, 17 nt, Artificial Sequence
  Synthetic
uaucuucuuucuuuucu

SEQ ID NO: 770480 - RNA, 17 nt, Artificial Sequence
  Synthetic
uuaacccacaguuuucu

SEQ ID NO: 770481 - RNA, 17 nt, Artificial Sequence
  Synthetic
ugguaaaucaguuuucu

SEQ ID NO: 770482 - RNA, 17 nt, Artificial Sequence
  Synthetic
aacuuuaucaguuuucu

SEQ ID NO: 770483 - RNA, 17 nt, Artificial Sequence
  Synthetic
aguuaccggaguuuucu

SEQ ID NO: 770484 - RNA, 17 nt, Artificial Sequence
  Synthetic
uuauucaugaguuuucu

SEQ ID NO: 770485 - RNA, 17 nt, Artificial Sequence
  Synthetic
aguuuuugagguuuucu

SEQ ID NO: 770486 - RNA, 17 nt, Artificial Sequence
  Synthetic
uuugaugacuguuuucu

SEQ ID NO: 770487 - RNA, 17 nt, Artificial Sequence
  Synthetic
aaucauggguguuuucu

SEQ ID NO: 770488 - RNA, 17 nt, Artificial Sequence
  Synthetic
agagaguaaauuuuucu

SEQ ID NO: 770489 - RNA, 17 nt, Artificial Sequence
  Synthetic
cauugaauaauuuuucu

SEQ ID NO: 770490 - RNA, 17 nt, Artificial Sequence
  Synthetic
acacaaaacauuuuucu

SEQ ID NO: 770491 - RNA, 17 nt, Artificial Sequence
  Synthetic
cggcagcacauuuuucu

SEQ ID NO: 770492 - RNA, 17 nt, Artificial Sequence
  Synthetic
auuugggucauuuuucu

SEQ ID NO: 770493 - RNA, 17 nt, Artificial Sequence
  Synthetic
auguuugugauuuuucu

SEQ ID NO: 770494 - RNA, 17 nt, Artificial Sequence
  Synthetic
cccuuaugacuuuuucu

SEQ ID NO: 770495 - RNA, 17 nt, Artificial Sequence
  Synthetic
aauccacaaguuuuucu

SEQ ID NO: 770496 - RNA, 17 nt, Artificial Sequence
  Synthetic
uggucccucguuuuucu

SEQ ID NO: 770497 - RNA, 17 nt, Artificial Sequence
  Synthetic
augccaaauguuuuucu

SEQ ID NO: 770498 - RNA, 17 nt, Artificial Sequence
  Synthetic
uacuucuuuguuuuucu

SEQ ID NO: 770499 - RNA, 17 nt, Artificial Sequence
  Synthetic
ugaaauaaauuuuuucu

SEQ ID NO: 770500 - RNA, 17 nt, Artificial Sequence
  Synthetic
cagaugacauuuuuucu

SEQ ID NO: 770501 - RNA, 17 nt, Artificial Sequence
  Synthetic
uuuaaggacuuuuuucu

SEQ ID NO: 770502 - RNA, 17 nt, Artificial Sequence
  Synthetic
ugagcaagcuuuuuucu

SEQ ID NO: 770503 - RNA, 17 nt, Artificial Sequence
  Synthetic
uuuguucauuuuuuucu

SEQ ID NO: 770504 - RNA, 17 nt, Artificial Sequence
  Synthetic
cuucucucuuuuuuucu

SEQ ID NO: 770505 - RNA, 17 nt, Artificial Sequence
  Synthetic
uuuuuuucuuuuuuucu

SEQ ID NO: 770506 - RNA, 17 nt, Artificial Sequence
  Synthetic
uucagcaguuuuuuucu

SEQ ID NO: 770507 - RNA, 17 nt, Artificial Sequence
  Synthetic
cagauuauuuuuuuucu

SEQ ID NO: 770508 - RNA, 17 nt, Artificial Sequence
  Synthetic
aaaaaaguuuuuuuucu

SEQ ID NO: 770509 - RNA, 17 nt, Artificial Sequence
  Synthetic
uuagauuuuuuuuuucu

SEQ ID NO: 770510 - RNA, 17 nt, Artificial Sequence
  Synthetic
uugaaaacaaaaaaagu

SEQ ID NO: 770511 - RNA, 17 nt, Artificial Sequence
  Synthetic
ugugaugcaaaaaaagu

SEQ ID NO: 770512 - RNA, 17 nt, Artificial Sequence
  Synthetic
ugcucaggaaaaaaagu

SEQ ID NO: 770513 - RNA, 17 nt, Artificial Sequence
  Synthetic
cuuuuaaagaaaaaagu

SEQ ID NO: 770514 - RNA, 17 nt, Artificial Sequence
  Synthetic
uuaugugagaaaaaagu

SEQ ID NO: 770515 - RNA, 17 nt, Artificial Sequence
  Synthetic
aacaaagaacaaaaagu

SEQ ID NO: 770516 - RNA, 17 nt, Artificial Sequence
  Synthetic
caaccccaucaaaaagu

SEQ ID NO: 770517 - RNA, 17 nt, Artificial Sequence
  Synthetic
aauauuccucaaaaagu

SEQ ID NO: 770518 - RNA, 17 nt, Artificial Sequence
  Synthetic
auuuccugagaaaaagu

SEQ ID NO: 770519 - RNA, 17 nt, Artificial Sequence
  Synthetic
aggaucauagaaaaagu

SEQ ID NO: 770520 - RNA, 17 nt, Artificial Sequence
  Synthetic
cacuuucuggaaaaagu

SEQ ID NO: 770521 - RNA, 17 nt, Artificial Sequence
  Synthetic
uuguaccaauaaaaagu

SEQ ID NO: 770522 - RNA, 17 nt, Artificial Sequence
  Synthetic
uuaacaucauaaaaagu

SEQ ID NO: 770523 - RNA, 17 nt, Artificial Sequence
  Synthetic
aaccccauguaaaaagu

SEQ ID NO: 770524 - RNA, 17 nt, Artificial Sequence
  Synthetic
auacaacuuuaaaaagu

SEQ ID NO: 770525 - RNA, 17 nt, Artificial Sequence
  Synthetic
aauaucaucacaaaagu

SEQ ID NO: 770526 - RNA, 17 nt, Artificial Sequence
  Synthetic
ugaauuaguacaaaagu

SEQ ID NO: 770527 - RNA, 17 nt, Artificial Sequence
  Synthetic
caguuguacccaaaagu

SEQ ID NO: 770528 - RNA, 17 nt, Artificial Sequence
  Synthetic
caaccccauccaaaagu

SEQ ID NO: 770529 - RNA, 17 nt, Artificial Sequence
  Synthetic
aaaggaggagcaaaagu

SEQ ID NO: 770530 - RNA, 17 nt, Artificial Sequence
  Synthetic
uuuagaacugcaaaagu

SEQ ID NO: 770531 - RNA, 17 nt, Artificial Sequence
  Synthetic
agauagaaaagaaaagu

SEQ ID NO: 770532 - RNA, 17 nt, Artificial Sequence
  Synthetic
aauuguagaagaaaagu

SEQ ID NO: 770533 - RNA, 17 nt, Artificial Sequence
  Synthetic
agaaugauaagaaaagu

SEQ ID NO: 770534 - RNA, 17 nt, Artificial Sequence
  Synthetic
agcugcagcagaaaagu

SEQ ID NO: 770535 - RNA, 17 nt, Artificial Sequence
  Synthetic
accagucagagaaaagu

SEQ ID NO: 770536 - RNA, 17 nt, Artificial Sequence
  Synthetic
caugaaucuagaaaagu

SEQ ID NO: 770537 - RNA, 17 nt, Artificial Sequence
  Synthetic
ucaacaaaacgaaaagu

SEQ ID NO: 770538 - RNA, 17 nt, Artificial Sequence
  Synthetic
caaccucaucgaaaagu

SEQ ID NO: 770539 - RNA, 17 nt, Artificial Sequence
  Synthetic
ugucauaaaggaaaagu

SEQ ID NO: 770540 - RNA, 17 nt, Artificial Sequence
  Synthetic
auucgaguaggaaaagu

SEQ ID NO: 770541 - RNA, 17 nt, Artificial Sequence
  Synthetic
auagaauauggaaaagu

SEQ ID NO: 770542 - RNA, 17 nt, Artificial Sequence
  Synthetic
aggacauauugaaaagu

SEQ ID NO: 770543 - RNA, 17 nt, Artificial Sequence
  Synthetic
uuacaaggaauaaaagu

SEQ ID NO: 770544 - RNA, 17 nt, Artificial Sequence
  Synthetic
ucaauaaaacuaaaagu

SEQ ID NO: 770545 - RNA, 17 nt, Artificial Sequence
  Synthetic
agucauuuucuaaaagu

SEQ ID NO: 770546 - RNA, 17 nt, Artificial Sequence
  Synthetic
cucuuagaaguaaaagu

SEQ ID NO: 770547 - RNA, 17 nt, Artificial Sequence
  Synthetic
uguucucacuuaaaagu

SEQ ID NO: 770548 - RNA, 17 nt, Artificial Sequence
  Synthetic
auccccaccuuaaaagu

SEQ ID NO: 770549 - RNA, 17 nt, Artificial Sequence
  Synthetic
uguucucgcuuaaaagu

SEQ ID NO: 770550 - RNA, 17 nt, Artificial Sequence
  Synthetic
ucugguuguuuaaaagu

SEQ ID NO: 770551 - RNA, 17 nt, Artificial Sequence
  Synthetic
uuugcuacacacaaagu

SEQ ID NO: 770552 - RNA, 17 nt, Artificial Sequence
  Synthetic
auuucaagccacaaagu

SEQ ID NO: 770553 - RNA, 17 nt, Artificial Sequence
  Synthetic
cguaagagccacaaagu

SEQ ID NO: 770554 - RNA, 17 nt, Artificial Sequence
  Synthetic
agugcugagcacaaagu

SEQ ID NO: 770555 - RNA, 17 nt, Artificial Sequence
  Synthetic
aguguuuggcacaaagu

SEQ ID NO: 770556 - RNA, 17 nt, Artificial Sequence
  Synthetic
agcucaagauacaaagu

SEQ ID NO: 770557 - RNA, 17 nt, Artificial Sequence
  Synthetic
aaaaaaaaaaccaaagu

SEQ ID NO: 770558 - RNA, 17 nt, Artificial Sequence
  Synthetic
uguauagggaccaaagu

SEQ ID NO: 770559 - RNA, 17 nt, Artificial Sequence
  Synthetic
uuggccuuuaccaaagu

SEQ ID NO: 770560 - RNA, 17 nt, Artificial Sequence
  Synthetic
cagaauguaagcaaagu

SEQ ID NO: 770561 - RNA, 17 nt, Artificial Sequence
  Synthetic
auauaaaugagcaaagu

SEQ ID NO: 770562 - RNA, 17 nt, Artificial Sequence
  Synthetic
aguaagcaaggcaaagu

SEQ ID NO: 770563 - RNA, 17 nt, Artificial Sequence
  Synthetic
ucuuuauuaaucaaagu

SEQ ID NO: 770564 - RNA, 17 nt, Artificial Sequence
  Synthetic
cagagauuacucaaagu

SEQ ID NO: 770565 - RNA, 17 nt, Artificial Sequence
  Synthetic
aaaccgcagcucaaagu

SEQ ID NO: 770566 - RNA, 17 nt, Artificial Sequence
  Synthetic
aauaguucauucaaagu

SEQ ID NO: 770567 - RNA, 17 nt, Artificial Sequence
  Synthetic
aauuuuagauucaaagu

SEQ ID NO: 770568 - RNA, 17 nt, Artificial Sequence
  Synthetic
cucucagaaaagaaagu

SEQ ID NO: 770569 - RNA, 17 nt, Artificial Sequence
  Synthetic
uggagaucaaagaaagu

SEQ ID NO: 770570 - RNA, 17 nt, Artificial Sequence
  Synthetic
aaugcuggaaagaaagu

SEQ ID NO: 770571 - RNA, 17 nt, Artificial Sequence
  Synthetic
cuguccccccagaaagu

SEQ ID NO: 770572 - RNA, 17 nt, Artificial Sequence
  Synthetic
ugcgucaagcagaaagu

SEQ ID NO: 770573 - RNA, 17 nt, Artificial Sequence
  Synthetic
aaaacccaucagaaagu

SEQ ID NO: 770574 - RNA, 17 nt, Artificial Sequence
  Synthetic
agaccccaucagaaagu

SEQ ID NO: 770575 - RNA, 17 nt, Artificial Sequence
  Synthetic
auuuccaaagagaaagu

SEQ ID NO: 770576 - RNA, 17 nt, Artificial Sequence
  Synthetic
cauuauaaagagaaagu

SEQ ID NO: 770577 - RNA, 17 nt, Artificial Sequence
  Synthetic
uuggaaagagagaaagu

SEQ ID NO: 770578 - RNA, 17 nt, Artificial Sequence
  Synthetic
aaucagugagagaaagu

SEQ ID NO: 770579 - RNA, 17 nt, Artificial Sequence
  Synthetic
auuuuggaggagaaagu

SEQ ID NO: 770580 - RNA, 17 nt, Artificial Sequence
  Synthetic
uugagaauugagaaagu

SEQ ID NO: 770581 - RNA, 17 nt, Artificial Sequence
  Synthetic
auaaacaaguagaaagu

SEQ ID NO: 770582 - RNA, 17 nt, Artificial Sequence
  Synthetic
aaaacaauuuagaaagu

SEQ ID NO: 770583 - RNA, 17 nt, Artificial Sequence
  Synthetic
ugaucucaaaggaaagu

SEQ ID NO: 770584 - RNA, 17 nt, Artificial Sequence
  Synthetic
aggaaaacgaggaaagu

SEQ ID NO: 770585 - RNA, 17 nt, Artificial Sequence
  Synthetic
auguaacuggggaaagu

SEQ ID NO: 770586 - RNA, 17 nt, Artificial Sequence
  Synthetic
uaugugccugggaaagu

SEQ ID NO: 770587 - RNA, 17 nt, Artificial Sequence
  Synthetic
auugaauccuggaaagu

SEQ ID NO: 770588 - RNA, 17 nt, Artificial Sequence
  Synthetic
acuagacauuggaaagu

SEQ ID NO: 770589 - RNA, 17 nt, Artificial Sequence
  Synthetic
uaaugggaaaugaaagu

SEQ ID NO: 770590 - RNA, 17 nt, Artificial Sequence
  Synthetic
aucucagcugugaaagu

SEQ ID NO: 770591 - RNA, 17 nt, Artificial Sequence
  Synthetic
ugcccaauguugaaagu

SEQ ID NO: 770592 - RNA, 17 nt, Artificial Sequence
  Synthetic
caaauauauuugaaagu

SEQ ID NO: 770593 - RNA, 17 nt, Artificial Sequence
  Synthetic
caaagcccuuugaaagu

SEQ ID NO: 770594 - RNA, 17 nt, Artificial Sequence
  Synthetic
cuuuucauuuugaaagu

SEQ ID NO: 770595 - RNA, 17 nt, Artificial Sequence
  Synthetic
aaaaagguaaauaaagu

SEQ ID NO: 770596 - RNA, 17 nt, Artificial Sequence
  Synthetic
uuaauuggcaauaaagu

SEQ ID NO: 770597 - RNA, 17 nt, Artificial Sequence
  Synthetic
augaucccucauaaagu

SEQ ID NO: 770598 - RNA, 17 nt, Artificial Sequence
  Synthetic
uuaauaucagauaaagu

SEQ ID NO: 770599 - RNA, 17 nt, Artificial Sequence
  Synthetic
auaagcucagauaaagu

SEQ ID NO: 770600 - RNA, 17 nt, Artificial Sequence
  Synthetic
aaaauaaaugauaaagu

SEQ ID NO: 770601 - RNA, 17 nt, Artificial Sequence
  Synthetic
uagaaaacugauaaagu

SEQ ID NO: 770602 - RNA, 17 nt, Artificial Sequence
  Synthetic
cuaaauuuuacuaaagu

SEQ ID NO: 770603 - RNA, 17 nt, Artificial Sequence
  Synthetic
aagauucaaccuaaagu

SEQ ID NO: 770604 - RNA, 17 nt, Artificial Sequence
  Synthetic
auucauaucaguaaagu

SEQ ID NO: 770605 - RNA, 17 nt, Artificial Sequence
  Synthetic
uuuuuaggggguaaagu

SEQ ID NO: 770606 - RNA, 17 nt, Artificial Sequence
  Synthetic
uggcaaaaaauuaaagu

SEQ ID NO: 770607 - RNA, 17 nt, Artificial Sequence
  Synthetic
uuuggaagaauuaaagu

SEQ ID NO: 770608 - RNA, 17 nt, Artificial Sequence
  Synthetic
aucuaauucauuaaagu

SEQ ID NO: 770609 - RNA, 17 nt, Artificial Sequence
  Synthetic
acccuagaucuuaaagu

SEQ ID NO: 770610 - RNA, 17 nt, Artificial Sequence
  Synthetic
auaauuaauguuaaagu

SEQ ID NO: 770611 - RNA, 17 nt, Artificial Sequence
  Synthetic
ugaacaaauuuuaaagu

SEQ ID NO: 770612 - RNA, 17 nt, Artificial Sequence
  Synthetic
uaccuaggcaaacaagu

SEQ ID NO: 770613 - RNA, 17 nt, Artificial Sequence
  Synthetic
aaaaguguuaaacaagu

SEQ ID NO: 770614 - RNA, 17 nt, Artificial Sequence
  Synthetic
ucccucccacaacaagu

SEQ ID NO: 770615 - RNA, 17 nt, Artificial Sequence
  Synthetic
aaaaguuuucaacaagu

SEQ ID NO: 770616 - RNA, 17 nt, Artificial Sequence
  Synthetic
aaaucuauagaacaagu

SEQ ID NO: 770617 - RNA, 17 nt, Artificial Sequence
  Synthetic
cacagacuagaacaagu

SEQ ID NO: 770618 - RNA, 17 nt, Artificial Sequence
  Synthetic
aacaccugggaacaagu

SEQ ID NO: 770619 - RNA, 17 nt, Artificial Sequence
  Synthetic
accaaaaauuaacaagu

SEQ ID NO: 770620 - RNA, 17 nt, Artificial Sequence
  Synthetic
uuuagaccuuaacaagu

SEQ ID NO: 770621 - RNA, 17 nt, Artificial Sequence
  Synthetic
aaaacuuuuagacaagu

SEQ ID NO: 770622 - RNA, 17 nt, Artificial Sequence
  Synthetic
acgcuuuggggacaagu

SEQ ID NO: 770623 - RNA, 17 nt, Artificial Sequence
  Synthetic
agucugcacauacaagu

SEQ ID NO: 770624 - RNA, 17 nt, Artificial Sequence
  Synthetic
caaucuuagcuacaagu

SEQ ID NO: 770625 - RNA, 17 nt, Artificial Sequence
  Synthetic
aagcacacuaaccaagu

SEQ ID NO: 770626 - RNA, 17 nt, Artificial Sequence
  Synthetic
acgggguuucaccaagu

SEQ ID NO: 770627 - RNA, 17 nt, Artificial Sequence
  Synthetic
cuaacucagccccaagu

SEQ ID NO: 770628 - RNA, 17 nt, Artificial Sequence
  Synthetic
augcauuuuccccaagu

SEQ ID NO: 770629 - RNA, 17 nt, Artificial Sequence
  Synthetic
cuggaagggggccaagu

SEQ ID NO: 770630 - RNA, 17 nt, Artificial Sequence
  Synthetic
uugugcuuaugccaagu

SEQ ID NO: 770631 - RNA, 17 nt, Artificial Sequence
  Synthetic
agaauaccuuuccaagu

SEQ ID NO: 770632 - RNA, 17 nt, Artificial Sequence
  Synthetic
auaagcauuaagcaagu

SEQ ID NO: 770633 - RNA, 17 nt, Artificial Sequence
  Synthetic
ccccuacagcagcaagu

SEQ ID NO: 770634 - RNA, 17 nt, Artificial Sequence
  Synthetic
cauauagggaggcaagu

SEQ ID NO: 770635 - RNA, 17 nt, Artificial Sequence
  Synthetic
agacugguucggcaagu

SEQ ID NO: 770636 - RNA, 17 nt, Artificial Sequence
  Synthetic
caaugcuucuggcaagu

SEQ ID NO: 770637 - RNA, 17 nt, Artificial Sequence
  Synthetic
cucaaaguguggcaagu

SEQ ID NO: 770638 - RNA, 17 nt, Artificial Sequence
  Synthetic
acaucuaagcugcaagu

SEQ ID NO: 770639 - RNA, 17 nt, Artificial Sequence
  Synthetic
aauggaaaucugcaagu

SEQ ID NO: 770640 - RNA, 17 nt, Artificial Sequence
  Synthetic
cagccugcucugcaagu

SEQ ID NO: 770641 - RNA, 17 nt, Artificial Sequence
  Synthetic
auuugcugcuugcaagu

SEQ ID NO: 770642 - RNA, 17 nt, Artificial Sequence
  Synthetic
ccauucauuuugcaagu

SEQ ID NO: 770643 - RNA, 17 nt, Artificial Sequence
  Synthetic
auccaucacaaucaagu

SEQ ID NO: 770644 - RNA, 17 nt, Artificial Sequence
  Synthetic
uacugcugucaucaagu

SEQ ID NO: 770645 - RNA, 17 nt, Artificial Sequence
  Synthetic
auccaccaugaucaagu

SEQ ID NO: 770646 - RNA, 17 nt, Artificial Sequence
  Synthetic
auccagcaugaucaagu

SEQ ID NO: 770647 - RNA, 17 nt, Artificial Sequence
  Synthetic
uacccagccacucaagu

SEQ ID NO: 770648 - RNA, 17 nt, Artificial Sequence
  Synthetic
cacacuuuuccucaagu

SEQ ID NO: 770649 - RNA, 17 nt, Artificial Sequence
  Synthetic
agacugccuucucaagu

SEQ ID NO: 770650 - RNA, 17 nt, Artificial Sequence
  Synthetic
ucacauugaagucaagu

SEQ ID NO: 770651 - RNA, 17 nt, Artificial Sequence
  Synthetic
aguuagacaggucaagu

SEQ ID NO: 770652 - RNA, 17 nt, Artificial Sequence
  Synthetic
uaagaaaaaugucaagu

SEQ ID NO: 770653 - RNA, 17 nt, Artificial Sequence
  Synthetic
acccaugggcuucaagu

SEQ ID NO: 770654 - RNA, 17 nt, Artificial Sequence
  Synthetic
aaaguuguucuucaagu

SEQ ID NO: 770655 - RNA, 17 nt, Artificial Sequence
  Synthetic
uugaugcauguucaagu

SEQ ID NO: 770656 - RNA, 17 nt, Artificial Sequence
  Synthetic
uuuaaaucuguucaagu

SEQ ID NO: 770657 - RNA, 17 nt, Artificial Sequence
  Synthetic
ugggauguauuucaagu

SEQ ID NO: 770658 - RNA, 17 nt, Artificial Sequence
  Synthetic
uuauaauauuuucaagu

SEQ ID NO: 770659 - RNA, 17 nt, Artificial Sequence
  Synthetic
uggacuuguuuucaagu

SEQ ID NO: 770660 - RNA, 17 nt, Artificial Sequence
  Synthetic
acauucaaaaaagaagu

SEQ ID NO: 770661 - RNA, 17 nt, Artificial Sequence
  Synthetic
agugguugaaaagaagu

SEQ ID NO: 770662 - RNA, 17 nt, Artificial Sequence
  Synthetic
aaagaaaauaaagaagu

SEQ ID NO: 770663 - RNA, 17 nt, Artificial Sequence
  Synthetic
aggcaggcuaaagaagu

SEQ ID NO: 770664 - RNA, 17 nt, Artificial Sequence
  Synthetic
aauaagagccaagaagu

SEQ ID NO: 770665 - RNA, 17 nt, Artificial Sequence
  Synthetic
uucaacaaugaagaagu

SEQ ID NO: 770666 - RNA, 17 nt, Artificial Sequence
  Synthetic
aagagcuauuaagaagu

SEQ ID NO: 770667 - RNA, 17 nt, Artificial Sequence
  Synthetic
acaaggacaacagaagu

SEQ ID NO: 770668 - RNA, 17 nt, Artificial Sequence
  Synthetic
uaagaggggacagaagu

SEQ ID NO: 770669 - RNA, 17 nt, Artificial Sequence
  Synthetic
aguauguacccagaagu

SEQ ID NO: 770670 - RNA, 17 nt, Artificial Sequence
  Synthetic
uggcaacauccagaagu

SEQ ID NO: 770671 - RNA, 17 nt, Artificial Sequence
  Synthetic
auaauuauuccagaagu

SEQ ID NO: 770672 - RNA, 17 nt, Artificial Sequence
  Synthetic
uucuuggaagcagaagu

SEQ ID NO: 770673 - RNA, 17 nt, Artificial Sequence
  Synthetic
cuuugggaggcagaagu

SEQ ID NO: 770674 - RNA, 17 nt, Artificial Sequence
  Synthetic
aacaauggaagagaagu

SEQ ID NO: 770675 - RNA, 17 nt, Artificial Sequence
  Synthetic
aacaaagguagagaagu

SEQ ID NO: 770676 - RNA, 17 nt, Artificial Sequence
  Synthetic
uucagcauuagagaagu

SEQ ID NO: 770677 - RNA, 17 nt, Artificial Sequence
  Synthetic
uauauuauaggagaagu

SEQ ID NO: 770678 - RNA, 17 nt, Artificial Sequence
  Synthetic
cuggccaggggagaagu

SEQ ID NO: 770679 - RNA, 17 nt, Artificial Sequence
  Synthetic
aggcccucaugagaagu

SEQ ID NO: 770680 - RNA, 17 nt, Artificial Sequence
  Synthetic
acauuuuuuugagaagu

SEQ ID NO: 770681 - RNA, 17 nt, Artificial Sequence
  Synthetic
aucugaguaguagaagu

SEQ ID NO: 770682 - RNA, 17 nt, Artificial Sequence
  Synthetic
cuuugggaggccgaagu

SEQ ID NO: 770683 - RNA, 17 nt, Artificial Sequence
  Synthetic
augcaaguacaggaagu

SEQ ID NO: 770684 - RNA, 17 nt, Artificial Sequence
  Synthetic
ccugcaagucaggaagu

SEQ ID NO: 770685 - RNA, 17 nt, Artificial Sequence
  Synthetic
uaagcagaagaggaagu

SEQ ID NO: 770686 - RNA, 17 nt, Artificial Sequence
  Synthetic
uguagcagagaggaagu

SEQ ID NO: 770687 - RNA, 17 nt, Artificial Sequence
  Synthetic
ugaugacauuaggaagu

SEQ ID NO: 770688 - RNA, 17 nt, Artificial Sequence
  Synthetic
cuaugaauaagggaagu

SEQ ID NO: 770689 - RNA, 17 nt, Artificial Sequence
  Synthetic
uccuuaaaaggggaagu

SEQ ID NO: 770690 - RNA, 17 nt, Artificial Sequence
  Synthetic
caaagaaugggggaagu

SEQ ID NO: 770691 - RNA, 17 nt, Artificial Sequence
  Synthetic
cguugaggaugggaagu

SEQ ID NO: 770692 - RNA, 17 nt, Artificial Sequence
  Synthetic
aaacagauaauggaagu

SEQ ID NO: 770693 - RNA, 17 nt, Artificial Sequence
  Synthetic
uacagcacaguggaagu

SEQ ID NO: 770694 - RNA, 17 nt, Artificial Sequence
  Synthetic
ucaaccauuguggaagu

SEQ ID NO: 770695 - RNA, 17 nt, Artificial Sequence
  Synthetic
ugaacguguuuggaagu

SEQ ID NO: 770696 - RNA, 17 nt, Artificial Sequence
  Synthetic
uauaggaaaaaugaagu

SEQ ID NO: 770697 - RNA, 17 nt, Artificial Sequence
  Synthetic
uauuguaaaaaugaagu

SEQ ID NO: 770698 - RNA, 17 nt, Artificial Sequence
  Synthetic
uacaauuuuuaugaagu

SEQ ID NO: 770699 - RNA, 17 nt, Artificial Sequence
  Synthetic
uuuuucuucacugaagu

SEQ ID NO: 770700 - RNA, 17 nt, Artificial Sequence
  Synthetic
cuguuauggacugaagu

SEQ ID NO: 770701 - RNA, 17 nt, Artificial Sequence
  Synthetic
cuguaguugacugaagu

SEQ ID NO: 770702 - RNA, 17 nt, Artificial Sequence
  Synthetic
cacauuugagcugaagu

SEQ ID NO: 770703 - RNA, 17 nt, Artificial Sequence
  Synthetic
cuuugggaggcugaagu

SEQ ID NO: 770704 - RNA, 17 nt, Artificial Sequence
  Synthetic
uucaacaguucugaagu

SEQ ID NO: 770705 - RNA, 17 nt, Artificial Sequence
  Synthetic
aaaaagaaaagugaagu

SEQ ID NO: 770706 - RNA, 17 nt, Artificial Sequence
  Synthetic
aaauguccuagugaagu

SEQ ID NO: 770707 - RNA, 17 nt, Artificial Sequence
  Synthetic
uauuuccucugugaagu

SEQ ID NO: 770708 - RNA, 17 nt, Artificial Sequence
  Synthetic
cagcuaucuauugaagu

SEQ ID NO: 770709 - RNA, 17 nt, Artificial Sequence
  Synthetic
cagucuugccuugaagu

SEQ ID NO: 770710 - RNA, 17 nt, Artificial Sequence
  Synthetic
aaaggaauucuugaagu

SEQ ID NO: 770711 - RNA, 17 nt, Artificial Sequence
  Synthetic
cuauagagauuugaagu

SEQ ID NO: 770712 - RNA, 17 nt, Artificial Sequence
  Synthetic
agaaguuacuuugaagu

SEQ ID NO: 770713 - RNA, 17 nt, Artificial Sequence
  Synthetic
auaguauaguuugaagu

SEQ ID NO: 770714 - RNA, 17 nt, Artificial Sequence
  Synthetic
uucaacaguuuugaagu

SEQ ID NO: 770715 - RNA, 17 nt, Artificial Sequence
  Synthetic
ucauaagcuaaauaagu

SEQ ID NO: 770716 - RNA, 17 nt, Artificial Sequence
  Synthetic
auaacaccagaauaagu

SEQ ID NO: 770717 - RNA, 17 nt, Artificial Sequence
  Synthetic
uacucuugugaauaagu

SEQ ID NO: 770718 - RNA, 17 nt, Artificial Sequence
  Synthetic
cuuuucuuauaauaagu

SEQ ID NO: 770719 - RNA, 17 nt, Artificial Sequence
  Synthetic
augaaauaaacauaagu

SEQ ID NO: 770720 - RNA, 17 nt, Artificial Sequence
  Synthetic
agagacuccacauaagu

SEQ ID NO: 770721 - RNA, 17 nt, Artificial Sequence
  Synthetic
agaaagaagacauaagu

SEQ ID NO: 770722 - RNA, 17 nt, Artificial Sequence
  Synthetic
uauucucacccauaagu

SEQ ID NO: 770723 - RNA, 17 nt, Artificial Sequence
  Synthetic
cuggguacuccauaagu

SEQ ID NO: 770724 - RNA, 17 nt, Artificial Sequence
  Synthetic
ccuacucuugcauaagu

SEQ ID NO: 770725 - RNA, 17 nt, Artificial Sequence
  Synthetic
uggucucacucauaagu

SEQ ID NO: 770726 - RNA, 17 nt, Artificial Sequence
  Synthetic
uguucucacucauaagu

SEQ ID NO: 770727 - RNA, 17 nt, Artificial Sequence
  Synthetic
agacuugaaggauaagu

SEQ ID NO: 770728 - RNA, 17 nt, Artificial Sequence
  Synthetic
auugauagaugauaagu

SEQ ID NO: 770729 - RNA, 17 nt, Artificial Sequence
  Synthetic
auuguaugucuauaagu

SEQ ID NO: 770730 - RNA, 17 nt, Artificial Sequence
  Synthetic
cuauugccuguauaagu

SEQ ID NO: 770731 - RNA, 17 nt, Artificial Sequence
  Synthetic
auaugcacauuauaagu

SEQ ID NO: 770732 - RNA, 17 nt, Artificial Sequence
  Synthetic
uguucucacuuauaagu

SEQ ID NO: 770733 - RNA, 17 nt, Artificial Sequence
  Synthetic
cucacuuacuuauaagu

SEQ ID NO: 770734 - RNA, 17 nt, Artificial Sequence
  Synthetic
uuugcugccuuauaagu

SEQ ID NO: 770735 - RNA, 17 nt, Artificial Sequence
  Synthetic
uguucucauuuauaagu

SEQ ID NO: 770736 - RNA, 17 nt, Artificial Sequence
  Synthetic
auuuuacuuuuauaagu

SEQ ID NO: 770737 - RNA, 17 nt, Artificial Sequence
  Synthetic
aaucaaaagcacuaagu

SEQ ID NO: 770738 - RNA, 17 nt, Artificial Sequence
  Synthetic
ccccuggaggacuaagu

SEQ ID NO: 770739 - RNA, 17 nt, Artificial Sequence
  Synthetic
acacccagcuacuaagu

SEQ ID NO: 770740 - RNA, 17 nt, Artificial Sequence
  Synthetic
acaagcaaacccuaagu

SEQ ID NO: 770741 - RNA, 17 nt, Artificial Sequence
  Synthetic
ugaggguccuccuaagu

SEQ ID NO: 770742 - RNA, 17 nt, Artificial Sequence
  Synthetic
aauaaauuuaucuaagu

SEQ ID NO: 770743 - RNA, 17 nt, Artificial Sequence
  Synthetic
cuuuggggacucuaagu

SEQ ID NO: 770744 - RNA, 17 nt, Artificial Sequence
  Synthetic
uucaacauucucuaagu

SEQ ID NO: 770745 - RNA, 17 nt, Artificial Sequence
  Synthetic
ugcccuucaaaguaagu

SEQ ID NO: 770746 - RNA, 17 nt, Artificial Sequence
  Synthetic
uaacuuugaaaguaagu

SEQ ID NO: 770747 - RNA, 17 nt, Artificial Sequence
  Synthetic
acauuuauaaaguaagu

SEQ ID NO: 770748 - RNA, 17 nt, Artificial Sequence
  Synthetic
aagugaggcaaguaagu

SEQ ID NO: 770749 - RNA, 17 nt, Artificial Sequence
  Synthetic
accaccuggcaguaagu

SEQ ID NO: 770750 - RNA, 17 nt, Artificial Sequence
  Synthetic
uaauauugugaguaagu

SEQ ID NO: 770751 - RNA, 17 nt, Artificial Sequence
  Synthetic
uggacucacucguaagu

SEQ ID NO: 770752 - RNA, 17 nt, Artificial Sequence
  Synthetic
uguucucacucguaagu

SEQ ID NO: 770753 - RNA, 17 nt, Artificial Sequence
  Synthetic
aaagaggugagguaagu

SEQ ID NO: 770754 - RNA, 17 nt, Artificial Sequence
  Synthetic
uucuaacauagguaagu

SEQ ID NO: 770755 - RNA, 17 nt, Artificial Sequence
  Synthetic
augaauuaaggguaagu

SEQ ID NO: 770756 - RNA, 17 nt, Artificial Sequence
  Synthetic
aaacaucagggguaagu

SEQ ID NO: 770757 - RNA, 17 nt, Artificial Sequence
  Synthetic
aggcugcagguguaagu

SEQ ID NO: 770758 - RNA, 17 nt, Artificial Sequence
  Synthetic
agaaauaugguguaagu

SEQ ID NO: 770759 - RNA, 17 nt, Artificial Sequence
  Synthetic
aucaacaaauuguaagu

SEQ ID NO: 770760 - RNA, 17 nt, Artificial Sequence
  Synthetic
ucacaucccuuguaagu

SEQ ID NO: 770761 - RNA, 17 nt, Artificial Sequence
  Synthetic
ucacaucgcuuguaagu

SEQ ID NO: 770762 - RNA, 17 nt, Artificial Sequence
  Synthetic
uuuaaucauuuguaagu

SEQ ID NO: 770763 - RNA, 17 nt, Artificial Sequence
  Synthetic
ccugcuugaaauuaagu

SEQ ID NO: 770764 - RNA, 17 nt, Artificial Sequence
  Synthetic
uauugcgacaauuaagu

SEQ ID NO: 770765 - RNA, 17 nt, Artificial Sequence
  Synthetic
auuuuugagaauuaagu

SEQ ID NO: 770766 - RNA, 17 nt, Artificial Sequence
  Synthetic
ucauuauagaauuaagu

SEQ ID NO: 770767 - RNA, 17 nt, Artificial Sequence
  Synthetic
uugucuuuuaauuaagu

SEQ ID NO: 770768 - RNA, 17 nt, Artificial Sequence
  Synthetic
uuuacacuucauuaagu

SEQ ID NO: 770769 - RNA, 17 nt, Artificial Sequence
  Synthetic
ugucaucaggauuaagu

SEQ ID NO: 770770 - RNA, 17 nt, Artificial Sequence
  Synthetic
agaaauacugauuaagu

SEQ ID NO: 770771 - RNA, 17 nt, Artificial Sequence
  Synthetic
uuagaauaauauuaagu

SEQ ID NO: 770772 - RNA, 17 nt, Artificial Sequence
  Synthetic
aucugguaauauuaagu

SEQ ID NO: 770773 - RNA, 17 nt, Artificial Sequence
  Synthetic
ucauuuuuaacuuaagu

SEQ ID NO: 770774 - RNA, 17 nt, Artificial Sequence
  Synthetic
acaaauauuacuuaagu

SEQ ID NO: 770775 - RNA, 17 nt, Artificial Sequence
  Synthetic
aagaagcaugcuuaagu

SEQ ID NO: 770776 - RNA, 17 nt, Artificial Sequence
  Synthetic
auacuggaugcuuaagu

SEQ ID NO: 770777 - RNA, 17 nt, Artificial Sequence
  Synthetic
uaacugcuaucuuaagu

SEQ ID NO: 770778 - RNA, 17 nt, Artificial Sequence
  Synthetic
uuacauuucaguuaagu

SEQ ID NO: 770779 - RNA, 17 nt, Artificial Sequence
  Synthetic
uuaucuucacguuaagu

SEQ ID NO: 770780 - RNA, 17 nt, Artificial Sequence
  Synthetic
uuggugaaagguuaagu

SEQ ID NO: 770781 - RNA, 17 nt, Artificial Sequence
  Synthetic
cuuguagaaauuuaagu

SEQ ID NO: 770782 - RNA, 17 nt, Artificial Sequence
  Synthetic
uauauugcaauuuaagu

SEQ ID NO: 770783 - RNA, 17 nt, Artificial Sequence
  Synthetic
cuccaggccauuuaagu

SEQ ID NO: 770784 - RNA, 17 nt, Artificial Sequence
  Synthetic
aauuaugcacuuuaagu

SEQ ID NO: 770785 - RNA, 17 nt, Artificial Sequence
  Synthetic
uaugaucuccuuuaagu

SEQ ID NO: 770786 - RNA, 17 nt, Artificial Sequence
  Synthetic
cauuaacugcuuuaagu

SEQ ID NO: 770787 - RNA, 17 nt, Artificial Sequence
  Synthetic
uuuaagaaguuuuaagu

SEQ ID NO: 770788 - RNA, 17 nt, Artificial Sequence
  Synthetic
aaugcgaauuuuuaagu

SEQ ID NO: 770789 - RNA, 17 nt, Artificial Sequence
  Synthetic
uuugagguuuuuuaagu

SEQ ID NO: 770790 - RNA, 17 nt, Artificial Sequence
  Synthetic
uguaucuucaaaacagu

SEQ ID NO: 770791 - RNA, 17 nt, Artificial Sequence
  Synthetic
agguaaaugaaaacagu

SEQ ID NO: 770792 - RNA, 17 nt, Artificial Sequence
  Synthetic
caguagcuuaaaacagu

SEQ ID NO: 770793 - RNA, 17 nt, Artificial Sequence
  Synthetic
aaacgauuuaaaacagu

SEQ ID NO: 770794 - RNA, 17 nt, Artificial Sequence
  Synthetic
uucuacuuuaaaacagu

SEQ ID NO: 770795 - RNA, 17 nt, Artificial Sequence
  Synthetic
auuccaaaauaaacagu

SEQ ID NO: 770796 - RNA, 17 nt, Artificial Sequence
  Synthetic
uaugcgugcuaaacagu

SEQ ID NO: 770797 - RNA, 17 nt, Artificial Sequence
  Synthetic
uaauacaguuaaacagu

SEQ ID NO: 770798 - RNA, 17 nt, Artificial Sequence
  Synthetic
caugcauuuuaaacagu

SEQ ID NO: 770799 - RNA, 17 nt, Artificial Sequence
  Synthetic
acagggaaaagaacagu

SEQ ID NO: 770800 - RNA, 17 nt, Artificial Sequence
  Synthetic
caaugugauagaacagu

SEQ ID NO: 770801 - RNA, 17 nt, Artificial Sequence
  Synthetic
aaaggcuuuagaacagu

SEQ ID NO: 770802 - RNA, 17 nt, Artificial Sequence
  Synthetic
cuuugucgacgaacagu

SEQ ID NO: 770803 - RNA, 17 nt, Artificial Sequence
  Synthetic
auugugcccugaacagu

SEQ ID NO: 770804 - RNA, 17 nt, Artificial Sequence
  Synthetic
ucauaacuuugaacagu

SEQ ID NO: 770805 - RNA, 17 nt, Artificial Sequence
  Synthetic
aaugguucaauaacagu

SEQ ID NO: 770806 - RNA, 17 nt, Artificial Sequence
  Synthetic
acaugguacauaacagu

SEQ ID NO: 770807 - RNA, 17 nt, Artificial Sequence
  Synthetic
cauggagucauaacagu

SEQ ID NO: 770808 - RNA, 17 nt, Artificial Sequence
  Synthetic
ccuggcaauauaacagu

SEQ ID NO: 770809 - RNA, 17 nt, Artificial Sequence
  Synthetic
cccacgcuucuaacagu

SEQ ID NO: 770810 - RNA, 17 nt, Artificial Sequence
  Synthetic
aaaguagugguaacagu

SEQ ID NO: 770811 - RNA, 17 nt, Artificial Sequence
  Synthetic
uuagaccuguuaacagu

SEQ ID NO: 770812 - RNA, 17 nt, Artificial Sequence
  Synthetic
cuuugauuuuuaacagu

SEQ ID NO: 770813 - RNA, 17 nt, Artificial Sequence
  Synthetic
caacaggaacacacagu

SEQ ID NO: 770814 - RNA, 17 nt, Artificial Sequence
  Synthetic
uauuugcuacacacagu

SEQ ID NO: 770815 - RNA, 17 nt, Artificial Sequence
  Synthetic
aagauagaccacacagu

SEQ ID NO: 770816 - RNA, 17 nt, Artificial Sequence
  Synthetic
ucugcuuugcacacagu

SEQ ID NO: 770817 - RNA, 17 nt, Artificial Sequence
  Synthetic
aauacuugucacacagu

SEQ ID NO: 770818 - RNA, 17 nt, Artificial Sequence
  Synthetic
uuuuguggguacacagu

SEQ ID NO: 770819 - RNA, 17 nt, Artificial Sequence
  Synthetic
cuccuuguccccacagu

SEQ ID NO: 770820 - RNA, 17 nt, Artificial Sequence
  Synthetic
accagcucagccacagu

SEQ ID NO: 770821 - RNA, 17 nt, Artificial Sequence
  Synthetic
uuuuauuaguccacagu

SEQ ID NO: 770822 - RNA, 17 nt, Artificial Sequence
  Synthetic
aaacugcuuuccacagu

SEQ ID NO: 770823 - RNA, 17 nt, Artificial Sequence
  Synthetic
ugagacuacagcacagu

SEQ ID NO: 770824 - RNA, 17 nt, Artificial Sequence
  Synthetic
cuuagcuuaggcacagu

SEQ ID NO: 770825 - RNA, 17 nt, Artificial Sequence
  Synthetic
auuccaggcugcacagu

SEQ ID NO: 770826 - RNA, 17 nt, Artificial Sequence
  Synthetic
uaagcagacaucacagu

SEQ ID NO: 770827 - RNA, 17 nt, Artificial Sequence
  Synthetic
accagcuuagucacagu

SEQ ID NO: 770828 - RNA, 17 nt, Artificial Sequence
  Synthetic
agugcagaguucacagu

SEQ ID NO: 770829 - RNA, 17 nt, Artificial Sequence
  Synthetic
cuucacuuguucacagu

SEQ ID NO: 770830 - RNA, 17 nt, Artificial Sequence
  Synthetic
acccaaaucaagacagu

SEQ ID NO: 770831 - RNA, 17 nt, Artificial Sequence
  Synthetic
auauuccagaagacagu

SEQ ID NO: 770832 - RNA, 17 nt, Artificial Sequence
  Synthetic
ccugaauuccagacagu

SEQ ID NO: 770833 - RNA, 17 nt, Artificial Sequence
  Synthetic
cucuguauucagacagu

SEQ ID NO: 770834 - RNA, 17 nt, Artificial Sequence
  Synthetic
agaaaggccacgacagu

SEQ ID NO: 770835 - RNA, 17 nt, Artificial Sequence
  Synthetic
uuauugguuuggacagu

SEQ ID NO: 770836 - RNA, 17 nt, Artificial Sequence
  Synthetic
caaagaccacugacagu

SEQ ID NO: 770837 - RNA, 17 nt, Artificial Sequence
  Synthetic
aaguagagagugacagu

SEQ ID NO: 770838 - RNA, 17 nt, Artificial Sequence
  Synthetic
cgucuaauauugacagu

SEQ ID NO: 770839 - RNA, 17 nt, Artificial Sequence
  Synthetic
ugucuaauguugacagu

SEQ ID NO: 770840 - RNA, 17 nt, Artificial Sequence
  Synthetic
ugccaugaaaauacagu

SEQ ID NO: 770841 - RNA, 17 nt, Artificial Sequence
  Synthetic
ugcuacuugaauacagu

SEQ ID NO: 770842 - RNA, 17 nt, Artificial Sequence
  Synthetic
uaggauuauaauacagu

SEQ ID NO: 770843 - RNA, 17 nt, Artificial Sequence
  Synthetic
ugccaagaacauacagu

SEQ ID NO: 770844 - RNA, 17 nt, Artificial Sequence
  Synthetic
cuuccacaauauacagu

SEQ ID NO: 770845 - RNA, 17 nt, Artificial Sequence
  Synthetic
uuacauuagccuacagu

SEQ ID NO: 770846 - RNA, 17 nt, Artificial Sequence
  Synthetic
ucucugcauucuacagu

SEQ ID NO: 770847 - RNA, 17 nt, Artificial Sequence
  Synthetic
uaaaacugaaguacagu

SEQ ID NO: 770848 - RNA, 17 nt, Artificial Sequence
  Synthetic
uuauaaaaaauuacagu

SEQ ID NO: 770849 - RNA, 17 nt, Artificial Sequence
  Synthetic
aagaaacugcuuacagu

SEQ ID NO: 770850 - RNA, 17 nt, Artificial Sequence
  Synthetic
aagauguuaguuacagu

SEQ ID NO: 770851 - RNA, 17 nt, Artificial Sequence
  Synthetic
uaauacaaauuuacagu

SEQ ID NO: 770852 - RNA, 17 nt, Artificial Sequence
  Synthetic
accauuucccaaccagu

SEQ ID NO: 770853 - RNA, 17 nt, Artificial Sequence
  Synthetic
uuccauaaaauaccagu

SEQ ID NO: 770854 - RNA, 17 nt, Artificial Sequence
  Synthetic
cacagagaaguaccagu

SEQ ID NO: 770855 - RNA, 17 nt, Artificial Sequence
  Synthetic
ucccaggaaguaccagu

SEQ ID NO: 770856 - RNA, 17 nt, Artificial Sequence
  Synthetic
ugcuuaagccacccagu

SEQ ID NO: 770857 - RNA, 17 nt, Artificial Sequence
  Synthetic
uaugggagggacccagu

SEQ ID NO: 770858 - RNA, 17 nt, Artificial Sequence
  Synthetic
caugugagggacccagu

SEQ ID NO: 770859 - RNA, 17 nt, Artificial Sequence
  Synthetic
cuaggcagugccccagu

SEQ ID NO: 770860 - RNA, 17 nt, Artificial Sequence
  Synthetic
acagaggcguccccagu

SEQ ID NO: 770861 - RNA, 17 nt, Artificial Sequence
  Synthetic
uuuagaauuuccccagu

SEQ ID NO: 770862 - RNA, 17 nt, Artificial Sequence
  Synthetic
ugggaaugcagcccagu

SEQ ID NO: 770863 - RNA, 17 nt, Artificial Sequence
  Synthetic
ucuaaacuaaucccagu

SEQ ID NO: 770864 - RNA, 17 nt, Artificial Sequence
  Synthetic
cuuugccuaaucccagu

SEQ ID NO: 770865 - RNA, 17 nt, Artificial Sequence
  Synthetic
caauagguauggccagu

SEQ ID NO: 770866 - RNA, 17 nt, Artificial Sequence
  Synthetic
ucuaacuagaugccagu

SEQ ID NO: 770867 - RNA, 17 nt, Artificial Sequence
  Synthetic
agaaggaaucugccagu

SEQ ID NO: 770868 - RNA, 17 nt, Artificial Sequence
  Synthetic
aaaaucuaagugccagu

SEQ ID NO: 770869 - RNA, 17 nt, Artificial Sequence
  Synthetic
agaccucuugugccagu

SEQ ID NO: 770870 - RNA, 17 nt, Artificial Sequence
  Synthetic
accuucugcuugccagu

SEQ ID NO: 770871 - RNA, 17 nt, Artificial Sequence
  Synthetic
aacaaggugcauccagu

SEQ ID NO: 770872 - RNA, 17 nt, Artificial Sequence
  Synthetic
caugggagggauccagu

SEQ ID NO: 770873 - RNA, 17 nt, Artificial Sequence
  Synthetic
ugugggagggauccagu

SEQ ID NO: 770874 - RNA, 17 nt, Artificial Sequence
  Synthetic
uaaucccaguauccagu

SEQ ID NO: 770875 - RNA, 17 nt, Artificial Sequence
  Synthetic
uuugucuaguauccagu

SEQ ID NO: 770876 - RNA, 17 nt, Artificial Sequence
  Synthetic
uuuuaaaauuauccagu

SEQ ID NO: 770877 - RNA, 17 nt, Artificial Sequence
  Synthetic
acccuccccacuccagu

SEQ ID NO: 770878 - RNA, 17 nt, Artificial Sequence
  Synthetic
cuaauaugaucuccagu

SEQ ID NO: 770879 - RNA, 17 nt, Artificial Sequence
  Synthetic
auauguauugguccagu

SEQ ID NO: 770880 - RNA, 17 nt, Artificial Sequence
  Synthetic
auacaugcauguccagu

SEQ ID NO: 770881 - RNA, 17 nt, Artificial Sequence
  Synthetic
accacaaacauuccagu

SEQ ID NO: 770882 - RNA, 17 nt, Artificial Sequence
  Synthetic
ucacaagacauuccagu

SEQ ID NO: 770883 - RNA, 17 nt, Artificial Sequence
  Synthetic
auuugagagauuccagu

SEQ ID NO: 770884 - RNA, 17 nt, Artificial Sequence
  Synthetic
caugaagaccuuccagu

SEQ ID NO: 770885 - RNA, 17 nt, Artificial Sequence
  Synthetic
cuuaccauccuuccagu

SEQ ID NO: 770886 - RNA, 17 nt, Artificial Sequence
  Synthetic
auuuucauucuuccagu

SEQ ID NO: 770887 - RNA, 17 nt, Artificial Sequence
  Synthetic
aagcuguacuuuccagu

SEQ ID NO: 770888 - RNA, 17 nt, Artificial Sequence
  Synthetic
uuugagaauuuuccagu

SEQ ID NO: 770889 - RNA, 17 nt, Artificial Sequence
  Synthetic
ucucuuucaaaagcagu

SEQ ID NO: 770890 - RNA, 17 nt, Artificial Sequence
  Synthetic
agacucugcaaagcagu

SEQ ID NO: 770891 - RNA, 17 nt, Artificial Sequence
  Synthetic
cuugaaaauaaagcagu

SEQ ID NO: 770892 - RNA, 17 nt, Artificial Sequence
  Synthetic
ugucugcuccaagcagu

SEQ ID NO: 770893 - RNA, 17 nt, Artificial Sequence
  Synthetic
aaugagagucaagcagu

SEQ ID NO: 770894 - RNA, 17 nt, Artificial Sequence
  Synthetic
uagcaacuggaagcagu

SEQ ID NO: 770895 - RNA, 17 nt, Artificial Sequence
  Synthetic
cuuuugggguaagcagu

SEQ ID NO: 770896 - RNA, 17 nt, Artificial Sequence
  Synthetic
uacuugguuuaagcagu

SEQ ID NO: 770897 - RNA, 17 nt, Artificial Sequence
  Synthetic
agagugcaugcagcagu

SEQ ID NO: 770898 - RNA, 17 nt, Artificial Sequence
  Synthetic
aggagcgugugagcagu

SEQ ID NO: 770899 - RNA, 17 nt, Artificial Sequence
  Synthetic
uauuucuucauagcagu

SEQ ID NO: 770900 - RNA, 17 nt, Artificial Sequence
  Synthetic
uaaaaaucuauagcagu

SEQ ID NO: 770901 - RNA, 17 nt, Artificial Sequence
  Synthetic
agacggaagcuagcagu

SEQ ID NO: 770902 - RNA, 17 nt, Artificial Sequence
  Synthetic
auaauaaaaguagcagu

SEQ ID NO: 770903 - RNA, 17 nt, Artificial Sequence
  Synthetic
auaguccaaguagcagu

SEQ ID NO: 770904 - RNA, 17 nt, Artificial Sequence
  Synthetic
aaauauacguuagcagu

SEQ ID NO: 770905 - RNA, 17 nt, Artificial Sequence
  Synthetic
ugacuuucuuuagcagu

SEQ ID NO: 770906 - RNA, 17 nt, Artificial Sequence
  Synthetic
cuuuccaugaaggcagu

SEQ ID NO: 770907 - RNA, 17 nt, Artificial Sequence
  Synthetic
accuggcugaaggcagu

SEQ ID NO: 770908 - RNA, 17 nt, Artificial Sequence
  Synthetic
cccaguuugaaggcagu

SEQ ID NO: 770909 - RNA, 17 nt, Artificial Sequence
  Synthetic
uugcaagaacaggcagu

SEQ ID NO: 770910 - RNA, 17 nt, Artificial Sequence
  Synthetic
ccugaauugcaggcagu

SEQ ID NO: 770911 - RNA, 17 nt, Artificial Sequence
  Synthetic
auuuaaacucaggcagu

SEQ ID NO: 770912 - RNA, 17 nt, Artificial Sequence
  Synthetic
uagagaauagaggcagu

SEQ ID NO: 770913 - RNA, 17 nt, Artificial Sequence
  Synthetic
ugggaggccgaggcagu

SEQ ID NO: 770914 - RNA, 17 nt, Artificial Sequence
  Synthetic
cucacaugacuggcagu

SEQ ID NO: 770915 - RNA, 17 nt, Artificial Sequence
  Synthetic
cugugcucccuggcagu

SEQ ID NO: 770916 - RNA, 17 nt, Artificial Sequence
  Synthetic
acuagaccaguggcagu

SEQ ID NO: 770917 - RNA, 17 nt, Artificial Sequence
  Synthetic
agaucagaaaaugcagu

SEQ ID NO: 770918 - RNA, 17 nt, Artificial Sequence
  Synthetic
caaggaccaaaugcagu

SEQ ID NO: 770919 - RNA, 17 nt, Artificial Sequence
  Synthetic
ugaacuuucaaugcagu

SEQ ID NO: 770920 - RNA, 17 nt, Artificial Sequence
  Synthetic
ucauuuuuacaugcagu

SEQ ID NO: 770921 - RNA, 17 nt, Artificial Sequence
  Synthetic
cagagcaugcaugcagu

SEQ ID NO: 770922 - RNA, 17 nt, Artificial Sequence
  Synthetic
ucccaucuucaugcagu

SEQ ID NO: 770923 - RNA, 17 nt, Artificial Sequence
  Synthetic
aaaaggcuaacugcagu

SEQ ID NO: 770924 - RNA, 17 nt, Artificial Sequence
  Synthetic
ucuuagauaccugcagu

SEQ ID NO: 770925 - RNA, 17 nt, Artificial Sequence
  Synthetic
agcuaacaugcugcagu

SEQ ID NO: 770926 - RNA, 17 nt, Artificial Sequence
  Synthetic
augcgugcugcugcagu

SEQ ID NO: 770927 - RNA, 17 nt, Artificial Sequence
  Synthetic
cagauggcuucugcagu

SEQ ID NO: 770928 - RNA, 17 nt, Artificial Sequence
  Synthetic
ucccucauuucugcagu

SEQ ID NO: 770929 - RNA, 17 nt, Artificial Sequence
  Synthetic
auaacuggcagugcagu

SEQ ID NO: 770930 - RNA, 17 nt, Artificial Sequence
  Synthetic
uagccuggaugugcagu

SEQ ID NO: 770931 - RNA, 17 nt, Artificial Sequence
  Synthetic
aaagcauucugugcagu

SEQ ID NO: 770932 - RNA, 17 nt, Artificial Sequence
  Synthetic
ucaaaucuuauugcagu

SEQ ID NO: 770933 - RNA, 17 nt, Artificial Sequence
  Synthetic
acuuuaucaguugcagu

SEQ ID NO: 770934 - RNA, 17 nt, Artificial Sequence
  Synthetic
ucuuggcauguugcagu

SEQ ID NO: 770935 - RNA, 17 nt, Artificial Sequence
  Synthetic
aaauugacauuugcagu

SEQ ID NO: 770936 - RNA, 17 nt, Artificial Sequence
  Synthetic
caguacaacuuugcagu

SEQ ID NO: 770937 - RNA, 17 nt, Artificial Sequence
  Synthetic
ccagaaaccuuugcagu

SEQ ID NO: 770938 - RNA, 17 nt, Artificial Sequence
  Synthetic
cuucugugcuuugcagu

SEQ ID NO: 770939 - RNA, 17 nt, Artificial Sequence
  Synthetic
ucucucagguuugcagu

SEQ ID NO: 770940 - RNA, 17 nt, Artificial Sequence
  Synthetic
cacagaaaaaaaucagu

SEQ ID NO: 770941 - RNA, 17 nt, Artificial Sequence
  Synthetic
caaguuaauaaaucagu

SEQ ID NO: 770942 - RNA, 17 nt, Artificial Sequence
  Synthetic
auuugaaaacaaucagu

SEQ ID NO: 770943 - RNA, 17 nt, Artificial Sequence
  Synthetic
accuguuaacaaucagu

SEQ ID NO: 770944 - RNA, 17 nt, Artificial Sequence
  Synthetic
aaaaugcaccaaucagu

SEQ ID NO: 770945 - RNA, 17 nt, Artificial Sequence
  Synthetic
agucauuagcaaucagu

SEQ ID NO: 770946 - RNA, 17 nt, Artificial Sequence
  Synthetic
aagaauucagaaucagu

SEQ ID NO: 770947 - RNA, 17 nt, Artificial Sequence
  Synthetic
cuaauaucauaaucagu

SEQ ID NO: 770948 - RNA, 17 nt, Artificial Sequence
  Synthetic
uaugcuucauaaucagu

SEQ ID NO: 770949 - RNA, 17 nt, Artificial Sequence
  Synthetic
aggaguuuauaaucagu

SEQ ID NO: 770950 - RNA, 17 nt, Artificial Sequence
  Synthetic
aaaagccguuaaucagu

SEQ ID NO: 770951 - RNA, 17 nt, Artificial Sequence
  Synthetic
cugcccaggacaucagu

SEQ ID NO: 770952 - RNA, 17 nt, Artificial Sequence
  Synthetic
cauggcaggacaucagu

SEQ ID NO: 770953 - RNA, 17 nt, Artificial Sequence
  Synthetic
uuucauaacucaucagu

SEQ ID NO: 770954 - RNA, 17 nt, Artificial Sequence
  Synthetic
cguauuuguucaucagu

SEQ ID NO: 770955 - RNA, 17 nt, Artificial Sequence
  Synthetic
uuucaguugauaucagu

SEQ ID NO: 770956 - RNA, 17 nt, Artificial Sequence
  Synthetic
uuaaauagcguaucagu

SEQ ID NO: 770957 - RNA, 17 nt, Artificial Sequence
  Synthetic
uaaguauuguuaucagu

SEQ ID NO: 770958 - RNA, 17 nt, Artificial Sequence
  Synthetic
auaacauauuuaucagu

SEQ ID NO: 770959 - RNA, 17 nt, Artificial Sequence
  Synthetic
auauauaugaacucagu

SEQ ID NO: 770960 - RNA, 17 nt, Artificial Sequence
  Synthetic
uuucucuugaacucagu

SEQ ID NO: 770961 - RNA, 17 nt, Artificial Sequence
  Synthetic
ugagacccacacucagu

SEQ ID NO: 770962 - RNA, 17 nt, Artificial Sequence
  Synthetic
aauccuggcuacucagu

SEQ ID NO: 770963 - RNA, 17 nt, Artificial Sequence
  Synthetic
aaaagcauacccucagu

SEQ ID NO: 770964 - RNA, 17 nt, Artificial Sequence
  Synthetic
auugcauauaucucagu

SEQ ID NO: 770965 - RNA, 17 nt, Artificial Sequence
  Synthetic
ugaaaguggcucucagu

SEQ ID NO: 770966 - RNA, 17 nt, Artificial Sequence
  Synthetic
caaguggaguucucagu

SEQ ID NO: 770967 - RNA, 17 nt, Artificial Sequence
  Synthetic
cuucugaauuucucagu

SEQ ID NO: 770968 - RNA, 17 nt, Artificial Sequence
  Synthetic
acaccaaauaagucagu

SEQ ID NO: 770969 - RNA, 17 nt, Artificial Sequence
  Synthetic
aaaccaucguagucagu

SEQ ID NO: 770970 - RNA, 17 nt, Artificial Sequence
  Synthetic
aagaagugguagucagu

SEQ ID NO: 770971 - RNA, 17 nt, Artificial Sequence
  Synthetic
cuaaccuacucgucagu

SEQ ID NO: 770972 - RNA, 17 nt, Artificial Sequence
  Synthetic
ugucagucaaggucagu

SEQ ID NO: 770973 - RNA, 17 nt, Artificial Sequence
  Synthetic
aagcacagaaggucagu

SEQ ID NO: 770974 - RNA, 17 nt, Artificial Sequence
  Synthetic
auaaacauaaggucagu

SEQ ID NO: 770975 - RNA, 17 nt, Artificial Sequence
  Synthetic
aagaguaaggggucagu

SEQ ID NO: 770976 - RNA, 17 nt, Artificial Sequence
  Synthetic
aauucaaacaugucagu

SEQ ID NO: 770977 - RNA, 17 nt, Artificial Sequence
  Synthetic
ucgcaggagcugucagu

SEQ ID NO: 770978 - RNA, 17 nt, Artificial Sequence
  Synthetic
ugagcaauagugucagu

SEQ ID NO: 770979 - RNA, 17 nt, Artificial Sequence
  Synthetic
agaguuucugugucagu

SEQ ID NO: 770980 - RNA, 17 nt, Artificial Sequence
  Synthetic
aacuggugauugucagu

SEQ ID NO: 770981 - RNA, 17 nt, Artificial Sequence
  Synthetic
acaacauuauugucagu

SEQ ID NO: 770982 - RNA, 17 nt, Artificial Sequence
  Synthetic
caagguaguuugucagu

SEQ ID NO: 770983 - RNA, 17 nt, Artificial Sequence
  Synthetic
acucauacaaauucagu

SEQ ID NO: 770984 - RNA, 17 nt, Artificial Sequence
  Synthetic
cuaaaauagaauucagu

SEQ ID NO: 770985 - RNA, 17 nt, Artificial Sequence
  Synthetic
cauaauguagauucagu

SEQ ID NO: 770986 - RNA, 17 nt, Artificial Sequence
  Synthetic
acagacacugauucagu

SEQ ID NO: 770987 - RNA, 17 nt, Artificial Sequence
  Synthetic
agagaugcugauucagu

SEQ ID NO: 770988 - RNA, 17 nt, Artificial Sequence
  Synthetic
acugaugcugauucagu

SEQ ID NO: 770989 - RNA, 17 nt, Artificial Sequence
  Synthetic
agugcuuuugauucagu

SEQ ID NO: 770990 - RNA, 17 nt, Artificial Sequence
  Synthetic
acaaaacuuuauucagu

SEQ ID NO: 770991 - RNA, 17 nt, Artificial Sequence
  Synthetic
uccaaaaugacuucagu

SEQ ID NO: 770992 - RNA, 17 nt, Artificial Sequence
  Synthetic
aaugggagcucuucagu

SEQ ID NO: 770993 - RNA, 17 nt, Artificial Sequence
  Synthetic
uuaauucaucguucagu

SEQ ID NO: 770994 - RNA, 17 nt, Artificial Sequence
  Synthetic
aagcaaugauguucagu

SEQ ID NO: 770995 - RNA, 17 nt, Artificial Sequence
  Synthetic
uuacagcacauuucagu

SEQ ID NO: 770996 - RNA, 17 nt, Artificial Sequence
  Synthetic
ccaggcuggauuucagu

SEQ ID NO: 770997 - RNA, 17 nt, Artificial Sequence
  Synthetic
agaauuucuguuucagu

SEQ ID NO: 770998 - RNA, 17 nt, Artificial Sequence
  Synthetic
uagagaaguguuucagu

SEQ ID NO: 770999 - RNA, 17 nt, Artificial Sequence
  Synthetic
caaaaauagaaaagagu

SEQ ID NO: 771000 - RNA, 17 nt, Artificial Sequence
  Synthetic
ugacugaggaaaagagu

SEQ ID NO: 771001 - RNA, 17 nt, Artificial Sequence
  Synthetic
auuaaaaaagaaagagu

SEQ ID NO: 771002 - RNA, 17 nt, Artificial Sequence
  Synthetic
caaacaagagaaagagu

SEQ ID NO: 771003 - RNA, 17 nt, Artificial Sequence
  Synthetic
agugguugagaaagagu

SEQ ID NO: 771004 - RNA, 17 nt, Artificial Sequence
  Synthetic
uguuuucuagaaagagu

SEQ ID NO: 771005 - RNA, 17 nt, Artificial Sequence
  Synthetic
aaggccagugaaagagu

SEQ ID NO: 771006 - RNA, 17 nt, Artificial Sequence
  Synthetic
aagccauaauaaagagu

SEQ ID NO: 771007 - RNA, 17 nt, Artificial Sequence
  Synthetic
cacaaaagcuaaagagu

SEQ ID NO: 771008 - RNA, 17 nt, Artificial Sequence
  Synthetic
aaugaagggacaagagu

SEQ ID NO: 771009 - RNA, 17 nt, Artificial Sequence
  Synthetic
uuuccagggacaagagu

SEQ ID NO: 771010 - RNA, 17 nt, Artificial Sequence
  Synthetic
cccacuuaugcaagagu

SEQ ID NO: 771011 - RNA, 17 nt, Artificial Sequence
  Synthetic
aucacaauugcaagagu

SEQ ID NO: 771012 - RNA, 17 nt, Artificial Sequence
  Synthetic
auguuugaaagaagagu

SEQ ID NO: 771013 - RNA, 17 nt, Artificial Sequence
  Synthetic
uggagaaacagaagagu

SEQ ID NO: 771014 - RNA, 17 nt, Artificial Sequence
  Synthetic
auagagucaggaagagu

SEQ ID NO: 771015 - RNA, 17 nt, Artificial Sequence
  Synthetic
auuuuaaugggaagagu

SEQ ID NO: 771016 - RNA, 17 nt, Artificial Sequence
  Synthetic
uaucuggaaauaagagu

SEQ ID NO: 771017 - RNA, 17 nt, Artificial Sequence
  Synthetic
caagaucagauaagagu

SEQ ID NO: 771018 - RNA, 17 nt, Artificial Sequence
  Synthetic
caaugauggauaagagu

SEQ ID NO: 771019 - RNA, 17 nt, Artificial Sequence
  Synthetic
aauaauaacguaagagu

SEQ ID NO: 771020 - RNA, 17 nt, Artificial Sequence
  Synthetic
uuucacaguguaagagu

SEQ ID NO: 771021 - RNA, 17 nt, Artificial Sequence
  Synthetic
uacaauguuuuaagagu

SEQ ID NO: 771022 - RNA, 17 nt, Artificial Sequence
  Synthetic
aaaaugggaaacagagu

SEQ ID NO: 771023 - RNA, 17 nt, Artificial Sequence
  Synthetic
uucugaauaaacagagu

SEQ ID NO: 771024 - RNA, 17 nt, Artificial Sequence
  Synthetic
uucuuggaacacagagu

SEQ ID NO: 771025 - RNA, 17 nt, Artificial Sequence
  Synthetic
agauaaaaccacagagu

SEQ ID NO: 771026 - RNA, 17 nt, Artificial Sequence
  Synthetic
aaugaaacccacagagu

SEQ ID NO: 771027 - RNA, 17 nt, Artificial Sequence
  Synthetic
auuagauagcacagagu

SEQ ID NO: 771028 - RNA, 17 nt, Artificial Sequence
  Synthetic
uuagguauggacagagu

SEQ ID NO: 771029 - RNA, 17 nt, Artificial Sequence
  Synthetic
cuagucagugacagagu

SEQ ID NO: 771030 - RNA, 17 nt, Artificial Sequence
  Synthetic
cauaguguguccagagu

SEQ ID NO: 771031 - RNA, 17 nt, Artificial Sequence
  Synthetic
uagcuguggagcagagu

SEQ ID NO: 771032 - RNA, 17 nt, Artificial Sequence
  Synthetic
auauugagaggcagagu

SEQ ID NO: 771033 - RNA, 17 nt, Artificial Sequence
  Synthetic
cucagaaggggcagagu

SEQ ID NO: 771034 - RNA, 17 nt, Artificial Sequence
  Synthetic
cuuaguaagaucagagu

SEQ ID NO: 771035 - RNA, 17 nt, Artificial Sequence
  Synthetic
agaaaaguccucagagu

SEQ ID NO: 771036 - RNA, 17 nt, Artificial Sequence
  Synthetic
caaauaugucucagagu

SEQ ID NO: 771037 - RNA, 17 nt, Artificial Sequence
  Synthetic
acaaguuuauucagagu

SEQ ID NO: 771038 - RNA, 17 nt, Artificial Sequence
  Synthetic
aagcagaauuucagagu

SEQ ID NO: 771039 - RNA, 17 nt, Artificial Sequence
  Synthetic
cccugcaguuucagagu

SEQ ID NO: 771040 - RNA, 17 nt, Artificial Sequence
  Synthetic
uggaccauuuucagagu

SEQ ID NO: 771041 - RNA, 17 nt, Artificial Sequence
  Synthetic
cuuuuuaagaagagagu

SEQ ID NO: 771042 - RNA, 17 nt, Artificial Sequence
  Synthetic
acaagccagaagagagu

SEQ ID NO: 771043 - RNA, 17 nt, Artificial Sequence
  Synthetic
acaagcuagaagagagu

SEQ ID NO: 771044 - RNA, 17 nt, Artificial Sequence
  Synthetic
uugguaccacagagagu

SEQ ID NO: 771045 - RNA, 17 nt, Artificial Sequence
  Synthetic
uugguacugcagagagu

SEQ ID NO: 771046 - RNA, 17 nt, Artificial Sequence
  Synthetic
aaacaugugcagagagu

SEQ ID NO: 771047 - RNA, 17 nt, Artificial Sequence
  Synthetic
aagcagagagagagagu

SEQ ID NO: 771048 - RNA, 17 nt, Artificial Sequence
  Synthetic
augguuuuugagagagu

SEQ ID NO: 771049 - RNA, 17 nt, Artificial Sequence
  Synthetic
aacaaaaucuagagagu

SEQ ID NO: 771050 - RNA, 17 nt, Artificial Sequence
  Synthetic
aucugcaguuagagagu

SEQ ID NO: 771051 - RNA, 17 nt, Artificial Sequence
  Synthetic
aauggaagcaggagagu

SEQ ID NO: 771052 - RNA, 17 nt, Artificial Sequence
  Synthetic
aguaccaguaggagagu

SEQ ID NO: 771053 - RNA, 17 nt, Artificial Sequence
  Synthetic
acaaggguggggagagu

SEQ ID NO: 771054 - RNA, 17 nt, Artificial Sequence
  Synthetic
uugaauaccuggagagu

SEQ ID NO: 771055 - RNA, 17 nt, Artificial Sequence
  Synthetic
uauuuauucuggagagu

SEQ ID NO: 771056 - RNA, 17 nt, Artificial Sequence
  Synthetic
cuuaaaaccaugagagu

SEQ ID NO: 771057 - RNA, 17 nt, Artificial Sequence
  Synthetic
ugagauacagugagagu

SEQ ID NO: 771058 - RNA, 17 nt, Artificial Sequence
  Synthetic
ccugugugggugagagu

SEQ ID NO: 771059 - RNA, 17 nt, Artificial Sequence
  Synthetic
ugccagcuauugagagu

SEQ ID NO: 771060 - RNA, 17 nt, Artificial Sequence
  Synthetic
auguguggcuugagagu

SEQ ID NO: 771061 - RNA, 17 nt, Artificial Sequence
  Synthetic
ugauaguaguugagagu

SEQ ID NO: 771062 - RNA, 17 nt, Artificial Sequence
  Synthetic
cuaccaagaaauagagu

SEQ ID NO: 771063 - RNA, 17 nt, Artificial Sequence
  Synthetic
uaugcuuaacauagagu

SEQ ID NO: 771064 - RNA, 17 nt, Artificial Sequence
  Synthetic
cuuauuucacauagagu

SEQ ID NO: 771065 - RNA, 17 nt, Artificial Sequence
  Synthetic
uguguugaccauagagu

SEQ ID NO: 771066 - RNA, 17 nt, Artificial Sequence
  Synthetic
aaugauagucauagagu

SEQ ID NO: 771067 - RNA, 17 nt, Artificial Sequence
  Synthetic
cugaagagaacuagagu

SEQ ID NO: 771068 - RNA, 17 nt, Artificial Sequence
  Synthetic
cggaggacuacuagagu

SEQ ID NO: 771069 - RNA, 17 nt, Artificial Sequence
  Synthetic
uuggacaucccuagagu

SEQ ID NO: 771070 - RNA, 17 nt, Artificial Sequence
  Synthetic
uuuuuaaaagcuagagu

SEQ ID NO: 771071 - RNA, 17 nt, Artificial Sequence
  Synthetic
uacucaucaucuagagu

SEQ ID NO: 771072 - RNA, 17 nt, Artificial Sequence
  Synthetic
uaagacaauucuagagu

SEQ ID NO: 771073 - RNA, 17 nt, Artificial Sequence
  Synthetic
auaaguccaaguagagu

SEQ ID NO: 771074 - RNA, 17 nt, Artificial Sequence
  Synthetic
uuugguaccaguagagu

SEQ ID NO: 771075 - RNA, 17 nt, Artificial Sequence
  Synthetic
uguauuuuuaguagagu

SEQ ID NO: 771076 - RNA, 17 nt, Artificial Sequence
  Synthetic
auagcuuaaguuagagu

SEQ ID NO: 771077 - RNA, 17 nt, Artificial Sequence
  Synthetic
cauccaaagguuagagu

SEQ ID NO: 771078 - RNA, 17 nt, Artificial Sequence
  Synthetic
uguuuauccuuuagagu

SEQ ID NO: 771079 - RNA, 17 nt, Artificial Sequence
  Synthetic
ucagaacuccuacgagu

SEQ ID NO: 771080 - RNA, 17 nt, Artificial Sequence
  Synthetic
acuuugggaggccgagu

SEQ ID NO: 771081 - RNA, 17 nt, Artificial Sequence
  Synthetic
auaaacaccauucgagu

SEQ ID NO: 771082 - RNA, 17 nt, Artificial Sequence
  Synthetic
auaccaaaacuucgagu

SEQ ID NO: 771083 - RNA, 17 nt, Artificial Sequence
  Synthetic
uaacucucccaaggagu

SEQ ID NO: 771084 - RNA, 17 nt, Artificial Sequence
  Synthetic
aaggcauuccaaggagu

SEQ ID NO: 771085 - RNA, 17 nt, Artificial Sequence
  Synthetic
ugugugcagcaaggagu

SEQ ID NO: 771086 - RNA, 17 nt, Artificial Sequence
  Synthetic
auuuuugagcaaggagu

SEQ ID NO: 771087 - RNA, 17 nt, Artificial Sequence
  Synthetic
cuauugugucaaggagu

SEQ ID NO: 771088 - RNA, 17 nt, Artificial Sequence
  Synthetic
ugaguggaagaaggagu

SEQ ID NO: 771089 - RNA, 17 nt, Artificial Sequence
  Synthetic
aaggagggagaaggagu

SEQ ID NO: 771090 - RNA, 17 nt, Artificial Sequence
  Synthetic
auuuugauauaaggagu

SEQ ID NO: 771091 - RNA, 17 nt, Artificial Sequence
  Synthetic
uguugaauguaaggagu

SEQ ID NO: 771092 - RNA, 17 nt, Artificial Sequence
  Synthetic
accucaguuuaaggagu

SEQ ID NO: 771093 - RNA, 17 nt, Artificial Sequence
  Synthetic
aucaggaaaacaggagu

SEQ ID NO: 771094 - RNA, 17 nt, Artificial Sequence
  Synthetic
ugccauuuaacaggagu

SEQ ID NO: 771095 - RNA, 17 nt, Artificial Sequence
  Synthetic
ugcuugagcccaggagu

SEQ ID NO: 771096 - RNA, 17 nt, Artificial Sequence
  Synthetic
uucuugagcccaggagu

SEQ ID NO: 771097 - RNA, 17 nt, Artificial Sequence
  Synthetic
aacuaaaaaucaggagu

SEQ ID NO: 771098 - RNA, 17 nt, Artificial Sequence
  Synthetic
aucacgaggucaggagu

SEQ ID NO: 771099 - RNA, 17 nt, Artificial Sequence
  Synthetic
uuuagaaucagaggagu

SEQ ID NO: 771100 - RNA, 17 nt, Artificial Sequence
  Synthetic
cagauguucagaggagu

SEQ ID NO: 771101 - RNA, 17 nt, Artificial Sequence
  Synthetic
uguguauggagaggagu

SEQ ID NO: 771102 - RNA, 17 nt, Artificial Sequence
  Synthetic
agugagacuagaggagu

SEQ ID NO: 771103 - RNA, 17 nt, Artificial Sequence
  Synthetic
uuuggcgggggaggagu

SEQ ID NO: 771104 - RNA, 17 nt, Artificial Sequence
  Synthetic
aaggauaguggaggagu

SEQ ID NO: 771105 - RNA, 17 nt, Artificial Sequence
  Synthetic
agaucagaaauaggagu

SEQ ID NO: 771106 - RNA, 17 nt, Artificial Sequence
  Synthetic
agguuuuugauaggagu

SEQ ID NO: 771107 - RNA, 17 nt, Artificial Sequence
  Synthetic
cuccugagccuaggagu

SEQ ID NO: 771108 - RNA, 17 nt, Artificial Sequence
  Synthetic
uuguugucucuaggagu

SEQ ID NO: 771109 - RNA, 17 nt, Artificial Sequence
  Synthetic
agggaguggguaggagu

SEQ ID NO: 771110 - RNA, 17 nt, Artificial Sequence
  Synthetic
auagcaguuuuaggagu

SEQ ID NO: 771111 - RNA, 17 nt, Artificial Sequence
  Synthetic
uaauaaaagaagggagu

SEQ ID NO: 771112 - RNA, 17 nt, Artificial Sequence
  Synthetic
cgcuugagccagggagu

SEQ ID NO: 771113 - RNA, 17 nt, Artificial Sequence
  Synthetic
cauacaggcuagggagu

SEQ ID NO: 771114 - RNA, 17 nt, Artificial Sequence
  Synthetic
aguuucauuuagggagu

SEQ ID NO: 771115 - RNA, 17 nt, Artificial Sequence
  Synthetic
cuugggagugggggagu

SEQ ID NO: 771116 - RNA, 17 nt, Artificial Sequence
  Synthetic
aggauacauuggggagu

SEQ ID NO: 771117 - RNA, 17 nt, Artificial Sequence
  Synthetic
uggguuaucaugggagu

SEQ ID NO: 771118 - RNA, 17 nt, Artificial Sequence
  Synthetic
uugaccaagcugggagu

SEQ ID NO: 771119 - RNA, 17 nt, Artificial Sequence
  Synthetic
uucugcuuggugggagu

SEQ ID NO: 771120 - RNA, 17 nt, Artificial Sequence
  Synthetic
ucagaguuuuugggagu

SEQ ID NO: 771121 - RNA, 17 nt, Artificial Sequence
  Synthetic
agagagcacaauggagu

SEQ ID NO: 771122 - RNA, 17 nt, Artificial Sequence
  Synthetic
agagagaggaauggagu

SEQ ID NO: 771123 - RNA, 17 nt, Artificial Sequence
  Synthetic
aacaugguaacuggagu

SEQ ID NO: 771124 - RNA, 17 nt, Artificial Sequence
  Synthetic
aguugagagacuggagu

SEQ ID NO: 771125 - RNA, 17 nt, Artificial Sequence
  Synthetic
uggaagccuacuggagu

SEQ ID NO: 771126 - RNA, 17 nt, Artificial Sequence
  Synthetic
aguggaauaucuggagu

SEQ ID NO: 771127 - RNA, 17 nt, Artificial Sequence
  Synthetic
auccuuuugucuggagu

SEQ ID NO: 771128 - RNA, 17 nt, Artificial Sequence
  Synthetic
ucaauacugaguggagu

SEQ ID NO: 771129 - RNA, 17 nt, Artificial Sequence
  Synthetic
aaauuuuuucguggagu

SEQ ID NO: 771130 - RNA, 17 nt, Artificial Sequence
  Synthetic
acgugaguguguggagu

SEQ ID NO: 771131 - RNA, 17 nt, Artificial Sequence
  Synthetic
cuccuuuuauuuggagu

SEQ ID NO: 771132 - RNA, 17 nt, Artificial Sequence
  Synthetic
aucaauagguuuggagu

SEQ ID NO: 771133 - RNA, 17 nt, Artificial Sequence
  Synthetic
cagagugaaaaaugagu

SEQ ID NO: 771134 - RNA, 17 nt, Artificial Sequence
  Synthetic
uuagcuaggaaaugagu

SEQ ID NO: 771135 - RNA, 17 nt, Artificial Sequence
  Synthetic
uuggauacuaaaugagu

SEQ ID NO: 771136 - RNA, 17 nt, Artificial Sequence
  Synthetic
ugggagugggaaugagu

SEQ ID NO: 771137 - RNA, 17 nt, Artificial Sequence
  Synthetic
uacaacagauaaugagu

SEQ ID NO: 771138 - RNA, 17 nt, Artificial Sequence
  Synthetic
caaagacaaacaugagu

SEQ ID NO: 771139 - RNA, 17 nt, Artificial Sequence
  Synthetic
augcccagcacaugagu

SEQ ID NO: 771140 - RNA, 17 nt, Artificial Sequence
  Synthetic
cuuauuagcccaugagu

SEQ ID NO: 771141 - RNA, 17 nt, Artificial Sequence
  Synthetic
ugccagaaaagaugagu

SEQ ID NO: 771142 - RNA, 17 nt, Artificial Sequence
  Synthetic
cccuuuaucagaugagu

SEQ ID NO: 771143 - RNA, 17 nt, Artificial Sequence
  Synthetic
cccuuugucagaugagu

SEQ ID NO: 771144 - RNA, 17 nt, Artificial Sequence
  Synthetic
aauagggagagaugagu

SEQ ID NO: 771145 - RNA, 17 nt, Artificial Sequence
  Synthetic
cuccuccugagaugagu

SEQ ID NO: 771146 - RNA, 17 nt, Artificial Sequence
  Synthetic
uccuugccauuaugagu

SEQ ID NO: 771147 - RNA, 17 nt, Artificial Sequence
  Synthetic
accaggauauuaugagu

SEQ ID NO: 771148 - RNA, 17 nt, Artificial Sequence
  Synthetic
uguacucaguuaugagu

SEQ ID NO: 771149 - RNA, 17 nt, Artificial Sequence
  Synthetic
uugauaacacacugagu

SEQ ID NO: 771150 - RNA, 17 nt, Artificial Sequence
  Synthetic
uggcugaagcacugagu

SEQ ID NO: 771151 - RNA, 17 nt, Artificial Sequence
  Synthetic
ugcucgggaggcugagu

SEQ ID NO: 771152 - RNA, 17 nt, Artificial Sequence
  Synthetic
acuuugggaggcugagu

SEQ ID NO: 771153 - RNA, 17 nt, Artificial Sequence
  Synthetic
uaaaaauuaggcugagu

SEQ ID NO: 771154 - RNA, 17 nt, Artificial Sequence
  Synthetic
cuguugaaaugcugagu

SEQ ID NO: 771155 - RNA, 17 nt, Artificial Sequence
  Synthetic
aaauagaaaaucugagu

SEQ ID NO: 771156 - RNA, 17 nt, Artificial Sequence
  Synthetic
agaguaacagucugagu

SEQ ID NO: 771157 - RNA, 17 nt, Artificial Sequence
  Synthetic
agaccugaaaagugagu

SEQ ID NO: 771158 - RNA, 17 nt, Artificial Sequence
  Synthetic
acagacauacagugagu

SEQ ID NO: 771159 - RNA, 17 nt, Artificial Sequence
  Synthetic
auaaaaauggagugagu

SEQ ID NO: 771160 - RNA, 17 nt, Artificial Sequence
  Synthetic
auugaggaugagugagu

SEQ ID NO: 771161 - RNA, 17 nt, Artificial Sequence
  Synthetic
uaguugaagaggugagu

SEQ ID NO: 771162 - RNA, 17 nt, Artificial Sequence
  Synthetic
uuuguggggaggugagu

SEQ ID NO: 771163 - RNA, 17 nt, Artificial Sequence
  Synthetic
cuuugcaugaggugagu

SEQ ID NO: 771164 - RNA, 17 nt, Artificial Sequence
  Synthetic
aagaaaugggggugagu

SEQ ID NO: 771165 - RNA, 17 nt, Artificial Sequence
  Synthetic
aguugcucugggugagu

SEQ ID NO: 771166 - RNA, 17 nt, Artificial Sequence
  Synthetic
aggcuaaaaaugugagu

SEQ ID NO: 771167 - RNA, 17 nt, Artificial Sequence
  Synthetic
accaauugaaugugagu

SEQ ID NO: 771168 - RNA, 17 nt, Artificial Sequence
  Synthetic
uuuaaaguuaugugagu

SEQ ID NO: 771169 - RNA, 17 nt, Artificial Sequence
  Synthetic
uuguauagcuugugagu

SEQ ID NO: 771170 - RNA, 17 nt, Artificial Sequence
  Synthetic
ugaauaaagaauugagu

SEQ ID NO: 771171 - RNA, 17 nt, Artificial Sequence
  Synthetic
ugaagucugaauugagu

SEQ ID NO: 771172 - RNA, 17 nt, Artificial Sequence
  Synthetic
uagcccucauauugagu

SEQ ID NO: 771173 - RNA, 17 nt, Artificial Sequence
  Synthetic
agcaccguuuauugagu

SEQ ID NO: 771174 - RNA, 17 nt, Artificial Sequence
  Synthetic
auuacugaagcuugagu

SEQ ID NO: 771175 - RNA, 17 nt, Artificial Sequence
  Synthetic
ucuaaguacucuugagu

SEQ ID NO: 771176 - RNA, 17 nt, Artificial Sequence
  Synthetic
uggcagccaaguugagu

SEQ ID NO: 771177 - RNA, 17 nt, Artificial Sequence
  Synthetic
caagaguacaguugagu

SEQ ID NO: 771178 - RNA, 17 nt, Artificial Sequence
  Synthetic
uuuuaugaacguugagu

SEQ ID NO: 771179 - RNA, 17 nt, Artificial Sequence
  Synthetic
uuuauuuuccguugagu

SEQ ID NO: 771180 - RNA, 17 nt, Artificial Sequence
  Synthetic
caauaguuugguugagu

SEQ ID NO: 771181 - RNA, 17 nt, Artificial Sequence
  Synthetic
aaguggaacuguugagu

SEQ ID NO: 771182 - RNA, 17 nt, Artificial Sequence
  Synthetic
caaaaugagauuugagu

SEQ ID NO: 771183 - RNA, 17 nt, Artificial Sequence
  Synthetic
auuuuuuaaaaaauagu

SEQ ID NO: 771184 - RNA, 17 nt, Artificial Sequence
  Synthetic
aauucaacaaaaauagu

SEQ ID NO: 771185 - RNA, 17 nt, Artificial Sequence
  Synthetic
uugacauuaaaaauagu

SEQ ID NO: 771186 - RNA, 17 nt, Artificial Sequence
  Synthetic
aggauauuaaaaauagu

SEQ ID NO: 771187 - RNA, 17 nt, Artificial Sequence
  Synthetic
cucuucauuaaaauagu

SEQ ID NO: 771188 - RNA, 17 nt, Artificial Sequence
  Synthetic
aaugccuaacaaauagu

SEQ ID NO: 771189 - RNA, 17 nt, Artificial Sequence
  Synthetic
uugugcuagcaaauagu

SEQ ID NO: 771190 - RNA, 17 nt, Artificial Sequence
  Synthetic
uugugcuaucaaauagu

SEQ ID NO: 771191 - RNA, 17 nt, Artificial Sequence
  Synthetic
aaaaagagagaaauagu

SEQ ID NO: 771192 - RNA, 17 nt, Artificial Sequence
  Synthetic
aaaacacgagaaauagu

SEQ ID NO: 771193 - RNA, 17 nt, Artificial Sequence
  Synthetic
uuugccuuauaaauagu

SEQ ID NO: 771194 - RNA, 17 nt, Artificial Sequence
  Synthetic
cuguagcuuuaaauagu

SEQ ID NO: 771195 - RNA, 17 nt, Artificial Sequence
  Synthetic
aacaguguggcaauagu

SEQ ID NO: 771196 - RNA, 17 nt, Artificial Sequence
  Synthetic
uugcauuagucaauagu

SEQ ID NO: 771197 - RNA, 17 nt, Artificial Sequence
  Synthetic
uucuuaacuugaauagu

SEQ ID NO: 771198 - RNA, 17 nt, Artificial Sequence
  Synthetic
uacaguacaauaauagu

SEQ ID NO: 771199 - RNA, 17 nt, Artificial Sequence
  Synthetic
agcaaugcaauaauagu

SEQ ID NO: 771200 - RNA, 17 nt, Artificial Sequence
  Synthetic
aaaaauaaccuaauagu

SEQ ID NO: 771201 - RNA, 17 nt, Artificial Sequence
  Synthetic
ccuaggaagcuaauagu

SEQ ID NO: 771202 - RNA, 17 nt, Artificial Sequence
  Synthetic
uaguauaaguuaauagu

SEQ ID NO: 771203 - RNA, 17 nt, Artificial Sequence
  Synthetic
ucuacauauuuaauagu

SEQ ID NO: 771204 - RNA, 17 nt, Artificial Sequence
  Synthetic
aaccuauuuuuaauagu

SEQ ID NO: 771205 - RNA, 17 nt, Artificial Sequence
  Synthetic
ccagcaaaccacauagu

SEQ ID NO: 771206 - RNA, 17 nt, Artificial Sequence
  Synthetic
agugccuaguacauagu

SEQ ID NO: 771207 - RNA, 17 nt, Artificial Sequence
  Synthetic
uuuuugggguacauagu

SEQ ID NO: 771208 - RNA, 17 nt, Artificial Sequence
  Synthetic
uuuuauggguacauagu

SEQ ID NO: 771209 - RNA, 17 nt, Artificial Sequence
  Synthetic
uuuuguggguacauagu

SEQ ID NO: 771210 - RNA, 17 nt, Artificial Sequence
  Synthetic
aaaaaaaaaaccauagu

SEQ ID NO: 771211 - RNA, 17 nt, Artificial Sequence
  Synthetic
aaggagcaaaucauagu

SEQ ID NO: 771212 - RNA, 17 nt, Artificial Sequence
  Synthetic
auauaguuucucauagu

SEQ ID NO: 771213 - RNA, 17 nt, Artificial Sequence
  Synthetic
augucccuauucauagu

SEQ ID NO: 771214 - RNA, 17 nt, Artificial Sequence
  Synthetic
cucaucacuuucauagu

SEQ ID NO: 771215 - RNA, 17 nt, Artificial Sequence
  Synthetic
aucaggcuuuucauagu

SEQ ID NO: 771216 - RNA, 17 nt, Artificial Sequence
  Synthetic
acagcaacuaagauagu

SEQ ID NO: 771217 - RNA, 17 nt, Artificial Sequence
  Synthetic
uuaauaucuuugauagu

SEQ ID NO: 771218 - RNA, 17 nt, Artificial Sequence
  Synthetic
uucagcaaaaauauagu

SEQ ID NO: 771219 - RNA, 17 nt, Artificial Sequence
  Synthetic
auuacuuggaauauagu

SEQ ID NO: 771220 - RNA, 17 nt, Artificial Sequence
  Synthetic
uugacuuaagauauagu

SEQ ID NO: 771221 - RNA, 17 nt, Artificial Sequence
  Synthetic
aguaaucuggauauagu

SEQ ID NO: 771222 - RNA, 17 nt, Artificial Sequence
  Synthetic
auauggccauauauagu

SEQ ID NO: 771223 - RNA, 17 nt, Artificial Sequence
  Synthetic
uagaagcaguauauagu

SEQ ID NO: 771224 - RNA, 17 nt, Artificial Sequence
  Synthetic
uugaucccuuauauagu

SEQ ID NO: 771225 - RNA, 17 nt, Artificial Sequence
  Synthetic
ugguguugaccuauagu

SEQ ID NO: 771226 - RNA, 17 nt, Artificial Sequence
  Synthetic
agcuuuuauucuauagu

SEQ ID NO: 771227 - RNA, 17 nt, Artificial Sequence
  Synthetic
caaccuagauguauagu

SEQ ID NO: 771228 - RNA, 17 nt, Artificial Sequence
  Synthetic
acaaacaaaauuauagu

SEQ ID NO: 771229 - RNA, 17 nt, Artificial Sequence
  Synthetic
aauguucaaauuauagu

SEQ ID NO: 771230 - RNA, 17 nt, Artificial Sequence
  Synthetic
accauacugauuauagu

SEQ ID NO: 771231 - RNA, 17 nt, Artificial Sequence
  Synthetic
aauacuuugcuuauagu

SEQ ID NO: 771232 - RNA, 17 nt, Artificial Sequence
  Synthetic
uugaagguauuuauagu

SEQ ID NO: 771233 - RNA, 17 nt, Artificial Sequence
  Synthetic
caacauuguuuuauagu

SEQ ID NO: 771234 - RNA, 17 nt, Artificial Sequence
  Synthetic
uuuacuagcaaacuagu

SEQ ID NO: 771235 - RNA, 17 nt, Artificial Sequence
  Synthetic
acauacuggaaacuagu

SEQ ID NO: 771236 - RNA, 17 nt, Artificial Sequence
  Synthetic
auauaauuggaacuagu

SEQ ID NO: 771237 - RNA, 17 nt, Artificial Sequence
  Synthetic
uuuacuaaguaacuagu

SEQ ID NO: 771238 - RNA, 17 nt, Artificial Sequence
  Synthetic
auuuccuuguaacuagu

SEQ ID NO: 771239 - RNA, 17 nt, Artificial Sequence
  Synthetic
ucaugagacacacuagu

SEQ ID NO: 771240 - RNA, 17 nt, Artificial Sequence
  Synthetic
acccuagauagacuagu

SEQ ID NO: 771241 - RNA, 17 nt, Artificial Sequence
  Synthetic
uggaaauacgaccuagu

SEQ ID NO: 771242 - RNA, 17 nt, Artificial Sequence
  Synthetic
uuugcuagaccccuagu

SEQ ID NO: 771243 - RNA, 17 nt, Artificial Sequence
  Synthetic
uugaucucacuccuagu

SEQ ID NO: 771244 - RNA, 17 nt, Artificial Sequence
  Synthetic
agaacauuagagcuagu

SEQ ID NO: 771245 - RNA, 17 nt, Artificial Sequence
  Synthetic
auuuaaauuuagcuagu

SEQ ID NO: 771246 - RNA, 17 nt, Artificial Sequence
  Synthetic
auggcccaagggcuagu

SEQ ID NO: 771247 - RNA, 17 nt, Artificial Sequence
  Synthetic
cagggagaggugcuagu

SEQ ID NO: 771248 - RNA, 17 nt, Artificial Sequence
  Synthetic
ucauaagcuuugcuagu

SEQ ID NO: 771249 - RNA, 17 nt, Artificial Sequence
  Synthetic
ugaguuuaaaaucuagu

SEQ ID NO: 771250 - RNA, 17 nt, Artificial Sequence
  Synthetic
aacccuagcaaucuagu

SEQ ID NO: 771251 - RNA, 17 nt, Artificial Sequence
  Synthetic
uagcuccuuaaucuagu

SEQ ID NO: 771252 - RNA, 17 nt, Artificial Sequence
  Synthetic
aguuagaggcaucuagu

SEQ ID NO: 771253 - RNA, 17 nt, Artificial Sequence
  Synthetic
aaugcccaauaucuagu

SEQ ID NO: 771254 - RNA, 17 nt, Artificial Sequence
  Synthetic
aaguuaagauaucuagu

SEQ ID NO: 771255 - RNA, 17 nt, Artificial Sequence
  Synthetic
uuuaugaaaucucuagu

SEQ ID NO: 771256 - RNA, 17 nt, Artificial Sequence
  Synthetic
auuuaaauuucucuagu

SEQ ID NO: 771257 - RNA, 17 nt, Artificial Sequence
  Synthetic
uacaacugaagucuagu

SEQ ID NO: 771258 - RNA, 17 nt, Artificial Sequence
  Synthetic
aguuggugcugucuagu

SEQ ID NO: 771259 - RNA, 17 nt, Artificial Sequence
  Synthetic
aaggcaugccuucuagu

SEQ ID NO: 771260 - RNA, 17 nt, Artificial Sequence
  Synthetic
uuuagaaaaguucuagu

SEQ ID NO: 771261 - RNA, 17 nt, Artificial Sequence
  Synthetic
uuuuauuauuuucuagu

SEQ ID NO: 771262 - RNA, 17 nt, Artificial Sequence
  Synthetic
uaagaucucaaaguagu

SEQ ID NO: 771263 - RNA, 17 nt, Artificial Sequence
  Synthetic
auuuuuuuuaaaguagu

SEQ ID NO: 771264 - RNA, 17 nt, Artificial Sequence
  Synthetic
cuucuucacacaguagu

SEQ ID NO: 771265 - RNA, 17 nt, Artificial Sequence
  Synthetic
ccuaugaggccaguagu

SEQ ID NO: 771266 - RNA, 17 nt, Artificial Sequence
  Synthetic
cauuuuuaagcaguagu

SEQ ID NO: 771267 - RNA, 17 nt, Artificial Sequence
  Synthetic
uaaaaacacagaguagu

SEQ ID NO: 771268 - RNA, 17 nt, Artificial Sequence
  Synthetic
uaagauugcagaguagu

SEQ ID NO: 771269 - RNA, 17 nt, Artificial Sequence
  Synthetic
agcaaggggagaguagu

SEQ ID NO: 771270 - RNA, 17 nt, Artificial Sequence
  Synthetic
cacaacaguagaguagu

SEQ ID NO: 771271 - RNA, 17 nt, Artificial Sequence
  Synthetic
ucugccucccgaguagu

SEQ ID NO: 771272 - RNA, 17 nt, Artificial Sequence
  Synthetic
ucagccuccugaguagu

SEQ ID NO: 771273 - RNA, 17 nt, Artificial Sequence
  Synthetic
ucugccuccugaguagu

SEQ ID NO: 771274 - RNA, 17 nt, Artificial Sequence
  Synthetic
uaacaucagugaguagu

SEQ ID NO: 771275 - RNA, 17 nt, Artificial Sequence
  Synthetic
cgcacacuuugaguagu

SEQ ID NO: 771276 - RNA, 17 nt, Artificial Sequence
  Synthetic
agcaaagacaagguagu

SEQ ID NO: 771277 - RNA, 17 nt, Artificial Sequence
  Synthetic
uagaugaagaagguagu

SEQ ID NO: 771278 - RNA, 17 nt, Artificial Sequence
  Synthetic
ugucauguccagguagu

SEQ ID NO: 771279 - RNA, 17 nt, Artificial Sequence
  Synthetic
auucagaaagcgguagu

SEQ ID NO: 771280 - RNA, 17 nt, Artificial Sequence
  Synthetic
aggcugugaaggguagu

SEQ ID NO: 771281 - RNA, 17 nt, Artificial Sequence
  Synthetic
uuacuaccugggguagu

SEQ ID NO: 771282 - RNA, 17 nt, Artificial Sequence
  Synthetic
uagccuggcgugguagu

SEQ ID NO: 771283 - RNA, 17 nt, Artificial Sequence
  Synthetic
uggagggaaaauguagu

SEQ ID NO: 771284 - RNA, 17 nt, Artificial Sequence
  Synthetic
auaaucauaaauguagu

SEQ ID NO: 771285 - RNA, 17 nt, Artificial Sequence
  Synthetic
acaaugccauauguagu

SEQ ID NO: 771286 - RNA, 17 nt, Artificial Sequence
  Synthetic
auaaauuccuauguagu

SEQ ID NO: 771287 - RNA, 17 nt, Artificial Sequence
  Synthetic
aaaaucauagcuguagu

SEQ ID NO: 771288 - RNA, 17 nt, Artificial Sequence
  Synthetic
aguaaaugcucuguagu

SEQ ID NO: 771289 - RNA, 17 nt, Artificial Sequence
  Synthetic
agagccuagaguguagu

SEQ ID NO: 771290 - RNA, 17 nt, Artificial Sequence
  Synthetic
aacaaaguuaguguagu

SEQ ID NO: 771291 - RNA, 17 nt, Artificial Sequence
  Synthetic
uagccuagguguguagu

SEQ ID NO: 771292 - RNA, 17 nt, Artificial Sequence
  Synthetic
uuaaugauguguguagu

SEQ ID NO: 771293 - RNA, 17 nt, Artificial Sequence
  Synthetic
aaauauauuauuguagu

SEQ ID NO: 771294 - RNA, 17 nt, Artificial Sequence
  Synthetic
acuucuuuauuuguagu

SEQ ID NO: 771295 - RNA, 17 nt, Artificial Sequence
  Synthetic
aaguacaaaaaauuagu

SEQ ID NO: 771296 - RNA, 17 nt, Artificial Sequence
  Synthetic
aaaauacaaaaauuagu

SEQ ID NO: 771297 - RNA, 17 nt, Artificial Sequence
  Synthetic
agagcuacaaaauuagu

SEQ ID NO: 771298 - RNA, 17 nt, Artificial Sequence
  Synthetic
acaauacuuaaauuagu

SEQ ID NO: 771299 - RNA, 17 nt, Artificial Sequence
  Synthetic
ccuacaaaucaauuagu

SEQ ID NO: 771300 - RNA, 17 nt, Artificial Sequence
  Synthetic
acucguuuucaauuagu

SEQ ID NO: 771301 - RNA, 17 nt, Artificial Sequence
  Synthetic
aucguaaaugaauuagu

SEQ ID NO: 771302 - RNA, 17 nt, Artificial Sequence
  Synthetic
uugugaauuuaauuagu

SEQ ID NO: 771303 - RNA, 17 nt, Artificial Sequence
  Synthetic
ccucucaguucauuagu

SEQ ID NO: 771304 - RNA, 17 nt, Artificial Sequence
  Synthetic
acggacuuuggauuagu

SEQ ID NO: 771305 - RNA, 17 nt, Artificial Sequence
  Synthetic
aucuuaaacugauuagu

SEQ ID NO: 771306 - RNA, 17 nt, Artificial Sequence
  Synthetic
aauuacuucauauuagu

SEQ ID NO: 771307 - RNA, 17 nt, Artificial Sequence
  Synthetic
uguucucacuuauuagu

SEQ ID NO: 771308 - RNA, 17 nt, Artificial Sequence
  Synthetic
auucuaagguuauuagu

SEQ ID NO: 771309 - RNA, 17 nt, Artificial Sequence
  Synthetic
cuuuuuuuuuuauuagu

SEQ ID NO: 771310 - RNA, 17 nt, Artificial Sequence
  Synthetic
uauucuguaaacuuagu

SEQ ID NO: 771311 - RNA, 17 nt, Artificial Sequence
  Synthetic
auuguaugggacuuagu

SEQ ID NO: 771312 - RNA, 17 nt, Artificial Sequence
  Synthetic
uagauuugacccuuagu

SEQ ID NO: 771313 - RNA, 17 nt, Artificial Sequence
  Synthetic
cagcaagauuccuuagu

SEQ ID NO: 771314 - RNA, 17 nt, Artificial Sequence
  Synthetic
uauguggggagcuuagu

SEQ ID NO: 771315 - RNA, 17 nt, Artificial Sequence
  Synthetic
cuugaaaugugcuuagu

SEQ ID NO: 771316 - RNA, 17 nt, Artificial Sequence
  Synthetic
aaccauuagaucuuagu

SEQ ID NO: 771317 - RNA, 17 nt, Artificial Sequence
  Synthetic
ugaggguuucucuuagu

SEQ ID NO: 771318 - RNA, 17 nt, Artificial Sequence
  Synthetic
aaauaaguuuucuuagu

SEQ ID NO: 771319 - RNA, 17 nt, Artificial Sequence
  Synthetic
cuagaugacaaguuagu

SEQ ID NO: 771320 - RNA, 17 nt, Artificial Sequence
  Synthetic
cuagaugacgaguuagu

SEQ ID NO: 771321 - RNA, 17 nt, Artificial Sequence
  Synthetic
cuagaugaugaguuagu

SEQ ID NO: 771322 - RNA, 17 nt, Artificial Sequence
  Synthetic
uuguuuuguuaguuagu

SEQ ID NO: 771323 - RNA, 17 nt, Artificial Sequence
  Synthetic
cuagaugacacguuagu

SEQ ID NO: 771324 - RNA, 17 nt, Artificial Sequence
  Synthetic
cuagaugacggguuagu

SEQ ID NO: 771325 - RNA, 17 nt, Artificial Sequence
  Synthetic
cuguugaauugguuagu

SEQ ID NO: 771326 - RNA, 17 nt, Artificial Sequence
  Synthetic
accuuacuuugguuagu

SEQ ID NO: 771327 - RNA, 17 nt, Artificial Sequence
  Synthetic
auuuccugaauguuagu

SEQ ID NO: 771328 - RNA, 17 nt, Artificial Sequence
  Synthetic
auugcccaaaauuuagu

SEQ ID NO: 771329 - RNA, 17 nt, Artificial Sequence
  Synthetic
caguuucaaaauuuagu

SEQ ID NO: 771330 - RNA, 17 nt, Artificial Sequence
  Synthetic
aacaucugacauuuagu

SEQ ID NO: 771331 - RNA, 17 nt, Artificial Sequence
  Synthetic
uuucauagagauuuagu

SEQ ID NO: 771332 - RNA, 17 nt, Artificial Sequence
  Synthetic
aaaaacucugauuuagu

SEQ ID NO: 771333 - RNA, 17 nt, Artificial Sequence
  Synthetic
agagauucugauuuagu

SEQ ID NO: 771334 - RNA, 17 nt, Artificial Sequence
  Synthetic
ugugcucaguauuuagu

SEQ ID NO: 771335 - RNA, 17 nt, Artificial Sequence
  Synthetic
uucagcauuuauuuagu

SEQ ID NO: 771336 - RNA, 17 nt, Artificial Sequence
  Synthetic
ucuaaauuaacuuuagu

SEQ ID NO: 771337 - RNA, 17 nt, Artificial Sequence
  Synthetic
uauauacuuacuuuagu

SEQ ID NO: 771338 - RNA, 17 nt, Artificial Sequence
  Synthetic
uauugacaaccuuuagu

SEQ ID NO: 771339 - RNA, 17 nt, Artificial Sequence
  Synthetic
uagcaccuugcuuuagu

SEQ ID NO: 771340 - RNA, 17 nt, Artificial Sequence
  Synthetic
uugaucuguaguuuagu

SEQ ID NO: 771341 - RNA, 17 nt, Artificial Sequence
  Synthetic
uuacuaccuuguuuagu

SEQ ID NO: 771342 - RNA, 17 nt, Artificial Sequence
  Synthetic
caaaggaacauuuuagu

SEQ ID NO: 771343 - RNA, 17 nt, Artificial Sequence
  Synthetic
uagcuguucauuuuagu

SEQ ID NO: 771344 - RNA, 17 nt, Artificial Sequence
  Synthetic
aaauguccuauuuuagu

SEQ ID NO: 771345 - RNA, 17 nt, Artificial Sequence
  Synthetic
ccuuuuccuguuuuagu

SEQ ID NO: 771346 - RNA, 17 nt, Artificial Sequence
  Synthetic
uuuuuuguauuuuuagu

SEQ ID NO: 771347 - RNA, 17 nt, Artificial Sequence
  Synthetic
aaucagagcaaaaacgu

SEQ ID NO: 771348 - RNA, 17 nt, Artificial Sequence
  Synthetic
agugcuucaacaaacgu

SEQ ID NO: 771349 - RNA, 17 nt, Artificial Sequence
  Synthetic
aaugguaaugcaaacgu

SEQ ID NO: 771350 - RNA, 17 nt, Artificial Sequence
  Synthetic
cacuggaagagaaacgu

SEQ ID NO: 771351 - RNA, 17 nt, Artificial Sequence
  Synthetic
cuacugaagggaaacgu

SEQ ID NO: 771352 - RNA, 17 nt, Artificial Sequence
  Synthetic
aauaguaacaacaacgu

SEQ ID NO: 771353 - RNA, 17 nt, Artificial Sequence
  Synthetic
aacagagaacccaacgu

SEQ ID NO: 771354 - RNA, 17 nt, Artificial Sequence
  Synthetic
auaaguuuaagcaacgu

SEQ ID NO: 771355 - RNA, 17 nt, Artificial Sequence
  Synthetic
uagguguccgucaacgu

SEQ ID NO: 771356 - RNA, 17 nt, Artificial Sequence
  Synthetic
aauguaaucaagaacgu

SEQ ID NO: 771357 - RNA, 17 nt, Artificial Sequence
  Synthetic
cagugaaaacagaacgu

SEQ ID NO: 771358 - RNA, 17 nt, Artificial Sequence
  Synthetic
uuccugaaucugaacgu

SEQ ID NO: 771359 - RNA, 17 nt, Artificial Sequence
  Synthetic
ucccucccacaacacgu

SEQ ID NO: 771360 - RNA, 17 nt, Artificial Sequence
  Synthetic
acuuuuucuggacacgu

SEQ ID NO: 771361 - RNA, 17 nt, Artificial Sequence
  Synthetic
ucucucccuugacacgu

SEQ ID NO: 771362 - RNA, 17 nt, Artificial Sequence
  Synthetic
augggguuucaccacgu

SEQ ID NO: 771363 - RNA, 17 nt, Artificial Sequence
  Synthetic
uggggguuuuaccacgu

SEQ ID NO: 771364 - RNA, 17 nt, Artificial Sequence
  Synthetic
aggugauccacccacgu

SEQ ID NO: 771365 - RNA, 17 nt, Artificial Sequence
  Synthetic
aauauuugaggccacgu

SEQ ID NO: 771366 - RNA, 17 nt, Artificial Sequence
  Synthetic
ucccggugcugccacgu

SEQ ID NO: 771367 - RNA, 17 nt, Artificial Sequence
  Synthetic
aacaaaucaauccacgu

SEQ ID NO: 771368 - RNA, 17 nt, Artificial Sequence
  Synthetic
ugaaagaacauccacgu

SEQ ID NO: 771369 - RNA, 17 nt, Artificial Sequence
  Synthetic
uuaauaauuauccacgu

SEQ ID NO: 771370 - RNA, 17 nt, Artificial Sequence
  Synthetic
augggguuucuccacgu

SEQ ID NO: 771371 - RNA, 17 nt, Artificial Sequence
  Synthetic
uguauacuuguccacgu

SEQ ID NO: 771372 - RNA, 17 nt, Artificial Sequence
  Synthetic
uuuuauuuuuuccacgu

SEQ ID NO: 771373 - RNA, 17 nt, Artificial Sequence
  Synthetic
cacacgcagaagcacgu

SEQ ID NO: 771374 - RNA, 17 nt, Artificial Sequence
  Synthetic
cagugauuaaugcacgu

SEQ ID NO: 771375 - RNA, 17 nt, Artificial Sequence
  Synthetic
ccugccaaaggucacgu

SEQ ID NO: 771376 - RNA, 17 nt, Artificial Sequence
  Synthetic
aagucaggaauucacgu

SEQ ID NO: 771377 - RNA, 17 nt, Artificial Sequence
  Synthetic
agcucaauucuucacgu

SEQ ID NO: 771378 - RNA, 17 nt, Artificial Sequence
  Synthetic
agcauuugucaagacgu

SEQ ID NO: 771379 - RNA, 17 nt, Artificial Sequence
  Synthetic
ucauguauuacagacgu

SEQ ID NO: 771380 - RNA, 17 nt, Artificial Sequence
  Synthetic
aaaacuuagccagacgu

SEQ ID NO: 771381 - RNA, 17 nt, Artificial Sequence
  Synthetic
uaaaaucauauagacgu

SEQ ID NO: 771382 - RNA, 17 nt, Artificial Sequence
  Synthetic
cagaaaaguaacgacgu

SEQ ID NO: 771383 - RNA, 17 nt, Artificial Sequence
  Synthetic
aauaccauucaggacgu

SEQ ID NO: 771384 - RNA, 17 nt, Artificial Sequence
  Synthetic
ugugaaggaagggacgu

SEQ ID NO: 771385 - RNA, 17 nt, Artificial Sequence
  Synthetic
aacaagaaugaugacgu

SEQ ID NO: 771386 - RNA, 17 nt, Artificial Sequence
  Synthetic
cacaugggugaugacgu

SEQ ID NO: 771387 - RNA, 17 nt, Artificial Sequence
  Synthetic
ccaaaaaugaaauacgu

SEQ ID NO: 771388 - RNA, 17 nt, Artificial Sequence
  Synthetic
uuuuccagaugauacgu

SEQ ID NO: 771389 - RNA, 17 nt, Artificial Sequence
  Synthetic
uguucucacugauacgu

SEQ ID NO: 771390 - RNA, 17 nt, Artificial Sequence
  Synthetic
cuuugggaggccuacgu

SEQ ID NO: 771391 - RNA, 17 nt, Artificial Sequence
  Synthetic
ugcauauauauguacgu

SEQ ID NO: 771392 - RNA, 17 nt, Artificial Sequence
  Synthetic
aauuuucaacuguacgu

SEQ ID NO: 771393 - RNA, 17 nt, Artificial Sequence
  Synthetic
acagguaacacuuacgu

SEQ ID NO: 771394 - RNA, 17 nt, Artificial Sequence
  Synthetic
uuaacugaggcuuacgu

SEQ ID NO: 771395 - RNA, 17 nt, Artificial Sequence
  Synthetic
ugcuggccugcuuacgu

SEQ ID NO: 771396 - RNA, 17 nt, Artificial Sequence
  Synthetic
ugaaaaggaaacaccgu

SEQ ID NO: 771397 - RNA, 17 nt, Artificial Sequence
  Synthetic
aggugcccucucaccgu

SEQ ID NO: 771398 - RNA, 17 nt, Artificial Sequence
  Synthetic
cuucagaaggcucccgu

SEQ ID NO: 771399 - RNA, 17 nt, Artificial Sequence
  Synthetic
aaauaaauaaaagccgu

SEQ ID NO: 771400 - RNA, 17 nt, Artificial Sequence
  Synthetic
aauuuagcauaugccgu

SEQ ID NO: 771401 - RNA, 17 nt, Artificial Sequence
  Synthetic
aagaauggccacuccgu

SEQ ID NO: 771402 - RNA, 17 nt, Artificial Sequence
  Synthetic
agcauaaauuacuccgu

SEQ ID NO: 771403 - RNA, 17 nt, Artificial Sequence
  Synthetic
ccuaaaugcagcuccgu

SEQ ID NO: 771404 - RNA, 17 nt, Artificial Sequence
  Synthetic
agcuggcugggcuccgu

SEQ ID NO: 771405 - RNA, 17 nt, Artificial Sequence
  Synthetic
uuuuauuaaaucuccgu

SEQ ID NO: 771406 - RNA, 17 nt, Artificial Sequence
  Synthetic
ccucuguucuguuccgu

SEQ ID NO: 771407 - RNA, 17 nt, Artificial Sequence
  Synthetic
uuaccccaauuuuccgu

SEQ ID NO: 771408 - RNA, 17 nt, Artificial Sequence
  Synthetic
uucaacuugugaagcgu

SEQ ID NO: 771409 - RNA, 17 nt, Artificial Sequence
  Synthetic
ugcaugcacaccagcgu

SEQ ID NO: 771410 - RNA, 17 nt, Artificial Sequence
  Synthetic
accagugaguagagcgu

SEQ ID NO: 771411 - RNA, 17 nt, Artificial Sequence
  Synthetic
ugucuuuuuagccgcgu

SEQ ID NO: 771412 - RNA, 17 nt, Artificial Sequence
  Synthetic
auucaggacauaggcgu

SEQ ID NO: 771413 - RNA, 17 nt, Artificial Sequence
  Synthetic
caaagggauuuaggcgu

SEQ ID NO: 771414 - RNA, 17 nt, Artificial Sequence
  Synthetic
cagggcccugguggcgu

SEQ ID NO: 771415 - RNA, 17 nt, Artificial Sequence
  Synthetic
uuuuuuuuuaacugcgu

SEQ ID NO: 771416 - RNA, 17 nt, Artificial Sequence
  Synthetic
uguggggagaggugcgu

SEQ ID NO: 771417 - RNA, 17 nt, Artificial Sequence
  Synthetic
cauauauuuuggugcgu

SEQ ID NO: 771418 - RNA, 17 nt, Artificial Sequence
  Synthetic
uuguuuugugguugcgu

SEQ ID NO: 771419 - RNA, 17 nt, Artificial Sequence
  Synthetic
uauaauguugguugcgu

SEQ ID NO: 771420 - RNA, 17 nt, Artificial Sequence
  Synthetic
cacacauauauuugcgu

SEQ ID NO: 771421 - RNA, 17 nt, Artificial Sequence
  Synthetic
acagagagccaaaucgu

SEQ ID NO: 771422 - RNA, 17 nt, Artificial Sequence
  Synthetic
uaaaaguagccaaucgu

SEQ ID NO: 771423 - RNA, 17 nt, Artificial Sequence
  Synthetic
acagaagguuacaucgu

SEQ ID NO: 771424 - RNA, 17 nt, Artificial Sequence
  Synthetic
ugcaaccuccccaucgu

SEQ ID NO: 771425 - RNA, 17 nt, Artificial Sequence
  Synthetic
uucuauccauccaucgu

SEQ ID NO: 771426 - RNA, 17 nt, Artificial Sequence
  Synthetic
aaauaauuggucaucgu

SEQ ID NO: 771427 - RNA, 17 nt, Artificial Sequence
  Synthetic
accagacaucaacucgu

SEQ ID NO: 771428 - RNA, 17 nt, Artificial Sequence
  Synthetic
ugcugugccccacucgu

SEQ ID NO: 771429 - RNA, 17 nt, Artificial Sequence
  Synthetic
cuugcccacaaccucgu

SEQ ID NO: 771430 - RNA, 17 nt, Artificial Sequence
  Synthetic
aaccucuuccaccucgu

SEQ ID NO: 771431 - RNA, 17 nt, Artificial Sequence
  Synthetic
ugugggaaggaccucgu

SEQ ID NO: 771432 - RNA, 17 nt, Artificial Sequence
  Synthetic
ugcaaccuccgccucgu

SEQ ID NO: 771433 - RNA, 17 nt, Artificial Sequence
  Synthetic
uuuucacuggggcucgu

SEQ ID NO: 771434 - RNA, 17 nt, Artificial Sequence
  Synthetic
aucaaauucaaggucgu

SEQ ID NO: 771435 - RNA, 17 nt, Artificial Sequence
  Synthetic
aggaugggaagggucgu

SEQ ID NO: 771436 - RNA, 17 nt, Artificial Sequence
  Synthetic
acaccagggccugucgu

SEQ ID NO: 771437 - RNA, 17 nt, Artificial Sequence
  Synthetic
acaccggggccugucgu

SEQ ID NO: 771438 - RNA, 17 nt, Artificial Sequence
  Synthetic
acacuggggccugucgu

SEQ ID NO: 771439 - RNA, 17 nt, Artificial Sequence
  Synthetic
cucuguuugucugucgu

SEQ ID NO: 771440 - RNA, 17 nt, Artificial Sequence
  Synthetic
caugugguuuuugucgu

SEQ ID NO: 771441 - RNA, 17 nt, Artificial Sequence
  Synthetic
augucccuuggauucgu

SEQ ID NO: 771442 - RNA, 17 nt, Artificial Sequence
  Synthetic
cuaaaaaucuuauucgu

SEQ ID NO: 771443 - RNA, 17 nt, Artificial Sequence
  Synthetic
uuuuuuuuuugguucgu

SEQ ID NO: 771444 - RNA, 17 nt, Artificial Sequence
  Synthetic
ccuguuguuuuuuucgu

SEQ ID NO: 771445 - RNA, 17 nt, Artificial Sequence
  Synthetic
auggaaagaaaaaaggu

SEQ ID NO: 771446 - RNA, 17 nt, Artificial Sequence
  Synthetic
auacuuuugaaaaaggu

SEQ ID NO: 771447 - RNA, 17 nt, Artificial Sequence
  Synthetic
ucuggugccgaaaaggu

SEQ ID NO: 771448 - RNA, 17 nt, Artificial Sequence
  Synthetic
aaggcaaaugaaaaggu

SEQ ID NO: 771449 - RNA, 17 nt, Artificial Sequence
  Synthetic
uaauucuucuaaaaggu

SEQ ID NO: 771450 - RNA, 17 nt, Artificial Sequence
  Synthetic
uauagaaauuaaaaggu

SEQ ID NO: 771451 - RNA, 17 nt, Artificial Sequence
  Synthetic
ccaaaaccuuaaaaggu

SEQ ID NO: 771452 - RNA, 17 nt, Artificial Sequence
  Synthetic
auagcagaaacaaaggu

SEQ ID NO: 771453 - RNA, 17 nt, Artificial Sequence
  Synthetic
cuuuuguaaacaaaggu

SEQ ID NO: 771454 - RNA, 17 nt, Artificial Sequence
  Synthetic
uucuaccuuccaaaggu

SEQ ID NO: 771455 - RNA, 17 nt, Artificial Sequence
  Synthetic
uuuuuauuuccaaaggu

SEQ ID NO: 771456 - RNA, 17 nt, Artificial Sequence
  Synthetic
agcugcuuugcaaaggu

SEQ ID NO: 771457 - RNA, 17 nt, Artificial Sequence
  Synthetic
acugccaacagaaaggu

SEQ ID NO: 771458 - RNA, 17 nt, Artificial Sequence
  Synthetic
aguuuguccugaaaggu

SEQ ID NO: 771459 - RNA, 17 nt, Artificial Sequence
  Synthetic
uguuacaagugaaaggu

SEQ ID NO: 771460 - RNA, 17 nt, Artificial Sequence
  Synthetic
uguauauagugaaaggu

SEQ ID NO: 771461 - RNA, 17 nt, Artificial Sequence
  Synthetic
aguaacuguugaaaggu

SEQ ID NO: 771462 - RNA, 17 nt, Artificial Sequence
  Synthetic
augucaaaaauaaaggu

SEQ ID NO: 771463 - RNA, 17 nt, Artificial Sequence
  Synthetic
uaugaauaacuaaaggu

SEQ ID NO: 771464 - RNA, 17 nt, Artificial Sequence
  Synthetic
uauuuuguguuaaaggu

SEQ ID NO: 771465 - RNA, 17 nt, Artificial Sequence
  Synthetic
aaaucuuuuuuaaaggu

SEQ ID NO: 771466 - RNA, 17 nt, Artificial Sequence
  Synthetic
uaagaaggagacaaggu

SEQ ID NO: 771467 - RNA, 17 nt, Artificial Sequence
  Synthetic
cuuugagagaccaaggu

SEQ ID NO: 771468 - RNA, 17 nt, Artificial Sequence
  Synthetic
uggguaaaacccaaggu

SEQ ID NO: 771469 - RNA, 17 nt, Artificial Sequence
  Synthetic
cguugucaggccaaggu

SEQ ID NO: 771470 - RNA, 17 nt, Artificial Sequence
  Synthetic
cuucgggaggccaaggu

SEQ ID NO: 771471 - RNA, 17 nt, Artificial Sequence
  Synthetic
cuuugggaggccaaggu

SEQ ID NO: 771472 - RNA, 17 nt, Artificial Sequence
  Synthetic
uuuugggaggccaaggu

SEQ ID NO: 771473 - RNA, 17 nt, Artificial Sequence
  Synthetic
uuuuuggaggccaaggu

SEQ ID NO: 771474 - RNA, 17 nt, Artificial Sequence
  Synthetic
ucaguaaaauccaaggu

SEQ ID NO: 771475 - RNA, 17 nt, Artificial Sequence
  Synthetic
cuuugggaguccaaggu

SEQ ID NO: 771476 - RNA, 17 nt, Artificial Sequence
  Synthetic
agaagugguuccaaggu

SEQ ID NO: 771477 - RNA, 17 nt, Artificial Sequence
  Synthetic
ucacgcugaugcaaggu

SEQ ID NO: 771478 - RNA, 17 nt, Artificial Sequence
  Synthetic
agcauaauagucaaggu

SEQ ID NO: 771479 - RNA, 17 nt, Artificial Sequence
  Synthetic
ugaauuucugucaaggu

SEQ ID NO: 771480 - RNA, 17 nt, Artificial Sequence
  Synthetic
acauagaaaaagaaggu

SEQ ID NO: 771481 - RNA, 17 nt, Artificial Sequence
  Synthetic
caaggggagaagaaggu

SEQ ID NO: 771482 - RNA, 17 nt, Artificial Sequence
  Synthetic
agaucaacacagaaggu

SEQ ID NO: 771483 - RNA, 17 nt, Artificial Sequence
  Synthetic
aguaggcuucagaaggu

SEQ ID NO: 771484 - RNA, 17 nt, Artificial Sequence
  Synthetic
ccaguguaagagaaggu

SEQ ID NO: 771485 - RNA, 17 nt, Artificial Sequence
  Synthetic
aaagguaaggagaaggu

SEQ ID NO: 771486 - RNA, 17 nt, Artificial Sequence
  Synthetic
ucugggagguagaaggu

SEQ ID NO: 771487 - RNA, 17 nt, Artificial Sequence
  Synthetic
ugaugguauuagaaggu

SEQ ID NO: 771488 - RNA, 17 nt, Artificial Sequence
  Synthetic
aaauuaagugggaaggu

SEQ ID NO: 771489 - RNA, 17 nt, Artificial Sequence
  Synthetic
ucuaggaguuggaaggu

SEQ ID NO: 771490 - RNA, 17 nt, Artificial Sequence
  Synthetic
aaaaagucaaugaaggu

SEQ ID NO: 771491 - RNA, 17 nt, Artificial Sequence
  Synthetic
uggcgguugcugaaggu

SEQ ID NO: 771492 - RNA, 17 nt, Artificial Sequence
  Synthetic
uaaucuaccuugaaggu

SEQ ID NO: 771493 - RNA, 17 nt, Artificial Sequence
  Synthetic
cugaccauguugaaggu

SEQ ID NO: 771494 - RNA, 17 nt, Artificial Sequence
  Synthetic
aguaaauaauauaaggu

SEQ ID NO: 771495 - RNA, 17 nt, Artificial Sequence
  Synthetic
uuagaaaucacuaaggu

SEQ ID NO: 771496 - RNA, 17 nt, Artificial Sequence
  Synthetic
cuuuggaaggcuaaggu

SEQ ID NO: 771497 - RNA, 17 nt, Artificial Sequence
  Synthetic
acuugggaggcuaaggu

SEQ ID NO: 771498 - RNA, 17 nt, Artificial Sequence
  Synthetic
ucacaggaauguaaggu

SEQ ID NO: 771499 - RNA, 17 nt, Artificial Sequence
  Synthetic
ucuaguagcuguaaggu

SEQ ID NO: 771500 - RNA, 17 nt, Artificial Sequence
  Synthetic
uucaguggguguaaggu

SEQ ID NO: 771501 - RNA, 17 nt, Artificial Sequence
  Synthetic
uaaaguguguguaaggu

SEQ ID NO: 771502 - RNA, 17 nt, Artificial Sequence
  Synthetic
uggcucgggauuaaggu

SEQ ID NO: 771503 - RNA, 17 nt, Artificial Sequence
  Synthetic
ucuaaauauauuaaggu

SEQ ID NO: 771504 - RNA, 17 nt, Artificial Sequence
  Synthetic
aauggcucaguuaaggu

SEQ ID NO: 771505 - RNA, 17 nt, Artificial Sequence
  Synthetic
ccauuugacguuaaggu

SEQ ID NO: 771506 - RNA, 17 nt, Artificial Sequence
  Synthetic
caacccacuuuuaaggu

SEQ ID NO: 771507 - RNA, 17 nt, Artificial Sequence
  Synthetic
cacaugcaaaaacaggu

SEQ ID NO: 771508 - RNA, 17 nt, Artificial Sequence
  Synthetic
auugcauauaaacaggu

SEQ ID NO: 771509 - RNA, 17 nt, Artificial Sequence
  Synthetic
aguauucaggaacaggu

SEQ ID NO: 771510 - RNA, 17 nt, Artificial Sequence
  Synthetic
cggguagcugaacaggu

SEQ ID NO: 771511 - RNA, 17 nt, Artificial Sequence
  Synthetic
agguaauaaacacaggu

SEQ ID NO: 771512 - RNA, 17 nt, Artificial Sequence
  Synthetic
aaaauacucccacaggu

SEQ ID NO: 771513 - RNA, 17 nt, Artificial Sequence
  Synthetic
ugcugauaagcacaggu

SEQ ID NO: 771514 - RNA, 17 nt, Artificial Sequence
  Synthetic
ugacugaaugcacaggu

SEQ ID NO: 771515 - RNA, 17 nt, Artificial Sequence
  Synthetic
uacucucacucacaggu

SEQ ID NO: 771516 - RNA, 17 nt, Artificial Sequence
  Synthetic
uauucucacucacaggu

SEQ ID NO: 771517 - RNA, 17 nt, Artificial Sequence
  Synthetic
uguucucacucacaggu

SEQ ID NO: 771518 - RNA, 17 nt, Artificial Sequence
  Synthetic
uaaaagaaaagacaggu

SEQ ID NO: 771519 - RNA, 17 nt, Artificial Sequence
  Synthetic
uagauagauagacaggu

SEQ ID NO: 771520 - RNA, 17 nt, Artificial Sequence
  Synthetic
cuuccaguuggacaggu

SEQ ID NO: 771521 - RNA, 17 nt, Artificial Sequence
  Synthetic
aauucaagucuacaggu

SEQ ID NO: 771522 - RNA, 17 nt, Artificial Sequence
  Synthetic
uuuaauaugguacaggu

SEQ ID NO: 771523 - RNA, 17 nt, Artificial Sequence
  Synthetic
aaguagguguuacaggu

SEQ ID NO: 771524 - RNA, 17 nt, Artificial Sequence
  Synthetic
cagaucaauuuacaggu

SEQ ID NO: 771525 - RNA, 17 nt, Artificial Sequence
  Synthetic
acaggguuucaccaggu

SEQ ID NO: 771526 - RNA, 17 nt, Artificial Sequence
  Synthetic
aacaacccagaccaggu

SEQ ID NO: 771527 - RNA, 17 nt, Artificial Sequence
  Synthetic
uacucugucacccaggu

SEQ ID NO: 771528 - RNA, 17 nt, Artificial Sequence
  Synthetic
cgcuccaucgcccaggu

SEQ ID NO: 771529 - RNA, 17 nt, Artificial Sequence
  Synthetic
cgcucugucgcccaggu

SEQ ID NO: 771530 - RNA, 17 nt, Artificial Sequence
  Synthetic
uguuccauugcccaggu

SEQ ID NO: 771531 - RNA, 17 nt, Artificial Sequence
  Synthetic
uucucaaaucuccaggu

SEQ ID NO: 771532 - RNA, 17 nt, Artificial Sequence
  Synthetic
uuaugaaauuuccaggu

SEQ ID NO: 771533 - RNA, 17 nt, Artificial Sequence
  Synthetic
aaaguuugcaagcaggu

SEQ ID NO: 771534 - RNA, 17 nt, Artificial Sequence
  Synthetic
ccagagaucaagcaggu

SEQ ID NO: 771535 - RNA, 17 nt, Artificial Sequence
  Synthetic
ucagaauuucugcaggu

SEQ ID NO: 771536 - RNA, 17 nt, Artificial Sequence
  Synthetic
uucuuugucaaucaggu

SEQ ID NO: 771537 - RNA, 17 nt, Artificial Sequence
  Synthetic
aaaacuacucaucaggu

SEQ ID NO: 771538 - RNA, 17 nt, Artificial Sequence
  Synthetic
cuuguagaaacucaggu

SEQ ID NO: 771539 - RNA, 17 nt, Artificial Sequence
  Synthetic
auuaaaaagacucaggu

SEQ ID NO: 771540 - RNA, 17 nt, Artificial Sequence
  Synthetic
uacaacaaagcucaggu

SEQ ID NO: 771541 - RNA, 17 nt, Artificial Sequence
  Synthetic
caucucugggcucaggu

SEQ ID NO: 771542 - RNA, 17 nt, Artificial Sequence
  Synthetic
uaaacuugggcucaggu

SEQ ID NO: 771543 - RNA, 17 nt, Artificial Sequence
  Synthetic
uauguuuaaagucaggu

SEQ ID NO: 771544 - RNA, 17 nt, Artificial Sequence
  Synthetic
aaagcauucauucaggu

SEQ ID NO: 771545 - RNA, 17 nt, Artificial Sequence
  Synthetic
ucccuuaagcuucaggu

SEQ ID NO: 771546 - RNA, 17 nt, Artificial Sequence
  Synthetic
agacagaaaaaagaggu

SEQ ID NO: 771547 - RNA, 17 nt, Artificial Sequence
  Synthetic
uucacauucaaagaggu

SEQ ID NO: 771548 - RNA, 17 nt, Artificial Sequence
  Synthetic
acacugaugcaagaggu

SEQ ID NO: 771549 - RNA, 17 nt, Artificial Sequence
  Synthetic
augcugaugcaagaggu

SEQ ID NO: 771550 - RNA, 17 nt, Artificial Sequence
  Synthetic
ccauuaagagaagaggu

SEQ ID NO: 771551 - RNA, 17 nt, Artificial Sequence
  Synthetic
ugcuuucgagaagaggu

SEQ ID NO: 771552 - RNA, 17 nt, Artificial Sequence
  Synthetic
ugucagcucgaagaggu

SEQ ID NO: 771553 - RNA, 17 nt, Artificial Sequence
  Synthetic
uucuucugugaagaggu

SEQ ID NO: 771554 - RNA, 17 nt, Artificial Sequence
  Synthetic
ugcuaguacuaagaggu

SEQ ID NO: 771555 - RNA, 17 nt, Artificial Sequence
  Synthetic
uauaggagguaagaggu

SEQ ID NO: 771556 - RNA, 17 nt, Artificial Sequence
  Synthetic
aacaaaggguaagaggu

SEQ ID NO: 771557 - RNA, 17 nt, Artificial Sequence
  Synthetic
aaaaguaauacagaggu

SEQ ID NO: 771558 - RNA, 17 nt, Artificial Sequence
  Synthetic
ccuaaagauacagaggu

SEQ ID NO: 771559 - RNA, 17 nt, Artificial Sequence
  Synthetic
aucaucaguacagaggu

SEQ ID NO: 771560 - RNA, 17 nt, Artificial Sequence
  Synthetic
aggagaggaagagaggu

SEQ ID NO: 771561 - RNA, 17 nt, Artificial Sequence
  Synthetic
uggucucuaagagaggu

SEQ ID NO: 771562 - RNA, 17 nt, Artificial Sequence
  Synthetic
acaaauaacagagaggu

SEQ ID NO: 771563 - RNA, 17 nt, Artificial Sequence
  Synthetic
ucuauuaucagagaggu

SEQ ID NO: 771564 - RNA, 17 nt, Artificial Sequence
  Synthetic
cauuuacagagagaggu

SEQ ID NO: 771565 - RNA, 17 nt, Artificial Sequence
  Synthetic
aguagguggagagaggu

SEQ ID NO: 771566 - RNA, 17 nt, Artificial Sequence
  Synthetic
auuugugucugagaggu

SEQ ID NO: 771567 - RNA, 17 nt, Artificial Sequence
  Synthetic
auagauauaauagaggu

SEQ ID NO: 771568 - RNA, 17 nt, Artificial Sequence
  Synthetic
cuauggcuuaacgaggu

SEQ ID NO: 771569 - RNA, 17 nt, Artificial Sequence
  Synthetic
cgggcagaucacgaggu

SEQ ID NO: 771570 - RNA, 17 nt, Artificial Sequence
  Synthetic
aauggauuucacgaggu

SEQ ID NO: 771571 - RNA, 17 nt, Artificial Sequence
  Synthetic
auuugagaggccgaggu

SEQ ID NO: 771572 - RNA, 17 nt, Artificial Sequence
  Synthetic
auuugggaggccgaggu

SEQ ID NO: 771573 - RNA, 17 nt, Artificial Sequence
  Synthetic
cuuugggaggccgaggu

SEQ ID NO: 771574 - RNA, 17 nt, Artificial Sequence
  Synthetic
cuuugugaggccgaggu

SEQ ID NO: 771575 - RNA, 17 nt, Artificial Sequence
  Synthetic
cuuuggggggccgaggu

SEQ ID NO: 771576 - RNA, 17 nt, Artificial Sequence
  Synthetic
ugcuacaccaaggaggu

SEQ ID NO: 771577 - RNA, 17 nt, Artificial Sequence
  Synthetic
cugcauucccaggaggu

SEQ ID NO: 771578 - RNA, 17 nt, Artificial Sequence
  Synthetic
agagggaaagaggaggu

SEQ ID NO: 771579 - RNA, 17 nt, Artificial Sequence
  Synthetic
ccaaauuccucggaggu

SEQ ID NO: 771580 - RNA, 17 nt, Artificial Sequence
  Synthetic
uuuuauuuaggggaggu

SEQ ID NO: 771581 - RNA, 17 nt, Artificial Sequence
  Synthetic
aagggucguggggaggu

SEQ ID NO: 771582 - RNA, 17 nt, Artificial Sequence
  Synthetic
uuagauggacuggaggu

SEQ ID NO: 771583 - RNA, 17 nt, Artificial Sequence
  Synthetic
aagacagagcuggaggu

SEQ ID NO: 771584 - RNA, 17 nt, Artificial Sequence
  Synthetic
aagacuucucuggaggu

SEQ ID NO: 771585 - RNA, 17 nt, Artificial Sequence
  Synthetic
ucaguauuucuggaggu

SEQ ID NO: 771586 - RNA, 17 nt, Artificial Sequence
  Synthetic
ccccugcaaguggaggu

SEQ ID NO: 771587 - RNA, 17 nt, Artificial Sequence
  Synthetic
uaucagaggguggaggu

SEQ ID NO: 771588 - RNA, 17 nt, Artificial Sequence
  Synthetic
aaggguaguguggaggu

SEQ ID NO: 771589 - RNA, 17 nt, Artificial Sequence
  Synthetic
uccucaauauuggaggu

SEQ ID NO: 771590 - RNA, 17 nt, Artificial Sequence
  Synthetic
uggugguuauuggaggu

SEQ ID NO: 771591 - RNA, 17 nt, Artificial Sequence
  Synthetic
uccccaauguuggaggu

SEQ ID NO: 771592 - RNA, 17 nt, Artificial Sequence
  Synthetic
uucccaguguuggaggu

SEQ ID NO: 771593 - RNA, 17 nt, Artificial Sequence
  Synthetic
aauggauauuuggaggu

SEQ ID NO: 771594 - RNA, 17 nt, Artificial Sequence
  Synthetic
aaaaagcugaaugaggu

SEQ ID NO: 771595 - RNA, 17 nt, Artificial Sequence
  Synthetic
aagagauguaaugaggu

SEQ ID NO: 771596 - RNA, 17 nt, Artificial Sequence
  Synthetic
auauuuuugcaugaggu

SEQ ID NO: 771597 - RNA, 17 nt, Artificial Sequence
  Synthetic
uugggugucgaugaggu

SEQ ID NO: 771598 - RNA, 17 nt, Artificial Sequence
  Synthetic
gguggaucaccugaggu

SEQ ID NO: 771599 - RNA, 17 nt, Artificial Sequence
  Synthetic
acccaggaagcugaggu

SEQ ID NO: 771600 - RNA, 17 nt, Artificial Sequence
  Synthetic
ucucagaaggcugaggu

SEQ ID NO: 771601 - RNA, 17 nt, Artificial Sequence
  Synthetic
acucaggaggcugaggu

SEQ ID NO: 771602 - RNA, 17 nt, Artificial Sequence
  Synthetic
acuuaggaggcugaggu

SEQ ID NO: 771603 - RNA, 17 nt, Artificial Sequence
  Synthetic
acccgggaggcugaggu

SEQ ID NO: 771604 - RNA, 17 nt, Artificial Sequence
  Synthetic
acucgggaggcugaggu

SEQ ID NO: 771605 - RNA, 17 nt, Artificial Sequence
  Synthetic
acuugggaggcugaggu

SEQ ID NO: 771606 - RNA, 17 nt, Artificial Sequence
  Synthetic
cuuugggaggcugaggu

SEQ ID NO: 771607 - RNA, 17 nt, Artificial Sequence
  Synthetic
aaugauggcucugaggu

SEQ ID NO: 771608 - RNA, 17 nt, Artificial Sequence
  Synthetic
acaugggagucugaggu

SEQ ID NO: 771609 - RNA, 17 nt, Artificial Sequence
  Synthetic
cuuugggagucugaggu

SEQ ID NO: 771610 - RNA, 17 nt, Artificial Sequence
  Synthetic
uaauauggaagugaggu

SEQ ID NO: 771611 - RNA, 17 nt, Artificial Sequence
  Synthetic
caacauccuagugaggu

SEQ ID NO: 771612 - RNA, 17 nt, Artificial Sequence
  Synthetic
aaggagaaaggugaggu

SEQ ID NO: 771613 - RNA, 17 nt, Artificial Sequence
  Synthetic
aaaguagaaggugaggu

SEQ ID NO: 771614 - RNA, 17 nt, Artificial Sequence
  Synthetic
uccagcaggggugaggu

SEQ ID NO: 771615 - RNA, 17 nt, Artificial Sequence
  Synthetic
uguucauaaugugaggu

SEQ ID NO: 771616 - RNA, 17 nt, Artificial Sequence
  Synthetic
uuauuggccugugaggu

SEQ ID NO: 771617 - RNA, 17 nt, Artificial Sequence
  Synthetic
caagaauccugugaggu

SEQ ID NO: 771618 - RNA, 17 nt, Artificial Sequence
  Synthetic
auauuacucugugaggu

SEQ ID NO: 771619 - RNA, 17 nt, Artificial Sequence
  Synthetic
uguguauggugugaggu

SEQ ID NO: 771620 - RNA, 17 nt, Artificial Sequence
  Synthetic
cagacaccauuugaggu

SEQ ID NO: 771621 - RNA, 17 nt, Artificial Sequence
  Synthetic
auguacaauaaauaggu

SEQ ID NO: 771622 - RNA, 17 nt, Artificial Sequence
  Synthetic
uuuuuuaacuaauaggu

SEQ ID NO: 771623 - RNA, 17 nt, Artificial Sequence
  Synthetic
ugaacauagccauaggu

SEQ ID NO: 771624 - RNA, 17 nt, Artificial Sequence
  Synthetic
uguccucacucauaggu

SEQ ID NO: 771625 - RNA, 17 nt, Artificial Sequence
  Synthetic
uauucucacucauaggu

SEQ ID NO: 771626 - RNA, 17 nt, Artificial Sequence
  Synthetic
uguucucacucauaggu

SEQ ID NO: 771627 - RNA, 17 nt, Artificial Sequence
  Synthetic
uguucucgcucauaggu

SEQ ID NO: 771628 - RNA, 17 nt, Artificial Sequence
  Synthetic
uauucucauucauaggu

SEQ ID NO: 771629 - RNA, 17 nt, Artificial Sequence
  Synthetic
aguaaauauugauaggu

SEQ ID NO: 771630 - RNA, 17 nt, Artificial Sequence
  Synthetic
cugagucaaauauaggu

SEQ ID NO: 771631 - RNA, 17 nt, Artificial Sequence
  Synthetic
uaaguagguauauaggu

SEQ ID NO: 771632 - RNA, 17 nt, Artificial Sequence
  Synthetic
aacuaucaacuauaggu

SEQ ID NO: 771633 - RNA, 17 nt, Artificial Sequence
  Synthetic
auccagcucaacuaggu

SEQ ID NO: 771634 - RNA, 17 nt, Artificial Sequence
  Synthetic
uuccuguuuaacuaggu

SEQ ID NO: 771635 - RNA, 17 nt, Artificial Sequence
  Synthetic
ucaaauacaaccuaggu

SEQ ID NO: 771636 - RNA, 17 nt, Artificial Sequence
  Synthetic
uuuaagaucuccuaggu

SEQ ID NO: 771637 - RNA, 17 nt, Artificial Sequence
  Synthetic
ugaaguuugugcuaggu

SEQ ID NO: 771638 - RNA, 17 nt, Artificial Sequence
  Synthetic
acauucucuaaguaggu

SEQ ID NO: 771639 - RNA, 17 nt, Artificial Sequence
  Synthetic
aaagugaauauguaggu

SEQ ID NO: 771640 - RNA, 17 nt, Artificial Sequence
  Synthetic
uucuauaauauguaggu

SEQ ID NO: 771641 - RNA, 17 nt, Artificial Sequence
  Synthetic
uaaauaagacuguaggu

SEQ ID NO: 771642 - RNA, 17 nt, Artificial Sequence
  Synthetic
cugggaagaguguaggu

SEQ ID NO: 771643 - RNA, 17 nt, Artificial Sequence
  Synthetic
ccuguggaauuguaggu

SEQ ID NO: 771644 - RNA, 17 nt, Artificial Sequence
  Synthetic
aaaaaaaaaaauuaggu

SEQ ID NO: 771645 - RNA, 17 nt, Artificial Sequence
  Synthetic
aaauacaaacauuaggu

SEQ ID NO: 771646 - RNA, 17 nt, Artificial Sequence
  Synthetic
agucugcaggauuaggu

SEQ ID NO: 771647 - RNA, 17 nt, Artificial Sequence
  Synthetic
uggaaauaugauuaggu

SEQ ID NO: 771648 - RNA, 17 nt, Artificial Sequence
  Synthetic
acugagauauauuaggu

SEQ ID NO: 771649 - RNA, 17 nt, Artificial Sequence
  Synthetic
aaacauuccaguuaggu

SEQ ID NO: 771650 - RNA, 17 nt, Artificial Sequence
  Synthetic
cauugguguaguuaggu

SEQ ID NO: 771651 - RNA, 17 nt, Artificial Sequence
  Synthetic
ccuuacagcuguuaggu

SEQ ID NO: 771652 - RNA, 17 nt, Artificial Sequence
  Synthetic
uuugaaugccuuuaggu

SEQ ID NO: 771653 - RNA, 17 nt, Artificial Sequence
  Synthetic
uaaagcaaaguuuaggu

SEQ ID NO: 771654 - RNA, 17 nt, Artificial Sequence
  Synthetic
ucaaaaugaguuuaggu

SEQ ID NO: 771655 - RNA, 17 nt, Artificial Sequence
  Synthetic
uaggguauauuuuaggu

SEQ ID NO: 771656 - RNA, 17 nt, Artificial Sequence
  Synthetic
acuauagcuuuuuaggu

SEQ ID NO: 771657 - RNA, 17 nt, Artificial Sequence
  Synthetic
cuguuuuacugaacggu

SEQ ID NO: 771658 - RNA, 17 nt, Artificial Sequence
  Synthetic
aguuugccuggcacggu

SEQ ID NO: 771659 - RNA, 17 nt, Artificial Sequence
  Synthetic
aaaaggagggagacggu

SEQ ID NO: 771660 - RNA, 17 nt, Artificial Sequence
  Synthetic
ucagauuuaaauacggu

SEQ ID NO: 771661 - RNA, 17 nt, Artificial Sequence
  Synthetic
acaaucagucacccggu

SEQ ID NO: 771662 - RNA, 17 nt, Artificial Sequence
  Synthetic
aguugguucccgccggu

SEQ ID NO: 771663 - RNA, 17 nt, Artificial Sequence
  Synthetic
cuuccauuuugagcggu

SEQ ID NO: 771664 - RNA, 17 nt, Artificial Sequence
  Synthetic
ucaccagguguggcggu

SEQ ID NO: 771665 - RNA, 17 nt, Artificial Sequence
  Synthetic
aaucccagcuacucggu

SEQ ID NO: 771666 - RNA, 17 nt, Artificial Sequence
  Synthetic
aaugccagcuacucggu

SEQ ID NO: 771667 - RNA, 17 nt, Artificial Sequence
  Synthetic
cuaaguuaaacaagggu

SEQ ID NO: 771668 - RNA, 17 nt, Artificial Sequence
  Synthetic
cacaaauaaagaagggu

SEQ ID NO: 771669 - RNA, 17 nt, Artificial Sequence
  Synthetic
uaaugagauagaagggu

SEQ ID NO: 771670 - RNA, 17 nt, Artificial Sequence
  Synthetic
uuaaauaagggaagggu

SEQ ID NO: 771671 - RNA, 17 nt, Artificial Sequence
  Synthetic
cuguacuagggaagggu

SEQ ID NO: 771672 - RNA, 17 nt, Artificial Sequence
  Synthetic
ucacucaggggaagggu

SEQ ID NO: 771673 - RNA, 17 nt, Artificial Sequence
  Synthetic
cugaugcugggaagggu

SEQ ID NO: 771674 - RNA, 17 nt, Artificial Sequence
  Synthetic
aaaacacuuggaagggu

SEQ ID NO: 771675 - RNA, 17 nt, Artificial Sequence
  Synthetic
accuuuggaugaagggu

SEQ ID NO: 771676 - RNA, 17 nt, Artificial Sequence
  Synthetic
auuugauguuuaagggu

SEQ ID NO: 771677 - RNA, 17 nt, Artificial Sequence
  Synthetic
auuaugaaaaacagggu

SEQ ID NO: 771678 - RNA, 17 nt, Artificial Sequence
  Synthetic
acacuuggacacagggu

SEQ ID NO: 771679 - RNA, 17 nt, Artificial Sequence
  Synthetic
uauuagcaagacagggu

SEQ ID NO: 771680 - RNA, 17 nt, Artificial Sequence
  Synthetic
uaaggugaugacagggu

SEQ ID NO: 771681 - RNA, 17 nt, Artificial Sequence
  Synthetic
aagauugucuacagggu

SEQ ID NO: 771682 - RNA, 17 nt, Artificial Sequence
  Synthetic
ucagauaugagcagggu

SEQ ID NO: 771683 - RNA, 17 nt, Artificial Sequence
  Synthetic
aggggacauagcagggu

SEQ ID NO: 771684 - RNA, 17 nt, Artificial Sequence
  Synthetic
uuguaaguuggcagggu

SEQ ID NO: 771685 - RNA, 17 nt, Artificial Sequence
  Synthetic
aagagucaaaucagggu

SEQ ID NO: 771686 - RNA, 17 nt, Artificial Sequence
  Synthetic
ucuguuggaaucagggu

SEQ ID NO: 771687 - RNA, 17 nt, Artificial Sequence
  Synthetic
uauauuugacucagggu

SEQ ID NO: 771688 - RNA, 17 nt, Artificial Sequence
  Synthetic
cccucuagucucagggu

SEQ ID NO: 771689 - RNA, 17 nt, Artificial Sequence
  Synthetic
augagcccccagagggu

SEQ ID NO: 771690 - RNA, 17 nt, Artificial Sequence
  Synthetic
uauaaacuccagagggu

SEQ ID NO: 771691 - RNA, 17 nt, Artificial Sequence
  Synthetic
cagaagggcgagagggu

SEQ ID NO: 771692 - RNA, 17 nt, Artificial Sequence
  Synthetic
caaauaaaggagagggu

SEQ ID NO: 771693 - RNA, 17 nt, Artificial Sequence
  Synthetic
caaggugucaggagggu

SEQ ID NO: 771694 - RNA, 17 nt, Artificial Sequence
  Synthetic
caggccagcgggagggu

SEQ ID NO: 771695 - RNA, 17 nt, Artificial Sequence
  Synthetic
acuggaguggggagggu

SEQ ID NO: 771696 - RNA, 17 nt, Artificial Sequence
  Synthetic
acucuaggguggagggu

SEQ ID NO: 771697 - RNA, 17 nt, Artificial Sequence
  Synthetic
augguaggguggagggu

SEQ ID NO: 771698 - RNA, 17 nt, Artificial Sequence
  Synthetic
auuagaguguggagggu

SEQ ID NO: 771699 - RNA, 17 nt, Artificial Sequence
  Synthetic
uaggcauucaugagggu

SEQ ID NO: 771700 - RNA, 17 nt, Artificial Sequence
  Synthetic
auaagcuuuaugagggu

SEQ ID NO: 771701 - RNA, 17 nt, Artificial Sequence
  Synthetic
auggagaaacugagggu

SEQ ID NO: 771702 - RNA, 17 nt, Artificial Sequence
  Synthetic
aguuugaagcugagggu

SEQ ID NO: 771703 - RNA, 17 nt, Artificial Sequence
  Synthetic
auuaggaugcugagggu

SEQ ID NO: 771704 - RNA, 17 nt, Artificial Sequence
  Synthetic
caacuucucgugagggu

SEQ ID NO: 771705 - RNA, 17 nt, Artificial Sequence
  Synthetic
uaccucugggugagggu

SEQ ID NO: 771706 - RNA, 17 nt, Artificial Sequence
  Synthetic
cuuuuuggcuugagggu

SEQ ID NO: 771707 - RNA, 17 nt, Artificial Sequence
  Synthetic
cuucauuucuugagggu

SEQ ID NO: 771708 - RNA, 17 nt, Artificial Sequence
  Synthetic
cuugggaaguugagggu

SEQ ID NO: 771709 - RNA, 17 nt, Artificial Sequence
  Synthetic
aauaccgcaaauagggu

SEQ ID NO: 771710 - RNA, 17 nt, Artificial Sequence
  Synthetic
ucaguuacagauagggu

SEQ ID NO: 771711 - RNA, 17 nt, Artificial Sequence
  Synthetic
auuuuuuuagauagggu

SEQ ID NO: 771712 - RNA, 17 nt, Artificial Sequence
  Synthetic
uaacaaaugccuagggu

SEQ ID NO: 771713 - RNA, 17 nt, Artificial Sequence
  Synthetic
cacuagauugcuagggu

SEQ ID NO: 771714 - RNA, 17 nt, Artificial Sequence
  Synthetic
caacaacccucuagggu

SEQ ID NO: 771715 - RNA, 17 nt, Artificial Sequence
  Synthetic
agggguggggguagggu

SEQ ID NO: 771716 - RNA, 17 nt, Artificial Sequence
  Synthetic
ucuaauuucuguagggu

SEQ ID NO: 771717 - RNA, 17 nt, Artificial Sequence
  Synthetic
ugggugggaguuagggu

SEQ ID NO: 771718 - RNA, 17 nt, Artificial Sequence
  Synthetic
caccaugaauuuagggu

SEQ ID NO: 771719 - RNA, 17 nt, Artificial Sequence
  Synthetic
uuaccuaacuuuagggu

SEQ ID NO: 771720 - RNA, 17 nt, Artificial Sequence
  Synthetic
uucaaacauuuuagggu

SEQ ID NO: 771721 - RNA, 17 nt, Artificial Sequence
  Synthetic
agaauuccaaaacgggu

SEQ ID NO: 771722 - RNA, 17 nt, Artificial Sequence
  Synthetic
uuuuccguggaccgggu

SEQ ID NO: 771723 - RNA, 17 nt, Artificial Sequence
  Synthetic
cgcucuguugcccgggu

SEQ ID NO: 771724 - RNA, 17 nt, Artificial Sequence
  Synthetic
agcaaaggaaagcgggu

SEQ ID NO: 771725 - RNA, 17 nt, Artificial Sequence
  Synthetic
aacaggaguuggcgggu

SEQ ID NO: 771726 - RNA, 17 nt, Artificial Sequence
  Synthetic
uucauugauuuucgggu

SEQ ID NO: 771727 - RNA, 17 nt, Artificial Sequence
  Synthetic
augugagcauaaggggu

SEQ ID NO: 771728 - RNA, 17 nt, Artificial Sequence
  Synthetic
ugacaguauuaaggggu

SEQ ID NO: 771729 - RNA, 17 nt, Artificial Sequence
  Synthetic
cugaaugacacaggggu

SEQ ID NO: 771730 - RNA, 17 nt, Artificial Sequence
  Synthetic
aagacaguagcaggggu

SEQ ID NO: 771731 - RNA, 17 nt, Artificial Sequence
  Synthetic
caccagagcucaggggu

SEQ ID NO: 771732 - RNA, 17 nt, Artificial Sequence
  Synthetic
caccaucagucaggggu

SEQ ID NO: 771733 - RNA, 17 nt, Artificial Sequence
  Synthetic
uuuuagguaagaggggu

SEQ ID NO: 771734 - RNA, 17 nt, Artificial Sequence
  Synthetic
agggaccagggaggggu

SEQ ID NO: 771735 - RNA, 17 nt, Artificial Sequence
  Synthetic
aaauccaagugaggggu

SEQ ID NO: 771736 - RNA, 17 nt, Artificial Sequence
  Synthetic
cagaaaauaauaggggu

SEQ ID NO: 771737 - RNA, 17 nt, Artificial Sequence
  Synthetic
ccccuaagacuaggggu

SEQ ID NO: 771738 - RNA, 17 nt, Artificial Sequence
  Synthetic
ccccuagucuuaggggu

SEQ ID NO: 771739 - RNA, 17 nt, Artificial Sequence
  Synthetic
aggaacuucuuaggggu

SEQ ID NO: 771740 - RNA, 17 nt, Artificial Sequence
  Synthetic
aagcuagguuuaggggu

SEQ ID NO: 771741 - RNA, 17 nt, Artificial Sequence
  Synthetic
aaagcaaaaaacggggu

SEQ ID NO: 771742 - RNA, 17 nt, Artificial Sequence
  Synthetic
cugggaggcuccggggu

SEQ ID NO: 771743 - RNA, 17 nt, Artificial Sequence
  Synthetic
agcaguuugagcggggu

SEQ ID NO: 771744 - RNA, 17 nt, Artificial Sequence
  Synthetic
uuuuaaagauggggggu

SEQ ID NO: 771745 - RNA, 17 nt, Artificial Sequence
  Synthetic
caaauaugcuggggggu

SEQ ID NO: 771746 - RNA, 17 nt, Artificial Sequence
  Synthetic
uuucuuuuuuggggggu

SEQ ID NO: 771747 - RNA, 17 nt, Artificial Sequence
  Synthetic
aacugaaucaugggggu

SEQ ID NO: 771748 - RNA, 17 nt, Artificial Sequence
  Synthetic
uauuagauccugggggu

SEQ ID NO: 771749 - RNA, 17 nt, Artificial Sequence
  Synthetic
ugaugaggggugggggu

SEQ ID NO: 771750 - RNA, 17 nt, Artificial Sequence
  Synthetic
uagccaggugugggggu

SEQ ID NO: 771751 - RNA, 17 nt, Artificial Sequence
  Synthetic
aaaaaaaaauugggggu

SEQ ID NO: 771752 - RNA, 17 nt, Artificial Sequence
  Synthetic
cuuucaagauugggggu

SEQ ID NO: 771753 - RNA, 17 nt, Artificial Sequence
  Synthetic
ugggcuccguugggggu

SEQ ID NO: 771754 - RNA, 17 nt, Artificial Sequence
  Synthetic
uggugccuguugggggu

SEQ ID NO: 771755 - RNA, 17 nt, Artificial Sequence
  Synthetic
auaucagagaauggggu

SEQ ID NO: 771756 - RNA, 17 nt, Artificial Sequence
  Synthetic
caaaaaguacauggggu

SEQ ID NO: 771757 - RNA, 17 nt, Artificial Sequence
  Synthetic
uaauugaaucauggggu

SEQ ID NO: 771758 - RNA, 17 nt, Artificial Sequence
  Synthetic
uuuauugaagauggggu

SEQ ID NO: 771759 - RNA, 17 nt, Artificial Sequence
  Synthetic
aauuucacagauggggu

SEQ ID NO: 771760 - RNA, 17 nt, Artificial Sequence
  Synthetic
uaggcacaggauggggu

SEQ ID NO: 771761 - RNA, 17 nt, Artificial Sequence
  Synthetic
auuuaguuggauggggu

SEQ ID NO: 771762 - RNA, 17 nt, Artificial Sequence
  Synthetic
cauuuauucacuggggu

SEQ ID NO: 771763 - RNA, 17 nt, Artificial Sequence
  Synthetic
cuauguuucacuggggu

SEQ ID NO: 771764 - RNA, 17 nt, Artificial Sequence
  Synthetic
uuggagaugacuggggu

SEQ ID NO: 771765 - RNA, 17 nt, Artificial Sequence
  Synthetic
uuuccaggggcuggggu

SEQ ID NO: 771766 - RNA, 17 nt, Artificial Sequence
  Synthetic
cccccauuggcuggggu

SEQ ID NO: 771767 - RNA, 17 nt, Artificial Sequence
  Synthetic
aucagcaucucuggggu

SEQ ID NO: 771768 - RNA, 17 nt, Artificial Sequence
  Synthetic
accacugacaguggggu

SEQ ID NO: 771769 - RNA, 17 nt, Artificial Sequence
  Synthetic
uagagaaucaguggggu

SEQ ID NO: 771770 - RNA, 17 nt, Artificial Sequence
  Synthetic
aucucugggaguggggu

SEQ ID NO: 771771 - RNA, 17 nt, Artificial Sequence
  Synthetic
agggccugucguggggu

SEQ ID NO: 771772 - RNA, 17 nt, Artificial Sequence
  Synthetic
ucacucauagguggggu

SEQ ID NO: 771773 - RNA, 17 nt, Artificial Sequence
  Synthetic
acaggaugggguggggu

SEQ ID NO: 771774 - RNA, 17 nt, Artificial Sequence
  Synthetic
ggggacugugguggggu

SEQ ID NO: 771775 - RNA, 17 nt, Artificial Sequence
  Synthetic
cuggucccauguggggu

SEQ ID NO: 771776 - RNA, 17 nt, Artificial Sequence
  Synthetic
cucaggagauguggggu

SEQ ID NO: 771777 - RNA, 17 nt, Artificial Sequence
  Synthetic
ugaaagcaguguggggu

SEQ ID NO: 771778 - RNA, 17 nt, Artificial Sequence
  Synthetic
auguauguguguggggu

SEQ ID NO: 771779 - RNA, 17 nt, Artificial Sequence
  Synthetic
agaugagauuguggggu

SEQ ID NO: 771780 - RNA, 17 nt, Artificial Sequence
  Synthetic
agggccuguuguggggu

SEQ ID NO: 771781 - RNA, 17 nt, Artificial Sequence
  Synthetic
aaagaaagaauuggggu

SEQ ID NO: 771782 - RNA, 17 nt, Artificial Sequence
  Synthetic
ccacagcaccuuggggu

SEQ ID NO: 771783 - RNA, 17 nt, Artificial Sequence
  Synthetic
aauucuucccuuggggu

SEQ ID NO: 771784 - RNA, 17 nt, Artificial Sequence
  Synthetic
uuuaguaggcuuggggu

SEQ ID NO: 771785 - RNA, 17 nt, Artificial Sequence
  Synthetic
aagcacugaguuggggu

SEQ ID NO: 771786 - RNA, 17 nt, Artificial Sequence
  Synthetic
acauaggcuguuggggu

SEQ ID NO: 771787 - RNA, 17 nt, Artificial Sequence
  Synthetic
ccauuuggauuuggggu

SEQ ID NO: 771788 - RNA, 17 nt, Artificial Sequence
  Synthetic
uucuguugauuuggggu

SEQ ID NO: 771789 - RNA, 17 nt, Artificial Sequence
  Synthetic
auguugcauaaaugggu

SEQ ID NO: 771790 - RNA, 17 nt, Artificial Sequence
  Synthetic
ucagucagcuaaugggu

SEQ ID NO: 771791 - RNA, 17 nt, Artificial Sequence
  Synthetic
auggaacucuaaugggu

SEQ ID NO: 771792 - RNA, 17 nt, Artificial Sequence
  Synthetic
aauguagaguaaugggu

SEQ ID NO: 771793 - RNA, 17 nt, Artificial Sequence
  Synthetic
cauaaaacagcaugggu

SEQ ID NO: 771794 - RNA, 17 nt, Artificial Sequence
  Synthetic
auuccaugcucaugggu

SEQ ID NO: 771795 - RNA, 17 nt, Artificial Sequence
  Synthetic
auuccgugcucaugggu

SEQ ID NO: 771796 - RNA, 17 nt, Artificial Sequence
  Synthetic
auaacuaucucaugggu

SEQ ID NO: 771797 - RNA, 17 nt, Artificial Sequence
  Synthetic
acaauagauucaugggu

SEQ ID NO: 771798 - RNA, 17 nt, Artificial Sequence
  Synthetic
acaauucaaagaugggu

SEQ ID NO: 771799 - RNA, 17 nt, Artificial Sequence
  Synthetic
aacucccuaagaugggu

SEQ ID NO: 771800 - RNA, 17 nt, Artificial Sequence
  Synthetic
agaccuaagagaugggu

SEQ ID NO: 771801 - RNA, 17 nt, Artificial Sequence
  Synthetic
uagagcagaugaugggu

SEQ ID NO: 771802 - RNA, 17 nt, Artificial Sequence
  Synthetic
uuauguggaugaugggu

SEQ ID NO: 771803 - RNA, 17 nt, Artificial Sequence
  Synthetic
aaugaguucauaugggu

SEQ ID NO: 771804 - RNA, 17 nt, Artificial Sequence
  Synthetic
uaacuacuuauaugggu

SEQ ID NO: 771805 - RNA, 17 nt, Artificial Sequence
  Synthetic
cugugagccuuaugggu

SEQ ID NO: 771806 - RNA, 17 nt, Artificial Sequence
  Synthetic
aucaucuccuuaugggu

SEQ ID NO: 771807 - RNA, 17 nt, Artificial Sequence
  Synthetic
ugcuaagaguuaugggu

SEQ ID NO: 771808 - RNA, 17 nt, Artificial Sequence
  Synthetic
auuucuaauuuaugggu

SEQ ID NO: 771809 - RNA, 17 nt, Artificial Sequence
  Synthetic
agucucuuuuuaugggu

SEQ ID NO: 771810 - RNA, 17 nt, Artificial Sequence
  Synthetic
agauucguucacugggu

SEQ ID NO: 771811 - RNA, 17 nt, Artificial Sequence
  Synthetic
ugguucugauccugggu

SEQ ID NO: 771812 - RNA, 17 nt, Artificial Sequence
  Synthetic
ugagucaggaucugggu

SEQ ID NO: 771813 - RNA, 17 nt, Artificial Sequence
  Synthetic
aaacagggagucugggu

SEQ ID NO: 771814 - RNA, 17 nt, Artificial Sequence
  Synthetic
caggcuagggagugggu

SEQ ID NO: 771815 - RNA, 17 nt, Artificial Sequence
  Synthetic
uuuuccguugagugggu

SEQ ID NO: 771816 - RNA, 17 nt, Artificial Sequence
  Synthetic
auaacagagaggugggu

SEQ ID NO: 771817 - RNA, 17 nt, Artificial Sequence
  Synthetic
cuauuugagaggugggu

SEQ ID NO: 771818 - RNA, 17 nt, Artificial Sequence
  Synthetic
uuaacuaauaggugggu

SEQ ID NO: 771819 - RNA, 17 nt, Artificial Sequence
  Synthetic
augaagcaagggugggu

SEQ ID NO: 771820 - RNA, 17 nt, Artificial Sequence
  Synthetic
uugagaggugggugggu

SEQ ID NO: 771821 - RNA, 17 nt, Artificial Sequence
  Synthetic
agaacagucuggugggu

SEQ ID NO: 771822 - RNA, 17 nt, Artificial Sequence
  Synthetic
acugauugguggugggu

SEQ ID NO: 771823 - RNA, 17 nt, Artificial Sequence
  Synthetic
cccuccacaaugugggu

SEQ ID NO: 771824 - RNA, 17 nt, Artificial Sequence
  Synthetic
aacuugaacaugugggu

SEQ ID NO: 771825 - RNA, 17 nt, Artificial Sequence
  Synthetic
uucucccuugugugggu

SEQ ID NO: 771826 - RNA, 17 nt, Artificial Sequence
  Synthetic
ucuucuccauugugggu

SEQ ID NO: 771827 - RNA, 17 nt, Artificial Sequence
  Synthetic
agcagaaucaauugggu

SEQ ID NO: 771828 - RNA, 17 nt, Artificial Sequence
  Synthetic
aguucaagugauugggu

SEQ ID NO: 771829 - RNA, 17 nt, Artificial Sequence
  Synthetic
ucgauggacacuugggu

SEQ ID NO: 771830 - RNA, 17 nt, Artificial Sequence
  Synthetic
auauaacuaccuugggu

SEQ ID NO: 771831 - RNA, 17 nt, Artificial Sequence
  Synthetic
uucuucuccccuugggu

SEQ ID NO: 771832 - RNA, 17 nt, Artificial Sequence
  Synthetic
accaugcagucuugggu

SEQ ID NO: 771833 - RNA, 17 nt, Artificial Sequence
  Synthetic
uguauaugauguugggu

SEQ ID NO: 771834 - RNA, 17 nt, Artificial Sequence
  Synthetic
uuuuugcauuguugggu

SEQ ID NO: 771835 - RNA, 17 nt, Artificial Sequence
  Synthetic
auccuuuguuguugggu

SEQ ID NO: 771836 - RNA, 17 nt, Artificial Sequence
  Synthetic
uugucggacauuugggu

SEQ ID NO: 771837 - RNA, 17 nt, Artificial Sequence
  Synthetic
cugauggacauuugggu

SEQ ID NO: 771838 - RNA, 17 nt, Artificial Sequence
  Synthetic
uugauggacauuugggu

SEQ ID NO: 771839 - RNA, 17 nt, Artificial Sequence
  Synthetic
cuguuggacauuugggu

SEQ ID NO: 771840 - RNA, 17 nt, Artificial Sequence
  Synthetic
uuguuggacauuugggu

SEQ ID NO: 771841 - RNA, 17 nt, Artificial Sequence
  Synthetic
uugaugagcauuugggu

SEQ ID NO: 771842 - RNA, 17 nt, Artificial Sequence
  Synthetic
uugaugggcauuugggu

SEQ ID NO: 771843 - RNA, 17 nt, Artificial Sequence
  Synthetic
cuggugggcauuugggu

SEQ ID NO: 771844 - RNA, 17 nt, Artificial Sequence
  Synthetic
caguaacagauuugggu

SEQ ID NO: 771845 - RNA, 17 nt, Artificial Sequence
  Synthetic
caaaaugagauuugggu

SEQ ID NO: 771846 - RNA, 17 nt, Artificial Sequence
  Synthetic
cagaaugagauuugggu

SEQ ID NO: 771847 - RNA, 17 nt, Artificial Sequence
  Synthetic
caagaugagauuugggu

SEQ ID NO: 771848 - RNA, 17 nt, Artificial Sequence
  Synthetic
uaauaugagauuugggu

SEQ ID NO: 771849 - RNA, 17 nt, Artificial Sequence
  Synthetic
caaggugagauuugggu

SEQ ID NO: 771850 - RNA, 17 nt, Artificial Sequence
  Synthetic
caagacgggauuugggu

SEQ ID NO: 771851 - RNA, 17 nt, Artificial Sequence
  Synthetic
ucugcaauaguuugggu

SEQ ID NO: 771852 - RNA, 17 nt, Artificial Sequence
  Synthetic
cauccucuuaaaauggu

SEQ ID NO: 771853 - RNA, 17 nt, Artificial Sequence
  Synthetic
acauacucucaaauggu

SEQ ID NO: 771854 - RNA, 17 nt, Artificial Sequence
  Synthetic
auacaugaagaaauggu

SEQ ID NO: 771855 - RNA, 17 nt, Artificial Sequence
  Synthetic
auuucaauagaaauggu

SEQ ID NO: 771856 - RNA, 17 nt, Artificial Sequence
  Synthetic
aacuaaguagaaauggu

SEQ ID NO: 771857 - RNA, 17 nt, Artificial Sequence
  Synthetic
ucagacauggaaauggu

SEQ ID NO: 771858 - RNA, 17 nt, Artificial Sequence
  Synthetic
uuuacauauuaaauggu

SEQ ID NO: 771859 - RNA, 17 nt, Artificial Sequence
  Synthetic
ucuacuucuuaaauggu

SEQ ID NO: 771860 - RNA, 17 nt, Artificial Sequence
  Synthetic
uaucuugugucaauggu

SEQ ID NO: 771861 - RNA, 17 nt, Artificial Sequence
  Synthetic
aagaaaacgagaauggu

SEQ ID NO: 771862 - RNA, 17 nt, Artificial Sequence
  Synthetic
cuugauaaaauaauggu

SEQ ID NO: 771863 - RNA, 17 nt, Artificial Sequence
  Synthetic
cggaguguaauaauggu

SEQ ID NO: 771864 - RNA, 17 nt, Artificial Sequence
  Synthetic
aaagggagcauaauggu

SEQ ID NO: 771865 - RNA, 17 nt, Artificial Sequence
  Synthetic
ccuuaauugauaauggu

SEQ ID NO: 771866 - RNA, 17 nt, Artificial Sequence
  Synthetic
agaagucaauuaauggu

SEQ ID NO: 771867 - RNA, 17 nt, Artificial Sequence
  Synthetic
caauaucacuuaauggu

SEQ ID NO: 771868 - RNA, 17 nt, Artificial Sequence
  Synthetic
aaaaauccuuuaauggu

SEQ ID NO: 771869 - RNA, 17 nt, Artificial Sequence
  Synthetic
cauuuaucaaacauggu

SEQ ID NO: 771870 - RNA, 17 nt, Artificial Sequence
  Synthetic
cagggaaguaacauggu

SEQ ID NO: 771871 - RNA, 17 nt, Artificial Sequence
  Synthetic
ugagacucucacauggu

SEQ ID NO: 771872 - RNA, 17 nt, Artificial Sequence
  Synthetic
aguacaguauacauggu

SEQ ID NO: 771873 - RNA, 17 nt, Artificial Sequence
  Synthetic
cuuugugaguacauggu

SEQ ID NO: 771874 - RNA, 17 nt, Artificial Sequence
  Synthetic
agcagcaaaaccauggu

SEQ ID NO: 771875 - RNA, 17 nt, Artificial Sequence
  Synthetic
uugccuuccaccauggu

SEQ ID NO: 771876 - RNA, 17 nt, Artificial Sequence
  Synthetic
agcauagaauccauggu

SEQ ID NO: 771877 - RNA, 17 nt, Artificial Sequence
  Synthetic
uccaucuuuggcauggu

SEQ ID NO: 771878 - RNA, 17 nt, Artificial Sequence
  Synthetic
aaaagacacaucauggu

SEQ ID NO: 771879 - RNA, 17 nt, Artificial Sequence
  Synthetic
uaugacugucucauggu

SEQ ID NO: 771880 - RNA, 17 nt, Artificial Sequence
  Synthetic
aucaagcuauucauggu

SEQ ID NO: 771881 - RNA, 17 nt, Artificial Sequence
  Synthetic
aggagauaacagauggu

SEQ ID NO: 771882 - RNA, 17 nt, Artificial Sequence
  Synthetic
caaguauagcagauggu

SEQ ID NO: 771883 - RNA, 17 nt, Artificial Sequence
  Synthetic
auuuuuaguuagauggu

SEQ ID NO: 771884 - RNA, 17 nt, Artificial Sequence
  Synthetic
caccaagucaggauggu

SEQ ID NO: 771885 - RNA, 17 nt, Artificial Sequence
  Synthetic
aaagggaaagggauggu

SEQ ID NO: 771886 - RNA, 17 nt, Artificial Sequence
  Synthetic
aauggaagagggauggu

SEQ ID NO: 771887 - RNA, 17 nt, Artificial Sequence
  Synthetic
uagcugggcaugauggu

SEQ ID NO: 771888 - RNA, 17 nt, Artificial Sequence
  Synthetic
cuuccaaggaugauggu

SEQ ID NO: 771889 - RNA, 17 nt, Artificial Sequence
  Synthetic
aggcacagccugauggu

SEQ ID NO: 771890 - RNA, 17 nt, Artificial Sequence
  Synthetic
accaaaagugugauggu

SEQ ID NO: 771891 - RNA, 17 nt, Artificial Sequence
  Synthetic
uuucaacauuugauggu

SEQ ID NO: 771892 - RNA, 17 nt, Artificial Sequence
  Synthetic
auuauuacuuugauggu

SEQ ID NO: 771893 - RNA, 17 nt, Artificial Sequence
  Synthetic
ugacuaaaucauauggu

SEQ ID NO: 771894 - RNA, 17 nt, Artificial Sequence
  Synthetic
ucaaaugcucauauggu

SEQ ID NO: 771895 - RNA, 17 nt, Artificial Sequence
  Synthetic
cgggaaggucauauggu

SEQ ID NO: 771896 - RNA, 17 nt, Artificial Sequence
  Synthetic
ccccaaggguauauggu

SEQ ID NO: 771897 - RNA, 17 nt, Artificial Sequence
  Synthetic
uuuaaacaaacuauggu

SEQ ID NO: 771898 - RNA, 17 nt, Artificial Sequence
  Synthetic
uucaggguuccuauggu

SEQ ID NO: 771899 - RNA, 17 nt, Artificial Sequence
  Synthetic
uacccaucagcuauggu

SEQ ID NO: 771900 - RNA, 17 nt, Artificial Sequence
  Synthetic
uuauaaugaucuauggu

SEQ ID NO: 771901 - RNA, 17 nt, Artificial Sequence
  Synthetic
uagaauaguaguauggu

SEQ ID NO: 771902 - RNA, 17 nt, Artificial Sequence
  Synthetic
uguaggggagguauggu

SEQ ID NO: 771903 - RNA, 17 nt, Artificial Sequence
  Synthetic
auagggugagguauggu

SEQ ID NO: 771904 - RNA, 17 nt, Artificial Sequence
  Synthetic
aaacaaaauauuauggu

SEQ ID NO: 771905 - RNA, 17 nt, Artificial Sequence
  Synthetic
cacuuccauauuauggu

SEQ ID NO: 771906 - RNA, 17 nt, Artificial Sequence
  Synthetic
cuucuucuucuuauggu

SEQ ID NO: 771907 - RNA, 17 nt, Artificial Sequence
  Synthetic
uuuagugcaaaacuggu

SEQ ID NO: 771908 - RNA, 17 nt, Artificial Sequence
  Synthetic
aaacucuauaaacuggu

SEQ ID NO: 771909 - RNA, 17 nt, Artificial Sequence
  Synthetic
auugaaugccaacuggu

SEQ ID NO: 771910 - RNA, 17 nt, Artificial Sequence
  Synthetic
aguauaauuacacuggu

SEQ ID NO: 771911 - RNA, 17 nt, Artificial Sequence
  Synthetic
uucaauccaccacuggu

SEQ ID NO: 771912 - RNA, 17 nt, Artificial Sequence
  Synthetic
uccagucuaucacuggu

SEQ ID NO: 771913 - RNA, 17 nt, Artificial Sequence
  Synthetic
ucugugaugauacuggu

SEQ ID NO: 771914 - RNA, 17 nt, Artificial Sequence
  Synthetic
aaucacucgaaccuggu

SEQ ID NO: 771915 - RNA, 17 nt, Artificial Sequence
  Synthetic
auuuaguugaaccuggu

SEQ ID NO: 771916 - RNA, 17 nt, Artificial Sequence
  Synthetic
caugggagugaccuggu

SEQ ID NO: 771917 - RNA, 17 nt, Artificial Sequence
  Synthetic
ugucuaccauaccuggu

SEQ ID NO: 771918 - RNA, 17 nt, Artificial Sequence
  Synthetic
ccucuuaggucccuggu

SEQ ID NO: 771919 - RNA, 17 nt, Artificial Sequence
  Synthetic
auuaaaguaggccuggu

SEQ ID NO: 771920 - RNA, 17 nt, Artificial Sequence
  Synthetic
uggaggcagggccuggu

SEQ ID NO: 771921 - RNA, 17 nt, Artificial Sequence
  Synthetic
uggagguggggccuggu

SEQ ID NO: 771922 - RNA, 17 nt, Artificial Sequence
  Synthetic
ccuugcuugggccuggu

SEQ ID NO: 771923 - RNA, 17 nt, Artificial Sequence
  Synthetic
ccuaaaacaauccuggu

SEQ ID NO: 771924 - RNA, 17 nt, Artificial Sequence
  Synthetic
uuacaaacacuccuggu

SEQ ID NO: 771925 - RNA, 17 nt, Artificial Sequence
  Synthetic
ugccugacauuccuggu

SEQ ID NO: 771926 - RNA, 17 nt, Artificial Sequence
  Synthetic
auauuaaaguuccuggu

SEQ ID NO: 771927 - RNA, 17 nt, Artificial Sequence
  Synthetic
aacauuucuuuccuggu

SEQ ID NO: 771928 - RNA, 17 nt, Artificial Sequence
  Synthetic
uucucccugcagcuggu

SEQ ID NO: 771929 - RNA, 17 nt, Artificial Sequence
  Synthetic
cugaguucucagcuggu

SEQ ID NO: 771930 - RNA, 17 nt, Artificial Sequence
  Synthetic
cuugucuuucagcuggu

SEQ ID NO: 771931 - RNA, 17 nt, Artificial Sequence
  Synthetic
cucaugcccuagcuggu

SEQ ID NO: 771932 - RNA, 17 nt, Artificial Sequence
  Synthetic
ugggauggcaggcuggu

SEQ ID NO: 771933 - RNA, 17 nt, Artificial Sequence
  Synthetic
ccuuauuuauggcuggu

SEQ ID NO: 771934 - RNA, 17 nt, Artificial Sequence
  Synthetic
ucuucuacguggcuggu

SEQ ID NO: 771935 - RNA, 17 nt, Artificial Sequence
  Synthetic
auaguacuuaugcuggu

SEQ ID NO: 771936 - RNA, 17 nt, Artificial Sequence
  Synthetic
cuuaacacacugcuggu

SEQ ID NO: 771937 - RNA, 17 nt, Artificial Sequence
  Synthetic
auuguacagcugcuggu

SEQ ID NO: 771938 - RNA, 17 nt, Artificial Sequence
  Synthetic
uagccgggugugcuggu

SEQ ID NO: 771939 - RNA, 17 nt, Artificial Sequence
  Synthetic
uggaacuuagaucuggu

SEQ ID NO: 771940 - RNA, 17 nt, Artificial Sequence
  Synthetic
acuagcugguaucuggu

SEQ ID NO: 771941 - RNA, 17 nt, Artificial Sequence
  Synthetic
uucuggcugucucuggu

SEQ ID NO: 771942 - RNA, 17 nt, Artificial Sequence
  Synthetic
aggcagaacagucuggu

SEQ ID NO: 771943 - RNA, 17 nt, Artificial Sequence
  Synthetic
ugacuuuucauucuggu

SEQ ID NO: 771944 - RNA, 17 nt, Artificial Sequence
  Synthetic
auuucaaugauucuggu

SEQ ID NO: 771945 - RNA, 17 nt, Artificial Sequence
  Synthetic
uauguuuaauuucuggu

SEQ ID NO: 771946 - RNA, 17 nt, Artificial Sequence
  Synthetic
aaaaagcuauuucuggu

SEQ ID NO: 771947 - RNA, 17 nt, Artificial Sequence
  Synthetic
auuuuguucuuucuggu

SEQ ID NO: 771948 - RNA, 17 nt, Artificial Sequence
  Synthetic
cagccucccaaaguggu

SEQ ID NO: 771949 - RNA, 17 nt, Artificial Sequence
  Synthetic
uuacaaaaacaaguggu

SEQ ID NO: 771950 - RNA, 17 nt, Artificial Sequence
  Synthetic
cacuuuaaugaaguggu

SEQ ID NO: 771951 - RNA, 17 nt, Artificial Sequence
  Synthetic
agaauuaaauaaguggu

SEQ ID NO: 771952 - RNA, 17 nt, Artificial Sequence
  Synthetic
augccgcacacaguggu

SEQ ID NO: 771953 - RNA, 17 nt, Artificial Sequence
  Synthetic
ucaaaagcugcaguggu

SEQ ID NO: 771954 - RNA, 17 nt, Artificial Sequence
  Synthetic
cugaggguuucaguggu

SEQ ID NO: 771955 - RNA, 17 nt, Artificial Sequence
  Synthetic
uguugaauacgaguggu

SEQ ID NO: 771956 - RNA, 17 nt, Artificial Sequence
  Synthetic
auguggugaggaguggu

SEQ ID NO: 771957 - RNA, 17 nt, Artificial Sequence
  Synthetic
acucagaauggaguggu

SEQ ID NO: 771958 - RNA, 17 nt, Artificial Sequence
  Synthetic
ugcugaacaguaguggu

SEQ ID NO: 771959 - RNA, 17 nt, Artificial Sequence
  Synthetic
cugggaaggguaguggu

SEQ ID NO: 771960 - RNA, 17 nt, Artificial Sequence
  Synthetic
cccgaaaugguaguggu

SEQ ID NO: 771961 - RNA, 17 nt, Artificial Sequence
  Synthetic
ccuuacuuuguaguggu

SEQ ID NO: 771962 - RNA, 17 nt, Artificial Sequence
  Synthetic
cacuucauauuaguggu

SEQ ID NO: 771963 - RNA, 17 nt, Artificial Sequence
  Synthetic
aauuauuguuuaguggu

SEQ ID NO: 771964 - RNA, 17 nt, Artificial Sequence
  Synthetic
cauacuuuacacguggu

SEQ ID NO: 771965 - RNA, 17 nt, Artificial Sequence
  Synthetic
uuaaauuuaaccguggu

SEQ ID NO: 771966 - RNA, 17 nt, Artificial Sequence
  Synthetic
agcaaaguccucguggu

SEQ ID NO: 771967 - RNA, 17 nt, Artificial Sequence
  Synthetic
aaacuuuuucagguggu

SEQ ID NO: 771968 - RNA, 17 nt, Artificial Sequence
  Synthetic
aauauuuguaggguggu

SEQ ID NO: 771969 - RNA, 17 nt, Artificial Sequence
  Synthetic
cucgcuaccuggguggu

SEQ ID NO: 771970 - RNA, 17 nt, Artificial Sequence
  Synthetic
uagccaggcaugguggu

SEQ ID NO: 771971 - RNA, 17 nt, Artificial Sequence
  Synthetic
uagcagggcaugguggu

SEQ ID NO: 771972 - RNA, 17 nt, Artificial Sequence
  Synthetic
uagccgggcaugguggu

SEQ ID NO: 771973 - RNA, 17 nt, Artificial Sequence
  Synthetic
uagcugggcaugguggu

SEQ ID NO: 771974 - RNA, 17 nt, Artificial Sequence
  Synthetic
uagcuaggagugguggu

SEQ ID NO: 771975 - RNA, 17 nt, Artificial Sequence
  Synthetic
uagccaggcgugguggu

SEQ ID NO: 771976 - RNA, 17 nt, Artificial Sequence
  Synthetic
uagcagggcgugguggu

SEQ ID NO: 771977 - RNA, 17 nt, Artificial Sequence
  Synthetic
uagccgggcgugguggu

SEQ ID NO: 771978 - RNA, 17 nt, Artificial Sequence
  Synthetic
uagcugggcgugguggu

SEQ ID NO: 771979 - RNA, 17 nt, Artificial Sequence
  Synthetic
ccuuuuggggugguggu

SEQ ID NO: 771980 - RNA, 17 nt, Artificial Sequence
  Synthetic
cuguauauggugguggu

SEQ ID NO: 771981 - RNA, 17 nt, Artificial Sequence
  Synthetic
uagccaggugugguggu

SEQ ID NO: 771982 - RNA, 17 nt, Artificial Sequence
  Synthetic
uagccgggugugguggu

SEQ ID NO: 771983 - RNA, 17 nt, Artificial Sequence
  Synthetic
uagcugggugugguggu

SEQ ID NO: 771984 - RNA, 17 nt, Artificial Sequence
  Synthetic
caauacugauugguggu

SEQ ID NO: 771985 - RNA, 17 nt, Artificial Sequence
  Synthetic
uucccaauguugguggu

SEQ ID NO: 771986 - RNA, 17 nt, Artificial Sequence
  Synthetic
auaacaguguugguggu

SEQ ID NO: 771987 - RNA, 17 nt, Artificial Sequence
  Synthetic
uugaggugaaauguggu

SEQ ID NO: 771988 - RNA, 17 nt, Artificial Sequence
  Synthetic
uuuuaucaccauguggu

SEQ ID NO: 771989 - RNA, 17 nt, Artificial Sequence
  Synthetic
uucaagggggauguggu

SEQ ID NO: 771990 - RNA, 17 nt, Artificial Sequence
  Synthetic
aacuguuaugauguggu

SEQ ID NO: 771991 - RNA, 17 nt, Artificial Sequence
  Synthetic
uuuuauauguauguggu

SEQ ID NO: 771992 - RNA, 17 nt, Artificial Sequence
  Synthetic
aauauuuauuauguggu

SEQ ID NO: 771993 - RNA, 17 nt, Artificial Sequence
  Synthetic
acucuggggacuguggu

SEQ ID NO: 771994 - RNA, 17 nt, Artificial Sequence
  Synthetic
uuauuucccccuguggu

SEQ ID NO: 771995 - RNA, 17 nt, Artificial Sequence
  Synthetic
uucuaggaagcuguggu

SEQ ID NO: 771996 - RNA, 17 nt, Artificial Sequence
  Synthetic
aucagaaucucuguggu

SEQ ID NO: 771997 - RNA, 17 nt, Artificial Sequence
  Synthetic
uauguaucuucuguggu

SEQ ID NO: 771998 - RNA, 17 nt, Artificial Sequence
  Synthetic
auacuugauaguguggu

SEQ ID NO: 771999 - RNA, 17 nt, Artificial Sequence
  Synthetic
aagagagaagguguggu

SEQ ID NO: 772000 - RNA, 17 nt, Artificial Sequence
  Synthetic
caaugauuggguguggu

SEQ ID NO: 772001 - RNA, 17 nt, Artificial Sequence
  Synthetic
cacuaccuguguguggu

SEQ ID NO: 772002 - RNA, 17 nt, Artificial Sequence
  Synthetic
auacagggccuuguggu

SEQ ID NO: 772003 - RNA, 17 nt, Artificial Sequence
  Synthetic
agagaauugguuguggu

SEQ ID NO: 772004 - RNA, 17 nt, Artificial Sequence
  Synthetic
uuccuguauguuguggu

SEQ ID NO: 772005 - RNA, 17 nt, Artificial Sequence
  Synthetic
cagccggguguuguggu

SEQ ID NO: 772006 - RNA, 17 nt, Artificial Sequence
  Synthetic
aaaaaacuauuuguggu

SEQ ID NO: 772007 - RNA, 17 nt, Artificial Sequence
  Synthetic
aacuuguuauuuguggu

SEQ ID NO: 772008 - RNA, 17 nt, Artificial Sequence
  Synthetic
aaagcuuuguuuguggu

SEQ ID NO: 772009 - RNA, 17 nt, Artificial Sequence
  Synthetic
caacaacauuuuguggu

SEQ ID NO: 772010 - RNA, 17 nt, Artificial Sequence
  Synthetic
aaauuagcuuuuguggu

SEQ ID NO: 772011 - RNA, 17 nt, Artificial Sequence
  Synthetic
auagaagugaaauuggu

SEQ ID NO: 772012 - RNA, 17 nt, Artificial Sequence
  Synthetic
ugcauuucuaaauuggu

SEQ ID NO: 772013 - RNA, 17 nt, Artificial Sequence
  Synthetic
acuuguauaucauuggu

SEQ ID NO: 772014 - RNA, 17 nt, Artificial Sequence
  Synthetic
uuuauccacucauuggu

SEQ ID NO: 772015 - RNA, 17 nt, Artificial Sequence
  Synthetic
cugggugcuucauuggu

SEQ ID NO: 772016 - RNA, 17 nt, Artificial Sequence
  Synthetic
augugacagauauuggu

SEQ ID NO: 772017 - RNA, 17 nt, Artificial Sequence
  Synthetic
cauagauaaaacuuggu

SEQ ID NO: 772018 - RNA, 17 nt, Artificial Sequence
  Synthetic
uagggcuuauacuuggu

SEQ ID NO: 772019 - RNA, 17 nt, Artificial Sequence
  Synthetic
aguuucuucugcuuggu

SEQ ID NO: 772020 - RNA, 17 nt, Artificial Sequence
  Synthetic
uaugguuuaaucuuggu

SEQ ID NO: 772021 - RNA, 17 nt, Artificial Sequence
  Synthetic
uaugcggaauucuuggu

SEQ ID NO: 772022 - RNA, 17 nt, Artificial Sequence
  Synthetic
cuuuagcuauucuuggu

SEQ ID NO: 772023 - RNA, 17 nt, Artificial Sequence
  Synthetic
ucuuuuaccuucuuggu

SEQ ID NO: 772024 - RNA, 17 nt, Artificial Sequence
  Synthetic
caagccacaaaguuggu

SEQ ID NO: 772025 - RNA, 17 nt, Artificial Sequence
  Synthetic
aauaaacauaaguuggu

SEQ ID NO: 772026 - RNA, 17 nt, Artificial Sequence
  Synthetic
auuaaugguaaguuggu

SEQ ID NO: 772027 - RNA, 17 nt, Artificial Sequence
  Synthetic
aucaggauuaaguuggu

SEQ ID NO: 772028 - RNA, 17 nt, Artificial Sequence
  Synthetic
aagaacaggcaguuggu

SEQ ID NO: 772029 - RNA, 17 nt, Artificial Sequence
  Synthetic
cuuugcuuauaguuggu

SEQ ID NO: 772030 - RNA, 17 nt, Artificial Sequence
  Synthetic
aagcuccccuaguuggu

SEQ ID NO: 772031 - RNA, 17 nt, Artificial Sequence
  Synthetic
acuuucacaccguuggu

SEQ ID NO: 772032 - RNA, 17 nt, Artificial Sequence
  Synthetic
uagguauauagguuggu

SEQ ID NO: 772033 - RNA, 17 nt, Artificial Sequence
  Synthetic
caagauuggggguuggu

SEQ ID NO: 772034 - RNA, 17 nt, Artificial Sequence
  Synthetic
uugaauuagauguuggu

SEQ ID NO: 772035 - RNA, 17 nt, Artificial Sequence
  Synthetic
auuuuguaacuguuggu

SEQ ID NO: 772036 - RNA, 17 nt, Artificial Sequence
  Synthetic
ccuugcacacuguuggu

SEQ ID NO: 772037 - RNA, 17 nt, Artificial Sequence
  Synthetic
acuucuacacuguuggu

SEQ ID NO: 772038 - RNA, 17 nt, Artificial Sequence
  Synthetic
acucuuacacuguuggu

SEQ ID NO: 772039 - RNA, 17 nt, Artificial Sequence
  Synthetic
ucuuuuacacuguuggu

SEQ ID NO: 772040 - RNA, 17 nt, Artificial Sequence
  Synthetic
ccuuaugcacuguuggu

SEQ ID NO: 772041 - RNA, 17 nt, Artificial Sequence
  Synthetic
cauuauacgcuguuggu

SEQ ID NO: 772042 - RNA, 17 nt, Artificial Sequence
  Synthetic
acuucugcauuguuggu

SEQ ID NO: 772043 - RNA, 17 nt, Artificial Sequence
  Synthetic
aagucaccaaauuuggu

SEQ ID NO: 772044 - RNA, 17 nt, Artificial Sequence
  Synthetic
auguugcuaaauuuggu

SEQ ID NO: 772045 - RNA, 17 nt, Artificial Sequence
  Synthetic
uucaguuuuaauuuggu

SEQ ID NO: 772046 - RNA, 17 nt, Artificial Sequence
  Synthetic
aaaugaggucauuuggu

SEQ ID NO: 772047 - RNA, 17 nt, Artificial Sequence
  Synthetic
uuuauuguagauuuggu

SEQ ID NO: 772048 - RNA, 17 nt, Artificial Sequence
  Synthetic
aaaccaugauauuuggu

SEQ ID NO: 772049 - RNA, 17 nt, Artificial Sequence
  Synthetic
uguuuucucuauuuggu

SEQ ID NO: 772050 - RNA, 17 nt, Artificial Sequence
  Synthetic
auggaaauguauuuggu

SEQ ID NO: 772051 - RNA, 17 nt, Artificial Sequence
  Synthetic
uuaacauuaacuuuggu

SEQ ID NO: 772052 - RNA, 17 nt, Artificial Sequence
  Synthetic
auugguuaaucuuuggu

SEQ ID NO: 772053 - RNA, 17 nt, Artificial Sequence
  Synthetic
uggagcugcaguuuggu

SEQ ID NO: 772054 - RNA, 17 nt, Artificial Sequence
  Synthetic
cuggaaugcuguuuggu

SEQ ID NO: 772055 - RNA, 17 nt, Artificial Sequence
  Synthetic
uuugucuuuuguuuggu

SEQ ID NO: 772056 - RNA, 17 nt, Artificial Sequence
  Synthetic
aucuucucuauuuuggu

SEQ ID NO: 772057 - RNA, 17 nt, Artificial Sequence
  Synthetic
caaagauuccuuuuggu

SEQ ID NO: 772058 - RNA, 17 nt, Artificial Sequence
  Synthetic
agcuauaaaguuuuggu

SEQ ID NO: 772059 - RNA, 17 nt, Artificial Sequence
  Synthetic
accagcuugguuuuggu

SEQ ID NO: 772060 - RNA, 17 nt, Artificial Sequence
  Synthetic
ccuggacucuuuuuggu

SEQ ID NO: 772061 - RNA, 17 nt, Artificial Sequence
  Synthetic
uuuggaauguuuuuggu

SEQ ID NO: 772062 - RNA, 17 nt, Artificial Sequence
  Synthetic
auguagcauuuuuuggu

SEQ ID NO: 772063 - RNA, 17 nt, Artificial Sequence
  Synthetic
ccugggcuuuuuuuggu

SEQ ID NO: 772064 - RNA, 17 nt, Artificial Sequence
  Synthetic
auggcaaaaaaaaaugu

SEQ ID NO: 772065 - RNA, 17 nt, Artificial Sequence
  Synthetic
aacaaagacaaaaaugu

SEQ ID NO: 772066 - RNA, 17 nt, Artificial Sequence
  Synthetic
cugggggccaaaaaugu

SEQ ID NO: 772067 - RNA, 17 nt, Artificial Sequence
  Synthetic
acuuuuuuuaaaaaugu

SEQ ID NO: 772068 - RNA, 17 nt, Artificial Sequence
  Synthetic
aaggagacccaaaaugu

SEQ ID NO: 772069 - RNA, 17 nt, Artificial Sequence
  Synthetic
uggaaaagucaaaaugu

SEQ ID NO: 772070 - RNA, 17 nt, Artificial Sequence
  Synthetic
aacaacgaagaaaaugu

SEQ ID NO: 772071 - RNA, 17 nt, Artificial Sequence
  Synthetic
cucuucuaagaaaaugu

SEQ ID NO: 772072 - RNA, 17 nt, Artificial Sequence
  Synthetic
agaagaaaggaaaaugu

SEQ ID NO: 772073 - RNA, 17 nt, Artificial Sequence
  Synthetic
agaugacaggaaaaugu

SEQ ID NO: 772074 - RNA, 17 nt, Artificial Sequence
  Synthetic
uaggacuuugaaaaugu

SEQ ID NO: 772075 - RNA, 17 nt, Artificial Sequence
  Synthetic
agauggcaauaaaaugu

SEQ ID NO: 772076 - RNA, 17 nt, Artificial Sequence
  Synthetic
cuggcucaauaaaaugu

SEQ ID NO: 772077 - RNA, 17 nt, Artificial Sequence
  Synthetic
uuagaaacauaaaaugu

SEQ ID NO: 772078 - RNA, 17 nt, Artificial Sequence
  Synthetic
aguaaguuauaaaaugu

SEQ ID NO: 772079 - RNA, 17 nt, Artificial Sequence
  Synthetic
ccucauuuguaaaaugu

SEQ ID NO: 772080 - RNA, 17 nt, Artificial Sequence
  Synthetic
aauaguuuaccaaaugu

SEQ ID NO: 772081 - RNA, 17 nt, Artificial Sequence
  Synthetic
aguagaggcccaaaugu

SEQ ID NO: 772082 - RNA, 17 nt, Artificial Sequence
  Synthetic
caauacuuuccaaaugu

SEQ ID NO: 772083 - RNA, 17 nt, Artificial Sequence
  Synthetic
auacugaaagcaaaugu

SEQ ID NO: 772084 - RNA, 17 nt, Artificial Sequence
  Synthetic
agcucacaaucaaaugu

SEQ ID NO: 772085 - RNA, 17 nt, Artificial Sequence
  Synthetic
uauaugcaaagaaaugu

SEQ ID NO: 772086 - RNA, 17 nt, Artificial Sequence
  Synthetic
cauacaguaagaaaugu

SEQ ID NO: 772087 - RNA, 17 nt, Artificial Sequence
  Synthetic
accacugauagaaaugu

SEQ ID NO: 772088 - RNA, 17 nt, Artificial Sequence
  Synthetic
aaaauauuuagaaaugu

SEQ ID NO: 772089 - RNA, 17 nt, Artificial Sequence
  Synthetic
aacgugcaaggaaaugu

SEQ ID NO: 772090 - RNA, 17 nt, Artificial Sequence
  Synthetic
agaugaaugggaaaugu

SEQ ID NO: 772091 - RNA, 17 nt, Artificial Sequence
  Synthetic
aauaauaaaauaaaugu

SEQ ID NO: 772092 - RNA, 17 nt, Artificial Sequence
  Synthetic
uuucaggccauaaaugu

SEQ ID NO: 772093 - RNA, 17 nt, Artificial Sequence
  Synthetic
ucacugcagauaaaugu

SEQ ID NO: 772094 - RNA, 17 nt, Artificial Sequence
  Synthetic
aggguguuacuaaaugu

SEQ ID NO: 772095 - RNA, 17 nt, Artificial Sequence
  Synthetic
ugccuuugucuaaaugu

SEQ ID NO: 772096 - RNA, 17 nt, Artificial Sequence
  Synthetic
cuaggagcauuaaaugu

SEQ ID NO: 772097 - RNA, 17 nt, Artificial Sequence
  Synthetic
cauuagccaaacaaugu

SEQ ID NO: 772098 - RNA, 17 nt, Artificial Sequence
  Synthetic
aaaacuggaaacaaugu

SEQ ID NO: 772099 - RNA, 17 nt, Artificial Sequence
  Synthetic
auuacccuccacaaugu

SEQ ID NO: 772100 - RNA, 17 nt, Artificial Sequence
  Synthetic
cuuccauuccacaaugu

SEQ ID NO: 772101 - RNA, 17 nt, Artificial Sequence
  Synthetic
acaggguuugacaaugu

SEQ ID NO: 772102 - RNA, 17 nt, Artificial Sequence
  Synthetic
auuugggaauacaaugu

SEQ ID NO: 772103 - RNA, 17 nt, Artificial Sequence
  Synthetic
ccugucuaauacaaugu

SEQ ID NO: 772104 - RNA, 17 nt, Artificial Sequence
  Synthetic
ugucuucuuaccaaugu

SEQ ID NO: 772105 - RNA, 17 nt, Artificial Sequence
  Synthetic
auuguaauccccaaugu

SEQ ID NO: 772106 - RNA, 17 nt, Artificial Sequence
  Synthetic
aauauaauucccaaugu

SEQ ID NO: 772107 - RNA, 17 nt, Artificial Sequence
  Synthetic
uuuagguacuccaaugu

SEQ ID NO: 772108 - RNA, 17 nt, Artificial Sequence
  Synthetic
aaugugauuuccaaugu

SEQ ID NO: 772109 - RNA, 17 nt, Artificial Sequence
  Synthetic
ucauuucugagcaaugu

SEQ ID NO: 772110 - RNA, 17 nt, Artificial Sequence
  Synthetic
cuugucagaggcaaugu

SEQ ID NO: 772111 - RNA, 17 nt, Artificial Sequence
  Synthetic
aggaaauggggcaaugu

SEQ ID NO: 772112 - RNA, 17 nt, Artificial Sequence
  Synthetic
aaaagagaaaucaaugu

SEQ ID NO: 772113 - RNA, 17 nt, Artificial Sequence
  Synthetic
uaugugucucucaaugu

SEQ ID NO: 772114 - RNA, 17 nt, Artificial Sequence
  Synthetic
agaucugccuucaaugu

SEQ ID NO: 772115 - RNA, 17 nt, Artificial Sequence
  Synthetic
ugacagauuuucaaugu

SEQ ID NO: 772116 - RNA, 17 nt, Artificial Sequence
  Synthetic
cagggcuuaaagaaugu

SEQ ID NO: 772117 - RNA, 17 nt, Artificial Sequence
  Synthetic
aaaaaugauaagaaugu

SEQ ID NO: 772118 - RNA, 17 nt, Artificial Sequence
  Synthetic
ucugaugcccagaaugu

SEQ ID NO: 772119 - RNA, 17 nt, Artificial Sequence
  Synthetic
uuugaaacucagaaugu

SEQ ID NO: 772120 - RNA, 17 nt, Artificial Sequence
  Synthetic
uaguuugcucagaaugu

SEQ ID NO: 772121 - RNA, 17 nt, Artificial Sequence
  Synthetic
uuucugcacuagaaugu

SEQ ID NO: 772122 - RNA, 17 nt, Artificial Sequence
  Synthetic
ugcuaucauuagaaugu

SEQ ID NO: 772123 - RNA, 17 nt, Artificial Sequence
  Synthetic
cauaguccuuagaaugu

SEQ ID NO: 772124 - RNA, 17 nt, Artificial Sequence
  Synthetic
aggggugguuagaaugu

SEQ ID NO: 772125 - RNA, 17 nt, Artificial Sequence
  Synthetic
ugaagauaaaugaaugu

SEQ ID NO: 772126 - RNA, 17 nt, Artificial Sequence
  Synthetic
cuuuguugaaugaaugu

SEQ ID NO: 772127 - RNA, 17 nt, Artificial Sequence
  Synthetic
agaaggguaaugaaugu

SEQ ID NO: 772128 - RNA, 17 nt, Artificial Sequence
  Synthetic
aaccaacaucugaaugu

SEQ ID NO: 772129 - RNA, 17 nt, Artificial Sequence
  Synthetic
uugucguacuugaaugu

SEQ ID NO: 772130 - RNA, 17 nt, Artificial Sequence
  Synthetic
uuccugaauuugaaugu

SEQ ID NO: 772131 - RNA, 17 nt, Artificial Sequence
  Synthetic
aucuauuauuugaaugu

SEQ ID NO: 772132 - RNA, 17 nt, Artificial Sequence
  Synthetic
uggaaaccuuugaaugu

SEQ ID NO: 772133 - RNA, 17 nt, Artificial Sequence
  Synthetic
auuaagaaaaauaaugu

SEQ ID NO: 772134 - RNA, 17 nt, Artificial Sequence
  Synthetic
agggaggugaauaaugu

SEQ ID NO: 772135 - RNA, 17 nt, Artificial Sequence
  Synthetic
agguugaaauauaaugu

SEQ ID NO: 772136 - RNA, 17 nt, Artificial Sequence
  Synthetic
uaugagaacuauaaugu

SEQ ID NO: 772137 - RNA, 17 nt, Artificial Sequence
  Synthetic
uaaaugcugucuaaugu

SEQ ID NO: 772138 - RNA, 17 nt, Artificial Sequence
  Synthetic
cuaucucucaguaaugu

SEQ ID NO: 772139 - RNA, 17 nt, Artificial Sequence
  Synthetic
uauccaggugguaaugu

SEQ ID NO: 772140 - RNA, 17 nt, Artificial Sequence
  Synthetic
ucagugguauguaaugu

SEQ ID NO: 772141 - RNA, 17 nt, Artificial Sequence
  Synthetic
uuuuauuucuguaaugu

SEQ ID NO: 772142 - RNA, 17 nt, Artificial Sequence
  Synthetic
uuaagaccuuguaaugu

SEQ ID NO: 772143 - RNA, 17 nt, Artificial Sequence
  Synthetic
agugcaauauuuaaugu

SEQ ID NO: 772144 - RNA, 17 nt, Artificial Sequence
  Synthetic
uuacuaaaacaacaugu

SEQ ID NO: 772145 - RNA, 17 nt, Artificial Sequence
  Synthetic
uccuucccacaacaugu

SEQ ID NO: 772146 - RNA, 17 nt, Artificial Sequence
  Synthetic
uuacagaguccacaugu

SEQ ID NO: 772147 - RNA, 17 nt, Artificial Sequence
  Synthetic
cacaucuaagcacaugu

SEQ ID NO: 772148 - RNA, 17 nt, Artificial Sequence
  Synthetic
auuauuacaucacaugu

SEQ ID NO: 772149 - RNA, 17 nt, Artificial Sequence
  Synthetic
uguugucacucacaugu

SEQ ID NO: 772150 - RNA, 17 nt, Artificial Sequence
  Synthetic
cacauuaauucacaugu

SEQ ID NO: 772151 - RNA, 17 nt, Artificial Sequence
  Synthetic
ccuaagacaagacaugu

SEQ ID NO: 772152 - RNA, 17 nt, Artificial Sequence
  Synthetic
aguugaugaagacaugu

SEQ ID NO: 772153 - RNA, 17 nt, Artificial Sequence
  Synthetic
cuccacccuugacaugu

SEQ ID NO: 772154 - RNA, 17 nt, Artificial Sequence
  Synthetic
ucucucccuugacaugu

SEQ ID NO: 772155 - RNA, 17 nt, Artificial Sequence
  Synthetic
acagucuguauacaugu

SEQ ID NO: 772156 - RNA, 17 nt, Artificial Sequence
  Synthetic
ugcaaggugcuacaugu

SEQ ID NO: 772157 - RNA, 17 nt, Artificial Sequence
  Synthetic
caaaaaguucuacaugu

SEQ ID NO: 772158 - RNA, 17 nt, Artificial Sequence
  Synthetic
ucugguuuuguacaugu

SEQ ID NO: 772159 - RNA, 17 nt, Artificial Sequence
  Synthetic
uuacauauauuacaugu

SEQ ID NO: 772160 - RNA, 17 nt, Artificial Sequence
  Synthetic
agucagauacaccaugu

SEQ ID NO: 772161 - RNA, 17 nt, Artificial Sequence
  Synthetic
acggggucucaccaugu

SEQ ID NO: 772162 - RNA, 17 nt, Artificial Sequence
  Synthetic
augggacuucaccaugu

SEQ ID NO: 772163 - RNA, 17 nt, Artificial Sequence
  Synthetic
aaaaugcuucaccaugu

SEQ ID NO: 772164 - RNA, 17 nt, Artificial Sequence
  Synthetic
acagggguucaccaugu

SEQ ID NO: 772165 - RNA, 17 nt, Artificial Sequence
  Synthetic
acgagauuucaccaugu

SEQ ID NO: 772166 - RNA, 17 nt, Artificial Sequence
  Synthetic
acgggauuucaccaugu

SEQ ID NO: 772167 - RNA, 17 nt, Artificial Sequence
  Synthetic
uuuguauuucaccaugu

SEQ ID NO: 772168 - RNA, 17 nt, Artificial Sequence
  Synthetic
auagaguuucaccaugu

SEQ ID NO: 772169 - RNA, 17 nt, Artificial Sequence
  Synthetic
acaagguuucaccaugu

SEQ ID NO: 772170 - RNA, 17 nt, Artificial Sequence
  Synthetic
acaggguuucaccaugu

SEQ ID NO: 772171 - RNA, 17 nt, Artificial Sequence
  Synthetic
acgggguuucaccaugu

SEQ ID NO: 772172 - RNA, 17 nt, Artificial Sequence
  Synthetic
augggguuucaccaugu

SEQ ID NO: 772173 - RNA, 17 nt, Artificial Sequence
  Synthetic
acggguuuucaccaugu

SEQ ID NO: 772174 - RNA, 17 nt, Artificial Sequence
  Synthetic
ugugggagggaccaugu

SEQ ID NO: 772175 - RNA, 17 nt, Artificial Sequence
  Synthetic
uuuccaagugaccaugu

SEQ ID NO: 772176 - RNA, 17 nt, Artificial Sequence
  Synthetic
ucucuuuucuaccaugu

SEQ ID NO: 772177 - RNA, 17 nt, Artificial Sequence
  Synthetic
augggguuuuaccaugu

SEQ ID NO: 772178 - RNA, 17 nt, Artificial Sequence
  Synthetic
augauccugacccaugu

SEQ ID NO: 772179 - RNA, 17 nt, Artificial Sequence
  Synthetic
cacauacauacccaugu

SEQ ID NO: 772180 - RNA, 17 nt, Artificial Sequence
  Synthetic
cuuaucuggucccaugu

SEQ ID NO: 772181 - RNA, 17 nt, Artificial Sequence
  Synthetic
ugccuaucuucccaugu

SEQ ID NO: 772182 - RNA, 17 nt, Artificial Sequence
  Synthetic
aaucacaacagccaugu

SEQ ID NO: 772183 - RNA, 17 nt, Artificial Sequence
  Synthetic
uauuuuuauagccaugu

SEQ ID NO: 772184 - RNA, 17 nt, Artificial Sequence
  Synthetic
uggaggguucgccaugu

SEQ ID NO: 772185 - RNA, 17 nt, Artificial Sequence
  Synthetic
acagaguuucgccaugu

SEQ ID NO: 772186 - RNA, 17 nt, Artificial Sequence
  Synthetic
acgggguuucgccaugu

SEQ ID NO: 772187 - RNA, 17 nt, Artificial Sequence
  Synthetic
augggguuucgccaugu

SEQ ID NO: 772188 - RNA, 17 nt, Artificial Sequence
  Synthetic
augugguuucgccaugu

SEQ ID NO: 772189 - RNA, 17 nt, Artificial Sequence
  Synthetic
auauacaugugccaugu

SEQ ID NO: 772190 - RNA, 17 nt, Artificial Sequence
  Synthetic
acggaguuuugccaugu

SEQ ID NO: 772191 - RNA, 17 nt, Artificial Sequence
  Synthetic
acgggguuuugccaugu

SEQ ID NO: 772192 - RNA, 17 nt, Artificial Sequence
  Synthetic
augggguuuugccaugu

SEQ ID NO: 772193 - RNA, 17 nt, Artificial Sequence
  Synthetic
uccagguccauccaugu

SEQ ID NO: 772194 - RNA, 17 nt, Artificial Sequence
  Synthetic
acagaguuucuccaugu

SEQ ID NO: 772195 - RNA, 17 nt, Artificial Sequence
  Synthetic
acacgguuucuccaugu

SEQ ID NO: 772196 - RNA, 17 nt, Artificial Sequence
  Synthetic
acgggguuucuccaugu

SEQ ID NO: 772197 - RNA, 17 nt, Artificial Sequence
  Synthetic
aaguuucaguuccaugu

SEQ ID NO: 772198 - RNA, 17 nt, Artificial Sequence
  Synthetic
aaguaaaauuuccaugu

SEQ ID NO: 772199 - RNA, 17 nt, Artificial Sequence
  Synthetic
cauacuguuuuccaugu

SEQ ID NO: 772200 - RNA, 17 nt, Artificial Sequence
  Synthetic
uggaauacuaagcaugu

SEQ ID NO: 772201 - RNA, 17 nt, Artificial Sequence
  Synthetic
acuggguuucagcaugu

SEQ ID NO: 772202 - RNA, 17 nt, Artificial Sequence
  Synthetic
uguggggccaggcaugu

SEQ ID NO: 772203 - RNA, 17 nt, Artificial Sequence
  Synthetic
uagacuaucaggcaugu

SEQ ID NO: 772204 - RNA, 17 nt, Artificial Sequence
  Synthetic
aauauuuuggggcaugu

SEQ ID NO: 772205 - RNA, 17 nt, Artificial Sequence
  Synthetic
aaauaccuaaugcaugu

SEQ ID NO: 772206 - RNA, 17 nt, Artificial Sequence
  Synthetic
ucucugaacaugcaugu

SEQ ID NO: 772207 - RNA, 17 nt, Artificial Sequence
  Synthetic
auagaauuuuugcaugu

SEQ ID NO: 772208 - RNA, 17 nt, Artificial Sequence
  Synthetic
uacuuugagaaucaugu

SEQ ID NO: 772209 - RNA, 17 nt, Artificial Sequence
  Synthetic
acgggguuucaucaugu

SEQ ID NO: 772210 - RNA, 17 nt, Artificial Sequence
  Synthetic
augggguuucaucaugu

SEQ ID NO: 772211 - RNA, 17 nt, Artificial Sequence
  Synthetic
ccugcccaauaucaugu

SEQ ID NO: 772212 - RNA, 17 nt, Artificial Sequence
  Synthetic
aauaauucuuaucaugu

SEQ ID NO: 772213 - RNA, 17 nt, Artificial Sequence
  Synthetic
acuaauaacacucaugu

SEQ ID NO: 772214 - RNA, 17 nt, Artificial Sequence
  Synthetic
ugaugagacccucaugu

SEQ ID NO: 772215 - RNA, 17 nt, Artificial Sequence
  Synthetic
cagcaauuuccucaugu

SEQ ID NO: 772216 - RNA, 17 nt, Artificial Sequence
  Synthetic
ugucuuuccucucaugu

SEQ ID NO: 772217 - RNA, 17 nt, Artificial Sequence
  Synthetic
aaaagaaagucucaugu

SEQ ID NO: 772218 - RNA, 17 nt, Artificial Sequence
  Synthetic
uuuguaucaagucaugu

SEQ ID NO: 772219 - RNA, 17 nt, Artificial Sequence
  Synthetic
uguuuaaugagucaugu

SEQ ID NO: 772220 - RNA, 17 nt, Artificial Sequence
  Synthetic
acgggguuucgucaugu

SEQ ID NO: 772221 - RNA, 17 nt, Artificial Sequence
  Synthetic
ucucucaucugucaugu

SEQ ID NO: 772222 - RNA, 17 nt, Artificial Sequence
  Synthetic
uuucugcaacuucaugu

SEQ ID NO: 772223 - RNA, 17 nt, Artificial Sequence
  Synthetic
caucugacucuucaugu

SEQ ID NO: 772224 - RNA, 17 nt, Artificial Sequence
  Synthetic
uaaaagaccuuucaugu

SEQ ID NO: 772225 - RNA, 17 nt, Artificial Sequence
  Synthetic
uucccagguuuucaugu

SEQ ID NO: 772226 - RNA, 17 nt, Artificial Sequence
  Synthetic
auaauuauuuuucaugu

SEQ ID NO: 772227 - RNA, 17 nt, Artificial Sequence
  Synthetic
acuuauaugaaagaugu

SEQ ID NO: 772228 - RNA, 17 nt, Artificial Sequence
  Synthetic
uuuacaagacaagaugu

SEQ ID NO: 772229 - RNA, 17 nt, Artificial Sequence
  Synthetic
ucccuaaaagaagaugu

SEQ ID NO: 772230 - RNA, 17 nt, Artificial Sequence
  Synthetic
agaagacaggaagaugu

SEQ ID NO: 772231 - RNA, 17 nt, Artificial Sequence
  Synthetic
uuuccuuuugaagaugu

SEQ ID NO: 772232 - RNA, 17 nt, Artificial Sequence
  Synthetic
aggcaguuuuaagaugu

SEQ ID NO: 772233 - RNA, 17 nt, Artificial Sequence
  Synthetic
aguaucaucacagaugu

SEQ ID NO: 772234 - RNA, 17 nt, Artificial Sequence
  Synthetic
uugacaguuacagaugu

SEQ ID NO: 772235 - RNA, 17 nt, Artificial Sequence
  Synthetic
cauuuaaaaccagaugu

SEQ ID NO: 772236 - RNA, 17 nt, Artificial Sequence
  Synthetic
acagccagcccagaugu

SEQ ID NO: 772237 - RNA, 17 nt, Artificial Sequence
  Synthetic
aguaaguuugcagaugu

SEQ ID NO: 772238 - RNA, 17 nt, Artificial Sequence
  Synthetic
aacaauucaucagaugu

SEQ ID NO: 772239 - RNA, 17 nt, Artificial Sequence
  Synthetic
aagggagagagagaugu

SEQ ID NO: 772240 - RNA, 17 nt, Artificial Sequence
  Synthetic
ucaaacucaggagaugu

SEQ ID NO: 772241 - RNA, 17 nt, Artificial Sequence
  Synthetic
uuaaacucaggagaugu

SEQ ID NO: 772242 - RNA, 17 nt, Artificial Sequence
  Synthetic
auaacaucuggagaugu

SEQ ID NO: 772243 - RNA, 17 nt, Artificial Sequence
  Synthetic
acagggauaugagaugu

SEQ ID NO: 772244 - RNA, 17 nt, Artificial Sequence
  Synthetic
acaaagucuugagaugu

SEQ ID NO: 772245 - RNA, 17 nt, Artificial Sequence
  Synthetic
caaaacacaauagaugu

SEQ ID NO: 772246 - RNA, 17 nt, Artificial Sequence
  Synthetic
ccuuaggagguagaugu

SEQ ID NO: 772247 - RNA, 17 nt, Artificial Sequence
  Synthetic
auuauugaauuagaugu

SEQ ID NO: 772248 - RNA, 17 nt, Artificial Sequence
  Synthetic
cuuagggaggccgaugu

SEQ ID NO: 772249 - RNA, 17 nt, Artificial Sequence
  Synthetic
uucagaaaaggcgaugu

SEQ ID NO: 772250 - RNA, 17 nt, Artificial Sequence
  Synthetic
aaaagaccugaggaugu

SEQ ID NO: 772251 - RNA, 17 nt, Artificial Sequence
  Synthetic
agguuuugugaggaugu

SEQ ID NO: 772252 - RNA, 17 nt, Artificial Sequence
  Synthetic
uuccaagaauaggaugu

SEQ ID NO: 772253 - RNA, 17 nt, Artificial Sequence
  Synthetic
ugggugaucuaggaugu

SEQ ID NO: 772254 - RNA, 17 nt, Artificial Sequence
  Synthetic
aagcugugguaggaugu

SEQ ID NO: 772255 - RNA, 17 nt, Artificial Sequence
  Synthetic
uucccucuaagggaugu

SEQ ID NO: 772256 - RNA, 17 nt, Artificial Sequence
  Synthetic
ucgacaagaggggaugu

SEQ ID NO: 772257 - RNA, 17 nt, Artificial Sequence
  Synthetic
uggaagcagugggaugu

SEQ ID NO: 772258 - RNA, 17 nt, Artificial Sequence
  Synthetic
acaaccucgugggaugu

SEQ ID NO: 772259 - RNA, 17 nt, Artificial Sequence
  Synthetic
uagcagaagauggaugu

SEQ ID NO: 772260 - RNA, 17 nt, Artificial Sequence
  Synthetic
ugagcuauuauggaugu

SEQ ID NO: 772261 - RNA, 17 nt, Artificial Sequence
  Synthetic
agucaugcacuggaugu

SEQ ID NO: 772262 - RNA, 17 nt, Artificial Sequence
  Synthetic
aggagugaaguggaugu

SEQ ID NO: 772263 - RNA, 17 nt, Artificial Sequence
  Synthetic
uaauuauguuuggaugu

SEQ ID NO: 772264 - RNA, 17 nt, Artificial Sequence
  Synthetic
ccaauuaucaaugaugu

SEQ ID NO: 772265 - RNA, 17 nt, Artificial Sequence
  Synthetic
cagccauguaaugaugu

SEQ ID NO: 772266 - RNA, 17 nt, Artificial Sequence
  Synthetic
uugggguuucaugaugu

SEQ ID NO: 772267 - RNA, 17 nt, Artificial Sequence
  Synthetic
ugaaauagagaugaugu

SEQ ID NO: 772268 - RNA, 17 nt, Artificial Sequence
  Synthetic
cacuauguauaugaugu

SEQ ID NO: 772269 - RNA, 17 nt, Artificial Sequence
  Synthetic
uccuguaauuaugaugu

SEQ ID NO: 772270 - RNA, 17 nt, Artificial Sequence
  Synthetic
aauauuaacccugaugu

SEQ ID NO: 772271 - RNA, 17 nt, Artificial Sequence
  Synthetic
acuugggaggcugaugu

SEQ ID NO: 772272 - RNA, 17 nt, Artificial Sequence
  Synthetic
caaaugguugcugaugu

SEQ ID NO: 772273 - RNA, 17 nt, Artificial Sequence
  Synthetic
cuuuggaacucugaugu

SEQ ID NO: 772274 - RNA, 17 nt, Artificial Sequence
  Synthetic
acuaauacuucugaugu

SEQ ID NO: 772275 - RNA, 17 nt, Artificial Sequence
  Synthetic
uggaaccaaagugaugu

SEQ ID NO: 772276 - RNA, 17 nt, Artificial Sequence
  Synthetic
cauucugacugugaugu

SEQ ID NO: 772277 - RNA, 17 nt, Artificial Sequence
  Synthetic
acagguaugugugaugu

SEQ ID NO: 772278 - RNA, 17 nt, Artificial Sequence
  Synthetic
auuuauccuugugaugu

SEQ ID NO: 772279 - RNA, 17 nt, Artificial Sequence
  Synthetic
ugcuaccuuugugaugu

SEQ ID NO: 772280 - RNA, 17 nt, Artificial Sequence
  Synthetic
uuguauuuuugugaugu

SEQ ID NO: 772281 - RNA, 17 nt, Artificial Sequence
  Synthetic
aauaacuugauugaugu

SEQ ID NO: 772282 - RNA, 17 nt, Artificial Sequence
  Synthetic
caaaucccccuugaugu

SEQ ID NO: 772283 - RNA, 17 nt, Artificial Sequence
  Synthetic
uguuaagauguugaugu

SEQ ID NO: 772284 - RNA, 17 nt, Artificial Sequence
  Synthetic
acuuuagguguugaugu

SEQ ID NO: 772285 - RNA, 17 nt, Artificial Sequence
  Synthetic
uucaggcucuuugaugu

SEQ ID NO: 772286 - RNA, 17 nt, Artificial Sequence
  Synthetic
ccuuuggucuuugaugu

SEQ ID NO: 772287 - RNA, 17 nt, Artificial Sequence
  Synthetic
ugguuagauuuugaugu

SEQ ID NO: 772288 - RNA, 17 nt, Artificial Sequence
  Synthetic
uucuucuuuuuugaugu

SEQ ID NO: 772289 - RNA, 17 nt, Artificial Sequence
  Synthetic
cuucugaaaaaauaugu

SEQ ID NO: 772290 - RNA, 17 nt, Artificial Sequence
  Synthetic
ucaaagaugaaauaugu

SEQ ID NO: 772291 - RNA, 17 nt, Artificial Sequence
  Synthetic
cugucagauaaauaugu

SEQ ID NO: 772292 - RNA, 17 nt, Artificial Sequence
  Synthetic
uggggcuuuaaauaugu

SEQ ID NO: 772293 - RNA, 17 nt, Artificial Sequence
  Synthetic
uugauucugcaauaugu

SEQ ID NO: 772294 - RNA, 17 nt, Artificial Sequence
  Synthetic
acuaguugucaauaugu

SEQ ID NO: 772295 - RNA, 17 nt, Artificial Sequence
  Synthetic
uaucuuacagaauaugu

SEQ ID NO: 772296 - RNA, 17 nt, Artificial Sequence
  Synthetic
uagaaaacugaauaugu

SEQ ID NO: 772297 - RNA, 17 nt, Artificial Sequence
  Synthetic
uugaaauaauaauaugu

SEQ ID NO: 772298 - RNA, 17 nt, Artificial Sequence
  Synthetic
aauuuucuauaauaugu

SEQ ID NO: 772299 - RNA, 17 nt, Artificial Sequence
  Synthetic
agauuguagacauaugu

SEQ ID NO: 772300 - RNA, 17 nt, Artificial Sequence
  Synthetic
uuugaagcuacauaugu

SEQ ID NO: 772301 - RNA, 17 nt, Artificial Sequence
  Synthetic
auaauuuauccauaugu

SEQ ID NO: 772302 - RNA, 17 nt, Artificial Sequence
  Synthetic
uguaucauagcauaugu

SEQ ID NO: 772303 - RNA, 17 nt, Artificial Sequence
  Synthetic
cuuguuuucucauaugu

SEQ ID NO: 772304 - RNA, 17 nt, Artificial Sequence
  Synthetic
cucguuaauucauaugu

SEQ ID NO: 772305 - RNA, 17 nt, Artificial Sequence
  Synthetic
cagccaagaagauaugu

SEQ ID NO: 772306 - RNA, 17 nt, Artificial Sequence
  Synthetic
agccaaggcagauaugu

SEQ ID NO: 772307 - RNA, 17 nt, Artificial Sequence
  Synthetic
uacuuagucagauaugu

SEQ ID NO: 772308 - RNA, 17 nt, Artificial Sequence
  Synthetic
aauuuuaauagauaugu

SEQ ID NO: 772309 - RNA, 17 nt, Artificial Sequence
  Synthetic
auccaguuuggauaugu

SEQ ID NO: 772310 - RNA, 17 nt, Artificial Sequence
  Synthetic
uauaacuauugauaugu

SEQ ID NO: 772311 - RNA, 17 nt, Artificial Sequence
  Synthetic
auuaaacuuugauaugu

SEQ ID NO: 772312 - RNA, 17 nt, Artificial Sequence
  Synthetic
ucugacacaauauaugu

SEQ ID NO: 772313 - RNA, 17 nt, Artificial Sequence
  Synthetic
cacacacacauauaugu

SEQ ID NO: 772314 - RNA, 17 nt, Artificial Sequence
  Synthetic
uacauauauauauaugu

SEQ ID NO: 772315 - RNA, 17 nt, Artificial Sequence
  Synthetic
acauaguguauauaugu

SEQ ID NO: 772316 - RNA, 17 nt, Artificial Sequence
  Synthetic
uauauguguauauaugu

SEQ ID NO: 772317 - RNA, 17 nt, Artificial Sequence
  Synthetic
aucuuguggcuauaugu

SEQ ID NO: 772318 - RNA, 17 nt, Artificial Sequence
  Synthetic
aaucauauuguauaugu

SEQ ID NO: 772319 - RNA, 17 nt, Artificial Sequence
  Synthetic
auguuuuaauuauaugu

SEQ ID NO: 772320 - RNA, 17 nt, Artificial Sequence
  Synthetic
uuguauauguuauaugu

SEQ ID NO: 772321 - RNA, 17 nt, Artificial Sequence
  Synthetic
cuagaaaacaacuaugu

SEQ ID NO: 772322 - RNA, 17 nt, Artificial Sequence
  Synthetic
uaguuugagaacuaugu

SEQ ID NO: 772323 - RNA, 17 nt, Artificial Sequence
  Synthetic
auauuuaaacacuaugu

SEQ ID NO: 772324 - RNA, 17 nt, Artificial Sequence
  Synthetic
augaaucuacacuaugu

SEQ ID NO: 772325 - RNA, 17 nt, Artificial Sequence
  Synthetic
acguaguuucacuaugu

SEQ ID NO: 772326 - RNA, 17 nt, Artificial Sequence
  Synthetic
acaggguuucacuaugu

SEQ ID NO: 772327 - RNA, 17 nt, Artificial Sequence
  Synthetic
acgggguuucacuaugu

SEQ ID NO: 772328 - RNA, 17 nt, Artificial Sequence
  Synthetic
auuguugugaccuaugu

SEQ ID NO: 772329 - RNA, 17 nt, Artificial Sequence
  Synthetic
caagucuguaccuaugu

SEQ ID NO: 772330 - RNA, 17 nt, Artificial Sequence
  Synthetic
cuugaaggagccuaugu

SEQ ID NO: 772331 - RNA, 17 nt, Artificial Sequence
  Synthetic
aacuuaugggccuaugu

SEQ ID NO: 772332 - RNA, 17 nt, Artificial Sequence
  Synthetic
ucuguccuuugcuaugu

SEQ ID NO: 772333 - RNA, 17 nt, Artificial Sequence
  Synthetic
caugagguuugcuaugu

SEQ ID NO: 772334 - RNA, 17 nt, Artificial Sequence
  Synthetic
caguggggacucuaugu

SEQ ID NO: 772335 - RNA, 17 nt, Artificial Sequence
  Synthetic
cuuacaugccucuaugu

SEQ ID NO: 772336 - RNA, 17 nt, Artificial Sequence
  Synthetic
agaagguuagucuaugu

SEQ ID NO: 772337 - RNA, 17 nt, Artificial Sequence
  Synthetic
uggcucagauucuaugu

SEQ ID NO: 772338 - RNA, 17 nt, Artificial Sequence
  Synthetic
uauucagagaaguaugu

SEQ ID NO: 772339 - RNA, 17 nt, Artificial Sequence
  Synthetic
uuauuaugugaguaugu

SEQ ID NO: 772340 - RNA, 17 nt, Artificial Sequence
  Synthetic
auuccuugugcguaugu

SEQ ID NO: 772341 - RNA, 17 nt, Artificial Sequence
  Synthetic
aaauauacaagguaugu

SEQ ID NO: 772342 - RNA, 17 nt, Artificial Sequence
  Synthetic
uuuucuuuuagguaugu

SEQ ID NO: 772343 - RNA, 17 nt, Artificial Sequence
  Synthetic
cauuucuuacuguaugu

SEQ ID NO: 772344 - RNA, 17 nt, Artificial Sequence
  Synthetic
aacacacguguguaugu

SEQ ID NO: 772345 - RNA, 17 nt, Artificial Sequence
  Synthetic
aauauaugaaauuaugu

SEQ ID NO: 772346 - RNA, 17 nt, Artificial Sequence
  Synthetic
uucuugaauaauuaugu

SEQ ID NO: 772347 - RNA, 17 nt, Artificial Sequence
  Synthetic
cuuacuugacauuaugu

SEQ ID NO: 772348 - RNA, 17 nt, Artificial Sequence
  Synthetic
auuuucucccauuaugu

SEQ ID NO: 772349 - RNA, 17 nt, Artificial Sequence
  Synthetic
acucaguggcauuaugu

SEQ ID NO: 772350 - RNA, 17 nt, Artificial Sequence
  Synthetic
aacucagaucauuaugu

SEQ ID NO: 772351 - RNA, 17 nt, Artificial Sequence
  Synthetic
uguuuaagagauuaugu

SEQ ID NO: 772352 - RNA, 17 nt, Artificial Sequence
  Synthetic
caagacuuagauuaugu

SEQ ID NO: 772353 - RNA, 17 nt, Artificial Sequence
  Synthetic
aguucuuccuauuaugu

SEQ ID NO: 772354 - RNA, 17 nt, Artificial Sequence
  Synthetic
cuuucagaguauuaugu

SEQ ID NO: 772355 - RNA, 17 nt, Artificial Sequence
  Synthetic
cuuuuuauguauuaugu

SEQ ID NO: 772356 - RNA, 17 nt, Artificial Sequence
  Synthetic
caaaguuuguauuaugu

SEQ ID NO: 772357 - RNA, 17 nt, Artificial Sequence
  Synthetic
auaaaugugaguuaugu

SEQ ID NO: 772358 - RNA, 17 nt, Artificial Sequence
  Synthetic
uuuuguguaauuuaugu

SEQ ID NO: 772359 - RNA, 17 nt, Artificial Sequence
  Synthetic
uagugaaggauuuaugu

SEQ ID NO: 772360 - RNA, 17 nt, Artificial Sequence
  Synthetic
uuuaaaacuguuuaugu

SEQ ID NO: 772361 - RNA, 17 nt, Artificial Sequence
  Synthetic
ucugaauauuuuuaugu

SEQ ID NO: 772362 - RNA, 17 nt, Artificial Sequence
  Synthetic
uuggaaauuuuuuaugu

SEQ ID NO: 772363 - RNA, 17 nt, Artificial Sequence
  Synthetic
agggccaagaaaacugu

SEQ ID NO: 772364 - RNA, 17 nt, Artificial Sequence
  Synthetic
cucagauagaaaacugu

SEQ ID NO: 772365 - RNA, 17 nt, Artificial Sequence
  Synthetic
caucucccacaaacugu

SEQ ID NO: 772366 - RNA, 17 nt, Artificial Sequence
  Synthetic
uaggguugccaaacugu

SEQ ID NO: 772367 - RNA, 17 nt, Artificial Sequence
  Synthetic
aauaaaacagaaacugu

SEQ ID NO: 772368 - RNA, 17 nt, Artificial Sequence
  Synthetic
auaucagaggaaacugu

SEQ ID NO: 772369 - RNA, 17 nt, Artificial Sequence
  Synthetic
uucuagauauaaacugu

SEQ ID NO: 772370 - RNA, 17 nt, Artificial Sequence
  Synthetic
cauugcuuauaaacugu

SEQ ID NO: 772371 - RNA, 17 nt, Artificial Sequence
  Synthetic
uuaaaguagacaacugu

SEQ ID NO: 772372 - RNA, 17 nt, Artificial Sequence
  Synthetic
ugauuuugcccaacugu

SEQ ID NO: 772373 - RNA, 17 nt, Artificial Sequence
  Synthetic
ugacuuugcgcaacugu

SEQ ID NO: 772374 - RNA, 17 nt, Artificial Sequence
  Synthetic
ugcagcucaagaacugu

SEQ ID NO: 772375 - RNA, 17 nt, Artificial Sequence
  Synthetic
ugaaugaacagaacugu

SEQ ID NO: 772376 - RNA, 17 nt, Artificial Sequence
  Synthetic
uguaaucccagaacugu

SEQ ID NO: 772377 - RNA, 17 nt, Artificial Sequence
  Synthetic
cuauugaaaugaacugu

SEQ ID NO: 772378 - RNA, 17 nt, Artificial Sequence
  Synthetic
ucuuuucauauaacugu

SEQ ID NO: 772379 - RNA, 17 nt, Artificial Sequence
  Synthetic
uacugaucacuaacugu

SEQ ID NO: 772380 - RNA, 17 nt, Artificial Sequence
  Synthetic
agccuguauguaacugu

SEQ ID NO: 772381 - RNA, 17 nt, Artificial Sequence
  Synthetic
aaguauuuuguaacugu

SEQ ID NO: 772382 - RNA, 17 nt, Artificial Sequence
  Synthetic
augagaaaauuaacugu

SEQ ID NO: 772383 - RNA, 17 nt, Artificial Sequence
  Synthetic
aaaaaugaguuaacugu

SEQ ID NO: 772384 - RNA, 17 nt, Artificial Sequence
  Synthetic
agucucucuuuaacugu

SEQ ID NO: 772385 - RNA, 17 nt, Artificial Sequence
  Synthetic
uugucuuuuuuaacugu

SEQ ID NO: 772386 - RNA, 17 nt, Artificial Sequence
  Synthetic
auccuaggaaacacugu

SEQ ID NO: 772387 - RNA, 17 nt, Artificial Sequence
  Synthetic
cuuacaugcaacacugu

SEQ ID NO: 772388 - RNA, 17 nt, Artificial Sequence
  Synthetic
cuaaguaguaacacugu

SEQ ID NO: 772389 - RNA, 17 nt, Artificial Sequence
  Synthetic
uacuuugguaacacugu

SEQ ID NO: 772390 - RNA, 17 nt, Artificial Sequence
  Synthetic
caacagccacacacugu

SEQ ID NO: 772391 - RNA, 17 nt, Artificial Sequence
  Synthetic
aaaaccuugcacacugu

SEQ ID NO: 772392 - RNA, 17 nt, Artificial Sequence
  Synthetic
cccagggaguacacugu

SEQ ID NO: 772393 - RNA, 17 nt, Artificial Sequence
  Synthetic
caugcuccucccacugu

SEQ ID NO: 772394 - RNA, 17 nt, Artificial Sequence
  Synthetic
aauaauauguccacugu

SEQ ID NO: 772395 - RNA, 17 nt, Artificial Sequence
  Synthetic
cuccccccuuccacugu

SEQ ID NO: 772396 - RNA, 17 nt, Artificial Sequence
  Synthetic
uguaaucccagcacugu

SEQ ID NO: 772397 - RNA, 17 nt, Artificial Sequence
  Synthetic
ucauaaugcaucacugu

SEQ ID NO: 772398 - RNA, 17 nt, Artificial Sequence
  Synthetic
ccuaugaugaucacugu

SEQ ID NO: 772399 - RNA, 17 nt, Artificial Sequence
  Synthetic
aauuaaaauaucacugu

SEQ ID NO: 772400 - RNA, 17 nt, Artificial Sequence
  Synthetic
auccagucuaucacugu

SEQ ID NO: 772401 - RNA, 17 nt, Artificial Sequence
  Synthetic
ucuauguuagucacugu

SEQ ID NO: 772402 - RNA, 17 nt, Artificial Sequence
  Synthetic
aaugugauauucacugu

SEQ ID NO: 772403 - RNA, 17 nt, Artificial Sequence
  Synthetic
aguuuaaauaagacugu

SEQ ID NO: 772404 - RNA, 17 nt, Artificial Sequence
  Synthetic
acuuuuguuaagacugu

SEQ ID NO: 772405 - RNA, 17 nt, Artificial Sequence
  Synthetic
ccaagauaagagacugu

SEQ ID NO: 772406 - RNA, 17 nt, Artificial Sequence
  Synthetic
accuaaagagagacugu

SEQ ID NO: 772407 - RNA, 17 nt, Artificial Sequence
  Synthetic
cagccuccagcgacugu

SEQ ID NO: 772408 - RNA, 17 nt, Artificial Sequence
  Synthetic
aagaacacaaugacugu

SEQ ID NO: 772409 - RNA, 17 nt, Artificial Sequence
  Synthetic
auucagaaucugacugu

SEQ ID NO: 772410 - RNA, 17 nt, Artificial Sequence
  Synthetic
agacuuugagugacugu

SEQ ID NO: 772411 - RNA, 17 nt, Artificial Sequence
  Synthetic
agacuuugggugacugu

SEQ ID NO: 772412 - RNA, 17 nt, Artificial Sequence
  Synthetic
uugguggcauugacugu

SEQ ID NO: 772413 - RNA, 17 nt, Artificial Sequence
  Synthetic
uuuugguaucauacugu

SEQ ID NO: 772414 - RNA, 17 nt, Artificial Sequence
  Synthetic
cuggcuuuggauacugu

SEQ ID NO: 772415 - RNA, 17 nt, Artificial Sequence
  Synthetic
cauagaauugauacugu

SEQ ID NO: 772416 - RNA, 17 nt, Artificial Sequence
  Synthetic
auuucuaaaacuacugu

SEQ ID NO: 772417 - RNA, 17 nt, Artificial Sequence
  Synthetic
cucccaaaaucuacugu

SEQ ID NO: 772418 - RNA, 17 nt, Artificial Sequence
  Synthetic
uuugaaagaucuacugu

SEQ ID NO: 772419 - RNA, 17 nt, Artificial Sequence
  Synthetic
uuucugguaaguacugu

SEQ ID NO: 772420 - RNA, 17 nt, Artificial Sequence
  Synthetic
ucuuucaagauuacugu

SEQ ID NO: 772421 - RNA, 17 nt, Artificial Sequence
  Synthetic
uacaaaauacuuacugu

SEQ ID NO: 772422 - RNA, 17 nt, Artificial Sequence
  Synthetic
cagaaaccauuuacugu

SEQ ID NO: 772423 - RNA, 17 nt, Artificial Sequence
  Synthetic
aauuccuuuuuuacugu

SEQ ID NO: 772424 - RNA, 17 nt, Artificial Sequence
  Synthetic
cuccugcugaaaccugu

SEQ ID NO: 772425 - RNA, 17 nt, Artificial Sequence
  Synthetic
cacaugucuaaaccugu

SEQ ID NO: 772426 - RNA, 17 nt, Artificial Sequence
  Synthetic
ccuuuacuccaaccugu

SEQ ID NO: 772427 - RNA, 17 nt, Artificial Sequence
  Synthetic
uuugccacaugaccugu

SEQ ID NO: 772428 - RNA, 17 nt, Artificial Sequence
  Synthetic
cuuuauccuugaccugu

SEQ ID NO: 772429 - RNA, 17 nt, Artificial Sequence
  Synthetic
ccuuuucacauaccugu

SEQ ID NO: 772430 - RNA, 17 nt, Artificial Sequence
  Synthetic
uuucauuuucuaccugu

SEQ ID NO: 772431 - RNA, 17 nt, Artificial Sequence
  Synthetic
uauauuuugguaccugu

SEQ ID NO: 772432 - RNA, 17 nt, Artificial Sequence
  Synthetic
aguuacaaugacccugu

SEQ ID NO: 772433 - RNA, 17 nt, Artificial Sequence
  Synthetic
aggcagauguccccugu

SEQ ID NO: 772434 - RNA, 17 nt, Artificial Sequence
  Synthetic
cugugaucaagcccugu

SEQ ID NO: 772435 - RNA, 17 nt, Artificial Sequence
  Synthetic
cuggaacacagcccugu

SEQ ID NO: 772436 - RNA, 17 nt, Artificial Sequence
  Synthetic
auucuggguggcccugu

SEQ ID NO: 772437 - RNA, 17 nt, Artificial Sequence
  Synthetic
ucauuacuucucccugu

SEQ ID NO: 772438 - RNA, 17 nt, Artificial Sequence
  Synthetic
aacucgauauucccugu

SEQ ID NO: 772439 - RNA, 17 nt, Artificial Sequence
  Synthetic
uacagccucuucccugu

SEQ ID NO: 772440 - RNA, 17 nt, Artificial Sequence
  Synthetic
cuugaauuuaagccugu

SEQ ID NO: 772441 - RNA, 17 nt, Artificial Sequence
  Synthetic
uucaggauucagccugu

SEQ ID NO: 772442 - RNA, 17 nt, Artificial Sequence
  Synthetic
ugugguguugagccugu

SEQ ID NO: 772443 - RNA, 17 nt, Artificial Sequence
  Synthetic
agucagugguagccugu

SEQ ID NO: 772444 - RNA, 17 nt, Artificial Sequence
  Synthetic
cacacacugaggccugu

SEQ ID NO: 772445 - RNA, 17 nt, Artificial Sequence
  Synthetic
uggccgcaggggccugu

SEQ ID NO: 772446 - RNA, 17 nt, Artificial Sequence
  Synthetic
uaaagaaagaugccugu

SEQ ID NO: 772447 - RNA, 17 nt, Artificial Sequence
  Synthetic
cacacacuggugccugu

SEQ ID NO: 772448 - RNA, 17 nt, Artificial Sequence
  Synthetic
aaagcaguuuugccugu

SEQ ID NO: 772449 - RNA, 17 nt, Artificial Sequence
  Synthetic
acuauacaagauccugu

SEQ ID NO: 772450 - RNA, 17 nt, Artificial Sequence
  Synthetic
uuuaacauugauccugu

SEQ ID NO: 772451 - RNA, 17 nt, Artificial Sequence
  Synthetic
aagcaaccuucuccugu

SEQ ID NO: 772452 - RNA, 17 nt, Artificial Sequence
  Synthetic
uuccugcuuucuccugu

SEQ ID NO: 772453 - RNA, 17 nt, Artificial Sequence
  Synthetic
aauaaaaccuguccugu

SEQ ID NO: 772454 - RNA, 17 nt, Artificial Sequence
  Synthetic
ucuuccugcuguccugu

SEQ ID NO: 772455 - RNA, 17 nt, Artificial Sequence
  Synthetic
caaugugaaguuccugu

SEQ ID NO: 772456 - RNA, 17 nt, Artificial Sequence
  Synthetic
ucuaauauauuuccugu

SEQ ID NO: 772457 - RNA, 17 nt, Artificial Sequence
  Synthetic
uaugaaguguuuccugu

SEQ ID NO: 772458 - RNA, 17 nt, Artificial Sequence
  Synthetic
auuucauuuuuuccugu

SEQ ID NO: 772459 - RNA, 17 nt, Artificial Sequence
  Synthetic
aauuuuggcaaagcugu

SEQ ID NO: 772460 - RNA, 17 nt, Artificial Sequence
  Synthetic
uaauucugcaaagcugu

SEQ ID NO: 772461 - RNA, 17 nt, Artificial Sequence
  Synthetic
cucaaccaccaagcugu

SEQ ID NO: 772462 - RNA, 17 nt, Artificial Sequence
  Synthetic
cuccucaaauaagcugu

SEQ ID NO: 772463 - RNA, 17 nt, Artificial Sequence
  Synthetic
ugauucuuuacagcugu

SEQ ID NO: 772464 - RNA, 17 nt, Artificial Sequence
  Synthetic
aaauugccuucagcugu

SEQ ID NO: 772465 - RNA, 17 nt, Artificial Sequence
  Synthetic
auaaaggaaugagcugu

SEQ ID NO: 772466 - RNA, 17 nt, Artificial Sequence
  Synthetic
acugaaaagugagcugu

SEQ ID NO: 772467 - RNA, 17 nt, Artificial Sequence
  Synthetic
ugacacugcauagcugu

SEQ ID NO: 772468 - RNA, 17 nt, Artificial Sequence
  Synthetic
ucuagauauauagcugu

SEQ ID NO: 772469 - RNA, 17 nt, Artificial Sequence
  Synthetic
ucugauaagguagcugu

SEQ ID NO: 772470 - RNA, 17 nt, Artificial Sequence
  Synthetic
ugcaugauguuagcugu

SEQ ID NO: 772471 - RNA, 17 nt, Artificial Sequence
  Synthetic
agugggagcuacgcugu

SEQ ID NO: 772472 - RNA, 17 nt, Artificial Sequence
  Synthetic
auaaccccaaaggcugu

SEQ ID NO: 772473 - RNA, 17 nt, Artificial Sequence
  Synthetic
uaugcugccaaggcugu

SEQ ID NO: 772474 - RNA, 17 nt, Artificial Sequence
  Synthetic
aaguagcaucaggcugu

SEQ ID NO: 772475 - RNA, 17 nt, Artificial Sequence
  Synthetic
uagcacuaucaggcugu

SEQ ID NO: 772476 - RNA, 17 nt, Artificial Sequence
  Synthetic
cauguugcggaggcugu

SEQ ID NO: 772477 - RNA, 17 nt, Artificial Sequence
  Synthetic
uaucauacauaggcugu

SEQ ID NO: 772478 - RNA, 17 nt, Artificial Sequence
  Synthetic
augcaguuuccggcugu

SEQ ID NO: 772479 - RNA, 17 nt, Artificial Sequence
  Synthetic
acauuaugaggggcugu

SEQ ID NO: 772480 - RNA, 17 nt, Artificial Sequence
  Synthetic
cuaauauacugggcugu

SEQ ID NO: 772481 - RNA, 17 nt, Artificial Sequence
  Synthetic
ccuagaagcugggcugu

SEQ ID NO: 772482 - RNA, 17 nt, Artificial Sequence
  Synthetic
aguaugauaauggcugu

SEQ ID NO: 772483 - RNA, 17 nt, Artificial Sequence
  Synthetic
aaagaucagauggcugu

SEQ ID NO: 772484 - RNA, 17 nt, Artificial Sequence
  Synthetic
caggagccacuggcugu

SEQ ID NO: 772485 - RNA, 17 nt, Artificial Sequence
  Synthetic
aguaugauacuggcugu

SEQ ID NO: 772486 - RNA, 17 nt, Artificial Sequence
  Synthetic
uacugaacccuggcugu

SEQ ID NO: 772487 - RNA, 17 nt, Artificial Sequence
  Synthetic
aucugacagcuggcugu

SEQ ID NO: 772488 - RNA, 17 nt, Artificial Sequence
  Synthetic
ccaaacaaauuggcugu

SEQ ID NO: 772489 - RNA, 17 nt, Artificial Sequence
  Synthetic
aguaugauauuggcugu

SEQ ID NO: 772490 - RNA, 17 nt, Artificial Sequence
  Synthetic
cucauauccuuggcugu

SEQ ID NO: 772491 - RNA, 17 nt, Artificial Sequence
  Synthetic
agaauuuucuuggcugu

SEQ ID NO: 772492 - RNA, 17 nt, Artificial Sequence
  Synthetic
cuguagcaaaaugcugu

SEQ ID NO: 772493 - RNA, 17 nt, Artificial Sequence
  Synthetic
cuggggcucaaugcugu

SEQ ID NO: 772494 - RNA, 17 nt, Artificial Sequence
  Synthetic
aaugcuuugaaugcugu

SEQ ID NO: 772495 - RNA, 17 nt, Artificial Sequence
  Synthetic
aagcgagcacaugcugu

SEQ ID NO: 772496 - RNA, 17 nt, Artificial Sequence
  Synthetic
cagaggauucaugcugu

SEQ ID NO: 772497 - RNA, 17 nt, Artificial Sequence
  Synthetic
cuacgauuucaugcugu

SEQ ID NO: 772498 - RNA, 17 nt, Artificial Sequence
  Synthetic
uaaguaauggaugcugu

SEQ ID NO: 772499 - RNA, 17 nt, Artificial Sequence
  Synthetic
ugugugggugaugcugu

SEQ ID NO: 772500 - RNA, 17 nt, Artificial Sequence
  Synthetic
uaauaucucuaugcugu

SEQ ID NO: 772501 - RNA, 17 nt, Artificial Sequence
  Synthetic
cacuaauuguaugcugu

SEQ ID NO: 772502 - RNA, 17 nt, Artificial Sequence
  Synthetic
aaggcaaguuaugcugu

SEQ ID NO: 772503 - RNA, 17 nt, Artificial Sequence
  Synthetic
uuagaaaagacugcugu

SEQ ID NO: 772504 - RNA, 17 nt, Artificial Sequence
  Synthetic
acucuggggacugcugu

SEQ ID NO: 772505 - RNA, 17 nt, Artificial Sequence
  Synthetic
aagugaaauacugcugu

SEQ ID NO: 772506 - RNA, 17 nt, Artificial Sequence
  Synthetic
acacuggggccugcugu

SEQ ID NO: 772507 - RNA, 17 nt, Artificial Sequence
  Synthetic
cuuggugcagcugcugu

SEQ ID NO: 772508 - RNA, 17 nt, Artificial Sequence
  Synthetic
uaccaacuugcugcugu

SEQ ID NO: 772509 - RNA, 17 nt, Artificial Sequence
  Synthetic
uacaauuacucugcugu

SEQ ID NO: 772510 - RNA, 17 nt, Artificial Sequence
  Synthetic
caaggaaacagugcugu

SEQ ID NO: 772511 - RNA, 17 nt, Artificial Sequence
  Synthetic
uuuucacugagugcugu

SEQ ID NO: 772512 - RNA, 17 nt, Artificial Sequence
  Synthetic
auuuaguaacuugcugu

SEQ ID NO: 772513 - RNA, 17 nt, Artificial Sequence
  Synthetic
aaaauaaagguugcugu

SEQ ID NO: 772514 - RNA, 17 nt, Artificial Sequence
  Synthetic
cuuuaucaaaaaucugu

SEQ ID NO: 772515 - RNA, 17 nt, Artificial Sequence
  Synthetic
ugcccucaaaaaucugu

SEQ ID NO: 772516 - RNA, 17 nt, Artificial Sequence
  Synthetic
aagcucacaaaaucugu

SEQ ID NO: 772517 - RNA, 17 nt, Artificial Sequence
  Synthetic
aucauaauuaaaucugu

SEQ ID NO: 772518 - RNA, 17 nt, Artificial Sequence
  Synthetic
uuuuucuuuaaaucugu

SEQ ID NO: 772519 - RNA, 17 nt, Artificial Sequence
  Synthetic
aucuucucccaaucugu

SEQ ID NO: 772520 - RNA, 17 nt, Artificial Sequence
  Synthetic
ucuuaucugcaaucugu

SEQ ID NO: 772521 - RNA, 17 nt, Artificial Sequence
  Synthetic
cagaauugagaaucugu

SEQ ID NO: 772522 - RNA, 17 nt, Artificial Sequence
  Synthetic
aaauugagugaaucugu

SEQ ID NO: 772523 - RNA, 17 nt, Artificial Sequence
  Synthetic
aaaaaaauaccaucugu

SEQ ID NO: 772524 - RNA, 17 nt, Artificial Sequence
  Synthetic
uacaggaauccaucugu

SEQ ID NO: 772525 - RNA, 17 nt, Artificial Sequence
  Synthetic
aaaguuucugcaucugu

SEQ ID NO: 772526 - RNA, 17 nt, Artificial Sequence
  Synthetic
agucucacgagaucugu

SEQ ID NO: 772527 - RNA, 17 nt, Artificial Sequence
  Synthetic
uccagguguggaucugu

SEQ ID NO: 772528 - RNA, 17 nt, Artificial Sequence
  Synthetic
uauguggaaugaucugu

SEQ ID NO: 772529 - RNA, 17 nt, Artificial Sequence
  Synthetic
aaugaaguaauaucugu

SEQ ID NO: 772530 - RNA, 17 nt, Artificial Sequence
  Synthetic
aaaacuaagauaucugu

SEQ ID NO: 772531 - RNA, 17 nt, Artificial Sequence
  Synthetic
aauaucacacuaucugu

SEQ ID NO: 772532 - RNA, 17 nt, Artificial Sequence
  Synthetic
caccacuuucuaucugu

SEQ ID NO: 772533 - RNA, 17 nt, Artificial Sequence
  Synthetic
cauuauagguuaucugu

SEQ ID NO: 772534 - RNA, 17 nt, Artificial Sequence
  Synthetic
cuaggcacgcacucugu

SEQ ID NO: 772535 - RNA, 17 nt, Artificial Sequence
  Synthetic
caaaauccucacucugu

SEQ ID NO: 772536 - RNA, 17 nt, Artificial Sequence
  Synthetic
uguucuguucacucugu

SEQ ID NO: 772537 - RNA, 17 nt, Artificial Sequence
  Synthetic
ugaaucagagacucugu

SEQ ID NO: 772538 - RNA, 17 nt, Artificial Sequence
  Synthetic
aauuuauccuacucugu

SEQ ID NO: 772539 - RNA, 17 nt, Artificial Sequence
  Synthetic
acucuggcguacucugu

SEQ ID NO: 772540 - RNA, 17 nt, Artificial Sequence
  Synthetic
auuaaaagguacucugu

SEQ ID NO: 772541 - RNA, 17 nt, Artificial Sequence
  Synthetic
cuuugggauuacucugu

SEQ ID NO: 772542 - RNA, 17 nt, Artificial Sequence
  Synthetic
aauuuuaucaccucugu

SEQ ID NO: 772543 - RNA, 17 nt, Artificial Sequence
  Synthetic
aaauaccuggccucugu

SEQ ID NO: 772544 - RNA, 17 nt, Artificial Sequence
  Synthetic
uugaaccucagcucugu

SEQ ID NO: 772545 - RNA, 17 nt, Artificial Sequence
  Synthetic
uuuauuuauagcucugu

SEQ ID NO: 772546 - RNA, 17 nt, Artificial Sequence
  Synthetic
cuuaucauuagcucugu

SEQ ID NO: 772547 - RNA, 17 nt, Artificial Sequence
  Synthetic
cucccuaaucgcucugu

SEQ ID NO: 772548 - RNA, 17 nt, Artificial Sequence
  Synthetic
ucuugguuaggcucugu

SEQ ID NO: 772549 - RNA, 17 nt, Artificial Sequence
  Synthetic
acuuuuucagucucugu

SEQ ID NO: 772550 - RNA, 17 nt, Artificial Sequence
  Synthetic
uuuuuaguagucucugu

SEQ ID NO: 772551 - RNA, 17 nt, Artificial Sequence
  Synthetic
uugauacaggucucugu

SEQ ID NO: 772552 - RNA, 17 nt, Artificial Sequence
  Synthetic
cuacuaugugucucugu

SEQ ID NO: 772553 - RNA, 17 nt, Artificial Sequence
  Synthetic
uuuucuuuugucucugu

SEQ ID NO: 772554 - RNA, 17 nt, Artificial Sequence
  Synthetic
cugggcugauucucugu

SEQ ID NO: 772555 - RNA, 17 nt, Artificial Sequence
  Synthetic
cugggugccuucucugu

SEQ ID NO: 772556 - RNA, 17 nt, Artificial Sequence
  Synthetic
ugucuccuguucucugu

SEQ ID NO: 772557 - RNA, 17 nt, Artificial Sequence
  Synthetic
aacaaaaaacagucugu

SEQ ID NO: 772558 - RNA, 17 nt, Artificial Sequence
  Synthetic
aauugcacacagucugu

SEQ ID NO: 772559 - RNA, 17 nt, Artificial Sequence
  Synthetic
ucugauuaggagucugu

SEQ ID NO: 772560 - RNA, 17 nt, Artificial Sequence
  Synthetic
cauccuucagugucugu

SEQ ID NO: 772561 - RNA, 17 nt, Artificial Sequence
  Synthetic
ugugugugugugucugu

SEQ ID NO: 772562 - RNA, 17 nt, Artificial Sequence
  Synthetic
ugaguagcuuugucugu

SEQ ID NO: 772563 - RNA, 17 nt, Artificial Sequence
  Synthetic
cauauuauuaauucugu

SEQ ID NO: 772564 - RNA, 17 nt, Artificial Sequence
  Synthetic
auuuucucccauucugu

SEQ ID NO: 772565 - RNA, 17 nt, Artificial Sequence
  Synthetic
uuuuguucauauucugu

SEQ ID NO: 772566 - RNA, 17 nt, Artificial Sequence
  Synthetic
ugauuucucuauucugu

SEQ ID NO: 772567 - RNA, 17 nt, Artificial Sequence
  Synthetic
ucugcuucuuauucugu

SEQ ID NO: 772568 - RNA, 17 nt, Artificial Sequence
  Synthetic
aauguccaaacuucugu

SEQ ID NO: 772569 - RNA, 17 nt, Artificial Sequence
  Synthetic
uaacagaguacuucugu

SEQ ID NO: 772570 - RNA, 17 nt, Artificial Sequence
  Synthetic
ucgcauuaaccuucugu

SEQ ID NO: 772571 - RNA, 17 nt, Artificial Sequence
  Synthetic
uaaauaaauccuucugu

SEQ ID NO: 772572 - RNA, 17 nt, Artificial Sequence
  Synthetic
ucccucacggcuucugu

SEQ ID NO: 772573 - RNA, 17 nt, Artificial Sequence
  Synthetic
augaagauugcuucugu

SEQ ID NO: 772574 - RNA, 17 nt, Artificial Sequence
  Synthetic
aucugcuagucuucugu

SEQ ID NO: 772575 - RNA, 17 nt, Artificial Sequence
  Synthetic
uuuggaaauucuucugu

SEQ ID NO: 772576 - RNA, 17 nt, Artificial Sequence
  Synthetic
ugcauugcuucuucugu

SEQ ID NO: 772577 - RNA, 17 nt, Artificial Sequence
  Synthetic
auauaugguucuucugu

SEQ ID NO: 772578 - RNA, 17 nt, Artificial Sequence
  Synthetic
ucacucauagguucugu

SEQ ID NO: 772579 - RNA, 17 nt, Artificial Sequence
  Synthetic
ccaugaauauguucugu

SEQ ID NO: 772580 - RNA, 17 nt, Artificial Sequence
  Synthetic
uuuuauugguguucugu

SEQ ID NO: 772581 - RNA, 17 nt, Artificial Sequence
  Synthetic
uaaaauggaauuucugu

SEQ ID NO: 772582 - RNA, 17 nt, Artificial Sequence
  Synthetic
uaacuaugcauuucugu

SEQ ID NO: 772583 - RNA, 17 nt, Artificial Sequence
  Synthetic
cuuuuggcuauuucugu

SEQ ID NO: 772584 - RNA, 17 nt, Artificial Sequence
  Synthetic
uaugcccaccuuucugu

SEQ ID NO: 772585 - RNA, 17 nt, Artificial Sequence
  Synthetic
auuuucucccuuucugu

SEQ ID NO: 772586 - RNA, 17 nt, Artificial Sequence
  Synthetic
aggcuagagcuuucugu

SEQ ID NO: 772587 - RNA, 17 nt, Artificial Sequence
  Synthetic
uaaugaacauuuucugu

SEQ ID NO: 772588 - RNA, 17 nt, Artificial Sequence
  Synthetic
ugaaccugguuuucugu

SEQ ID NO: 772589 - RNA, 17 nt, Artificial Sequence
  Synthetic
auauauauuuuuucugu

SEQ ID NO: 772590 - RNA, 17 nt, Artificial Sequence
  Synthetic
uugagaauaaaaagugu

SEQ ID NO: 772591 - RNA, 17 nt, Artificial Sequence
  Synthetic
caaaagauaaaaagugu

SEQ ID NO: 772592 - RNA, 17 nt, Artificial Sequence
  Synthetic
ugaucacuaaaaagugu

SEQ ID NO: 772593 - RNA, 17 nt, Artificial Sequence
  Synthetic
cuggagaucaaaagugu

SEQ ID NO: 772594 - RNA, 17 nt, Artificial Sequence
  Synthetic
agacaaaagaaaagugu

SEQ ID NO: 772595 - RNA, 17 nt, Artificial Sequence
  Synthetic
cccagucagaaaagugu

SEQ ID NO: 772596 - RNA, 17 nt, Artificial Sequence
  Synthetic
cuaguagcuaaaagugu

SEQ ID NO: 772597 - RNA, 17 nt, Artificial Sequence
  Synthetic
uaauguuuacaaagugu

SEQ ID NO: 772598 - RNA, 17 nt, Artificial Sequence
  Synthetic
ucggccccccaaagugu

SEQ ID NO: 772599 - RNA, 17 nt, Artificial Sequence
  Synthetic
ucagccucccaaagugu

SEQ ID NO: 772600 - RNA, 17 nt, Artificial Sequence
  Synthetic
ucggccucccaaagugu

SEQ ID NO: 772601 - RNA, 17 nt, Artificial Sequence
  Synthetic
aaaacucuccaaagugu

SEQ ID NO: 772602 - RNA, 17 nt, Artificial Sequence
  Synthetic
aguuguuuucaaagugu

SEQ ID NO: 772603 - RNA, 17 nt, Artificial Sequence
  Synthetic
acaauaaaggaaagugu

SEQ ID NO: 772604 - RNA, 17 nt, Artificial Sequence
  Synthetic
aauauaaugccaagugu

SEQ ID NO: 772605 - RNA, 17 nt, Artificial Sequence
  Synthetic
uucuugaauccaagugu

SEQ ID NO: 772606 - RNA, 17 nt, Artificial Sequence
  Synthetic
augucauuuccaagugu

SEQ ID NO: 772607 - RNA, 17 nt, Artificial Sequence
  Synthetic
auuuacagaucaagugu

SEQ ID NO: 772608 - RNA, 17 nt, Artificial Sequence
  Synthetic
accugagucagaagugu

SEQ ID NO: 772609 - RNA, 17 nt, Artificial Sequence
  Synthetic
aagacauugggaagugu

SEQ ID NO: 772610 - RNA, 17 nt, Artificial Sequence
  Synthetic
auuggagacugaagugu

SEQ ID NO: 772611 - RNA, 17 nt, Artificial Sequence
  Synthetic
cuuuuucagugaagugu

SEQ ID NO: 772612 - RNA, 17 nt, Artificial Sequence
  Synthetic
aaugaguauugaagugu

SEQ ID NO: 772613 - RNA, 17 nt, Artificial Sequence
  Synthetic
caaggaaaaauaagugu

SEQ ID NO: 772614 - RNA, 17 nt, Artificial Sequence
  Synthetic
ucuaaagauguaagugu

SEQ ID NO: 772615 - RNA, 17 nt, Artificial Sequence
  Synthetic
cagcaauguguaagugu

SEQ ID NO: 772616 - RNA, 17 nt, Artificial Sequence
  Synthetic
aagaguuauaacagugu

SEQ ID NO: 772617 - RNA, 17 nt, Artificial Sequence
  Synthetic
ccacagccccccagugu

SEQ ID NO: 772618 - RNA, 17 nt, Artificial Sequence
  Synthetic
aauguaauucccagugu

SEQ ID NO: 772619 - RNA, 17 nt, Artificial Sequence
  Synthetic
uacacaaucuccagugu

SEQ ID NO: 772620 - RNA, 17 nt, Artificial Sequence
  Synthetic
uauccugaaagcagugu

SEQ ID NO: 772621 - RNA, 17 nt, Artificial Sequence
  Synthetic
uagccaaggagcagugu

SEQ ID NO: 772622 - RNA, 17 nt, Artificial Sequence
  Synthetic
uuucucuacaucagugu

SEQ ID NO: 772623 - RNA, 17 nt, Artificial Sequence
  Synthetic
aacaauuacaucagugu

SEQ ID NO: 772624 - RNA, 17 nt, Artificial Sequence
  Synthetic
aacauagccaucagugu

SEQ ID NO: 772625 - RNA, 17 nt, Artificial Sequence
  Synthetic
uuuuaaagauucagugu

SEQ ID NO: 772626 - RNA, 17 nt, Artificial Sequence
  Synthetic
caaaaugcuuucagugu

SEQ ID NO: 772627 - RNA, 17 nt, Artificial Sequence
  Synthetic
aacucaguaaagagugu

SEQ ID NO: 772628 - RNA, 17 nt, Artificial Sequence
  Synthetic
acccauuucaagagugu

SEQ ID NO: 772629 - RNA, 17 nt, Artificial Sequence
  Synthetic
acauuuuagcagagugu

SEQ ID NO: 772630 - RNA, 17 nt, Artificial Sequence
  Synthetic
aaaacacuucagagugu

SEQ ID NO: 772631 - RNA, 17 nt, Artificial Sequence
  Synthetic
uucugauuggagagugu

SEQ ID NO: 772632 - RNA, 17 nt, Artificial Sequence
  Synthetic
cugaaggggcggagugu

SEQ ID NO: 772633 - RNA, 17 nt, Artificial Sequence
  Synthetic
aagucauugaugagugu

SEQ ID NO: 772634 - RNA, 17 nt, Artificial Sequence
  Synthetic
aauaaccuacugagugu

SEQ ID NO: 772635 - RNA, 17 nt, Artificial Sequence
  Synthetic
cuuaauaugaauagugu

SEQ ID NO: 772636 - RNA, 17 nt, Artificial Sequence
  Synthetic
ccuauucaacauagugu

SEQ ID NO: 772637 - RNA, 17 nt, Artificial Sequence
  Synthetic
aagaggaagcauagugu

SEQ ID NO: 772638 - RNA, 17 nt, Artificial Sequence
  Synthetic
aagcugguugauagugu

SEQ ID NO: 772639 - RNA, 17 nt, Artificial Sequence
  Synthetic
uaggaggucccuagugu

SEQ ID NO: 772640 - RNA, 17 nt, Artificial Sequence
  Synthetic
cagcugaaagguagugu

SEQ ID NO: 772641 - RNA, 17 nt, Artificial Sequence
  Synthetic
aauaauauugguagugu

SEQ ID NO: 772642 - RNA, 17 nt, Artificial Sequence
  Synthetic
aggcauccuuguagugu

SEQ ID NO: 772643 - RNA, 17 nt, Artificial Sequence
  Synthetic
auacucaagcuuagugu

SEQ ID NO: 772644 - RNA, 17 nt, Artificial Sequence
  Synthetic
acuuuauagcuuagugu

SEQ ID NO: 772645 - RNA, 17 nt, Artificial Sequence
  Synthetic
ucccucccaggacgugu

SEQ ID NO: 772646 - RNA, 17 nt, Artificial Sequence
  Synthetic
acaggguuucaccgugu

SEQ ID NO: 772647 - RNA, 17 nt, Artificial Sequence
  Synthetic
cuauacaugugccgugu

SEQ ID NO: 772648 - RNA, 17 nt, Artificial Sequence
  Synthetic
aaauuggccaggcgugu

SEQ ID NO: 772649 - RNA, 17 nt, Artificial Sequence
  Synthetic
uguuaauuaaaaggugu

SEQ ID NO: 772650 - RNA, 17 nt, Artificial Sequence
  Synthetic
uauauuugcaaaggugu

SEQ ID NO: 772651 - RNA, 17 nt, Artificial Sequence
  Synthetic
cugggggauaaaggugu

SEQ ID NO: 772652 - RNA, 17 nt, Artificial Sequence
  Synthetic
caaaggcugcaaggugu

SEQ ID NO: 772653 - RNA, 17 nt, Artificial Sequence
  Synthetic
agugaugaggaaggugu

SEQ ID NO: 772654 - RNA, 17 nt, Artificial Sequence
  Synthetic
uguguuggugaaggugu

SEQ ID NO: 772655 - RNA, 17 nt, Artificial Sequence
  Synthetic
uaaccaaaguaaggugu

SEQ ID NO: 772656 - RNA, 17 nt, Artificial Sequence
  Synthetic
aaaaauuagccaggugu

SEQ ID NO: 772657 - RNA, 17 nt, Artificial Sequence
  Synthetic
ugcuacugaagaggugu

SEQ ID NO: 772658 - RNA, 17 nt, Artificial Sequence
  Synthetic
uugaaccugggaggugu

SEQ ID NO: 772659 - RNA, 17 nt, Artificial Sequence
  Synthetic
cuaauuauaugaggugu

SEQ ID NO: 772660 - RNA, 17 nt, Artificial Sequence
  Synthetic
uuaagccacugaggugu

SEQ ID NO: 772661 - RNA, 17 nt, Artificial Sequence
  Synthetic
acauauauaauaggugu

SEQ ID NO: 772662 - RNA, 17 nt, Artificial Sequence
  Synthetic
cauaaaaaucuaggugu

SEQ ID NO: 772663 - RNA, 17 nt, Artificial Sequence
  Synthetic
cauucccagcccggugu

SEQ ID NO: 772664 - RNA, 17 nt, Artificial Sequence
  Synthetic
acaacaggaaagggugu

SEQ ID NO: 772665 - RNA, 17 nt, Artificial Sequence
  Synthetic
cccuagcuccagggugu

SEQ ID NO: 772666 - RNA, 17 nt, Artificial Sequence
  Synthetic
aggauugggcagggugu

SEQ ID NO: 772667 - RNA, 17 nt, Artificial Sequence
  Synthetic
agacaaugugggggugu

SEQ ID NO: 772668 - RNA, 17 nt, Artificial Sequence
  Synthetic
uucucuuuugggggugu

SEQ ID NO: 772669 - RNA, 17 nt, Artificial Sequence
  Synthetic
aaaaauuaacugggugu

SEQ ID NO: 772670 - RNA, 17 nt, Artificial Sequence
  Synthetic
ugauggaaucugggugu

SEQ ID NO: 772671 - RNA, 17 nt, Artificial Sequence
  Synthetic
aauuucagagugggugu

SEQ ID NO: 772672 - RNA, 17 nt, Artificial Sequence
  Synthetic
aacaugcaugugggugu

SEQ ID NO: 772673 - RNA, 17 nt, Artificial Sequence
  Synthetic
uaacaaugcuugggugu

SEQ ID NO: 772674 - RNA, 17 nt, Artificial Sequence
  Synthetic
ucuccuuuguugggugu

SEQ ID NO: 772675 - RNA, 17 nt, Artificial Sequence
  Synthetic
uauuuaauaaauggugu

SEQ ID NO: 772676 - RNA, 17 nt, Artificial Sequence
  Synthetic
uauaaauuaaauggugu

SEQ ID NO: 772677 - RNA, 17 nt, Artificial Sequence
  Synthetic
aaguaagcacauggugu

SEQ ID NO: 772678 - RNA, 17 nt, Artificial Sequence
  Synthetic
ucuaaucuccauggugu

SEQ ID NO: 772679 - RNA, 17 nt, Artificial Sequence
  Synthetic
uccuuaggggauggugu

SEQ ID NO: 772680 - RNA, 17 nt, Artificial Sequence
  Synthetic
auguaccacucuggugu

SEQ ID NO: 772681 - RNA, 17 nt, Artificial Sequence
  Synthetic
aaaucuagcaguggugu

SEQ ID NO: 772682 - RNA, 17 nt, Artificial Sequence
  Synthetic
uuguauuucuguggugu

SEQ ID NO: 772683 - RNA, 17 nt, Artificial Sequence
  Synthetic
uucauguuaguuggugu

SEQ ID NO: 772684 - RNA, 17 nt, Artificial Sequence
  Synthetic
auguuuuugguuggugu

SEQ ID NO: 772685 - RNA, 17 nt, Artificial Sequence
  Synthetic
uguuagccauuuggugu

SEQ ID NO: 772686 - RNA, 17 nt, Artificial Sequence
  Synthetic
aauggcugcuuuggugu

SEQ ID NO: 772687 - RNA, 17 nt, Artificial Sequence
  Synthetic
auugucauaaaaugugu

SEQ ID NO: 772688 - RNA, 17 nt, Artificial Sequence
  Synthetic
uuucagcuaaaaugugu

SEQ ID NO: 772689 - RNA, 17 nt, Artificial Sequence
  Synthetic
uaugcucacaaaugugu

SEQ ID NO: 772690 - RNA, 17 nt, Artificial Sequence
  Synthetic
augcaaaagaaaugugu

SEQ ID NO: 772691 - RNA, 17 nt, Artificial Sequence
  Synthetic
agcuagaaacaaugugu

SEQ ID NO: 772692 - RNA, 17 nt, Artificial Sequence
  Synthetic
uugaugggacaaugugu

SEQ ID NO: 772693 - RNA, 17 nt, Artificial Sequence
  Synthetic
uuucuaauucaaugugu

SEQ ID NO: 772694 - RNA, 17 nt, Artificial Sequence
  Synthetic
uagauuuuucaaugugu

SEQ ID NO: 772695 - RNA, 17 nt, Artificial Sequence
  Synthetic
augggaucagaaugugu

SEQ ID NO: 772696 - RNA, 17 nt, Artificial Sequence
  Synthetic
ucacaucuggaaugugu

SEQ ID NO: 772697 - RNA, 17 nt, Artificial Sequence
  Synthetic
ucccauuauuaaugugu

SEQ ID NO: 772698 - RNA, 17 nt, Artificial Sequence
  Synthetic
agcguuguaacaugugu

SEQ ID NO: 772699 - RNA, 17 nt, Artificial Sequence
  Synthetic
ucagggaguacaugugu

SEQ ID NO: 772700 - RNA, 17 nt, Artificial Sequence
  Synthetic
cucagggguacaugugu

SEQ ID NO: 772701 - RNA, 17 nt, Artificial Sequence
  Synthetic
aagaucauuacaugugu

SEQ ID NO: 772702 - RNA, 17 nt, Artificial Sequence
  Synthetic
uugucuuuuacaugugu

SEQ ID NO: 772703 - RNA, 17 nt, Artificial Sequence
  Synthetic
ccccaaauuucaugugu

SEQ ID NO: 772704 - RNA, 17 nt, Artificial Sequence
  Synthetic
cauucugauagaugugu

SEQ ID NO: 772705 - RNA, 17 nt, Artificial Sequence
  Synthetic
uacauggauggaugugu

SEQ ID NO: 772706 - RNA, 17 nt, Artificial Sequence
  Synthetic
auugugucaauaugugu

SEQ ID NO: 772707 - RNA, 17 nt, Artificial Sequence
  Synthetic
uuaucauuuauaugugu

SEQ ID NO: 772708 - RNA, 17 nt, Artificial Sequence
  Synthetic
uguguucccuuaugugu

SEQ ID NO: 772709 - RNA, 17 nt, Artificial Sequence
  Synthetic
ucggaguuucacugugu

SEQ ID NO: 772710 - RNA, 17 nt, Artificial Sequence
  Synthetic
acaggguuucacugugu

SEQ ID NO: 772711 - RNA, 17 nt, Artificial Sequence
  Synthetic
ucucacuauuacugugu

SEQ ID NO: 772712 - RNA, 17 nt, Artificial Sequence
  Synthetic
uauaauuaagccugugu

SEQ ID NO: 772713 - RNA, 17 nt, Artificial Sequence
  Synthetic
aagacucccuccugugu

SEQ ID NO: 772714 - RNA, 17 nt, Artificial Sequence
  Synthetic
auacaaaagggcugugu

SEQ ID NO: 772715 - RNA, 17 nt, Artificial Sequence
  Synthetic
caguggggacucugugu

SEQ ID NO: 772716 - RNA, 17 nt, Artificial Sequence
  Synthetic
cuaucaagagucugugu

SEQ ID NO: 772717 - RNA, 17 nt, Artificial Sequence
  Synthetic
uauucuaaauucugugu

SEQ ID NO: 772718 - RNA, 17 nt, Artificial Sequence
  Synthetic
uagaaacucuucugugu

SEQ ID NO: 772719 - RNA, 17 nt, Artificial Sequence
  Synthetic
ccaucuucuuucugugu

SEQ ID NO: 772720 - RNA, 17 nt, Artificial Sequence
  Synthetic
ucagauuguuucugugu

SEQ ID NO: 772721 - RNA, 17 nt, Artificial Sequence
  Synthetic
uuuuuuuuaaagugugu

SEQ ID NO: 772722 - RNA, 17 nt, Artificial Sequence
  Synthetic
uggaauuguaagugugu

SEQ ID NO: 772723 - RNA, 17 nt, Artificial Sequence
  Synthetic
auaguucuuaagugugu

SEQ ID NO: 772724 - RNA, 17 nt, Artificial Sequence
  Synthetic
auugcugaacagugugu

SEQ ID NO: 772725 - RNA, 17 nt, Artificial Sequence
  Synthetic
ccaguaguugagugugu

SEQ ID NO: 772726 - RNA, 17 nt, Artificial Sequence
  Synthetic
aauagaagauagugugu

SEQ ID NO: 772727 - RNA, 17 nt, Artificial Sequence
  Synthetic
cuggcacuaacgugugu

SEQ ID NO: 772728 - RNA, 17 nt, Artificial Sequence
  Synthetic
auugaucaaaggugugu

SEQ ID NO: 772729 - RNA, 17 nt, Artificial Sequence
  Synthetic
auggauucaaggugugu

SEQ ID NO: 772730 - RNA, 17 nt, Artificial Sequence
  Synthetic
auaucuguagggugugu

SEQ ID NO: 772731 - RNA, 17 nt, Artificial Sequence
  Synthetic
aaugcugaauggugugu

SEQ ID NO: 772732 - RNA, 17 nt, Artificial Sequence
  Synthetic
ucuucuaaaaugugugu

SEQ ID NO: 772733 - RNA, 17 nt, Artificial Sequence
  Synthetic
ugcaugcccaugugugu

SEQ ID NO: 772734 - RNA, 17 nt, Artificial Sequence
  Synthetic
uaucaacagaugugugu

SEQ ID NO: 772735 - RNA, 17 nt, Artificial Sequence
  Synthetic
uauaggaggaugugugu

SEQ ID NO: 772736 - RNA, 17 nt, Artificial Sequence
  Synthetic
aaaaaauguaugugugu

SEQ ID NO: 772737 - RNA, 17 nt, Artificial Sequence
  Synthetic
auucagugacugugugu

SEQ ID NO: 772738 - RNA, 17 nt, Artificial Sequence
  Synthetic
uuuaugucccugugugu

SEQ ID NO: 772739 - RNA, 17 nt, Artificial Sequence
  Synthetic
auaacccagcugugugu

SEQ ID NO: 772740 - RNA, 17 nt, Artificial Sequence
  Synthetic
uauguguaugugugugu

SEQ ID NO: 772741 - RNA, 17 nt, Artificial Sequence
  Synthetic
ugcgacugugugugugu

SEQ ID NO: 772742 - RNA, 17 nt, Artificial Sequence
  Synthetic
ugugugugugugugugu

SEQ ID NO: 772743 - RNA, 17 nt, Artificial Sequence
  Synthetic
uacuauugugugugugu

SEQ ID NO: 772744 - RNA, 17 nt, Artificial Sequence
  Synthetic
aauugaucauugugugu

SEQ ID NO: 772745 - RNA, 17 nt, Artificial Sequence
  Synthetic
uuuccuguuuugugugu

SEQ ID NO: 772746 - RNA, 17 nt, Artificial Sequence
  Synthetic
acaugugcacauugugu

SEQ ID NO: 772747 - RNA, 17 nt, Artificial Sequence
  Synthetic
ugaacaagagauugugu

SEQ ID NO: 772748 - RNA, 17 nt, Artificial Sequence
  Synthetic
cuucucugauauugugu

SEQ ID NO: 772749 - RNA, 17 nt, Artificial Sequence
  Synthetic
aagacaaucuauugugu

SEQ ID NO: 772750 - RNA, 17 nt, Artificial Sequence
  Synthetic
ccuugacugacuugugu

SEQ ID NO: 772751 - RNA, 17 nt, Artificial Sequence
  Synthetic
uauguaugaccuugugu

SEQ ID NO: 772752 - RNA, 17 nt, Artificial Sequence
  Synthetic
auuguucucccuugugu

SEQ ID NO: 772753 - RNA, 17 nt, Artificial Sequence
  Synthetic
uggcuugguccuugugu

SEQ ID NO: 772754 - RNA, 17 nt, Artificial Sequence
  Synthetic
cuauaaggagcuugugu

SEQ ID NO: 772755 - RNA, 17 nt, Artificial Sequence
  Synthetic
aagaaauuggcuugugu

SEQ ID NO: 772756 - RNA, 17 nt, Artificial Sequence
  Synthetic
auacuuccugcuugugu

SEQ ID NO: 772757 - RNA, 17 nt, Artificial Sequence
  Synthetic
uuguuuccugcuugugu

SEQ ID NO: 772758 - RNA, 17 nt, Artificial Sequence
  Synthetic
aggguuggggguugugu

SEQ ID NO: 772759 - RNA, 17 nt, Artificial Sequence
  Synthetic
aguuuacaaauuugugu

SEQ ID NO: 772760 - RNA, 17 nt, Artificial Sequence
  Synthetic
uuccaugguauuugugu

SEQ ID NO: 772761 - RNA, 17 nt, Artificial Sequence
  Synthetic
uggucauuuauuugugu

SEQ ID NO: 772762 - RNA, 17 nt, Artificial Sequence
  Synthetic
ccuaagucccuuugugu

SEQ ID NO: 772763 - RNA, 17 nt, Artificial Sequence
  Synthetic
cuucuggagcuuugugu

SEQ ID NO: 772764 - RNA, 17 nt, Artificial Sequence
  Synthetic
uuaccauugcuuugugu

SEQ ID NO: 772765 - RNA, 17 nt, Artificial Sequence
  Synthetic
uuuacuccucuuugugu

SEQ ID NO: 772766 - RNA, 17 nt, Artificial Sequence
  Synthetic
accaccuagguuugugu

SEQ ID NO: 772767 - RNA, 17 nt, Artificial Sequence
  Synthetic
caccauucuuuuugugu

SEQ ID NO: 772768 - RNA, 17 nt, Artificial Sequence
  Synthetic
aaguuauagaaaauugu

SEQ ID NO: 772769 - RNA, 17 nt, Artificial Sequence
  Synthetic
uaagccacuaaaauugu

SEQ ID NO: 772770 - RNA, 17 nt, Artificial Sequence
  Synthetic
cucaaucaccaaauugu

SEQ ID NO: 772771 - RNA, 17 nt, Artificial Sequence
  Synthetic
auucaacaagaaauugu

SEQ ID NO: 772772 - RNA, 17 nt, Artificial Sequence
  Synthetic
auugucuaauaaauugu

SEQ ID NO: 772773 - RNA, 17 nt, Artificial Sequence
  Synthetic
ugcuauauauaaauugu

SEQ ID NO: 772774 - RNA, 17 nt, Artificial Sequence
  Synthetic
agugaaucuuaaauugu

SEQ ID NO: 772775 - RNA, 17 nt, Artificial Sequence
  Synthetic
ucuggagaugcaauugu

SEQ ID NO: 772776 - RNA, 17 nt, Artificial Sequence
  Synthetic
aacaggaagucaauugu

SEQ ID NO: 772777 - RNA, 17 nt, Artificial Sequence
  Synthetic
ucaagauauagaauugu

SEQ ID NO: 772778 - RNA, 17 nt, Artificial Sequence
  Synthetic
ccaauggguagaauugu

SEQ ID NO: 772779 - RNA, 17 nt, Artificial Sequence
  Synthetic
ucccccuguggaauugu

SEQ ID NO: 772780 - RNA, 17 nt, Artificial Sequence
  Synthetic
uuguuaauaauaauugu

SEQ ID NO: 772781 - RNA, 17 nt, Artificial Sequence
  Synthetic
ccuauuguaauaauugu

SEQ ID NO: 772782 - RNA, 17 nt, Artificial Sequence
  Synthetic
uggaaaaccauaauugu

SEQ ID NO: 772783 - RNA, 17 nt, Artificial Sequence
  Synthetic
aagguggagauaauugu

SEQ ID NO: 772784 - RNA, 17 nt, Artificial Sequence
  Synthetic
acaaaaauuauaauugu

SEQ ID NO: 772785 - RNA, 17 nt, Artificial Sequence
  Synthetic
auauaaugacuaauugu

SEQ ID NO: 772786 - RNA, 17 nt, Artificial Sequence
  Synthetic
aaaaaaucaguaauugu

SEQ ID NO: 772787 - RNA, 17 nt, Artificial Sequence
  Synthetic
uacauaucauuaauugu

SEQ ID NO: 772788 - RNA, 17 nt, Artificial Sequence
  Synthetic
uuacugagauuaauugu

SEQ ID NO: 772789 - RNA, 17 nt, Artificial Sequence
  Synthetic
aaugcagaguuaauugu

SEQ ID NO: 772790 - RNA, 17 nt, Artificial Sequence
  Synthetic
cauugaaauuuaauugu

SEQ ID NO: 772791 - RNA, 17 nt, Artificial Sequence
  Synthetic
aucugcaacaacauugu

SEQ ID NO: 772792 - RNA, 17 nt, Artificial Sequence
  Synthetic
aauauugcacacauugu

SEQ ID NO: 772793 - RNA, 17 nt, Artificial Sequence
  Synthetic
ugauuauuacacauugu

SEQ ID NO: 772794 - RNA, 17 nt, Artificial Sequence
  Synthetic
cacuuagaggacauugu

SEQ ID NO: 772795 - RNA, 17 nt, Artificial Sequence
  Synthetic
cccaugcuggacauugu

SEQ ID NO: 772796 - RNA, 17 nt, Artificial Sequence
  Synthetic
agcugguauuacauugu

SEQ ID NO: 772797 - RNA, 17 nt, Artificial Sequence
  Synthetic
acaacucaccccauugu

SEQ ID NO: 772798 - RNA, 17 nt, Artificial Sequence
  Synthetic
ugccucuucuccauugu

SEQ ID NO: 772799 - RNA, 17 nt, Artificial Sequence
  Synthetic
auauuuuauuccauugu

SEQ ID NO: 772800 - RNA, 17 nt, Artificial Sequence
  Synthetic
aaguuuuauuccauugu

SEQ ID NO: 772801 - RNA, 17 nt, Artificial Sequence
  Synthetic
aaggcagagagcauugu

SEQ ID NO: 772802 - RNA, 17 nt, Artificial Sequence
  Synthetic
cuaugucguagcauugu

SEQ ID NO: 772803 - RNA, 17 nt, Artificial Sequence
  Synthetic
agguagaaaggcauugu

SEQ ID NO: 772804 - RNA, 17 nt, Artificial Sequence
  Synthetic
aaauaugaaggcauugu

SEQ ID NO: 772805 - RNA, 17 nt, Artificial Sequence
  Synthetic
aaauggccaggcauugu

SEQ ID NO: 772806 - RNA, 17 nt, Artificial Sequence
  Synthetic
aaacacuucugcauugu

SEQ ID NO: 772807 - RNA, 17 nt, Artificial Sequence
  Synthetic
uguagagauugcauugu

SEQ ID NO: 772808 - RNA, 17 nt, Artificial Sequence
  Synthetic
auuuuuuuuugcauugu

SEQ ID NO: 772809 - RNA, 17 nt, Artificial Sequence
  Synthetic
auccagucuaucauugu

SEQ ID NO: 772810 - RNA, 17 nt, Artificial Sequence
  Synthetic
uuauaguaccucauugu

SEQ ID NO: 772811 - RNA, 17 nt, Artificial Sequence
  Synthetic
uauccuucucucauugu

SEQ ID NO: 772812 - RNA, 17 nt, Artificial Sequence
  Synthetic
ucaaaacauuucauugu

SEQ ID NO: 772813 - RNA, 17 nt, Artificial Sequence
  Synthetic
uaacuacauuucauugu

SEQ ID NO: 772814 - RNA, 17 nt, Artificial Sequence
  Synthetic
cacuguccccagauugu

SEQ ID NO: 772815 - RNA, 17 nt, Artificial Sequence
  Synthetic
uuuuacaaggagauugu

SEQ ID NO: 772816 - RNA, 17 nt, Artificial Sequence
  Synthetic
agcacaagggagauugu

SEQ ID NO: 772817 - RNA, 17 nt, Artificial Sequence
  Synthetic
auuuaagaugagauugu

SEQ ID NO: 772818 - RNA, 17 nt, Artificial Sequence
  Synthetic
aguaugcagaggauugu

SEQ ID NO: 772819 - RNA, 17 nt, Artificial Sequence
  Synthetic
uggccucauaggauugu

SEQ ID NO: 772820 - RNA, 17 nt, Artificial Sequence
  Synthetic
ugacauguggggauugu

SEQ ID NO: 772821 - RNA, 17 nt, Artificial Sequence
  Synthetic
uguagaaaauggauugu

SEQ ID NO: 772822 - RNA, 17 nt, Artificial Sequence
  Synthetic
aagcaggccaugauugu

SEQ ID NO: 772823 - RNA, 17 nt, Artificial Sequence
  Synthetic
uuaacucauaugauugu

SEQ ID NO: 772824 - RNA, 17 nt, Artificial Sequence
  Synthetic
acuuccccagugauugu

SEQ ID NO: 772825 - RNA, 17 nt, Artificial Sequence
  Synthetic
uagccacgcgugauugu

SEQ ID NO: 772826 - RNA, 17 nt, Artificial Sequence
  Synthetic
aauggagugaauauugu

SEQ ID NO: 772827 - RNA, 17 nt, Artificial Sequence
  Synthetic
ucucacaaacauauugu

SEQ ID NO: 772828 - RNA, 17 nt, Artificial Sequence
  Synthetic
uuuuuuuuuccuauugu

SEQ ID NO: 772829 - RNA, 17 nt, Artificial Sequence
  Synthetic
caguugguaucuauugu

SEQ ID NO: 772830 - RNA, 17 nt, Artificial Sequence
  Synthetic
aaagagaggucuauugu

SEQ ID NO: 772831 - RNA, 17 nt, Artificial Sequence
  Synthetic
caaggaagaaguauugu

SEQ ID NO: 772832 - RNA, 17 nt, Artificial Sequence
  Synthetic
uaagacagacguauugu

SEQ ID NO: 772833 - RNA, 17 nt, Artificial Sequence
  Synthetic
auuaaugaauguauugu

SEQ ID NO: 772834 - RNA, 17 nt, Artificial Sequence
  Synthetic
ugggaaagguguauugu

SEQ ID NO: 772835 - RNA, 17 nt, Artificial Sequence
  Synthetic
auuagcaucauuauugu

SEQ ID NO: 772836 - RNA, 17 nt, Artificial Sequence
  Synthetic
cuacagggucuuauugu

SEQ ID NO: 772837 - RNA, 17 nt, Artificial Sequence
  Synthetic
uauauccaaguuauugu

SEQ ID NO: 772838 - RNA, 17 nt, Artificial Sequence
  Synthetic
ugcugcaggguuauugu

SEQ ID NO: 772839 - RNA, 17 nt, Artificial Sequence
  Synthetic
auaaauguguuuauugu

SEQ ID NO: 772840 - RNA, 17 nt, Artificial Sequence
  Synthetic
auuuuuuauuuuauugu

SEQ ID NO: 772841 - RNA, 17 nt, Artificial Sequence
  Synthetic
aaauauuucacacuugu

SEQ ID NO: 772842 - RNA, 17 nt, Artificial Sequence
  Synthetic
ugaaaugagccacuugu

SEQ ID NO: 772843 - RNA, 17 nt, Artificial Sequence
  Synthetic
uuucucugaagacuugu

SEQ ID NO: 772844 - RNA, 17 nt, Artificial Sequence
  Synthetic
uauggcuagauacuugu

SEQ ID NO: 772845 - RNA, 17 nt, Artificial Sequence
  Synthetic
uaaguguauguacuugu

SEQ ID NO: 772846 - RNA, 17 nt, Artificial Sequence
  Synthetic
ucaacugauuuacuugu

SEQ ID NO: 772847 - RNA, 17 nt, Artificial Sequence
  Synthetic
auuauuauuuuacuugu

SEQ ID NO: 772848 - RNA, 17 nt, Artificial Sequence
  Synthetic
acauuuauuuuacuugu

SEQ ID NO: 772849 - RNA, 17 nt, Artificial Sequence
  Synthetic
cuuccguuuuuacuugu

SEQ ID NO: 772850 - RNA, 17 nt, Artificial Sequence
  Synthetic
aggucugauaaccuugu

SEQ ID NO: 772851 - RNA, 17 nt, Artificial Sequence
  Synthetic
acgggguuucaccuugu

SEQ ID NO: 772852 - RNA, 17 nt, Artificial Sequence
  Synthetic
acuggguuucaccuugu

SEQ ID NO: 772853 - RNA, 17 nt, Artificial Sequence
  Synthetic
cacaagaaagaccuugu

SEQ ID NO: 772854 - RNA, 17 nt, Artificial Sequence
  Synthetic
agugucagggaccuugu

SEQ ID NO: 772855 - RNA, 17 nt, Artificial Sequence
  Synthetic
uuagucuaaucccuugu

SEQ ID NO: 772856 - RNA, 17 nt, Artificial Sequence
  Synthetic
auuuuggacucccuugu

SEQ ID NO: 772857 - RNA, 17 nt, Artificial Sequence
  Synthetic
auuacuguuugccuugu

SEQ ID NO: 772858 - RNA, 17 nt, Artificial Sequence
  Synthetic
cauccagaaauccuugu

SEQ ID NO: 772859 - RNA, 17 nt, Artificial Sequence
  Synthetic
acauggaacauccuugu

SEQ ID NO: 772860 - RNA, 17 nt, Artificial Sequence
  Synthetic
cccagagugauccuugu

SEQ ID NO: 772861 - RNA, 17 nt, Artificial Sequence
  Synthetic
aaauauggccuccuugu

SEQ ID NO: 772862 - RNA, 17 nt, Artificial Sequence
  Synthetic
uccuccauccuccuugu

SEQ ID NO: 772863 - RNA, 17 nt, Artificial Sequence
  Synthetic
aauacagccuuccuugu

SEQ ID NO: 772864 - RNA, 17 nt, Artificial Sequence
  Synthetic
auuagauaacagcuugu

SEQ ID NO: 772865 - RNA, 17 nt, Artificial Sequence
  Synthetic
acucucuucuagcuugu

SEQ ID NO: 772866 - RNA, 17 nt, Artificial Sequence
  Synthetic
agugaacuacggcuugu

SEQ ID NO: 772867 - RNA, 17 nt, Artificial Sequence
  Synthetic
acucucuucuggcuugu

SEQ ID NO: 772868 - RNA, 17 nt, Artificial Sequence
  Synthetic
uguuuucagaugcuugu

SEQ ID NO: 772869 - RNA, 17 nt, Artificial Sequence
  Synthetic
uuuuuucauaugcuugu

SEQ ID NO: 772870 - RNA, 17 nt, Artificial Sequence
  Synthetic
caaagcuucaaucuugu

SEQ ID NO: 772871 - RNA, 17 nt, Artificial Sequence
  Synthetic
cucaguuugcaucuugu

SEQ ID NO: 772872 - RNA, 17 nt, Artificial Sequence
  Synthetic
auuuucucucaucuugu

SEQ ID NO: 772873 - RNA, 17 nt, Artificial Sequence
  Synthetic
uugugucuggaucuugu

SEQ ID NO: 772874 - RNA, 17 nt, Artificial Sequence
  Synthetic
uauuuucuggaucuugu

SEQ ID NO: 772875 - RNA, 17 nt, Artificial Sequence
  Synthetic
uacugcagaacucuugu

SEQ ID NO: 772876 - RNA, 17 nt, Artificial Sequence
  Synthetic
auuauuuccacucuugu

SEQ ID NO: 772877 - RNA, 17 nt, Artificial Sequence
  Synthetic
uccugccucccucuugu

SEQ ID NO: 772878 - RNA, 17 nt, Artificial Sequence
  Synthetic
cucauuugaucucuugu

SEQ ID NO: 772879 - RNA, 17 nt, Artificial Sequence
  Synthetic
cucuguaccucucuugu

SEQ ID NO: 772880 - RNA, 17 nt, Artificial Sequence
  Synthetic
auacaaaucucucuugu

SEQ ID NO: 772881 - RNA, 17 nt, Artificial Sequence
  Synthetic
uuccugcuuucucuugu

SEQ ID NO: 772882 - RNA, 17 nt, Artificial Sequence
  Synthetic
acaagaaaaugucuugu

SEQ ID NO: 772883 - RNA, 17 nt, Artificial Sequence
  Synthetic
auaacauggugucuugu

SEQ ID NO: 772884 - RNA, 17 nt, Artificial Sequence
  Synthetic
uaaaguuugugucuugu

SEQ ID NO: 772885 - RNA, 17 nt, Artificial Sequence
  Synthetic
uuuucuuaccuucuugu

SEQ ID NO: 772886 - RNA, 17 nt, Artificial Sequence
  Synthetic
cacuuuggccuucuugu

SEQ ID NO: 772887 - RNA, 17 nt, Artificial Sequence
  Synthetic
aguaaauaucuucuugu

SEQ ID NO: 772888 - RNA, 17 nt, Artificial Sequence
  Synthetic
uaacuguacuuucuugu

SEQ ID NO: 772889 - RNA, 17 nt, Artificial Sequence
  Synthetic
aauuacaccuuucuugu

SEQ ID NO: 772890 - RNA, 17 nt, Artificial Sequence
  Synthetic
ugccaucuguuucuugu

SEQ ID NO: 772891 - RNA, 17 nt, Artificial Sequence
  Synthetic
agucuuccuuuucuugu

SEQ ID NO: 772892 - RNA, 17 nt, Artificial Sequence
  Synthetic
aauaauggugaaguugu

SEQ ID NO: 772893 - RNA, 17 nt, Artificial Sequence
  Synthetic
aguugcaguuaaguugu

SEQ ID NO: 772894 - RNA, 17 nt, Artificial Sequence
  Synthetic
aauguaugcacaguugu

SEQ ID NO: 772895 - RNA, 17 nt, Artificial Sequence
  Synthetic
ccauaagauacaguugu

SEQ ID NO: 772896 - RNA, 17 nt, Artificial Sequence
  Synthetic
uuguuucuuccaguugu

SEQ ID NO: 772897 - RNA, 17 nt, Artificial Sequence
  Synthetic
ucuaucugugcaguugu

SEQ ID NO: 772898 - RNA, 17 nt, Artificial Sequence
  Synthetic
aucuguuacucaguugu

SEQ ID NO: 772899 - RNA, 17 nt, Artificial Sequence
  Synthetic
ucuugcuauugaguugu

SEQ ID NO: 772900 - RNA, 17 nt, Artificial Sequence
  Synthetic
auuuaucuuugaguugu

SEQ ID NO: 772901 - RNA, 17 nt, Artificial Sequence
  Synthetic
aaagaucagauaguugu

SEQ ID NO: 772902 - RNA, 17 nt, Artificial Sequence
  Synthetic
auuagggagcuaguugu

SEQ ID NO: 772903 - RNA, 17 nt, Artificial Sequence
  Synthetic
uagaaaaaucuaguugu

SEQ ID NO: 772904 - RNA, 17 nt, Artificial Sequence
  Synthetic
uacuaaaauuuaguugu

SEQ ID NO: 772905 - RNA, 17 nt, Artificial Sequence
  Synthetic
cuuucaaguuuaguugu

SEQ ID NO: 772906 - RNA, 17 nt, Artificial Sequence
  Synthetic
aagaaauuuuuaguugu

SEQ ID NO: 772907 - RNA, 17 nt, Artificial Sequence
  Synthetic
agaccugaagccguugu

SEQ ID NO: 772908 - RNA, 17 nt, Artificial Sequence
  Synthetic
acaucccacgagguugu

SEQ ID NO: 772909 - RNA, 17 nt, Artificial Sequence
  Synthetic
aaaagcugcaggguugu

SEQ ID NO: 772910 - RNA, 17 nt, Artificial Sequence
  Synthetic
aggauucuucggguugu

SEQ ID NO: 772911 - RNA, 17 nt, Artificial Sequence
  Synthetic
auuuucuuuuggguugu

SEQ ID NO: 772912 - RNA, 17 nt, Artificial Sequence
  Synthetic
uagccuggcgugguugu

SEQ ID NO: 772913 - RNA, 17 nt, Artificial Sequence
  Synthetic
augauaaaguugguugu

SEQ ID NO: 772914 - RNA, 17 nt, Artificial Sequence
  Synthetic
acaugucuuaauguugu

SEQ ID NO: 772915 - RNA, 17 nt, Artificial Sequence
  Synthetic
auuuucucccauguugu

SEQ ID NO: 772916 - RNA, 17 nt, Artificial Sequence
  Synthetic
ccuaagagagauguugu

SEQ ID NO: 772917 - RNA, 17 nt, Artificial Sequence
  Synthetic
acccugggaacuguugu

SEQ ID NO: 772918 - RNA, 17 nt, Artificial Sequence
  Synthetic
ugcuuauacacuguugu

SEQ ID NO: 772919 - RNA, 17 nt, Artificial Sequence
  Synthetic
acucuggggacuguugu

SEQ ID NO: 772920 - RNA, 17 nt, Artificial Sequence
  Synthetic
auaaauuugacuguugu

SEQ ID NO: 772921 - RNA, 17 nt, Artificial Sequence
  Synthetic
ccaaacucaccuguugu

SEQ ID NO: 772922 - RNA, 17 nt, Artificial Sequence
  Synthetic
acaccagggccuguugu

SEQ ID NO: 772923 - RNA, 17 nt, Artificial Sequence
  Synthetic
acaccggggccuguugu

SEQ ID NO: 772924 - RNA, 17 nt, Artificial Sequence
  Synthetic
aagccagcugcuguugu

SEQ ID NO: 772925 - RNA, 17 nt, Artificial Sequence
  Synthetic
cucuguuugucuguugu

SEQ ID NO: 772926 - RNA, 17 nt, Artificial Sequence
  Synthetic
uacuauuuuucuguugu

SEQ ID NO: 772927 - RNA, 17 nt, Artificial Sequence
  Synthetic
uaauccccacguguugu

SEQ ID NO: 772928 - RNA, 17 nt, Artificial Sequence
  Synthetic
uaauucccauguguugu

SEQ ID NO: 772929 - RNA, 17 nt, Artificial Sequence
  Synthetic
uaauuccuacuuguugu

SEQ ID NO: 772930 - RNA, 17 nt, Artificial Sequence
  Synthetic
cuagguagaguuguugu

SEQ ID NO: 772931 - RNA, 17 nt, Artificial Sequence
  Synthetic
aaaugguuuguuguugu

SEQ ID NO: 772932 - RNA, 17 nt, Artificial Sequence
  Synthetic
cauucauccuuuguugu

SEQ ID NO: 772933 - RNA, 17 nt, Artificial Sequence
  Synthetic
aaauaauucuuuguugu

SEQ ID NO: 772934 - RNA, 17 nt, Artificial Sequence
  Synthetic
uagccuggaaaauuugu

SEQ ID NO: 772935 - RNA, 17 nt, Artificial Sequence
  Synthetic
uuaauuaacaaauuugu

SEQ ID NO: 772936 - RNA, 17 nt, Artificial Sequence
  Synthetic
uaauucagcaaauuugu

SEQ ID NO: 772937 - RNA, 17 nt, Artificial Sequence
  Synthetic
auuuucuucaaauuugu

SEQ ID NO: 772938 - RNA, 17 nt, Artificial Sequence
  Synthetic
auaagugugaaauuugu

SEQ ID NO: 772939 - RNA, 17 nt, Artificial Sequence
  Synthetic
aagcacuauaaauuugu

SEQ ID NO: 772940 - RNA, 17 nt, Artificial Sequence
  Synthetic
uuuucuuguaaauuugu

SEQ ID NO: 772941 - RNA, 17 nt, Artificial Sequence
  Synthetic
uagaaauuuaaauuugu

SEQ ID NO: 772942 - RNA, 17 nt, Artificial Sequence
  Synthetic
uagauuuuucaauuugu

SEQ ID NO: 772943 - RNA, 17 nt, Artificial Sequence
  Synthetic
caaacauuugaauuugu

SEQ ID NO: 772944 - RNA, 17 nt, Artificial Sequence
  Synthetic
aauggaugauaauuugu

SEQ ID NO: 772945 - RNA, 17 nt, Artificial Sequence
  Synthetic
ugaguucacuaauuugu

SEQ ID NO: 772946 - RNA, 17 nt, Artificial Sequence
  Synthetic
auucgcuuuuaauuugu

SEQ ID NO: 772947 - RNA, 17 nt, Artificial Sequence
  Synthetic
aucgcagccacauuugu

SEQ ID NO: 772948 - RNA, 17 nt, Artificial Sequence
  Synthetic
uguggguagacauuugu

SEQ ID NO: 772949 - RNA, 17 nt, Artificial Sequence
  Synthetic
auacugcuaccauuugu

SEQ ID NO: 772950 - RNA, 17 nt, Artificial Sequence
  Synthetic
aaauuugaugcauuugu

SEQ ID NO: 772951 - RNA, 17 nt, Artificial Sequence
  Synthetic
uuauuguuaucauuugu

SEQ ID NO: 772952 - RNA, 17 nt, Artificial Sequence
  Synthetic
caacuguauucauuugu

SEQ ID NO: 772953 - RNA, 17 nt, Artificial Sequence
  Synthetic
ucuuagcuuucauuugu

SEQ ID NO: 772954 - RNA, 17 nt, Artificial Sequence
  Synthetic
uuuucugaaagauuugu

SEQ ID NO: 772955 - RNA, 17 nt, Artificial Sequence
  Synthetic
aggcuguacagauuugu

SEQ ID NO: 772956 - RNA, 17 nt, Artificial Sequence
  Synthetic
aaauaaaggagauuugu

SEQ ID NO: 772957 - RNA, 17 nt, Artificial Sequence
  Synthetic
accugcuggagauuugu

SEQ ID NO: 772958 - RNA, 17 nt, Artificial Sequence
  Synthetic
aauagcaauagauuugu

SEQ ID NO: 772959 - RNA, 17 nt, Artificial Sequence
  Synthetic
uuguuugauagauuugu

SEQ ID NO: 772960 - RNA, 17 nt, Artificial Sequence
  Synthetic
aaugaacagggauuugu

SEQ ID NO: 772961 - RNA, 17 nt, Artificial Sequence
  Synthetic
uguggauguggauuugu

SEQ ID NO: 772962 - RNA, 17 nt, Artificial Sequence
  Synthetic
cucccuuguggauuugu

SEQ ID NO: 772963 - RNA, 17 nt, Artificial Sequence
  Synthetic
ccaacuaauugauuugu

SEQ ID NO: 772964 - RNA, 17 nt, Artificial Sequence
  Synthetic
ucuuacuauugauuugu

SEQ ID NO: 772965 - RNA, 17 nt, Artificial Sequence
  Synthetic
aauugauaaauauuugu

SEQ ID NO: 772966 - RNA, 17 nt, Artificial Sequence
  Synthetic
cuaaauuaaauauuugu

SEQ ID NO: 772967 - RNA, 17 nt, Artificial Sequence
  Synthetic
cucauugcaauauuugu

SEQ ID NO: 772968 - RNA, 17 nt, Artificial Sequence
  Synthetic
uaauuguacauauuugu

SEQ ID NO: 772969 - RNA, 17 nt, Artificial Sequence
  Synthetic
uaaagcaccauauuugu

SEQ ID NO: 772970 - RNA, 17 nt, Artificial Sequence
  Synthetic
agugcauggauauuugu

SEQ ID NO: 772971 - RNA, 17 nt, Artificial Sequence
  Synthetic
cuuuaaaauauauuugu

SEQ ID NO: 772972 - RNA, 17 nt, Artificial Sequence
  Synthetic
uauguauauauauuugu

SEQ ID NO: 772973 - RNA, 17 nt, Artificial Sequence
  Synthetic
uaggaguauauauuugu

SEQ ID NO: 772974 - RNA, 17 nt, Artificial Sequence
  Synthetic
auuucuaaacuauuugu

SEQ ID NO: 772975 - RNA, 17 nt, Artificial Sequence
  Synthetic
uaagagaagguauuugu

SEQ ID NO: 772976 - RNA, 17 nt, Artificial Sequence
  Synthetic
uuguaaguuguauuugu

SEQ ID NO: 772977 - RNA, 17 nt, Artificial Sequence
  Synthetic
uguucucacuuauuugu

SEQ ID NO: 772978 - RNA, 17 nt, Artificial Sequence
  Synthetic
aucuuauauuuauuugu

SEQ ID NO: 772979 - RNA, 17 nt, Artificial Sequence
  Synthetic
cccucuccuuuauuugu

SEQ ID NO: 772980 - RNA, 17 nt, Artificial Sequence
  Synthetic
acauuuggaaacuuugu

SEQ ID NO: 772981 - RNA, 17 nt, Artificial Sequence
  Synthetic
ugucacucuaacuuugu

SEQ ID NO: 772982 - RNA, 17 nt, Artificial Sequence
  Synthetic
ucuagcuuuaacuuugu

SEQ ID NO: 772983 - RNA, 17 nt, Artificial Sequence
  Synthetic
aaaggaaaauacuuugu

SEQ ID NO: 772984 - RNA, 17 nt, Artificial Sequence
  Synthetic
ugccuuguauccuuugu

SEQ ID NO: 772985 - RNA, 17 nt, Artificial Sequence
  Synthetic
augucuuccuccuuugu

SEQ ID NO: 772986 - RNA, 17 nt, Artificial Sequence
  Synthetic
uuauauaucuccuuugu

SEQ ID NO: 772987 - RNA, 17 nt, Artificial Sequence
  Synthetic
uacaauagcagcuuugu

SEQ ID NO: 772988 - RNA, 17 nt, Artificial Sequence
  Synthetic
cuaacucauagcuuugu

SEQ ID NO: 772989 - RNA, 17 nt, Artificial Sequence
  Synthetic
aauauuucaggcuuugu

SEQ ID NO: 772990 - RNA, 17 nt, Artificial Sequence
  Synthetic
uaaaaaaauggcuuugu

SEQ ID NO: 772991 - RNA, 17 nt, Artificial Sequence
  Synthetic
aacaaugcuggcuuugu

SEQ ID NO: 772992 - RNA, 17 nt, Artificial Sequence
  Synthetic
aaugccuuuggcuuugu

SEQ ID NO: 772993 - RNA, 17 nt, Artificial Sequence
  Synthetic
uggagcugcugcuuugu

SEQ ID NO: 772994 - RNA, 17 nt, Artificial Sequence
  Synthetic
augugcuugugcuuugu

SEQ ID NO: 772995 - RNA, 17 nt, Artificial Sequence
  Synthetic
auacuagaaaucuuugu

SEQ ID NO: 772996 - RNA, 17 nt, Artificial Sequence
  Synthetic
uaaaauaacaucuuugu

SEQ ID NO: 772997 - RNA, 17 nt, Artificial Sequence
  Synthetic
ccuaauugcaucuuugu

SEQ ID NO: 772998 - RNA, 17 nt, Artificial Sequence
  Synthetic
aaagugaucaucuuugu

SEQ ID NO: 772999 - RNA, 17 nt, Artificial Sequence
  Synthetic
ucuuucuugaucuuugu

SEQ ID NO: 773000 - RNA, 17 nt, Artificial Sequence
  Synthetic
ucucuuuugaucuuugu

SEQ ID NO: 773001 - RNA, 17 nt, Artificial Sequence
  Synthetic
uguuucuuccucuuugu

SEQ ID NO: 773002 - RNA, 17 nt, Artificial Sequence
  Synthetic
acagcuucucucuuugu

SEQ ID NO: 773003 - RNA, 17 nt, Artificial Sequence
  Synthetic
agucuaagucucuuugu

SEQ ID NO: 773004 - RNA, 17 nt, Artificial Sequence
  Synthetic
aguguaagucucuuugu

SEQ ID NO: 773005 - RNA, 17 nt, Artificial Sequence
  Synthetic
caucuaugucucuuugu

SEQ ID NO: 773006 - RNA, 17 nt, Artificial Sequence
  Synthetic
uaguauucugucuuugu

SEQ ID NO: 773007 - RNA, 17 nt, Artificial Sequence
  Synthetic
ccugggcuuuucuuugu

SEQ ID NO: 773008 - RNA, 17 nt, Artificial Sequence
  Synthetic
caaguuuucaaguuugu

SEQ ID NO: 773009 - RNA, 17 nt, Artificial Sequence
  Synthetic
auuuuuuugaaguuugu

SEQ ID NO: 773010 - RNA, 17 nt, Artificial Sequence
  Synthetic
ccuugcucuaaguuugu

SEQ ID NO: 773011 - RNA, 17 nt, Artificial Sequence
  Synthetic
aacaauauuaaguuugu

SEQ ID NO: 773012 - RNA, 17 nt, Artificial Sequence
  Synthetic
auuuaauuuaaguuugu

SEQ ID NO: 773013 - RNA, 17 nt, Artificial Sequence
  Synthetic
auuugccuacaguuugu

SEQ ID NO: 773014 - RNA, 17 nt, Artificial Sequence
  Synthetic
uuuagugaagaguuugu

SEQ ID NO: 773015 - RNA, 17 nt, Artificial Sequence
  Synthetic
uuauuuuuaacguuugu

SEQ ID NO: 773016 - RNA, 17 nt, Artificial Sequence
  Synthetic
agugucaauagguuugu

SEQ ID NO: 773017 - RNA, 17 nt, Artificial Sequence
  Synthetic
uuuuauuuuagguuugu

SEQ ID NO: 773018 - RNA, 17 nt, Artificial Sequence
  Synthetic
auaacuuggggguuugu

SEQ ID NO: 773019 - RNA, 17 nt, Artificial Sequence
  Synthetic
aguuucugaugguuugu

SEQ ID NO: 773020 - RNA, 17 nt, Artificial Sequence
  Synthetic
cauuuuuucauguuugu

SEQ ID NO: 773021 - RNA, 17 nt, Artificial Sequence
  Synthetic
cuuuuuuucauguuugu

SEQ ID NO: 773022 - RNA, 17 nt, Artificial Sequence
  Synthetic
uuuuuucuuauguuugu

SEQ ID NO: 773023 - RNA, 17 nt, Artificial Sequence
  Synthetic
uugaaaaacaauuuugu

SEQ ID NO: 773024 - RNA, 17 nt, Artificial Sequence
  Synthetic
auaaauguacauuuugu

SEQ ID NO: 773025 - RNA, 17 nt, Artificial Sequence
  Synthetic
auuuucucccauuuugu

SEQ ID NO: 773026 - RNA, 17 nt, Artificial Sequence
  Synthetic
ugcgaaggucauuuugu

SEQ ID NO: 773027 - RNA, 17 nt, Artificial Sequence
  Synthetic
uuccuauuucauuuugu

SEQ ID NO: 773028 - RNA, 17 nt, Artificial Sequence
  Synthetic
uuccauugagauuuugu

SEQ ID NO: 773029 - RNA, 17 nt, Artificial Sequence
  Synthetic
aaacagcuggauuuugu

SEQ ID NO: 773030 - RNA, 17 nt, Artificial Sequence
  Synthetic
ugauaucagacuuuugu

SEQ ID NO: 773031 - RNA, 17 nt, Artificial Sequence
  Synthetic
aacuuugagacuuuugu

SEQ ID NO: 773032 - RNA, 17 nt, Artificial Sequence
  Synthetic
ugucauacuacuuuugu

SEQ ID NO: 773033 - RNA, 17 nt, Artificial Sequence
  Synthetic
acugaaauuacuuuugu

SEQ ID NO: 773034 - RNA, 17 nt, Artificial Sequence
  Synthetic
uuuuucguaccuuuugu

SEQ ID NO: 773035 - RNA, 17 nt, Artificial Sequence
  Synthetic
ucaggaaagccuuuugu

SEQ ID NO: 773036 - RNA, 17 nt, Artificial Sequence
  Synthetic
ugauguuuuccuuuugu

SEQ ID NO: 773037 - RNA, 17 nt, Artificial Sequence
  Synthetic
caaauguuagcuuuugu

SEQ ID NO: 773038 - RNA, 17 nt, Artificial Sequence
  Synthetic
ucagacuacaguuuugu

SEQ ID NO: 773039 - RNA, 17 nt, Artificial Sequence
  Synthetic
acaaucacuaguuuugu

SEQ ID NO: 773040 - RNA, 17 nt, Artificial Sequence
  Synthetic
acugucauauguuuugu

SEQ ID NO: 773041 - RNA, 17 nt, Artificial Sequence
  Synthetic
ccuguauacuguuuugu

SEQ ID NO: 773042 - RNA, 17 nt, Artificial Sequence
  Synthetic
auaaaugauuguuuugu

SEQ ID NO: 773043 - RNA, 17 nt, Artificial Sequence
  Synthetic
uuuuuuuaaauuuuugu

SEQ ID NO: 773044 - RNA, 17 nt, Artificial Sequence
  Synthetic
uuuauuuuaauuuuugu

SEQ ID NO: 773045 - RNA, 17 nt, Artificial Sequence
  Synthetic
uaauuuuuaauuuuugu

SEQ ID NO: 773046 - RNA, 17 nt, Artificial Sequence
  Synthetic
uuguuuuuaauuuuugu

SEQ ID NO: 773047 - RNA, 17 nt, Artificial Sequence
  Synthetic
ucucaguccauuuuugu

SEQ ID NO: 773048 - RNA, 17 nt, Artificial Sequence
  Synthetic
aagauuaugauuuuugu

SEQ ID NO: 773049 - RNA, 17 nt, Artificial Sequence
  Synthetic
agaaauccccuuuuugu

SEQ ID NO: 773050 - RNA, 17 nt, Artificial Sequence
  Synthetic
uauuucucucuuuuugu

SEQ ID NO: 773051 - RNA, 17 nt, Artificial Sequence
  Synthetic
uuguuaagaguuuuugu

SEQ ID NO: 773052 - RNA, 17 nt, Artificial Sequence
  Synthetic
aauuuuguaguuuuugu

SEQ ID NO: 773053 - RNA, 17 nt, Artificial Sequence
  Synthetic
uuugcaauuguuuuugu

SEQ ID NO: 773054 - RNA, 17 nt, Artificial Sequence
  Synthetic
aggucuuuuguuuuugu

SEQ ID NO: 773055 - RNA, 17 nt, Artificial Sequence
  Synthetic
ucuaguuuuguuuuugu

SEQ ID NO: 773056 - RNA, 17 nt, Artificial Sequence
  Synthetic
uuuuuauuauuuuuugu

SEQ ID NO: 773057 - RNA, 17 nt, Artificial Sequence
  Synthetic
agggaacuguuuuuugu

SEQ ID NO: 773058 - RNA, 17 nt, Artificial Sequence
  Synthetic
caaaaaaaaaaaaaauu

SEQ ID NO: 773059 - RNA, 17 nt, Artificial Sequence
  Synthetic
aaagaaaaaaaaaaauu

SEQ ID NO: 773060 - RNA, 17 nt, Artificial Sequence
  Synthetic
aaaagagaaaaaaaauu

SEQ ID NO: 773061 - RNA, 17 nt, Artificial Sequence
  Synthetic
aauuauacaaaaaaauu

SEQ ID NO: 773062 - RNA, 17 nt, Artificial Sequence
  Synthetic
uaugaaacuaaaaaauu

SEQ ID NO: 773063 - RNA, 17 nt, Artificial Sequence
  Synthetic
uuuaauuguaaaaaauu

SEQ ID NO: 773064 - RNA, 17 nt, Artificial Sequence
  Synthetic
uuuugguuuaaaaaauu

SEQ ID NO: 773065 - RNA, 17 nt, Artificial Sequence
  Synthetic
uaacuuuuuaaaaaauu

SEQ ID NO: 773066 - RNA, 17 nt, Artificial Sequence
  Synthetic
cuauacagacaaaaauu

SEQ ID NO: 773067 - RNA, 17 nt, Artificial Sequence
  Synthetic
aaaccuaaucaaaaauu

SEQ ID NO: 773068 - RNA, 17 nt, Artificial Sequence
  Synthetic
uuauaaauagaaaaauu

SEQ ID NO: 773069 - RNA, 17 nt, Artificial Sequence
  Synthetic
caagauaaugaaaaauu

SEQ ID NO: 773070 - RNA, 17 nt, Artificial Sequence
  Synthetic
uugaugugugaaaaauu

SEQ ID NO: 773071 - RNA, 17 nt, Artificial Sequence
  Synthetic
acauaaaaauaaaaauu

SEQ ID NO: 773072 - RNA, 17 nt, Artificial Sequence
  Synthetic
cacaacaaauaaaaauu

SEQ ID NO: 773073 - RNA, 17 nt, Artificial Sequence
  Synthetic
uacuaacaauaaaaauu

SEQ ID NO: 773074 - RNA, 17 nt, Artificial Sequence
  Synthetic
uauuaaguauaaaaauu

SEQ ID NO: 773075 - RNA, 17 nt, Artificial Sequence
  Synthetic
aagaaguuauaaaaauu

SEQ ID NO: 773076 - RNA, 17 nt, Artificial Sequence
  Synthetic
uaaauucauuaaaaauu

SEQ ID NO: 773077 - RNA, 17 nt, Artificial Sequence
  Synthetic
uguucacuuuaaaaauu

SEQ ID NO: 773078 - RNA, 17 nt, Artificial Sequence
  Synthetic
cauauaaagacaaaauu

SEQ ID NO: 773079 - RNA, 17 nt, Artificial Sequence
  Synthetic
cuguuuuuuacaaaauu

SEQ ID NO: 773080 - RNA, 17 nt, Artificial Sequence
  Synthetic
cuguggcuaccaaaauu

SEQ ID NO: 773081 - RNA, 17 nt, Artificial Sequence
  Synthetic
cuuguuugagcaaaauu

SEQ ID NO: 773082 - RNA, 17 nt, Artificial Sequence
  Synthetic
aagaacuuggcaaaauu

SEQ ID NO: 773083 - RNA, 17 nt, Artificial Sequence
  Synthetic
cuuuaggaugcaaaauu

SEQ ID NO: 773084 - RNA, 17 nt, Artificial Sequence
  Synthetic
aucuccagugcaaaauu

SEQ ID NO: 773085 - RNA, 17 nt, Artificial Sequence
  Synthetic
acagaaugaucaaaauu

SEQ ID NO: 773086 - RNA, 17 nt, Artificial Sequence
  Synthetic
cccaaagucucaaaauu

SEQ ID NO: 773087 - RNA, 17 nt, Artificial Sequence
  Synthetic
uauuuucagucaaaauu

SEQ ID NO: 773088 - RNA, 17 nt, Artificial Sequence
  Synthetic
ccaaaauagucaaaauu

SEQ ID NO: 773089 - RNA, 17 nt, Artificial Sequence
  Synthetic
aauuuugguucaaaauu

SEQ ID NO: 773090 - RNA, 17 nt, Artificial Sequence
  Synthetic
uauacauuaagaaaauu

SEQ ID NO: 773091 - RNA, 17 nt, Artificial Sequence
  Synthetic
aggcccuggagaaaauu

SEQ ID NO: 773092 - RNA, 17 nt, Artificial Sequence
  Synthetic
uaaauuuggagaaaauu

SEQ ID NO: 773093 - RNA, 17 nt, Artificial Sequence
  Synthetic
agacaaugaggaaaauu

SEQ ID NO: 773094 - RNA, 17 nt, Artificial Sequence
  Synthetic
caauccaacggaaaauu

SEQ ID NO: 773095 - RNA, 17 nt, Artificial Sequence
  Synthetic
cacugacagggaaaauu

SEQ ID NO: 773096 - RNA, 17 nt, Artificial Sequence
  Synthetic
aaaucugagggaaaauu

SEQ ID NO: 773097 - RNA, 17 nt, Artificial Sequence
  Synthetic
uggccugugggaaaauu

SEQ ID NO: 773098 - RNA, 17 nt, Artificial Sequence
  Synthetic
ucaaugagaugaaaauu

SEQ ID NO: 773099 - RNA, 17 nt, Artificial Sequence
  Synthetic
uguagagggugaaaauu

SEQ ID NO: 773100 - RNA, 17 nt, Artificial Sequence
  Synthetic
ucugaagugugaaaauu

SEQ ID NO: 773101 - RNA, 17 nt, Artificial Sequence
  Synthetic
auuuugagaauaaaauu

SEQ ID NO: 773102 - RNA, 17 nt, Artificial Sequence
  Synthetic
ucagaguucauaaaauu

SEQ ID NO: 773103 - RNA, 17 nt, Artificial Sequence
  Synthetic
aggacaaauauaaaauu

SEQ ID NO: 773104 - RNA, 17 nt, Artificial Sequence
  Synthetic
uaagauccuauaaaauu

SEQ ID NO: 773105 - RNA, 17 nt, Artificial Sequence
  Synthetic
ccuucauguauaaaauu

SEQ ID NO: 773106 - RNA, 17 nt, Artificial Sequence
  Synthetic
cuuauaauccuaaaauu

SEQ ID NO: 773107 - RNA, 17 nt, Artificial Sequence
  Synthetic
auaaaauagcuaaaauu

SEQ ID NO: 773108 - RNA, 17 nt, Artificial Sequence
  Synthetic
augcuuucaguaaaauu

SEQ ID NO: 773109 - RNA, 17 nt, Artificial Sequence
  Synthetic
uauagaagaguaaaauu

SEQ ID NO: 773110 - RNA, 17 nt, Artificial Sequence
  Synthetic
caggagccauuaaaauu

SEQ ID NO: 773111 - RNA, 17 nt, Artificial Sequence
  Synthetic
aauauguuauuaaaauu

SEQ ID NO: 773112 - RNA, 17 nt, Artificial Sequence
  Synthetic
agagauauguuaaaauu

SEQ ID NO: 773113 - RNA, 17 nt, Artificial Sequence
  Synthetic
aggugucuguuaaaauu

SEQ ID NO: 773114 - RNA, 17 nt, Artificial Sequence
  Synthetic
ucuuuaagacacaaauu

SEQ ID NO: 773115 - RNA, 17 nt, Artificial Sequence
  Synthetic
aaaaaauuccacaaauu

SEQ ID NO: 773116 - RNA, 17 nt, Artificial Sequence
  Synthetic
acagccggagacaaauu

SEQ ID NO: 773117 - RNA, 17 nt, Artificial Sequence
  Synthetic
aaagaagucaccaaauu

SEQ ID NO: 773118 - RNA, 17 nt, Artificial Sequence
  Synthetic
uuuuauuucaccaaauu

SEQ ID NO: 773119 - RNA, 17 nt, Artificial Sequence
  Synthetic
cuuaagccuaccaaauu

SEQ ID NO: 773120 - RNA, 17 nt, Artificial Sequence
  Synthetic
cugcuuugagccaaauu

SEQ ID NO: 773121 - RNA, 17 nt, Artificial Sequence
  Synthetic
uguucuuaaagcaaauu

SEQ ID NO: 773122 - RNA, 17 nt, Artificial Sequence
  Synthetic
aaaacugguagcaaauu

SEQ ID NO: 773123 - RNA, 17 nt, Artificial Sequence
  Synthetic
aaaacucuuagcaaauu

SEQ ID NO: 773124 - RNA, 17 nt, Artificial Sequence
  Synthetic
cagccaguaugcaaauu

SEQ ID NO: 773125 - RNA, 17 nt, Artificial Sequence
  Synthetic
acuuauguaugcaaauu

SEQ ID NO: 773126 - RNA, 17 nt, Artificial Sequence
  Synthetic
uguggcagcugcaaauu

SEQ ID NO: 773127 - RNA, 17 nt, Artificial Sequence
  Synthetic
cugaagaagugcaaauu

SEQ ID NO: 773128 - RNA, 17 nt, Artificial Sequence
  Synthetic
auaaaauacaucaaauu

SEQ ID NO: 773129 - RNA, 17 nt, Artificial Sequence
  Synthetic
augucaucuaucaaauu

SEQ ID NO: 773130 - RNA, 17 nt, Artificial Sequence
  Synthetic
uugcuauaacucaaauu

SEQ ID NO: 773131 - RNA, 17 nt, Artificial Sequence
  Synthetic
aagguuugucucaaauu

SEQ ID NO: 773132 - RNA, 17 nt, Artificial Sequence
  Synthetic
ucaagucuggucaaauu

SEQ ID NO: 773133 - RNA, 17 nt, Artificial Sequence
  Synthetic
agacugucauucaaauu

SEQ ID NO: 773134 - RNA, 17 nt, Artificial Sequence
  Synthetic
aaggugugguucaaauu

SEQ ID NO: 773135 - RNA, 17 nt, Artificial Sequence
  Synthetic
ccugacucuaagaaauu

SEQ ID NO: 773136 - RNA, 17 nt, Artificial Sequence
  Synthetic
aaacugaguaagaaauu

SEQ ID NO: 773137 - RNA, 17 nt, Artificial Sequence
  Synthetic
aaaacaauuaagaaauu

SEQ ID NO: 773138 - RNA, 17 nt, Artificial Sequence
  Synthetic
ccagaauuucagaaauu

SEQ ID NO: 773139 - RNA, 17 nt, Artificial Sequence
  Synthetic
uuacgcacagagaaauu

SEQ ID NO: 773140 - RNA, 17 nt, Artificial Sequence
  Synthetic
caguuaccaaggaaauu

SEQ ID NO: 773141 - RNA, 17 nt, Artificial Sequence
  Synthetic
uucaacagaaggaaauu

SEQ ID NO: 773142 - RNA, 17 nt, Artificial Sequence
  Synthetic
uauggcuuuaggaaauu

SEQ ID NO: 773143 - RNA, 17 nt, Artificial Sequence
  Synthetic
uucaggccagggaaauu

SEQ ID NO: 773144 - RNA, 17 nt, Artificial Sequence
  Synthetic
ugagaaauauggaaauu

SEQ ID NO: 773145 - RNA, 17 nt, Artificial Sequence
  Synthetic
uguaauaaaaugaaauu

SEQ ID NO: 773146 - RNA, 17 nt, Artificial Sequence
  Synthetic
ugaaaaauaaugaaauu

SEQ ID NO: 773147 - RNA, 17 nt, Artificial Sequence
  Synthetic
uuccaacacaugaaauu

SEQ ID NO: 773148 - RNA, 17 nt, Artificial Sequence
  Synthetic
aucucuuagaugaaauu

SEQ ID NO: 773149 - RNA, 17 nt, Artificial Sequence
  Synthetic
agauaagggcugaaauu

SEQ ID NO: 773150 - RNA, 17 nt, Artificial Sequence
  Synthetic
uagcucaugcugaaauu

SEQ ID NO: 773151 - RNA, 17 nt, Artificial Sequence
  Synthetic
uuagcugcucugaaauu

SEQ ID NO: 773152 - RNA, 17 nt, Artificial Sequence
  Synthetic
aaaagaguagugaaauu

SEQ ID NO: 773153 - RNA, 17 nt, Artificial Sequence
  Synthetic
uaaucuugugugaaauu

SEQ ID NO: 773154 - RNA, 17 nt, Artificial Sequence
  Synthetic
accagcaucuugaaauu

SEQ ID NO: 773155 - RNA, 17 nt, Artificial Sequence
  Synthetic
aaaacucucaauaaauu

SEQ ID NO: 773156 - RNA, 17 nt, Artificial Sequence
  Synthetic
uuguaagauaauaaauu

SEQ ID NO: 773157 - RNA, 17 nt, Artificial Sequence
  Synthetic
uguaauuggcauaaauu

SEQ ID NO: 773158 - RNA, 17 nt, Artificial Sequence
  Synthetic
uauaugagagauaaauu

SEQ ID NO: 773159 - RNA, 17 nt, Artificial Sequence
  Synthetic
aaaacucucgauaaauu

SEQ ID NO: 773160 - RNA, 17 nt, Artificial Sequence
  Synthetic
ucugcaggggauaaauu

SEQ ID NO: 773161 - RNA, 17 nt, Artificial Sequence
  Synthetic
aaugguggugauaaauu

SEQ ID NO: 773162 - RNA, 17 nt, Artificial Sequence
  Synthetic
uuaaaaugugauaaauu

SEQ ID NO: 773163 - RNA, 17 nt, Artificial Sequence
  Synthetic
uacccaaacuauaaauu

SEQ ID NO: 773164 - RNA, 17 nt, Artificial Sequence
  Synthetic
uaucuauccuauaaauu

SEQ ID NO: 773165 - RNA, 17 nt, Artificial Sequence
  Synthetic
cuauuguucuauaaauu

SEQ ID NO: 773166 - RNA, 17 nt, Artificial Sequence
  Synthetic
agucuuaguuauaaauu

SEQ ID NO: 773167 - RNA, 17 nt, Artificial Sequence
  Synthetic
auuuuaauuuauaaauu

SEQ ID NO: 773168 - RNA, 17 nt, Artificial Sequence
  Synthetic
uguagauggccuaaauu

SEQ ID NO: 773169 - RNA, 17 nt, Artificial Sequence
  Synthetic
ccuuuauaugcuaaauu

SEQ ID NO: 773170 - RNA, 17 nt, Artificial Sequence
  Synthetic
ccucauguugcuaaauu

SEQ ID NO: 773171 - RNA, 17 nt, Artificial Sequence
  Synthetic
auaaaaagaaguaaauu

SEQ ID NO: 773172 - RNA, 17 nt, Artificial Sequence
  Synthetic
ugaaaccauaguaaauu

SEQ ID NO: 773173 - RNA, 17 nt, Artificial Sequence
  Synthetic
ccucucacuaguaaauu

SEQ ID NO: 773174 - RNA, 17 nt, Artificial Sequence
  Synthetic
aguaacagauguaaauu

SEQ ID NO: 773175 - RNA, 17 nt, Artificial Sequence
  Synthetic
aauuaaugcuguaaauu

SEQ ID NO: 773176 - RNA, 17 nt, Artificial Sequence
  Synthetic
uugcugcuuuguaaauu

SEQ ID NO: 773177 - RNA, 17 nt, Artificial Sequence
  Synthetic
uuaaauuaaauuaaauu

SEQ ID NO: 773178 - RNA, 17 nt, Artificial Sequence
  Synthetic
ugaguagcaauuaaauu

SEQ ID NO: 773179 - RNA, 17 nt, Artificial Sequence
  Synthetic
uagggaggcauuaaauu

SEQ ID NO: 773180 - RNA, 17 nt, Artificial Sequence
  Synthetic
ucauauugcauuaaauu

SEQ ID NO: 773181 - RNA, 17 nt, Artificial Sequence
  Synthetic
cugaugauaguuaaauu

SEQ ID NO: 773182 - RNA, 17 nt, Artificial Sequence
  Synthetic
uauccauauguuaaauu

SEQ ID NO: 773183 - RNA, 17 nt, Artificial Sequence
  Synthetic
uaauggaaauuuaaauu

SEQ ID NO: 773184 - RNA, 17 nt, Artificial Sequence
  Synthetic
acuucaacauuuaaauu

SEQ ID NO: 773185 - RNA, 17 nt, Artificial Sequence
  Synthetic
acuuagacauuuaaauu

SEQ ID NO: 773186 - RNA, 17 nt, Artificial Sequence
  Synthetic
auccucauauuuaaauu

SEQ ID NO: 773187 - RNA, 17 nt, Artificial Sequence
  Synthetic
ccauaauuauuuaaauu

SEQ ID NO: 773188 - RNA, 17 nt, Artificial Sequence
  Synthetic
uuuauaacuuuuaaauu

SEQ ID NO: 773189 - RNA, 17 nt, Artificial Sequence
  Synthetic
uuuauuauuuuuaaauu

SEQ ID NO: 773190 - RNA, 17 nt, Artificial Sequence
  Synthetic
acaagggaaaaacaauu

SEQ ID NO: 773191 - RNA, 17 nt, Artificial Sequence
  Synthetic
cuaugccccaaacaauu

SEQ ID NO: 773192 - RNA, 17 nt, Artificial Sequence
  Synthetic
ugggauuugaaacaauu

SEQ ID NO: 773193 - RNA, 17 nt, Artificial Sequence
  Synthetic
aaaaucacuaaacaauu

SEQ ID NO: 773194 - RNA, 17 nt, Artificial Sequence
  Synthetic
uugaagugacaacaauu

SEQ ID NO: 773195 - RNA, 17 nt, Artificial Sequence
  Synthetic
uuguccacugaacaauu

SEQ ID NO: 773196 - RNA, 17 nt, Artificial Sequence
  Synthetic
caagaaguauaacaauu

SEQ ID NO: 773197 - RNA, 17 nt, Artificial Sequence
  Synthetic
ccgaaaaauacacaauu

SEQ ID NO: 773198 - RNA, 17 nt, Artificial Sequence
  Synthetic
uugcugauuccacaauu

SEQ ID NO: 773199 - RNA, 17 nt, Artificial Sequence
  Synthetic
acugugggggcacaauu

SEQ ID NO: 773200 - RNA, 17 nt, Artificial Sequence
  Synthetic
aaaauauuuagacaauu

SEQ ID NO: 773201 - RNA, 17 nt, Artificial Sequence
  Synthetic
ccauuuuaccgacaauu

SEQ ID NO: 773202 - RNA, 17 nt, Artificial Sequence
  Synthetic
uaucuauuaggacaauu

SEQ ID NO: 773203 - RNA, 17 nt, Artificial Sequence
  Synthetic
agaaaaucuugacaauu

SEQ ID NO: 773204 - RNA, 17 nt, Artificial Sequence
  Synthetic
aauguauugauacaauu

SEQ ID NO: 773205 - RNA, 17 nt, Artificial Sequence
  Synthetic
uuuacuuaacuacaauu

SEQ ID NO: 773206 - RNA, 17 nt, Artificial Sequence
  Synthetic
aucucaaugcuacaauu

SEQ ID NO: 773207 - RNA, 17 nt, Artificial Sequence
  Synthetic
auuguuuuucuacaauu

SEQ ID NO: 773208 - RNA, 17 nt, Artificial Sequence
  Synthetic
cgauggucuuuacaauu

SEQ ID NO: 773209 - RNA, 17 nt, Artificial Sequence
  Synthetic
cagguuauaaaccaauu

SEQ ID NO: 773210 - RNA, 17 nt, Artificial Sequence
  Synthetic
uuuuuaguaagccaauu

SEQ ID NO: 773211 - RNA, 17 nt, Artificial Sequence
  Synthetic
aacuuucuaauccaauu

SEQ ID NO: 773212 - RNA, 17 nt, Artificial Sequence
  Synthetic
auaucacuucuccaauu

SEQ ID NO: 773213 - RNA, 17 nt, Artificial Sequence
  Synthetic
caccacacauuccaauu

SEQ ID NO: 773214 - RNA, 17 nt, Artificial Sequence
  Synthetic
ugaauaauuuuccaauu

SEQ ID NO: 773215 - RNA, 17 nt, Artificial Sequence
  Synthetic
uuguccauuuuccaauu

SEQ ID NO: 773216 - RNA, 17 nt, Artificial Sequence
  Synthetic
cuguaaucccagcaauu

SEQ ID NO: 773217 - RNA, 17 nt, Artificial Sequence
  Synthetic
cuguaauaucagcaauu

SEQ ID NO: 773218 - RNA, 17 nt, Artificial Sequence
  Synthetic
uucuaugaagagcaauu

SEQ ID NO: 773219 - RNA, 17 nt, Artificial Sequence
  Synthetic
uccuagccagagcaauu

SEQ ID NO: 773220 - RNA, 17 nt, Artificial Sequence
  Synthetic
aguguuugaaggcaauu

SEQ ID NO: 773221 - RNA, 17 nt, Artificial Sequence
  Synthetic
agcugagucaggcaauu

SEQ ID NO: 773222 - RNA, 17 nt, Artificial Sequence
  Synthetic
acagaaaauaggcaauu

SEQ ID NO: 773223 - RNA, 17 nt, Artificial Sequence
  Synthetic
ucaugcuguaggcaauu

SEQ ID NO: 773224 - RNA, 17 nt, Artificial Sequence
  Synthetic
aaacaaacaaugcaauu

SEQ ID NO: 773225 - RNA, 17 nt, Artificial Sequence
  Synthetic
ccaacaaagaugcaauu

SEQ ID NO: 773226 - RNA, 17 nt, Artificial Sequence
  Synthetic
aaauuaaauaugcaauu

SEQ ID NO: 773227 - RNA, 17 nt, Artificial Sequence
  Synthetic
uaaacuauuaugcaauu

SEQ ID NO: 773228 - RNA, 17 nt, Artificial Sequence
  Synthetic
uugucuuaacugcaauu

SEQ ID NO: 773229 - RNA, 17 nt, Artificial Sequence
  Synthetic
cauaauacauugcaauu

SEQ ID NO: 773230 - RNA, 17 nt, Artificial Sequence
  Synthetic
ucaaucagguugcaauu

SEQ ID NO: 773231 - RNA, 17 nt, Artificial Sequence
  Synthetic
ugaugauaaaaucaauu

SEQ ID NO: 773232 - RNA, 17 nt, Artificial Sequence
  Synthetic
ugagaaugcaaucaauu

SEQ ID NO: 773233 - RNA, 17 nt, Artificial Sequence
  Synthetic
acacagcagaaucaauu

SEQ ID NO: 773234 - RNA, 17 nt, Artificial Sequence
  Synthetic
ugucuguauaaucaauu

SEQ ID NO: 773235 - RNA, 17 nt, Artificial Sequence
  Synthetic
uagagguauuaucaauu

SEQ ID NO: 773236 - RNA, 17 nt, Artificial Sequence
  Synthetic
cuucuaagagcucaauu

SEQ ID NO: 773237 - RNA, 17 nt, Artificial Sequence
  Synthetic
ugcaucccaucucaauu

SEQ ID NO: 773238 - RNA, 17 nt, Artificial Sequence
  Synthetic
aaaacgucaagucaauu

SEQ ID NO: 773239 - RNA, 17 nt, Artificial Sequence
  Synthetic
cacuuacugggucaauu

SEQ ID NO: 773240 - RNA, 17 nt, Artificial Sequence
  Synthetic
agacuucugggucaauu

SEQ ID NO: 773241 - RNA, 17 nt, Artificial Sequence
  Synthetic
cauauguuuggucaauu

SEQ ID NO: 773242 - RNA, 17 nt, Artificial Sequence
  Synthetic
aaguggagaugucaauu

SEQ ID NO: 773243 - RNA, 17 nt, Artificial Sequence
  Synthetic
cgacucuucugucaauu

SEQ ID NO: 773244 - RNA, 17 nt, Artificial Sequence
  Synthetic
auacaaauaauucaauu

SEQ ID NO: 773245 - RNA, 17 nt, Artificial Sequence
  Synthetic
auaaaggguauucaauu

SEQ ID NO: 773246 - RNA, 17 nt, Artificial Sequence
  Synthetic
agccguuuucuucaauu

SEQ ID NO: 773247 - RNA, 17 nt, Artificial Sequence
  Synthetic
uccuuagcuguucaauu

SEQ ID NO: 773248 - RNA, 17 nt, Artificial Sequence
  Synthetic
augggacaaaaagaauu

SEQ ID NO: 773249 - RNA, 17 nt, Artificial Sequence
  Synthetic
aauauaauaaaagaauu

SEQ ID NO: 773250 - RNA, 17 nt, Artificial Sequence
  Synthetic
uuaaaaaagaaagaauu

SEQ ID NO: 773251 - RNA, 17 nt, Artificial Sequence
  Synthetic
aauggucauaaagaauu

SEQ ID NO: 773252 - RNA, 17 nt, Artificial Sequence
  Synthetic
uauucaugacaagaauu

SEQ ID NO: 773253 - RNA, 17 nt, Artificial Sequence
  Synthetic
auagaauaccaagaauu

SEQ ID NO: 773254 - RNA, 17 nt, Artificial Sequence
  Synthetic
aacuagccagaagaauu

SEQ ID NO: 773255 - RNA, 17 nt, Artificial Sequence
  Synthetic
ugucacagagaagaauu

SEQ ID NO: 773256 - RNA, 17 nt, Artificial Sequence
  Synthetic
accccaagggaagaauu

SEQ ID NO: 773257 - RNA, 17 nt, Artificial Sequence
  Synthetic
agauauaauuaagaauu

SEQ ID NO: 773258 - RNA, 17 nt, Artificial Sequence
  Synthetic
uacaacugaacagaauu

SEQ ID NO: 773259 - RNA, 17 nt, Artificial Sequence
  Synthetic
acuuucuuuacagaauu

SEQ ID NO: 773260 - RNA, 17 nt, Artificial Sequence
  Synthetic
cauggaggcccagaauu

SEQ ID NO: 773261 - RNA, 17 nt, Artificial Sequence
  Synthetic
aggauagagccagaauu

SEQ ID NO: 773262 - RNA, 17 nt, Artificial Sequence
  Synthetic
uuguagcacucagaauu

SEQ ID NO: 773263 - RNA, 17 nt, Artificial Sequence
  Synthetic
cacagucccucagaauu

SEQ ID NO: 773264 - RNA, 17 nt, Artificial Sequence
  Synthetic
cuaaacucuucagaauu

SEQ ID NO: 773265 - RNA, 17 nt, Artificial Sequence
  Synthetic
ccaaaguguucagaauu

SEQ ID NO: 773266 - RNA, 17 nt, Artificial Sequence
  Synthetic
acaaucaaaagagaauu

SEQ ID NO: 773267 - RNA, 17 nt, Artificial Sequence
  Synthetic
aagcagucaagagaauu

SEQ ID NO: 773268 - RNA, 17 nt, Artificial Sequence
  Synthetic
agagagguaagagaauu

SEQ ID NO: 773269 - RNA, 17 nt, Artificial Sequence
  Synthetic
uucugguuaagagaauu

SEQ ID NO: 773270 - RNA, 17 nt, Artificial Sequence
  Synthetic
uacacacagagagaauu

SEQ ID NO: 773271 - RNA, 17 nt, Artificial Sequence
  Synthetic
aacauccuuggagaauu

SEQ ID NO: 773272 - RNA, 17 nt, Artificial Sequence
  Synthetic
uuugacuuaugagaauu

SEQ ID NO: 773273 - RNA, 17 nt, Artificial Sequence
  Synthetic
aggugggccugagaauu

SEQ ID NO: 773274 - RNA, 17 nt, Artificial Sequence
  Synthetic
acaaauuccugagaauu

SEQ ID NO: 773275 - RNA, 17 nt, Artificial Sequence
  Synthetic
uaagauaauugagaauu

SEQ ID NO: 773276 - RNA, 17 nt, Artificial Sequence
  Synthetic
aucaguaaaauagaauu

SEQ ID NO: 773277 - RNA, 17 nt, Artificial Sequence
  Synthetic
uucugcaucauagaauu

SEQ ID NO: 773278 - RNA, 17 nt, Artificial Sequence
  Synthetic
cuauaaaagauagaauu

SEQ ID NO: 773279 - RNA, 17 nt, Artificial Sequence
  Synthetic
uucaaagugauagaauu

SEQ ID NO: 773280 - RNA, 17 nt, Artificial Sequence
  Synthetic
ucuuuucuuauagaauu

SEQ ID NO: 773281 - RNA, 17 nt, Artificial Sequence
  Synthetic
uuggcuaagcuagaauu

SEQ ID NO: 773282 - RNA, 17 nt, Artificial Sequence
  Synthetic
cacaucaggcuagaauu

SEQ ID NO: 773283 - RNA, 17 nt, Artificial Sequence
  Synthetic
agcuaaugucuagaauu

SEQ ID NO: 773284 - RNA, 17 nt, Artificial Sequence
  Synthetic
caaaaaagaguagaauu

SEQ ID NO: 773285 - RNA, 17 nt, Artificial Sequence
  Synthetic
cugagcuugguagaauu

SEQ ID NO: 773286 - RNA, 17 nt, Artificial Sequence
  Synthetic
uucuucuccuuagaauu

SEQ ID NO: 773287 - RNA, 17 nt, Artificial Sequence
  Synthetic
auaacuuucuuagaauu

SEQ ID NO: 773288 - RNA, 17 nt, Artificial Sequence
  Synthetic
ucaaugaaguuagaauu

SEQ ID NO: 773289 - RNA, 17 nt, Artificial Sequence
  Synthetic
aauuuccaacacgaauu

SEQ ID NO: 773290 - RNA, 17 nt, Artificial Sequence
  Synthetic
uaaugacauaucgaauu

SEQ ID NO: 773291 - RNA, 17 nt, Artificial Sequence
  Synthetic
uucccuggcaaggaauu

SEQ ID NO: 773292 - RNA, 17 nt, Artificial Sequence
  Synthetic
aaauauauuaaggaauu

SEQ ID NO: 773293 - RNA, 17 nt, Artificial Sequence
  Synthetic
uagucagaccaggaauu

SEQ ID NO: 773294 - RNA, 17 nt, Artificial Sequence
  Synthetic
aguggaagccaggaauu

SEQ ID NO: 773295 - RNA, 17 nt, Artificial Sequence
  Synthetic
ucuugaaagcaggaauu

SEQ ID NO: 773296 - RNA, 17 nt, Artificial Sequence
  Synthetic
augugugcucaggaauu

SEQ ID NO: 773297 - RNA, 17 nt, Artificial Sequence
  Synthetic
ccuaccuccgaggaauu

SEQ ID NO: 773298 - RNA, 17 nt, Artificial Sequence
  Synthetic
cuuggcccugaggaauu

SEQ ID NO: 773299 - RNA, 17 nt, Artificial Sequence
  Synthetic
aguaagaaguaggaauu

SEQ ID NO: 773300 - RNA, 17 nt, Artificial Sequence
  Synthetic
auuaaagacagggaauu

SEQ ID NO: 773301 - RNA, 17 nt, Artificial Sequence
  Synthetic
cucaaagggagggaauu

SEQ ID NO: 773302 - RNA, 17 nt, Artificial Sequence
  Synthetic
uggccauuuagggaauu

SEQ ID NO: 773303 - RNA, 17 nt, Artificial Sequence
  Synthetic
augauuccaggggaauu

SEQ ID NO: 773304 - RNA, 17 nt, Artificial Sequence
  Synthetic
ccacugaguauggaauu

SEQ ID NO: 773305 - RNA, 17 nt, Artificial Sequence
  Synthetic
cugcagaagcuggaauu

SEQ ID NO: 773306 - RNA, 17 nt, Artificial Sequence
  Synthetic
caucuauuaguggaauu

SEQ ID NO: 773307 - RNA, 17 nt, Artificial Sequence
  Synthetic
ucuccguggguggaauu

SEQ ID NO: 773308 - RNA, 17 nt, Artificial Sequence
  Synthetic
uuaaaugguguggaauu

SEQ ID NO: 773309 - RNA, 17 nt, Artificial Sequence
  Synthetic
uuguuuuuguuggaauu

SEQ ID NO: 773310 - RNA, 17 nt, Artificial Sequence
  Synthetic
ucauuccauuuggaauu

SEQ ID NO: 773311 - RNA, 17 nt, Artificial Sequence
  Synthetic
acuuguuauuuggaauu

SEQ ID NO: 773312 - RNA, 17 nt, Artificial Sequence
  Synthetic
caaacaguuuuggaauu

SEQ ID NO: 773313 - RNA, 17 nt, Artificial Sequence
  Synthetic
uaaaggugaaaugaauu

SEQ ID NO: 773314 - RNA, 17 nt, Artificial Sequence
  Synthetic
agauagaucaaugaauu

SEQ ID NO: 773315 - RNA, 17 nt, Artificial Sequence
  Synthetic
uguaugucagaugaauu

SEQ ID NO: 773316 - RNA, 17 nt, Artificial Sequence
  Synthetic
augagcauagaugaauu

SEQ ID NO: 773317 - RNA, 17 nt, Artificial Sequence
  Synthetic
aagacaugggaugaauu

SEQ ID NO: 773318 - RNA, 17 nt, Artificial Sequence
  Synthetic
auacaaugugaugaauu

SEQ ID NO: 773319 - RNA, 17 nt, Artificial Sequence
  Synthetic
uuauuauuauaugaauu

SEQ ID NO: 773320 - RNA, 17 nt, Artificial Sequence
  Synthetic
uucuguuucuaugaauu

SEQ ID NO: 773321 - RNA, 17 nt, Artificial Sequence
  Synthetic
uguucugauuaugaauu

SEQ ID NO: 773322 - RNA, 17 nt, Artificial Sequence
  Synthetic
auugaguuaacugaauu

SEQ ID NO: 773323 - RNA, 17 nt, Artificial Sequence
  Synthetic
uuaucgacaccugaauu

SEQ ID NO: 773324 - RNA, 17 nt, Artificial Sequence
  Synthetic
acugacuggccugaauu

SEQ ID NO: 773325 - RNA, 17 nt, Artificial Sequence
  Synthetic
aauaauaauccugaauu

SEQ ID NO: 773326 - RNA, 17 nt, Artificial Sequence
  Synthetic
aauguaaaugcugaauu

SEQ ID NO: 773327 - RNA, 17 nt, Artificial Sequence
  Synthetic
uaaguuuauucugaauu

SEQ ID NO: 773328 - RNA, 17 nt, Artificial Sequence
  Synthetic
aaaaucuccagugaauu

SEQ ID NO: 773329 - RNA, 17 nt, Artificial Sequence
  Synthetic
accaguaguagugaauu

SEQ ID NO: 773330 - RNA, 17 nt, Artificial Sequence
  Synthetic
aaauuguguggugaauu

SEQ ID NO: 773331 - RNA, 17 nt, Artificial Sequence
  Synthetic
cagaaaugcugugaauu

SEQ ID NO: 773332 - RNA, 17 nt, Artificial Sequence
  Synthetic
acaaaggugauugaauu

SEQ ID NO: 773333 - RNA, 17 nt, Artificial Sequence
  Synthetic
ucuuuaauuauugaauu

SEQ ID NO: 773334 - RNA, 17 nt, Artificial Sequence
  Synthetic
ugaagggcuguugaauu

SEQ ID NO: 773335 - RNA, 17 nt, Artificial Sequence
  Synthetic
uagcaguguguugaauu

SEQ ID NO: 773336 - RNA, 17 nt, Artificial Sequence
  Synthetic
uauugaauuguugaauu

SEQ ID NO: 773337 - RNA, 17 nt, Artificial Sequence
  Synthetic
cugucuauuguugaauu

SEQ ID NO: 773338 - RNA, 17 nt, Artificial Sequence
  Synthetic
aaccuagaguuugaauu

SEQ ID NO: 773339 - RNA, 17 nt, Artificial Sequence
  Synthetic
cucugcacuuuugaauu

SEQ ID NO: 773340 - RNA, 17 nt, Artificial Sequence
  Synthetic
cauugggcuuuugaauu

SEQ ID NO: 773341 - RNA, 17 nt, Artificial Sequence
  Synthetic
uuauuacgaaaauaauu

SEQ ID NO: 773342 - RNA, 17 nt, Artificial Sequence
  Synthetic
ccaauauagaaauaauu

SEQ ID NO: 773343 - RNA, 17 nt, Artificial Sequence
  Synthetic
uacagaaauaaauaauu

SEQ ID NO: 773344 - RNA, 17 nt, Artificial Sequence
  Synthetic
acauugaauaaauaauu

SEQ ID NO: 773345 - RNA, 17 nt, Artificial Sequence
  Synthetic
uucuagcuuaaauaauu

SEQ ID NO: 773346 - RNA, 17 nt, Artificial Sequence
  Synthetic
aaacuaauucaauaauu

SEQ ID NO: 773347 - RNA, 17 nt, Artificial Sequence
  Synthetic
acaguacuucaauaauu

SEQ ID NO: 773348 - RNA, 17 nt, Artificial Sequence
  Synthetic
ccugacuuagaauaauu

SEQ ID NO: 773349 - RNA, 17 nt, Artificial Sequence
  Synthetic
ucuaggaaggaauaauu

SEQ ID NO: 773350 - RNA, 17 nt, Artificial Sequence
  Synthetic
aacaguuuggaauaauu

SEQ ID NO: 773351 - RNA, 17 nt, Artificial Sequence
  Synthetic
uauuuaaaugaauaauu

SEQ ID NO: 773352 - RNA, 17 nt, Artificial Sequence
  Synthetic
uguuguaucuaauaauu

SEQ ID NO: 773353 - RNA, 17 nt, Artificial Sequence
  Synthetic
acacuagaguaauaauu

SEQ ID NO: 773354 - RNA, 17 nt, Artificial Sequence
  Synthetic
ucuuuuaaaacauaauu

SEQ ID NO: 773355 - RNA, 17 nt, Artificial Sequence
  Synthetic
cuacaauguacauaauu

SEQ ID NO: 773356 - RNA, 17 nt, Artificial Sequence
  Synthetic
uguaccauuccauaauu

SEQ ID NO: 773357 - RNA, 17 nt, Artificial Sequence
  Synthetic
uaaugaguaucauaauu

SEQ ID NO: 773358 - RNA, 17 nt, Artificial Sequence
  Synthetic
uuuucucacucauaauu

SEQ ID NO: 773359 - RNA, 17 nt, Artificial Sequence
  Synthetic
ccucagugcucauaauu

SEQ ID NO: 773360 - RNA, 17 nt, Artificial Sequence
  Synthetic
caaagugaaagauaauu

SEQ ID NO: 773361 - RNA, 17 nt, Artificial Sequence
  Synthetic
aagauguucagauaauu

SEQ ID NO: 773362 - RNA, 17 nt, Artificial Sequence
  Synthetic
aagcaaaagggauaauu

SEQ ID NO: 773363 - RNA, 17 nt, Artificial Sequence
  Synthetic
auggccaagauauaauu

SEQ ID NO: 773364 - RNA, 17 nt, Artificial Sequence
  Synthetic
uuguccaggauauaauu

SEQ ID NO: 773365 - RNA, 17 nt, Artificial Sequence
  Synthetic
uuguggucuguauaauu

SEQ ID NO: 773366 - RNA, 17 nt, Artificial Sequence
  Synthetic
acccccagcuuauaauu

SEQ ID NO: 773367 - RNA, 17 nt, Artificial Sequence
  Synthetic
uuuguuuuguuauaauu

SEQ ID NO: 773368 - RNA, 17 nt, Artificial Sequence
  Synthetic
uccuaaaauaacuaauu

SEQ ID NO: 773369 - RNA, 17 nt, Artificial Sequence
  Synthetic
aauuuacuuaacuaauu

SEQ ID NO: 773370 - RNA, 17 nt, Artificial Sequence
  Synthetic
ccuucauuuaacuaauu

SEQ ID NO: 773371 - RNA, 17 nt, Artificial Sequence
  Synthetic
aauugguauuacuaauu

SEQ ID NO: 773372 - RNA, 17 nt, Artificial Sequence
  Synthetic
aguauagaggccuaauu

SEQ ID NO: 773373 - RNA, 17 nt, Artificial Sequence
  Synthetic
acccaugauugcuaauu

SEQ ID NO: 773374 - RNA, 17 nt, Artificial Sequence
  Synthetic
uuuucugucaucuaauu

SEQ ID NO: 773375 - RNA, 17 nt, Artificial Sequence
  Synthetic
auacagaaacucuaauu

SEQ ID NO: 773376 - RNA, 17 nt, Artificial Sequence
  Synthetic
ugaagcacauucuaauu

SEQ ID NO: 773377 - RNA, 17 nt, Artificial Sequence
  Synthetic
cccuuaagcuucuaauu

SEQ ID NO: 773378 - RNA, 17 nt, Artificial Sequence
  Synthetic
cugaauauuuucuaauu

SEQ ID NO: 773379 - RNA, 17 nt, Artificial Sequence
  Synthetic
uauauguuuuucuaauu

SEQ ID NO: 773380 - RNA, 17 nt, Artificial Sequence
  Synthetic
aacaguagaaaguaauu

SEQ ID NO: 773381 - RNA, 17 nt, Artificial Sequence
  Synthetic
uuaaacuucaaguaauu

SEQ ID NO: 773382 - RNA, 17 nt, Artificial Sequence
  Synthetic
uacuuuuugaaguaauu

SEQ ID NO: 773383 - RNA, 17 nt, Artificial Sequence
  Synthetic
caguauaggcaguaauu

SEQ ID NO: 773384 - RNA, 17 nt, Artificial Sequence
  Synthetic
acauuuagggaguaauu

SEQ ID NO: 773385 - RNA, 17 nt, Artificial Sequence
  Synthetic
augagauuauaguaauu

SEQ ID NO: 773386 - RNA, 17 nt, Artificial Sequence
  Synthetic
auauguugcuaguaauu

SEQ ID NO: 773387 - RNA, 17 nt, Artificial Sequence
  Synthetic
uccauaaaaagguaauu

SEQ ID NO: 773388 - RNA, 17 nt, Artificial Sequence
  Synthetic
caaagguacauguaauu

SEQ ID NO: 773389 - RNA, 17 nt, Artificial Sequence
  Synthetic
cuuaaucucauguaauu

SEQ ID NO: 773390 - RNA, 17 nt, Artificial Sequence
  Synthetic
acccaagucauguaauu

SEQ ID NO: 773391 - RNA, 17 nt, Artificial Sequence
  Synthetic
uuuaauagucuguaauu

SEQ ID NO: 773392 - RNA, 17 nt, Artificial Sequence
  Synthetic
aagucucaaguguaauu

SEQ ID NO: 773393 - RNA, 17 nt, Artificial Sequence
  Synthetic
cauuuaagauuguaauu

SEQ ID NO: 773394 - RNA, 17 nt, Artificial Sequence
  Synthetic
auucugauauuguaauu

SEQ ID NO: 773395 - RNA, 17 nt, Artificial Sequence
  Synthetic
uuacugcuauuguaauu

SEQ ID NO: 773396 - RNA, 17 nt, Artificial Sequence
  Synthetic
acuuagguuuuguaauu

SEQ ID NO: 773397 - RNA, 17 nt, Artificial Sequence
  Synthetic
uuucuaaaagauuaauu

SEQ ID NO: 773398 - RNA, 17 nt, Artificial Sequence
  Synthetic
aaugcaauagauuaauu

SEQ ID NO: 773399 - RNA, 17 nt, Artificial Sequence
  Synthetic
cuccugacugauuaauu

SEQ ID NO: 773400 - RNA, 17 nt, Artificial Sequence
  Synthetic
uuaaagagugauuaauu

SEQ ID NO: 773401 - RNA, 17 nt, Artificial Sequence
  Synthetic
auauuaguauauuaauu

SEQ ID NO: 773402 - RNA, 17 nt, Artificial Sequence
  Synthetic
ugcaaagacuauuaauu

SEQ ID NO: 773403 - RNA, 17 nt, Artificial Sequence
  Synthetic
acuguuuacuauuaauu

SEQ ID NO: 773404 - RNA, 17 nt, Artificial Sequence
  Synthetic
aauaacuuguauuaauu

SEQ ID NO: 773405 - RNA, 17 nt, Artificial Sequence
  Synthetic
uagcuguugacuuaauu

SEQ ID NO: 773406 - RNA, 17 nt, Artificial Sequence
  Synthetic
uucuuaccaucuuaauu

SEQ ID NO: 773407 - RNA, 17 nt, Artificial Sequence
  Synthetic
auaaugacugguuaauu

SEQ ID NO: 773408 - RNA, 17 nt, Artificial Sequence
  Synthetic
aauuugaaauguuaauu

SEQ ID NO: 773409 - RNA, 17 nt, Artificial Sequence
  Synthetic
aagacaaauauuuaauu

SEQ ID NO: 773410 - RNA, 17 nt, Artificial Sequence
  Synthetic
aacauauauauuuaauu

SEQ ID NO: 773411 - RNA, 17 nt, Artificial Sequence
  Synthetic
caguauuauauuuaauu

SEQ ID NO: 773412 - RNA, 17 nt, Artificial Sequence
  Synthetic
aguuuuaaucuuuaauu

SEQ ID NO: 773413 - RNA, 17 nt, Artificial Sequence
  Synthetic
uaauauccauuuuaauu

SEQ ID NO: 773414 - RNA, 17 nt, Artificial Sequence
  Synthetic
uaccacugauuuuaauu

SEQ ID NO: 773415 - RNA, 17 nt, Artificial Sequence
  Synthetic
auucaaguauuuuaauu

SEQ ID NO: 773416 - RNA, 17 nt, Artificial Sequence
  Synthetic
uugaacuuauuuuaauu

SEQ ID NO: 773417 - RNA, 17 nt, Artificial Sequence
  Synthetic
uaaauuuuauuuuaauu

SEQ ID NO: 773418 - RNA, 17 nt, Artificial Sequence
  Synthetic
cagagaucaaaaacauu

SEQ ID NO: 773419 - RNA, 17 nt, Artificial Sequence
  Synthetic
uuaaauaugaaaacauu

SEQ ID NO: 773420 - RNA, 17 nt, Artificial Sequence
  Synthetic
uaaagaaauaaaacauu

SEQ ID NO: 773421 - RNA, 17 nt, Artificial Sequence
  Synthetic
uggggucauaaaacauu

SEQ ID NO: 773422 - RNA, 17 nt, Artificial Sequence
  Synthetic
cuaaaaauacaaacauu

SEQ ID NO: 773423 - RNA, 17 nt, Artificial Sequence
  Synthetic
uugauguuccaaacauu

SEQ ID NO: 773424 - RNA, 17 nt, Artificial Sequence
  Synthetic
cccauaaaagaaacauu

SEQ ID NO: 773425 - RNA, 17 nt, Artificial Sequence
  Synthetic
aaacuuccagaaacauu

SEQ ID NO: 773426 - RNA, 17 nt, Artificial Sequence
  Synthetic
uucucuagggaaacauu

SEQ ID NO: 773427 - RNA, 17 nt, Artificial Sequence
  Synthetic
aagugggccuaaacauu

SEQ ID NO: 773428 - RNA, 17 nt, Artificial Sequence
  Synthetic
caccaccuguaaacauu

SEQ ID NO: 773429 - RNA, 17 nt, Artificial Sequence
  Synthetic
acugcauuuuaaacauu

SEQ ID NO: 773430 - RNA, 17 nt, Artificial Sequence
  Synthetic
ugcuuuaacccaacauu

SEQ ID NO: 773431 - RNA, 17 nt, Artificial Sequence
  Synthetic
aaaaauuaagcaacauu

SEQ ID NO: 773432 - RNA, 17 nt, Artificial Sequence
  Synthetic
cuuagucuaucaacauu

SEQ ID NO: 773433 - RNA, 17 nt, Artificial Sequence
  Synthetic
aaaagucucucaacauu

SEQ ID NO: 773434 - RNA, 17 nt, Artificial Sequence
  Synthetic
cuuccauugucaacauu

SEQ ID NO: 773435 - RNA, 17 nt, Artificial Sequence
  Synthetic
agugcuuugucaacauu

SEQ ID NO: 773436 - RNA, 17 nt, Artificial Sequence
  Synthetic
accccacuuucaacauu

SEQ ID NO: 773437 - RNA, 17 nt, Artificial Sequence
  Synthetic
caaauggaaagaacauu

SEQ ID NO: 773438 - RNA, 17 nt, Artificial Sequence
  Synthetic
accacuugaggaacauu

SEQ ID NO: 773439 - RNA, 17 nt, Artificial Sequence
  Synthetic
uugcuuauuggaacauu

SEQ ID NO: 773440 - RNA, 17 nt, Artificial Sequence
  Synthetic
uuggaauuuggaacauu

SEQ ID NO: 773441 - RNA, 17 nt, Artificial Sequence
  Synthetic
aaaguaaaaugaacauu

SEQ ID NO: 773442 - RNA, 17 nt, Artificial Sequence
  Synthetic
aauugcaucugaacauu

SEQ ID NO: 773443 - RNA, 17 nt, Artificial Sequence
  Synthetic
acucgucauugaacauu

SEQ ID NO: 773444 - RNA, 17 nt, Artificial Sequence
  Synthetic
cacuauuauugaacauu

SEQ ID NO: 773445 - RNA, 17 nt, Artificial Sequence
  Synthetic
cuaagaaagauaacauu

SEQ ID NO: 773446 - RNA, 17 nt, Artificial Sequence
  Synthetic
ccuuggugauuaacauu

SEQ ID NO: 773447 - RNA, 17 nt, Artificial Sequence
  Synthetic
ucuugccuauuaacauu

SEQ ID NO: 773448 - RNA, 17 nt, Artificial Sequence
  Synthetic
aaguuauuauuaacauu

SEQ ID NO: 773449 - RNA, 17 nt, Artificial Sequence
  Synthetic
acacaauacuuaacauu

SEQ ID NO: 773450 - RNA, 17 nt, Artificial Sequence
  Synthetic
ucuuggcgcuuaacauu

SEQ ID NO: 773451 - RNA, 17 nt, Artificial Sequence
  Synthetic
acucgucaguuaacauu

SEQ ID NO: 773452 - RNA, 17 nt, Artificial Sequence
  Synthetic
cuuucugaguuaacauu

SEQ ID NO: 773453 - RNA, 17 nt, Artificial Sequence
  Synthetic
acucuucauuuaacauu

SEQ ID NO: 773454 - RNA, 17 nt, Artificial Sequence
  Synthetic
uauuuuauuuuaacauu

SEQ ID NO: 773455 - RNA, 17 nt, Artificial Sequence
  Synthetic
aaugucaaaaacacauu

SEQ ID NO: 773456 - RNA, 17 nt, Artificial Sequence
  Synthetic
agggacucaaacacauu

SEQ ID NO: 773457 - RNA, 17 nt, Artificial Sequence
  Synthetic
ucaucugaagacacauu

SEQ ID NO: 773458 - RNA, 17 nt, Artificial Sequence
  Synthetic
agauucagagacacauu

SEQ ID NO: 773459 - RNA, 17 nt, Artificial Sequence
  Synthetic
ucucaauuugacacauu

SEQ ID NO: 773460 - RNA, 17 nt, Artificial Sequence
  Synthetic
ucacaaguauacacauu

SEQ ID NO: 773461 - RNA, 17 nt, Artificial Sequence
  Synthetic
aagcucagucccacauu

SEQ ID NO: 773462 - RNA, 17 nt, Artificial Sequence
  Synthetic
ugcaaucccagcacauu

SEQ ID NO: 773463 - RNA, 17 nt, Artificial Sequence
  Synthetic
uaagagcauagcacauu

SEQ ID NO: 773464 - RNA, 17 nt, Artificial Sequence
  Synthetic
uaucagaaacucacauu

SEQ ID NO: 773465 - RNA, 17 nt, Artificial Sequence
  Synthetic
ugaagucugcucacauu

SEQ ID NO: 773466 - RNA, 17 nt, Artificial Sequence
  Synthetic
uguguaacagucacauu

SEQ ID NO: 773467 - RNA, 17 nt, Artificial Sequence
  Synthetic
aaaugacuggucacauu

SEQ ID NO: 773468 - RNA, 17 nt, Artificial Sequence
  Synthetic
acuucuggugucacauu

SEQ ID NO: 773469 - RNA, 17 nt, Artificial Sequence
  Synthetic
uucuugguugucacauu

SEQ ID NO: 773470 - RNA, 17 nt, Artificial Sequence
  Synthetic
uuacuuaaauucacauu

SEQ ID NO: 773471 - RNA, 17 nt, Artificial Sequence
  Synthetic
auuuagucauucacauu

SEQ ID NO: 773472 - RNA, 17 nt, Artificial Sequence
  Synthetic
auacauauuuucacauu

SEQ ID NO: 773473 - RNA, 17 nt, Artificial Sequence
  Synthetic
aaguuucaaaagacauu

SEQ ID NO: 773474 - RNA, 17 nt, Artificial Sequence
  Synthetic
aaagagaaccagacauu

SEQ ID NO: 773475 - RNA, 17 nt, Artificial Sequence
  Synthetic
agguuucaucagacauu

SEQ ID NO: 773476 - RNA, 17 nt, Artificial Sequence
  Synthetic
auagcauuagagacauu

SEQ ID NO: 773477 - RNA, 17 nt, Artificial Sequence
  Synthetic
caggguaccgagacauu

SEQ ID NO: 773478 - RNA, 17 nt, Artificial Sequence
  Synthetic
uuuccucaggagacauu

SEQ ID NO: 773479 - RNA, 17 nt, Artificial Sequence
  Synthetic
cuaaaaagggagacauu

SEQ ID NO: 773480 - RNA, 17 nt, Artificial Sequence
  Synthetic
acacaaagggagacauu

SEQ ID NO: 773481 - RNA, 17 nt, Artificial Sequence
  Synthetic
ugaaaacaauagacauu

SEQ ID NO: 773482 - RNA, 17 nt, Artificial Sequence
  Synthetic
ugagccuggaggacauu

SEQ ID NO: 773483 - RNA, 17 nt, Artificial Sequence
  Synthetic
uaucauugucggacauu

SEQ ID NO: 773484 - RNA, 17 nt, Artificial Sequence
  Synthetic
ccagguucauggacauu

SEQ ID NO: 773485 - RNA, 17 nt, Artificial Sequence
  Synthetic
uaucacugauggacauu

SEQ ID NO: 773486 - RNA, 17 nt, Artificial Sequence
  Synthetic
auuagcugauggacauu

SEQ ID NO: 773487 - RNA, 17 nt, Artificial Sequence
  Synthetic
uaucauugauggacauu

SEQ ID NO: 773488 - RNA, 17 nt, Artificial Sequence
  Synthetic
uauuauugauggacauu

SEQ ID NO: 773489 - RNA, 17 nt, Artificial Sequence
  Synthetic
uaucacuguuggacauu

SEQ ID NO: 773490 - RNA, 17 nt, Artificial Sequence
  Synthetic
uaucauuguuggacauu

SEQ ID NO: 773491 - RNA, 17 nt, Artificial Sequence
  Synthetic
acagaaguuuggacauu

SEQ ID NO: 773492 - RNA, 17 nt, Artificial Sequence
  Synthetic
ucaccagugaugacauu

SEQ ID NO: 773493 - RNA, 17 nt, Artificial Sequence
  Synthetic
cucaaggugaugacauu

SEQ ID NO: 773494 - RNA, 17 nt, Artificial Sequence
  Synthetic
uuccaaugccugacauu

SEQ ID NO: 773495 - RNA, 17 nt, Artificial Sequence
  Synthetic
ccuugaaaugugacauu

SEQ ID NO: 773496 - RNA, 17 nt, Artificial Sequence
  Synthetic
augacacucaauacauu

SEQ ID NO: 773497 - RNA, 17 nt, Artificial Sequence
  Synthetic
agucucuaggauacauu

SEQ ID NO: 773498 - RNA, 17 nt, Artificial Sequence
  Synthetic
ccagcuccugauacauu

SEQ ID NO: 773499 - RNA, 17 nt, Artificial Sequence
  Synthetic
aacaacagauauacauu

SEQ ID NO: 773500 - RNA, 17 nt, Artificial Sequence
  Synthetic
cagaaaauauauacauu

SEQ ID NO: 773501 - RNA, 17 nt, Artificial Sequence
  Synthetic
uugugaagcuauacauu

SEQ ID NO: 773502 - RNA, 17 nt, Artificial Sequence
  Synthetic
acacaaaucacuacauu

SEQ ID NO: 773503 - RNA, 17 nt, Artificial Sequence
  Synthetic
acucuguagacuacauu

SEQ ID NO: 773504 - RNA, 17 nt, Artificial Sequence
  Synthetic
cacaaccugccuacauu

SEQ ID NO: 773505 - RNA, 17 nt, Artificial Sequence
  Synthetic
ugaaaggaggcuacauu

SEQ ID NO: 773506 - RNA, 17 nt, Artificial Sequence
  Synthetic
acuuuauuugcuacauu

SEQ ID NO: 773507 - RNA, 17 nt, Artificial Sequence
  Synthetic
uauuuaaaaucuacauu

SEQ ID NO: 773508 - RNA, 17 nt, Artificial Sequence
  Synthetic
aacccaucaucuacauu

SEQ ID NO: 773509 - RNA, 17 nt, Artificial Sequence
  Synthetic
aacccgucaucuacauu

SEQ ID NO: 773510 - RNA, 17 nt, Artificial Sequence
  Synthetic
aaccugucaucuacauu

SEQ ID NO: 773511 - RNA, 17 nt, Artificial Sequence
  Synthetic
aacccuucaucuacauu

SEQ ID NO: 773512 - RNA, 17 nt, Artificial Sequence
  Synthetic
uuuuaagucucuacauu

SEQ ID NO: 773513 - RNA, 17 nt, Artificial Sequence
  Synthetic
cugagaacaaguacauu

SEQ ID NO: 773514 - RNA, 17 nt, Artificial Sequence
  Synthetic
uuaucucaagguacauu

SEQ ID NO: 773515 - RNA, 17 nt, Artificial Sequence
  Synthetic
aaaaaaauguguacauu

SEQ ID NO: 773516 - RNA, 17 nt, Artificial Sequence
  Synthetic
cauaagauguguacauu

SEQ ID NO: 773517 - RNA, 17 nt, Artificial Sequence
  Synthetic
acucuugugauuacauu

SEQ ID NO: 773518 - RNA, 17 nt, Artificial Sequence
  Synthetic
acaaccuuuauuacauu

SEQ ID NO: 773519 - RNA, 17 nt, Artificial Sequence
  Synthetic
ugugcagaccuuacauu

SEQ ID NO: 773520 - RNA, 17 nt, Artificial Sequence
  Synthetic
uuuauggaucuuacauu

SEQ ID NO: 773521 - RNA, 17 nt, Artificial Sequence
  Synthetic
aacucgucauuuacauu

SEQ ID NO: 773522 - RNA, 17 nt, Artificial Sequence
  Synthetic
aacuugucauuuacauu

SEQ ID NO: 773523 - RNA, 17 nt, Artificial Sequence
  Synthetic
ugaucauauuuuacauu

SEQ ID NO: 773524 - RNA, 17 nt, Artificial Sequence
  Synthetic
caaaagaauagaccauu

SEQ ID NO: 773525 - RNA, 17 nt, Artificial Sequence
  Synthetic
auuagauauagaccauu

SEQ ID NO: 773526 - RNA, 17 nt, Artificial Sequence
  Synthetic
ugcuuucuuggaccauu

SEQ ID NO: 773527 - RNA, 17 nt, Artificial Sequence
  Synthetic
uaagagguuauaccauu

SEQ ID NO: 773528 - RNA, 17 nt, Artificial Sequence
  Synthetic
agaaaacucuuaccauu

SEQ ID NO: 773529 - RNA, 17 nt, Artificial Sequence
  Synthetic
aaccuguucuuaccauu

SEQ ID NO: 773530 - RNA, 17 nt, Artificial Sequence
  Synthetic
acucgucauuuaccauu

SEQ ID NO: 773531 - RNA, 17 nt, Artificial Sequence
  Synthetic
cuguccagacacccauu

SEQ ID NO: 773532 - RNA, 17 nt, Artificial Sequence
  Synthetic
aacugcagggacccauu

SEQ ID NO: 773533 - RNA, 17 nt, Artificial Sequence
  Synthetic
auaacccucuacccauu

SEQ ID NO: 773534 - RNA, 17 nt, Artificial Sequence
  Synthetic
ucugccaaaaccccauu

SEQ ID NO: 773535 - RNA, 17 nt, Artificial Sequence
  Synthetic
uugguuuucugcccauu

SEQ ID NO: 773536 - RNA, 17 nt, Artificial Sequence
  Synthetic
ucucucagaaucccauu

SEQ ID NO: 773537 - RNA, 17 nt, Artificial Sequence
  Synthetic
aaauuccuucucccauu

SEQ ID NO: 773538 - RNA, 17 nt, Artificial Sequence
  Synthetic
aaaaguuuucucccauu

SEQ ID NO: 773539 - RNA, 17 nt, Artificial Sequence
  Synthetic
cuuuuucaggucccauu

SEQ ID NO: 773540 - RNA, 17 nt, Artificial Sequence
  Synthetic
agagacccuuucccauu

SEQ ID NO: 773541 - RNA, 17 nt, Artificial Sequence
  Synthetic
ccacaaauuuucccauu

SEQ ID NO: 773542 - RNA, 17 nt, Artificial Sequence
  Synthetic
cuucuucaaaagccauu

SEQ ID NO: 773543 - RNA, 17 nt, Artificial Sequence
  Synthetic
auaggaguaaagccauu

SEQ ID NO: 773544 - RNA, 17 nt, Artificial Sequence
  Synthetic
uuaaauguuaagccauu

SEQ ID NO: 773545 - RNA, 17 nt, Artificial Sequence
  Synthetic
aagauaaaacagccauu

SEQ ID NO: 773546 - RNA, 17 nt, Artificial Sequence
  Synthetic
auaaauaaagagccauu

SEQ ID NO: 773547 - RNA, 17 nt, Artificial Sequence
  Synthetic
acuucuuccuagccauu

SEQ ID NO: 773548 - RNA, 17 nt, Artificial Sequence
  Synthetic
cauuucccuuagccauu

SEQ ID NO: 773549 - RNA, 17 nt, Artificial Sequence
  Synthetic
caaaauuguuagccauu

SEQ ID NO: 773550 - RNA, 17 nt, Artificial Sequence
  Synthetic
aggcuucaugggccauu

SEQ ID NO: 773551 - RNA, 17 nt, Artificial Sequence
  Synthetic
uuucuuccauggccauu

SEQ ID NO: 773552 - RNA, 17 nt, Artificial Sequence
  Synthetic
aaaugcagaaugccauu

SEQ ID NO: 773553 - RNA, 17 nt, Artificial Sequence
  Synthetic
ugacuaaauaugccauu

SEQ ID NO: 773554 - RNA, 17 nt, Artificial Sequence
  Synthetic
ucagcccuauugccauu

SEQ ID NO: 773555 - RNA, 17 nt, Artificial Sequence
  Synthetic
ucugaggccuugccauu

SEQ ID NO: 773556 - RNA, 17 nt, Artificial Sequence
  Synthetic
ccaggcacuuugccauu

SEQ ID NO: 773557 - RNA, 17 nt, Artificial Sequence
  Synthetic
uuggagugaaauccauu

SEQ ID NO: 773558 - RNA, 17 nt, Artificial Sequence
  Synthetic
aauugaaauaauccauu

SEQ ID NO: 773559 - RNA, 17 nt, Artificial Sequence
  Synthetic
ccucaguguaauccauu

SEQ ID NO: 773560 - RNA, 17 nt, Artificial Sequence
  Synthetic
uguuguuuuaauccauu

SEQ ID NO: 773561 - RNA, 17 nt, Artificial Sequence
  Synthetic
accuccaaauauccauu

SEQ ID NO: 773562 - RNA, 17 nt, Artificial Sequence
  Synthetic
acaauauucacuccauu

SEQ ID NO: 773563 - RNA, 17 nt, Artificial Sequence
  Synthetic
aagaucuaaucuccauu

SEQ ID NO: 773564 - RNA, 17 nt, Artificial Sequence
  Synthetic
uaccucucuucuccauu

SEQ ID NO: 773565 - RNA, 17 nt, Artificial Sequence
  Synthetic
ugggauuguucuccauu

SEQ ID NO: 773566 - RNA, 17 nt, Artificial Sequence
  Synthetic
cuauuauuaaguccauu

SEQ ID NO: 773567 - RNA, 17 nt, Artificial Sequence
  Synthetic
cauuuuaauaguccauu

SEQ ID NO: 773568 - RNA, 17 nt, Artificial Sequence
  Synthetic
ugucuguuagguccauu

SEQ ID NO: 773569 - RNA, 17 nt, Artificial Sequence
  Synthetic
uugguucacauuccauu

SEQ ID NO: 773570 - RNA, 17 nt, Artificial Sequence
  Synthetic
uuuuacuucauuccauu

SEQ ID NO: 773571 - RNA, 17 nt, Artificial Sequence
  Synthetic
auauagaguguuccauu

SEQ ID NO: 773572 - RNA, 17 nt, Artificial Sequence
  Synthetic
aucuguaauuuuccauu

SEQ ID NO: 773573 - RNA, 17 nt, Artificial Sequence
  Synthetic
aauuaugguuuuccauu

SEQ ID NO: 773574 - RNA, 17 nt, Artificial Sequence
  Synthetic
auuaggaaacaagcauu

SEQ ID NO: 773575 - RNA, 17 nt, Artificial Sequence
  Synthetic
uuagagaaagaagcauu

SEQ ID NO: 773576 - RNA, 17 nt, Artificial Sequence
  Synthetic
aauccaucugaagcauu

SEQ ID NO: 773577 - RNA, 17 nt, Artificial Sequence
  Synthetic
acaaaaaaauaagcauu

SEQ ID NO: 773578 - RNA, 17 nt, Artificial Sequence
  Synthetic
acaaccaacccagcauu

SEQ ID NO: 773579 - RNA, 17 nt, Artificial Sequence
  Synthetic
uuccaaaugccagcauu

SEQ ID NO: 773580 - RNA, 17 nt, Artificial Sequence
  Synthetic
ccuaaaugugcagcauu

SEQ ID NO: 773581 - RNA, 17 nt, Artificial Sequence
  Synthetic
auaucacuaucagcauu

SEQ ID NO: 773582 - RNA, 17 nt, Artificial Sequence
  Synthetic
ugcagcuauucagcauu

SEQ ID NO: 773583 - RNA, 17 nt, Artificial Sequence
  Synthetic
aggggacagagagcauu

SEQ ID NO: 773584 - RNA, 17 nt, Artificial Sequence
  Synthetic
aggggagggagagcauu

SEQ ID NO: 773585 - RNA, 17 nt, Artificial Sequence
  Synthetic
aggugagggagagcauu

SEQ ID NO: 773586 - RNA, 17 nt, Artificial Sequence
  Synthetic
ugcagcccaggagcauu

SEQ ID NO: 773587 - RNA, 17 nt, Artificial Sequence
  Synthetic
uaucauugaugagcauu

SEQ ID NO: 773588 - RNA, 17 nt, Artificial Sequence
  Synthetic
aggggagggauagcauu

SEQ ID NO: 773589 - RNA, 17 nt, Artificial Sequence
  Synthetic
gggggagggauagcauu

SEQ ID NO: 773590 - RNA, 17 nt, Artificial Sequence
  Synthetic
uggggagggauagcauu

SEQ ID NO: 773591 - RNA, 17 nt, Artificial Sequence
  Synthetic
aggguagggauagcauu

SEQ ID NO: 773592 - RNA, 17 nt, Artificial Sequence
  Synthetic
acucaucaucuagcauu

SEQ ID NO: 773593 - RNA, 17 nt, Artificial Sequence
  Synthetic
acccgucaucuagcauu

SEQ ID NO: 773594 - RNA, 17 nt, Artificial Sequence
  Synthetic
acucgucaucuagcauu

SEQ ID NO: 773595 - RNA, 17 nt, Artificial Sequence
  Synthetic
acgugucaucuagcauu

SEQ ID NO: 773596 - RNA, 17 nt, Artificial Sequence
  Synthetic
acuugucaucuagcauu

SEQ ID NO: 773597 - RNA, 17 nt, Artificial Sequence
  Synthetic
aauauggcaguagcauu

SEQ ID NO: 773598 - RNA, 17 nt, Artificial Sequence
  Synthetic
cacaucauuguagcauu

SEQ ID NO: 773599 - RNA, 17 nt, Artificial Sequence
  Synthetic
acuucucauuuagcauu

SEQ ID NO: 773600 - RNA, 17 nt, Artificial Sequence
  Synthetic
acucgucauuuagcauu

SEQ ID NO: 773601 - RNA, 17 nt, Artificial Sequence
  Synthetic
cuuuaaguuuuagcauu

SEQ ID NO: 773602 - RNA, 17 nt, Artificial Sequence
  Synthetic
ugggggguacaggcauu

SEQ ID NO: 773603 - RNA, 17 nt, Artificial Sequence
  Synthetic
uagaacacccaggcauu

SEQ ID NO: 773604 - RNA, 17 nt, Artificial Sequence
  Synthetic
uuacucacccaggcauu

SEQ ID NO: 773605 - RNA, 17 nt, Artificial Sequence
  Synthetic
aguaaacccuaggcauu

SEQ ID NO: 773606 - RNA, 17 nt, Artificial Sequence
  Synthetic
ucuuugauguaggcauu

SEQ ID NO: 773607 - RNA, 17 nt, Artificial Sequence
  Synthetic
aaaaacacuuaggcauu

SEQ ID NO: 773608 - RNA, 17 nt, Artificial Sequence
  Synthetic
acaauagguuaggcauu

SEQ ID NO: 773609 - RNA, 17 nt, Artificial Sequence
  Synthetic
ucuaucuguggggcauu

SEQ ID NO: 773610 - RNA, 17 nt, Artificial Sequence
  Synthetic
caucacugaugggcauu

SEQ ID NO: 773611 - RNA, 17 nt, Artificial Sequence
  Synthetic
uaucacugaugggcauu

SEQ ID NO: 773612 - RNA, 17 nt, Artificial Sequence
  Synthetic
uaucauugaugggcauu

SEQ ID NO: 773613 - RNA, 17 nt, Artificial Sequence
  Synthetic
uaucacuggugggcauu

SEQ ID NO: 773614 - RNA, 17 nt, Artificial Sequence
  Synthetic
ucccauuauugggcauu

SEQ ID NO: 773615 - RNA, 17 nt, Artificial Sequence
  Synthetic
uuugaaaggauggcauu

SEQ ID NO: 773616 - RNA, 17 nt, Artificial Sequence
  Synthetic
aacuccaggauggcauu

SEQ ID NO: 773617 - RNA, 17 nt, Artificial Sequence
  Synthetic
ccagcaaguauggcauu

SEQ ID NO: 773618 - RNA, 17 nt, Artificial Sequence
  Synthetic
cauggcagacuggcauu

SEQ ID NO: 773619 - RNA, 17 nt, Artificial Sequence
  Synthetic
auccaaaugcuggcauu

SEQ ID NO: 773620 - RNA, 17 nt, Artificial Sequence
  Synthetic
auaaaggcucuggcauu

SEQ ID NO: 773621 - RNA, 17 nt, Artificial Sequence
  Synthetic
uggaaccaaguggcauu

SEQ ID NO: 773622 - RNA, 17 nt, Artificial Sequence
  Synthetic
aaaagagggguggcauu

SEQ ID NO: 773623 - RNA, 17 nt, Artificial Sequence
  Synthetic
aacuaguguuuggcauu

SEQ ID NO: 773624 - RNA, 17 nt, Artificial Sequence
  Synthetic
aaacaacuuuuggcauu

SEQ ID NO: 773625 - RNA, 17 nt, Artificial Sequence
  Synthetic
auacuaaaaaaugcauu

SEQ ID NO: 773626 - RNA, 17 nt, Artificial Sequence
  Synthetic
uaagcccccaaugcauu

SEQ ID NO: 773627 - RNA, 17 nt, Artificial Sequence
  Synthetic
aguggaaugaaugcauu

SEQ ID NO: 773628 - RNA, 17 nt, Artificial Sequence
  Synthetic
caaauaccuaaugcauu

SEQ ID NO: 773629 - RNA, 17 nt, Artificial Sequence
  Synthetic
uaagccccacaugcauu

SEQ ID NO: 773630 - RNA, 17 nt, Artificial Sequence
  Synthetic
uaagccccgcaugcauu

SEQ ID NO: 773631 - RNA, 17 nt, Artificial Sequence
  Synthetic
uuuuagauguaugcauu

SEQ ID NO: 773632 - RNA, 17 nt, Artificial Sequence
  Synthetic
ccucaaguuuaugcauu

SEQ ID NO: 773633 - RNA, 17 nt, Artificial Sequence
  Synthetic
cugaaaagaccugcauu

SEQ ID NO: 773634 - RNA, 17 nt, Artificial Sequence
  Synthetic
uuugggggaggugcauu

SEQ ID NO: 773635 - RNA, 17 nt, Artificial Sequence
  Synthetic
caguaaaagggugcauu

SEQ ID NO: 773636 - RNA, 17 nt, Artificial Sequence
  Synthetic
cuugaaauaugugcauu

SEQ ID NO: 773637 - RNA, 17 nt, Artificial Sequence
  Synthetic
cuuagcuuccuugcauu

SEQ ID NO: 773638 - RNA, 17 nt, Artificial Sequence
  Synthetic
cagaaguagguugcauu

SEQ ID NO: 773639 - RNA, 17 nt, Artificial Sequence
  Synthetic
auaaaaauauuugcauu

SEQ ID NO: 773640 - RNA, 17 nt, Artificial Sequence
  Synthetic
cauaguuccuuugcauu

SEQ ID NO: 773641 - RNA, 17 nt, Artificial Sequence
  Synthetic
uuuaaaucaaaaucauu

SEQ ID NO: 773642 - RNA, 17 nt, Artificial Sequence
  Synthetic
aauuugaucaaaucauu

SEQ ID NO: 773643 - RNA, 17 nt, Artificial Sequence
  Synthetic
uuauaguucaaaucauu

SEQ ID NO: 773644 - RNA, 17 nt, Artificial Sequence
  Synthetic
caccacacccaaucauu

SEQ ID NO: 773645 - RNA, 17 nt, Artificial Sequence
  Synthetic
caacaucacuaaucauu

SEQ ID NO: 773646 - RNA, 17 nt, Artificial Sequence
  Synthetic
ugaccucugucaucauu

SEQ ID NO: 773647 - RNA, 17 nt, Artificial Sequence
  Synthetic
agucaaaggagaucauu

SEQ ID NO: 773648 - RNA, 17 nt, Artificial Sequence
  Synthetic
acagcuaauagaucauu

SEQ ID NO: 773649 - RNA, 17 nt, Artificial Sequence
  Synthetic
acuaacagcggaucauu

SEQ ID NO: 773650 - RNA, 17 nt, Artificial Sequence
  Synthetic
aaaaaucacugaucauu

SEQ ID NO: 773651 - RNA, 17 nt, Artificial Sequence
  Synthetic
auacuuauaauaucauu

SEQ ID NO: 773652 - RNA, 17 nt, Artificial Sequence
  Synthetic
auuauaaucauaucauu

SEQ ID NO: 773653 - RNA, 17 nt, Artificial Sequence
  Synthetic
uaaacauggauaucauu

SEQ ID NO: 773654 - RNA, 17 nt, Artificial Sequence
  Synthetic
acaaauucacuaucauu

SEQ ID NO: 773655 - RNA, 17 nt, Artificial Sequence
  Synthetic
uuuaaaaugcuaucauu

SEQ ID NO: 773656 - RNA, 17 nt, Artificial Sequence
  Synthetic
uauguuuugcuaucauu

SEQ ID NO: 773657 - RNA, 17 nt, Artificial Sequence
  Synthetic
aacaauaaucuaucauu

SEQ ID NO: 773658 - RNA, 17 nt, Artificial Sequence
  Synthetic
aauauauuauuaucauu

SEQ ID NO: 773659 - RNA, 17 nt, Artificial Sequence
  Synthetic
acagaagaguuaucauu

SEQ ID NO: 773660 - RNA, 17 nt, Artificial Sequence
  Synthetic
uuugcgaauuuaucauu

SEQ ID NO: 773661 - RNA, 17 nt, Artificial Sequence
  Synthetic
uacuucuuuuuaucauu

SEQ ID NO: 773662 - RNA, 17 nt, Artificial Sequence
  Synthetic
aguagaacaaacucauu

SEQ ID NO: 773663 - RNA, 17 nt, Artificial Sequence
  Synthetic
uucuaaguaaacucauu

SEQ ID NO: 773664 - RNA, 17 nt, Artificial Sequence
  Synthetic
aauaaaaaucacucauu

SEQ ID NO: 773665 - RNA, 17 nt, Artificial Sequence
  Synthetic
uccaccugcuacucauu

SEQ ID NO: 773666 - RNA, 17 nt, Artificial Sequence
  Synthetic
aucauuuccaccucauu

SEQ ID NO: 773667 - RNA, 17 nt, Artificial Sequence
  Synthetic
aacacuucacccucauu

SEQ ID NO: 773668 - RNA, 17 nt, Artificial Sequence
  Synthetic
agaagaaagcccucauu

SEQ ID NO: 773669 - RNA, 17 nt, Artificial Sequence
  Synthetic
uguuugagaugcucauu

SEQ ID NO: 773670 - RNA, 17 nt, Artificial Sequence
  Synthetic
uuaauugagugcucauu

SEQ ID NO: 773671 - RNA, 17 nt, Artificial Sequence
  Synthetic
cuuauugaaaucucauu

SEQ ID NO: 773672 - RNA, 17 nt, Artificial Sequence
  Synthetic
auaugaggaaucucauu

SEQ ID NO: 773673 - RNA, 17 nt, Artificial Sequence
  Synthetic
uggguuugagucucauu

SEQ ID NO: 773674 - RNA, 17 nt, Artificial Sequence
  Synthetic
acuacacaugucucauu

SEQ ID NO: 773675 - RNA, 17 nt, Artificial Sequence
  Synthetic
cucauuuacuucucauu

SEQ ID NO: 773676 - RNA, 17 nt, Artificial Sequence
  Synthetic
uuuuuucucuucucauu

SEQ ID NO: 773677 - RNA, 17 nt, Artificial Sequence
  Synthetic
cacugaauuuucucauu

SEQ ID NO: 773678 - RNA, 17 nt, Artificial Sequence
  Synthetic
aucaaauaacagucauu

SEQ ID NO: 773679 - RNA, 17 nt, Artificial Sequence
  Synthetic
aagcacuuacagucauu

SEQ ID NO: 773680 - RNA, 17 nt, Artificial Sequence
  Synthetic
aaacugucagagucauu

SEQ ID NO: 773681 - RNA, 17 nt, Artificial Sequence
  Synthetic
auaauuuuuuagucauu

SEQ ID NO: 773682 - RNA, 17 nt, Artificial Sequence
  Synthetic
caguuccacaggucauu

SEQ ID NO: 773683 - RNA, 17 nt, Artificial Sequence
  Synthetic
cuuaaaaugaggucauu

SEQ ID NO: 773684 - RNA, 17 nt, Artificial Sequence
  Synthetic
uucaauauauggucauu

SEQ ID NO: 773685 - RNA, 17 nt, Artificial Sequence
  Synthetic
cuagcagaaaugucauu

SEQ ID NO: 773686 - RNA, 17 nt, Artificial Sequence
  Synthetic
auuaagaugaugucauu

SEQ ID NO: 773687 - RNA, 17 nt, Artificial Sequence
  Synthetic
uaggaaauucugucauu

SEQ ID NO: 773688 - RNA, 17 nt, Artificial Sequence
  Synthetic
ugauuuguggugucauu

SEQ ID NO: 773689 - RNA, 17 nt, Artificial Sequence
  Synthetic
cugaaaaaugugucauu

SEQ ID NO: 773690 - RNA, 17 nt, Artificial Sequence
  Synthetic
uucuuaaaugugucauu

SEQ ID NO: 773691 - RNA, 17 nt, Artificial Sequence
  Synthetic
cugagagaugugucauu

SEQ ID NO: 773692 - RNA, 17 nt, Artificial Sequence
  Synthetic
ucaaugcccuugucauu

SEQ ID NO: 773693 - RNA, 17 nt, Artificial Sequence
  Synthetic
uacaauugguugucauu

SEQ ID NO: 773694 - RNA, 17 nt, Artificial Sequence
  Synthetic
uuagaauacaauucauu

SEQ ID NO: 773695 - RNA, 17 nt, Artificial Sequence
  Synthetic
auaaauaagcauucauu

SEQ ID NO: 773696 - RNA, 17 nt, Artificial Sequence
  Synthetic
auguguuaagauucauu

SEQ ID NO: 773697 - RNA, 17 nt, Artificial Sequence
  Synthetic
uaauguugauauucauu

SEQ ID NO: 773698 - RNA, 17 nt, Artificial Sequence
  Synthetic
uguuacugguauucauu

SEQ ID NO: 773699 - RNA, 17 nt, Artificial Sequence
  Synthetic
uuaaaacugccuucauu

SEQ ID NO: 773700 - RNA, 17 nt, Artificial Sequence
  Synthetic
uucuuuaucucuucauu

SEQ ID NO: 773701 - RNA, 17 nt, Artificial Sequence
  Synthetic
auuuuaauuucuucauu

SEQ ID NO: 773702 - RNA, 17 nt, Artificial Sequence
  Synthetic
aaauaacuagguucauu

SEQ ID NO: 773703 - RNA, 17 nt, Artificial Sequence
  Synthetic
cuuccuuuaauuucauu

SEQ ID NO: 773704 - RNA, 17 nt, Artificial Sequence
  Synthetic
uguuguuuaauuucauu

SEQ ID NO: 773705 - RNA, 17 nt, Artificial Sequence
  Synthetic
aauauggacauuucauu

SEQ ID NO: 773706 - RNA, 17 nt, Artificial Sequence
  Synthetic
ugagguuggauuucauu

SEQ ID NO: 773707 - RNA, 17 nt, Artificial Sequence
  Synthetic
auaggauuuauuucauu

SEQ ID NO: 773708 - RNA, 17 nt, Artificial Sequence
  Synthetic
aaaaaaauccuuucauu

SEQ ID NO: 773709 - RNA, 17 nt, Artificial Sequence
  Synthetic
uguauucugcuuucauu

SEQ ID NO: 773710 - RNA, 17 nt, Artificial Sequence
  Synthetic
uugguauggguuucauu

SEQ ID NO: 773711 - RNA, 17 nt, Artificial Sequence
  Synthetic
cucuauucuguuucauu

SEQ ID NO: 773712 - RNA, 17 nt, Artificial Sequence
  Synthetic
auucuagaauuuucauu

SEQ ID NO: 773713 - RNA, 17 nt, Artificial Sequence
  Synthetic
uaucagaacuuuucauu

SEQ ID NO: 773714 - RNA, 17 nt, Artificial Sequence
  Synthetic
ucuaaaggcuuuucauu

SEQ ID NO: 773715 - RNA, 17 nt, Artificial Sequence
  Synthetic
cugggcuucuuuucauu

SEQ ID NO: 773716 - RNA, 17 nt, Artificial Sequence
  Synthetic
uucacuuuguuuucauu

SEQ ID NO: 773717 - RNA, 17 nt, Artificial Sequence
  Synthetic
aacgauuauuuuucauu

SEQ ID NO: 773718 - RNA, 17 nt, Artificial Sequence
  Synthetic
uauauauuuuuuucauu

SEQ ID NO: 773719 - RNA, 17 nt, Artificial Sequence
  Synthetic
ugaggaagaaaaagauu

SEQ ID NO: 773720 - RNA, 17 nt, Artificial Sequence
  Synthetic
uuggacccagaaagauu

SEQ ID NO: 773721 - RNA, 17 nt, Artificial Sequence
  Synthetic
aagcugaaauaaagauu

SEQ ID NO: 773722 - RNA, 17 nt, Artificial Sequence
  Synthetic
uuuucuuaguaaagauu

SEQ ID NO: 773723 - RNA, 17 nt, Artificial Sequence
  Synthetic
cauaaugauuaaagauu

SEQ ID NO: 773724 - RNA, 17 nt, Artificial Sequence
  Synthetic
aaaugcucaacaagauu

SEQ ID NO: 773725 - RNA, 17 nt, Artificial Sequence
  Synthetic
ucacaauagccaagauu

SEQ ID NO: 773726 - RNA, 17 nt, Artificial Sequence
  Synthetic
ucauaauagccaagauu

SEQ ID NO: 773727 - RNA, 17 nt, Artificial Sequence
  Synthetic
aguaagccuccaagauu

SEQ ID NO: 773728 - RNA, 17 nt, Artificial Sequence
  Synthetic
ucacaacaggcaagauu

SEQ ID NO: 773729 - RNA, 17 nt, Artificial Sequence
  Synthetic
uuccugcuuucaagauu

SEQ ID NO: 773730 - RNA, 17 nt, Artificial Sequence
  Synthetic
aauggaaguagaagauu

SEQ ID NO: 773731 - RNA, 17 nt, Artificial Sequence
  Synthetic
aaucaguugggaagauu

SEQ ID NO: 773732 - RNA, 17 nt, Artificial Sequence
  Synthetic
uuaggcuacauaagauu

SEQ ID NO: 773733 - RNA, 17 nt, Artificial Sequence
  Synthetic
caaauaaauauaagauu

SEQ ID NO: 773734 - RNA, 17 nt, Artificial Sequence
  Synthetic
cauuucaauauaagauu

SEQ ID NO: 773735 - RNA, 17 nt, Artificial Sequence
  Synthetic
aaaguacauguaagauu

SEQ ID NO: 773736 - RNA, 17 nt, Artificial Sequence
  Synthetic
uacucaguuguaagauu

SEQ ID NO: 773737 - RNA, 17 nt, Artificial Sequence
  Synthetic
auaauauuguuaagauu

SEQ ID NO: 773738 - RNA, 17 nt, Artificial Sequence
  Synthetic
aggaagaggaacagauu

SEQ ID NO: 773739 - RNA, 17 nt, Artificial Sequence
  Synthetic
uccuccaguaacagauu

SEQ ID NO: 773740 - RNA, 17 nt, Artificial Sequence
  Synthetic
uuaaacagggacagauu

SEQ ID NO: 773741 - RNA, 17 nt, Artificial Sequence
  Synthetic
caggcaaacuacagauu

SEQ ID NO: 773742 - RNA, 17 nt, Artificial Sequence
  Synthetic
caaagaccuuacagauu

SEQ ID NO: 773743 - RNA, 17 nt, Artificial Sequence
  Synthetic
auguacaaaaccagauu

SEQ ID NO: 773744 - RNA, 17 nt, Artificial Sequence
  Synthetic
uugaaugucaccagauu

SEQ ID NO: 773745 - RNA, 17 nt, Artificial Sequence
  Synthetic
ugcccucuugccagauu

SEQ ID NO: 773746 - RNA, 17 nt, Artificial Sequence
  Synthetic
uaagaccuuuccagauu

SEQ ID NO: 773747 - RNA, 17 nt, Artificial Sequence
  Synthetic
cuauauuaaagcagauu

SEQ ID NO: 773748 - RNA, 17 nt, Artificial Sequence
  Synthetic
caaaauaccagcagauu

SEQ ID NO: 773749 - RNA, 17 nt, Artificial Sequence
  Synthetic
cagaagacuagcagauu

SEQ ID NO: 773750 - RNA, 17 nt, Artificial Sequence
  Synthetic
ugaggggaaggcagauu

SEQ ID NO: 773751 - RNA, 17 nt, Artificial Sequence
  Synthetic
aaaagaaggggcagauu

SEQ ID NO: 773752 - RNA, 17 nt, Artificial Sequence
  Synthetic
cugaacuuuggcagauu

SEQ ID NO: 773753 - RNA, 17 nt, Artificial Sequence
  Synthetic
ccucagaguugcagauu

SEQ ID NO: 773754 - RNA, 17 nt, Artificial Sequence
  Synthetic
aggagguugaucagauu

SEQ ID NO: 773755 - RNA, 17 nt, Artificial Sequence
  Synthetic
ugaauuacagucagauu

SEQ ID NO: 773756 - RNA, 17 nt, Artificial Sequence
  Synthetic
uaagaucaugucagauu

SEQ ID NO: 773757 - RNA, 17 nt, Artificial Sequence
  Synthetic
ucuauugaugucagauu

SEQ ID NO: 773758 - RNA, 17 nt, Artificial Sequence
  Synthetic
uuuuggauuuucagauu

SEQ ID NO: 773759 - RNA, 17 nt, Artificial Sequence
  Synthetic
auucuaaaacagagauu

SEQ ID NO: 773760 - RNA, 17 nt, Artificial Sequence
  Synthetic
uuggauagagagagauu

SEQ ID NO: 773761 - RNA, 17 nt, Artificial Sequence
  Synthetic
ugcaauugagagagauu

SEQ ID NO: 773762 - RNA, 17 nt, Artificial Sequence
  Synthetic
augaaugaggagagauu

SEQ ID NO: 773763 - RNA, 17 nt, Artificial Sequence
  Synthetic
aaauagguggagagauu

SEQ ID NO: 773764 - RNA, 17 nt, Artificial Sequence
  Synthetic
agaaggaaauagagauu

SEQ ID NO: 773765 - RNA, 17 nt, Artificial Sequence
  Synthetic
uuuauaagcuagagauu

SEQ ID NO: 773766 - RNA, 17 nt, Artificial Sequence
  Synthetic
agcuggguuuagagauu

SEQ ID NO: 773767 - RNA, 17 nt, Artificial Sequence
  Synthetic
agguaaaacacgagauu

SEQ ID NO: 773768 - RNA, 17 nt, Artificial Sequence
  Synthetic
aagaacugcccgagauu

SEQ ID NO: 773769 - RNA, 17 nt, Artificial Sequence
  Synthetic
aaauucuuaaggagauu

SEQ ID NO: 773770 - RNA, 17 nt, Artificial Sequence
  Synthetic
agaauuaaagggagauu

SEQ ID NO: 773771 - RNA, 17 nt, Artificial Sequence
  Synthetic
caauucaaaaugagauu

SEQ ID NO: 773772 - RNA, 17 nt, Artificial Sequence
  Synthetic
caauucagaaugagauu

SEQ ID NO: 773773 - RNA, 17 nt, Artificial Sequence
  Synthetic
aauuucaacaugagauu

SEQ ID NO: 773774 - RNA, 17 nt, Artificial Sequence
  Synthetic
ugugaugacaugagauu

SEQ ID NO: 773775 - RNA, 17 nt, Artificial Sequence
  Synthetic
caauucaagaugagauu

SEQ ID NO: 773776 - RNA, 17 nt, Artificial Sequence
  Synthetic
cauuucaagaugagauu

SEQ ID NO: 773777 - RNA, 17 nt, Artificial Sequence
  Synthetic
caguucuagaugagauu

SEQ ID NO: 773778 - RNA, 17 nt, Artificial Sequence
  Synthetic
caauuuaauaugagauu

SEQ ID NO: 773779 - RNA, 17 nt, Artificial Sequence
  Synthetic
aaguuguuuaugagauu

SEQ ID NO: 773780 - RNA, 17 nt, Artificial Sequence
  Synthetic
uguuugaugcugagauu

SEQ ID NO: 773781 - RNA, 17 nt, Artificial Sequence
  Synthetic
acugagacagugagauu

SEQ ID NO: 773782 - RNA, 17 nt, Artificial Sequence
  Synthetic
uuauccugagugagauu

SEQ ID NO: 773783 - RNA, 17 nt, Artificial Sequence
  Synthetic
caauucaaggugagauu

SEQ ID NO: 773784 - RNA, 17 nt, Artificial Sequence
  Synthetic
uaauucaaggugagauu

SEQ ID NO: 773785 - RNA, 17 nt, Artificial Sequence
  Synthetic
uuaccagauaauagauu

SEQ ID NO: 773786 - RNA, 17 nt, Artificial Sequence
  Synthetic
uacaaaugccauagauu

SEQ ID NO: 773787 - RNA, 17 nt, Artificial Sequence
  Synthetic
agcaugagucauagauu

SEQ ID NO: 773788 - RNA, 17 nt, Artificial Sequence
  Synthetic
agagauagugauagauu

SEQ ID NO: 773789 - RNA, 17 nt, Artificial Sequence
  Synthetic
uguuugauauauagauu

SEQ ID NO: 773790 - RNA, 17 nt, Artificial Sequence
  Synthetic
uccucucucuauagauu

SEQ ID NO: 773791 - RNA, 17 nt, Artificial Sequence
  Synthetic
uucuuuucaccuagauu

SEQ ID NO: 773792 - RNA, 17 nt, Artificial Sequence
  Synthetic
auccuguaggcuagauu

SEQ ID NO: 773793 - RNA, 17 nt, Artificial Sequence
  Synthetic
acaugugucaguagauu

SEQ ID NO: 773794 - RNA, 17 nt, Artificial Sequence
  Synthetic
cugagagggaguagauu

SEQ ID NO: 773795 - RNA, 17 nt, Artificial Sequence
  Synthetic
ccaaucagacguagauu

SEQ ID NO: 773796 - RNA, 17 nt, Artificial Sequence
  Synthetic
uuucuaaaggguagauu

SEQ ID NO: 773797 - RNA, 17 nt, Artificial Sequence
  Synthetic
ugccuccucuguagauu

SEQ ID NO: 773798 - RNA, 17 nt, Artificial Sequence
  Synthetic
aagggucucuguagauu

SEQ ID NO: 773799 - RNA, 17 nt, Artificial Sequence
  Synthetic
aaauuaaauuguagauu

SEQ ID NO: 773800 - RNA, 17 nt, Artificial Sequence
  Synthetic
agaguuuauuguagauu

SEQ ID NO: 773801 - RNA, 17 nt, Artificial Sequence
  Synthetic
aacccugugguuagauu

SEQ ID NO: 773802 - RNA, 17 nt, Artificial Sequence
  Synthetic
ugaccuaaauuuagauu

SEQ ID NO: 773803 - RNA, 17 nt, Artificial Sequence
  Synthetic
uaaccauaauuuagauu

SEQ ID NO: 773804 - RNA, 17 nt, Artificial Sequence
  Synthetic
cuggcagcauuuagauu

SEQ ID NO: 773805 - RNA, 17 nt, Artificial Sequence
  Synthetic
auauuaaaguuuagauu

SEQ ID NO: 773806 - RNA, 17 nt, Artificial Sequence
  Synthetic
auaucaggguuuagauu

SEQ ID NO: 773807 - RNA, 17 nt, Artificial Sequence
  Synthetic
caaaacauuuuuagauu

SEQ ID NO: 773808 - RNA, 17 nt, Artificial Sequence
  Synthetic
uuguaauuucaacgauu

SEQ ID NO: 773809 - RNA, 17 nt, Artificial Sequence
  Synthetic
ugaauacagagacgauu

SEQ ID NO: 773810 - RNA, 17 nt, Artificial Sequence
  Synthetic
uacaaaaugacccgauu

SEQ ID NO: 773811 - RNA, 17 nt, Artificial Sequence
  Synthetic
ccuccaacagagcgauu

SEQ ID NO: 773812 - RNA, 17 nt, Artificial Sequence
  Synthetic
cuguaaaaaaugcgauu

SEQ ID NO: 773813 - RNA, 17 nt, Artificial Sequence
  Synthetic
cuuuugcuuggucgauu

SEQ ID NO: 773814 - RNA, 17 nt, Artificial Sequence
  Synthetic
aucuccaaaaaaggauu

SEQ ID NO: 773815 - RNA, 17 nt, Artificial Sequence
  Synthetic
uauaccccaaaaggauu

SEQ ID NO: 773816 - RNA, 17 nt, Artificial Sequence
  Synthetic
cuguaaucccaaggauu

SEQ ID NO: 773817 - RNA, 17 nt, Artificial Sequence
  Synthetic
ucugugggucaaggauu

SEQ ID NO: 773818 - RNA, 17 nt, Artificial Sequence
  Synthetic
augggaugagaaggauu

SEQ ID NO: 773819 - RNA, 17 nt, Artificial Sequence
  Synthetic
ccaaaacaugaaggauu

SEQ ID NO: 773820 - RNA, 17 nt, Artificial Sequence
  Synthetic
auuucaugauaaggauu

SEQ ID NO: 773821 - RNA, 17 nt, Artificial Sequence
  Synthetic
uuaaaugccacaggauu

SEQ ID NO: 773822 - RNA, 17 nt, Artificial Sequence
  Synthetic
ugaacuaauccaggauu

SEQ ID NO: 773823 - RNA, 17 nt, Artificial Sequence
  Synthetic
aaaaagauggcaggauu

SEQ ID NO: 773824 - RNA, 17 nt, Artificial Sequence
  Synthetic
cuguagucugcaggauu

SEQ ID NO: 773825 - RNA, 17 nt, Artificial Sequence
  Synthetic
acuacauacucaggauu

SEQ ID NO: 773826 - RNA, 17 nt, Artificial Sequence
  Synthetic
uagcagugaagaggauu

SEQ ID NO: 773827 - RNA, 17 nt, Artificial Sequence
  Synthetic
uaaggacugagaggauu

SEQ ID NO: 773828 - RNA, 17 nt, Artificial Sequence
  Synthetic
aaucucccccgaggauu

SEQ ID NO: 773829 - RNA, 17 nt, Artificial Sequence
  Synthetic
ugggugagaggaggauu

SEQ ID NO: 773830 - RNA, 17 nt, Artificial Sequence
  Synthetic
acaaccuagggaggauu

SEQ ID NO: 773831 - RNA, 17 nt, Artificial Sequence
  Synthetic
cuuaaauugugaggauu

SEQ ID NO: 773832 - RNA, 17 nt, Artificial Sequence
  Synthetic
ucaauccacauaggauu

SEQ ID NO: 773833 - RNA, 17 nt, Artificial Sequence
  Synthetic
aacaaugggcuaggauu

SEQ ID NO: 773834 - RNA, 17 nt, Artificial Sequence
  Synthetic
uuacuuagucuaggauu

SEQ ID NO: 773835 - RNA, 17 nt, Artificial Sequence
  Synthetic
aacuugcugguaggauu

SEQ ID NO: 773836 - RNA, 17 nt, Artificial Sequence
  Synthetic
ucuuuacauuuaggauu

SEQ ID NO: 773837 - RNA, 17 nt, Artificial Sequence
  Synthetic
aggcccuugcagggauu

SEQ ID NO: 773838 - RNA, 17 nt, Artificial Sequence
  Synthetic
aauuacagcuagggauu

SEQ ID NO: 773839 - RNA, 17 nt, Artificial Sequence
  Synthetic
caauucaagacgggauu

SEQ ID NO: 773840 - RNA, 17 nt, Artificial Sequence
  Synthetic
acaccaguugggggauu

SEQ ID NO: 773841 - RNA, 17 nt, Artificial Sequence
  Synthetic
aggucaaguuggggauu

SEQ ID NO: 773842 - RNA, 17 nt, Artificial Sequence
  Synthetic
uacguucagaugggauu

SEQ ID NO: 773843 - RNA, 17 nt, Artificial Sequence
  Synthetic
aaucuagauaugggauu

SEQ ID NO: 773844 - RNA, 17 nt, Artificial Sequence
  Synthetic
aauaucccacugggauu

SEQ ID NO: 773845 - RNA, 17 nt, Artificial Sequence
  Synthetic
caagcugcacugggauu

SEQ ID NO: 773846 - RNA, 17 nt, Artificial Sequence
  Synthetic
cacagguuccugggauu

SEQ ID NO: 773847 - RNA, 17 nt, Artificial Sequence
  Synthetic
ucaugagcuuugggauu

SEQ ID NO: 773848 - RNA, 17 nt, Artificial Sequence
  Synthetic
aaaaucaguuugggauu

SEQ ID NO: 773849 - RNA, 17 nt, Artificial Sequence
  Synthetic
aaaaagaaaaauggauu

SEQ ID NO: 773850 - RNA, 17 nt, Artificial Sequence
  Synthetic
agagaagccaauggauu

SEQ ID NO: 773851 - RNA, 17 nt, Artificial Sequence
  Synthetic
cuaaugacuaauggauu

SEQ ID NO: 773852 - RNA, 17 nt, Artificial Sequence
  Synthetic
uauauaacccauggauu

SEQ ID NO: 773853 - RNA, 17 nt, Artificial Sequence
  Synthetic
aaugugugccauggauu

SEQ ID NO: 773854 - RNA, 17 nt, Artificial Sequence
  Synthetic
uauguaucucauggauu

SEQ ID NO: 773855 - RNA, 17 nt, Artificial Sequence
  Synthetic
aaggccguucauggauu

SEQ ID NO: 773856 - RNA, 17 nt, Artificial Sequence
  Synthetic
uuauggugagauggauu

SEQ ID NO: 773857 - RNA, 17 nt, Artificial Sequence
  Synthetic
ucagucuauuauggauu

SEQ ID NO: 773858 - RNA, 17 nt, Artificial Sequence
  Synthetic
uaaaagaucacuggauu

SEQ ID NO: 773859 - RNA, 17 nt, Artificial Sequence
  Synthetic
aaacuaaggacuggauu

SEQ ID NO: 773860 - RNA, 17 nt, Artificial Sequence
  Synthetic
uaaugugcuacuggauu

SEQ ID NO: 773861 - RNA, 17 nt, Artificial Sequence
  Synthetic
ucaugugcugcuggauu

SEQ ID NO: 773862 - RNA, 17 nt, Artificial Sequence
  Synthetic
ugaugugcugcuggauu

SEQ ID NO: 773863 - RNA, 17 nt, Artificial Sequence
  Synthetic
auugaagccaguggauu

SEQ ID NO: 773864 - RNA, 17 nt, Artificial Sequence
  Synthetic
aagaacuauaguggauu

SEQ ID NO: 773865 - RNA, 17 nt, Artificial Sequence
  Synthetic
ugauaaugagguggauu

SEQ ID NO: 773866 - RNA, 17 nt, Artificial Sequence
  Synthetic
auuacaaaauguggauu

SEQ ID NO: 773867 - RNA, 17 nt, Artificial Sequence
  Synthetic
ugguuaauaauuggauu

SEQ ID NO: 773868 - RNA, 17 nt, Artificial Sequence
  Synthetic
uaagugacuauuggauu

SEQ ID NO: 773869 - RNA, 17 nt, Artificial Sequence
  Synthetic
cauuucucccuuggauu

SEQ ID NO: 773870 - RNA, 17 nt, Artificial Sequence
  Synthetic
auaagggcucuuggauu

SEQ ID NO: 773871 - RNA, 17 nt, Artificial Sequence
  Synthetic
aggcaguugguuggauu

SEQ ID NO: 773872 - RNA, 17 nt, Artificial Sequence
  Synthetic
aaauggauuguuggauu

SEQ ID NO: 773873 - RNA, 17 nt, Artificial Sequence
  Synthetic
aagcaggaauuuggauu

SEQ ID NO: 773874 - RNA, 17 nt, Artificial Sequence
  Synthetic
uaaucuccauuuggauu

SEQ ID NO: 773875 - RNA, 17 nt, Artificial Sequence
  Synthetic
uggaugaaaaaaugauu

SEQ ID NO: 773876 - RNA, 17 nt, Artificial Sequence
  Synthetic
uccucagaaaaaugauu

SEQ ID NO: 773877 - RNA, 17 nt, Artificial Sequence
  Synthetic
cuccucacccaaugauu

SEQ ID NO: 773878 - RNA, 17 nt, Artificial Sequence
  Synthetic
aaucauugcuaaugauu

SEQ ID NO: 773879 - RNA, 17 nt, Artificial Sequence
  Synthetic
auucuaauuuaaugauu

SEQ ID NO: 773880 - RNA, 17 nt, Artificial Sequence
  Synthetic
ucucugucaacaugauu

SEQ ID NO: 773881 - RNA, 17 nt, Artificial Sequence
  Synthetic
agaguucacucaugauu

SEQ ID NO: 773882 - RNA, 17 nt, Artificial Sequence
  Synthetic
cuuucuguuucaugauu

SEQ ID NO: 773883 - RNA, 17 nt, Artificial Sequence
  Synthetic
cccaagauaagaugauu

SEQ ID NO: 773884 - RNA, 17 nt, Artificial Sequence
  Synthetic
acgucugcaugaugauu

SEQ ID NO: 773885 - RNA, 17 nt, Artificial Sequence
  Synthetic
uauguggaaauaugauu

SEQ ID NO: 773886 - RNA, 17 nt, Artificial Sequence
  Synthetic
uuuaaaagcauaugauu

SEQ ID NO: 773887 - RNA, 17 nt, Artificial Sequence
  Synthetic
aagucuuugauaugauu

SEQ ID NO: 773888 - RNA, 17 nt, Artificial Sequence
  Synthetic
cuuuggguuauaugauu

SEQ ID NO: 773889 - RNA, 17 nt, Artificial Sequence
  Synthetic
uggcucaugcuaugauu

SEQ ID NO: 773890 - RNA, 17 nt, Artificial Sequence
  Synthetic
ugcaauguauuaugauu

SEQ ID NO: 773891 - RNA, 17 nt, Artificial Sequence
  Synthetic
uguuguuuauuaugauu

SEQ ID NO: 773892 - RNA, 17 nt, Artificial Sequence
  Synthetic
ucaguuuccuuaugauu

SEQ ID NO: 773893 - RNA, 17 nt, Artificial Sequence
  Synthetic
uuauuagcuuuaugauu

SEQ ID NO: 773894 - RNA, 17 nt, Artificial Sequence
  Synthetic
aucugauucaacugauu

SEQ ID NO: 773895 - RNA, 17 nt, Artificial Sequence
  Synthetic
ugcucagguaacugauu

SEQ ID NO: 773896 - RNA, 17 nt, Artificial Sequence
  Synthetic
uauuuuauuaacugauu

SEQ ID NO: 773897 - RNA, 17 nt, Artificial Sequence
  Synthetic
auucuuuuacccugauu

SEQ ID NO: 773898 - RNA, 17 nt, Artificial Sequence
  Synthetic
aggcacaugcccugauu

SEQ ID NO: 773899 - RNA, 17 nt, Artificial Sequence
  Synthetic
aaucaaauauccugauu

SEQ ID NO: 773900 - RNA, 17 nt, Artificial Sequence
  Synthetic
cuuaugaugggcugauu

SEQ ID NO: 773901 - RNA, 17 nt, Artificial Sequence
  Synthetic
uuugagccuggcugauu

SEQ ID NO: 773902 - RNA, 17 nt, Artificial Sequence
  Synthetic
aaggcaaagcucugauu

SEQ ID NO: 773903 - RNA, 17 nt, Artificial Sequence
  Synthetic
auuuaggugcucugauu

SEQ ID NO: 773904 - RNA, 17 nt, Artificial Sequence
  Synthetic
aggcuuccucucugauu

SEQ ID NO: 773905 - RNA, 17 nt, Artificial Sequence
  Synthetic
aaccaauaagucugauu

SEQ ID NO: 773906 - RNA, 17 nt, Artificial Sequence
  Synthetic
uaauuuuaugucugauu

SEQ ID NO: 773907 - RNA, 17 nt, Artificial Sequence
  Synthetic
aauaauuuauucugauu

SEQ ID NO: 773908 - RNA, 17 nt, Artificial Sequence
  Synthetic
acuuuaccaaagugauu

SEQ ID NO: 773909 - RNA, 17 nt, Artificial Sequence
  Synthetic
caaaagaaacagugauu

SEQ ID NO: 773910 - RNA, 17 nt, Artificial Sequence
  Synthetic
augacaaggcagugauu

SEQ ID NO: 773911 - RNA, 17 nt, Artificial Sequence
  Synthetic
cauuguagucagugauu

SEQ ID NO: 773912 - RNA, 17 nt, Artificial Sequence
  Synthetic
accuugaagaggugauu

SEQ ID NO: 773913 - RNA, 17 nt, Artificial Sequence
  Synthetic
cuggggguggggugauu

SEQ ID NO: 773914 - RNA, 17 nt, Artificial Sequence
  Synthetic
uccagugcugggugauu

SEQ ID NO: 773915 - RNA, 17 nt, Artificial Sequence
  Synthetic
uuaucaguugggugauu

SEQ ID NO: 773916 - RNA, 17 nt, Artificial Sequence
  Synthetic
acaguguaaaugugauu

SEQ ID NO: 773917 - RNA, 17 nt, Artificial Sequence
  Synthetic
aaucaugccaugugauu

SEQ ID NO: 773918 - RNA, 17 nt, Artificial Sequence
  Synthetic
uaauaguagaugugauu

SEQ ID NO: 773919 - RNA, 17 nt, Artificial Sequence
  Synthetic
uauguccauaugugauu

SEQ ID NO: 773920 - RNA, 17 nt, Artificial Sequence
  Synthetic
uucauaacuaugugauu

SEQ ID NO: 773921 - RNA, 17 nt, Artificial Sequence
  Synthetic
auauuucaacugugauu

SEQ ID NO: 773922 - RNA, 17 nt, Artificial Sequence
  Synthetic
ucuaauauucugugauu

SEQ ID NO: 773923 - RNA, 17 nt, Artificial Sequence
  Synthetic
uuuaaauaauugugauu

SEQ ID NO: 773924 - RNA, 17 nt, Artificial Sequence
  Synthetic
auguuccaaaauugauu

SEQ ID NO: 773925 - RNA, 17 nt, Artificial Sequence
  Synthetic
ccuuaucaaacuugauu

SEQ ID NO: 773926 - RNA, 17 nt, Artificial Sequence
  Synthetic
ugucuauaaacuugauu

SEQ ID NO: 773927 - RNA, 17 nt, Artificial Sequence
  Synthetic
aaaaucugcccuugauu

SEQ ID NO: 773928 - RNA, 17 nt, Artificial Sequence
  Synthetic
uuuccaaaagcuugauu

SEQ ID NO: 773929 - RNA, 17 nt, Artificial Sequence
  Synthetic
acaggagagucuugauu

SEQ ID NO: 773930 - RNA, 17 nt, Artificial Sequence
  Synthetic
auuucaaugucuugauu

SEQ ID NO: 773931 - RNA, 17 nt, Artificial Sequence
  Synthetic
agccaacugucuugauu

SEQ ID NO: 773932 - RNA, 17 nt, Artificial Sequence
  Synthetic
aguuugcauucuugauu

SEQ ID NO: 773933 - RNA, 17 nt, Artificial Sequence
  Synthetic
uauucuauuucuugauu

SEQ ID NO: 773934 - RNA, 17 nt, Artificial Sequence
  Synthetic
uauuauguuucuugauu

SEQ ID NO: 773935 - RNA, 17 nt, Artificial Sequence
  Synthetic
ugaggcaaaaguugauu

SEQ ID NO: 773936 - RNA, 17 nt, Artificial Sequence
  Synthetic
agcaguccaaguugauu

SEQ ID NO: 773937 - RNA, 17 nt, Artificial Sequence
  Synthetic
cauguugcagguugauu

SEQ ID NO: 773938 - RNA, 17 nt, Artificial Sequence
  Synthetic
uguauauucuguugauu

SEQ ID NO: 773939 - RNA, 17 nt, Artificial Sequence
  Synthetic
aaggcucaaauuugauu

SEQ ID NO: 773940 - RNA, 17 nt, Artificial Sequence
  Synthetic
ucacaaaggauuugauu

SEQ ID NO: 773941 - RNA, 17 nt, Artificial Sequence
  Synthetic
uuuguuuugauuugauu

SEQ ID NO: 773942 - RNA, 17 nt, Artificial Sequence
  Synthetic
auauuucaucuuugauu

SEQ ID NO: 773943 - RNA, 17 nt, Artificial Sequence
  Synthetic
cacaaagcuguuugauu

SEQ ID NO: 773944 - RNA, 17 nt, Artificial Sequence
  Synthetic
cuauaaaucuuuugauu

SEQ ID NO: 773945 - RNA, 17 nt, Artificial Sequence
  Synthetic
uugcccaauuuuugauu

SEQ ID NO: 773946 - RNA, 17 nt, Artificial Sequence
  Synthetic
aaucaggcuuuuugauu

SEQ ID NO: 773947 - RNA, 17 nt, Artificial Sequence
  Synthetic
aucauuucuuuuugauu

SEQ ID NO: 773948 - RNA, 17 nt, Artificial Sequence
  Synthetic
uagcaugaaaaaauauu

SEQ ID NO: 773949 - RNA, 17 nt, Artificial Sequence
  Synthetic
caaaggagaaaaauauu

SEQ ID NO: 773950 - RNA, 17 nt, Artificial Sequence
  Synthetic
uugacaaacaaaauauu

SEQ ID NO: 773951 - RNA, 17 nt, Artificial Sequence
  Synthetic
cccauucacaaaauauu

SEQ ID NO: 773952 - RNA, 17 nt, Artificial Sequence
  Synthetic
uuuuacugcaaaauauu

SEQ ID NO: 773953 - RNA, 17 nt, Artificial Sequence
  Synthetic
aaaaaaaagaaaauauu

SEQ ID NO: 773954 - RNA, 17 nt, Artificial Sequence
  Synthetic
uuuucauugaaaauauu

SEQ ID NO: 773955 - RNA, 17 nt, Artificial Sequence
  Synthetic
ugacaacuuaaaauauu

SEQ ID NO: 773956 - RNA, 17 nt, Artificial Sequence
  Synthetic
uguuauguuaaaauauu

SEQ ID NO: 773957 - RNA, 17 nt, Artificial Sequence
  Synthetic
uaauauugccaaauauu

SEQ ID NO: 773958 - RNA, 17 nt, Artificial Sequence
  Synthetic
caaaaagcagaaauauu

SEQ ID NO: 773959 - RNA, 17 nt, Artificial Sequence
  Synthetic
aacucagaggaaauauu

SEQ ID NO: 773960 - RNA, 17 nt, Artificial Sequence
  Synthetic
aaguuuuaggaaauauu

SEQ ID NO: 773961 - RNA, 17 nt, Artificial Sequence
  Synthetic
acguaguaugaaauauu

SEQ ID NO: 773962 - RNA, 17 nt, Artificial Sequence
  Synthetic
ugugaugaauaaauauu

SEQ ID NO: 773963 - RNA, 17 nt, Artificial Sequence
  Synthetic
ccauauccauaaauauu

SEQ ID NO: 773964 - RNA, 17 nt, Artificial Sequence
  Synthetic
agcacuugauaaauauu

SEQ ID NO: 773965 - RNA, 17 nt, Artificial Sequence
  Synthetic
aauuuuaccuaaauauu

SEQ ID NO: 773966 - RNA, 17 nt, Artificial Sequence
  Synthetic
ugagauugcuaaauauu

SEQ ID NO: 773967 - RNA, 17 nt, Artificial Sequence
  Synthetic
ucaguuaaguaaauauu

SEQ ID NO: 773968 - RNA, 17 nt, Artificial Sequence
  Synthetic
auggccauguaaauauu

SEQ ID NO: 773969 - RNA, 17 nt, Artificial Sequence
  Synthetic
aagauggauuaaauauu

SEQ ID NO: 773970 - RNA, 17 nt, Artificial Sequence
  Synthetic
auuaugcugacaauauu

SEQ ID NO: 773971 - RNA, 17 nt, Artificial Sequence
  Synthetic
ugaaacacagcaauauu

SEQ ID NO: 773972 - RNA, 17 nt, Artificial Sequence
  Synthetic
uuaauaaugucaauauu

SEQ ID NO: 773973 - RNA, 17 nt, Artificial Sequence
  Synthetic
acaucuuugucaauauu

SEQ ID NO: 773974 - RNA, 17 nt, Artificial Sequence
  Synthetic
cacauggaaagaauauu

SEQ ID NO: 773975 - RNA, 17 nt, Artificial Sequence
  Synthetic
uuaagguaaagaauauu

SEQ ID NO: 773976 - RNA, 17 nt, Artificial Sequence
  Synthetic
aaauagagcagaauauu

SEQ ID NO: 773977 - RNA, 17 nt, Artificial Sequence
  Synthetic
ucuguaaguagaauauu

SEQ ID NO: 773978 - RNA, 17 nt, Artificial Sequence
  Synthetic
uugacacaaugaauauu

SEQ ID NO: 773979 - RNA, 17 nt, Artificial Sequence
  Synthetic
agauuaaacugaauauu

SEQ ID NO: 773980 - RNA, 17 nt, Artificial Sequence
  Synthetic
acuuagaaaauaauauu

SEQ ID NO: 773981 - RNA, 17 nt, Artificial Sequence
  Synthetic
auaacugaaauaauauu

SEQ ID NO: 773982 - RNA, 17 nt, Artificial Sequence
  Synthetic
uuguuagccauaauauu

SEQ ID NO: 773983 - RNA, 17 nt, Artificial Sequence
  Synthetic
uaugcuuccauaauauu

SEQ ID NO: 773984 - RNA, 17 nt, Artificial Sequence
  Synthetic
acacuauaccuaauauu

SEQ ID NO: 773985 - RNA, 17 nt, Artificial Sequence
  Synthetic
uaaagguagguaauauu

SEQ ID NO: 773986 - RNA, 17 nt, Artificial Sequence
  Synthetic
aaggaaagguuaauauu

SEQ ID NO: 773987 - RNA, 17 nt, Artificial Sequence
  Synthetic
auccccauuuuaauauu

SEQ ID NO: 773988 - RNA, 17 nt, Artificial Sequence
  Synthetic
aaaacagaaaacauauu

SEQ ID NO: 773989 - RNA, 17 nt, Artificial Sequence
  Synthetic
aacucagaaaacauauu

SEQ ID NO: 773990 - RNA, 17 nt, Artificial Sequence
  Synthetic
uuaaguucaaacauauu

SEQ ID NO: 773991 - RNA, 17 nt, Artificial Sequence
  Synthetic
caaugcaacaacauauu

SEQ ID NO: 773992 - RNA, 17 nt, Artificial Sequence
  Synthetic
uaacuucucaacauauu

SEQ ID NO: 773993 - RNA, 17 nt, Artificial Sequence
  Synthetic
uuuuacaaacacauauu

SEQ ID NO: 773994 - RNA, 17 nt, Artificial Sequence
  Synthetic
ucauacuuccacauauu

SEQ ID NO: 773995 - RNA, 17 nt, Artificial Sequence
  Synthetic
uguaggcagcacauauu

SEQ ID NO: 773996 - RNA, 17 nt, Artificial Sequence
  Synthetic
aaaagucuucacauauu

SEQ ID NO: 773997 - RNA, 17 nt, Artificial Sequence
  Synthetic
uacuccacagacauauu

SEQ ID NO: 773998 - RNA, 17 nt, Artificial Sequence
  Synthetic
ucguuuugagacauauu

SEQ ID NO: 773999 - RNA, 17 nt, Artificial Sequence
  Synthetic
cucucuucugacauauu

SEQ ID NO: 774000 - RNA, 17 nt, Artificial Sequence
  Synthetic
auggaccaauacauauu

SEQ ID NO: 774001 - RNA, 17 nt, Artificial Sequence
  Synthetic
auacgcauguacauauu

SEQ ID NO: 774002 - RNA, 17 nt, Artificial Sequence
  Synthetic
uuauccauuuacauauu

SEQ ID NO: 774003 - RNA, 17 nt, Artificial Sequence
  Synthetic
ccauuuuagaccauauu

SEQ ID NO: 774004 - RNA, 17 nt, Artificial Sequence
  Synthetic
uauguuaucuccauauu

SEQ ID NO: 774005 - RNA, 17 nt, Artificial Sequence
  Synthetic
agucucugguccauauu

SEQ ID NO: 774006 - RNA, 17 nt, Artificial Sequence
  Synthetic
cucaaguuuuccauauu

SEQ ID NO: 774007 - RNA, 17 nt, Artificial Sequence
  Synthetic
aagagugaaagcauauu

SEQ ID NO: 774008 - RNA, 17 nt, Artificial Sequence
  Synthetic
uuguucauaagcauauu

SEQ ID NO: 774009 - RNA, 17 nt, Artificial Sequence
  Synthetic
caaccccccagcauauu

SEQ ID NO: 774010 - RNA, 17 nt, Artificial Sequence
  Synthetic
agugacaugagcauauu

SEQ ID NO: 774011 - RNA, 17 nt, Artificial Sequence
  Synthetic
auaugugauggcauauu

SEQ ID NO: 774012 - RNA, 17 nt, Artificial Sequence
  Synthetic
agauucuguggcauauu

SEQ ID NO: 774013 - RNA, 17 nt, Artificial Sequence
  Synthetic
uaagugcaaugcauauu

SEQ ID NO: 774014 - RNA, 17 nt, Artificial Sequence
  Synthetic
aaagggguaugcauauu

SEQ ID NO: 774015 - RNA, 17 nt, Artificial Sequence
  Synthetic
uuuuaaaccugcauauu

SEQ ID NO: 774016 - RNA, 17 nt, Artificial Sequence
  Synthetic
uguaauuuggucauauu

SEQ ID NO: 774017 - RNA, 17 nt, Artificial Sequence
  Synthetic
aacagaugauucauauu

SEQ ID NO: 774018 - RNA, 17 nt, Artificial Sequence
  Synthetic
uuguaaacuuucauauu

SEQ ID NO: 774019 - RNA, 17 nt, Artificial Sequence
  Synthetic
cgacuuuuaaagauauu

SEQ ID NO: 774020 - RNA, 17 nt, Artificial Sequence
  Synthetic
auuagacacaagauauu

SEQ ID NO: 774021 - RNA, 17 nt, Artificial Sequence
  Synthetic
ccuaucuccaagauauu

SEQ ID NO: 774022 - RNA, 17 nt, Artificial Sequence
  Synthetic
uacuguccacagauauu

SEQ ID NO: 774023 - RNA, 17 nt, Artificial Sequence
  Synthetic
caaggugcccagauauu

SEQ ID NO: 774024 - RNA, 17 nt, Artificial Sequence
  Synthetic
aagguacugcagauauu

SEQ ID NO: 774025 - RNA, 17 nt, Artificial Sequence
  Synthetic
uugaaacaagagauauu

SEQ ID NO: 774026 - RNA, 17 nt, Artificial Sequence
  Synthetic
uauaauccagagauauu

SEQ ID NO: 774027 - RNA, 17 nt, Artificial Sequence
  Synthetic
uuuggacuagagauauu

SEQ ID NO: 774028 - RNA, 17 nt, Artificial Sequence
  Synthetic
auaaauggauagauauu

SEQ ID NO: 774029 - RNA, 17 nt, Artificial Sequence
  Synthetic
acugcagauuagauauu

SEQ ID NO: 774030 - RNA, 17 nt, Artificial Sequence
  Synthetic
aacccccaauggauauu

SEQ ID NO: 774031 - RNA, 17 nt, Artificial Sequence
  Synthetic
cuuuccaacaugauauu

SEQ ID NO: 774032 - RNA, 17 nt, Artificial Sequence
  Synthetic
cauuuccugaugauauu

SEQ ID NO: 774033 - RNA, 17 nt, Artificial Sequence
  Synthetic
caacugauuaugauauu

SEQ ID NO: 774034 - RNA, 17 nt, Artificial Sequence
  Synthetic
aauauggagcugauauu

SEQ ID NO: 774035 - RNA, 17 nt, Artificial Sequence
  Synthetic
ugagaacaugugauauu

SEQ ID NO: 774036 - RNA, 17 nt, Artificial Sequence
  Synthetic
cauuacaauuugauauu

SEQ ID NO: 774037 - RNA, 17 nt, Artificial Sequence
  Synthetic
caguggacaaauauauu

SEQ ID NO: 774038 - RNA, 17 nt, Artificial Sequence
  Synthetic
uaccacuguaauauauu

SEQ ID NO: 774039 - RNA, 17 nt, Artificial Sequence
  Synthetic
caaauuauuaauauauu

SEQ ID NO: 774040 - RNA, 17 nt, Artificial Sequence
  Synthetic
auuauaagccauauauu

SEQ ID NO: 774041 - RNA, 17 nt, Artificial Sequence
  Synthetic
aacauguaucauauauu

SEQ ID NO: 774042 - RNA, 17 nt, Artificial Sequence
  Synthetic
uugaucgaagauauauu

SEQ ID NO: 774043 - RNA, 17 nt, Artificial Sequence
  Synthetic
auggacugagauauauu

SEQ ID NO: 774044 - RNA, 17 nt, Artificial Sequence
  Synthetic
aucacaaaauauauauu

SEQ ID NO: 774045 - RNA, 17 nt, Artificial Sequence
  Synthetic
uauacuguauauauauu

SEQ ID NO: 774046 - RNA, 17 nt, Artificial Sequence
  Synthetic
aucugaaacuauauauu

SEQ ID NO: 774047 - RNA, 17 nt, Artificial Sequence
  Synthetic
uaaguccccuauauauu

SEQ ID NO: 774048 - RNA, 17 nt, Artificial Sequence
  Synthetic
aacugugucuauauauu

SEQ ID NO: 774049 - RNA, 17 nt, Artificial Sequence
  Synthetic
ugacuuuucuauauauu

SEQ ID NO: 774050 - RNA, 17 nt, Artificial Sequence
  Synthetic
uuguagacuuauauauu

SEQ ID NO: 774051 - RNA, 17 nt, Artificial Sequence
  Synthetic
ccgggugcuccuauauu

SEQ ID NO: 774052 - RNA, 17 nt, Artificial Sequence
  Synthetic
aauguuuuggguauauu

SEQ ID NO: 774053 - RNA, 17 nt, Artificial Sequence
  Synthetic
cauuguacauguauauu

SEQ ID NO: 774054 - RNA, 17 nt, Artificial Sequence
  Synthetic
agcccucgguguauauu

SEQ ID NO: 774055 - RNA, 17 nt, Artificial Sequence
  Synthetic
agugccucuuguauauu

SEQ ID NO: 774056 - RNA, 17 nt, Artificial Sequence
  Synthetic
auuaugcuuuguauauu

SEQ ID NO: 774057 - RNA, 17 nt, Artificial Sequence
  Synthetic
uuuagagaaauuauauu

SEQ ID NO: 774058 - RNA, 17 nt, Artificial Sequence
  Synthetic
auguuaguaauuauauu

SEQ ID NO: 774059 - RNA, 17 nt, Artificial Sequence
  Synthetic
uacaguagucuuauauu

SEQ ID NO: 774060 - RNA, 17 nt, Artificial Sequence
  Synthetic
aauauugcaguuauauu

SEQ ID NO: 774061 - RNA, 17 nt, Artificial Sequence
  Synthetic
agaucagauguuauauu

SEQ ID NO: 774062 - RNA, 17 nt, Artificial Sequence
  Synthetic
agcugcaccuuuauauu

SEQ ID NO: 774063 - RNA, 17 nt, Artificial Sequence
  Synthetic
ugugagauuuuuauauu

SEQ ID NO: 774064 - RNA, 17 nt, Artificial Sequence
  Synthetic
aaaaaaaaaaaacuauu

SEQ ID NO: 774065 - RNA, 17 nt, Artificial Sequence
  Synthetic
ucuaccaaacaacuauu

SEQ ID NO: 774066 - RNA, 17 nt, Artificial Sequence
  Synthetic
augcaaggccaacuauu

SEQ ID NO: 774067 - RNA, 17 nt, Artificial Sequence
  Synthetic
cauuugauagaacuauu

SEQ ID NO: 774068 - RNA, 17 nt, Artificial Sequence
  Synthetic
aagcaaucugaacuauu

SEQ ID NO: 774069 - RNA, 17 nt, Artificial Sequence
  Synthetic
auuucugccuaacuauu

SEQ ID NO: 774070 - RNA, 17 nt, Artificial Sequence
  Synthetic
auuuuuaaaacacuauu

SEQ ID NO: 774071 - RNA, 17 nt, Artificial Sequence
  Synthetic
aauaaaucaacacuauu

SEQ ID NO: 774072 - RNA, 17 nt, Artificial Sequence
  Synthetic
aaucuugcaccacuauu

SEQ ID NO: 774073 - RNA, 17 nt, Artificial Sequence
  Synthetic
ucuggauauccacuauu

SEQ ID NO: 774074 - RNA, 17 nt, Artificial Sequence
  Synthetic
caggaaaaaagacuauu

SEQ ID NO: 774075 - RNA, 17 nt, Artificial Sequence
  Synthetic
aaaacuaucagacuauu

SEQ ID NO: 774076 - RNA, 17 nt, Artificial Sequence
  Synthetic
augugacagagacuauu

SEQ ID NO: 774077 - RNA, 17 nt, Artificial Sequence
  Synthetic
acuguaacacuacuauu

SEQ ID NO: 774078 - RNA, 17 nt, Artificial Sequence
  Synthetic
ccucccuugguacuauu

SEQ ID NO: 774079 - RNA, 17 nt, Artificial Sequence
  Synthetic
aauaguauauuacuauu

SEQ ID NO: 774080 - RNA, 17 nt, Artificial Sequence
  Synthetic
aucgguuucuuacuauu

SEQ ID NO: 774081 - RNA, 17 nt, Artificial Sequence
  Synthetic
uuuauuuugaaccuauu

SEQ ID NO: 774082 - RNA, 17 nt, Artificial Sequence
  Synthetic
acuggcugccaccuauu

SEQ ID NO: 774083 - RNA, 17 nt, Artificial Sequence
  Synthetic
cagaaugugacccuauu

SEQ ID NO: 774084 - RNA, 17 nt, Artificial Sequence
  Synthetic
ugaaccuaaagccuauu

SEQ ID NO: 774085 - RNA, 17 nt, Artificial Sequence
  Synthetic
acuuaaaauagccuauu

SEQ ID NO: 774086 - RNA, 17 nt, Artificial Sequence
  Synthetic
cccagaauaugccuauu

SEQ ID NO: 774087 - RNA, 17 nt, Artificial Sequence
  Synthetic
auuuuauucugccuauu

SEQ ID NO: 774088 - RNA, 17 nt, Artificial Sequence
  Synthetic
aagaauaggugccuauu

SEQ ID NO: 774089 - RNA, 17 nt, Artificial Sequence
  Synthetic
aaccauaucauccuauu

SEQ ID NO: 774090 - RNA, 17 nt, Artificial Sequence
  Synthetic
auagcauugauccuauu

SEQ ID NO: 774091 - RNA, 17 nt, Artificial Sequence
  Synthetic
ccuugccugguccuauu

SEQ ID NO: 774092 - RNA, 17 nt, Artificial Sequence
  Synthetic
aaagaaaacuuccuauu

SEQ ID NO: 774093 - RNA, 17 nt, Artificial Sequence
  Synthetic
uuugguugaaagcuauu

SEQ ID NO: 774094 - RNA, 17 nt, Artificial Sequence
  Synthetic
cuguaaucccagcuauu

SEQ ID NO: 774095 - RNA, 17 nt, Artificial Sequence
  Synthetic
cuguagucccagcuauu

SEQ ID NO: 774096 - RNA, 17 nt, Artificial Sequence
  Synthetic
ccuccuuuuuagcuauu

SEQ ID NO: 774097 - RNA, 17 nt, Artificial Sequence
  Synthetic
auguuauguacgcuauu

SEQ ID NO: 774098 - RNA, 17 nt, Artificial Sequence
  Synthetic
ucuauuauggggcuauu

SEQ ID NO: 774099 - RNA, 17 nt, Artificial Sequence
  Synthetic
agacuguuuuggcuauu

SEQ ID NO: 774100 - RNA, 17 nt, Artificial Sequence
  Synthetic
caauuguuuuggcuauu

SEQ ID NO: 774101 - RNA, 17 nt, Artificial Sequence
  Synthetic
aaagucaugaugcuauu

SEQ ID NO: 774102 - RNA, 17 nt, Artificial Sequence
  Synthetic
acaacagaccugcuauu

SEQ ID NO: 774103 - RNA, 17 nt, Artificial Sequence
  Synthetic
uuuaauuauaaucuauu

SEQ ID NO: 774104 - RNA, 17 nt, Artificial Sequence
  Synthetic
uaugaaucacaucuauu

SEQ ID NO: 774105 - RNA, 17 nt, Artificial Sequence
  Synthetic
agguguuuuuaucuauu

SEQ ID NO: 774106 - RNA, 17 nt, Artificial Sequence
  Synthetic
auuaguguaccucuauu

SEQ ID NO: 774107 - RNA, 17 nt, Artificial Sequence
  Synthetic
acaaaaucuccucuauu

SEQ ID NO: 774108 - RNA, 17 nt, Artificial Sequence
  Synthetic
uucuguagaugucuauu

SEQ ID NO: 774109 - RNA, 17 nt, Artificial Sequence
  Synthetic
cgucccugcugucuauu

SEQ ID NO: 774110 - RNA, 17 nt, Artificial Sequence
  Synthetic
ccaggucucauucuauu

SEQ ID NO: 774111 - RNA, 17 nt, Artificial Sequence
  Synthetic
aagcaguuuauucuauu

SEQ ID NO: 774112 - RNA, 17 nt, Artificial Sequence
  Synthetic
uucguguuuauucuauu

SEQ ID NO: 774113 - RNA, 17 nt, Artificial Sequence
  Synthetic
aaauaauaucuucuauu

SEQ ID NO: 774114 - RNA, 17 nt, Artificial Sequence
  Synthetic
accuuuuaauuucuauu

SEQ ID NO: 774115 - RNA, 17 nt, Artificial Sequence
  Synthetic
uauauucuguuucuauu

SEQ ID NO: 774116 - RNA, 17 nt, Artificial Sequence
  Synthetic
cuagauaauuuucuauu

SEQ ID NO: 774117 - RNA, 17 nt, Artificial Sequence
  Synthetic
ugagauccuuuucuauu

SEQ ID NO: 774118 - RNA, 17 nt, Artificial Sequence
  Synthetic
aaccucaguuuucuauu

SEQ ID NO: 774119 - RNA, 17 nt, Artificial Sequence
  Synthetic
acugaaauuuuucuauu

SEQ ID NO: 774120 - RNA, 17 nt, Artificial Sequence
  Synthetic
uuuugauuuuuucuauu

SEQ ID NO: 774121 - RNA, 17 nt, Artificial Sequence
  Synthetic
caaaucacaaaaguauu

SEQ ID NO: 774122 - RNA, 17 nt, Artificial Sequence
  Synthetic
aacaugaacaaaguauu

SEQ ID NO: 774123 - RNA, 17 nt, Artificial Sequence
  Synthetic
agcugaacuaaaguauu

SEQ ID NO: 774124 - RNA, 17 nt, Artificial Sequence
  Synthetic
cuugaacucgaaguauu

SEQ ID NO: 774125 - RNA, 17 nt, Artificial Sequence
  Synthetic
cggcagauggaaguauu

SEQ ID NO: 774126 - RNA, 17 nt, Artificial Sequence
  Synthetic
uauaauuaugaaguauu

SEQ ID NO: 774127 - RNA, 17 nt, Artificial Sequence
  Synthetic
uuuuuccgugaaguauu

SEQ ID NO: 774128 - RNA, 17 nt, Artificial Sequence
  Synthetic
aaaggaagguaaguauu

SEQ ID NO: 774129 - RNA, 17 nt, Artificial Sequence
  Synthetic
auuaaaacaacaguauu

SEQ ID NO: 774130 - RNA, 17 nt, Artificial Sequence
  Synthetic
ugagaacauacaguauu

SEQ ID NO: 774131 - RNA, 17 nt, Artificial Sequence
  Synthetic
auauaaagagcaguauu

SEQ ID NO: 774132 - RNA, 17 nt, Artificial Sequence
  Synthetic
ugagaacacgcaguauu

SEQ ID NO: 774133 - RNA, 17 nt, Artificial Sequence
  Synthetic
uugugcauggcaguauu

SEQ ID NO: 774134 - RNA, 17 nt, Artificial Sequence
  Synthetic
ugagaacaugcaguauu

SEQ ID NO: 774135 - RNA, 17 nt, Artificial Sequence
  Synthetic
aacaucucgucaguauu

SEQ ID NO: 774136 - RNA, 17 nt, Artificial Sequence
  Synthetic
caacucuccagaguauu

SEQ ID NO: 774137 - RNA, 17 nt, Artificial Sequence
  Synthetic
aucacaauaugaguauu

SEQ ID NO: 774138 - RNA, 17 nt, Artificial Sequence
  Synthetic
uaaauuagaauaguauu

SEQ ID NO: 774139 - RNA, 17 nt, Artificial Sequence
  Synthetic
ugaguacauauaguauu

SEQ ID NO: 774140 - RNA, 17 nt, Artificial Sequence
  Synthetic
auccuaucacuaguauu

SEQ ID NO: 774141 - RNA, 17 nt, Artificial Sequence
  Synthetic
auuaacucucuaguauu

SEQ ID NO: 774142 - RNA, 17 nt, Artificial Sequence
  Synthetic
uuuuuuguuguaguauu

SEQ ID NO: 774143 - RNA, 17 nt, Artificial Sequence
  Synthetic
uaguuuuacuuaguauu

SEQ ID NO: 774144 - RNA, 17 nt, Artificial Sequence
  Synthetic
acaauagaguuaguauu

SEQ ID NO: 774145 - RNA, 17 nt, Artificial Sequence
  Synthetic
agagugacuuuaguauu

SEQ ID NO: 774146 - RNA, 17 nt, Artificial Sequence
  Synthetic
aaacacagcuacguauu

SEQ ID NO: 774147 - RNA, 17 nt, Artificial Sequence
  Synthetic
auguguaguuacguauu

SEQ ID NO: 774148 - RNA, 17 nt, Artificial Sequence
  Synthetic
aaauuccacaucguauu

SEQ ID NO: 774149 - RNA, 17 nt, Artificial Sequence
  Synthetic
ccaggaauuuucguauu

SEQ ID NO: 774150 - RNA, 17 nt, Artificial Sequence
  Synthetic
acagugugcaagguauu

SEQ ID NO: 774151 - RNA, 17 nt, Artificial Sequence
  Synthetic
auguuuuacuagguauu

SEQ ID NO: 774152 - RNA, 17 nt, Artificial Sequence
  Synthetic
ugauguauuucgguauu

SEQ ID NO: 774153 - RNA, 17 nt, Artificial Sequence
  Synthetic
acaaaccaagggguauu

SEQ ID NO: 774154 - RNA, 17 nt, Artificial Sequence
  Synthetic
ugagaacaugggguauu

SEQ ID NO: 774155 - RNA, 17 nt, Artificial Sequence
  Synthetic
aaucaaauguggguauu

SEQ ID NO: 774156 - RNA, 17 nt, Artificial Sequence
  Synthetic
cuucaauaaaugguauu

SEQ ID NO: 774157 - RNA, 17 nt, Artificial Sequence
  Synthetic
ccuaaggcaaugguauu

SEQ ID NO: 774158 - RNA, 17 nt, Artificial Sequence
  Synthetic
uauauugcaaugguauu

SEQ ID NO: 774159 - RNA, 17 nt, Artificial Sequence
  Synthetic
auugcuaccaugguauu

SEQ ID NO: 774160 - RNA, 17 nt, Artificial Sequence
  Synthetic
ugagaauauaugguauu

SEQ ID NO: 774161 - RNA, 17 nt, Artificial Sequence
  Synthetic
uuuucuauucugguauu

SEQ ID NO: 774162 - RNA, 17 nt, Artificial Sequence
  Synthetic
ugagaacacgugguauu

SEQ ID NO: 774163 - RNA, 17 nt, Artificial Sequence
  Synthetic
ucacuguaguugguauu

SEQ ID NO: 774164 - RNA, 17 nt, Artificial Sequence
  Synthetic
uccaugucuuugguauu

SEQ ID NO: 774165 - RNA, 17 nt, Artificial Sequence
  Synthetic
uuucugguuuugguauu

SEQ ID NO: 774166 - RNA, 17 nt, Artificial Sequence
  Synthetic
uuuaauggaaauguauu

SEQ ID NO: 774167 - RNA, 17 nt, Artificial Sequence
  Synthetic
uauuauggcaauguauu

SEQ ID NO: 774168 - RNA, 17 nt, Artificial Sequence
  Synthetic
ucccacgaucauguauu

SEQ ID NO: 774169 - RNA, 17 nt, Artificial Sequence
  Synthetic
uuuuugcuucauguauu

SEQ ID NO: 774170 - RNA, 17 nt, Artificial Sequence
  Synthetic
cacaacaaagauguauu

SEQ ID NO: 774171 - RNA, 17 nt, Artificial Sequence
  Synthetic
auauauauauauguauu

SEQ ID NO: 774172 - RNA, 17 nt, Artificial Sequence
  Synthetic
ucauuaguauauguauu

SEQ ID NO: 774173 - RNA, 17 nt, Artificial Sequence
  Synthetic
agcaugaaaacuguauu

SEQ ID NO: 774174 - RNA, 17 nt, Artificial Sequence
  Synthetic
ugguaauauacuguauu

SEQ ID NO: 774175 - RNA, 17 nt, Artificial Sequence
  Synthetic
uuauuauuuacuguauu

SEQ ID NO: 774176 - RNA, 17 nt, Artificial Sequence
  Synthetic
cugggugcuccuguauu

SEQ ID NO: 774177 - RNA, 17 nt, Artificial Sequence
  Synthetic
uaugaaucaucuguauu

SEQ ID NO: 774178 - RNA, 17 nt, Artificial Sequence
  Synthetic
uacaaaugaucuguauu

SEQ ID NO: 774179 - RNA, 17 nt, Artificial Sequence
  Synthetic
auuaacaaauguguauu

SEQ ID NO: 774180 - RNA, 17 nt, Artificial Sequence
  Synthetic
acauuuucauguguauu

SEQ ID NO: 774181 - RNA, 17 nt, Artificial Sequence
  Synthetic
cugugcugcuguguauu

SEQ ID NO: 774182 - RNA, 17 nt, Artificial Sequence
  Synthetic
cugugcauguguguauu

SEQ ID NO: 774183 - RNA, 17 nt, Artificial Sequence
  Synthetic
uaagguuauuguguauu

SEQ ID NO: 774184 - RNA, 17 nt, Artificial Sequence
  Synthetic
agcauuuacauuguauu

SEQ ID NO: 774185 - RNA, 17 nt, Artificial Sequence
  Synthetic
uauaguuugauuguauu

SEQ ID NO: 774186 - RNA, 17 nt, Artificial Sequence
  Synthetic
caauauggacuuguauu

SEQ ID NO: 774187 - RNA, 17 nt, Artificial Sequence
  Synthetic
acaaauuaucuuguauu

SEQ ID NO: 774188 - RNA, 17 nt, Artificial Sequence
  Synthetic
ugaaucuaaguuguauu

SEQ ID NO: 774189 - RNA, 17 nt, Artificial Sequence
  Synthetic
uaauauguuguuguauu

SEQ ID NO: 774190 - RNA, 17 nt, Artificial Sequence
  Synthetic
cagauuccauuuguauu

SEQ ID NO: 774191 - RNA, 17 nt, Artificial Sequence
  Synthetic
aagauacaaaaauuauu

SEQ ID NO: 774192 - RNA, 17 nt, Artificial Sequence
  Synthetic
uaaaaaugcaaauuauu

SEQ ID NO: 774193 - RNA, 17 nt, Artificial Sequence
  Synthetic
ccaguauucaaauuauu

SEQ ID NO: 774194 - RNA, 17 nt, Artificial Sequence
  Synthetic
cauuguaauaaauuauu

SEQ ID NO: 774195 - RNA, 17 nt, Artificial Sequence
  Synthetic
agauguuauaaauuauu

SEQ ID NO: 774196 - RNA, 17 nt, Artificial Sequence
  Synthetic
uuuuucuguaaauuauu

SEQ ID NO: 774197 - RNA, 17 nt, Artificial Sequence
  Synthetic
aaaccacagcaauuauu

SEQ ID NO: 774198 - RNA, 17 nt, Artificial Sequence
  Synthetic
cacaacaaagaauuauu

SEQ ID NO: 774199 - RNA, 17 nt, Artificial Sequence
  Synthetic
uucccuguagaauuauu

SEQ ID NO: 774200 - RNA, 17 nt, Artificial Sequence
  Synthetic
uauguuauggaauuauu

SEQ ID NO: 774201 - RNA, 17 nt, Artificial Sequence
  Synthetic
caggaaaaauaauuauu

SEQ ID NO: 774202 - RNA, 17 nt, Artificial Sequence
  Synthetic
uuacuaaaauaauuauu

SEQ ID NO: 774203 - RNA, 17 nt, Artificial Sequence
  Synthetic
ccuuaagauuaauuauu

SEQ ID NO: 774204 - RNA, 17 nt, Artificial Sequence
  Synthetic
uaaaggucuuaauuauu

SEQ ID NO: 774205 - RNA, 17 nt, Artificial Sequence
  Synthetic
aaacaaaacacauuauu

SEQ ID NO: 774206 - RNA, 17 nt, Artificial Sequence
  Synthetic
ccagcaaucccauuauu

SEQ ID NO: 774207 - RNA, 17 nt, Artificial Sequence
  Synthetic
auuauucucccauuauu

SEQ ID NO: 774208 - RNA, 17 nt, Artificial Sequence
  Synthetic
ccuggaaauccauuauu

SEQ ID NO: 774209 - RNA, 17 nt, Artificial Sequence
  Synthetic
accuuuaaggcauuauu

SEQ ID NO: 774210 - RNA, 17 nt, Artificial Sequence
  Synthetic
ugauugcucucauuauu

SEQ ID NO: 774211 - RNA, 17 nt, Artificial Sequence
  Synthetic
uguggaaggcgauuauu

SEQ ID NO: 774212 - RNA, 17 nt, Artificial Sequence
  Synthetic
aucugguaaugauuauu

SEQ ID NO: 774213 - RNA, 17 nt, Artificial Sequence
  Synthetic
uuaccuuuaugauuauu

SEQ ID NO: 774214 - RNA, 17 nt, Artificial Sequence
  Synthetic
ugaaguucaauauuauu

SEQ ID NO: 774215 - RNA, 17 nt, Artificial Sequence
  Synthetic
auacagggaauauuauu

SEQ ID NO: 774216 - RNA, 17 nt, Artificial Sequence
  Synthetic
uuagcacgcauauuauu

SEQ ID NO: 774217 - RNA, 17 nt, Artificial Sequence
  Synthetic
uuccaaaaacuauuauu

SEQ ID NO: 774218 - RNA, 17 nt, Artificial Sequence
  Synthetic
aaauacuagcuauuauu

SEQ ID NO: 774219 - RNA, 17 nt, Artificial Sequence
  Synthetic
uauugucuucuauuauu

SEQ ID NO: 774220 - RNA, 17 nt, Artificial Sequence
  Synthetic
aagaaaagcuuauuauu

SEQ ID NO: 774221 - RNA, 17 nt, Artificial Sequence
  Synthetic
uaaucuguguuauuauu

SEQ ID NO: 774222 - RNA, 17 nt, Artificial Sequence
  Synthetic
caaaaauguuuauuauu

SEQ ID NO: 774223 - RNA, 17 nt, Artificial Sequence
  Synthetic
uuacaguguuuauuauu

SEQ ID NO: 774224 - RNA, 17 nt, Artificial Sequence
  Synthetic
aucaaguuuuuauuauu

SEQ ID NO: 774225 - RNA, 17 nt, Artificial Sequence
  Synthetic
uuaauaagagacuuauu

SEQ ID NO: 774226 - RNA, 17 nt, Artificial Sequence
  Synthetic
ucuccuacugacuuauu

SEQ ID NO: 774227 - RNA, 17 nt, Artificial Sequence
  Synthetic
uaucucccugacuuauu

SEQ ID NO: 774228 - RNA, 17 nt, Artificial Sequence
  Synthetic
caguugagugacuuauu

SEQ ID NO: 774229 - RNA, 17 nt, Artificial Sequence
  Synthetic
uucugauuuuacuuauu

SEQ ID NO: 774230 - RNA, 17 nt, Artificial Sequence
  Synthetic
caaucugccaccuuauu

SEQ ID NO: 774231 - RNA, 17 nt, Artificial Sequence
  Synthetic
ccacacccagccuuauu

SEQ ID NO: 774232 - RNA, 17 nt, Artificial Sequence
  Synthetic
uucuauaaauccuuauu

SEQ ID NO: 774233 - RNA, 17 nt, Artificial Sequence
  Synthetic
aacaugauguccuuauu

SEQ ID NO: 774234 - RNA, 17 nt, Artificial Sequence
  Synthetic
acauucauuuccuuauu

SEQ ID NO: 774235 - RNA, 17 nt, Artificial Sequence
  Synthetic
aaauuuuagagcuuauu

SEQ ID NO: 774236 - RNA, 17 nt, Artificial Sequence
  Synthetic
aaauauccaaucuuauu

SEQ ID NO: 774237 - RNA, 17 nt, Artificial Sequence
  Synthetic
cucuuucauaucuuauu

SEQ ID NO: 774238 - RNA, 17 nt, Artificial Sequence
  Synthetic
aguacuacuaucuuauu

SEQ ID NO: 774239 - RNA, 17 nt, Artificial Sequence
  Synthetic
cauggauuuaucuuauu

SEQ ID NO: 774240 - RNA, 17 nt, Artificial Sequence
  Synthetic
uuugcuggacucuuauu

SEQ ID NO: 774241 - RNA, 17 nt, Artificial Sequence
  Synthetic
acugaacuccucuuauu

SEQ ID NO: 774242 - RNA, 17 nt, Artificial Sequence
  Synthetic
caauucuaucucuuauu

SEQ ID NO: 774243 - RNA, 17 nt, Artificial Sequence
  Synthetic
aaacaaguguucuuauu

SEQ ID NO: 774244 - RNA, 17 nt, Artificial Sequence
  Synthetic
uuuuaccuuuucuuauu

SEQ ID NO: 774245 - RNA, 17 nt, Artificial Sequence
  Synthetic
auuucauuuuucuuauu

SEQ ID NO: 774246 - RNA, 17 nt, Artificial Sequence
  Synthetic
agaaaguuuuucuuauu

SEQ ID NO: 774247 - RNA, 17 nt, Artificial Sequence
  Synthetic
uucuagacaaaguuauu

SEQ ID NO: 774248 - RNA, 17 nt, Artificial Sequence
  Synthetic
auuuccgcaaaguuauu

SEQ ID NO: 774249 - RNA, 17 nt, Artificial Sequence
  Synthetic
cauauaaacaaguuauu

SEQ ID NO: 774250 - RNA, 17 nt, Artificial Sequence
  Synthetic
cugauguagaaguuauu

SEQ ID NO: 774251 - RNA, 17 nt, Artificial Sequence
  Synthetic
uuacaaaauaaguuauu

SEQ ID NO: 774252 - RNA, 17 nt, Artificial Sequence
  Synthetic
cucuagucccaguuauu

SEQ ID NO: 774253 - RNA, 17 nt, Artificial Sequence
  Synthetic
uaacacauucaguuauu

SEQ ID NO: 774254 - RNA, 17 nt, Artificial Sequence
  Synthetic
uaaacucuuuaguuauu

SEQ ID NO: 774255 - RNA, 17 nt, Artificial Sequence
  Synthetic
auaagcuaaccguuauu

SEQ ID NO: 774256 - RNA, 17 nt, Artificial Sequence
  Synthetic
acacuaugcagguuauu

SEQ ID NO: 774257 - RNA, 17 nt, Artificial Sequence
  Synthetic
cauauauuuagguuauu

SEQ ID NO: 774258 - RNA, 17 nt, Artificial Sequence
  Synthetic
uagauauccugguuauu

SEQ ID NO: 774259 - RNA, 17 nt, Artificial Sequence
  Synthetic
cuuggaaggugguuauu

SEQ ID NO: 774260 - RNA, 17 nt, Artificial Sequence
  Synthetic
acugaacagauguuauu

SEQ ID NO: 774261 - RNA, 17 nt, Artificial Sequence
  Synthetic
ugguuagcacuguuauu

SEQ ID NO: 774262 - RNA, 17 nt, Artificial Sequence
  Synthetic
agcuaauuccuguuauu

SEQ ID NO: 774263 - RNA, 17 nt, Artificial Sequence
  Synthetic
acacuaaggcuguuauu

SEQ ID NO: 774264 - RNA, 17 nt, Artificial Sequence
  Synthetic
agugccaggcuguuauu

SEQ ID NO: 774265 - RNA, 17 nt, Artificial Sequence
  Synthetic
ucuuguuaucuguuauu

SEQ ID NO: 774266 - RNA, 17 nt, Artificial Sequence
  Synthetic
cuuagauauguguuauu

SEQ ID NO: 774267 - RNA, 17 nt, Artificial Sequence
  Synthetic
accauuauuguguuauu

SEQ ID NO: 774268 - RNA, 17 nt, Artificial Sequence
  Synthetic
cucucaaacuuguuauu

SEQ ID NO: 774269 - RNA, 17 nt, Artificial Sequence
  Synthetic
uuaaaaacuuuguuauu

SEQ ID NO: 774270 - RNA, 17 nt, Artificial Sequence
  Synthetic
agaagugcuuuguuauu

SEQ ID NO: 774271 - RNA, 17 nt, Artificial Sequence
  Synthetic
ugauaguuuuuguuauu

SEQ ID NO: 774272 - RNA, 17 nt, Artificial Sequence
  Synthetic
aacaggugaaauuuauu

SEQ ID NO: 774273 - RNA, 17 nt, Artificial Sequence
  Synthetic
auaugcuuaaauuuauu

SEQ ID NO: 774274 - RNA, 17 nt, Artificial Sequence
  Synthetic
ugucauucuaauuuauu

SEQ ID NO: 774275 - RNA, 17 nt, Artificial Sequence
  Synthetic
uuuucaacacauuuauu

SEQ ID NO: 774276 - RNA, 17 nt, Artificial Sequence
  Synthetic
caguccagacauuuauu

SEQ ID NO: 774277 - RNA, 17 nt, Artificial Sequence
  Synthetic
ucacugagacauuuauu

SEQ ID NO: 774278 - RNA, 17 nt, Artificial Sequence
  Synthetic
ccaauuguacauuuauu

SEQ ID NO: 774279 - RNA, 17 nt, Artificial Sequence
  Synthetic
aacauuuaccauuuauu

SEQ ID NO: 774280 - RNA, 17 nt, Artificial Sequence
  Synthetic
cuauguaaucauuuauu

SEQ ID NO: 774281 - RNA, 17 nt, Artificial Sequence
  Synthetic
uggaacuaucauuuauu

SEQ ID NO: 774282 - RNA, 17 nt, Artificial Sequence
  Synthetic
uuuccucaagauuuauu

SEQ ID NO: 774283 - RNA, 17 nt, Artificial Sequence
  Synthetic
uucgaaucugauuuauu

SEQ ID NO: 774284 - RNA, 17 nt, Artificial Sequence
  Synthetic
agagcaagugauuuauu

SEQ ID NO: 774285 - RNA, 17 nt, Artificial Sequence
  Synthetic
aaaaacagugauuuauu

SEQ ID NO: 774286 - RNA, 17 nt, Artificial Sequence
  Synthetic
aguagcaaauauuuauu

SEQ ID NO: 774287 - RNA, 17 nt, Artificial Sequence
  Synthetic
auuuuaucauauuuauu

SEQ ID NO: 774288 - RNA, 17 nt, Artificial Sequence
  Synthetic
agguguauauauuuauu

SEQ ID NO: 774289 - RNA, 17 nt, Artificial Sequence
  Synthetic
acauuuauauauuuauu

SEQ ID NO: 774290 - RNA, 17 nt, Artificial Sequence
  Synthetic
auuuuuauauauuuauu

SEQ ID NO: 774291 - RNA, 17 nt, Artificial Sequence
  Synthetic
auaaaagacuauuuauu

SEQ ID NO: 774292 - RNA, 17 nt, Artificial Sequence
  Synthetic
auaacucauuauuuauu

SEQ ID NO: 774293 - RNA, 17 nt, Artificial Sequence
  Synthetic
cagacacuaacuuuauu

SEQ ID NO: 774294 - RNA, 17 nt, Artificial Sequence
  Synthetic
aacaaauauacuuuauu

SEQ ID NO: 774295 - RNA, 17 nt, Artificial Sequence
  Synthetic
auggccuugccuuuauu

SEQ ID NO: 774296 - RNA, 17 nt, Artificial Sequence
  Synthetic
uaucaagaaucuuuauu

SEQ ID NO: 774297 - RNA, 17 nt, Artificial Sequence
  Synthetic
caaagauuaucuuuauu

SEQ ID NO: 774298 - RNA, 17 nt, Artificial Sequence
  Synthetic
auccagaguucuuuauu

SEQ ID NO: 774299 - RNA, 17 nt, Artificial Sequence
  Synthetic
agucuuaagaguuuauu

SEQ ID NO: 774300 - RNA, 17 nt, Artificial Sequence
  Synthetic
agaauggaagguuuauu

SEQ ID NO: 774301 - RNA, 17 nt, Artificial Sequence
  Synthetic
uucucugaggguuuauu

SEQ ID NO: 774302 - RNA, 17 nt, Artificial Sequence
  Synthetic
aacucaguggguuuauu

SEQ ID NO: 774303 - RNA, 17 nt, Artificial Sequence
  Synthetic
cuugggagauguuuauu

SEQ ID NO: 774304 - RNA, 17 nt, Artificial Sequence
  Synthetic
uauuagcuauguuuauu

SEQ ID NO: 774305 - RNA, 17 nt, Artificial Sequence
  Synthetic
caagguagcuguuuauu

SEQ ID NO: 774306 - RNA, 17 nt, Artificial Sequence
  Synthetic
uuauauauuuguuuauu

SEQ ID NO: 774307 - RNA, 17 nt, Artificial Sequence
  Synthetic
cgugcaaucauuuuauu

SEQ ID NO: 774308 - RNA, 17 nt, Artificial Sequence
  Synthetic
uccaaauucauuuuauu

SEQ ID NO: 774309 - RNA, 17 nt, Artificial Sequence
  Synthetic
uccucaucuauuuuauu

SEQ ID NO: 774310 - RNA, 17 nt, Artificial Sequence
  Synthetic
cucagcaaacuuuuauu

SEQ ID NO: 774311 - RNA, 17 nt, Artificial Sequence
  Synthetic
uaaaauguacuuuuauu

SEQ ID NO: 774312 - RNA, 17 nt, Artificial Sequence
  Synthetic
ugaauuguacuuuuauu

SEQ ID NO: 774313 - RNA, 17 nt, Artificial Sequence
  Synthetic
uacuggcuccuuuuauu

SEQ ID NO: 774314 - RNA, 17 nt, Artificial Sequence
  Synthetic
uguccccuucuuuuauu

SEQ ID NO: 774315 - RNA, 17 nt, Artificial Sequence
  Synthetic
uaauuuucuguuuuauu

SEQ ID NO: 774316 - RNA, 17 nt, Artificial Sequence
  Synthetic
uauucuauuguuuuauu

SEQ ID NO: 774317 - RNA, 17 nt, Artificial Sequence
  Synthetic
aagcaauuuguuuuauu

SEQ ID NO: 774318 - RNA, 17 nt, Artificial Sequence
  Synthetic
cuuucauaauuuuuauu

SEQ ID NO: 774319 - RNA, 17 nt, Artificial Sequence
  Synthetic
cuuaccacauuuuuauu

SEQ ID NO: 774320 - RNA, 17 nt, Artificial Sequence
  Synthetic
cuauugccauuuuuauu

SEQ ID NO: 774321 - RNA, 17 nt, Artificial Sequence
  Synthetic
cauaagucauuuuuauu

SEQ ID NO: 774322 - RNA, 17 nt, Artificial Sequence
  Synthetic
agauuacuauuuuuauu

SEQ ID NO: 774323 - RNA, 17 nt, Artificial Sequence
  Synthetic
aaugagcccuuuuuauu

SEQ ID NO: 774324 - RNA, 17 nt, Artificial Sequence
  Synthetic
auaacacucuuuuuauu

SEQ ID NO: 774325 - RNA, 17 nt, Artificial Sequence
  Synthetic
uuauuucucuuuuuauu

SEQ ID NO: 774326 - RNA, 17 nt, Artificial Sequence
  Synthetic
uccuauaauuuuuuauu

SEQ ID NO: 774327 - RNA, 17 nt, Artificial Sequence
  Synthetic
aaaauuuauuuuuuauu

SEQ ID NO: 774328 - RNA, 17 nt, Artificial Sequence
  Synthetic
uuagcuacuuuuuuauu

SEQ ID NO: 774329 - RNA, 17 nt, Artificial Sequence
  Synthetic
uugcccauuuuuuuauu

SEQ ID NO: 774330 - RNA, 17 nt, Artificial Sequence
  Synthetic
uucccauugaaaaacuu

SEQ ID NO: 774331 - RNA, 17 nt, Artificial Sequence
  Synthetic
aaaaauguuaaaaacuu

SEQ ID NO: 774332 - RNA, 17 nt, Artificial Sequence
  Synthetic
aaggagaaacaaaacuu

SEQ ID NO: 774333 - RNA, 17 nt, Artificial Sequence
  Synthetic
aaacuuuggcaaaacuu

SEQ ID NO: 774334 - RNA, 17 nt, Artificial Sequence
  Synthetic
uucaucugagaaaacuu

SEQ ID NO: 774335 - RNA, 17 nt, Artificial Sequence
  Synthetic
caggaggaauaaaacuu

SEQ ID NO: 774336 - RNA, 17 nt, Artificial Sequence
  Synthetic
uauuguucguaaaacuu

SEQ ID NO: 774337 - RNA, 17 nt, Artificial Sequence
  Synthetic
aaagcaaggacaaacuu

SEQ ID NO: 774338 - RNA, 17 nt, Artificial Sequence
  Synthetic
uuuucaaaagcaaacuu

SEQ ID NO: 774339 - RNA, 17 nt, Artificial Sequence
  Synthetic
aaaucgaucucaaacuu

SEQ ID NO: 774340 - RNA, 17 nt, Artificial Sequence
  Synthetic
aucagaaagucaaacuu

SEQ ID NO: 774341 - RNA, 17 nt, Artificial Sequence
  Synthetic
ucuaaagucagaaacuu

SEQ ID NO: 774342 - RNA, 17 nt, Artificial Sequence
  Synthetic
uugaaacauggaaacuu

SEQ ID NO: 774343 - RNA, 17 nt, Artificial Sequence
  Synthetic
uccacugauggaaacuu

SEQ ID NO: 774344 - RNA, 17 nt, Artificial Sequence
  Synthetic
ugccuuagaugaaacuu

SEQ ID NO: 774345 - RNA, 17 nt, Artificial Sequence
  Synthetic
ucauucuuuugaaacuu

SEQ ID NO: 774346 - RNA, 17 nt, Artificial Sequence
  Synthetic
uauagcuagauaaacuu

SEQ ID NO: 774347 - RNA, 17 nt, Artificial Sequence
  Synthetic
ccaaaauggauaaacuu

SEQ ID NO: 774348 - RNA, 17 nt, Artificial Sequence
  Synthetic
cuugccuuccuaaacuu

SEQ ID NO: 774349 - RNA, 17 nt, Artificial Sequence
  Synthetic
cuucaaaaaguaaacuu

SEQ ID NO: 774350 - RNA, 17 nt, Artificial Sequence
  Synthetic
uucaaauauuuaaacuu

SEQ ID NO: 774351 - RNA, 17 nt, Artificial Sequence
  Synthetic
auaucagcuuuaaacuu

SEQ ID NO: 774352 - RNA, 17 nt, Artificial Sequence
  Synthetic
uauguguguuuaaacuu

SEQ ID NO: 774353 - RNA, 17 nt, Artificial Sequence
  Synthetic
uauguuuggaacaacuu

SEQ ID NO: 774354 - RNA, 17 nt, Artificial Sequence
  Synthetic
ugugccacucacaacuu

SEQ ID NO: 774355 - RNA, 17 nt, Artificial Sequence
  Synthetic
uauucuugucacaacuu

SEQ ID NO: 774356 - RNA, 17 nt, Artificial Sequence
  Synthetic
acucagauugacaacuu

SEQ ID NO: 774357 - RNA, 17 nt, Artificial Sequence
  Synthetic
uauucuacauacaacuu

SEQ ID NO: 774358 - RNA, 17 nt, Artificial Sequence
  Synthetic
uuauugcauuccaacuu

SEQ ID NO: 774359 - RNA, 17 nt, Artificial Sequence
  Synthetic
aaauguggaagcaacuu

SEQ ID NO: 774360 - RNA, 17 nt, Artificial Sequence
  Synthetic
uuggauaagagcaacuu

SEQ ID NO: 774361 - RNA, 17 nt, Artificial Sequence
  Synthetic
cacuuucuuugcaacuu

SEQ ID NO: 774362 - RNA, 17 nt, Artificial Sequence
  Synthetic
uuguugagacucaacuu

SEQ ID NO: 774363 - RNA, 17 nt, Artificial Sequence
  Synthetic
ucaggcaaucucaacuu

SEQ ID NO: 774364 - RNA, 17 nt, Artificial Sequence
  Synthetic
uguugggaagucaacuu

SEQ ID NO: 774365 - RNA, 17 nt, Artificial Sequence
  Synthetic
agcuggagaaagaacuu

SEQ ID NO: 774366 - RNA, 17 nt, Artificial Sequence
  Synthetic
agcauuaacaagaacuu

SEQ ID NO: 774367 - RNA, 17 nt, Artificial Sequence
  Synthetic
ugcauguugaagaacuu

SEQ ID NO: 774368 - RNA, 17 nt, Artificial Sequence
  Synthetic
uagcuuaaauagaacuu

SEQ ID NO: 774369 - RNA, 17 nt, Artificial Sequence
  Synthetic
uuuaaauaauagaacuu

SEQ ID NO: 774370 - RNA, 17 nt, Artificial Sequence
  Synthetic
aaagaaucguagaacuu

SEQ ID NO: 774371 - RNA, 17 nt, Artificial Sequence
  Synthetic
ccaaguacuuagaacuu

SEQ ID NO: 774372 - RNA, 17 nt, Artificial Sequence
  Synthetic
agggugggcaggaacuu

SEQ ID NO: 774373 - RNA, 17 nt, Artificial Sequence
  Synthetic
cacucucuggggaacuu

SEQ ID NO: 774374 - RNA, 17 nt, Artificial Sequence
  Synthetic
ugcuagucauggaacuu

SEQ ID NO: 774375 - RNA, 17 nt, Artificial Sequence
  Synthetic
aagguacagaugaacuu

SEQ ID NO: 774376 - RNA, 17 nt, Artificial Sequence
  Synthetic
aaaauagggaugaacuu

SEQ ID NO: 774377 - RNA, 17 nt, Artificial Sequence
  Synthetic
uaugcugcuaugaacuu

SEQ ID NO: 774378 - RNA, 17 nt, Artificial Sequence
  Synthetic
ucaaguggagugaacuu

SEQ ID NO: 774379 - RNA, 17 nt, Artificial Sequence
  Synthetic
ucaaccaaggugaacuu

SEQ ID NO: 774380 - RNA, 17 nt, Artificial Sequence
  Synthetic
uggauaguggugaacuu

SEQ ID NO: 774381 - RNA, 17 nt, Artificial Sequence
  Synthetic
cagaaucgcuugaacuu

SEQ ID NO: 774382 - RNA, 17 nt, Artificial Sequence
  Synthetic
uuuuuauucaauaacuu

SEQ ID NO: 774383 - RNA, 17 nt, Artificial Sequence
  Synthetic
ucagcugauaauaacuu

SEQ ID NO: 774384 - RNA, 17 nt, Artificial Sequence
  Synthetic
aagccuugacauaacuu

SEQ ID NO: 774385 - RNA, 17 nt, Artificial Sequence
  Synthetic
uuucagugucauaacuu

SEQ ID NO: 774386 - RNA, 17 nt, Artificial Sequence
  Synthetic
auccuccaggauaacuu

SEQ ID NO: 774387 - RNA, 17 nt, Artificial Sequence
  Synthetic
aguucuuaauauaacuu

SEQ ID NO: 774388 - RNA, 17 nt, Artificial Sequence
  Synthetic
aauuacuauuauaacuu

SEQ ID NO: 774389 - RNA, 17 nt, Artificial Sequence
  Synthetic
uauggauguuauaacuu

SEQ ID NO: 774390 - RNA, 17 nt, Artificial Sequence
  Synthetic
auaauauguuauaacuu

SEQ ID NO: 774391 - RNA, 17 nt, Artificial Sequence
  Synthetic
cuucccucugcuaacuu

SEQ ID NO: 774392 - RNA, 17 nt, Artificial Sequence
  Synthetic
cuucuuucugcuaacuu

SEQ ID NO: 774393 - RNA, 17 nt, Artificial Sequence
  Synthetic
ugcugguccaguaacuu

SEQ ID NO: 774394 - RNA, 17 nt, Artificial Sequence
  Synthetic
cuaggaauaauuaacuu

SEQ ID NO: 774395 - RNA, 17 nt, Artificial Sequence
  Synthetic
acaagggaauuuaacuu

SEQ ID NO: 774396 - RNA, 17 nt, Artificial Sequence
  Synthetic
cuauaauucuuuaacuu

SEQ ID NO: 774397 - RNA, 17 nt, Artificial Sequence
  Synthetic
uaaguuuucuuuaacuu

SEQ ID NO: 774398 - RNA, 17 nt, Artificial Sequence
  Synthetic
acaaaacaaaaacacuu

SEQ ID NO: 774399 - RNA, 17 nt, Artificial Sequence
  Synthetic
ccuuauccaaaacacuu

SEQ ID NO: 774400 - RNA, 17 nt, Artificial Sequence
  Synthetic
ccgcauuuaaaacacuu

SEQ ID NO: 774401 - RNA, 17 nt, Artificial Sequence
  Synthetic
auuuauuggaaacacuu

SEQ ID NO: 774402 - RNA, 17 nt, Artificial Sequence
  Synthetic
cuauaaucccaacacuu

SEQ ID NO: 774403 - RNA, 17 nt, Artificial Sequence
  Synthetic
cuguaaucccaacacuu

SEQ ID NO: 774404 - RNA, 17 nt, Artificial Sequence
  Synthetic
uuguaaucccaacacuu

SEQ ID NO: 774405 - RNA, 17 nt, Artificial Sequence
  Synthetic
cucuacucccaacacuu

SEQ ID NO: 774406 - RNA, 17 nt, Artificial Sequence
  Synthetic
uuagauuaucaacacuu

SEQ ID NO: 774407 - RNA, 17 nt, Artificial Sequence
  Synthetic
cuguaaucucaacacuu

SEQ ID NO: 774408 - RNA, 17 nt, Artificial Sequence
  Synthetic
ccaaauucugaacacuu

SEQ ID NO: 774409 - RNA, 17 nt, Artificial Sequence
  Synthetic
cuguaauccuaacacuu

SEQ ID NO: 774410 - RNA, 17 nt, Artificial Sequence
  Synthetic
uuggucgauggacacuu

SEQ ID NO: 774411 - RNA, 17 nt, Artificial Sequence
  Synthetic
ucuacugauggacacuu

SEQ ID NO: 774412 - RNA, 17 nt, Artificial Sequence
  Synthetic
uagugugaaugacacuu

SEQ ID NO: 774413 - RNA, 17 nt, Artificial Sequence
  Synthetic
cucaauauuauacacuu

SEQ ID NO: 774414 - RNA, 17 nt, Artificial Sequence
  Synthetic
aguuuugaccuacacuu

SEQ ID NO: 774415 - RNA, 17 nt, Artificial Sequence
  Synthetic
uuuaccuuuguacacuu

SEQ ID NO: 774416 - RNA, 17 nt, Artificial Sequence
  Synthetic
cuguaaucccaccacuu

SEQ ID NO: 774417 - RNA, 17 nt, Artificial Sequence
  Synthetic
acacgucagcaccacuu

SEQ ID NO: 774418 - RNA, 17 nt, Artificial Sequence
  Synthetic
ugacaggaugaccacuu

SEQ ID NO: 774419 - RNA, 17 nt, Artificial Sequence
  Synthetic
ucgugguccgcccacuu

SEQ ID NO: 774420 - RNA, 17 nt, Artificial Sequence
  Synthetic
aagugauccucccacuu

SEQ ID NO: 774421 - RNA, 17 nt, Artificial Sequence
  Synthetic
acuugcaucucccacuu

SEQ ID NO: 774422 - RNA, 17 nt, Artificial Sequence
  Synthetic
uguaaucccagccacuu

SEQ ID NO: 774423 - RNA, 17 nt, Artificial Sequence
  Synthetic
uguagucccagccacuu

SEQ ID NO: 774424 - RNA, 17 nt, Artificial Sequence
  Synthetic
uuuugcuucagccacuu

SEQ ID NO: 774425 - RNA, 17 nt, Artificial Sequence
  Synthetic
ugguuaaugagccacuu

SEQ ID NO: 774426 - RNA, 17 nt, Artificial Sequence
  Synthetic
ucucaauuuagccacuu

SEQ ID NO: 774427 - RNA, 17 nt, Artificial Sequence
  Synthetic
ucucaugguggccacuu

SEQ ID NO: 774428 - RNA, 17 nt, Artificial Sequence
  Synthetic
uuaggaaagauccacuu

SEQ ID NO: 774429 - RNA, 17 nt, Artificial Sequence
  Synthetic
uucccugaauuccacuu

SEQ ID NO: 774430 - RNA, 17 nt, Artificial Sequence
  Synthetic
cauacugcauuccacuu

SEQ ID NO: 774431 - RNA, 17 nt, Artificial Sequence
  Synthetic
cacucagaaaagcacuu

SEQ ID NO: 774432 - RNA, 17 nt, Artificial Sequence
  Synthetic
cuguaauccaagcacuu

SEQ ID NO: 774433 - RNA, 17 nt, Artificial Sequence
  Synthetic
ugggcuggcaagcacuu

SEQ ID NO: 774434 - RNA, 17 nt, Artificial Sequence
  Synthetic
uauuucuggaagcacuu

SEQ ID NO: 774435 - RNA, 17 nt, Artificial Sequence
  Synthetic
caagucugacagcacuu

SEQ ID NO: 774436 - RNA, 17 nt, Artificial Sequence
  Synthetic
cuguaauaccagcacuu

SEQ ID NO: 774437 - RNA, 17 nt, Artificial Sequence
  Synthetic
cuguaaacccagcacuu

SEQ ID NO: 774438 - RNA, 17 nt, Artificial Sequence
  Synthetic
cuguaaccccagcacuu

SEQ ID NO: 774439 - RNA, 17 nt, Artificial Sequence
  Synthetic
uguaaaucccagcacuu

SEQ ID NO: 774440 - RNA, 17 nt, Artificial Sequence
  Synthetic
cugcaaucccagcacuu

SEQ ID NO: 774441 - RNA, 17 nt, Artificial Sequence
  Synthetic
ccauaaucccagcacuu

SEQ ID NO: 774442 - RNA, 17 nt, Artificial Sequence
  Synthetic
auauaaucccagcacuu

SEQ ID NO: 774443 - RNA, 17 nt, Artificial Sequence
  Synthetic
cuauaaucccagcacuu

SEQ ID NO: 774444 - RNA, 17 nt, Artificial Sequence
  Synthetic
caguaaucccagcacuu

SEQ ID NO: 774445 - RNA, 17 nt, Artificial Sequence
  Synthetic
ccguaaucccagcacuu

SEQ ID NO: 774446 - RNA, 17 nt, Artificial Sequence
  Synthetic
cuguaaucccagcacuu

SEQ ID NO: 774447 - RNA, 17 nt, Artificial Sequence
  Synthetic
ccuguaucccagcacuu

SEQ ID NO: 774448 - RNA, 17 nt, Artificial Sequence
  Synthetic
cuguacucccagcacuu

SEQ ID NO: 774449 - RNA, 17 nt, Artificial Sequence
  Synthetic
cuguaauuccagcacuu

SEQ ID NO: 774450 - RNA, 17 nt, Artificial Sequence
  Synthetic
cuguaaucgcagcacuu

SEQ ID NO: 774451 - RNA, 17 nt, Artificial Sequence
  Synthetic
cuguaaucucagcacuu

SEQ ID NO: 774452 - RNA, 17 nt, Artificial Sequence
  Synthetic
agacugacauagcacuu

SEQ ID NO: 774453 - RNA, 17 nt, Artificial Sequence
  Synthetic
cuauaauccuagcacuu

SEQ ID NO: 774454 - RNA, 17 nt, Artificial Sequence
  Synthetic
cuguaauccuagcacuu

SEQ ID NO: 774455 - RNA, 17 nt, Artificial Sequence
  Synthetic
cuaugauccuagcacuu

SEQ ID NO: 774456 - RNA, 17 nt, Artificial Sequence
  Synthetic
cugugauuuuagcacuu

SEQ ID NO: 774457 - RNA, 17 nt, Artificial Sequence
  Synthetic
cuguaauccccgcacuu

SEQ ID NO: 774458 - RNA, 17 nt, Artificial Sequence
  Synthetic
cuguauacuaggcacuu

SEQ ID NO: 774459 - RNA, 17 nt, Artificial Sequence
  Synthetic
uaaaaaauuaggcacuu

SEQ ID NO: 774460 - RNA, 17 nt, Artificial Sequence
  Synthetic
ucuacgauagggcacuu

SEQ ID NO: 774461 - RNA, 17 nt, Artificial Sequence
  Synthetic
ugggauguagggcacuu

SEQ ID NO: 774462 - RNA, 17 nt, Artificial Sequence
  Synthetic
uuggucggcuggcacuu

SEQ ID NO: 774463 - RNA, 17 nt, Artificial Sequence
  Synthetic
uguguugucuggcacuu

SEQ ID NO: 774464 - RNA, 17 nt, Artificial Sequence
  Synthetic
uuugcuuucuggcacuu

SEQ ID NO: 774465 - RNA, 17 nt, Artificial Sequence
  Synthetic
cuuuuguguaugcacuu

SEQ ID NO: 774466 - RNA, 17 nt, Artificial Sequence
  Synthetic
auaaauaaacugcacuu

SEQ ID NO: 774467 - RNA, 17 nt, Artificial Sequence
  Synthetic
aaugaagcuuugcacuu

SEQ ID NO: 774468 - RNA, 17 nt, Artificial Sequence
  Synthetic
aauucuuuuuugcacuu

SEQ ID NO: 774469 - RNA, 17 nt, Artificial Sequence
  Synthetic
ccauguccuaaucacuu

SEQ ID NO: 774470 - RNA, 17 nt, Artificial Sequence
  Synthetic
cagcguuagcaucacuu

SEQ ID NO: 774471 - RNA, 17 nt, Artificial Sequence
  Synthetic
caguaucggcaucacuu

SEQ ID NO: 774472 - RNA, 17 nt, Artificial Sequence
  Synthetic
caaaagaaggaucacuu

SEQ ID NO: 774473 - RNA, 17 nt, Artificial Sequence
  Synthetic
aaaggaguauaucacuu

SEQ ID NO: 774474 - RNA, 17 nt, Artificial Sequence
  Synthetic
aauguaguuuaucacuu

SEQ ID NO: 774475 - RNA, 17 nt, Artificial Sequence
  Synthetic
aaagaugucccucacuu

SEQ ID NO: 774476 - RNA, 17 nt, Artificial Sequence
  Synthetic
agugguuucccucacuu

SEQ ID NO: 774477 - RNA, 17 nt, Artificial Sequence
  Synthetic
uuguccaguccucacuu

SEQ ID NO: 774478 - RNA, 17 nt, Artificial Sequence
  Synthetic
uuaccaaaugcucacuu

SEQ ID NO: 774479 - RNA, 17 nt, Artificial Sequence
  Synthetic
aacauuuguucucacuu

SEQ ID NO: 774480 - RNA, 17 nt, Artificial Sequence
  Synthetic
ugauaaauaagucacuu

SEQ ID NO: 774481 - RNA, 17 nt, Artificial Sequence
  Synthetic
uuaauacccugucacuu

SEQ ID NO: 774482 - RNA, 17 nt, Artificial Sequence
  Synthetic
acaauuauuugucacuu

SEQ ID NO: 774483 - RNA, 17 nt, Artificial Sequence
  Synthetic
auuuaaagaauucacuu

SEQ ID NO: 774484 - RNA, 17 nt, Artificial Sequence
  Synthetic
uguguaauaauucacuu

SEQ ID NO: 774485 - RNA, 17 nt, Artificial Sequence
  Synthetic
ccugcauuaauucacuu

SEQ ID NO: 774486 - RNA, 17 nt, Artificial Sequence
  Synthetic
uaaccugccauucacuu

SEQ ID NO: 774487 - RNA, 17 nt, Artificial Sequence
  Synthetic
caugucagucuucacuu

SEQ ID NO: 774488 - RNA, 17 nt, Artificial Sequence
  Synthetic
uuuggugcauuucacuu

SEQ ID NO: 774489 - RNA, 17 nt, Artificial Sequence
  Synthetic
aaaagaaaaaaagacuu

SEQ ID NO: 774490 - RNA, 17 nt, Artificial Sequence
  Synthetic
uuuucacaaaaagacuu

SEQ ID NO: 774491 - RNA, 17 nt, Artificial Sequence
  Synthetic
ccaucugagaaagacuu

SEQ ID NO: 774492 - RNA, 17 nt, Artificial Sequence
  Synthetic
uucuugaugaaagacuu

SEQ ID NO: 774493 - RNA, 17 nt, Artificial Sequence
  Synthetic
uguugaacacaagacuu

SEQ ID NO: 774494 - RNA, 17 nt, Artificial Sequence
  Synthetic
ucuagaaugcaagacuu

SEQ ID NO: 774495 - RNA, 17 nt, Artificial Sequence
  Synthetic
agacuuugggaagacuu

SEQ ID NO: 774496 - RNA, 17 nt, Artificial Sequence
  Synthetic
aguuuauuggaagacuu

SEQ ID NO: 774497 - RNA, 17 nt, Artificial Sequence
  Synthetic
aaagagaaugaagacuu

SEQ ID NO: 774498 - RNA, 17 nt, Artificial Sequence
  Synthetic
ugccuaccauaagacuu

SEQ ID NO: 774499 - RNA, 17 nt, Artificial Sequence
  Synthetic
agggauuacuaagacuu

SEQ ID NO: 774500 - RNA, 17 nt, Artificial Sequence
  Synthetic
aguugcuucuaagacuu

SEQ ID NO: 774501 - RNA, 17 nt, Artificial Sequence
  Synthetic
caggcaugaacagacuu

SEQ ID NO: 774502 - RNA, 17 nt, Artificial Sequence
  Synthetic
ugcuuuaagacagacuu

SEQ ID NO: 774503 - RNA, 17 nt, Artificial Sequence
  Synthetic
aagcauuuuacagacuu

SEQ ID NO: 774504 - RNA, 17 nt, Artificial Sequence
  Synthetic
acagguuuaccagacuu

SEQ ID NO: 774505 - RNA, 17 nt, Artificial Sequence
  Synthetic
cagaaauaagcagacuu

SEQ ID NO: 774506 - RNA, 17 nt, Artificial Sequence
  Synthetic
cucuggacaucagacuu

SEQ ID NO: 774507 - RNA, 17 nt, Artificial Sequence
  Synthetic
aaagugcugucagacuu

SEQ ID NO: 774508 - RNA, 17 nt, Artificial Sequence
  Synthetic
auaggaauaagagacuu

SEQ ID NO: 774509 - RNA, 17 nt, Artificial Sequence
  Synthetic
auguauccuagagacuu

SEQ ID NO: 774510 - RNA, 17 nt, Artificial Sequence
  Synthetic
auuucaacaggagacuu

SEQ ID NO: 774511 - RNA, 17 nt, Artificial Sequence
  Synthetic
augggcuuuggagacuu

SEQ ID NO: 774512 - RNA, 17 nt, Artificial Sequence
  Synthetic
aguaagaaaugagacuu

SEQ ID NO: 774513 - RNA, 17 nt, Artificial Sequence
  Synthetic
ugucucagaugagacuu

SEQ ID NO: 774514 - RNA, 17 nt, Artificial Sequence
  Synthetic
ugagaaaacugagacuu

SEQ ID NO: 774515 - RNA, 17 nt, Artificial Sequence
  Synthetic
acauuugggugagacuu

SEQ ID NO: 774516 - RNA, 17 nt, Artificial Sequence
  Synthetic
cccuaauuuugagacuu

SEQ ID NO: 774517 - RNA, 17 nt, Artificial Sequence
  Synthetic
uauguauaaauagacuu

SEQ ID NO: 774518 - RNA, 17 nt, Artificial Sequence
  Synthetic
aaggcuaggauagacuu

SEQ ID NO: 774519 - RNA, 17 nt, Artificial Sequence
  Synthetic
agauugauuauagacuu

SEQ ID NO: 774520 - RNA, 17 nt, Artificial Sequence
  Synthetic
uggacagggcuagacuu

SEQ ID NO: 774521 - RNA, 17 nt, Artificial Sequence
  Synthetic
uaccccaaguuagacuu

SEQ ID NO: 774522 - RNA, 17 nt, Artificial Sequence
  Synthetic
aaauguggaagcgacuu

SEQ ID NO: 774523 - RNA, 17 nt, Artificial Sequence
  Synthetic
aacuuucucaaggacuu

SEQ ID NO: 774524 - RNA, 17 nt, Artificial Sequence
  Synthetic
uucaccaguaaggacuu

SEQ ID NO: 774525 - RNA, 17 nt, Artificial Sequence
  Synthetic
cuucuguaacaggacuu

SEQ ID NO: 774526 - RNA, 17 nt, Artificial Sequence
  Synthetic
cuguaaucccaggacuu

SEQ ID NO: 774527 - RNA, 17 nt, Artificial Sequence
  Synthetic
cuguaacccuaggacuu

SEQ ID NO: 774528 - RNA, 17 nt, Artificial Sequence
  Synthetic
uuuuucucuuaggacuu

SEQ ID NO: 774529 - RNA, 17 nt, Artificial Sequence
  Synthetic
ccuacacaaagggacuu

SEQ ID NO: 774530 - RNA, 17 nt, Artificial Sequence
  Synthetic
uuccaguucagggacuu

SEQ ID NO: 774531 - RNA, 17 nt, Artificial Sequence
  Synthetic
cucuggggaugggacuu

SEQ ID NO: 774532 - RNA, 17 nt, Artificial Sequence
  Synthetic
agugauacaauggacuu

SEQ ID NO: 774533 - RNA, 17 nt, Artificial Sequence
  Synthetic
caauaauacauggacuu

SEQ ID NO: 774534 - RNA, 17 nt, Artificial Sequence
  Synthetic
uguaauacauuggacuu

SEQ ID NO: 774535 - RNA, 17 nt, Artificial Sequence
  Synthetic
ugccaaguguuggacuu

SEQ ID NO: 774536 - RNA, 17 nt, Artificial Sequence
  Synthetic
acccauuuuuuggacuu

SEQ ID NO: 774537 - RNA, 17 nt, Artificial Sequence
  Synthetic
accaaauuacaugacuu

SEQ ID NO: 774538 - RNA, 17 nt, Artificial Sequence
  Synthetic
uuuugauagcaugacuu

SEQ ID NO: 774539 - RNA, 17 nt, Artificial Sequence
  Synthetic
aauuguggggaugacuu

SEQ ID NO: 774540 - RNA, 17 nt, Artificial Sequence
  Synthetic
uacccuuuugaugacuu

SEQ ID NO: 774541 - RNA, 17 nt, Artificial Sequence
  Synthetic
aacagcuuauaugacuu

SEQ ID NO: 774542 - RNA, 17 nt, Artificial Sequence
  Synthetic
uugggaaaaccugacuu

SEQ ID NO: 774543 - RNA, 17 nt, Artificial Sequence
  Synthetic
caagugacuucugacuu

SEQ ID NO: 774544 - RNA, 17 nt, Artificial Sequence
  Synthetic
cucggugaaagugacuu

SEQ ID NO: 774545 - RNA, 17 nt, Artificial Sequence
  Synthetic
cuuuuauuaggugacuu

SEQ ID NO: 774546 - RNA, 17 nt, Artificial Sequence
  Synthetic
aaugaaaucggugacuu

SEQ ID NO: 774547 - RNA, 17 nt, Artificial Sequence
  Synthetic
cugggaaacugugacuu

SEQ ID NO: 774548 - RNA, 17 nt, Artificial Sequence
  Synthetic
ucccuucccauugacuu

SEQ ID NO: 774549 - RNA, 17 nt, Artificial Sequence
  Synthetic
uauuuguagauugacuu

SEQ ID NO: 774550 - RNA, 17 nt, Artificial Sequence
  Synthetic
aguuuagggauugacuu

SEQ ID NO: 774551 - RNA, 17 nt, Artificial Sequence
  Synthetic
cuaauauugauugacuu

SEQ ID NO: 774552 - RNA, 17 nt, Artificial Sequence
  Synthetic
uuccuaccccuugacuu

SEQ ID NO: 774553 - RNA, 17 nt, Artificial Sequence
  Synthetic
uuucuaccaguugacuu

SEQ ID NO: 774554 - RNA, 17 nt, Artificial Sequence
  Synthetic
uguucaagauuugacuu

SEQ ID NO: 774555 - RNA, 17 nt, Artificial Sequence
  Synthetic
uauguuuccuuugacuu

SEQ ID NO: 774556 - RNA, 17 nt, Artificial Sequence
  Synthetic
uuuacauucuuugacuu

SEQ ID NO: 774557 - RNA, 17 nt, Artificial Sequence
  Synthetic
uucaccugaaaauacuu

SEQ ID NO: 774558 - RNA, 17 nt, Artificial Sequence
  Synthetic
caaaaugugaaauacuu

SEQ ID NO: 774559 - RNA, 17 nt, Artificial Sequence
  Synthetic
aucaauuuuaaauacuu

SEQ ID NO: 774560 - RNA, 17 nt, Artificial Sequence
  Synthetic
acuaaucagcaauacuu

SEQ ID NO: 774561 - RNA, 17 nt, Artificial Sequence
  Synthetic
aaugauuuauaauacuu

SEQ ID NO: 774562 - RNA, 17 nt, Artificial Sequence
  Synthetic
cuuuaguacacauacuu

SEQ ID NO: 774563 - RNA, 17 nt, Artificial Sequence
  Synthetic
uuauuuuuuucauacuu

SEQ ID NO: 774564 - RNA, 17 nt, Artificial Sequence
  Synthetic
uguaaucccagauacuu

SEQ ID NO: 774565 - RNA, 17 nt, Artificial Sequence
  Synthetic
acaguaucaugauacuu

SEQ ID NO: 774566 - RNA, 17 nt, Artificial Sequence
  Synthetic
acuaaaagaugauacuu

SEQ ID NO: 774567 - RNA, 17 nt, Artificial Sequence
  Synthetic
aaauaguaaauauacuu

SEQ ID NO: 774568 - RNA, 17 nt, Artificial Sequence
  Synthetic
ugcauauuccuauacuu

SEQ ID NO: 774569 - RNA, 17 nt, Artificial Sequence
  Synthetic
uuagagcugcuauacuu

SEQ ID NO: 774570 - RNA, 17 nt, Artificial Sequence
  Synthetic
uaaaaugugcuauacuu

SEQ ID NO: 774571 - RNA, 17 nt, Artificial Sequence
  Synthetic
uguguaguaguauacuu

SEQ ID NO: 774572 - RNA, 17 nt, Artificial Sequence
  Synthetic
uauccuugauuauacuu

SEQ ID NO: 774573 - RNA, 17 nt, Artificial Sequence
  Synthetic
auuguugcuuuauacuu

SEQ ID NO: 774574 - RNA, 17 nt, Artificial Sequence
  Synthetic
ccuuuaauuuuauacuu

SEQ ID NO: 774575 - RNA, 17 nt, Artificial Sequence
  Synthetic
acggcuuuuuuauacuu

SEQ ID NO: 774576 - RNA, 17 nt, Artificial Sequence
  Synthetic
cuauuacgaaacuacuu

SEQ ID NO: 774577 - RNA, 17 nt, Artificial Sequence
  Synthetic
uuaccaguuaacuacuu

SEQ ID NO: 774578 - RNA, 17 nt, Artificial Sequence
  Synthetic
uguaauguacacuacuu

SEQ ID NO: 774579 - RNA, 17 nt, Artificial Sequence
  Synthetic
aagugauccaccuacuu

SEQ ID NO: 774580 - RNA, 17 nt, Artificial Sequence
  Synthetic
cccucuuauaccuacuu

SEQ ID NO: 774581 - RNA, 17 nt, Artificial Sequence
  Synthetic
ucuuggguucccuacuu

SEQ ID NO: 774582 - RNA, 17 nt, Artificial Sequence
  Synthetic
aaccucacuuccuacuu

SEQ ID NO: 774583 - RNA, 17 nt, Artificial Sequence
  Synthetic
uugaaucacagcuacuu

SEQ ID NO: 774584 - RNA, 17 nt, Artificial Sequence
  Synthetic
ucuaaucccagcuacuu

SEQ ID NO: 774585 - RNA, 17 nt, Artificial Sequence
  Synthetic
uguaaucccagcuacuu

SEQ ID NO: 774586 - RNA, 17 nt, Artificial Sequence
  Synthetic
ugugaucccagcuacuu

SEQ ID NO: 774587 - RNA, 17 nt, Artificial Sequence
  Synthetic
cuguaucccagcuacuu

SEQ ID NO: 774588 - RNA, 17 nt, Artificial Sequence
  Synthetic
uagagucccagcuacuu

SEQ ID NO: 774589 - RNA, 17 nt, Artificial Sequence
  Synthetic
uauagucccagcuacuu

SEQ ID NO: 774590 - RNA, 17 nt, Artificial Sequence
  Synthetic
uguagucccagcuacuu

SEQ ID NO: 774591 - RNA, 17 nt, Artificial Sequence
  Synthetic
uguaaucucagcuacuu

SEQ ID NO: 774592 - RNA, 17 nt, Artificial Sequence
  Synthetic
uguagucucagcuacuu

SEQ ID NO: 774593 - RNA, 17 nt, Artificial Sequence
  Synthetic
uguaauccuagcuacuu

SEQ ID NO: 774594 - RNA, 17 nt, Artificial Sequence
  Synthetic
aauagucuuagcuacuu

SEQ ID NO: 774595 - RNA, 17 nt, Artificial Sequence
  Synthetic
aacuggcauggcuacuu

SEQ ID NO: 774596 - RNA, 17 nt, Artificial Sequence
  Synthetic
uguagaccuggcuacuu

SEQ ID NO: 774597 - RNA, 17 nt, Artificial Sequence
  Synthetic
uguagucucugcuacuu

SEQ ID NO: 774598 - RNA, 17 nt, Artificial Sequence
  Synthetic
aacuauuucugcuacuu

SEQ ID NO: 774599 - RNA, 17 nt, Artificial Sequence
  Synthetic
ugguaggcaaucuacuu

SEQ ID NO: 774600 - RNA, 17 nt, Artificial Sequence
  Synthetic
uguaguuccaucuacuu

SEQ ID NO: 774601 - RNA, 17 nt, Artificial Sequence
  Synthetic
aauuauuacuucuacuu

SEQ ID NO: 774602 - RNA, 17 nt, Artificial Sequence
  Synthetic
aauaaucauuucuacuu

SEQ ID NO: 774603 - RNA, 17 nt, Artificial Sequence
  Synthetic
aacucucgaaaguacuu

SEQ ID NO: 774604 - RNA, 17 nt, Artificial Sequence
  Synthetic
aucuuuuuaaaguacuu

SEQ ID NO: 774605 - RNA, 17 nt, Artificial Sequence
  Synthetic
uccuuuaucaaguacuu

SEQ ID NO: 774606 - RNA, 17 nt, Artificial Sequence
  Synthetic
cuguaaucccaguacuu

SEQ ID NO: 774607 - RNA, 17 nt, Artificial Sequence
  Synthetic
aaucuguuccaguacuu

SEQ ID NO: 774608 - RNA, 17 nt, Artificial Sequence
  Synthetic
cuguaauccuaguacuu

SEQ ID NO: 774609 - RNA, 17 nt, Artificial Sequence
  Synthetic
uguaaucccagguacuu

SEQ ID NO: 774610 - RNA, 17 nt, Artificial Sequence
  Synthetic
uauuaucccagguacuu

SEQ ID NO: 774611 - RNA, 17 nt, Artificial Sequence
  Synthetic
auauaugccagguacuu

SEQ ID NO: 774612 - RNA, 17 nt, Artificial Sequence
  Synthetic
acuuaauuccuguacuu

SEQ ID NO: 774613 - RNA, 17 nt, Artificial Sequence
  Synthetic
cagccugagcuguacuu

SEQ ID NO: 774614 - RNA, 17 nt, Artificial Sequence
  Synthetic
uugcuuuaauuguacuu

SEQ ID NO: 774615 - RNA, 17 nt, Artificial Sequence
  Synthetic
caagaauuguuguacuu

SEQ ID NO: 774616 - RNA, 17 nt, Artificial Sequence
  Synthetic
cuaaaagcaaauuacuu

SEQ ID NO: 774617 - RNA, 17 nt, Artificial Sequence
  Synthetic
ucuuagguucauuacuu

SEQ ID NO: 774618 - RNA, 17 nt, Artificial Sequence
  Synthetic
aaacucuuucauuacuu

SEQ ID NO: 774619 - RNA, 17 nt, Artificial Sequence
  Synthetic
aaauauuuguauuacuu

SEQ ID NO: 774620 - RNA, 17 nt, Artificial Sequence
  Synthetic
agacccacaccuuacuu

SEQ ID NO: 774621 - RNA, 17 nt, Artificial Sequence
  Synthetic
uagaauuugccuuacuu

SEQ ID NO: 774622 - RNA, 17 nt, Artificial Sequence
  Synthetic
agucagacuccuuacuu

SEQ ID NO: 774623 - RNA, 17 nt, Artificial Sequence
  Synthetic
auauuaaaggcuuacuu

SEQ ID NO: 774624 - RNA, 17 nt, Artificial Sequence
  Synthetic
aucugauagucuuacuu

SEQ ID NO: 774625 - RNA, 17 nt, Artificial Sequence
  Synthetic
uggcugaaaauuuacuu

SEQ ID NO: 774626 - RNA, 17 nt, Artificial Sequence
  Synthetic
cccgugacaauuuacuu

SEQ ID NO: 774627 - RNA, 17 nt, Artificial Sequence
  Synthetic
uauucuccuauuuacuu

SEQ ID NO: 774628 - RNA, 17 nt, Artificial Sequence
  Synthetic
ucuaauuuaguuuacuu

SEQ ID NO: 774629 - RNA, 17 nt, Artificial Sequence
  Synthetic
ucuugugagguuuacuu

SEQ ID NO: 774630 - RNA, 17 nt, Artificial Sequence
  Synthetic
uagcuaaauguuuacuu

SEQ ID NO: 774631 - RNA, 17 nt, Artificial Sequence
  Synthetic
cuuuguucauuuuacuu

SEQ ID NO: 774632 - RNA, 17 nt, Artificial Sequence
  Synthetic
uuccuuaggaaaaccuu

SEQ ID NO: 774633 - RNA, 17 nt, Artificial Sequence
  Synthetic
aauguaguuuaaaccuu

SEQ ID NO: 774634 - RNA, 17 nt, Artificial Sequence
  Synthetic
ucaaucuggccaaccuu

SEQ ID NO: 774635 - RNA, 17 nt, Artificial Sequence
  Synthetic
caaaaaauugcaaccuu

SEQ ID NO: 774636 - RNA, 17 nt, Artificial Sequence
  Synthetic
cuuaauuguucaaccuu

SEQ ID NO: 774637 - RNA, 17 nt, Artificial Sequence
  Synthetic
uauucuccacuaaccuu

SEQ ID NO: 774638 - RNA, 17 nt, Artificial Sequence
  Synthetic
ucacccacucuaaccuu

SEQ ID NO: 774639 - RNA, 17 nt, Artificial Sequence
  Synthetic
cucccacaauuaaccuu

SEQ ID NO: 774640 - RNA, 17 nt, Artificial Sequence
  Synthetic
uggggaguaaacaccuu

SEQ ID NO: 774641 - RNA, 17 nt, Artificial Sequence
  Synthetic
acacacacacacaccuu

SEQ ID NO: 774642 - RNA, 17 nt, Artificial Sequence
  Synthetic
agaagagaagacaccuu

SEQ ID NO: 774643 - RNA, 17 nt, Artificial Sequence
  Synthetic
uucugcccgcccaccuu

SEQ ID NO: 774644 - RNA, 17 nt, Artificial Sequence
  Synthetic
ccucaagaugccaccuu

SEQ ID NO: 774645 - RNA, 17 nt, Artificial Sequence
  Synthetic
uguaauuccagcaccuu

SEQ ID NO: 774646 - RNA, 17 nt, Artificial Sequence
  Synthetic
aaucuguaaaucaccuu

SEQ ID NO: 774647 - RNA, 17 nt, Artificial Sequence
  Synthetic
ccucacacacucaccuu

SEQ ID NO: 774648 - RNA, 17 nt, Artificial Sequence
  Synthetic
uccuauguacucaccuu

SEQ ID NO: 774649 - RNA, 17 nt, Artificial Sequence
  Synthetic
cagaugcuccucaccuu

SEQ ID NO: 774650 - RNA, 17 nt, Artificial Sequence
  Synthetic
aaugggauagucaccuu

SEQ ID NO: 774651 - RNA, 17 nt, Artificial Sequence
  Synthetic
uucuuaauggucaccuu

SEQ ID NO: 774652 - RNA, 17 nt, Artificial Sequence
  Synthetic
acaaaccuuuucaccuu

SEQ ID NO: 774653 - RNA, 17 nt, Artificial Sequence
  Synthetic
aucuaauucaagaccuu

SEQ ID NO: 774654 - RNA, 17 nt, Artificial Sequence
  Synthetic
accaacucuaagaccuu

SEQ ID NO: 774655 - RNA, 17 nt, Artificial Sequence
  Synthetic
uuaaggugggcgaccuu

SEQ ID NO: 774656 - RNA, 17 nt, Artificial Sequence
  Synthetic
aucuguugggcgaccuu

SEQ ID NO: 774657 - RNA, 17 nt, Artificial Sequence
  Synthetic
ugaaauaauaggaccuu

SEQ ID NO: 774658 - RNA, 17 nt, Artificial Sequence
  Synthetic
uccccuggauggaccuu

SEQ ID NO: 774659 - RNA, 17 nt, Artificial Sequence
  Synthetic
acaaugagaaugaccuu

SEQ ID NO: 774660 - RNA, 17 nt, Artificial Sequence
  Synthetic
cuuggcaguaugaccuu

SEQ ID NO: 774661 - RNA, 17 nt, Artificial Sequence
  Synthetic
agacaguuccugaccuu

SEQ ID NO: 774662 - RNA, 17 nt, Artificial Sequence
  Synthetic
uuuagcuuggugaccuu

SEQ ID NO: 774663 - RNA, 17 nt, Artificial Sequence
  Synthetic
uauuauuaaaauaccuu

SEQ ID NO: 774664 - RNA, 17 nt, Artificial Sequence
  Synthetic
aagaauucaaauaccuu

SEQ ID NO: 774665 - RNA, 17 nt, Artificial Sequence
  Synthetic
uucacccuguauaccuu

SEQ ID NO: 774666 - RNA, 17 nt, Artificial Sequence
  Synthetic
aaauauauaacuaccuu

SEQ ID NO: 774667 - RNA, 17 nt, Artificial Sequence
  Synthetic
uucucuuguccuaccuu

SEQ ID NO: 774668 - RNA, 17 nt, Artificial Sequence
  Synthetic
caauaaacagcuaccuu

SEQ ID NO: 774669 - RNA, 17 nt, Artificial Sequence
  Synthetic
acaauuguagcuaccuu

SEQ ID NO: 774670 - RNA, 17 nt, Artificial Sequence
  Synthetic
acaccauuugcuaccuu

SEQ ID NO: 774671 - RNA, 17 nt, Artificial Sequence
  Synthetic
uauuaacuggguaccuu

SEQ ID NO: 774672 - RNA, 17 nt, Artificial Sequence
  Synthetic
aacucuggcuguaccuu

SEQ ID NO: 774673 - RNA, 17 nt, Artificial Sequence
  Synthetic
aaucuguaaauuaccuu

SEQ ID NO: 774674 - RNA, 17 nt, Artificial Sequence
  Synthetic
ccuguguuuauuaccuu

SEQ ID NO: 774675 - RNA, 17 nt, Artificial Sequence
  Synthetic
auaguguaccuuaccuu

SEQ ID NO: 774676 - RNA, 17 nt, Artificial Sequence
  Synthetic
cauuuucacuuuaccuu

SEQ ID NO: 774677 - RNA, 17 nt, Artificial Sequence
  Synthetic
cuuaucagacaacccuu

SEQ ID NO: 774678 - RNA, 17 nt, Artificial Sequence
  Synthetic
ugguuuuagggacccuu

SEQ ID NO: 774679 - RNA, 17 nt, Artificial Sequence
  Synthetic
cacuauuuuggacccuu

SEQ ID NO: 774680 - RNA, 17 nt, Artificial Sequence
  Synthetic
aguuucacaugacccuu

SEQ ID NO: 774681 - RNA, 17 nt, Artificial Sequence
  Synthetic
auuuauaauugacccuu

SEQ ID NO: 774682 - RNA, 17 nt, Artificial Sequence
  Synthetic
uccuugaagauacccuu

SEQ ID NO: 774683 - RNA, 17 nt, Artificial Sequence
  Synthetic
ucccaccauauacccuu

SEQ ID NO: 774684 - RNA, 17 nt, Artificial Sequence
  Synthetic
auauaguuucuacccuu

SEQ ID NO: 774685 - RNA, 17 nt, Artificial Sequence
  Synthetic
ugaguuucuuuacccuu

SEQ ID NO: 774686 - RNA, 17 nt, Artificial Sequence
  Synthetic
uuuaaguguuuacccuu

SEQ ID NO: 774687 - RNA, 17 nt, Artificial Sequence
  Synthetic
acuuugucuugccccuu

SEQ ID NO: 774688 - RNA, 17 nt, Artificial Sequence
  Synthetic
ucuuuuucacuccccuu

SEQ ID NO: 774689 - RNA, 17 nt, Artificial Sequence
  Synthetic
aaaaaagagcuccccuu

SEQ ID NO: 774690 - RNA, 17 nt, Artificial Sequence
  Synthetic
caccuucuucuccccuu

SEQ ID NO: 774691 - RNA, 17 nt, Artificial Sequence
  Synthetic
acuugcugaguccccuu

SEQ ID NO: 774692 - RNA, 17 nt, Artificial Sequence
  Synthetic
cuggaaagcguccccuu

SEQ ID NO: 774693 - RNA, 17 nt, Artificial Sequence
  Synthetic
ucuagcucauuccccuu

SEQ ID NO: 774694 - RNA, 17 nt, Artificial Sequence
  Synthetic
cugccuagauuccccuu

SEQ ID NO: 774695 - RNA, 17 nt, Artificial Sequence
  Synthetic
cauacuuccuuccccuu

SEQ ID NO: 774696 - RNA, 17 nt, Artificial Sequence
  Synthetic
ugagaauauuuccccuu

SEQ ID NO: 774697 - RNA, 17 nt, Artificial Sequence
  Synthetic
aguacuagacagcccuu

SEQ ID NO: 774698 - RNA, 17 nt, Artificial Sequence
  Synthetic
auauggucccagcccuu

SEQ ID NO: 774699 - RNA, 17 nt, Artificial Sequence
  Synthetic
cugauggaagagcccuu

SEQ ID NO: 774700 - RNA, 17 nt, Artificial Sequence
  Synthetic
aaucagcuugagcccuu

SEQ ID NO: 774701 - RNA, 17 nt, Artificial Sequence
  Synthetic
uugcccaacuagcccuu

SEQ ID NO: 774702 - RNA, 17 nt, Artificial Sequence
  Synthetic
uguuuggauuagcccuu

SEQ ID NO: 774703 - RNA, 17 nt, Artificial Sequence
  Synthetic
agacaggguuagcccuu

SEQ ID NO: 774704 - RNA, 17 nt, Artificial Sequence
  Synthetic
uuguaaauuaggcccuu

SEQ ID NO: 774705 - RNA, 17 nt, Artificial Sequence
  Synthetic
aucuauuuucugcccuu

SEQ ID NO: 774706 - RNA, 17 nt, Artificial Sequence
  Synthetic
auucaguauuugcccuu

SEQ ID NO: 774707 - RNA, 17 nt, Artificial Sequence
  Synthetic
aagaaugggaaucccuu

SEQ ID NO: 774708 - RNA, 17 nt, Artificial Sequence
  Synthetic
cccuccccucaucccuu

SEQ ID NO: 774709 - RNA, 17 nt, Artificial Sequence
  Synthetic
uucaugaaugaucccuu

SEQ ID NO: 774710 - RNA, 17 nt, Artificial Sequence
  Synthetic
cuggagcuuuaucccuu

SEQ ID NO: 774711 - RNA, 17 nt, Artificial Sequence
  Synthetic
caaauuuucacucccuu

SEQ ID NO: 774712 - RNA, 17 nt, Artificial Sequence
  Synthetic
ucugacugggcucccuu

SEQ ID NO: 774713 - RNA, 17 nt, Artificial Sequence
  Synthetic
auauauuuaucucccuu

SEQ ID NO: 774714 - RNA, 17 nt, Artificial Sequence
  Synthetic
cuucccaucucucccuu

SEQ ID NO: 774715 - RNA, 17 nt, Artificial Sequence
  Synthetic
uuuuuuaagucucccuu

SEQ ID NO: 774716 - RNA, 17 nt, Artificial Sequence
  Synthetic
auuuccaaaugucccuu

SEQ ID NO: 774717 - RNA, 17 nt, Artificial Sequence
  Synthetic
uuaauuucuugucccuu

SEQ ID NO: 774718 - RNA, 17 nt, Artificial Sequence
  Synthetic
augacccaucuucccuu

SEQ ID NO: 774719 - RNA, 17 nt, Artificial Sequence
  Synthetic
uacacuuaucuucccuu

SEQ ID NO: 774720 - RNA, 17 nt, Artificial Sequence
  Synthetic
uccccaauucuucccuu

SEQ ID NO: 774721 - RNA, 17 nt, Artificial Sequence
  Synthetic
aggaucuuucuucccuu

SEQ ID NO: 774722 - RNA, 17 nt, Artificial Sequence
  Synthetic
cuccaucuuguucccuu

SEQ ID NO: 774723 - RNA, 17 nt, Artificial Sequence
  Synthetic
cuguccauuuuucccuu

SEQ ID NO: 774724 - RNA, 17 nt, Artificial Sequence
  Synthetic
aacaagggcaaagccuu

SEQ ID NO: 774725 - RNA, 17 nt, Artificial Sequence
  Synthetic
uucaaacuccaagccuu

SEQ ID NO: 774726 - RNA, 17 nt, Artificial Sequence
  Synthetic
uagaaaaggcaagccuu

SEQ ID NO: 774727 - RNA, 17 nt, Artificial Sequence
  Synthetic
ugaguggcagaagccuu

SEQ ID NO: 774728 - RNA, 17 nt, Artificial Sequence
  Synthetic
cauuaaauagaagccuu

SEQ ID NO: 774729 - RNA, 17 nt, Artificial Sequence
  Synthetic
cacacugacuaagccuu

SEQ ID NO: 774730 - RNA, 17 nt, Artificial Sequence
  Synthetic
ugggcucccacagccuu

SEQ ID NO: 774731 - RNA, 17 nt, Artificial Sequence
  Synthetic
acuagcaucacagccuu

SEQ ID NO: 774732 - RNA, 17 nt, Artificial Sequence
  Synthetic
ugauacccuacagccuu

SEQ ID NO: 774733 - RNA, 17 nt, Artificial Sequence
  Synthetic
aaauuguugccagccuu

SEQ ID NO: 774734 - RNA, 17 nt, Artificial Sequence
  Synthetic
ugaggaucaucagccuu

SEQ ID NO: 774735 - RNA, 17 nt, Artificial Sequence
  Synthetic
agcaaaaaaagagccuu

SEQ ID NO: 774736 - RNA, 17 nt, Artificial Sequence
  Synthetic
uuuugaaagagagccuu

SEQ ID NO: 774737 - RNA, 17 nt, Artificial Sequence
  Synthetic
agggcaaagggagccuu

SEQ ID NO: 774738 - RNA, 17 nt, Artificial Sequence
  Synthetic
agacaaauaugagccuu

SEQ ID NO: 774739 - RNA, 17 nt, Artificial Sequence
  Synthetic
uucuacauaauagccuu

SEQ ID NO: 774740 - RNA, 17 nt, Artificial Sequence
  Synthetic
acuaucugauuagccuu

SEQ ID NO: 774741 - RNA, 17 nt, Artificial Sequence
  Synthetic
agcuauucucaggccuu

SEQ ID NO: 774742 - RNA, 17 nt, Artificial Sequence
  Synthetic
aaagucauaagggccuu

SEQ ID NO: 774743 - RNA, 17 nt, Artificial Sequence
  Synthetic
agauuguggagggccuu

SEQ ID NO: 774744 - RNA, 17 nt, Artificial Sequence
  Synthetic
ccauauuuuagggccuu

SEQ ID NO: 774745 - RNA, 17 nt, Artificial Sequence
  Synthetic
uuaggaaguggggccuu

SEQ ID NO: 774746 - RNA, 17 nt, Artificial Sequence
  Synthetic
aagaaaugaugggccuu

SEQ ID NO: 774747 - RNA, 17 nt, Artificial Sequence
  Synthetic
ugggcucccauggccuu

SEQ ID NO: 774748 - RNA, 17 nt, Artificial Sequence
  Synthetic
aauuaacugauggccuu

SEQ ID NO: 774749 - RNA, 17 nt, Artificial Sequence
  Synthetic
ccccucuagcuggccuu

SEQ ID NO: 774750 - RNA, 17 nt, Artificial Sequence
  Synthetic
aucucaucuuuggccuu

SEQ ID NO: 774751 - RNA, 17 nt, Artificial Sequence
  Synthetic
cagauacuaaaugccuu

SEQ ID NO: 774752 - RNA, 17 nt, Artificial Sequence
  Synthetic
aggaauaauaaugccuu

SEQ ID NO: 774753 - RNA, 17 nt, Artificial Sequence
  Synthetic
ucauugcuuaaugccuu

SEQ ID NO: 774754 - RNA, 17 nt, Artificial Sequence
  Synthetic
cuugguucucaugccuu

SEQ ID NO: 774755 - RNA, 17 nt, Artificial Sequence
  Synthetic
uuucaguacuaugccuu

SEQ ID NO: 774756 - RNA, 17 nt, Artificial Sequence
  Synthetic
auuuuugguccugccuu

SEQ ID NO: 774757 - RNA, 17 nt, Artificial Sequence
  Synthetic
acaacuuuaucugccuu

SEQ ID NO: 774758 - RNA, 17 nt, Artificial Sequence
  Synthetic
caguucaugucugccuu

SEQ ID NO: 774759 - RNA, 17 nt, Artificial Sequence
  Synthetic
aucuaagaaagugccuu

SEQ ID NO: 774760 - RNA, 17 nt, Artificial Sequence
  Synthetic
uaggggaagagugccuu

SEQ ID NO: 774761 - RNA, 17 nt, Artificial Sequence
  Synthetic
uaugacuuaugugccuu

SEQ ID NO: 774762 - RNA, 17 nt, Artificial Sequence
  Synthetic
aaguagccuugugccuu

SEQ ID NO: 774763 - RNA, 17 nt, Artificial Sequence
  Synthetic
uuacuaagaauugccuu

SEQ ID NO: 774764 - RNA, 17 nt, Artificial Sequence
  Synthetic
ccuaauaccauugccuu

SEQ ID NO: 774765 - RNA, 17 nt, Artificial Sequence
  Synthetic
aucaauggcauugccuu

SEQ ID NO: 774766 - RNA, 17 nt, Artificial Sequence
  Synthetic
uagcuucguguugccuu

SEQ ID NO: 774767 - RNA, 17 nt, Artificial Sequence
  Synthetic
ccacucagauuugccuu

SEQ ID NO: 774768 - RNA, 17 nt, Artificial Sequence
  Synthetic
cucugacuguuugccuu

SEQ ID NO: 774769 - RNA, 17 nt, Artificial Sequence
  Synthetic
caccuagauuuugccuu

SEQ ID NO: 774770 - RNA, 17 nt, Artificial Sequence
  Synthetic
cagcuucccaaauccuu

SEQ ID NO: 774771 - RNA, 17 nt, Artificial Sequence
  Synthetic
uguguaucuaaauccuu

SEQ ID NO: 774772 - RNA, 17 nt, Artificial Sequence
  Synthetic
caggauuuauaauccuu

SEQ ID NO: 774773 - RNA, 17 nt, Artificial Sequence
  Synthetic
aaugauuuauaauccuu

SEQ ID NO: 774774 - RNA, 17 nt, Artificial Sequence
  Synthetic
caugauuuauaauccuu

SEQ ID NO: 774775 - RNA, 17 nt, Artificial Sequence
  Synthetic
auauuuauuuaauccuu

SEQ ID NO: 774776 - RNA, 17 nt, Artificial Sequence
  Synthetic
auauuccauacauccuu

SEQ ID NO: 774777 - RNA, 17 nt, Artificial Sequence
  Synthetic
aguggugagccauccuu

SEQ ID NO: 774778 - RNA, 17 nt, Artificial Sequence
  Synthetic
acagaucugccauccuu

SEQ ID NO: 774779 - RNA, 17 nt, Artificial Sequence
  Synthetic
caggaaggaucauccuu

SEQ ID NO: 774780 - RNA, 17 nt, Artificial Sequence
  Synthetic
uucauauccucauccuu

SEQ ID NO: 774781 - RNA, 17 nt, Artificial Sequence
  Synthetic
uauggucucucauccuu

SEQ ID NO: 774782 - RNA, 17 nt, Artificial Sequence
  Synthetic
aagugggcuucauccuu

SEQ ID NO: 774783 - RNA, 17 nt, Artificial Sequence
  Synthetic
agauauuaaagauccuu

SEQ ID NO: 774784 - RNA, 17 nt, Artificial Sequence
  Synthetic
aguauucccagauccuu

SEQ ID NO: 774785 - RNA, 17 nt, Artificial Sequence
  Synthetic
auaguuuugggauccuu

SEQ ID NO: 774786 - RNA, 17 nt, Artificial Sequence
  Synthetic
agggauaggugauccuu

SEQ ID NO: 774787 - RNA, 17 nt, Artificial Sequence
  Synthetic
aauuacuuaauauccuu

SEQ ID NO: 774788 - RNA, 17 nt, Artificial Sequence
  Synthetic
aaagacaaucuauccuu

SEQ ID NO: 774789 - RNA, 17 nt, Artificial Sequence
  Synthetic
uucugucuuguauccuu

SEQ ID NO: 774790 - RNA, 17 nt, Artificial Sequence
  Synthetic
uugucugcuuuauccuu

SEQ ID NO: 774791 - RNA, 17 nt, Artificial Sequence
  Synthetic
auuuucccaaacuccuu

SEQ ID NO: 774792 - RNA, 17 nt, Artificial Sequence
  Synthetic
ucccuuucaaacuccuu

SEQ ID NO: 774793 - RNA, 17 nt, Artificial Sequence
  Synthetic
auuuguacgaacuccuu

SEQ ID NO: 774794 - RNA, 17 nt, Artificial Sequence
  Synthetic
aguccuccccacuccuu

SEQ ID NO: 774795 - RNA, 17 nt, Artificial Sequence
  Synthetic
aaauuaauuuacuccuu

SEQ ID NO: 774796 - RNA, 17 nt, Artificial Sequence
  Synthetic
uucucuuuccccuccuu

SEQ ID NO: 774797 - RNA, 17 nt, Artificial Sequence
  Synthetic
uucauaaugcccuccuu

SEQ ID NO: 774798 - RNA, 17 nt, Artificial Sequence
  Synthetic
aguuaaaauggcuccuu

SEQ ID NO: 774799 - RNA, 17 nt, Artificial Sequence
  Synthetic
cauuucccaugcuccuu

SEQ ID NO: 774800 - RNA, 17 nt, Artificial Sequence
  Synthetic
ccucucuuccucuccuu

SEQ ID NO: 774801 - RNA, 17 nt, Artificial Sequence
  Synthetic
ucucucuuccucuccuu

SEQ ID NO: 774802 - RNA, 17 nt, Artificial Sequence
  Synthetic
uauuuucuagucuccuu

SEQ ID NO: 774803 - RNA, 17 nt, Artificial Sequence
  Synthetic
aauucacaggucuccuu

SEQ ID NO: 774804 - RNA, 17 nt, Artificial Sequence
  Synthetic
ucuccaugugucuccuu

SEQ ID NO: 774805 - RNA, 17 nt, Artificial Sequence
  Synthetic
aagaaaagauucuccuu

SEQ ID NO: 774806 - RNA, 17 nt, Artificial Sequence
  Synthetic
ugcauuaaucaguccuu

SEQ ID NO: 774807 - RNA, 17 nt, Artificial Sequence
  Synthetic
cucagugcucaguccuu

SEQ ID NO: 774808 - RNA, 17 nt, Artificial Sequence
  Synthetic
uuuucaguggaguccuu

SEQ ID NO: 774809 - RNA, 17 nt, Artificial Sequence
  Synthetic
acuacaauugaguccuu

SEQ ID NO: 774810 - RNA, 17 nt, Artificial Sequence
  Synthetic
caugauuuauaguccuu

SEQ ID NO: 774811 - RNA, 17 nt, Artificial Sequence
  Synthetic
uacagaacuagguccuu

SEQ ID NO: 774812 - RNA, 17 nt, Artificial Sequence
  Synthetic
uacugcauuugguccuu

SEQ ID NO: 774813 - RNA, 17 nt, Artificial Sequence
  Synthetic
uagcaaaauauguccuu

SEQ ID NO: 774814 - RNA, 17 nt, Artificial Sequence
  Synthetic
aauaauugucuguccuu

SEQ ID NO: 774815 - RNA, 17 nt, Artificial Sequence
  Synthetic
ugcagaggauuguccuu

SEQ ID NO: 774816 - RNA, 17 nt, Artificial Sequence
  Synthetic
aaagcucugaauuccuu

SEQ ID NO: 774817 - RNA, 17 nt, Artificial Sequence
  Synthetic
agcagauuuaauuccuu

SEQ ID NO: 774818 - RNA, 17 nt, Artificial Sequence
  Synthetic
uuucccuuuaauuccuu

SEQ ID NO: 774819 - RNA, 17 nt, Artificial Sequence
  Synthetic
auagaaagauauuccuu

SEQ ID NO: 774820 - RNA, 17 nt, Artificial Sequence
  Synthetic
aaugauuuauauuccuu

SEQ ID NO: 774821 - RNA, 17 nt, Artificial Sequence
  Synthetic
aaugguuuauauuccuu

SEQ ID NO: 774822 - RNA, 17 nt, Artificial Sequence
  Synthetic
uuuuuaaaaacuuccuu

SEQ ID NO: 774823 - RNA, 17 nt, Artificial Sequence
  Synthetic
aguuaaacuacuuccuu

SEQ ID NO: 774824 - RNA, 17 nt, Artificial Sequence
  Synthetic
aaaaaaaccgcuuccuu

SEQ ID NO: 774825 - RNA, 17 nt, Artificial Sequence
  Synthetic
ugagguaaggcuuccuu

SEQ ID NO: 774826 - RNA, 17 nt, Artificial Sequence
  Synthetic
ccugcuuucucuuccuu

SEQ ID NO: 774827 - RNA, 17 nt, Artificial Sequence
  Synthetic
agggggagaaguuccuu

SEQ ID NO: 774828 - RNA, 17 nt, Artificial Sequence
  Synthetic
uuuugucacaguuccuu

SEQ ID NO: 774829 - RNA, 17 nt, Artificial Sequence
  Synthetic
uguuguugcuguuccuu

SEQ ID NO: 774830 - RNA, 17 nt, Artificial Sequence
  Synthetic
aggagaguuuguuccuu

SEQ ID NO: 774831 - RNA, 17 nt, Artificial Sequence
  Synthetic
aaucuauaaauuuccuu

SEQ ID NO: 774832 - RNA, 17 nt, Artificial Sequence
  Synthetic
auuuuauuaauuuccuu

SEQ ID NO: 774833 - RNA, 17 nt, Artificial Sequence
  Synthetic
caacuagucauuuccuu

SEQ ID NO: 774834 - RNA, 17 nt, Artificial Sequence
  Synthetic
ucagucaagauuuccuu

SEQ ID NO: 774835 - RNA, 17 nt, Artificial Sequence
  Synthetic
aagaguauuauuuccuu

SEQ ID NO: 774836 - RNA, 17 nt, Artificial Sequence
  Synthetic
uauuacagacuuuccuu

SEQ ID NO: 774837 - RNA, 17 nt, Artificial Sequence
  Synthetic
uucaugaagcuuuccuu

SEQ ID NO: 774838 - RNA, 17 nt, Artificial Sequence
  Synthetic
ucugaugggcuuuccuu

SEQ ID NO: 774839 - RNA, 17 nt, Artificial Sequence
  Synthetic
uccagccagguuuccuu

SEQ ID NO: 774840 - RNA, 17 nt, Artificial Sequence
  Synthetic
uaaaauauuguuuccuu

SEQ ID NO: 774841 - RNA, 17 nt, Artificial Sequence
  Synthetic
acaagagacuuuuccuu

SEQ ID NO: 774842 - RNA, 17 nt, Artificial Sequence
  Synthetic
caaguauacuuuuccuu

SEQ ID NO: 774843 - RNA, 17 nt, Artificial Sequence
  Synthetic
auuuuagaguuuuccuu

SEQ ID NO: 774844 - RNA, 17 nt, Artificial Sequence
  Synthetic
auuuacauuuuuuccuu

SEQ ID NO: 774845 - RNA, 17 nt, Artificial Sequence
  Synthetic
uuaaguggcaaaagcuu

SEQ ID NO: 774846 - RNA, 17 nt, Artificial Sequence
  Synthetic
ccaguaaagaaaagcuu

SEQ ID NO: 774847 - RNA, 17 nt, Artificial Sequence
  Synthetic
uuaaacaguaaaagcuu

SEQ ID NO: 774848 - RNA, 17 nt, Artificial Sequence
  Synthetic
cagccuggacaaagcuu

SEQ ID NO: 774849 - RNA, 17 nt, Artificial Sequence
  Synthetic
aagaauuagcaaagcuu

SEQ ID NO: 774850 - RNA, 17 nt, Artificial Sequence
  Synthetic
aaggcaaaucaaagcuu

SEQ ID NO: 774851 - RNA, 17 nt, Artificial Sequence
  Synthetic
aaguuauacuaaagcuu

SEQ ID NO: 774852 - RNA, 17 nt, Artificial Sequence
  Synthetic
aguaauaacacaagcuu

SEQ ID NO: 774853 - RNA, 17 nt, Artificial Sequence
  Synthetic
uuugucucuucaagcuu

SEQ ID NO: 774854 - RNA, 17 nt, Artificial Sequence
  Synthetic
caguaacauagaagcuu

SEQ ID NO: 774855 - RNA, 17 nt, Artificial Sequence
  Synthetic
ucuuaagguagaagcuu

SEQ ID NO: 774856 - RNA, 17 nt, Artificial Sequence
  Synthetic
uucuagaaaugaagcuu

SEQ ID NO: 774857 - RNA, 17 nt, Artificial Sequence
  Synthetic
uugaaacucugaagcuu

SEQ ID NO: 774858 - RNA, 17 nt, Artificial Sequence
  Synthetic
aagucaagaguaagcuu

SEQ ID NO: 774859 - RNA, 17 nt, Artificial Sequence
  Synthetic
auaagauuuuuaagcuu

SEQ ID NO: 774860 - RNA, 17 nt, Artificial Sequence
  Synthetic
ucaaggucacacagcuu

SEQ ID NO: 774861 - RNA, 17 nt, Artificial Sequence
  Synthetic
uuuaguaaagacagcuu

SEQ ID NO: 774862 - RNA, 17 nt, Artificial Sequence
  Synthetic
ccauccacggacagcuu

SEQ ID NO: 774863 - RNA, 17 nt, Artificial Sequence
  Synthetic
ugaaaaaauuacagcuu

SEQ ID NO: 774864 - RNA, 17 nt, Artificial Sequence
  Synthetic
ucacugcacaccagcuu

SEQ ID NO: 774865 - RNA, 17 nt, Artificial Sequence
  Synthetic
agcaucuagcccagcuu

SEQ ID NO: 774866 - RNA, 17 nt, Artificial Sequence
  Synthetic
cuuagaugagccagcuu

SEQ ID NO: 774867 - RNA, 17 nt, Artificial Sequence
  Synthetic
ucgcggcacuccagcuu

SEQ ID NO: 774868 - RNA, 17 nt, Artificial Sequence
  Synthetic
ccacugcacuccagcuu

SEQ ID NO: 774869 - RNA, 17 nt, Artificial Sequence
  Synthetic
aagaugucuuccagcuu

SEQ ID NO: 774870 - RNA, 17 nt, Artificial Sequence
  Synthetic
ccacugcacugcagcuu

SEQ ID NO: 774871 - RNA, 17 nt, Artificial Sequence
  Synthetic
caaagcaauaucagcuu

SEQ ID NO: 774872 - RNA, 17 nt, Artificial Sequence
  Synthetic
caaucagaacucagcuu

SEQ ID NO: 774873 - RNA, 17 nt, Artificial Sequence
  Synthetic
auuacauuauucagcuu

SEQ ID NO: 774874 - RNA, 17 nt, Artificial Sequence
  Synthetic
aacauagaguucagcuu

SEQ ID NO: 774875 - RNA, 17 nt, Artificial Sequence
  Synthetic
uuccaaaauuucagcuu

SEQ ID NO: 774876 - RNA, 17 nt, Artificial Sequence
  Synthetic
auuagcuauuucagcuu

SEQ ID NO: 774877 - RNA, 17 nt, Artificial Sequence
  Synthetic
ucaugaauuuucagcuu

SEQ ID NO: 774878 - RNA, 17 nt, Artificial Sequence
  Synthetic
acuggucuuuucagcuu

SEQ ID NO: 774879 - RNA, 17 nt, Artificial Sequence
  Synthetic
agugaagacaagagcuu

SEQ ID NO: 774880 - RNA, 17 nt, Artificial Sequence
  Synthetic
acaucucccaagagcuu

SEQ ID NO: 774881 - RNA, 17 nt, Artificial Sequence
  Synthetic
auuuuagagaagagcuu

SEQ ID NO: 774882 - RNA, 17 nt, Artificial Sequence
  Synthetic
auuucuuggaagagcuu

SEQ ID NO: 774883 - RNA, 17 nt, Artificial Sequence
  Synthetic
cuaaaguguaagagcuu

SEQ ID NO: 774884 - RNA, 17 nt, Artificial Sequence
  Synthetic
cuauagcuacagagcuu

SEQ ID NO: 774885 - RNA, 17 nt, Artificial Sequence
  Synthetic
auauaaaaccagagcuu

SEQ ID NO: 774886 - RNA, 17 nt, Artificial Sequence
  Synthetic
aaaccagaccagagcuu

SEQ ID NO: 774887 - RNA, 17 nt, Artificial Sequence
  Synthetic
agaaaaagagagagcuu

SEQ ID NO: 774888 - RNA, 17 nt, Artificial Sequence
  Synthetic
aauuguauuuagagcuu

SEQ ID NO: 774889 - RNA, 17 nt, Artificial Sequence
  Synthetic
aaagauggaaggagcuu

SEQ ID NO: 774890 - RNA, 17 nt, Artificial Sequence
  Synthetic
cagcuaaacuggagcuu

SEQ ID NO: 774891 - RNA, 17 nt, Artificial Sequence
  Synthetic
auuguuucguggagcuu

SEQ ID NO: 774892 - RNA, 17 nt, Artificial Sequence
  Synthetic
uauguuuucaugagcuu

SEQ ID NO: 774893 - RNA, 17 nt, Artificial Sequence
  Synthetic
agucaagaacugagcuu

SEQ ID NO: 774894 - RNA, 17 nt, Artificial Sequence
  Synthetic
uuauaauacuugagcuu

SEQ ID NO: 774895 - RNA, 17 nt, Artificial Sequence
  Synthetic
agcacagguuugagcuu

SEQ ID NO: 774896 - RNA, 17 nt, Artificial Sequence
  Synthetic
ucacuacuuuugagcuu

SEQ ID NO: 774897 - RNA, 17 nt, Artificial Sequence
  Synthetic
acugguguuuugagcuu

SEQ ID NO: 774898 - RNA, 17 nt, Artificial Sequence
  Synthetic
ugauagcagaauagcuu

SEQ ID NO: 774899 - RNA, 17 nt, Artificial Sequence
  Synthetic
uguagugauaauagcuu

SEQ ID NO: 774900 - RNA, 17 nt, Artificial Sequence
  Synthetic
uuccuaaaacauagcuu

SEQ ID NO: 774901 - RNA, 17 nt, Artificial Sequence
  Synthetic
aaaaaugugacuagcuu

SEQ ID NO: 774902 - RNA, 17 nt, Artificial Sequence
  Synthetic
uucucuucugcuagcuu

SEQ ID NO: 774903 - RNA, 17 nt, Artificial Sequence
  Synthetic
aaagcagacucuagcuu

SEQ ID NO: 774904 - RNA, 17 nt, Artificial Sequence
  Synthetic
uuagcuaauucuagcuu

SEQ ID NO: 774905 - RNA, 17 nt, Artificial Sequence
  Synthetic
uaucuucauucuagcuu

SEQ ID NO: 774906 - RNA, 17 nt, Artificial Sequence
  Synthetic
uaucuuuagaguagcuu

SEQ ID NO: 774907 - RNA, 17 nt, Artificial Sequence
  Synthetic
cuugacugagguagcuu

SEQ ID NO: 774908 - RNA, 17 nt, Artificial Sequence
  Synthetic
augauguuugguagcuu

SEQ ID NO: 774909 - RNA, 17 nt, Artificial Sequence
  Synthetic
auuuauuacuguagcuu

SEQ ID NO: 774910 - RNA, 17 nt, Artificial Sequence
  Synthetic
cugacaaggauuagcuu

SEQ ID NO: 774911 - RNA, 17 nt, Artificial Sequence
  Synthetic
uaccaggcacuuagcuu

SEQ ID NO: 774912 - RNA, 17 nt, Artificial Sequence
  Synthetic
ccauguccucuuagcuu

SEQ ID NO: 774913 - RNA, 17 nt, Artificial Sequence
  Synthetic
uaugaguuauuuagcuu

SEQ ID NO: 774914 - RNA, 17 nt, Artificial Sequence
  Synthetic
aaagaugaguuuagcuu

SEQ ID NO: 774915 - RNA, 17 nt, Artificial Sequence
  Synthetic
aaaaaaaaaaaacgcuu

SEQ ID NO: 774916 - RNA, 17 nt, Artificial Sequence
  Synthetic
agaaacccugaacgcuu

SEQ ID NO: 774917 - RNA, 17 nt, Artificial Sequence
  Synthetic
uucaaucaaauacgcuu

SEQ ID NO: 774918 - RNA, 17 nt, Artificial Sequence
  Synthetic
ucaugauccacccgcuu

SEQ ID NO: 774919 - RNA, 17 nt, Artificial Sequence
  Synthetic
cugcacucccagcgcuu

SEQ ID NO: 774920 - RNA, 17 nt, Artificial Sequence
  Synthetic
cuguaauuccagcgcuu

SEQ ID NO: 774921 - RNA, 17 nt, Artificial Sequence
  Synthetic
cuguaacccuagcgcuu

SEQ ID NO: 774922 - RNA, 17 nt, Artificial Sequence
  Synthetic
auuacugauaaucgcuu

SEQ ID NO: 774923 - RNA, 17 nt, Artificial Sequence
  Synthetic
aaaucugaaaaaggcuu

SEQ ID NO: 774924 - RNA, 17 nt, Artificial Sequence
  Synthetic
aagguuugggaaggcuu

SEQ ID NO: 774925 - RNA, 17 nt, Artificial Sequence
  Synthetic
agcuggacugaaggcuu

SEQ ID NO: 774926 - RNA, 17 nt, Artificial Sequence
  Synthetic
cucagaacuuaaggcuu

SEQ ID NO: 774927 - RNA, 17 nt, Artificial Sequence
  Synthetic
uccuaaauaacaggcuu

SEQ ID NO: 774928 - RNA, 17 nt, Artificial Sequence
  Synthetic
augguuaacagaggcuu

SEQ ID NO: 774929 - RNA, 17 nt, Artificial Sequence
  Synthetic
uccuucuguggaggcuu

SEQ ID NO: 774930 - RNA, 17 nt, Artificial Sequence
  Synthetic
ucugauuuaguaggcuu

SEQ ID NO: 774931 - RNA, 17 nt, Artificial Sequence
  Synthetic
ugcucuggauuaggcuu

SEQ ID NO: 774932 - RNA, 17 nt, Artificial Sequence
  Synthetic
uuacaaugguucggcuu

SEQ ID NO: 774933 - RNA, 17 nt, Artificial Sequence
  Synthetic
acuaccacacagggcuu

SEQ ID NO: 774934 - RNA, 17 nt, Artificial Sequence
  Synthetic
auauagccucagggcuu

SEQ ID NO: 774935 - RNA, 17 nt, Artificial Sequence
  Synthetic
cucagaguucagggcuu

SEQ ID NO: 774936 - RNA, 17 nt, Artificial Sequence
  Synthetic
uugaggcagaggggcuu

SEQ ID NO: 774937 - RNA, 17 nt, Artificial Sequence
  Synthetic
aguucauggaggggcuu

SEQ ID NO: 774938 - RNA, 17 nt, Artificial Sequence
  Synthetic
uaauagugguggggcuu

SEQ ID NO: 774939 - RNA, 17 nt, Artificial Sequence
  Synthetic
uaagauuuuuggggcuu

SEQ ID NO: 774940 - RNA, 17 nt, Artificial Sequence
  Synthetic
aaugauacaaugggcuu

SEQ ID NO: 774941 - RNA, 17 nt, Artificial Sequence
  Synthetic
uuaaaauacaugggcuu

SEQ ID NO: 774942 - RNA, 17 nt, Artificial Sequence
  Synthetic
acuuuuggcaugggcuu

SEQ ID NO: 774943 - RNA, 17 nt, Artificial Sequence
  Synthetic
uuugguucuaugggcuu

SEQ ID NO: 774944 - RNA, 17 nt, Artificial Sequence
  Synthetic
uucugguuucugggcuu

SEQ ID NO: 774945 - RNA, 17 nt, Artificial Sequence
  Synthetic
cuuaagugugugggcuu

SEQ ID NO: 774946 - RNA, 17 nt, Artificial Sequence
  Synthetic
agaaaucagaauggcuu

SEQ ID NO: 774947 - RNA, 17 nt, Artificial Sequence
  Synthetic
ugggcacugaauggcuu

SEQ ID NO: 774948 - RNA, 17 nt, Artificial Sequence
  Synthetic
agauaaaccgauggcuu

SEQ ID NO: 774949 - RNA, 17 nt, Artificial Sequence
  Synthetic
cucauucuggauggcuu

SEQ ID NO: 774950 - RNA, 17 nt, Artificial Sequence
  Synthetic
auacauagugauggcuu

SEQ ID NO: 774951 - RNA, 17 nt, Artificial Sequence
  Synthetic
uccugcgagacuggcuu

SEQ ID NO: 774952 - RNA, 17 nt, Artificial Sequence
  Synthetic
aaacacaggacuggcuu

SEQ ID NO: 774953 - RNA, 17 nt, Artificial Sequence
  Synthetic
agauuuuggacuggcuu

SEQ ID NO: 774954 - RNA, 17 nt, Artificial Sequence
  Synthetic
uuuaucaagccuggcuu

SEQ ID NO: 774955 - RNA, 17 nt, Artificial Sequence
  Synthetic
aucucaucuucuggcuu

SEQ ID NO: 774956 - RNA, 17 nt, Artificial Sequence
  Synthetic
uggcaaaccaguggcuu

SEQ ID NO: 774957 - RNA, 17 nt, Artificial Sequence
  Synthetic
aacugagagaguggcuu

SEQ ID NO: 774958 - RNA, 17 nt, Artificial Sequence
  Synthetic
cccccucuauguggcuu

SEQ ID NO: 774959 - RNA, 17 nt, Artificial Sequence
  Synthetic
cucagucccuguggcuu

SEQ ID NO: 774960 - RNA, 17 nt, Artificial Sequence
  Synthetic
agaacucuguguggcuu

SEQ ID NO: 774961 - RNA, 17 nt, Artificial Sequence
  Synthetic
aagguguuuuguggcuu

SEQ ID NO: 774962 - RNA, 17 nt, Artificial Sequence
  Synthetic
auucuggacauuggcuu

SEQ ID NO: 774963 - RNA, 17 nt, Artificial Sequence
  Synthetic
aaaguauccauuggcuu

SEQ ID NO: 774964 - RNA, 17 nt, Artificial Sequence
  Synthetic
ucugauaucauuggcuu

SEQ ID NO: 774965 - RNA, 17 nt, Artificial Sequence
  Synthetic
uacaugcugauuggcuu

SEQ ID NO: 774966 - RNA, 17 nt, Artificial Sequence
  Synthetic
ugugagaagcuuggcuu

SEQ ID NO: 774967 - RNA, 17 nt, Artificial Sequence
  Synthetic
aguuaagagcuuggcuu

SEQ ID NO: 774968 - RNA, 17 nt, Artificial Sequence
  Synthetic
aauuuuuaaguuggcuu

SEQ ID NO: 774969 - RNA, 17 nt, Artificial Sequence
  Synthetic
auguguacauuuggcuu

SEQ ID NO: 774970 - RNA, 17 nt, Artificial Sequence
  Synthetic
uguaauauauuuggcuu

SEQ ID NO: 774971 - RNA, 17 nt, Artificial Sequence
  Synthetic
aauguuuacuuuggcuu

SEQ ID NO: 774972 - RNA, 17 nt, Artificial Sequence
  Synthetic
ugguacaaguuuggcuu

SEQ ID NO: 774973 - RNA, 17 nt, Artificial Sequence
  Synthetic
cuuuguucuuuuggcuu

SEQ ID NO: 774974 - RNA, 17 nt, Artificial Sequence
  Synthetic
agaacaaaaaaaugcuu

SEQ ID NO: 774975 - RNA, 17 nt, Artificial Sequence
  Synthetic
ccauauccaaaaugcuu

SEQ ID NO: 774976 - RNA, 17 nt, Artificial Sequence
  Synthetic
cagaacuuaaaaugcuu

SEQ ID NO: 774977 - RNA, 17 nt, Artificial Sequence
  Synthetic
uuuaaaccacaaugcuu

SEQ ID NO: 774978 - RNA, 17 nt, Artificial Sequence
  Synthetic
ccuuaaaugcaaugcuu

SEQ ID NO: 774979 - RNA, 17 nt, Artificial Sequence
  Synthetic
aacugaacugaaugcuu

SEQ ID NO: 774980 - RNA, 17 nt, Artificial Sequence
  Synthetic
uacuaaauugaaugcuu

SEQ ID NO: 774981 - RNA, 17 nt, Artificial Sequence
  Synthetic
aacaaugucacaugcuu

SEQ ID NO: 774982 - RNA, 17 nt, Artificial Sequence
  Synthetic
acuuaagauacaugcuu

SEQ ID NO: 774983 - RNA, 17 nt, Artificial Sequence
  Synthetic
aacgggaggccaugcuu

SEQ ID NO: 774984 - RNA, 17 nt, Artificial Sequence
  Synthetic
aauuuaaaagcaugcuu

SEQ ID NO: 774985 - RNA, 17 nt, Artificial Sequence
  Synthetic
cauaaaaauucaugcuu

SEQ ID NO: 774986 - RNA, 17 nt, Artificial Sequence
  Synthetic
uuugaaaauucaugcuu

SEQ ID NO: 774987 - RNA, 17 nt, Artificial Sequence
  Synthetic
uaauaguuaagaugcuu

SEQ ID NO: 774988 - RNA, 17 nt, Artificial Sequence
  Synthetic
ucuaaaaucagaugcuu

SEQ ID NO: 774989 - RNA, 17 nt, Artificial Sequence
  Synthetic
aaaaucugaggaugcuu

SEQ ID NO: 774990 - RNA, 17 nt, Artificial Sequence
  Synthetic
aucagaauaugaugcuu

SEQ ID NO: 774991 - RNA, 17 nt, Artificial Sequence
  Synthetic
aaauaaaguugaugcuu

SEQ ID NO: 774992 - RNA, 17 nt, Artificial Sequence
  Synthetic
uacccucuacuaugcuu

SEQ ID NO: 774993 - RNA, 17 nt, Artificial Sequence
  Synthetic
aggcuuggucuaugcuu

SEQ ID NO: 774994 - RNA, 17 nt, Artificial Sequence
  Synthetic
cagaguggaaacugcuu

SEQ ID NO: 774995 - RNA, 17 nt, Artificial Sequence
  Synthetic
ucccucuuucacugcuu

SEQ ID NO: 774996 - RNA, 17 nt, Artificial Sequence
  Synthetic
auuuucuuucacugcuu

SEQ ID NO: 774997 - RNA, 17 nt, Artificial Sequence
  Synthetic
ucauuuuuuuacugcuu

SEQ ID NO: 774998 - RNA, 17 nt, Artificial Sequence
  Synthetic
accaaguuaaccugcuu

SEQ ID NO: 774999 - RNA, 17 nt, Artificial Sequence
  Synthetic
aggcaauccaccugcuu

SEQ ID NO: 775000 - RNA, 17 nt, Artificial Sequence
  Synthetic
aauggagucuccugcuu

SEQ ID NO: 775001 - RNA, 17 nt, Artificial Sequence
  Synthetic
caagaauauuccugcuu

SEQ ID NO: 775002 - RNA, 17 nt, Artificial Sequence
  Synthetic
ucuaaucccagcugcuu

SEQ ID NO: 775003 - RNA, 17 nt, Artificial Sequence
  Synthetic
uucucuuccagcugcuu

SEQ ID NO: 775004 - RNA, 17 nt, Artificial Sequence
  Synthetic
aaucuaugacgcugcuu

SEQ ID NO: 775005 - RNA, 17 nt, Artificial Sequence
  Synthetic
ugagcgagaggcugcuu

SEQ ID NO: 775006 - RNA, 17 nt, Artificial Sequence
  Synthetic
uaacaaaauggcugcuu

SEQ ID NO: 775007 - RNA, 17 nt, Artificial Sequence
  Synthetic
uaagcuuacaucugcuu

SEQ ID NO: 775008 - RNA, 17 nt, Artificial Sequence
  Synthetic
cuuuuagguaucugcuu

SEQ ID NO: 775009 - RNA, 17 nt, Artificial Sequence
  Synthetic
acuuguuuucucugcuu

SEQ ID NO: 775010 - RNA, 17 nt, Artificial Sequence
  Synthetic
uaauuuaucuucugcuu

SEQ ID NO: 775011 - RNA, 17 nt, Artificial Sequence
  Synthetic
caaaacauuuucugcuu

SEQ ID NO: 775012 - RNA, 17 nt, Artificial Sequence
  Synthetic
uaacuucaaaagugcuu

SEQ ID NO: 775013 - RNA, 17 nt, Artificial Sequence
  Synthetic
uacgaaugaaagugcuu

SEQ ID NO: 775014 - RNA, 17 nt, Artificial Sequence
  Synthetic
uaauauuagaagugcuu

SEQ ID NO: 775015 - RNA, 17 nt, Artificial Sequence
  Synthetic
auguauauacagugcuu

SEQ ID NO: 775016 - RNA, 17 nt, Artificial Sequence
  Synthetic
uuguaaucccagugcuu

SEQ ID NO: 775017 - RNA, 17 nt, Artificial Sequence
  Synthetic
cuggaauuccagugcuu

SEQ ID NO: 775018 - RNA, 17 nt, Artificial Sequence
  Synthetic
uuucuggggcagugcuu

SEQ ID NO: 775019 - RNA, 17 nt, Artificial Sequence
  Synthetic
cugucaucucagugcuu

SEQ ID NO: 775020 - RNA, 17 nt, Artificial Sequence
  Synthetic
cuguaauccuagugcuu

SEQ ID NO: 775021 - RNA, 17 nt, Artificial Sequence
  Synthetic
ccugcguuaacgugcuu

SEQ ID NO: 775022 - RNA, 17 nt, Artificial Sequence
  Synthetic
aucuuaaacaggugcuu

SEQ ID NO: 775023 - RNA, 17 nt, Artificial Sequence
  Synthetic
cuguaauccaggugcuu

SEQ ID NO: 775024 - RNA, 17 nt, Artificial Sequence
  Synthetic
uggagaugauggugcuu

SEQ ID NO: 775025 - RNA, 17 nt, Artificial Sequence
  Synthetic
agagcacacuggugcuu

SEQ ID NO: 775026 - RNA, 17 nt, Artificial Sequence
  Synthetic
ucuaucuucuggugcuu

SEQ ID NO: 775027 - RNA, 17 nt, Artificial Sequence
  Synthetic
uuuuaaaagaugugcuu

SEQ ID NO: 775028 - RNA, 17 nt, Artificial Sequence
  Synthetic
cauauuuauaugugcuu

SEQ ID NO: 775029 - RNA, 17 nt, Artificial Sequence
  Synthetic
cuauuuaguaugugcuu

SEQ ID NO: 775030 - RNA, 17 nt, Artificial Sequence
  Synthetic
uaaugacuacugugcuu

SEQ ID NO: 775031 - RNA, 17 nt, Artificial Sequence
  Synthetic
cuguaaucccugugcuu

SEQ ID NO: 775032 - RNA, 17 nt, Artificial Sequence
  Synthetic
ccaauaucucugugcuu

SEQ ID NO: 775033 - RNA, 17 nt, Artificial Sequence
  Synthetic
augcaucaagugugcuu

SEQ ID NO: 775034 - RNA, 17 nt, Artificial Sequence
  Synthetic
caguuaggguugugcuu

SEQ ID NO: 775035 - RNA, 17 nt, Artificial Sequence
  Synthetic
aaaacaaaacauugcuu

SEQ ID NO: 775036 - RNA, 17 nt, Artificial Sequence
  Synthetic
aggcgggaggauugcuu

SEQ ID NO: 775037 - RNA, 17 nt, Artificial Sequence
  Synthetic
caaagcugauauugcuu

SEQ ID NO: 775038 - RNA, 17 nt, Artificial Sequence
  Synthetic
cagaaugacccuugcuu

SEQ ID NO: 775039 - RNA, 17 nt, Artificial Sequence
  Synthetic
aaaaaauguccuugcuu

SEQ ID NO: 775040 - RNA, 17 nt, Artificial Sequence
  Synthetic
cucacaaaugcuugcuu

SEQ ID NO: 775041 - RNA, 17 nt, Artificial Sequence
  Synthetic
auacagucugcuugcuu

SEQ ID NO: 775042 - RNA, 17 nt, Artificial Sequence
  Synthetic
cuuuguuauucuugcuu

SEQ ID NO: 775043 - RNA, 17 nt, Artificial Sequence
  Synthetic
aggaagcagaguugcuu

SEQ ID NO: 775044 - RNA, 17 nt, Artificial Sequence
  Synthetic
aagcugaaagguugcuu

SEQ ID NO: 775045 - RNA, 17 nt, Artificial Sequence
  Synthetic
uucuuaaaauguugcuu

SEQ ID NO: 775046 - RNA, 17 nt, Artificial Sequence
  Synthetic
uucaugcacuguugcuu

SEQ ID NO: 775047 - RNA, 17 nt, Artificial Sequence
  Synthetic
uggcagagcuguugcuu

SEQ ID NO: 775048 - RNA, 17 nt, Artificial Sequence
  Synthetic
uaugguucuuguugcuu

SEQ ID NO: 775049 - RNA, 17 nt, Artificial Sequence
  Synthetic
ucaauuauaauuugcuu

SEQ ID NO: 775050 - RNA, 17 nt, Artificial Sequence
  Synthetic
cuuauguuaauuugcuu

SEQ ID NO: 775051 - RNA, 17 nt, Artificial Sequence
  Synthetic
uugaaauggauuugcuu

SEQ ID NO: 775052 - RNA, 17 nt, Artificial Sequence
  Synthetic
ugccuugugauuugcuu

SEQ ID NO: 775053 - RNA, 17 nt, Artificial Sequence
  Synthetic
cuugcaucucuuugcuu

SEQ ID NO: 775054 - RNA, 17 nt, Artificial Sequence
  Synthetic
auccauauucuuugcuu

SEQ ID NO: 775055 - RNA, 17 nt, Artificial Sequence
  Synthetic
uggcaggauguuugcuu

SEQ ID NO: 775056 - RNA, 17 nt, Artificial Sequence
  Synthetic
ucugggucuguuugcuu

SEQ ID NO: 775057 - RNA, 17 nt, Artificial Sequence
  Synthetic
uuuccagcauuuugcuu

SEQ ID NO: 775058 - RNA, 17 nt, Artificial Sequence
  Synthetic
cagcuugcauuuugcuu

SEQ ID NO: 775059 - RNA, 17 nt, Artificial Sequence
  Synthetic
cuuuguucuuuuugcuu

SEQ ID NO: 775060 - RNA, 17 nt, Artificial Sequence
  Synthetic
uauaugaguuuuugcuu

SEQ ID NO: 775061 - RNA, 17 nt, Artificial Sequence
  Synthetic
uuuucucuuuuuugcuu

SEQ ID NO: 775062 - RNA, 17 nt, Artificial Sequence
  Synthetic
uuccagguuuuuugcuu

SEQ ID NO: 775063 - RNA, 17 nt, Artificial Sequence
  Synthetic
auaacuggaaaaaucuu

SEQ ID NO: 775064 - RNA, 17 nt, Artificial Sequence
  Synthetic
uccaguaacaaaaucuu

SEQ ID NO: 775065 - RNA, 17 nt, Artificial Sequence
  Synthetic
uauacgucuaaaaucuu

SEQ ID NO: 775066 - RNA, 17 nt, Artificial Sequence
  Synthetic
uggcaucugcaaaucuu

SEQ ID NO: 775067 - RNA, 17 nt, Artificial Sequence
  Synthetic
uuuucgguggaaaucuu

SEQ ID NO: 775068 - RNA, 17 nt, Artificial Sequence
  Synthetic
aaacauacugaaaucuu

SEQ ID NO: 775069 - RNA, 17 nt, Artificial Sequence
  Synthetic
cuaugaugugaaaucuu

SEQ ID NO: 775070 - RNA, 17 nt, Artificial Sequence
  Synthetic
acuuacauauaaaucuu

SEQ ID NO: 775071 - RNA, 17 nt, Artificial Sequence
  Synthetic
ugcugacuguaaaucuu

SEQ ID NO: 775072 - RNA, 17 nt, Artificial Sequence
  Synthetic
uuuaggcauuaaaucuu

SEQ ID NO: 775073 - RNA, 17 nt, Artificial Sequence
  Synthetic
uuucccuagacaaucuu

SEQ ID NO: 775074 - RNA, 17 nt, Artificial Sequence
  Synthetic
cauaugucuacaaucuu

SEQ ID NO: 775075 - RNA, 17 nt, Artificial Sequence
  Synthetic
cuuuuaaaugcaaucuu

SEQ ID NO: 775076 - RNA, 17 nt, Artificial Sequence
  Synthetic
aauuuuuaugcaaucuu

SEQ ID NO: 775077 - RNA, 17 nt, Artificial Sequence
  Synthetic
uacuucuagucaaucuu

SEQ ID NO: 775078 - RNA, 17 nt, Artificial Sequence
  Synthetic
uacagauauucaaucuu

SEQ ID NO: 775079 - RNA, 17 nt, Artificial Sequence
  Synthetic
cauauugaaagaaucuu

SEQ ID NO: 775080 - RNA, 17 nt, Artificial Sequence
  Synthetic
cagacaacuagaaucuu

SEQ ID NO: 775081 - RNA, 17 nt, Artificial Sequence
  Synthetic
aaauuuguauuaaucuu

SEQ ID NO: 775082 - RNA, 17 nt, Artificial Sequence
  Synthetic
ucugauugguuaaucuu

SEQ ID NO: 775083 - RNA, 17 nt, Artificial Sequence
  Synthetic
uaggaaauguuaaucuu

SEQ ID NO: 775084 - RNA, 17 nt, Artificial Sequence
  Synthetic
aaauuugcuuuaaucuu

SEQ ID NO: 775085 - RNA, 17 nt, Artificial Sequence
  Synthetic
agaacuaaaaacaucuu

SEQ ID NO: 775086 - RNA, 17 nt, Artificial Sequence
  Synthetic
aaagugcuaaacaucuu

SEQ ID NO: 775087 - RNA, 17 nt, Artificial Sequence
  Synthetic
cuuuaguuaaacaucuu

SEQ ID NO: 775088 - RNA, 17 nt, Artificial Sequence
  Synthetic
aauuuauggcacaucuu

SEQ ID NO: 775089 - RNA, 17 nt, Artificial Sequence
  Synthetic
uaggauauggacaucuu

SEQ ID NO: 775090 - RNA, 17 nt, Artificial Sequence
  Synthetic
aucaugcuguacaucuu

SEQ ID NO: 775091 - RNA, 17 nt, Artificial Sequence
  Synthetic
auaguccaacccaucuu

SEQ ID NO: 775092 - RNA, 17 nt, Artificial Sequence
  Synthetic
ugcaucucccccaucuu

SEQ ID NO: 775093 - RNA, 17 nt, Artificial Sequence
  Synthetic
caaguauaguccaucuu

SEQ ID NO: 775094 - RNA, 17 nt, Artificial Sequence
  Synthetic
cuguuaaauggcaucuu

SEQ ID NO: 775095 - RNA, 17 nt, Artificial Sequence
  Synthetic
ucuuuuuugaucaucuu

SEQ ID NO: 775096 - RNA, 17 nt, Artificial Sequence
  Synthetic
uuucaguuuaucaucuu

SEQ ID NO: 775097 - RNA, 17 nt, Artificial Sequence
  Synthetic
caaaaccaucucaucuu

SEQ ID NO: 775098 - RNA, 17 nt, Artificial Sequence
  Synthetic
ugggugacagucaucuu

SEQ ID NO: 775099 - RNA, 17 nt, Artificial Sequence
  Synthetic
cacugacccuucaucuu

SEQ ID NO: 775100 - RNA, 17 nt, Artificial Sequence
  Synthetic
uagaacccuuucaucuu

SEQ ID NO: 775101 - RNA, 17 nt, Artificial Sequence
  Synthetic
agugucuuuuucaucuu

SEQ ID NO: 775102 - RNA, 17 nt, Artificial Sequence
  Synthetic
ugauucuagaagaucuu

SEQ ID NO: 775103 - RNA, 17 nt, Artificial Sequence
  Synthetic
cuuuaccauaagaucuu

SEQ ID NO: 775104 - RNA, 17 nt, Artificial Sequence
  Synthetic
uaacuucuaaggaucuu

SEQ ID NO: 775105 - RNA, 17 nt, Artificial Sequence
  Synthetic
uaauuuuauaggaucuu

SEQ ID NO: 775106 - RNA, 17 nt, Artificial Sequence
  Synthetic
aagccaaaggggaucuu

SEQ ID NO: 775107 - RNA, 17 nt, Artificial Sequence
  Synthetic
uuuggugucuggaucuu

SEQ ID NO: 775108 - RNA, 17 nt, Artificial Sequence
  Synthetic
acacauguaaugaucuu

SEQ ID NO: 775109 - RNA, 17 nt, Artificial Sequence
  Synthetic
ucauucugcaugaucuu

SEQ ID NO: 775110 - RNA, 17 nt, Artificial Sequence
  Synthetic
uuguaagagaugaucuu

SEQ ID NO: 775111 - RNA, 17 nt, Artificial Sequence
  Synthetic
ucucuaucccugaucuu

SEQ ID NO: 775112 - RNA, 17 nt, Artificial Sequence
  Synthetic
cacuauuuccugaucuu

SEQ ID NO: 775113 - RNA, 17 nt, Artificial Sequence
  Synthetic
cccaaagagcugaucuu

SEQ ID NO: 775114 - RNA, 17 nt, Artificial Sequence
  Synthetic
uugcuuuuggugaucuu

SEQ ID NO: 775115 - RNA, 17 nt, Artificial Sequence
  Synthetic
agugacuguuugaucuu

SEQ ID NO: 775116 - RNA, 17 nt, Artificial Sequence
  Synthetic
ucuuaucuagauaucuu

SEQ ID NO: 775117 - RNA, 17 nt, Artificial Sequence
  Synthetic
uggcuucacacuaucuu

SEQ ID NO: 775118 - RNA, 17 nt, Artificial Sequence
  Synthetic
uuuacuguaccuaucuu

SEQ ID NO: 775119 - RNA, 17 nt, Artificial Sequence
  Synthetic
ucuuaugccccuaucuu

SEQ ID NO: 775120 - RNA, 17 nt, Artificial Sequence
  Synthetic
uauauucacaguaucuu

SEQ ID NO: 775121 - RNA, 17 nt, Artificial Sequence
  Synthetic
aggccuugcaguaucuu

SEQ ID NO: 775122 - RNA, 17 nt, Artificial Sequence
  Synthetic
uuuuguaaggguaucuu

SEQ ID NO: 775123 - RNA, 17 nt, Artificial Sequence
  Synthetic
auauucugaauuaucuu

SEQ ID NO: 775124 - RNA, 17 nt, Artificial Sequence
  Synthetic
agcucacccauuaucuu

SEQ ID NO: 775125 - RNA, 17 nt, Artificial Sequence
  Synthetic
aaauauuagcuuaucuu

SEQ ID NO: 775126 - RNA, 17 nt, Artificial Sequence
  Synthetic
aaaagagugcuuaucuu

SEQ ID NO: 775127 - RNA, 17 nt, Artificial Sequence
  Synthetic
ccuaaucaucuuaucuu

SEQ ID NO: 775128 - RNA, 17 nt, Artificial Sequence
  Synthetic
uaccuaauauuuaucuu

SEQ ID NO: 775129 - RNA, 17 nt, Artificial Sequence
  Synthetic
aagcugugguuuaucuu

SEQ ID NO: 775130 - RNA, 17 nt, Artificial Sequence
  Synthetic
caaaacuguuuuaucuu

SEQ ID NO: 775131 - RNA, 17 nt, Artificial Sequence
  Synthetic
uuucuugagaaacucuu

SEQ ID NO: 775132 - RNA, 17 nt, Artificial Sequence
  Synthetic
aacugaacugaacucuu

SEQ ID NO: 775133 - RNA, 17 nt, Artificial Sequence
  Synthetic
auuuuucuuuaacucuu

SEQ ID NO: 775134 - RNA, 17 nt, Artificial Sequence
  Synthetic
uaaguaucuccacucuu

SEQ ID NO: 775135 - RNA, 17 nt, Artificial Sequence
  Synthetic
auguucauuccacucuu

SEQ ID NO: 775136 - RNA, 17 nt, Artificial Sequence
  Synthetic
cgcauguucucacucuu

SEQ ID NO: 775137 - RNA, 17 nt, Artificial Sequence
  Synthetic
cugcagggucuacucuu

SEQ ID NO: 775138 - RNA, 17 nt, Artificial Sequence
  Synthetic
accuccauucuacucuu

SEQ ID NO: 775139 - RNA, 17 nt, Artificial Sequence
  Synthetic
uaucucucaguacucuu

SEQ ID NO: 775140 - RNA, 17 nt, Artificial Sequence
  Synthetic
agaaaauuaguacucuu

SEQ ID NO: 775141 - RNA, 17 nt, Artificial Sequence
  Synthetic
ucuggcuaguuacucuu

SEQ ID NO: 775142 - RNA, 17 nt, Artificial Sequence
  Synthetic
uaaaucaagaaccucuu

SEQ ID NO: 775143 - RNA, 17 nt, Artificial Sequence
  Synthetic
agcaaagugaaccucuu

SEQ ID NO: 775144 - RNA, 17 nt, Artificial Sequence
  Synthetic
caucucauucaccucuu

SEQ ID NO: 775145 - RNA, 17 nt, Artificial Sequence
  Synthetic
agacccccagaccucuu

SEQ ID NO: 775146 - RNA, 17 nt, Artificial Sequence
  Synthetic
aauaaaaucuaccucuu

SEQ ID NO: 775147 - RNA, 17 nt, Artificial Sequence
  Synthetic
uuaaacuuguaccucuu

SEQ ID NO: 775148 - RNA, 17 nt, Artificial Sequence
  Synthetic
acaucaggcccccucuu

SEQ ID NO: 775149 - RNA, 17 nt, Artificial Sequence
  Synthetic
uuuuucacuccccucuu

SEQ ID NO: 775150 - RNA, 17 nt, Artificial Sequence
  Synthetic
aaucaauuugcccucuu

SEQ ID NO: 775151 - RNA, 17 nt, Artificial Sequence
  Synthetic
uucugcaucagccucuu

SEQ ID NO: 775152 - RNA, 17 nt, Artificial Sequence
  Synthetic
aaauucaucagccucuu

SEQ ID NO: 775153 - RNA, 17 nt, Artificial Sequence
  Synthetic
uguaaucucagccucuu

SEQ ID NO: 775154 - RNA, 17 nt, Artificial Sequence
  Synthetic
cccugcaagggccucuu

SEQ ID NO: 775155 - RNA, 17 nt, Artificial Sequence
  Synthetic
ugccaccucugccucuu

SEQ ID NO: 775156 - RNA, 17 nt, Artificial Sequence
  Synthetic
cauauugucuuccucuu

SEQ ID NO: 775157 - RNA, 17 nt, Artificial Sequence
  Synthetic
agcucucuuuuccucuu

SEQ ID NO: 775158 - RNA, 17 nt, Artificial Sequence
  Synthetic
ugaaaaguuuuccucuu

SEQ ID NO: 775159 - RNA, 17 nt, Artificial Sequence
  Synthetic
auugucccaaagcucuu

SEQ ID NO: 775160 - RNA, 17 nt, Artificial Sequence
  Synthetic
cuguaaucccagcucuu

SEQ ID NO: 775161 - RNA, 17 nt, Artificial Sequence
  Synthetic
uccuaagaucagcucuu

SEQ ID NO: 775162 - RNA, 17 nt, Artificial Sequence
  Synthetic
uccguaacugagcucuu

SEQ ID NO: 775163 - RNA, 17 nt, Artificial Sequence
  Synthetic
aucuaaaaauagcucuu

SEQ ID NO: 775164 - RNA, 17 nt, Artificial Sequence
  Synthetic
ugucauaauaggcucuu

SEQ ID NO: 775165 - RNA, 17 nt, Artificial Sequence
  Synthetic
uauuccucagggcucuu

SEQ ID NO: 775166 - RNA, 17 nt, Artificial Sequence
  Synthetic
uuccuucuagggcucuu

SEQ ID NO: 775167 - RNA, 17 nt, Artificial Sequence
  Synthetic
uuguaaauauggcucuu

SEQ ID NO: 775168 - RNA, 17 nt, Artificial Sequence
  Synthetic
caguguuaucugcucuu

SEQ ID NO: 775169 - RNA, 17 nt, Artificial Sequence
  Synthetic
uuaggauaauugcucuu

SEQ ID NO: 775170 - RNA, 17 nt, Artificial Sequence
  Synthetic
aagccagccaaucucuu

SEQ ID NO: 775171 - RNA, 17 nt, Artificial Sequence
  Synthetic
aagccucaacaucucuu

SEQ ID NO: 775172 - RNA, 17 nt, Artificial Sequence
  Synthetic
accucauuacaucucuu

SEQ ID NO: 775173 - RNA, 17 nt, Artificial Sequence
  Synthetic
ugaccaacccaucucuu

SEQ ID NO: 775174 - RNA, 17 nt, Artificial Sequence
  Synthetic
uagaagauucaucucuu

SEQ ID NO: 775175 - RNA, 17 nt, Artificial Sequence
  Synthetic
aggugacaugaucucuu

SEQ ID NO: 775176 - RNA, 17 nt, Artificial Sequence
  Synthetic
ccacuccucacucucuu

SEQ ID NO: 775177 - RNA, 17 nt, Artificial Sequence
  Synthetic
ucccaugacccucucuu

SEQ ID NO: 775178 - RNA, 17 nt, Artificial Sequence
  Synthetic
ugugaucugccucucuu

SEQ ID NO: 775179 - RNA, 17 nt, Artificial Sequence
  Synthetic
auucuuauuccucucuu

SEQ ID NO: 775180 - RNA, 17 nt, Artificial Sequence
  Synthetic
cccacaacaucucucuu

SEQ ID NO: 775181 - RNA, 17 nt, Artificial Sequence
  Synthetic
uuauuuugcucucucuu

SEQ ID NO: 775182 - RNA, 17 nt, Artificial Sequence
  Synthetic
accucuuucucucucuu

SEQ ID NO: 775183 - RNA, 17 nt, Artificial Sequence
  Synthetic
uuugacuggucucucuu

SEQ ID NO: 775184 - RNA, 17 nt, Artificial Sequence
  Synthetic
ucaccuccuucucucuu

SEQ ID NO: 775185 - RNA, 17 nt, Artificial Sequence
  Synthetic
uauauuuaaggucucuu

SEQ ID NO: 775186 - RNA, 17 nt, Artificial Sequence
  Synthetic
cuggaucccauucucuu

SEQ ID NO: 775187 - RNA, 17 nt, Artificial Sequence
  Synthetic
agaagucccauucucuu

SEQ ID NO: 775188 - RNA, 17 nt, Artificial Sequence
  Synthetic
aauaaaaucauucucuu

SEQ ID NO: 775189 - RNA, 17 nt, Artificial Sequence
  Synthetic
aaauguugacuucucuu

SEQ ID NO: 775190 - RNA, 17 nt, Artificial Sequence
  Synthetic
acucugaggcuucucuu

SEQ ID NO: 775191 - RNA, 17 nt, Artificial Sequence
  Synthetic
uuaucaggucuucucuu

SEQ ID NO: 775192 - RNA, 17 nt, Artificial Sequence
  Synthetic
uacgguuuucuucucuu

SEQ ID NO: 775193 - RNA, 17 nt, Artificial Sequence
  Synthetic
acuaaaaaaguucucuu

SEQ ID NO: 775194 - RNA, 17 nt, Artificial Sequence
  Synthetic
uugaauacaguucucuu

SEQ ID NO: 775195 - RNA, 17 nt, Artificial Sequence
  Synthetic
aagagcuaauuucucuu

SEQ ID NO: 775196 - RNA, 17 nt, Artificial Sequence
  Synthetic
acaggccuauuucucuu

SEQ ID NO: 775197 - RNA, 17 nt, Artificial Sequence
  Synthetic
uaacccuacuuucucuu

SEQ ID NO: 775198 - RNA, 17 nt, Artificial Sequence
  Synthetic
uaacucuuguuucucuu

SEQ ID NO: 775199 - RNA, 17 nt, Artificial Sequence
  Synthetic
aaguaguguuuucucuu

SEQ ID NO: 775200 - RNA, 17 nt, Artificial Sequence
  Synthetic
caacacauuuuucucuu

SEQ ID NO: 775201 - RNA, 17 nt, Artificial Sequence
  Synthetic
aagcucuuuaaagucuu

SEQ ID NO: 775202 - RNA, 17 nt, Artificial Sequence
  Synthetic
uuagaaucagaagucuu

SEQ ID NO: 775203 - RNA, 17 nt, Artificial Sequence
  Synthetic
uaagaguaggaagucuu

SEQ ID NO: 775204 - RNA, 17 nt, Artificial Sequence
  Synthetic
aacauaaucuaagucuu

SEQ ID NO: 775205 - RNA, 17 nt, Artificial Sequence
  Synthetic
cuguuuggcacagucuu

SEQ ID NO: 775206 - RNA, 17 nt, Artificial Sequence
  Synthetic
cuucagaagacagucuu

SEQ ID NO: 775207 - RNA, 17 nt, Artificial Sequence
  Synthetic
aaaaggacaccagucuu

SEQ ID NO: 775208 - RNA, 17 nt, Artificial Sequence
  Synthetic
auaaauuacccagucuu

SEQ ID NO: 775209 - RNA, 17 nt, Artificial Sequence
  Synthetic
auauaccaugcagucuu

SEQ ID NO: 775210 - RNA, 17 nt, Artificial Sequence
  Synthetic
cuuaggaaaucagucuu

SEQ ID NO: 775211 - RNA, 17 nt, Artificial Sequence
  Synthetic
auaaauuauucagucuu

SEQ ID NO: 775212 - RNA, 17 nt, Artificial Sequence
  Synthetic
agagaagggagagucuu

SEQ ID NO: 775213 - RNA, 17 nt, Artificial Sequence
  Synthetic
aagugaaugagagucuu

SEQ ID NO: 775214 - RNA, 17 nt, Artificial Sequence
  Synthetic
aggcagcuuagagucuu

SEQ ID NO: 775215 - RNA, 17 nt, Artificial Sequence
  Synthetic
aguagcccuggagucuu

SEQ ID NO: 775216 - RNA, 17 nt, Artificial Sequence
  Synthetic
uccaagccuggagucuu

SEQ ID NO: 775217 - RNA, 17 nt, Artificial Sequence
  Synthetic
acuuggcuuugagucuu

SEQ ID NO: 775218 - RNA, 17 nt, Artificial Sequence
  Synthetic
acuggaguuugagucuu

SEQ ID NO: 775219 - RNA, 17 nt, Artificial Sequence
  Synthetic
ucaaauucaauagucuu

SEQ ID NO: 775220 - RNA, 17 nt, Artificial Sequence
  Synthetic
aauuauuaccuagucuu

SEQ ID NO: 775221 - RNA, 17 nt, Artificial Sequence
  Synthetic
ucccaaccccuagucuu

SEQ ID NO: 775222 - RNA, 17 nt, Artificial Sequence
  Synthetic
ucuacccucuuagucuu

SEQ ID NO: 775223 - RNA, 17 nt, Artificial Sequence
  Synthetic
cuuccugguuuagucuu

SEQ ID NO: 775224 - RNA, 17 nt, Artificial Sequence
  Synthetic
uuaugguuucaggucuu

SEQ ID NO: 775225 - RNA, 17 nt, Artificial Sequence
  Synthetic
ccacuggcggaggucuu

SEQ ID NO: 775226 - RNA, 17 nt, Artificial Sequence
  Synthetic
uucaucuccuaggucuu

SEQ ID NO: 775227 - RNA, 17 nt, Artificial Sequence
  Synthetic
acaauuuucuaggucuu

SEQ ID NO: 775228 - RNA, 17 nt, Artificial Sequence
  Synthetic
uaauaaugguaggucuu

SEQ ID NO: 775229 - RNA, 17 nt, Artificial Sequence
  Synthetic
uuagggaauuaggucuu

SEQ ID NO: 775230 - RNA, 17 nt, Artificial Sequence
  Synthetic
auaaauuacccggucuu

SEQ ID NO: 775231 - RNA, 17 nt, Artificial Sequence
  Synthetic
aacuugucuagggucuu

SEQ ID NO: 775232 - RNA, 17 nt, Artificial Sequence
  Synthetic
auuuuuuaaggggucuu

SEQ ID NO: 775233 - RNA, 17 nt, Artificial Sequence
  Synthetic
uggagccccugggucuu

SEQ ID NO: 775234 - RNA, 17 nt, Artificial Sequence
  Synthetic
auaaauuuucuggucuu

SEQ ID NO: 775235 - RNA, 17 nt, Artificial Sequence
  Synthetic
uuaggguuauuggucuu

SEQ ID NO: 775236 - RNA, 17 nt, Artificial Sequence
  Synthetic
agagaugcaaaugucuu

SEQ ID NO: 775237 - RNA, 17 nt, Artificial Sequence
  Synthetic
aagacaagggaugucuu

SEQ ID NO: 775238 - RNA, 17 nt, Artificial Sequence
  Synthetic
ucaauaggggaugucuu

SEQ ID NO: 775239 - RNA, 17 nt, Artificial Sequence
  Synthetic
uuguuaguugaugucuu

SEQ ID NO: 775240 - RNA, 17 nt, Artificial Sequence
  Synthetic
uuaugugcaacugucuu

SEQ ID NO: 775241 - RNA, 17 nt, Artificial Sequence
  Synthetic
uccaagggaacugucuu

SEQ ID NO: 775242 - RNA, 17 nt, Artificial Sequence
  Synthetic
accccugcuacugucuu

SEQ ID NO: 775243 - RNA, 17 nt, Artificial Sequence
  Synthetic
agggcuaacccugucuu

SEQ ID NO: 775244 - RNA, 17 nt, Artificial Sequence
  Synthetic
acuucaauagcugucuu

SEQ ID NO: 775245 - RNA, 17 nt, Artificial Sequence
  Synthetic
aacuggcuggcugucuu

SEQ ID NO: 775246 - RNA, 17 nt, Artificial Sequence
  Synthetic
aauuccucuggugucuu

SEQ ID NO: 775247 - RNA, 17 nt, Artificial Sequence
  Synthetic
cgauuauuaugugucuu

SEQ ID NO: 775248 - RNA, 17 nt, Artificial Sequence
  Synthetic
auuucuaaaauugucuu

SEQ ID NO: 775249 - RNA, 17 nt, Artificial Sequence
  Synthetic
ccaacaugucuugucuu

SEQ ID NO: 775250 - RNA, 17 nt, Artificial Sequence
  Synthetic
uaaaacaauguugucuu

SEQ ID NO: 775251 - RNA, 17 nt, Artificial Sequence
  Synthetic
uuucuuauuguugucuu

SEQ ID NO: 775252 - RNA, 17 nt, Artificial Sequence
  Synthetic
ucuucguuguuugucuu

SEQ ID NO: 775253 - RNA, 17 nt, Artificial Sequence
  Synthetic
uauuauaauuuugucuu

SEQ ID NO: 775254 - RNA, 17 nt, Artificial Sequence
  Synthetic
caugugguuuuugucuu

SEQ ID NO: 775255 - RNA, 17 nt, Artificial Sequence
  Synthetic
ucugagaagaaauucuu

SEQ ID NO: 775256 - RNA, 17 nt, Artificial Sequence
  Synthetic
ucuauucugaaauucuu

SEQ ID NO: 775257 - RNA, 17 nt, Artificial Sequence
  Synthetic
agguagauuaaauucuu

SEQ ID NO: 775258 - RNA, 17 nt, Artificial Sequence
  Synthetic
ugaggaauacaauucuu

SEQ ID NO: 775259 - RNA, 17 nt, Artificial Sequence
  Synthetic
agaaagaagcaauucuu

SEQ ID NO: 775260 - RNA, 17 nt, Artificial Sequence
  Synthetic
acuaugaaagaauucuu

SEQ ID NO: 775261 - RNA, 17 nt, Artificial Sequence
  Synthetic
uuggagauugaauucuu

SEQ ID NO: 775262 - RNA, 17 nt, Artificial Sequence
  Synthetic
uuuguuuaauaauucuu

SEQ ID NO: 775263 - RNA, 17 nt, Artificial Sequence
  Synthetic
uuuauuugcuaauucuu

SEQ ID NO: 775264 - RNA, 17 nt, Artificial Sequence
  Synthetic
augaacuucuaauucuu

SEQ ID NO: 775265 - RNA, 17 nt, Artificial Sequence
  Synthetic
uucugguuuuaauucuu

SEQ ID NO: 775266 - RNA, 17 nt, Artificial Sequence
  Synthetic
cucauacuaacauucuu

SEQ ID NO: 775267 - RNA, 17 nt, Artificial Sequence
  Synthetic
cuacuucccccauucuu

SEQ ID NO: 775268 - RNA, 17 nt, Artificial Sequence
  Synthetic
uaucucugcucauucuu

SEQ ID NO: 775269 - RNA, 17 nt, Artificial Sequence
  Synthetic
aagcaucucucauucuu

SEQ ID NO: 775270 - RNA, 17 nt, Artificial Sequence
  Synthetic
aacauuaauucauucuu

SEQ ID NO: 775271 - RNA, 17 nt, Artificial Sequence
  Synthetic
acauaagaaagauucuu

SEQ ID NO: 775272 - RNA, 17 nt, Artificial Sequence
  Synthetic
uuauccuggagauucuu

SEQ ID NO: 775273 - RNA, 17 nt, Artificial Sequence
  Synthetic
cacuacaaaggauucuu

SEQ ID NO: 775274 - RNA, 17 nt, Artificial Sequence
  Synthetic
cuuggcaauggauucuu

SEQ ID NO: 775275 - RNA, 17 nt, Artificial Sequence
  Synthetic
augcccucuggauucuu

SEQ ID NO: 775276 - RNA, 17 nt, Artificial Sequence
  Synthetic
ccauuuuacugauucuu

SEQ ID NO: 775277 - RNA, 17 nt, Artificial Sequence
  Synthetic
acuuuucccugauucuu

SEQ ID NO: 775278 - RNA, 17 nt, Artificial Sequence
  Synthetic
ccucauuucugauucuu

SEQ ID NO: 775279 - RNA, 17 nt, Artificial Sequence
  Synthetic
accugcguuauauucuu

SEQ ID NO: 775280 - RNA, 17 nt, Artificial Sequence
  Synthetic
aaggaaggucuauucuu

SEQ ID NO: 775281 - RNA, 17 nt, Artificial Sequence
  Synthetic
aguagauaaguauucuu

SEQ ID NO: 775282 - RNA, 17 nt, Artificial Sequence
  Synthetic
auggaaccuguauucuu

SEQ ID NO: 775283 - RNA, 17 nt, Artificial Sequence
  Synthetic
uuaauaucuguauucuu

SEQ ID NO: 775284 - RNA, 17 nt, Artificial Sequence
  Synthetic
uaauugcaauuauucuu

SEQ ID NO: 775285 - RNA, 17 nt, Artificial Sequence
  Synthetic
aaugaaguguuauucuu

SEQ ID NO: 775286 - RNA, 17 nt, Artificial Sequence
  Synthetic
acugguauaaacuucuu

SEQ ID NO: 775287 - RNA, 17 nt, Artificial Sequence
  Synthetic
aguacaaggaacuucuu

SEQ ID NO: 775288 - RNA, 17 nt, Artificial Sequence
  Synthetic
ugucuccugaacuucuu

SEQ ID NO: 775289 - RNA, 17 nt, Artificial Sequence
  Synthetic
ucaaagccuaacuucuu

SEQ ID NO: 775290 - RNA, 17 nt, Artificial Sequence
  Synthetic
cuugccagccacuucuu

SEQ ID NO: 775291 - RNA, 17 nt, Artificial Sequence
  Synthetic
cauguaugagacuucuu

SEQ ID NO: 775292 - RNA, 17 nt, Artificial Sequence
  Synthetic
uaugccuuggacuucuu

SEQ ID NO: 775293 - RNA, 17 nt, Artificial Sequence
  Synthetic
auacugacauacuucuu

SEQ ID NO: 775294 - RNA, 17 nt, Artificial Sequence
  Synthetic
cuuauuccauacuucuu

SEQ ID NO: 775295 - RNA, 17 nt, Artificial Sequence
  Synthetic
uaauuuucucccuucuu

SEQ ID NO: 775296 - RNA, 17 nt, Artificial Sequence
  Synthetic
ugaauaucagccuucuu

SEQ ID NO: 775297 - RNA, 17 nt, Artificial Sequence
  Synthetic
cuuguuuccuccuucuu

SEQ ID NO: 775298 - RNA, 17 nt, Artificial Sequence
  Synthetic
agauaucauuccuucuu

SEQ ID NO: 775299 - RNA, 17 nt, Artificial Sequence
  Synthetic
aggaacgcuuccuucuu

SEQ ID NO: 775300 - RNA, 17 nt, Artificial Sequence
  Synthetic
uuguuuaacugcuucuu

SEQ ID NO: 775301 - RNA, 17 nt, Artificial Sequence
  Synthetic
cauuucuauaucuucuu

SEQ ID NO: 775302 - RNA, 17 nt, Artificial Sequence
  Synthetic
cuuugucaacucuucuu

SEQ ID NO: 775303 - RNA, 17 nt, Artificial Sequence
  Synthetic
cuuuuuacacucuucuu

SEQ ID NO: 775304 - RNA, 17 nt, Artificial Sequence
  Synthetic
cauuuuaaugucuucuu

SEQ ID NO: 775305 - RNA, 17 nt, Artificial Sequence
  Synthetic
cauuucuaugucuucuu

SEQ ID NO: 775306 - RNA, 17 nt, Artificial Sequence
  Synthetic
aauguauucuucuucuu

SEQ ID NO: 775307 - RNA, 17 nt, Artificial Sequence
  Synthetic
acauaauuguucuucuu

SEQ ID NO: 775308 - RNA, 17 nt, Artificial Sequence
  Synthetic
auaccggauuucuucuu

SEQ ID NO: 775309 - RNA, 17 nt, Artificial Sequence
  Synthetic
ugcacauuuuucuucuu

SEQ ID NO: 775310 - RNA, 17 nt, Artificial Sequence
  Synthetic
augacauuuuucuucuu

SEQ ID NO: 775311 - RNA, 17 nt, Artificial Sequence
  Synthetic
aauagguguaaguucuu

SEQ ID NO: 775312 - RNA, 17 nt, Artificial Sequence
  Synthetic
auuucccaccaguucuu

SEQ ID NO: 775313 - RNA, 17 nt, Artificial Sequence
  Synthetic
ucacugucucaguucuu

SEQ ID NO: 775314 - RNA, 17 nt, Artificial Sequence
  Synthetic
uucacgauucaguucuu

SEQ ID NO: 775315 - RNA, 17 nt, Artificial Sequence
  Synthetic
cugaaauauacguucuu

SEQ ID NO: 775316 - RNA, 17 nt, Artificial Sequence
  Synthetic
uuuuaaacuugguucuu

SEQ ID NO: 775317 - RNA, 17 nt, Artificial Sequence
  Synthetic
uguucuguucuguucuu

SEQ ID NO: 775318 - RNA, 17 nt, Artificial Sequence
  Synthetic
uauuuaggaguguucuu

SEQ ID NO: 775319 - RNA, 17 nt, Artificial Sequence
  Synthetic
aggccaugaguguucuu

SEQ ID NO: 775320 - RNA, 17 nt, Artificial Sequence
  Synthetic
ccaauccagaauuucuu

SEQ ID NO: 775321 - RNA, 17 nt, Artificial Sequence
  Synthetic
uaauucuggaauuucuu

SEQ ID NO: 775322 - RNA, 17 nt, Artificial Sequence
  Synthetic
ugucuaucucauuucuu

SEQ ID NO: 775323 - RNA, 17 nt, Artificial Sequence
  Synthetic
acaacauaagauuucuu

SEQ ID NO: 775324 - RNA, 17 nt, Artificial Sequence
  Synthetic
uggauaaacacuuucuu

SEQ ID NO: 775325 - RNA, 17 nt, Artificial Sequence
  Synthetic
cuuuaauagacuuucuu

SEQ ID NO: 775326 - RNA, 17 nt, Artificial Sequence
  Synthetic
ugaaaagcaccuuucuu

SEQ ID NO: 775327 - RNA, 17 nt, Artificial Sequence
  Synthetic
aagaaacagccuuucuu

SEQ ID NO: 775328 - RNA, 17 nt, Artificial Sequence
  Synthetic
ugucauccuccuuucuu

SEQ ID NO: 775329 - RNA, 17 nt, Artificial Sequence
  Synthetic
uacugauuuccuuucuu

SEQ ID NO: 775330 - RNA, 17 nt, Artificial Sequence
  Synthetic
uaugugccagcuuucuu

SEQ ID NO: 775331 - RNA, 17 nt, Artificial Sequence
  Synthetic
uacugauuugcuuucuu

SEQ ID NO: 775332 - RNA, 17 nt, Artificial Sequence
  Synthetic
uugaugaauucuuucuu

SEQ ID NO: 775333 - RNA, 17 nt, Artificial Sequence
  Synthetic
ugaaaaaguucuuucuu

SEQ ID NO: 775334 - RNA, 17 nt, Artificial Sequence
  Synthetic
aguucaaauaguuucuu

SEQ ID NO: 775335 - RNA, 17 nt, Artificial Sequence
  Synthetic
aucucaugugguuucuu

SEQ ID NO: 775336 - RNA, 17 nt, Artificial Sequence
  Synthetic
cacugcugugguuucuu

SEQ ID NO: 775337 - RNA, 17 nt, Artificial Sequence
  Synthetic
agagggaaauguuucuu

SEQ ID NO: 775338 - RNA, 17 nt, Artificial Sequence
  Synthetic
aaaguuuucuguuucuu

SEQ ID NO: 775339 - RNA, 17 nt, Artificial Sequence
  Synthetic
aaguuuuguuguuucuu

SEQ ID NO: 775340 - RNA, 17 nt, Artificial Sequence
  Synthetic
ugugauuccauuuucuu

SEQ ID NO: 775341 - RNA, 17 nt, Artificial Sequence
  Synthetic
ugcuacagcauuuucuu

SEQ ID NO: 775342 - RNA, 17 nt, Artificial Sequence
  Synthetic
aaaaguagcauuuucuu

SEQ ID NO: 775343 - RNA, 17 nt, Artificial Sequence
  Synthetic
augggacucauuuucuu

SEQ ID NO: 775344 - RNA, 17 nt, Artificial Sequence
  Synthetic
cagugauucauuuucuu

SEQ ID NO: 775345 - RNA, 17 nt, Artificial Sequence
  Synthetic
cacuuuaggauuuucuu

SEQ ID NO: 775346 - RNA, 17 nt, Artificial Sequence
  Synthetic
acgaaacauauuuucuu

SEQ ID NO: 775347 - RNA, 17 nt, Artificial Sequence
  Synthetic
uguguauauauuuucuu

SEQ ID NO: 775348 - RNA, 17 nt, Artificial Sequence
  Synthetic
aaugacuaacuuuucuu

SEQ ID NO: 775349 - RNA, 17 nt, Artificial Sequence
  Synthetic
uuaggguuacuuuucuu

SEQ ID NO: 775350 - RNA, 17 nt, Artificial Sequence
  Synthetic
auuguucaccuuuucuu

SEQ ID NO: 775351 - RNA, 17 nt, Artificial Sequence
  Synthetic
acugauuuccuuuucuu

SEQ ID NO: 775352 - RNA, 17 nt, Artificial Sequence
  Synthetic
uacaagaggcuuuucuu

SEQ ID NO: 775353 - RNA, 17 nt, Artificial Sequence
  Synthetic
uuucuuugucuuuucuu

SEQ ID NO: 775354 - RNA, 17 nt, Artificial Sequence
  Synthetic
uuuuucuuucuuuucuu

SEQ ID NO: 775355 - RNA, 17 nt, Artificial Sequence
  Synthetic
cucugaagaguuuucuu

SEQ ID NO: 775356 - RNA, 17 nt, Artificial Sequence
  Synthetic
uguguagaauuuuucuu

SEQ ID NO: 775357 - RNA, 17 nt, Artificial Sequence
  Synthetic
uagcaauaauuuuucuu

SEQ ID NO: 775358 - RNA, 17 nt, Artificial Sequence
  Synthetic
aaaaucgucuuuuucuu

SEQ ID NO: 775359 - RNA, 17 nt, Artificial Sequence
  Synthetic
uacuuuuucuuuuucuu

SEQ ID NO: 775360 - RNA, 17 nt, Artificial Sequence
  Synthetic
uuauagcaguuuuucuu

SEQ ID NO: 775361 - RNA, 17 nt, Artificial Sequence
  Synthetic
ucuuuggaaaaaaaguu

SEQ ID NO: 775362 - RNA, 17 nt, Artificial Sequence
  Synthetic
uggaggaggaaaaaguu

SEQ ID NO: 775363 - RNA, 17 nt, Artificial Sequence
  Synthetic
cuuucccugaaaaaguu

SEQ ID NO: 775364 - RNA, 17 nt, Artificial Sequence
  Synthetic
uauuuuaauaaaaaguu

SEQ ID NO: 775365 - RNA, 17 nt, Artificial Sequence
  Synthetic
uacaacuuuaaaaaguu

SEQ ID NO: 775366 - RNA, 17 nt, Artificial Sequence
  Synthetic
uugaggaugcaaaaguu

SEQ ID NO: 775367 - RNA, 17 nt, Artificial Sequence
  Synthetic
cauaaauuucaaaaguu

SEQ ID NO: 775368 - RNA, 17 nt, Artificial Sequence
  Synthetic
ucuuagaaguaaaaguu

SEQ ID NO: 775369 - RNA, 17 nt, Artificial Sequence
  Synthetic
cugaaauguuaaaaguu

SEQ ID NO: 775370 - RNA, 17 nt, Artificial Sequence
  Synthetic
uacaguuucacaaaguu

SEQ ID NO: 775371 - RNA, 17 nt, Artificial Sequence
  Synthetic
cuauuagguacaaaguu

SEQ ID NO: 775372 - RNA, 17 nt, Artificial Sequence
  Synthetic
uuaauuauuacaaaguu

SEQ ID NO: 775373 - RNA, 17 nt, Artificial Sequence
  Synthetic
agcagagcaucaaaguu

SEQ ID NO: 775374 - RNA, 17 nt, Artificial Sequence
  Synthetic
augcuggaaagaaaguu

SEQ ID NO: 775375 - RNA, 17 nt, Artificial Sequence
  Synthetic
aaaugaggaagaaaguu

SEQ ID NO: 775376 - RNA, 17 nt, Artificial Sequence
  Synthetic
uuauccuucagaaaguu

SEQ ID NO: 775377 - RNA, 17 nt, Artificial Sequence
  Synthetic
uauucacagcgaaaguu

SEQ ID NO: 775378 - RNA, 17 nt, Artificial Sequence
  Synthetic
uguaacuggggaaaguu

SEQ ID NO: 775379 - RNA, 17 nt, Artificial Sequence
  Synthetic
auucaacgcauaaaguu

SEQ ID NO: 775380 - RNA, 17 nt, Artificial Sequence
  Synthetic
agauucaaccuaaaguu

SEQ ID NO: 775381 - RNA, 17 nt, Artificial Sequence
  Synthetic
aaaccuacccuaaaguu

SEQ ID NO: 775382 - RNA, 17 nt, Artificial Sequence
  Synthetic
caucaaacauuaaaguu

SEQ ID NO: 775383 - RNA, 17 nt, Artificial Sequence
  Synthetic
aaauguuuuuuaaaguu

SEQ ID NO: 775384 - RNA, 17 nt, Artificial Sequence
  Synthetic
aaaguguuaaacaaguu

SEQ ID NO: 775385 - RNA, 17 nt, Artificial Sequence
  Synthetic
aaucuauagaacaaguu

SEQ ID NO: 775386 - RNA, 17 nt, Artificial Sequence
  Synthetic
acagacuagaacaaguu

SEQ ID NO: 775387 - RNA, 17 nt, Artificial Sequence
  Synthetic
acaccugggaacaaguu

SEQ ID NO: 775388 - RNA, 17 nt, Artificial Sequence
  Synthetic
uaaaaccauaacaaguu

SEQ ID NO: 775389 - RNA, 17 nt, Artificial Sequence
  Synthetic
ucauauaaggacaaguu

SEQ ID NO: 775390 - RNA, 17 nt, Artificial Sequence
  Synthetic
aauaauuauuccaaguu

SEQ ID NO: 775391 - RNA, 17 nt, Artificial Sequence
  Synthetic
uauuuucugagcaaguu

SEQ ID NO: 775392 - RNA, 17 nt, Artificial Sequence
  Synthetic
auauagggaggcaaguu

SEQ ID NO: 775393 - RNA, 17 nt, Artificial Sequence
  Synthetic
uaugauuuaggcaaguu

SEQ ID NO: 775394 - RNA, 17 nt, Artificial Sequence
  Synthetic
ccuuauaugggcaaguu

SEQ ID NO: 775395 - RNA, 17 nt, Artificial Sequence
  Synthetic
cacauugaagucaaguu

SEQ ID NO: 775396 - RNA, 17 nt, Artificial Sequence
  Synthetic
aagaaaaaugucaaguu

SEQ ID NO: 775397 - RNA, 17 nt, Artificial Sequence
  Synthetic
cccaugggcuucaaguu

SEQ ID NO: 775398 - RNA, 17 nt, Artificial Sequence
  Synthetic
agcagugaguucaaguu

SEQ ID NO: 775399 - RNA, 17 nt, Artificial Sequence
  Synthetic
uuugaacccaagaaguu

SEQ ID NO: 775400 - RNA, 17 nt, Artificial Sequence
  Synthetic
uuuuaagucaagaaguu

SEQ ID NO: 775401 - RNA, 17 nt, Artificial Sequence
  Synthetic
aaugaccuacagaaguu

SEQ ID NO: 775402 - RNA, 17 nt, Artificial Sequence
  Synthetic
aacacugcagagaaguu

SEQ ID NO: 775403 - RNA, 17 nt, Artificial Sequence
  Synthetic
aauuacccauagaaguu

SEQ ID NO: 775404 - RNA, 17 nt, Artificial Sequence
  Synthetic
caagauccuuagaaguu

SEQ ID NO: 775405 - RNA, 17 nt, Artificial Sequence
  Synthetic
acuuauuuuuagaaguu

SEQ ID NO: 775406 - RNA, 17 nt, Artificial Sequence
  Synthetic
ucuugcagaacgaaguu

SEQ ID NO: 775407 - RNA, 17 nt, Artificial Sequence
  Synthetic
agaaaaugaaggaaguu

SEQ ID NO: 775408 - RNA, 17 nt, Artificial Sequence
  Synthetic
uaaaacauaaggaaguu

SEQ ID NO: 775409 - RNA, 17 nt, Artificial Sequence
  Synthetic
acugcugacaggaaguu

SEQ ID NO: 775410 - RNA, 17 nt, Artificial Sequence
  Synthetic
uauaguaaugggaaguu

SEQ ID NO: 775411 - RNA, 17 nt, Artificial Sequence
  Synthetic
cuaguaaacuggaaguu

SEQ ID NO: 775412 - RNA, 17 nt, Artificial Sequence
  Synthetic
ugauuauaaaugaaguu

SEQ ID NO: 775413 - RNA, 17 nt, Artificial Sequence
  Synthetic
aauguccuagugaaguu

SEQ ID NO: 775414 - RNA, 17 nt, Artificial Sequence
  Synthetic
auucaagaauugaaguu

SEQ ID NO: 775415 - RNA, 17 nt, Artificial Sequence
  Synthetic
aaggaauucuugaaguu

SEQ ID NO: 775416 - RNA, 17 nt, Artificial Sequence
  Synthetic
aaaaugagaaauaaguu

SEQ ID NO: 775417 - RNA, 17 nt, Artificial Sequence
  Synthetic
cgcuauuuaaauaaguu

SEQ ID NO: 775418 - RNA, 17 nt, Artificial Sequence
  Synthetic
uaacaccagaauaaguu

SEQ ID NO: 775419 - RNA, 17 nt, Artificial Sequence
  Synthetic
uuaggauauaauaaguu

SEQ ID NO: 775420 - RNA, 17 nt, Artificial Sequence
  Synthetic
aaauuuuaccauaaguu

SEQ ID NO: 775421 - RNA, 17 nt, Artificial Sequence
  Synthetic
ccuuggaggcauaaguu

SEQ ID NO: 775422 - RNA, 17 nt, Artificial Sequence
  Synthetic
ugagauacagauaaguu

SEQ ID NO: 775423 - RNA, 17 nt, Artificial Sequence
  Synthetic
caugagaaguauaaguu

SEQ ID NO: 775424 - RNA, 17 nt, Artificial Sequence
  Synthetic
cuuuaggacacuaaguu

SEQ ID NO: 775425 - RNA, 17 nt, Artificial Sequence
  Synthetic
uuagaccuuaguaaguu

SEQ ID NO: 775426 - RNA, 17 nt, Artificial Sequence
  Synthetic
ucaacaaauuguaaguu

SEQ ID NO: 775427 - RNA, 17 nt, Artificial Sequence
  Synthetic
agaacucuuuguaaguu

SEQ ID NO: 775428 - RNA, 17 nt, Artificial Sequence
  Synthetic
ugguaguuuuguaaguu

SEQ ID NO: 775429 - RNA, 17 nt, Artificial Sequence
  Synthetic
agauacaaaauuaaguu

SEQ ID NO: 775430 - RNA, 17 nt, Artificial Sequence
  Synthetic
cuuccuguaauuaaguu

SEQ ID NO: 775431 - RNA, 17 nt, Artificial Sequence
  Synthetic
ucugguaauauuaaguu

SEQ ID NO: 775432 - RNA, 17 nt, Artificial Sequence
  Synthetic
aaaaaaaauguuaaguu

SEQ ID NO: 775433 - RNA, 17 nt, Artificial Sequence
  Synthetic
caacuuugaaaacaguu

SEQ ID NO: 775434 - RNA, 17 nt, Artificial Sequence
  Synthetic
uaccacuacaaacaguu

SEQ ID NO: 775435 - RNA, 17 nt, Artificial Sequence
  Synthetic
ucugagaugaaacaguu

SEQ ID NO: 775436 - RNA, 17 nt, Artificial Sequence
  Synthetic
cagagguugaaacaguu

SEQ ID NO: 775437 - RNA, 17 nt, Artificial Sequence
  Synthetic
aauacaguuaaacaguu

SEQ ID NO: 775438 - RNA, 17 nt, Artificial Sequence
  Synthetic
augcagggacaacaguu

SEQ ID NO: 775439 - RNA, 17 nt, Artificial Sequence
  Synthetic
cacuauagagaacaguu

SEQ ID NO: 775440 - RNA, 17 nt, Artificial Sequence
  Synthetic
cacagguuggaacaguu

SEQ ID NO: 775441 - RNA, 17 nt, Artificial Sequence
  Synthetic
cagggguuggaacaguu

SEQ ID NO: 775442 - RNA, 17 nt, Artificial Sequence
  Synthetic
cauaacuuugaacaguu

SEQ ID NO: 775443 - RNA, 17 nt, Artificial Sequence
  Synthetic
uuaaugaucuaacaguu

SEQ ID NO: 775444 - RNA, 17 nt, Artificial Sequence
  Synthetic
uugccugaaacacaguu

SEQ ID NO: 775445 - RNA, 17 nt, Artificial Sequence
  Synthetic
ccucuguccacacaguu

SEQ ID NO: 775446 - RNA, 17 nt, Artificial Sequence
  Synthetic
uggaauacaccacaguu

SEQ ID NO: 775447 - RNA, 17 nt, Artificial Sequence
  Synthetic
uuccaggcugcacaguu

SEQ ID NO: 775448 - RNA, 17 nt, Artificial Sequence
  Synthetic
ucuaaggucucacaguu

SEQ ID NO: 775449 - RNA, 17 nt, Artificial Sequence
  Synthetic
auucaguuuucacaguu

SEQ ID NO: 775450 - RNA, 17 nt, Artificial Sequence
  Synthetic
aacaaaaagggacaguu

SEQ ID NO: 775451 - RNA, 17 nt, Artificial Sequence
  Synthetic
acuuuuuaaauacaguu

SEQ ID NO: 775452 - RNA, 17 nt, Artificial Sequence
  Synthetic
ucaaucugaauacaguu

SEQ ID NO: 775453 - RNA, 17 nt, Artificial Sequence
  Synthetic
uauucgcacauacaguu

SEQ ID NO: 775454 - RNA, 17 nt, Artificial Sequence
  Synthetic
uacauuagccuacaguu

SEQ ID NO: 775455 - RNA, 17 nt, Artificial Sequence
  Synthetic
uuuaccuuccuacaguu

SEQ ID NO: 775456 - RNA, 17 nt, Artificial Sequence
  Synthetic
caggauucaguacaguu

SEQ ID NO: 775457 - RNA, 17 nt, Artificial Sequence
  Synthetic
cagagucugguacaguu

SEQ ID NO: 775458 - RNA, 17 nt, Artificial Sequence
  Synthetic
caacuaauuaaccaguu

SEQ ID NO: 775459 - RNA, 17 nt, Artificial Sequence
  Synthetic
aacaucacacaccaguu

SEQ ID NO: 775460 - RNA, 17 nt, Artificial Sequence
  Synthetic
uuuuauuacucccaguu

SEQ ID NO: 775461 - RNA, 17 nt, Artificial Sequence
  Synthetic
aagacagccagccaguu

SEQ ID NO: 775462 - RNA, 17 nt, Artificial Sequence
  Synthetic
uaugaaacauuccaguu

SEQ ID NO: 775463 - RNA, 17 nt, Artificial Sequence
  Synthetic
cacuguagaaagcaguu

SEQ ID NO: 775464 - RNA, 17 nt, Artificial Sequence
  Synthetic
cacuguggaaagcaguu

SEQ ID NO: 775465 - RNA, 17 nt, Artificial Sequence
  Synthetic
cucuccauggagcaguu

SEQ ID NO: 775466 - RNA, 17 nt, Artificial Sequence
  Synthetic
cuaauucccucgcaguu

SEQ ID NO: 775467 - RNA, 17 nt, Artificial Sequence
  Synthetic
ucuuguggaaggcaguu

SEQ ID NO: 775468 - RNA, 17 nt, Artificial Sequence
  Synthetic
ugugaacucaggcaguu

SEQ ID NO: 775469 - RNA, 17 nt, Artificial Sequence
  Synthetic
uucauggagcugcaguu

SEQ ID NO: 775470 - RNA, 17 nt, Artificial Sequence
  Synthetic
caaaagaaauugcaguu

SEQ ID NO: 775471 - RNA, 17 nt, Artificial Sequence
  Synthetic
auacugcaaaaucaguu

SEQ ID NO: 775472 - RNA, 17 nt, Artificial Sequence
  Synthetic
augcuucauaaucaguu

SEQ ID NO: 775473 - RNA, 17 nt, Artificial Sequence
  Synthetic
uaaaagggagaucaguu

SEQ ID NO: 775474 - RNA, 17 nt, Artificial Sequence
  Synthetic
uucaguugauaucaguu

SEQ ID NO: 775475 - RNA, 17 nt, Artificial Sequence
  Synthetic
uuaugagugucucaguu

SEQ ID NO: 775476 - RNA, 17 nt, Artificial Sequence
  Synthetic
uucugaauuucucaguu

SEQ ID NO: 775477 - RNA, 17 nt, Artificial Sequence
  Synthetic
aguguuguuugucaguu

SEQ ID NO: 775478 - RNA, 17 nt, Artificial Sequence
  Synthetic
cucauacaaauucaguu

SEQ ID NO: 775479 - RNA, 17 nt, Artificial Sequence
  Synthetic
auaaaagguauucaguu

SEQ ID NO: 775480 - RNA, 17 nt, Artificial Sequence
  Synthetic
caaaacuuuauucaguu

SEQ ID NO: 775481 - RNA, 17 nt, Artificial Sequence
  Synthetic
ucacucauucuucaguu

SEQ ID NO: 775482 - RNA, 17 nt, Artificial Sequence
  Synthetic
aguaggggauuucaguu

SEQ ID NO: 775483 - RNA, 17 nt, Artificial Sequence
  Synthetic
uugucauuauuucaguu

SEQ ID NO: 775484 - RNA, 17 nt, Artificial Sequence
  Synthetic
uugaaugacuuucaguu

SEQ ID NO: 775485 - RNA, 17 nt, Artificial Sequence
  Synthetic
agagaaguguuucaguu

SEQ ID NO: 775486 - RNA, 17 nt, Artificial Sequence
  Synthetic
uuaauguuguuucaguu

SEQ ID NO: 775487 - RNA, 17 nt, Artificial Sequence
  Synthetic
cuucauccuuuucaguu

SEQ ID NO: 775488 - RNA, 17 nt, Artificial Sequence
  Synthetic
uauaaaaucaaagaguu

SEQ ID NO: 775489 - RNA, 17 nt, Artificial Sequence
  Synthetic
agccauaauaaagaguu

SEQ ID NO: 775490 - RNA, 17 nt, Artificial Sequence
  Synthetic
aauuggaugcaagaguu

SEQ ID NO: 775491 - RNA, 17 nt, Artificial Sequence
  Synthetic
cuacuuuuucaagaguu

SEQ ID NO: 775492 - RNA, 17 nt, Artificial Sequence
  Synthetic
cuuuuaugagaagaguu

SEQ ID NO: 775493 - RNA, 17 nt, Artificial Sequence
  Synthetic
ugucaugaauaagaguu

SEQ ID NO: 775494 - RNA, 17 nt, Artificial Sequence
  Synthetic
uucacaguguaagaguu

SEQ ID NO: 775495 - RNA, 17 nt, Artificial Sequence
  Synthetic
ucuuggaacacagaguu

SEQ ID NO: 775496 - RNA, 17 nt, Artificial Sequence
  Synthetic
ccauccagcccagaguu

SEQ ID NO: 775497 - RNA, 17 nt, Artificial Sequence
  Synthetic
uacauuuuagcagaguu

SEQ ID NO: 775498 - RNA, 17 nt, Artificial Sequence
  Synthetic
ccuguccccucagaguu

SEQ ID NO: 775499 - RNA, 17 nt, Artificial Sequence
  Synthetic
caaguuuauucagaguu

SEQ ID NO: 775500 - RNA, 17 nt, Artificial Sequence
  Synthetic
aacaugugcagagaguu

SEQ ID NO: 775501 - RNA, 17 nt, Artificial Sequence
  Synthetic
cuucuaggaggagaguu

SEQ ID NO: 775502 - RNA, 17 nt, Artificial Sequence
  Synthetic
cugugugggugagaguu

SEQ ID NO: 775503 - RNA, 17 nt, Artificial Sequence
  Synthetic
augauagucauagaguu

SEQ ID NO: 775504 - RNA, 17 nt, Artificial Sequence
  Synthetic
uuaagauaacuagaguu

SEQ ID NO: 775505 - RNA, 17 nt, Artificial Sequence
  Synthetic
uugugaggucuagaguu

SEQ ID NO: 775506 - RNA, 17 nt, Artificial Sequence
  Synthetic
uucucccgcaaggaguu

SEQ ID NO: 775507 - RNA, 17 nt, Artificial Sequence
  Synthetic
aaaaaauggaaggaguu

SEQ ID NO: 775508 - RNA, 17 nt, Artificial Sequence
  Synthetic
acugccccuaaggaguu

SEQ ID NO: 775509 - RNA, 17 nt, Artificial Sequence
  Synthetic
auaagaucgcaggaguu

SEQ ID NO: 775510 - RNA, 17 nt, Artificial Sequence
  Synthetic
caacauuaucaggaguu

SEQ ID NO: 775511 - RNA, 17 nt, Artificial Sequence
  Synthetic
ugcagagcagaggaguu

SEQ ID NO: 775512 - RNA, 17 nt, Artificial Sequence
  Synthetic
aaaucaacauaggaguu

SEQ ID NO: 775513 - RNA, 17 nt, Artificial Sequence
  Synthetic
cugggaaaguaggaguu

SEQ ID NO: 775514 - RNA, 17 nt, Artificial Sequence
  Synthetic
agaggcaaaugggaguu

SEQ ID NO: 775515 - RNA, 17 nt, Artificial Sequence
  Synthetic
ugcaugucaugggaguu

SEQ ID NO: 775516 - RNA, 17 nt, Artificial Sequence
  Synthetic
aagaguugaugggaguu

SEQ ID NO: 775517 - RNA, 17 nt, Artificial Sequence
  Synthetic
auaggugggugggaguu

SEQ ID NO: 775518 - RNA, 17 nt, Artificial Sequence
  Synthetic
ucugcuuggugggaguu

SEQ ID NO: 775519 - RNA, 17 nt, Artificial Sequence
  Synthetic
aaauaacaacuggaguu

SEQ ID NO: 775520 - RNA, 17 nt, Artificial Sequence
  Synthetic
uuuguuagacuggaguu

SEQ ID NO: 775521 - RNA, 17 nt, Artificial Sequence
  Synthetic
aagccuguauuggaguu

SEQ ID NO: 775522 - RNA, 17 nt, Artificial Sequence
  Synthetic
aaagauuucuuggaguu

SEQ ID NO: 775523 - RNA, 17 nt, Artificial Sequence
  Synthetic
acccuucagaaugaguu

SEQ ID NO: 775524 - RNA, 17 nt, Artificial Sequence
  Synthetic
ugaucuuugaaugaguu

SEQ ID NO: 775525 - RNA, 17 nt, Artificial Sequence
  Synthetic
uuauuagcccaugaguu

SEQ ID NO: 775526 - RNA, 17 nt, Artificial Sequence
  Synthetic
auagaacuugaugaguu

SEQ ID NO: 775527 - RNA, 17 nt, Artificial Sequence
  Synthetic
caacaaagcuaugaguu

SEQ ID NO: 775528 - RNA, 17 nt, Artificial Sequence
  Synthetic
cugaauuuguaugaguu

SEQ ID NO: 775529 - RNA, 17 nt, Artificial Sequence
  Synthetic
cucuggaaaacugaguu

SEQ ID NO: 775530 - RNA, 17 nt, Artificial Sequence
  Synthetic
aguguaauaacugaguu

SEQ ID NO: 775531 - RNA, 17 nt, Artificial Sequence
  Synthetic
auuuaacucagugaguu

SEQ ID NO: 775532 - RNA, 17 nt, Artificial Sequence
  Synthetic
ccaacaacaggugaguu

SEQ ID NO: 775533 - RNA, 17 nt, Artificial Sequence
  Synthetic
ucuuauuguggugaguu

SEQ ID NO: 775534 - RNA, 17 nt, Artificial Sequence
  Synthetic
uacaaaggaauugaguu

SEQ ID NO: 775535 - RNA, 17 nt, Artificial Sequence
  Synthetic
uugaaaugaauugaguu

SEQ ID NO: 775536 - RNA, 17 nt, Artificial Sequence
  Synthetic
auaacugagauugaguu

SEQ ID NO: 775537 - RNA, 17 nt, Artificial Sequence
  Synthetic
auucacucuguugaguu

SEQ ID NO: 775538 - RNA, 17 nt, Artificial Sequence
  Synthetic
uuggcagaauuugaguu

SEQ ID NO: 775539 - RNA, 17 nt, Artificial Sequence
  Synthetic
uuuuagccuuuugaguu

SEQ ID NO: 775540 - RNA, 17 nt, Artificial Sequence
  Synthetic
aaacacgagaaauaguu

SEQ ID NO: 775541 - RNA, 17 nt, Artificial Sequence
  Synthetic
uuaaggagccaauaguu

SEQ ID NO: 775542 - RNA, 17 nt, Artificial Sequence
  Synthetic
ucuuuucugcaauaguu

SEQ ID NO: 775543 - RNA, 17 nt, Artificial Sequence
  Synthetic
caaaauggagaauaguu

SEQ ID NO: 775544 - RNA, 17 nt, Artificial Sequence
  Synthetic
aagagacccuaauaguu

SEQ ID NO: 775545 - RNA, 17 nt, Artificial Sequence
  Synthetic
aagaagguguaauaguu

SEQ ID NO: 775546 - RNA, 17 nt, Artificial Sequence
  Synthetic
auauuuauaccauaguu

SEQ ID NO: 775547 - RNA, 17 nt, Artificial Sequence
  Synthetic
ucuugcaggccauaguu

SEQ ID NO: 775548 - RNA, 17 nt, Artificial Sequence
  Synthetic
uauugugauccauaguu

SEQ ID NO: 775549 - RNA, 17 nt, Artificial Sequence
  Synthetic
ucaguucuggcauaguu

SEQ ID NO: 775550 - RNA, 17 nt, Artificial Sequence
  Synthetic
aagauaauaucauaguu

SEQ ID NO: 775551 - RNA, 17 nt, Artificial Sequence
  Synthetic
uauauggacucauaguu

SEQ ID NO: 775552 - RNA, 17 nt, Artificial Sequence
  Synthetic
auuaagucaggauaguu

SEQ ID NO: 775553 - RNA, 17 nt, Artificial Sequence
  Synthetic
auauaauuuugauaguu

SEQ ID NO: 775554 - RNA, 17 nt, Artificial Sequence
  Synthetic
ccauaguaaauauaguu

SEQ ID NO: 775555 - RNA, 17 nt, Artificial Sequence
  Synthetic
aguuuauucauauaguu

SEQ ID NO: 775556 - RNA, 17 nt, Artificial Sequence
  Synthetic
uaagauuucauauaguu

SEQ ID NO: 775557 - RNA, 17 nt, Artificial Sequence
  Synthetic
ugagcccugauauaguu

SEQ ID NO: 775558 - RNA, 17 nt, Artificial Sequence
  Synthetic
acaaacacuguauaguu

SEQ ID NO: 775559 - RNA, 17 nt, Artificial Sequence
  Synthetic
ucaggauuauuauaguu

SEQ ID NO: 775560 - RNA, 17 nt, Artificial Sequence
  Synthetic
cuuccaaauuuauaguu

SEQ ID NO: 775561 - RNA, 17 nt, Artificial Sequence
  Synthetic
aauaucugcaacuaguu

SEQ ID NO: 775562 - RNA, 17 nt, Artificial Sequence
  Synthetic
uaacuuccauacuaguu

SEQ ID NO: 775563 - RNA, 17 nt, Artificial Sequence
  Synthetic
cuagguuuuuacuaguu

SEQ ID NO: 775564 - RNA, 17 nt, Artificial Sequence
  Synthetic
ugaucucacuccuaguu

SEQ ID NO: 775565 - RNA, 17 nt, Artificial Sequence
  Synthetic
uguacauguuccuaguu

SEQ ID NO: 775566 - RNA, 17 nt, Artificial Sequence
  Synthetic
acacaagaaagcuaguu

SEQ ID NO: 775567 - RNA, 17 nt, Artificial Sequence
  Synthetic
uggcccaagggcuaguu

SEQ ID NO: 775568 - RNA, 17 nt, Artificial Sequence
  Synthetic
auuuggacaugcuaguu

SEQ ID NO: 775569 - RNA, 17 nt, Artificial Sequence
  Synthetic
cuuucuuggaucuaguu

SEQ ID NO: 775570 - RNA, 17 nt, Artificial Sequence
  Synthetic
aagcacacacucuaguu

SEQ ID NO: 775571 - RNA, 17 nt, Artificial Sequence
  Synthetic
aaaccuguucucuaguu

SEQ ID NO: 775572 - RNA, 17 nt, Artificial Sequence
  Synthetic
uuagaaaaguucuaguu

SEQ ID NO: 775573 - RNA, 17 nt, Artificial Sequence
  Synthetic
aauccauauuucuaguu

SEQ ID NO: 775574 - RNA, 17 nt, Artificial Sequence
  Synthetic
agguuuuuuuucuaguu

SEQ ID NO: 775575 - RNA, 17 nt, Artificial Sequence
  Synthetic
aagauugcagaguaguu

SEQ ID NO: 775576 - RNA, 17 nt, Artificial Sequence
  Synthetic
cugccucccgaguaguu

SEQ ID NO: 775577 - RNA, 17 nt, Artificial Sequence
  Synthetic
cagccuccugaguaguu

SEQ ID NO: 775578 - RNA, 17 nt, Artificial Sequence
  Synthetic
agaugaagaagguaguu

SEQ ID NO: 775579 - RNA, 17 nt, Artificial Sequence
  Synthetic
caaugccauauguaguu

SEQ ID NO: 775580 - RNA, 17 nt, Artificial Sequence
  Synthetic
caauuugauauguaguu

SEQ ID NO: 775581 - RNA, 17 nt, Artificial Sequence
  Synthetic
uauuggacuauguaguu

SEQ ID NO: 775582 - RNA, 17 nt, Artificial Sequence
  Synthetic
auugcauugguguaguu

SEQ ID NO: 775583 - RNA, 17 nt, Artificial Sequence
  Synthetic
agcuuuuacuuguaguu

SEQ ID NO: 775584 - RNA, 17 nt, Artificial Sequence
  Synthetic
cauuuguaguuguaguu

SEQ ID NO: 775585 - RNA, 17 nt, Artificial Sequence
  Synthetic
uaccuaguuuuguaguu

SEQ ID NO: 775586 - RNA, 17 nt, Artificial Sequence
  Synthetic
aguacaaaaaauuaguu

SEQ ID NO: 775587 - RNA, 17 nt, Artificial Sequence
  Synthetic
aaauacaaaaauuaguu

SEQ ID NO: 775588 - RNA, 17 nt, Artificial Sequence
  Synthetic
uuuuaugaaaauuaguu

SEQ ID NO: 775589 - RNA, 17 nt, Artificial Sequence
  Synthetic
uaaauaaugaauuaguu

SEQ ID NO: 775590 - RNA, 17 nt, Artificial Sequence
  Synthetic
uugcagaaacauuaguu

SEQ ID NO: 775591 - RNA, 17 nt, Artificial Sequence
  Synthetic
cucccuugccauuaguu

SEQ ID NO: 775592 - RNA, 17 nt, Artificial Sequence
  Synthetic
uaaccugugacuuaguu

SEQ ID NO: 775593 - RNA, 17 nt, Artificial Sequence
  Synthetic
acuuaugaagcuuaguu

SEQ ID NO: 775594 - RNA, 17 nt, Artificial Sequence
  Synthetic
uagagaauaucuuaguu

SEQ ID NO: 775595 - RNA, 17 nt, Artificial Sequence
  Synthetic
aauaaguuuucuuaguu

SEQ ID NO: 775596 - RNA, 17 nt, Artificial Sequence
  Synthetic
aacauuuaagguuaguu

SEQ ID NO: 775597 - RNA, 17 nt, Artificial Sequence
  Synthetic
uccuauaaauguuaguu

SEQ ID NO: 775598 - RNA, 17 nt, Artificial Sequence
  Synthetic
ucaucugguauuuaguu

SEQ ID NO: 775599 - RNA, 17 nt, Artificial Sequence
  Synthetic
cuugugacauuuuaguu

SEQ ID NO: 775600 - RNA, 17 nt, Artificial Sequence
  Synthetic
aucugugacuuuuaguu

SEQ ID NO: 775601 - RNA, 17 nt, Artificial Sequence
  Synthetic
uaggauaccuuuuaguu

SEQ ID NO: 775602 - RNA, 17 nt, Artificial Sequence
  Synthetic
uugaggagaaaaacguu

SEQ ID NO: 775603 - RNA, 17 nt, Artificial Sequence
  Synthetic
aaacaacagggaacguu

SEQ ID NO: 775604 - RNA, 17 nt, Artificial Sequence
  Synthetic
aaaugugagauaacguu

SEQ ID NO: 775605 - RNA, 17 nt, Artificial Sequence
  Synthetic
auucuccuuuuaacguu

SEQ ID NO: 775606 - RNA, 17 nt, Artificial Sequence
  Synthetic
caucuuccucccacguu

SEQ ID NO: 775607 - RNA, 17 nt, Artificial Sequence
  Synthetic
uuccugaaaagcacguu

SEQ ID NO: 775608 - RNA, 17 nt, Artificial Sequence
  Synthetic
cccaaacugugcacguu

SEQ ID NO: 775609 - RNA, 17 nt, Artificial Sequence
  Synthetic
acaugggugaugacguu

SEQ ID NO: 775610 - RNA, 17 nt, Artificial Sequence
  Synthetic
caggcuucaaauacguu

SEQ ID NO: 775611 - RNA, 17 nt, Artificial Sequence
  Synthetic
aauuauuaucauacguu

SEQ ID NO: 775612 - RNA, 17 nt, Artificial Sequence
  Synthetic
auuuucaacuguacguu

SEQ ID NO: 775613 - RNA, 17 nt, Artificial Sequence
  Synthetic
cacuauggagaaccguu

SEQ ID NO: 775614 - RNA, 17 nt, Artificial Sequence
  Synthetic
uauacaaccacaccguu

SEQ ID NO: 775615 - RNA, 17 nt, Artificial Sequence
  Synthetic
uauauuuauuggccguu

SEQ ID NO: 775616 - RNA, 17 nt, Artificial Sequence
  Synthetic
cuaaaugcagcuccguu

SEQ ID NO: 775617 - RNA, 17 nt, Artificial Sequence
  Synthetic
uuuuuuucaauuccguu

SEQ ID NO: 775618 - RNA, 17 nt, Artificial Sequence
  Synthetic
ccuguggugugagcguu

SEQ ID NO: 775619 - RNA, 17 nt, Artificial Sequence
  Synthetic
aacugcccuagggcguu

SEQ ID NO: 775620 - RNA, 17 nt, Artificial Sequence
  Synthetic
ucugaaacagaugcguu

SEQ ID NO: 775621 - RNA, 17 nt, Artificial Sequence
  Synthetic
auaauguugguugcguu

SEQ ID NO: 775622 - RNA, 17 nt, Artificial Sequence
  Synthetic
agagaaauauuugcguu

SEQ ID NO: 775623 - RNA, 17 nt, Artificial Sequence
  Synthetic
cauagugaaaccucguu

SEQ ID NO: 775624 - RNA, 17 nt, Artificial Sequence
  Synthetic
uuugaucuuuucucguu

SEQ ID NO: 775625 - RNA, 17 nt, Artificial Sequence
  Synthetic
cuguuguuuuuuucguu

SEQ ID NO: 775626 - RNA, 17 nt, Artificial Sequence
  Synthetic
agggaggcaaaaagguu

SEQ ID NO: 775627 - RNA, 17 nt, Artificial Sequence
  Synthetic
cuggugccgaaaagguu

SEQ ID NO: 775628 - RNA, 17 nt, Artificial Sequence
  Synthetic
ugaauaucuaaaagguu

SEQ ID NO: 775629 - RNA, 17 nt, Artificial Sequence
  Synthetic
uguugauguuaaagguu

SEQ ID NO: 775630 - RNA, 17 nt, Artificial Sequence
  Synthetic
auuuuguguuaaagguu

SEQ ID NO: 775631 - RNA, 17 nt, Artificial Sequence
  Synthetic
ucacaauagccaagguu

SEQ ID NO: 775632 - RNA, 17 nt, Artificial Sequence
  Synthetic
cccaaaagagcaagguu

SEQ ID NO: 775633 - RNA, 17 nt, Artificial Sequence
  Synthetic
agcucauuaugaagguu

SEQ ID NO: 775634 - RNA, 17 nt, Artificial Sequence
  Synthetic
ugcaggaggauaagguu

SEQ ID NO: 775635 - RNA, 17 nt, Artificial Sequence
  Synthetic
aauguaaaucuaagguu

SEQ ID NO: 775636 - RNA, 17 nt, Artificial Sequence
  Synthetic
acacagcagcacagguu

SEQ ID NO: 775637 - RNA, 17 nt, Artificial Sequence
  Synthetic
ucuguuagguacagguu

SEQ ID NO: 775638 - RNA, 17 nt, Artificial Sequence
  Synthetic
uuaauaugguacagguu

SEQ ID NO: 775639 - RNA, 17 nt, Artificial Sequence
  Synthetic
aguagguguuacagguu

SEQ ID NO: 775640 - RNA, 17 nt, Artificial Sequence
  Synthetic
cagcaggcagccagguu

SEQ ID NO: 775641 - RNA, 17 nt, Artificial Sequence
  Synthetic
caaaaauuugccagguu

SEQ ID NO: 775642 - RNA, 17 nt, Artificial Sequence
  Synthetic
aacaguugauccagguu

SEQ ID NO: 775643 - RNA, 17 nt, Artificial Sequence
  Synthetic
aggugaacaagcagguu

SEQ ID NO: 775644 - RNA, 17 nt, Artificial Sequence
  Synthetic
caaggcacuggcagguu

SEQ ID NO: 775645 - RNA, 17 nt, Artificial Sequence
  Synthetic
ugaaggacuggcagguu

SEQ ID NO: 775646 - RNA, 17 nt, Artificial Sequence
  Synthetic
aauaaaaauugcagguu

SEQ ID NO: 775647 - RNA, 17 nt, Artificial Sequence
  Synthetic
agccuaggaaucagguu

SEQ ID NO: 775648 - RNA, 17 nt, Artificial Sequence
  Synthetic
uccaaauuagucagguu

SEQ ID NO: 775649 - RNA, 17 nt, Artificial Sequence
  Synthetic
aaaacauuugucagguu

SEQ ID NO: 775650 - RNA, 17 nt, Artificial Sequence
  Synthetic
ucaaaaguguucagguu

SEQ ID NO: 775651 - RNA, 17 nt, Artificial Sequence
  Synthetic
cuuuaaaguuucagguu

SEQ ID NO: 775652 - RNA, 17 nt, Artificial Sequence
  Synthetic
agucacagaaagagguu

SEQ ID NO: 775653 - RNA, 17 nt, Artificial Sequence
  Synthetic
cauuaagagaagagguu

SEQ ID NO: 775654 - RNA, 17 nt, Artificial Sequence
  Synthetic
uuggcauugaagagguu

SEQ ID NO: 775655 - RNA, 17 nt, Artificial Sequence
  Synthetic
aguaacuaacagagguu

SEQ ID NO: 775656 - RNA, 17 nt, Artificial Sequence
  Synthetic
ccuggauaucagagguu

SEQ ID NO: 775657 - RNA, 17 nt, Artificial Sequence
  Synthetic
auccaaagagagagguu

SEQ ID NO: 775658 - RNA, 17 nt, Artificial Sequence
  Synthetic
auggauuucacgagguu

SEQ ID NO: 775659 - RNA, 17 nt, Artificial Sequence
  Synthetic
uacaugaugccgagguu

SEQ ID NO: 775660 - RNA, 17 nt, Artificial Sequence
  Synthetic
ugcuuagaaaggagguu

SEQ ID NO: 775661 - RNA, 17 nt, Artificial Sequence
  Synthetic
ugcauucccaggagguu

SEQ ID NO: 775662 - RNA, 17 nt, Artificial Sequence
  Synthetic
ucgaggggugggagguu

SEQ ID NO: 775663 - RNA, 17 nt, Artificial Sequence
  Synthetic
uagauggacuggagguu

SEQ ID NO: 775664 - RNA, 17 nt, Artificial Sequence
  Synthetic
aucagaggguggagguu

SEQ ID NO: 775665 - RNA, 17 nt, Artificial Sequence
  Synthetic
ugcaaaugacugagguu

SEQ ID NO: 775666 - RNA, 17 nt, Artificial Sequence
  Synthetic
ugggugauacugagguu

SEQ ID NO: 775667 - RNA, 17 nt, Artificial Sequence
  Synthetic
cuugggaggcugagguu

SEQ ID NO: 775668 - RNA, 17 nt, Artificial Sequence
  Synthetic
cgcaugaugcugagguu

SEQ ID NO: 775669 - RNA, 17 nt, Artificial Sequence
  Synthetic
ugcaugaugcugagguu

SEQ ID NO: 775670 - RNA, 17 nt, Artificial Sequence
  Synthetic
ugcgugaugcugagguu

SEQ ID NO: 775671 - RNA, 17 nt, Artificial Sequence
  Synthetic
augauggcucugagguu

SEQ ID NO: 775672 - RNA, 17 nt, Artificial Sequence
  Synthetic
ccuuaaguucugagguu

SEQ ID NO: 775673 - RNA, 17 nt, Artificial Sequence
  Synthetic
auuuguaaagugagguu

SEQ ID NO: 775674 - RNA, 17 nt, Artificial Sequence
  Synthetic
ucaguuguggugagguu

SEQ ID NO: 775675 - RNA, 17 nt, Artificial Sequence
  Synthetic
accucuuacuugagguu

SEQ ID NO: 775676 - RNA, 17 nt, Artificial Sequence
  Synthetic
acuaguaguuugagguu

SEQ ID NO: 775677 - RNA, 17 nt, Artificial Sequence
  Synthetic
ucacucagaaauagguu

SEQ ID NO: 775678 - RNA, 17 nt, Artificial Sequence
  Synthetic
aaaacauuaaauagguu

SEQ ID NO: 775679 - RNA, 17 nt, Artificial Sequence
  Synthetic
aaaccucacaauagguu

SEQ ID NO: 775680 - RNA, 17 nt, Artificial Sequence
  Synthetic
auauccaucaauagguu

SEQ ID NO: 775681 - RNA, 17 nt, Artificial Sequence
  Synthetic
cacugauucaauagguu

SEQ ID NO: 775682 - RNA, 17 nt, Artificial Sequence
  Synthetic
uuauaugugaauagguu

SEQ ID NO: 775683 - RNA, 17 nt, Artificial Sequence
  Synthetic
uccuuucagcauagguu

SEQ ID NO: 775684 - RNA, 17 nt, Artificial Sequence
  Synthetic
aaaacaaucaguagguu

SEQ ID NO: 775685 - RNA, 17 nt, Artificial Sequence
  Synthetic
cacugauucaguagguu

SEQ ID NO: 775686 - RNA, 17 nt, Artificial Sequence
  Synthetic
augauguucaguagguu

SEQ ID NO: 775687 - RNA, 17 nt, Artificial Sequence
  Synthetic
ccaaucaaauguagguu

SEQ ID NO: 775688 - RNA, 17 nt, Artificial Sequence
  Synthetic
aggugguaauguagguu

SEQ ID NO: 775689 - RNA, 17 nt, Artificial Sequence
  Synthetic
uacaaaaaaauuagguu

SEQ ID NO: 775690 - RNA, 17 nt, Artificial Sequence
  Synthetic
ugaggagagauuagguu

SEQ ID NO: 775691 - RNA, 17 nt, Artificial Sequence
  Synthetic
uaacuggaacuuagguu

SEQ ID NO: 775692 - RNA, 17 nt, Artificial Sequence
  Synthetic
aacauuccaguuagguu

SEQ ID NO: 775693 - RNA, 17 nt, Artificial Sequence
  Synthetic
uuacuaacauuuagguu

SEQ ID NO: 775694 - RNA, 17 nt, Artificial Sequence
  Synthetic
uuuuaucacuuuagguu

SEQ ID NO: 775695 - RNA, 17 nt, Artificial Sequence
  Synthetic
cuguaucuugagcgguu

SEQ ID NO: 775696 - RNA, 17 nt, Artificial Sequence
  Synthetic
ugaguuuugaggcgguu

SEQ ID NO: 775697 - RNA, 17 nt, Artificial Sequence
  Synthetic
auguaaacagcucgguu

SEQ ID NO: 775698 - RNA, 17 nt, Artificial Sequence
  Synthetic
aaccacaauaaaggguu

SEQ ID NO: 775699 - RNA, 17 nt, Artificial Sequence
  Synthetic
uaugcauuuaaaggguu

SEQ ID NO: 775700 - RNA, 17 nt, Artificial Sequence
  Synthetic
ucagagaagcaaggguu

SEQ ID NO: 775701 - RNA, 17 nt, Artificial Sequence
  Synthetic
uuaaucuucccaggguu

SEQ ID NO: 775702 - RNA, 17 nt, Artificial Sequence
  Synthetic
uguaaguuggcaggguu

SEQ ID NO: 775703 - RNA, 17 nt, Artificial Sequence
  Synthetic
cuguuggaaucaggguu

SEQ ID NO: 775704 - RNA, 17 nt, Artificial Sequence
  Synthetic
auauuugacucaggguu

SEQ ID NO: 775705 - RNA, 17 nt, Artificial Sequence
  Synthetic
uaaugguucucaggguu

SEQ ID NO: 775706 - RNA, 17 nt, Artificial Sequence
  Synthetic
aggccagcgggaggguu

SEQ ID NO: 775707 - RNA, 17 nt, Artificial Sequence
  Synthetic
caaacaaugugaggguu

SEQ ID NO: 775708 - RNA, 17 nt, Artificial Sequence
  Synthetic
caaacagugugaggguu

SEQ ID NO: 775709 - RNA, 17 nt, Artificial Sequence
  Synthetic
uugggaaguugaggguu

SEQ ID NO: 775710 - RNA, 17 nt, Artificial Sequence
  Synthetic
uauagccucauaggguu

SEQ ID NO: 775711 - RNA, 17 nt, Artificial Sequence
  Synthetic
aaggcagugauaggguu

SEQ ID NO: 775712 - RNA, 17 nt, Artificial Sequence
  Synthetic
ucccaugcacuaggguu

SEQ ID NO: 775713 - RNA, 17 nt, Artificial Sequence
  Synthetic
uaaaacugccuaggguu

SEQ ID NO: 775714 - RNA, 17 nt, Artificial Sequence
  Synthetic
ugcaguuugguaggguu

SEQ ID NO: 775715 - RNA, 17 nt, Artificial Sequence
  Synthetic
caaaaauuagccggguu

SEQ ID NO: 775716 - RNA, 17 nt, Artificial Sequence
  Synthetic
uugauugaugucggguu

SEQ ID NO: 775717 - RNA, 17 nt, Artificial Sequence
  Synthetic
cugagguaccagggguu

SEQ ID NO: 775718 - RNA, 17 nt, Artificial Sequence
  Synthetic
aauccaagugagggguu

SEQ ID NO: 775719 - RNA, 17 nt, Artificial Sequence
  Synthetic
ugcauuuugcggggguu

SEQ ID NO: 775720 - RNA, 17 nt, Artificial Sequence
  Synthetic
ucaggggaugggggguu

SEQ ID NO: 775721 - RNA, 17 nt, Artificial Sequence
  Synthetic
aaauaugcugggggguu

SEQ ID NO: 775722 - RNA, 17 nt, Artificial Sequence
  Synthetic
uguuuguuugggggguu

SEQ ID NO: 775723 - RNA, 17 nt, Artificial Sequence
  Synthetic
auuagaagguggggguu

SEQ ID NO: 775724 - RNA, 17 nt, Artificial Sequence
  Synthetic
aaaaaguacaugggguu

SEQ ID NO: 775725 - RNA, 17 nt, Artificial Sequence
  Synthetic
ucaguagagaugggguu

SEQ ID NO: 775726 - RNA, 17 nt, Artificial Sequence
  Synthetic
ccccauuggcugggguu

SEQ ID NO: 775727 - RNA, 17 nt, Artificial Sequence
  Synthetic
ucagcaucucugggguu

SEQ ID NO: 775728 - RNA, 17 nt, Artificial Sequence
  Synthetic
cugacuauucugggguu

SEQ ID NO: 775729 - RNA, 17 nt, Artificial Sequence
  Synthetic
ucucugggagugggguu

SEQ ID NO: 775730 - RNA, 17 nt, Artificial Sequence
  Synthetic
cacacaguggugggguu

SEQ ID NO: 775731 - RNA, 17 nt, Artificial Sequence
  Synthetic
uggucccaugugggguu

SEQ ID NO: 775732 - RNA, 17 nt, Artificial Sequence
  Synthetic
ucaggagaugugggguu

SEQ ID NO: 775733 - RNA, 17 nt, Artificial Sequence
  Synthetic
uguaugugugugggguu

SEQ ID NO: 775734 - RNA, 17 nt, Artificial Sequence
  Synthetic
aagaaagaauugggguu

SEQ ID NO: 775735 - RNA, 17 nt, Artificial Sequence
  Synthetic
agcacugaguugggguu

SEQ ID NO: 775736 - RNA, 17 nt, Artificial Sequence
  Synthetic
uuuugaauuuugggguu

SEQ ID NO: 775737 - RNA, 17 nt, Artificial Sequence
  Synthetic
aaaauacuacauggguu

SEQ ID NO: 775738 - RNA, 17 nt, Artificial Sequence
  Synthetic
auaaaacagcauggguu

SEQ ID NO: 775739 - RNA, 17 nt, Artificial Sequence
  Synthetic
uaacuaucucauggguu

SEQ ID NO: 775740 - RNA, 17 nt, Artificial Sequence
  Synthetic
uguaucuucuauggguu

SEQ ID NO: 775741 - RNA, 17 nt, Artificial Sequence
  Synthetic
ugaccuauaccuggguu

SEQ ID NO: 775742 - RNA, 17 nt, Artificial Sequence
  Synthetic
aaguauucaaguggguu

SEQ ID NO: 775743 - RNA, 17 nt, Artificial Sequence
  Synthetic
acccucacgaguggguu

SEQ ID NO: 775744 - RNA, 17 nt, Artificial Sequence
  Synthetic
ugauagaaauguggguu

SEQ ID NO: 775745 - RNA, 17 nt, Artificial Sequence
  Synthetic
aaauucuucuguggguu

SEQ ID NO: 775746 - RNA, 17 nt, Artificial Sequence
  Synthetic
aaaguugguuguggguu

SEQ ID NO: 775747 - RNA, 17 nt, Artificial Sequence
  Synthetic
agguuaggcauuggguu

SEQ ID NO: 775748 - RNA, 17 nt, Artificial Sequence
  Synthetic
ugucaguuuauuggguu

SEQ ID NO: 775749 - RNA, 17 nt, Artificial Sequence
  Synthetic
uugauuguauuuggguu

SEQ ID NO: 775750 - RNA, 17 nt, Artificial Sequence
  Synthetic
uuacauauuaaaugguu

SEQ ID NO: 775751 - RNA, 17 nt, Artificial Sequence
  Synthetic
ucucuucuuaaaugguu

SEQ ID NO: 775752 - RNA, 17 nt, Artificial Sequence
  Synthetic
uuugauuuacaaugguu

SEQ ID NO: 775753 - RNA, 17 nt, Artificial Sequence
  Synthetic
ugaugguaagaaugguu

SEQ ID NO: 775754 - RNA, 17 nt, Artificial Sequence
  Synthetic
uugauaaaauaaugguu

SEQ ID NO: 775755 - RNA, 17 nt, Artificial Sequence
  Synthetic
aauaucacuuaaugguu

SEQ ID NO: 775756 - RNA, 17 nt, Artificial Sequence
  Synthetic
aaguaauugacaugguu

SEQ ID NO: 775757 - RNA, 17 nt, Artificial Sequence
  Synthetic
ccaauuacugcaugguu

SEQ ID NO: 775758 - RNA, 17 nt, Artificial Sequence
  Synthetic
cuacccugaagaugguu

SEQ ID NO: 775759 - RNA, 17 nt, Artificial Sequence
  Synthetic
aagaauuugagaugguu

SEQ ID NO: 775760 - RNA, 17 nt, Artificial Sequence
  Synthetic
uguaucuguagaugguu

SEQ ID NO: 775761 - RNA, 17 nt, Artificial Sequence
  Synthetic
cgugggaggcgaugguu

SEQ ID NO: 775762 - RNA, 17 nt, Artificial Sequence
  Synthetic
uuguuugggggaugguu

SEQ ID NO: 775763 - RNA, 17 nt, Artificial Sequence
  Synthetic
ucagcccugggaugguu

SEQ ID NO: 775764 - RNA, 17 nt, Artificial Sequence
  Synthetic
uuuaaauaaugaugguu

SEQ ID NO: 775765 - RNA, 17 nt, Artificial Sequence
  Synthetic
aauaacuugugaugguu

SEQ ID NO: 775766 - RNA, 17 nt, Artificial Sequence
  Synthetic
uccacaaagauaugguu

SEQ ID NO: 775767 - RNA, 17 nt, Artificial Sequence
  Synthetic
cuuaguacgauaugguu

SEQ ID NO: 775768 - RNA, 17 nt, Artificial Sequence
  Synthetic
ugaccaaugauaugguu

SEQ ID NO: 775769 - RNA, 17 nt, Artificial Sequence
  Synthetic
aauaggaugauaugguu

SEQ ID NO: 775770 - RNA, 17 nt, Artificial Sequence
  Synthetic
aacucuaugauaugguu

SEQ ID NO: 775771 - RNA, 17 nt, Artificial Sequence
  Synthetic
caauaacugauaugguu

SEQ ID NO: 775772 - RNA, 17 nt, Artificial Sequence
  Synthetic
uccauugugauaugguu

SEQ ID NO: 775773 - RNA, 17 nt, Artificial Sequence
  Synthetic
cacacauugauaugguu

SEQ ID NO: 775774 - RNA, 17 nt, Artificial Sequence
  Synthetic
uauuuauugauaugguu

SEQ ID NO: 775775 - RNA, 17 nt, Artificial Sequence
  Synthetic
ugauggauccuaugguu

SEQ ID NO: 775776 - RNA, 17 nt, Artificial Sequence
  Synthetic
ucuuguuggcuaugguu

SEQ ID NO: 775777 - RNA, 17 nt, Artificial Sequence
  Synthetic
uagggugagguaugguu

SEQ ID NO: 775778 - RNA, 17 nt, Artificial Sequence
  Synthetic
uuggguaaguuaugguu

SEQ ID NO: 775779 - RNA, 17 nt, Artificial Sequence
  Synthetic
cuucauguaaacugguu

SEQ ID NO: 775780 - RNA, 17 nt, Artificial Sequence
  Synthetic
uuuaucaacaacugguu

SEQ ID NO: 775781 - RNA, 17 nt, Artificial Sequence
  Synthetic
uugaaugccaacugguu

SEQ ID NO: 775782 - RNA, 17 nt, Artificial Sequence
  Synthetic
cucugauuuaacugguu

SEQ ID NO: 775783 - RNA, 17 nt, Artificial Sequence
  Synthetic
aauaucuuagacugguu

SEQ ID NO: 775784 - RNA, 17 nt, Artificial Sequence
  Synthetic
aauaaguaguacugguu

SEQ ID NO: 775785 - RNA, 17 nt, Artificial Sequence
  Synthetic
acauuucuuuccugguu

SEQ ID NO: 775786 - RNA, 17 nt, Artificial Sequence
  Synthetic
augcugcccagcugguu

SEQ ID NO: 775787 - RNA, 17 nt, Artificial Sequence
  Synthetic
uuguacagcugcugguu

SEQ ID NO: 775788 - RNA, 17 nt, Artificial Sequence
  Synthetic
cauuuucugaucugguu

SEQ ID NO: 775789 - RNA, 17 nt, Artificial Sequence
  Synthetic
cuagcugguaucugguu

SEQ ID NO: 775790 - RNA, 17 nt, Artificial Sequence
  Synthetic
uugcacauucucugguu

SEQ ID NO: 775791 - RNA, 17 nt, Artificial Sequence
  Synthetic
aaaagcuauuucugguu

SEQ ID NO: 775792 - RNA, 17 nt, Artificial Sequence
  Synthetic
uuuuguucuuucugguu

SEQ ID NO: 775793 - RNA, 17 nt, Artificial Sequence
  Synthetic
uaauggugaaagugguu

SEQ ID NO: 775794 - RNA, 17 nt, Artificial Sequence
  Synthetic
acuacugugaagugguu

SEQ ID NO: 775795 - RNA, 17 nt, Artificial Sequence
  Synthetic
aacuauucccagugguu

SEQ ID NO: 775796 - RNA, 17 nt, Artificial Sequence
  Synthetic
ucauucugguagugguu

SEQ ID NO: 775797 - RNA, 17 nt, Artificial Sequence
  Synthetic
auuucaugcucgugguu

SEQ ID NO: 775798 - RNA, 17 nt, Artificial Sequence
  Synthetic
cauaugaaguggugguu

SEQ ID NO: 775799 - RNA, 17 nt, Artificial Sequence
  Synthetic
uguauaugguggugguu

SEQ ID NO: 775800 - RNA, 17 nt, Artificial Sequence
  Synthetic
uaacaguguuggugguu

SEQ ID NO: 775801 - RNA, 17 nt, Artificial Sequence
  Synthetic
acaaauaaacugugguu

SEQ ID NO: 775802 - RNA, 17 nt, Artificial Sequence
  Synthetic
ucugcuggccugugguu

SEQ ID NO: 775803 - RNA, 17 nt, Artificial Sequence
  Synthetic
aauuuuugccugugguu

SEQ ID NO: 775804 - RNA, 17 nt, Artificial Sequence
  Synthetic
auugcugcuaauugguu

SEQ ID NO: 775805 - RNA, 17 nt, Artificial Sequence
  Synthetic
uagaugugacauugguu

SEQ ID NO: 775806 - RNA, 17 nt, Artificial Sequence
  Synthetic
ugugauucagauugguu

SEQ ID NO: 775807 - RNA, 17 nt, Artificial Sequence
  Synthetic
ugggggaaauauugguu

SEQ ID NO: 775808 - RNA, 17 nt, Artificial Sequence
  Synthetic
aaucagacuuauugguu

SEQ ID NO: 775809 - RNA, 17 nt, Artificial Sequence
  Synthetic
uaaauuacaccuugguu

SEQ ID NO: 775810 - RNA, 17 nt, Artificial Sequence
  Synthetic
caauauauaccuugguu

SEQ ID NO: 775811 - RNA, 17 nt, Artificial Sequence
  Synthetic
aaugauuaagcuugguu

SEQ ID NO: 775812 - RNA, 17 nt, Artificial Sequence
  Synthetic
ucuuaaaugucuugguu

SEQ ID NO: 775813 - RNA, 17 nt, Artificial Sequence
  Synthetic
cuuuuaccuucuugguu

SEQ ID NO: 775814 - RNA, 17 nt, Artificial Sequence
  Synthetic
aaugguccuucuugguu

SEQ ID NO: 775815 - RNA, 17 nt, Artificial Sequence
  Synthetic
caaaauuauaguugguu

SEQ ID NO: 775816 - RNA, 17 nt, Artificial Sequence
  Synthetic
uagcuuugugguugguu

SEQ ID NO: 775817 - RNA, 17 nt, Artificial Sequence
  Synthetic
aaauauauuuguugguu

SEQ ID NO: 775818 - RNA, 17 nt, Artificial Sequence
  Synthetic
auuucagaaauuugguu

SEQ ID NO: 775819 - RNA, 17 nt, Artificial Sequence
  Synthetic
accaaggaaauuugguu

SEQ ID NO: 775820 - RNA, 17 nt, Artificial Sequence
  Synthetic
augaauuacauuugguu

SEQ ID NO: 775821 - RNA, 17 nt, Artificial Sequence
  Synthetic
aaugaggucauuugguu

SEQ ID NO: 775822 - RNA, 17 nt, Artificial Sequence
  Synthetic
uugaaagcuauuugguu

SEQ ID NO: 775823 - RNA, 17 nt, Artificial Sequence
  Synthetic
uucguaaaacuuugguu

SEQ ID NO: 775824 - RNA, 17 nt, Artificial Sequence
  Synthetic
ucaguucuacuuugguu

SEQ ID NO: 775825 - RNA, 17 nt, Artificial Sequence
  Synthetic
cauucucugguuugguu

SEQ ID NO: 775826 - RNA, 17 nt, Artificial Sequence
  Synthetic
cugaaguaguuuugguu

SEQ ID NO: 775827 - RNA, 17 nt, Artificial Sequence
  Synthetic
aaccaucaaaaaauguu

SEQ ID NO: 775828 - RNA, 17 nt, Artificial Sequence
  Synthetic
cuuauauuaaaaauguu

SEQ ID NO: 775829 - RNA, 17 nt, Artificial Sequence
  Synthetic
uuuuggcccaaaauguu

SEQ ID NO: 775830 - RNA, 17 nt, Artificial Sequence
  Synthetic
aacuucuagaaaauguu

SEQ ID NO: 775831 - RNA, 17 nt, Artificial Sequence
  Synthetic
aacuuggcuaaaauguu

SEQ ID NO: 775832 - RNA, 17 nt, Artificial Sequence
  Synthetic
auggagauuaaaauguu

SEQ ID NO: 775833 - RNA, 17 nt, Artificial Sequence
  Synthetic
auaguuuaccaaauguu

SEQ ID NO: 775834 - RNA, 17 nt, Artificial Sequence
  Synthetic
auaauaaaauaaauguu

SEQ ID NO: 775835 - RNA, 17 nt, Artificial Sequence
  Synthetic
ucagcuaaguaaauguu

SEQ ID NO: 775836 - RNA, 17 nt, Artificial Sequence
  Synthetic
aacuaaccuuaaauguu

SEQ ID NO: 775837 - RNA, 17 nt, Artificial Sequence
  Synthetic
ugcuagcuuuaaauguu

SEQ ID NO: 775838 - RNA, 17 nt, Artificial Sequence
  Synthetic
aguagauguacaauguu

SEQ ID NO: 775839 - RNA, 17 nt, Artificial Sequence
  Synthetic
uuagguacuccaauguu

SEQ ID NO: 775840 - RNA, 17 nt, Artificial Sequence
  Synthetic
augugucucucaauguu

SEQ ID NO: 775841 - RNA, 17 nt, Artificial Sequence
  Synthetic
uauuuaccaagaauguu

SEQ ID NO: 775842 - RNA, 17 nt, Artificial Sequence
  Synthetic
acagaagcaagaauguu

SEQ ID NO: 775843 - RNA, 17 nt, Artificial Sequence
  Synthetic
ucacuucaaugaauguu

SEQ ID NO: 775844 - RNA, 17 nt, Artificial Sequence
  Synthetic
uccugagguauaauguu

SEQ ID NO: 775845 - RNA, 17 nt, Artificial Sequence
  Synthetic
uaacgaugacuaauguu

SEQ ID NO: 775846 - RNA, 17 nt, Artificial Sequence
  Synthetic
uaacuaauguuaauguu

SEQ ID NO: 775847 - RNA, 17 nt, Artificial Sequence
  Synthetic
ugaagacauuuaauguu

SEQ ID NO: 775848 - RNA, 17 nt, Artificial Sequence
  Synthetic
uuauuaccuuuaauguu

SEQ ID NO: 775849 - RNA, 17 nt, Artificial Sequence
  Synthetic
ugcaugucaaacauguu

SEQ ID NO: 775850 - RNA, 17 nt, Artificial Sequence
  Synthetic
uguuguacuaacauguu

SEQ ID NO: 775851 - RNA, 17 nt, Artificial Sequence
  Synthetic
acaucuaagcacauguu

SEQ ID NO: 775852 - RNA, 17 nt, Artificial Sequence
  Synthetic
cauagaucagacauguu

SEQ ID NO: 775853 - RNA, 17 nt, Artificial Sequence
  Synthetic
auuccaggagacauguu

SEQ ID NO: 775854 - RNA, 17 nt, Artificial Sequence
  Synthetic
aguauuuaggacauguu

SEQ ID NO: 775855 - RNA, 17 nt, Artificial Sequence
  Synthetic
uacauauauuacauguu

SEQ ID NO: 775856 - RNA, 17 nt, Artificial Sequence
  Synthetic
uuccaagugaccauguu

SEQ ID NO: 775857 - RNA, 17 nt, Artificial Sequence
  Synthetic
ccagguccauccauguu

SEQ ID NO: 775858 - RNA, 17 nt, Artificial Sequence
  Synthetic
acuaggaacagcauguu

SEQ ID NO: 775859 - RNA, 17 nt, Artificial Sequence
  Synthetic
aggugaaaaugcauguu

SEQ ID NO: 775860 - RNA, 17 nt, Artificial Sequence
  Synthetic
uagaauuuuugcauguu

SEQ ID NO: 775861 - RNA, 17 nt, Artificial Sequence
  Synthetic
uuuucacagaucauguu

SEQ ID NO: 775862 - RNA, 17 nt, Artificial Sequence
  Synthetic
aaagauacuaucauguu

SEQ ID NO: 775863 - RNA, 17 nt, Artificial Sequence
  Synthetic
ccuaaauuauucauguu

SEQ ID NO: 775864 - RNA, 17 nt, Artificial Sequence
  Synthetic
agugcuaacuucauguu

SEQ ID NO: 775865 - RNA, 17 nt, Artificial Sequence
  Synthetic
aaaagaccuuucauguu

SEQ ID NO: 775866 - RNA, 17 nt, Artificial Sequence
  Synthetic
aauuaaauuuucauguu

SEQ ID NO: 775867 - RNA, 17 nt, Artificial Sequence
  Synthetic
auagaaagacagauguu

SEQ ID NO: 775868 - RNA, 17 nt, Artificial Sequence
  Synthetic
auuuaaaaccagauguu

SEQ ID NO: 775869 - RNA, 17 nt, Artificial Sequence
  Synthetic
ccaaguuuccagauguu

SEQ ID NO: 775870 - RNA, 17 nt, Artificial Sequence
  Synthetic
acaauucaucagauguu

SEQ ID NO: 775871 - RNA, 17 nt, Artificial Sequence
  Synthetic
uaaacuugugagauguu

SEQ ID NO: 775872 - RNA, 17 nt, Artificial Sequence
  Synthetic
ugcaguaaauagauguu

SEQ ID NO: 775873 - RNA, 17 nt, Artificial Sequence
  Synthetic
uagaauauaaggauguu

SEQ ID NO: 775874 - RNA, 17 nt, Artificial Sequence
  Synthetic
cuuaaaaccuggauguu

SEQ ID NO: 775875 - RNA, 17 nt, Artificial Sequence
  Synthetic
aguuuaauaaugauguu

SEQ ID NO: 775876 - RNA, 17 nt, Artificial Sequence
  Synthetic
uuauuagagaugauguu

SEQ ID NO: 775877 - RNA, 17 nt, Artificial Sequence
  Synthetic
aucaccuauaugauguu

SEQ ID NO: 775878 - RNA, 17 nt, Artificial Sequence
  Synthetic
acuauguauaugauguu

SEQ ID NO: 775879 - RNA, 17 nt, Artificial Sequence
  Synthetic
cuaauacuucugauguu

SEQ ID NO: 775880 - RNA, 17 nt, Artificial Sequence
  Synthetic
ccuucaggugugauguu

SEQ ID NO: 775881 - RNA, 17 nt, Artificial Sequence
  Synthetic
cuuuuaauugugauguu

SEQ ID NO: 775882 - RNA, 17 nt, Artificial Sequence
  Synthetic
uuuauccuugugauguu

SEQ ID NO: 775883 - RNA, 17 nt, Artificial Sequence
  Synthetic
ugagaauuauugauguu

SEQ ID NO: 775884 - RNA, 17 nt, Artificial Sequence
  Synthetic
uuauagagcaauauguu

SEQ ID NO: 775885 - RNA, 17 nt, Artificial Sequence
  Synthetic
ugauucugcaauauguu

SEQ ID NO: 775886 - RNA, 17 nt, Artificial Sequence
  Synthetic
cuaguugucaauauguu

SEQ ID NO: 775887 - RNA, 17 nt, Artificial Sequence
  Synthetic
cagauucaccauauguu

SEQ ID NO: 775888 - RNA, 17 nt, Artificial Sequence
  Synthetic
uauguuaagcauauguu

SEQ ID NO: 775889 - RNA, 17 nt, Artificial Sequence
  Synthetic
aggauagaucauauguu

SEQ ID NO: 775890 - RNA, 17 nt, Artificial Sequence
  Synthetic
aggguagaucauauguu

SEQ ID NO: 775891 - RNA, 17 nt, Artificial Sequence
  Synthetic
acuuagucagauauguu

SEQ ID NO: 775892 - RNA, 17 nt, Artificial Sequence
  Synthetic
uuguugauagauauguu

SEQ ID NO: 775893 - RNA, 17 nt, Artificial Sequence
  Synthetic
ugauauuaggauauguu

SEQ ID NO: 775894 - RNA, 17 nt, Artificial Sequence
  Synthetic
ucaucuaaugauauguu

SEQ ID NO: 775895 - RNA, 17 nt, Artificial Sequence
  Synthetic
uuuucugauuauauguu

SEQ ID NO: 775896 - RNA, 17 nt, Artificial Sequence
  Synthetic
agaguuguuuauauguu

SEQ ID NO: 775897 - RNA, 17 nt, Artificial Sequence
  Synthetic
auuuuaucaacuauguu

SEQ ID NO: 775898 - RNA, 17 nt, Artificial Sequence
  Synthetic
cgggguuucacuauguu

SEQ ID NO: 775899 - RNA, 17 nt, Artificial Sequence
  Synthetic
ccuauggaagcuauguu

SEQ ID NO: 775900 - RNA, 17 nt, Artificial Sequence
  Synthetic
ucucucuuugcuauguu

SEQ ID NO: 775901 - RNA, 17 nt, Artificial Sequence
  Synthetic
cucagagaaucuauguu

SEQ ID NO: 775902 - RNA, 17 nt, Artificial Sequence
  Synthetic
aggaaaagaucuauguu

SEQ ID NO: 775903 - RNA, 17 nt, Artificial Sequence
  Synthetic
uuuaucaucaguauguu

SEQ ID NO: 775904 - RNA, 17 nt, Artificial Sequence
  Synthetic
cuguauccucguauguu

SEQ ID NO: 775905 - RNA, 17 nt, Artificial Sequence
  Synthetic
cauugaaaagguauguu

SEQ ID NO: 775906 - RNA, 17 nt, Artificial Sequence
  Synthetic
uaaauauuagguauguu

SEQ ID NO: 775907 - RNA, 17 nt, Artificial Sequence
  Synthetic
aaacuuuuguguauguu

SEQ ID NO: 775908 - RNA, 17 nt, Artificial Sequence
  Synthetic
auauaugaaauuauguu

SEQ ID NO: 775909 - RNA, 17 nt, Artificial Sequence
  Synthetic
agaauguuaauuauguu

SEQ ID NO: 775910 - RNA, 17 nt, Artificial Sequence
  Synthetic
ugacagcagauuauguu

SEQ ID NO: 775911 - RNA, 17 nt, Artificial Sequence
  Synthetic
aagacuuagauuauguu

SEQ ID NO: 775912 - RNA, 17 nt, Artificial Sequence
  Synthetic
aagguuuuaguuauguu

SEQ ID NO: 775913 - RNA, 17 nt, Artificial Sequence
  Synthetic
uugugcccuguuauguu

SEQ ID NO: 775914 - RNA, 17 nt, Artificial Sequence
  Synthetic
aguuauccuuuuauguu

SEQ ID NO: 775915 - RNA, 17 nt, Artificial Sequence
  Synthetic
augccuauaaaacuguu

SEQ ID NO: 775916 - RNA, 17 nt, Artificial Sequence
  Synthetic
auacaaacuaaacuguu

SEQ ID NO: 775917 - RNA, 17 nt, Artificial Sequence
  Synthetic
uuguguuuuuaacuguu

SEQ ID NO: 775918 - RNA, 17 nt, Artificial Sequence
  Synthetic
auguguuagacacuguu

SEQ ID NO: 775919 - RNA, 17 nt, Artificial Sequence
  Synthetic
auaguuuuaucacuguu

SEQ ID NO: 775920 - RNA, 17 nt, Artificial Sequence
  Synthetic
uguauucugcuacuguu

SEQ ID NO: 775921 - RNA, 17 nt, Artificial Sequence
  Synthetic
ccuugagucuuacuguu

SEQ ID NO: 775922 - RNA, 17 nt, Artificial Sequence
  Synthetic
uuguggugccaccuguu

SEQ ID NO: 775923 - RNA, 17 nt, Artificial Sequence
  Synthetic
caggucagugaccuguu

SEQ ID NO: 775924 - RNA, 17 nt, Artificial Sequence
  Synthetic
aaauucauauaccuguu

SEQ ID NO: 775925 - RNA, 17 nt, Artificial Sequence
  Synthetic
aucaucucaccccuguu

SEQ ID NO: 775926 - RNA, 17 nt, Artificial Sequence
  Synthetic
cauuacuucucccuguu

SEQ ID NO: 775927 - RNA, 17 nt, Artificial Sequence
  Synthetic
uauauguauggccuguu

SEQ ID NO: 775928 - RNA, 17 nt, Artificial Sequence
  Synthetic
aaagaaagaugccuguu

SEQ ID NO: 775929 - RNA, 17 nt, Artificial Sequence
  Synthetic
acacacuggugccuguu

SEQ ID NO: 775930 - RNA, 17 nt, Artificial Sequence
  Synthetic
ccaauccguugccuguu

SEQ ID NO: 775931 - RNA, 17 nt, Artificial Sequence
  Synthetic
cugcaaaacuuccuguu

SEQ ID NO: 775932 - RNA, 17 nt, Artificial Sequence
  Synthetic
aaaaauauuuuccuguu

SEQ ID NO: 775933 - RNA, 17 nt, Artificial Sequence
  Synthetic
auuuuggcaaagcuguu

SEQ ID NO: 775934 - RNA, 17 nt, Artificial Sequence
  Synthetic
cucagcucaaagcuguu

SEQ ID NO: 775935 - RNA, 17 nt, Artificial Sequence
  Synthetic
aaucccuuacagcuguu

SEQ ID NO: 775936 - RNA, 17 nt, Artificial Sequence
  Synthetic
aaaauugggcagcuguu

SEQ ID NO: 775937 - RNA, 17 nt, Artificial Sequence
  Synthetic
ugagaacaugcgcuguu

SEQ ID NO: 775938 - RNA, 17 nt, Artificial Sequence
  Synthetic
ugcugcugcucgcuguu

SEQ ID NO: 775939 - RNA, 17 nt, Artificial Sequence
  Synthetic
aucauacauaggcuguu

SEQ ID NO: 775940 - RNA, 17 nt, Artificial Sequence
  Synthetic
uaauauacugggcuguu

SEQ ID NO: 775941 - RNA, 17 nt, Artificial Sequence
  Synthetic
acugaacccuggcuguu

SEQ ID NO: 775942 - RNA, 17 nt, Artificial Sequence
  Synthetic
uggggcucaaugcuguu

SEQ ID NO: 775943 - RNA, 17 nt, Artificial Sequence
  Synthetic
uuaacuggaaugcuguu

SEQ ID NO: 775944 - RNA, 17 nt, Artificial Sequence
  Synthetic
ugagaacauaugcuguu

SEQ ID NO: 775945 - RNA, 17 nt, Artificial Sequence
  Synthetic
uguucuagacugcuguu

SEQ ID NO: 775946 - RNA, 17 nt, Artificial Sequence
  Synthetic
auuugaggacugcuguu

SEQ ID NO: 775947 - RNA, 17 nt, Artificial Sequence
  Synthetic
agcuggugccugcuguu

SEQ ID NO: 775948 - RNA, 17 nt, Artificial Sequence
  Synthetic
uuggugcagcugcuguu

SEQ ID NO: 775949 - RNA, 17 nt, Artificial Sequence
  Synthetic
uuucacugagugcuguu

SEQ ID NO: 775950 - RNA, 17 nt, Artificial Sequence
  Synthetic
uuuaucaaaaaucuguu

SEQ ID NO: 775951 - RNA, 17 nt, Artificial Sequence
  Synthetic
aucuugaguaaucuguu

SEQ ID NO: 775952 - RNA, 17 nt, Artificial Sequence
  Synthetic
uaauguuguaaucuguu

SEQ ID NO: 775953 - RNA, 17 nt, Artificial Sequence
  Synthetic
aacauacugcaucuguu

SEQ ID NO: 775954 - RNA, 17 nt, Artificial Sequence
  Synthetic
uugacuugucaucuguu

SEQ ID NO: 775955 - RNA, 17 nt, Artificial Sequence
  Synthetic
ccagguguggaucuguu

SEQ ID NO: 775956 - RNA, 17 nt, Artificial Sequence
  Synthetic
cuguauagauaucuguu

SEQ ID NO: 775957 - RNA, 17 nt, Artificial Sequence
  Synthetic
ccucacuguccucuguu

SEQ ID NO: 775958 - RNA, 17 nt, Artificial Sequence
  Synthetic
cauugaauuccucuguu

SEQ ID NO: 775959 - RNA, 17 nt, Artificial Sequence
  Synthetic
ugggugccuucucuguu

SEQ ID NO: 775960 - RNA, 17 nt, Artificial Sequence
  Synthetic
ugccuaguuucucuguu

SEQ ID NO: 775961 - RNA, 17 nt, Artificial Sequence
  Synthetic
auuaaaauaagucuguu

SEQ ID NO: 775962 - RNA, 17 nt, Artificial Sequence
  Synthetic
uucuguauaugucuguu

SEQ ID NO: 775963 - RNA, 17 nt, Artificial Sequence
  Synthetic
uauguucauugucuguu

SEQ ID NO: 775964 - RNA, 17 nt, Artificial Sequence
  Synthetic
ugacugcucauucuguu

SEQ ID NO: 775965 - RNA, 17 nt, Artificial Sequence
  Synthetic
cacaucaaacuucuguu

SEQ ID NO: 775966 - RNA, 17 nt, Artificial Sequence
  Synthetic
aaauaaauccuucuguu

SEQ ID NO: 775967 - RNA, 17 nt, Artificial Sequence
  Synthetic
ucugcuagucuucuguu

SEQ ID NO: 775968 - RNA, 17 nt, Artificial Sequence
  Synthetic
aggccgucgguucuguu

SEQ ID NO: 775969 - RNA, 17 nt, Artificial Sequence
  Synthetic
auucauccauuucuguu

SEQ ID NO: 775970 - RNA, 17 nt, Artificial Sequence
  Synthetic
ucagguuuauuucuguu

SEQ ID NO: 775971 - RNA, 17 nt, Artificial Sequence
  Synthetic
aucacaguguuucuguu

SEQ ID NO: 775972 - RNA, 17 nt, Artificial Sequence
  Synthetic
cccuaugguuuucuguu

SEQ ID NO: 775973 - RNA, 17 nt, Artificial Sequence
  Synthetic
cggccccccaaaguguu

SEQ ID NO: 775974 - RNA, 17 nt, Artificial Sequence
  Synthetic
cagccucccaaaguguu

SEQ ID NO: 775975 - RNA, 17 nt, Artificial Sequence
  Synthetic
cggccucccaaaguguu

SEQ ID NO: 775976 - RNA, 17 nt, Artificial Sequence
  Synthetic
uggccucccaaaguguu

SEQ ID NO: 775977 - RNA, 17 nt, Artificial Sequence
  Synthetic
cguauuugugaaguguu

SEQ ID NO: 775978 - RNA, 17 nt, Artificial Sequence
  Synthetic
cacgugucuuaaguguu

SEQ ID NO: 775979 - RNA, 17 nt, Artificial Sequence
  Synthetic
uuuaaacauacaguguu

SEQ ID NO: 775980 - RNA, 17 nt, Artificial Sequence
  Synthetic
cuaggagcaccaguguu

SEQ ID NO: 775981 - RNA, 17 nt, Artificial Sequence
  Synthetic
cacagccccccaguguu

SEQ ID NO: 775982 - RNA, 17 nt, Artificial Sequence
  Synthetic
ugagaacaugcaguguu

SEQ ID NO: 775983 - RNA, 17 nt, Artificial Sequence
  Synthetic
ugagaccaugcaguguu

SEQ ID NO: 775984 - RNA, 17 nt, Artificial Sequence
  Synthetic
ugagaauaugcaguguu

SEQ ID NO: 775985 - RNA, 17 nt, Artificial Sequence
  Synthetic
ugagaguaugcaguguu

SEQ ID NO: 775986 - RNA, 17 nt, Artificial Sequence
  Synthetic
acugaauaaucaguguu

SEQ ID NO: 775987 - RNA, 17 nt, Artificial Sequence
  Synthetic
ccaucaccuugaguguu

SEQ ID NO: 775988 - RNA, 17 nt, Artificial Sequence
  Synthetic
aggugaucaauaguguu

SEQ ID NO: 775989 - RNA, 17 nt, Artificial Sequence
  Synthetic
cauauucugaacguguu

SEQ ID NO: 775990 - RNA, 17 nt, Artificial Sequence
  Synthetic
auacauaugcacguguu

SEQ ID NO: 775991 - RNA, 17 nt, Artificial Sequence
  Synthetic
cauaauuucagcguguu

SEQ ID NO: 775992 - RNA, 17 nt, Artificial Sequence
  Synthetic
caacauuacaagguguu

SEQ ID NO: 775993 - RNA, 17 nt, Artificial Sequence
  Synthetic
uaauuauaugagguguu

SEQ ID NO: 775994 - RNA, 17 nt, Artificial Sequence
  Synthetic
auucccagcccgguguu

SEQ ID NO: 775995 - RNA, 17 nt, Artificial Sequence
  Synthetic
cgagaacaugcgguguu

SEQ ID NO: 775996 - RNA, 17 nt, Artificial Sequence
  Synthetic
ugagaacaugcgguguu

SEQ ID NO: 775997 - RNA, 17 nt, Artificial Sequence
  Synthetic
ugaggacaugcgguguu

SEQ ID NO: 775998 - RNA, 17 nt, Artificial Sequence
  Synthetic
ugagaauaugcgguguu

SEQ ID NO: 775999 - RNA, 17 nt, Artificial Sequence
  Synthetic
aacaaugcuuggguguu

SEQ ID NO: 776000 - RNA, 17 nt, Artificial Sequence
  Synthetic
auuuaauaaaugguguu

SEQ ID NO: 776001 - RNA, 17 nt, Artificial Sequence
  Synthetic
auuuauuucaugguguu

SEQ ID NO: 776002 - RNA, 17 nt, Artificial Sequence
  Synthetic
uuucagugucugguguu

SEQ ID NO: 776003 - RNA, 17 nt, Artificial Sequence
  Synthetic
uuuuuaaaagugguguu

SEQ ID NO: 776004 - RNA, 17 nt, Artificial Sequence
  Synthetic
uuaauuugagugguguu

SEQ ID NO: 776005 - RNA, 17 nt, Artificial Sequence
  Synthetic
uaagaacaugugguguu

SEQ ID NO: 776006 - RNA, 17 nt, Artificial Sequence
  Synthetic
ugagaacaugugguguu

SEQ ID NO: 776007 - RNA, 17 nt, Artificial Sequence
  Synthetic
ugagaauaugugguguu

SEQ ID NO: 776008 - RNA, 17 nt, Artificial Sequence
  Synthetic
cauacuaguuugguguu

SEQ ID NO: 776009 - RNA, 17 nt, Artificial Sequence
  Synthetic
uugucauaaaauguguu

SEQ ID NO: 776010 - RNA, 17 nt, Artificial Sequence
  Synthetic
augcucacaaauguguu

SEQ ID NO: 776011 - RNA, 17 nt, Artificial Sequence
  Synthetic
cacacacacaauguguu

SEQ ID NO: 776012 - RNA, 17 nt, Artificial Sequence
  Synthetic
uucuaauucaauguguu

SEQ ID NO: 776013 - RNA, 17 nt, Artificial Sequence
  Synthetic
agauuuuucaauguguu

SEQ ID NO: 776014 - RNA, 17 nt, Artificial Sequence
  Synthetic
aauaaugguaauguguu

SEQ ID NO: 776015 - RNA, 17 nt, Artificial Sequence
  Synthetic
uaccucuuccauguguu

SEQ ID NO: 776016 - RNA, 17 nt, Artificial Sequence
  Synthetic
aaggucuuucauguguu

SEQ ID NO: 776017 - RNA, 17 nt, Artificial Sequence
  Synthetic
aaugcuuuugauguguu

SEQ ID NO: 776018 - RNA, 17 nt, Artificial Sequence
  Synthetic
uaugccauauauguguu

SEQ ID NO: 776019 - RNA, 17 nt, Artificial Sequence
  Synthetic
auugauuacuauguguu

SEQ ID NO: 776020 - RNA, 17 nt, Artificial Sequence
  Synthetic
agcacuuacuauguguu

SEQ ID NO: 776021 - RNA, 17 nt, Artificial Sequence
  Synthetic
acaggguagacuguguu

SEQ ID NO: 776022 - RNA, 17 nt, Artificial Sequence
  Synthetic
uuuguuacaucuguguu

SEQ ID NO: 776023 - RNA, 17 nt, Artificial Sequence
  Synthetic
aguggggacucuguguu

SEQ ID NO: 776024 - RNA, 17 nt, Artificial Sequence
  Synthetic
auuugucuuucuguguu

SEQ ID NO: 776025 - RNA, 17 nt, Artificial Sequence
  Synthetic
uaccauuuuucuguguu

SEQ ID NO: 776026 - RNA, 17 nt, Artificial Sequence
  Synthetic
agauuccucaguguguu

SEQ ID NO: 776027 - RNA, 17 nt, Artificial Sequence
  Synthetic
aguaauauauguguguu

SEQ ID NO: 776028 - RNA, 17 nt, Artificial Sequence
  Synthetic
uucagugacuguguguu

SEQ ID NO: 776029 - RNA, 17 nt, Artificial Sequence
  Synthetic
auguguauguguguguu

SEQ ID NO: 776030 - RNA, 17 nt, Artificial Sequence
  Synthetic
acuauuguguguguguu

SEQ ID NO: 776031 - RNA, 17 nt, Artificial Sequence
  Synthetic
uuggaauauuguguguu

SEQ ID NO: 776032 - RNA, 17 nt, Artificial Sequence
  Synthetic
uuuguguugauuguguu

SEQ ID NO: 776033 - RNA, 17 nt, Artificial Sequence
  Synthetic
ugagaaagauuuguguu

SEQ ID NO: 776034 - RNA, 17 nt, Artificial Sequence
  Synthetic
uaccauugcuuuguguu

SEQ ID NO: 776035 - RNA, 17 nt, Artificial Sequence
  Synthetic
agaaacaaaaaauuguu

SEQ ID NO: 776036 - RNA, 17 nt, Artificial Sequence
  Synthetic
uggagggggaaauuguu

SEQ ID NO: 776037 - RNA, 17 nt, Artificial Sequence
  Synthetic
accuuagaagaauuguu

SEQ ID NO: 776038 - RNA, 17 nt, Artificial Sequence
  Synthetic
uuuguuuuggaauuguu

SEQ ID NO: 776039 - RNA, 17 nt, Artificial Sequence
  Synthetic
uauauucuauaauuguu

SEQ ID NO: 776040 - RNA, 17 nt, Artificial Sequence
  Synthetic
ucauccaacuaauuguu

SEQ ID NO: 776041 - RNA, 17 nt, Artificial Sequence
  Synthetic
uucuauaauuaauuguu

SEQ ID NO: 776042 - RNA, 17 nt, Artificial Sequence
  Synthetic
uaaaggucuuaauuguu

SEQ ID NO: 776043 - RNA, 17 nt, Artificial Sequence
  Synthetic
augcuaccaacauuguu

SEQ ID NO: 776044 - RNA, 17 nt, Artificial Sequence
  Synthetic
uuuucuaucacauuguu

SEQ ID NO: 776045 - RNA, 17 nt, Artificial Sequence
  Synthetic
acaguuggcccauuguu

SEQ ID NO: 776046 - RNA, 17 nt, Artificial Sequence
  Synthetic
cuuuaaguugcauuguu

SEQ ID NO: 776047 - RNA, 17 nt, Artificial Sequence
  Synthetic
uuuuuuuuugcauuguu

SEQ ID NO: 776048 - RNA, 17 nt, Artificial Sequence
  Synthetic
auugagauaucauuguu

SEQ ID NO: 776049 - RNA, 17 nt, Artificial Sequence
  Synthetic
uuacuugauucauuguu

SEQ ID NO: 776050 - RNA, 17 nt, Artificial Sequence
  Synthetic
auauauuaaagauuguu

SEQ ID NO: 776051 - RNA, 17 nt, Artificial Sequence
  Synthetic
aaaaaauuaagauuguu

SEQ ID NO: 776052 - RNA, 17 nt, Artificial Sequence
  Synthetic
aguauaauuggauuguu

SEQ ID NO: 776053 - RNA, 17 nt, Artificial Sequence
  Synthetic
cgggcacauugauuguu

SEQ ID NO: 776054 - RNA, 17 nt, Artificial Sequence
  Synthetic
cucacaaacauauuguu

SEQ ID NO: 776055 - RNA, 17 nt, Artificial Sequence
  Synthetic
augcuuuucauauuguu

SEQ ID NO: 776056 - RNA, 17 nt, Artificial Sequence
  Synthetic
uuaaugaauguauuguu

SEQ ID NO: 776057 - RNA, 17 nt, Artificial Sequence
  Synthetic
uacagggucuuauuguu

SEQ ID NO: 776058 - RNA, 17 nt, Artificial Sequence
  Synthetic
aaggccugguuauuguu

SEQ ID NO: 776059 - RNA, 17 nt, Artificial Sequence
  Synthetic
uuugauugguuauuguu

SEQ ID NO: 776060 - RNA, 17 nt, Artificial Sequence
  Synthetic
uuuuaugcuuuauuguu

SEQ ID NO: 776061 - RNA, 17 nt, Artificial Sequence
  Synthetic
uucucgaaaaacuuguu

SEQ ID NO: 776062 - RNA, 17 nt, Artificial Sequence
  Synthetic
uacauuuaucacuuguu

SEQ ID NO: 776063 - RNA, 17 nt, Artificial Sequence
  Synthetic
auuuauugguacuuguu

SEQ ID NO: 776064 - RNA, 17 nt, Artificial Sequence
  Synthetic
uuucuguuuuacuuguu

SEQ ID NO: 776065 - RNA, 17 nt, Artificial Sequence
  Synthetic
ucccauuaacccuuguu

SEQ ID NO: 776066 - RNA, 17 nt, Artificial Sequence
  Synthetic
uuuuggacucccuuguu

SEQ ID NO: 776067 - RNA, 17 nt, Artificial Sequence
  Synthetic
aguacagaugccuuguu

SEQ ID NO: 776068 - RNA, 17 nt, Artificial Sequence
  Synthetic
ucaaaaauauccuuguu

SEQ ID NO: 776069 - RNA, 17 nt, Artificial Sequence
  Synthetic
aacguauuuugcuuguu

SEQ ID NO: 776070 - RNA, 17 nt, Artificial Sequence
  Synthetic
ucuguaccucucuuguu

SEQ ID NO: 776071 - RNA, 17 nt, Artificial Sequence
  Synthetic
ccuuuucaauucuuguu

SEQ ID NO: 776072 - RNA, 17 nt, Artificial Sequence
  Synthetic
aacuguacuuucuuguu

SEQ ID NO: 776073 - RNA, 17 nt, Artificial Sequence
  Synthetic
cugcuuuuuaaguuguu

SEQ ID NO: 776074 - RNA, 17 nt, Artificial Sequence
  Synthetic
uaugguucccaguuguu

SEQ ID NO: 776075 - RNA, 17 nt, Artificial Sequence
  Synthetic
ucugaaacagaguuguu

SEQ ID NO: 776076 - RNA, 17 nt, Artificial Sequence
  Synthetic
agcuccaaauaguuguu

SEQ ID NO: 776077 - RNA, 17 nt, Artificial Sequence
  Synthetic
uuagggagcuaguuguu

SEQ ID NO: 776078 - RNA, 17 nt, Artificial Sequence
  Synthetic
aaagcugcaggguuguu

SEQ ID NO: 776079 - RNA, 17 nt, Artificial Sequence
  Synthetic
uuggaagcucuguuguu

SEQ ID NO: 776080 - RNA, 17 nt, Artificial Sequence
  Synthetic
auuauucuucuguuguu

SEQ ID NO: 776081 - RNA, 17 nt, Artificial Sequence
  Synthetic
uagguagaguuguuguu

SEQ ID NO: 776082 - RNA, 17 nt, Artificial Sequence
  Synthetic
auucauccuuuguuguu

SEQ ID NO: 776083 - RNA, 17 nt, Artificial Sequence
  Synthetic
uaagugugaaauuuguu

SEQ ID NO: 776084 - RNA, 17 nt, Artificial Sequence
  Synthetic
aucuuguuaaauuuguu

SEQ ID NO: 776085 - RNA, 17 nt, Artificial Sequence
  Synthetic
ccuacagccaauuuguu

SEQ ID NO: 776086 - RNA, 17 nt, Artificial Sequence
  Synthetic
uuugguaguaauuuguu

SEQ ID NO: 776087 - RNA, 17 nt, Artificial Sequence
  Synthetic
uuuggagguaauuuguu

SEQ ID NO: 776088 - RNA, 17 nt, Artificial Sequence
  Synthetic
auggucucccauuuguu

SEQ ID NO: 776089 - RNA, 17 nt, Artificial Sequence
  Synthetic
auguuuuuccauuuguu

SEQ ID NO: 776090 - RNA, 17 nt, Artificial Sequence
  Synthetic
aagcaaguucauuuguu

SEQ ID NO: 776091 - RNA, 17 nt, Artificial Sequence
  Synthetic
ccugcuggagauuuguu

SEQ ID NO: 776092 - RNA, 17 nt, Artificial Sequence
  Synthetic
uuuugaacauauuuguu

SEQ ID NO: 776093 - RNA, 17 nt, Artificial Sequence
  Synthetic
uuucuaaacuauuuguu

SEQ ID NO: 776094 - RNA, 17 nt, Artificial Sequence
  Synthetic
agaaccuacuauuuguu

SEQ ID NO: 776095 - RNA, 17 nt, Artificial Sequence
  Synthetic
agauaacuguauuuguu

SEQ ID NO: 776096 - RNA, 17 nt, Artificial Sequence
  Synthetic
uaaaucucuuauuuguu

SEQ ID NO: 776097 - RNA, 17 nt, Artificial Sequence
  Synthetic
ccuggagccccuuuguu

SEQ ID NO: 776098 - RNA, 17 nt, Artificial Sequence
  Synthetic
uauauaucuccuuuguu

SEQ ID NO: 776099 - RNA, 17 nt, Artificial Sequence
  Synthetic
acaaugcuggcuuuguu

SEQ ID NO: 776100 - RNA, 17 nt, Artificial Sequence
  Synthetic
cuuaaagcugcuuuguu

SEQ ID NO: 776101 - RNA, 17 nt, Artificial Sequence
  Synthetic
uccaaaauugcuuuguu

SEQ ID NO: 776102 - RNA, 17 nt, Artificial Sequence
  Synthetic
cuaguguuuucuuuguu

SEQ ID NO: 776103 - RNA, 17 nt, Artificial Sequence
  Synthetic
uuuaauuuaaguuuguu

SEQ ID NO: 776104 - RNA, 17 nt, Artificial Sequence
  Synthetic
uaaccaauagguuuguu

SEQ ID NO: 776105 - RNA, 17 nt, Artificial Sequence
  Synthetic
uuaaauuuuuguuuguu

SEQ ID NO: 776106 - RNA, 17 nt, Artificial Sequence
  Synthetic
uguaauucaauuuuguu

SEQ ID NO: 776107 - RNA, 17 nt, Artificial Sequence
  Synthetic
ccuucagauauuuuguu

SEQ ID NO: 776108 - RNA, 17 nt, Artificial Sequence
  Synthetic
cucuuuugucuuuuguu

SEQ ID NO: 776109 - RNA, 17 nt, Artificial Sequence
  Synthetic
cgcuuguuucuuuuguu

SEQ ID NO: 776110 - RNA, 17 nt, Artificial Sequence
  Synthetic
ccagugaggguuuuguu

SEQ ID NO: 776111 - RNA, 17 nt, Artificial Sequence
  Synthetic
uuuuauuacuuuuuguu

SEQ ID NO: 776112 - RNA, 17 nt, Artificial Sequence
  Synthetic
uccuaggucuuuuuguu

SEQ ID NO: 776113 - RNA, 17 nt, Artificial Sequence
  Synthetic
augugugucuuuuuguu

SEQ ID NO: 776114 - RNA, 17 nt, Artificial Sequence
  Synthetic
cuucugagguuuuuguu

SEQ ID NO: 776115 - RNA, 17 nt, Artificial Sequence
  Synthetic
cagaaaaaaaaaaauuu

SEQ ID NO: 776116 - RNA, 17 nt, Artificial Sequence
  Synthetic
aaaaagauaaaaaauuu

SEQ ID NO: 776117 - RNA, 17 nt, Artificial Sequence
  Synthetic
cucuuagacaaaaauuu

SEQ ID NO: 776118 - RNA, 17 nt, Artificial Sequence
  Synthetic
agguaagagaaaaauuu

SEQ ID NO: 776119 - RNA, 17 nt, Artificial Sequence
  Synthetic
uaaaacuaucaaaauuu

SEQ ID NO: 776120 - RNA, 17 nt, Artificial Sequence
  Synthetic
caaaauagucaaaauuu

SEQ ID NO: 776121 - RNA, 17 nt, Artificial Sequence
  Synthetic
uagauuugcuaaaauuu

SEQ ID NO: 776122 - RNA, 17 nt, Artificial Sequence
  Synthetic
caacuuuaguaaaauuu

SEQ ID NO: 776123 - RNA, 17 nt, Artificial Sequence
  Synthetic
uggcacaauuaaaauuu

SEQ ID NO: 776124 - RNA, 17 nt, Artificial Sequence
  Synthetic
uauauauguuaaaauuu

SEQ ID NO: 776125 - RNA, 17 nt, Artificial Sequence
  Synthetic
auaaacaacacaaauuu

SEQ ID NO: 776126 - RNA, 17 nt, Artificial Sequence
  Synthetic
uggagcgagacaaauuu

SEQ ID NO: 776127 - RNA, 17 nt, Artificial Sequence
  Synthetic
cauuuugaugcaaauuu

SEQ ID NO: 776128 - RNA, 17 nt, Artificial Sequence
  Synthetic
uuuccccuugcaaauuu

SEQ ID NO: 776129 - RNA, 17 nt, Artificial Sequence
  Synthetic
ugcuauaacucaaauuu

SEQ ID NO: 776130 - RNA, 17 nt, Artificial Sequence
  Synthetic
uugacaaucucaaauuu

SEQ ID NO: 776131 - RNA, 17 nt, Artificial Sequence
  Synthetic
aggugugguucaaauuu

SEQ ID NO: 776132 - RNA, 17 nt, Artificial Sequence
  Synthetic
uaggcaugaagaaauuu

SEQ ID NO: 776133 - RNA, 17 nt, Artificial Sequence
  Synthetic
cugacucuaagaaauuu

SEQ ID NO: 776134 - RNA, 17 nt, Artificial Sequence
  Synthetic
uauuuuaacagaaauuu

SEQ ID NO: 776135 - RNA, 17 nt, Artificial Sequence
  Synthetic
augaguucgagaaauuu

SEQ ID NO: 776136 - RNA, 17 nt, Artificial Sequence
  Synthetic
cuaguggaaggaaauuu

SEQ ID NO: 776137 - RNA, 17 nt, Artificial Sequence
  Synthetic
uuacagccaggaaauuu

SEQ ID NO: 776138 - RNA, 17 nt, Artificial Sequence
  Synthetic
auacacagaggaaauuu

SEQ ID NO: 776139 - RNA, 17 nt, Artificial Sequence
  Synthetic
ucgaauacuggaaauuu

SEQ ID NO: 776140 - RNA, 17 nt, Artificial Sequence
  Synthetic
ucaaaauaaugaaauuu

SEQ ID NO: 776141 - RNA, 17 nt, Artificial Sequence
  Synthetic
uccaacacaugaaauuu

SEQ ID NO: 776142 - RNA, 17 nt, Artificial Sequence
  Synthetic
uucccaagcugaaauuu

SEQ ID NO: 776143 - RNA, 17 nt, Artificial Sequence
  Synthetic
agguaccucugaaauuu

SEQ ID NO: 776144 - RNA, 17 nt, Artificial Sequence
  Synthetic
uuguaucaaauaaauuu

SEQ ID NO: 776145 - RNA, 17 nt, Artificial Sequence
  Synthetic
accuuucaaauaaauuu

SEQ ID NO: 776146 - RNA, 17 nt, Artificial Sequence
  Synthetic
uauaauggaauaaauuu

SEQ ID NO: 776147 - RNA, 17 nt, Artificial Sequence
  Synthetic
uguaagauaauaaauuu

SEQ ID NO: 776148 - RNA, 17 nt, Artificial Sequence
  Synthetic
aaagucuuaauaaauuu

SEQ ID NO: 776149 - RNA, 17 nt, Artificial Sequence
  Synthetic
uuuugucauauaaauuu

SEQ ID NO: 776150 - RNA, 17 nt, Artificial Sequence
  Synthetic
agcaucccacuaaauuu

SEQ ID NO: 776151 - RNA, 17 nt, Artificial Sequence
  Synthetic
acuucuguacuaaauuu

SEQ ID NO: 776152 - RNA, 17 nt, Artificial Sequence
  Synthetic
uuuaagcugcuaaauuu

SEQ ID NO: 776153 - RNA, 17 nt, Artificial Sequence
  Synthetic
uugccuaaucuaaauuu

SEQ ID NO: 776154 - RNA, 17 nt, Artificial Sequence
  Synthetic
cauguauaaguaaauuu

SEQ ID NO: 776155 - RNA, 17 nt, Artificial Sequence
  Synthetic
uuuggcaaauuaaauuu

SEQ ID NO: 776156 - RNA, 17 nt, Artificial Sequence
  Synthetic
acuugcuaauuaaauuu

SEQ ID NO: 776157 - RNA, 17 nt, Artificial Sequence
  Synthetic
auacauugauuaaauuu

SEQ ID NO: 776158 - RNA, 17 nt, Artificial Sequence
  Synthetic
acauggcccuuaaauuu

SEQ ID NO: 776159 - RNA, 17 nt, Artificial Sequence
  Synthetic
cacuccaauuuaaauuu

SEQ ID NO: 776160 - RNA, 17 nt, Artificial Sequence
  Synthetic
aaaagcaaaaacaauuu

SEQ ID NO: 776161 - RNA, 17 nt, Artificial Sequence
  Synthetic
caguguuuaaacaauuu

SEQ ID NO: 776162 - RNA, 17 nt, Artificial Sequence
  Synthetic
uaaucuuugaacaauuu

SEQ ID NO: 776163 - RNA, 17 nt, Artificial Sequence
  Synthetic
aaagcaaaacacaauuu

SEQ ID NO: 776164 - RNA, 17 nt, Artificial Sequence
  Synthetic
uuucuguaggacaauuu

SEQ ID NO: 776165 - RNA, 17 nt, Artificial Sequence
  Synthetic
uauaguacauacaauuu

SEQ ID NO: 776166 - RNA, 17 nt, Artificial Sequence
  Synthetic
auguauugauacaauuu

SEQ ID NO: 776167 - RNA, 17 nt, Artificial Sequence
  Synthetic
acauauauauacaauuu

SEQ ID NO: 776168 - RNA, 17 nt, Artificial Sequence
  Synthetic
ugacacugguacaauuu

SEQ ID NO: 776169 - RNA, 17 nt, Artificial Sequence
  Synthetic
ucuacccauuacaauuu

SEQ ID NO: 776170 - RNA, 17 nt, Artificial Sequence
  Synthetic
uacagugcuuacaauuu

SEQ ID NO: 776171 - RNA, 17 nt, Artificial Sequence
  Synthetic
uuauuaucuuacaauuu

SEQ ID NO: 776172 - RNA, 17 nt, Artificial Sequence
  Synthetic
uuuuaguaagccaauuu

SEQ ID NO: 776173 - RNA, 17 nt, Artificial Sequence
  Synthetic
uccauuugagccaauuu

SEQ ID NO: 776174 - RNA, 17 nt, Artificial Sequence
  Synthetic
uaaauccaugccaauuu

SEQ ID NO: 776175 - RNA, 17 nt, Artificial Sequence
  Synthetic
cagauauucuccaauuu

SEQ ID NO: 776176 - RNA, 17 nt, Artificial Sequence
  Synthetic
aauuuauuguccaauuu

SEQ ID NO: 776177 - RNA, 17 nt, Artificial Sequence
  Synthetic
uguccauuuuccaauuu

SEQ ID NO: 776178 - RNA, 17 nt, Artificial Sequence
  Synthetic
accuaacaaagcaauuu

SEQ ID NO: 776179 - RNA, 17 nt, Artificial Sequence
  Synthetic
caagaugaaagcaauuu

SEQ ID NO: 776180 - RNA, 17 nt, Artificial Sequence
  Synthetic
uaauguucaagcaauuu

SEQ ID NO: 776181 - RNA, 17 nt, Artificial Sequence
  Synthetic
agcagguacagcaauuu

SEQ ID NO: 776182 - RNA, 17 nt, Artificial Sequence
  Synthetic
uguaaucccagcaauuu

SEQ ID NO: 776183 - RNA, 17 nt, Artificial Sequence
  Synthetic
uuaagcuccagcaauuu

SEQ ID NO: 776184 - RNA, 17 nt, Artificial Sequence
  Synthetic
uguaauaucagcaauuu

SEQ ID NO: 776185 - RNA, 17 nt, Artificial Sequence
  Synthetic
auuuauaucagcaauuu

SEQ ID NO: 776186 - RNA, 17 nt, Artificial Sequence
  Synthetic
caauauaaaggcaauuu

SEQ ID NO: 776187 - RNA, 17 nt, Artificial Sequence
  Synthetic
aguuaagaaugcaauuu

SEQ ID NO: 776188 - RNA, 17 nt, Artificial Sequence
  Synthetic
ccuuaaaaaaucaauuu

SEQ ID NO: 776189 - RNA, 17 nt, Artificial Sequence
  Synthetic
aacuucccaaucaauuu

SEQ ID NO: 776190 - RNA, 17 nt, Artificial Sequence
  Synthetic
auauaaaacaucaauuu

SEQ ID NO: 776191 - RNA, 17 nt, Artificial Sequence
  Synthetic
acauaaaauaucaauuu

SEQ ID NO: 776192 - RNA, 17 nt, Artificial Sequence
  Synthetic
cagagguuccucaauuu

SEQ ID NO: 776193 - RNA, 17 nt, Artificial Sequence
  Synthetic
ucucuccagcucaauuu

SEQ ID NO: 776194 - RNA, 17 nt, Artificial Sequence
  Synthetic
agaugacaagucaauuu

SEQ ID NO: 776195 - RNA, 17 nt, Artificial Sequence
  Synthetic
uuaagaaacgucaauuu

SEQ ID NO: 776196 - RNA, 17 nt, Artificial Sequence
  Synthetic
aaguauguggucaauuu

SEQ ID NO: 776197 - RNA, 17 nt, Artificial Sequence
  Synthetic
uguuagggugucaauuu

SEQ ID NO: 776198 - RNA, 17 nt, Artificial Sequence
  Synthetic
aaaccauuugucaauuu

SEQ ID NO: 776199 - RNA, 17 nt, Artificial Sequence
  Synthetic
aucccauuugucaauuu

SEQ ID NO: 776200 - RNA, 17 nt, Artificial Sequence
  Synthetic
cuaaacgaauucaauuu

SEQ ID NO: 776201 - RNA, 17 nt, Artificial Sequence
  Synthetic
auagaaacauucaauuu

SEQ ID NO: 776202 - RNA, 17 nt, Artificial Sequence
  Synthetic
auaaacaacuucaauuu

SEQ ID NO: 776203 - RNA, 17 nt, Artificial Sequence
  Synthetic
agugaucaguucaauuu

SEQ ID NO: 776204 - RNA, 17 nt, Artificial Sequence
  Synthetic
aagguuuuuaagaauuu

SEQ ID NO: 776205 - RNA, 17 nt, Artificial Sequence
  Synthetic
auccuggaacagaauuu

SEQ ID NO: 776206 - RNA, 17 nt, Artificial Sequence
  Synthetic
auccagagacagaauuu

SEQ ID NO: 776207 - RNA, 17 nt, Artificial Sequence
  Synthetic
uaggaaaugcagaauuu

SEQ ID NO: 776208 - RNA, 17 nt, Artificial Sequence
  Synthetic
aaggaacaucagaauuu

SEQ ID NO: 776209 - RNA, 17 nt, Artificial Sequence
  Synthetic
cugagauaucagaauuu

SEQ ID NO: 776210 - RNA, 17 nt, Artificial Sequence
  Synthetic
uaaggugcucagaauuu

SEQ ID NO: 776211 - RNA, 17 nt, Artificial Sequence
  Synthetic
auugggguucagaauuu

SEQ ID NO: 776212 - RNA, 17 nt, Artificial Sequence
  Synthetic
acauccuuggagaauuu

SEQ ID NO: 776213 - RNA, 17 nt, Artificial Sequence
  Synthetic
aguucagcugagaauuu

SEQ ID NO: 776214 - RNA, 17 nt, Artificial Sequence
  Synthetic
caauaaaaauagaauuu

SEQ ID NO: 776215 - RNA, 17 nt, Artificial Sequence
  Synthetic
ucugcaucauagaauuu

SEQ ID NO: 776216 - RNA, 17 nt, Artificial Sequence
  Synthetic
uauaaaagauagaauuu

SEQ ID NO: 776217 - RNA, 17 nt, Artificial Sequence
  Synthetic
uaacuuucuuagaauuu

SEQ ID NO: 776218 - RNA, 17 nt, Artificial Sequence
  Synthetic
caaugaaguuagaauuu

SEQ ID NO: 776219 - RNA, 17 nt, Artificial Sequence
  Synthetic
caguaaaaaaggaauuu

SEQ ID NO: 776220 - RNA, 17 nt, Artificial Sequence
  Synthetic
uuguuuugaaggaauuu

SEQ ID NO: 776221 - RNA, 17 nt, Artificial Sequence
  Synthetic
ugugugcucaggaauuu

SEQ ID NO: 776222 - RNA, 17 nt, Artificial Sequence
  Synthetic
ucaacaaugaggaauuu

SEQ ID NO: 776223 - RNA, 17 nt, Artificial Sequence
  Synthetic
aguuggaaauggaauuu

SEQ ID NO: 776224 - RNA, 17 nt, Artificial Sequence
  Synthetic
aaccaugguuggaauuu

SEQ ID NO: 776225 - RNA, 17 nt, Artificial Sequence
  Synthetic
augauacuuuggaauuu

SEQ ID NO: 776226 - RNA, 17 nt, Artificial Sequence
  Synthetic
aggagaauaaugaauuu

SEQ ID NO: 776227 - RNA, 17 nt, Artificial Sequence
  Synthetic
cuucacauucugaauuu

SEQ ID NO: 776228 - RNA, 17 nt, Artificial Sequence
  Synthetic
uuuacauuucugaauuu

SEQ ID NO: 776229 - RNA, 17 nt, Artificial Sequence
  Synthetic
agcacugaagugaauuu

SEQ ID NO: 776230 - RNA, 17 nt, Artificial Sequence
  Synthetic
aauaugccugugaauuu

SEQ ID NO: 776231 - RNA, 17 nt, Artificial Sequence
  Synthetic
aagauuucauugaauuu

SEQ ID NO: 776232 - RNA, 17 nt, Artificial Sequence
  Synthetic
auaauuuacuugaauuu

SEQ ID NO: 776233 - RNA, 17 nt, Artificial Sequence
  Synthetic
ugucuauuguugaauuu

SEQ ID NO: 776234 - RNA, 17 nt, Artificial Sequence
  Synthetic
uuuccaauuuugaauuu

SEQ ID NO: 776235 - RNA, 17 nt, Artificial Sequence
  Synthetic
agaaagcuuuugaauuu

SEQ ID NO: 776236 - RNA, 17 nt, Artificial Sequence
  Synthetic
cuguuuuaaaauaauuu

SEQ ID NO: 776237 - RNA, 17 nt, Artificial Sequence
  Synthetic
caauauagaaauaauuu

SEQ ID NO: 776238 - RNA, 17 nt, Artificial Sequence
  Synthetic
cuugacauuaauaauuu

SEQ ID NO: 776239 - RNA, 17 nt, Artificial Sequence
  Synthetic
uacaauguacauaauuu

SEQ ID NO: 776240 - RNA, 17 nt, Artificial Sequence
  Synthetic
aagaacagucauaauuu

SEQ ID NO: 776241 - RNA, 17 nt, Artificial Sequence
  Synthetic
aagaaagcugauaauuu

SEQ ID NO: 776242 - RNA, 17 nt, Artificial Sequence
  Synthetic
cauuaaaauuauaauuu

SEQ ID NO: 776243 - RNA, 17 nt, Artificial Sequence
  Synthetic
cuuucuuccacuaauuu

SEQ ID NO: 776244 - RNA, 17 nt, Artificial Sequence
  Synthetic
auugguauuacuaauuu

SEQ ID NO: 776245 - RNA, 17 nt, Artificial Sequence
  Synthetic
uucaagucaccuaauuu

SEQ ID NO: 776246 - RNA, 17 nt, Artificial Sequence
  Synthetic
caguguuauucuaauuu

SEQ ID NO: 776247 - RNA, 17 nt, Artificial Sequence
  Synthetic
acuuuuugaaguaauuu

SEQ ID NO: 776248 - RNA, 17 nt, Artificial Sequence
  Synthetic
ugagauuauaguaauuu

SEQ ID NO: 776249 - RNA, 17 nt, Artificial Sequence
  Synthetic
uuaauagucuguaauuu

SEQ ID NO: 776250 - RNA, 17 nt, Artificial Sequence
  Synthetic
uuaugaugaauuaauuu

SEQ ID NO: 776251 - RNA, 17 nt, Artificial Sequence
  Synthetic
cuguuuacuauuaauuu

SEQ ID NO: 776252 - RNA, 17 nt, Artificial Sequence
  Synthetic
aaaauauguauuaauuu

SEQ ID NO: 776253 - RNA, 17 nt, Artificial Sequence
  Synthetic
aagacuuguauuaauuu

SEQ ID NO: 776254 - RNA, 17 nt, Artificial Sequence
  Synthetic
ugcaacucuguuaauuu

SEQ ID NO: 776255 - RNA, 17 nt, Artificial Sequence
  Synthetic
caacaaauauuuaauuu

SEQ ID NO: 776256 - RNA, 17 nt, Artificial Sequence
  Synthetic
uuguucuuauuuaauuu

SEQ ID NO: 776257 - RNA, 17 nt, Artificial Sequence
  Synthetic
uuuuucaacuuuaauuu

SEQ ID NO: 776258 - RNA, 17 nt, Artificial Sequence
  Synthetic
ucuggucucuuuaauuu

SEQ ID NO: 776259 - RNA, 17 nt, Artificial Sequence
  Synthetic
aauauccauuuuaauuu

SEQ ID NO: 776260 - RNA, 17 nt, Artificial Sequence
  Synthetic
cacagucauuuuaauuu

SEQ ID NO: 776261 - RNA, 17 nt, Artificial Sequence
  Synthetic
ugaucuacuuuuaauuu

SEQ ID NO: 776262 - RNA, 17 nt, Artificial Sequence
  Synthetic
uuugcaaaaaaacauuu

SEQ ID NO: 776263 - RNA, 17 nt, Artificial Sequence
  Synthetic
aaaauaacuaaacauuu

SEQ ID NO: 776264 - RNA, 17 nt, Artificial Sequence
  Synthetic
auuuuauuuaaacauuu

SEQ ID NO: 776265 - RNA, 17 nt, Artificial Sequence
  Synthetic
uauauuuuuaaacauuu

SEQ ID NO: 776266 - RNA, 17 nt, Artificial Sequence
  Synthetic
uaugaaaaucaacauuu

SEQ ID NO: 776267 - RNA, 17 nt, Artificial Sequence
  Synthetic
ugucaaauucaacauuu

SEQ ID NO: 776268 - RNA, 17 nt, Artificial Sequence
  Synthetic
auacuuugggaacauuu

SEQ ID NO: 776269 - RNA, 17 nt, Artificial Sequence
  Synthetic
aaucacauggaacauuu

SEQ ID NO: 776270 - RNA, 17 nt, Artificial Sequence
  Synthetic
uagcauuacuaacauuu

SEQ ID NO: 776271 - RNA, 17 nt, Artificial Sequence
  Synthetic
uauaugaccuaacauuu

SEQ ID NO: 776272 - RNA, 17 nt, Artificial Sequence
  Synthetic
uacaguaaguaacauuu

SEQ ID NO: 776273 - RNA, 17 nt, Artificial Sequence
  Synthetic
aaagauagguaacauuu

SEQ ID NO: 776274 - RNA, 17 nt, Artificial Sequence
  Synthetic
aaccagaauuaacauuu

SEQ ID NO: 776275 - RNA, 17 nt, Artificial Sequence
  Synthetic
ccuuaauauuaacauuu

SEQ ID NO: 776276 - RNA, 17 nt, Artificial Sequence
  Synthetic
uaggugcaaacacauuu

SEQ ID NO: 776277 - RNA, 17 nt, Artificial Sequence
  Synthetic
cuguggcucacacauuu

SEQ ID NO: 776278 - RNA, 17 nt, Artificial Sequence
  Synthetic
caucugaagacacauuu

SEQ ID NO: 776279 - RNA, 17 nt, Artificial Sequence
  Synthetic
uuucaacauacacauuu

SEQ ID NO: 776280 - RNA, 17 nt, Artificial Sequence
  Synthetic
uucagcaaaccacauuu

SEQ ID NO: 776281 - RNA, 17 nt, Artificial Sequence
  Synthetic
agcucagucccacauuu

SEQ ID NO: 776282 - RNA, 17 nt, Artificial Sequence
  Synthetic
uaugaggaugcacauuu

SEQ ID NO: 776283 - RNA, 17 nt, Artificial Sequence
  Synthetic
cccaaugcugcacauuu

SEQ ID NO: 776284 - RNA, 17 nt, Artificial Sequence
  Synthetic
uaaguaaaaucacauuu

SEQ ID NO: 776285 - RNA, 17 nt, Artificial Sequence
  Synthetic
ccaaguauuucacauuu

SEQ ID NO: 776286 - RNA, 17 nt, Artificial Sequence
  Synthetic
cuacuucuuucacauuu

SEQ ID NO: 776287 - RNA, 17 nt, Artificial Sequence
  Synthetic
aaggaaaggagacauuu

SEQ ID NO: 776288 - RNA, 17 nt, Artificial Sequence
  Synthetic
aucauugucggacauuu

SEQ ID NO: 776289 - RNA, 17 nt, Artificial Sequence
  Synthetic
aucacugauggacauuu

SEQ ID NO: 776290 - RNA, 17 nt, Artificial Sequence
  Synthetic
uuagcugauggacauuu

SEQ ID NO: 776291 - RNA, 17 nt, Artificial Sequence
  Synthetic
aucauugauggacauuu

SEQ ID NO: 776292 - RNA, 17 nt, Artificial Sequence
  Synthetic
auuauugauggacauuu

SEQ ID NO: 776293 - RNA, 17 nt, Artificial Sequence
  Synthetic
uuuauugauggacauuu

SEQ ID NO: 776294 - RNA, 17 nt, Artificial Sequence
  Synthetic
caugcguauggacauuu

SEQ ID NO: 776295 - RNA, 17 nt, Artificial Sequence
  Synthetic
aucacuguuggacauuu

SEQ ID NO: 776296 - RNA, 17 nt, Artificial Sequence
  Synthetic
aucauuguuggacauuu

SEQ ID NO: 776297 - RNA, 17 nt, Artificial Sequence
  Synthetic
caccacaacugacauuu

SEQ ID NO: 776298 - RNA, 17 nt, Artificial Sequence
  Synthetic
uuauacuacugacauuu

SEQ ID NO: 776299 - RNA, 17 nt, Artificial Sequence
  Synthetic
ugacacucaauacauuu

SEQ ID NO: 776300 - RNA, 17 nt, Artificial Sequence
  Synthetic
uacaguuacauacauuu

SEQ ID NO: 776301 - RNA, 17 nt, Artificial Sequence
  Synthetic
cagcuccugauacauuu

SEQ ID NO: 776302 - RNA, 17 nt, Artificial Sequence
  Synthetic
cucuguagacuacauuu

SEQ ID NO: 776303 - RNA, 17 nt, Artificial Sequence
  Synthetic
uuucaaaaccuacauuu

SEQ ID NO: 776304 - RNA, 17 nt, Artificial Sequence
  Synthetic
uuuaagucucuacauuu

SEQ ID NO: 776305 - RNA, 17 nt, Artificial Sequence
  Synthetic
agacugagucuacauuu

SEQ ID NO: 776306 - RNA, 17 nt, Artificial Sequence
  Synthetic
uauauacuaguacauuu

SEQ ID NO: 776307 - RNA, 17 nt, Artificial Sequence
  Synthetic
aagcauaaauuacauuu

SEQ ID NO: 776308 - RNA, 17 nt, Artificial Sequence
  Synthetic
aaacauuaauuacauuu

SEQ ID NO: 776309 - RNA, 17 nt, Artificial Sequence
  Synthetic
uaaacauuguuacauuu

SEQ ID NO: 776310 - RNA, 17 nt, Artificial Sequence
  Synthetic
ccagaacauuuacauuu

SEQ ID NO: 776311 - RNA, 17 nt, Artificial Sequence
  Synthetic
cgauggucuuuacauuu

SEQ ID NO: 776312 - RNA, 17 nt, Artificial Sequence
  Synthetic
caaguuucuuuacauuu

SEQ ID NO: 776313 - RNA, 17 nt, Artificial Sequence
  Synthetic
uauccuuuuaaccauuu

SEQ ID NO: 776314 - RNA, 17 nt, Artificial Sequence
  Synthetic
uguuuuuugcaccauuu

SEQ ID NO: 776315 - RNA, 17 nt, Artificial Sequence
  Synthetic
ugaggaauagaccauuu

SEQ ID NO: 776316 - RNA, 17 nt, Artificial Sequence
  Synthetic
acaagaaaauaccauuu

SEQ ID NO: 776317 - RNA, 17 nt, Artificial Sequence
  Synthetic
ccccaccacuaccauuu

SEQ ID NO: 776318 - RNA, 17 nt, Artificial Sequence
  Synthetic
aagugauccacccauuu

SEQ ID NO: 776319 - RNA, 17 nt, Artificial Sequence
  Synthetic
uaacccucuacccauuu

SEQ ID NO: 776320 - RNA, 17 nt, Artificial Sequence
  Synthetic
aggcuuucuucccauuu

SEQ ID NO: 776321 - RNA, 17 nt, Artificial Sequence
  Synthetic
ugugagugaggccauuu

SEQ ID NO: 776322 - RNA, 17 nt, Artificial Sequence
  Synthetic
augauagauggccauuu

SEQ ID NO: 776323 - RNA, 17 nt, Artificial Sequence
  Synthetic
caacccagcugccauuu

SEQ ID NO: 776324 - RNA, 17 nt, Artificial Sequence
  Synthetic
cagcccuauugccauuu

SEQ ID NO: 776325 - RNA, 17 nt, Artificial Sequence
  Synthetic
ccaaaguuuauccauuu

SEQ ID NO: 776326 - RNA, 17 nt, Artificial Sequence
  Synthetic
ucucagaaccuccauuu

SEQ ID NO: 776327 - RNA, 17 nt, Artificial Sequence
  Synthetic
caaacuauucuccauuu

SEQ ID NO: 776328 - RNA, 17 nt, Artificial Sequence
  Synthetic
aauagagaauuccauuu

SEQ ID NO: 776329 - RNA, 17 nt, Artificial Sequence
  Synthetic
uucauugguuuccauuu

SEQ ID NO: 776330 - RNA, 17 nt, Artificial Sequence
  Synthetic
uuuauuauuuuccauuu

SEQ ID NO: 776331 - RNA, 17 nt, Artificial Sequence
  Synthetic
uaaagaaaaaagcauuu

SEQ ID NO: 776332 - RNA, 17 nt, Artificial Sequence
  Synthetic
uccaaucccaagcauuu

SEQ ID NO: 776333 - RNA, 17 nt, Artificial Sequence
  Synthetic
auccaucugaagcauuu

SEQ ID NO: 776334 - RNA, 17 nt, Artificial Sequence
  Synthetic
cuugagcuuaagcauuu

SEQ ID NO: 776335 - RNA, 17 nt, Artificial Sequence
  Synthetic
uaaaacagacagcauuu

SEQ ID NO: 776336 - RNA, 17 nt, Artificial Sequence
  Synthetic
uugugaguccagcauuu

SEQ ID NO: 776337 - RNA, 17 nt, Artificial Sequence
  Synthetic
uaucacuaucagcauuu

SEQ ID NO: 776338 - RNA, 17 nt, Artificial Sequence
  Synthetic
agaguuguucagcauuu

SEQ ID NO: 776339 - RNA, 17 nt, Artificial Sequence
  Synthetic
acagcacaagagcauuu

SEQ ID NO: 776340 - RNA, 17 nt, Artificial Sequence
  Synthetic
aucauugaugagcauuu

SEQ ID NO: 776341 - RNA, 17 nt, Artificial Sequence
  Synthetic
ucauagaaguagcauuu

SEQ ID NO: 776342 - RNA, 17 nt, Artificial Sequence
  Synthetic
acuugagcuuagcauuu

SEQ ID NO: 776343 - RNA, 17 nt, Artificial Sequence
  Synthetic
uaacucaacacgcauuu

SEQ ID NO: 776344 - RNA, 17 nt, Artificial Sequence
  Synthetic
uuuuaaaguacgcauuu

SEQ ID NO: 776345 - RNA, 17 nt, Artificial Sequence
  Synthetic
aaacuaaacaggcauuu

SEQ ID NO: 776346 - RNA, 17 nt, Artificial Sequence
  Synthetic
aaaacacuuaggcauuu

SEQ ID NO: 776347 - RNA, 17 nt, Artificial Sequence
  Synthetic
caucaccaucggcauuu

SEQ ID NO: 776348 - RNA, 17 nt, Artificial Sequence
  Synthetic
cuguaaucucggcauuu

SEQ ID NO: 776349 - RNA, 17 nt, Artificial Sequence
  Synthetic
ucugccaaugggcauuu

SEQ ID NO: 776350 - RNA, 17 nt, Artificial Sequence
  Synthetic
aucacugaugggcauuu

SEQ ID NO: 776351 - RNA, 17 nt, Artificial Sequence
  Synthetic
accauugaugggcauuu

SEQ ID NO: 776352 - RNA, 17 nt, Artificial Sequence
  Synthetic
aucauugaugggcauuu

SEQ ID NO: 776353 - RNA, 17 nt, Artificial Sequence
  Synthetic
ucgauugaugggcauuu

SEQ ID NO: 776354 - RNA, 17 nt, Artificial Sequence
  Synthetic
aucacuggugggcauuu

SEQ ID NO: 776355 - RNA, 17 nt, Artificial Sequence
  Synthetic
uacuaaaaaaugcauuu

SEQ ID NO: 776356 - RNA, 17 nt, Artificial Sequence
  Synthetic
uaccuaguaaugcauuu

SEQ ID NO: 776357 - RNA, 17 nt, Artificial Sequence
  Synthetic
auuuucaauaugcauuu

SEQ ID NO: 776358 - RNA, 17 nt, Artificial Sequence
  Synthetic
uuuagauguaugcauuu

SEQ ID NO: 776359 - RNA, 17 nt, Artificial Sequence
  Synthetic
cuaaaagugcugcauuu

SEQ ID NO: 776360 - RNA, 17 nt, Artificial Sequence
  Synthetic
uaauuuccucugcauuu

SEQ ID NO: 776361 - RNA, 17 nt, Artificial Sequence
  Synthetic
uucucauuuaaucauuu

SEQ ID NO: 776362 - RNA, 17 nt, Artificial Sequence
  Synthetic
cuugaauaacaucauuu

SEQ ID NO: 776363 - RNA, 17 nt, Artificial Sequence
  Synthetic
uggaagaaauaucauuu

SEQ ID NO: 776364 - RNA, 17 nt, Artificial Sequence
  Synthetic
ccacaaggguaucauuu

SEQ ID NO: 776365 - RNA, 17 nt, Artificial Sequence
  Synthetic
ucuaaguaaacucauuu

SEQ ID NO: 776366 - RNA, 17 nt, Artificial Sequence
  Synthetic
cagcaguaaacucauuu

SEQ ID NO: 776367 - RNA, 17 nt, Artificial Sequence
  Synthetic
auaaaaaucacucauuu

SEQ ID NO: 776368 - RNA, 17 nt, Artificial Sequence
  Synthetic
aucaguuucccucauuu

SEQ ID NO: 776369 - RNA, 17 nt, Artificial Sequence
  Synthetic
uaggacuagccucauuu

SEQ ID NO: 776370 - RNA, 17 nt, Artificial Sequence
  Synthetic
agcugaaugucucauuu

SEQ ID NO: 776371 - RNA, 17 nt, Artificial Sequence
  Synthetic
cuacacaugucucauuu

SEQ ID NO: 776372 - RNA, 17 nt, Artificial Sequence
  Synthetic
ucccacugaagucauuu

SEQ ID NO: 776373 - RNA, 17 nt, Artificial Sequence
  Synthetic
agaucccuuagucauuu

SEQ ID NO: 776374 - RNA, 17 nt, Artificial Sequence
  Synthetic
cuaugaacccgucauuu

SEQ ID NO: 776375 - RNA, 17 nt, Artificial Sequence
  Synthetic
auaguaaucugucauuu

SEQ ID NO: 776376 - RNA, 17 nt, Artificial Sequence
  Synthetic
ugaaauaugugucauuu

SEQ ID NO: 776377 - RNA, 17 nt, Artificial Sequence
  Synthetic
aaucacacaauucauuu

SEQ ID NO: 776378 - RNA, 17 nt, Artificial Sequence
  Synthetic
uguguuaagauucauuu

SEQ ID NO: 776379 - RNA, 17 nt, Artificial Sequence
  Synthetic
ccaguggcuauucauuu

SEQ ID NO: 776380 - RNA, 17 nt, Artificial Sequence
  Synthetic
uacuguauuauucauuu

SEQ ID NO: 776381 - RNA, 17 nt, Artificial Sequence
  Synthetic
cuguagccccuucauuu

SEQ ID NO: 776382 - RNA, 17 nt, Artificial Sequence
  Synthetic
cauuccuuccuucauuu

SEQ ID NO: 776383 - RNA, 17 nt, Artificial Sequence
  Synthetic
ucuuuaucucuucauuu

SEQ ID NO: 776384 - RNA, 17 nt, Artificial Sequence
  Synthetic
cacagggcaguucauuu

SEQ ID NO: 776385 - RNA, 17 nt, Artificial Sequence
  Synthetic
aaugaaauaguucauuu

SEQ ID NO: 776386 - RNA, 17 nt, Artificial Sequence
  Synthetic
uuuucauuauuucauuu

SEQ ID NO: 776387 - RNA, 17 nt, Artificial Sequence
  Synthetic
uagauauccuuucauuu

SEQ ID NO: 776388 - RNA, 17 nt, Artificial Sequence
  Synthetic
ucauaacaguuucauuu

SEQ ID NO: 776389 - RNA, 17 nt, Artificial Sequence
  Synthetic
uuguucacguuucauuu

SEQ ID NO: 776390 - RNA, 17 nt, Artificial Sequence
  Synthetic
cacauccacaaagauuu

SEQ ID NO: 776391 - RNA, 17 nt, Artificial Sequence
  Synthetic
agcugaaauaaagauuu

SEQ ID NO: 776392 - RNA, 17 nt, Artificial Sequence
  Synthetic
cuuuguuauaaagauuu

SEQ ID NO: 776393 - RNA, 17 nt, Artificial Sequence
  Synthetic
aguuaugguaaagauuu

SEQ ID NO: 776394 - RNA, 17 nt, Artificial Sequence
  Synthetic
uggcuacuuaaagauuu

SEQ ID NO: 776395 - RNA, 17 nt, Artificial Sequence
  Synthetic
uauuaaaaagaagauuu

SEQ ID NO: 776396 - RNA, 17 nt, Artificial Sequence
  Synthetic
ucagcuuaagaagauuu

SEQ ID NO: 776397 - RNA, 17 nt, Artificial Sequence
  Synthetic
uugaagguagaagauuu

SEQ ID NO: 776398 - RNA, 17 nt, Artificial Sequence
  Synthetic
aucaguugggaagauuu

SEQ ID NO: 776399 - RNA, 17 nt, Artificial Sequence
  Synthetic
agggauguguaagauuu

SEQ ID NO: 776400 - RNA, 17 nt, Artificial Sequence
  Synthetic
auucagcaaacagauuu

SEQ ID NO: 776401 - RNA, 17 nt, Artificial Sequence
  Synthetic
ccuccaguaacagauuu

SEQ ID NO: 776402 - RNA, 17 nt, Artificial Sequence
  Synthetic
agauuacuuacagauuu

SEQ ID NO: 776403 - RNA, 17 nt, Artificial Sequence
  Synthetic
aaagaccuuacagauuu

SEQ ID NO: 776404 - RNA, 17 nt, Artificial Sequence
  Synthetic
ugaucaguaccagauuu

SEQ ID NO: 776405 - RNA, 17 nt, Artificial Sequence
  Synthetic
cucagaguugcagauuu

SEQ ID NO: 776406 - RNA, 17 nt, Artificial Sequence
  Synthetic
auaaaaccaucagauuu

SEQ ID NO: 776407 - RNA, 17 nt, Artificial Sequence
  Synthetic
uccuucucuucagauuu

SEQ ID NO: 776408 - RNA, 17 nt, Artificial Sequence
  Synthetic
uuuggauuuucagauuu

SEQ ID NO: 776409 - RNA, 17 nt, Artificial Sequence
  Synthetic
cagauuuuuucagauuu

SEQ ID NO: 776410 - RNA, 17 nt, Artificial Sequence
  Synthetic
uucuaaaacagagauuu

SEQ ID NO: 776411 - RNA, 17 nt, Artificial Sequence
  Synthetic
auuucuuucagagauuu

SEQ ID NO: 776412 - RNA, 17 nt, Artificial Sequence
  Synthetic
ucagcuuaaggagauuu

SEQ ID NO: 776413 - RNA, 17 nt, Artificial Sequence
  Synthetic
aauucaaaaugagauuu

SEQ ID NO: 776414 - RNA, 17 nt, Artificial Sequence
  Synthetic
aauucagaaugagauuu

SEQ ID NO: 776415 - RNA, 17 nt, Artificial Sequence
  Synthetic
aauucaacaugagauuu

SEQ ID NO: 776416 - RNA, 17 nt, Artificial Sequence
  Synthetic
aaagggacaugagauuu

SEQ ID NO: 776417 - RNA, 17 nt, Artificial Sequence
  Synthetic
aauucaagaugagauuu

SEQ ID NO: 776418 - RNA, 17 nt, Artificial Sequence
  Synthetic
auuucaagaugagauuu

SEQ ID NO: 776419 - RNA, 17 nt, Artificial Sequence
  Synthetic
aguucuagaugagauuu

SEQ ID NO: 776420 - RNA, 17 nt, Artificial Sequence
  Synthetic
aauuuaauaugagauuu

SEQ ID NO: 776421 - RNA, 17 nt, Artificial Sequence
  Synthetic
cugagacagugagauuu

SEQ ID NO: 776422 - RNA, 17 nt, Artificial Sequence
  Synthetic
aauucaaggugagauuu

SEQ ID NO: 776423 - RNA, 17 nt, Artificial Sequence
  Synthetic
uacaaggugugagauuu

SEQ ID NO: 776424 - RNA, 17 nt, Artificial Sequence
  Synthetic
acugcccugauagauuu

SEQ ID NO: 776425 - RNA, 17 nt, Artificial Sequence
  Synthetic
acagaauaacuagauuu

SEQ ID NO: 776426 - RNA, 17 nt, Artificial Sequence
  Synthetic
acuaaauuucuagauuu

SEQ ID NO: 776427 - RNA, 17 nt, Artificial Sequence
  Synthetic
cagugaaaaguagauuu

SEQ ID NO: 776428 - RNA, 17 nt, Artificial Sequence
  Synthetic
ucacccacaguagauuu

SEQ ID NO: 776429 - RNA, 17 nt, Artificial Sequence
  Synthetic
ugcccuaucguagauuu

SEQ ID NO: 776430 - RNA, 17 nt, Artificial Sequence
  Synthetic
ccuguuaguuuagauuu

SEQ ID NO: 776431 - RNA, 17 nt, Artificial Sequence
  Synthetic
acaaaaugacccgauuu

SEQ ID NO: 776432 - RNA, 17 nt, Artificial Sequence
  Synthetic
uugggaaacagcgauuu

SEQ ID NO: 776433 - RNA, 17 nt, Artificial Sequence
  Synthetic
cccuacaacugcgauuu

SEQ ID NO: 776434 - RNA, 17 nt, Artificial Sequence
  Synthetic
ucaauaaacaucgauuu

SEQ ID NO: 776435 - RNA, 17 nt, Artificial Sequence
  Synthetic
uguaaucccaaggauuu

SEQ ID NO: 776436 - RNA, 17 nt, Artificial Sequence
  Synthetic
cugugcugacaggauuu

SEQ ID NO: 776437 - RNA, 17 nt, Artificial Sequence
  Synthetic
aagaugaaagaggauuu

SEQ ID NO: 776438 - RNA, 17 nt, Artificial Sequence
  Synthetic
ccacagagugaggauuu

SEQ ID NO: 776439 - RNA, 17 nt, Artificial Sequence
  Synthetic
acccuuguugaggauuu

SEQ ID NO: 776440 - RNA, 17 nt, Artificial Sequence
  Synthetic
aauucaagacgggauuu

SEQ ID NO: 776441 - RNA, 17 nt, Artificial Sequence
  Synthetic
augacaccuggggauuu

SEQ ID NO: 776442 - RNA, 17 nt, Artificial Sequence
  Synthetic
caugagcuuugggauuu

SEQ ID NO: 776443 - RNA, 17 nt, Artificial Sequence
  Synthetic
acacguuaaauggauuu

SEQ ID NO: 776444 - RNA, 17 nt, Artificial Sequence
  Synthetic
ucaucauggauggauuu

SEQ ID NO: 776445 - RNA, 17 nt, Artificial Sequence
  Synthetic
cgagcagcuauggauuu

SEQ ID NO: 776446 - RNA, 17 nt, Artificial Sequence
  Synthetic
cuggggacaguggauuu

SEQ ID NO: 776447 - RNA, 17 nt, Artificial Sequence
  Synthetic
aaagugugaguggauuu

SEQ ID NO: 776448 - RNA, 17 nt, Artificial Sequence
  Synthetic
aaugcagugguggauuu

SEQ ID NO: 776449 - RNA, 17 nt, Artificial Sequence
  Synthetic
ccagaggcuguggauuu

SEQ ID NO: 776450 - RNA, 17 nt, Artificial Sequence
  Synthetic
ugccauauuguggauuu

SEQ ID NO: 776451 - RNA, 17 nt, Artificial Sequence
  Synthetic
aaucuccauuuggauuu

SEQ ID NO: 776452 - RNA, 17 nt, Artificial Sequence
  Synthetic
uuguuuuauuuggauuu

SEQ ID NO: 776453 - RNA, 17 nt, Artificial Sequence
  Synthetic
uagaguuuuuuggauuu

SEQ ID NO: 776454 - RNA, 17 nt, Artificial Sequence
  Synthetic
ccucagaaaaaugauuu

SEQ ID NO: 776455 - RNA, 17 nt, Artificial Sequence
  Synthetic
aaaggacaaaaugauuu

SEQ ID NO: 776456 - RNA, 17 nt, Artificial Sequence
  Synthetic
uuucuguaaaaugauuu

SEQ ID NO: 776457 - RNA, 17 nt, Artificial Sequence
  Synthetic
acuucauagaaugauuu

SEQ ID NO: 776458 - RNA, 17 nt, Artificial Sequence
  Synthetic
cugcucuugaaugauuu

SEQ ID NO: 776459 - RNA, 17 nt, Artificial Sequence
  Synthetic
uaauuuaaacaugauuu

SEQ ID NO: 776460 - RNA, 17 nt, Artificial Sequence
  Synthetic
uuacaccagcaugauuu

SEQ ID NO: 776461 - RNA, 17 nt, Artificial Sequence
  Synthetic
aucacauggcaugauuu

SEQ ID NO: 776462 - RNA, 17 nt, Artificial Sequence
  Synthetic
caugagagagaugauuu

SEQ ID NO: 776463 - RNA, 17 nt, Artificial Sequence
  Synthetic
uucucauuugaugauuu

SEQ ID NO: 776464 - RNA, 17 nt, Artificial Sequence
  Synthetic
uuucuuagauaugauuu

SEQ ID NO: 776465 - RNA, 17 nt, Artificial Sequence
  Synthetic
uuuggguuauaugauuu

SEQ ID NO: 776466 - RNA, 17 nt, Artificial Sequence
  Synthetic
uuuuuccuuuaugauuu

SEQ ID NO: 776467 - RNA, 17 nt, Artificial Sequence
  Synthetic
uauuagcuuuaugauuu

SEQ ID NO: 776468 - RNA, 17 nt, Artificial Sequence
  Synthetic
auuaacuuuuaugauuu

SEQ ID NO: 776469 - RNA, 17 nt, Artificial Sequence
  Synthetic
uaauauuuuuaugauuu

SEQ ID NO: 776470 - RNA, 17 nt, Artificial Sequence
  Synthetic
ucugauucaacugauuu

SEQ ID NO: 776471 - RNA, 17 nt, Artificial Sequence
  Synthetic
uuugagaacacugauuu

SEQ ID NO: 776472 - RNA, 17 nt, Artificial Sequence
  Synthetic
cucuugcccacugauuu

SEQ ID NO: 776473 - RNA, 17 nt, Artificial Sequence
  Synthetic
cuugugauaccugauuu

SEQ ID NO: 776474 - RNA, 17 nt, Artificial Sequence
  Synthetic
uuggacauugcugauuu

SEQ ID NO: 776475 - RNA, 17 nt, Artificial Sequence
  Synthetic
uuuaggugcucugauuu

SEQ ID NO: 776476 - RNA, 17 nt, Artificial Sequence
  Synthetic
auaauuuauucugauuu

SEQ ID NO: 776477 - RNA, 17 nt, Artificial Sequence
  Synthetic
aaaagaaacagugauuu

SEQ ID NO: 776478 - RNA, 17 nt, Artificial Sequence
  Synthetic
uggggguggggugauuu

SEQ ID NO: 776479 - RNA, 17 nt, Artificial Sequence
  Synthetic
uaacaccauggugauuu

SEQ ID NO: 776480 - RNA, 17 nt, Artificial Sequence
  Synthetic
acuaaauaaugugauuu

SEQ ID NO: 776481 - RNA, 17 nt, Artificial Sequence
  Synthetic
uguuuucagauugauuu

SEQ ID NO: 776482 - RNA, 17 nt, Artificial Sequence
  Synthetic
auuccuugacuugauuu

SEQ ID NO: 776483 - RNA, 17 nt, Artificial Sequence
  Synthetic
auaauugaccuugauuu

SEQ ID NO: 776484 - RNA, 17 nt, Artificial Sequence
  Synthetic
ugcuggaaucuugauuu

SEQ ID NO: 776485 - RNA, 17 nt, Artificial Sequence
  Synthetic
ugucucagucuugauuu

SEQ ID NO: 776486 - RNA, 17 nt, Artificial Sequence
  Synthetic
acuuuggcauuugauuu

SEQ ID NO: 776487 - RNA, 17 nt, Artificial Sequence
  Synthetic
auuccccccuuugauuu

SEQ ID NO: 776488 - RNA, 17 nt, Artificial Sequence
  Synthetic
ucauuucuuuuugauuu

SEQ ID NO: 776489 - RNA, 17 nt, Artificial Sequence
  Synthetic
aauauauaaaaauauuu

SEQ ID NO: 776490 - RNA, 17 nt, Artificial Sequence
  Synthetic
ccuauuccaaaauauuu

SEQ ID NO: 776491 - RNA, 17 nt, Artificial Sequence
  Synthetic
uuuauaagaaaauauuu

SEQ ID NO: 776492 - RNA, 17 nt, Artificial Sequence
  Synthetic
cgacugauaaaauauuu

SEQ ID NO: 776493 - RNA, 17 nt, Artificial Sequence
  Synthetic
uaggagcuaaaauauuu

SEQ ID NO: 776494 - RNA, 17 nt, Artificial Sequence
  Synthetic
aacccuuuaaaauauuu

SEQ ID NO: 776495 - RNA, 17 nt, Artificial Sequence
  Synthetic
uaaaaaugcaaauauuu

SEQ ID NO: 776496 - RNA, 17 nt, Artificial Sequence
  Synthetic
ugaaccaagaaauauuu

SEQ ID NO: 776497 - RNA, 17 nt, Artificial Sequence
  Synthetic
ugggugcauaaauauuu

SEQ ID NO: 776498 - RNA, 17 nt, Artificial Sequence
  Synthetic
aggagaccuaaauauuu

SEQ ID NO: 776499 - RNA, 17 nt, Artificial Sequence
  Synthetic
uuacucucuaaauauuu

SEQ ID NO: 776500 - RNA, 17 nt, Artificial Sequence
  Synthetic
caguuaaguaaauauuu

SEQ ID NO: 776501 - RNA, 17 nt, Artificial Sequence
  Synthetic
auucccaguaaauauuu

SEQ ID NO: 776502 - RNA, 17 nt, Artificial Sequence
  Synthetic
ccagauaguaaauauuu

SEQ ID NO: 776503 - RNA, 17 nt, Artificial Sequence
  Synthetic
aauaguuuuaaauauuu

SEQ ID NO: 776504 - RNA, 17 nt, Artificial Sequence
  Synthetic
uccuaugaagaauauuu

SEQ ID NO: 776505 - RNA, 17 nt, Artificial Sequence
  Synthetic
cagagaggagaauauuu

SEQ ID NO: 776506 - RNA, 17 nt, Artificial Sequence
  Synthetic
caggguguagaauauuu

SEQ ID NO: 776507 - RNA, 17 nt, Artificial Sequence
  Synthetic
ccugaauaggaauauuu

SEQ ID NO: 776508 - RNA, 17 nt, Artificial Sequence
  Synthetic
uaacugaaauaauauuu

SEQ ID NO: 776509 - RNA, 17 nt, Artificial Sequence
  Synthetic
ucuagccacuaauauuu

SEQ ID NO: 776510 - RNA, 17 nt, Artificial Sequence
  Synthetic
ugaugacuguaauauuu

SEQ ID NO: 776511 - RNA, 17 nt, Artificial Sequence
  Synthetic
auaauccaaacauauuu

SEQ ID NO: 776512 - RNA, 17 nt, Artificial Sequence
  Synthetic
aaaguauaaacauauuu

SEQ ID NO: 776513 - RNA, 17 nt, Artificial Sequence
  Synthetic
uuagaaugaacauauuu

SEQ ID NO: 776514 - RNA, 17 nt, Artificial Sequence
  Synthetic
ccaggaguaacauauuu

SEQ ID NO: 776515 - RNA, 17 nt, Artificial Sequence
  Synthetic
acuccacagacauauuu

SEQ ID NO: 776516 - RNA, 17 nt, Artificial Sequence
  Synthetic
auguugucuacauauuu

SEQ ID NO: 776517 - RNA, 17 nt, Artificial Sequence
  Synthetic
uacgcauguacauauuu

SEQ ID NO: 776518 - RNA, 17 nt, Artificial Sequence
  Synthetic
uauccauuuacauauuu

SEQ ID NO: 776519 - RNA, 17 nt, Artificial Sequence
  Synthetic
acacaauaaccauauuu

SEQ ID NO: 776520 - RNA, 17 nt, Artificial Sequence
  Synthetic
augaagaguccauauuu

SEQ ID NO: 776521 - RNA, 17 nt, Artificial Sequence
  Synthetic
ucaaguuuuccauauuu

SEQ ID NO: 776522 - RNA, 17 nt, Artificial Sequence
  Synthetic
aaugauaaagcauauuu

SEQ ID NO: 776523 - RNA, 17 nt, Artificial Sequence
  Synthetic
aagucaagggcauauuu

SEQ ID NO: 776524 - RNA, 17 nt, Artificial Sequence
  Synthetic
uaugugauggcauauuu

SEQ ID NO: 776525 - RNA, 17 nt, Artificial Sequence
  Synthetic
ccuaugcagucauauuu

SEQ ID NO: 776526 - RNA, 17 nt, Artificial Sequence
  Synthetic
cuauugucgucauauuu

SEQ ID NO: 776527 - RNA, 17 nt, Artificial Sequence
  Synthetic
uaauugaugucauauuu

SEQ ID NO: 776528 - RNA, 17 nt, Artificial Sequence
  Synthetic
aauugcauuucauauuu

SEQ ID NO: 776529 - RNA, 17 nt, Artificial Sequence
  Synthetic
uguaaacuuucauauuu

SEQ ID NO: 776530 - RNA, 17 nt, Artificial Sequence
  Synthetic
uuucuacuuucauauuu

SEQ ID NO: 776531 - RNA, 17 nt, Artificial Sequence
  Synthetic
aguaacauaagauauuu

SEQ ID NO: 776532 - RNA, 17 nt, Artificial Sequence
  Synthetic
aaugauaucagauauuu

SEQ ID NO: 776533 - RNA, 17 nt, Artificial Sequence
  Synthetic
ugaaacaagagauauuu

SEQ ID NO: 776534 - RNA, 17 nt, Artificial Sequence
  Synthetic
aauggcaguagauauuu

SEQ ID NO: 776535 - RNA, 17 nt, Artificial Sequence
  Synthetic
cuacacauccgauauuu

SEQ ID NO: 776536 - RNA, 17 nt, Artificial Sequence
  Synthetic
cuggucaugggauauuu

SEQ ID NO: 776537 - RNA, 17 nt, Artificial Sequence
  Synthetic
uuuauagauggauauuu

SEQ ID NO: 776538 - RNA, 17 nt, Artificial Sequence
  Synthetic
uuucaaaaaugauauuu

SEQ ID NO: 776539 - RNA, 17 nt, Artificial Sequence
  Synthetic
auauaauggugauauuu

SEQ ID NO: 776540 - RNA, 17 nt, Artificial Sequence
  Synthetic
ucaauuuguugauauuu

SEQ ID NO: 776541 - RNA, 17 nt, Artificial Sequence
  Synthetic
aaaagguacauauauuu

SEQ ID NO: 776542 - RNA, 17 nt, Artificial Sequence
  Synthetic
uuucuaagcauauauuu

SEQ ID NO: 776543 - RNA, 17 nt, Artificial Sequence
  Synthetic
uguugucucauauauuu

SEQ ID NO: 776544 - RNA, 17 nt, Artificial Sequence
  Synthetic
auuaauaggauauauuu

SEQ ID NO: 776545 - RNA, 17 nt, Artificial Sequence
  Synthetic
auagccaugauauauuu

SEQ ID NO: 776546 - RNA, 17 nt, Artificial Sequence
  Synthetic
ugggugcauauauauuu

SEQ ID NO: 776547 - RNA, 17 nt, Artificial Sequence
  Synthetic
aaguccccuauauauuu

SEQ ID NO: 776548 - RNA, 17 nt, Artificial Sequence
  Synthetic
auuugcuuuauauauuu

SEQ ID NO: 776549 - RNA, 17 nt, Artificial Sequence
  Synthetic
aauaugacacuauauuu

SEQ ID NO: 776550 - RNA, 17 nt, Artificial Sequence
  Synthetic
uggauucuacuauauuu

SEQ ID NO: 776551 - RNA, 17 nt, Artificial Sequence
  Synthetic
aagugaaaucuauauuu

SEQ ID NO: 776552 - RNA, 17 nt, Artificial Sequence
  Synthetic
uuuggacaaguauauuu

SEQ ID NO: 776553 - RNA, 17 nt, Artificial Sequence
  Synthetic
acaauuuuaguauauuu

SEQ ID NO: 776554 - RNA, 17 nt, Artificial Sequence
  Synthetic
caagagcauguauauuu

SEQ ID NO: 776555 - RNA, 17 nt, Artificial Sequence
  Synthetic
acacaguaauuauauuu

SEQ ID NO: 776556 - RNA, 17 nt, Artificial Sequence
  Synthetic
auaguuucauuauauuu

SEQ ID NO: 776557 - RNA, 17 nt, Artificial Sequence
  Synthetic
auuuauaauuuauauuu

SEQ ID NO: 776558 - RNA, 17 nt, Artificial Sequence
  Synthetic
uucauuuauuuauauuu

SEQ ID NO: 776559 - RNA, 17 nt, Artificial Sequence
  Synthetic
uuuuuuuuuuuauauuu

SEQ ID NO: 776560 - RNA, 17 nt, Artificial Sequence
  Synthetic
agaauauaaaacuauuu

SEQ ID NO: 776561 - RNA, 17 nt, Artificial Sequence
  Synthetic
augacaguaaacuauuu

SEQ ID NO: 776562 - RNA, 17 nt, Artificial Sequence
  Synthetic
agauaaagcaacuauuu

SEQ ID NO: 776563 - RNA, 17 nt, Artificial Sequence
  Synthetic
agaaaccagaacuauuu

SEQ ID NO: 776564 - RNA, 17 nt, Artificial Sequence
  Synthetic
auuugauagaacuauuu

SEQ ID NO: 776565 - RNA, 17 nt, Artificial Sequence
  Synthetic
uauuacaugaacuauuu

SEQ ID NO: 776566 - RNA, 17 nt, Artificial Sequence
  Synthetic
cuggauauccacuauuu

SEQ ID NO: 776567 - RNA, 17 nt, Artificial Sequence
  Synthetic
cucucauaucacuauuu

SEQ ID NO: 776568 - RNA, 17 nt, Artificial Sequence
  Synthetic
ugugacagagacuauuu

SEQ ID NO: 776569 - RNA, 17 nt, Artificial Sequence
  Synthetic
ccaaauuuugacuauuu

SEQ ID NO: 776570 - RNA, 17 nt, Artificial Sequence
  Synthetic
ucgguuucuuacuauuu

SEQ ID NO: 776571 - RNA, 17 nt, Artificial Sequence
  Synthetic
auuugcugaaccuauuu

SEQ ID NO: 776572 - RNA, 17 nt, Artificial Sequence
  Synthetic
aauucccucaccuauuu

SEQ ID NO: 776573 - RNA, 17 nt, Artificial Sequence
  Synthetic
uaaaaaauggccuauuu

SEQ ID NO: 776574 - RNA, 17 nt, Artificial Sequence
  Synthetic
agccugcaguccuauuu

SEQ ID NO: 776575 - RNA, 17 nt, Artificial Sequence
  Synthetic
uguaaucccagcuauuu

SEQ ID NO: 776576 - RNA, 17 nt, Artificial Sequence
  Synthetic
uguagucccagcuauuu

SEQ ID NO: 776577 - RNA, 17 nt, Artificial Sequence
  Synthetic
cguuaaaauagcuauuu

SEQ ID NO: 776578 - RNA, 17 nt, Artificial Sequence
  Synthetic
uguuauguacgcuauuu

SEQ ID NO: 776579 - RNA, 17 nt, Artificial Sequence
  Synthetic
uagucaucaggcuauuu

SEQ ID NO: 776580 - RNA, 17 nt, Artificial Sequence
  Synthetic
uaaugaagaggcuauuu

SEQ ID NO: 776581 - RNA, 17 nt, Artificial Sequence
  Synthetic
uaaaucuagggcuauuu

SEQ ID NO: 776582 - RNA, 17 nt, Artificial Sequence
  Synthetic
aauuaagcacucuauuu

SEQ ID NO: 776583 - RNA, 17 nt, Artificial Sequence
  Synthetic
aagcaucuucucuauuu

SEQ ID NO: 776584 - RNA, 17 nt, Artificial Sequence
  Synthetic
augcaguaugucuauuu

SEQ ID NO: 776585 - RNA, 17 nt, Artificial Sequence
  Synthetic
uccaagauugucuauuu

SEQ ID NO: 776586 - RNA, 17 nt, Artificial Sequence
  Synthetic
caggucucauucuauuu

SEQ ID NO: 776587 - RNA, 17 nt, Artificial Sequence
  Synthetic
agcaguuuauucuauuu

SEQ ID NO: 776588 - RNA, 17 nt, Artificial Sequence
  Synthetic
ucguguuuauucuauuu

SEQ ID NO: 776589 - RNA, 17 nt, Artificial Sequence
  Synthetic
ucuccucacuucuauuu

SEQ ID NO: 776590 - RNA, 17 nt, Artificial Sequence
  Synthetic
aauaauaucuucuauuu

SEQ ID NO: 776591 - RNA, 17 nt, Artificial Sequence
  Synthetic
uaguuuuauuucuauuu

SEQ ID NO: 776592 - RNA, 17 nt, Artificial Sequence
  Synthetic
aacagcccuuucuauuu

SEQ ID NO: 776593 - RNA, 17 nt, Artificial Sequence
  Synthetic
acaugaacaaaguauuu

SEQ ID NO: 776594 - RNA, 17 nt, Artificial Sequence
  Synthetic
uucagucgcaaguauuu

SEQ ID NO: 776595 - RNA, 17 nt, Artificial Sequence
  Synthetic
acagaacuccaguauuu

SEQ ID NO: 776596 - RNA, 17 nt, Artificial Sequence
  Synthetic
uauaaagagcaguauuu

SEQ ID NO: 776597 - RNA, 17 nt, Artificial Sequence
  Synthetic
uaugcaguggaguauuu

SEQ ID NO: 776598 - RNA, 17 nt, Artificial Sequence
  Synthetic
uuuuuguuguaguauuu

SEQ ID NO: 776599 - RNA, 17 nt, Artificial Sequence
  Synthetic
caauagaguuaguauuu

SEQ ID NO: 776600 - RNA, 17 nt, Artificial Sequence
  Synthetic
uuuuaauaaacguauuu

SEQ ID NO: 776601 - RNA, 17 nt, Artificial Sequence
  Synthetic
agagaguaaacguauuu

SEQ ID NO: 776602 - RNA, 17 nt, Artificial Sequence
  Synthetic
cuaggugauacguauuu

SEQ ID NO: 776603 - RNA, 17 nt, Artificial Sequence
  Synthetic
acaauucaaucguauuu

SEQ ID NO: 776604 - RNA, 17 nt, Artificial Sequence
  Synthetic
uugugcugaagguauuu

SEQ ID NO: 776605 - RNA, 17 nt, Artificial Sequence
  Synthetic
uguuuuacuagguauuu

SEQ ID NO: 776606 - RNA, 17 nt, Artificial Sequence
  Synthetic
aagggguuuagguauuu

SEQ ID NO: 776607 - RNA, 17 nt, Artificial Sequence
  Synthetic
uuagagagcugguauuu

SEQ ID NO: 776608 - RNA, 17 nt, Artificial Sequence
  Synthetic
ucaguagcuugguauuu

SEQ ID NO: 776609 - RNA, 17 nt, Artificial Sequence
  Synthetic
agcuaaaaaauguauuu

SEQ ID NO: 776610 - RNA, 17 nt, Artificial Sequence
  Synthetic
uacagccugauguauuu

SEQ ID NO: 776611 - RNA, 17 nt, Artificial Sequence
  Synthetic
auauuuuugauguauuu

SEQ ID NO: 776612 - RNA, 17 nt, Artificial Sequence
  Synthetic
ugaaugucuauguauuu

SEQ ID NO: 776613 - RNA, 17 nt, Artificial Sequence
  Synthetic
uuuucauugcuguauuu

SEQ ID NO: 776614 - RNA, 17 nt, Artificial Sequence
  Synthetic
augaaucaucuguauuu

SEQ ID NO: 776615 - RNA, 17 nt, Artificial Sequence
  Synthetic
aaaguauuucuguauuu

SEQ ID NO: 776616 - RNA, 17 nt, Artificial Sequence
  Synthetic
agcauagcuguguauuu

SEQ ID NO: 776617 - RNA, 17 nt, Artificial Sequence
  Synthetic
uggggcaguguguauuu

SEQ ID NO: 776618 - RNA, 17 nt, Artificial Sequence
  Synthetic
auaguuugauuguauuu

SEQ ID NO: 776619 - RNA, 17 nt, Artificial Sequence
  Synthetic
aaguaaguguuguauuu

SEQ ID NO: 776620 - RNA, 17 nt, Artificial Sequence
  Synthetic
agauuccauuuguauuu

SEQ ID NO: 776621 - RNA, 17 nt, Artificial Sequence
  Synthetic
uuuaugguuuuguauuu

SEQ ID NO: 776622 - RNA, 17 nt, Artificial Sequence
  Synthetic
uaaaagaaaaauuauuu

SEQ ID NO: 776623 - RNA, 17 nt, Artificial Sequence
  Synthetic
uugcaaaacaauuauuu

SEQ ID NO: 776624 - RNA, 17 nt, Artificial Sequence
  Synthetic
ccuguuuucaauuauuu

SEQ ID NO: 776625 - RNA, 17 nt, Artificial Sequence
  Synthetic
uccacaaggaauuauuu

SEQ ID NO: 776626 - RNA, 17 nt, Artificial Sequence
  Synthetic
auguuauggaauuauuu

SEQ ID NO: 776627 - RNA, 17 nt, Artificial Sequence
  Synthetic
cacaugcugaauuauuu

SEQ ID NO: 776628 - RNA, 17 nt, Artificial Sequence
  Synthetic
auuucauugaauuauuu

SEQ ID NO: 776629 - RNA, 17 nt, Artificial Sequence
  Synthetic
uacuaaaauaauuauuu

SEQ ID NO: 776630 - RNA, 17 nt, Artificial Sequence
  Synthetic
aauuauuaacauuauuu

SEQ ID NO: 776631 - RNA, 17 nt, Artificial Sequence
  Synthetic
accugaagccauuauuu

SEQ ID NO: 776632 - RNA, 17 nt, Artificial Sequence
  Synthetic
cuauaaauucauuauuu

SEQ ID NO: 776633 - RNA, 17 nt, Artificial Sequence
  Synthetic
cagagccuggauuauuu

SEQ ID NO: 776634 - RNA, 17 nt, Artificial Sequence
  Synthetic
uuguuuaaugauuauuu

SEQ ID NO: 776635 - RNA, 17 nt, Artificial Sequence
  Synthetic
agugucugugauuauuu

SEQ ID NO: 776636 - RNA, 17 nt, Artificial Sequence
  Synthetic
uuauuugaguauuauuu

SEQ ID NO: 776637 - RNA, 17 nt, Artificial Sequence
  Synthetic
caaugguuuuauuauuu

SEQ ID NO: 776638 - RNA, 17 nt, Artificial Sequence
  Synthetic
auauaauccacuuauuu

SEQ ID NO: 776639 - RNA, 17 nt, Artificial Sequence
  Synthetic
augaaacagacuuauuu

SEQ ID NO: 776640 - RNA, 17 nt, Artificial Sequence
  Synthetic
cuacacuggacuuauuu

SEQ ID NO: 776641 - RNA, 17 nt, Artificial Sequence
  Synthetic
ucugauuuuacuuauuu

SEQ ID NO: 776642 - RNA, 17 nt, Artificial Sequence
  Synthetic
acaugauguccuuauuu

SEQ ID NO: 776643 - RNA, 17 nt, Artificial Sequence
  Synthetic
ucaauuuaugcuuauuu

SEQ ID NO: 776644 - RNA, 17 nt, Artificial Sequence
  Synthetic
uagagggcugcuuauuu

SEQ ID NO: 776645 - RNA, 17 nt, Artificial Sequence
  Synthetic
agucaaugugcuuauuu

SEQ ID NO: 776646 - RNA, 17 nt, Artificial Sequence
  Synthetic
aagaugauaucuuauuu

SEQ ID NO: 776647 - RNA, 17 nt, Artificial Sequence
  Synthetic
aauucuaucucuuauuu

SEQ ID NO: 776648 - RNA, 17 nt, Artificial Sequence
  Synthetic
uaugcuuagucuuauuu

SEQ ID NO: 776649 - RNA, 17 nt, Artificial Sequence
  Synthetic
ucuagucccaguuauuu

SEQ ID NO: 776650 - RNA, 17 nt, Artificial Sequence
  Synthetic
auuguuaggaguuauuu

SEQ ID NO: 776651 - RNA, 17 nt, Artificial Sequence
  Synthetic
uggcuuuggaguuauuu

SEQ ID NO: 776652 - RNA, 17 nt, Artificial Sequence
  Synthetic
aaacucuuuaguuauuu

SEQ ID NO: 776653 - RNA, 17 nt, Artificial Sequence
  Synthetic
augugaggagguuauuu

SEQ ID NO: 776654 - RNA, 17 nt, Artificial Sequence
  Synthetic
augaucacauguuauuu

SEQ ID NO: 776655 - RNA, 17 nt, Artificial Sequence
  Synthetic
aaauuaaccuguuauuu

SEQ ID NO: 776656 - RNA, 17 nt, Artificial Sequence
  Synthetic
cccuaagccuguuauuu

SEQ ID NO: 776657 - RNA, 17 nt, Artificial Sequence
  Synthetic
ucccaucauuguuauuu

SEQ ID NO: 776658 - RNA, 17 nt, Artificial Sequence
  Synthetic
aaggugaaaauuuauuu

SEQ ID NO: 776659 - RNA, 17 nt, Artificial Sequence
  Synthetic
uuuuuggaaauuuauuu

SEQ ID NO: 776660 - RNA, 17 nt, Artificial Sequence
  Synthetic
cacugagacauuuauuu

SEQ ID NO: 776661 - RNA, 17 nt, Artificial Sequence
  Synthetic
agauuauacauuuauuu

SEQ ID NO: 776662 - RNA, 17 nt, Artificial Sequence
  Synthetic
acauuuaccauuuauuu

SEQ ID NO: 776663 - RNA, 17 nt, Artificial Sequence
  Synthetic
uacugucucauuuauuu

SEQ ID NO: 776664 - RNA, 17 nt, Artificial Sequence
  Synthetic
agauuugucauuuauuu

SEQ ID NO: 776665 - RNA, 17 nt, Artificial Sequence
  Synthetic
uaacuugauauuuauuu

SEQ ID NO: 776666 - RNA, 17 nt, Artificial Sequence
  Synthetic
uguaauuauauuuauuu

SEQ ID NO: 776667 - RNA, 17 nt, Artificial Sequence
  Synthetic
auaaaaucuauuuauuu

SEQ ID NO: 776668 - RNA, 17 nt, Artificial Sequence
  Synthetic
caauuauguauuuauuu

SEQ ID NO: 776669 - RNA, 17 nt, Artificial Sequence
  Synthetic
uuguauuguauuuauuu

SEQ ID NO: 776670 - RNA, 17 nt, Artificial Sequence
  Synthetic
uauuuauuuauuuauuu

SEQ ID NO: 776671 - RNA, 17 nt, Artificial Sequence
  Synthetic
cuguaaccccuuuauuu

SEQ ID NO: 776672 - RNA, 17 nt, Artificial Sequence
  Synthetic
aaaaaaaaaguuuauuu

SEQ ID NO: 776673 - RNA, 17 nt, Artificial Sequence
  Synthetic
aguauuaaaguuuauuu

SEQ ID NO: 776674 - RNA, 17 nt, Artificial Sequence
  Synthetic
acucaguggguuuauuu

SEQ ID NO: 776675 - RNA, 17 nt, Artificial Sequence
  Synthetic
accccuacuguuuauuu

SEQ ID NO: 776676 - RNA, 17 nt, Artificial Sequence
  Synthetic
uauauauuuguuuauuu

SEQ ID NO: 776677 - RNA, 17 nt, Artificial Sequence
  Synthetic
cauuuguuuguuuauuu

SEQ ID NO: 776678 - RNA, 17 nt, Artificial Sequence
  Synthetic
acaaaggaauuuuauuu

SEQ ID NO: 776679 - RNA, 17 nt, Artificial Sequence
  Synthetic
cagcaaauguuuuauuu

SEQ ID NO: 776680 - RNA, 17 nt, Artificial Sequence
  Synthetic
uaauuguuguuuuauuu

SEQ ID NO: 776681 - RNA, 17 nt, Artificial Sequence
  Synthetic
agcaauuuguuuuauuu

SEQ ID NO: 776682 - RNA, 17 nt, Artificial Sequence
  Synthetic
acauaacauuuuuauuu

SEQ ID NO: 776683 - RNA, 17 nt, Artificial Sequence
  Synthetic
augagcccuuuuuauuu

SEQ ID NO: 776684 - RNA, 17 nt, Artificial Sequence
  Synthetic
uguuuuuaacaaacuuu

SEQ ID NO: 776685 - RNA, 17 nt, Artificial Sequence
  Synthetic
cuaaagucagaaacuuu

SEQ ID NO: 776686 - RNA, 17 nt, Artificial Sequence
  Synthetic
uccaggcuagaaacuuu

SEQ ID NO: 776687 - RNA, 17 nt, Artificial Sequence
  Synthetic
aggugagaggaaacuuu

SEQ ID NO: 776688 - RNA, 17 nt, Artificial Sequence
  Synthetic
cucaauguugaaacuuu

SEQ ID NO: 776689 - RNA, 17 nt, Artificial Sequence
  Synthetic
caaaauggauaaacuuu

SEQ ID NO: 776690 - RNA, 17 nt, Artificial Sequence
  Synthetic
accugcuauuaaacuuu

SEQ ID NO: 776691 - RNA, 17 nt, Artificial Sequence
  Synthetic
uaaaaaaacacaacuuu

SEQ ID NO: 776692 - RNA, 17 nt, Artificial Sequence
  Synthetic
uaaaacuucccaacuuu

SEQ ID NO: 776693 - RNA, 17 nt, Artificial Sequence
  Synthetic
aucauuuugccaacuuu

SEQ ID NO: 776694 - RNA, 17 nt, Artificial Sequence
  Synthetic
acaaaacaagcaacuuu

SEQ ID NO: 776695 - RNA, 17 nt, Artificial Sequence
  Synthetic
aucaagacugcaacuuu

SEQ ID NO: 776696 - RNA, 17 nt, Artificial Sequence
  Synthetic
agugauuuuucaacuuu

SEQ ID NO: 776697 - RNA, 17 nt, Artificial Sequence
  Synthetic
uaauuguacagaacuuu

SEQ ID NO: 776698 - RNA, 17 nt, Artificial Sequence
  Synthetic
auggcaaaaggaacuuu

SEQ ID NO: 776699 - RNA, 17 nt, Artificial Sequence
  Synthetic
aauugcuacugaacuuu

SEQ ID NO: 776700 - RNA, 17 nt, Artificial Sequence
  Synthetic
caauaacaaauaacuuu

SEQ ID NO: 776701 - RNA, 17 nt, Artificial Sequence
  Synthetic
cauuucaccauaacuuu

SEQ ID NO: 776702 - RNA, 17 nt, Artificial Sequence
  Synthetic
uucagugucauaacuuu

SEQ ID NO: 776703 - RNA, 17 nt, Artificial Sequence
  Synthetic
auuauccagauaacuuu

SEQ ID NO: 776704 - RNA, 17 nt, Artificial Sequence
  Synthetic
uagaaauauauaacuuu

SEQ ID NO: 776705 - RNA, 17 nt, Artificial Sequence
  Synthetic
auucugauuauaacuuu

SEQ ID NO: 776706 - RNA, 17 nt, Artificial Sequence
  Synthetic
uucccucugcuaacuuu

SEQ ID NO: 776707 - RNA, 17 nt, Artificial Sequence
  Synthetic
uucuuucugcuaacuuu

SEQ ID NO: 776708 - RNA, 17 nt, Artificial Sequence
  Synthetic
acauaguggguaacuuu

SEQ ID NO: 776709 - RNA, 17 nt, Artificial Sequence
  Synthetic
uuaaaacuuguaacuuu

SEQ ID NO: 776710 - RNA, 17 nt, Artificial Sequence
  Synthetic
uauaaucccaacacuuu

SEQ ID NO: 776711 - RNA, 17 nt, Artificial Sequence
  Synthetic
uguaaucccaacacuuu

SEQ ID NO: 776712 - RNA, 17 nt, Artificial Sequence
  Synthetic
ucuacucccaacacuuu

SEQ ID NO: 776713 - RNA, 17 nt, Artificial Sequence
  Synthetic
uauaaauccaacacuuu

SEQ ID NO: 776714 - RNA, 17 nt, Artificial Sequence
  Synthetic
uguaaucucaacacuuu

SEQ ID NO: 776715 - RNA, 17 nt, Artificial Sequence
  Synthetic
uguaauccuaacacuuu

SEQ ID NO: 776716 - RNA, 17 nt, Artificial Sequence
  Synthetic
uccuaccaucacacuuu

SEQ ID NO: 776717 - RNA, 17 nt, Artificial Sequence
  Synthetic
acuuuacaagacacuuu

SEQ ID NO: 776718 - RNA, 17 nt, Artificial Sequence
  Synthetic
uguaaucccaccacuuu

SEQ ID NO: 776719 - RNA, 17 nt, Artificial Sequence
  Synthetic
uguccuucgcccacuuu

SEQ ID NO: 776720 - RNA, 17 nt, Artificial Sequence
  Synthetic
aacuuggcuuccacuuu

SEQ ID NO: 776721 - RNA, 17 nt, Artificial Sequence
  Synthetic
uguaauccaagcacuuu

SEQ ID NO: 776722 - RNA, 17 nt, Artificial Sequence
  Synthetic
uguaauaccagcacuuu

SEQ ID NO: 776723 - RNA, 17 nt, Artificial Sequence
  Synthetic
uguaaacccagcacuuu

SEQ ID NO: 776724 - RNA, 17 nt, Artificial Sequence
  Synthetic
uguaaccccagcacuuu

SEQ ID NO: 776725 - RNA, 17 nt, Artificial Sequence
  Synthetic
ugaaaucccagcacuuu

SEQ ID NO: 776726 - RNA, 17 nt, Artificial Sequence
  Synthetic
ugcaaucccagcacuuu

SEQ ID NO: 776727 - RNA, 17 nt, Artificial Sequence
  Synthetic
cauaaucccagcacuuu

SEQ ID NO: 776728 - RNA, 17 nt, Artificial Sequence
  Synthetic
uauaaucccagcacuuu

SEQ ID NO: 776729 - RNA, 17 nt, Artificial Sequence
  Synthetic
aguaaucccagcacuuu

SEQ ID NO: 776730 - RNA, 17 nt, Artificial Sequence
  Synthetic
cguaaucccagcacuuu

SEQ ID NO: 776731 - RNA, 17 nt, Artificial Sequence
  Synthetic
uguaaucccagcacuuu

SEQ ID NO: 776732 - RNA, 17 nt, Artificial Sequence
  Synthetic
cuguaucccagcacuuu

SEQ ID NO: 776733 - RNA, 17 nt, Artificial Sequence
  Synthetic
uguacucccagcacuuu

SEQ ID NO: 776734 - RNA, 17 nt, Artificial Sequence
  Synthetic
uguaauuccagcacuuu

SEQ ID NO: 776735 - RNA, 17 nt, Artificial Sequence
  Synthetic
uguaaucgcagcacuuu

SEQ ID NO: 776736 - RNA, 17 nt, Artificial Sequence
  Synthetic
cgguggcucagcacuuu

SEQ ID NO: 776737 - RNA, 17 nt, Artificial Sequence
  Synthetic
uguaaucucagcacuuu

SEQ ID NO: 776738 - RNA, 17 nt, Artificial Sequence
  Synthetic
uguaauuucagcacuuu

SEQ ID NO: 776739 - RNA, 17 nt, Artificial Sequence
  Synthetic
uauaauccuagcacuuu

SEQ ID NO: 776740 - RNA, 17 nt, Artificial Sequence
  Synthetic
uguaauccuagcacuuu

SEQ ID NO: 776741 - RNA, 17 nt, Artificial Sequence
  Synthetic
ugugauuuuagcacuuu

SEQ ID NO: 776742 - RNA, 17 nt, Artificial Sequence
  Synthetic
ucuaguuuuagcacuuu

SEQ ID NO: 776743 - RNA, 17 nt, Artificial Sequence
  Synthetic
uguaauccccgcacuuu

SEQ ID NO: 776744 - RNA, 17 nt, Artificial Sequence
  Synthetic
aguaugcuaaucacuuu

SEQ ID NO: 776745 - RNA, 17 nt, Artificial Sequence
  Synthetic
auucuuaccaucacuuu

SEQ ID NO: 776746 - RNA, 17 nt, Artificial Sequence
  Synthetic
auguaguuuaucacuuu

SEQ ID NO: 776747 - RNA, 17 nt, Artificial Sequence
  Synthetic
auuucuuuuaucacuuu

SEQ ID NO: 776748 - RNA, 17 nt, Artificial Sequence
  Synthetic
aagaugucccucacuuu

SEQ ID NO: 776749 - RNA, 17 nt, Artificial Sequence
  Synthetic
uauauuuuccucacuuu

SEQ ID NO: 776750 - RNA, 17 nt, Artificial Sequence
  Synthetic
cucaauaaucucacuuu

SEQ ID NO: 776751 - RNA, 17 nt, Artificial Sequence
  Synthetic
uuaucagaucucacuuu

SEQ ID NO: 776752 - RNA, 17 nt, Artificial Sequence
  Synthetic
uaauacccugucacuuu

SEQ ID NO: 776753 - RNA, 17 nt, Artificial Sequence
  Synthetic
ucuugaugaaagacuuu

SEQ ID NO: 776754 - RNA, 17 nt, Artificial Sequence
  Synthetic
aauuauuuuaagacuuu

SEQ ID NO: 776755 - RNA, 17 nt, Artificial Sequence
  Synthetic
aaaaaaauccagacuuu

SEQ ID NO: 776756 - RNA, 17 nt, Artificial Sequence
  Synthetic
cagaaugcugagacuuu

SEQ ID NO: 776757 - RNA, 17 nt, Artificial Sequence
  Synthetic
uaagaaggugagacuuu

SEQ ID NO: 776758 - RNA, 17 nt, Artificial Sequence
  Synthetic
aauggucuugagacuuu

SEQ ID NO: 776759 - RNA, 17 nt, Artificial Sequence
  Synthetic
ccuaauuuugagacuuu

SEQ ID NO: 776760 - RNA, 17 nt, Artificial Sequence
  Synthetic
cgucaaagauagacuuu

SEQ ID NO: 776761 - RNA, 17 nt, Artificial Sequence
  Synthetic
uaguuuguuucgacuuu

SEQ ID NO: 776762 - RNA, 17 nt, Artificial Sequence
  Synthetic
uguaaucccaggacuuu

SEQ ID NO: 776763 - RNA, 17 nt, Artificial Sequence
  Synthetic
uguaacccuaggacuuu

SEQ ID NO: 776764 - RNA, 17 nt, Artificial Sequence
  Synthetic
uuuucucuuaggacuuu

SEQ ID NO: 776765 - RNA, 17 nt, Artificial Sequence
  Synthetic
cuuuggacuuggacuuu

SEQ ID NO: 776766 - RNA, 17 nt, Artificial Sequence
  Synthetic
acagugaccaugacuuu

SEQ ID NO: 776767 - RNA, 17 nt, Artificial Sequence
  Synthetic
uuugauagcaugacuuu

SEQ ID NO: 776768 - RNA, 17 nt, Artificial Sequence
  Synthetic
uuugugucuaugacuuu

SEQ ID NO: 776769 - RNA, 17 nt, Artificial Sequence
  Synthetic
ugggaaaaccugacuuu

SEQ ID NO: 776770 - RNA, 17 nt, Artificial Sequence
  Synthetic
cagggucaucugacuuu

SEQ ID NO: 776771 - RNA, 17 nt, Artificial Sequence
  Synthetic
cccuucccauugacuuu

SEQ ID NO: 776772 - RNA, 17 nt, Artificial Sequence
  Synthetic
uccuaccccuugacuuu

SEQ ID NO: 776773 - RNA, 17 nt, Artificial Sequence
  Synthetic
uuacccuuaaauacuuu

SEQ ID NO: 776774 - RNA, 17 nt, Artificial Sequence
  Synthetic
cuaaucagcaauacuuu

SEQ ID NO: 776775 - RNA, 17 nt, Artificial Sequence
  Synthetic
uagccacauaauacuuu

SEQ ID NO: 776776 - RNA, 17 nt, Artificial Sequence
  Synthetic
cauuuccauaauacuuu

SEQ ID NO: 776777 - RNA, 17 nt, Artificial Sequence
  Synthetic
augauuuauaauacuuu

SEQ ID NO: 776778 - RNA, 17 nt, Artificial Sequence
  Synthetic
cagaaaacuaauacuuu

SEQ ID NO: 776779 - RNA, 17 nt, Artificial Sequence
  Synthetic
aaaaacagacauacuuu

SEQ ID NO: 776780 - RNA, 17 nt, Artificial Sequence
  Synthetic
uauucucaccauacuuu

SEQ ID NO: 776781 - RNA, 17 nt, Artificial Sequence
  Synthetic
ccugcagaccauacuuu

SEQ ID NO: 776782 - RNA, 17 nt, Artificial Sequence
  Synthetic
ucagaggaccauacuuu

SEQ ID NO: 776783 - RNA, 17 nt, Artificial Sequence
  Synthetic
aguaacaugcauacuuu

SEQ ID NO: 776784 - RNA, 17 nt, Artificial Sequence
  Synthetic
aguuguucucauacuuu

SEQ ID NO: 776785 - RNA, 17 nt, Artificial Sequence
  Synthetic
aagccaauggauacuuu

SEQ ID NO: 776786 - RNA, 17 nt, Artificial Sequence
  Synthetic
cuaaaagaugauacuuu

SEQ ID NO: 776787 - RNA, 17 nt, Artificial Sequence
  Synthetic
uuugcuacauauacuuu

SEQ ID NO: 776788 - RNA, 17 nt, Artificial Sequence
  Synthetic
aaaaugugcuauacuuu

SEQ ID NO: 776789 - RNA, 17 nt, Artificial Sequence
  Synthetic
uugucagucuauacuuu

SEQ ID NO: 776790 - RNA, 17 nt, Artificial Sequence
  Synthetic
uaaaucaucacuacuuu

SEQ ID NO: 776791 - RNA, 17 nt, Artificial Sequence
  Synthetic
cuuuauuauccuacuuu

SEQ ID NO: 776792 - RNA, 17 nt, Artificial Sequence
  Synthetic
auugccuuggcuacuuu

SEQ ID NO: 776793 - RNA, 17 nt, Artificial Sequence
  Synthetic
acuauuucugcuacuuu

SEQ ID NO: 776794 - RNA, 17 nt, Artificial Sequence
  Synthetic
augauuauugcuacuuu

SEQ ID NO: 776795 - RNA, 17 nt, Artificial Sequence
  Synthetic
cauuguacaucuacuuu

SEQ ID NO: 776796 - RNA, 17 nt, Artificial Sequence
  Synthetic
ugccaagacucuacuuu

SEQ ID NO: 776797 - RNA, 17 nt, Artificial Sequence
  Synthetic
ugucaacaaaguacuuu

SEQ ID NO: 776798 - RNA, 17 nt, Artificial Sequence
  Synthetic
uguaaucccaguacuuu

SEQ ID NO: 776799 - RNA, 17 nt, Artificial Sequence
  Synthetic
uguaauccuaguacuuu

SEQ ID NO: 776800 - RNA, 17 nt, Artificial Sequence
  Synthetic
aauguugaagguacuuu

SEQ ID NO: 776801 - RNA, 17 nt, Artificial Sequence
  Synthetic
uuagaaccugguacuuu

SEQ ID NO: 776802 - RNA, 17 nt, Artificial Sequence
  Synthetic
ugaaaacaauguacuuu

SEQ ID NO: 776803 - RNA, 17 nt, Artificial Sequence
  Synthetic
uucaagaauuguacuuu

SEQ ID NO: 776804 - RNA, 17 nt, Artificial Sequence
  Synthetic
aaucuauaaauuacuuu

SEQ ID NO: 776805 - RNA, 17 nt, Artificial Sequence
  Synthetic
uuaaaugcuauuacuuu

SEQ ID NO: 776806 - RNA, 17 nt, Artificial Sequence
  Synthetic
cugcuuuuccuuacuuu

SEQ ID NO: 776807 - RNA, 17 nt, Artificial Sequence
  Synthetic
aagauaaugguuacuuu

SEQ ID NO: 776808 - RNA, 17 nt, Artificial Sequence
  Synthetic
aggagugauguuacuuu

SEQ ID NO: 776809 - RNA, 17 nt, Artificial Sequence
  Synthetic
agaggcauuguuacuuu

SEQ ID NO: 776810 - RNA, 17 nt, Artificial Sequence
  Synthetic
aaugauuuauuuacuuu

SEQ ID NO: 776811 - RNA, 17 nt, Artificial Sequence
  Synthetic
cagaaaacuuuuacuuu

SEQ ID NO: 776812 - RNA, 17 nt, Artificial Sequence
  Synthetic
cuccagagaaaaccuuu

SEQ ID NO: 776813 - RNA, 17 nt, Artificial Sequence
  Synthetic
auagaaaagaaaccuuu

SEQ ID NO: 776814 - RNA, 17 nt, Artificial Sequence
  Synthetic
ucccucucuuaaccuuu

SEQ ID NO: 776815 - RNA, 17 nt, Artificial Sequence
  Synthetic
uagggguuuuaaccuuu

SEQ ID NO: 776816 - RNA, 17 nt, Artificial Sequence
  Synthetic
augggauagucaccuuu

SEQ ID NO: 776817 - RNA, 17 nt, Artificial Sequence
  Synthetic
auaccauuuucaccuuu

SEQ ID NO: 776818 - RNA, 17 nt, Artificial Sequence
  Synthetic
uuaauaccaagaccuuu

SEQ ID NO: 776819 - RNA, 17 nt, Artificial Sequence
  Synthetic
ucaauuguuagaccuuu

SEQ ID NO: 776820 - RNA, 17 nt, Artificial Sequence
  Synthetic
auuauuaaaauaccuuu

SEQ ID NO: 776821 - RNA, 17 nt, Artificial Sequence
  Synthetic
caccauuugcuaccuuu

SEQ ID NO: 776822 - RNA, 17 nt, Artificial Sequence
  Synthetic
auuaacuggguaccuuu

SEQ ID NO: 776823 - RNA, 17 nt, Artificial Sequence
  Synthetic
acucuggcuguaccuuu

SEQ ID NO: 776824 - RNA, 17 nt, Artificial Sequence
  Synthetic
uuccuuuucuuaccuuu

SEQ ID NO: 776825 - RNA, 17 nt, Artificial Sequence
  Synthetic
caccaguaaaacccuuu

SEQ ID NO: 776826 - RNA, 17 nt, Artificial Sequence
  Synthetic
caagauacacccccuuu

SEQ ID NO: 776827 - RNA, 17 nt, Artificial Sequence
  Synthetic
cuaauauaagccccuuu

SEQ ID NO: 776828 - RNA, 17 nt, Artificial Sequence
  Synthetic
caccuuucugccccuuu

SEQ ID NO: 776829 - RNA, 17 nt, Artificial Sequence
  Synthetic
aaaaagagcuccccuuu

SEQ ID NO: 776830 - RNA, 17 nt, Artificial Sequence
  Synthetic
cuagcucauuccccuuu

SEQ ID NO: 776831 - RNA, 17 nt, Artificial Sequence
  Synthetic
auacuuccuuccccuuu

SEQ ID NO: 776832 - RNA, 17 nt, Artificial Sequence
  Synthetic
aguuuauaaagcccuuu

SEQ ID NO: 776833 - RNA, 17 nt, Artificial Sequence
  Synthetic
cuccuguguugcccuuu

SEQ ID NO: 776834 - RNA, 17 nt, Artificial Sequence
  Synthetic
auuucaacccucccuuu

SEQ ID NO: 776835 - RNA, 17 nt, Artificial Sequence
  Synthetic
agauuucaguucccuuu

SEQ ID NO: 776836 - RNA, 17 nt, Artificial Sequence
  Synthetic
ugguaauggaagccuuu

SEQ ID NO: 776837 - RNA, 17 nt, Artificial Sequence
  Synthetic
cuccugccccagccuuu

SEQ ID NO: 776838 - RNA, 17 nt, Artificial Sequence
  Synthetic
ucuacauaauagccuuu

SEQ ID NO: 776839 - RNA, 17 nt, Artificial Sequence
  Synthetic
aacuccucaccgccuuu

SEQ ID NO: 776840 - RNA, 17 nt, Artificial Sequence
  Synthetic
ugaacuuguccgccuuu

SEQ ID NO: 776841 - RNA, 17 nt, Artificial Sequence
  Synthetic
auaucaugcaggccuuu

SEQ ID NO: 776842 - RNA, 17 nt, Artificial Sequence
  Synthetic
uaggagauggggccuuu

SEQ ID NO: 776843 - RNA, 17 nt, Artificial Sequence
  Synthetic
augauuugaaugccuuu

SEQ ID NO: 776844 - RNA, 17 nt, Artificial Sequence
  Synthetic
uuuuucuuucugccuuu

SEQ ID NO: 776845 - RNA, 17 nt, Artificial Sequence
  Synthetic
cacucagauuugccuuu

SEQ ID NO: 776846 - RNA, 17 nt, Artificial Sequence
  Synthetic
acauacauuuugccuuu

SEQ ID NO: 776847 - RNA, 17 nt, Artificial Sequence
  Synthetic
aggauuuauaauccuuu

SEQ ID NO: 776848 - RNA, 17 nt, Artificial Sequence
  Synthetic
augauuuauaauccuuu

SEQ ID NO: 776849 - RNA, 17 nt, Artificial Sequence
  Synthetic
cugugcucuaauccuuu

SEQ ID NO: 776850 - RNA, 17 nt, Artificial Sequence
  Synthetic
ucauauccucauccuuu

SEQ ID NO: 776851 - RNA, 17 nt, Artificial Sequence
  Synthetic
ccauuaucaacuccuuu

SEQ ID NO: 776852 - RNA, 17 nt, Artificial Sequence
  Synthetic
cccuccccuccuccuuu

SEQ ID NO: 776853 - RNA, 17 nt, Artificial Sequence
  Synthetic
aaaauauuaucuccuuu

SEQ ID NO: 776854 - RNA, 17 nt, Artificial Sequence
  Synthetic
uuuuaaaucucuccuuu

SEQ ID NO: 776855 - RNA, 17 nt, Artificial Sequence
  Synthetic
aaauacaauucuccuuu

SEQ ID NO: 776856 - RNA, 17 nt, Artificial Sequence
  Synthetic
uuacugcuuucuccuuu

SEQ ID NO: 776857 - RNA, 17 nt, Artificial Sequence
  Synthetic
agaaggcacaguccuuu

SEQ ID NO: 776858 - RNA, 17 nt, Artificial Sequence
  Synthetic
aaacacuucaguccuuu

SEQ ID NO: 776859 - RNA, 17 nt, Artificial Sequence
  Synthetic
cagcuccagaguccuuu

SEQ ID NO: 776860 - RNA, 17 nt, Artificial Sequence
  Synthetic
augauuuauaguccuuu

SEQ ID NO: 776861 - RNA, 17 nt, Artificial Sequence
  Synthetic
aauaaagaagguccuuu

SEQ ID NO: 776862 - RNA, 17 nt, Artificial Sequence
  Synthetic
acaauuauagguccuuu

SEQ ID NO: 776863 - RNA, 17 nt, Artificial Sequence
  Synthetic
acagaacuagguccuuu

SEQ ID NO: 776864 - RNA, 17 nt, Artificial Sequence
  Synthetic
acaaaauaaauuccuuu

SEQ ID NO: 776865 - RNA, 17 nt, Artificial Sequence
  Synthetic
augacaaagauuccuuu

SEQ ID NO: 776866 - RNA, 17 nt, Artificial Sequence
  Synthetic
augauuuauauuccuuu

SEQ ID NO: 776867 - RNA, 17 nt, Artificial Sequence
  Synthetic
augguuuauauuccuuu

SEQ ID NO: 776868 - RNA, 17 nt, Artificial Sequence
  Synthetic
cuucaaacacuuccuuu

SEQ ID NO: 776869 - RNA, 17 nt, Artificial Sequence
  Synthetic
uucuauuuacuuccuuu

SEQ ID NO: 776870 - RNA, 17 nt, Artificial Sequence
  Synthetic
ucaagguggcuuccuuu

SEQ ID NO: 776871 - RNA, 17 nt, Artificial Sequence
  Synthetic
uucauccauguuccuuu

SEQ ID NO: 776872 - RNA, 17 nt, Artificial Sequence
  Synthetic
cugaugggcuuuccuuu

SEQ ID NO: 776873 - RNA, 17 nt, Artificial Sequence
  Synthetic
auugauguguuuccuuu

SEQ ID NO: 776874 - RNA, 17 nt, Artificial Sequence
  Synthetic
cuguuugcuuuuccuuu

SEQ ID NO: 776875 - RNA, 17 nt, Artificial Sequence
  Synthetic
uuuacauuuuuuccuuu

SEQ ID NO: 776876 - RNA, 17 nt, Artificial Sequence
  Synthetic
uaaguggcaaaagcuuu

SEQ ID NO: 776877 - RNA, 17 nt, Artificial Sequence
  Synthetic
uuugaaaagaaagcuuu

SEQ ID NO: 776878 - RNA, 17 nt, Artificial Sequence
  Synthetic
uuuuaaauccaagcuuu

SEQ ID NO: 776879 - RNA, 17 nt, Artificial Sequence
  Synthetic
uuuccaaaucaagcuuu

SEQ ID NO: 776880 - RNA, 17 nt, Artificial Sequence
  Synthetic
uucuucacagaagcuuu

SEQ ID NO: 776881 - RNA, 17 nt, Artificial Sequence
  Synthetic
aaucacauagaagcuuu

SEQ ID NO: 776882 - RNA, 17 nt, Artificial Sequence
  Synthetic
ugaaacucugaagcuuu

SEQ ID NO: 776883 - RNA, 17 nt, Artificial Sequence
  Synthetic
aacaaugguuaagcuuu

SEQ ID NO: 776884 - RNA, 17 nt, Artificial Sequence
  Synthetic
uaaaaugaaacagcuuu

SEQ ID NO: 776885 - RNA, 17 nt, Artificial Sequence
  Synthetic
uguacagagucagcuuu

SEQ ID NO: 776886 - RNA, 17 nt, Artificial Sequence
  Synthetic
caucucccaagagcuuu

SEQ ID NO: 776887 - RNA, 17 nt, Artificial Sequence
  Synthetic
uugagacccagagcuuu

SEQ ID NO: 776888 - RNA, 17 nt, Artificial Sequence
  Synthetic
cuaaauaguagagcuuu

SEQ ID NO: 776889 - RNA, 17 nt, Artificial Sequence
  Synthetic
uaaggggugggagcuuu

SEQ ID NO: 776890 - RNA, 17 nt, Artificial Sequence
  Synthetic
auguuuucaugagcuuu

SEQ ID NO: 776891 - RNA, 17 nt, Artificial Sequence
  Synthetic
agcuuaagaugagcuuu

SEQ ID NO: 776892 - RNA, 17 nt, Artificial Sequence
  Synthetic
uuucacucuugagcuuu

SEQ ID NO: 776893 - RNA, 17 nt, Artificial Sequence
  Synthetic
cacaaaaauguagcuuu

SEQ ID NO: 776894 - RNA, 17 nt, Artificial Sequence
  Synthetic
aaagaagguguagcuuu

SEQ ID NO: 776895 - RNA, 17 nt, Artificial Sequence
  Synthetic
caggucuguguagcuuu

SEQ ID NO: 776896 - RNA, 17 nt, Artificial Sequence
  Synthetic
cauguccucuuagcuuu

SEQ ID NO: 776897 - RNA, 17 nt, Artificial Sequence
  Synthetic
ucaaucaaauacgcuuu

SEQ ID NO: 776898 - RNA, 17 nt, Artificial Sequence
  Synthetic
ugcacucccagcgcuuu

SEQ ID NO: 776899 - RNA, 17 nt, Artificial Sequence
  Synthetic
uguaauuccagcgcuuu

SEQ ID NO: 776900 - RNA, 17 nt, Artificial Sequence
  Synthetic
ucugaauagaaggcuuu

SEQ ID NO: 776901 - RNA, 17 nt, Artificial Sequence
  Synthetic
ccauccugccaggcuuu

SEQ ID NO: 776902 - RNA, 17 nt, Artificial Sequence
  Synthetic
aaggaugaagaggcuuu

SEQ ID NO: 776903 - RNA, 17 nt, Artificial Sequence
  Synthetic
uuuguucaugaggcuuu

SEQ ID NO: 776904 - RNA, 17 nt, Artificial Sequence
  Synthetic
aagaccuaauaggcuuu

SEQ ID NO: 776905 - RNA, 17 nt, Artificial Sequence
  Synthetic
aaaagcugguaggcuuu

SEQ ID NO: 776906 - RNA, 17 nt, Artificial Sequence
  Synthetic
acucauaguuaggcuuu

SEQ ID NO: 776907 - RNA, 17 nt, Artificial Sequence
  Synthetic
uauagccucagggcuuu

SEQ ID NO: 776908 - RNA, 17 nt, Artificial Sequence
  Synthetic
ugcagacauagggcuuu

SEQ ID NO: 776909 - RNA, 17 nt, Artificial Sequence
  Synthetic
aagauuuuuggggcuuu

SEQ ID NO: 776910 - RNA, 17 nt, Artificial Sequence
  Synthetic
uaaaauacaugggcuuu

SEQ ID NO: 776911 - RNA, 17 nt, Artificial Sequence
  Synthetic
uuaagugugugggcuuu

SEQ ID NO: 776912 - RNA, 17 nt, Artificial Sequence
  Synthetic
agacgaacuauggcuuu

SEQ ID NO: 776913 - RNA, 17 nt, Artificial Sequence
  Synthetic
uuguuuggacuggcuuu

SEQ ID NO: 776914 - RNA, 17 nt, Artificial Sequence
  Synthetic
ugucuuugccuggcuuu

SEQ ID NO: 776915 - RNA, 17 nt, Artificial Sequence
  Synthetic
uuuucugcaguggcuuu

SEQ ID NO: 776916 - RNA, 17 nt, Artificial Sequence
  Synthetic
uuagcaaauguggcuuu

SEQ ID NO: 776917 - RNA, 17 nt, Artificial Sequence
  Synthetic
ucagucccuguggcuuu

SEQ ID NO: 776918 - RNA, 17 nt, Artificial Sequence
  Synthetic
agguguuuuguggcuuu

SEQ ID NO: 776919 - RNA, 17 nt, Artificial Sequence
  Synthetic
ccauaggcauuggcuuu

SEQ ID NO: 776920 - RNA, 17 nt, Artificial Sequence
  Synthetic
uaaaagguguuggcuuu

SEQ ID NO: 776921 - RNA, 17 nt, Artificial Sequence
  Synthetic
uuaaaccacaaugcuuu

SEQ ID NO: 776922 - RNA, 17 nt, Artificial Sequence
  Synthetic
aaauuugagaaugcuuu

SEQ ID NO: 776923 - RNA, 17 nt, Artificial Sequence
  Synthetic
acugaacugaaugcuuu

SEQ ID NO: 776924 - RNA, 17 nt, Artificial Sequence
  Synthetic
agcuaauuccaugcuuu

SEQ ID NO: 776925 - RNA, 17 nt, Artificial Sequence
  Synthetic
cccauuuuccaugcuuu

SEQ ID NO: 776926 - RNA, 17 nt, Artificial Sequence
  Synthetic
uaagcaggucaugcuuu

SEQ ID NO: 776927 - RNA, 17 nt, Artificial Sequence
  Synthetic
auaaaaauucaugcuuu

SEQ ID NO: 776928 - RNA, 17 nt, Artificial Sequence
  Synthetic
aauaguuaagaugcuuu

SEQ ID NO: 776929 - RNA, 17 nt, Artificial Sequence
  Synthetic
cuaaaaucagaugcuuu

SEQ ID NO: 776930 - RNA, 17 nt, Artificial Sequence
  Synthetic
ucuuuccuggaugcuuu

SEQ ID NO: 776931 - RNA, 17 nt, Artificial Sequence
  Synthetic
aguuuccuugaugcuuu

SEQ ID NO: 776932 - RNA, 17 nt, Artificial Sequence
  Synthetic
auuuaucuauaugcuuu

SEQ ID NO: 776933 - RNA, 17 nt, Artificial Sequence
  Synthetic
auuuauauguaugcuuu

SEQ ID NO: 776934 - RNA, 17 nt, Artificial Sequence
  Synthetic
aauugaccuuaugcuuu

SEQ ID NO: 776935 - RNA, 17 nt, Artificial Sequence
  Synthetic
agaguggaaacugcuuu

SEQ ID NO: 776936 - RNA, 17 nt, Artificial Sequence
  Synthetic
cccucuuucacugcuuu

SEQ ID NO: 776937 - RNA, 17 nt, Artificial Sequence
  Synthetic
cuucugacuccugcuuu

SEQ ID NO: 776938 - RNA, 17 nt, Artificial Sequence
  Synthetic
aagaauauuccugcuuu

SEQ ID NO: 776939 - RNA, 17 nt, Artificial Sequence
  Synthetic
aucuaugacgcugcuuu

SEQ ID NO: 776940 - RNA, 17 nt, Artificial Sequence
  Synthetic
cuaaucuuaucugcuuu

SEQ ID NO: 776941 - RNA, 17 nt, Artificial Sequence
  Synthetic
uuccaauucucugcuuu

SEQ ID NO: 776942 - RNA, 17 nt, Artificial Sequence
  Synthetic
aaaacauuuucugcuuu

SEQ ID NO: 776943 - RNA, 17 nt, Artificial Sequence
  Synthetic
uguaaucccagugcuuu

SEQ ID NO: 776944 - RNA, 17 nt, Artificial Sequence
  Synthetic
uggaauuccagugcuuu

SEQ ID NO: 776945 - RNA, 17 nt, Artificial Sequence
  Synthetic
ugucaucucagugcuuu

SEQ ID NO: 776946 - RNA, 17 nt, Artificial Sequence
  Synthetic
uguucuuugagugcuuu

SEQ ID NO: 776947 - RNA, 17 nt, Artificial Sequence
  Synthetic
uguaauccuagugcuuu

SEQ ID NO: 776948 - RNA, 17 nt, Artificial Sequence
  Synthetic
acauugaguagugcuuu

SEQ ID NO: 776949 - RNA, 17 nt, Artificial Sequence
  Synthetic
uguaauccaggugcuuu

SEQ ID NO: 776950 - RNA, 17 nt, Artificial Sequence
  Synthetic
uuuaaaagaugugcuuu

SEQ ID NO: 776951 - RNA, 17 nt, Artificial Sequence
  Synthetic
aaugacuacugugcuuu

SEQ ID NO: 776952 - RNA, 17 nt, Artificial Sequence
  Synthetic
uguaaucccugugcuuu

SEQ ID NO: 776953 - RNA, 17 nt, Artificial Sequence
  Synthetic
aguuaggguugugcuuu

SEQ ID NO: 776954 - RNA, 17 nt, Artificial Sequence
  Synthetic
uuaaacucaauugcuuu

SEQ ID NO: 776955 - RNA, 17 nt, Artificial Sequence
  Synthetic
ucuguugccauugcuuu

SEQ ID NO: 776956 - RNA, 17 nt, Artificial Sequence
  Synthetic
uuuguugccauugcuuu

SEQ ID NO: 776957 - RNA, 17 nt, Artificial Sequence
  Synthetic
aguacaucgauugcuuu

SEQ ID NO: 776958 - RNA, 17 nt, Artificial Sequence
  Synthetic
uuuguugcccuugcuuu

SEQ ID NO: 776959 - RNA, 17 nt, Artificial Sequence
  Synthetic
cuacuccugcuugcuuu

SEQ ID NO: 776960 - RNA, 17 nt, Artificial Sequence
  Synthetic
uugcugacucuugcuuu

SEQ ID NO: 776961 - RNA, 17 nt, Artificial Sequence
  Synthetic
aauuaugauguugcuuu

SEQ ID NO: 776962 - RNA, 17 nt, Artificial Sequence
  Synthetic
uuuguugcuguugcuuu

SEQ ID NO: 776963 - RNA, 17 nt, Artificial Sequence
  Synthetic
cugggucuguuugcuuu

SEQ ID NO: 776964 - RNA, 17 nt, Artificial Sequence
  Synthetic
uauuuuuuguuugcuuu

SEQ ID NO: 776965 - RNA, 17 nt, Artificial Sequence
  Synthetic
agcuugcauuuugcuuu

SEQ ID NO: 776966 - RNA, 17 nt, Artificial Sequence
  Synthetic
ucgguuacuuuugcuuu

SEQ ID NO: 776967 - RNA, 17 nt, Artificial Sequence
  Synthetic
aguuguauaaaaucuuu

SEQ ID NO: 776968 - RNA, 17 nt, Artificial Sequence
  Synthetic
aaaauugacaaaucuuu

SEQ ID NO: 776969 - RNA, 17 nt, Artificial Sequence
  Synthetic
aacauacugaaaucuuu

SEQ ID NO: 776970 - RNA, 17 nt, Artificial Sequence
  Synthetic
uuggggaaacaaucuuu

SEQ ID NO: 776971 - RNA, 17 nt, Artificial Sequence
  Synthetic
agcuguauccaaucuuu

SEQ ID NO: 776972 - RNA, 17 nt, Artificial Sequence
  Synthetic
cuaaugugugaaucuuu

SEQ ID NO: 776973 - RNA, 17 nt, Artificial Sequence
  Synthetic
cagacaaaauaaucuuu

SEQ ID NO: 776974 - RNA, 17 nt, Artificial Sequence
  Synthetic
uugugaugauaaucuuu

SEQ ID NO: 776975 - RNA, 17 nt, Artificial Sequence
  Synthetic
cguagcugcuaaucuuu

SEQ ID NO: 776976 - RNA, 17 nt, Artificial Sequence
  Synthetic
aggaaauguuaaucuuu

SEQ ID NO: 776977 - RNA, 17 nt, Artificial Sequence
  Synthetic
uugcuugaaacaucuuu

SEQ ID NO: 776978 - RNA, 17 nt, Artificial Sequence
  Synthetic
ucaugcuguacaucuuu

SEQ ID NO: 776979 - RNA, 17 nt, Artificial Sequence
  Synthetic
ucuagacauccaucuuu

SEQ ID NO: 776980 - RNA, 17 nt, Artificial Sequence
  Synthetic
caaguuagugcaucuuu

SEQ ID NO: 776981 - RNA, 17 nt, Artificial Sequence
  Synthetic
ugugcaugcagaucuuu

SEQ ID NO: 776982 - RNA, 17 nt, Artificial Sequence
  Synthetic
uaguguagcauaucuuu

SEQ ID NO: 776983 - RNA, 17 nt, Artificial Sequence
  Synthetic
uaucaccucauaucuuu

SEQ ID NO: 776984 - RNA, 17 nt, Artificial Sequence
  Synthetic
aguuauuugcuaucuuu

SEQ ID NO: 776985 - RNA, 17 nt, Artificial Sequence
  Synthetic
cuuuggauaguaucuuu

SEQ ID NO: 776986 - RNA, 17 nt, Artificial Sequence
  Synthetic
cccaccucuguaucuuu

SEQ ID NO: 776987 - RNA, 17 nt, Artificial Sequence
  Synthetic
aaagagugcuuaucuuu

SEQ ID NO: 776988 - RNA, 17 nt, Artificial Sequence
  Synthetic
auaaagcucuuaucuuu

SEQ ID NO: 776989 - RNA, 17 nt, Artificial Sequence
  Synthetic
ucuuucucaaacucuuu

SEQ ID NO: 776990 - RNA, 17 nt, Artificial Sequence
  Synthetic
cuuggcuuccacucuuu

SEQ ID NO: 776991 - RNA, 17 nt, Artificial Sequence
  Synthetic
ccucugucucacucuuu

SEQ ID NO: 776992 - RNA, 17 nt, Artificial Sequence
  Synthetic
acuaagauucacucuuu

SEQ ID NO: 776993 - RNA, 17 nt, Artificial Sequence
  Synthetic
cuggcuaguuacucuuu

SEQ ID NO: 776994 - RNA, 17 nt, Artificial Sequence
  Synthetic
ugugcaaaaaccucuuu

SEQ ID NO: 776995 - RNA, 17 nt, Artificial Sequence
  Synthetic
aaugacuaccccucuuu

SEQ ID NO: 776996 - RNA, 17 nt, Artificial Sequence
  Synthetic
ccugcaagggccucuuu

SEQ ID NO: 776997 - RNA, 17 nt, Artificial Sequence
  Synthetic
acuauuaauuccucuuu

SEQ ID NO: 776998 - RNA, 17 nt, Artificial Sequence
  Synthetic
caauaauuaagcucuuu

SEQ ID NO: 776999 - RNA, 17 nt, Artificial Sequence
  Synthetic
uguaaucccagcucuuu

SEQ ID NO: 777000 - RNA, 17 nt, Artificial Sequence
  Synthetic
uaggaaagcagcucuuu

SEQ ID NO: 777001 - RNA, 17 nt, Artificial Sequence
  Synthetic
ccuaagaucagcucuuu

SEQ ID NO: 777002 - RNA, 17 nt, Artificial Sequence
  Synthetic
uuugccuauggcucuuu

SEQ ID NO: 777003 - RNA, 17 nt, Artificial Sequence
  Synthetic
cccaaaccuugcucuuu

SEQ ID NO: 777004 - RNA, 17 nt, Artificial Sequence
  Synthetic
augaaaaucaucucuuu

SEQ ID NO: 777005 - RNA, 17 nt, Artificial Sequence
  Synthetic
cccaugacccucucuuu

SEQ ID NO: 777006 - RNA, 17 nt, Artificial Sequence
  Synthetic
accuacagucucucuuu

SEQ ID NO: 777007 - RNA, 17 nt, Artificial Sequence
  Synthetic
ccauuuuuucucucuuu

SEQ ID NO: 777008 - RNA, 17 nt, Artificial Sequence
  Synthetic
cuauccccauucucuuu

SEQ ID NO: 777009 - RNA, 17 nt, Artificial Sequence
  Synthetic
aauuguugauucucuuu

SEQ ID NO: 777010 - RNA, 17 nt, Artificial Sequence
  Synthetic
cugggcuuauucucuuu

SEQ ID NO: 777011 - RNA, 17 nt, Artificial Sequence
  Synthetic
cauaaugacuucucuuu

SEQ ID NO: 777012 - RNA, 17 nt, Artificial Sequence
  Synthetic
aauguugacuucucuuu

SEQ ID NO: 777013 - RNA, 17 nt, Artificial Sequence
  Synthetic
uugccaauguucucuuu

SEQ ID NO: 777014 - RNA, 17 nt, Artificial Sequence
  Synthetic
caggccuauuucucuuu

SEQ ID NO: 777015 - RNA, 17 nt, Artificial Sequence
  Synthetic
cucaaagagaagucuuu

SEQ ID NO: 777016 - RNA, 17 nt, Artificial Sequence
  Synthetic
aaacaaaauaagucuuu

SEQ ID NO: 777017 - RNA, 17 nt, Artificial Sequence
  Synthetic
ccuagggguaagucuuu

SEQ ID NO: 777018 - RNA, 17 nt, Artificial Sequence
  Synthetic
acugaaucagagucuuu

SEQ ID NO: 777019 - RNA, 17 nt, Artificial Sequence
  Synthetic
uugugauuguagucuuu

SEQ ID NO: 777020 - RNA, 17 nt, Artificial Sequence
  Synthetic
cuacccucuuagucuuu

SEQ ID NO: 777021 - RNA, 17 nt, Artificial Sequence
  Synthetic
ucaucuccuaggucuuu

SEQ ID NO: 777022 - RNA, 17 nt, Artificial Sequence
  Synthetic
aauaaugguaggucuuu

SEQ ID NO: 777023 - RNA, 17 nt, Artificial Sequence
  Synthetic
caauucaaauggucuuu

SEQ ID NO: 777024 - RNA, 17 nt, Artificial Sequence
  Synthetic
uaggguuauuggucuuu

SEQ ID NO: 777025 - RNA, 17 nt, Artificial Sequence
  Synthetic
uuacugggaaugucuuu

SEQ ID NO: 777026 - RNA, 17 nt, Artificial Sequence
  Synthetic
aaagaagacaugucuuu

SEQ ID NO: 777027 - RNA, 17 nt, Artificial Sequence
  Synthetic
uucuauuacaugucuuu

SEQ ID NO: 777028 - RNA, 17 nt, Artificial Sequence
  Synthetic
agacaagggaugucuuu

SEQ ID NO: 777029 - RNA, 17 nt, Artificial Sequence
  Synthetic
uguaauugccugucuuu

SEQ ID NO: 777030 - RNA, 17 nt, Artificial Sequence
  Synthetic
acuggcuggcugucuuu

SEQ ID NO: 777031 - RNA, 17 nt, Artificial Sequence
  Synthetic
uuacuuuaucugucuuu

SEQ ID NO: 777032 - RNA, 17 nt, Artificial Sequence
  Synthetic
uagauuauucugucuuu

SEQ ID NO: 777033 - RNA, 17 nt, Artificial Sequence
  Synthetic
uaugaaaaugugucuuu

SEQ ID NO: 777034 - RNA, 17 nt, Artificial Sequence
  Synthetic
uuuuuucaugugucuuu

SEQ ID NO: 777035 - RNA, 17 nt, Artificial Sequence
  Synthetic
acuacaaaauugucuuu

SEQ ID NO: 777036 - RNA, 17 nt, Artificial Sequence
  Synthetic
uuuugguacuugucuuu

SEQ ID NO: 777037 - RNA, 17 nt, Artificial Sequence
  Synthetic
uucuuauuguugucuuu

SEQ ID NO: 777038 - RNA, 17 nt, Artificial Sequence
  Synthetic
uuuguuuuguugucuuu

SEQ ID NO: 777039 - RNA, 17 nt, Artificial Sequence
  Synthetic
acugguuuaaauucuuu

SEQ ID NO: 777040 - RNA, 17 nt, Artificial Sequence
  Synthetic
uuuuggcagaauucuuu

SEQ ID NO: 777041 - RNA, 17 nt, Artificial Sequence
  Synthetic
uuguuuaauaauucuuu

SEQ ID NO: 777042 - RNA, 17 nt, Artificial Sequence
  Synthetic
auagaggauaauucuuu

SEQ ID NO: 777043 - RNA, 17 nt, Artificial Sequence
  Synthetic
ucugguuuuaauucuuu

SEQ ID NO: 777044 - RNA, 17 nt, Artificial Sequence
  Synthetic
ccuguuuuuaauucuuu

SEQ ID NO: 777045 - RNA, 17 nt, Artificial Sequence
  Synthetic
uuuugaaggcauucuuu

SEQ ID NO: 777046 - RNA, 17 nt, Artificial Sequence
  Synthetic
uuuaggccucauucuuu

SEQ ID NO: 777047 - RNA, 17 nt, Artificial Sequence
  Synthetic
agcaucucucauucuuu

SEQ ID NO: 777048 - RNA, 17 nt, Artificial Sequence
  Synthetic
aagccaugucauucuuu

SEQ ID NO: 777049 - RNA, 17 nt, Artificial Sequence
  Synthetic
uaaaauguagauucuuu

SEQ ID NO: 777050 - RNA, 17 nt, Artificial Sequence
  Synthetic
cuuuucccugauucuuu

SEQ ID NO: 777051 - RNA, 17 nt, Artificial Sequence
  Synthetic
ucuggaacauauucuuu

SEQ ID NO: 777052 - RNA, 17 nt, Artificial Sequence
  Synthetic
aggcuaguauauucuuu

SEQ ID NO: 777053 - RNA, 17 nt, Artificial Sequence
  Synthetic
uauggcuuuuauucuuu

SEQ ID NO: 777054 - RNA, 17 nt, Artificial Sequence
  Synthetic
cugguauaaacuucuuu

SEQ ID NO: 777055 - RNA, 17 nt, Artificial Sequence
  Synthetic
uaacaaagcacuucuuu

SEQ ID NO: 777056 - RNA, 17 nt, Artificial Sequence
  Synthetic
auuagaaucacuucuuu

SEQ ID NO: 777057 - RNA, 17 nt, Artificial Sequence
  Synthetic
agacaacagacuucuuu

SEQ ID NO: 777058 - RNA, 17 nt, Artificial Sequence
  Synthetic
augcuauugacuucuuu

SEQ ID NO: 777059 - RNA, 17 nt, Artificial Sequence
  Synthetic
agccacaaaccuucuuu

SEQ ID NO: 777060 - RNA, 17 nt, Artificial Sequence
  Synthetic
aaaccauuaucuucuuu

SEQ ID NO: 777061 - RNA, 17 nt, Artificial Sequence
  Synthetic
uuuaaacuugguucuuu

SEQ ID NO: 777062 - RNA, 17 nt, Artificial Sequence
  Synthetic
agugcuuauuguucuuu

SEQ ID NO: 777063 - RNA, 17 nt, Artificial Sequence
  Synthetic
auuggugcuuguucuuu

SEQ ID NO: 777064 - RNA, 17 nt, Artificial Sequence
  Synthetic
cuccagcuuuguucuuu

SEQ ID NO: 777065 - RNA, 17 nt, Artificial Sequence
  Synthetic
aauucuggaauuucuuu

SEQ ID NO: 777066 - RNA, 17 nt, Artificial Sequence
  Synthetic
aauucuuggauuucuuu

SEQ ID NO: 777067 - RNA, 17 nt, Artificial Sequence
  Synthetic
ccauuuaguauuucuuu

SEQ ID NO: 777068 - RNA, 17 nt, Artificial Sequence
  Synthetic
acugauuuccuuucuuu

SEQ ID NO: 777069 - RNA, 17 nt, Artificial Sequence
  Synthetic
caucaaaugcuuucuuu

SEQ ID NO: 777070 - RNA, 17 nt, Artificial Sequence
  Synthetic
acugauuugcuuucuuu

SEQ ID NO: 777071 - RNA, 17 nt, Artificial Sequence
  Synthetic
aaucaggggguuucuuu

SEQ ID NO: 777072 - RNA, 17 nt, Artificial Sequence
  Synthetic
uuuguccaauuuucuuu

SEQ ID NO: 777073 - RNA, 17 nt, Artificial Sequence
  Synthetic
aauuuaagauuuucuuu

SEQ ID NO: 777074 - RNA, 17 nt, Artificial Sequence
  Synthetic
uuucugugauuuucuuu

SEQ ID NO: 777075 - RNA, 17 nt, Artificial Sequence
  Synthetic
acugauuuauuuucuuu

SEQ ID NO: 777076 - RNA, 17 nt, Artificial Sequence
  Synthetic
aaugugggcuuuucuuu

SEQ ID NO: 777077 - RNA, 17 nt, Artificial Sequence
  Synthetic
uaggagcuguuuucuuu

SEQ ID NO: 777078 - RNA, 17 nt, Artificial Sequence
  Synthetic
aaccauuuguuuucuuu

SEQ ID NO: 777079 - RNA, 17 nt, Artificial Sequence
  Synthetic
accugauauuuuucuuu

SEQ ID NO: 777080 - RNA, 17 nt, Artificial Sequence
  Synthetic
uuucccugaaaaaguuu

SEQ ID NO: 777081 - RNA, 17 nt, Artificial Sequence
  Synthetic
agaggaaguaaaaguuu

SEQ ID NO: 777082 - RNA, 17 nt, Artificial Sequence
  Synthetic
ugaaauguuaaaaguuu

SEQ ID NO: 777083 - RNA, 17 nt, Artificial Sequence
  Synthetic
ugcaugaaacaaaguuu

SEQ ID NO: 777084 - RNA, 17 nt, Artificial Sequence
  Synthetic
aaaagucuccaaaguuu

SEQ ID NO: 777085 - RNA, 17 nt, Artificial Sequence
  Synthetic
aaaauaaagcaaaguuu

SEQ ID NO: 777086 - RNA, 17 nt, Artificial Sequence
  Synthetic
cagauaauggaaaguuu

SEQ ID NO: 777087 - RNA, 17 nt, Artificial Sequence
  Synthetic
auuguucccuaaaguuu

SEQ ID NO: 777088 - RNA, 17 nt, Artificial Sequence
  Synthetic
uccaaaucuuaaaguuu

SEQ ID NO: 777089 - RNA, 17 nt, Artificial Sequence
  Synthetic
aauguuuuuuaaaguuu

SEQ ID NO: 777090 - RNA, 17 nt, Artificial Sequence
  Synthetic
caagucugagcaaguuu

SEQ ID NO: 777091 - RNA, 17 nt, Artificial Sequence
  Synthetic
uaagacagcucaaguuu

SEQ ID NO: 777092 - RNA, 17 nt, Artificial Sequence
  Synthetic
acacugcagagaaguuu

SEQ ID NO: 777093 - RNA, 17 nt, Artificial Sequence
  Synthetic
agucaggagagaaguuu

SEQ ID NO: 777094 - RNA, 17 nt, Artificial Sequence
  Synthetic
agauggaugagaaguuu

SEQ ID NO: 777095 - RNA, 17 nt, Artificial Sequence
  Synthetic
auuacccauagaaguuu

SEQ ID NO: 777096 - RNA, 17 nt, Artificial Sequence
  Synthetic
aagugggaaggaaguuu

SEQ ID NO: 777097 - RNA, 17 nt, Artificial Sequence
  Synthetic
aaaacauaaggaaguuu

SEQ ID NO: 777098 - RNA, 17 nt, Artificial Sequence
  Synthetic
cauaauauuggaaguuu

SEQ ID NO: 777099 - RNA, 17 nt, Artificial Sequence
  Synthetic
cugaagccaugaaguuu

SEQ ID NO: 777100 - RNA, 17 nt, Artificial Sequence
  Synthetic
uucaagaauugaaguuu

SEQ ID NO: 777101 - RNA, 17 nt, Artificial Sequence
  Synthetic
aauggguauugaaguuu

SEQ ID NO: 777102 - RNA, 17 nt, Artificial Sequence
  Synthetic
uaauggcaaauaaguuu

SEQ ID NO: 777103 - RNA, 17 nt, Artificial Sequence
  Synthetic
aauuuuaccauaaguuu

SEQ ID NO: 777104 - RNA, 17 nt, Artificial Sequence
  Synthetic
cauaggcccauaaguuu

SEQ ID NO: 777105 - RNA, 17 nt, Artificial Sequence
  Synthetic
ccuccucccauaaguuu

SEQ ID NO: 777106 - RNA, 17 nt, Artificial Sequence
  Synthetic
uucuucucuauaaguuu

SEQ ID NO: 777107 - RNA, 17 nt, Artificial Sequence
  Synthetic
uuuaggacacuaaguuu

SEQ ID NO: 777108 - RNA, 17 nt, Artificial Sequence
  Synthetic
ucugauucaguaaguuu

SEQ ID NO: 777109 - RNA, 17 nt, Artificial Sequence
  Synthetic
acauuuuugguaaguuu

SEQ ID NO: 777110 - RNA, 17 nt, Artificial Sequence
  Synthetic
cagaacaguguaaguuu

SEQ ID NO: 777111 - RNA, 17 nt, Artificial Sequence
  Synthetic
aaaaaaauguuaaguuu

SEQ ID NO: 777112 - RNA, 17 nt, Artificial Sequence
  Synthetic
uuugaacuguuaaguuu

SEQ ID NO: 777113 - RNA, 17 nt, Artificial Sequence
  Synthetic
cagcauucaaacaguuu

SEQ ID NO: 777114 - RNA, 17 nt, Artificial Sequence
  Synthetic
cugagcagaaacaguuu

SEQ ID NO: 777115 - RNA, 17 nt, Artificial Sequence
  Synthetic
auggguuucaacaguuu

SEQ ID NO: 777116 - RNA, 17 nt, Artificial Sequence
  Synthetic
uaaauuuaacacaguuu

SEQ ID NO: 777117 - RNA, 17 nt, Artificial Sequence
  Synthetic
ugagagaaccacaguuu

SEQ ID NO: 777118 - RNA, 17 nt, Artificial Sequence
  Synthetic
ccuaacgugcacaguuu

SEQ ID NO: 777119 - RNA, 17 nt, Artificial Sequence
  Synthetic
uucaguuuucacaguuu

SEQ ID NO: 777120 - RNA, 17 nt, Artificial Sequence
  Synthetic
caaucugaauacaguuu

SEQ ID NO: 777121 - RNA, 17 nt, Artificial Sequence
  Synthetic
uuucacuuuuacaguuu

SEQ ID NO: 777122 - RNA, 17 nt, Artificial Sequence
  Synthetic
acuguggaaagcaguuu

SEQ ID NO: 777123 - RNA, 17 nt, Artificial Sequence
  Synthetic
aauggguuaagcaguuu

SEQ ID NO: 777124 - RNA, 17 nt, Artificial Sequence
  Synthetic
ucuccauggagcaguuu

SEQ ID NO: 777125 - RNA, 17 nt, Artificial Sequence
  Synthetic
uuuaggcaaggcaguuu

SEQ ID NO: 777126 - RNA, 17 nt, Artificial Sequence
  Synthetic
ugaugaacaggcaguuu

SEQ ID NO: 777127 - RNA, 17 nt, Artificial Sequence
  Synthetic
aaaagaaauugcaguuu

SEQ ID NO: 777128 - RNA, 17 nt, Artificial Sequence
  Synthetic
uacugcaaaaucaguuu

SEQ ID NO: 777129 - RNA, 17 nt, Artificial Sequence
  Synthetic
aauuucaacaucaguuu

SEQ ID NO: 777130 - RNA, 17 nt, Artificial Sequence
  Synthetic
uaugagugucucaguuu

SEQ ID NO: 777131 - RNA, 17 nt, Artificial Sequence
  Synthetic
uuaagaacggucaguuu

SEQ ID NO: 777132 - RNA, 17 nt, Artificial Sequence
  Synthetic
uuuucauuauucaguuu

SEQ ID NO: 777133 - RNA, 17 nt, Artificial Sequence
  Synthetic
ugucauuauuucaguuu

SEQ ID NO: 777134 - RNA, 17 nt, Artificial Sequence
  Synthetic
cuuuauuauuucaguuu

SEQ ID NO: 777135 - RNA, 17 nt, Artificial Sequence
  Synthetic
uaccugaguuucaguuu

SEQ ID NO: 777136 - RNA, 17 nt, Artificial Sequence
  Synthetic
auaaaaucaaagaguuu

SEQ ID NO: 777137 - RNA, 17 nt, Artificial Sequence
  Synthetic
aaaauugccaagaguuu

SEQ ID NO: 777138 - RNA, 17 nt, Artificial Sequence
  Synthetic
uuuuaugagaagaguuu

SEQ ID NO: 777139 - RNA, 17 nt, Artificial Sequence
  Synthetic
auuuuuuggaagaguuu

SEQ ID NO: 777140 - RNA, 17 nt, Artificial Sequence
  Synthetic
uagaaaaugaagaguuu

SEQ ID NO: 777141 - RNA, 17 nt, Artificial Sequence
  Synthetic
aaauucaugaagaguuu

SEQ ID NO: 777142 - RNA, 17 nt, Artificial Sequence
  Synthetic
agaaagaugaagaguuu

SEQ ID NO: 777143 - RNA, 17 nt, Artificial Sequence
  Synthetic
uucuaggaggagaguuu

SEQ ID NO: 777144 - RNA, 17 nt, Artificial Sequence
  Synthetic
auauuuagcuagaguuu

SEQ ID NO: 777145 - RNA, 17 nt, Artificial Sequence
  Synthetic
cugccccuaaggaguuu

SEQ ID NO: 777146 - RNA, 17 nt, Artificial Sequence
  Synthetic
augguacauaggaguuu

SEQ ID NO: 777147 - RNA, 17 nt, Artificial Sequence
  Synthetic
agaguugaugggaguuu

SEQ ID NO: 777148 - RNA, 17 nt, Artificial Sequence
  Synthetic
caguggguuuggaguuu

SEQ ID NO: 777149 - RNA, 17 nt, Artificial Sequence
  Synthetic
agucucaaaaugaguuu

SEQ ID NO: 777150 - RNA, 17 nt, Artificial Sequence
  Synthetic
uuuuagagaaugaguuu

SEQ ID NO: 777151 - RNA, 17 nt, Artificial Sequence
  Synthetic
auuaauuugaugaguuu

SEQ ID NO: 777152 - RNA, 17 nt, Artificial Sequence
  Synthetic
uauaacauguugaguuu

SEQ ID NO: 777153 - RNA, 17 nt, Artificial Sequence
  Synthetic
cauggaaauuugaguuu

SEQ ID NO: 777154 - RNA, 17 nt, Artificial Sequence
  Synthetic
ugccacacuuugaguuu

SEQ ID NO: 777155 - RNA, 17 nt, Artificial Sequence
  Synthetic
cuuuucugcaauaguuu

SEQ ID NO: 777156 - RNA, 17 nt, Artificial Sequence
  Synthetic
agauaauaucauaguuu

SEQ ID NO: 777157 - RNA, 17 nt, Artificial Sequence
  Synthetic
auauggacucauaguuu

SEQ ID NO: 777158 - RNA, 17 nt, Artificial Sequence
  Synthetic
aagauuucauauaguuu

SEQ ID NO: 777159 - RNA, 17 nt, Artificial Sequence
  Synthetic
uagaaaucuuauaguuu

SEQ ID NO: 777160 - RNA, 17 nt, Artificial Sequence
  Synthetic
ugauuaucuuauaguuu

SEQ ID NO: 777161 - RNA, 17 nt, Artificial Sequence
  Synthetic
ugcuaaaguuauaguuu

SEQ ID NO: 777162 - RNA, 17 nt, Artificial Sequence
  Synthetic
uuccaaauuuauaguuu

SEQ ID NO: 777163 - RNA, 17 nt, Artificial Sequence
  Synthetic
aaucuccuuacuaguuu

SEQ ID NO: 777164 - RNA, 17 nt, Artificial Sequence
  Synthetic
uuacacuaaccuaguuu

SEQ ID NO: 777165 - RNA, 17 nt, Artificial Sequence
  Synthetic
uuuggacaugcuaguuu

SEQ ID NO: 777166 - RNA, 17 nt, Artificial Sequence
  Synthetic
agcacacacucuaguuu

SEQ ID NO: 777167 - RNA, 17 nt, Artificial Sequence
  Synthetic
uugagcucaaguaguuu

SEQ ID NO: 777168 - RNA, 17 nt, Artificial Sequence
  Synthetic
aaauacugaaguaguuu

SEQ ID NO: 777169 - RNA, 17 nt, Artificial Sequence
  Synthetic
uauaauuucaguaguuu

SEQ ID NO: 777170 - RNA, 17 nt, Artificial Sequence
  Synthetic
auuuguaguuguaguuu

SEQ ID NO: 777171 - RNA, 17 nt, Artificial Sequence
  Synthetic
aggucauugauuaguuu

SEQ ID NO: 777172 - RNA, 17 nt, Artificial Sequence
  Synthetic
uuccugguuauuaguuu

SEQ ID NO: 777173 - RNA, 17 nt, Artificial Sequence
  Synthetic
agagaauaucuuaguuu

SEQ ID NO: 777174 - RNA, 17 nt, Artificial Sequence
  Synthetic
cucaagaacuuuaguuu

SEQ ID NO: 777175 - RNA, 17 nt, Artificial Sequence
  Synthetic
uauuacuucuuuaguuu

SEQ ID NO: 777176 - RNA, 17 nt, Artificial Sequence
  Synthetic
ccuuuggauuuuaguuu

SEQ ID NO: 777177 - RNA, 17 nt, Artificial Sequence
  Synthetic
aggauaccuuuuaguuu

SEQ ID NO: 777178 - RNA, 17 nt, Artificial Sequence
  Synthetic
uccacugauggacguuu

SEQ ID NO: 777179 - RNA, 17 nt, Artificial Sequence
  Synthetic
ucauuaaaaauacguuu

SEQ ID NO: 777180 - RNA, 17 nt, Artificial Sequence
  Synthetic
aagccacuacuacguuu

SEQ ID NO: 777181 - RNA, 17 nt, Artificial Sequence
  Synthetic
ucuaaaccauuacguuu

SEQ ID NO: 777182 - RNA, 17 nt, Artificial Sequence
  Synthetic
uauuaguaguuacguuu

SEQ ID NO: 777183 - RNA, 17 nt, Artificial Sequence
  Synthetic
aucccauuuguccguuu

SEQ ID NO: 777184 - RNA, 17 nt, Artificial Sequence
  Synthetic
agcagauaucagcguuu

SEQ ID NO: 777185 - RNA, 17 nt, Artificial Sequence
  Synthetic
cuguaaucucagcguuu

SEQ ID NO: 777186 - RNA, 17 nt, Artificial Sequence
  Synthetic
uucauauugacucguuu

SEQ ID NO: 777187 - RNA, 17 nt, Artificial Sequence
  Synthetic
ugguucugaagucguuu

SEQ ID NO: 777188 - RNA, 17 nt, Artificial Sequence
  Synthetic
ccaaaagagcaagguuu

SEQ ID NO: 777189 - RNA, 17 nt, Artificial Sequence
  Synthetic
ugcuguuuucaagguuu

SEQ ID NO: 777190 - RNA, 17 nt, Artificial Sequence
  Synthetic
ucacuucaagaagguuu

SEQ ID NO: 777191 - RNA, 17 nt, Artificial Sequence
  Synthetic
ucuuuguuggaagguuu

SEQ ID NO: 777192 - RNA, 17 nt, Artificial Sequence
  Synthetic
cacaauuuguaagguuu

SEQ ID NO: 777193 - RNA, 17 nt, Artificial Sequence
  Synthetic
ccuaccuuuuaagguuu

SEQ ID NO: 777194 - RNA, 17 nt, Artificial Sequence
  Synthetic
cacagcagcacagguuu

SEQ ID NO: 777195 - RNA, 17 nt, Artificial Sequence
  Synthetic
uguuacaauacagguuu

SEQ ID NO: 777196 - RNA, 17 nt, Artificial Sequence
  Synthetic
acaguugauccagguuu

SEQ ID NO: 777197 - RNA, 17 nt, Artificial Sequence
  Synthetic
ucuaaacaagcagguuu

SEQ ID NO: 777198 - RNA, 17 nt, Artificial Sequence
  Synthetic
auaaaaauugcagguuu

SEQ ID NO: 777199 - RNA, 17 nt, Artificial Sequence
  Synthetic
cugguccguucagguuu

SEQ ID NO: 777200 - RNA, 17 nt, Artificial Sequence
  Synthetic
uuucaaauuucagguuu

SEQ ID NO: 777201 - RNA, 17 nt, Artificial Sequence
  Synthetic
uauguguaaugagguuu

SEQ ID NO: 777202 - RNA, 17 nt, Artificial Sequence
  Synthetic
uuuguaaagugagguuu

SEQ ID NO: 777203 - RNA, 17 nt, Artificial Sequence
  Synthetic
cuaguaguuugagguuu

SEQ ID NO: 777204 - RNA, 17 nt, Artificial Sequence
  Synthetic
acugauucaauagguuu

SEQ ID NO: 777205 - RNA, 17 nt, Artificial Sequence
  Synthetic
uagauuauaauagguuu

SEQ ID NO: 777206 - RNA, 17 nt, Artificial Sequence
  Synthetic
cuguaucccauagguuu

SEQ ID NO: 777207 - RNA, 17 nt, Artificial Sequence
  Synthetic
ccuuucagcauagguuu

SEQ ID NO: 777208 - RNA, 17 nt, Artificial Sequence
  Synthetic
aauacaaagcuagguuu

SEQ ID NO: 777209 - RNA, 17 nt, Artificial Sequence
  Synthetic
acugauucaguagguuu

SEQ ID NO: 777210 - RNA, 17 nt, Artificial Sequence
  Synthetic
agaucaccuguagguuu

SEQ ID NO: 777211 - RNA, 17 nt, Artificial Sequence
  Synthetic
ugcaggagauccgguuu

SEQ ID NO: 777212 - RNA, 17 nt, Artificial Sequence
  Synthetic
uauaauguccucgguuu

SEQ ID NO: 777213 - RNA, 17 nt, Artificial Sequence
  Synthetic
ucguuuugaaaggguuu

SEQ ID NO: 777214 - RNA, 17 nt, Artificial Sequence
  Synthetic
accacaauaaaggguuu

SEQ ID NO: 777215 - RNA, 17 nt, Artificial Sequence
  Synthetic
augcauuuaaaggguuu

SEQ ID NO: 777216 - RNA, 17 nt, Artificial Sequence
  Synthetic
aggauuaugaaggguuu

SEQ ID NO: 777217 - RNA, 17 nt, Artificial Sequence
  Synthetic
ccagaaacacaggguuu

SEQ ID NO: 777218 - RNA, 17 nt, Artificial Sequence
  Synthetic
aaaacugccuaggguuu

SEQ ID NO: 777219 - RNA, 17 nt, Artificial Sequence
  Synthetic
aaagaaaaaagggguuu

SEQ ID NO: 777220 - RNA, 17 nt, Artificial Sequence
  Synthetic
uuagaagguggggguuu

SEQ ID NO: 777221 - RNA, 17 nt, Artificial Sequence
  Synthetic
cuaugguuuggggguuu

SEQ ID NO: 777222 - RNA, 17 nt, Artificial Sequence
  Synthetic
uuuuccaaaugggguuu

SEQ ID NO: 777223 - RNA, 17 nt, Artificial Sequence
  Synthetic
uuugaauuuugggguuu

SEQ ID NO: 777224 - RNA, 17 nt, Artificial Sequence
  Synthetic
aaauacuacauggguuu

SEQ ID NO: 777225 - RNA, 17 nt, Artificial Sequence
  Synthetic
ugggccccucuggguuu

SEQ ID NO: 777226 - RNA, 17 nt, Artificial Sequence
  Synthetic
auucagaucaaugguuu

SEQ ID NO: 777227 - RNA, 17 nt, Artificial Sequence
  Synthetic
uugaaauuauaugguuu

SEQ ID NO: 777228 - RNA, 17 nt, Artificial Sequence
  Synthetic
cuuguuggcuaugguuu

SEQ ID NO: 777229 - RNA, 17 nt, Artificial Sequence
  Synthetic
ucugauuuaacugguuu

SEQ ID NO: 777230 - RNA, 17 nt, Artificial Sequence
  Synthetic
ucuuuaagcccugguuu

SEQ ID NO: 777231 - RNA, 17 nt, Artificial Sequence
  Synthetic
ugcugcccagcugguuu

SEQ ID NO: 777232 - RNA, 17 nt, Artificial Sequence
  Synthetic
aaaaauaauucugguuu

SEQ ID NO: 777233 - RNA, 17 nt, Artificial Sequence
  Synthetic
uaccuggcuucugguuu

SEQ ID NO: 777234 - RNA, 17 nt, Artificial Sequence
  Synthetic
auuuccuuuucugguuu

SEQ ID NO: 777235 - RNA, 17 nt, Artificial Sequence
  Synthetic
uaaacuuuuucugguuu

SEQ ID NO: 777236 - RNA, 17 nt, Artificial Sequence
  Synthetic
uaaaguuaaauugguuu

SEQ ID NO: 777237 - RNA, 17 nt, Artificial Sequence
  Synthetic
uuuguugccauugguuu

SEQ ID NO: 777238 - RNA, 17 nt, Artificial Sequence
  Synthetic
cugcuagucauugguuu

SEQ ID NO: 777239 - RNA, 17 nt, Artificial Sequence
  Synthetic
uuucaccagcuugguuu

SEQ ID NO: 777240 - RNA, 17 nt, Artificial Sequence
  Synthetic
uggcuuccaguugguuu

SEQ ID NO: 777241 - RNA, 17 nt, Artificial Sequence
  Synthetic
agcuuugugguugguuu

SEQ ID NO: 777242 - RNA, 17 nt, Artificial Sequence
  Synthetic
uuuuguuugguugguuu

SEQ ID NO: 777243 - RNA, 17 nt, Artificial Sequence
  Synthetic
aauauauuuguugguuu

SEQ ID NO: 777244 - RNA, 17 nt, Artificial Sequence
  Synthetic
auccgauauuuugguuu

SEQ ID NO: 777245 - RNA, 17 nt, Artificial Sequence
  Synthetic
caucugacuuuugguuu

SEQ ID NO: 777246 - RNA, 17 nt, Artificial Sequence
  Synthetic
ugaaguaguuuugguuu

SEQ ID NO: 777247 - RNA, 17 nt, Artificial Sequence
  Synthetic
caaagcagaaaauguuu

SEQ ID NO: 777248 - RNA, 17 nt, Artificial Sequence
  Synthetic
aguuauauaaaauguuu

SEQ ID NO: 777249 - RNA, 17 nt, Artificial Sequence
  Synthetic
uuauugggcaaauguuu

SEQ ID NO: 777250 - RNA, 17 nt, Artificial Sequence
  Synthetic
uuaaaaugacaauguuu

SEQ ID NO: 777251 - RNA, 17 nt, Artificial Sequence
  Synthetic
augagugcccaauguuu

SEQ ID NO: 777252 - RNA, 17 nt, Artificial Sequence
  Synthetic
auccugcuucaauguuu

SEQ ID NO: 777253 - RNA, 17 nt, Artificial Sequence
  Synthetic
uguaagagagaauguuu

SEQ ID NO: 777254 - RNA, 17 nt, Artificial Sequence
  Synthetic
ucuuggguggaauguuu

SEQ ID NO: 777255 - RNA, 17 nt, Artificial Sequence
  Synthetic
accaagaaguaauguuu

SEQ ID NO: 777256 - RNA, 17 nt, Artificial Sequence
  Synthetic
aaaaguagguaauguuu

SEQ ID NO: 777257 - RNA, 17 nt, Artificial Sequence
  Synthetic
uggucccagacauguuu

SEQ ID NO: 777258 - RNA, 17 nt, Artificial Sequence
  Synthetic
uuccaggagacauguuu

SEQ ID NO: 777259 - RNA, 17 nt, Artificial Sequence
  Synthetic
uaacucccaccauguuu

SEQ ID NO: 777260 - RNA, 17 nt, Artificial Sequence
  Synthetic
cuaggaacagcauguuu

SEQ ID NO: 777261 - RNA, 17 nt, Artificial Sequence
  Synthetic
cccaauccuucauguuu

SEQ ID NO: 777262 - RNA, 17 nt, Artificial Sequence
  Synthetic
cuuugccuuucauguuu

SEQ ID NO: 777263 - RNA, 17 nt, Artificial Sequence
  Synthetic
cuccagccuagauguuu

SEQ ID NO: 777264 - RNA, 17 nt, Artificial Sequence
  Synthetic
uguuacucaggauguuu

SEQ ID NO: 777265 - RNA, 17 nt, Artificial Sequence
  Synthetic
aggaaagauggauguuu

SEQ ID NO: 777266 - RNA, 17 nt, Artificial Sequence
  Synthetic
cuggagcagugauguuu

SEQ ID NO: 777267 - RNA, 17 nt, Artificial Sequence
  Synthetic
uuguauuggugauguuu

SEQ ID NO: 777268 - RNA, 17 nt, Artificial Sequence
  Synthetic
uauagagcaauauguuu

SEQ ID NO: 777269 - RNA, 17 nt, Artificial Sequence
  Synthetic
agcaaaaugauauguuu

SEQ ID NO: 777270 - RNA, 17 nt, Artificial Sequence
  Synthetic
agcagaaugauauguuu

SEQ ID NO: 777271 - RNA, 17 nt, Artificial Sequence
  Synthetic
cuaguccagcuauguuu

SEQ ID NO: 777272 - RNA, 17 nt, Artificial Sequence
  Synthetic
cauaaaacgcuauguuu

SEQ ID NO: 777273 - RNA, 17 nt, Artificial Sequence
  Synthetic
uaccuuuuucuauguuu

SEQ ID NO: 777274 - RNA, 17 nt, Artificial Sequence
  Synthetic
uacuggaaaguauguuu

SEQ ID NO: 777275 - RNA, 17 nt, Artificial Sequence
  Synthetic
auugaaaagguauguuu

SEQ ID NO: 777276 - RNA, 17 nt, Artificial Sequence
  Synthetic
acauaccauguauguuu

SEQ ID NO: 777277 - RNA, 17 nt, Artificial Sequence
  Synthetic
acuuuagaaaacuguuu

SEQ ID NO: 777278 - RNA, 17 nt, Artificial Sequence
  Synthetic
ugccuauaaaacuguuu

SEQ ID NO: 777279 - RNA, 17 nt, Artificial Sequence
  Synthetic
augagaaguaacuguuu

SEQ ID NO: 777280 - RNA, 17 nt, Artificial Sequence
  Synthetic
aaauaccuuaacuguuu

SEQ ID NO: 777281 - RNA, 17 nt, Artificial Sequence
  Synthetic
uacuaugcucacuguuu

SEQ ID NO: 777282 - RNA, 17 nt, Artificial Sequence
  Synthetic
cugcguugucacuguuu

SEQ ID NO: 777283 - RNA, 17 nt, Artificial Sequence
  Synthetic
cuuccucaagacuguuu

SEQ ID NO: 777284 - RNA, 17 nt, Artificial Sequence
  Synthetic
cuggugccagacuguuu

SEQ ID NO: 777285 - RNA, 17 nt, Artificial Sequence
  Synthetic
aaugaaaaugacuguuu

SEQ ID NO: 777286 - RNA, 17 nt, Artificial Sequence
  Synthetic
ccaauaccauacuguuu

SEQ ID NO: 777287 - RNA, 17 nt, Artificial Sequence
  Synthetic
augcugguauacuguuu

SEQ ID NO: 777288 - RNA, 17 nt, Artificial Sequence
  Synthetic
auguaucccuacuguuu

SEQ ID NO: 777289 - RNA, 17 nt, Artificial Sequence
  Synthetic
auuacauuguacuguuu

SEQ ID NO: 777290 - RNA, 17 nt, Artificial Sequence
  Synthetic
cuugagucuuacuguuu

SEQ ID NO: 777291 - RNA, 17 nt, Artificial Sequence
  Synthetic
ucccuaaaaaccuguuu

SEQ ID NO: 777292 - RNA, 17 nt, Artificial Sequence
  Synthetic
agcucauucuccuguuu

SEQ ID NO: 777293 - RNA, 17 nt, Artificial Sequence
  Synthetic
aaauugggcagcuguuu

SEQ ID NO: 777294 - RNA, 17 nt, Artificial Sequence
  Synthetic
agcuaauaaugcuguuu

SEQ ID NO: 777295 - RNA, 17 nt, Artificial Sequence
  Synthetic
ccaguaccaugcuguuu

SEQ ID NO: 777296 - RNA, 17 nt, Artificial Sequence
  Synthetic
ugaagccacugcuguuu

SEQ ID NO: 777297 - RNA, 17 nt, Artificial Sequence
  Synthetic
uaguucaaaaucuguuu

SEQ ID NO: 777298 - RNA, 17 nt, Artificial Sequence
  Synthetic
aucaguauaaucuguuu

SEQ ID NO: 777299 - RNA, 17 nt, Artificial Sequence
  Synthetic
cuucugaagaucuguuu

SEQ ID NO: 777300 - RNA, 17 nt, Artificial Sequence
  Synthetic
aaugcucagaucuguuu

SEQ ID NO: 777301 - RNA, 17 nt, Artificial Sequence
  Synthetic
uuaacaauucucuguuu

SEQ ID NO: 777302 - RNA, 17 nt, Artificial Sequence
  Synthetic
uuaaaauaagucuguuu

SEQ ID NO: 777303 - RNA, 17 nt, Artificial Sequence
  Synthetic
cagguuuauuucuguuu

SEQ ID NO: 777304 - RNA, 17 nt, Artificial Sequence
  Synthetic
ccuaugguuuucuguuu

SEQ ID NO: 777305 - RNA, 17 nt, Artificial Sequence
  Synthetic
aagacuaaaaaguguuu

SEQ ID NO: 777306 - RNA, 17 nt, Artificial Sequence
  Synthetic
uauuucuaaaaguguuu

SEQ ID NO: 777307 - RNA, 17 nt, Artificial Sequence
  Synthetic
uguggucccaaguguuu

SEQ ID NO: 777308 - RNA, 17 nt, Artificial Sequence
  Synthetic
ugggauuggaaguguuu

SEQ ID NO: 777309 - RNA, 17 nt, Artificial Sequence
  Synthetic
ugaacugguaaguguuu

SEQ ID NO: 777310 - RNA, 17 nt, Artificial Sequence
  Synthetic
acgugucuuaaguguuu

SEQ ID NO: 777311 - RNA, 17 nt, Artificial Sequence
  Synthetic
aaauacuuucaguguuu

SEQ ID NO: 777312 - RNA, 17 nt, Artificial Sequence
  Synthetic
uguacaccagaguguuu

SEQ ID NO: 777313 - RNA, 17 nt, Artificial Sequence
  Synthetic
uacagaggcuaguguuu

SEQ ID NO: 777314 - RNA, 17 nt, Artificial Sequence
  Synthetic
uuuaauuuuuaguguuu

SEQ ID NO: 777315 - RNA, 17 nt, Artificial Sequence
  Synthetic
cauugcuuuugguguuu

SEQ ID NO: 777316 - RNA, 17 nt, Artificial Sequence
  Synthetic
augcuuuugauguguuu

SEQ ID NO: 777317 - RNA, 17 nt, Artificial Sequence
  Synthetic
cuugugacucuguguuu

SEQ ID NO: 777318 - RNA, 17 nt, Artificial Sequence
  Synthetic
ucuagauuucuguguuu

SEQ ID NO: 777319 - RNA, 17 nt, Artificial Sequence
  Synthetic
ugauaaugaguguguuu

SEQ ID NO: 777320 - RNA, 17 nt, Artificial Sequence
  Synthetic
uguguguguguguguuu

SEQ ID NO: 777321 - RNA, 17 nt, Artificial Sequence
  Synthetic
uuguguugauuguguuu

SEQ ID NO: 777322 - RNA, 17 nt, Artificial Sequence
  Synthetic
uaaagauuguuguguuu

SEQ ID NO: 777323 - RNA, 17 nt, Artificial Sequence
  Synthetic
cuuuuucacaauuguuu

SEQ ID NO: 777324 - RNA, 17 nt, Artificial Sequence
  Synthetic
aaugcacccaauuguuu

SEQ ID NO: 777325 - RNA, 17 nt, Artificial Sequence
  Synthetic
uguuuguucaauuguuu

SEQ ID NO: 777326 - RNA, 17 nt, Artificial Sequence
  Synthetic
ugacccaauaauuguuu

SEQ ID NO: 777327 - RNA, 17 nt, Artificial Sequence
  Synthetic
auuuacuguaauuguuu

SEQ ID NO: 777328 - RNA, 17 nt, Artificial Sequence
  Synthetic
uuaacucugcauuguuu

SEQ ID NO: 777329 - RNA, 17 nt, Artificial Sequence
  Synthetic
uuuuaucaauauuguuu

SEQ ID NO: 777330 - RNA, 17 nt, Artificial Sequence
  Synthetic
auauacauauauuguuu

SEQ ID NO: 777331 - RNA, 17 nt, Artificial Sequence
  Synthetic
uauaauuuauauuguuu

SEQ ID NO: 777332 - RNA, 17 nt, Artificial Sequence
  Synthetic
uugauugguuauuguuu

SEQ ID NO: 777333 - RNA, 17 nt, Artificial Sequence
  Synthetic
uuuaugcuuuauuguuu

SEQ ID NO: 777334 - RNA, 17 nt, Artificial Sequence
  Synthetic
caugguuuuuauuguuu

SEQ ID NO: 777335 - RNA, 17 nt, Artificial Sequence
  Synthetic
aaguaacuaacuuguuu

SEQ ID NO: 777336 - RNA, 17 nt, Artificial Sequence
  Synthetic
uccaguucaccuuguuu

SEQ ID NO: 777337 - RNA, 17 nt, Artificial Sequence
  Synthetic
aaaaaaauaccuuguuu

SEQ ID NO: 777338 - RNA, 17 nt, Artificial Sequence
  Synthetic
ugauucaugucuuguuu

SEQ ID NO: 777339 - RNA, 17 nt, Artificial Sequence
  Synthetic
ccaguaccauguuguuu

SEQ ID NO: 777340 - RNA, 17 nt, Artificial Sequence
  Synthetic
uuauucuucuguuguuu

SEQ ID NO: 777341 - RNA, 17 nt, Artificial Sequence
  Synthetic
auaaguaacauuuguuu

SEQ ID NO: 777342 - RNA, 17 nt, Artificial Sequence
  Synthetic
uguuuuuccauuuguuu

SEQ ID NO: 777343 - RNA, 17 nt, Artificial Sequence
  Synthetic
caaaaaaggauuuguuu

SEQ ID NO: 777344 - RNA, 17 nt, Artificial Sequence
  Synthetic
aaaucucuuauuuguuu

SEQ ID NO: 777345 - RNA, 17 nt, Artificial Sequence
  Synthetic
uaugcauuacuuuguuu

SEQ ID NO: 777346 - RNA, 17 nt, Artificial Sequence
  Synthetic
cuggagccccuuuguuu

SEQ ID NO: 777347 - RNA, 17 nt, Artificial Sequence
  Synthetic
uuucuaucccuuuguuu

SEQ ID NO: 777348 - RNA, 17 nt, Artificial Sequence
  Synthetic
aagauuuaaguuuguuu

SEQ ID NO: 777349 - RNA, 17 nt, Artificial Sequence
  Synthetic
aucaaaauaguuuguuu

SEQ ID NO: 777350 - RNA, 17 nt, Artificial Sequence
  Synthetic
aaccaauagguuuguuu

SEQ ID NO: 777351 - RNA, 17 nt, Artificial Sequence
  Synthetic
auuuaaacuguuuguuu

SEQ ID NO: 777352 - RNA, 17 nt, Artificial Sequence
  Synthetic
caauccaguguuuguuu

SEQ ID NO: 777353 - RNA, 17 nt, Artificial Sequence
  Synthetic
aagcuauuuguuuguuu

SEQ ID NO: 777354 - RNA, 17 nt, Artificial Sequence
  Synthetic
uaaauuuuuguuuguuu

SEQ ID NO: 777355 - RNA, 17 nt, Artificial Sequence
  Synthetic
ucuguuuuuguuuguuu

SEQ ID NO: 777356 - RNA, 17 nt, Artificial Sequence
  Synthetic
aagcaauaauuuuguuu

SEQ ID NO: 777357 - RNA, 17 nt, Artificial Sequence
  Synthetic
ugaauaauauuuuguuu

SEQ ID NO: 777358 - RNA, 17 nt, Artificial Sequence
  Synthetic
ucagcuaucuuuuguuu

SEQ ID NO: 777359 - RNA, 17 nt, Artificial Sequence
  Synthetic
uauuguugguuuuguuu

SEQ ID NO: 777360 - RNA, 17 nt, Artificial Sequence
  Synthetic
aaaucaauguuuuguuu

SEQ ID NO: 777361 - RNA, 17 nt, Artificial Sequence
  Synthetic
ugugugucuuuuuguuu

SEQ ID NO: 777362 - RNA, 17 nt, Artificial Sequence
  Synthetic
uucugagguuuuuguuu

SEQ ID NO: 777363 - RNA, 17 nt, Artificial Sequence
  Synthetic
uaucauuuuuuuuguuu

SEQ ID NO: 777364 - RNA, 17 nt, Artificial Sequence
  Synthetic
aauaaggucaaaauuuu

SEQ ID NO: 777365 - RNA, 17 nt, Artificial Sequence
  Synthetic
aaauauuugaaaauuuu

SEQ ID NO: 777366 - RNA, 17 nt, Artificial Sequence
  Synthetic
caaccugcacaaauuuu

SEQ ID NO: 777367 - RNA, 17 nt, Artificial Sequence
  Synthetic
cgaauuuuacaaauuuu

SEQ ID NO: 777368 - RNA, 17 nt, Artificial Sequence
  Synthetic
uuccccuugcaaauuuu

SEQ ID NO: 777369 - RNA, 17 nt, Artificial Sequence
  Synthetic
auuuucauagaaauuuu

SEQ ID NO: 777370 - RNA, 17 nt, Artificial Sequence
  Synthetic
aauucaaaauaaauuuu

SEQ ID NO: 777371 - RNA, 17 nt, Artificial Sequence
  Synthetic
acuuggcaauaaauuuu

SEQ ID NO: 777372 - RNA, 17 nt, Artificial Sequence
  Synthetic
ugauagagauaaauuuu

SEQ ID NO: 777373 - RNA, 17 nt, Artificial Sequence
  Synthetic
auacauuauuaaauuuu

SEQ ID NO: 777374 - RNA, 17 nt, Artificial Sequence
  Synthetic
auuauacuuuaaauuuu

SEQ ID NO: 777375 - RNA, 17 nt, Artificial Sequence
  Synthetic
uuuauccuuuaaauuuu

SEQ ID NO: 777376 - RNA, 17 nt, Artificial Sequence
  Synthetic
aaaaucucaacaauuuu

SEQ ID NO: 777377 - RNA, 17 nt, Artificial Sequence
  Synthetic
auuuuacuaacaauuuu

SEQ ID NO: 777378 - RNA, 17 nt, Artificial Sequence
  Synthetic
aagcaaaacacaauuuu

SEQ ID NO: 777379 - RNA, 17 nt, Artificial Sequence
  Synthetic
cuccccagugcaauuuu

SEQ ID NO: 777380 - RNA, 17 nt, Artificial Sequence
  Synthetic
cuuaaaaaaucaauuuu

SEQ ID NO: 777381 - RNA, 17 nt, Artificial Sequence
  Synthetic
uuccacuugucaauuuu

SEQ ID NO: 777382 - RNA, 17 nt, Artificial Sequence
  Synthetic
uuaguuacuucaauuuu

SEQ ID NO: 777383 - RNA, 17 nt, Artificial Sequence
  Synthetic
agaagaacaagaauuuu

SEQ ID NO: 777384 - RNA, 17 nt, Artificial Sequence
  Synthetic
uccuggaacagaauuuu

SEQ ID NO: 777385 - RNA, 17 nt, Artificial Sequence
  Synthetic
aaggaucagagaauuuu

SEQ ID NO: 777386 - RNA, 17 nt, Artificial Sequence
  Synthetic
uagccacauggaauuuu

SEQ ID NO: 777387 - RNA, 17 nt, Artificial Sequence
  Synthetic
uuuuugguuggaauuuu

SEQ ID NO: 777388 - RNA, 17 nt, Artificial Sequence
  Synthetic
agauucauaugaauuuu

SEQ ID NO: 777389 - RNA, 17 nt, Artificial Sequence
  Synthetic
auaugauucugaauuuu

SEQ ID NO: 777390 - RNA, 17 nt, Artificial Sequence
  Synthetic
cugauugugugaauuuu

SEQ ID NO: 777391 - RNA, 17 nt, Artificial Sequence
  Synthetic
uuccaauuuugaauuuu

SEQ ID NO: 777392 - RNA, 17 nt, Artificial Sequence
  Synthetic
agggaagaaauaauuuu

SEQ ID NO: 777393 - RNA, 17 nt, Artificial Sequence
  Synthetic
ugaaauugcauaauuuu

SEQ ID NO: 777394 - RNA, 17 nt, Artificial Sequence
  Synthetic
aauacucucauaauuuu

SEQ ID NO: 777395 - RNA, 17 nt, Artificial Sequence
  Synthetic
uuauaauuuauaauuuu

SEQ ID NO: 777396 - RNA, 17 nt, Artificial Sequence
  Synthetic
uuucuuccacuaauuuu

SEQ ID NO: 777397 - RNA, 17 nt, Artificial Sequence
  Synthetic
ccugccucccuaauuuu

SEQ ID NO: 777398 - RNA, 17 nt, Artificial Sequence
  Synthetic
cacacccagcuaauuuu

SEQ ID NO: 777399 - RNA, 17 nt, Artificial Sequence
  Synthetic
ucaaaaucaguaauuuu

SEQ ID NO: 777400 - RNA, 17 nt, Artificial Sequence
  Synthetic
uacucaugaguaauuuu

SEQ ID NO: 777401 - RNA, 17 nt, Artificial Sequence
  Synthetic
uuaugagcuguaauuuu

SEQ ID NO: 777402 - RNA, 17 nt, Artificial Sequence
  Synthetic
uguuuugaauuaauuuu

SEQ ID NO: 777403 - RNA, 17 nt, Artificial Sequence
  Synthetic
auuaaaacauuaauuuu

SEQ ID NO: 777404 - RNA, 17 nt, Artificial Sequence
  Synthetic
ucccacuuguuaauuuu

SEQ ID NO: 777405 - RNA, 17 nt, Artificial Sequence
  Synthetic
ccuugguauuuaauuuu

SEQ ID NO: 777406 - RNA, 17 nt, Artificial Sequence
  Synthetic
acauauucaaacauuuu

SEQ ID NO: 777407 - RNA, 17 nt, Artificial Sequence
  Synthetic
ugauguggcaacauuuu

SEQ ID NO: 777408 - RNA, 17 nt, Artificial Sequence
  Synthetic
ccuuuccagaacauuuu

SEQ ID NO: 777409 - RNA, 17 nt, Artificial Sequence
  Synthetic
auauuguagaacauuuu

SEQ ID NO: 777410 - RNA, 17 nt, Artificial Sequence
  Synthetic
aaaugccauaacauuuu

SEQ ID NO: 777411 - RNA, 17 nt, Artificial Sequence
  Synthetic
auaugaccuaacauuuu

SEQ ID NO: 777412 - RNA, 17 nt, Artificial Sequence
  Synthetic
cuuuacauuaacauuuu

SEQ ID NO: 777413 - RNA, 17 nt, Artificial Sequence
  Synthetic
ucagcaaaccacauuuu

SEQ ID NO: 777414 - RNA, 17 nt, Artificial Sequence
  Synthetic
agucgcuuccacauuuu

SEQ ID NO: 777415 - RNA, 17 nt, Artificial Sequence
  Synthetic
aguugcuuccacauuuu

SEQ ID NO: 777416 - RNA, 17 nt, Artificial Sequence
  Synthetic
aggauuuuccacauuuu

SEQ ID NO: 777417 - RNA, 17 nt, Artificial Sequence
  Synthetic
uauguugggcacauuuu

SEQ ID NO: 777418 - RNA, 17 nt, Artificial Sequence
  Synthetic
uuuccuuggcacauuuu

SEQ ID NO: 777419 - RNA, 17 nt, Artificial Sequence
  Synthetic
caaguauuucacauuuu

SEQ ID NO: 777420 - RNA, 17 nt, Artificial Sequence
  Synthetic
augucaggagacauuuu

SEQ ID NO: 777421 - RNA, 17 nt, Artificial Sequence
  Synthetic
auuucuggagacauuuu

SEQ ID NO: 777422 - RNA, 17 nt, Artificial Sequence
  Synthetic
uucaaaaccuacauuuu

SEQ ID NO: 777423 - RNA, 17 nt, Artificial Sequence
  Synthetic
ugcuuguccuacauuuu

SEQ ID NO: 777424 - RNA, 17 nt, Artificial Sequence
  Synthetic
cagaacauuuacauuuu

SEQ ID NO: 777425 - RNA, 17 nt, Artificial Sequence
  Synthetic
uuuuuuuuaaccauuuu

SEQ ID NO: 777426 - RNA, 17 nt, Artificial Sequence
  Synthetic
acucuguuucccauuuu

SEQ ID NO: 777427 - RNA, 17 nt, Artificial Sequence
  Synthetic
aaauaauauuccauuuu

SEQ ID NO: 777428 - RNA, 17 nt, Artificial Sequence
  Synthetic
cugaguccuuccauuuu

SEQ ID NO: 777429 - RNA, 17 nt, Artificial Sequence
  Synthetic
aaccaggguuccauuuu

SEQ ID NO: 777430 - RNA, 17 nt, Artificial Sequence
  Synthetic
uuauuauuuuccauuuu

SEQ ID NO: 777431 - RNA, 17 nt, Artificial Sequence
  Synthetic
uugguaucaagcauuuu

SEQ ID NO: 777432 - RNA, 17 nt, Artificial Sequence
  Synthetic
uucuuggacagcauuuu

SEQ ID NO: 777433 - RNA, 17 nt, Artificial Sequence
  Synthetic
uguaaucccagcauuuu

SEQ ID NO: 777434 - RNA, 17 nt, Artificial Sequence
  Synthetic
cagcacaagagcauuuu

SEQ ID NO: 777435 - RNA, 17 nt, Artificial Sequence
  Synthetic
agcuccaugagcauuuu

SEQ ID NO: 777436 - RNA, 17 nt, Artificial Sequence
  Synthetic
uuuaaaguacgcauuuu

SEQ ID NO: 777437 - RNA, 17 nt, Artificial Sequence
  Synthetic
aacaagggaggcauuuu

SEQ ID NO: 777438 - RNA, 17 nt, Artificial Sequence
  Synthetic
uguaaucucggcauuuu

SEQ ID NO: 777439 - RNA, 17 nt, Artificial Sequence
  Synthetic
uauaacuagggcauuuu

SEQ ID NO: 777440 - RNA, 17 nt, Artificial Sequence
  Synthetic
cuuaucaaaugcauuuu

SEQ ID NO: 777441 - RNA, 17 nt, Artificial Sequence
  Synthetic
cacucugaaugcauuuu

SEQ ID NO: 777442 - RNA, 17 nt, Artificial Sequence
  Synthetic
ugacuuuugugcauuuu

SEQ ID NO: 777443 - RNA, 17 nt, Artificial Sequence
  Synthetic
uucuuuucuaucauuuu

SEQ ID NO: 777444 - RNA, 17 nt, Artificial Sequence
  Synthetic
agcaguaaacucauuuu

SEQ ID NO: 777445 - RNA, 17 nt, Artificial Sequence
  Synthetic
auuauuucccucauuuu

SEQ ID NO: 777446 - RNA, 17 nt, Artificial Sequence
  Synthetic
aacuuauuucucauuuu

SEQ ID NO: 777447 - RNA, 17 nt, Artificial Sequence
  Synthetic
aucacacaauucauuuu

SEQ ID NO: 777448 - RNA, 17 nt, Artificial Sequence
  Synthetic
cuuucauucuucauuuu

SEQ ID NO: 777449 - RNA, 17 nt, Artificial Sequence
  Synthetic
acagaaaaguucauuuu

SEQ ID NO: 777450 - RNA, 17 nt, Artificial Sequence
  Synthetic
ccuacguauuucauuuu

SEQ ID NO: 777451 - RNA, 17 nt, Artificial Sequence
  Synthetic
acuucuuauuucauuuu

SEQ ID NO: 777452 - RNA, 17 nt, Artificial Sequence
  Synthetic
uuugcugguuucauuuu

SEQ ID NO: 777453 - RNA, 17 nt, Artificial Sequence
  Synthetic
aaaggcauuuucauuuu

SEQ ID NO: 777454 - RNA, 17 nt, Artificial Sequence
  Synthetic
uuaucugcaaagauuuu

SEQ ID NO: 777455 - RNA, 17 nt, Artificial Sequence
  Synthetic
uccuucaagaagauuuu

SEQ ID NO: 777456 - RNA, 17 nt, Artificial Sequence
  Synthetic
cagcuuaagaagauuuu

SEQ ID NO: 777457 - RNA, 17 nt, Artificial Sequence
  Synthetic
ugcugaaauaagauuuu

SEQ ID NO: 777458 - RNA, 17 nt, Artificial Sequence
  Synthetic
uagcagguuaagauuuu

SEQ ID NO: 777459 - RNA, 17 nt, Artificial Sequence
  Synthetic
aaaaccaaacagauuuu

SEQ ID NO: 777460 - RNA, 17 nt, Artificial Sequence
  Synthetic
caugggagacagauuuu

SEQ ID NO: 777461 - RNA, 17 nt, Artificial Sequence
  Synthetic
uaaaaccaucagauuuu

SEQ ID NO: 777462 - RNA, 17 nt, Artificial Sequence
  Synthetic
auuagaacagagauuuu

SEQ ID NO: 777463 - RNA, 17 nt, Artificial Sequence
  Synthetic
ucaguuuuagagauuuu

SEQ ID NO: 777464 - RNA, 17 nt, Artificial Sequence
  Synthetic
cagcuuaaggagauuuu

SEQ ID NO: 777465 - RNA, 17 nt, Artificial Sequence
  Synthetic
aauuuauaauagauuuu

SEQ ID NO: 777466 - RNA, 17 nt, Artificial Sequence
  Synthetic
cuacuuuucuagauuuu

SEQ ID NO: 777467 - RNA, 17 nt, Artificial Sequence
  Synthetic
cacccacaguagauuuu

SEQ ID NO: 777468 - RNA, 17 nt, Artificial Sequence
  Synthetic
uuuguauuguagauuuu

SEQ ID NO: 777469 - RNA, 17 nt, Artificial Sequence
  Synthetic
aaauacuuaacgauuuu

SEQ ID NO: 777470 - RNA, 17 nt, Artificial Sequence
  Synthetic
aagggcccuaggauuuu

SEQ ID NO: 777471 - RNA, 17 nt, Artificial Sequence
  Synthetic
caugguacagggauuuu

SEQ ID NO: 777472 - RNA, 17 nt, Artificial Sequence
  Synthetic
aggugaacugggauuuu

SEQ ID NO: 777473 - RNA, 17 nt, Artificial Sequence
  Synthetic
cucugauuauggauuuu

SEQ ID NO: 777474 - RNA, 17 nt, Artificial Sequence
  Synthetic
ugcucuugaaugauuuu

SEQ ID NO: 777475 - RNA, 17 nt, Artificial Sequence
  Synthetic
cuauucuucaugauuuu

SEQ ID NO: 777476 - RNA, 17 nt, Artificial Sequence
  Synthetic
auguuauuuaugauuuu

SEQ ID NO: 777477 - RNA, 17 nt, Artificial Sequence
  Synthetic
uauuugcaagugauuuu

SEQ ID NO: 777478 - RNA, 17 nt, Artificial Sequence
  Synthetic
augucgaaggugauuuu

SEQ ID NO: 777479 - RNA, 17 nt, Artificial Sequence
  Synthetic
uuuagggaggugauuuu

SEQ ID NO: 777480 - RNA, 17 nt, Artificial Sequence
  Synthetic
uugggggaggugauuuu

SEQ ID NO: 777481 - RNA, 17 nt, Artificial Sequence
  Synthetic
caguuuucauugauuuu

SEQ ID NO: 777482 - RNA, 17 nt, Artificial Sequence
  Synthetic
aggugccuauugauuuu

SEQ ID NO: 777483 - RNA, 17 nt, Artificial Sequence
  Synthetic
auauauaaaaauauuuu

SEQ ID NO: 777484 - RNA, 17 nt, Artificial Sequence
  Synthetic
cccuuucaaaauauuuu

SEQ ID NO: 777485 - RNA, 17 nt, Artificial Sequence
  Synthetic
aggagcuaaaauauuuu

SEQ ID NO: 777486 - RNA, 17 nt, Artificial Sequence
  Synthetic
auuaaaucaaauauuuu

SEQ ID NO: 777487 - RNA, 17 nt, Artificial Sequence
  Synthetic
cagagaguaaauauuuu

SEQ ID NO: 777488 - RNA, 17 nt, Artificial Sequence
  Synthetic
cagauaguaaauauuuu

SEQ ID NO: 777489 - RNA, 17 nt, Artificial Sequence
  Synthetic
uaguuaguaaauauuuu

SEQ ID NO: 777490 - RNA, 17 nt, Artificial Sequence
  Synthetic
auaguuuuaaauauuuu

SEQ ID NO: 777491 - RNA, 17 nt, Artificial Sequence
  Synthetic
aaugugugcaauauuuu

SEQ ID NO: 777492 - RNA, 17 nt, Artificial Sequence
  Synthetic
aggcacacgaauauuuu

SEQ ID NO: 777493 - RNA, 17 nt, Artificial Sequence
  Synthetic
uacuuacugaauauuuu

SEQ ID NO: 777494 - RNA, 17 nt, Artificial Sequence
  Synthetic
aaguuguugaauauuuu

SEQ ID NO: 777495 - RNA, 17 nt, Artificial Sequence
  Synthetic
uugguuaauaauauuuu

SEQ ID NO: 777496 - RNA, 17 nt, Artificial Sequence
  Synthetic
uaauccaaacauauuuu

SEQ ID NO: 777497 - RNA, 17 nt, Artificial Sequence
  Synthetic
uagaaugaacauauuuu

SEQ ID NO: 777498 - RNA, 17 nt, Artificial Sequence
  Synthetic
caggaguaacauauuuu

SEQ ID NO: 777499 - RNA, 17 nt, Artificial Sequence
  Synthetic
uaugagcuacauauuuu

SEQ ID NO: 777500 - RNA, 17 nt, Artificial Sequence
  Synthetic
cacaauaaccauauuuu

SEQ ID NO: 777501 - RNA, 17 nt, Artificial Sequence
  Synthetic
acugggacccauauuuu

SEQ ID NO: 777502 - RNA, 17 nt, Artificial Sequence
  Synthetic
uaucaaggccauauuuu

SEQ ID NO: 777503 - RNA, 17 nt, Artificial Sequence
  Synthetic
uauugucgucauauuuu

SEQ ID NO: 777504 - RNA, 17 nt, Artificial Sequence
  Synthetic
auugcauuucauauuuu

SEQ ID NO: 777505 - RNA, 17 nt, Artificial Sequence
  Synthetic
augauaucagauauuuu

SEQ ID NO: 777506 - RNA, 17 nt, Artificial Sequence
  Synthetic
auuuccuaugauauuuu

SEQ ID NO: 777507 - RNA, 17 nt, Artificial Sequence
  Synthetic
auauugugugauauuuu

SEQ ID NO: 777508 - RNA, 17 nt, Artificial Sequence
  Synthetic
caauuuguugauauuuu

SEQ ID NO: 777509 - RNA, 17 nt, Artificial Sequence
  Synthetic
agugaaaucuauauuuu

SEQ ID NO: 777510 - RNA, 17 nt, Artificial Sequence
  Synthetic
uugauaggguauauuuu

SEQ ID NO: 777511 - RNA, 17 nt, Artificial Sequence
  Synthetic
cccagacauuauauuuu

SEQ ID NO: 777512 - RNA, 17 nt, Artificial Sequence
  Synthetic
uuuuuuuuuuauauuuu

SEQ ID NO: 777513 - RNA, 17 nt, Artificial Sequence
  Synthetic
agcuuaauaacuauuuu

SEQ ID NO: 777514 - RNA, 17 nt, Artificial Sequence
  Synthetic
ucuauugucacuauuuu

SEQ ID NO: 777515 - RNA, 17 nt, Artificial Sequence
  Synthetic
auucccucaccuauuuu

SEQ ID NO: 777516 - RNA, 17 nt, Artificial Sequence
  Synthetic
aaguucaucccuauuuu

SEQ ID NO: 777517 - RNA, 17 nt, Artificial Sequence
  Synthetic
ucaucucucccuauuuu

SEQ ID NO: 777518 - RNA, 17 nt, Artificial Sequence
  Synthetic
agagaacaagcuauuuu

SEQ ID NO: 777519 - RNA, 17 nt, Artificial Sequence
  Synthetic
caugauuaaucuauuuu

SEQ ID NO: 777520 - RNA, 17 nt, Artificial Sequence
  Synthetic
ccuuguguaucuauuuu

SEQ ID NO: 777521 - RNA, 17 nt, Artificial Sequence
  Synthetic
acagugggcucuauuuu

SEQ ID NO: 777522 - RNA, 17 nt, Artificial Sequence
  Synthetic
uagcuuuauucuauuuu

SEQ ID NO: 777523 - RNA, 17 nt, Artificial Sequence
  Synthetic
cuccucacuucuauuuu

SEQ ID NO: 777524 - RNA, 17 nt, Artificial Sequence
  Synthetic
ugaaauagcaguauuuu

SEQ ID NO: 777525 - RNA, 17 nt, Artificial Sequence
  Synthetic
aacaccaucaguauuuu

SEQ ID NO: 777526 - RNA, 17 nt, Artificial Sequence
  Synthetic
aaacuauggaguauuuu

SEQ ID NO: 777527 - RNA, 17 nt, Artificial Sequence
  Synthetic
uagauuuauaguauuuu

SEQ ID NO: 777528 - RNA, 17 nt, Artificial Sequence
  Synthetic
uaggugauacguauuuu

SEQ ID NO: 777529 - RNA, 17 nt, Artificial Sequence
  Synthetic
uggauucuggguauuuu

SEQ ID NO: 777530 - RNA, 17 nt, Artificial Sequence
  Synthetic
uuucauugcuguauuuu

SEQ ID NO: 777531 - RNA, 17 nt, Artificial Sequence
  Synthetic
uguugaucuuguauuuu

SEQ ID NO: 777532 - RNA, 17 nt, Artificial Sequence
  Synthetic
uuaauuuuuuguauuuu

SEQ ID NO: 777533 - RNA, 17 nt, Artificial Sequence
  Synthetic
cuguuuucaauuauuuu

SEQ ID NO: 777534 - RNA, 17 nt, Artificial Sequence
  Synthetic
uauuauggaauuauuuu

SEQ ID NO: 777535 - RNA, 17 nt, Artificial Sequence
  Synthetic
cccaaaaacauuauuuu

SEQ ID NO: 777536 - RNA, 17 nt, Artificial Sequence
  Synthetic
cgggggaggauuauuuu

SEQ ID NO: 777537 - RNA, 17 nt, Artificial Sequence
  Synthetic
acuaaagcuauuauuuu

SEQ ID NO: 777538 - RNA, 17 nt, Artificial Sequence
  Synthetic
ucuaggucuauuauuuu

SEQ ID NO: 777539 - RNA, 17 nt, Artificial Sequence
  Synthetic
uuuuagauuauuauuuu

SEQ ID NO: 777540 - RNA, 17 nt, Artificial Sequence
  Synthetic
uaagcaugccuuauuuu

SEQ ID NO: 777541 - RNA, 17 nt, Artificial Sequence
  Synthetic
aguuaaaaaguuauuuu

SEQ ID NO: 777542 - RNA, 17 nt, Artificial Sequence
  Synthetic
accaaauuaguuauuuu

SEQ ID NO: 777543 - RNA, 17 nt, Artificial Sequence
  Synthetic
ugugaggagguuauuuu

SEQ ID NO: 777544 - RNA, 17 nt, Artificial Sequence
  Synthetic
aacuauuagguuauuuu

SEQ ID NO: 777545 - RNA, 17 nt, Artificial Sequence
  Synthetic
cucauaguauuuauuuu

SEQ ID NO: 777546 - RNA, 17 nt, Artificial Sequence
  Synthetic
aauuauguauuuauuuu

SEQ ID NO: 777547 - RNA, 17 nt, Artificial Sequence
  Synthetic
acuauuaucuuuauuuu

SEQ ID NO: 777548 - RNA, 17 nt, Artificial Sequence
  Synthetic
uguaagauguuuauuuu

SEQ ID NO: 777549 - RNA, 17 nt, Artificial Sequence
  Synthetic
cuuaaaaauuuuauuuu

SEQ ID NO: 777550 - RNA, 17 nt, Artificial Sequence
  Synthetic
uuuuuaacuuuuauuuu

SEQ ID NO: 777551 - RNA, 17 nt, Artificial Sequence
  Synthetic
aauucugguuuuauuuu

SEQ ID NO: 777552 - RNA, 17 nt, Artificial Sequence
  Synthetic
aauuguuguuuuauuuu

SEQ ID NO: 777553 - RNA, 17 nt, Artificial Sequence
  Synthetic
acuuguugaaaacuuuu

SEQ ID NO: 777554 - RNA, 17 nt, Artificial Sequence
  Synthetic
aaguugcuccaacuuuu

SEQ ID NO: 777555 - RNA, 17 nt, Artificial Sequence
  Synthetic
acuccucugcaacuuuu

SEQ ID NO: 777556 - RNA, 17 nt, Artificial Sequence
  Synthetic
aguagucugcaacuuuu

SEQ ID NO: 777557 - RNA, 17 nt, Artificial Sequence
  Synthetic
ugucugguauaacuuuu

SEQ ID NO: 777558 - RNA, 17 nt, Artificial Sequence
  Synthetic
auuacuaguuaacuuuu

SEQ ID NO: 777559 - RNA, 17 nt, Artificial Sequence
  Synthetic
acuuguuuaacacuuuu

SEQ ID NO: 777560 - RNA, 17 nt, Artificial Sequence
  Synthetic
ccaugcuauacacuuuu

SEQ ID NO: 777561 - RNA, 17 nt, Artificial Sequence
  Synthetic
uuuucuugcccacuuuu

SEQ ID NO: 777562 - RNA, 17 nt, Artificial Sequence
  Synthetic
cacacugauccacuuuu

SEQ ID NO: 777563 - RNA, 17 nt, Artificial Sequence
  Synthetic
cuguguuucucacuuuu

SEQ ID NO: 777564 - RNA, 17 nt, Artificial Sequence
  Synthetic
uauuacagaagacuuuu

SEQ ID NO: 777565 - RNA, 17 nt, Artificial Sequence
  Synthetic
uuagaaaugagacuuuu

SEQ ID NO: 777566 - RNA, 17 nt, Artificial Sequence
  Synthetic
auggucuugagacuuuu

SEQ ID NO: 777567 - RNA, 17 nt, Artificial Sequence
  Synthetic
uguggaucuagacuuuu

SEQ ID NO: 777568 - RNA, 17 nt, Artificial Sequence
  Synthetic
uuuggacuuggacuuuu

SEQ ID NO: 777569 - RNA, 17 nt, Artificial Sequence
  Synthetic
caucagcuuugacuuuu

SEQ ID NO: 777570 - RNA, 17 nt, Artificial Sequence
  Synthetic
aaaaaauaaauacuuuu

SEQ ID NO: 777571 - RNA, 17 nt, Artificial Sequence
  Synthetic
agccacauaauacuuuu

SEQ ID NO: 777572 - RNA, 17 nt, Artificial Sequence
  Synthetic
auucucaccauacuuuu

SEQ ID NO: 777573 - RNA, 17 nt, Artificial Sequence
  Synthetic
aaaucaucacuacuuuu

SEQ ID NO: 777574 - RNA, 17 nt, Artificial Sequence
  Synthetic
uuuauuauccuacuuuu

SEQ ID NO: 777575 - RNA, 17 nt, Artificial Sequence
  Synthetic
agggaacaucuacuuuu

SEQ ID NO: 777576 - RNA, 17 nt, Artificial Sequence
  Synthetic
uagaaccugguacuuuu

SEQ ID NO: 777577 - RNA, 17 nt, Artificial Sequence
  Synthetic
auguuauauguacuuuu

SEQ ID NO: 777578 - RNA, 17 nt, Artificial Sequence
  Synthetic
acacaauguguacuuuu

SEQ ID NO: 777579 - RNA, 17 nt, Artificial Sequence
  Synthetic
cauuuauccuuacuuuu

SEQ ID NO: 777580 - RNA, 17 nt, Artificial Sequence
  Synthetic
ccagggaaguuacuuuu

SEQ ID NO: 777581 - RNA, 17 nt, Artificial Sequence
  Synthetic
aguuuucaagaccuuuu

SEQ ID NO: 777582 - RNA, 17 nt, Artificial Sequence
  Synthetic
agaaacuaauaccuuuu

SEQ ID NO: 777583 - RNA, 17 nt, Artificial Sequence
  Synthetic
cucaauguuuaccuuuu

SEQ ID NO: 777584 - RNA, 17 nt, Artificial Sequence
  Synthetic
uaauauaagccccuuuu

SEQ ID NO: 777585 - RNA, 17 nt, Artificial Sequence
  Synthetic
aaucuaauuucccuuuu

SEQ ID NO: 777586 - RNA, 17 nt, Artificial Sequence
  Synthetic
uuucaaacaggccuuuu

SEQ ID NO: 777587 - RNA, 17 nt, Artificial Sequence
  Synthetic
uuuaggaccugccuuuu

SEQ ID NO: 777588 - RNA, 17 nt, Artificial Sequence
  Synthetic
cauuguuucugccuuuu

SEQ ID NO: 777589 - RNA, 17 nt, Artificial Sequence
  Synthetic
uauaacaugugccuuuu

SEQ ID NO: 777590 - RNA, 17 nt, Artificial Sequence
  Synthetic
uuuuuguuuugccuuuu

SEQ ID NO: 777591 - RNA, 17 nt, Artificial Sequence
  Synthetic
uuuaaacaaauccuuuu

SEQ ID NO: 777592 - RNA, 17 nt, Artificial Sequence
  Synthetic
uauucccuaauccuuuu

SEQ ID NO: 777593 - RNA, 17 nt, Artificial Sequence
  Synthetic
acucaaaauauccuuuu

SEQ ID NO: 777594 - RNA, 17 nt, Artificial Sequence
  Synthetic
uaucuguauauccuuuu

SEQ ID NO: 777595 - RNA, 17 nt, Artificial Sequence
  Synthetic
accgucucccuccuuuu

SEQ ID NO: 777596 - RNA, 17 nt, Artificial Sequence
  Synthetic
uaugauuuccuccuuuu

SEQ ID NO: 777597 - RNA, 17 nt, Artificial Sequence
  Synthetic
uuuaaaucucuccuuuu

SEQ ID NO: 777598 - RNA, 17 nt, Artificial Sequence
  Synthetic
aacacuucaguccuuuu

SEQ ID NO: 777599 - RNA, 17 nt, Artificial Sequence
  Synthetic
uaaucuccauuccuuuu

SEQ ID NO: 777600 - RNA, 17 nt, Artificial Sequence
  Synthetic
agcauuuacuuccuuuu

SEQ ID NO: 777601 - RNA, 17 nt, Artificial Sequence
  Synthetic
auacuuaccuuccuuuu

SEQ ID NO: 777602 - RNA, 17 nt, Artificial Sequence
  Synthetic
ucauacuccuuccuuuu

SEQ ID NO: 777603 - RNA, 17 nt, Artificial Sequence
  Synthetic
uccuuuuauuuccuuuu

SEQ ID NO: 777604 - RNA, 17 nt, Artificial Sequence
  Synthetic
aaccauguuuuccuuuu

SEQ ID NO: 777605 - RNA, 17 nt, Artificial Sequence
  Synthetic
uagauuacccagcuuuu

SEQ ID NO: 777606 - RNA, 17 nt, Artificial Sequence
  Synthetic
auacuuaaugagcuuuu

SEQ ID NO: 777607 - RNA, 17 nt, Artificial Sequence
  Synthetic
cuuagcugauagcuuuu

SEQ ID NO: 777608 - RNA, 17 nt, Artificial Sequence
  Synthetic
ucugcauucuagcuuuu

SEQ ID NO: 777609 - RNA, 17 nt, Artificial Sequence
  Synthetic
ugaguauucuagcuuuu

SEQ ID NO: 777610 - RNA, 17 nt, Artificial Sequence
  Synthetic
acacaauuuuagcuuuu

SEQ ID NO: 777611 - RNA, 17 nt, Artificial Sequence
  Synthetic
uuugagcaaaggcuuuu

SEQ ID NO: 777612 - RNA, 17 nt, Artificial Sequence
  Synthetic
cugaauagaaggcuuuu

SEQ ID NO: 777613 - RNA, 17 nt, Artificial Sequence
  Synthetic
aauuacugaaggcuuuu

SEQ ID NO: 777614 - RNA, 17 nt, Artificial Sequence
  Synthetic
ugcgguuucaggcuuuu

SEQ ID NO: 777615 - RNA, 17 nt, Artificial Sequence
  Synthetic
cucauaguuaggcuuuu

SEQ ID NO: 777616 - RNA, 17 nt, Artificial Sequence
  Synthetic
ugaguucaauggcuuuu

SEQ ID NO: 777617 - RNA, 17 nt, Artificial Sequence
  Synthetic
ucagcuauauggcuuuu

SEQ ID NO: 777618 - RNA, 17 nt, Artificial Sequence
  Synthetic
uagaaaauuaugcuuuu

SEQ ID NO: 777619 - RNA, 17 nt, Artificial Sequence
  Synthetic
uuucucuugcugcuuuu

SEQ ID NO: 777620 - RNA, 17 nt, Artificial Sequence
  Synthetic
acccauuuagugcuuuu

SEQ ID NO: 777621 - RNA, 17 nt, Artificial Sequence
  Synthetic
aaucauuaauugcuuuu

SEQ ID NO: 777622 - RNA, 17 nt, Artificial Sequence
  Synthetic
cuaugaacauugcuuuu

SEQ ID NO: 777623 - RNA, 17 nt, Artificial Sequence
  Synthetic
cuguuaagcuugcuuuu

SEQ ID NO: 777624 - RNA, 17 nt, Artificial Sequence
  Synthetic
aaaccauucuugcuuuu

SEQ ID NO: 777625 - RNA, 17 nt, Artificial Sequence
  Synthetic
cagaaaucuuugcuuuu

SEQ ID NO: 777626 - RNA, 17 nt, Artificial Sequence
  Synthetic
auuuuuuguuugcuuuu

SEQ ID NO: 777627 - RNA, 17 nt, Artificial Sequence
  Synthetic
uggggaaacaaucuuuu

SEQ ID NO: 777628 - RNA, 17 nt, Artificial Sequence
  Synthetic
uuuuaaaagaaucuuuu

SEQ ID NO: 777629 - RNA, 17 nt, Artificial Sequence
  Synthetic
uaaugugugaaucuuuu

SEQ ID NO: 777630 - RNA, 17 nt, Artificial Sequence
  Synthetic
uuucauuaccaucuuuu

SEQ ID NO: 777631 - RNA, 17 nt, Artificial Sequence
  Synthetic
auaauucuucaucuuuu

SEQ ID NO: 777632 - RNA, 17 nt, Artificial Sequence
  Synthetic
ccccaaaacuaucuuuu

SEQ ID NO: 777633 - RNA, 17 nt, Artificial Sequence
  Synthetic
uaaagcucuuaucuuuu

SEQ ID NO: 777634 - RNA, 17 nt, Artificial Sequence
  Synthetic
cuaagauucacucuuuu

SEQ ID NO: 777635 - RNA, 17 nt, Artificial Sequence
  Synthetic
ugguccuggacucuuuu

SEQ ID NO: 777636 - RNA, 17 nt, Artificial Sequence
  Synthetic
caucaguguacucuuuu

SEQ ID NO: 777637 - RNA, 17 nt, Artificial Sequence
  Synthetic
cuauuaauuccucuuuu

SEQ ID NO: 777638 - RNA, 17 nt, Artificial Sequence
  Synthetic
ccuucaggagcucuuuu

SEQ ID NO: 777639 - RNA, 17 nt, Artificial Sequence
  Synthetic
ccaaaccuugcucuuuu

SEQ ID NO: 777640 - RNA, 17 nt, Artificial Sequence
  Synthetic
cagucuaaaucucuuuu

SEQ ID NO: 777641 - RNA, 17 nt, Artificial Sequence
  Synthetic
uacuacuacucucuuuu

SEQ ID NO: 777642 - RNA, 17 nt, Artificial Sequence
  Synthetic
auaaugacuucucuuuu

SEQ ID NO: 777643 - RNA, 17 nt, Artificial Sequence
  Synthetic
ugccaauguucucuuuu

SEQ ID NO: 777644 - RNA, 17 nt, Artificial Sequence
  Synthetic
ucacugaaaagucuuuu

SEQ ID NO: 777645 - RNA, 17 nt, Artificial Sequence
  Synthetic
ucaaagagaagucuuuu

SEQ ID NO: 777646 - RNA, 17 nt, Artificial Sequence
  Synthetic
auucauacuagucuuuu

SEQ ID NO: 777647 - RNA, 17 nt, Artificial Sequence
  Synthetic
ugguccuugggucuuuu

SEQ ID NO: 777648 - RNA, 17 nt, Artificial Sequence
  Synthetic
uguacuuuuggucuuuu

SEQ ID NO: 777649 - RNA, 17 nt, Artificial Sequence
  Synthetic
cuuuuaguaugucuuuu

SEQ ID NO: 777650 - RNA, 17 nt, Artificial Sequence
  Synthetic
aagugcaugugucuuuu

SEQ ID NO: 777651 - RNA, 17 nt, Artificial Sequence
  Synthetic
cauaccaauugucuuuu

SEQ ID NO: 777652 - RNA, 17 nt, Artificial Sequence
  Synthetic
uuguuuuguugucuuuu

SEQ ID NO: 777653 - RNA, 17 nt, Artificial Sequence
  Synthetic
cuaagcuuuugucuuuu

SEQ ID NO: 777654 - RNA, 17 nt, Artificial Sequence
  Synthetic
aucauuugcauucuuuu

SEQ ID NO: 777655 - RNA, 17 nt, Artificial Sequence
  Synthetic
uuccuacaucuucuuuu

SEQ ID NO: 777656 - RNA, 17 nt, Artificial Sequence
  Synthetic
aaauuuaacuuucuuuu

SEQ ID NO: 777657 - RNA, 17 nt, Artificial Sequence
  Synthetic
aucaaaugcuuucuuuu

SEQ ID NO: 777658 - RNA, 17 nt, Artificial Sequence
  Synthetic
cagacauucuuucuuuu

SEQ ID NO: 777659 - RNA, 17 nt, Artificial Sequence
  Synthetic
aaucaguaguuucuuuu

SEQ ID NO: 777660 - RNA, 17 nt, Artificial Sequence
  Synthetic
acuuaaaauuuucuuuu

SEQ ID NO: 777661 - RNA, 17 nt, Artificial Sequence
  Synthetic
uuguccaauuuucuuuu

SEQ ID NO: 777662 - RNA, 17 nt, Artificial Sequence
  Synthetic
cugacuuauuuucuuuu

SEQ ID NO: 777663 - RNA, 17 nt, Artificial Sequence
  Synthetic
cugauuuauuuucuuuu

SEQ ID NO: 777664 - RNA, 17 nt, Artificial Sequence
  Synthetic
caccugucuuuucuuuu

SEQ ID NO: 777665 - RNA, 17 nt, Artificial Sequence
  Synthetic
acgugauuuuuucuuuu

SEQ ID NO: 777666 - RNA, 17 nt, Artificial Sequence
  Synthetic
acucuucuaaaaguuuu

SEQ ID NO: 777667 - RNA, 17 nt, Artificial Sequence
  Synthetic
aucugaaacaaaguuuu

SEQ ID NO: 777668 - RNA, 17 nt, Artificial Sequence
  Synthetic
uacauuuaacaaguuuu

SEQ ID NO: 777669 - RNA, 17 nt, Artificial Sequence
  Synthetic
ugauuuguucaaguuuu

SEQ ID NO: 777670 - RNA, 17 nt, Artificial Sequence
  Synthetic
aaacucacagaaguuuu

SEQ ID NO: 777671 - RNA, 17 nt, Artificial Sequence
  Synthetic
ugaagccaugaaguuuu

SEQ ID NO: 777672 - RNA, 17 nt, Artificial Sequence
  Synthetic
cuauucagugaaguuuu

SEQ ID NO: 777673 - RNA, 17 nt, Artificial Sequence
  Synthetic
uuaagucaauaaguuuu

SEQ ID NO: 777674 - RNA, 17 nt, Artificial Sequence
  Synthetic
auguaaauauaaguuuu

SEQ ID NO: 777675 - RNA, 17 nt, Artificial Sequence
  Synthetic
auuauacucuaaguuuu

SEQ ID NO: 777676 - RNA, 17 nt, Artificial Sequence
  Synthetic
uuacaccuguaaguuuu

SEQ ID NO: 777677 - RNA, 17 nt, Artificial Sequence
  Synthetic
uugaacuguuaaguuuu

SEQ ID NO: 777678 - RNA, 17 nt, Artificial Sequence
  Synthetic
auuauacuuuaaguuuu

SEQ ID NO: 777679 - RNA, 17 nt, Artificial Sequence
  Synthetic
auucuacuuuaaguuuu

SEQ ID NO: 777680 - RNA, 17 nt, Artificial Sequence
  Synthetic
auuguacuuuaaguuuu

SEQ ID NO: 777681 - RNA, 17 nt, Artificial Sequence
  Synthetic
uauaagaaaccaguuuu

SEQ ID NO: 777682 - RNA, 17 nt, Artificial Sequence
  Synthetic
auuauuuacccaguuuu

SEQ ID NO: 777683 - RNA, 17 nt, Artificial Sequence
  Synthetic
uagcuuuaagcaguuuu

SEQ ID NO: 777684 - RNA, 17 nt, Artificial Sequence
  Synthetic
cacaguauagcaguuuu

SEQ ID NO: 777685 - RNA, 17 nt, Artificial Sequence
  Synthetic
ucacuguuggcaguuuu

SEQ ID NO: 777686 - RNA, 17 nt, Artificial Sequence
  Synthetic
uucuucugcucaguuuu

SEQ ID NO: 777687 - RNA, 17 nt, Artificial Sequence
  Synthetic
cuucagcucucaguuuu

SEQ ID NO: 777688 - RNA, 17 nt, Artificial Sequence
  Synthetic
uauaacauuucaguuuu

SEQ ID NO: 777689 - RNA, 17 nt, Artificial Sequence
  Synthetic
aggugguuuucaguuuu

SEQ ID NO: 777690 - RNA, 17 nt, Artificial Sequence
  Synthetic
ucagcuuaaagaguuuu

SEQ ID NO: 777691 - RNA, 17 nt, Artificial Sequence
  Synthetic
acaaaaaacagaguuuu

SEQ ID NO: 777692 - RNA, 17 nt, Artificial Sequence
  Synthetic
uacuaaaucagaguuuu

SEQ ID NO: 777693 - RNA, 17 nt, Artificial Sequence
  Synthetic
aaauugcucagaguuuu

SEQ ID NO: 777694 - RNA, 17 nt, Artificial Sequence
  Synthetic
uacccaauaauaguuuu

SEQ ID NO: 777695 - RNA, 17 nt, Artificial Sequence
  Synthetic
accaaaaagauaguuuu

SEQ ID NO: 777696 - RNA, 17 nt, Artificial Sequence
  Synthetic
cguucacagauaguuuu

SEQ ID NO: 777697 - RNA, 17 nt, Artificial Sequence
  Synthetic
auaguuauuauaguuuu

SEQ ID NO: 777698 - RNA, 17 nt, Artificial Sequence
  Synthetic
agaaaucuuauaguuuu

SEQ ID NO: 777699 - RNA, 17 nt, Artificial Sequence
  Synthetic
cacgcccagcuaguuuu

SEQ ID NO: 777700 - RNA, 17 nt, Artificial Sequence
  Synthetic
ugagcucaaguaguuuu

SEQ ID NO: 777701 - RNA, 17 nt, Artificial Sequence
  Synthetic
auaauuucaguaguuuu

SEQ ID NO: 777702 - RNA, 17 nt, Artificial Sequence
  Synthetic
cuuuggauuuuaguuuu

SEQ ID NO: 777703 - RNA, 17 nt, Artificial Sequence
  Synthetic
uucaugguuuuaguuuu

SEQ ID NO: 777704 - RNA, 17 nt, Artificial Sequence
  Synthetic
auuaguaguuacguuuu

SEQ ID NO: 777705 - RNA, 17 nt, Artificial Sequence
  Synthetic
uguaaucucagcguuuu

SEQ ID NO: 777706 - RNA, 17 nt, Artificial Sequence
  Synthetic
caauaugacaagguuuu

SEQ ID NO: 777707 - RNA, 17 nt, Artificial Sequence
  Synthetic
aagaaguuacagguuuu

SEQ ID NO: 777708 - RNA, 17 nt, Artificial Sequence
  Synthetic
uuuggauuucagguuuu

SEQ ID NO: 777709 - RNA, 17 nt, Artificial Sequence
  Synthetic
uuuugauuucagguuuu

SEQ ID NO: 777710 - RNA, 17 nt, Artificial Sequence
  Synthetic
aaugcacacuagguuuu

SEQ ID NO: 777711 - RNA, 17 nt, Artificial Sequence
  Synthetic
acuauguguuagguuuu

SEQ ID NO: 777712 - RNA, 17 nt, Artificial Sequence
  Synthetic
agaggcguuccgguuuu

SEQ ID NO: 777713 - RNA, 17 nt, Artificial Sequence
  Synthetic
aguggauaggcgguuuu

SEQ ID NO: 777714 - RNA, 17 nt, Artificial Sequence
  Synthetic
ugaugguuuucgguuuu

SEQ ID NO: 777715 - RNA, 17 nt, Artificial Sequence
  Synthetic
cguuuugaaaggguuuu

SEQ ID NO: 777716 - RNA, 17 nt, Artificial Sequence
  Synthetic
cagaaacacaggguuuu

SEQ ID NO: 777717 - RNA, 17 nt, Artificial Sequence
  Synthetic
uaugguuuggggguuuu

SEQ ID NO: 777718 - RNA, 17 nt, Artificial Sequence
  Synthetic
aacucagcaaugguuuu

SEQ ID NO: 777719 - RNA, 17 nt, Artificial Sequence
  Synthetic
aaaguacuaaugguuuu

SEQ ID NO: 777720 - RNA, 17 nt, Artificial Sequence
  Synthetic
aggguuuugaugguuuu

SEQ ID NO: 777721 - RNA, 17 nt, Artificial Sequence
  Synthetic
uuaugaaauaugguuuu

SEQ ID NO: 777722 - RNA, 17 nt, Artificial Sequence
  Synthetic
uaggguuuuaugguuuu

SEQ ID NO: 777723 - RNA, 17 nt, Artificial Sequence
  Synthetic
aggguuuuuaugguuuu

SEQ ID NO: 777724 - RNA, 17 nt, Artificial Sequence
  Synthetic
auuccguaccugguuuu

SEQ ID NO: 777725 - RNA, 17 nt, Artificial Sequence
  Synthetic
agauaaguugugguuuu

SEQ ID NO: 777726 - RNA, 17 nt, Artificial Sequence
  Synthetic
ugccuaaucuugguuuu

SEQ ID NO: 777727 - RNA, 17 nt, Artificial Sequence
  Synthetic
augcaguguuugguuuu

SEQ ID NO: 777728 - RNA, 17 nt, Artificial Sequence
  Synthetic
aucugacuuuugguuuu

SEQ ID NO: 777729 - RNA, 17 nt, Artificial Sequence
  Synthetic
cagaugguaaauguuuu

SEQ ID NO: 777730 - RNA, 17 nt, Artificial Sequence
  Synthetic
uaaaaugacaauguuuu

SEQ ID NO: 777731 - RNA, 17 nt, Artificial Sequence
  Synthetic
cauauuuggaauguuuu

SEQ ID NO: 777732 - RNA, 17 nt, Artificial Sequence
  Synthetic
uccuaaaauaauguuuu

SEQ ID NO: 777733 - RNA, 17 nt, Artificial Sequence
  Synthetic
cagugacuuaauguuuu

SEQ ID NO: 777734 - RNA, 17 nt, Artificial Sequence
  Synthetic
ucuaaagaacauguuuu

SEQ ID NO: 777735 - RNA, 17 nt, Artificial Sequence
  Synthetic
ccaauccuucauguuuu

SEQ ID NO: 777736 - RNA, 17 nt, Artificial Sequence
  Synthetic
uaggaauaagauguuuu

SEQ ID NO: 777737 - RNA, 17 nt, Artificial Sequence
  Synthetic
auaauuauagauguuuu

SEQ ID NO: 777738 - RNA, 17 nt, Artificial Sequence
  Synthetic
aaccuaagcuauguuuu

SEQ ID NO: 777739 - RNA, 17 nt, Artificial Sequence
  Synthetic
ccugacaucuauguuuu

SEQ ID NO: 777740 - RNA, 17 nt, Artificial Sequence
  Synthetic
acuggaaaguauguuuu

SEQ ID NO: 777741 - RNA, 17 nt, Artificial Sequence
  Synthetic
uuugacucuuauguuuu

SEQ ID NO: 777742 - RNA, 17 nt, Artificial Sequence
  Synthetic
uaccuagucacuguuuu

SEQ ID NO: 777743 - RNA, 17 nt, Artificial Sequence
  Synthetic
auguuugcgacuguuuu

SEQ ID NO: 777744 - RNA, 17 nt, Artificial Sequence
  Synthetic
cacuauuuuacuguuuu

SEQ ID NO: 777745 - RNA, 17 nt, Artificial Sequence
  Synthetic
cucaacucugcuguuuu

SEQ ID NO: 777746 - RNA, 17 nt, Artificial Sequence
  Synthetic
ccucacaagucuguuuu

SEQ ID NO: 777747 - RNA, 17 nt, Artificial Sequence
  Synthetic
cccuccuggucuguuuu

SEQ ID NO: 777748 - RNA, 17 nt, Artificial Sequence
  Synthetic
cagcguuugucuguuuu

SEQ ID NO: 777749 - RNA, 17 nt, Artificial Sequence
  Synthetic
cauuacuuuucuguuuu

SEQ ID NO: 777750 - RNA, 17 nt, Artificial Sequence
  Synthetic
cagaaggagaguguuuu

SEQ ID NO: 777751 - RNA, 17 nt, Artificial Sequence
  Synthetic
cuacaucaagguguuuu

SEQ ID NO: 777752 - RNA, 17 nt, Artificial Sequence
  Synthetic
uaguagcuggguguuuu

SEQ ID NO: 777753 - RNA, 17 nt, Artificial Sequence
  Synthetic
ucuauuuaauguguuuu

SEQ ID NO: 777754 - RNA, 17 nt, Artificial Sequence
  Synthetic
uaucaucgauguguuuu

SEQ ID NO: 777755 - RNA, 17 nt, Artificial Sequence
  Synthetic
cuagauuucuguguuuu

SEQ ID NO: 777756 - RNA, 17 nt, Artificial Sequence
  Synthetic
uagauacaaauuguuuu

SEQ ID NO: 777757 - RNA, 17 nt, Artificial Sequence
  Synthetic
aucagguuaauuguuuu

SEQ ID NO: 777758 - RNA, 17 nt, Artificial Sequence
  Synthetic
cccaccaggauuguuuu

SEQ ID NO: 777759 - RNA, 17 nt, Artificial Sequence
  Synthetic
cuacguaggauuguuuu

SEQ ID NO: 777760 - RNA, 17 nt, Artificial Sequence
  Synthetic
caggagucacuuguuuu

SEQ ID NO: 777761 - RNA, 17 nt, Artificial Sequence
  Synthetic
uucuuaucucuuguuuu

SEQ ID NO: 777762 - RNA, 17 nt, Artificial Sequence
  Synthetic
ucaauuuguguuguuuu

SEQ ID NO: 777763 - RNA, 17 nt, Artificial Sequence
  Synthetic
aauauucccuuuguuuu

SEQ ID NO: 777764 - RNA, 17 nt, Artificial Sequence
  Synthetic
auuugauauuuuguuuu

SEQ ID NO: 777765 - RNA, 17 nt, Artificial Sequence
  Synthetic
auaaauaagaaauuuuu

SEQ ID NO: 777766 - RNA, 17 nt, Artificial Sequence
  Synthetic
ucaauuugucaauuuuu

SEQ ID NO: 777767 - RNA, 17 nt, Artificial Sequence
  Synthetic
aauaaaugugaauuuuu

SEQ ID NO: 777768 - RNA, 17 nt, Artificial Sequence
  Synthetic
ucauaauaauaauuuuu

SEQ ID NO: 777769 - RNA, 17 nt, Artificial Sequence
  Synthetic
uuuauaagauaauuuuu

SEQ ID NO: 777770 - RNA, 17 nt, Artificial Sequence
  Synthetic
cugccucccuaauuuuu

SEQ ID NO: 777771 - RNA, 17 nt, Artificial Sequence
  Synthetic
cauauucuuuaauuuuu

SEQ ID NO: 777772 - RNA, 17 nt, Artificial Sequence
  Synthetic
uuuuauuuuuaauuuuu

SEQ ID NO: 777773 - RNA, 17 nt, Artificial Sequence
  Synthetic
cuaaugcuaacauuuuu

SEQ ID NO: 777774 - RNA, 17 nt, Artificial Sequence
  Synthetic
auuuaauacacauuuuu

SEQ ID NO: 777775 - RNA, 17 nt, Artificial Sequence
  Synthetic
uugugagacccauuuuu

SEQ ID NO: 777776 - RNA, 17 nt, Artificial Sequence
  Synthetic
aaaauaccuccauuuuu

SEQ ID NO: 777777 - RNA, 17 nt, Artificial Sequence
  Synthetic
acuuauguagcauuuuu

SEQ ID NO: 777778 - RNA, 17 nt, Artificial Sequence
  Synthetic
ccuucaagaagauuuuu

SEQ ID NO: 777779 - RNA, 17 nt, Artificial Sequence
  Synthetic
aucuguuuaagauuuuu

SEQ ID NO: 777780 - RNA, 17 nt, Artificial Sequence
  Synthetic
ucuggcagcagauuuuu

SEQ ID NO: 777781 - RNA, 17 nt, Artificial Sequence
  Synthetic
auuuauaauagauuuuu

SEQ ID NO: 777782 - RNA, 17 nt, Artificial Sequence
  Synthetic
auauuuuguagauuuuu

SEQ ID NO: 777783 - RNA, 17 nt, Artificial Sequence
  Synthetic
cucaauggaggauuuuu

SEQ ID NO: 777784 - RNA, 17 nt, Artificial Sequence
  Synthetic
aagacaagcggauuuuu

SEQ ID NO: 777785 - RNA, 17 nt, Artificial Sequence
  Synthetic
uguuuugaaugauuuuu

SEQ ID NO: 777786 - RNA, 17 nt, Artificial Sequence
  Synthetic
ugacucaagugauuuuu

SEQ ID NO: 777787 - RNA, 17 nt, Artificial Sequence
  Synthetic
uggccugagugauuuuu

SEQ ID NO: 777788 - RNA, 17 nt, Artificial Sequence
  Synthetic
uuagggaggugauuuuu

SEQ ID NO: 777789 - RNA, 17 nt, Artificial Sequence
  Synthetic
ugucguucuugauuuuu

SEQ ID NO: 777790 - RNA, 17 nt, Artificial Sequence
  Synthetic
uuaaaucaaauauuuuu

SEQ ID NO: 777791 - RNA, 17 nt, Artificial Sequence
  Synthetic
caauugucaauauuuuu

SEQ ID NO: 777792 - RNA, 17 nt, Artificial Sequence
  Synthetic
auugcacuaauauuuuu

SEQ ID NO: 777793 - RNA, 17 nt, Artificial Sequence
  Synthetic
aagcaauacauauuuuu

SEQ ID NO: 777794 - RNA, 17 nt, Artificial Sequence
  Synthetic
augagcuacauauuuuu

SEQ ID NO: 777795 - RNA, 17 nt, Artificial Sequence
  Synthetic
ucuugccucauauuuuu

SEQ ID NO: 777796 - RNA, 17 nt, Artificial Sequence
  Synthetic
uaaaaaaauauauuuuu

SEQ ID NO: 777797 - RNA, 17 nt, Artificial Sequence
  Synthetic
aaauauacuauauuuuu

SEQ ID NO: 777798 - RNA, 17 nt, Artificial Sequence
  Synthetic
auauagcguauauuuuu

SEQ ID NO: 777799 - RNA, 17 nt, Artificial Sequence
  Synthetic
uuccaguuuauauuuuu

SEQ ID NO: 777800 - RNA, 17 nt, Artificial Sequence
  Synthetic
cauugguaacuauuuuu

SEQ ID NO: 777801 - RNA, 17 nt, Artificial Sequence
  Synthetic
aauuuguuacuauuuuu

SEQ ID NO: 777802 - RNA, 17 nt, Artificial Sequence
  Synthetic
cuuucucuucuauuuuu

SEQ ID NO: 777803 - RNA, 17 nt, Artificial Sequence
  Synthetic
uagcacacaguauuuuu

SEQ ID NO: 777804 - RNA, 17 nt, Artificial Sequence
  Synthetic
uaauagcuaguauuuuu

SEQ ID NO: 777805 - RNA, 17 nt, Artificial Sequence
  Synthetic
ccaaauuguguauuuuu

SEQ ID NO: 777806 - RNA, 17 nt, Artificial Sequence
  Synthetic
auauuuuguguauuuuu

SEQ ID NO: 777807 - RNA, 17 nt, Artificial Sequence
  Synthetic
ucaaagcaauuauuuuu

SEQ ID NO: 777808 - RNA, 17 nt, Artificial Sequence
  Synthetic
uaaagagaauuauuuuu

SEQ ID NO: 777809 - RNA, 17 nt, Artificial Sequence
  Synthetic
agugcaacauuauuuuu

SEQ ID NO: 777810 - RNA, 17 nt, Artificial Sequence
  Synthetic
uaaaagagcuuauuuuu

SEQ ID NO: 777811 - RNA, 17 nt, Artificial Sequence
  Synthetic
auuuauagguuauuuuu

SEQ ID NO: 777812 - RNA, 17 nt, Artificial Sequence
  Synthetic
aauucaauuuuauuuuu

SEQ ID NO: 777813 - RNA, 17 nt, Artificial Sequence
  Synthetic
uuuuauuuuuuauuuuu

SEQ ID NO: 777814 - RNA, 17 nt, Artificial Sequence
  Synthetic
ucauaacugaacuuuuu

SEQ ID NO: 777815 - RNA, 17 nt, Artificial Sequence
  Synthetic
uuacuaguuaacuuuuu

SEQ ID NO: 777816 - RNA, 17 nt, Artificial Sequence
  Synthetic
ugaaauugacacuuuuu

SEQ ID NO: 777817 - RNA, 17 nt, Artificial Sequence
  Synthetic
uuugauuaaaccuuuuu

SEQ ID NO: 777818 - RNA, 17 nt, Artificial Sequence
  Synthetic
caaauuuucaccuuuuu

SEQ ID NO: 777819 - RNA, 17 nt, Artificial Sequence
  Synthetic
cugagagauaccuuuuu

SEQ ID NO: 777820 - RNA, 17 nt, Artificial Sequence
  Synthetic
uugcucucgcccuuuuu

SEQ ID NO: 777821 - RNA, 17 nt, Artificial Sequence
  Synthetic
cuauaugggcccuuuuu

SEQ ID NO: 777822 - RNA, 17 nt, Artificial Sequence
  Synthetic
aaaugacaucccuuuuu

SEQ ID NO: 777823 - RNA, 17 nt, Artificial Sequence
  Synthetic
ccaucuacucccuuuuu

SEQ ID NO: 777824 - RNA, 17 nt, Artificial Sequence
  Synthetic
uucaaacaggccuuuuu

SEQ ID NO: 777825 - RNA, 17 nt, Artificial Sequence
  Synthetic
auuuccaaauccuuuuu

SEQ ID NO: 777826 - RNA, 17 nt, Artificial Sequence
  Synthetic
agcaagcccuccuuuuu

SEQ ID NO: 777827 - RNA, 17 nt, Artificial Sequence
  Synthetic
ccgucucccuccuuuuu

SEQ ID NO: 777828 - RNA, 17 nt, Artificial Sequence
  Synthetic
auaguguauuccuuuuu

SEQ ID NO: 777829 - RNA, 17 nt, Artificial Sequence
  Synthetic
ccuuuuauuuccuuuuu

SEQ ID NO: 777830 - RNA, 17 nt, Artificial Sequence
  Synthetic
agauuacccagcuuuuu

SEQ ID NO: 777831 - RNA, 17 nt, Artificial Sequence
  Synthetic
uguaacuauagcuuuuu

SEQ ID NO: 777832 - RNA, 17 nt, Artificial Sequence
  Synthetic
cugcauucuagcuuuuu

SEQ ID NO: 777833 - RNA, 17 nt, Artificial Sequence
  Synthetic
aagaaaauacgcuuuuu

SEQ ID NO: 777834 - RNA, 17 nt, Artificial Sequence
  Synthetic
uagcaccuccucuuuuu

SEQ ID NO: 777835 - RNA, 17 nt, Artificial Sequence
  Synthetic
cuauacaagcucuuuuu

SEQ ID NO: 777836 - RNA, 17 nt, Artificial Sequence
  Synthetic
aaaggggagcucuuuuu

SEQ ID NO: 777837 - RNA, 17 nt, Artificial Sequence
  Synthetic
cgaugcgggcucuuuuu

SEQ ID NO: 777838 - RNA, 17 nt, Artificial Sequence
  Synthetic
caaugugggcucuuuuu

SEQ ID NO: 777839 - RNA, 17 nt, Artificial Sequence
  Synthetic
cgaugugggcucuuuuu

SEQ ID NO: 777840 - RNA, 17 nt, Artificial Sequence
  Synthetic
cuaugugggcucuuuuu

SEQ ID NO: 777841 - RNA, 17 nt, Artificial Sequence
  Synthetic
ucuaaaauucucuuuuu

SEQ ID NO: 777842 - RNA, 17 nt, Artificial Sequence
  Synthetic
uuuucaagagucuuuuu

SEQ ID NO: 777843 - RNA, 17 nt, Artificial Sequence
  Synthetic
cuuaucauauucuuuuu

SEQ ID NO: 777844 - RNA, 17 nt, Artificial Sequence
  Synthetic
caaaguguauucuuuuu

SEQ ID NO: 777845 - RNA, 17 nt, Artificial Sequence
  Synthetic
uuucucugcuucuuuuu

SEQ ID NO: 777846 - RNA, 17 nt, Artificial Sequence
  Synthetic
ugauuuucuuucuuuuu

SEQ ID NO: 777847 - RNA, 17 nt, Artificial Sequence
  Synthetic
uggaaguguuucuuuuu

SEQ ID NO: 777848 - RNA, 17 nt, Artificial Sequence
  Synthetic
augucccuuuucuuuuu

SEQ ID NO: 777849 - RNA, 17 nt, Artificial Sequence
  Synthetic
uuuuuuuuuuucuuuuu

SEQ ID NO: 777850 - RNA, 17 nt, Artificial Sequence
  Synthetic
acauuuaacaaguuuuu

SEQ ID NO: 777851 - RNA, 17 nt, Artificial Sequence
  Synthetic
cagcuuaaagaguuuuu

SEQ ID NO: 777852 - RNA, 17 nt, Artificial Sequence
  Synthetic
acuaaaucagaguuuuu

SEQ ID NO: 777853 - RNA, 17 nt, Artificial Sequence
  Synthetic
cagcuuuuagaguuuuu

SEQ ID NO: 777854 - RNA, 17 nt, Artificial Sequence
  Synthetic
aauucuucauaguuuuu

SEQ ID NO: 777855 - RNA, 17 nt, Artificial Sequence
  Synthetic
cauguacauuaguuuuu

SEQ ID NO: 777856 - RNA, 17 nt, Artificial Sequence
  Synthetic
agaacauaagcguuuuu

SEQ ID NO: 777857 - RNA, 17 nt, Artificial Sequence
  Synthetic
uguguggauucguuuuu

SEQ ID NO: 777858 - RNA, 17 nt, Artificial Sequence
  Synthetic
ccuggcgggagguuuuu

SEQ ID NO: 777859 - RNA, 17 nt, Artificial Sequence
  Synthetic
aguauuuugagguuuuu

SEQ ID NO: 777860 - RNA, 17 nt, Artificial Sequence
  Synthetic
ccuaaaauaauguuuuu

SEQ ID NO: 777861 - RNA, 17 nt, Artificial Sequence
  Synthetic
auuacucucauguuuuu

SEQ ID NO: 777862 - RNA, 17 nt, Artificial Sequence
  Synthetic
acugaaaaacuguuuuu

SEQ ID NO: 777863 - RNA, 17 nt, Artificial Sequence
  Synthetic
acuucuucgcuguuuuu

SEQ ID NO: 777864 - RNA, 17 nt, Artificial Sequence
  Synthetic
aauaaacugcuguuuuu

SEQ ID NO: 777865 - RNA, 17 nt, Artificial Sequence
  Synthetic
ugguuuuaucuguuuuu

SEQ ID NO: 777866 - RNA, 17 nt, Artificial Sequence
  Synthetic
ugcaugggucuguuuuu

SEQ ID NO: 777867 - RNA, 17 nt, Artificial Sequence
  Synthetic
ccuccuggucuguuuuu

SEQ ID NO: 777868 - RNA, 17 nt, Artificial Sequence
  Synthetic
ccccuccuucuguuuuu

SEQ ID NO: 777869 - RNA, 17 nt, Artificial Sequence
  Synthetic
uuucuucauguguuuuu

SEQ ID NO: 777870 - RNA, 17 nt, Artificial Sequence
  Synthetic
uuuuuucauguguuuuu

SEQ ID NO: 777871 - RNA, 17 nt, Artificial Sequence
  Synthetic
aagagauauguguuuuu

SEQ ID NO: 777872 - RNA, 17 nt, Artificial Sequence
  Synthetic
aaagguaauuuguuuuu

SEQ ID NO: 777873 - RNA, 17 nt, Artificial Sequence
  Synthetic
uuucuguuuuuguuuuu

SEQ ID NO: 777874 - RNA, 17 nt, Artificial Sequence
  Synthetic
uagguuuuuuuguuuuu

SEQ ID NO: 777875 - RNA, 17 nt, Artificial Sequence
  Synthetic
uuuuuaaaaaauuuuuu

SEQ ID NO: 777876 - RNA, 17 nt, Artificial Sequence
  Synthetic
uuuagaugaaauuuuuu

SEQ ID NO: 777877 - RNA, 17 nt, Artificial Sequence
  Synthetic
acugaauuaaauuuuuu

SEQ ID NO: 777878 - RNA, 17 nt, Artificial Sequence
  Synthetic
accuugaauaauuuuuu

SEQ ID NO: 777879 - RNA, 17 nt, Artificial Sequence
  Synthetic
cuccauuuuaauuuuuu

SEQ ID NO: 777880 - RNA, 17 nt, Artificial Sequence
  Synthetic
aggagggaacauuuuuu

SEQ ID NO: 777881 - RNA, 17 nt, Artificial Sequence
  Synthetic
cugugcauacauuuuuu

SEQ ID NO: 777882 - RNA, 17 nt, Artificial Sequence
  Synthetic
agcugagagcauuuuuu

SEQ ID NO: 777883 - RNA, 17 nt, Artificial Sequence
  Synthetic
uuuccuuuuuauuuuuu

SEQ ID NO: 777884 - RNA, 17 nt, Artificial Sequence
  Synthetic
cucaugagaacuuuuuu

SEQ ID NO: 777885 - RNA, 17 nt, Artificial Sequence
  Synthetic
aacuuuuuaacuuuuuu

SEQ ID NO: 777886 - RNA, 17 nt, Artificial Sequence
  Synthetic
ugguccuggacuuuuuu

SEQ ID NO: 777887 - RNA, 17 nt, Artificial Sequence
  Synthetic
acuuuuuguacuuuuuu

SEQ ID NO: 777888 - RNA, 17 nt, Artificial Sequence
  Synthetic
uggacaggcccuuuuuu

SEQ ID NO: 777889 - RNA, 17 nt, Artificial Sequence
  Synthetic
uauuuuguuccuuuuuu

SEQ ID NO: 777890 - RNA, 17 nt, Artificial Sequence
  Synthetic
uucuacuuuccuuuuuu

SEQ ID NO: 777891 - RNA, 17 nt, Artificial Sequence
  Synthetic
uguuccugggcuuuuuu

SEQ ID NO: 777892 - RNA, 17 nt, Artificial Sequence
  Synthetic
uuggguuuggcuuuuuu

SEQ ID NO: 777893 - RNA, 17 nt, Artificial Sequence
  Synthetic
uauuucuuugcuuuuuu

SEQ ID NO: 777894 - RNA, 17 nt, Artificial Sequence
  Synthetic
cacuuuaagucuuuuuu

SEQ ID NO: 777895 - RNA, 17 nt, Artificial Sequence
  Synthetic
uuuucugauucuuuuuu

SEQ ID NO: 777896 - RNA, 17 nt, Artificial Sequence
  Synthetic
cuuuucuuuucuuuuuu

SEQ ID NO: 777897 - RNA, 17 nt, Artificial Sequence
  Synthetic
ccuauuaaaaguuuuuu

SEQ ID NO: 777898 - RNA, 17 nt, Artificial Sequence
  Synthetic
cuaguagggcguuuuuu

SEQ ID NO: 777899 - RNA, 17 nt, Artificial Sequence
  Synthetic
uaaucaugugguuuuuu

SEQ ID NO: 777900 - RNA, 17 nt, Artificial Sequence
  Synthetic
uucuguuuuuguuuuuu

SEQ ID NO: 777901 - RNA, 17 nt, Artificial Sequence
  Synthetic
uucacaauaauuuuuuu

SEQ ID NO: 777902 - RNA, 17 nt, Artificial Sequence
  Synthetic
uuaaugaacauuuuuuu

SEQ ID NO: 777903 - RNA, 17 nt, Artificial Sequence
  Synthetic
agagcagugauuuuuuu

SEQ ID NO: 777904 - RNA, 17 nt, Artificial Sequence
  Synthetic
aaaaguuauauuuuuuu

SEQ ID NO: 777905 - RNA, 17 nt, Artificial Sequence
  Synthetic
aaaaaaaaccuuuuuuu

SEQ ID NO: 777906 - RNA, 17 nt, Artificial Sequence
  Synthetic
cagcuuccccuuuuuuu

SEQ ID NO: 777907 - RNA, 17 nt, Artificial Sequence
  Synthetic
ucuacuuuccuuuuuuu

SEQ ID NO: 777908 - RNA, 17 nt, Artificial Sequence
  Synthetic
uuaucaacauuuuuuuu

SEQ ID NO: 777909 - RNA, 17 nt, Artificial Sequence
  Synthetic
uuguuaccauuuuuuuu

SEQ ID NO: 777910 - RNA, 17 nt, Artificial Sequence
  Synthetic
acagcuauuuuuuuuuu

SEQ ID NO: 777911 - RNA, 17 nt, Artificial Sequence
  Synthetic
caaaaccuuuuuuuuuu

SEQ ID NO: 777912 - RNA, 17 nt, Artificial Sequence
  Synthetic
uucuuuguuuuuuuuuu

SEQ ID NO: 777913 - RNA, 17 nt, Artificial Sequence
  Synthetic
aauuuuuuuuuuuuuuu

SEQ ID NO: 777914 - RNA, 17 nt, Artificial Sequence
  Synthetic
cuuuuuuuuuuuuuuuu

SEQ ID NO: 777915 - RNA, 17 nt, Artificial Sequence
  Synthetic
uuuuuuuuuuuuuuuuu

SEQ ID NO: 777916 - RNA, 20 nt, Artificial Sequence
  Synthetic
aaaaaaaaaaaaaaaaaaaa

SEQ ID NO: 777917 - RNA, 20 nt, Artificial Sequence
  Synthetic
cucaaaaaaaaaaaaaaaaa

SEQ ID NO: 777918 - RNA, 20 nt, Artificial Sequence
  Synthetic
uugaaaaaaaaaaaaaaaaa

SEQ ID NO: 777919 - RNA, 20 nt, Artificial Sequence
  Synthetic
uuggaaaaaaaaaaaaaaaa

SEQ ID NO: 777920 - RNA, 20 nt, Artificial Sequence
  Synthetic
uuugcaaaaaaaaaaaaaaa

SEQ ID NO: 777921 - RNA, 20 nt, Artificial Sequence
  Synthetic
ucuggaaaaaaaaaaaaaaa

SEQ ID NO: 777922 - RNA, 20 nt, Artificial Sequence
  Synthetic
aauuuaaaaaaaaaaaaaaa

SEQ ID NO: 777923 - RNA, 20 nt, Artificial Sequence
  Synthetic
aguuguaaaaaaaaaaaaaa

SEQ ID NO: 777924 - RNA, 20 nt, Artificial Sequence
  Synthetic
aauugacaaaaaaaaaaaaa

SEQ ID NO: 777925 - RNA, 20 nt, Artificial Sequence
  Synthetic
uaaauugcaaaaaaaaaaaa

SEQ ID NO: 777926 - RNA, 20 nt, Artificial Sequence
  Synthetic
uccaucucaaaaaaaaaaaa

SEQ ID NO: 777927 - RNA, 20 nt, Artificial Sequence
  Synthetic
cguacuuuaaaaaaaaaaaa

SEQ ID NO: 777928 - RNA, 20 nt, Artificial Sequence
  Synthetic
agaagggagaaaaaaaaaaa

SEQ ID NO: 777929 - RNA, 20 nt, Artificial Sequence
  Synthetic
acuacccugaaaaaaaaaaa

SEQ ID NO: 777930 - RNA, 20 nt, Artificial Sequence
  Synthetic
acguacuuuaaaaaaaaaaa

SEQ ID NO: 777931 - RNA, 20 nt, Artificial Sequence
  Synthetic
aacacugcacaaaaaaaaaa

SEQ ID NO: 777932 - RNA, 20 nt, Artificial Sequence
  Synthetic
agggaaggagaaaaaaaaaa

SEQ ID NO: 777933 - RNA, 20 nt, Artificial Sequence
  Synthetic
aaguauaauuaaaaaaaaaa

SEQ ID NO: 777934 - RNA, 20 nt, Artificial Sequence
  Synthetic
caacgcaguuaaaaaaaaaa

SEQ ID NO: 777935 - RNA, 20 nt, Artificial Sequence
  Synthetic
aauuaggaaagaaaaaaaaa

SEQ ID NO: 777936 - RNA, 20 nt, Artificial Sequence
  Synthetic
uuggaggaaugaaaaaaaaa

SEQ ID NO: 777937 - RNA, 20 nt, Artificial Sequence
  Synthetic
uauguucaauuaaaaaaaaa

SEQ ID NO: 777938 - RNA, 20 nt, Artificial Sequence
  Synthetic
aucaaaaaggacaaaaaaaa

SEQ ID NO: 777939 - RNA, 20 nt, Artificial Sequence
  Synthetic
aauaaccccaucaaaaaaaa

SEQ ID NO: 777940 - RNA, 20 nt, Artificial Sequence
  Synthetic
cuaacagcacucaaaaaaaa

SEQ ID NO: 777941 - RNA, 20 nt, Artificial Sequence
  Synthetic
aaauuaggaaagaaaaaaaa

SEQ ID NO: 777942 - RNA, 20 nt, Artificial Sequence
  Synthetic
ugccugcaguagaaaaaaaa

SEQ ID NO: 777943 - RNA, 20 nt, Artificial Sequence
  Synthetic
auuggaggaaugaaaaaaaa

SEQ ID NO: 777944 - RNA, 20 nt, Artificial Sequence
  Synthetic
uacauuacuccuaaaaaaaa

SEQ ID NO: 777945 - RNA, 20 nt, Artificial Sequence
  Synthetic
agaacagaaauuaaaaaaaa

SEQ ID NO: 777946 - RNA, 20 nt, Artificial Sequence
  Synthetic
uucucauauauuaaaaaaaa

SEQ ID NO: 777947 - RNA, 20 nt, Artificial Sequence
  Synthetic
caccuauuaguuaaaaaaaa

SEQ ID NO: 777948 - RNA, 20 nt, Artificial Sequence
  Synthetic
uuaccuuguguuaaaaaaaa

SEQ ID NO: 777949 - RNA, 20 nt, Artificial Sequence
  Synthetic
aaccauuuuuuuaaaaaaaa

SEQ ID NO: 777950 - RNA, 20 nt, Artificial Sequence
  Synthetic
aagcuauguaaccaaaaaaa

SEQ ID NO: 777951 - RNA, 20 nt, Artificial Sequence
  Synthetic
uucccauuuauccaaaaaaa

SEQ ID NO: 777952 - RNA, 20 nt, Artificial Sequence
  Synthetic
ugacccugucuccaaaaaaa

SEQ ID NO: 777953 - RNA, 20 nt, Artificial Sequence
  Synthetic
ugccuugaaguucaaaaaaa

SEQ ID NO: 777954 - RNA, 20 nt, Artificial Sequence
  Synthetic
aauaggaaacaggaaaaaaa

SEQ ID NO: 777955 - RNA, 20 nt, Artificial Sequence
  Synthetic
auuauauucagugaaaaaaa

SEQ ID NO: 777956 - RNA, 20 nt, Artificial Sequence
  Synthetic
ccagaguuccuugaaaaaaa

SEQ ID NO: 777957 - RNA, 20 nt, Artificial Sequence
  Synthetic
aaauaaaaacaauaaaaaaa

SEQ ID NO: 777958 - RNA, 20 nt, Artificial Sequence
  Synthetic
aaauaacccuaauaaaaaaa

SEQ ID NO: 777959 - RNA, 20 nt, Artificial Sequence
  Synthetic
agauguguggcauaaaaaaa

SEQ ID NO: 777960 - RNA, 20 nt, Artificial Sequence
  Synthetic
auuuuucucagguaaaaaaa

SEQ ID NO: 777961 - RNA, 20 nt, Artificial Sequence
  Synthetic
caaagaaaaugguaaaaaaa

SEQ ID NO: 777962 - RNA, 20 nt, Artificial Sequence
  Synthetic
agcuaagaaccuuaaaaaaa

SEQ ID NO: 777963 - RNA, 20 nt, Artificial Sequence
  Synthetic
cccuucuagucuuaaaaaaa

SEQ ID NO: 777964 - RNA, 20 nt, Artificial Sequence
  Synthetic
uuuaccuuguguuaaaaaaa

SEQ ID NO: 777965 - RNA, 20 nt, Artificial Sequence
  Synthetic
agauuuuauguuuaaaaaaa

SEQ ID NO: 777966 - RNA, 20 nt, Artificial Sequence
  Synthetic
uuccauuuuuuuuaaaaaaa

SEQ ID NO: 777967 - RNA, 20 nt, Artificial Sequence
  Synthetic
agcaaauggaaaacaaaaaa

SEQ ID NO: 777968 - RNA, 20 nt, Artificial Sequence
  Synthetic
uaaaagaagacaacaaaaaa

SEQ ID NO: 777969 - RNA, 20 nt, Artificial Sequence
  Synthetic
auuauauuaccaacaaaaaa

SEQ ID NO: 777970 - RNA, 20 nt, Artificial Sequence
  Synthetic
aauacauaaagaacaaaaaa

SEQ ID NO: 777971 - RNA, 20 nt, Artificial Sequence
  Synthetic
cauuaaaaaugaacaaaaaa

SEQ ID NO: 777972 - RNA, 20 nt, Artificial Sequence
  Synthetic
uguuacugucacacaaaaaa

SEQ ID NO: 777973 - RNA, 20 nt, Artificial Sequence
  Synthetic
uguaggaaguggacaaaaaa

SEQ ID NO: 777974 - RNA, 20 nt, Artificial Sequence
  Synthetic
auaaaaggagguacaaaaaa

SEQ ID NO: 777975 - RNA, 20 nt, Artificial Sequence
  Synthetic
uuucauauggaaccaaaaaa

SEQ ID NO: 777976 - RNA, 20 nt, Artificial Sequence
  Synthetic
accuauaucucaccaaaaaa

SEQ ID NO: 777977 - RNA, 20 nt, Artificial Sequence
  Synthetic
aaauugaauaucccaaaaaa

SEQ ID NO: 777978 - RNA, 20 nt, Artificial Sequence
  Synthetic
cagaaaaacacuccaaaaaa

SEQ ID NO: 777979 - RNA, 20 nt, Artificial Sequence
  Synthetic
cugcauagguuagcaaaaaa

SEQ ID NO: 777980 - RNA, 20 nt, Artificial Sequence
  Synthetic
uucuuucuuuacucaaaaaa

SEQ ID NO: 777981 - RNA, 20 nt, Artificial Sequence
  Synthetic
ugagacuccaucucaaaaaa

SEQ ID NO: 777982 - RNA, 20 nt, Artificial Sequence
  Synthetic
aucacugaagcaagaaaaaa

SEQ ID NO: 777983 - RNA, 20 nt, Artificial Sequence
  Synthetic
ccagacuaaugaagaaaaaa

SEQ ID NO: 777984 - RNA, 20 nt, Artificial Sequence
  Synthetic
agaccaaaagagagaaaaaa

SEQ ID NO: 777985 - RNA, 20 nt, Artificial Sequence
  Synthetic
aaacuggcaaugagaaaaaa

SEQ ID NO: 777986 - RNA, 20 nt, Artificial Sequence
  Synthetic
acuagaaaaucuagaaaaaa

SEQ ID NO: 777987 - RNA, 20 nt, Artificial Sequence
  Synthetic
ugaagaaauuuaugaaaaaa

SEQ ID NO: 777988 - RNA, 20 nt, Artificial Sequence
  Synthetic
cauacaaaauccugaaaaaa

SEQ ID NO: 777989 - RNA, 20 nt, Artificial Sequence
  Synthetic
aguuuuuuaaucugaaaaaa

SEQ ID NO: 777990 - RNA, 20 nt, Artificial Sequence
  Synthetic
aaagaaaacuugugaaaaaa

SEQ ID NO: 777991 - RNA, 20 nt, Artificial Sequence
  Synthetic
aaacuacaaaauugaaaaaa

SEQ ID NO: 777992 - RNA, 20 nt, Artificial Sequence
  Synthetic
cguggggaggauugaaaaaa

SEQ ID NO: 777993 - RNA, 20 nt, Artificial Sequence
  Synthetic
aaugcuucauauugaaaaaa

SEQ ID NO: 777994 - RNA, 20 nt, Artificial Sequence
  Synthetic
uaggagcucacuugaaaaaa

SEQ ID NO: 777995 - RNA, 20 nt, Artificial Sequence
  Synthetic
aaggaauucauuugaaaaaa

SEQ ID NO: 777996 - RNA, 20 nt, Artificial Sequence
  Synthetic
auacaaaacuuuugaaaaaa

SEQ ID NO: 777997 - RNA, 20 nt, Artificial Sequence
  Synthetic
uacuaugcagccauaaaaaa

SEQ ID NO: 777998 - RNA, 20 nt, Artificial Sequence
  Synthetic
auaagacuugguauaaaaaa

SEQ ID NO: 777999 - RNA, 20 nt, Artificial Sequence
  Synthetic
aucuuuuaaugaguaaaaaa

SEQ ID NO: 778000 - RNA, 20 nt, Artificial Sequence
  Synthetic
uaaaaauagagauuaaaaaa

SEQ ID NO: 778001 - RNA, 20 nt, Artificial Sequence
  Synthetic
uaaaacaaaaauuuaaaaaa

SEQ ID NO: 778002 - RNA, 20 nt, Artificial Sequence
  Synthetic
auaaaacaucauuuaaaaaa

SEQ ID NO: 778003 - RNA, 20 nt, Artificial Sequence
  Synthetic
auaccauuuucuuuaaaaaa

SEQ ID NO: 778004 - RNA, 20 nt, Artificial Sequence
  Synthetic
uaaaccaauuguuuaaaaaa

SEQ ID NO: 778005 - RNA, 20 nt, Artificial Sequence
  Synthetic
uauaucuagaaaaacaaaaa

SEQ ID NO: 778006 - RNA, 20 nt, Artificial Sequence
  Synthetic
cagugaauaaagaacaaaaa

SEQ ID NO: 778007 - RNA, 20 nt, Artificial Sequence
  Synthetic
aaauacauaaagaacaaaaa

SEQ ID NO: 778008 - RNA, 20 nt, Artificial Sequence
  Synthetic
auaauaaagcagaacaaaaa

SEQ ID NO: 778009 - RNA, 20 nt, Artificial Sequence
  Synthetic
ccuggaaacaggaacaaaaa

SEQ ID NO: 778010 - RNA, 20 nt, Artificial Sequence
  Synthetic
agugaaccauggcacaaaaa

SEQ ID NO: 778011 - RNA, 20 nt, Artificial Sequence
  Synthetic
aaucaucuuuaucacaaaaa

SEQ ID NO: 778012 - RNA, 20 nt, Artificial Sequence
  Synthetic
aaucacaaagccgacaaaaa

SEQ ID NO: 778013 - RNA, 20 nt, Artificial Sequence
  Synthetic
uuuauuuguuaugacaaaaa

SEQ ID NO: 778014 - RNA, 20 nt, Artificial Sequence
  Synthetic
uucccucuuggugacaaaaa

SEQ ID NO: 778015 - RNA, 20 nt, Artificial Sequence
  Synthetic
ugacagggauuugacaaaaa

SEQ ID NO: 778016 - RNA, 20 nt, Artificial Sequence
  Synthetic
auuuugccacaauacaaaaa

SEQ ID NO: 778017 - RNA, 20 nt, Artificial Sequence
  Synthetic
caaaaauggcccuacaaaaa

SEQ ID NO: 778018 - RNA, 20 nt, Artificial Sequence
  Synthetic
agugcugucugcuacaaaaa

SEQ ID NO: 778019 - RNA, 20 nt, Artificial Sequence
  Synthetic
cauaaaaggagguacaaaaa

SEQ ID NO: 778020 - RNA, 20 nt, Artificial Sequence
  Synthetic
uacuuuucuauuuacaaaaa

SEQ ID NO: 778021 - RNA, 20 nt, Artificial Sequence
  Synthetic
uaaaacuuuauuuacaaaaa

SEQ ID NO: 778022 - RNA, 20 nt, Artificial Sequence
  Synthetic
auuucauauggaaccaaaaa

SEQ ID NO: 778023 - RNA, 20 nt, Artificial Sequence
  Synthetic
aaaaugaauauggccaaaaa

SEQ ID NO: 778024 - RNA, 20 nt, Artificial Sequence
  Synthetic
cucaauuugaaugccaaaaa

SEQ ID NO: 778025 - RNA, 20 nt, Artificial Sequence
  Synthetic
cuaucaacauaauccaaaaa

SEQ ID NO: 778026 - RNA, 20 nt, Artificial Sequence
  Synthetic
auguccucuacauccaaaaa

SEQ ID NO: 778027 - RNA, 20 nt, Artificial Sequence
  Synthetic
ccagaaaaacacuccaaaaa

SEQ ID NO: 778028 - RNA, 20 nt, Artificial Sequence
  Synthetic
aaaucauaacacuccaaaaa

SEQ ID NO: 778029 - RNA, 20 nt, Artificial Sequence
  Synthetic
uuuuaaaaaaucuccaaaaa

SEQ ID NO: 778030 - RNA, 20 nt, Artificial Sequence
  Synthetic
ccuuuagaguucagcaaaaa

SEQ ID NO: 778031 - RNA, 20 nt, Artificial Sequence
  Synthetic
uguuagcagaagagcaaaaa

SEQ ID NO: 778032 - RNA, 20 nt, Artificial Sequence
  Synthetic
auaagcaggaggagcaaaaa

SEQ ID NO: 778033 - RNA, 20 nt, Artificial Sequence
  Synthetic
cucauaugugauagcaaaaa

SEQ ID NO: 778034 - RNA, 20 nt, Artificial Sequence
  Synthetic
uuauauagggguagcaaaaa

SEQ ID NO: 778035 - RNA, 20 nt, Artificial Sequence
  Synthetic
agaggucuaggaggcaaaaa

SEQ ID NO: 778036 - RNA, 20 nt, Artificial Sequence
  Synthetic
caggugguauacggcaaaaa

SEQ ID NO: 778037 - RNA, 20 nt, Artificial Sequence
  Synthetic
cucugcucaaugggcaaaaa

SEQ ID NO: 778038 - RNA, 20 nt, Artificial Sequence
  Synthetic
uuauucuuggaaugcaaaaa

SEQ ID NO: 778039 - RNA, 20 nt, Artificial Sequence
  Synthetic
ugcaaguuuuccugcaaaaa

SEQ ID NO: 778040 - RNA, 20 nt, Artificial Sequence
  Synthetic
caagaguuaugcugcaaaaa

SEQ ID NO: 778041 - RNA, 20 nt, Artificial Sequence
  Synthetic
aaugucauauauugcaaaaa

SEQ ID NO: 778042 - RNA, 20 nt, Artificial Sequence
  Synthetic
ucaaggaaaaaaaucaaaaa

SEQ ID NO: 778043 - RNA, 20 nt, Artificial Sequence
  Synthetic
uccgacuccuugcucaaaaa

SEQ ID NO: 778044 - RNA, 20 nt, Artificial Sequence
  Synthetic
cagcaucuaguucucaaaaa

SEQ ID NO: 778045 - RNA, 20 nt, Artificial Sequence
  Synthetic
aagggcuuugaagucaaaaa

SEQ ID NO: 778046 - RNA, 20 nt, Artificial Sequence
  Synthetic
cauuucauaacagucaaaaa

SEQ ID NO: 778047 - RNA, 20 nt, Artificial Sequence
  Synthetic
uaucacauugccuucaaaaa

SEQ ID NO: 778048 - RNA, 20 nt, Artificial Sequence
  Synthetic
uaguucaagaaaaagaaaaa

SEQ ID NO: 778049 - RNA, 20 nt, Artificial Sequence
  Synthetic
aaugacaaaacaaagaaaaa

SEQ ID NO: 778050 - RNA, 20 nt, Artificial Sequence
  Synthetic
acuagcccuucaaagaaaaa

SEQ ID NO: 778051 - RNA, 20 nt, Artificial Sequence
  Synthetic
aagaauagaagaaagaaaaa

SEQ ID NO: 778052 - RNA, 20 nt, Artificial Sequence
  Synthetic
ugagagaauggaaagaaaaa

SEQ ID NO: 778053 - RNA, 20 nt, Artificial Sequence
  Synthetic
ugaucauguugaaagaaaaa

SEQ ID NO: 778054 - RNA, 20 nt, Artificial Sequence
  Synthetic
uacuguaguuagaagaaaaa

SEQ ID NO: 778055 - RNA, 20 nt, Artificial Sequence
  Synthetic
aaagacaacaauaagaaaaa

SEQ ID NO: 778056 - RNA, 20 nt, Artificial Sequence
  Synthetic
aaaaaaaaggauaagaaaaa

SEQ ID NO: 778057 - RNA, 20 nt, Artificial Sequence
  Synthetic
acuuucauuucuaagaaaaa

SEQ ID NO: 778058 - RNA, 20 nt, Artificial Sequence
  Synthetic
cugagugcucuuaagaaaaa

SEQ ID NO: 778059 - RNA, 20 nt, Artificial Sequence
  Synthetic
uuuuaugaauuuaagaaaaa

SEQ ID NO: 778060 - RNA, 20 nt, Artificial Sequence
  Synthetic
uuugucuuuuuuaagaaaaa

SEQ ID NO: 778061 - RNA, 20 nt, Artificial Sequence
  Synthetic
aacauccaaacacagaaaaa

SEQ ID NO: 778062 - RNA, 20 nt, Artificial Sequence
  Synthetic
aggcacugcacacagaaaaa

SEQ ID NO: 778063 - RNA, 20 nt, Artificial Sequence
  Synthetic
auagugaggcagcagaaaaa

SEQ ID NO: 778064 - RNA, 20 nt, Artificial Sequence
  Synthetic
aucuccgagaggcagaaaaa

SEQ ID NO: 778065 - RNA, 20 nt, Artificial Sequence
  Synthetic
agcuucaugaaagagaaaaa

SEQ ID NO: 778066 - RNA, 20 nt, Artificial Sequence
  Synthetic
uugucuagauaagagaaaaa

SEQ ID NO: 778067 - RNA, 20 nt, Artificial Sequence
  Synthetic
aaucuuugguaagagaaaaa

SEQ ID NO: 778068 - RNA, 20 nt, Artificial Sequence
  Synthetic
aagaauuuuuaagagaaaaa

SEQ ID NO: 778069 - RNA, 20 nt, Artificial Sequence
  Synthetic
cucagagaaacagagaaaaa

SEQ ID NO: 778070 - RNA, 20 nt, Artificial Sequence
  Synthetic
cuaaaguuuagagagaaaaa

SEQ ID NO: 778071 - RNA, 20 nt, Artificial Sequence
  Synthetic
acgaggagacgagagaaaaa

SEQ ID NO: 778072 - RNA, 20 nt, Artificial Sequence
  Synthetic
uucuguguggaggagaaaaa

SEQ ID NO: 778073 - RNA, 20 nt, Artificial Sequence
  Synthetic
uaaggggcaugggagaaaaa

SEQ ID NO: 778074 - RNA, 20 nt, Artificial Sequence
  Synthetic
agggucaaaauggagaaaaa

SEQ ID NO: 778075 - RNA, 20 nt, Artificial Sequence
  Synthetic
uagacacaggaugagaaaaa

SEQ ID NO: 778076 - RNA, 20 nt, Artificial Sequence
  Synthetic
cauaauauguaugagaaaaa

SEQ ID NO: 778077 - RNA, 20 nt, Artificial Sequence
  Synthetic
cagauaauccaauagaaaaa

SEQ ID NO: 778078 - RNA, 20 nt, Artificial Sequence
  Synthetic
cccuguguugaauagaaaaa

SEQ ID NO: 778079 - RNA, 20 nt, Artificial Sequence
  Synthetic
agucuccauauauagaaaaa

SEQ ID NO: 778080 - RNA, 20 nt, Artificial Sequence
  Synthetic
uuagauagaaaguagaaaaa

SEQ ID NO: 778081 - RNA, 20 nt, Artificial Sequence
  Synthetic
agaagcagagaguagaaaaa

SEQ ID NO: 778082 - RNA, 20 nt, Artificial Sequence
  Synthetic
aaagaagguagguagaaaaa

SEQ ID NO: 778083 - RNA, 20 nt, Artificial Sequence
  Synthetic
aauauguuucuuuagaaaaa

SEQ ID NO: 778084 - RNA, 20 nt, Artificial Sequence
  Synthetic
aaaguuaaauuuuagaaaaa

SEQ ID NO: 778085 - RNA, 20 nt, Artificial Sequence
  Synthetic
cccacaaaagguacgaaaaa

SEQ ID NO: 778086 - RNA, 20 nt, Artificial Sequence
  Synthetic
ccaaaaucauaaaggaaaaa

SEQ ID NO: 778087 - RNA, 20 nt, Artificial Sequence
  Synthetic
ucaucaggguaaaggaaaaa

SEQ ID NO: 778088 - RNA, 20 nt, Artificial Sequence
  Synthetic
aaaugaagcacaaggaaaaa

SEQ ID NO: 778089 - RNA, 20 nt, Artificial Sequence
  Synthetic
uuaaucaagagaaggaaaaa

SEQ ID NO: 778090 - RNA, 20 nt, Artificial Sequence
  Synthetic
uauuaagagagaaggaaaaa

SEQ ID NO: 778091 - RNA, 20 nt, Artificial Sequence
  Synthetic
aucaguuauugaaggaaaaa

SEQ ID NO: 778092 - RNA, 20 nt, Artificial Sequence
  Synthetic
auaggaaaacacaggaaaaa

SEQ ID NO: 778093 - RNA, 20 nt, Artificial Sequence
  Synthetic
aggaaggaaagcaggaaaaa

SEQ ID NO: 778094 - RNA, 20 nt, Artificial Sequence
  Synthetic
uuuguugggaucaggaaaaa

SEQ ID NO: 778095 - RNA, 20 nt, Artificial Sequence
  Synthetic
agacuuuccaaagggaaaaa

SEQ ID NO: 778096 - RNA, 20 nt, Artificial Sequence
  Synthetic
cuugggggcucagggaaaaa

SEQ ID NO: 778097 - RNA, 20 nt, Artificial Sequence
  Synthetic
agaguuuuuguagggaaaaa

SEQ ID NO: 778098 - RNA, 20 nt, Artificial Sequence
  Synthetic
auagccacuggggggaaaaa

SEQ ID NO: 778099 - RNA, 20 nt, Artificial Sequence
  Synthetic
aauagauuucuggggaaaaa

SEQ ID NO: 778100 - RNA, 20 nt, Artificial Sequence
  Synthetic
ugcacacacuaugggaaaaa

SEQ ID NO: 778101 - RNA, 20 nt, Artificial Sequence
  Synthetic
augcuguaaauugggaaaaa

SEQ ID NO: 778102 - RNA, 20 nt, Artificial Sequence
  Synthetic
ugaucaaggauauggaaaaa

SEQ ID NO: 778103 - RNA, 20 nt, Artificial Sequence
  Synthetic
cacucuugucccuggaaaaa

SEQ ID NO: 778104 - RNA, 20 nt, Artificial Sequence
  Synthetic
uaaauugcugaguggaaaaa

SEQ ID NO: 778105 - RNA, 20 nt, Artificial Sequence
  Synthetic
ucaagcgccagguggaaaaa

SEQ ID NO: 778106 - RNA, 20 nt, Artificial Sequence
  Synthetic
uuuacucuuagaaugaaaaa

SEQ ID NO: 778107 - RNA, 20 nt, Artificial Sequence
  Synthetic
uggggugacuggaugaaaaa

SEQ ID NO: 778108 - RNA, 20 nt, Artificial Sequence
  Synthetic
ugaaauacauuuaugaaaaa

SEQ ID NO: 778109 - RNA, 20 nt, Artificial Sequence
  Synthetic
agggggaagguacugaaaaa

SEQ ID NO: 778110 - RNA, 20 nt, Artificial Sequence
  Synthetic
uuuauucauuuacugaaaaa

SEQ ID NO: 778111 - RNA, 20 nt, Artificial Sequence
  Synthetic
ucuugccacagagugaaaaa

SEQ ID NO: 778112 - RNA, 20 nt, Artificial Sequence
  Synthetic
ucguggggaggauugaaaaa

SEQ ID NO: 778113 - RNA, 20 nt, Artificial Sequence
  Synthetic
aaaugcuucauauugaaaaa

SEQ ID NO: 778114 - RNA, 20 nt, Artificial Sequence
  Synthetic
uuaggagcucacuugaaaaa

SEQ ID NO: 778115 - RNA, 20 nt, Artificial Sequence
  Synthetic
ugcuaugauaaguugaaaaa

SEQ ID NO: 778116 - RNA, 20 nt, Artificial Sequence
  Synthetic
auaguaaaugauuugaaaaa

SEQ ID NO: 778117 - RNA, 20 nt, Artificial Sequence
  Synthetic
aaagagcagauuuugaaaaa

SEQ ID NO: 778118 - RNA, 20 nt, Artificial Sequence
  Synthetic
uauacaaaacuuuugaaaaa

SEQ ID NO: 778119 - RNA, 20 nt, Artificial Sequence
  Synthetic
aaauuucuguaaaauaaaaa

SEQ ID NO: 778120 - RNA, 20 nt, Artificial Sequence
  Synthetic
agggauuuuuaaaauaaaaa

SEQ ID NO: 778121 - RNA, 20 nt, Artificial Sequence
  Synthetic
aaacaugcaccaaauaaaaa

SEQ ID NO: 778122 - RNA, 20 nt, Artificial Sequence
  Synthetic
auauauagaauaaauaaaaa

SEQ ID NO: 778123 - RNA, 20 nt, Artificial Sequence
  Synthetic
uuuuuaccauuaaauaaaaa

SEQ ID NO: 778124 - RNA, 20 nt, Artificial Sequence
  Synthetic
augcugacucucaauaaaaa

SEQ ID NO: 778125 - RNA, 20 nt, Artificial Sequence
  Synthetic
uuggaaacacauaauaaaaa

SEQ ID NO: 778126 - RNA, 20 nt, Artificial Sequence
  Synthetic
acuguacauaaacauaaaaa

SEQ ID NO: 778127 - RNA, 20 nt, Artificial Sequence
  Synthetic
auacuacgcaaccauaaaaa

SEQ ID NO: 778128 - RNA, 20 nt, Artificial Sequence
  Synthetic
auacuaugcaaccauaaaaa

SEQ ID NO: 778129 - RNA, 20 nt, Artificial Sequence
  Synthetic
auacugugaagccauaaaaa

SEQ ID NO: 778130 - RNA, 20 nt, Artificial Sequence
  Synthetic
auacuaugcagccauaaaaa

SEQ ID NO: 778131 - RNA, 20 nt, Artificial Sequence
  Synthetic
auacugugcagccauaaaaa

SEQ ID NO: 778132 - RNA, 20 nt, Artificial Sequence
  Synthetic
cuaaaacuacaucauaaaaa

SEQ ID NO: 778133 - RNA, 20 nt, Artificial Sequence
  Synthetic
auuuugaucacugauaaaaa

SEQ ID NO: 778134 - RNA, 20 nt, Artificial Sequence
  Synthetic
ucugaguuuuaauauaaaaa

SEQ ID NO: 778135 - RNA, 20 nt, Artificial Sequence
  Synthetic
uaugguauaucauauaaaaa

SEQ ID NO: 778136 - RNA, 20 nt, Artificial Sequence
  Synthetic
uaauucuuaucauauaaaaa

SEQ ID NO: 778137 - RNA, 20 nt, Artificial Sequence
  Synthetic
cacauaagaggauauaaaaa

SEQ ID NO: 778138 - RNA, 20 nt, Artificial Sequence
  Synthetic
augccagagggauauaaaaa

SEQ ID NO: 778139 - RNA, 20 nt, Artificial Sequence
  Synthetic
uuaagaagcacguauaaaaa

SEQ ID NO: 778140 - RNA, 20 nt, Artificial Sequence
  Synthetic
uuacaugaguguuauaaaaa

SEQ ID NO: 778141 - RNA, 20 nt, Artificial Sequence
  Synthetic
auaauuuagaaaacuaaaaa

SEQ ID NO: 778142 - RNA, 20 nt, Artificial Sequence
  Synthetic
ucuuuuucuugaacuaaaaa

SEQ ID NO: 778143 - RNA, 20 nt, Artificial Sequence
  Synthetic
ucaaauuauuuuacuaaaaa

SEQ ID NO: 778144 - RNA, 20 nt, Artificial Sequence
  Synthetic
uuccaauuucccccuaaaaa

SEQ ID NO: 778145 - RNA, 20 nt, Artificial Sequence
  Synthetic
cuaaauguugguucuaaaaa

SEQ ID NO: 778146 - RNA, 20 nt, Artificial Sequence
  Synthetic
augauaccuacaaguaaaaa

SEQ ID NO: 778147 - RNA, 20 nt, Artificial Sequence
  Synthetic
caaaaggcccacaguaaaaa

SEQ ID NO: 778148 - RNA, 20 nt, Artificial Sequence
  Synthetic
ucauuauccaguaguaaaaa

SEQ ID NO: 778149 - RNA, 20 nt, Artificial Sequence
  Synthetic
ugauccaucuuuaguaaaaa

SEQ ID NO: 778150 - RNA, 20 nt, Artificial Sequence
  Synthetic
aaguguuuaacagguaaaaa

SEQ ID NO: 778151 - RNA, 20 nt, Artificial Sequence
  Synthetic
ccuguuauaggagguaaaaa

SEQ ID NO: 778152 - RNA, 20 nt, Artificial Sequence
  Synthetic
aaauacuuuuaggguaaaaa

SEQ ID NO: 778153 - RNA, 20 nt, Artificial Sequence
  Synthetic
uuacuauauagggguaaaaa

SEQ ID NO: 778154 - RNA, 20 nt, Artificial Sequence
  Synthetic
cccuaagaagaguguaaaaa

SEQ ID NO: 778155 - RNA, 20 nt, Artificial Sequence
  Synthetic
uucauuuagucuuguaaaaa

SEQ ID NO: 778156 - RNA, 20 nt, Artificial Sequence
  Synthetic
ucauagcaucuuuguaaaaa

SEQ ID NO: 778157 - RNA, 20 nt, Artificial Sequence
  Synthetic
aaagugaaaguuuguaaaaa

SEQ ID NO: 778158 - RNA, 20 nt, Artificial Sequence
  Synthetic
uagggaacaaaaauuaaaaa

SEQ ID NO: 778159 - RNA, 20 nt, Artificial Sequence
  Synthetic
uaaaaacagcuaauuaaaaa

SEQ ID NO: 778160 - RNA, 20 nt, Artificial Sequence
  Synthetic
agaauuugcuuaauuaaaaa

SEQ ID NO: 778161 - RNA, 20 nt, Artificial Sequence
  Synthetic
cagcaaauuugcauuaaaaa

SEQ ID NO: 778162 - RNA, 20 nt, Artificial Sequence
  Synthetic
cucaacuguauacuuaaaaa

SEQ ID NO: 778163 - RNA, 20 nt, Artificial Sequence
  Synthetic
cugaacuguauacuuaaaaa

SEQ ID NO: 778164 - RNA, 20 nt, Artificial Sequence
  Synthetic
aaggaaugauuucuuaaaaa

SEQ ID NO: 778165 - RNA, 20 nt, Artificial Sequence
  Synthetic
cacaggcuuugcuuuaaaaa

SEQ ID NO: 778166 - RNA, 20 nt, Artificial Sequence
  Synthetic
caauuuuguuucuuuaaaaa

SEQ ID NO: 778167 - RNA, 20 nt, Artificial Sequence
  Synthetic
uguuugcugaauuuuaaaaa

SEQ ID NO: 778168 - RNA, 20 nt, Artificial Sequence
  Synthetic
uaucuuuuuuauuuuaaaaa

SEQ ID NO: 778169 - RNA, 20 nt, Artificial Sequence
  Synthetic
cauaaugcauuuuuuaaaaa

SEQ ID NO: 778170 - RNA, 20 nt, Artificial Sequence
  Synthetic
caauucaucuuuuuuaaaaa

SEQ ID NO: 778171 - RNA, 20 nt, Artificial Sequence
  Synthetic
auggaaucuuuuuuuaaaaa

SEQ ID NO: 778172 - RNA, 20 nt, Artificial Sequence
  Synthetic
uuuuuuuuuuuuuuuaaaaa

SEQ ID NO: 778173 - RNA, 20 nt, Artificial Sequence
  Synthetic
uuauaucuagaaaaacaaaa

SEQ ID NO: 778174 - RNA, 20 nt, Artificial Sequence
  Synthetic
uguuaccagccaaaacaaaa

SEQ ID NO: 778175 - RNA, 20 nt, Artificial Sequence
  Synthetic
uaagaacuuggaaaacaaaa

SEQ ID NO: 778176 - RNA, 20 nt, Artificial Sequence
  Synthetic
uauaccucaauaaaacaaaa

SEQ ID NO: 778177 - RNA, 20 nt, Artificial Sequence
  Synthetic
ugagacuaaguaaaacaaaa

SEQ ID NO: 778178 - RNA, 20 nt, Artificial Sequence
  Synthetic
cacucacuacugaaacaaaa

SEQ ID NO: 778179 - RNA, 20 nt, Artificial Sequence
  Synthetic
cucauaauucaacaacaaaa

SEQ ID NO: 778180 - RNA, 20 nt, Artificial Sequence
  Synthetic
uaagaaaagcgacaacaaaa

SEQ ID NO: 778181 - RNA, 20 nt, Artificial Sequence
  Synthetic
uagcaucaacaucaacaaaa

SEQ ID NO: 778182 - RNA, 20 nt, Artificial Sequence
  Synthetic
aauaauaaagcagaacaaaa

SEQ ID NO: 778183 - RNA, 20 nt, Artificial Sequence
  Synthetic
agcuuuaggggagaacaaaa

SEQ ID NO: 778184 - RNA, 20 nt, Artificial Sequence
  Synthetic
cucucagaugaggaacaaaa

SEQ ID NO: 778185 - RNA, 20 nt, Artificial Sequence
  Synthetic
uuuuugaucucugaacaaaa

SEQ ID NO: 778186 - RNA, 20 nt, Artificial Sequence
  Synthetic
cugguuucccuugaacaaaa

SEQ ID NO: 778187 - RNA, 20 nt, Artificial Sequence
  Synthetic
uauuucuuaaaauaacaaaa

SEQ ID NO: 778188 - RNA, 20 nt, Artificial Sequence
  Synthetic
ccaugucaaauaacacaaaa

SEQ ID NO: 778189 - RNA, 20 nt, Artificial Sequence
  Synthetic
uauacacaauuaacacaaaa

SEQ ID NO: 778190 - RNA, 20 nt, Artificial Sequence
  Synthetic
ugggaagugcugacacaaaa

SEQ ID NO: 778191 - RNA, 20 nt, Artificial Sequence
  Synthetic
aauaucauucugccacaaaa

SEQ ID NO: 778192 - RNA, 20 nt, Artificial Sequence
  Synthetic
auuaugauacauccacaaaa

SEQ ID NO: 778193 - RNA, 20 nt, Artificial Sequence
  Synthetic
cuaggauuccacgcacaaaa

SEQ ID NO: 778194 - RNA, 20 nt, Artificial Sequence
  Synthetic
aagugaaccauggcacaaaa

SEQ ID NO: 778195 - RNA, 20 nt, Artificial Sequence
  Synthetic
aagggaacuucaucacaaaa

SEQ ID NO: 778196 - RNA, 20 nt, Artificial Sequence
  Synthetic
ucaccucagccuucacaaaa

SEQ ID NO: 778197 - RNA, 20 nt, Artificial Sequence
  Synthetic
uguuauaacuuaagacaaaa

SEQ ID NO: 778198 - RNA, 20 nt, Artificial Sequence
  Synthetic
uauucuuauaucagacaaaa

SEQ ID NO: 778199 - RNA, 20 nt, Artificial Sequence
  Synthetic
caaucacaaagccgacaaaa

SEQ ID NO: 778200 - RNA, 20 nt, Artificial Sequence
  Synthetic
ugagauccagaaggacaaaa

SEQ ID NO: 778201 - RNA, 20 nt, Artificial Sequence
  Synthetic
auauguauucucugacaaaa

SEQ ID NO: 778202 - RNA, 20 nt, Artificial Sequence
  Synthetic
uaugaaacgagaauacaaaa

SEQ ID NO: 778203 - RNA, 20 nt, Artificial Sequence
  Synthetic
uaaaaucaaaggauacaaaa

SEQ ID NO: 778204 - RNA, 20 nt, Artificial Sequence
  Synthetic
uugacaagucugauacaaaa

SEQ ID NO: 778205 - RNA, 20 nt, Artificial Sequence
  Synthetic
aaagaaagaauacuacaaaa

SEQ ID NO: 778206 - RNA, 20 nt, Artificial Sequence
  Synthetic
ugaacaggcaaccuacaaaa

SEQ ID NO: 778207 - RNA, 20 nt, Artificial Sequence
  Synthetic
aaaaggaauuagcuacaaaa

SEQ ID NO: 778208 - RNA, 20 nt, Artificial Sequence
  Synthetic
uucuuagaaauaguacaaaa

SEQ ID NO: 778209 - RNA, 20 nt, Artificial Sequence
  Synthetic
ugauuuuugauauuacaaaa

SEQ ID NO: 778210 - RNA, 20 nt, Artificial Sequence
  Synthetic
aaaaaugaaaauuuacaaaa

SEQ ID NO: 778211 - RNA, 20 nt, Artificial Sequence
  Synthetic
ugcugguagaaaaaccaaaa

SEQ ID NO: 778212 - RNA, 20 nt, Artificial Sequence
  Synthetic
uugaauacuuagaaccaaaa

SEQ ID NO: 778213 - RNA, 20 nt, Artificial Sequence
  Synthetic
cuaagauccagacaccaaaa

SEQ ID NO: 778214 - RNA, 20 nt, Artificial Sequence
  Synthetic
caagaaacguuucaccaaaa

SEQ ID NO: 778215 - RNA, 20 nt, Artificial Sequence
  Synthetic
aaauaauaaagguaccaaaa

SEQ ID NO: 778216 - RNA, 20 nt, Artificial Sequence
  Synthetic
uuagaauguuucccccaaaa

SEQ ID NO: 778217 - RNA, 20 nt, Artificial Sequence
  Synthetic
aagugucuugucucccaaaa

SEQ ID NO: 778218 - RNA, 20 nt, Artificial Sequence
  Synthetic
aggaauucagggucccaaaa

SEQ ID NO: 778219 - RNA, 20 nt, Artificial Sequence
  Synthetic
uucuuauagaguucccaaaa

SEQ ID NO: 778220 - RNA, 20 nt, Artificial Sequence
  Synthetic
ccgggacaguuuucccaaaa

SEQ ID NO: 778221 - RNA, 20 nt, Artificial Sequence
  Synthetic
aaggaggauuuuucccaaaa

SEQ ID NO: 778222 - RNA, 20 nt, Artificial Sequence
  Synthetic
aauggcaacaaaagccaaaa

SEQ ID NO: 778223 - RNA, 20 nt, Artificial Sequence
  Synthetic
uuuuagcacaaaagccaaaa

SEQ ID NO: 778224 - RNA, 20 nt, Artificial Sequence
  Synthetic
uggaagguuagaggccaaaa

SEQ ID NO: 778225 - RNA, 20 nt, Artificial Sequence
  Synthetic
agacacacccugggccaaaa

SEQ ID NO: 778226 - RNA, 20 nt, Artificial Sequence
  Synthetic
uuuuguguuaaaugccaaaa

SEQ ID NO: 778227 - RNA, 20 nt, Artificial Sequence
  Synthetic
aucaguuccuggugccaaaa

SEQ ID NO: 778228 - RNA, 20 nt, Artificial Sequence
  Synthetic
agauggaugugacuccaaaa

SEQ ID NO: 778229 - RNA, 20 nt, Artificial Sequence
  Synthetic
cuaaacauucagcuccaaaa

SEQ ID NO: 778230 - RNA, 20 nt, Artificial Sequence
  Synthetic
ccuccugcuccucuccaaaa

SEQ ID NO: 778231 - RNA, 20 nt, Artificial Sequence
  Synthetic
cccaacaagggaguccaaaa

SEQ ID NO: 778232 - RNA, 20 nt, Artificial Sequence
  Synthetic
caugguaacaugguccaaaa

SEQ ID NO: 778233 - RNA, 20 nt, Artificial Sequence
  Synthetic
aauuaggcaaaauuccaaaa

SEQ ID NO: 778234 - RNA, 20 nt, Artificial Sequence
  Synthetic
uguguuuugaaauuccaaaa

SEQ ID NO: 778235 - RNA, 20 nt, Artificial Sequence
  Synthetic
aaucuauggagcuuccaaaa

SEQ ID NO: 778236 - RNA, 20 nt, Artificial Sequence
  Synthetic
auaacuuuuuaguuccaaaa

SEQ ID NO: 778237 - RNA, 20 nt, Artificial Sequence
  Synthetic
caaugaaauuguuuccaaaa

SEQ ID NO: 778238 - RNA, 20 nt, Artificial Sequence
  Synthetic
uucuguuucauuuuccaaaa

SEQ ID NO: 778239 - RNA, 20 nt, Artificial Sequence
  Synthetic
uguguucauagcaagcaaaa

SEQ ID NO: 778240 - RNA, 20 nt, Artificial Sequence
  Synthetic
aaacuauagcagaagcaaaa

SEQ ID NO: 778241 - RNA, 20 nt, Artificial Sequence
  Synthetic
ugugacaaaaugaagcaaaa

SEQ ID NO: 778242 - RNA, 20 nt, Artificial Sequence
  Synthetic
ucucuacauugacagcaaaa

SEQ ID NO: 778243 - RNA, 20 nt, Artificial Sequence
  Synthetic
aauccuacaccgcagcaaaa

SEQ ID NO: 778244 - RNA, 20 nt, Artificial Sequence
  Synthetic
uuguuuauugugcagcaaaa

SEQ ID NO: 778245 - RNA, 20 nt, Artificial Sequence
  Synthetic
auguuagcagaagagcaaaa

SEQ ID NO: 778246 - RNA, 20 nt, Artificial Sequence
  Synthetic
cuguguccccaugagcaaaa

SEQ ID NO: 778247 - RNA, 20 nt, Artificial Sequence
  Synthetic
ucauaaugauaugagcaaaa

SEQ ID NO: 778248 - RNA, 20 nt, Artificial Sequence
  Synthetic
ugacccuccccugagcaaaa

SEQ ID NO: 778249 - RNA, 20 nt, Artificial Sequence
  Synthetic
aucugcugauuugagcaaaa

SEQ ID NO: 778250 - RNA, 20 nt, Artificial Sequence
  Synthetic
uagaauauaaaauagcaaaa

SEQ ID NO: 778251 - RNA, 20 nt, Artificial Sequence
  Synthetic
uauaaaugugaauagcaaaa

SEQ ID NO: 778252 - RNA, 20 nt, Artificial Sequence
  Synthetic
cagagaacugcuuagcaaaa

SEQ ID NO: 778253 - RNA, 20 nt, Artificial Sequence
  Synthetic
auguaauuugguuagcaaaa

SEQ ID NO: 778254 - RNA, 20 nt, Artificial Sequence
  Synthetic
aaaacuacuaaaaggcaaaa

SEQ ID NO: 778255 - RNA, 20 nt, Artificial Sequence
  Synthetic
agaggccuaggaaggcaaaa

SEQ ID NO: 778256 - RNA, 20 nt, Artificial Sequence
  Synthetic
aguucuggagggaggcaaaa

SEQ ID NO: 778257 - RNA, 20 nt, Artificial Sequence
  Synthetic
aguaacaguuggaggcaaaa

SEQ ID NO: 778258 - RNA, 20 nt, Artificial Sequence
  Synthetic
auuauuuacauagggcaaaa

SEQ ID NO: 778259 - RNA, 20 nt, Artificial Sequence
  Synthetic
agucaauaaaaugggcaaaa

SEQ ID NO: 778260 - RNA, 20 nt, Artificial Sequence
  Synthetic
acaguuagaaaauggcaaaa

SEQ ID NO: 778261 - RNA, 20 nt, Artificial Sequence
  Synthetic
acaauuuugcuguggcaaaa

SEQ ID NO: 778262 - RNA, 20 nt, Artificial Sequence
  Synthetic
augauucuuccaaugcaaaa

SEQ ID NO: 778263 - RNA, 20 nt, Artificial Sequence
  Synthetic
auauuucaccugaugcaaaa

SEQ ID NO: 778264 - RNA, 20 nt, Artificial Sequence
  Synthetic
uugcaaguuuuccugcaaaa

SEQ ID NO: 778265 - RNA, 20 nt, Artificial Sequence
  Synthetic
caguguccucaucugcaaaa

SEQ ID NO: 778266 - RNA, 20 nt, Artificial Sequence
  Synthetic
cucaaauaaacucugcaaaa

SEQ ID NO: 778267 - RNA, 20 nt, Artificial Sequence
  Synthetic
aaggaaaacuacgugcaaaa

SEQ ID NO: 778268 - RNA, 20 nt, Artificial Sequence
  Synthetic
augugaaccucugugcaaaa

SEQ ID NO: 778269 - RNA, 20 nt, Artificial Sequence
  Synthetic
ucacugguggcauugcaaaa

SEQ ID NO: 778270 - RNA, 20 nt, Artificial Sequence
  Synthetic
uuacacuggggcuugcaaaa

SEQ ID NO: 778271 - RNA, 20 nt, Artificial Sequence
  Synthetic
uauuuuggguuuuugcaaaa

SEQ ID NO: 778272 - RNA, 20 nt, Artificial Sequence
  Synthetic
uucaaggaaaaaaaucaaaa

SEQ ID NO: 778273 - RNA, 20 nt, Artificial Sequence
  Synthetic
accaaaauagaaaaucaaaa

SEQ ID NO: 778274 - RNA, 20 nt, Artificial Sequence
  Synthetic
cagagaacugcaaaucaaaa

SEQ ID NO: 778275 - RNA, 20 nt, Artificial Sequence
  Synthetic
cucauacucucaaaucaaaa

SEQ ID NO: 778276 - RNA, 20 nt, Artificial Sequence
  Synthetic
uaucagcaagccaaucaaaa

SEQ ID NO: 778277 - RNA, 20 nt, Artificial Sequence
  Synthetic
aauuugagagggaaucaaaa

SEQ ID NO: 778278 - RNA, 20 nt, Artificial Sequence
  Synthetic
cagagcaucaguaaucaaaa

SEQ ID NO: 778279 - RNA, 20 nt, Artificial Sequence
  Synthetic
auaaaaugauaacaucaaaa

SEQ ID NO: 778280 - RNA, 20 nt, Artificial Sequence
  Synthetic
auccuaaauuugcaucaaaa

SEQ ID NO: 778281 - RNA, 20 nt, Artificial Sequence
  Synthetic
uaaaccaauaaagaucaaaa

SEQ ID NO: 778282 - RNA, 20 nt, Artificial Sequence
  Synthetic
ucuuguuuagaagaucaaaa

SEQ ID NO: 778283 - RNA, 20 nt, Artificial Sequence
  Synthetic
uugauuaacacugaucaaaa

SEQ ID NO: 778284 - RNA, 20 nt, Artificial Sequence
  Synthetic
uggggagauguugaucaaaa

SEQ ID NO: 778285 - RNA, 20 nt, Artificial Sequence
  Synthetic
uaauaguagaaaacucaaaa

SEQ ID NO: 778286 - RNA, 20 nt, Artificial Sequence
  Synthetic
auacaagaaucaacucaaaa

SEQ ID NO: 778287 - RNA, 20 nt, Artificial Sequence
  Synthetic
cuuagaacauuuacucaaaa

SEQ ID NO: 778288 - RNA, 20 nt, Artificial Sequence
  Synthetic
uccagaaaauagccucaaaa

SEQ ID NO: 778289 - RNA, 20 nt, Artificial Sequence
  Synthetic
aguuuccaagguccucaaaa

SEQ ID NO: 778290 - RNA, 20 nt, Artificial Sequence
  Synthetic
aauuauggaauugcucaaaa

SEQ ID NO: 778291 - RNA, 20 nt, Artificial Sequence
  Synthetic
acaauggauagaucucaaaa

SEQ ID NO: 778292 - RNA, 20 nt, Artificial Sequence
  Synthetic
agguauugcguaucucaaaa

SEQ ID NO: 778293 - RNA, 20 nt, Artificial Sequence
  Synthetic
uuucucccacacucucaaaa

SEQ ID NO: 778294 - RNA, 20 nt, Artificial Sequence
  Synthetic
acagcaucuaguucucaaaa

SEQ ID NO: 778295 - RNA, 20 nt, Artificial Sequence
  Synthetic
uauugcaaugguucucaaaa

SEQ ID NO: 778296 - RNA, 20 nt, Artificial Sequence
  Synthetic
uaguagcuuugaagucaaaa

SEQ ID NO: 778297 - RNA, 20 nt, Artificial Sequence
  Synthetic
agugaugacaagggucaaaa

SEQ ID NO: 778298 - RNA, 20 nt, Artificial Sequence
  Synthetic
ccucuauauuuaugucaaaa

SEQ ID NO: 778299 - RNA, 20 nt, Artificial Sequence
  Synthetic
uuuuuuaaacauugucaaaa

SEQ ID NO: 778300 - RNA, 20 nt, Artificial Sequence
  Synthetic
augcaaagcucaauucaaaa

SEQ ID NO: 778301 - RNA, 20 nt, Artificial Sequence
  Synthetic
auaucacauugccuucaaaa

SEQ ID NO: 778302 - RNA, 20 nt, Artificial Sequence
  Synthetic
aggauuggaauucuucaaaa

SEQ ID NO: 778303 - RNA, 20 nt, Artificial Sequence
  Synthetic
uuucuuauucgaguucaaaa

SEQ ID NO: 778304 - RNA, 20 nt, Artificial Sequence
  Synthetic
ugcccuugauuaguucaaaa

SEQ ID NO: 778305 - RNA, 20 nt, Artificial Sequence
  Synthetic
aaauuauuuuuauuucaaaa

SEQ ID NO: 778306 - RNA, 20 nt, Artificial Sequence
  Synthetic
uggugcuccuaaaaagaaaa

SEQ ID NO: 778307 - RNA, 20 nt, Artificial Sequence
  Synthetic
aucaggucuuaaaaagaaaa

SEQ ID NO: 778308 - RNA, 20 nt, Artificial Sequence
  Synthetic
ugggugcuuuaaaaagaaaa

SEQ ID NO: 778309 - RNA, 20 nt, Artificial Sequence
  Synthetic
uuccucaggauaaaagaaaa

SEQ ID NO: 778310 - RNA, 20 nt, Artificial Sequence
  Synthetic
acuggcaauauaaaagaaaa

SEQ ID NO: 778311 - RNA, 20 nt, Artificial Sequence
  Synthetic
ugauuaccucuaaaagaaaa

SEQ ID NO: 778312 - RNA, 20 nt, Artificial Sequence
  Synthetic
uuuuuaaaaguaaaagaaaa

SEQ ID NO: 778313 - RNA, 20 nt, Artificial Sequence
  Synthetic
aucaaacaagccaaagaaaa

SEQ ID NO: 778314 - RNA, 20 nt, Artificial Sequence
  Synthetic
aaaaugaugugcaaagaaaa

SEQ ID NO: 778315 - RNA, 20 nt, Artificial Sequence
  Synthetic
uuaaacaugcagaaagaaaa

SEQ ID NO: 778316 - RNA, 20 nt, Artificial Sequence
  Synthetic
aaauuguuaaggaaagaaaa

SEQ ID NO: 778317 - RNA, 20 nt, Artificial Sequence
  Synthetic
uugaucauguugaaagaaaa

SEQ ID NO: 778318 - RNA, 20 nt, Artificial Sequence
  Synthetic
aauaaguacuauaaagaaaa

SEQ ID NO: 778319 - RNA, 20 nt, Artificial Sequence
  Synthetic
cagagacuuacuaaagaaaa

SEQ ID NO: 778320 - RNA, 20 nt, Artificial Sequence
  Synthetic
ucauuauucucuaaagaaaa

SEQ ID NO: 778321 - RNA, 20 nt, Artificial Sequence
  Synthetic
aggucagagguuaaagaaaa

SEQ ID NO: 778322 - RNA, 20 nt, Artificial Sequence
  Synthetic
acuccuuuuuuuaaagaaaa

SEQ ID NO: 778323 - RNA, 20 nt, Artificial Sequence
  Synthetic
ugaguaugaauacaagaaaa

SEQ ID NO: 778324 - RNA, 20 nt, Artificial Sequence
  Synthetic
aaggcaauacgccaagaaaa

SEQ ID NO: 778325 - RNA, 20 nt, Artificial Sequence
  Synthetic
cuuaaaaauggucaagaaaa

SEQ ID NO: 778326 - RNA, 20 nt, Artificial Sequence
  Synthetic
cuaagauaacuucaagaaaa

SEQ ID NO: 778327 - RNA, 20 nt, Artificial Sequence
  Synthetic
ucuuugggcaaagaagaaaa

SEQ ID NO: 778328 - RNA, 20 nt, Artificial Sequence
  Synthetic
agguugacuuaagaagaaaa

SEQ ID NO: 778329 - RNA, 20 nt, Artificial Sequence
  Synthetic
cagccacaagcagaagaaaa

SEQ ID NO: 778330 - RNA, 20 nt, Artificial Sequence
  Synthetic
agcccuuuugcagaagaaaa

SEQ ID NO: 778331 - RNA, 20 nt, Artificial Sequence
  Synthetic
uaagucuuugaggaagaaaa

SEQ ID NO: 778332 - RNA, 20 nt, Artificial Sequence
  Synthetic
agucaaggcuaggaagaaaa

SEQ ID NO: 778333 - RNA, 20 nt, Artificial Sequence
  Synthetic
ugacaaguaugugaagaaaa

SEQ ID NO: 778334 - RNA, 20 nt, Artificial Sequence
  Synthetic
uggagagagugugaagaaaa

SEQ ID NO: 778335 - RNA, 20 nt, Artificial Sequence
  Synthetic
uauucccaaauugaagaaaa

SEQ ID NO: 778336 - RNA, 20 nt, Artificial Sequence
  Synthetic
ucugcaaaguaauaagaaaa

SEQ ID NO: 778337 - RNA, 20 nt, Artificial Sequence
  Synthetic
aacgcuauuauauaagaaaa

SEQ ID NO: 778338 - RNA, 20 nt, Artificial Sequence
  Synthetic
ccagaucuucccuaagaaaa

SEQ ID NO: 778339 - RNA, 20 nt, Artificial Sequence
  Synthetic
uuccauauuuccuaagaaaa

SEQ ID NO: 778340 - RNA, 20 nt, Artificial Sequence
  Synthetic
uuuccacuaugcuaagaaaa

SEQ ID NO: 778341 - RNA, 20 nt, Artificial Sequence
  Synthetic
ucugagugcucuuaagaaaa

SEQ ID NO: 778342 - RNA, 20 nt, Artificial Sequence
  Synthetic
uuuuucaauguaacagaaaa

SEQ ID NO: 778343 - RNA, 20 nt, Artificial Sequence
  Synthetic
uacaaauaaaacacagaaaa

SEQ ID NO: 778344 - RNA, 20 nt, Artificial Sequence
  Synthetic
acacacacacacacagaaaa

SEQ ID NO: 778345 - RNA, 20 nt, Artificial Sequence
  Synthetic
aagggagagaugccagaaaa

SEQ ID NO: 778346 - RNA, 20 nt, Artificial Sequence
  Synthetic
ugcucuaaaaauccagaaaa

SEQ ID NO: 778347 - RNA, 20 nt, Artificial Sequence
  Synthetic
cagccagccucuccagaaaa

SEQ ID NO: 778348 - RNA, 20 nt, Artificial Sequence
  Synthetic
uacuugaugagugcagaaaa

SEQ ID NO: 778349 - RNA, 20 nt, Artificial Sequence
  Synthetic
uauacuuauaacucagaaaa

SEQ ID NO: 778350 - RNA, 20 nt, Artificial Sequence
  Synthetic
agcuuguauuucucagaaaa

SEQ ID NO: 778351 - RNA, 20 nt, Artificial Sequence
  Synthetic
uggaauucagaaagagaaaa

SEQ ID NO: 778352 - RNA, 20 nt, Artificial Sequence
  Synthetic
ucuugaauuucaagagaaaa

SEQ ID NO: 778353 - RNA, 20 nt, Artificial Sequence
  Synthetic
auagauaacuuaagagaaaa

SEQ ID NO: 778354 - RNA, 20 nt, Artificial Sequence
  Synthetic
aaagaauuuuuaagagaaaa

SEQ ID NO: 778355 - RNA, 20 nt, Artificial Sequence
  Synthetic
uggugaggcugcagagaaaa

SEQ ID NO: 778356 - RNA, 20 nt, Artificial Sequence
  Synthetic
uggugaggcuucagagaaaa

SEQ ID NO: 778357 - RNA, 20 nt, Artificial Sequence
  Synthetic
agagagagagagagagaaaa

SEQ ID NO: 778358 - RNA, 20 nt, Artificial Sequence
  Synthetic
ucaaaaagugagagagaaaa

SEQ ID NO: 778359 - RNA, 20 nt, Artificial Sequence
  Synthetic
uacgaggagacgagagaaaa

SEQ ID NO: 778360 - RNA, 20 nt, Artificial Sequence
  Synthetic
ccguauuacagaggagaaaa

SEQ ID NO: 778361 - RNA, 20 nt, Artificial Sequence
  Synthetic
agaacugcuuuaggagaaaa

SEQ ID NO: 778362 - RNA, 20 nt, Artificial Sequence
  Synthetic
cucugagguuggggagaaaa

SEQ ID NO: 778363 - RNA, 20 nt, Artificial Sequence
  Synthetic
uuugagagugugggagaaaa

SEQ ID NO: 778364 - RNA, 20 nt, Artificial Sequence
  Synthetic
uggcaagaauauggagaaaa

SEQ ID NO: 778365 - RNA, 20 nt, Artificial Sequence
  Synthetic
uagcaaggauguggagaaaa

SEQ ID NO: 778366 - RNA, 20 nt, Artificial Sequence
  Synthetic
uggagaggauguggagaaaa

SEQ ID NO: 778367 - RNA, 20 nt, Artificial Sequence
  Synthetic
auagacacaggaugagaaaa

SEQ ID NO: 778368 - RNA, 20 nt, Artificial Sequence
  Synthetic
acacaaaguaauugagaaaa

SEQ ID NO: 778369 - RNA, 20 nt, Artificial Sequence
  Synthetic
acauuucacauuugagaaaa

SEQ ID NO: 778370 - RNA, 20 nt, Artificial Sequence
  Synthetic
acauaccuaaacauagaaaa

SEQ ID NO: 778371 - RNA, 20 nt, Artificial Sequence
  Synthetic
caguauuuauagauagaaaa

SEQ ID NO: 778372 - RNA, 20 nt, Artificial Sequence
  Synthetic
augcaagcaaguauagaaaa

SEQ ID NO: 778373 - RNA, 20 nt, Artificial Sequence
  Synthetic
cacaagcuccuuauagaaaa

SEQ ID NO: 778374 - RNA, 20 nt, Artificial Sequence
  Synthetic
acuagacaguaacuagaaaa

SEQ ID NO: 778375 - RNA, 20 nt, Artificial Sequence
  Synthetic
uuaaaggauaaucuagaaaa

SEQ ID NO: 778376 - RNA, 20 nt, Artificial Sequence
  Synthetic
aaauuuucacaucuagaaaa

SEQ ID NO: 778377 - RNA, 20 nt, Artificial Sequence
  Synthetic
caaaauaugaaaguagaaaa

SEQ ID NO: 778378 - RNA, 20 nt, Artificial Sequence
  Synthetic
uagauuuuggaaguagaaaa

SEQ ID NO: 778379 - RNA, 20 nt, Artificial Sequence
  Synthetic
uagacaguugcaguagaaaa

SEQ ID NO: 778380 - RNA, 20 nt, Artificial Sequence
  Synthetic
acaagugaauuaguagaaaa

SEQ ID NO: 778381 - RNA, 20 nt, Artificial Sequence
  Synthetic
accuuuuauuguguagaaaa

SEQ ID NO: 778382 - RNA, 20 nt, Artificial Sequence
  Synthetic
uuuuccacuuguguagaaaa

SEQ ID NO: 778383 - RNA, 20 nt, Artificial Sequence
  Synthetic
ugaagcacuuaauuagaaaa

SEQ ID NO: 778384 - RNA, 20 nt, Artificial Sequence
  Synthetic
auucugucucuauuagaaaa

SEQ ID NO: 778385 - RNA, 20 nt, Artificial Sequence
  Synthetic
aacauagaaacuuuagaaaa

SEQ ID NO: 778386 - RNA, 20 nt, Artificial Sequence
  Synthetic
auaauuaaaaguuuagaaaa

SEQ ID NO: 778387 - RNA, 20 nt, Artificial Sequence
  Synthetic
caaaguuaaauuuuagaaaa

SEQ ID NO: 778388 - RNA, 20 nt, Artificial Sequence
  Synthetic
uaaaguauuauuuuagaaaa

SEQ ID NO: 778389 - RNA, 20 nt, Artificial Sequence
  Synthetic
uauugaguauuuuuagaaaa

SEQ ID NO: 778390 - RNA, 20 nt, Artificial Sequence
  Synthetic
cuuauuugugacaacgaaaa

SEQ ID NO: 778391 - RNA, 20 nt, Artificial Sequence
  Synthetic
uuugacuggcuuaucgaaaa

SEQ ID NO: 778392 - RNA, 20 nt, Artificial Sequence
  Synthetic
aaaaagggaagauucgaaaa

SEQ ID NO: 778393 - RNA, 20 nt, Artificial Sequence
  Synthetic
uuuaggguaaaaaaggaaaa

SEQ ID NO: 778394 - RNA, 20 nt, Artificial Sequence
  Synthetic
auaauacauaaaaaggaaaa

SEQ ID NO: 778395 - RNA, 20 nt, Artificial Sequence
  Synthetic
aacaaagguaaaaaggaaaa

SEQ ID NO: 778396 - RNA, 20 nt, Artificial Sequence
  Synthetic
ugugcagguucaaaggaaaa

SEQ ID NO: 778397 - RNA, 20 nt, Artificial Sequence
  Synthetic
accaaaaucauaaaggaaaa

SEQ ID NO: 778398 - RNA, 20 nt, Artificial Sequence
  Synthetic
aucaucaggguaaaggaaaa

SEQ ID NO: 778399 - RNA, 20 nt, Artificial Sequence
  Synthetic
ccucgccaagccaaggaaaa

SEQ ID NO: 778400 - RNA, 20 nt, Artificial Sequence
  Synthetic
cauuuauucaggaaggaaaa

SEQ ID NO: 778401 - RNA, 20 nt, Artificial Sequence
  Synthetic
aguccaucugggaaggaaaa

SEQ ID NO: 778402 - RNA, 20 nt, Artificial Sequence
  Synthetic
auagagcaaaauaaggaaaa

SEQ ID NO: 778403 - RNA, 20 nt, Artificial Sequence
  Synthetic
cagauaugggauaaggaaaa

SEQ ID NO: 778404 - RNA, 20 nt, Artificial Sequence
  Synthetic
aauacaacucaacaggaaaa

SEQ ID NO: 778405 - RNA, 20 nt, Artificial Sequence
  Synthetic
uuugcacuaacacaggaaaa

SEQ ID NO: 778406 - RNA, 20 nt, Artificial Sequence
  Synthetic
uaggagugaacccaggaaaa

SEQ ID NO: 778407 - RNA, 20 nt, Artificial Sequence
  Synthetic
auuuguugggaucaggaaaa

SEQ ID NO: 778408 - RNA, 20 nt, Artificial Sequence
  Synthetic
uagaagucuagucaggaaaa

SEQ ID NO: 778409 - RNA, 20 nt, Artificial Sequence
  Synthetic
aaaugaaugugucaggaaaa

SEQ ID NO: 778410 - RNA, 20 nt, Artificial Sequence
  Synthetic
aagaaaaaaaaagaggaaaa

SEQ ID NO: 778411 - RNA, 20 nt, Artificial Sequence
  Synthetic
auucacuuuaccgaggaaaa

SEQ ID NO: 778412 - RNA, 20 nt, Artificial Sequence
  Synthetic
aaaucuagcaguuaggaaaa

SEQ ID NO: 778413 - RNA, 20 nt, Artificial Sequence
  Synthetic
aaggguaucauuuaggaaaa

SEQ ID NO: 778414 - RNA, 20 nt, Artificial Sequence
  Synthetic
uaaaauggaagaagggaaaa

SEQ ID NO: 778415 - RNA, 20 nt, Artificial Sequence
  Synthetic
ucuguauuauuaagggaaaa

SEQ ID NO: 778416 - RNA, 20 nt, Artificial Sequence
  Synthetic
uagguauugauuggggaaaa

SEQ ID NO: 778417 - RNA, 20 nt, Artificial Sequence
  Synthetic
aacaagaauuuuggggaaaa

SEQ ID NO: 778418 - RNA, 20 nt, Artificial Sequence
  Synthetic
cuggagaaaagaugggaaaa

SEQ ID NO: 778419 - RNA, 20 nt, Artificial Sequence
  Synthetic
ugauggcauauuugggaaaa

SEQ ID NO: 778420 - RNA, 20 nt, Artificial Sequence
  Synthetic
cuguuuucuccaauggaaaa

SEQ ID NO: 778421 - RNA, 20 nt, Artificial Sequence
  Synthetic
auagccaaaagcauggaaaa

SEQ ID NO: 778422 - RNA, 20 nt, Artificial Sequence
  Synthetic
aaaaaaugaagcauggaaaa

SEQ ID NO: 778423 - RNA, 20 nt, Artificial Sequence
  Synthetic
caugcaaguaucauggaaaa

SEQ ID NO: 778424 - RNA, 20 nt, Artificial Sequence
  Synthetic
aauuucaugcucauggaaaa

SEQ ID NO: 778425 - RNA, 20 nt, Artificial Sequence
  Synthetic
ucaaauaguguacuggaaaa

SEQ ID NO: 778426 - RNA, 20 nt, Artificial Sequence
  Synthetic
caagcaaaaaaccuggaaaa

SEQ ID NO: 778427 - RNA, 20 nt, Artificial Sequence
  Synthetic
ccacucuugucccuggaaaa

SEQ ID NO: 778428 - RNA, 20 nt, Artificial Sequence
  Synthetic
cagcuucuuugccuggaaaa

SEQ ID NO: 778429 - RNA, 20 nt, Artificial Sequence
  Synthetic
agaucuucagaaguggaaaa

SEQ ID NO: 778430 - RNA, 20 nt, Artificial Sequence
  Synthetic
aauuuacccaaauuggaaaa

SEQ ID NO: 778431 - RNA, 20 nt, Artificial Sequence
  Synthetic
aagaagaauacauuggaaaa

SEQ ID NO: 778432 - RNA, 20 nt, Artificial Sequence
  Synthetic
cuuuagugaccauuggaaaa

SEQ ID NO: 778433 - RNA, 20 nt, Artificial Sequence
  Synthetic
aaaagcgaggucuuggaaaa

SEQ ID NO: 778434 - RNA, 20 nt, Artificial Sequence
  Synthetic
cuuuacaaauauuuggaaaa

SEQ ID NO: 778435 - RNA, 20 nt, Artificial Sequence
  Synthetic
cgaaggugauuuuuggaaaa

SEQ ID NO: 778436 - RNA, 20 nt, Artificial Sequence
  Synthetic
uuauucuucucaaaugaaaa

SEQ ID NO: 778437 - RNA, 20 nt, Artificial Sequence
  Synthetic
ucccacuggaagaaugaaaa

SEQ ID NO: 778438 - RNA, 20 nt, Artificial Sequence
  Synthetic
aacauaauuuugaaugaaaa

SEQ ID NO: 778439 - RNA, 20 nt, Artificial Sequence
  Synthetic
acugagucugcuaaugaaaa

SEQ ID NO: 778440 - RNA, 20 nt, Artificial Sequence
  Synthetic
caaagggaaaaacaugaaaa

SEQ ID NO: 778441 - RNA, 20 nt, Artificial Sequence
  Synthetic
aagaaucaauaacaugaaaa

SEQ ID NO: 778442 - RNA, 20 nt, Artificial Sequence
  Synthetic
acuuuauaaagacaugaaaa

SEQ ID NO: 778443 - RNA, 20 nt, Artificial Sequence
  Synthetic
uuuccuugguuccaugaaaa

SEQ ID NO: 778444 - RNA, 20 nt, Artificial Sequence
  Synthetic
ucuuuaucacagcaugaaaa

SEQ ID NO: 778445 - RNA, 20 nt, Artificial Sequence
  Synthetic
aucuaaauggaugaugaaaa

SEQ ID NO: 778446 - RNA, 20 nt, Artificial Sequence
  Synthetic
uguugugaaugugaugaaaa

SEQ ID NO: 778447 - RNA, 20 nt, Artificial Sequence
  Synthetic
uuccaaggagaauaugaaaa

SEQ ID NO: 778448 - RNA, 20 nt, Artificial Sequence
  Synthetic
aauuuucaucuauaugaaaa

SEQ ID NO: 778449 - RNA, 20 nt, Artificial Sequence
  Synthetic
aggagagaauuauaugaaaa

SEQ ID NO: 778450 - RNA, 20 nt, Artificial Sequence
  Synthetic
ucuuuauagcaguaugaaaa

SEQ ID NO: 778451 - RNA, 20 nt, Artificial Sequence
  Synthetic
ucuuucuagcgguaugaaaa

SEQ ID NO: 778452 - RNA, 20 nt, Artificial Sequence
  Synthetic
uggauaaaguaaacugaaaa

SEQ ID NO: 778453 - RNA, 20 nt, Artificial Sequence
  Synthetic
aguaaaaaugcaacugaaaa

SEQ ID NO: 778454 - RNA, 20 nt, Artificial Sequence
  Synthetic
ccuggguaacuaacugaaaa

SEQ ID NO: 778455 - RNA, 20 nt, Artificial Sequence
  Synthetic
agccuacacuucacugaaaa

SEQ ID NO: 778456 - RNA, 20 nt, Artificial Sequence
  Synthetic
uagcacggagagacugaaaa

SEQ ID NO: 778457 - RNA, 20 nt, Artificial Sequence
  Synthetic
ucauauucauuuacugaaaa

SEQ ID NO: 778458 - RNA, 20 nt, Artificial Sequence
  Synthetic
auuuauucauuuacugaaaa

SEQ ID NO: 778459 - RNA, 20 nt, Artificial Sequence
  Synthetic
uguaacagaauaccugaaaa

SEQ ID NO: 778460 - RNA, 20 nt, Artificial Sequence
  Synthetic
aaguauuucaguccugaaaa

SEQ ID NO: 778461 - RNA, 20 nt, Artificial Sequence
  Synthetic
ucuacaaacugggcugaaaa

SEQ ID NO: 778462 - RNA, 20 nt, Artificial Sequence
  Synthetic
auuauuagcugugcugaaaa

SEQ ID NO: 778463 - RNA, 20 nt, Artificial Sequence
  Synthetic
caaucaaaaauaucugaaaa

SEQ ID NO: 778464 - RNA, 20 nt, Artificial Sequence
  Synthetic
uaaaaugccuacucugaaaa

SEQ ID NO: 778465 - RNA, 20 nt, Artificial Sequence
  Synthetic
uaugaggugcugucugaaaa

SEQ ID NO: 778466 - RNA, 20 nt, Artificial Sequence
  Synthetic
aggguucauauaagugaaaa

SEQ ID NO: 778467 - RNA, 20 nt, Artificial Sequence
  Synthetic
aauguuuugaagagugaaaa

SEQ ID NO: 778468 - RNA, 20 nt, Artificial Sequence
  Synthetic
ugcauuccccagagugaaaa

SEQ ID NO: 778469 - RNA, 20 nt, Artificial Sequence
  Synthetic
aagaaucaguggagugaaaa

SEQ ID NO: 778470 - RNA, 20 nt, Artificial Sequence
  Synthetic
uacuaagcucugagugaaaa

SEQ ID NO: 778471 - RNA, 20 nt, Artificial Sequence
  Synthetic
uuucaggagacuagugaaaa

SEQ ID NO: 778472 - RNA, 20 nt, Artificial Sequence
  Synthetic
aagaaucaauaucgugaaaa

SEQ ID NO: 778473 - RNA, 20 nt, Artificial Sequence
  Synthetic
aauuugccaaaaggugaaaa

SEQ ID NO: 778474 - RNA, 20 nt, Artificial Sequence
  Synthetic
cuuugaaagauaggugaaaa

SEQ ID NO: 778475 - RNA, 20 nt, Artificial Sequence
  Synthetic
cuuuauccgcagugugaaaa

SEQ ID NO: 778476 - RNA, 20 nt, Artificial Sequence
  Synthetic
uaauaaacuaauugugaaaa

SEQ ID NO: 778477 - RNA, 20 nt, Artificial Sequence
  Synthetic
aagaaucaauauugugaaaa

SEQ ID NO: 778478 - RNA, 20 nt, Artificial Sequence
  Synthetic
cuuggggccuuuugugaaaa

SEQ ID NO: 778479 - RNA, 20 nt, Artificial Sequence
  Synthetic
auaaauauagcgauugaaaa

SEQ ID NO: 778480 - RNA, 20 nt, Artificial Sequence
  Synthetic
aaauauaguauuauugaaaa

SEQ ID NO: 778481 - RNA, 20 nt, Artificial Sequence
  Synthetic
cugcuaugauaaguugaaaa

SEQ ID NO: 778482 - RNA, 20 nt, Artificial Sequence
  Synthetic
aaguuuucauaauuugaaaa

SEQ ID NO: 778483 - RNA, 20 nt, Artificial Sequence
  Synthetic
ugggcagagacauuugaaaa

SEQ ID NO: 778484 - RNA, 20 nt, Artificial Sequence
  Synthetic
cugagugguaacuuugaaaa

SEQ ID NO: 778485 - RNA, 20 nt, Artificial Sequence
  Synthetic
aaaacuuuuaauuuugaaaa

SEQ ID NO: 778486 - RNA, 20 nt, Artificial Sequence
  Synthetic
ucauuaaauacuuuugaaaa

SEQ ID NO: 778487 - RNA, 20 nt, Artificial Sequence
  Synthetic
ccaaaguuugcuuuugaaaa

SEQ ID NO: 778488 - RNA, 20 nt, Artificial Sequence
  Synthetic
ugaaauccuaaaaaauaaaa

SEQ ID NO: 778489 - RNA, 20 nt, Artificial Sequence
  Synthetic
aaaauuucuguaaaauaaaa

SEQ ID NO: 778490 - RNA, 20 nt, Artificial Sequence
  Synthetic
auguacauuuuaaaauaaaa

SEQ ID NO: 778491 - RNA, 20 nt, Artificial Sequence
  Synthetic
ccauucguuuuaaaauaaaa

SEQ ID NO: 778492 - RNA, 20 nt, Artificial Sequence
  Synthetic
aauaaauaaaacaaauaaaa

SEQ ID NO: 778493 - RNA, 20 nt, Artificial Sequence
  Synthetic
ucauaaaaugacaaauaaaa

SEQ ID NO: 778494 - RNA, 20 nt, Artificial Sequence
  Synthetic
cuagggugccccaaauaaaa

SEQ ID NO: 778495 - RNA, 20 nt, Artificial Sequence
  Synthetic
aagguagggagcaaauaaaa

SEQ ID NO: 778496 - RNA, 20 nt, Artificial Sequence
  Synthetic
acuauguggggcaaauaaaa

SEQ ID NO: 778497 - RNA, 20 nt, Artificial Sequence
  Synthetic
aggaacucagucaaauaaaa

SEQ ID NO: 778498 - RNA, 20 nt, Artificial Sequence
  Synthetic
uccuucauggcgaaauaaaa

SEQ ID NO: 778499 - RNA, 20 nt, Artificial Sequence
  Synthetic
cagaaaucaaggaaauaaaa

SEQ ID NO: 778500 - RNA, 20 nt, Artificial Sequence
  Synthetic
auguuuaacuggaaauaaaa

SEQ ID NO: 778501 - RNA, 20 nt, Artificial Sequence
  Synthetic
aauuuaguuaugaaauaaaa

SEQ ID NO: 778502 - RNA, 20 nt, Artificial Sequence
  Synthetic
aaaaaauagacuaaauaaaa

SEQ ID NO: 778503 - RNA, 20 nt, Artificial Sequence
  Synthetic
aaaauaugauuuaaauaaaa

SEQ ID NO: 778504 - RNA, 20 nt, Artificial Sequence
  Synthetic
aaaucucgguaccaauaaaa

SEQ ID NO: 778505 - RNA, 20 nt, Artificial Sequence
  Synthetic
aauacuauucagcaauaaaa

SEQ ID NO: 778506 - RNA, 20 nt, Artificial Sequence
  Synthetic
accuauagcagucaauaaaa

SEQ ID NO: 778507 - RNA, 20 nt, Artificial Sequence
  Synthetic
acaaugggagaugaauaaaa

SEQ ID NO: 778508 - RNA, 20 nt, Artificial Sequence
  Synthetic
aauugagaaaaauaauaaaa

SEQ ID NO: 778509 - RNA, 20 nt, Artificial Sequence
  Synthetic
cugcuuaaugguuaauaaaa

SEQ ID NO: 778510 - RNA, 20 nt, Artificial Sequence
  Synthetic
auuaaugaaauuuaauaaaa

SEQ ID NO: 778511 - RNA, 20 nt, Artificial Sequence
  Synthetic
uauauuuaaauuuaauaaaa

SEQ ID NO: 778512 - RNA, 20 nt, Artificial Sequence
  Synthetic
aaagaaagaaaaacauaaaa

SEQ ID NO: 778513 - RNA, 20 nt, Artificial Sequence
  Synthetic
auuuucuucaauacauaaaa

SEQ ID NO: 778514 - RNA, 20 nt, Artificial Sequence
  Synthetic
aauacucugcagccauaaaa

SEQ ID NO: 778515 - RNA, 20 nt, Artificial Sequence
  Synthetic
aauacuacucagccauaaaa

SEQ ID NO: 778516 - RNA, 20 nt, Artificial Sequence
  Synthetic
ugguaucauuuuccauaaaa

SEQ ID NO: 778517 - RNA, 20 nt, Artificial Sequence
  Synthetic
aauauuauucagucauaaaa

SEQ ID NO: 778518 - RNA, 20 nt, Artificial Sequence
  Synthetic
agagcuuucaugucauaaaa

SEQ ID NO: 778519 - RNA, 20 nt, Artificial Sequence
  Synthetic
aacuaucuuuguucauaaaa

SEQ ID NO: 778520 - RNA, 20 nt, Artificial Sequence
  Synthetic
agaugguaggaaagauaaaa

SEQ ID NO: 778521 - RNA, 20 nt, Artificial Sequence
  Synthetic
ugguauugaacaagauaaaa

SEQ ID NO: 778522 - RNA, 20 nt, Artificial Sequence
  Synthetic
agagaaagcagaagauaaaa

SEQ ID NO: 778523 - RNA, 20 nt, Artificial Sequence
  Synthetic
agaauaagaagcagauaaaa

SEQ ID NO: 778524 - RNA, 20 nt, Artificial Sequence
  Synthetic
aauuucaugaucagauaaaa

SEQ ID NO: 778525 - RNA, 20 nt, Artificial Sequence
  Synthetic
uaguuacuuccuagauaaaa

SEQ ID NO: 778526 - RNA, 20 nt, Artificial Sequence
  Synthetic
cucaggucccuucgauaaaa

SEQ ID NO: 778527 - RNA, 20 nt, Artificial Sequence
  Synthetic
uguacccagacaggauaaaa

SEQ ID NO: 778528 - RNA, 20 nt, Artificial Sequence
  Synthetic
cauuguguguggggauaaaa

SEQ ID NO: 778529 - RNA, 20 nt, Artificial Sequence
  Synthetic
cacuccagccauggauaaaa

SEQ ID NO: 778530 - RNA, 20 nt, Artificial Sequence
  Synthetic
uuggccuuucccugauaaaa

SEQ ID NO: 778531 - RNA, 20 nt, Artificial Sequence
  Synthetic
auaauaaaaacuugauaaaa

SEQ ID NO: 778532 - RNA, 20 nt, Artificial Sequence
  Synthetic
aauacauguugaauauaaaa

SEQ ID NO: 778533 - RNA, 20 nt, Artificial Sequence
  Synthetic
cuuauagauuagauauaaaa

SEQ ID NO: 778534 - RNA, 20 nt, Artificial Sequence
  Synthetic
aguauuaguuauauauaaaa

SEQ ID NO: 778535 - RNA, 20 nt, Artificial Sequence
  Synthetic
uauauuuauucuauauaaaa

SEQ ID NO: 778536 - RNA, 20 nt, Artificial Sequence
  Synthetic
cucaaauuauuuauauaaaa

SEQ ID NO: 778537 - RNA, 20 nt, Artificial Sequence
  Synthetic
aaguuuaucuagcuauaaaa

SEQ ID NO: 778538 - RNA, 20 nt, Artificial Sequence
  Synthetic
ucccuuugaaaucuauaaaa

SEQ ID NO: 778539 - RNA, 20 nt, Artificial Sequence
  Synthetic
ugguuaucucaucuauaaaa

SEQ ID NO: 778540 - RNA, 20 nt, Artificial Sequence
  Synthetic
auggcaugaucucuauaaaa

SEQ ID NO: 778541 - RNA, 20 nt, Artificial Sequence
  Synthetic
cuguuuucucgucuauaaaa

SEQ ID NO: 778542 - RNA, 20 nt, Artificial Sequence
  Synthetic
cauuuuccuugucuauaaaa

SEQ ID NO: 778543 - RNA, 20 nt, Artificial Sequence
  Synthetic
auauccaagccaguauaaaa

SEQ ID NO: 778544 - RNA, 20 nt, Artificial Sequence
  Synthetic
auacacaguucaguauaaaa

SEQ ID NO: 778545 - RNA, 20 nt, Artificial Sequence
  Synthetic
uuuccucccguauuauaaaa

SEQ ID NO: 778546 - RNA, 20 nt, Artificial Sequence
  Synthetic
acaaacuuaaacuuauaaaa

SEQ ID NO: 778547 - RNA, 20 nt, Artificial Sequence
  Synthetic
auuacaugaguguuauaaaa

SEQ ID NO: 778548 - RNA, 20 nt, Artificial Sequence
  Synthetic
agcuacugcaaaaacuaaaa

SEQ ID NO: 778549 - RNA, 20 nt, Artificial Sequence
  Synthetic
uauuaaaaaacgaacuaaaa

SEQ ID NO: 778550 - RNA, 20 nt, Artificial Sequence
  Synthetic
aaugcagaaaaugacuaaaa

SEQ ID NO: 778551 - RNA, 20 nt, Artificial Sequence
  Synthetic
cucaaauuauuuuacuaaaa

SEQ ID NO: 778552 - RNA, 20 nt, Artificial Sequence
  Synthetic
caaugacagcacaccuaaaa

SEQ ID NO: 778553 - RNA, 20 nt, Artificial Sequence
  Synthetic
uuuccaauuucccccuaaaa

SEQ ID NO: 778554 - RNA, 20 nt, Artificial Sequence
  Synthetic
uuaagugauaaucccuaaaa

SEQ ID NO: 778555 - RNA, 20 nt, Artificial Sequence
  Synthetic
ucauuguaagaagccuaaaa

SEQ ID NO: 778556 - RNA, 20 nt, Artificial Sequence
  Synthetic
ugaggaugguaagccuaaaa

SEQ ID NO: 778557 - RNA, 20 nt, Artificial Sequence
  Synthetic
uauucacacauagccuaaaa

SEQ ID NO: 778558 - RNA, 20 nt, Artificial Sequence
  Synthetic
auccuuaugauagccuaaaa

SEQ ID NO: 778559 - RNA, 20 nt, Artificial Sequence
  Synthetic
accuagaaaaucagcuaaaa

SEQ ID NO: 778560 - RNA, 20 nt, Artificial Sequence
  Synthetic
auauuuccaaauagcuaaaa

SEQ ID NO: 778561 - RNA, 20 nt, Artificial Sequence
  Synthetic
uacacagaagagggcuaaaa

SEQ ID NO: 778562 - RNA, 20 nt, Artificial Sequence
  Synthetic
acaaauucauauggcuaaaa

SEQ ID NO: 778563 - RNA, 20 nt, Artificial Sequence
  Synthetic
auagccaaugcuggcuaaaa

SEQ ID NO: 778564 - RNA, 20 nt, Artificial Sequence
  Synthetic
uuaaaauagaaaugcuaaaa

SEQ ID NO: 778565 - RNA, 20 nt, Artificial Sequence
  Synthetic
caauuuuaccauugcuaaaa

SEQ ID NO: 778566 - RNA, 20 nt, Artificial Sequence
  Synthetic
cagagacuguauugcuaaaa

SEQ ID NO: 778567 - RNA, 20 nt, Artificial Sequence
  Synthetic
ucaaaauauaugaucuaaaa

SEQ ID NO: 778568 - RNA, 20 nt, Artificial Sequence
  Synthetic
acguagucucugcucuaaaa

SEQ ID NO: 778569 - RNA, 20 nt, Artificial Sequence
  Synthetic
ucgguuuucugucucuaaaa

SEQ ID NO: 778570 - RNA, 20 nt, Artificial Sequence
  Synthetic
cugauuucucuucucuaaaa

SEQ ID NO: 778571 - RNA, 20 nt, Artificial Sequence
  Synthetic
uauagaguauaagucuaaaa

SEQ ID NO: 778572 - RNA, 20 nt, Artificial Sequence
  Synthetic
uagcgugucauagucuaaaa

SEQ ID NO: 778573 - RNA, 20 nt, Artificial Sequence
  Synthetic
uuacccaauauggucuaaaa

SEQ ID NO: 778574 - RNA, 20 nt, Artificial Sequence
  Synthetic
acucaaacugucuucuaaaa

SEQ ID NO: 778575 - RNA, 20 nt, Artificial Sequence
  Synthetic
aaaccucaauaguucuaaaa

SEQ ID NO: 778576 - RNA, 20 nt, Artificial Sequence
  Synthetic
acuaaauguugguucuaaaa

SEQ ID NO: 778577 - RNA, 20 nt, Artificial Sequence
  Synthetic
uguuuuuagccuuucuaaaa

SEQ ID NO: 778578 - RNA, 20 nt, Artificial Sequence
  Synthetic
agccuuuuaucuuucuaaaa

SEQ ID NO: 778579 - RNA, 20 nt, Artificial Sequence
  Synthetic
ccugaaagggagaaguaaaa

SEQ ID NO: 778580 - RNA, 20 nt, Artificial Sequence
  Synthetic
uccuccaaauggaaguaaaa

SEQ ID NO: 778581 - RNA, 20 nt, Artificial Sequence
  Synthetic
cuuaaaaaguauaaguaaaa

SEQ ID NO: 778582 - RNA, 20 nt, Artificial Sequence
  Synthetic
uguguccuaucccaguaaaa

SEQ ID NO: 778583 - RNA, 20 nt, Artificial Sequence
  Synthetic
aagagaaaaauccaguaaaa

SEQ ID NO: 778584 - RNA, 20 nt, Artificial Sequence
  Synthetic
cuccccaagaaucaguaaaa

SEQ ID NO: 778585 - RNA, 20 nt, Artificial Sequence
  Synthetic
ugggcaacuucagaguaaaa

SEQ ID NO: 778586 - RNA, 20 nt, Artificial Sequence
  Synthetic
ugauaguaacaauaguaaaa

SEQ ID NO: 778587 - RNA, 20 nt, Artificial Sequence
  Synthetic
auuaguguuucauaguaaaa

SEQ ID NO: 778588 - RNA, 20 nt, Artificial Sequence
  Synthetic
cgaugguaagucuaguaaaa

SEQ ID NO: 778589 - RNA, 20 nt, Artificial Sequence
  Synthetic
aaacaauuucauuaguaaaa

SEQ ID NO: 778590 - RNA, 20 nt, Artificial Sequence
  Synthetic
ucugaguaauuaucguaaaa

SEQ ID NO: 778591 - RNA, 20 nt, Artificial Sequence
  Synthetic
uaaccaaucaaaagguaaaa

SEQ ID NO: 778592 - RNA, 20 nt, Artificial Sequence
  Synthetic
uccaaguugauuagguaaaa

SEQ ID NO: 778593 - RNA, 20 nt, Artificial Sequence
  Synthetic
ucaccaaauugucgguaaaa

SEQ ID NO: 778594 - RNA, 20 nt, Artificial Sequence
  Synthetic
uuagaagcuuaaggguaaaa

SEQ ID NO: 778595 - RNA, 20 nt, Artificial Sequence
  Synthetic
uuuacuauauagggguaaaa

SEQ ID NO: 778596 - RNA, 20 nt, Artificial Sequence
  Synthetic
ccuggaguuaaaugguaaaa

SEQ ID NO: 778597 - RNA, 20 nt, Artificial Sequence
  Synthetic
auaucugaacaaugguaaaa

SEQ ID NO: 778598 - RNA, 20 nt, Artificial Sequence
  Synthetic
uguucaguugcaugguaaaa

SEQ ID NO: 778599 - RNA, 20 nt, Artificial Sequence
  Synthetic
uggugaaauaaaauguaaaa

SEQ ID NO: 778600 - RNA, 20 nt, Artificial Sequence
  Synthetic
uuauuuuaagaaauguaaaa

SEQ ID NO: 778601 - RNA, 20 nt, Artificial Sequence
  Synthetic
uuacugguggaaauguaaaa

SEQ ID NO: 778602 - RNA, 20 nt, Artificial Sequence
  Synthetic
uugcugguggaaauguaaaa

SEQ ID NO: 778603 - RNA, 20 nt, Artificial Sequence
  Synthetic
aaaaugagucccauguaaaa

SEQ ID NO: 778604 - RNA, 20 nt, Artificial Sequence
  Synthetic
aguaagcacaucauguaaaa

SEQ ID NO: 778605 - RNA, 20 nt, Artificial Sequence
  Synthetic
auagaaauaaggauguaaaa

SEQ ID NO: 778606 - RNA, 20 nt, Artificial Sequence
  Synthetic
aguccuuuugggauguaaaa

SEQ ID NO: 778607 - RNA, 20 nt, Artificial Sequence
  Synthetic
cuauuucgucaacuguaaaa

SEQ ID NO: 778608 - RNA, 20 nt, Artificial Sequence
  Synthetic
uugugcccucgccuguaaaa

SEQ ID NO: 778609 - RNA, 20 nt, Artificial Sequence
  Synthetic
uuaauuucucagcuguaaaa

SEQ ID NO: 778610 - RNA, 20 nt, Artificial Sequence
  Synthetic
ugguugucucaucuguaaaa

SEQ ID NO: 778611 - RNA, 20 nt, Artificial Sequence
  Synthetic
acaaauaaguuucuguaaaa

SEQ ID NO: 778612 - RNA, 20 nt, Artificial Sequence
  Synthetic
cuuggaaagccauuguaaaa

SEQ ID NO: 778613 - RNA, 20 nt, Artificial Sequence
  Synthetic
uaaugugguaauuuguaaaa

SEQ ID NO: 778614 - RNA, 20 nt, Artificial Sequence
  Synthetic
aucauagcaucuuuguaaaa

SEQ ID NO: 778615 - RNA, 20 nt, Artificial Sequence
  Synthetic
uuuuaccuaaaaaauuaaaa

SEQ ID NO: 778616 - RNA, 20 nt, Artificial Sequence
  Synthetic
uuagggaacaaaaauuaaaa

SEQ ID NO: 778617 - RNA, 20 nt, Artificial Sequence
  Synthetic
auuucuaugacaaauuaaaa

SEQ ID NO: 778618 - RNA, 20 nt, Artificial Sequence
  Synthetic
ucuucucucccaaauuaaaa

SEQ ID NO: 778619 - RNA, 20 nt, Artificial Sequence
  Synthetic
uuuucuagauuaaauuaaaa

SEQ ID NO: 778620 - RNA, 20 nt, Artificial Sequence
  Synthetic
uaugaaagucacaauuaaaa

SEQ ID NO: 778621 - RNA, 20 nt, Artificial Sequence
  Synthetic
agacaaauacucaauuaaaa

SEQ ID NO: 778622 - RNA, 20 nt, Artificial Sequence
  Synthetic
aaagaaccacagaauuaaaa

SEQ ID NO: 778623 - RNA, 20 nt, Artificial Sequence
  Synthetic
aggccacaaaugaauuaaaa

SEQ ID NO: 778624 - RNA, 20 nt, Artificial Sequence
  Synthetic
cagaauuugcuuaauuaaaa

SEQ ID NO: 778625 - RNA, 20 nt, Artificial Sequence
  Synthetic
aaaguagccauacauuaaaa

SEQ ID NO: 778626 - RNA, 20 nt, Artificial Sequence
  Synthetic
aagaaucaauaucauuaaaa

SEQ ID NO: 778627 - RNA, 20 nt, Artificial Sequence
  Synthetic
aaagaugcuggggauuaaaa

SEQ ID NO: 778628 - RNA, 20 nt, Artificial Sequence
  Synthetic
aacaaauaaucugauuaaaa

SEQ ID NO: 778629 - RNA, 20 nt, Artificial Sequence
  Synthetic
acuuaugaaugugauuaaaa

SEQ ID NO: 778630 - RNA, 20 nt, Artificial Sequence
  Synthetic
auaauauccuaauauuaaaa

SEQ ID NO: 778631 - RNA, 20 nt, Artificial Sequence
  Synthetic
ucgauguuuuaauauuaaaa

SEQ ID NO: 778632 - RNA, 20 nt, Artificial Sequence
  Synthetic
acuucucagcuauauuaaaa

SEQ ID NO: 778633 - RNA, 20 nt, Artificial Sequence
  Synthetic
caguuuuggagguauuaaaa

SEQ ID NO: 778634 - RNA, 20 nt, Artificial Sequence
  Synthetic
aaacaaacaaggacuuaaaa

SEQ ID NO: 778635 - RNA, 20 nt, Artificial Sequence
  Synthetic
uaucaaagaucuacuuaaaa

SEQ ID NO: 778636 - RNA, 20 nt, Artificial Sequence
  Synthetic
auguugaaggaaccuuaaaa

SEQ ID NO: 778637 - RNA, 20 nt, Artificial Sequence
  Synthetic
uuguuuugaaucccuuaaaa

SEQ ID NO: 778638 - RNA, 20 nt, Artificial Sequence
  Synthetic
cauuaauuuuagccuuaaaa

SEQ ID NO: 778639 - RNA, 20 nt, Artificial Sequence
  Synthetic
aauauuauuuggccuuaaaa

SEQ ID NO: 778640 - RNA, 20 nt, Artificial Sequence
  Synthetic
aauccucucaguccuuaaaa

SEQ ID NO: 778641 - RNA, 20 nt, Artificial Sequence
  Synthetic
auaugacucuguccuuaaaa

SEQ ID NO: 778642 - RNA, 20 nt, Artificial Sequence
  Synthetic
aagaucuagaaaucuuaaaa

SEQ ID NO: 778643 - RNA, 20 nt, Artificial Sequence
  Synthetic
auauuaaacucaucuuaaaa

SEQ ID NO: 778644 - RNA, 20 nt, Artificial Sequence
  Synthetic
cccgccucauccucuuaaaa

SEQ ID NO: 778645 - RNA, 20 nt, Artificial Sequence
  Synthetic
acaguguuucauucuuaaaa

SEQ ID NO: 778646 - RNA, 20 nt, Artificial Sequence
  Synthetic
uaaggaaugauuucuuaaaa

SEQ ID NO: 778647 - RNA, 20 nt, Artificial Sequence
  Synthetic
uguuauguagcaaguuaaaa

SEQ ID NO: 778648 - RNA, 20 nt, Artificial Sequence
  Synthetic
uuaccucacucccguuaaaa

SEQ ID NO: 778649 - RNA, 20 nt, Artificial Sequence
  Synthetic
aagugaauggcagguuaaaa

SEQ ID NO: 778650 - RNA, 20 nt, Artificial Sequence
  Synthetic
agaagaaggucagguuaaaa

SEQ ID NO: 778651 - RNA, 20 nt, Artificial Sequence
  Synthetic
uuuuuaaaaagauguuaaaa

SEQ ID NO: 778652 - RNA, 20 nt, Artificial Sequence
  Synthetic
uuuccuuuuaaaauuuaaaa

SEQ ID NO: 778653 - RNA, 20 nt, Artificial Sequence
  Synthetic
uguaagacugcaauuuaaaa

SEQ ID NO: 778654 - RNA, 20 nt, Artificial Sequence
  Synthetic
aaauagcucuuaauuuaaaa

SEQ ID NO: 778655 - RNA, 20 nt, Artificial Sequence
  Synthetic
aggagugacuucauuuaaaa

SEQ ID NO: 778656 - RNA, 20 nt, Artificial Sequence
  Synthetic
auuucaaagaagauuuaaaa

SEQ ID NO: 778657 - RNA, 20 nt, Artificial Sequence
  Synthetic
auaaauaccuauauuuaaaa

SEQ ID NO: 778658 - RNA, 20 nt, Artificial Sequence
  Synthetic
ucaaacuguacacuuuaaaa

SEQ ID NO: 778659 - RNA, 20 nt, Artificial Sequence
  Synthetic
uacauaaagagacuuuaaaa

SEQ ID NO: 778660 - RNA, 20 nt, Artificial Sequence
  Synthetic
uaugugcagggacuuuaaaa

SEQ ID NO: 778661 - RNA, 20 nt, Artificial Sequence
  Synthetic
acuaugucuguacuuuaaaa

SEQ ID NO: 778662 - RNA, 20 nt, Artificial Sequence
  Synthetic
aguuccucaaaccuuuaaaa

SEQ ID NO: 778663 - RNA, 20 nt, Artificial Sequence
  Synthetic
uccaugaagucccuuuaaaa

SEQ ID NO: 778664 - RNA, 20 nt, Artificial Sequence
  Synthetic
uuggggguucuccuuuaaaa

SEQ ID NO: 778665 - RNA, 20 nt, Artificial Sequence
  Synthetic
aaaauccacaugcuuuaaaa

SEQ ID NO: 778666 - RNA, 20 nt, Artificial Sequence
  Synthetic
aacaguauucugcuuuaaaa

SEQ ID NO: 778667 - RNA, 20 nt, Artificial Sequence
  Synthetic
uauggacucaaaguuuaaaa

SEQ ID NO: 778668 - RNA, 20 nt, Artificial Sequence
  Synthetic
ucuugggauaggguuuaaaa

SEQ ID NO: 778669 - RNA, 20 nt, Artificial Sequence
  Synthetic
auuggaaauuauguuuaaaa

SEQ ID NO: 778670 - RNA, 20 nt, Artificial Sequence
  Synthetic
ucuuccaaagguguuuaaaa

SEQ ID NO: 778671 - RNA, 20 nt, Artificial Sequence
  Synthetic
cauaaaauuguuguuuaaaa

SEQ ID NO: 778672 - RNA, 20 nt, Artificial Sequence
  Synthetic
ucaguuccguaauuuuaaaa

SEQ ID NO: 778673 - RNA, 20 nt, Artificial Sequence
  Synthetic
agguuuaaaacauuuuaaaa

SEQ ID NO: 778674 - RNA, 20 nt, Artificial Sequence
  Synthetic
uaaauauugacauuuuaaaa

SEQ ID NO: 778675 - RNA, 20 nt, Artificial Sequence
  Synthetic
aaggaaaauacauuuuaaaa

SEQ ID NO: 778676 - RNA, 20 nt, Artificial Sequence
  Synthetic
caauuaaccugauuuuaaaa

SEQ ID NO: 778677 - RNA, 20 nt, Artificial Sequence
  Synthetic
acauaguaacuauuuuaaaa

SEQ ID NO: 778678 - RNA, 20 nt, Artificial Sequence
  Synthetic
uagacuaaucuauuuuaaaa

SEQ ID NO: 778679 - RNA, 20 nt, Artificial Sequence
  Synthetic
uggauucuaguauuuuaaaa

SEQ ID NO: 778680 - RNA, 20 nt, Artificial Sequence
  Synthetic
aaaauuugauuauuuuaaaa

SEQ ID NO: 778681 - RNA, 20 nt, Artificial Sequence
  Synthetic
aaccacauuuuauuuuaaaa

SEQ ID NO: 778682 - RNA, 20 nt, Artificial Sequence
  Synthetic
accaguauuuuauuuuaaaa

SEQ ID NO: 778683 - RNA, 20 nt, Artificial Sequence
  Synthetic
acuaaaacagucuuuuaaaa

SEQ ID NO: 778684 - RNA, 20 nt, Artificial Sequence
  Synthetic
cagccagcuacguuuuaaaa

SEQ ID NO: 778685 - RNA, 20 nt, Artificial Sequence
  Synthetic
uagaaugauauguuuuaaaa

SEQ ID NO: 778686 - RNA, 20 nt, Artificial Sequence
  Synthetic
ugucauguuauguuuuaaaa

SEQ ID NO: 778687 - RNA, 20 nt, Artificial Sequence
  Synthetic
ugaaugaaaaaaaaaacaaa

SEQ ID NO: 778688 - RNA, 20 nt, Artificial Sequence
  Synthetic
ccucagccucccaaaacaaa

SEQ ID NO: 778689 - RNA, 20 nt, Artificial Sequence
  Synthetic
uaauaauaacagaaaacaaa

SEQ ID NO: 778690 - RNA, 20 nt, Artificial Sequence
  Synthetic
auaagaacuuggaaaacaaa

SEQ ID NO: 778691 - RNA, 20 nt, Artificial Sequence
  Synthetic
agcauggagcuuaaaacaaa

SEQ ID NO: 778692 - RNA, 20 nt, Artificial Sequence
  Synthetic
ccauagauaacacaaacaaa

SEQ ID NO: 778693 - RNA, 20 nt, Artificial Sequence
  Synthetic
uaaaagaggacacaaacaaa

SEQ ID NO: 778694 - RNA, 20 nt, Artificial Sequence
  Synthetic
uugucaaagucacaaacaaa

SEQ ID NO: 778695 - RNA, 20 nt, Artificial Sequence
  Synthetic
cuucaaagaugacaaacaaa

SEQ ID NO: 778696 - RNA, 20 nt, Artificial Sequence
  Synthetic
uaaaagaggauacaaacaaa

SEQ ID NO: 778697 - RNA, 20 nt, Artificial Sequence
  Synthetic
uaagagaggacccaaacaaa

SEQ ID NO: 778698 - RNA, 20 nt, Artificial Sequence
  Synthetic
uacgaaaggacgcaaacaaa

SEQ ID NO: 778699 - RNA, 20 nt, Artificial Sequence
  Synthetic
ucugacaauauucaaacaaa

SEQ ID NO: 778700 - RNA, 20 nt, Artificial Sequence
  Synthetic
aaaagcauugcagaaacaaa

SEQ ID NO: 778701 - RNA, 20 nt, Artificial Sequence
  Synthetic
aauaauaacguagaaacaaa

SEQ ID NO: 778702 - RNA, 20 nt, Artificial Sequence
  Synthetic
auagcugccucggaaacaaa

SEQ ID NO: 778703 - RNA, 20 nt, Artificial Sequence
  Synthetic
caauccuguuuugaaacaaa

SEQ ID NO: 778704 - RNA, 20 nt, Artificial Sequence
  Synthetic
aaagaaaagaaauaaacaaa

SEQ ID NO: 778705 - RNA, 20 nt, Artificial Sequence
  Synthetic
uuuagaaaauaauaaacaaa

SEQ ID NO: 778706 - RNA, 20 nt, Artificial Sequence
  Synthetic
uccacgcugucauaaacaaa

SEQ ID NO: 778707 - RNA, 20 nt, Artificial Sequence
  Synthetic
uguucccauuccuaaacaaa

SEQ ID NO: 778708 - RNA, 20 nt, Artificial Sequence
  Synthetic
aaucaaaaacaguaaacaaa

SEQ ID NO: 778709 - RNA, 20 nt, Artificial Sequence
  Synthetic
uuuuauucuuuuuaaacaaa

SEQ ID NO: 778710 - RNA, 20 nt, Artificial Sequence
  Synthetic
aauguaaauuccacaacaaa

SEQ ID NO: 778711 - RNA, 20 nt, Artificial Sequence
  Synthetic
aauguugaaaugacaacaaa

SEQ ID NO: 778712 - RNA, 20 nt, Artificial Sequence
  Synthetic
cuuagucaguuuccaacaaa

SEQ ID NO: 778713 - RNA, 20 nt, Artificial Sequence
  Synthetic
agaugacugccagcaacaaa

SEQ ID NO: 778714 - RNA, 20 nt, Artificial Sequence
  Synthetic
ugguguugaagagcaacaaa

SEQ ID NO: 778715 - RNA, 20 nt, Artificial Sequence
  Synthetic
auacauaagaaaucaacaaa

SEQ ID NO: 778716 - RNA, 20 nt, Artificial Sequence
  Synthetic
aaagcaaggugaucaacaaa

SEQ ID NO: 778717 - RNA, 20 nt, Artificial Sequence
  Synthetic
uuuuaacaaauaucaacaaa

SEQ ID NO: 778718 - RNA, 20 nt, Artificial Sequence
  Synthetic
aguucuguucauucaacaaa

SEQ ID NO: 778719 - RNA, 20 nt, Artificial Sequence
  Synthetic
aagacagucucuucaacaaa

SEQ ID NO: 778720 - RNA, 20 nt, Artificial Sequence
  Synthetic
aagcucaccuuuucaacaaa

SEQ ID NO: 778721 - RNA, 20 nt, Artificial Sequence
  Synthetic
uauccuaugcaaagaacaaa

SEQ ID NO: 778722 - RNA, 20 nt, Artificial Sequence
  Synthetic
auuugccacuuaagaacaaa

SEQ ID NO: 778723 - RNA, 20 nt, Artificial Sequence
  Synthetic
aagcuuuaggggagaacaaa

SEQ ID NO: 778724 - RNA, 20 nt, Artificial Sequence
  Synthetic
uuuaaaauuaugagaacaaa

SEQ ID NO: 778725 - RNA, 20 nt, Artificial Sequence
  Synthetic
aaauuacacccuagaacaaa

SEQ ID NO: 778726 - RNA, 20 nt, Artificial Sequence
  Synthetic
caggaauggaguagaacaaa

SEQ ID NO: 778727 - RNA, 20 nt, Artificial Sequence
  Synthetic
auuuccagcauuagaacaaa

SEQ ID NO: 778728 - RNA, 20 nt, Artificial Sequence
  Synthetic
uaguuccguggaggaacaaa

SEQ ID NO: 778729 - RNA, 20 nt, Artificial Sequence
  Synthetic
ucucucagaugaggaacaaa

SEQ ID NO: 778730 - RNA, 20 nt, Artificial Sequence
  Synthetic
agcaauaacgaaugaacaaa

SEQ ID NO: 778731 - RNA, 20 nt, Artificial Sequence
  Synthetic
uaucaagcugaaugaacaaa

SEQ ID NO: 778732 - RNA, 20 nt, Artificial Sequence
  Synthetic
ugagagcacaccugaacaaa

SEQ ID NO: 778733 - RNA, 20 nt, Artificial Sequence
  Synthetic
aauaaaaaucaaauaacaaa

SEQ ID NO: 778734 - RNA, 20 nt, Artificial Sequence
  Synthetic
aaaugaguggaaauaacaaa

SEQ ID NO: 778735 - RNA, 20 nt, Artificial Sequence
  Synthetic
cggaagugaacacuaacaaa

SEQ ID NO: 778736 - RNA, 20 nt, Artificial Sequence
  Synthetic
aguaaggaugaucuaacaaa

SEQ ID NO: 778737 - RNA, 20 nt, Artificial Sequence
  Synthetic
cuucuuaaaacaguaacaaa

SEQ ID NO: 778738 - RNA, 20 nt, Artificial Sequence
  Synthetic
accacuguauggguaacaaa

SEQ ID NO: 778739 - RNA, 20 nt, Artificial Sequence
  Synthetic
agggacuagguuguaacaaa

SEQ ID NO: 778740 - RNA, 20 nt, Artificial Sequence
  Synthetic
uauggauggaacuuaacaaa

SEQ ID NO: 778741 - RNA, 20 nt, Artificial Sequence
  Synthetic
uguggcaaaauguuaacaaa

SEQ ID NO: 778742 - RNA, 20 nt, Artificial Sequence
  Synthetic
uucuucccugacaacacaaa

SEQ ID NO: 778743 - RNA, 20 nt, Artificial Sequence
  Synthetic
uguugauagacagacacaaa

SEQ ID NO: 778744 - RNA, 20 nt, Artificial Sequence
  Synthetic
acauaugagaaugacacaaa

SEQ ID NO: 778745 - RNA, 20 nt, Artificial Sequence
  Synthetic
ccccuaagugcauacacaaa

SEQ ID NO: 778746 - RNA, 20 nt, Artificial Sequence
  Synthetic
acgugguacauauacacaaa

SEQ ID NO: 778747 - RNA, 20 nt, Artificial Sequence
  Synthetic
uguuacaagcacuacacaaa

SEQ ID NO: 778748 - RNA, 20 nt, Artificial Sequence
  Synthetic
uuuuuccaaaccuacacaaa

SEQ ID NO: 778749 - RNA, 20 nt, Artificial Sequence
  Synthetic
cucaagaugcucuacacaaa

SEQ ID NO: 778750 - RNA, 20 nt, Artificial Sequence
  Synthetic
cauacaagcaaacccacaaa

SEQ ID NO: 778751 - RNA, 20 nt, Artificial Sequence
  Synthetic
aaggcuggguuacccacaaa

SEQ ID NO: 778752 - RNA, 20 nt, Artificial Sequence
  Synthetic
ucuuucugccagcccacaaa

SEQ ID NO: 778753 - RNA, 20 nt, Artificial Sequence
  Synthetic
uuugcaguauuucccacaaa

SEQ ID NO: 778754 - RNA, 20 nt, Artificial Sequence
  Synthetic
ccuguugcgaguuccacaaa

SEQ ID NO: 778755 - RNA, 20 nt, Artificial Sequence
  Synthetic
uuuauuacaaagagcacaaa

SEQ ID NO: 778756 - RNA, 20 nt, Artificial Sequence
  Synthetic
uuuucuucauguagcacaaa

SEQ ID NO: 778757 - RNA, 20 nt, Artificial Sequence
  Synthetic
uugugggaaaacugcacaaa

SEQ ID NO: 778758 - RNA, 20 nt, Artificial Sequence
  Synthetic
uaaaauuuaaucugcacaaa

SEQ ID NO: 778759 - RNA, 20 nt, Artificial Sequence
  Synthetic
aguagaaaauucugcacaaa

SEQ ID NO: 778760 - RNA, 20 nt, Artificial Sequence
  Synthetic
caagccaugcagugcacaaa

SEQ ID NO: 778761 - RNA, 20 nt, Artificial Sequence
  Synthetic
ugcugacaugacaucacaaa

SEQ ID NO: 778762 - RNA, 20 nt, Artificial Sequence
  Synthetic
aguagagaccagaucacaaa

SEQ ID NO: 778763 - RNA, 20 nt, Artificial Sequence
  Synthetic
ugaaaacauaugcucacaaa

SEQ ID NO: 778764 - RNA, 20 nt, Artificial Sequence
  Synthetic
uaucuugccauuuucacaaa

SEQ ID NO: 778765 - RNA, 20 nt, Artificial Sequence
  Synthetic
cagaauaugucaaagacaaa

SEQ ID NO: 778766 - RNA, 20 nt, Artificial Sequence
  Synthetic
ugaaauuauugaaagacaaa

SEQ ID NO: 778767 - RNA, 20 nt, Artificial Sequence
  Synthetic
agagaggauaacaagacaaa

SEQ ID NO: 778768 - RNA, 20 nt, Artificial Sequence
  Synthetic
acuucucaaaagaagacaaa

SEQ ID NO: 778769 - RNA, 20 nt, Artificial Sequence
  Synthetic
cuguguggagcuaagacaaa

SEQ ID NO: 778770 - RNA, 20 nt, Artificial Sequence
  Synthetic
aaauaccuacuccagacaaa

SEQ ID NO: 778771 - RNA, 20 nt, Artificial Sequence
  Synthetic
auauagcagaaagagacaaa

SEQ ID NO: 778772 - RNA, 20 nt, Artificial Sequence
  Synthetic
aguguaguuggggagacaaa

SEQ ID NO: 778773 - RNA, 20 nt, Artificial Sequence
  Synthetic
uggaaggaaacugagacaaa

SEQ ID NO: 778774 - RNA, 20 nt, Artificial Sequence
  Synthetic
caaaagcaaaaauagacaaa

SEQ ID NO: 778775 - RNA, 20 nt, Artificial Sequence
  Synthetic
aaauaauugcuguagacaaa

SEQ ID NO: 778776 - RNA, 20 nt, Artificial Sequence
  Synthetic
caccagugccagacgacaaa

SEQ ID NO: 778777 - RNA, 20 nt, Artificial Sequence
  Synthetic
uugagauccagaaggacaaa

SEQ ID NO: 778778 - RNA, 20 nt, Artificial Sequence
  Synthetic
auucuuuaaagcaggacaaa

SEQ ID NO: 778779 - RNA, 20 nt, Artificial Sequence
  Synthetic
uggaucuggccuaggacaaa

SEQ ID NO: 778780 - RNA, 20 nt, Artificial Sequence
  Synthetic
caaaagccaaaacggacaaa

SEQ ID NO: 778781 - RNA, 20 nt, Artificial Sequence
  Synthetic
uaauguuuuugggggacaaa

SEQ ID NO: 778782 - RNA, 20 nt, Artificial Sequence
  Synthetic
uucucauacagauggacaaa

SEQ ID NO: 778783 - RNA, 20 nt, Artificial Sequence
  Synthetic
aaagguuguaaaaugacaaa

SEQ ID NO: 778784 - RNA, 20 nt, Artificial Sequence
  Synthetic
uguguguguugaaugacaaa

SEQ ID NO: 778785 - RNA, 20 nt, Artificial Sequence
  Synthetic
ugagcagauucccugacaaa

SEQ ID NO: 778786 - RNA, 20 nt, Artificial Sequence
  Synthetic
caaucuauacaucugacaaa

SEQ ID NO: 778787 - RNA, 20 nt, Artificial Sequence
  Synthetic
caaucuacccaucugacaaa

SEQ ID NO: 778788 - RNA, 20 nt, Artificial Sequence
  Synthetic
caaucuauccaucugacaaa

SEQ ID NO: 778789 - RNA, 20 nt, Artificial Sequence
  Synthetic
caaccuacucaucugacaaa

SEQ ID NO: 778790 - RNA, 20 nt, Artificial Sequence
  Synthetic
caaucuacucaucugacaaa

SEQ ID NO: 778791 - RNA, 20 nt, Artificial Sequence
  Synthetic
ccaucuauucaucugacaaa

SEQ ID NO: 778792 - RNA, 20 nt, Artificial Sequence
  Synthetic
uauauguauucucugacaaa

SEQ ID NO: 778793 - RNA, 20 nt, Artificial Sequence
  Synthetic
uuccacuuaggggugacaaa

SEQ ID NO: 778794 - RNA, 20 nt, Artificial Sequence
  Synthetic
caaaagccaaaauugacaaa

SEQ ID NO: 778795 - RNA, 20 nt, Artificial Sequence
  Synthetic
cagaagccaaaauugacaaa

SEQ ID NO: 778796 - RNA, 20 nt, Artificial Sequence
  Synthetic
caaaagccagaauugacaaa

SEQ ID NO: 778797 - RNA, 20 nt, Artificial Sequence
  Synthetic
uuucucaggcccuugacaaa

SEQ ID NO: 778798 - RNA, 20 nt, Artificial Sequence
  Synthetic
ugacuauguccuuugacaaa

SEQ ID NO: 778799 - RNA, 20 nt, Artificial Sequence
  Synthetic
aaaagagagguuuugacaaa

SEQ ID NO: 778800 - RNA, 20 nt, Artificial Sequence
  Synthetic
aaauuaaagaaaaauacaaa

SEQ ID NO: 778801 - RNA, 20 nt, Artificial Sequence
  Synthetic
acaaaauccccaaauacaaa

SEQ ID NO: 778802 - RNA, 20 nt, Artificial Sequence
  Synthetic
cuuaaauccagaaauacaaa

SEQ ID NO: 778803 - RNA, 20 nt, Artificial Sequence
  Synthetic
agauucagauuaaauacaaa

SEQ ID NO: 778804 - RNA, 20 nt, Artificial Sequence
  Synthetic
auaugaaacgagaauacaaa

SEQ ID NO: 778805 - RNA, 20 nt, Artificial Sequence
  Synthetic
augagccaauggaauacaaa

SEQ ID NO: 778806 - RNA, 20 nt, Artificial Sequence
  Synthetic
augcaagggcugaauacaaa

SEQ ID NO: 778807 - RNA, 20 nt, Artificial Sequence
  Synthetic
uucauaaaggauaauacaaa

SEQ ID NO: 778808 - RNA, 20 nt, Artificial Sequence
  Synthetic
cucuaaagcaaacauacaaa

SEQ ID NO: 778809 - RNA, 20 nt, Artificial Sequence
  Synthetic
cucaaaagaagacauacaaa

SEQ ID NO: 778810 - RNA, 20 nt, Artificial Sequence
  Synthetic
agaucaagaauacauacaaa

SEQ ID NO: 778811 - RNA, 20 nt, Artificial Sequence
  Synthetic
auucuaaauauacauacaaa

SEQ ID NO: 778812 - RNA, 20 nt, Artificial Sequence
  Synthetic
auauuauucagccauacaaa

SEQ ID NO: 778813 - RNA, 20 nt, Artificial Sequence
  Synthetic
cacuguuuugaagauacaaa

SEQ ID NO: 778814 - RNA, 20 nt, Artificial Sequence
  Synthetic
uuaaaaucaaaggauacaaa

SEQ ID NO: 778815 - RNA, 20 nt, Artificial Sequence
  Synthetic
ugccuguaugaauauacaaa

SEQ ID NO: 778816 - RNA, 20 nt, Artificial Sequence
  Synthetic
accuauaguagauauacaaa

SEQ ID NO: 778817 - RNA, 20 nt, Artificial Sequence
  Synthetic
uuggcuugaaucuauacaaa

SEQ ID NO: 778818 - RNA, 20 nt, Artificial Sequence
  Synthetic
ugcauccauguuccuacaaa

SEQ ID NO: 778819 - RNA, 20 nt, Artificial Sequence
  Synthetic
ugguuaccagaggcuacaaa

SEQ ID NO: 778820 - RNA, 20 nt, Artificial Sequence
  Synthetic
agaauaauaauaucuacaaa

SEQ ID NO: 778821 - RNA, 20 nt, Artificial Sequence
  Synthetic
aaauaaguaucauguacaaa

SEQ ID NO: 778822 - RNA, 20 nt, Artificial Sequence
  Synthetic
aguugaguuucauguacaaa

SEQ ID NO: 778823 - RNA, 20 nt, Artificial Sequence
  Synthetic
cauagaaaaaacuguacaaa

SEQ ID NO: 778824 - RNA, 20 nt, Artificial Sequence
  Synthetic
uuuguuccuuucuguacaaa

SEQ ID NO: 778825 - RNA, 20 nt, Artificial Sequence
  Synthetic
auggauaaugugauuacaaa

SEQ ID NO: 778826 - RNA, 20 nt, Artificial Sequence
  Synthetic
auuggaacaaaacuuacaaa

SEQ ID NO: 778827 - RNA, 20 nt, Artificial Sequence
  Synthetic
uucauuauuuuacuuacaaa

SEQ ID NO: 778828 - RNA, 20 nt, Artificial Sequence
  Synthetic
uuauuuuugcugcuuacaaa

SEQ ID NO: 778829 - RNA, 20 nt, Artificial Sequence
  Synthetic
uaagaugggggaguuacaaa

SEQ ID NO: 778830 - RNA, 20 nt, Artificial Sequence
  Synthetic
cuguuguauguauuuacaaa

SEQ ID NO: 778831 - RNA, 20 nt, Artificial Sequence
  Synthetic
cccaaaccucacuuuacaaa

SEQ ID NO: 778832 - RNA, 20 nt, Artificial Sequence
  Synthetic
cauuuaacauauuuuacaaa

SEQ ID NO: 778833 - RNA, 20 nt, Artificial Sequence
  Synthetic
caagacuaaauuuuuacaaa

SEQ ID NO: 778834 - RNA, 20 nt, Artificial Sequence
  Synthetic
uggaugucuauucaaccaaa

SEQ ID NO: 778835 - RNA, 20 nt, Artificial Sequence
  Synthetic
agaaaacuacaagaaccaaa

SEQ ID NO: 778836 - RNA, 20 nt, Artificial Sequence
  Synthetic
uuucuagcuauauaaccaaa

SEQ ID NO: 778837 - RNA, 20 nt, Artificial Sequence
  Synthetic
augauugaauugacaccaaa

SEQ ID NO: 778838 - RNA, 20 nt, Artificial Sequence
  Synthetic
uauauuaaacauccaccaaa

SEQ ID NO: 778839 - RNA, 20 nt, Artificial Sequence
  Synthetic
ugaacuaacuugucaccaaa

SEQ ID NO: 778840 - RNA, 20 nt, Artificial Sequence
  Synthetic
ccaauaauauauucaccaaa

SEQ ID NO: 778841 - RNA, 20 nt, Artificial Sequence
  Synthetic
aucacuugagcuucaccaaa

SEQ ID NO: 778842 - RNA, 20 nt, Artificial Sequence
  Synthetic
uauuuccaacagagaccaaa

SEQ ID NO: 778843 - RNA, 20 nt, Artificial Sequence
  Synthetic
aucaguauugaaugaccaaa

SEQ ID NO: 778844 - RNA, 20 nt, Artificial Sequence
  Synthetic
uucaaugccaucauaccaaa

SEQ ID NO: 778845 - RNA, 20 nt, Artificial Sequence
  Synthetic
caugcaauaaaacuaccaaa

SEQ ID NO: 778846 - RNA, 20 nt, Artificial Sequence
  Synthetic
uggaaacaaggaguaccaaa

SEQ ID NO: 778847 - RNA, 20 nt, Artificial Sequence
  Synthetic
ugucaagcuaaguuaccaaa

SEQ ID NO: 778848 - RNA, 20 nt, Artificial Sequence
  Synthetic
cacacuauacauuuaccaaa

SEQ ID NO: 778849 - RNA, 20 nt, Artificial Sequence
  Synthetic
auauaaagagcucacccaaa

SEQ ID NO: 778850 - RNA, 20 nt, Artificial Sequence
  Synthetic
ccccccaccaccaccccaaa

SEQ ID NO: 778851 - RNA, 20 nt, Artificial Sequence
  Synthetic
aaguccuaauagaccccaaa

SEQ ID NO: 778852 - RNA, 20 nt, Artificial Sequence
  Synthetic
ucuggauuauauaccccaaa

SEQ ID NO: 778853 - RNA, 20 nt, Artificial Sequence
  Synthetic
aucucuuaauaucccccaaa

SEQ ID NO: 778854 - RNA, 20 nt, Artificial Sequence
  Synthetic
caucugaaauccuccccaaa

SEQ ID NO: 778855 - RNA, 20 nt, Artificial Sequence
  Synthetic
uagguaauagaaagcccaaa

SEQ ID NO: 778856 - RNA, 20 nt, Artificial Sequence
  Synthetic
agauauucagccagcccaaa

SEQ ID NO: 778857 - RNA, 20 nt, Artificial Sequence
  Synthetic
uuuuucaguuucagcccaaa

SEQ ID NO: 778858 - RNA, 20 nt, Artificial Sequence
  Synthetic
caguuguauaaaugcccaaa

SEQ ID NO: 778859 - RNA, 20 nt, Artificial Sequence
  Synthetic
aaaccuggggugugcccaaa

SEQ ID NO: 778860 - RNA, 20 nt, Artificial Sequence
  Synthetic
uccccauuuuacaucccaaa

SEQ ID NO: 778861 - RNA, 20 nt, Artificial Sequence
  Synthetic
caucccuggccccucccaaa

SEQ ID NO: 778862 - RNA, 20 nt, Artificial Sequence
  Synthetic
aauaauuauccagucccaaa

SEQ ID NO: 778863 - RNA, 20 nt, Artificial Sequence
  Synthetic
auaucaauuuauuucccaaa

SEQ ID NO: 778864 - RNA, 20 nt, Artificial Sequence
  Synthetic
accgggacaguuuucccaaa

SEQ ID NO: 778865 - RNA, 20 nt, Artificial Sequence
  Synthetic
aaaaaaaaaaaaaagccaaa

SEQ ID NO: 778866 - RNA, 20 nt, Artificial Sequence
  Synthetic
uuuuuagcacaaaagccaaa

SEQ ID NO: 778867 - RNA, 20 nt, Artificial Sequence
  Synthetic
agugggaaaggaaagccaaa

SEQ ID NO: 778868 - RNA, 20 nt, Artificial Sequence
  Synthetic
uuugggugacagaagccaaa

SEQ ID NO: 778869 - RNA, 20 nt, Artificial Sequence
  Synthetic
uaaaccaacuggaagccaaa

SEQ ID NO: 778870 - RNA, 20 nt, Artificial Sequence
  Synthetic
uaaaacuuccagcagccaaa

SEQ ID NO: 778871 - RNA, 20 nt, Artificial Sequence
  Synthetic
cgccaacagaaauagccaaa

SEQ ID NO: 778872 - RNA, 20 nt, Artificial Sequence
  Synthetic
ucuguuugacuaaggccaaa

SEQ ID NO: 778873 - RNA, 20 nt, Artificial Sequence
  Synthetic
aaaaaaaaaaacaggccaaa

SEQ ID NO: 778874 - RNA, 20 nt, Artificial Sequence
  Synthetic
aaggugccucagaggccaaa

SEQ ID NO: 778875 - RNA, 20 nt, Artificial Sequence
  Synthetic
uuggaagguuagaggccaaa

SEQ ID NO: 778876 - RNA, 20 nt, Artificial Sequence
  Synthetic
uagacacacccugggccaaa

SEQ ID NO: 778877 - RNA, 20 nt, Artificial Sequence
  Synthetic
auccugaacaccuggccaaa

SEQ ID NO: 778878 - RNA, 20 nt, Artificial Sequence
  Synthetic
ucuagaccagccuggccaaa

SEQ ID NO: 778879 - RNA, 20 nt, Artificial Sequence
  Synthetic
cuaaagauagaguggccaaa

SEQ ID NO: 778880 - RNA, 20 nt, Artificial Sequence
  Synthetic
cacacucacuauaugccaaa

SEQ ID NO: 778881 - RNA, 20 nt, Artificial Sequence
  Synthetic
auuuacuaaauagugccaaa

SEQ ID NO: 778882 - RNA, 20 nt, Artificial Sequence
  Synthetic
aaucaguuccuggugccaaa

SEQ ID NO: 778883 - RNA, 20 nt, Artificial Sequence
  Synthetic
aggccaaguaauuugccaaa

SEQ ID NO: 778884 - RNA, 20 nt, Artificial Sequence
  Synthetic
ccuccuaccccaaauccaaa

SEQ ID NO: 778885 - RNA, 20 nt, Artificial Sequence
  Synthetic
uacaaaauaagaaauccaaa

SEQ ID NO: 778886 - RNA, 20 nt, Artificial Sequence
  Synthetic
uaggauacuugaaauccaaa

SEQ ID NO: 778887 - RNA, 20 nt, Artificial Sequence
  Synthetic
uuaaaauacuagaauccaaa

SEQ ID NO: 778888 - RNA, 20 nt, Artificial Sequence
  Synthetic
uggaaaggcuguaauccaaa

SEQ ID NO: 778889 - RNA, 20 nt, Artificial Sequence
  Synthetic
uacccaugaaaccauccaaa

SEQ ID NO: 778890 - RNA, 20 nt, Artificial Sequence
  Synthetic
cuguuuagggaauauccaaa

SEQ ID NO: 778891 - RNA, 20 nt, Artificial Sequence
  Synthetic
aaucugguagacuauccaaa

SEQ ID NO: 778892 - RNA, 20 nt, Artificial Sequence
  Synthetic
uauuacugggaaacuccaaa

SEQ ID NO: 778893 - RNA, 20 nt, Artificial Sequence
  Synthetic
aacuaaaaaucaacuccaaa

SEQ ID NO: 778894 - RNA, 20 nt, Artificial Sequence
  Synthetic
uuuuuugaggaaccuccaaa

SEQ ID NO: 778895 - RNA, 20 nt, Artificial Sequence
  Synthetic
cugguucuucuuccuccaaa

SEQ ID NO: 778896 - RNA, 20 nt, Artificial Sequence
  Synthetic
acaaguagauuuccuccaaa

SEQ ID NO: 778897 - RNA, 20 nt, Artificial Sequence
  Synthetic
aaauauauguggucuccaaa

SEQ ID NO: 778898 - RNA, 20 nt, Artificial Sequence
  Synthetic
aaauaaaggaguucuccaaa

SEQ ID NO: 778899 - RNA, 20 nt, Artificial Sequence
  Synthetic
cuguagcugauuucuccaaa

SEQ ID NO: 778900 - RNA, 20 nt, Artificial Sequence
  Synthetic
cuacucagucucuguccaaa

SEQ ID NO: 778901 - RNA, 20 nt, Artificial Sequence
  Synthetic
aaauuaggcaaaauuccaaa

SEQ ID NO: 778902 - RNA, 20 nt, Artificial Sequence
  Synthetic
aaaaugauccaaauuccaaa

SEQ ID NO: 778903 - RNA, 20 nt, Artificial Sequence
  Synthetic
acugcuuaaacucuuccaaa

SEQ ID NO: 778904 - RNA, 20 nt, Artificial Sequence
  Synthetic
cuaaguccuucauuuccaaa

SEQ ID NO: 778905 - RNA, 20 nt, Artificial Sequence
  Synthetic
aagauccuagacuuuccaaa

SEQ ID NO: 778906 - RNA, 20 nt, Artificial Sequence
  Synthetic
aaaauuauuuucuuuccaaa

SEQ ID NO: 778907 - RNA, 20 nt, Artificial Sequence
  Synthetic
aaacauauagccaaagcaaa

SEQ ID NO: 778908 - RNA, 20 nt, Artificial Sequence
  Synthetic
acacauaggcucaaagcaaa

SEQ ID NO: 778909 - RNA, 20 nt, Artificial Sequence
  Synthetic
uaaucaugguggaaagcaaa

SEQ ID NO: 778910 - RNA, 20 nt, Artificial Sequence
  Synthetic
ugacagagcagacaagcaaa

SEQ ID NO: 778911 - RNA, 20 nt, Artificial Sequence
  Synthetic
cauccuuaaaaccaagcaaa

SEQ ID NO: 778912 - RNA, 20 nt, Artificial Sequence
  Synthetic
aggaagaucuaccaagcaaa

SEQ ID NO: 778913 - RNA, 20 nt, Artificial Sequence
  Synthetic
cggaauauuuuccaagcaaa

SEQ ID NO: 778914 - RNA, 20 nt, Artificial Sequence
  Synthetic
uuguguucauagcaagcaaa

SEQ ID NO: 778915 - RNA, 20 nt, Artificial Sequence
  Synthetic
caaaaagauaaagaagcaaa

SEQ ID NO: 778916 - RNA, 20 nt, Artificial Sequence
  Synthetic
aaaucacagugagaagcaaa

SEQ ID NO: 778917 - RNA, 20 nt, Artificial Sequence
  Synthetic
cugcccaugaaugaagcaaa

SEQ ID NO: 778918 - RNA, 20 nt, Artificial Sequence
  Synthetic
auacauggagcauaagcaaa

SEQ ID NO: 778919 - RNA, 20 nt, Artificial Sequence
  Synthetic
uaggaaagcacuuaagcaaa

SEQ ID NO: 778920 - RNA, 20 nt, Artificial Sequence
  Synthetic
acaccauuaucuuaagcaaa

SEQ ID NO: 778921 - RNA, 20 nt, Artificial Sequence
  Synthetic
auacuuugucuuuaagcaaa

SEQ ID NO: 778922 - RNA, 20 nt, Artificial Sequence
  Synthetic
cuguuacaagcaacagcaaa

SEQ ID NO: 778923 - RNA, 20 nt, Artificial Sequence
  Synthetic
ucauucuaaaauacagcaaa

SEQ ID NO: 778924 - RNA, 20 nt, Artificial Sequence
  Synthetic
auugaucaaucuacagcaaa

SEQ ID NO: 778925 - RNA, 20 nt, Artificial Sequence
  Synthetic
cacaguaacuaaccagcaaa

SEQ ID NO: 778926 - RNA, 20 nt, Artificial Sequence
  Synthetic
aaaagagauggaccagcaaa

SEQ ID NO: 778927 - RNA, 20 nt, Artificial Sequence
  Synthetic
agacauggaaaagcagcaaa

SEQ ID NO: 778928 - RNA, 20 nt, Artificial Sequence
  Synthetic
aauauuuaccaagcagcaaa

SEQ ID NO: 778929 - RNA, 20 nt, Artificial Sequence
  Synthetic
ucugugaaagcagcagcaaa

SEQ ID NO: 778930 - RNA, 20 nt, Artificial Sequence
  Synthetic
ugguacuccagggcagcaaa

SEQ ID NO: 778931 - RNA, 20 nt, Artificial Sequence
  Synthetic
uugcuggaacugagagcaaa

SEQ ID NO: 778932 - RNA, 20 nt, Artificial Sequence
  Synthetic
aggauauuuuugagagcaaa

SEQ ID NO: 778933 - RNA, 20 nt, Artificial Sequence
  Synthetic
cugacccuccccugagcaaa

SEQ ID NO: 778934 - RNA, 20 nt, Artificial Sequence
  Synthetic
aaggagaagugcugagcaaa

SEQ ID NO: 778935 - RNA, 20 nt, Artificial Sequence
  Synthetic
auagaauauaaaauagcaaa

SEQ ID NO: 778936 - RNA, 20 nt, Artificial Sequence
  Synthetic
acaaauguauuucuagcaaa

SEQ ID NO: 778937 - RNA, 20 nt, Artificial Sequence
  Synthetic
cuaacacugagcguagcaaa

SEQ ID NO: 778938 - RNA, 20 nt, Artificial Sequence
  Synthetic
caaaucccaaagguagcaaa

SEQ ID NO: 778939 - RNA, 20 nt, Artificial Sequence
  Synthetic
uaagugguauaauuagcaaa

SEQ ID NO: 778940 - RNA, 20 nt, Artificial Sequence
  Synthetic
uuucagaguuacuuagcaaa

SEQ ID NO: 778941 - RNA, 20 nt, Artificial Sequence
  Synthetic
accuuauuuuucuuagcaaa

SEQ ID NO: 778942 - RNA, 20 nt, Artificial Sequence
  Synthetic
uuuuccauaagguuagcaaa

SEQ ID NO: 778943 - RNA, 20 nt, Artificial Sequence
  Synthetic
cauguaauuugguuagcaaa

SEQ ID NO: 778944 - RNA, 20 nt, Artificial Sequence
  Synthetic
augugauuugcuuuagcaaa

SEQ ID NO: 778945 - RNA, 20 nt, Artificial Sequence
  Synthetic
acagaauguucuuuagcaaa

SEQ ID NO: 778946 - RNA, 20 nt, Artificial Sequence
  Synthetic
auugugaauagugccgcaaa

SEQ ID NO: 778947 - RNA, 20 nt, Artificial Sequence
  Synthetic
uacucgagcagaaaggcaaa

SEQ ID NO: 778948 - RNA, 20 nt, Artificial Sequence
  Synthetic
caaccaugguggaaggcaaa

SEQ ID NO: 778949 - RNA, 20 nt, Artificial Sequence
  Synthetic
cagaaauauaugaaggcaaa

SEQ ID NO: 778950 - RNA, 20 nt, Artificial Sequence
  Synthetic
ugcucagucuugcaggcaaa

SEQ ID NO: 778951 - RNA, 20 nt, Artificial Sequence
  Synthetic
agggagauaaaagaggcaaa

SEQ ID NO: 778952 - RNA, 20 nt, Artificial Sequence
  Synthetic
acuaaggggacagaggcaaa

SEQ ID NO: 778953 - RNA, 20 nt, Artificial Sequence
  Synthetic
aagcuauacuacgaggcaaa

SEQ ID NO: 778954 - RNA, 20 nt, Artificial Sequence
  Synthetic
cuuugcgaggccgaggcaaa

SEQ ID NO: 778955 - RNA, 20 nt, Artificial Sequence
  Synthetic
aauugcagaugggaggcaaa

SEQ ID NO: 778956 - RNA, 20 nt, Artificial Sequence
  Synthetic
cuuuugccucuggaggcaaa

SEQ ID NO: 778957 - RNA, 20 nt, Artificial Sequence
  Synthetic
aggugccaugaugaggcaaa

SEQ ID NO: 778958 - RNA, 20 nt, Artificial Sequence
  Synthetic
uucuaccaaauugaggcaaa

SEQ ID NO: 778959 - RNA, 20 nt, Artificial Sequence
  Synthetic
ccuccaccagcaagggcaaa

SEQ ID NO: 778960 - RNA, 20 nt, Artificial Sequence
  Synthetic
cauucauggugaagggcaaa

SEQ ID NO: 778961 - RNA, 20 nt, Artificial Sequence
  Synthetic
agacuuagguauggggcaaa

SEQ ID NO: 778962 - RNA, 20 nt, Artificial Sequence
  Synthetic
cagucaauaaaaugggcaaa

SEQ ID NO: 778963 - RNA, 20 nt, Artificial Sequence
  Synthetic
caaacaucuugaauggcaaa

SEQ ID NO: 778964 - RNA, 20 nt, Artificial Sequence
  Synthetic
auguuaccuuacauggcaaa

SEQ ID NO: 778965 - RNA, 20 nt, Artificial Sequence
  Synthetic
uugcugcaagagauggcaaa

SEQ ID NO: 778966 - RNA, 20 nt, Artificial Sequence
  Synthetic
uugaaauaccauauggcaaa

SEQ ID NO: 778967 - RNA, 20 nt, Artificial Sequence
  Synthetic
uuaaugacuauaaaugcaaa

SEQ ID NO: 778968 - RNA, 20 nt, Artificial Sequence
  Synthetic
aaauggucucuaaaugcaaa

SEQ ID NO: 778969 - RNA, 20 nt, Artificial Sequence
  Synthetic
auaauuaccuuaaaugcaaa

SEQ ID NO: 778970 - RNA, 20 nt, Artificial Sequence
  Synthetic
aacuguucauuacaugcaaa

SEQ ID NO: 778971 - RNA, 20 nt, Artificial Sequence
  Synthetic
aaaaagauacuccaugcaaa

SEQ ID NO: 778972 - RNA, 20 nt, Artificial Sequence
  Synthetic
uauuuugguuuccaugcaaa

SEQ ID NO: 778973 - RNA, 20 nt, Artificial Sequence
  Synthetic
auggacaguuuuuaugcaaa

SEQ ID NO: 778974 - RNA, 20 nt, Artificial Sequence
  Synthetic
aaaaccauguaaacugcaaa

SEQ ID NO: 778975 - RNA, 20 nt, Artificial Sequence
  Synthetic
uuggaggcagugacugcaaa

SEQ ID NO: 778976 - RNA, 20 nt, Artificial Sequence
  Synthetic
uuauuugaauauacugcaaa

SEQ ID NO: 778977 - RNA, 20 nt, Artificial Sequence
  Synthetic
acaaucucuuuuacugcaaa

SEQ ID NO: 778978 - RNA, 20 nt, Artificial Sequence
  Synthetic
auagccuaagguccugcaaa

SEQ ID NO: 778979 - RNA, 20 nt, Artificial Sequence
  Synthetic
uggccauuuucuucugcaaa

SEQ ID NO: 778980 - RNA, 20 nt, Artificial Sequence
  Synthetic
agguaauggugaagugcaaa

SEQ ID NO: 778981 - RNA, 20 nt, Artificial Sequence
  Synthetic
aguuugguguucagugcaaa

SEQ ID NO: 778982 - RNA, 20 nt, Artificial Sequence
  Synthetic
agaaggauggggagugcaaa

SEQ ID NO: 778983 - RNA, 20 nt, Artificial Sequence
  Synthetic
uugauucucauuauugcaaa

SEQ ID NO: 778984 - RNA, 20 nt, Artificial Sequence
  Synthetic
aagaccauguggcuugcaaa

SEQ ID NO: 778985 - RNA, 20 nt, Artificial Sequence
  Synthetic
uuauauuguuguguugcaaa

SEQ ID NO: 778986 - RNA, 20 nt, Artificial Sequence
  Synthetic
ccacaaucaucauuugcaaa

SEQ ID NO: 778987 - RNA, 20 nt, Artificial Sequence
  Synthetic
acuggacucucauuugcaaa

SEQ ID NO: 778988 - RNA, 20 nt, Artificial Sequence
  Synthetic
aguaaucuguauuuugcaaa

SEQ ID NO: 778989 - RNA, 20 nt, Artificial Sequence
  Synthetic
uguauucauugaaaaucaaa

SEQ ID NO: 778990 - RNA, 20 nt, Artificial Sequence
  Synthetic
auguacauguucaaaucaaa

SEQ ID NO: 778991 - RNA, 20 nt, Artificial Sequence
  Synthetic
cuccuauaauaacaaucaaa

SEQ ID NO: 778992 - RNA, 20 nt, Artificial Sequence
  Synthetic
ccaaacaauaaccaaucaaa

SEQ ID NO: 778993 - RNA, 20 nt, Artificial Sequence
  Synthetic
auaucagcaagccaaucaaa

SEQ ID NO: 778994 - RNA, 20 nt, Artificial Sequence
  Synthetic
aauaaacucaagcaaucaaa

SEQ ID NO: 778995 - RNA, 20 nt, Artificial Sequence
  Synthetic
aauacaaaccuagaaucaaa

SEQ ID NO: 778996 - RNA, 20 nt, Artificial Sequence
  Synthetic
acacaagcuuaggaaucaaa

SEQ ID NO: 778997 - RNA, 20 nt, Artificial Sequence
  Synthetic
aaauuugagagggaaucaaa

SEQ ID NO: 778998 - RNA, 20 nt, Artificial Sequence
  Synthetic
aaaaaagcacuggaaucaaa

SEQ ID NO: 778999 - RNA, 20 nt, Artificial Sequence
  Synthetic
uacacggucacauaaucaaa

SEQ ID NO: 779000 - RNA, 20 nt, Artificial Sequence
  Synthetic
uaaguugaaauguaaucaaa

SEQ ID NO: 779001 - RNA, 20 nt, Artificial Sequence
  Synthetic
aaaguacagauuuaaucaaa

SEQ ID NO: 779002 - RNA, 20 nt, Artificial Sequence
  Synthetic
ucuuuuuuuuuuuaaucaaa

SEQ ID NO: 779003 - RNA, 20 nt, Artificial Sequence
  Synthetic
aauaaaaugauaacaucaaa

SEQ ID NO: 779004 - RNA, 20 nt, Artificial Sequence
  Synthetic
aaagcccgaggcacaucaaa

SEQ ID NO: 779005 - RNA, 20 nt, Artificial Sequence
  Synthetic
aauaagauaaauacaucaaa

SEQ ID NO: 779006 - RNA, 20 nt, Artificial Sequence
  Synthetic
aagcagaaucaaccaucaaa

SEQ ID NO: 779007 - RNA, 20 nt, Artificial Sequence
  Synthetic
agguuggcauaaccaucaaa

SEQ ID NO: 779008 - RNA, 20 nt, Artificial Sequence
  Synthetic
auuaaggacaugccaucaaa

SEQ ID NO: 779009 - RNA, 20 nt, Artificial Sequence
  Synthetic
ccaccugaauguccaucaaa

SEQ ID NO: 779010 - RNA, 20 nt, Artificial Sequence
  Synthetic
uuauuuccaugggcaucaaa

SEQ ID NO: 779011 - RNA, 20 nt, Artificial Sequence
  Synthetic
uuuuaaacccauucaucaaa

SEQ ID NO: 779012 - RNA, 20 nt, Artificial Sequence
  Synthetic
agagggcaagaaagaucaaa

SEQ ID NO: 779013 - RNA, 20 nt, Artificial Sequence
  Synthetic
ccgucaacaccaagaucaaa

SEQ ID NO: 779014 - RNA, 20 nt, Artificial Sequence
  Synthetic
aaugggauugcuggaucaaa

SEQ ID NO: 779015 - RNA, 20 nt, Artificial Sequence
  Synthetic
uuugauuaacacugaucaaa

SEQ ID NO: 779016 - RNA, 20 nt, Artificial Sequence
  Synthetic
aaauggagugacugaucaaa

SEQ ID NO: 779017 - RNA, 20 nt, Artificial Sequence
  Synthetic
ucaaaaacaaauugaucaaa

SEQ ID NO: 779018 - RNA, 20 nt, Artificial Sequence
  Synthetic
auggggagauguugaucaaa

SEQ ID NO: 779019 - RNA, 20 nt, Artificial Sequence
  Synthetic
uucaguuuucuaauaucaaa

SEQ ID NO: 779020 - RNA, 20 nt, Artificial Sequence
  Synthetic
augccacaucgcauaucaaa

SEQ ID NO: 779021 - RNA, 20 nt, Artificial Sequence
  Synthetic
aaaaaaaauuuucuaucaaa

SEQ ID NO: 779022 - RNA, 20 nt, Artificial Sequence
  Synthetic
uuuaauaauuauuuaucaaa

SEQ ID NO: 779023 - RNA, 20 nt, Artificial Sequence
  Synthetic
auaauaguagaaaacucaaa

SEQ ID NO: 779024 - RNA, 20 nt, Artificial Sequence
  Synthetic
uaagauuagccaaacucaaa

SEQ ID NO: 779025 - RNA, 20 nt, Artificial Sequence
  Synthetic
ucagugaugaguaacucaaa

SEQ ID NO: 779026 - RNA, 20 nt, Artificial Sequence
  Synthetic
uugcuuaacaaagacucaaa

SEQ ID NO: 779027 - RNA, 20 nt, Artificial Sequence
  Synthetic
uugagugcauaugacucaaa

SEQ ID NO: 779028 - RNA, 20 nt, Artificial Sequence
  Synthetic
ccuauuuuagaauacucaaa

SEQ ID NO: 779029 - RNA, 20 nt, Artificial Sequence
  Synthetic
uaaaguauuuuauacucaaa

SEQ ID NO: 779030 - RNA, 20 nt, Artificial Sequence
  Synthetic
ugcaacauaacuuacucaaa

SEQ ID NO: 779031 - RNA, 20 nt, Artificial Sequence
  Synthetic
ucuuagaacauuuacucaaa

SEQ ID NO: 779032 - RNA, 20 nt, Artificial Sequence
  Synthetic
cagccuguggcaaccucaaa

SEQ ID NO: 779033 - RNA, 20 nt, Artificial Sequence
  Synthetic
auaguaaugauaaccucaaa

SEQ ID NO: 779034 - RNA, 20 nt, Artificial Sequence
  Synthetic
cauuauuaaccuaccucaaa

SEQ ID NO: 779035 - RNA, 20 nt, Artificial Sequence
  Synthetic
acguaaaauaaagccucaaa

SEQ ID NO: 779036 - RNA, 20 nt, Artificial Sequence
  Synthetic
auccagaaaauagccucaaa

SEQ ID NO: 779037 - RNA, 20 nt, Artificial Sequence
  Synthetic
ucugauuaucuuuccucaaa

SEQ ID NO: 779038 - RNA, 20 nt, Artificial Sequence
  Synthetic
ucuucauuuaaaggcucaaa

SEQ ID NO: 779039 - RNA, 20 nt, Artificial Sequence
  Synthetic
auguccuaaauuggcucaaa

SEQ ID NO: 779040 - RNA, 20 nt, Artificial Sequence
  Synthetic
uacuucacguggaucucaaa

SEQ ID NO: 779041 - RNA, 20 nt, Artificial Sequence
  Synthetic
uuuucucccacacucucaaa

SEQ ID NO: 779042 - RNA, 20 nt, Artificial Sequence
  Synthetic
agccucuuuucacucucaaa

SEQ ID NO: 779043 - RNA, 20 nt, Artificial Sequence
  Synthetic
uuggagaacauacucucaaa

SEQ ID NO: 779044 - RNA, 20 nt, Artificial Sequence
  Synthetic
uguccccuuauacucucaaa

SEQ ID NO: 779045 - RNA, 20 nt, Artificial Sequence
  Synthetic
agguagucucugcucucaaa

SEQ ID NO: 779046 - RNA, 20 nt, Artificial Sequence
  Synthetic
ucuccuuuccuucucucaaa

SEQ ID NO: 779047 - RNA, 20 nt, Artificial Sequence
  Synthetic
aaacugugucuucucucaaa

SEQ ID NO: 779048 - RNA, 20 nt, Artificial Sequence
  Synthetic
ucacauaauacagucucaaa

SEQ ID NO: 779049 - RNA, 20 nt, Artificial Sequence
  Synthetic
ucaggagaaagcuucucaaa

SEQ ID NO: 779050 - RNA, 20 nt, Artificial Sequence
  Synthetic
cuagaguaguaguucucaaa

SEQ ID NO: 779051 - RNA, 20 nt, Artificial Sequence
  Synthetic
acauuuauaauuuucucaaa

SEQ ID NO: 779052 - RNA, 20 nt, Artificial Sequence
  Synthetic
aauacaacuggcaagucaaa

SEQ ID NO: 779053 - RNA, 20 nt, Artificial Sequence
  Synthetic
ccaaauucucauaagucaaa

SEQ ID NO: 779054 - RNA, 20 nt, Artificial Sequence
  Synthetic
uuagaaggauuagagucaaa

SEQ ID NO: 779055 - RNA, 20 nt, Artificial Sequence
  Synthetic
uucccuaccuuaacgucaaa

SEQ ID NO: 779056 - RNA, 20 nt, Artificial Sequence
  Synthetic
ccacgguauagcaggucaaa

SEQ ID NO: 779057 - RNA, 20 nt, Artificial Sequence
  Synthetic
aggccagaagaagggucaaa

SEQ ID NO: 779058 - RNA, 20 nt, Artificial Sequence
  Synthetic
ucugauccaagagggucaaa

SEQ ID NO: 779059 - RNA, 20 nt, Artificial Sequence
  Synthetic
aaugggauggccgggucaaa

SEQ ID NO: 779060 - RNA, 20 nt, Artificial Sequence
  Synthetic
aaugggauagcugggucaaa

SEQ ID NO: 779061 - RNA, 20 nt, Artificial Sequence
  Synthetic
aaugggauggcugggucaaa

SEQ ID NO: 779062 - RNA, 20 nt, Artificial Sequence
  Synthetic
aaugggauugcugggucaaa

SEQ ID NO: 779063 - RNA, 20 nt, Artificial Sequence
  Synthetic
aaaccauaucauuggucaaa

SEQ ID NO: 779064 - RNA, 20 nt, Artificial Sequence
  Synthetic
uuaugaguaaagaugucaaa

SEQ ID NO: 779065 - RNA, 20 nt, Artificial Sequence
  Synthetic
cucugagcucaacugucaaa

SEQ ID NO: 779066 - RNA, 20 nt, Artificial Sequence
  Synthetic
uaaagguagaaccugucaaa

SEQ ID NO: 779067 - RNA, 20 nt, Artificial Sequence
  Synthetic
uuuagcaagcggcugucaaa

SEQ ID NO: 779068 - RNA, 20 nt, Artificial Sequence
  Synthetic
augucaggucacuugucaaa

SEQ ID NO: 779069 - RNA, 20 nt, Artificial Sequence
  Synthetic
aguuuucucuuuuugucaaa

SEQ ID NO: 779070 - RNA, 20 nt, Artificial Sequence
  Synthetic
uaugaggucaaaaauucaaa

SEQ ID NO: 779071 - RNA, 20 nt, Artificial Sequence
  Synthetic
aacacuguaacaaauucaaa

SEQ ID NO: 779072 - RNA, 20 nt, Artificial Sequence
  Synthetic
aggcuaaaacuaaauucaaa

SEQ ID NO: 779073 - RNA, 20 nt, Artificial Sequence
  Synthetic
aguuuccaccucaauucaaa

SEQ ID NO: 779074 - RNA, 20 nt, Artificial Sequence
  Synthetic
aagaaacugaagaauucaaa

SEQ ID NO: 779075 - RNA, 20 nt, Artificial Sequence
  Synthetic
uaagucucacuacauucaaa

SEQ ID NO: 779076 - RNA, 20 nt, Artificial Sequence
  Synthetic
aacuaugaagaagauucaaa

SEQ ID NO: 779077 - RNA, 20 nt, Artificial Sequence
  Synthetic
aguaucuauugagauucaaa

SEQ ID NO: 779078 - RNA, 20 nt, Artificial Sequence
  Synthetic
auuuauguuauauauucaaa

SEQ ID NO: 779079 - RNA, 20 nt, Artificial Sequence
  Synthetic
caacucuccagguauucaaa

SEQ ID NO: 779080 - RNA, 20 nt, Artificial Sequence
  Synthetic
uguagcaauguguauucaaa

SEQ ID NO: 779081 - RNA, 20 nt, Artificial Sequence
  Synthetic
ccucaugaacaaacuucaaa

SEQ ID NO: 779082 - RNA, 20 nt, Artificial Sequence
  Synthetic
ucacagaacuuuacuucaaa

SEQ ID NO: 779083 - RNA, 20 nt, Artificial Sequence
  Synthetic
uccaagccaacaucuucaaa

SEQ ID NO: 779084 - RNA, 20 nt, Artificial Sequence
  Synthetic
ccuuggcuaugaucuucaaa

SEQ ID NO: 779085 - RNA, 20 nt, Artificial Sequence
  Synthetic
ucucucugcuuuucuucaaa

SEQ ID NO: 779086 - RNA, 20 nt, Artificial Sequence
  Synthetic
ccccuccaucauaguucaaa

SEQ ID NO: 779087 - RNA, 20 nt, Artificial Sequence
  Synthetic
ucaggaaguucagguucaaa

SEQ ID NO: 779088 - RNA, 20 nt, Artificial Sequence
  Synthetic
aauaaaagaggugguucaaa

SEQ ID NO: 779089 - RNA, 20 nt, Artificial Sequence
  Synthetic
agguuucuauacuguucaaa

SEQ ID NO: 779090 - RNA, 20 nt, Artificial Sequence
  Synthetic
aaacugaggaacauuucaaa

SEQ ID NO: 779091 - RNA, 20 nt, Artificial Sequence
  Synthetic
cccauuuuauagauuucaaa

SEQ ID NO: 779092 - RNA, 20 nt, Artificial Sequence
  Synthetic
aggaauaaugugauuucaaa

SEQ ID NO: 779093 - RNA, 20 nt, Artificial Sequence
  Synthetic
uugauagcuuugauuucaaa

SEQ ID NO: 779094 - RNA, 20 nt, Artificial Sequence
  Synthetic
uuuauuguuaauauuucaaa

SEQ ID NO: 779095 - RNA, 20 nt, Artificial Sequence
  Synthetic
uaaauaugugguauuucaaa

SEQ ID NO: 779096 - RNA, 20 nt, Artificial Sequence
  Synthetic
aucucuuuuguuauuucaaa

SEQ ID NO: 779097 - RNA, 20 nt, Artificial Sequence
  Synthetic
agaguuguccaacuuucaaa

SEQ ID NO: 779098 - RNA, 20 nt, Artificial Sequence
  Synthetic
aauaaguuagugcuuucaaa

SEQ ID NO: 779099 - RNA, 20 nt, Artificial Sequence
  Synthetic
uuauuauuucuucuuucaaa

SEQ ID NO: 779100 - RNA, 20 nt, Artificial Sequence
  Synthetic
aauaauauagaaguuucaaa

SEQ ID NO: 779101 - RNA, 20 nt, Artificial Sequence
  Synthetic
aaagcaaguugauuuucaaa

SEQ ID NO: 779102 - RNA, 20 nt, Artificial Sequence
  Synthetic
auggaaaaguccuuuucaaa

SEQ ID NO: 779103 - RNA, 20 nt, Artificial Sequence
  Synthetic
uaucuuccaucuuuuucaaa

SEQ ID NO: 779104 - RNA, 20 nt, Artificial Sequence
  Synthetic
cugaaacacauuuuuucaaa

SEQ ID NO: 779105 - RNA, 20 nt, Artificial Sequence
  Synthetic
ucacuucuuguuuuuucaaa

SEQ ID NO: 779106 - RNA, 20 nt, Artificial Sequence
  Synthetic
auuacugauuuuuuuucaaa

SEQ ID NO: 779107 - RNA, 20 nt, Artificial Sequence
  Synthetic
uguauucaccaaaaaagaaa

SEQ ID NO: 779108 - RNA, 20 nt, Artificial Sequence
  Synthetic
auggugcuccuaaaaagaaa

SEQ ID NO: 779109 - RNA, 20 nt, Artificial Sequence
  Synthetic
cugggugcuuuaaaaagaaa

SEQ ID NO: 779110 - RNA, 20 nt, Artificial Sequence
  Synthetic
uuuauuaucagcaaaagaaa

SEQ ID NO: 779111 - RNA, 20 nt, Artificial Sequence
  Synthetic
uuuucccauuucaaaagaaa

SEQ ID NO: 779112 - RNA, 20 nt, Artificial Sequence
  Synthetic
aaaaaaaaaaagaaaagaaa

SEQ ID NO: 779113 - RNA, 20 nt, Artificial Sequence
  Synthetic
agggagggaaagaaaagaaa

SEQ ID NO: 779114 - RNA, 20 nt, Artificial Sequence
  Synthetic
caugcaaaacggaaaagaaa

SEQ ID NO: 779115 - RNA, 20 nt, Artificial Sequence
  Synthetic
uauguucagaauaaaagaaa

SEQ ID NO: 779116 - RNA, 20 nt, Artificial Sequence
  Synthetic
caucaaaaaauacaaagaaa

SEQ ID NO: 779117 - RNA, 20 nt, Artificial Sequence
  Synthetic
auggguaauuuacaaagaaa

SEQ ID NO: 779118 - RNA, 20 nt, Artificial Sequence
  Synthetic
ugggcauuuauccaaagaaa

SEQ ID NO: 779119 - RNA, 20 nt, Artificial Sequence
  Synthetic
agaaaaacccuccaaagaaa

SEQ ID NO: 779120 - RNA, 20 nt, Artificial Sequence
  Synthetic
ugucccuuccaagaaagaaa

SEQ ID NO: 779121 - RNA, 20 nt, Artificial Sequence
  Synthetic
auagcgcuggaagaaagaaa

SEQ ID NO: 779122 - RNA, 20 nt, Artificial Sequence
  Synthetic
cuuaaacaugcagaaagaaa

SEQ ID NO: 779123 - RNA, 20 nt, Artificial Sequence
  Synthetic
ugugagagaagagaaagaaa

SEQ ID NO: 779124 - RNA, 20 nt, Artificial Sequence
  Synthetic
aauaggugaguagaaagaaa

SEQ ID NO: 779125 - RNA, 20 nt, Artificial Sequence
  Synthetic
uuagcuaagaaggaaagaaa

SEQ ID NO: 779126 - RNA, 20 nt, Artificial Sequence
  Synthetic
caaagaagggaggaaagaaa

SEQ ID NO: 779127 - RNA, 20 nt, Artificial Sequence
  Synthetic
cugauugguuaggaaagaaa

SEQ ID NO: 779128 - RNA, 20 nt, Artificial Sequence
  Synthetic
auuucagggggggaaagaaa

SEQ ID NO: 779129 - RNA, 20 nt, Artificial Sequence
  Synthetic
aaugcagaauuggaaagaaa

SEQ ID NO: 779130 - RNA, 20 nt, Artificial Sequence
  Synthetic
auaaauauucaugaaagaaa

SEQ ID NO: 779131 - RNA, 20 nt, Artificial Sequence
  Synthetic
uccuagauaauugaaagaaa

SEQ ID NO: 779132 - RNA, 20 nt, Artificial Sequence
  Synthetic
ugauggacuggauaaagaaa

SEQ ID NO: 779133 - RNA, 20 nt, Artificial Sequence
  Synthetic
uaauaaguacuauaaagaaa

SEQ ID NO: 779134 - RNA, 20 nt, Artificial Sequence
  Synthetic
agaggaaguauguaaagaaa

SEQ ID NO: 779135 - RNA, 20 nt, Artificial Sequence
  Synthetic
caagcaauauuguaaagaaa

SEQ ID NO: 779136 - RNA, 20 nt, Artificial Sequence
  Synthetic
aaccugaaacuuuaaagaaa

SEQ ID NO: 779137 - RNA, 20 nt, Artificial Sequence
  Synthetic
auacugagauuuuaaagaaa

SEQ ID NO: 779138 - RNA, 20 nt, Artificial Sequence
  Synthetic
accugacaaaaaacaagaaa

SEQ ID NO: 779139 - RNA, 20 nt, Artificial Sequence
  Synthetic
aaccugacaaaaacaagaaa

SEQ ID NO: 779140 - RNA, 20 nt, Artificial Sequence
  Synthetic
augggaauaauaacaagaaa

SEQ ID NO: 779141 - RNA, 20 nt, Artificial Sequence
  Synthetic
cuuuauuuuuauacaagaaa

SEQ ID NO: 779142 - RNA, 20 nt, Artificial Sequence
  Synthetic
auaggaagauagccaagaaa

SEQ ID NO: 779143 - RNA, 20 nt, Artificial Sequence
  Synthetic
aucugaugacugccaagaaa

SEQ ID NO: 779144 - RNA, 20 nt, Artificial Sequence
  Synthetic
auaaguaauaacucaagaaa

SEQ ID NO: 779145 - RNA, 20 nt, Artificial Sequence
  Synthetic
agcauacaucauucaagaaa

SEQ ID NO: 779146 - RNA, 20 nt, Artificial Sequence
  Synthetic
uaaaaguucuuuucaagaaa

SEQ ID NO: 779147 - RNA, 20 nt, Artificial Sequence
  Synthetic
cuguucuacaaaagaagaaa

SEQ ID NO: 779148 - RNA, 20 nt, Artificial Sequence
  Synthetic
cuagaauacuccagaagaaa

SEQ ID NO: 779149 - RNA, 20 nt, Artificial Sequence
  Synthetic
ugcagaagguggagaagaaa

SEQ ID NO: 779150 - RNA, 20 nt, Artificial Sequence
  Synthetic
acuagaaaaucuagaagaaa

SEQ ID NO: 779151 - RNA, 20 nt, Artificial Sequence
  Synthetic
agugcuaggaaacgaagaaa

SEQ ID NO: 779152 - RNA, 20 nt, Artificial Sequence
  Synthetic
aagucaaggcuaggaagaaa

SEQ ID NO: 779153 - RNA, 20 nt, Artificial Sequence
  Synthetic
uaaaaggaguauggaagaaa

SEQ ID NO: 779154 - RNA, 20 nt, Artificial Sequence
  Synthetic
augcgaucaacuggaagaaa

SEQ ID NO: 779155 - RNA, 20 nt, Artificial Sequence
  Synthetic
cucaaggagaguggaagaaa

SEQ ID NO: 779156 - RNA, 20 nt, Artificial Sequence
  Synthetic
uccuuacuuuuuggaagaaa

SEQ ID NO: 779157 - RNA, 20 nt, Artificial Sequence
  Synthetic
aaagaaaauacaugaagaaa

SEQ ID NO: 779158 - RNA, 20 nt, Artificial Sequence
  Synthetic
aaaucaggaugaugaagaaa

SEQ ID NO: 779159 - RNA, 20 nt, Artificial Sequence
  Synthetic
cugggucucaacugaagaaa

SEQ ID NO: 779160 - RNA, 20 nt, Artificial Sequence
  Synthetic
aaaccucugcucugaagaaa

SEQ ID NO: 779161 - RNA, 20 nt, Artificial Sequence
  Synthetic
cuggagagagugugaagaaa

SEQ ID NO: 779162 - RNA, 20 nt, Artificial Sequence
  Synthetic
cuggugagguugugaagaaa

SEQ ID NO: 779163 - RNA, 20 nt, Artificial Sequence
  Synthetic
cuacuuuuccaaauaagaaa

SEQ ID NO: 779164 - RNA, 20 nt, Artificial Sequence
  Synthetic
cucauaaucuaaauaagaaa

SEQ ID NO: 779165 - RNA, 20 nt, Artificial Sequence
  Synthetic
cuccccucccucauaagaaa

SEQ ID NO: 779166 - RNA, 20 nt, Artificial Sequence
  Synthetic
uuccauguuuauauaagaaa

SEQ ID NO: 779167 - RNA, 20 nt, Artificial Sequence
  Synthetic
ucucccucccuuauaagaaa

SEQ ID NO: 779168 - RNA, 20 nt, Artificial Sequence
  Synthetic
ugucaauuucuacuaagaaa

SEQ ID NO: 779169 - RNA, 20 nt, Artificial Sequence
  Synthetic
uacauaaauuggcuaagaaa

SEQ ID NO: 779170 - RNA, 20 nt, Artificial Sequence
  Synthetic
auuuccacuaugcuaagaaa

SEQ ID NO: 779171 - RNA, 20 nt, Artificial Sequence
  Synthetic
agaguaaaugcucuaagaaa

SEQ ID NO: 779172 - RNA, 20 nt, Artificial Sequence
  Synthetic
ugaguaaauguucuaagaaa

SEQ ID NO: 779173 - RNA, 20 nt, Artificial Sequence
  Synthetic
uuuguauaagguguaagaaa

SEQ ID NO: 779174 - RNA, 20 nt, Artificial Sequence
  Synthetic
agauaguuaaauuuaagaaa

SEQ ID NO: 779175 - RNA, 20 nt, Artificial Sequence
  Synthetic
agcaacgauacuuuaagaaa

SEQ ID NO: 779176 - RNA, 20 nt, Artificial Sequence
  Synthetic
agcuuauaaauuuuaagaaa

SEQ ID NO: 779177 - RNA, 20 nt, Artificial Sequence
  Synthetic
cuagguugaggaaacagaaa

SEQ ID NO: 779178 - RNA, 20 nt, Artificial Sequence
  Synthetic
uauuggcgaauaaacagaaa

SEQ ID NO: 779179 - RNA, 20 nt, Artificial Sequence
  Synthetic
ccagcaguggucaacagaaa

SEQ ID NO: 779180 - RNA, 20 nt, Artificial Sequence
  Synthetic
augaaaacaaagaacagaaa

SEQ ID NO: 779181 - RNA, 20 nt, Artificial Sequence
  Synthetic
aauguuuuucugaacagaaa

SEQ ID NO: 779182 - RNA, 20 nt, Artificial Sequence
  Synthetic
auuggacauccuaacagaaa

SEQ ID NO: 779183 - RNA, 20 nt, Artificial Sequence
  Synthetic
aauuuauauucuaacagaaa

SEQ ID NO: 779184 - RNA, 20 nt, Artificial Sequence
  Synthetic
uuuguaagaaguaacagaaa

SEQ ID NO: 779185 - RNA, 20 nt, Artificial Sequence
  Synthetic
cgaaacugaagacacagaaa

SEQ ID NO: 779186 - RNA, 20 nt, Artificial Sequence
  Synthetic
ucuuuugcaaagcacagaaa

SEQ ID NO: 779187 - RNA, 20 nt, Artificial Sequence
  Synthetic
aucuacauggaagacagaaa

SEQ ID NO: 779188 - RNA, 20 nt, Artificial Sequence
  Synthetic
agggguaaacgagacagaaa

SEQ ID NO: 779189 - RNA, 20 nt, Artificial Sequence
  Synthetic
uaguuccagaauuacagaaa

SEQ ID NO: 779190 - RNA, 20 nt, Artificial Sequence
  Synthetic
aauaaucacauuuacagaaa

SEQ ID NO: 779191 - RNA, 20 nt, Artificial Sequence
  Synthetic
caaaacaaccuuuacagaaa

SEQ ID NO: 779192 - RNA, 20 nt, Artificial Sequence
  Synthetic
ccuaauaccaaaaccagaaa

SEQ ID NO: 779193 - RNA, 20 nt, Artificial Sequence
  Synthetic
acucaugucacaaccagaaa

SEQ ID NO: 779194 - RNA, 20 nt, Artificial Sequence
  Synthetic
acuaaccguacacccagaaa

SEQ ID NO: 779195 - RNA, 20 nt, Artificial Sequence
  Synthetic
aagacugaaguccccagaaa

SEQ ID NO: 779196 - RNA, 20 nt, Artificial Sequence
  Synthetic
auauaggggaaagccagaaa

SEQ ID NO: 779197 - RNA, 20 nt, Artificial Sequence
  Synthetic
cugcucuaaaaauccagaaa

SEQ ID NO: 779198 - RNA, 20 nt, Artificial Sequence
  Synthetic
uggcugcagugauccagaaa

SEQ ID NO: 779199 - RNA, 20 nt, Artificial Sequence
  Synthetic
uccuuaaguaguuccagaaa

SEQ ID NO: 779200 - RNA, 20 nt, Artificial Sequence
  Synthetic
caauuaaaccaaggcagaaa

SEQ ID NO: 779201 - RNA, 20 nt, Artificial Sequence
  Synthetic
agguggagcucaggcagaaa

SEQ ID NO: 779202 - RNA, 20 nt, Artificial Sequence
  Synthetic
agagaagcucuaggcagaaa

SEQ ID NO: 779203 - RNA, 20 nt, Artificial Sequence
  Synthetic
uuccuuuagaaaugcagaaa

SEQ ID NO: 779204 - RNA, 20 nt, Artificial Sequence
  Synthetic
uaucucaauagaugcagaaa

SEQ ID NO: 779205 - RNA, 20 nt, Artificial Sequence
  Synthetic
acuguacuuacaaucagaaa

SEQ ID NO: 779206 - RNA, 20 nt, Artificial Sequence
  Synthetic
ugagagaaagcauucagaaa

SEQ ID NO: 779207 - RNA, 20 nt, Artificial Sequence
  Synthetic
uaauucccaggguucagaaa

SEQ ID NO: 779208 - RNA, 20 nt, Artificial Sequence
  Synthetic
acagggcgaaaaaagagaaa

SEQ ID NO: 779209 - RNA, 20 nt, Artificial Sequence
  Synthetic
ccuagcuacacaaagagaaa

SEQ ID NO: 779210 - RNA, 20 nt, Artificial Sequence
  Synthetic
auggaauucagaaagagaaa

SEQ ID NO: 779211 - RNA, 20 nt, Artificial Sequence
  Synthetic
caaaggaggggaaagagaaa

SEQ ID NO: 779212 - RNA, 20 nt, Artificial Sequence
  Synthetic
ugugagcucauaaagagaaa

SEQ ID NO: 779213 - RNA, 20 nt, Artificial Sequence
  Synthetic
ugcugcugauggaagagaaa

SEQ ID NO: 779214 - RNA, 20 nt, Artificial Sequence
  Synthetic
caaagcagcuggaagagaaa

SEQ ID NO: 779215 - RNA, 20 nt, Artificial Sequence
  Synthetic
uguggagcuuugaagagaaa

SEQ ID NO: 779216 - RNA, 20 nt, Artificial Sequence
  Synthetic
augggaauucuuaagagaaa

SEQ ID NO: 779217 - RNA, 20 nt, Artificial Sequence
  Synthetic
uuaccaggcagacagagaaa

SEQ ID NO: 779218 - RNA, 20 nt, Artificial Sequence
  Synthetic
aaauauuuaugacagagaaa

SEQ ID NO: 779219 - RNA, 20 nt, Artificial Sequence
  Synthetic
aggagcuaaguccagagaaa

SEQ ID NO: 779220 - RNA, 20 nt, Artificial Sequence
  Synthetic
uuggugaggcugcagagaaa

SEQ ID NO: 779221 - RNA, 20 nt, Artificial Sequence
  Synthetic
auggugaggcuucagagaaa

SEQ ID NO: 779222 - RNA, 20 nt, Artificial Sequence
  Synthetic
cugcgaugggaagagagaaa

SEQ ID NO: 779223 - RNA, 20 nt, Artificial Sequence
  Synthetic
cggaugggaagagagagaaa

SEQ ID NO: 779224 - RNA, 20 nt, Artificial Sequence
  Synthetic
ugugcugagauagagagaaa

SEQ ID NO: 779225 - RNA, 20 nt, Artificial Sequence
  Synthetic
cagguagacaaggagagaaa

SEQ ID NO: 779226 - RNA, 20 nt, Artificial Sequence
  Synthetic
uucacagucuuggagagaaa

SEQ ID NO: 779227 - RNA, 20 nt, Artificial Sequence
  Synthetic
aaccuauagaaugagagaaa

SEQ ID NO: 779228 - RNA, 20 nt, Artificial Sequence
  Synthetic
uuuacaauucaauagagaaa

SEQ ID NO: 779229 - RNA, 20 nt, Artificial Sequence
  Synthetic
uggcuuugaagauagagaaa

SEQ ID NO: 779230 - RNA, 20 nt, Artificial Sequence
  Synthetic
uuuagacuaugauagagaaa

SEQ ID NO: 779231 - RNA, 20 nt, Artificial Sequence
  Synthetic
aaaaggaaucacuagagaaa

SEQ ID NO: 779232 - RNA, 20 nt, Artificial Sequence
  Synthetic
cuggcauaaggcuagagaaa

SEQ ID NO: 779233 - RNA, 20 nt, Artificial Sequence
  Synthetic
ccaacacugauguagagaaa

SEQ ID NO: 779234 - RNA, 20 nt, Artificial Sequence
  Synthetic
cauauuuuacuguagagaaa

SEQ ID NO: 779235 - RNA, 20 nt, Artificial Sequence
  Synthetic
uggggcugcuccccgagaaa

SEQ ID NO: 779236 - RNA, 20 nt, Artificial Sequence
  Synthetic
ugcagaaagguuaggagaaa

SEQ ID NO: 779237 - RNA, 20 nt, Artificial Sequence
  Synthetic
cuccaaauccaagggagaaa

SEQ ID NO: 779238 - RNA, 20 nt, Artificial Sequence
  Synthetic
aaaagagccacauggagaaa

SEQ ID NO: 779239 - RNA, 20 nt, Artificial Sequence
  Synthetic
agagcugucacauggagaaa

SEQ ID NO: 779240 - RNA, 20 nt, Artificial Sequence
  Synthetic
cccauacucagauggagaaa

SEQ ID NO: 779241 - RNA, 20 nt, Artificial Sequence
  Synthetic
uuggcaagaauauggagaaa

SEQ ID NO: 779242 - RNA, 20 nt, Artificial Sequence
  Synthetic
uaaaauuaugccuggagaaa

SEQ ID NO: 779243 - RNA, 20 nt, Artificial Sequence
  Synthetic
cucuguggcaucuggagaaa

SEQ ID NO: 779244 - RNA, 20 nt, Artificial Sequence
  Synthetic
aaaagacccugguggagaaa

SEQ ID NO: 779245 - RNA, 20 nt, Artificial Sequence
  Synthetic
cuggagagaauguggagaaa

SEQ ID NO: 779246 - RNA, 20 nt, Artificial Sequence
  Synthetic
agacagaagagcaugagaaa

SEQ ID NO: 779247 - RNA, 20 nt, Artificial Sequence
  Synthetic
ccaaggauacaucugagaaa

SEQ ID NO: 779248 - RNA, 20 nt, Artificial Sequence
  Synthetic
uauaauguuuuucugagaaa

SEQ ID NO: 779249 - RNA, 20 nt, Artificial Sequence
  Synthetic
ugcuuaggaaaugugagaaa

SEQ ID NO: 779250 - RNA, 20 nt, Artificial Sequence
  Synthetic
uguuaccuggaugugagaaa

SEQ ID NO: 779251 - RNA, 20 nt, Artificial Sequence
  Synthetic
auucuuuuugccuugagaaa

SEQ ID NO: 779252 - RNA, 20 nt, Artificial Sequence
  Synthetic
uugacagaucuguugagaaa

SEQ ID NO: 779253 - RNA, 20 nt, Artificial Sequence
  Synthetic
uugauggcaauuuugagaaa

SEQ ID NO: 779254 - RNA, 20 nt, Artificial Sequence
  Synthetic
uaaauauuccuaaauagaaa

SEQ ID NO: 779255 - RNA, 20 nt, Artificial Sequence
  Synthetic
aaugauggcaacaauagaaa

SEQ ID NO: 779256 - RNA, 20 nt, Artificial Sequence
  Synthetic
aggagaauagacaauagaaa

SEQ ID NO: 779257 - RNA, 20 nt, Artificial Sequence
  Synthetic
uuuugaagcaucaauagaaa

SEQ ID NO: 779258 - RNA, 20 nt, Artificial Sequence
  Synthetic
cccuugcauuucaauagaaa

SEQ ID NO: 779259 - RNA, 20 nt, Artificial Sequence
  Synthetic
uauacguuaaauaauagaaa

SEQ ID NO: 779260 - RNA, 20 nt, Artificial Sequence
  Synthetic
cuccaaagaagacauagaaa

SEQ ID NO: 779261 - RNA, 20 nt, Artificial Sequence
  Synthetic
agugcuucaaaccauagaaa

SEQ ID NO: 779262 - RNA, 20 nt, Artificial Sequence
  Synthetic
uagcaaacagugcauagaaa

SEQ ID NO: 779263 - RNA, 20 nt, Artificial Sequence
  Synthetic
aaaaguugaacucauagaaa

SEQ ID NO: 779264 - RNA, 20 nt, Artificial Sequence
  Synthetic
acguaauguuuucauagaaa

SEQ ID NO: 779265 - RNA, 20 nt, Artificial Sequence
  Synthetic
ccuuuaugugaugauagaaa

SEQ ID NO: 779266 - RNA, 20 nt, Artificial Sequence
  Synthetic
ccugguaacuaugauagaaa

SEQ ID NO: 779267 - RNA, 20 nt, Artificial Sequence
  Synthetic
uuugauuuaagugauagaaa

SEQ ID NO: 779268 - RNA, 20 nt, Artificial Sequence
  Synthetic
uuuucacuuagauauagaaa

SEQ ID NO: 779269 - RNA, 20 nt, Artificial Sequence
  Synthetic
auuuuagcugaguauagaaa

SEQ ID NO: 779270 - RNA, 20 nt, Artificial Sequence
  Synthetic
ugccacuguguguauagaaa

SEQ ID NO: 779271 - RNA, 20 nt, Artificial Sequence
  Synthetic
acacaagcuccuuauagaaa

SEQ ID NO: 779272 - RNA, 20 nt, Artificial Sequence
  Synthetic
auacauuuuauuuauagaaa

SEQ ID NO: 779273 - RNA, 20 nt, Artificial Sequence
  Synthetic
ccuauacuauuuuauagaaa

SEQ ID NO: 779274 - RNA, 20 nt, Artificial Sequence
  Synthetic
uuaaguuacugaacuagaaa

SEQ ID NO: 779275 - RNA, 20 nt, Artificial Sequence
  Synthetic
ccaggagcugagccuagaaa

SEQ ID NO: 779276 - RNA, 20 nt, Artificial Sequence
  Synthetic
cccuaggauauuucuagaaa

SEQ ID NO: 779277 - RNA, 20 nt, Artificial Sequence
  Synthetic
ccucucuuuauuucuagaaa

SEQ ID NO: 779278 - RNA, 20 nt, Artificial Sequence
  Synthetic
uuucugucuucaaguagaaa

SEQ ID NO: 779279 - RNA, 20 nt, Artificial Sequence
  Synthetic
aaaaguaaacuaaguagaaa

SEQ ID NO: 779280 - RNA, 20 nt, Artificial Sequence
  Synthetic
cuagacaguugcaguagaaa

SEQ ID NO: 779281 - RNA, 20 nt, Artificial Sequence
  Synthetic
auuuuuucuaggaguagaaa

SEQ ID NO: 779282 - RNA, 20 nt, Artificial Sequence
  Synthetic
cccagcaagauagguagaaa

SEQ ID NO: 779283 - RNA, 20 nt, Artificial Sequence
  Synthetic
uaaaugaggguugguagaaa

SEQ ID NO: 779284 - RNA, 20 nt, Artificial Sequence
  Synthetic
uuuuguauuuuugguagaaa

SEQ ID NO: 779285 - RNA, 20 nt, Artificial Sequence
  Synthetic
caguugagaggguguagaaa

SEQ ID NO: 779286 - RNA, 20 nt, Artificial Sequence
  Synthetic
auuuuccacuuguguagaaa

SEQ ID NO: 779287 - RNA, 20 nt, Artificial Sequence
  Synthetic
uuuuuuauguuuuguagaaa

SEQ ID NO: 779288 - RNA, 20 nt, Artificial Sequence
  Synthetic
uuagaauuuuuuuguagaaa

SEQ ID NO: 779289 - RNA, 20 nt, Artificial Sequence
  Synthetic
aaaaauaaauacauuagaaa

SEQ ID NO: 779290 - RNA, 20 nt, Artificial Sequence
  Synthetic
ucuuuccuagucauuagaaa

SEQ ID NO: 779291 - RNA, 20 nt, Artificial Sequence
  Synthetic
uauuauauuuugauuagaaa

SEQ ID NO: 779292 - RNA, 20 nt, Artificial Sequence
  Synthetic
ugugaauaaaauauuagaaa

SEQ ID NO: 779293 - RNA, 20 nt, Artificial Sequence
  Synthetic
uauucugucucuauuagaaa

SEQ ID NO: 779294 - RNA, 20 nt, Artificial Sequence
  Synthetic
ugauaaauacugcuuagaaa

SEQ ID NO: 779295 - RNA, 20 nt, Artificial Sequence
  Synthetic
uugggagaagugguuagaaa

SEQ ID NO: 779296 - RNA, 20 nt, Artificial Sequence
  Synthetic
aauaauuaaaaguuuagaaa

SEQ ID NO: 779297 - RNA, 20 nt, Artificial Sequence
  Synthetic
cucuaauagaaguuuagaaa

SEQ ID NO: 779298 - RNA, 20 nt, Artificial Sequence
  Synthetic
auuuuauucuuuuuuagaaa

SEQ ID NO: 779299 - RNA, 20 nt, Artificial Sequence
  Synthetic
aucaugagcugaacacgaaa

SEQ ID NO: 779300 - RNA, 20 nt, Artificial Sequence
  Synthetic
uuuguuacggaagcacgaaa

SEQ ID NO: 779301 - RNA, 20 nt, Artificial Sequence
  Synthetic
agccuuucuaguuaccgaaa

SEQ ID NO: 779302 - RNA, 20 nt, Artificial Sequence
  Synthetic
auugcuguauagccccgaaa

SEQ ID NO: 779303 - RNA, 20 nt, Artificial Sequence
  Synthetic
agcacuuugagaggccgaaa

SEQ ID NO: 779304 - RNA, 20 nt, Artificial Sequence
  Synthetic
accagucucuggugccgaaa

SEQ ID NO: 779305 - RNA, 20 nt, Artificial Sequence
  Synthetic
cuucagaccagaagucgaaa

SEQ ID NO: 779306 - RNA, 20 nt, Artificial Sequence
  Synthetic
ugauaugagcaaaaaggaaa

SEQ ID NO: 779307 - RNA, 20 nt, Artificial Sequence
  Synthetic
aggauaaaagaaaaaggaaa

SEQ ID NO: 779308 - RNA, 20 nt, Artificial Sequence
  Synthetic
uaggaaagauaaaaaggaaa

SEQ ID NO: 779309 - RNA, 20 nt, Artificial Sequence
  Synthetic
ugcuuuucuucaaaaggaaa

SEQ ID NO: 779310 - RNA, 20 nt, Artificial Sequence
  Synthetic
cuggaagaaagaaaaggaaa

SEQ ID NO: 779311 - RNA, 20 nt, Artificial Sequence
  Synthetic
aaaggaaaaggaaaaggaaa

SEQ ID NO: 779312 - RNA, 20 nt, Artificial Sequence
  Synthetic
aaaggggcaagcaaaggaaa

SEQ ID NO: 779313 - RNA, 20 nt, Artificial Sequence
  Synthetic
ugugagcggaggaaaggaaa

SEQ ID NO: 779314 - RNA, 20 nt, Artificial Sequence
  Synthetic
uaauagaaggggaaaggaaa

SEQ ID NO: 779315 - RNA, 20 nt, Artificial Sequence
  Synthetic
uggguaauuuauaaaggaaa

SEQ ID NO: 779316 - RNA, 20 nt, Artificial Sequence
  Synthetic
cccucgccaagccaaggaaa

SEQ ID NO: 779317 - RNA, 20 nt, Artificial Sequence
  Synthetic
cugcaaggugggcaaggaaa

SEQ ID NO: 779318 - RNA, 20 nt, Artificial Sequence
  Synthetic
ugauauaauaaagaaggaaa

SEQ ID NO: 779319 - RNA, 20 nt, Artificial Sequence
  Synthetic
aaaagauuuagagaaggaaa

SEQ ID NO: 779320 - RNA, 20 nt, Artificial Sequence
  Synthetic
cauuuuuauuaggaaggaaa

SEQ ID NO: 779321 - RNA, 20 nt, Artificial Sequence
  Synthetic
aaguccaucugggaaggaaa

SEQ ID NO: 779322 - RNA, 20 nt, Artificial Sequence
  Synthetic
aggucuguaaaauaaggaaa

SEQ ID NO: 779323 - RNA, 20 nt, Artificial Sequence
  Synthetic
uguauuuauucauaaggaaa

SEQ ID NO: 779324 - RNA, 20 nt, Artificial Sequence
  Synthetic
uauaaagaaauuuaaggaaa

SEQ ID NO: 779325 - RNA, 20 nt, Artificial Sequence
  Synthetic
augccaacuaaaacaggaaa

SEQ ID NO: 779326 - RNA, 20 nt, Artificial Sequence
  Synthetic
aggguuaaugaaacaggaaa

SEQ ID NO: 779327 - RNA, 20 nt, Artificial Sequence
  Synthetic
aacauaaccacaacaggaaa

SEQ ID NO: 779328 - RNA, 20 nt, Artificial Sequence
  Synthetic
cuuugcuuaaagacaggaaa

SEQ ID NO: 779329 - RNA, 20 nt, Artificial Sequence
  Synthetic
uuaaagguuacuccaggaaa

SEQ ID NO: 779330 - RNA, 20 nt, Artificial Sequence
  Synthetic
aguauauaguacucaggaaa

SEQ ID NO: 779331 - RNA, 20 nt, Artificial Sequence
  Synthetic
uaucacauguccucaggaaa

SEQ ID NO: 779332 - RNA, 20 nt, Artificial Sequence
  Synthetic
auagaagucuagucaggaaa

SEQ ID NO: 779333 - RNA, 20 nt, Artificial Sequence
  Synthetic
cugcuccucucuucaggaaa

SEQ ID NO: 779334 - RNA, 20 nt, Artificial Sequence
  Synthetic
aagauuugguuuucaggaaa

SEQ ID NO: 779335 - RNA, 20 nt, Artificial Sequence
  Synthetic
aaagaaaaaaaaagaggaaa

SEQ ID NO: 779336 - RNA, 20 nt, Artificial Sequence
  Synthetic
uugagacauagaagaggaaa

SEQ ID NO: 779337 - RNA, 20 nt, Artificial Sequence
  Synthetic
uaugggaagggaagaggaaa

SEQ ID NO: 779338 - RNA, 20 nt, Artificial Sequence
  Synthetic
caggaaaggaggagaggaaa

SEQ ID NO: 779339 - RNA, 20 nt, Artificial Sequence
  Synthetic
uccagacugaggagaggaaa

SEQ ID NO: 779340 - RNA, 20 nt, Artificial Sequence
  Synthetic
uagugaaagaauagaggaaa

SEQ ID NO: 779341 - RNA, 20 nt, Artificial Sequence
  Synthetic
auuccugaagcuagaggaaa

SEQ ID NO: 779342 - RNA, 20 nt, Artificial Sequence
  Synthetic
acuagaaaaucuagaggaaa

SEQ ID NO: 779343 - RNA, 20 nt, Artificial Sequence
  Synthetic
uuaggcacaguuggaggaaa

SEQ ID NO: 779344 - RNA, 20 nt, Artificial Sequence
  Synthetic
agcaaugaagaaugaggaaa

SEQ ID NO: 779345 - RNA, 20 nt, Artificial Sequence
  Synthetic
uuuguuaauguaugaggaaa

SEQ ID NO: 779346 - RNA, 20 nt, Artificial Sequence
  Synthetic
cggacuguaaacugaggaaa

SEQ ID NO: 779347 - RNA, 20 nt, Artificial Sequence
  Synthetic
aaggagaaguacugaggaaa

SEQ ID NO: 779348 - RNA, 20 nt, Artificial Sequence
  Synthetic
ucaggguaguugugaggaaa

SEQ ID NO: 779349 - RNA, 20 nt, Artificial Sequence
  Synthetic
ucagaagacuacauaggaaa

SEQ ID NO: 779350 - RNA, 20 nt, Artificial Sequence
  Synthetic
aauauaguauucauaggaaa

SEQ ID NO: 779351 - RNA, 20 nt, Artificial Sequence
  Synthetic
auacugaguggaguaggaaa

SEQ ID NO: 779352 - RNA, 20 nt, Artificial Sequence
  Synthetic
caaacaaugcaauuaggaaa

SEQ ID NO: 779353 - RNA, 20 nt, Artificial Sequence
  Synthetic
cccagcuuauaauuaggaaa

SEQ ID NO: 779354 - RNA, 20 nt, Artificial Sequence
  Synthetic
uugggguggagggacggaaa

SEQ ID NO: 779355 - RNA, 20 nt, Artificial Sequence
  Synthetic
ccaccacgcccggccggaaa

SEQ ID NO: 779356 - RNA, 20 nt, Artificial Sequence
  Synthetic
uaucucaauagaagcggaaa

SEQ ID NO: 779357 - RNA, 20 nt, Artificial Sequence
  Synthetic
uuuguugauagaagcggaaa

SEQ ID NO: 779358 - RNA, 20 nt, Artificial Sequence
  Synthetic
ucugggaaggaaaagggaaa

SEQ ID NO: 779359 - RNA, 20 nt, Artificial Sequence
  Synthetic
uggaagcacuagaagggaaa

SEQ ID NO: 779360 - RNA, 20 nt, Artificial Sequence
  Synthetic
auauguaacaauaagggaaa

SEQ ID NO: 779361 - RNA, 20 nt, Artificial Sequence
  Synthetic
acaauguggacacagggaaa

SEQ ID NO: 779362 - RNA, 20 nt, Artificial Sequence
  Synthetic
aacauauacuuacagggaaa

SEQ ID NO: 779363 - RNA, 20 nt, Artificial Sequence
  Synthetic
auugcaauauuucagggaaa

SEQ ID NO: 779364 - RNA, 20 nt, Artificial Sequence
  Synthetic
cagggagagggagagggaaa

SEQ ID NO: 779365 - RNA, 20 nt, Artificial Sequence
  Synthetic
acccggaagcaggagggaaa

SEQ ID NO: 779366 - RNA, 20 nt, Artificial Sequence
  Synthetic
agaggguggaaugagggaaa

SEQ ID NO: 779367 - RNA, 20 nt, Artificial Sequence
  Synthetic
aggggacagaaguagggaaa

SEQ ID NO: 779368 - RNA, 20 nt, Artificial Sequence
  Synthetic
cauuucugaauuuagggaaa

SEQ ID NO: 779369 - RNA, 20 nt, Artificial Sequence
  Synthetic
uaagcuugcuuuuagggaaa

SEQ ID NO: 779370 - RNA, 20 nt, Artificial Sequence
  Synthetic
ucacacaaaaaaaggggaaa

SEQ ID NO: 779371 - RNA, 20 nt, Artificial Sequence
  Synthetic
acgaaugaacaaaggggaaa

SEQ ID NO: 779372 - RNA, 20 nt, Artificial Sequence
  Synthetic
uggaagauuggagggggaaa

SEQ ID NO: 779373 - RNA, 20 nt, Artificial Sequence
  Synthetic
aggguagugguagggggaaa

SEQ ID NO: 779374 - RNA, 20 nt, Artificial Sequence
  Synthetic
ccccagccaauggggggaaa

SEQ ID NO: 779375 - RNA, 20 nt, Artificial Sequence
  Synthetic
auauuacaggaauggggaaa

SEQ ID NO: 779376 - RNA, 20 nt, Artificial Sequence
  Synthetic
ugagugaaaggauggggaaa

SEQ ID NO: 779377 - RNA, 20 nt, Artificial Sequence
  Synthetic
cuuuagauauuguggggaaa

SEQ ID NO: 779378 - RNA, 20 nt, Artificial Sequence
  Synthetic
aaaucacuacauuggggaaa

SEQ ID NO: 779379 - RNA, 20 nt, Artificial Sequence
  Synthetic
uggcagguuaaaaugggaaa

SEQ ID NO: 779380 - RNA, 20 nt, Artificial Sequence
  Synthetic
uuggccucccuaaugggaaa

SEQ ID NO: 779381 - RNA, 20 nt, Artificial Sequence
  Synthetic
ugaaaauaaguaaugggaaa

SEQ ID NO: 779382 - RNA, 20 nt, Artificial Sequence
  Synthetic
ucccuaaggagcaugggaaa

SEQ ID NO: 779383 - RNA, 20 nt, Artificial Sequence
  Synthetic
caacaaaacaagaugggaaa

SEQ ID NO: 779384 - RNA, 20 nt, Artificial Sequence
  Synthetic
ucacugcccaguaugggaaa

SEQ ID NO: 779385 - RNA, 20 nt, Artificial Sequence
  Synthetic
uaaguguuagaacugggaaa

SEQ ID NO: 779386 - RNA, 20 nt, Artificial Sequence
  Synthetic
uucaaaaucucacugggaaa

SEQ ID NO: 779387 - RNA, 20 nt, Artificial Sequence
  Synthetic
cuacaugaaaaccugggaaa

SEQ ID NO: 779388 - RNA, 20 nt, Artificial Sequence
  Synthetic
aucuguacacugcugggaaa

SEQ ID NO: 779389 - RNA, 20 nt, Artificial Sequence
  Synthetic
uucaugaguuuucugggaaa

SEQ ID NO: 779390 - RNA, 20 nt, Artificial Sequence
  Synthetic
uauuuaggggaggugggaaa

SEQ ID NO: 779391 - RNA, 20 nt, Artificial Sequence
  Synthetic
aggaguuggcgggugggaaa

SEQ ID NO: 779392 - RNA, 20 nt, Artificial Sequence
  Synthetic
uugaacaugugggugggaaa

SEQ ID NO: 779393 - RNA, 20 nt, Artificial Sequence
  Synthetic
aaaaaauaagcauugggaaa

SEQ ID NO: 779394 - RNA, 20 nt, Artificial Sequence
  Synthetic
auuuuggaggucuugggaaa

SEQ ID NO: 779395 - RNA, 20 nt, Artificial Sequence
  Synthetic
aaagaauugggguugggaaa

SEQ ID NO: 779396 - RNA, 20 nt, Artificial Sequence
  Synthetic
aaugccaacugguugggaaa

SEQ ID NO: 779397 - RNA, 20 nt, Artificial Sequence
  Synthetic
cgaggcacaucaaauggaaa

SEQ ID NO: 779398 - RNA, 20 nt, Artificial Sequence
  Synthetic
cuuuuuggaagaaauggaaa

SEQ ID NO: 779399 - RNA, 20 nt, Artificial Sequence
  Synthetic
uaaggaugaugaaauggaaa

SEQ ID NO: 779400 - RNA, 20 nt, Artificial Sequence
  Synthetic
aaguauuauugaaauggaaa

SEQ ID NO: 779401 - RNA, 20 nt, Artificial Sequence
  Synthetic
auauaauuacuaaauggaaa

SEQ ID NO: 779402 - RNA, 20 nt, Artificial Sequence
  Synthetic
cuuuauccuuuaaauggaaa

SEQ ID NO: 779403 - RNA, 20 nt, Artificial Sequence
  Synthetic
auggaagaacucaauggaaa

SEQ ID NO: 779404 - RNA, 20 nt, Artificial Sequence
  Synthetic
uuuucuuuguugaauggaaa

SEQ ID NO: 779405 - RNA, 20 nt, Artificial Sequence
  Synthetic
aauauuuuuauuaauggaaa

SEQ ID NO: 779406 - RNA, 20 nt, Artificial Sequence
  Synthetic
aaaaaaaugaagcauggaaa

SEQ ID NO: 779407 - RNA, 20 nt, Artificial Sequence
  Synthetic
ugcaacaacauggauggaaa

SEQ ID NO: 779408 - RNA, 20 nt, Artificial Sequence
  Synthetic
ugaauacacuaugauggaaa

SEQ ID NO: 779409 - RNA, 20 nt, Artificial Sequence
  Synthetic
aauauuuauggauauggaaa

SEQ ID NO: 779410 - RNA, 20 nt, Artificial Sequence
  Synthetic
uucauugaucaguauggaaa

SEQ ID NO: 779411 - RNA, 20 nt, Artificial Sequence
  Synthetic
aauguucaucagacuggaaa

SEQ ID NO: 779412 - RNA, 20 nt, Artificial Sequence
  Synthetic
ccaagcaaaaaaccuggaaa

SEQ ID NO: 779413 - RNA, 20 nt, Artificial Sequence
  Synthetic
accauucacuccccuggaaa

SEQ ID NO: 779414 - RNA, 20 nt, Artificial Sequence
  Synthetic
ucaugagccacgccuggaaa

SEQ ID NO: 779415 - RNA, 20 nt, Artificial Sequence
  Synthetic
caggcucuaaaagcuggaaa

SEQ ID NO: 779416 - RNA, 20 nt, Artificial Sequence
  Synthetic
uggccaaucauggcuggaaa

SEQ ID NO: 779417 - RNA, 20 nt, Artificial Sequence
  Synthetic
ugagggagguucucuggaaa

SEQ ID NO: 779418 - RNA, 20 nt, Artificial Sequence
  Synthetic
uugcuuucucauucuggaaa

SEQ ID NO: 779419 - RNA, 20 nt, Artificial Sequence
  Synthetic
aaccuaaaauguucuggaaa

SEQ ID NO: 779420 - RNA, 20 nt, Artificial Sequence
  Synthetic
agaacuuauacgaguggaaa

SEQ ID NO: 779421 - RNA, 20 nt, Artificial Sequence
  Synthetic
caaaucaccuauaguggaaa

SEQ ID NO: 779422 - RNA, 20 nt, Artificial Sequence
  Synthetic
uaaugaauauguaguggaaa

SEQ ID NO: 779423 - RNA, 20 nt, Artificial Sequence
  Synthetic
auuaagcacugcuguggaaa

SEQ ID NO: 779424 - RNA, 20 nt, Artificial Sequence
  Synthetic
uuuguaccaucaauuggaaa

SEQ ID NO: 779425 - RNA, 20 nt, Artificial Sequence
  Synthetic
aucugaaugaacauuggaaa

SEQ ID NO: 779426 - RNA, 20 nt, Artificial Sequence
  Synthetic
acuuuagugaccauuggaaa

SEQ ID NO: 779427 - RNA, 20 nt, Artificial Sequence
  Synthetic
aaacagccuucuauuggaaa

SEQ ID NO: 779428 - RNA, 20 nt, Artificial Sequence
  Synthetic
cucagugggaguauuggaaa

SEQ ID NO: 779429 - RNA, 20 nt, Artificial Sequence
  Synthetic
acuugggagcuuauuggaaa

SEQ ID NO: 779430 - RNA, 20 nt, Artificial Sequence
  Synthetic
aaaggguaaagacuuggaaa

SEQ ID NO: 779431 - RNA, 20 nt, Artificial Sequence
  Synthetic
acucagaagacccuuggaaa

SEQ ID NO: 779432 - RNA, 20 nt, Artificial Sequence
  Synthetic
ugcaacaacauuguuggaaa

SEQ ID NO: 779433 - RNA, 20 nt, Artificial Sequence
  Synthetic
ucuuaaagcaaauuuggaaa

SEQ ID NO: 779434 - RNA, 20 nt, Artificial Sequence
  Synthetic
uaaccugacuaauuuggaaa

SEQ ID NO: 779435 - RNA, 20 nt, Artificial Sequence
  Synthetic
uuuaguauuucuuuuggaaa

SEQ ID NO: 779436 - RNA, 20 nt, Artificial Sequence
  Synthetic
aaaaucaacucaaaaugaaa

SEQ ID NO: 779437 - RNA, 20 nt, Artificial Sequence
  Synthetic
ugccuacuuucaaaaugaaa

SEQ ID NO: 779438 - RNA, 20 nt, Artificial Sequence
  Synthetic
cauggacaaggcaaaugaaa

SEQ ID NO: 779439 - RNA, 20 nt, Artificial Sequence
  Synthetic
uucucaccugucaaaugaaa

SEQ ID NO: 779440 - RNA, 20 nt, Artificial Sequence
  Synthetic
uuaaugaaauucaaaugaaa

SEQ ID NO: 779441 - RNA, 20 nt, Artificial Sequence
  Synthetic
cugaugggucauaaaugaaa

SEQ ID NO: 779442 - RNA, 20 nt, Artificial Sequence
  Synthetic
caauuuuaggaccaaugaaa

SEQ ID NO: 779443 - RNA, 20 nt, Artificial Sequence
  Synthetic
uauaauauuugucaaugaaa

SEQ ID NO: 779444 - RNA, 20 nt, Artificial Sequence
  Synthetic
uuacugaaaaaagaaugaaa

SEQ ID NO: 779445 - RNA, 20 nt, Artificial Sequence
  Synthetic
ugauguccaggagaaugaaa

SEQ ID NO: 779446 - RNA, 20 nt, Artificial Sequence
  Synthetic
uuuuaggauacugaaugaaa

SEQ ID NO: 779447 - RNA, 20 nt, Artificial Sequence
  Synthetic
aacagcacaggauaaugaaa

SEQ ID NO: 779448 - RNA, 20 nt, Artificial Sequence
  Synthetic
uacuaaaacauauaaugaaa

SEQ ID NO: 779449 - RNA, 20 nt, Artificial Sequence
  Synthetic
uuaaauguauauuaaugaaa

SEQ ID NO: 779450 - RNA, 20 nt, Artificial Sequence
  Synthetic
acagagcccauaacaugaaa

SEQ ID NO: 779451 - RNA, 20 nt, Artificial Sequence
  Synthetic
ugaguguuuuuaacaugaaa

SEQ ID NO: 779452 - RNA, 20 nt, Artificial Sequence
  Synthetic
aacuuuauaaagacaugaaa

SEQ ID NO: 779453 - RNA, 20 nt, Artificial Sequence
  Synthetic
ugugaccuuucuacaugaaa

SEQ ID NO: 779454 - RNA, 20 nt, Artificial Sequence
  Synthetic
uguaauuuauagccaugaaa

SEQ ID NO: 779455 - RNA, 20 nt, Artificial Sequence
  Synthetic
acaguuucuuuagcaugaaa

SEQ ID NO: 779456 - RNA, 20 nt, Artificial Sequence
  Synthetic
agagagcgaugaucaugaaa

SEQ ID NO: 779457 - RNA, 20 nt, Artificial Sequence
  Synthetic
ugugauaugaugucaugaaa

SEQ ID NO: 779458 - RNA, 20 nt, Artificial Sequence
  Synthetic
cuaugggaccaaagaugaaa

SEQ ID NO: 779459 - RNA, 20 nt, Artificial Sequence
  Synthetic
ccaaggagggaaagaugaaa

SEQ ID NO: 779460 - RNA, 20 nt, Artificial Sequence
  Synthetic
caauccuccuuuagaugaaa

SEQ ID NO: 779461 - RNA, 20 nt, Artificial Sequence
  Synthetic
agcuaacacccuggaugaaa

SEQ ID NO: 779462 - RNA, 20 nt, Artificial Sequence
  Synthetic
uaucauuuucuuggaugaaa

SEQ ID NO: 779463 - RNA, 20 nt, Artificial Sequence
  Synthetic
cugguauaaggaugaugaaa

SEQ ID NO: 779464 - RNA, 20 nt, Artificial Sequence
  Synthetic
auguuguuagugugaugaaa

SEQ ID NO: 779465 - RNA, 20 nt, Artificial Sequence
  Synthetic
aaaugucucaguugaugaaa

SEQ ID NO: 779466 - RNA, 20 nt, Artificial Sequence
  Synthetic
uggcaaacaagcauaugaaa

SEQ ID NO: 779467 - RNA, 20 nt, Artificial Sequence
  Synthetic
uauguaagaaggauaugaaa

SEQ ID NO: 779468 - RNA, 20 nt, Artificial Sequence
  Synthetic
uagacaguccauauaugaaa

SEQ ID NO: 779469 - RNA, 20 nt, Artificial Sequence
  Synthetic
uuauuguucuuacuaugaaa

SEQ ID NO: 779470 - RNA, 20 nt, Artificial Sequence
  Synthetic
cauuguuuacaauuaugaaa

SEQ ID NO: 779471 - RNA, 20 nt, Artificial Sequence
  Synthetic
aacuguucaaaguuaugaaa

SEQ ID NO: 779472 - RNA, 20 nt, Artificial Sequence
  Synthetic
aaaaggcaaccaaacugaaa

SEQ ID NO: 779473 - RNA, 20 nt, Artificial Sequence
  Synthetic
cagagugcugcaaacugaaa

SEQ ID NO: 779474 - RNA, 20 nt, Artificial Sequence
  Synthetic
aaggugaagguaaacugaaa

SEQ ID NO: 779475 - RNA, 20 nt, Artificial Sequence
  Synthetic
aaaaaauguucacacugaaa

SEQ ID NO: 779476 - RNA, 20 nt, Artificial Sequence
  Synthetic
ugcaagacugugcacugaaa

SEQ ID NO: 779477 - RNA, 20 nt, Artificial Sequence
  Synthetic
uaagaaaagauggacugaaa

SEQ ID NO: 779478 - RNA, 20 nt, Artificial Sequence
  Synthetic
uuguccuuuggugacugaaa

SEQ ID NO: 779479 - RNA, 20 nt, Artificial Sequence
  Synthetic
agcaucagugacuacugaaa

SEQ ID NO: 779480 - RNA, 20 nt, Artificial Sequence
  Synthetic
caaaaaaggucuuacugaaa

SEQ ID NO: 779481 - RNA, 20 nt, Artificial Sequence
  Synthetic
uggagaugaaguuacugaaa

SEQ ID NO: 779482 - RNA, 20 nt, Artificial Sequence
  Synthetic
aagcuucuauguuacugaaa

SEQ ID NO: 779483 - RNA, 20 nt, Artificial Sequence
  Synthetic
ucuguaagucaucccugaaa

SEQ ID NO: 779484 - RNA, 20 nt, Artificial Sequence
  Synthetic
uuaagucuaugggccugaaa

SEQ ID NO: 779485 - RNA, 20 nt, Artificial Sequence
  Synthetic
uuguuaauuccauccugaaa

SEQ ID NO: 779486 - RNA, 20 nt, Artificial Sequence
  Synthetic
uucaaauuucagagcugaaa

SEQ ID NO: 779487 - RNA, 20 nt, Artificial Sequence
  Synthetic
agugggaaggggagcugaaa

SEQ ID NO: 779488 - RNA, 20 nt, Artificial Sequence
  Synthetic
auauuaucacuaaucugaaa

SEQ ID NO: 779489 - RNA, 20 nt, Artificial Sequence
  Synthetic
uaaaaacagcucaucugaaa

SEQ ID NO: 779490 - RNA, 20 nt, Artificial Sequence
  Synthetic
auuaccaaaagagucugaaa

SEQ ID NO: 779491 - RNA, 20 nt, Artificial Sequence
  Synthetic
acaaucuggcaggucugaaa

SEQ ID NO: 779492 - RNA, 20 nt, Artificial Sequence
  Synthetic
uaugcucauggggucugaaa

SEQ ID NO: 779493 - RNA, 20 nt, Artificial Sequence
  Synthetic
uuaugaggugcugucugaaa

SEQ ID NO: 779494 - RNA, 20 nt, Artificial Sequence
  Synthetic
cucuugaggguauucugaaa

SEQ ID NO: 779495 - RNA, 20 nt, Artificial Sequence
  Synthetic
cgccuuugaaacuucugaaa

SEQ ID NO: 779496 - RNA, 20 nt, Artificial Sequence
  Synthetic
ugcagauguggguucugaaa

SEQ ID NO: 779497 - RNA, 20 nt, Artificial Sequence
  Synthetic
aucaguaguccuuucugaaa

SEQ ID NO: 779498 - RNA, 20 nt, Artificial Sequence
  Synthetic
cagguauccaguuucugaaa

SEQ ID NO: 779499 - RNA, 20 nt, Artificial Sequence
  Synthetic
aaguuucacaaaaagugaaa

SEQ ID NO: 779500 - RNA, 20 nt, Artificial Sequence
  Synthetic
uagguaggagaaaagugaaa

SEQ ID NO: 779501 - RNA, 20 nt, Artificial Sequence
  Synthetic
cagaguuuaaauaagugaaa

SEQ ID NO: 779502 - RNA, 20 nt, Artificial Sequence
  Synthetic
ucaucuugguggcagugaaa

SEQ ID NO: 779503 - RNA, 20 nt, Artificial Sequence
  Synthetic
ugaaugaugaugcagugaaa

SEQ ID NO: 779504 - RNA, 20 nt, Artificial Sequence
  Synthetic
aguuuauaaaacuagugaaa

SEQ ID NO: 779505 - RNA, 20 nt, Artificial Sequence
  Synthetic
aauguuuuuaaaacgugaaa

SEQ ID NO: 779506 - RNA, 20 nt, Artificial Sequence
  Synthetic
uauaaucuucuggcgugaaa

SEQ ID NO: 779507 - RNA, 20 nt, Artificial Sequence
  Synthetic
aggacaaucccaaggugaaa

SEQ ID NO: 779508 - RNA, 20 nt, Artificial Sequence
  Synthetic
uugucaagcagaaggugaaa

SEQ ID NO: 779509 - RNA, 20 nt, Artificial Sequence
  Synthetic
aaggcuuugauagggugaaa

SEQ ID NO: 779510 - RNA, 20 nt, Artificial Sequence
  Synthetic
cuaaaaaugaaaaugugaaa

SEQ ID NO: 779511 - RNA, 20 nt, Artificial Sequence
  Synthetic
auugguuuugaaaugugaaa

SEQ ID NO: 779512 - RNA, 20 nt, Artificial Sequence
  Synthetic
cuaagauaauaaaugugaaa

SEQ ID NO: 779513 - RNA, 20 nt, Artificial Sequence
  Synthetic
caguuuuauccaaugugaaa

SEQ ID NO: 779514 - RNA, 20 nt, Artificial Sequence
  Synthetic
uuguuggugggaaugugaaa

SEQ ID NO: 779515 - RNA, 20 nt, Artificial Sequence
  Synthetic
ccauuuaggugaaugugaaa

SEQ ID NO: 779516 - RNA, 20 nt, Artificial Sequence
  Synthetic
uggccaacagguaugugaaa

SEQ ID NO: 779517 - RNA, 20 nt, Artificial Sequence
  Synthetic
aaugcugaacaacugugaaa

SEQ ID NO: 779518 - RNA, 20 nt, Artificial Sequence
  Synthetic
aauaaucuuccacugugaaa

SEQ ID NO: 779519 - RNA, 20 nt, Artificial Sequence
  Synthetic
ucauuuccagcacugugaaa

SEQ ID NO: 779520 - RNA, 20 nt, Artificial Sequence
  Synthetic
uuuuugagauuacugugaaa

SEQ ID NO: 779521 - RNA, 20 nt, Artificial Sequence
  Synthetic
ucuccuaucacccugugaaa

SEQ ID NO: 779522 - RNA, 20 nt, Artificial Sequence
  Synthetic
aaggucagauagcugugaaa

SEQ ID NO: 779523 - RNA, 20 nt, Artificial Sequence
  Synthetic
aaaacuucuguguugugaaa

SEQ ID NO: 779524 - RNA, 20 nt, Artificial Sequence
  Synthetic
aauagaguauuaaauugaaa

SEQ ID NO: 779525 - RNA, 20 nt, Artificial Sequence
  Synthetic
uaacaauaccucaauugaaa

SEQ ID NO: 779526 - RNA, 20 nt, Artificial Sequence
  Synthetic
ucuccaaacaagaauugaaa

SEQ ID NO: 779527 - RNA, 20 nt, Artificial Sequence
  Synthetic
aaaaacaguggagauugaaa

SEQ ID NO: 779528 - RNA, 20 nt, Artificial Sequence
  Synthetic
auuuuucaguuggauugaaa

SEQ ID NO: 779529 - RNA, 20 nt, Artificial Sequence
  Synthetic
ugcucaugcuuugauugaaa

SEQ ID NO: 779530 - RNA, 20 nt, Artificial Sequence
  Synthetic
cacugaugaaaauauugaaa

SEQ ID NO: 779531 - RNA, 20 nt, Artificial Sequence
  Synthetic
uaccuguauucauauugaaa

SEQ ID NO: 779532 - RNA, 20 nt, Artificial Sequence
  Synthetic
uauuuaaaguauuauugaaa

SEQ ID NO: 779533 - RNA, 20 nt, Artificial Sequence
  Synthetic
aucuccagaucuccuugaaa

SEQ ID NO: 779534 - RNA, 20 nt, Artificial Sequence
  Synthetic
uuggaauagauuccuugaaa

SEQ ID NO: 779535 - RNA, 20 nt, Artificial Sequence
  Synthetic
uuuauuuuucaagcuugaaa

SEQ ID NO: 779536 - RNA, 20 nt, Artificial Sequence
  Synthetic
auuuuaugugaggcuugaaa

SEQ ID NO: 779537 - RNA, 20 nt, Artificial Sequence
  Synthetic
aaaaaaaaaaaaucuugaaa

SEQ ID NO: 779538 - RNA, 20 nt, Artificial Sequence
  Synthetic
auacacccacacucuugaaa

SEQ ID NO: 779539 - RNA, 20 nt, Artificial Sequence
  Synthetic
cuuauacauaguucuugaaa

SEQ ID NO: 779540 - RNA, 20 nt, Artificial Sequence
  Synthetic
acauuuuuuaaucguugaaa

SEQ ID NO: 779541 - RNA, 20 nt, Artificial Sequence
  Synthetic
ucauuaccauuauguugaaa

SEQ ID NO: 779542 - RNA, 20 nt, Artificial Sequence
  Synthetic
ugcaggaccauuuguugaaa

SEQ ID NO: 779543 - RNA, 20 nt, Artificial Sequence
  Synthetic
uuaauaauacacauuugaaa

SEQ ID NO: 779544 - RNA, 20 nt, Artificial Sequence
  Synthetic
ugaggaaaugacauuugaaa

SEQ ID NO: 779545 - RNA, 20 nt, Artificial Sequence
  Synthetic
uagugaguagccauuugaaa

SEQ ID NO: 779546 - RNA, 20 nt, Artificial Sequence
  Synthetic
cauuucuacccuauuugaaa

SEQ ID NO: 779547 - RNA, 20 nt, Artificial Sequence
  Synthetic
agaaauuuaguuauuugaaa

SEQ ID NO: 779548 - RNA, 20 nt, Artificial Sequence
  Synthetic
ucugagugguaacuuugaaa

SEQ ID NO: 779549 - RNA, 20 nt, Artificial Sequence
  Synthetic
aagucuaagcuacuuugaaa

SEQ ID NO: 779550 - RNA, 20 nt, Artificial Sequence
  Synthetic
aaaauaacuuuacuuugaaa

SEQ ID NO: 779551 - RNA, 20 nt, Artificial Sequence
  Synthetic
auuuggugacuucuuugaaa

SEQ ID NO: 779552 - RNA, 20 nt, Artificial Sequence
  Synthetic
uggaagucagaaguuugaaa

SEQ ID NO: 779553 - RNA, 20 nt, Artificial Sequence
  Synthetic
cagucccaaggaguuugaaa

SEQ ID NO: 779554 - RNA, 20 nt, Artificial Sequence
  Synthetic
uaagagcagaaauuuugaaa

SEQ ID NO: 779555 - RNA, 20 nt, Artificial Sequence
  Synthetic
uauccaaaaauauuuugaaa

SEQ ID NO: 779556 - RNA, 20 nt, Artificial Sequence
  Synthetic
aucugacauauauuuugaaa

SEQ ID NO: 779557 - RNA, 20 nt, Artificial Sequence
  Synthetic
uuagaucauauauuuugaaa

SEQ ID NO: 779558 - RNA, 20 nt, Artificial Sequence
  Synthetic
caaaccaguguauuuugaaa

SEQ ID NO: 779559 - RNA, 20 nt, Artificial Sequence
  Synthetic
cacugccauuucuuuugaaa

SEQ ID NO: 779560 - RNA, 20 nt, Artificial Sequence
  Synthetic
ugggaaaugucguuuugaaa

SEQ ID NO: 779561 - RNA, 20 nt, Artificial Sequence
  Synthetic
uugauacaguuguuuugaaa

SEQ ID NO: 779562 - RNA, 20 nt, Artificial Sequence
  Synthetic
agaagauauuauuuuugaaa

SEQ ID NO: 779563 - RNA, 20 nt, Artificial Sequence
  Synthetic
auaagaagugguuuuugaaa

SEQ ID NO: 779564 - RNA, 20 nt, Artificial Sequence
  Synthetic
aauuuuuuuuuuuuuugaaa

SEQ ID NO: 779565 - RNA, 20 nt, Artificial Sequence
  Synthetic
cuaaaugugcaaaaaauaaa

SEQ ID NO: 779566 - RNA, 20 nt, Artificial Sequence
  Synthetic
uugaagaugacaaaaauaaa

SEQ ID NO: 779567 - RNA, 20 nt, Artificial Sequence
  Synthetic
uauggcagaagaaaaauaaa

SEQ ID NO: 779568 - RNA, 20 nt, Artificial Sequence
  Synthetic
aguuaagaaauaaaaauaaa

SEQ ID NO: 779569 - RNA, 20 nt, Artificial Sequence
  Synthetic
uuugauuuucacaaaauaaa

SEQ ID NO: 779570 - RNA, 20 nt, Artificial Sequence
  Synthetic
acacauaggcucaaaauaaa

SEQ ID NO: 779571 - RNA, 20 nt, Artificial Sequence
  Synthetic
uuaucauuaaugaaaauaaa

SEQ ID NO: 779572 - RNA, 20 nt, Artificial Sequence
  Synthetic
ugugaacuugauaaaauaaa

SEQ ID NO: 779573 - RNA, 20 nt, Artificial Sequence
  Synthetic
ucuuugguuuauaaaauaaa

SEQ ID NO: 779574 - RNA, 20 nt, Artificial Sequence
  Synthetic
uugaagaugacacaaauaaa

SEQ ID NO: 779575 - RNA, 20 nt, Artificial Sequence
  Synthetic
ccuuaaggaauacaaauaaa

SEQ ID NO: 779576 - RNA, 20 nt, Artificial Sequence
  Synthetic
agguuucuaccccaaauaaa

SEQ ID NO: 779577 - RNA, 20 nt, Artificial Sequence
  Synthetic
uuccucccacuccaaauaaa

SEQ ID NO: 779578 - RNA, 20 nt, Artificial Sequence
  Synthetic
acaauuacucagcaaauaaa

SEQ ID NO: 779579 - RNA, 20 nt, Artificial Sequence
  Synthetic
aaaaaucacuugcaaauaaa

SEQ ID NO: 779580 - RNA, 20 nt, Artificial Sequence
  Synthetic
aggcaggaaaaagaaauaaa

SEQ ID NO: 779581 - RNA, 20 nt, Artificial Sequence
  Synthetic
aggcaggagaaagaaauaaa

SEQ ID NO: 779582 - RNA, 20 nt, Artificial Sequence
  Synthetic
aggcaagggaaagaaauaaa

SEQ ID NO: 779583 - RNA, 20 nt, Artificial Sequence
  Synthetic
ucaaaacaaugagaaauaaa

SEQ ID NO: 779584 - RNA, 20 nt, Artificial Sequence
  Synthetic
uaaaaauuacuagaaauaaa

SEQ ID NO: 779585 - RNA, 20 nt, Artificial Sequence
  Synthetic
aggcaggagaaggaaauaaa

SEQ ID NO: 779586 - RNA, 20 nt, Artificial Sequence
  Synthetic
agaaacaaggaggaaauaaa

SEQ ID NO: 779587 - RNA, 20 nt, Artificial Sequence
  Synthetic
acacacagacuggaaauaaa

SEQ ID NO: 779588 - RNA, 20 nt, Artificial Sequence
  Synthetic
cgagaggggcuggaaauaaa

SEQ ID NO: 779589 - RNA, 20 nt, Artificial Sequence
  Synthetic
ugaaaaauggcugaaauaaa

SEQ ID NO: 779590 - RNA, 20 nt, Artificial Sequence
  Synthetic
cucaauucugcugaaauaaa

SEQ ID NO: 779591 - RNA, 20 nt, Artificial Sequence
  Synthetic
cucaacaagcacuaaauaaa

SEQ ID NO: 779592 - RNA, 20 nt, Artificial Sequence
  Synthetic
acagacaauaccuaaauaaa

SEQ ID NO: 779593 - RNA, 20 nt, Artificial Sequence
  Synthetic
aaauuaaaaaucuaaauaaa

SEQ ID NO: 779594 - RNA, 20 nt, Artificial Sequence
  Synthetic
auucuuuuuuucuaaauaaa

SEQ ID NO: 779595 - RNA, 20 nt, Artificial Sequence
  Synthetic
uacucaaaagauuaaauaaa

SEQ ID NO: 779596 - RNA, 20 nt, Artificial Sequence
  Synthetic
uguuucccuuauuaaauaaa

SEQ ID NO: 779597 - RNA, 20 nt, Artificial Sequence
  Synthetic
auauuuugguuuuaaauaaa

SEQ ID NO: 779598 - RNA, 20 nt, Artificial Sequence
  Synthetic
uccauuuucuacacaauaaa

SEQ ID NO: 779599 - RNA, 20 nt, Artificial Sequence
  Synthetic
uccuuggaaaccacaauaaa

SEQ ID NO: 779600 - RNA, 20 nt, Artificial Sequence
  Synthetic
cuucaaaggaugacaauaaa

SEQ ID NO: 779601 - RNA, 20 nt, Artificial Sequence
  Synthetic
uagggaagauagccaauaaa

SEQ ID NO: 779602 - RNA, 20 nt, Artificial Sequence
  Synthetic
aguuuccaagcagcaauaaa

SEQ ID NO: 779603 - RNA, 20 nt, Artificial Sequence
  Synthetic
agacaaagcaaggcaauaaa

SEQ ID NO: 779604 - RNA, 20 nt, Artificial Sequence
  Synthetic
caaauggacacaucaauaaa

SEQ ID NO: 779605 - RNA, 20 nt, Artificial Sequence
  Synthetic
uauagguauucaucaauaaa

SEQ ID NO: 779606 - RNA, 20 nt, Artificial Sequence
  Synthetic
aggacucccuacucaauaaa

SEQ ID NO: 779607 - RNA, 20 nt, Artificial Sequence
  Synthetic
acuaguagacccucaauaaa

SEQ ID NO: 779608 - RNA, 20 nt, Artificial Sequence
  Synthetic
auauucuacaucucaauaaa

SEQ ID NO: 779609 - RNA, 20 nt, Artificial Sequence
  Synthetic
aagguguuuuauucaauaaa

SEQ ID NO: 779610 - RNA, 20 nt, Artificial Sequence
  Synthetic
uagcuaaucucuucaauaaa

SEQ ID NO: 779611 - RNA, 20 nt, Artificial Sequence
  Synthetic
aggacagucucuucaauaaa

SEQ ID NO: 779612 - RNA, 20 nt, Artificial Sequence
  Synthetic
auuauuacuauaagaauaaa

SEQ ID NO: 779613 - RNA, 20 nt, Artificial Sequence
  Synthetic
acucauggagacagaauaaa

SEQ ID NO: 779614 - RNA, 20 nt, Artificial Sequence
  Synthetic
acauaaauaaggagaauaaa

SEQ ID NO: 779615 - RNA, 20 nt, Artificial Sequence
  Synthetic
aguaucaauaugagaauaaa

SEQ ID NO: 779616 - RNA, 20 nt, Artificial Sequence
  Synthetic
aaucugcacuauagaauaaa

SEQ ID NO: 779617 - RNA, 20 nt, Artificial Sequence
  Synthetic
auucuuucaacuagaauaaa

SEQ ID NO: 779618 - RNA, 20 nt, Artificial Sequence
  Synthetic
aaaaaggauuuuagaauaaa

SEQ ID NO: 779619 - RNA, 20 nt, Artificial Sequence
  Synthetic
aguaaugaacaaugaauaaa

SEQ ID NO: 779620 - RNA, 20 nt, Artificial Sequence
  Synthetic
uuuuacuuuccaugaauaaa

SEQ ID NO: 779621 - RNA, 20 nt, Artificial Sequence
  Synthetic
caauucuugucaugaauaaa

SEQ ID NO: 779622 - RNA, 20 nt, Artificial Sequence
  Synthetic
ccaguaacaacaauaauaaa

SEQ ID NO: 779623 - RNA, 20 nt, Artificial Sequence
  Synthetic
caccagucaauaauaauaaa

SEQ ID NO: 779624 - RNA, 20 nt, Artificial Sequence
  Synthetic
agaagaaaugacauaauaaa

SEQ ID NO: 779625 - RNA, 20 nt, Artificial Sequence
  Synthetic
aauaaauuuaauauaauaaa

SEQ ID NO: 779626 - RNA, 20 nt, Artificial Sequence
  Synthetic
auaauccagcauauaauaaa

SEQ ID NO: 779627 - RNA, 20 nt, Artificial Sequence
  Synthetic
aucuuagauucucuaauaaa

SEQ ID NO: 779628 - RNA, 20 nt, Artificial Sequence
  Synthetic
uaaacuaaagaaguaauaaa

SEQ ID NO: 779629 - RNA, 20 nt, Artificial Sequence
  Synthetic
aaaggcugugcaguaauaaa

SEQ ID NO: 779630 - RNA, 20 nt, Artificial Sequence
  Synthetic
aauagauguuggguaauaaa

SEQ ID NO: 779631 - RNA, 20 nt, Artificial Sequence
  Synthetic
aacugaaaauaauuaauaaa

SEQ ID NO: 779632 - RNA, 20 nt, Artificial Sequence
  Synthetic
aacuuccacaucuuaauaaa

SEQ ID NO: 779633 - RNA, 20 nt, Artificial Sequence
  Synthetic
caaauucccuauuuaauaaa

SEQ ID NO: 779634 - RNA, 20 nt, Artificial Sequence
  Synthetic
aagauucccuauuuaauaaa

SEQ ID NO: 779635 - RNA, 20 nt, Artificial Sequence
  Synthetic
aggauucccuauuuaauaaa

SEQ ID NO: 779636 - RNA, 20 nt, Artificial Sequence
  Synthetic
cucacaccaaguuuaauaaa

SEQ ID NO: 779637 - RNA, 20 nt, Artificial Sequence
  Synthetic
aaguugauuauuuuaauaaa

SEQ ID NO: 779638 - RNA, 20 nt, Artificial Sequence
  Synthetic
aauauauacccaaacauaaa

SEQ ID NO: 779639 - RNA, 20 nt, Artificial Sequence
  Synthetic
aaaaugguagagaacauaaa

SEQ ID NO: 779640 - RNA, 20 nt, Artificial Sequence
  Synthetic
uuuuuucccugacacauaaa

SEQ ID NO: 779641 - RNA, 20 nt, Artificial Sequence
  Synthetic
augguuuuauaauacauaaa

SEQ ID NO: 779642 - RNA, 20 nt, Artificial Sequence
  Synthetic
aauggggaauauuacauaaa

SEQ ID NO: 779643 - RNA, 20 nt, Artificial Sequence
  Synthetic
aguccaggauaauccauaaa

SEQ ID NO: 779644 - RNA, 20 nt, Artificial Sequence
  Synthetic
acugcugcuuaguccauaaa

SEQ ID NO: 779645 - RNA, 20 nt, Artificial Sequence
  Synthetic
ugaaaacaaaagcgcauaaa

SEQ ID NO: 779646 - RNA, 20 nt, Artificial Sequence
  Synthetic
auugcaaccuuaggcauaaa

SEQ ID NO: 779647 - RNA, 20 nt, Artificial Sequence
  Synthetic
caaaauguacguaucauaaa

SEQ ID NO: 779648 - RNA, 20 nt, Artificial Sequence
  Synthetic
aagucuaauguccucauaaa

SEQ ID NO: 779649 - RNA, 20 nt, Artificial Sequence
  Synthetic
cuaagaguuuuucucauaaa

SEQ ID NO: 779650 - RNA, 20 nt, Artificial Sequence
  Synthetic
aaguaugguguugucauaaa

SEQ ID NO: 779651 - RNA, 20 nt, Artificial Sequence
  Synthetic
cuuggagaagcauucauaaa

SEQ ID NO: 779652 - RNA, 20 nt, Artificial Sequence
  Synthetic
uaauaaucuagaaagauaaa

SEQ ID NO: 779653 - RNA, 20 nt, Artificial Sequence
  Synthetic
cuaucaccaucacagauaaa

SEQ ID NO: 779654 - RNA, 20 nt, Artificial Sequence
  Synthetic
aggaguaauagccagauaaa

SEQ ID NO: 779655 - RNA, 20 nt, Artificial Sequence
  Synthetic
caaaaauaucuugagauaaa

SEQ ID NO: 779656 - RNA, 20 nt, Artificial Sequence
  Synthetic
aauuuuuauuuugagauaaa

SEQ ID NO: 779657 - RNA, 20 nt, Artificial Sequence
  Synthetic
aaauaaauaauaacgauaaa

SEQ ID NO: 779658 - RNA, 20 nt, Artificial Sequence
  Synthetic
uggauguacagagcgauaaa

SEQ ID NO: 779659 - RNA, 20 nt, Artificial Sequence
  Synthetic
cucacagcuugaaggauaaa

SEQ ID NO: 779660 - RNA, 20 nt, Artificial Sequence
  Synthetic
uuccaaaaaguaaggauaaa

SEQ ID NO: 779661 - RNA, 20 nt, Artificial Sequence
  Synthetic
uuuucacccuuaaggauaaa

SEQ ID NO: 779662 - RNA, 20 nt, Artificial Sequence
  Synthetic
ugugucuuuaacaggauaaa

SEQ ID NO: 779663 - RNA, 20 nt, Artificial Sequence
  Synthetic
ucauuguguguggggauaaa

SEQ ID NO: 779664 - RNA, 20 nt, Artificial Sequence
  Synthetic
auuauaaugcaauggauaaa

SEQ ID NO: 779665 - RNA, 20 nt, Artificial Sequence
  Synthetic
auaauauaggaauggauaaa

SEQ ID NO: 779666 - RNA, 20 nt, Artificial Sequence
  Synthetic
ccacuccagccauggauaaa

SEQ ID NO: 779667 - RNA, 20 nt, Artificial Sequence
  Synthetic
aaaccuuuuuuuuggauaaa

SEQ ID NO: 779668 - RNA, 20 nt, Artificial Sequence
  Synthetic
acacaagaaaaaaugauaaa

SEQ ID NO: 779669 - RNA, 20 nt, Artificial Sequence
  Synthetic
acacaauaaaaaaugauaaa

SEQ ID NO: 779670 - RNA, 20 nt, Artificial Sequence
  Synthetic
augcaauaaaaaaugauaaa

SEQ ID NO: 779671 - RNA, 20 nt, Artificial Sequence
  Synthetic
agacauuguauaaugauaaa

SEQ ID NO: 779672 - RNA, 20 nt, Artificial Sequence
  Synthetic
uaucaaaguagacugauaaa

SEQ ID NO: 779673 - RNA, 20 nt, Artificial Sequence
  Synthetic
uaacaaucuuuccugauaaa

SEQ ID NO: 779674 - RNA, 20 nt, Artificial Sequence
  Synthetic
caaccuacucaucugauaaa

SEQ ID NO: 779675 - RNA, 20 nt, Artificial Sequence
  Synthetic
uggguuaagucauugauaaa

SEQ ID NO: 779676 - RNA, 20 nt, Artificial Sequence
  Synthetic
aauguccauugauugauaaa

SEQ ID NO: 779677 - RNA, 20 nt, Artificial Sequence
  Synthetic
aaacuguaaugcuugauaaa

SEQ ID NO: 779678 - RNA, 20 nt, Artificial Sequence
  Synthetic
aaaagacaucauuugauaaa

SEQ ID NO: 779679 - RNA, 20 nt, Artificial Sequence
  Synthetic
uacauuguucaaaauauaaa

SEQ ID NO: 779680 - RNA, 20 nt, Artificial Sequence
  Synthetic
uauauuaguugaaauauaaa

SEQ ID NO: 779681 - RNA, 20 nt, Artificial Sequence
  Synthetic
auauuaacuuuaaauauaaa

SEQ ID NO: 779682 - RNA, 20 nt, Artificial Sequence
  Synthetic
ucagccuuccuacauauaaa

SEQ ID NO: 779683 - RNA, 20 nt, Artificial Sequence
  Synthetic
acauagaagaaccauauaaa

SEQ ID NO: 779684 - RNA, 20 nt, Artificial Sequence
  Synthetic
cuucauugaaagcauauaaa

SEQ ID NO: 779685 - RNA, 20 nt, Artificial Sequence
  Synthetic
cauacugccuggcauauaaa

SEQ ID NO: 779686 - RNA, 20 nt, Artificial Sequence
  Synthetic
cuuuagauacaucauauaaa

SEQ ID NO: 779687 - RNA, 20 nt, Artificial Sequence
  Synthetic
ucucagacaccucauauaaa

SEQ ID NO: 779688 - RNA, 20 nt, Artificial Sequence
  Synthetic
aaaacacggauggauauaaa

SEQ ID NO: 779689 - RNA, 20 nt, Artificial Sequence
  Synthetic
cauuucuaaagugauauaaa

SEQ ID NO: 779690 - RNA, 20 nt, Artificial Sequence
  Synthetic
cucauguugaaauauauaaa

SEQ ID NO: 779691 - RNA, 20 nt, Artificial Sequence
  Synthetic
cuucuaagugaauauauaaa

SEQ ID NO: 779692 - RNA, 20 nt, Artificial Sequence
  Synthetic
aaccauguauaauauauaaa

SEQ ID NO: 779693 - RNA, 20 nt, Artificial Sequence
  Synthetic
caacaaaggagauauauaaa

SEQ ID NO: 779694 - RNA, 20 nt, Artificial Sequence
  Synthetic
agagcacaaauauauauaaa

SEQ ID NO: 779695 - RNA, 20 nt, Artificial Sequence
  Synthetic
augaguaguaguuauauaaa

SEQ ID NO: 779696 - RNA, 20 nt, Artificial Sequence
  Synthetic
aaggaaaggaagacuauaaa

SEQ ID NO: 779697 - RNA, 20 nt, Artificial Sequence
  Synthetic
cuuagaugugauccuauaaa

SEQ ID NO: 779698 - RNA, 20 nt, Artificial Sequence
  Synthetic
aaaaacugaugagcuauaaa

SEQ ID NO: 779699 - RNA, 20 nt, Artificial Sequence
  Synthetic
cucugccuaugcucuauaaa

SEQ ID NO: 779700 - RNA, 20 nt, Artificial Sequence
  Synthetic
aauggcaugaucucuauaaa

SEQ ID NO: 779701 - RNA, 20 nt, Artificial Sequence
  Synthetic
ucauuuuccuugucuauaaa

SEQ ID NO: 779702 - RNA, 20 nt, Artificial Sequence
  Synthetic
caguuuagaauuucuauaaa

SEQ ID NO: 779703 - RNA, 20 nt, Artificial Sequence
  Synthetic
ugauauuauucuaguauaaa

SEQ ID NO: 779704 - RNA, 20 nt, Artificial Sequence
  Synthetic
uuguauaaaucacguauaaa

SEQ ID NO: 779705 - RNA, 20 nt, Artificial Sequence
  Synthetic
aguuauaaaauugguauaaa

SEQ ID NO: 779706 - RNA, 20 nt, Artificial Sequence
  Synthetic
uuuggauaagcaauuauaaa

SEQ ID NO: 779707 - RNA, 20 nt, Artificial Sequence
  Synthetic
agacugugugcaauuauaaa

SEQ ID NO: 779708 - RNA, 20 nt, Artificial Sequence
  Synthetic
ugcguguucucacuuauaaa

SEQ ID NO: 779709 - RNA, 20 nt, Artificial Sequence
  Synthetic
auuuuaauugaucuuauaaa

SEQ ID NO: 779710 - RNA, 20 nt, Artificial Sequence
  Synthetic
uaauuguaauguguuauaaa

SEQ ID NO: 779711 - RNA, 20 nt, Artificial Sequence
  Synthetic
cuuaugaguuuauuuauaaa

SEQ ID NO: 779712 - RNA, 20 nt, Artificial Sequence
  Synthetic
uacuauucagccuuuauaaa

SEQ ID NO: 779713 - RNA, 20 nt, Artificial Sequence
  Synthetic
aagccuagagaguuuauaaa

SEQ ID NO: 779714 - RNA, 20 nt, Artificial Sequence
  Synthetic
agcaguugugauuuuauaaa

SEQ ID NO: 779715 - RNA, 20 nt, Artificial Sequence
  Synthetic
agaucagaugguuuuauaaa

SEQ ID NO: 779716 - RNA, 20 nt, Artificial Sequence
  Synthetic
agaucugaugguuuuauaaa

SEQ ID NO: 779717 - RNA, 20 nt, Artificial Sequence
  Synthetic
acaauucaguguuuuauaaa

SEQ ID NO: 779718 - RNA, 20 nt, Artificial Sequence
  Synthetic
cuacauuuccccaaacuaaa

SEQ ID NO: 779719 - RNA, 20 nt, Artificial Sequence
  Synthetic
uaacagccaagagaacuaaa

SEQ ID NO: 779720 - RNA, 20 nt, Artificial Sequence
  Synthetic
uguuucuuagggugacuaaa

SEQ ID NO: 779721 - RNA, 20 nt, Artificial Sequence
  Synthetic
uuuccaaaagaaauacuaaa

SEQ ID NO: 779722 - RNA, 20 nt, Artificial Sequence
  Synthetic
aucaagcaauacauacuaaa

SEQ ID NO: 779723 - RNA, 20 nt, Artificial Sequence
  Synthetic
auuuagaaaaaacuacuaaa

SEQ ID NO: 779724 - RNA, 20 nt, Artificial Sequence
  Synthetic
caguugauagaacuacuaaa

SEQ ID NO: 779725 - RNA, 20 nt, Artificial Sequence
  Synthetic
uuaugagagauuguacuaaa

SEQ ID NO: 779726 - RNA, 20 nt, Artificial Sequence
  Synthetic
ugacuauaucaguuacuaaa

SEQ ID NO: 779727 - RNA, 20 nt, Artificial Sequence
  Synthetic
uucucuuggcuguuacuaaa

SEQ ID NO: 779728 - RNA, 20 nt, Artificial Sequence
  Synthetic
aauuuguucuuuuuacuaaa

SEQ ID NO: 779729 - RNA, 20 nt, Artificial Sequence
  Synthetic
uguacauugugucaccuaaa

SEQ ID NO: 779730 - RNA, 20 nt, Artificial Sequence
  Synthetic
ccauuucacauucaccuaaa

SEQ ID NO: 779731 - RNA, 20 nt, Artificial Sequence
  Synthetic
ucucucuuaggggaccuaaa

SEQ ID NO: 779732 - RNA, 20 nt, Artificial Sequence
  Synthetic
ugccaagugcacuaccuaaa

SEQ ID NO: 779733 - RNA, 20 nt, Artificial Sequence
  Synthetic
aaggugauggauacccuaaa

SEQ ID NO: 779734 - RNA, 20 nt, Artificial Sequence
  Synthetic
cuaagaccuaauucccuaaa

SEQ ID NO: 779735 - RNA, 20 nt, Artificial Sequence
  Synthetic
cuuaguuuggguucccuaaa

SEQ ID NO: 779736 - RNA, 20 nt, Artificial Sequence
  Synthetic
agacauagucucagccuaaa

SEQ ID NO: 779737 - RNA, 20 nt, Artificial Sequence
  Synthetic
cuaaaguccacaggccuaaa

SEQ ID NO: 779738 - RNA, 20 nt, Artificial Sequence
  Synthetic
cacaagcccagaggccuaaa

SEQ ID NO: 779739 - RNA, 20 nt, Artificial Sequence
  Synthetic
uggggaggaacaauccuaaa

SEQ ID NO: 779740 - RNA, 20 nt, Artificial Sequence
  Synthetic
agcuuuucuucucuccuaaa

SEQ ID NO: 779741 - RNA, 20 nt, Artificial Sequence
  Synthetic
aguuauaguucuuuccuaaa

SEQ ID NO: 779742 - RNA, 20 nt, Artificial Sequence
  Synthetic
auacaaaauaaaaagcuaaa

SEQ ID NO: 779743 - RNA, 20 nt, Artificial Sequence
  Synthetic
cccaaggucaccaagcuaaa

SEQ ID NO: 779744 - RNA, 20 nt, Artificial Sequence
  Synthetic
ccagcaaaacaacagcuaaa

SEQ ID NO: 779745 - RNA, 20 nt, Artificial Sequence
  Synthetic
cauaauaugugacagcuaaa

SEQ ID NO: 779746 - RNA, 20 nt, Artificial Sequence
  Synthetic
aaagcugaagagcagcuaaa

SEQ ID NO: 779747 - RNA, 20 nt, Artificial Sequence
  Synthetic
caccuagaaaaucagcuaaa

SEQ ID NO: 779748 - RNA, 20 nt, Artificial Sequence
  Synthetic
auuucaguauuucagcuaaa

SEQ ID NO: 779749 - RNA, 20 nt, Artificial Sequence
  Synthetic
aaggauuuaagggagcuaaa

SEQ ID NO: 779750 - RNA, 20 nt, Artificial Sequence
  Synthetic
uuauuuuuaguugagcuaaa

SEQ ID NO: 779751 - RNA, 20 nt, Artificial Sequence
  Synthetic
cucaaagucauauagcuaaa

SEQ ID NO: 779752 - RNA, 20 nt, Artificial Sequence
  Synthetic
auaccaugugccuagcuaaa

SEQ ID NO: 779753 - RNA, 20 nt, Artificial Sequence
  Synthetic
uuuuuggauaugacgcuaaa

SEQ ID NO: 779754 - RNA, 20 nt, Artificial Sequence
  Synthetic
aaaaaaauuuaaaggcuaaa

SEQ ID NO: 779755 - RNA, 20 nt, Artificial Sequence
  Synthetic
ccacuccagccauggcuaaa

SEQ ID NO: 779756 - RNA, 20 nt, Artificial Sequence
  Synthetic
uacacucucugguggcuaaa

SEQ ID NO: 779757 - RNA, 20 nt, Artificial Sequence
  Synthetic
ccagugcugugaaugcuaaa

SEQ ID NO: 779758 - RNA, 20 nt, Artificial Sequence
  Synthetic
uaaaaaugguaagugcuaaa

SEQ ID NO: 779759 - RNA, 20 nt, Artificial Sequence
  Synthetic
caguuuccuccuuugcuaaa

SEQ ID NO: 779760 - RNA, 20 nt, Artificial Sequence
  Synthetic
uguucaugugcuuugcuaaa

SEQ ID NO: 779761 - RNA, 20 nt, Artificial Sequence
  Synthetic
ucauaaaaucuaaaucuaaa

SEQ ID NO: 779762 - RNA, 20 nt, Artificial Sequence
  Synthetic
ccucuugcagggaaucuaaa

SEQ ID NO: 779763 - RNA, 20 nt, Artificial Sequence
  Synthetic
aguaaagucuuuaaucuaaa

SEQ ID NO: 779764 - RNA, 20 nt, Artificial Sequence
  Synthetic
uauucaugugaauaucuaaa

SEQ ID NO: 779765 - RNA, 20 nt, Artificial Sequence
  Synthetic
uauagaacuaccuaucuaaa

SEQ ID NO: 779766 - RNA, 20 nt, Artificial Sequence
  Synthetic
ucauacgguaauacucuaaa

SEQ ID NO: 779767 - RNA, 20 nt, Artificial Sequence
  Synthetic
auaugccuggagccucuaaa

SEQ ID NO: 779768 - RNA, 20 nt, Artificial Sequence
  Synthetic
caaucuugacguccucuaaa

SEQ ID NO: 779769 - RNA, 20 nt, Artificial Sequence
  Synthetic
uaugaauacuuaucucuaaa

SEQ ID NO: 779770 - RNA, 20 nt, Artificial Sequence
  Synthetic
caauucagcgugucucuaaa

SEQ ID NO: 779771 - RNA, 20 nt, Artificial Sequence
  Synthetic
uauacguuauaaagucuaaa

SEQ ID NO: 779772 - RNA, 20 nt, Artificial Sequence
  Synthetic
uuaauacaacgaauucuaaa

SEQ ID NO: 779773 - RNA, 20 nt, Artificial Sequence
  Synthetic
uuacuuagcuuuauucuaaa

SEQ ID NO: 779774 - RNA, 20 nt, Artificial Sequence
  Synthetic
aaaugugcacagcuucuaaa

SEQ ID NO: 779775 - RNA, 20 nt, Artificial Sequence
  Synthetic
auucuuuuuuugcuucuaaa

SEQ ID NO: 779776 - RNA, 20 nt, Artificial Sequence
  Synthetic
caauguuuaauucuucuaaa

SEQ ID NO: 779777 - RNA, 20 nt, Artificial Sequence
  Synthetic
ccucuugugaaaguucuaaa

SEQ ID NO: 779778 - RNA, 20 nt, Artificial Sequence
  Synthetic
uauuucuuaagaguucuaaa

SEQ ID NO: 779779 - RNA, 20 nt, Artificial Sequence
  Synthetic
aguucaauccuauuucuaaa

SEQ ID NO: 779780 - RNA, 20 nt, Artificial Sequence
  Synthetic
uaucaaucacuuuuucuaaa

SEQ ID NO: 779781 - RNA, 20 nt, Artificial Sequence
  Synthetic
ccuuuacuagaaaaaguaaa

SEQ ID NO: 779782 - RNA, 20 nt, Artificial Sequence
  Synthetic
aaaguagacagaaaaguaaa

SEQ ID NO: 779783 - RNA, 20 nt, Artificial Sequence
  Synthetic
augcauagacugaaaguaaa

SEQ ID NO: 779784 - RNA, 20 nt, Artificial Sequence
  Synthetic
cuggaauuugugaaaguaaa

SEQ ID NO: 779785 - RNA, 20 nt, Artificial Sequence
  Synthetic
caaacauauuuccaaguaaa

SEQ ID NO: 779786 - RNA, 20 nt, Artificial Sequence
  Synthetic
auguucacaugggaaguaaa

SEQ ID NO: 779787 - RNA, 20 nt, Artificial Sequence
  Synthetic
acuagcaacugauaaguaaa

SEQ ID NO: 779788 - RNA, 20 nt, Artificial Sequence
  Synthetic
ucuuugcaaaucuaaguaaa

SEQ ID NO: 779789 - RNA, 20 nt, Artificial Sequence
  Synthetic
agcugugagcccacaguaaa

SEQ ID NO: 779790 - RNA, 20 nt, Artificial Sequence
  Synthetic
accaaaacaauuacaguaaa

SEQ ID NO: 779791 - RNA, 20 nt, Artificial Sequence
  Synthetic
cauuauuuucccccaguaaa

SEQ ID NO: 779792 - RNA, 20 nt, Artificial Sequence
  Synthetic
cuguguccuaucccaguaaa

SEQ ID NO: 779793 - RNA, 20 nt, Artificial Sequence
  Synthetic
aguguacagaauccaguaaa

SEQ ID NO: 779794 - RNA, 20 nt, Artificial Sequence
  Synthetic
aggauucccuauucaguaaa

SEQ ID NO: 779795 - RNA, 20 nt, Artificial Sequence
  Synthetic
agaggcaaaugaagaguaaa

SEQ ID NO: 779796 - RNA, 20 nt, Artificial Sequence
  Synthetic
acucuuguacagagaguaaa

SEQ ID NO: 779797 - RNA, 20 nt, Artificial Sequence
  Synthetic
aaagauaauauuagaguaaa

SEQ ID NO: 779798 - RNA, 20 nt, Artificial Sequence
  Synthetic
ccacuuuacagaggaguaaa

SEQ ID NO: 779799 - RNA, 20 nt, Artificial Sequence
  Synthetic
cucccacagguuggaguaaa

SEQ ID NO: 779800 - RNA, 20 nt, Artificial Sequence
  Synthetic
aaaguuguugucugaguaaa

SEQ ID NO: 779801 - RNA, 20 nt, Artificial Sequence
  Synthetic
cagauauuacugugaguaaa

SEQ ID NO: 779802 - RNA, 20 nt, Artificial Sequence
  Synthetic
aacagaauucccauaguaaa

SEQ ID NO: 779803 - RNA, 20 nt, Artificial Sequence
  Synthetic
auaucaauaguuauaguaaa

SEQ ID NO: 779804 - RNA, 20 nt, Artificial Sequence
  Synthetic
aaauucaaugagguaguaaa

SEQ ID NO: 779805 - RNA, 20 nt, Artificial Sequence
  Synthetic
aaacauuuugguguaguaaa

SEQ ID NO: 779806 - RNA, 20 nt, Artificial Sequence
  Synthetic
uuuauuuuuggauuaguaaa

SEQ ID NO: 779807 - RNA, 20 nt, Artificial Sequence
  Synthetic
auaauuacuaacuuaguaaa

SEQ ID NO: 779808 - RNA, 20 nt, Artificial Sequence
  Synthetic
uucuguaauguaaacguaaa

SEQ ID NO: 779809 - RNA, 20 nt, Artificial Sequence
  Synthetic
uuaucuaaguaucccguaaa

SEQ ID NO: 779810 - RNA, 20 nt, Artificial Sequence
  Synthetic
uaaaauaagcaagucguaaa

SEQ ID NO: 779811 - RNA, 20 nt, Artificial Sequence
  Synthetic
caaacuugaaaauagguaaa

SEQ ID NO: 779812 - RNA, 20 nt, Artificial Sequence
  Synthetic
uauuuauauucaacgguaaa

SEQ ID NO: 779813 - RNA, 20 nt, Artificial Sequence
  Synthetic
cuaaaguauuuaaggguaaa

SEQ ID NO: 779814 - RNA, 20 nt, Artificial Sequence
  Synthetic
ccagaaacauuagggguaaa

SEQ ID NO: 779815 - RNA, 20 nt, Artificial Sequence
  Synthetic
uugaagaacuuagggguaaa

SEQ ID NO: 779816 - RNA, 20 nt, Artificial Sequence
  Synthetic
auugggagaagcuggguaaa

SEQ ID NO: 779817 - RNA, 20 nt, Artificial Sequence
  Synthetic
uuacauuacauaaugguaaa

SEQ ID NO: 779818 - RNA, 20 nt, Artificial Sequence
  Synthetic
aaaauaucacuugugguaaa

SEQ ID NO: 779819 - RNA, 20 nt, Artificial Sequence
  Synthetic
aguuucguuaccuugguaaa

SEQ ID NO: 779820 - RNA, 20 nt, Artificial Sequence
  Synthetic
aacagccuuucuuugguaaa

SEQ ID NO: 779821 - RNA, 20 nt, Artificial Sequence
  Synthetic
cugaaacacaguuugguaaa

SEQ ID NO: 779822 - RNA, 20 nt, Artificial Sequence
  Synthetic
uugcuuauacaaaauguaaa

SEQ ID NO: 779823 - RNA, 20 nt, Artificial Sequence
  Synthetic
auauuaacuuuaaauguaaa

SEQ ID NO: 779824 - RNA, 20 nt, Artificial Sequence
  Synthetic
uuugcagaccucaauguaaa

SEQ ID NO: 779825 - RNA, 20 nt, Artificial Sequence
  Synthetic
ucuugcucugggaauguaaa

SEQ ID NO: 779826 - RNA, 20 nt, Artificial Sequence
  Synthetic
auauuuacuuugaauguaaa

SEQ ID NO: 779827 - RNA, 20 nt, Artificial Sequence
  Synthetic
acaauuuaauggcauguaaa

SEQ ID NO: 779828 - RNA, 20 nt, Artificial Sequence
  Synthetic
ugaugcauuagugauguaaa

SEQ ID NO: 779829 - RNA, 20 nt, Artificial Sequence
  Synthetic
ucuuuccccaaauauguaaa

SEQ ID NO: 779830 - RNA, 20 nt, Artificial Sequence
  Synthetic
auauacuguuuauauguaaa

SEQ ID NO: 779831 - RNA, 20 nt, Artificial Sequence
  Synthetic
uaaauaguguccuauguaaa

SEQ ID NO: 779832 - RNA, 20 nt, Artificial Sequence
  Synthetic
uauuuccuuuccuauguaaa

SEQ ID NO: 779833 - RNA, 20 nt, Artificial Sequence
  Synthetic
uauuacauaugcuauguaaa

SEQ ID NO: 779834 - RNA, 20 nt, Artificial Sequence
  Synthetic
uuuacuuuguauuauguaaa

SEQ ID NO: 779835 - RNA, 20 nt, Artificial Sequence
  Synthetic
cuucauuuuugcccuguaaa

SEQ ID NO: 779836 - RNA, 20 nt, Artificial Sequence
  Synthetic
ucauuguuaaaggcuguaaa

SEQ ID NO: 779837 - RNA, 20 nt, Artificial Sequence
  Synthetic
agcccaccucucucuguaaa

SEQ ID NO: 779838 - RNA, 20 nt, Artificial Sequence
  Synthetic
auuauauuaguuucuguaaa

SEQ ID NO: 779839 - RNA, 20 nt, Artificial Sequence
  Synthetic
uggauauuuuuuucuguaaa

SEQ ID NO: 779840 - RNA, 20 nt, Artificial Sequence
  Synthetic
ccaaacuagguuaguguaaa

SEQ ID NO: 779841 - RNA, 20 nt, Artificial Sequence
  Synthetic
aagaaucaauaucguguaaa

SEQ ID NO: 779842 - RNA, 20 nt, Artificial Sequence
  Synthetic
ucaaaaagugaauguguaaa

SEQ ID NO: 779843 - RNA, 20 nt, Artificial Sequence
  Synthetic
aaaaaugacgauuguguaaa

SEQ ID NO: 779844 - RNA, 20 nt, Artificial Sequence
  Synthetic
augucauggaagauuguaaa

SEQ ID NO: 779845 - RNA, 20 nt, Artificial Sequence
  Synthetic
cagauaaugucaguuguaaa

SEQ ID NO: 779846 - RNA, 20 nt, Artificial Sequence
  Synthetic
aauaaaacaaauguuguaaa

SEQ ID NO: 779847 - RNA, 20 nt, Artificial Sequence
  Synthetic
caguauaucuuauuuguaaa

SEQ ID NO: 779848 - RNA, 20 nt, Artificial Sequence
  Synthetic
accaugaagaaaaaauuaaa

SEQ ID NO: 779849 - RNA, 20 nt, Artificial Sequence
  Synthetic
acccuaaguauaaaauuaaa

SEQ ID NO: 779850 - RNA, 20 nt, Artificial Sequence
  Synthetic
ugcccuccuguaaaauuaaa

SEQ ID NO: 779851 - RNA, 20 nt, Artificial Sequence
  Synthetic
aaaauauacaccaaauuaaa

SEQ ID NO: 779852 - RNA, 20 nt, Artificial Sequence
  Synthetic
caaacccaauagaaauuaaa

SEQ ID NO: 779853 - RNA, 20 nt, Artificial Sequence
  Synthetic
uugaucuuauagaaauuaaa

SEQ ID NO: 779854 - RNA, 20 nt, Artificial Sequence
  Synthetic
uugagcaugucucaauuaaa

SEQ ID NO: 779855 - RNA, 20 nt, Artificial Sequence
  Synthetic
cuuucaacaccagaauuaaa

SEQ ID NO: 779856 - RNA, 20 nt, Artificial Sequence
  Synthetic
uccuuccacauagaauuaaa

SEQ ID NO: 779857 - RNA, 20 nt, Artificial Sequence
  Synthetic
aacaauuaagaggaauuaaa

SEQ ID NO: 779858 - RNA, 20 nt, Artificial Sequence
  Synthetic
ugaaugcaucacuaauuaaa

SEQ ID NO: 779859 - RNA, 20 nt, Artificial Sequence
  Synthetic
agauuuaaaguguaauuaaa

SEQ ID NO: 779860 - RNA, 20 nt, Artificial Sequence
  Synthetic
ugaguauuuuguuaauuaaa

SEQ ID NO: 779861 - RNA, 20 nt, Artificial Sequence
  Synthetic
ugaauaauuuuuuaauuaaa

SEQ ID NO: 779862 - RNA, 20 nt, Artificial Sequence
  Synthetic
auaaaauuagaaacauuaaa

SEQ ID NO: 779863 - RNA, 20 nt, Artificial Sequence
  Synthetic
agacaggaggagacauuaaa

SEQ ID NO: 779864 - RNA, 20 nt, Artificial Sequence
  Synthetic
uugaaaaauucuacauuaaa

SEQ ID NO: 779865 - RNA, 20 nt, Artificial Sequence
  Synthetic
aguugucacuuuacauuaaa

SEQ ID NO: 779866 - RNA, 20 nt, Artificial Sequence
  Synthetic
aaauuaaaaacaccauuaaa

SEQ ID NO: 779867 - RNA, 20 nt, Artificial Sequence
  Synthetic
auuuuauuuuacccauuaaa

SEQ ID NO: 779868 - RNA, 20 nt, Artificial Sequence
  Synthetic
caagcuucugaaucauuaaa

SEQ ID NO: 779869 - RNA, 20 nt, Artificial Sequence
  Synthetic
cauauuagaugcucauuaaa

SEQ ID NO: 779870 - RNA, 20 nt, Artificial Sequence
  Synthetic
uagaauugcuagagauuaaa

SEQ ID NO: 779871 - RNA, 20 nt, Artificial Sequence
  Synthetic
aaaaaaacaacgagauuaaa

SEQ ID NO: 779872 - RNA, 20 nt, Artificial Sequence
  Synthetic
aaucaaaaagccugauuaaa

SEQ ID NO: 779873 - RNA, 20 nt, Artificial Sequence
  Synthetic
auaacugaaguuugauuaaa

SEQ ID NO: 779874 - RNA, 20 nt, Artificial Sequence
  Synthetic
acuuuuugaggaauauuaaa

SEQ ID NO: 779875 - RNA, 20 nt, Artificial Sequence
  Synthetic
cuuaacuccuuaauauuaaa

SEQ ID NO: 779876 - RNA, 20 nt, Artificial Sequence
  Synthetic
aaugggauuuacauauuaaa

SEQ ID NO: 779877 - RNA, 20 nt, Artificial Sequence
  Synthetic
aaucgugaaaugauauuaaa

SEQ ID NO: 779878 - RNA, 20 nt, Artificial Sequence
  Synthetic
cuuggaggcuuuauauuaaa

SEQ ID NO: 779879 - RNA, 20 nt, Artificial Sequence
  Synthetic
uaugggcagaguguauuaaa

SEQ ID NO: 779880 - RNA, 20 nt, Artificial Sequence
  Synthetic
acucuuauauaauuauuaaa

SEQ ID NO: 779881 - RNA, 20 nt, Artificial Sequence
  Synthetic
uuuauuuaucucuuauuaaa

SEQ ID NO: 779882 - RNA, 20 nt, Artificial Sequence
  Synthetic
aauuacauucauuuauuaaa

SEQ ID NO: 779883 - RNA, 20 nt, Artificial Sequence
  Synthetic
aauuugcugacuuuauuaaa

SEQ ID NO: 779884 - RNA, 20 nt, Artificial Sequence
  Synthetic
aguacaaaaaccaacuuaaa

SEQ ID NO: 779885 - RNA, 20 nt, Artificial Sequence
  Synthetic
uauuugcuauaugacuuaaa

SEQ ID NO: 779886 - RNA, 20 nt, Artificial Sequence
  Synthetic
uuaucaaagaucuacuuaaa

SEQ ID NO: 779887 - RNA, 20 nt, Artificial Sequence
  Synthetic
uuauuuuuaaauuacuuaaa

SEQ ID NO: 779888 - RNA, 20 nt, Artificial Sequence
  Synthetic
caagaacuuuaaaccuuaaa

SEQ ID NO: 779889 - RNA, 20 nt, Artificial Sequence
  Synthetic
cauguugaaggaaccuuaaa

SEQ ID NO: 779890 - RNA, 20 nt, Artificial Sequence
  Synthetic
uuaaaugcaauaaccuuaaa

SEQ ID NO: 779891 - RNA, 20 nt, Artificial Sequence
  Synthetic
agggaaucugcuaccuuaaa

SEQ ID NO: 779892 - RNA, 20 nt, Artificial Sequence
  Synthetic
auaaauagaauacccuuaaa

SEQ ID NO: 779893 - RNA, 20 nt, Artificial Sequence
  Synthetic
uaaaauguuugagccuuaaa

SEQ ID NO: 779894 - RNA, 20 nt, Artificial Sequence
  Synthetic
aauaugacucuguccuuaaa

SEQ ID NO: 779895 - RNA, 20 nt, Artificial Sequence
  Synthetic
aauaggcauuuaugcuuaaa

SEQ ID NO: 779896 - RNA, 20 nt, Artificial Sequence
  Synthetic
aaagaucuagaaaucuuaaa

SEQ ID NO: 779897 - RNA, 20 nt, Artificial Sequence
  Synthetic
aggaagaacacacucuuaaa

SEQ ID NO: 779898 - RNA, 20 nt, Artificial Sequence
  Synthetic
acuucaggcaggcucuuaaa

SEQ ID NO: 779899 - RNA, 20 nt, Artificial Sequence
  Synthetic
aagcauucauggcucuuaaa

SEQ ID NO: 779900 - RNA, 20 nt, Artificial Sequence
  Synthetic
uuauaucagagucucuuaaa

SEQ ID NO: 779901 - RNA, 20 nt, Artificial Sequence
  Synthetic
uucauuuguguauucuuaaa

SEQ ID NO: 779902 - RNA, 20 nt, Artificial Sequence
  Synthetic
cccuugcucuacuucuuaaa

SEQ ID NO: 779903 - RNA, 20 nt, Artificial Sequence
  Synthetic
cucuucuugcucuucuuaaa

SEQ ID NO: 779904 - RNA, 20 nt, Artificial Sequence
  Synthetic
cuauucaaucucuucuuaaa

SEQ ID NO: 779905 - RNA, 20 nt, Artificial Sequence
  Synthetic
auauugguauuuuucuuaaa

SEQ ID NO: 779906 - RNA, 20 nt, Artificial Sequence
  Synthetic
ccuuguauuuuaaaguuaaa

SEQ ID NO: 779907 - RNA, 20 nt, Artificial Sequence
  Synthetic
cuuuuaucuuccaaguuaaa

SEQ ID NO: 779908 - RNA, 20 nt, Artificial Sequence
  Synthetic
aauaugcaggagaaguuaaa

SEQ ID NO: 779909 - RNA, 20 nt, Artificial Sequence
  Synthetic
auggugaggaugcaguuaaa

SEQ ID NO: 779910 - RNA, 20 nt, Artificial Sequence
  Synthetic
uaaaucacaggucaguuaaa

SEQ ID NO: 779911 - RNA, 20 nt, Artificial Sequence
  Synthetic
uucauuucacuucaguuaaa

SEQ ID NO: 779912 - RNA, 20 nt, Artificial Sequence
  Synthetic
acuuuuguccuggaguuaaa

SEQ ID NO: 779913 - RNA, 20 nt, Artificial Sequence
  Synthetic
cacuuaacuaaugaguuaaa

SEQ ID NO: 779914 - RNA, 20 nt, Artificial Sequence
  Synthetic
aaugggauggcugaguuaaa

SEQ ID NO: 779915 - RNA, 20 nt, Artificial Sequence
  Synthetic
aucagaugccaaacguuaaa

SEQ ID NO: 779916 - RNA, 20 nt, Artificial Sequence
  Synthetic
uagguaaguuacacguuaaa

SEQ ID NO: 779917 - RNA, 20 nt, Artificial Sequence
  Synthetic
uacuucuuucucacguuaaa

SEQ ID NO: 779918 - RNA, 20 nt, Artificial Sequence
  Synthetic
cauagucaaaauagguuaaa

SEQ ID NO: 779919 - RNA, 20 nt, Artificial Sequence
  Synthetic
aauuccaguucuagguuaaa

SEQ ID NO: 779920 - RNA, 20 nt, Artificial Sequence
  Synthetic
cauucaccuaaaugguuaaa

SEQ ID NO: 779921 - RNA, 20 nt, Artificial Sequence
  Synthetic
uaaucuaagugcugguuaaa

SEQ ID NO: 779922 - RNA, 20 nt, Artificial Sequence
  Synthetic
acagcagggaaaauguuaaa

SEQ ID NO: 779923 - RNA, 20 nt, Artificial Sequence
  Synthetic
auuaaaagaaggauguuaaa

SEQ ID NO: 779924 - RNA, 20 nt, Artificial Sequence
  Synthetic
cuuuguguuuauauguuaaa

SEQ ID NO: 779925 - RNA, 20 nt, Artificial Sequence
  Synthetic
agggcauuagaaguguuaaa

SEQ ID NO: 779926 - RNA, 20 nt, Artificial Sequence
  Synthetic
uuagcacuugccuuguuaaa

SEQ ID NO: 779927 - RNA, 20 nt, Artificial Sequence
  Synthetic
cucaaaacauguuuguuaaa

SEQ ID NO: 779928 - RNA, 20 nt, Artificial Sequence
  Synthetic
cugcgccuugcuaauuuaaa

SEQ ID NO: 779929 - RNA, 20 nt, Artificial Sequence
  Synthetic
uuuaggaagcuuaauuuaaa

SEQ ID NO: 779930 - RNA, 20 nt, Artificial Sequence
  Synthetic
uaaauagcucuuaauuuaaa

SEQ ID NO: 779931 - RNA, 20 nt, Artificial Sequence
  Synthetic
auuucucauuuacauuuaaa

SEQ ID NO: 779932 - RNA, 20 nt, Artificial Sequence
  Synthetic
cuuacagcuaugcauuuaaa

SEQ ID NO: 779933 - RNA, 20 nt, Artificial Sequence
  Synthetic
ucagaucuuguucauuuaaa

SEQ ID NO: 779934 - RNA, 20 nt, Artificial Sequence
  Synthetic
uacaugauaaaagauuuaaa

SEQ ID NO: 779935 - RNA, 20 nt, Artificial Sequence
  Synthetic
ccuacuugaacagauuuaaa

SEQ ID NO: 779936 - RNA, 20 nt, Artificial Sequence
  Synthetic
uuuauugucauagauuuaaa

SEQ ID NO: 779937 - RNA, 20 nt, Artificial Sequence
  Synthetic
auagaacugauugauuuaaa

SEQ ID NO: 779938 - RNA, 20 nt, Artificial Sequence
  Synthetic
agcucuuuauauuauuuaaa

SEQ ID NO: 779939 - RNA, 20 nt, Artificial Sequence
  Synthetic
caaaucuauauuuauuuaaa

SEQ ID NO: 779940 - RNA, 20 nt, Artificial Sequence
  Synthetic
auagcaugcauuacuuuaaa

SEQ ID NO: 779941 - RNA, 20 nt, Artificial Sequence
  Synthetic
uaauaaacaguuacuuuaaa

SEQ ID NO: 779942 - RNA, 20 nt, Artificial Sequence
  Synthetic
uuccaugaagucccuuuaaa

SEQ ID NO: 779943 - RNA, 20 nt, Artificial Sequence
  Synthetic
ugaagccuuuauccuuuaaa

SEQ ID NO: 779944 - RNA, 20 nt, Artificial Sequence
  Synthetic
agcugcugugguucuuuaaa

SEQ ID NO: 779945 - RNA, 20 nt, Artificial Sequence
  Synthetic
aaugaguguccagguuuaaa

SEQ ID NO: 779946 - RNA, 20 nt, Artificial Sequence
  Synthetic
uguaggucaacauguuuaaa

SEQ ID NO: 779947 - RNA, 20 nt, Artificial Sequence
  Synthetic
aauuggaaauuauguuuaaa

SEQ ID NO: 779948 - RNA, 20 nt, Artificial Sequence
  Synthetic
auguuuaauaaaauuuuaaa

SEQ ID NO: 779949 - RNA, 20 nt, Artificial Sequence
  Synthetic
uucauccuauaaauuuuaaa

SEQ ID NO: 779950 - RNA, 20 nt, Artificial Sequence
  Synthetic
uguuuuacuuaaauuuuaaa

SEQ ID NO: 779951 - RNA, 20 nt, Artificial Sequence
  Synthetic
uauccauuuuaaauuuuaaa

SEQ ID NO: 779952 - RNA, 20 nt, Artificial Sequence
  Synthetic
aaacaaaagagaauuuuaaa

SEQ ID NO: 779953 - RNA, 20 nt, Artificial Sequence
  Synthetic
auaaucaccuuaauuuuaaa

SEQ ID NO: 779954 - RNA, 20 nt, Artificial Sequence
  Synthetic
aucacaaaacacauuuuaaa

SEQ ID NO: 779955 - RNA, 20 nt, Artificial Sequence
  Synthetic
cgaguuugggucauuuuaaa

SEQ ID NO: 779956 - RNA, 20 nt, Artificial Sequence
  Synthetic
auaaauauauucauuuuaaa

SEQ ID NO: 779957 - RNA, 20 nt, Artificial Sequence
  Synthetic
auauaaaagcugauuuuaaa

SEQ ID NO: 779958 - RNA, 20 nt, Artificial Sequence
  Synthetic
ugcuuccuaaauauuuuaaa

SEQ ID NO: 779959 - RNA, 20 nt, Artificial Sequence
  Synthetic
aaucaaaauaauauuuuaaa

SEQ ID NO: 779960 - RNA, 20 nt, Artificial Sequence
  Synthetic
uauaaauaauauauuuuaaa

SEQ ID NO: 779961 - RNA, 20 nt, Artificial Sequence
  Synthetic
uaauucuuguauauuuuaaa

SEQ ID NO: 779962 - RNA, 20 nt, Artificial Sequence
  Synthetic
aauuucauuucuauuuuaaa

SEQ ID NO: 779963 - RNA, 20 nt, Artificial Sequence
  Synthetic
aaaccacauuuuauuuuaaa

SEQ ID NO: 779964 - RNA, 20 nt, Artificial Sequence
  Synthetic
ucuuguuagucacuuuuaaa

SEQ ID NO: 779965 - RNA, 20 nt, Artificial Sequence
  Synthetic
cucuuccuugcccuuuuaaa

SEQ ID NO: 779966 - RNA, 20 nt, Artificial Sequence
  Synthetic
aggauccucugccuuuuaaa

SEQ ID NO: 779967 - RNA, 20 nt, Artificial Sequence
  Synthetic
ccuacauaaacaguuuuaaa

SEQ ID NO: 779968 - RNA, 20 nt, Artificial Sequence
  Synthetic
augaacucaucaguuuuaaa

SEQ ID NO: 779969 - RNA, 20 nt, Artificial Sequence
  Synthetic
uuaguuuuauauguuuuaaa

SEQ ID NO: 779970 - RNA, 20 nt, Artificial Sequence
  Synthetic
aauuggaacuuuguuuuaaa

SEQ ID NO: 779971 - RNA, 20 nt, Artificial Sequence
  Synthetic
ucucgcugaaaauuuuuaaa

SEQ ID NO: 779972 - RNA, 20 nt, Artificial Sequence
  Synthetic
uuauaaagugaauuuuuaaa

SEQ ID NO: 779973 - RNA, 20 nt, Artificial Sequence
  Synthetic
cacuaaaaaucauuuuuaaa

SEQ ID NO: 779974 - RNA, 20 nt, Artificial Sequence
  Synthetic
augugcaauucauuuuuaaa

SEQ ID NO: 779975 - RNA, 20 nt, Artificial Sequence
  Synthetic
aagaaugucagauuuuuaaa

SEQ ID NO: 779976 - RNA, 20 nt, Artificial Sequence
  Synthetic
auaacauauugauuuuuaaa

SEQ ID NO: 779977 - RNA, 20 nt, Artificial Sequence
  Synthetic
aaacagucuauauuuuuaaa

SEQ ID NO: 779978 - RNA, 20 nt, Artificial Sequence
  Synthetic
uuugugcacguauuuuuaaa

SEQ ID NO: 779979 - RNA, 20 nt, Artificial Sequence
  Synthetic
uuagaaaacaacuuuuuaaa

SEQ ID NO: 779980 - RNA, 20 nt, Artificial Sequence
  Synthetic
aggaagugggauuuuuuaaa

SEQ ID NO: 779981 - RNA, 20 nt, Artificial Sequence
  Synthetic
uacaaacuaacuuuuuuaaa

SEQ ID NO: 779982 - RNA, 20 nt, Artificial Sequence
  Synthetic
auuugcuuaauuuuuuuaaa

SEQ ID NO: 779983 - RNA, 20 nt, Artificial Sequence
  Synthetic
cagagaaggauuuuuuuaaa

SEQ ID NO: 779984 - RNA, 20 nt, Artificial Sequence
  Synthetic
auuuaaaauuuuuuuuuaaa

SEQ ID NO: 779985 - RNA, 20 nt, Artificial Sequence
  Synthetic
uuuuauucaagaaaaaacaa

SEQ ID NO: 779986 - RNA, 20 nt, Artificial Sequence
  Synthetic
uguaaacaagacaaaaacaa

SEQ ID NO: 779987 - RNA, 20 nt, Artificial Sequence
  Synthetic
caaugagacacacaaaacaa

SEQ ID NO: 779988 - RNA, 20 nt, Artificial Sequence
  Synthetic
ugcaguuuauuccaaaacaa

SEQ ID NO: 779989 - RNA, 20 nt, Artificial Sequence
  Synthetic
uagggaugggggcaaaacaa

SEQ ID NO: 779990 - RNA, 20 nt, Artificial Sequence
  Synthetic
ccaaaauuccuucaaaacaa

SEQ ID NO: 779991 - RNA, 20 nt, Artificial Sequence
  Synthetic
uaguugaaacaagaaaacaa

SEQ ID NO: 779992 - RNA, 20 nt, Artificial Sequence
  Synthetic
auaauaauaacagaaaacaa

SEQ ID NO: 779993 - RNA, 20 nt, Artificial Sequence
  Synthetic
uguaaguuuuuggaaaacaa

SEQ ID NO: 779994 - RNA, 20 nt, Artificial Sequence
  Synthetic
uuugugaaagucuaaaacaa

SEQ ID NO: 779995 - RNA, 20 nt, Artificial Sequence
  Synthetic
ugacugcucaaguaaaacaa

SEQ ID NO: 779996 - RNA, 20 nt, Artificial Sequence
  Synthetic
uuuaucuaggaaacaaacaa

SEQ ID NO: 779997 - RNA, 20 nt, Artificial Sequence
  Synthetic
cagaaucgcucaccaaacaa

SEQ ID NO: 779998 - RNA, 20 nt, Artificial Sequence
  Synthetic
uauuugaucugaucaaacaa

SEQ ID NO: 779999 - RNA, 20 nt, Artificial Sequence
  Synthetic
aaaacuuaacaaagaaacaa

SEQ ID NO: 780000 - RNA, 20 nt, Artificial Sequence
  Synthetic
aggcauuaaauaagaaacaa

SEQ ID NO: 780001 - RNA, 20 nt, Artificial Sequence
  Synthetic
uuuaagaugcugagaaacaa

SEQ ID NO: 780002 - RNA, 20 nt, Artificial Sequence
  Synthetic
aaauaauaacguagaaacaa

SEQ ID NO: 780003 - RNA, 20 nt, Artificial Sequence
  Synthetic
auuccaggcagaggaaacaa

SEQ ID NO: 780004 - RNA, 20 nt, Artificial Sequence
  Synthetic
aauuuuuuauuaggaaacaa

SEQ ID NO: 780005 - RNA, 20 nt, Artificial Sequence
  Synthetic
cauagcugccucggaaacaa

SEQ ID NO: 780006 - RNA, 20 nt, Artificial Sequence
  Synthetic
uaaaagagcugaugaaacaa

SEQ ID NO: 780007 - RNA, 20 nt, Artificial Sequence
  Synthetic
acucuggccuagugaaacaa

SEQ ID NO: 780008 - RNA, 20 nt, Artificial Sequence
  Synthetic
uaggcuggccugugaaacaa

SEQ ID NO: 780009 - RNA, 20 nt, Artificial Sequence
  Synthetic
uccaucuaguugugaaacaa

SEQ ID NO: 780010 - RNA, 20 nt, Artificial Sequence
  Synthetic
uugaguuagaaaauaaacaa

SEQ ID NO: 780011 - RNA, 20 nt, Artificial Sequence
  Synthetic
auuuagaaaauaauaaacaa

SEQ ID NO: 780012 - RNA, 20 nt, Artificial Sequence
  Synthetic
ucauuguucuagauaaacaa

SEQ ID NO: 780013 - RNA, 20 nt, Artificial Sequence
  Synthetic
uacaaaguagcacuaaacaa

SEQ ID NO: 780014 - RNA, 20 nt, Artificial Sequence
  Synthetic
cuguucccauuccuaaacaa

SEQ ID NO: 780015 - RNA, 20 nt, Artificial Sequence
  Synthetic
auuauuaacuagcuaaacaa

SEQ ID NO: 780016 - RNA, 20 nt, Artificial Sequence
  Synthetic
cuugauuauaugcuaaacaa

SEQ ID NO: 780017 - RNA, 20 nt, Artificial Sequence
  Synthetic
uaaucaaaaacaguaaacaa

SEQ ID NO: 780018 - RNA, 20 nt, Artificial Sequence
  Synthetic
agaagaugagauguaaacaa

SEQ ID NO: 780019 - RNA, 20 nt, Artificial Sequence
  Synthetic
aacucuuuugauguaaacaa

SEQ ID NO: 780020 - RNA, 20 nt, Artificial Sequence
  Synthetic
auuauuucuuauguaaacaa

SEQ ID NO: 780021 - RNA, 20 nt, Artificial Sequence
  Synthetic
aauguucugguauuaaacaa

SEQ ID NO: 780022 - RNA, 20 nt, Artificial Sequence
  Synthetic
cccaguacuaaguuaaacaa

SEQ ID NO: 780023 - RNA, 20 nt, Artificial Sequence
  Synthetic
agcccuuaaauguuaaacaa

SEQ ID NO: 780024 - RNA, 20 nt, Artificial Sequence
  Synthetic
ucccccccacccaacaacaa

SEQ ID NO: 780025 - RNA, 20 nt, Artificial Sequence
  Synthetic
cuacagcugcaccacaacaa

SEQ ID NO: 780026 - RNA, 20 nt, Artificial Sequence
  Synthetic
aaauguaaauuccacaacaa

SEQ ID NO: 780027 - RNA, 20 nt, Artificial Sequence
  Synthetic
aggcuuuagguucacaacaa

SEQ ID NO: 780028 - RNA, 20 nt, Artificial Sequence
  Synthetic
uuauuuguccuggacaacaa

SEQ ID NO: 780029 - RNA, 20 nt, Artificial Sequence
  Synthetic
caauguugaaaugacaacaa

SEQ ID NO: 780030 - RNA, 20 nt, Artificial Sequence
  Synthetic
cauuguugaaaugacaacaa

SEQ ID NO: 780031 - RNA, 20 nt, Artificial Sequence
  Synthetic
uguacaaucuaugacaacaa

SEQ ID NO: 780032 - RNA, 20 nt, Artificial Sequence
  Synthetic
aaauuguaauauaccaacaa

SEQ ID NO: 780033 - RNA, 20 nt, Artificial Sequence
  Synthetic
auugcaccccuuaccaacaa

SEQ ID NO: 780034 - RNA, 20 nt, Artificial Sequence
  Synthetic
caaaguugacuucccaacaa

SEQ ID NO: 780035 - RNA, 20 nt, Artificial Sequence
  Synthetic
accgaaguauaaagcaacaa

SEQ ID NO: 780036 - RNA, 20 nt, Artificial Sequence
  Synthetic
acaaaucuagcaagcaacaa

SEQ ID NO: 780037 - RNA, 20 nt, Artificial Sequence
  Synthetic
auuccucagucuggcaacaa

SEQ ID NO: 780038 - RNA, 20 nt, Artificial Sequence
  Synthetic
ccauauaaacaaugcaacaa

SEQ ID NO: 780039 - RNA, 20 nt, Artificial Sequence
  Synthetic
cauuauuagucaaucaacaa

SEQ ID NO: 780040 - RNA, 20 nt, Artificial Sequence
  Synthetic
auuuuaacaaauaucaacaa

SEQ ID NO: 780041 - RNA, 20 nt, Artificial Sequence
  Synthetic
aagaccaaaauccucaacaa

SEQ ID NO: 780042 - RNA, 20 nt, Artificial Sequence
  Synthetic
aaagcaagacaggucaacaa

SEQ ID NO: 780043 - RNA, 20 nt, Artificial Sequence
  Synthetic
agaggagagaguuucaacaa

SEQ ID NO: 780044 - RNA, 20 nt, Artificial Sequence
  Synthetic
augauggaagauaagaacaa

SEQ ID NO: 780045 - RNA, 20 nt, Artificial Sequence
  Synthetic
acacaacauuaacagaacaa

SEQ ID NO: 780046 - RNA, 20 nt, Artificial Sequence
  Synthetic
aagaucaaacugcagaacaa

SEQ ID NO: 780047 - RNA, 20 nt, Artificial Sequence
  Synthetic
aaaaaaggcauauagaacaa

SEQ ID NO: 780048 - RNA, 20 nt, Artificial Sequence
  Synthetic
ugaacucacaauuagaacaa

SEQ ID NO: 780049 - RNA, 20 nt, Artificial Sequence
  Synthetic
aucucugacagagggaacaa

SEQ ID NO: 780050 - RNA, 20 nt, Artificial Sequence
  Synthetic
uagguuggcagugggaacaa

SEQ ID NO: 780051 - RNA, 20 nt, Artificial Sequence
  Synthetic
uggaugagugaaaugaacaa

SEQ ID NO: 780052 - RNA, 20 nt, Artificial Sequence
  Synthetic
aagcaauaacgaaugaacaa

SEQ ID NO: 780053 - RNA, 20 nt, Artificial Sequence
  Synthetic
cugcuaugagaacugaacaa

SEQ ID NO: 780054 - RNA, 20 nt, Artificial Sequence
  Synthetic
augagagcacaccugaacaa

SEQ ID NO: 780055 - RNA, 20 nt, Artificial Sequence
  Synthetic
acauuuaacaagcugaacaa

SEQ ID NO: 780056 - RNA, 20 nt, Artificial Sequence
  Synthetic
aaaugagaauaucugaacaa

SEQ ID NO: 780057 - RNA, 20 nt, Artificial Sequence
  Synthetic
ccaauuuuuaaagugaacaa

SEQ ID NO: 780058 - RNA, 20 nt, Artificial Sequence
  Synthetic
uuauucaaaagauugaacaa

SEQ ID NO: 780059 - RNA, 20 nt, Artificial Sequence
  Synthetic
uguguucagaacuugaacaa

SEQ ID NO: 780060 - RNA, 20 nt, Artificial Sequence
  Synthetic
aaggcuugagaguugaacaa

SEQ ID NO: 780061 - RNA, 20 nt, Artificial Sequence
  Synthetic
uuugcaucguuuuugaacaa

SEQ ID NO: 780062 - RNA, 20 nt, Artificial Sequence
  Synthetic
acagcuacaggaaauaacaa

SEQ ID NO: 780063 - RNA, 20 nt, Artificial Sequence
  Synthetic
uggaaaaguaggaauaacaa

SEQ ID NO: 780064 - RNA, 20 nt, Artificial Sequence
  Synthetic
uuaugagauaauuauaacaa

SEQ ID NO: 780065 - RNA, 20 nt, Artificial Sequence
  Synthetic
uugugguaguauuauaacaa

SEQ ID NO: 780066 - RNA, 20 nt, Artificial Sequence
  Synthetic
uuaguggagaguuauaacaa

SEQ ID NO: 780067 - RNA, 20 nt, Artificial Sequence
  Synthetic
ugugccugggcaucuaacaa

SEQ ID NO: 780068 - RNA, 20 nt, Artificial Sequence
  Synthetic
aggauuuucucaucuaacaa

SEQ ID NO: 780069 - RNA, 20 nt, Artificial Sequence
  Synthetic
auuagaaacagauguaacaa

SEQ ID NO: 780070 - RNA, 20 nt, Artificial Sequence
  Synthetic
auaacaaaaaacuguaacaa

SEQ ID NO: 780071 - RNA, 20 nt, Artificial Sequence
  Synthetic
uaaauuuggcauauuaacaa

SEQ ID NO: 780072 - RNA, 20 nt, Artificial Sequence
  Synthetic
aaggaauugucuauuaacaa

SEQ ID NO: 780073 - RNA, 20 nt, Artificial Sequence
  Synthetic
auauggauggaacuuaacaa

SEQ ID NO: 780074 - RNA, 20 nt, Artificial Sequence
  Synthetic
ugagaaugaaaaguuaacaa

SEQ ID NO: 780075 - RNA, 20 nt, Artificial Sequence
  Synthetic
cuaaacaaauaaguuaacaa

SEQ ID NO: 780076 - RNA, 20 nt, Artificial Sequence
  Synthetic
cuuauguacuauuuuaacaa

SEQ ID NO: 780077 - RNA, 20 nt, Artificial Sequence
  Synthetic
uuacuguccaguuuuaacaa

SEQ ID NO: 780078 - RNA, 20 nt, Artificial Sequence
  Synthetic
acaaaaccaucaaaacacaa

SEQ ID NO: 780079 - RNA, 20 nt, Artificial Sequence
  Synthetic
aaguaaggaaacaaacacaa

SEQ ID NO: 780080 - RNA, 20 nt, Artificial Sequence
  Synthetic
auuaguggcuagaaacacaa

SEQ ID NO: 780081 - RNA, 20 nt, Artificial Sequence
  Synthetic
auugcgguauauaaacacaa

SEQ ID NO: 780082 - RNA, 20 nt, Artificial Sequence
  Synthetic
aggcccuuauauaaacacaa

SEQ ID NO: 780083 - RNA, 20 nt, Artificial Sequence
  Synthetic
aauucucuauuuaaacacaa

SEQ ID NO: 780084 - RNA, 20 nt, Artificial Sequence
  Synthetic
ugagucuccauacaacacaa

SEQ ID NO: 780085 - RNA, 20 nt, Artificial Sequence
  Synthetic
uugugcuguggggaacacaa

SEQ ID NO: 780086 - RNA, 20 nt, Artificial Sequence
  Synthetic
uugaaauuuauugaacacaa

SEQ ID NO: 780087 - RNA, 20 nt, Artificial Sequence
  Synthetic
uugcacagucaauaacacaa

SEQ ID NO: 780088 - RNA, 20 nt, Artificial Sequence
  Synthetic
uuggauuguuuguaacacaa

SEQ ID NO: 780089 - RNA, 20 nt, Artificial Sequence
  Synthetic
uacaggggaacaacacacaa

SEQ ID NO: 780090 - RNA, 20 nt, Artificial Sequence
  Synthetic
aagcuaggauagacacacaa

SEQ ID NO: 780091 - RNA, 20 nt, Artificial Sequence
  Synthetic
aaaauggucaaaucacacaa

SEQ ID NO: 780092 - RNA, 20 nt, Artificial Sequence
  Synthetic
ugggagccuccaucacacaa

SEQ ID NO: 780093 - RNA, 20 nt, Artificial Sequence
  Synthetic
uuccugcauuucucacacaa

SEQ ID NO: 780094 - RNA, 20 nt, Artificial Sequence
  Synthetic
auguugauagacagacacaa

SEQ ID NO: 780095 - RNA, 20 nt, Artificial Sequence
  Synthetic
augaaaaaggcgagacacaa

SEQ ID NO: 780096 - RNA, 20 nt, Artificial Sequence
  Synthetic
aaaugugguauaggacacaa

SEQ ID NO: 780097 - RNA, 20 nt, Artificial Sequence
  Synthetic
uaaaucaaacuuugacacaa

SEQ ID NO: 780098 - RNA, 20 nt, Artificial Sequence
  Synthetic
caaugagaauaaauacacaa

SEQ ID NO: 780099 - RNA, 20 nt, Artificial Sequence
  Synthetic
ucaccauaccccauacacaa

SEQ ID NO: 780100 - RNA, 20 nt, Artificial Sequence
  Synthetic
aaugugguacauauacacaa

SEQ ID NO: 780101 - RNA, 20 nt, Artificial Sequence
  Synthetic
aaugugguauauauacacaa

SEQ ID NO: 780102 - RNA, 20 nt, Artificial Sequence
  Synthetic
aaguuuugaaaacuacacaa

SEQ ID NO: 780103 - RNA, 20 nt, Artificial Sequence
  Synthetic
aaugagaagggacuacacaa

SEQ ID NO: 780104 - RNA, 20 nt, Artificial Sequence
  Synthetic
cacaauggaauacuacacaa

SEQ ID NO: 780105 - RNA, 20 nt, Artificial Sequence
  Synthetic
auuuuuccaaaccuacacaa

SEQ ID NO: 780106 - RNA, 20 nt, Artificial Sequence
  Synthetic
aaaacacacaccuuacacaa

SEQ ID NO: 780107 - RNA, 20 nt, Artificial Sequence
  Synthetic
ucuuaguacuuuuuacacaa

SEQ ID NO: 780108 - RNA, 20 nt, Artificial Sequence
  Synthetic
cucaaaguugucaaccacaa

SEQ ID NO: 780109 - RNA, 20 nt, Artificial Sequence
  Synthetic
aauguaaaaaggaaccacaa

SEQ ID NO: 780110 - RNA, 20 nt, Artificial Sequence
  Synthetic
agcuaguucuuuaaccacaa

SEQ ID NO: 780111 - RNA, 20 nt, Artificial Sequence
  Synthetic
agcaucuucucugaccacaa

SEQ ID NO: 780112 - RNA, 20 nt, Artificial Sequence
  Synthetic
cagggaaguauugaccacaa

SEQ ID NO: 780113 - RNA, 20 nt, Artificial Sequence
  Synthetic
uaaauaaauccuacccacaa

SEQ ID NO: 780114 - RNA, 20 nt, Artificial Sequence
  Synthetic
aaaggcuggguuacccacaa

SEQ ID NO: 780115 - RNA, 20 nt, Artificial Sequence
  Synthetic
cuguccaccagaccccacaa

SEQ ID NO: 780116 - RNA, 20 nt, Artificial Sequence
  Synthetic
cagagcacuuuggcccacaa

SEQ ID NO: 780117 - RNA, 20 nt, Artificial Sequence
  Synthetic
uguacccugcaaagccacaa

SEQ ID NO: 780118 - RNA, 20 nt, Artificial Sequence
  Synthetic
ucaccuuuuaauagccacaa

SEQ ID NO: 780119 - RNA, 20 nt, Artificial Sequence
  Synthetic
uugccaucuuugugccacaa

SEQ ID NO: 780120 - RNA, 20 nt, Artificial Sequence
  Synthetic
cauugccauggaauccacaa

SEQ ID NO: 780121 - RNA, 20 nt, Artificial Sequence
  Synthetic
aaggguguuuauauccacaa

SEQ ID NO: 780122 - RNA, 20 nt, Artificial Sequence
  Synthetic
auauacuagaaucuccacaa

SEQ ID NO: 780123 - RNA, 20 nt, Artificial Sequence
  Synthetic
uaugauaauguucuccacaa

SEQ ID NO: 780124 - RNA, 20 nt, Artificial Sequence
  Synthetic
cgccacaccgacuuccacaa

SEQ ID NO: 780125 - RNA, 20 nt, Artificial Sequence
  Synthetic
cgccacacugacuuccacaa

SEQ ID NO: 780126 - RNA, 20 nt, Artificial Sequence
  Synthetic
cgccacacggucuuccacaa

SEQ ID NO: 780127 - RNA, 20 nt, Artificial Sequence
  Synthetic
cgccacacugucuuccacaa

SEQ ID NO: 780128 - RNA, 20 nt, Artificial Sequence
  Synthetic
ugccacacugucuuccacaa

SEQ ID NO: 780129 - RNA, 20 nt, Artificial Sequence
  Synthetic
cugcacacugucuuccacaa

SEQ ID NO: 780130 - RNA, 20 nt, Artificial Sequence
  Synthetic
cccuguugcgaguuccacaa

SEQ ID NO: 780131 - RNA, 20 nt, Artificial Sequence
  Synthetic
caaggaagagaagagcacaa

SEQ ID NO: 780132 - RNA, 20 nt, Artificial Sequence
  Synthetic
uuuagauucagagagcacaa

SEQ ID NO: 780133 - RNA, 20 nt, Artificial Sequence
  Synthetic
uuacauuguuuguagcacaa

SEQ ID NO: 780134 - RNA, 20 nt, Artificial Sequence
  Synthetic
augugcuguaauuagcacaa

SEQ ID NO: 780135 - RNA, 20 nt, Artificial Sequence
  Synthetic
aagagagaugauuagcacaa

SEQ ID NO: 780136 - RNA, 20 nt, Artificial Sequence
  Synthetic
uaacuccuuuauuagcacaa

SEQ ID NO: 780137 - RNA, 20 nt, Artificial Sequence
  Synthetic
ucaauuuuggcucggcacaa

SEQ ID NO: 780138 - RNA, 20 nt, Artificial Sequence
  Synthetic
acauguaagauuuggcacaa

SEQ ID NO: 780139 - RNA, 20 nt, Artificial Sequence
  Synthetic
caugugguaccuaugcacaa

SEQ ID NO: 780140 - RNA, 20 nt, Artificial Sequence
  Synthetic
uccuauccuucucugcacaa

SEQ ID NO: 780141 - RNA, 20 nt, Artificial Sequence
  Synthetic
aaagaaaaguuauugcacaa

SEQ ID NO: 780142 - RNA, 20 nt, Artificial Sequence
  Synthetic
agaucuuaggcaaaucacaa

SEQ ID NO: 780143 - RNA, 20 nt, Artificial Sequence
  Synthetic
aaacuggaccaacaucacaa

SEQ ID NO: 780144 - RNA, 20 nt, Artificial Sequence
  Synthetic
ugauuccauuaucaucacaa

SEQ ID NO: 780145 - RNA, 20 nt, Artificial Sequence
  Synthetic
aaguagagaccagaucacaa

SEQ ID NO: 780146 - RNA, 20 nt, Artificial Sequence
  Synthetic
cuaauuguuagagaucacaa

SEQ ID NO: 780147 - RNA, 20 nt, Artificial Sequence
  Synthetic
uuagucauacaugaucacaa

SEQ ID NO: 780148 - RNA, 20 nt, Artificial Sequence
  Synthetic
aaagccaaaccauaucacaa

SEQ ID NO: 780149 - RNA, 20 nt, Artificial Sequence
  Synthetic
uuguuaaucacaacucacaa

SEQ ID NO: 780150 - RNA, 20 nt, Artificial Sequence
  Synthetic
ugcuucggggucucucacaa

SEQ ID NO: 780151 - RNA, 20 nt, Artificial Sequence
  Synthetic
acauuuuuuuuuucucacaa

SEQ ID NO: 780152 - RNA, 20 nt, Artificial Sequence
  Synthetic
ugauguuucaaaggucacaa

SEQ ID NO: 780153 - RNA, 20 nt, Artificial Sequence
  Synthetic
uauucucaaagaggucacaa

SEQ ID NO: 780154 - RNA, 20 nt, Artificial Sequence
  Synthetic
uguauuucucacugucacaa

SEQ ID NO: 780155 - RNA, 20 nt, Artificial Sequence
  Synthetic
accccuuaauacugucacaa

SEQ ID NO: 780156 - RNA, 20 nt, Artificial Sequence
  Synthetic
auuguuuacuuaauucacaa

SEQ ID NO: 780157 - RNA, 20 nt, Artificial Sequence
  Synthetic
caucacagcacuauucacaa

SEQ ID NO: 780158 - RNA, 20 nt, Artificial Sequence
  Synthetic
uccaugcuuuugguucacaa

SEQ ID NO: 780159 - RNA, 20 nt, Artificial Sequence
  Synthetic
cagucaugaacauuucacaa

SEQ ID NO: 780160 - RNA, 20 nt, Artificial Sequence
  Synthetic
cauuauuaaaccuuucacaa

SEQ ID NO: 780161 - RNA, 20 nt, Artificial Sequence
  Synthetic
ugugagcucuuuaaagacaa

SEQ ID NO: 780162 - RNA, 20 nt, Artificial Sequence
  Synthetic
cagagaggauaacaagacaa

SEQ ID NO: 780163 - RNA, 20 nt, Artificial Sequence
  Synthetic
auacagaugguacaagacaa

SEQ ID NO: 780164 - RNA, 20 nt, Artificial Sequence
  Synthetic
aauguuaagcgccaagacaa

SEQ ID NO: 780165 - RNA, 20 nt, Artificial Sequence
  Synthetic
aauguuaauaggcaagacaa

SEQ ID NO: 780166 - RNA, 20 nt, Artificial Sequence
  Synthetic
cagcccagugcagaagacaa

SEQ ID NO: 780167 - RNA, 20 nt, Artificial Sequence
  Synthetic
cauguagaaugagaagacaa

SEQ ID NO: 780168 - RNA, 20 nt, Artificial Sequence
  Synthetic
auaagcagauucgaagacaa

SEQ ID NO: 780169 - RNA, 20 nt, Artificial Sequence
  Synthetic
aguuaugcuaaugaagacaa

SEQ ID NO: 780170 - RNA, 20 nt, Artificial Sequence
  Synthetic
agcggcccagacuaagacaa

SEQ ID NO: 780171 - RNA, 20 nt, Artificial Sequence
  Synthetic
acuguguggagcuaagacaa

SEQ ID NO: 780172 - RNA, 20 nt, Artificial Sequence
  Synthetic
ugccucuagaauuaagacaa

SEQ ID NO: 780173 - RNA, 20 nt, Artificial Sequence
  Synthetic
agugcaucauccacagacaa

SEQ ID NO: 780174 - RNA, 20 nt, Artificial Sequence
  Synthetic
aguucuaugaauccagacaa

SEQ ID NO: 780175 - RNA, 20 nt, Artificial Sequence
  Synthetic
aaagaauauguuccagacaa

SEQ ID NO: 780176 - RNA, 20 nt, Artificial Sequence
  Synthetic
ugcuucuuuguuucagacaa

SEQ ID NO: 780177 - RNA, 20 nt, Artificial Sequence
  Synthetic
aauauagcagaaagagacaa

SEQ ID NO: 780178 - RNA, 20 nt, Artificial Sequence
  Synthetic
cccuaagcuugaagagacaa

SEQ ID NO: 780179 - RNA, 20 nt, Artificial Sequence
  Synthetic
uggcaaggccgcagagacaa

SEQ ID NO: 780180 - RNA, 20 nt, Artificial Sequence
  Synthetic
ccagugggaaacggagacaa

SEQ ID NO: 780181 - RNA, 20 nt, Artificial Sequence
  Synthetic
aauauagcuuuaugagacaa

SEQ ID NO: 780182 - RNA, 20 nt, Artificial Sequence
  Synthetic
auggaaggaaacugagacaa

SEQ ID NO: 780183 - RNA, 20 nt, Artificial Sequence
  Synthetic
cuaaaagucuauauagacaa

SEQ ID NO: 780184 - RNA, 20 nt, Artificial Sequence
  Synthetic
aauuauaaaauuauagacaa

SEQ ID NO: 780185 - RNA, 20 nt, Artificial Sequence
  Synthetic
auaaugacaucacuagacaa

SEQ ID NO: 780186 - RNA, 20 nt, Artificial Sequence
  Synthetic
uugaggugacuccuagacaa

SEQ ID NO: 780187 - RNA, 20 nt, Artificial Sequence
  Synthetic
aagcaccuacauuuagacaa

SEQ ID NO: 780188 - RNA, 20 nt, Artificial Sequence
  Synthetic
uucugcuuuuauuuagacaa

SEQ ID NO: 780189 - RNA, 20 nt, Artificial Sequence
  Synthetic
aaauguacaaggaccgacaa

SEQ ID NO: 780190 - RNA, 20 nt, Artificial Sequence
  Synthetic
uauuaguuugauaaggacaa

SEQ ID NO: 780191 - RNA, 20 nt, Artificial Sequence
  Synthetic
cauuaguuugcuaaggacaa

SEQ ID NO: 780192 - RNA, 20 nt, Artificial Sequence
  Synthetic
uuuuuaauauuucaggacaa

SEQ ID NO: 780193 - RNA, 20 nt, Artificial Sequence
  Synthetic
uagaaugaaugaagggacaa

SEQ ID NO: 780194 - RNA, 20 nt, Artificial Sequence
  Synthetic
aucagaauuucuggggacaa

SEQ ID NO: 780195 - RNA, 20 nt, Artificial Sequence
  Synthetic
uaaacaggugcuugggacaa

SEQ ID NO: 780196 - RNA, 20 nt, Artificial Sequence
  Synthetic
aucucugaucucauggacaa

SEQ ID NO: 780197 - RNA, 20 nt, Artificial Sequence
  Synthetic
auucucauacagauggacaa

SEQ ID NO: 780198 - RNA, 20 nt, Artificial Sequence
  Synthetic
cccaagugaggacuggacaa

SEQ ID NO: 780199 - RNA, 20 nt, Artificial Sequence
  Synthetic
uguccaguaugacuggacaa

SEQ ID NO: 780200 - RNA, 20 nt, Artificial Sequence
  Synthetic
aaacaugccaugcuggacaa

SEQ ID NO: 780201 - RNA, 20 nt, Artificial Sequence
  Synthetic
uggguagccaaucuggacaa

SEQ ID NO: 780202 - RNA, 20 nt, Artificial Sequence
  Synthetic
uaguuugauaacuuggacaa

SEQ ID NO: 780203 - RNA, 20 nt, Artificial Sequence
  Synthetic
auucugcaguccuuggacaa

SEQ ID NO: 780204 - RNA, 20 nt, Artificial Sequence
  Synthetic
acacacacagucuuggacaa

SEQ ID NO: 780205 - RNA, 20 nt, Artificial Sequence
  Synthetic
ccauugacaccaaaugacaa

SEQ ID NO: 780206 - RNA, 20 nt, Artificial Sequence
  Synthetic
uuuuuuuacuugcaugacaa

SEQ ID NO: 780207 - RNA, 20 nt, Artificial Sequence
  Synthetic
uucaaaguguugcaugacaa

SEQ ID NO: 780208 - RNA, 20 nt, Artificial Sequence
  Synthetic
uguucuuccagugaugacaa

SEQ ID NO: 780209 - RNA, 20 nt, Artificial Sequence
  Synthetic
uucucuuauuaauaugacaa

SEQ ID NO: 780210 - RNA, 20 nt, Artificial Sequence
  Synthetic
aguucugugaguucugacaa

SEQ ID NO: 780211 - RNA, 20 nt, Artificial Sequence
  Synthetic
uucuugccaucaugugacaa

SEQ ID NO: 780212 - RNA, 20 nt, Artificial Sequence
  Synthetic
uucaaagaaagaugugacaa

SEQ ID NO: 780213 - RNA, 20 nt, Artificial Sequence
  Synthetic
uuucugaauuccauugacaa

SEQ ID NO: 780214 - RNA, 20 nt, Artificial Sequence
  Synthetic
auuaagagguggauugacaa

SEQ ID NO: 780215 - RNA, 20 nt, Artificial Sequence
  Synthetic
uaaucuuccccuauugacaa

SEQ ID NO: 780216 - RNA, 20 nt, Artificial Sequence
  Synthetic
aacuucagagguauugacaa

SEQ ID NO: 780217 - RNA, 20 nt, Artificial Sequence
  Synthetic
auaauuuuuaacguugacaa

SEQ ID NO: 780218 - RNA, 20 nt, Artificial Sequence
  Synthetic
ugcacuccuaauguugacaa

SEQ ID NO: 780219 - RNA, 20 nt, Artificial Sequence
  Synthetic
auaucucaaucauuugacaa

SEQ ID NO: 780220 - RNA, 20 nt, Artificial Sequence
  Synthetic
ucuguuaaaauauuugacaa

SEQ ID NO: 780221 - RNA, 20 nt, Artificial Sequence
  Synthetic
uaauuucaaaaguuugacaa

SEQ ID NO: 780222 - RNA, 20 nt, Artificial Sequence
  Synthetic
uucauaucagauuuugacaa

SEQ ID NO: 780223 - RNA, 20 nt, Artificial Sequence
  Synthetic
aaaaagagagguuuugacaa

SEQ ID NO: 780224 - RNA, 20 nt, Artificial Sequence
  Synthetic
aguuaacucauuuuugacaa

SEQ ID NO: 780225 - RNA, 20 nt, Artificial Sequence
  Synthetic
ucacagaaaagaaaauacaa

SEQ ID NO: 780226 - RNA, 20 nt, Artificial Sequence
  Synthetic
cugauaacacagaaauacaa

SEQ ID NO: 780227 - RNA, 20 nt, Artificial Sequence
  Synthetic
agucaggauaggaaauacaa

SEQ ID NO: 780228 - RNA, 20 nt, Artificial Sequence
  Synthetic
uuugacaugaauaaauacaa

SEQ ID NO: 780229 - RNA, 20 nt, Artificial Sequence
  Synthetic
uuuauuuuuuauaaauacaa

SEQ ID NO: 780230 - RNA, 20 nt, Artificial Sequence
  Synthetic
acugcaaauggucaauacaa

SEQ ID NO: 780231 - RNA, 20 nt, Artificial Sequence
  Synthetic
uggcuggaucaggaauacaa

SEQ ID NO: 780232 - RNA, 20 nt, Artificial Sequence
  Synthetic
aagaaaauguaggaauacaa

SEQ ID NO: 780233 - RNA, 20 nt, Artificial Sequence
  Synthetic
uaugagccaauggaauacaa

SEQ ID NO: 780234 - RNA, 20 nt, Artificial Sequence
  Synthetic
uaugcaagggcugaauacaa

SEQ ID NO: 780235 - RNA, 20 nt, Artificial Sequence
  Synthetic
uuuuuuguguaauaauacaa

SEQ ID NO: 780236 - RNA, 20 nt, Artificial Sequence
  Synthetic
acuuuaaucaauuaauacaa

SEQ ID NO: 780237 - RNA, 20 nt, Artificial Sequence
  Synthetic
uccuacuaagucccauacaa

SEQ ID NO: 780238 - RNA, 20 nt, Artificial Sequence
  Synthetic
ugagaaugcauugcauacaa

SEQ ID NO: 780239 - RNA, 20 nt, Artificial Sequence
  Synthetic
ugaauuuuguuugcauacaa

SEQ ID NO: 780240 - RNA, 20 nt, Artificial Sequence
  Synthetic
ccgcagagaaaaagauacaa

SEQ ID NO: 780241 - RNA, 20 nt, Artificial Sequence
  Synthetic
aaccuuuaaggaagauacaa

SEQ ID NO: 780242 - RNA, 20 nt, Artificial Sequence
  Synthetic
agcaacaggauaagauacaa

SEQ ID NO: 780243 - RNA, 20 nt, Artificial Sequence
  Synthetic
uuauaauaaaagagauacaa

SEQ ID NO: 780244 - RNA, 20 nt, Artificial Sequence
  Synthetic
uaguuacuuccaggauacaa

SEQ ID NO: 780245 - RNA, 20 nt, Artificial Sequence
  Synthetic
aaggcauaagaaugauacaa

SEQ ID NO: 780246 - RNA, 20 nt, Artificial Sequence
  Synthetic
agacauacggagugauacaa

SEQ ID NO: 780247 - RNA, 20 nt, Artificial Sequence
  Synthetic
uagcaaagauaaauauacaa

SEQ ID NO: 780248 - RNA, 20 nt, Artificial Sequence
  Synthetic
acacacacacacauauacaa

SEQ ID NO: 780249 - RNA, 20 nt, Artificial Sequence
  Synthetic
uucuauauguccauauacaa

SEQ ID NO: 780250 - RNA, 20 nt, Artificial Sequence
  Synthetic
ucuacuuuuuucauauacaa

SEQ ID NO: 780251 - RNA, 20 nt, Artificial Sequence
  Synthetic
uucaagcaaaguauauacaa

SEQ ID NO: 780252 - RNA, 20 nt, Artificial Sequence
  Synthetic
uauuauugauuuauauacaa

SEQ ID NO: 780253 - RNA, 20 nt, Artificial Sequence
  Synthetic
uuuuauaaauaccuauacaa

SEQ ID NO: 780254 - RNA, 20 nt, Artificial Sequence
  Synthetic
uuuccaccaacaguauacaa

SEQ ID NO: 780255 - RNA, 20 nt, Artificial Sequence
  Synthetic
aauacaaagcaaaacuacaa

SEQ ID NO: 780256 - RNA, 20 nt, Artificial Sequence
  Synthetic
ugacuugcuauaaacuacaa

SEQ ID NO: 780257 - RNA, 20 nt, Artificial Sequence
  Synthetic
uccuccuuccugcacuacaa

SEQ ID NO: 780258 - RNA, 20 nt, Artificial Sequence
  Synthetic
ccauuggggguccccuacaa

SEQ ID NO: 780259 - RNA, 20 nt, Artificial Sequence
  Synthetic
cuucauccauaucccuacaa

SEQ ID NO: 780260 - RNA, 20 nt, Artificial Sequence
  Synthetic
cuucauccacgucccuacaa

SEQ ID NO: 780261 - RNA, 20 nt, Artificial Sequence
  Synthetic
cuucauccaugucccuacaa

SEQ ID NO: 780262 - RNA, 20 nt, Artificial Sequence
  Synthetic
uuucauccaugucccuacaa

SEQ ID NO: 780263 - RNA, 20 nt, Artificial Sequence
  Synthetic
uuucacccaugugccuacaa

SEQ ID NO: 780264 - RNA, 20 nt, Artificial Sequence
  Synthetic
ccugccuaucccuccuacaa

SEQ ID NO: 780265 - RNA, 20 nt, Artificial Sequence
  Synthetic
ccucuuaguggcuccuacaa

SEQ ID NO: 780266 - RNA, 20 nt, Artificial Sequence
  Synthetic
aaaaggaagaacagcuacaa

SEQ ID NO: 780267 - RNA, 20 nt, Artificial Sequence
  Synthetic
uaguguuccugcagcuacaa

SEQ ID NO: 780268 - RNA, 20 nt, Artificial Sequence
  Synthetic
cagaaaauggcaggcuacaa

SEQ ID NO: 780269 - RNA, 20 nt, Artificial Sequence
  Synthetic
augguuaccagaggcuacaa

SEQ ID NO: 780270 - RNA, 20 nt, Artificial Sequence
  Synthetic
agacaaaauauaugcuacaa

SEQ ID NO: 780271 - RNA, 20 nt, Artificial Sequence
  Synthetic
uucugaagucauugcuacaa

SEQ ID NO: 780272 - RNA, 20 nt, Artificial Sequence
  Synthetic
uugcaugcauguugcuacaa

SEQ ID NO: 780273 - RNA, 20 nt, Artificial Sequence
  Synthetic
aaucucccagaaaucuacaa

SEQ ID NO: 780274 - RNA, 20 nt, Artificial Sequence
  Synthetic
accugaauaucuaucuacaa

SEQ ID NO: 780275 - RNA, 20 nt, Artificial Sequence
  Synthetic
acguagguuauuaucuacaa

SEQ ID NO: 780276 - RNA, 20 nt, Artificial Sequence
  Synthetic
cuuccaagcucauucuacaa

SEQ ID NO: 780277 - RNA, 20 nt, Artificial Sequence
  Synthetic
uaaugugauuuuuucuacaa

SEQ ID NO: 780278 - RNA, 20 nt, Artificial Sequence
  Synthetic
agagaaguaaaaaaguacaa

SEQ ID NO: 780279 - RNA, 20 nt, Artificial Sequence
  Synthetic
uauagaaacagaaaguacaa

SEQ ID NO: 780280 - RNA, 20 nt, Artificial Sequence
  Synthetic
aaagaaaaaugaaaguacaa

SEQ ID NO: 780281 - RNA, 20 nt, Artificial Sequence
  Synthetic
agcagagaaaacaaguacaa

SEQ ID NO: 780282 - RNA, 20 nt, Artificial Sequence
  Synthetic
uaauauacguggaaguacaa

SEQ ID NO: 780283 - RNA, 20 nt, Artificial Sequence
  Synthetic
cugcccaggcuggaguacaa

SEQ ID NO: 780284 - RNA, 20 nt, Artificial Sequence
  Synthetic
uugcccaggcuggaguacaa

SEQ ID NO: 780285 - RNA, 20 nt, Artificial Sequence
  Synthetic
uugcccggguuggaguacaa

SEQ ID NO: 780286 - RNA, 20 nt, Artificial Sequence
  Synthetic
ugagucaagaguuaguacaa

SEQ ID NO: 780287 - RNA, 20 nt, Artificial Sequence
  Synthetic
aggugcuccucaacguacaa

SEQ ID NO: 780288 - RNA, 20 nt, Artificial Sequence
  Synthetic
uaguuacuuucuagguacaa

SEQ ID NO: 780289 - RNA, 20 nt, Artificial Sequence
  Synthetic
uaaaaccaccagggguacaa

SEQ ID NO: 780290 - RNA, 20 nt, Artificial Sequence
  Synthetic
augcagugacauugguacaa

SEQ ID NO: 780291 - RNA, 20 nt, Artificial Sequence
  Synthetic
acugcugagaaaauguacaa

SEQ ID NO: 780292 - RNA, 20 nt, Artificial Sequence
  Synthetic
ucauagaaaaaacuguacaa

SEQ ID NO: 780293 - RNA, 20 nt, Artificial Sequence
  Synthetic
uuugcaaacuugcuguacaa

SEQ ID NO: 780294 - RNA, 20 nt, Artificial Sequence
  Synthetic
aucacaaccgaaguguacaa

SEQ ID NO: 780295 - RNA, 20 nt, Artificial Sequence
  Synthetic
auauacauucauguguacaa

SEQ ID NO: 780296 - RNA, 20 nt, Artificial Sequence
  Synthetic
uucccaucaacauuguacaa

SEQ ID NO: 780297 - RNA, 20 nt, Artificial Sequence
  Synthetic
acuucacaaaagaauuacaa

SEQ ID NO: 780298 - RNA, 20 nt, Artificial Sequence
  Synthetic
uuucaugaucuccauuacaa

SEQ ID NO: 780299 - RNA, 20 nt, Artificial Sequence
  Synthetic
ugugauuuuugucauuacaa

SEQ ID NO: 780300 - RNA, 20 nt, Artificial Sequence
  Synthetic
cuucugucaugguauuacaa

SEQ ID NO: 780301 - RNA, 20 nt, Artificial Sequence
  Synthetic
cugaagcgaaaaacuuacaa

SEQ ID NO: 780302 - RNA, 20 nt, Artificial Sequence
  Synthetic
ccuacaaauacaacuuacaa

SEQ ID NO: 780303 - RNA, 20 nt, Artificial Sequence
  Synthetic
ccuaggaauacaacuuacaa

SEQ ID NO: 780304 - RNA, 20 nt, Artificial Sequence
  Synthetic
ccuaggaauccaacuuacaa

SEQ ID NO: 780305 - RNA, 20 nt, Artificial Sequence
  Synthetic
ccuaggaaugcaacuuacaa

SEQ ID NO: 780306 - RNA, 20 nt, Artificial Sequence
  Synthetic
acaaaauucucaacuuacaa

SEQ ID NO: 780307 - RNA, 20 nt, Artificial Sequence
  Synthetic
ugaacuguauacacuuacaa

SEQ ID NO: 780308 - RNA, 20 nt, Artificial Sequence
  Synthetic
uauuugauauaaccuuacaa

SEQ ID NO: 780309 - RNA, 20 nt, Artificial Sequence
  Synthetic
cuucauccauguccuuacaa

SEQ ID NO: 780310 - RNA, 20 nt, Artificial Sequence
  Synthetic
cuuauuuuugcugcuuacaa

SEQ ID NO: 780311 - RNA, 20 nt, Artificial Sequence
  Synthetic
agagaaaauauugcuuacaa

SEQ ID NO: 780312 - RNA, 20 nt, Artificial Sequence
  Synthetic
uuacuagauauaucuuacaa

SEQ ID NO: 780313 - RNA, 20 nt, Artificial Sequence
  Synthetic
cuagaucauuuaaguuacaa

SEQ ID NO: 780314 - RNA, 20 nt, Artificial Sequence
  Synthetic
ucaaaacacaccaguuacaa

SEQ ID NO: 780315 - RNA, 20 nt, Artificial Sequence
  Synthetic
aaauuggacuuuaguuacaa

SEQ ID NO: 780316 - RNA, 20 nt, Artificial Sequence
  Synthetic
aaacuauuuuaauguuacaa

SEQ ID NO: 780317 - RNA, 20 nt, Artificial Sequence
  Synthetic
cauguguugguuuguuacaa

SEQ ID NO: 780318 - RNA, 20 nt, Artificial Sequence
  Synthetic
aaugaaugcucaauuuacaa

SEQ ID NO: 780319 - RNA, 20 nt, Artificial Sequence
  Synthetic
caaaaggaaagaauuuacaa

SEQ ID NO: 780320 - RNA, 20 nt, Artificial Sequence
  Synthetic
uucagggagaacauuuacaa

SEQ ID NO: 780321 - RNA, 20 nt, Artificial Sequence
  Synthetic
aaaaauguuuugauuuacaa

SEQ ID NO: 780322 - RNA, 20 nt, Artificial Sequence
  Synthetic
aauuaagaaaauauuuacaa

SEQ ID NO: 780323 - RNA, 20 nt, Artificial Sequence
  Synthetic
auuuagaaucuucuuuacaa

SEQ ID NO: 780324 - RNA, 20 nt, Artificial Sequence
  Synthetic
uuuccauagcuuguuuacaa

SEQ ID NO: 780325 - RNA, 20 nt, Artificial Sequence
  Synthetic
uacaaaucuccauuuuacaa

SEQ ID NO: 780326 - RNA, 20 nt, Artificial Sequence
  Synthetic
uaacauccuucauuuuacaa

SEQ ID NO: 780327 - RNA, 20 nt, Artificial Sequence
  Synthetic
cugaggcauguauuuuacaa

SEQ ID NO: 780328 - RNA, 20 nt, Artificial Sequence
  Synthetic
aggauauuuuuauuuuacaa

SEQ ID NO: 780329 - RNA, 20 nt, Artificial Sequence
  Synthetic
ucucucucucucuuuuacaa

SEQ ID NO: 780330 - RNA, 20 nt, Artificial Sequence
  Synthetic
uuccccucuuucuuuuacaa

SEQ ID NO: 780331 - RNA, 20 nt, Artificial Sequence
  Synthetic
ucaaaggcuguuuuuuacaa

SEQ ID NO: 780332 - RNA, 20 nt, Artificial Sequence
  Synthetic
auguucagaaaaaaaaccaa

SEQ ID NO: 780333 - RNA, 20 nt, Artificial Sequence
  Synthetic
uaaugagaacuacaaaccaa

SEQ ID NO: 780334 - RNA, 20 nt, Artificial Sequence
  Synthetic
agugaaaugcaccaaaccaa

SEQ ID NO: 780335 - RNA, 20 nt, Artificial Sequence
  Synthetic
uuauaaauuauagaaaccaa

SEQ ID NO: 780336 - RNA, 20 nt, Artificial Sequence
  Synthetic
uaggagacccaggaaaccaa

SEQ ID NO: 780337 - RNA, 20 nt, Artificial Sequence
  Synthetic
ccuuuuauuagcuaaaccaa

SEQ ID NO: 780338 - RNA, 20 nt, Artificial Sequence
  Synthetic
ugacccuggauaucaaccaa

SEQ ID NO: 780339 - RNA, 20 nt, Artificial Sequence
  Synthetic
cuugcuuucuuaucaaccaa

SEQ ID NO: 780340 - RNA, 20 nt, Artificial Sequence
  Synthetic
agugagcaaccuucaaccaa

SEQ ID NO: 780341 - RNA, 20 nt, Artificial Sequence
  Synthetic
aggauauccucuucaaccaa

SEQ ID NO: 780342 - RNA, 20 nt, Artificial Sequence
  Synthetic
aagaaaacuacaagaaccaa

SEQ ID NO: 780343 - RNA, 20 nt, Artificial Sequence
  Synthetic
agauuuaaagggagaaccaa

SEQ ID NO: 780344 - RNA, 20 nt, Artificial Sequence
  Synthetic
uauuuacauucaugaaccaa

SEQ ID NO: 780345 - RNA, 20 nt, Artificial Sequence
  Synthetic
uuuauagaugagauaaccaa

SEQ ID NO: 780346 - RNA, 20 nt, Artificial Sequence
  Synthetic
uaauucacagagcuaaccaa

SEQ ID NO: 780347 - RNA, 20 nt, Artificial Sequence
  Synthetic
acauuugccaugcuaaccaa

SEQ ID NO: 780348 - RNA, 20 nt, Artificial Sequence
  Synthetic
uuuggauuuacuguaaccaa

SEQ ID NO: 780349 - RNA, 20 nt, Artificial Sequence
  Synthetic
aaugaggucaguguaaccaa

SEQ ID NO: 780350 - RNA, 20 nt, Artificial Sequence
  Synthetic
cuuugaacgguuuuaaccaa

SEQ ID NO: 780351 - RNA, 20 nt, Artificial Sequence
  Synthetic
cuuaauuuuuuuuuaaccaa

SEQ ID NO: 780352 - RNA, 20 nt, Artificial Sequence
  Synthetic
aaaacagagauauacaccaa

SEQ ID NO: 780353 - RNA, 20 nt, Artificial Sequence
  Synthetic
uauguaugaaacaccaccaa

SEQ ID NO: 780354 - RNA, 20 nt, Artificial Sequence
  Synthetic
ccaacagucaaugccaccaa

SEQ ID NO: 780355 - RNA, 20 nt, Artificial Sequence
  Synthetic
uuuaaaaaaauuuccaccaa

SEQ ID NO: 780356 - RNA, 20 nt, Artificial Sequence
  Synthetic
aaucaagggcagcucaccaa

SEQ ID NO: 780357 - RNA, 20 nt, Artificial Sequence
  Synthetic
ugaaauaagccagucaccaa

SEQ ID NO: 780358 - RNA, 20 nt, Artificial Sequence
  Synthetic
uuuuccuuuucagucaccaa

SEQ ID NO: 780359 - RNA, 20 nt, Artificial Sequence
  Synthetic
augaacuaacuugucaccaa

SEQ ID NO: 780360 - RNA, 20 nt, Artificial Sequence
  Synthetic
aaaauccacauauucaccaa

SEQ ID NO: 780361 - RNA, 20 nt, Artificial Sequence
  Synthetic
ucaccaacaucaaagaccaa

SEQ ID NO: 780362 - RNA, 20 nt, Artificial Sequence
  Synthetic
aagauuucucuaaagaccaa

SEQ ID NO: 780363 - RNA, 20 nt, Artificial Sequence
  Synthetic
uuccuuccucacaagaccaa

SEQ ID NO: 780364 - RNA, 20 nt, Artificial Sequence
  Synthetic
aguacauaaaaacagaccaa

SEQ ID NO: 780365 - RNA, 20 nt, Artificial Sequence
  Synthetic
ccuggcaggauggagaccaa

SEQ ID NO: 780366 - RNA, 20 nt, Artificial Sequence
  Synthetic
aaggcagacauauagaccaa

SEQ ID NO: 780367 - RNA, 20 nt, Artificial Sequence
  Synthetic
aaaacagagauauagaccaa

SEQ ID NO: 780368 - RNA, 20 nt, Artificial Sequence
  Synthetic
aaaacagauauauagaccaa

SEQ ID NO: 780369 - RNA, 20 nt, Artificial Sequence
  Synthetic
uuauuuaugcuggugaccaa

SEQ ID NO: 780370 - RNA, 20 nt, Artificial Sequence
  Synthetic
agguuggccagauugaccaa

SEQ ID NO: 780371 - RNA, 20 nt, Artificial Sequence
  Synthetic
uuucagauucauuugaccaa

SEQ ID NO: 780372 - RNA, 20 nt, Artificial Sequence
  Synthetic
uccacacuaaaaacuaccaa

SEQ ID NO: 780373 - RNA, 20 nt, Artificial Sequence
  Synthetic
auuuauuacacaucuaccaa

SEQ ID NO: 780374 - RNA, 20 nt, Artificial Sequence
  Synthetic
auuauaugguacaguaccaa

SEQ ID NO: 780375 - RNA, 20 nt, Artificial Sequence
  Synthetic
cuggaaacaaggaguaccaa

SEQ ID NO: 780376 - RNA, 20 nt, Artificial Sequence
  Synthetic
acuccuccaaauaguaccaa

SEQ ID NO: 780377 - RNA, 20 nt, Artificial Sequence
  Synthetic
uaaggagucagacuuaccaa

SEQ ID NO: 780378 - RNA, 20 nt, Artificial Sequence
  Synthetic
ccaggacuuuuauuuaccaa

SEQ ID NO: 780379 - RNA, 20 nt, Artificial Sequence
  Synthetic
cuccauauugcaaaacccaa

SEQ ID NO: 780380 - RNA, 20 nt, Artificial Sequence
  Synthetic
uguaaagucugauaacccaa

SEQ ID NO: 780381 - RNA, 20 nt, Artificial Sequence
  Synthetic
agaaacuauuuuuaacccaa

SEQ ID NO: 780382 - RNA, 20 nt, Artificial Sequence
  Synthetic
aaaacuccuaaaacacccaa

SEQ ID NO: 780383 - RNA, 20 nt, Artificial Sequence
  Synthetic
uuuauauauuugacacccaa

SEQ ID NO: 780384 - RNA, 20 nt, Artificial Sequence
  Synthetic
uuuuuacucuucucacccaa

SEQ ID NO: 780385 - RNA, 20 nt, Artificial Sequence
  Synthetic
uccaagacagccagacccaa

SEQ ID NO: 780386 - RNA, 20 nt, Artificial Sequence
  Synthetic
auuacuggauauauacccaa

SEQ ID NO: 780387 - RNA, 20 nt, Artificial Sequence
  Synthetic
auuacuggguauauacccaa

SEQ ID NO: 780388 - RNA, 20 nt, Artificial Sequence
  Synthetic
auuacugguuauauacccaa

SEQ ID NO: 780389 - RNA, 20 nt, Artificial Sequence
  Synthetic
auuauugguuauauacccaa

SEQ ID NO: 780390 - RNA, 20 nt, Artificial Sequence
  Synthetic
auuggagguguccuacccaa

SEQ ID NO: 780391 - RNA, 20 nt, Artificial Sequence
  Synthetic
ccucugguuaaaaaccccaa

SEQ ID NO: 780392 - RNA, 20 nt, Artificial Sequence
  Synthetic
cuagaaucugauaaccccaa

SEQ ID NO: 780393 - RNA, 20 nt, Artificial Sequence
  Synthetic
aguagaggauauaaccccaa

SEQ ID NO: 780394 - RNA, 20 nt, Artificial Sequence
  Synthetic
aacagauaaugacaccccaa

SEQ ID NO: 780395 - RNA, 20 nt, Artificial Sequence
  Synthetic
uaguguacauuacaccccaa

SEQ ID NO: 780396 - RNA, 20 nt, Artificial Sequence
  Synthetic
ugggcccagugucaccccaa

SEQ ID NO: 780397 - RNA, 20 nt, Artificial Sequence
  Synthetic
aaaguccuaauagaccccaa

SEQ ID NO: 780398 - RNA, 20 nt, Artificial Sequence
  Synthetic
cagauagcccccuaccccaa

SEQ ID NO: 780399 - RNA, 20 nt, Artificial Sequence
  Synthetic
ucaguggaucccacccccaa

SEQ ID NO: 780400 - RNA, 20 nt, Artificial Sequence
  Synthetic
ccuuuguaggggacccccaa

SEQ ID NO: 780401 - RNA, 20 nt, Artificial Sequence
  Synthetic
aaggauuuauuuucccccaa

SEQ ID NO: 780402 - RNA, 20 nt, Artificial Sequence
  Synthetic
cuucuuuacaauggccccaa

SEQ ID NO: 780403 - RNA, 20 nt, Artificial Sequence
  Synthetic
cauuguaagacaauccccaa

SEQ ID NO: 780404 - RNA, 20 nt, Artificial Sequence
  Synthetic
aguuuauucagcauccccaa

SEQ ID NO: 780405 - RNA, 20 nt, Artificial Sequence
  Synthetic
aagauagaucuacuccccaa

SEQ ID NO: 780406 - RNA, 20 nt, Artificial Sequence
  Synthetic
ucaucugaaauccuccccaa

SEQ ID NO: 780407 - RNA, 20 nt, Artificial Sequence
  Synthetic
uauucuccaccauuccccaa

SEQ ID NO: 780408 - RNA, 20 nt, Artificial Sequence
  Synthetic
caucagcauuccuuccccaa

SEQ ID NO: 780409 - RNA, 20 nt, Artificial Sequence
  Synthetic
caccaaauucaaaagcccaa

SEQ ID NO: 780410 - RNA, 20 nt, Artificial Sequence
  Synthetic
aagauauucagccagcccaa

SEQ ID NO: 780411 - RNA, 20 nt, Artificial Sequence
  Synthetic
cuuuuucaguuucagcccaa

SEQ ID NO: 780412 - RNA, 20 nt, Artificial Sequence
  Synthetic
uuugaaagcauggggcccaa

SEQ ID NO: 780413 - RNA, 20 nt, Artificial Sequence
  Synthetic
uggggugacacugggcccaa

SEQ ID NO: 780414 - RNA, 20 nt, Artificial Sequence
  Synthetic
aucuuauguuacuugcccaa

SEQ ID NO: 780415 - RNA, 20 nt, Artificial Sequence
  Synthetic
uauauauauacaaaucccaa

SEQ ID NO: 780416 - RNA, 20 nt, Artificial Sequence
  Synthetic
cuaccagccugccaucccaa

SEQ ID NO: 780417 - RNA, 20 nt, Artificial Sequence
  Synthetic
cagcuaauuuaucaucccaa

SEQ ID NO: 780418 - RNA, 20 nt, Artificial Sequence
  Synthetic
caauauuuacuguaucccaa

SEQ ID NO: 780419 - RNA, 20 nt, Artificial Sequence
  Synthetic
uuucuggcaagcagucccaa

SEQ ID NO: 780420 - RNA, 20 nt, Artificial Sequence
  Synthetic
agauuauaacaaggucccaa

SEQ ID NO: 780421 - RNA, 20 nt, Artificial Sequence
  Synthetic
uucugaacaccuugucccaa

SEQ ID NO: 780422 - RNA, 20 nt, Artificial Sequence
  Synthetic
uuuguuacuuuauuucccaa

SEQ ID NO: 780423 - RNA, 20 nt, Artificial Sequence
  Synthetic
aggguuccagaguuucccaa

SEQ ID NO: 780424 - RNA, 20 nt, Artificial Sequence
  Synthetic
ugaauggcccacaaagccaa

SEQ ID NO: 780425 - RNA, 20 nt, Artificial Sequence
  Synthetic
uuccauguggccaaagccaa

SEQ ID NO: 780426 - RNA, 20 nt, Artificial Sequence
  Synthetic
agcagaauagucaaagccaa

SEQ ID NO: 780427 - RNA, 20 nt, Artificial Sequence
  Synthetic
cagugggaaaggaaagccaa

SEQ ID NO: 780428 - RNA, 20 nt, Artificial Sequence
  Synthetic
uacauacugaauaaagccaa

SEQ ID NO: 780429 - RNA, 20 nt, Artificial Sequence
  Synthetic
uaaaauggcagagaagccaa

SEQ ID NO: 780430 - RNA, 20 nt, Artificial Sequence
  Synthetic
ccaagcuguggggaagccaa

SEQ ID NO: 780431 - RNA, 20 nt, Artificial Sequence
  Synthetic
cuaaaccaacuggaagccaa

SEQ ID NO: 780432 - RNA, 20 nt, Artificial Sequence
  Synthetic
uuauucacagcauaagccaa

SEQ ID NO: 780433 - RNA, 20 nt, Artificial Sequence
  Synthetic
uuuagauaaaacuaagccaa

SEQ ID NO: 780434 - RNA, 20 nt, Artificial Sequence
  Synthetic
cuuguaauaaaguaagccaa

SEQ ID NO: 780435 - RNA, 20 nt, Artificial Sequence
  Synthetic
ugaggaaauuuaacagccaa

SEQ ID NO: 780436 - RNA, 20 nt, Artificial Sequence
  Synthetic
cucuguggagauacagccaa

SEQ ID NO: 780437 - RNA, 20 nt, Artificial Sequence
  Synthetic
uacgacccaaccccagccaa

SEQ ID NO: 780438 - RNA, 20 nt, Artificial Sequence
  Synthetic
uaaaugcugggcccagccaa

SEQ ID NO: 780439 - RNA, 20 nt, Artificial Sequence
  Synthetic
agaaugucgcucucagccaa

SEQ ID NO: 780440 - RNA, 20 nt, Artificial Sequence
  Synthetic
agagcaugucagucagccaa

SEQ ID NO: 780441 - RNA, 20 nt, Artificial Sequence
  Synthetic
caugacugaguucgagccaa

SEQ ID NO: 780442 - RNA, 20 nt, Artificial Sequence
  Synthetic
acacacucuuaaauagccaa

SEQ ID NO: 780443 - RNA, 20 nt, Artificial Sequence
  Synthetic
uucacugugaguguagccaa

SEQ ID NO: 780444 - RNA, 20 nt, Artificial Sequence
  Synthetic
caaggugccucagaggccaa

SEQ ID NO: 780445 - RNA, 20 nt, Artificial Sequence
  Synthetic
cucuaggcucuagaggccaa

SEQ ID NO: 780446 - RNA, 20 nt, Artificial Sequence
  Synthetic
agcagccagccccuggccaa

SEQ ID NO: 780447 - RNA, 20 nt, Artificial Sequence
  Synthetic
agaaagaagcauuuggccaa

SEQ ID NO: 780448 - RNA, 20 nt, Artificial Sequence
  Synthetic
auaugccuggcuuuggccaa

SEQ ID NO: 780449 - RNA, 20 nt, Artificial Sequence
  Synthetic
aaaaagauauuccaugccaa

SEQ ID NO: 780450 - RNA, 20 nt, Artificial Sequence
  Synthetic
uucccagacucauaugccaa

SEQ ID NO: 780451 - RNA, 20 nt, Artificial Sequence
  Synthetic
uaagcuaagucaccugccaa

SEQ ID NO: 780452 - RNA, 20 nt, Artificial Sequence
  Synthetic
aacacacucaagccugccaa

SEQ ID NO: 780453 - RNA, 20 nt, Artificial Sequence
  Synthetic
uauuaagcucuugcugccaa

SEQ ID NO: 780454 - RNA, 20 nt, Artificial Sequence
  Synthetic
uuuaucuauucaucugccaa

SEQ ID NO: 780455 - RNA, 20 nt, Artificial Sequence
  Synthetic
acuugaaggaugagugccaa

SEQ ID NO: 780456 - RNA, 20 nt, Artificial Sequence
  Synthetic
uuacauguaacuagugccaa

SEQ ID NO: 780457 - RNA, 20 nt, Artificial Sequence
  Synthetic
caacaacauccuagugccaa

SEQ ID NO: 780458 - RNA, 20 nt, Artificial Sequence
  Synthetic
cucuaaaauuauauugccaa

SEQ ID NO: 780459 - RNA, 20 nt, Artificial Sequence
  Synthetic
cucagugucuugguugccaa

SEQ ID NO: 780460 - RNA, 20 nt, Artificial Sequence
  Synthetic
uaucagcacuguuuugccaa

SEQ ID NO: 780461 - RNA, 20 nt, Artificial Sequence
  Synthetic
cccccaaaacuaaaauccaa

SEQ ID NO: 780462 - RNA, 20 nt, Artificial Sequence
  Synthetic
ugauuuuucuccaaauccaa

SEQ ID NO: 780463 - RNA, 20 nt, Artificial Sequence
  Synthetic
aauaagcaugagaaauccaa

SEQ ID NO: 780464 - RNA, 20 nt, Artificial Sequence
  Synthetic
uuaggauacuugaaauccaa

SEQ ID NO: 780465 - RNA, 20 nt, Artificial Sequence
  Synthetic
agagaaaguaaacaauccaa

SEQ ID NO: 780466 - RNA, 20 nt, Artificial Sequence
  Synthetic
ugugaugucacagaauccaa

SEQ ID NO: 780467 - RNA, 20 nt, Artificial Sequence
  Synthetic
uuuaaaauacuagaauccaa

SEQ ID NO: 780468 - RNA, 20 nt, Artificial Sequence
  Synthetic
uacuuguuucucuaauccaa

SEQ ID NO: 780469 - RNA, 20 nt, Artificial Sequence
  Synthetic
cauuucacuucaucauccaa

SEQ ID NO: 780470 - RNA, 20 nt, Artificial Sequence
  Synthetic
cagcccuacccuucauccaa

SEQ ID NO: 780471 - RNA, 20 nt, Artificial Sequence
  Synthetic
ugaguucucaugagauccaa

SEQ ID NO: 780472 - RNA, 20 nt, Artificial Sequence
  Synthetic
agaggaaacaccauauccaa

SEQ ID NO: 780473 - RNA, 20 nt, Artificial Sequence
  Synthetic
acugacaugcccauauccaa

SEQ ID NO: 780474 - RNA, 20 nt, Artificial Sequence
  Synthetic
aaaucugguagacuauccaa

SEQ ID NO: 780475 - RNA, 20 nt, Artificial Sequence
  Synthetic
acuuugauaacucuauccaa

SEQ ID NO: 780476 - RNA, 20 nt, Artificial Sequence
  Synthetic
uagaaaauucaguuauccaa

SEQ ID NO: 780477 - RNA, 20 nt, Artificial Sequence
  Synthetic
cuugaagaauuccacuccaa

SEQ ID NO: 780478 - RNA, 20 nt, Artificial Sequence
  Synthetic
augccugggugugccuccaa

SEQ ID NO: 780479 - RNA, 20 nt, Artificial Sequence
  Synthetic
ugaugaauucucaucuccaa

SEQ ID NO: 780480 - RNA, 20 nt, Artificial Sequence
  Synthetic
auguucugcaggcucuccaa

SEQ ID NO: 780481 - RNA, 20 nt, Artificial Sequence
  Synthetic
aauacauguggagucuccaa

SEQ ID NO: 780482 - RNA, 20 nt, Artificial Sequence
  Synthetic
aaaauaaaggaguucuccaa

SEQ ID NO: 780483 - RNA, 20 nt, Artificial Sequence
  Synthetic
uuggccucuguuuucuccaa

SEQ ID NO: 780484 - RNA, 20 nt, Artificial Sequence
  Synthetic
uugcuuggcugccaguccaa

SEQ ID NO: 780485 - RNA, 20 nt, Artificial Sequence
  Synthetic
uaguuccugucugaguccaa

SEQ ID NO: 780486 - RNA, 20 nt, Artificial Sequence
  Synthetic
uguugcaaucuugaguccaa

SEQ ID NO: 780487 - RNA, 20 nt, Artificial Sequence
  Synthetic
ucacaaggcagcagguccaa

SEQ ID NO: 780488 - RNA, 20 nt, Artificial Sequence
  Synthetic
ucuacucagucucuguccaa

SEQ ID NO: 780489 - RNA, 20 nt, Artificial Sequence
  Synthetic
uuuaaagugguguuguccaa

SEQ ID NO: 780490 - RNA, 20 nt, Artificial Sequence
  Synthetic
uaaauccugacuuuguccaa

SEQ ID NO: 780491 - RNA, 20 nt, Artificial Sequence
  Synthetic
uaucauccuguaaauuccaa

SEQ ID NO: 780492 - RNA, 20 nt, Artificial Sequence
  Synthetic
uaugaaguaacuaauuccaa

SEQ ID NO: 780493 - RNA, 20 nt, Artificial Sequence
  Synthetic
aacauaauacaucauuccaa

SEQ ID NO: 780494 - RNA, 20 nt, Artificial Sequence
  Synthetic
ugaauagccauucauuccaa

SEQ ID NO: 780495 - RNA, 20 nt, Artificial Sequence
  Synthetic
accauguuacauacuuccaa

SEQ ID NO: 780496 - RNA, 20 nt, Artificial Sequence
  Synthetic
uccugaauucuaccuuccaa

SEQ ID NO: 780497 - RNA, 20 nt, Artificial Sequence
  Synthetic
augaccuaauuaccuuccaa

SEQ ID NO: 780498 - RNA, 20 nt, Artificial Sequence
  Synthetic
uuacaaauguugccuuccaa

SEQ ID NO: 780499 - RNA, 20 nt, Artificial Sequence
  Synthetic
aguuucucuaguccuuccaa

SEQ ID NO: 780500 - RNA, 20 nt, Artificial Sequence
  Synthetic
ugguuuaggacugcuuccaa

SEQ ID NO: 780501 - RNA, 20 nt, Artificial Sequence
  Synthetic
auauuuuaauaaucuuccaa

SEQ ID NO: 780502 - RNA, 20 nt, Artificial Sequence
  Synthetic
aacugcuuaaacucuuccaa

SEQ ID NO: 780503 - RNA, 20 nt, Artificial Sequence
  Synthetic
uaauuuuuuuaaaguuccaa

SEQ ID NO: 780504 - RNA, 20 nt, Artificial Sequence
  Synthetic
ugccaugcugccaguuccaa

SEQ ID NO: 780505 - RNA, 20 nt, Artificial Sequence
  Synthetic
aaaaauugagaugguuccaa

SEQ ID NO: 780506 - RNA, 20 nt, Artificial Sequence
  Synthetic
uggaauaaaaccauuuccaa

SEQ ID NO: 780507 - RNA, 20 nt, Artificial Sequence
  Synthetic
acuaaguccuucauuuccaa

SEQ ID NO: 780508 - RNA, 20 nt, Artificial Sequence
  Synthetic
acaauacuuuuuauuuccaa

SEQ ID NO: 780509 - RNA, 20 nt, Artificial Sequence
  Synthetic
aacuguauaacacuuuccaa

SEQ ID NO: 780510 - RNA, 20 nt, Artificial Sequence
  Synthetic
aaagauccuagacuuuccaa

SEQ ID NO: 780511 - RNA, 20 nt, Artificial Sequence
  Synthetic
ucuaaaacagggcuuuccaa

SEQ ID NO: 780512 - RNA, 20 nt, Artificial Sequence
  Synthetic
caaaauuauuuucuuuccaa

SEQ ID NO: 780513 - RNA, 20 nt, Artificial Sequence
  Synthetic
cacaaaaaagaauuuuccaa

SEQ ID NO: 780514 - RNA, 20 nt, Artificial Sequence
  Synthetic
uuuauaaaucccuuuuccaa

SEQ ID NO: 780515 - RNA, 20 nt, Artificial Sequence
  Synthetic
uaacacaaguuaaaaagcaa

SEQ ID NO: 780516 - RNA, 20 nt, Artificial Sequence
  Synthetic
gucuaaaacaccaaaagcaa

SEQ ID NO: 780517 - RNA, 20 nt, Artificial Sequence
  Synthetic
ucaaaguuuuucaaaagcaa

SEQ ID NO: 780518 - RNA, 20 nt, Artificial Sequence
  Synthetic
uuuuuuaccauuaaaagcaa

SEQ ID NO: 780519 - RNA, 20 nt, Artificial Sequence
  Synthetic
auguucccaacacaaagcaa

SEQ ID NO: 780520 - RNA, 20 nt, Artificial Sequence
  Synthetic
aaaaagcuucuacaaagcaa

SEQ ID NO: 780521 - RNA, 20 nt, Artificial Sequence
  Synthetic
caauauuagauccaaagcaa

SEQ ID NO: 780522 - RNA, 20 nt, Artificial Sequence
  Synthetic
cacacauaggcucaaagcaa

SEQ ID NO: 780523 - RNA, 20 nt, Artificial Sequence
  Synthetic
agucagauaauucaaagcaa

SEQ ID NO: 780524 - RNA, 20 nt, Artificial Sequence
  Synthetic
uuuacaacugaagaaagcaa

SEQ ID NO: 780525 - RNA, 20 nt, Artificial Sequence
  Synthetic
auaaucaugguggaaagcaa

SEQ ID NO: 780526 - RNA, 20 nt, Artificial Sequence
  Synthetic
caugagagaaaauaaagcaa

SEQ ID NO: 780527 - RNA, 20 nt, Artificial Sequence
  Synthetic
aauccugagucauaaagcaa

SEQ ID NO: 780528 - RNA, 20 nt, Artificial Sequence
  Synthetic
cagggauggggcuaaagcaa

SEQ ID NO: 780529 - RNA, 20 nt, Artificial Sequence
  Synthetic
aaaaggcuaaucuaaagcaa

SEQ ID NO: 780530 - RNA, 20 nt, Artificial Sequence
  Synthetic
uggugcuccugguaaagcaa

SEQ ID NO: 780531 - RNA, 20 nt, Artificial Sequence
  Synthetic
acguuggcauuuuaaagcaa

SEQ ID NO: 780532 - RNA, 20 nt, Artificial Sequence
  Synthetic
aaccugacaaaaacaagcaa

SEQ ID NO: 780533 - RNA, 20 nt, Artificial Sequence
  Synthetic
aaccugagaaaaacaagcaa

SEQ ID NO: 780534 - RNA, 20 nt, Artificial Sequence
  Synthetic
aaccugaggaaaacaagcaa

SEQ ID NO: 780535 - RNA, 20 nt, Artificial Sequence
  Synthetic
aguucauuugauacaagcaa

SEQ ID NO: 780536 - RNA, 20 nt, Artificial Sequence
  Synthetic
acauccuuaaaaccaagcaa

SEQ ID NO: 780537 - RNA, 20 nt, Artificial Sequence
  Synthetic
ucucucaaaggggcaagcaa

SEQ ID NO: 780538 - RNA, 20 nt, Artificial Sequence
  Synthetic
auuuggagaagugcaagcaa

SEQ ID NO: 780539 - RNA, 20 nt, Artificial Sequence
  Synthetic
ccuaaagauguuucaagcaa

SEQ ID NO: 780540 - RNA, 20 nt, Artificial Sequence
  Synthetic
acaaaaagauaaagaagcaa

SEQ ID NO: 780541 - RNA, 20 nt, Artificial Sequence
  Synthetic
ccaucuuaaacaagaagcaa

SEQ ID NO: 780542 - RNA, 20 nt, Artificial Sequence
  Synthetic
acucuauucuuaagaagcaa

SEQ ID NO: 780543 - RNA, 20 nt, Artificial Sequence
  Synthetic
ucaguaaaucagagaagcaa

SEQ ID NO: 780544 - RNA, 20 nt, Artificial Sequence
  Synthetic
uguuuugaaggaggaagcaa

SEQ ID NO: 780545 - RNA, 20 nt, Artificial Sequence
  Synthetic
auuuacauuucuggaagcaa

SEQ ID NO: 780546 - RNA, 20 nt, Artificial Sequence
  Synthetic
cagauaagaaaaugaagcaa

SEQ ID NO: 780547 - RNA, 20 nt, Artificial Sequence
  Synthetic
acuugcucccucugaagcaa

SEQ ID NO: 780548 - RNA, 20 nt, Artificial Sequence
  Synthetic
ugagugagauucugaagcaa

SEQ ID NO: 780549 - RNA, 20 nt, Artificial Sequence
  Synthetic
aucuucuaaaauugaagcaa

SEQ ID NO: 780550 - RNA, 20 nt, Artificial Sequence
  Synthetic
acuaaauggaaaauaagcaa

SEQ ID NO: 780551 - RNA, 20 nt, Artificial Sequence
  Synthetic
agggagaggggaauaagcaa

SEQ ID NO: 780552 - RNA, 20 nt, Artificial Sequence
  Synthetic
aaacuaaguuucauaagcaa

SEQ ID NO: 780553 - RNA, 20 nt, Artificial Sequence
  Synthetic
ucaugagacuguauaagcaa

SEQ ID NO: 780554 - RNA, 20 nt, Artificial Sequence
  Synthetic
aaagagugagauguaagcaa

SEQ ID NO: 780555 - RNA, 20 nt, Artificial Sequence
  Synthetic
ucucgaaguuauuuaagcaa

SEQ ID NO: 780556 - RNA, 20 nt, Artificial Sequence
  Synthetic
augagugggucuuuaagcaa

SEQ ID NO: 780557 - RNA, 20 nt, Artificial Sequence
  Synthetic
aauacuuugucuuuaagcaa

SEQ ID NO: 780558 - RNA, 20 nt, Artificial Sequence
  Synthetic
ucuaacgacaaaaacagcaa

SEQ ID NO: 780559 - RNA, 20 nt, Artificial Sequence
  Synthetic
uuuggcagguagaacagcaa

SEQ ID NO: 780560 - RNA, 20 nt, Artificial Sequence
  Synthetic
aaaaaaaaaaaacacagcaa

SEQ ID NO: 780561 - RNA, 20 nt, Artificial Sequence
  Synthetic
uaaagacuaugccacagcaa

SEQ ID NO: 780562 - RNA, 20 nt, Artificial Sequence
  Synthetic
uaaaaagcuuugcacagcaa

SEQ ID NO: 780563 - RNA, 20 nt, Artificial Sequence
  Synthetic
augaaaaucuuugacagcaa

SEQ ID NO: 780564 - RNA, 20 nt, Artificial Sequence
  Synthetic
cagcugcccuccaccagcaa

SEQ ID NO: 780565 - RNA, 20 nt, Artificial Sequence
  Synthetic
cagauccagcaacccagcaa

SEQ ID NO: 780566 - RNA, 20 nt, Artificial Sequence
  Synthetic
aaaaaaaaacaggccagcaa

SEQ ID NO: 780567 - RNA, 20 nt, Artificial Sequence
  Synthetic
ucacaacuccucuccagcaa

SEQ ID NO: 780568 - RNA, 20 nt, Artificial Sequence
  Synthetic
aucugugaaagcagcagcaa

SEQ ID NO: 780569 - RNA, 20 nt, Artificial Sequence
  Synthetic
acauugacuucuagcagcaa

SEQ ID NO: 780570 - RNA, 20 nt, Artificial Sequence
  Synthetic
cugguacuccagggcagcaa

SEQ ID NO: 780571 - RNA, 20 nt, Artificial Sequence
  Synthetic
uauauacauauaugcagcaa

SEQ ID NO: 780572 - RNA, 20 nt, Artificial Sequence
  Synthetic
auuguccugaguugcagcaa

SEQ ID NO: 780573 - RNA, 20 nt, Artificial Sequence
  Synthetic
auuucugucaaaaucagcaa

SEQ ID NO: 780574 - RNA, 20 nt, Artificial Sequence
  Synthetic
ccuaauuguggaaucagcaa

SEQ ID NO: 780575 - RNA, 20 nt, Artificial Sequence
  Synthetic
auucuacuucaacucagcaa

SEQ ID NO: 780576 - RNA, 20 nt, Artificial Sequence
  Synthetic
auuucucuauuucucagcaa

SEQ ID NO: 780577 - RNA, 20 nt, Artificial Sequence
  Synthetic
auguguuuaauuuucagcaa

SEQ ID NO: 780578 - RNA, 20 nt, Artificial Sequence
  Synthetic
cgagauggggaaaagagcaa

SEQ ID NO: 780579 - RNA, 20 nt, Artificial Sequence
  Synthetic
ccucccagaauaaagagcaa

SEQ ID NO: 780580 - RNA, 20 nt, Artificial Sequence
  Synthetic
auuuuuaauauaaagagcaa

SEQ ID NO: 780581 - RNA, 20 nt, Artificial Sequence
  Synthetic
uuaggaggcacagagagcaa

SEQ ID NO: 780582 - RNA, 20 nt, Artificial Sequence
  Synthetic
agaaugucauuggagagcaa

SEQ ID NO: 780583 - RNA, 20 nt, Artificial Sequence
  Synthetic
uuugcuggaacugagagcaa

SEQ ID NO: 780584 - RNA, 20 nt, Artificial Sequence
  Synthetic
cuuuuaacacuauagagcaa

SEQ ID NO: 780585 - RNA, 20 nt, Artificial Sequence
  Synthetic
ccauuuaagaaguagagcaa

SEQ ID NO: 780586 - RNA, 20 nt, Artificial Sequence
  Synthetic
aguacuugauaaaggagcaa

SEQ ID NO: 780587 - RNA, 20 nt, Artificial Sequence
  Synthetic
agaaagaacuuacggagcaa

SEQ ID NO: 780588 - RNA, 20 nt, Artificial Sequence
  Synthetic
ugcugggguacagggagcaa

SEQ ID NO: 780589 - RNA, 20 nt, Artificial Sequence
  Synthetic
cuucuugggaacuggagcaa

SEQ ID NO: 780590 - RNA, 20 nt, Artificial Sequence
  Synthetic
agaauuuuuagccugagcaa

SEQ ID NO: 780591 - RNA, 20 nt, Artificial Sequence
  Synthetic
aaaggagaagugcugagcaa

SEQ ID NO: 780592 - RNA, 20 nt, Artificial Sequence
  Synthetic
cacuauauaucagugagcaa

SEQ ID NO: 780593 - RNA, 20 nt, Artificial Sequence
  Synthetic
ugcagaauguguuugagcaa

SEQ ID NO: 780594 - RNA, 20 nt, Artificial Sequence
  Synthetic
agauaaauuugaaauagcaa

SEQ ID NO: 780595 - RNA, 20 nt, Artificial Sequence
  Synthetic
agcaccauucacaauagcaa

SEQ ID NO: 780596 - RNA, 20 nt, Artificial Sequence
  Synthetic
agcacuauucacaauagcaa

SEQ ID NO: 780597 - RNA, 20 nt, Artificial Sequence
  Synthetic
aaauacugccaacauagcaa

SEQ ID NO: 780598 - RNA, 20 nt, Artificial Sequence
  Synthetic
cuuucucuucacacuagcaa

SEQ ID NO: 780599 - RNA, 20 nt, Artificial Sequence
  Synthetic
uaacuuaaaugaucuagcaa

SEQ ID NO: 780600 - RNA, 20 nt, Artificial Sequence
  Synthetic
aauggaaaauuaaguagcaa

SEQ ID NO: 780601 - RNA, 20 nt, Artificial Sequence
  Synthetic
augaccacauucaguagcaa

SEQ ID NO: 780602 - RNA, 20 nt, Artificial Sequence
  Synthetic
auuucagaguuacuuagcaa

SEQ ID NO: 780603 - RNA, 20 nt, Artificial Sequence
  Synthetic
uuaauauucccauuuagcaa

SEQ ID NO: 780604 - RNA, 20 nt, Artificial Sequence
  Synthetic
cagcuguuacuauuuagcaa

SEQ ID NO: 780605 - RNA, 20 nt, Artificial Sequence
  Synthetic
cucggaaaccauuuuagcaa

SEQ ID NO: 780606 - RNA, 20 nt, Artificial Sequence
  Synthetic
aggaaagcaaaggaacgcaa

SEQ ID NO: 780607 - RNA, 20 nt, Artificial Sequence
  Synthetic
cugcauccgugcuuccgcaa

SEQ ID NO: 780608 - RNA, 20 nt, Artificial Sequence
  Synthetic
ccccguguguagcagcgcaa

SEQ ID NO: 780609 - RNA, 20 nt, Artificial Sequence
  Synthetic
uugcccaggcuggagcgcaa

SEQ ID NO: 780610 - RNA, 20 nt, Artificial Sequence
  Synthetic
uauaaauaggccaggcgcaa

SEQ ID NO: 780611 - RNA, 20 nt, Artificial Sequence
  Synthetic
auauuucagggaaaaggcaa

SEQ ID NO: 780612 - RNA, 20 nt, Artificial Sequence
  Synthetic
auacucgagcagaaaggcaa

SEQ ID NO: 780613 - RNA, 20 nt, Artificial Sequence
  Synthetic
auuuugaaauggaaaggcaa

SEQ ID NO: 780614 - RNA, 20 nt, Artificial Sequence
  Synthetic
aauguuaaucaccaaggcaa

SEQ ID NO: 780615 - RNA, 20 nt, Artificial Sequence
  Synthetic
acaaucauggcagaaggcaa

SEQ ID NO: 780616 - RNA, 20 nt, Artificial Sequence
  Synthetic
ccaaccaugguggaaggcaa

SEQ ID NO: 780617 - RNA, 20 nt, Artificial Sequence
  Synthetic
uuccauucagaugaaggcaa

SEQ ID NO: 780618 - RNA, 20 nt, Artificial Sequence
  Synthetic
aaucaaaacaccuaaggcaa

SEQ ID NO: 780619 - RNA, 20 nt, Artificial Sequence
  Synthetic
auacuuucuuuuuaaggcaa

SEQ ID NO: 780620 - RNA, 20 nt, Artificial Sequence
  Synthetic
aucgggucccuaacaggcaa

SEQ ID NO: 780621 - RNA, 20 nt, Artificial Sequence
  Synthetic
uauucacuaaucacaggcaa

SEQ ID NO: 780622 - RNA, 20 nt, Artificial Sequence
  Synthetic
agcugaagaaaaccaggcaa

SEQ ID NO: 780623 - RNA, 20 nt, Artificial Sequence
  Synthetic
uggccaggacaaucaggcaa

SEQ ID NO: 780624 - RNA, 20 nt, Artificial Sequence
  Synthetic
aaauuugaagaaagaggcaa

SEQ ID NO: 780625 - RNA, 20 nt, Artificial Sequence
  Synthetic
uacuaaggggacagaggcaa

SEQ ID NO: 780626 - RNA, 20 nt, Artificial Sequence
  Synthetic
caagcuauacuacgaggcaa

SEQ ID NO: 780627 - RNA, 20 nt, Artificial Sequence
  Synthetic
augucgacauaaggaggcaa

SEQ ID NO: 780628 - RNA, 20 nt, Artificial Sequence
  Synthetic
cacuugaacccaggaggcaa

SEQ ID NO: 780629 - RNA, 20 nt, Artificial Sequence
  Synthetic
aaauugcagaugggaggcaa

SEQ ID NO: 780630 - RNA, 20 nt, Artificial Sequence
  Synthetic
caggugccaugaugaggcaa

SEQ ID NO: 780631 - RNA, 20 nt, Artificial Sequence
  Synthetic
aaacuucauuucugaggcaa

SEQ ID NO: 780632 - RNA, 20 nt, Artificial Sequence
  Synthetic
caugcuuguugaauaggcaa

SEQ ID NO: 780633 - RNA, 20 nt, Artificial Sequence
  Synthetic
ugaguuggagaaguaggcaa

SEQ ID NO: 780634 - RNA, 20 nt, Artificial Sequence
  Synthetic
uaguguuuaauacucggcaa

SEQ ID NO: 780635 - RNA, 20 nt, Artificial Sequence
  Synthetic
agagggaaucaaaagggcaa

SEQ ID NO: 780636 - RNA, 20 nt, Artificial Sequence
  Synthetic
cccuccaccagcaagggcaa

SEQ ID NO: 780637 - RNA, 20 nt, Artificial Sequence
  Synthetic
uucaucagcaagaagggcaa

SEQ ID NO: 780638 - RNA, 20 nt, Artificial Sequence
  Synthetic
uuauuagaucugaagggcaa

SEQ ID NO: 780639 - RNA, 20 nt, Artificial Sequence
  Synthetic
ccauucauggugaagggcaa

SEQ ID NO: 780640 - RNA, 20 nt, Artificial Sequence
  Synthetic
ucuuggucuccacagggcaa

SEQ ID NO: 780641 - RNA, 20 nt, Artificial Sequence
  Synthetic
agaaggggauuggagggcaa

SEQ ID NO: 780642 - RNA, 20 nt, Artificial Sequence
  Synthetic
caaauggugaauccgggcaa

SEQ ID NO: 780643 - RNA, 20 nt, Artificial Sequence
  Synthetic
uuauucuuucaaaggggcaa

SEQ ID NO: 780644 - RNA, 20 nt, Artificial Sequence
  Synthetic
ugucaaggggugaggggcaa

SEQ ID NO: 780645 - RNA, 20 nt, Artificial Sequence
  Synthetic
acuauuccuuccgggggcaa

SEQ ID NO: 780646 - RNA, 20 nt, Artificial Sequence
  Synthetic
ugucgcgagguggggggcaa

SEQ ID NO: 780647 - RNA, 20 nt, Artificial Sequence
  Synthetic
uguuggcggguggggggcaa

SEQ ID NO: 780648 - RNA, 20 nt, Artificial Sequence
  Synthetic
aaacagauaacugggggcaa

SEQ ID NO: 780649 - RNA, 20 nt, Artificial Sequence
  Synthetic
caguuuaggggcuggggcaa

SEQ ID NO: 780650 - RNA, 20 nt, Artificial Sequence
  Synthetic
cuggauuccaaccugggcaa

SEQ ID NO: 780651 - RNA, 20 nt, Artificial Sequence
  Synthetic
cugcacuccagccugggcaa

SEQ ID NO: 780652 - RNA, 20 nt, Artificial Sequence
  Synthetic
agacugaagaugcugggcaa

SEQ ID NO: 780653 - RNA, 20 nt, Artificial Sequence
  Synthetic
ccccaucagaaagugggcaa

SEQ ID NO: 780654 - RNA, 20 nt, Artificial Sequence
  Synthetic
ccuaaucaaaaauugggcaa

SEQ ID NO: 780655 - RNA, 20 nt, Artificial Sequence
  Synthetic
uuuauuuacaaaaauggcaa

SEQ ID NO: 780656 - RNA, 20 nt, Artificial Sequence
  Synthetic
cuaacuuuuuuaaauggcaa

SEQ ID NO: 780657 - RNA, 20 nt, Artificial Sequence
  Synthetic
cauuguggauuccauggcaa

SEQ ID NO: 780658 - RNA, 20 nt, Artificial Sequence
  Synthetic
uugacucacaugcauggcaa

SEQ ID NO: 780659 - RNA, 20 nt, Artificial Sequence
  Synthetic
accaagccuugagauggcaa

SEQ ID NO: 780660 - RNA, 20 nt, Artificial Sequence
  Synthetic
auugaaauaccauauggcaa

SEQ ID NO: 780661 - RNA, 20 nt, Artificial Sequence
  Synthetic
cauuggauuguguauggcaa

SEQ ID NO: 780662 - RNA, 20 nt, Artificial Sequence
  Synthetic
auuccuugcuugccuggcaa

SEQ ID NO: 780663 - RNA, 20 nt, Artificial Sequence
  Synthetic
ucaagaauuuucaguggcaa

SEQ ID NO: 780664 - RNA, 20 nt, Artificial Sequence
  Synthetic
aggcacauguguuguggcaa

SEQ ID NO: 780665 - RNA, 20 nt, Artificial Sequence
  Synthetic
aauauuguuaaaauuggcaa

SEQ ID NO: 780666 - RNA, 20 nt, Artificial Sequence
  Synthetic
cuguguuauaauauuggcaa

SEQ ID NO: 780667 - RNA, 20 nt, Artificial Sequence
  Synthetic
acaauguguuuucuuggcaa

SEQ ID NO: 780668 - RNA, 20 nt, Artificial Sequence
  Synthetic
uaauucuuuaacuuuggcaa

SEQ ID NO: 780669 - RNA, 20 nt, Artificial Sequence
  Synthetic
acauacaccaccaaaugcaa

SEQ ID NO: 780670 - RNA, 20 nt, Artificial Sequence
  Synthetic
uaguaaucaaugaaaugcaa

SEQ ID NO: 780671 - RNA, 20 nt, Artificial Sequence
  Synthetic
ccauuucuauugaaaugcaa

SEQ ID NO: 780672 - RNA, 20 nt, Artificial Sequence
  Synthetic
ucaguugaccauaaaugcaa

SEQ ID NO: 780673 - RNA, 20 nt, Artificial Sequence
  Synthetic
agagguagcacacaaugcaa

SEQ ID NO: 780674 - RNA, 20 nt, Artificial Sequence
  Synthetic
agagauauagaggaaugcaa

SEQ ID NO: 780675 - RNA, 20 nt, Artificial Sequence
  Synthetic
auuuaauaguaggaaugcaa

SEQ ID NO: 780676 - RNA, 20 nt, Artificial Sequence
  Synthetic
uugcccaggcuggaaugcaa

SEQ ID NO: 780677 - RNA, 20 nt, Artificial Sequence
  Synthetic
uggccaaguugugaaugcaa

SEQ ID NO: 780678 - RNA, 20 nt, Artificial Sequence
  Synthetic
uagcuaaguugugaaugcaa

SEQ ID NO: 780679 - RNA, 20 nt, Artificial Sequence
  Synthetic
agcaaauaauuauaaugcaa

SEQ ID NO: 780680 - RNA, 20 nt, Artificial Sequence
  Synthetic
aacaauugcauguaaugcaa

SEQ ID NO: 780681 - RNA, 20 nt, Artificial Sequence
  Synthetic
uuaagaaagaguuaaugcaa

SEQ ID NO: 780682 - RNA, 20 nt, Artificial Sequence
  Synthetic
auaaacaaguaaacaugcaa

SEQ ID NO: 780683 - RNA, 20 nt, Artificial Sequence
  Synthetic
uggggagcagagccaugcaa

SEQ ID NO: 780684 - RNA, 20 nt, Artificial Sequence
  Synthetic
auugugaacuacucaugcaa

SEQ ID NO: 780685 - RNA, 20 nt, Artificial Sequence
  Synthetic
aauauugcauauauaugcaa

SEQ ID NO: 780686 - RNA, 20 nt, Artificial Sequence
  Synthetic
agcaagcagacuguaugcaa

SEQ ID NO: 780687 - RNA, 20 nt, Artificial Sequence
  Synthetic
cauggacaguuuuuaugcaa

SEQ ID NO: 780688 - RNA, 20 nt, Artificial Sequence
  Synthetic
augacaaugccaaacugcaa

SEQ ID NO: 780689 - RNA, 20 nt, Artificial Sequence
  Synthetic
uugaagggccauaacugcaa

SEQ ID NO: 780690 - RNA, 20 nt, Artificial Sequence
  Synthetic
ccucuaggagauaacugcaa

SEQ ID NO: 780691 - RNA, 20 nt, Artificial Sequence
  Synthetic
auucauuuuuauaacugcaa

SEQ ID NO: 780692 - RNA, 20 nt, Artificial Sequence
  Synthetic
aaugucugaggacacugcaa

SEQ ID NO: 780693 - RNA, 20 nt, Artificial Sequence
  Synthetic
aggcacagggaccacugcaa

SEQ ID NO: 780694 - RNA, 20 nt, Artificial Sequence
  Synthetic
cuuggaggcagugacugcaa

SEQ ID NO: 780695 - RNA, 20 nt, Artificial Sequence
  Synthetic
aucaaggagaccuacugcaa

SEQ ID NO: 780696 - RNA, 20 nt, Artificial Sequence
  Synthetic
cucgcucacucacccugcaa

SEQ ID NO: 780697 - RNA, 20 nt, Artificial Sequence
  Synthetic
cuucauccaugucccugcaa

SEQ ID NO: 780698 - RNA, 20 nt, Artificial Sequence
  Synthetic
auccaucuaugucccugcaa

SEQ ID NO: 780699 - RNA, 20 nt, Artificial Sequence
  Synthetic
aggaaaaguguagccugcaa

SEQ ID NO: 780700 - RNA, 20 nt, Artificial Sequence
  Synthetic
uuucauccauguuccugcaa

SEQ ID NO: 780701 - RNA, 20 nt, Artificial Sequence
  Synthetic
cuccauauguguuccugcaa

SEQ ID NO: 780702 - RNA, 20 nt, Artificial Sequence
  Synthetic
cuccauccaugucgcugcaa

SEQ ID NO: 780703 - RNA, 20 nt, Artificial Sequence
  Synthetic
ucaucacugaggugcugcaa

SEQ ID NO: 780704 - RNA, 20 nt, Artificial Sequence
  Synthetic
cugcauccauguugcugcaa

SEQ ID NO: 780705 - RNA, 20 nt, Artificial Sequence
  Synthetic
cugcaucuauguugcugcaa

SEQ ID NO: 780706 - RNA, 20 nt, Artificial Sequence
  Synthetic
ugcggauuuuaaaucugcaa

SEQ ID NO: 780707 - RNA, 20 nt, Artificial Sequence
  Synthetic
agccaguacaaccucugcaa

SEQ ID NO: 780708 - RNA, 20 nt, Artificial Sequence
  Synthetic
auugcugagaggcucugcaa

SEQ ID NO: 780709 - RNA, 20 nt, Artificial Sequence
  Synthetic
ucaacagacuguuucugcaa

SEQ ID NO: 780710 - RNA, 20 nt, Artificial Sequence
  Synthetic
ugcagagacagcaagugcaa

SEQ ID NO: 780711 - RNA, 20 nt, Artificial Sequence
  Synthetic
uagauuuuaucuaagugcaa

SEQ ID NO: 780712 - RNA, 20 nt, Artificial Sequence
  Synthetic
agauuuauauguaagugcaa

SEQ ID NO: 780713 - RNA, 20 nt, Artificial Sequence
  Synthetic
caggcuggagugcagugcaa

SEQ ID NO: 780714 - RNA, 20 nt, Artificial Sequence
  Synthetic
acaggucuuuugcagugcaa

SEQ ID NO: 780715 - RNA, 20 nt, Artificial Sequence
  Synthetic
uugcccagguuagagugcaa

SEQ ID NO: 780716 - RNA, 20 nt, Artificial Sequence
  Synthetic
uugccccagcuggagugcaa

SEQ ID NO: 780717 - RNA, 20 nt, Artificial Sequence
  Synthetic
uaacccaggcuggagugcaa

SEQ ID NO: 780718 - RNA, 20 nt, Artificial Sequence
  Synthetic
ucacccaggcuggagugcaa

SEQ ID NO: 780719 - RNA, 20 nt, Artificial Sequence
  Synthetic
ucccccaggcuggagugcaa

SEQ ID NO: 780720 - RNA, 20 nt, Artificial Sequence
  Synthetic
ucgcccaggcuggagugcaa

SEQ ID NO: 780721 - RNA, 20 nt, Artificial Sequence
  Synthetic
uugcccaggcuggagugcaa

SEQ ID NO: 780722 - RNA, 20 nt, Artificial Sequence
  Synthetic
ucucccaggcuggagugcaa

SEQ ID NO: 780723 - RNA, 20 nt, Artificial Sequence
  Synthetic
uugccuaggcuggagugcaa

SEQ ID NO: 780724 - RNA, 20 nt, Artificial Sequence
  Synthetic
ucgccccggcuggagugcaa

SEQ ID NO: 780725 - RNA, 20 nt, Artificial Sequence
  Synthetic
ucacucagucuggagugcaa

SEQ ID NO: 780726 - RNA, 20 nt, Artificial Sequence
  Synthetic
uuagucaagucuuagugcaa

SEQ ID NO: 780727 - RNA, 20 nt, Artificial Sequence
  Synthetic
aaacggaauaguacgugcaa

SEQ ID NO: 780728 - RNA, 20 nt, Artificial Sequence
  Synthetic
cuucauccauguccgugcaa

SEQ ID NO: 780729 - RNA, 20 nt, Artificial Sequence
  Synthetic
uugcccaggcuggggugcaa

SEQ ID NO: 780730 - RNA, 20 nt, Artificial Sequence
  Synthetic
aauguuagaggauggugcaa

SEQ ID NO: 780731 - RNA, 20 nt, Artificial Sequence
  Synthetic
agagagaccaauaugugcaa

SEQ ID NO: 780732 - RNA, 20 nt, Artificial Sequence
  Synthetic
aauggugagaugcugugcaa

SEQ ID NO: 780733 - RNA, 20 nt, Artificial Sequence
  Synthetic
ugaagugugggggugugcaa

SEQ ID NO: 780734 - RNA, 20 nt, Artificial Sequence
  Synthetic
uaagucaugaccuugugcaa

SEQ ID NO: 780735 - RNA, 20 nt, Artificial Sequence
  Synthetic
auucugggaaccaauugcaa

SEQ ID NO: 780736 - RNA, 20 nt, Artificial Sequence
  Synthetic
uuugcuccuuccaauugcaa

SEQ ID NO: 780737 - RNA, 20 nt, Artificial Sequence
  Synthetic
uccauuaauuuucauugcaa

SEQ ID NO: 780738 - RNA, 20 nt, Artificial Sequence
  Synthetic
uguagaaaucaagauugcaa

SEQ ID NO: 780739 - RNA, 20 nt, Artificial Sequence
  Synthetic
uaugauaaaggauauugcaa

SEQ ID NO: 780740 - RNA, 20 nt, Artificial Sequence
  Synthetic
ugguagacauuauauugcaa

SEQ ID NO: 780741 - RNA, 20 nt, Artificial Sequence
  Synthetic
uuguagaauuguuauugcaa

SEQ ID NO: 780742 - RNA, 20 nt, Artificial Sequence
  Synthetic
ccuaggaauacaacuugcaa

SEQ ID NO: 780743 - RNA, 20 nt, Artificial Sequence
  Synthetic
acguaauuaaaaccuugcaa

SEQ ID NO: 780744 - RNA, 20 nt, Artificial Sequence
  Synthetic
caucauauugaaccuugcaa

SEQ ID NO: 780745 - RNA, 20 nt, Artificial Sequence
  Synthetic
auccguaauauaaguugcaa

SEQ ID NO: 780746 - RNA, 20 nt, Artificial Sequence
  Synthetic
cauucagacaacaguugcaa

SEQ ID NO: 780747 - RNA, 20 nt, Artificial Sequence
  Synthetic
ucaccaggcuggaguugcaa

SEQ ID NO: 780748 - RNA, 20 nt, Artificial Sequence
  Synthetic
cccuuccccaaaauuugcaa

SEQ ID NO: 780749 - RNA, 20 nt, Artificial Sequence
  Synthetic
agagagaacagcauuugcaa

SEQ ID NO: 780750 - RNA, 20 nt, Artificial Sequence
  Synthetic
agagaauaauauauuugcaa

SEQ ID NO: 780751 - RNA, 20 nt, Artificial Sequence
  Synthetic
agguuaggaaaacuuugcaa

SEQ ID NO: 780752 - RNA, 20 nt, Artificial Sequence
  Synthetic
aacagacccagacuuugcaa

SEQ ID NO: 780753 - RNA, 20 nt, Artificial Sequence
  Synthetic
aggucccagcugcuuugcaa

SEQ ID NO: 780754 - RNA, 20 nt, Artificial Sequence
  Synthetic
agagcacagaaaaaaaucaa

SEQ ID NO: 780755 - RNA, 20 nt, Artificial Sequence
  Synthetic
uuuguuucacuaaaaaucaa

SEQ ID NO: 780756 - RNA, 20 nt, Artificial Sequence
  Synthetic
acaaaagagaucaaaaucaa

SEQ ID NO: 780757 - RNA, 20 nt, Artificial Sequence
  Synthetic
cuuuugagucucaaaaucaa

SEQ ID NO: 780758 - RNA, 20 nt, Artificial Sequence
  Synthetic
uauugaaauuguaaaaucaa

SEQ ID NO: 780759 - RNA, 20 nt, Artificial Sequence
  Synthetic
aaaauauuuuuuaaaaucaa

SEQ ID NO: 780760 - RNA, 20 nt, Artificial Sequence
  Synthetic
aacgccuuuuuuaaaaucaa

SEQ ID NO: 780761 - RNA, 20 nt, Artificial Sequence
  Synthetic
agacauucauggcaaaucaa

SEQ ID NO: 780762 - RNA, 20 nt, Artificial Sequence
  Synthetic
uuguuugacccagaaaucaa

SEQ ID NO: 780763 - RNA, 20 nt, Artificial Sequence
  Synthetic
cuacuagaucaugaaaucaa

SEQ ID NO: 780764 - RNA, 20 nt, Artificial Sequence
  Synthetic
aacagaucuccuuaaaucaa

SEQ ID NO: 780765 - RNA, 20 nt, Artificial Sequence
  Synthetic
aacacauagcacccaaucaa

SEQ ID NO: 780766 - RNA, 20 nt, Artificial Sequence
  Synthetic
uuaauccguuuaucaaucaa

SEQ ID NO: 780767 - RNA, 20 nt, Artificial Sequence
  Synthetic
uccucauuauuuucaaucaa

SEQ ID NO: 780768 - RNA, 20 nt, Artificial Sequence
  Synthetic
auuucuagaaagggaaucaa

SEQ ID NO: 780769 - RNA, 20 nt, Artificial Sequence
  Synthetic
agugguaaccugggaaucaa

SEQ ID NO: 780770 - RNA, 20 nt, Artificial Sequence
  Synthetic
acuuguuaggauggaaucaa

SEQ ID NO: 780771 - RNA, 20 nt, Artificial Sequence
  Synthetic
aaaaaaagcacuggaaucaa

SEQ ID NO: 780772 - RNA, 20 nt, Artificial Sequence
  Synthetic
caaacugucacaugaaucaa

SEQ ID NO: 780773 - RNA, 20 nt, Artificial Sequence
  Synthetic
ugguacagcuacugaaucaa

SEQ ID NO: 780774 - RNA, 20 nt, Artificial Sequence
  Synthetic
aaguguugucugugaaucaa

SEQ ID NO: 780775 - RNA, 20 nt, Artificial Sequence
  Synthetic
uguaucauaagaauaaucaa

SEQ ID NO: 780776 - RNA, 20 nt, Artificial Sequence
  Synthetic
ucccauuuugaacuaaucaa

SEQ ID NO: 780777 - RNA, 20 nt, Artificial Sequence
  Synthetic
uucaaaaaauagcuaaucaa

SEQ ID NO: 780778 - RNA, 20 nt, Artificial Sequence
  Synthetic
uuauccauucugcuaaucaa

SEQ ID NO: 780779 - RNA, 20 nt, Artificial Sequence
  Synthetic
acaaugcauacucuaaucaa

SEQ ID NO: 780780 - RNA, 20 nt, Artificial Sequence
  Synthetic
ccagaacacacaguaaucaa

SEQ ID NO: 780781 - RNA, 20 nt, Artificial Sequence
  Synthetic
auaaaacacagaguaaucaa

SEQ ID NO: 780782 - RNA, 20 nt, Artificial Sequence
  Synthetic
auaaguugaaauguaaucaa

SEQ ID NO: 780783 - RNA, 20 nt, Artificial Sequence
  Synthetic
uuguuuuguuguuuaaucaa

SEQ ID NO: 780784 - RNA, 20 nt, Artificial Sequence
  Synthetic
aucuuuuuuuuuuuaaucaa

SEQ ID NO: 780785 - RNA, 20 nt, Artificial Sequence
  Synthetic
caugcaugagaaaacaucaa

SEQ ID NO: 780786 - RNA, 20 nt, Artificial Sequence
  Synthetic
aauuacaauaguaacaucaa

SEQ ID NO: 780787 - RNA, 20 nt, Artificial Sequence
  Synthetic
auuaaaacuucccacaucaa

SEQ ID NO: 780788 - RNA, 20 nt, Artificial Sequence
  Synthetic
uuuaaaaguucucacaucaa

SEQ ID NO: 780789 - RNA, 20 nt, Artificial Sequence
  Synthetic
uaagcagaaucaaccaucaa

SEQ ID NO: 780790 - RNA, 20 nt, Artificial Sequence
  Synthetic
ucaaccuagaugaccaucaa

SEQ ID NO: 780791 - RNA, 20 nt, Artificial Sequence
  Synthetic
ucaaccuaaaugcccaucaa

SEQ ID NO: 780792 - RNA, 20 nt, Artificial Sequence
  Synthetic
cuacuacguguggccaucaa

SEQ ID NO: 780793 - RNA, 20 nt, Artificial Sequence
  Synthetic
uguuuuuucuucuccaucaa

SEQ ID NO: 780794 - RNA, 20 nt, Artificial Sequence
  Synthetic
agaauaccauaaaucaucaa

SEQ ID NO: 780795 - RNA, 20 nt, Artificial Sequence
  Synthetic
aguuagggaaggaucaucaa

SEQ ID NO: 780796 - RNA, 20 nt, Artificial Sequence
  Synthetic
ccucugcucugacucaucaa

SEQ ID NO: 780797 - RNA, 20 nt, Artificial Sequence
  Synthetic
acauuaauugaauucaucaa

SEQ ID NO: 780798 - RNA, 20 nt, Artificial Sequence
  Synthetic
agugaaaacaaaaagaucaa

SEQ ID NO: 780799 - RNA, 20 nt, Artificial Sequence
  Synthetic
aauuuaaauauucagaucaa

SEQ ID NO: 780800 - RNA, 20 nt, Artificial Sequence
  Synthetic
ucaagggacugagagaucaa

SEQ ID NO: 780801 - RNA, 20 nt, Artificial Sequence
  Synthetic
auuguauucucugagaucaa

SEQ ID NO: 780802 - RNA, 20 nt, Artificial Sequence
  Synthetic
aaaacagacauauagaucaa

SEQ ID NO: 780803 - RNA, 20 nt, Artificial Sequence
  Synthetic
aaaacagagauauagaucaa

SEQ ID NO: 780804 - RNA, 20 nt, Artificial Sequence
  Synthetic
aaaugaucacugaugaucaa

SEQ ID NO: 780805 - RNA, 20 nt, Artificial Sequence
  Synthetic
cauaaggacauuuugaucaa

SEQ ID NO: 780806 - RNA, 20 nt, Artificial Sequence
  Synthetic
ugggaaaagcaaaauaucaa

SEQ ID NO: 780807 - RNA, 20 nt, Artificial Sequence
  Synthetic
cucaaaaucucaacuaucaa

SEQ ID NO: 780808 - RNA, 20 nt, Artificial Sequence
  Synthetic
uuucuaaagugaucuaucaa

SEQ ID NO: 780809 - RNA, 20 nt, Artificial Sequence
  Synthetic
aaagauacuaucucuaucaa

SEQ ID NO: 780810 - RNA, 20 nt, Artificial Sequence
  Synthetic
ucugaaaauaugucuaucaa

SEQ ID NO: 780811 - RNA, 20 nt, Artificial Sequence
  Synthetic
uaauuuaauacuaguaucaa

SEQ ID NO: 780812 - RNA, 20 nt, Artificial Sequence
  Synthetic
uauuaaauguuguguaucaa

SEQ ID NO: 780813 - RNA, 20 nt, Artificial Sequence
  Synthetic
aaguguauuucaauuaucaa

SEQ ID NO: 780814 - RNA, 20 nt, Artificial Sequence
  Synthetic
aucaaugccagaauuaucaa

SEQ ID NO: 780815 - RNA, 20 nt, Artificial Sequence
  Synthetic
aagaaucuaaacauuaucaa

SEQ ID NO: 780816 - RNA, 20 nt, Artificial Sequence
  Synthetic
aaugauuuaugacuuaucaa

SEQ ID NO: 780817 - RNA, 20 nt, Artificial Sequence
  Synthetic
aguuugggaagaguuaucaa

SEQ ID NO: 780818 - RNA, 20 nt, Artificial Sequence
  Synthetic
uauuccuacucauuuaucaa

SEQ ID NO: 780819 - RNA, 20 nt, Artificial Sequence
  Synthetic
aaaugagagacguuuaucaa

SEQ ID NO: 780820 - RNA, 20 nt, Artificial Sequence
  Synthetic
agugcauauuguuuuaucaa

SEQ ID NO: 780821 - RNA, 20 nt, Artificial Sequence
  Synthetic
cccagcaauuauaaacucaa

SEQ ID NO: 780822 - RNA, 20 nt, Artificial Sequence
  Synthetic
cucagugaugaguaacucaa

SEQ ID NO: 780823 - RNA, 20 nt, Artificial Sequence
  Synthetic
aguauguaguagucacucaa

SEQ ID NO: 780824 - RNA, 20 nt, Artificial Sequence
  Synthetic
acagaguaucugggacucaa

SEQ ID NO: 780825 - RNA, 20 nt, Artificial Sequence
  Synthetic
cuugagugcauaugacucaa

SEQ ID NO: 780826 - RNA, 20 nt, Artificial Sequence
  Synthetic
ugggcucugaacugacucaa

SEQ ID NO: 780827 - RNA, 20 nt, Artificial Sequence
  Synthetic
cccuauuuuagaauacucaa

SEQ ID NO: 780828 - RNA, 20 nt, Artificial Sequence
  Synthetic
acuugugaggccauacucaa

SEQ ID NO: 780829 - RNA, 20 nt, Artificial Sequence
  Synthetic
caaacauauaaauuacucaa

SEQ ID NO: 780830 - RNA, 20 nt, Artificial Sequence
  Synthetic
agugugcucucuuuacucaa

SEQ ID NO: 780831 - RNA, 20 nt, Artificial Sequence
  Synthetic
ucauuugacugaaaccucaa

SEQ ID NO: 780832 - RNA, 20 nt, Artificial Sequence
  Synthetic
ucagccuguggcaaccucaa

SEQ ID NO: 780833 - RNA, 20 nt, Artificial Sequence
  Synthetic
aucugucauaucaaccucaa

SEQ ID NO: 780834 - RNA, 20 nt, Artificial Sequence
  Synthetic
uagauguauguuaaccucaa

SEQ ID NO: 780835 - RNA, 20 nt, Artificial Sequence
  Synthetic
uuugugcuucuggaccucaa

SEQ ID NO: 780836 - RNA, 20 nt, Artificial Sequence
  Synthetic
acaaauuucagauaccucaa

SEQ ID NO: 780837 - RNA, 20 nt, Artificial Sequence
  Synthetic
aaaggucgaguuacccucaa

SEQ ID NO: 780838 - RNA, 20 nt, Artificial Sequence
  Synthetic
cuugcuacuuuuacccucaa

SEQ ID NO: 780839 - RNA, 20 nt, Artificial Sequence
  Synthetic
uguuauuucaaagcccucaa

SEQ ID NO: 780840 - RNA, 20 nt, Artificial Sequence
  Synthetic
cccugaacacagagccucaa

SEQ ID NO: 780841 - RNA, 20 nt, Artificial Sequence
  Synthetic
ucuugaacuucuggccucaa

SEQ ID NO: 780842 - RNA, 20 nt, Artificial Sequence
  Synthetic
ucuacaguuugaugccucaa

SEQ ID NO: 780843 - RNA, 20 nt, Artificial Sequence
  Synthetic
uaucucuaccucugccucaa

SEQ ID NO: 780844 - RNA, 20 nt, Artificial Sequence
  Synthetic
agacaguguccuugccucaa

SEQ ID NO: 780845 - RNA, 20 nt, Artificial Sequence
  Synthetic
aucugauuaucuuuccucaa

SEQ ID NO: 780846 - RNA, 20 nt, Artificial Sequence
  Synthetic
uaauguagaauaaagcucaa

SEQ ID NO: 780847 - RNA, 20 nt, Artificial Sequence
  Synthetic
agguuucaauucaagcucaa

SEQ ID NO: 780848 - RNA, 20 nt, Artificial Sequence
  Synthetic
auggugugaucucagcucaa

SEQ ID NO: 780849 - RNA, 20 nt, Artificial Sequence
  Synthetic
cguggucucagugggcucaa

SEQ ID NO: 780850 - RNA, 20 nt, Artificial Sequence
  Synthetic
cuaagauuuacaaugcucaa

SEQ ID NO: 780851 - RNA, 20 nt, Artificial Sequence
  Synthetic
uugagauaagagaugcucaa

SEQ ID NO: 780852 - RNA, 20 nt, Artificial Sequence
  Synthetic
aaauccuagccucugcucaa

SEQ ID NO: 780853 - RNA, 20 nt, Artificial Sequence
  Synthetic
cauaggguucuucugcucaa

SEQ ID NO: 780854 - RNA, 20 nt, Artificial Sequence
  Synthetic
agcccauaguaagugcucaa

SEQ ID NO: 780855 - RNA, 20 nt, Artificial Sequence
  Synthetic
aagggcgaguuguugcucaa

SEQ ID NO: 780856 - RNA, 20 nt, Artificial Sequence
  Synthetic
uucuuccaaucuuugcucaa

SEQ ID NO: 780857 - RNA, 20 nt, Artificial Sequence
  Synthetic
uugugcccacaaaaucucaa

SEQ ID NO: 780858 - RNA, 20 nt, Artificial Sequence
  Synthetic
aaggcaggaauaaaucucaa

SEQ ID NO: 780859 - RNA, 20 nt, Artificial Sequence
  Synthetic
uuuauugaaaccaaucucaa

SEQ ID NO: 780860 - RNA, 20 nt, Artificial Sequence
  Synthetic
cauggaaguugcaaucucaa

SEQ ID NO: 780861 - RNA, 20 nt, Artificial Sequence
  Synthetic
uuggagagcacugaucucaa

SEQ ID NO: 780862 - RNA, 20 nt, Artificial Sequence
  Synthetic
agaugagcuguguaucucaa

SEQ ID NO: 780863 - RNA, 20 nt, Artificial Sequence
  Synthetic
aaagucuugaccacucucaa

SEQ ID NO: 780864 - RNA, 20 nt, Artificial Sequence
  Synthetic
cagccucuuuucacucucaa

SEQ ID NO: 780865 - RNA, 20 nt, Artificial Sequence
  Synthetic
aucucauuagauacucucaa

SEQ ID NO: 780866 - RNA, 20 nt, Artificial Sequence
  Synthetic
cuggaaugugaaccucucaa

SEQ ID NO: 780867 - RNA, 20 nt, Artificial Sequence
  Synthetic
ugccagggguguccucucaa

SEQ ID NO: 780868 - RNA, 20 nt, Artificial Sequence
  Synthetic
agaacagccaaugcucucaa

SEQ ID NO: 780869 - RNA, 20 nt, Artificial Sequence
  Synthetic
uagguagucucugcucucaa

SEQ ID NO: 780870 - RNA, 20 nt, Artificial Sequence
  Synthetic
agaaaucauacaucucucaa

SEQ ID NO: 780871 - RNA, 20 nt, Artificial Sequence
  Synthetic
cacuguuuuccuucucucaa

SEQ ID NO: 780872 - RNA, 20 nt, Artificial Sequence
  Synthetic
aaguugcaguuuucucucaa

SEQ ID NO: 780873 - RNA, 20 nt, Artificial Sequence
  Synthetic
aauuauaaaaugugucucaa

SEQ ID NO: 780874 - RNA, 20 nt, Artificial Sequence
  Synthetic
uuuuaaugacugugucucaa

SEQ ID NO: 780875 - RNA, 20 nt, Artificial Sequence
  Synthetic
ucacuuagcuccauucucaa

SEQ ID NO: 780876 - RNA, 20 nt, Artificial Sequence
  Synthetic
agucaggguuucauucucaa

SEQ ID NO: 780877 - RNA, 20 nt, Artificial Sequence
  Synthetic
ugagaaaguuuccuucucaa

SEQ ID NO: 780878 - RNA, 20 nt, Artificial Sequence
  Synthetic
cucaggagaaagcuucucaa

SEQ ID NO: 780879 - RNA, 20 nt, Artificial Sequence
  Synthetic
agcacauuucaaguucucaa

SEQ ID NO: 780880 - RNA, 20 nt, Artificial Sequence
  Synthetic
ugauuacucacaguucucaa

SEQ ID NO: 780881 - RNA, 20 nt, Artificial Sequence
  Synthetic
ucuagaguaguaguucucaa

SEQ ID NO: 780882 - RNA, 20 nt, Artificial Sequence
  Synthetic
auaaacacaaagguucucaa

SEQ ID NO: 780883 - RNA, 20 nt, Artificial Sequence
  Synthetic
acaguuugaagauuucucaa

SEQ ID NO: 780884 - RNA, 20 nt, Artificial Sequence
  Synthetic
agguuggagauauuucucaa

SEQ ID NO: 780885 - RNA, 20 nt, Artificial Sequence
  Synthetic
uaacccuuauuauuucucaa

SEQ ID NO: 780886 - RNA, 20 nt, Artificial Sequence
  Synthetic
aacauuuauaauuuucucaa

SEQ ID NO: 780887 - RNA, 20 nt, Artificial Sequence
  Synthetic
uaguaacuacuuuuucucaa

SEQ ID NO: 780888 - RNA, 20 nt, Artificial Sequence
  Synthetic
ugagaaagcagaaaagucaa

SEQ ID NO: 780889 - RNA, 20 nt, Artificial Sequence
  Synthetic
aggaugcucuuaaaagucaa

SEQ ID NO: 780890 - RNA, 20 nt, Artificial Sequence
  Synthetic
acagucaagcccaaagucaa

SEQ ID NO: 780891 - RNA, 20 nt, Artificial Sequence
  Synthetic
aauuaugugaagaaagucaa

SEQ ID NO: 780892 - RNA, 20 nt, Artificial Sequence
  Synthetic
aauucugugaagaaagucaa

SEQ ID NO: 780893 - RNA, 20 nt, Artificial Sequence
  Synthetic
ucuucagcccuuaaagucaa

SEQ ID NO: 780894 - RNA, 20 nt, Artificial Sequence
  Synthetic
auuauugucuuuaaagucaa

SEQ ID NO: 780895 - RNA, 20 nt, Artificial Sequence
  Synthetic
aaagcaaccaaggaagucaa

SEQ ID NO: 780896 - RNA, 20 nt, Artificial Sequence
  Synthetic
aagaguuuaggguaagucaa

SEQ ID NO: 780897 - RNA, 20 nt, Artificial Sequence
  Synthetic
uuuagaaggauuagagucaa

SEQ ID NO: 780898 - RNA, 20 nt, Artificial Sequence
  Synthetic
aguuuagaaaagggagucaa

SEQ ID NO: 780899 - RNA, 20 nt, Artificial Sequence
  Synthetic
ugacuaguugcaugagucaa

SEQ ID NO: 780900 - RNA, 20 nt, Artificial Sequence
  Synthetic
aagugagauuauugagucaa

SEQ ID NO: 780901 - RNA, 20 nt, Artificial Sequence
  Synthetic
ccaguagaagguugagucaa

SEQ ID NO: 780902 - RNA, 20 nt, Artificial Sequence
  Synthetic
auauaaacaggaauagucaa

SEQ ID NO: 780903 - RNA, 20 nt, Artificial Sequence
  Synthetic
uuauaaauaguccacgucaa

SEQ ID NO: 780904 - RNA, 20 nt, Artificial Sequence
  Synthetic
uauucaguuuuuugcgucaa

SEQ ID NO: 780905 - RNA, 20 nt, Artificial Sequence
  Synthetic
aauguacaguugaaggucaa

SEQ ID NO: 780906 - RNA, 20 nt, Artificial Sequence
  Synthetic
aaggaaaauucugaggucaa

SEQ ID NO: 780907 - RNA, 20 nt, Artificial Sequence
  Synthetic
aaggccagaagaagggucaa

SEQ ID NO: 780908 - RNA, 20 nt, Artificial Sequence
  Synthetic
aggacacugcaaugggucaa

SEQ ID NO: 780909 - RNA, 20 nt, Artificial Sequence
  Synthetic
uauuuggacuaaugggucaa

SEQ ID NO: 780910 - RNA, 20 nt, Artificial Sequence
  Synthetic
uaguuaaaaaaaauggucaa

SEQ ID NO: 780911 - RNA, 20 nt, Artificial Sequence
  Synthetic
caaaccauaucauuggucaa

SEQ ID NO: 780912 - RNA, 20 nt, Artificial Sequence
  Synthetic
acagauuucuuaaaugucaa

SEQ ID NO: 780913 - RNA, 20 nt, Artificial Sequence
  Synthetic
augaccaagcucaaugucaa

SEQ ID NO: 780914 - RNA, 20 nt, Artificial Sequence
  Synthetic
caauuccuauagaaugucaa

SEQ ID NO: 780915 - RNA, 20 nt, Artificial Sequence
  Synthetic
aacagugccuagaaugucaa

SEQ ID NO: 780916 - RNA, 20 nt, Artificial Sequence
  Synthetic
ccacaauccccacaugucaa

SEQ ID NO: 780917 - RNA, 20 nt, Artificial Sequence
  Synthetic
ugguaauccccacaugucaa

SEQ ID NO: 780918 - RNA, 20 nt, Artificial Sequence
  Synthetic
cugacagcaucccaugucaa

SEQ ID NO: 780919 - RNA, 20 nt, Artificial Sequence
  Synthetic
uuuguauuuauucaugucaa

SEQ ID NO: 780920 - RNA, 20 nt, Artificial Sequence
  Synthetic
agucuacagauugaugucaa

SEQ ID NO: 780921 - RNA, 20 nt, Artificial Sequence
  Synthetic
augguagguguauaugucaa

SEQ ID NO: 780922 - RNA, 20 nt, Artificial Sequence
  Synthetic
ucugcaggaagcuaugucaa

SEQ ID NO: 780923 - RNA, 20 nt, Artificial Sequence
  Synthetic
acucugagcucaacugucaa

SEQ ID NO: 780924 - RNA, 20 nt, Artificial Sequence
  Synthetic
uggggaaggagaccugucaa

SEQ ID NO: 780925 - RNA, 20 nt, Artificial Sequence
  Synthetic
cacacaccggggccugucaa

SEQ ID NO: 780926 - RNA, 20 nt, Artificial Sequence
  Synthetic
ccauaauccccacgugucaa

SEQ ID NO: 780927 - RNA, 20 nt, Artificial Sequence
  Synthetic
uuauuauucacaggugucaa

SEQ ID NO: 780928 - RNA, 20 nt, Artificial Sequence
  Synthetic
ccauaauccccaggugucaa

SEQ ID NO: 780929 - RNA, 20 nt, Artificial Sequence
  Synthetic
cccuugucauuuggugucaa

SEQ ID NO: 780930 - RNA, 20 nt, Artificial Sequence
  Synthetic
uuauaauccccgugugucaa

SEQ ID NO: 780931 - RNA, 20 nt, Artificial Sequence
  Synthetic
ccaaauauucauugugucaa

SEQ ID NO: 780932 - RNA, 20 nt, Artificial Sequence
  Synthetic
aaaaauauaucuugugucaa

SEQ ID NO: 780933 - RNA, 20 nt, Artificial Sequence
  Synthetic
aauggggagaggauugucaa

SEQ ID NO: 780934 - RNA, 20 nt, Artificial Sequence
  Synthetic
aacauuuuuauuauugucaa

SEQ ID NO: 780935 - RNA, 20 nt, Artificial Sequence
  Synthetic
caugucaggucacuugucaa

SEQ ID NO: 780936 - RNA, 20 nt, Artificial Sequence
  Synthetic
caauuaucuccuuuugucaa

SEQ ID NO: 780937 - RNA, 20 nt, Artificial Sequence
  Synthetic
uaguuuucucuuuuugucaa

SEQ ID NO: 780938 - RNA, 20 nt, Artificial Sequence
  Synthetic
auuugaaaaucaaaauucaa

SEQ ID NO: 780939 - RNA, 20 nt, Artificial Sequence
  Synthetic
uuaauaccagauaaauucaa

SEQ ID NO: 780940 - RNA, 20 nt, Artificial Sequence
  Synthetic
aucuuuaucuauaaauucaa

SEQ ID NO: 780941 - RNA, 20 nt, Artificial Sequence
  Synthetic
uguacaauuucacaauucaa

SEQ ID NO: 780942 - RNA, 20 nt, Artificial Sequence
  Synthetic
accauuccuaugcaauucaa

SEQ ID NO: 780943 - RNA, 20 nt, Artificial Sequence
  Synthetic
aaagaaacugaagaauucaa

SEQ ID NO: 780944 - RNA, 20 nt, Artificial Sequence
  Synthetic
cagaaauugacagaauucaa

SEQ ID NO: 780945 - RNA, 20 nt, Artificial Sequence
  Synthetic
aggguaccaagagaauucaa

SEQ ID NO: 780946 - RNA, 20 nt, Artificial Sequence
  Synthetic
cuacuuuuguacuaauucaa

SEQ ID NO: 780947 - RNA, 20 nt, Artificial Sequence
  Synthetic
ccauggagaaaaacauucaa

SEQ ID NO: 780948 - RNA, 20 nt, Artificial Sequence
  Synthetic
auaagucucacuacauucaa

SEQ ID NO: 780949 - RNA, 20 nt, Artificial Sequence
  Synthetic
caugccucuccuacauucaa

SEQ ID NO: 780950 - RNA, 20 nt, Artificial Sequence
  Synthetic
ugaccaccaaucccauucaa

SEQ ID NO: 780951 - RNA, 20 nt, Artificial Sequence
  Synthetic
aucuaaaaccaagcauucaa

SEQ ID NO: 780952 - RNA, 20 nt, Artificial Sequence
  Synthetic
caauuuaauagaucauucaa

SEQ ID NO: 780953 - RNA, 20 nt, Artificial Sequence
  Synthetic
acacacauuggcucauucaa

SEQ ID NO: 780954 - RNA, 20 nt, Artificial Sequence
  Synthetic
ccaaacugaaagucauucaa

SEQ ID NO: 780955 - RNA, 20 nt, Artificial Sequence
  Synthetic
ccacacuccccuucauucaa

SEQ ID NO: 780956 - RNA, 20 nt, Artificial Sequence
  Synthetic
augggagaccauagauucaa

SEQ ID NO: 780957 - RNA, 20 nt, Artificial Sequence
  Synthetic
uauaguuuauauagauucaa

SEQ ID NO: 780958 - RNA, 20 nt, Artificial Sequence
  Synthetic
ugacuuuucuuuagauucaa

SEQ ID NO: 780959 - RNA, 20 nt, Artificial Sequence
  Synthetic
aaaucagguuacugauucaa

SEQ ID NO: 780960 - RNA, 20 nt, Artificial Sequence
  Synthetic
uuguccauauacauauucaa

SEQ ID NO: 780961 - RNA, 20 nt, Artificial Sequence
  Synthetic
aucuuuaccugcauauucaa

SEQ ID NO: 780962 - RNA, 20 nt, Artificial Sequence
  Synthetic
ccaaggaaaacuauauucaa

SEQ ID NO: 780963 - RNA, 20 nt, Artificial Sequence
  Synthetic
uuaauuuacuuccuauucaa

SEQ ID NO: 780964 - RNA, 20 nt, Artificial Sequence
  Synthetic
aauguauuucuucuauucaa

SEQ ID NO: 780965 - RNA, 20 nt, Artificial Sequence
  Synthetic
cucacucacuaaaacuucaa

SEQ ID NO: 780966 - RNA, 20 nt, Artificial Sequence
  Synthetic
aucucauaaugaaacuucaa

SEQ ID NO: 780967 - RNA, 20 nt, Artificial Sequence
  Synthetic
uucauauuuguaaacuucaa

SEQ ID NO: 780968 - RNA, 20 nt, Artificial Sequence
  Synthetic
uuacuaaagaugaacuucaa

SEQ ID NO: 780969 - RNA, 20 nt, Artificial Sequence
  Synthetic
uugaaaucucuggacuucaa

SEQ ID NO: 780970 - RNA, 20 nt, Artificial Sequence
  Synthetic
accaugugugaauacuucaa

SEQ ID NO: 780971 - RNA, 20 nt, Artificial Sequence
  Synthetic
cuucauccaugucccuucaa

SEQ ID NO: 780972 - RNA, 20 nt, Artificial Sequence
  Synthetic
cuuuauccaugucccuucaa

SEQ ID NO: 780973 - RNA, 20 nt, Artificial Sequence
  Synthetic
aaacgaggugaugccuucaa

SEQ ID NO: 780974 - RNA, 20 nt, Artificial Sequence
  Synthetic
cguccuuacaauggcuucaa

SEQ ID NO: 780975 - RNA, 20 nt, Artificial Sequence
  Synthetic
uuuuaaggaggcugcuucaa

SEQ ID NO: 780976 - RNA, 20 nt, Artificial Sequence
  Synthetic
uccuuggcuaugaucuucaa

SEQ ID NO: 780977 - RNA, 20 nt, Artificial Sequence
  Synthetic
aaccagauggucuucuucaa

SEQ ID NO: 780978 - RNA, 20 nt, Artificial Sequence
  Synthetic
ugcuccucugucaaguucaa

SEQ ID NO: 780979 - RNA, 20 nt, Artificial Sequence
  Synthetic
uacaauauaaaccaguucaa

SEQ ID NO: 780980 - RNA, 20 nt, Artificial Sequence
  Synthetic
auucucaaccugcaguucaa

SEQ ID NO: 780981 - RNA, 20 nt, Artificial Sequence
  Synthetic
auggccauuccugaguucaa

SEQ ID NO: 780982 - RNA, 20 nt, Artificial Sequence
  Synthetic
uuaaaccucauguaguucaa

SEQ ID NO: 780983 - RNA, 20 nt, Artificial Sequence
  Synthetic
uugagaagcaguuaguucaa

SEQ ID NO: 780984 - RNA, 20 nt, Artificial Sequence
  Synthetic
ccuugguuaaaaccguucaa

SEQ ID NO: 780985 - RNA, 20 nt, Artificial Sequence
  Synthetic
acaguuugcucaagguucaa

SEQ ID NO: 780986 - RNA, 20 nt, Artificial Sequence
  Synthetic
ugacaauucauaagguucaa

SEQ ID NO: 780987 - RNA, 20 nt, Artificial Sequence
  Synthetic
accuccgccuccagguucaa

SEQ ID NO: 780988 - RNA, 20 nt, Artificial Sequence
  Synthetic
uaaacagugugcagguucaa

SEQ ID NO: 780989 - RNA, 20 nt, Artificial Sequence
  Synthetic
cucaggaaguucagguucaa

SEQ ID NO: 780990 - RNA, 20 nt, Artificial Sequence
  Synthetic
ccuccgccuccuggguucaa

SEQ ID NO: 780991 - RNA, 20 nt, Artificial Sequence
  Synthetic
ccucugccuccuggguucaa

SEQ ID NO: 780992 - RNA, 20 nt, Artificial Sequence
  Synthetic
cucucuaguauuggguucaa

SEQ ID NO: 780993 - RNA, 20 nt, Artificial Sequence
  Synthetic
ccucugacucccugguucaa

SEQ ID NO: 780994 - RNA, 20 nt, Artificial Sequence
  Synthetic
aaauaaaagaggugguucaa

SEQ ID NO: 780995 - RNA, 20 nt, Artificial Sequence
  Synthetic
uauggccucuaaauguucaa

SEQ ID NO: 780996 - RNA, 20 nt, Artificial Sequence
  Synthetic
acacauuccuucauguucaa

SEQ ID NO: 780997 - RNA, 20 nt, Artificial Sequence
  Synthetic
aagacgggaaagauguucaa

SEQ ID NO: 780998 - RNA, 20 nt, Artificial Sequence
  Synthetic
agauaauuuuaucuguucaa

SEQ ID NO: 780999 - RNA, 20 nt, Artificial Sequence
  Synthetic
caacccuccauuuuguucaa

SEQ ID NO: 781000 - RNA, 20 nt, Artificial Sequence
  Synthetic
auugguuugaaaaauuucaa

SEQ ID NO: 781001 - RNA, 20 nt, Artificial Sequence
  Synthetic
uacuucucucaaaauuucaa

SEQ ID NO: 781002 - RNA, 20 nt, Artificial Sequence
  Synthetic
caaguauaguaaaauuucaa

SEQ ID NO: 781003 - RNA, 20 nt, Artificial Sequence
  Synthetic
aaacucuucaugaauuucaa

SEQ ID NO: 781004 - RNA, 20 nt, Artificial Sequence
  Synthetic
ugggggcaauauaauuucaa

SEQ ID NO: 781005 - RNA, 20 nt, Artificial Sequence
  Synthetic
ugaaaacuaacucauuucaa

SEQ ID NO: 781006 - RNA, 20 nt, Artificial Sequence
  Synthetic
ucccauuuuauagauuucaa

SEQ ID NO: 781007 - RNA, 20 nt, Artificial Sequence
  Synthetic
ucaugaaauuuauauuucaa

SEQ ID NO: 781008 - RNA, 20 nt, Artificial Sequence
  Synthetic
uaauguaugaacuauuucaa

SEQ ID NO: 781009 - RNA, 20 nt, Artificial Sequence
  Synthetic
aaaagguauuucacuuucaa

SEQ ID NO: 781010 - RNA, 20 nt, Artificial Sequence
  Synthetic
cucuguguaaaaccuuucaa

SEQ ID NO: 781011 - RNA, 20 nt, Artificial Sequence
  Synthetic
acaagucaaugaccuuucaa

SEQ ID NO: 781012 - RNA, 20 nt, Artificial Sequence
  Synthetic
cuugggccccaugcuuucaa

SEQ ID NO: 781013 - RNA, 20 nt, Artificial Sequence
  Synthetic
agaguuaguuauucuuucaa

SEQ ID NO: 781014 - RNA, 20 nt, Artificial Sequence
  Synthetic
ucucaugauuuuucuuucaa

SEQ ID NO: 781015 - RNA, 20 nt, Artificial Sequence
  Synthetic
uuuuaaguuuuuucuuucaa

SEQ ID NO: 781016 - RNA, 20 nt, Artificial Sequence
  Synthetic
ugccuuuucagaaguuucaa

SEQ ID NO: 781017 - RNA, 20 nt, Artificial Sequence
  Synthetic
uuuuuuaaaguacguuucaa

SEQ ID NO: 781018 - RNA, 20 nt, Artificial Sequence
  Synthetic
uuuaaagucuuucguuucaa

SEQ ID NO: 781019 - RNA, 20 nt, Artificial Sequence
  Synthetic
cuauaacagugauguuucaa

SEQ ID NO: 781020 - RNA, 20 nt, Artificial Sequence
  Synthetic
uuuuaaucaaaguguuucaa

SEQ ID NO: 781021 - RNA, 20 nt, Artificial Sequence
  Synthetic
auagagcucugguguuucaa

SEQ ID NO: 781022 - RNA, 20 nt, Artificial Sequence
  Synthetic
agugcucaugauuguuucaa

SEQ ID NO: 781023 - RNA, 20 nt, Artificial Sequence
  Synthetic
ccaaauaucucuuguuucaa

SEQ ID NO: 781024 - RNA, 20 nt, Artificial Sequence
  Synthetic
acauuuuccagaauuuucaa

SEQ ID NO: 781025 - RNA, 20 nt, Artificial Sequence
  Synthetic
cuuaaagucugaauuuucaa

SEQ ID NO: 781026 - RNA, 20 nt, Artificial Sequence
  Synthetic
aaugaaauguuaauuuucaa

SEQ ID NO: 781027 - RNA, 20 nt, Artificial Sequence
  Synthetic
uuguuaccuuggauuuucaa

SEQ ID NO: 781028 - RNA, 20 nt, Artificial Sequence
  Synthetic
uagcauucauauauuuucaa

SEQ ID NO: 781029 - RNA, 20 nt, Artificial Sequence
  Synthetic
cuaucacaacugcuuuucaa

SEQ ID NO: 781030 - RNA, 20 nt, Artificial Sequence
  Synthetic
cuaugauuuugucuuuucaa

SEQ ID NO: 781031 - RNA, 20 nt, Artificial Sequence
  Synthetic
caugguccagaaguuuucaa

SEQ ID NO: 781032 - RNA, 20 nt, Artificial Sequence
  Synthetic
aucaacuuuacaguuuucaa

SEQ ID NO: 781033 - RNA, 20 nt, Artificial Sequence
  Synthetic
ugucuugugccaguuuucaa

SEQ ID NO: 781034 - RNA, 20 nt, Artificial Sequence
  Synthetic
auguuaaugggaguuuucaa

SEQ ID NO: 781035 - RNA, 20 nt, Artificial Sequence
  Synthetic
uaguaacuuaaauuuuucaa

SEQ ID NO: 781036 - RNA, 20 nt, Artificial Sequence
  Synthetic
cccucacuuggauuuuucaa

SEQ ID NO: 781037 - RNA, 20 nt, Artificial Sequence
  Synthetic
aaccagucauuauuuuucaa

SEQ ID NO: 781038 - RNA, 20 nt, Artificial Sequence
  Synthetic
ugguucaagaaguuuuucaa

SEQ ID NO: 781039 - RNA, 20 nt, Artificial Sequence
  Synthetic
accacuaaugguuuuuucaa

SEQ ID NO: 781040 - RNA, 20 nt, Artificial Sequence
  Synthetic
uuuuauuuagaaaaaaagaa

SEQ ID NO: 781041 - RNA, 20 nt, Artificial Sequence
  Synthetic
aagucucuugaaaaaaagaa

SEQ ID NO: 781042 - RNA, 20 nt, Artificial Sequence
  Synthetic
agagauacacuaaaaaagaa

SEQ ID NO: 781043 - RNA, 20 nt, Artificial Sequence
  Synthetic
acauaaacuuuaaaaaagaa

SEQ ID NO: 781044 - RNA, 20 nt, Artificial Sequence
  Synthetic
agaggaaaagacaaaaagaa

SEQ ID NO: 781045 - RNA, 20 nt, Artificial Sequence
  Synthetic
uaaguuucauacaaaaagaa

SEQ ID NO: 781046 - RNA, 20 nt, Artificial Sequence
  Synthetic
ugagggacuggcaaaaagaa

SEQ ID NO: 781047 - RNA, 20 nt, Artificial Sequence
  Synthetic
augagaagaaagaaaaagaa

SEQ ID NO: 781048 - RNA, 20 nt, Artificial Sequence
  Synthetic
aaguauauauggaaaaagaa

SEQ ID NO: 781049 - RNA, 20 nt, Artificial Sequence
  Synthetic
ccuggaagguggaaaaagaa

SEQ ID NO: 781050 - RNA, 20 nt, Artificial Sequence
  Synthetic
caauaugaaaugaaaaagaa

SEQ ID NO: 781051 - RNA, 20 nt, Artificial Sequence
  Synthetic
augguuaauaauaaaaagaa

SEQ ID NO: 781052 - RNA, 20 nt, Artificial Sequence
  Synthetic
aacuuacaaaguaaaaagaa

SEQ ID NO: 781053 - RNA, 20 nt, Artificial Sequence
  Synthetic
uauaauggagaacaaaagaa

SEQ ID NO: 781054 - RNA, 20 nt, Artificial Sequence
  Synthetic
agagagaaaagacaaaagaa

SEQ ID NO: 781055 - RNA, 20 nt, Artificial Sequence
  Synthetic
aaaucgaccaagcaaaagaa

SEQ ID NO: 781056 - RNA, 20 nt, Artificial Sequence
  Synthetic
auuuauuaucagcaaaagaa

SEQ ID NO: 781057 - RNA, 20 nt, Artificial Sequence
  Synthetic
uguccauccauucaaaagaa

SEQ ID NO: 781058 - RNA, 20 nt, Artificial Sequence
  Synthetic
aagagcaacaaagaaaagaa

SEQ ID NO: 781059 - RNA, 20 nt, Artificial Sequence
  Synthetic
auaugcuugaaagaaaagaa

SEQ ID NO: 781060 - RNA, 20 nt, Artificial Sequence
  Synthetic
agcuggagaacagaaaagaa

SEQ ID NO: 781061 - RNA, 20 nt, Artificial Sequence
  Synthetic
ccacggagaaacgaaaagaa

SEQ ID NO: 781062 - RNA, 20 nt, Artificial Sequence
  Synthetic
ucaugcaaaacggaaaagaa

SEQ ID NO: 781063 - RNA, 20 nt, Artificial Sequence
  Synthetic
ucuuggaaaggugaaaagaa

SEQ ID NO: 781064 - RNA, 20 nt, Artificial Sequence
  Synthetic
augaugucauuugaaaagaa

SEQ ID NO: 781065 - RNA, 20 nt, Artificial Sequence
  Synthetic
uauuacacuaaauaaaagaa

SEQ ID NO: 781066 - RNA, 20 nt, Artificial Sequence
  Synthetic
aagcagggauaauaaaagaa

SEQ ID NO: 781067 - RNA, 20 nt, Artificial Sequence
  Synthetic
ugcacucccuaauaaaagaa

SEQ ID NO: 781068 - RNA, 20 nt, Artificial Sequence
  Synthetic
acaacuuaucuuuaaaagaa

SEQ ID NO: 781069 - RNA, 20 nt, Artificial Sequence
  Synthetic
aggaaggagagaacaaagaa

SEQ ID NO: 781070 - RNA, 20 nt, Artificial Sequence
  Synthetic
agaucaagaaagacaaagaa

SEQ ID NO: 781071 - RNA, 20 nt, Artificial Sequence
  Synthetic
agagagaggaagacaaagaa

SEQ ID NO: 781072 - RNA, 20 nt, Artificial Sequence
  Synthetic
augcaccguuuaccaaagaa

SEQ ID NO: 781073 - RNA, 20 nt, Artificial Sequence
  Synthetic
cuggguauauacccaaagaa

SEQ ID NO: 781074 - RNA, 20 nt, Artificial Sequence
  Synthetic
aaguuucuagauccaaagaa

SEQ ID NO: 781075 - RNA, 20 nt, Artificial Sequence
  Synthetic
uaguucauuuaggcaaagaa

SEQ ID NO: 781076 - RNA, 20 nt, Artificial Sequence
  Synthetic
auaaaugcuuuaucaaagaa

SEQ ID NO: 781077 - RNA, 20 nt, Artificial Sequence
  Synthetic
agggagagaaggucaaagaa

SEQ ID NO: 781078 - RNA, 20 nt, Artificial Sequence
  Synthetic
cagugcuauccuucaaagaa

SEQ ID NO: 781079 - RNA, 20 nt, Artificial Sequence
  Synthetic
ugaguuacuguuucaaagaa

SEQ ID NO: 781080 - RNA, 20 nt, Artificial Sequence
  Synthetic
cauuguacuaaaagaaagaa

SEQ ID NO: 781081 - RNA, 20 nt, Artificial Sequence
  Synthetic
aagaagaaagaaagaaagaa

SEQ ID NO: 781082 - RNA, 20 nt, Artificial Sequence
  Synthetic
uucauaaaacgaagaaagaa

SEQ ID NO: 781083 - RNA, 20 nt, Artificial Sequence
  Synthetic
ucugucuccuggagaaagaa

SEQ ID NO: 781084 - RNA, 20 nt, Artificial Sequence
  Synthetic
aaggagagagguagaaagaa

SEQ ID NO: 781085 - RNA, 20 nt, Artificial Sequence
  Synthetic
uuagcuuuuuuuagaaagaa

SEQ ID NO: 781086 - RNA, 20 nt, Artificial Sequence
  Synthetic
aaaaaaaaaaaaggaaagaa

SEQ ID NO: 781087 - RNA, 20 nt, Artificial Sequence
  Synthetic
uuuagcuaagaaggaaagaa

SEQ ID NO: 781088 - RNA, 20 nt, Artificial Sequence
  Synthetic
acaaagaagggaggaaagaa

SEQ ID NO: 781089 - RNA, 20 nt, Artificial Sequence
  Synthetic
aaacucauuuggggaaagaa

SEQ ID NO: 781090 - RNA, 20 nt, Artificial Sequence
  Synthetic
ugccaccuguuuggaaagaa

SEQ ID NO: 781091 - RNA, 20 nt, Artificial Sequence
  Synthetic
uacuuuagaaugugaaagaa

SEQ ID NO: 781092 - RNA, 20 nt, Artificial Sequence
  Synthetic
cacaucagaaguugaaagaa

SEQ ID NO: 781093 - RNA, 20 nt, Artificial Sequence
  Synthetic
ucucugaaaauuugaaagaa

SEQ ID NO: 781094 - RNA, 20 nt, Artificial Sequence
  Synthetic
aacccauaauuuugaaagaa

SEQ ID NO: 781095 - RNA, 20 nt, Artificial Sequence
  Synthetic
acuagaagaaaaauaaagaa

SEQ ID NO: 781096 - RNA, 20 nt, Artificial Sequence
  Synthetic
aggugcacacaaauaaagaa

SEQ ID NO: 781097 - RNA, 20 nt, Artificial Sequence
  Synthetic
uaacugcagugcauaaagaa

SEQ ID NO: 781098 - RNA, 20 nt, Artificial Sequence
  Synthetic
uaaugguuggggauaaagaa

SEQ ID NO: 781099 - RNA, 20 nt, Artificial Sequence
  Synthetic
cuaucccuuaugauaaagaa

SEQ ID NO: 781100 - RNA, 20 nt, Artificial Sequence
  Synthetic
auuuuguaagcuauaaagaa

SEQ ID NO: 781101 - RNA, 20 nt, Artificial Sequence
  Synthetic
acugggcaauuuauaaagaa

SEQ ID NO: 781102 - RNA, 20 nt, Artificial Sequence
  Synthetic
uugaauucauucuuaaagaa

SEQ ID NO: 781103 - RNA, 20 nt, Artificial Sequence
  Synthetic
uggcuuuuggauuuaaagaa

SEQ ID NO: 781104 - RNA, 20 nt, Artificial Sequence
  Synthetic
aacuccugauacaacaagaa

SEQ ID NO: 781105 - RNA, 20 nt, Artificial Sequence
  Synthetic
aaugggaauaauaacaagaa

SEQ ID NO: 781106 - RNA, 20 nt, Artificial Sequence
  Synthetic
caugaagucucacacaagaa

SEQ ID NO: 781107 - RNA, 20 nt, Artificial Sequence
  Synthetic
agagaucugaaugacaagaa

SEQ ID NO: 781108 - RNA, 20 nt, Artificial Sequence
  Synthetic
aaacaggggguugacaagaa

SEQ ID NO: 781109 - RNA, 20 nt, Artificial Sequence
  Synthetic
aaagaaauugaguacaagaa

SEQ ID NO: 781110 - RNA, 20 nt, Artificial Sequence
  Synthetic
aaaaaaaaguguuacaagaa

SEQ ID NO: 781111 - RNA, 20 nt, Artificial Sequence
  Synthetic
uuaaagguagaaaccaagaa

SEQ ID NO: 781112 - RNA, 20 nt, Artificial Sequence
  Synthetic
cuguguacacugaccaagaa

SEQ ID NO: 781113 - RNA, 20 nt, Artificial Sequence
  Synthetic
caucauaagggccccaagaa

SEQ ID NO: 781114 - RNA, 20 nt, Artificial Sequence
  Synthetic
aaucugaugacugccaagaa

SEQ ID NO: 781115 - RNA, 20 nt, Artificial Sequence
  Synthetic
ccagacccuggcagcaagaa

SEQ ID NO: 781116 - RNA, 20 nt, Artificial Sequence
  Synthetic
caguauuucaucagcaagaa

SEQ ID NO: 781117 - RNA, 20 nt, Artificial Sequence
  Synthetic
uaucagaucuguagcaagaa

SEQ ID NO: 781118 - RNA, 20 nt, Artificial Sequence
  Synthetic
ucuuuauagcaaugcaagaa

SEQ ID NO: 781119 - RNA, 20 nt, Artificial Sequence
  Synthetic
ucuaauccagaaaucaagaa

SEQ ID NO: 781120 - RNA, 20 nt, Artificial Sequence
  Synthetic
aauaaguaauaacucaagaa

SEQ ID NO: 781121 - RNA, 20 nt, Artificial Sequence
  Synthetic
ucuguugugaggcucaagaa

SEQ ID NO: 781122 - RNA, 20 nt, Artificial Sequence
  Synthetic
ucucaaaggaacuucaagaa

SEQ ID NO: 781123 - RNA, 20 nt, Artificial Sequence
  Synthetic
uauuuaacacucuucaagaa

SEQ ID NO: 781124 - RNA, 20 nt, Artificial Sequence
  Synthetic
uuauuaggaguuuucaagaa

SEQ ID NO: 781125 - RNA, 20 nt, Artificial Sequence
  Synthetic
aagcuugguguaaagaagaa

SEQ ID NO: 781126 - RNA, 20 nt, Artificial Sequence
  Synthetic
aguuauuguuucaagaagaa

SEQ ID NO: 781127 - RNA, 20 nt, Artificial Sequence
  Synthetic
ugggaguggaagaagaagaa

SEQ ID NO: 781128 - RNA, 20 nt, Artificial Sequence
  Synthetic
aaucuguauuuuaagaagaa

SEQ ID NO: 781129 - RNA, 20 nt, Artificial Sequence
  Synthetic
auguaagaaggccagaagaa

SEQ ID NO: 781130 - RNA, 20 nt, Artificial Sequence
  Synthetic
accguauagaaugagaagaa

SEQ ID NO: 781131 - RNA, 20 nt, Artificial Sequence
  Synthetic
aagugcuaggaaacgaagaa

SEQ ID NO: 781132 - RNA, 20 nt, Artificial Sequence
  Synthetic
acuugccuuuccaggaagaa

SEQ ID NO: 781133 - RNA, 20 nt, Artificial Sequence
  Synthetic
agacagcaauagaggaagaa

SEQ ID NO: 781134 - RNA, 20 nt, Artificial Sequence
  Synthetic
acgagagaaaaagggaagaa

SEQ ID NO: 781135 - RNA, 20 nt, Artificial Sequence
  Synthetic
uuaaagaaccacgggaagaa

SEQ ID NO: 781136 - RNA, 20 nt, Artificial Sequence
  Synthetic
aggagcggagcugggaagaa

SEQ ID NO: 781137 - RNA, 20 nt, Artificial Sequence
  Synthetic
uguacuuuaaaauggaagaa

SEQ ID NO: 781138 - RNA, 20 nt, Artificial Sequence
  Synthetic
cacccauuagaauggaagaa

SEQ ID NO: 781139 - RNA, 20 nt, Artificial Sequence
  Synthetic
uguuuuacugacuggaagaa

SEQ ID NO: 781140 - RNA, 20 nt, Artificial Sequence
  Synthetic
aacgcaugaagguggaagaa

SEQ ID NO: 781141 - RNA, 20 nt, Artificial Sequence
  Synthetic
auauauagcuguuggaagaa

SEQ ID NO: 781142 - RNA, 20 nt, Artificial Sequence
  Synthetic
caggauccugaaaugaagaa

SEQ ID NO: 781143 - RNA, 20 nt, Artificial Sequence
  Synthetic
uguccuguguuaaugaagaa

SEQ ID NO: 781144 - RNA, 20 nt, Artificial Sequence
  Synthetic
uucauccacagcaugaagaa

SEQ ID NO: 781145 - RNA, 20 nt, Artificial Sequence
  Synthetic
acugggucucaacugaagaa

SEQ ID NO: 781146 - RNA, 20 nt, Artificial Sequence
  Synthetic
agaaaauagacacugaagaa

SEQ ID NO: 781147 - RNA, 20 nt, Artificial Sequence
  Synthetic
aaaaccucugcucugaagaa

SEQ ID NO: 781148 - RNA, 20 nt, Artificial Sequence
  Synthetic
uuuuccaauucugugaagaa

SEQ ID NO: 781149 - RNA, 20 nt, Artificial Sequence
  Synthetic
auccuauguggauugaagaa

SEQ ID NO: 781150 - RNA, 20 nt, Artificial Sequence
  Synthetic
uauuaggaagauuugaagaa

SEQ ID NO: 781151 - RNA, 20 nt, Artificial Sequence
  Synthetic
agcuaaagagguuugaagaa

SEQ ID NO: 781152 - RNA, 20 nt, Artificial Sequence
  Synthetic
aaaacuccuguaaauaagaa

SEQ ID NO: 781153 - RNA, 20 nt, Artificial Sequence
  Synthetic
aacaagggaaaacauaagaa

SEQ ID NO: 781154 - RNA, 20 nt, Artificial Sequence
  Synthetic
aagggucaucaacauaagaa

SEQ ID NO: 781155 - RNA, 20 nt, Artificial Sequence
  Synthetic
uaaugaaaguaccauaagaa

SEQ ID NO: 781156 - RNA, 20 nt, Artificial Sequence
  Synthetic
auacuaugcagccauaagaa

SEQ ID NO: 781157 - RNA, 20 nt, Artificial Sequence
  Synthetic
ucuccccucccucauaagaa

SEQ ID NO: 781158 - RNA, 20 nt, Artificial Sequence
  Synthetic
uucuuccuccuucauaagaa

SEQ ID NO: 781159 - RNA, 20 nt, Artificial Sequence
  Synthetic
cagcagcuuguggauaagaa

SEQ ID NO: 781160 - RNA, 20 nt, Artificial Sequence
  Synthetic
uauuagcauacugauaagaa

SEQ ID NO: 781161 - RNA, 20 nt, Artificial Sequence
  Synthetic
uucucccucccuuauaagaa

SEQ ID NO: 781162 - RNA, 20 nt, Artificial Sequence
  Synthetic
ugaagcuaucuuacuaagaa

SEQ ID NO: 781163 - RNA, 20 nt, Artificial Sequence
  Synthetic
auauuuaauaucccuaagaa

SEQ ID NO: 781164 - RNA, 20 nt, Artificial Sequence
  Synthetic
ugggggacagcuccuaagaa

SEQ ID NO: 781165 - RNA, 20 nt, Artificial Sequence
  Synthetic
augguaggcuguccuaagaa

SEQ ID NO: 781166 - RNA, 20 nt, Artificial Sequence
  Synthetic
uauggcacacaagcuaagaa

SEQ ID NO: 781167 - RNA, 20 nt, Artificial Sequence
  Synthetic
auaauuucaugcucuaagaa

SEQ ID NO: 781168 - RNA, 20 nt, Artificial Sequence
  Synthetic
ugggauuuuuaaaguaagaa

SEQ ID NO: 781169 - RNA, 20 nt, Artificial Sequence
  Synthetic
auucuagggaacaguaagaa

SEQ ID NO: 781170 - RNA, 20 nt, Artificial Sequence
  Synthetic
uaaauuugagcuaguaagaa

SEQ ID NO: 781171 - RNA, 20 nt, Artificial Sequence
  Synthetic
uuuuauuguaguaguaagaa

SEQ ID NO: 781172 - RNA, 20 nt, Artificial Sequence
  Synthetic
uccuaaagugaugguaagaa

SEQ ID NO: 781173 - RNA, 20 nt, Artificial Sequence
  Synthetic
uuuuguauaagguguaagaa

SEQ ID NO: 781174 - RNA, 20 nt, Artificial Sequence
  Synthetic
agaagagagacaauuaagaa

SEQ ID NO: 781175 - RNA, 20 nt, Artificial Sequence
  Synthetic
aaagagaaaugaauuaagaa

SEQ ID NO: 781176 - RNA, 20 nt, Artificial Sequence
  Synthetic
agguugaagacuauuaagaa

SEQ ID NO: 781177 - RNA, 20 nt, Artificial Sequence
  Synthetic
uaaucagaaacacuuaagaa

SEQ ID NO: 781178 - RNA, 20 nt, Artificial Sequence
  Synthetic
uuucaaugaacacuuaagaa

SEQ ID NO: 781179 - RNA, 20 nt, Artificial Sequence
  Synthetic
agaucuguuugacuuaagaa

SEQ ID NO: 781180 - RNA, 20 nt, Artificial Sequence
  Synthetic
uuaaaagguaaucuuaagaa

SEQ ID NO: 781181 - RNA, 20 nt, Artificial Sequence
  Synthetic
auaugagauaaauuuaagaa

SEQ ID NO: 781182 - RNA, 20 nt, Artificial Sequence
  Synthetic
ccuaagcaacauuuuaagaa

SEQ ID NO: 781183 - RNA, 20 nt, Artificial Sequence
  Synthetic
cuacugaaggauuuuaagaa

SEQ ID NO: 781184 - RNA, 20 nt, Artificial Sequence
  Synthetic
uuuuguuacuguuuuaagaa

SEQ ID NO: 781185 - RNA, 20 nt, Artificial Sequence
  Synthetic
ucaaacuacagaaaacagaa

SEQ ID NO: 781186 - RNA, 20 nt, Artificial Sequence
  Synthetic
ucuacuuuucucaaacagaa

SEQ ID NO: 781187 - RNA, 20 nt, Artificial Sequence
  Synthetic
auccaaaucaugaaacagaa

SEQ ID NO: 781188 - RNA, 20 nt, Artificial Sequence
  Synthetic
aagacauucucuaaacagaa

SEQ ID NO: 781189 - RNA, 20 nt, Artificial Sequence
  Synthetic
ugaagagacaaccaacagaa

SEQ ID NO: 781190 - RNA, 20 nt, Artificial Sequence
  Synthetic
uguuagaaaucagaacagaa

SEQ ID NO: 781191 - RNA, 20 nt, Artificial Sequence
  Synthetic
agugacagaauagaacagaa

SEQ ID NO: 781192 - RNA, 20 nt, Artificial Sequence
  Synthetic
uauagaccaauggaacagaa

SEQ ID NO: 781193 - RNA, 20 nt, Artificial Sequence
  Synthetic
agaaaaaugaguuaacagaa

SEQ ID NO: 781194 - RNA, 20 nt, Artificial Sequence
  Synthetic
agccaagaagucacacagaa

SEQ ID NO: 781195 - RNA, 20 nt, Artificial Sequence
  Synthetic
agagaugacuagacacagaa

SEQ ID NO: 781196 - RNA, 20 nt, Artificial Sequence
  Synthetic
aggaugugugauacacagaa

SEQ ID NO: 781197 - RNA, 20 nt, Artificial Sequence
  Synthetic
uaauuuucuucaccacagaa

SEQ ID NO: 781198 - RNA, 20 nt, Artificial Sequence
  Synthetic
uugaaauauuugccacagaa

SEQ ID NO: 781199 - RNA, 20 nt, Artificial Sequence
  Synthetic
uuuuuuagugagucacagaa

SEQ ID NO: 781200 - RNA, 20 nt, Artificial Sequence
  Synthetic
acguuuggaaaaagacagaa

SEQ ID NO: 781201 - RNA, 20 nt, Artificial Sequence
  Synthetic
caucuacauggaagacagaa

SEQ ID NO: 781202 - RNA, 20 nt, Artificial Sequence
  Synthetic
uagaccauggacagacagaa

SEQ ID NO: 781203 - RNA, 20 nt, Artificial Sequence
  Synthetic
acaagaaggucaggacagaa

SEQ ID NO: 781204 - RNA, 20 nt, Artificial Sequence
  Synthetic
uacaugcaguagggacagaa

SEQ ID NO: 781205 - RNA, 20 nt, Artificial Sequence
  Synthetic
auauauuucuaaugacagaa

SEQ ID NO: 781206 - RNA, 20 nt, Artificial Sequence
  Synthetic
auguuaauauauauacagaa

SEQ ID NO: 781207 - RNA, 20 nt, Artificial Sequence
  Synthetic
cuguauuuauauauacagaa

SEQ ID NO: 781208 - RNA, 20 nt, Artificial Sequence
  Synthetic
ugaacaagcaaccuacagaa

SEQ ID NO: 781209 - RNA, 20 nt, Artificial Sequence
  Synthetic
ugaacaggcagccuacagaa

SEQ ID NO: 781210 - RNA, 20 nt, Artificial Sequence
  Synthetic
uuaaguccuuuuguacagaa

SEQ ID NO: 781211 - RNA, 20 nt, Artificial Sequence
  Synthetic
uagguagaaagauuacagaa

SEQ ID NO: 781212 - RNA, 20 nt, Artificial Sequence
  Synthetic
uugaguuuggcacaccagaa

SEQ ID NO: 781213 - RNA, 20 nt, Artificial Sequence
  Synthetic
caaagauaaugucaccagaa

SEQ ID NO: 781214 - RNA, 20 nt, Artificial Sequence
  Synthetic
cacuuuccauaggaccagaa

SEQ ID NO: 781215 - RNA, 20 nt, Artificial Sequence
  Synthetic
auucuauaucauuaccagaa

SEQ ID NO: 781216 - RNA, 20 nt, Artificial Sequence
  Synthetic
accuacagggccacccagaa

SEQ ID NO: 781217 - RNA, 20 nt, Artificial Sequence
  Synthetic
aguuccugcugcacccagaa

SEQ ID NO: 781218 - RNA, 20 nt, Artificial Sequence
  Synthetic
aaagagaaagagacccagaa

SEQ ID NO: 781219 - RNA, 20 nt, Artificial Sequence
  Synthetic
ugcuagccacaugcccagaa

SEQ ID NO: 781220 - RNA, 20 nt, Artificial Sequence
  Synthetic
aguuuuuucucugcccagaa

SEQ ID NO: 781221 - RNA, 20 nt, Artificial Sequence
  Synthetic
ugaacuagccccagccagaa

SEQ ID NO: 781222 - RNA, 20 nt, Artificial Sequence
  Synthetic
ugggcaauaaagagccagaa

SEQ ID NO: 781223 - RNA, 20 nt, Artificial Sequence
  Synthetic
aacuuacaaccaugccagaa

SEQ ID NO: 781224 - RNA, 20 nt, Artificial Sequence
  Synthetic
uugugaggccacauccagaa

SEQ ID NO: 781225 - RNA, 20 nt, Artificial Sequence
  Synthetic
uuauaacaugucauccagaa

SEQ ID NO: 781226 - RNA, 20 nt, Artificial Sequence
  Synthetic
ucccaagccaauguccagaa

SEQ ID NO: 781227 - RNA, 20 nt, Artificial Sequence
  Synthetic
acacuucacauuuuccagaa

SEQ ID NO: 781228 - RNA, 20 nt, Artificial Sequence
  Synthetic
caugauuuuaaaaagcagaa

SEQ ID NO: 781229 - RNA, 20 nt, Artificial Sequence
  Synthetic
ccuugcugcacacagcagaa

SEQ ID NO: 781230 - RNA, 20 nt, Artificial Sequence
  Synthetic
uguaucugcggagagcagaa

SEQ ID NO: 781231 - RNA, 20 nt, Artificial Sequence
  Synthetic
auuugggaagaggagcagaa

SEQ ID NO: 781232 - RNA, 20 nt, Artificial Sequence
  Synthetic
agccauggaaaauagcagaa

SEQ ID NO: 781233 - RNA, 20 nt, Artificial Sequence
  Synthetic
agggcacauagauagcagaa

SEQ ID NO: 781234 - RNA, 20 nt, Artificial Sequence
  Synthetic
ucauuucugugauagcagaa

SEQ ID NO: 781235 - RNA, 20 nt, Artificial Sequence
  Synthetic
auguccauugauuagcagaa

SEQ ID NO: 781236 - RNA, 20 nt, Artificial Sequence
  Synthetic
cuauuuccuuauccgcagaa

SEQ ID NO: 781237 - RNA, 20 nt, Artificial Sequence
  Synthetic
agucguggcagaaggcagaa

SEQ ID NO: 781238 - RNA, 20 nt, Artificial Sequence
  Synthetic
ucugacaaaaccaggcagaa

SEQ ID NO: 781239 - RNA, 20 nt, Artificial Sequence
  Synthetic
cauucauuguguaggcagaa

SEQ ID NO: 781240 - RNA, 20 nt, Artificial Sequence
  Synthetic
aauagccaaaaggggcagaa

SEQ ID NO: 781241 - RNA, 20 nt, Artificial Sequence
  Synthetic
auaagcgucugggggcagaa

SEQ ID NO: 781242 - RNA, 20 nt, Artificial Sequence
  Synthetic
aaaaggauuuccuggcagaa

SEQ ID NO: 781243 - RNA, 20 nt, Artificial Sequence
  Synthetic
uucuucauaugguggcagaa

SEQ ID NO: 781244 - RNA, 20 nt, Artificial Sequence
  Synthetic
ccaucagugaaaaugcagaa

SEQ ID NO: 781245 - RNA, 20 nt, Artificial Sequence
  Synthetic
uggcaagaguagaugcagaa

SEQ ID NO: 781246 - RNA, 20 nt, Artificial Sequence
  Synthetic
uacaugagauauaugcagaa

SEQ ID NO: 781247 - RNA, 20 nt, Artificial Sequence
  Synthetic
cgucauugaaaacugcagaa

SEQ ID NO: 781248 - RNA, 20 nt, Artificial Sequence
  Synthetic
uugauccaaggacugcagaa

SEQ ID NO: 781249 - RNA, 20 nt, Artificial Sequence
  Synthetic
uuuguccaaggacugcagaa

SEQ ID NO: 781250 - RNA, 20 nt, Artificial Sequence
  Synthetic
aagcaguaaucccugcagaa

SEQ ID NO: 781251 - RNA, 20 nt, Artificial Sequence
  Synthetic
cuauaggccaagcugcagaa

SEQ ID NO: 781252 - RNA, 20 nt, Artificial Sequence
  Synthetic
ucugggacacacgugcagaa

SEQ ID NO: 781253 - RNA, 20 nt, Artificial Sequence
  Synthetic
caacagggaaauuugcagaa

SEQ ID NO: 781254 - RNA, 20 nt, Artificial Sequence
  Synthetic
cuauuuugguauuugcagaa

SEQ ID NO: 781255 - RNA, 20 nt, Artificial Sequence
  Synthetic
uaaacuaucacaaaucagaa

SEQ ID NO: 781256 - RNA, 20 nt, Artificial Sequence
  Synthetic
ucacagaucagaaaucagaa

SEQ ID NO: 781257 - RNA, 20 nt, Artificial Sequence
  Synthetic
caccuuacagagaaucagaa

SEQ ID NO: 781258 - RNA, 20 nt, Artificial Sequence
  Synthetic
agagauuugcauaaucagaa

SEQ ID NO: 781259 - RNA, 20 nt, Artificial Sequence
  Synthetic
cuaguugggagucaucagaa

SEQ ID NO: 781260 - RNA, 20 nt, Artificial Sequence
  Synthetic
uuuaacacauaagaucagaa

SEQ ID NO: 781261 - RNA, 20 nt, Artificial Sequence
  Synthetic
uuccuacacaucuaucagaa

SEQ ID NO: 781262 - RNA, 20 nt, Artificial Sequence
  Synthetic
ucuaauugguaguaucagaa

SEQ ID NO: 781263 - RNA, 20 nt, Artificial Sequence
  Synthetic
uuguggaggcuuuaucagaa

SEQ ID NO: 781264 - RNA, 20 nt, Artificial Sequence
  Synthetic
uuacauuugaaaacucagaa

SEQ ID NO: 781265 - RNA, 20 nt, Artificial Sequence
  Synthetic
uaaaucuccuuaacucagaa

SEQ ID NO: 781266 - RNA, 20 nt, Artificial Sequence
  Synthetic
uggacuuugaagacucagaa

SEQ ID NO: 781267 - RNA, 20 nt, Artificial Sequence
  Synthetic
uagacacuggagacucagaa

SEQ ID NO: 781268 - RNA, 20 nt, Artificial Sequence
  Synthetic
aucagagagaguacucagaa

SEQ ID NO: 781269 - RNA, 20 nt, Artificial Sequence
  Synthetic
uuuacgauaauuacucagaa

SEQ ID NO: 781270 - RNA, 20 nt, Artificial Sequence
  Synthetic
uggcagaaguucccucagaa

SEQ ID NO: 781271 - RNA, 20 nt, Artificial Sequence
  Synthetic
augaauccuacggcucagaa

SEQ ID NO: 781272 - RNA, 20 nt, Artificial Sequence
  Synthetic
aauaucuuucuugcucagaa

SEQ ID NO: 781273 - RNA, 20 nt, Artificial Sequence
  Synthetic
agcaucaucuuugcucagaa

SEQ ID NO: 781274 - RNA, 20 nt, Artificial Sequence
  Synthetic
ccagaacacuguucucagaa

SEQ ID NO: 781275 - RNA, 20 nt, Artificial Sequence
  Synthetic
uugcagcuuuuaagucagaa

SEQ ID NO: 781276 - RNA, 20 nt, Artificial Sequence
  Synthetic
ccaucacauaccagucagaa

SEQ ID NO: 781277 - RNA, 20 nt, Artificial Sequence
  Synthetic
uugcauguguauggucagaa

SEQ ID NO: 781278 - RNA, 20 nt, Artificial Sequence
  Synthetic
augagagaaagcauucagaa

SEQ ID NO: 781279 - RNA, 20 nt, Artificial Sequence
  Synthetic
uacuugcuuugcauucagaa

SEQ ID NO: 781280 - RNA, 20 nt, Artificial Sequence
  Synthetic
cagguaaaugaccuucagaa

SEQ ID NO: 781281 - RNA, 20 nt, Artificial Sequence
  Synthetic
aguauggaaagcuuucagaa

SEQ ID NO: 781282 - RNA, 20 nt, Artificial Sequence
  Synthetic
agguaguuuaucuuucagaa

SEQ ID NO: 781283 - RNA, 20 nt, Artificial Sequence
  Synthetic
uuuccuucuacuuuucagaa

SEQ ID NO: 781284 - RNA, 20 nt, Artificial Sequence
  Synthetic
uaaauguguccuuuucagaa

SEQ ID NO: 781285 - RNA, 20 nt, Artificial Sequence
  Synthetic
cgacuaggaaguuuucagaa

SEQ ID NO: 781286 - RNA, 20 nt, Artificial Sequence
  Synthetic
aaauggaaaccaaaagagaa

SEQ ID NO: 781287 - RNA, 20 nt, Artificial Sequence
  Synthetic
aaaugaugaugaaaagagaa

SEQ ID NO: 781288 - RNA, 20 nt, Artificial Sequence
  Synthetic
aagagauuuauaaaagagaa

SEQ ID NO: 781289 - RNA, 20 nt, Artificial Sequence
  Synthetic
ugaauuguaguaaaagagaa

SEQ ID NO: 781290 - RNA, 20 nt, Artificial Sequence
  Synthetic
uaaucuaaggacaaagagaa

SEQ ID NO: 781291 - RNA, 20 nt, Artificial Sequence
  Synthetic
cuacaguuacccaaagagaa

SEQ ID NO: 781292 - RNA, 20 nt, Artificial Sequence
  Synthetic
auagcuagagccaaagagaa

SEQ ID NO: 781293 - RNA, 20 nt, Artificial Sequence
  Synthetic
ugucucccagucaaagagaa

SEQ ID NO: 781294 - RNA, 20 nt, Artificial Sequence
  Synthetic
ccaaaggaggggaaagagaa

SEQ ID NO: 781295 - RNA, 20 nt, Artificial Sequence
  Synthetic
ccuuuagucauccaagagaa

SEQ ID NO: 781296 - RNA, 20 nt, Artificial Sequence
  Synthetic
cuauucagcaagcaagagaa

SEQ ID NO: 781297 - RNA, 20 nt, Artificial Sequence
  Synthetic
uccuaaaagcagcaagagaa

SEQ ID NO: 781298 - RNA, 20 nt, Artificial Sequence
  Synthetic
aggaggcugaggcaagagaa

SEQ ID NO: 781299 - RNA, 20 nt, Artificial Sequence
  Synthetic
auaagggaaagagaagagaa

SEQ ID NO: 781300 - RNA, 20 nt, Artificial Sequence
  Synthetic
uuccaaaaaauagaagagaa

SEQ ID NO: 781301 - RNA, 20 nt, Artificial Sequence
  Synthetic
auaauguuaaaggaagagaa

SEQ ID NO: 781302 - RNA, 20 nt, Artificial Sequence
  Synthetic
agacuggaguaggaagagaa

SEQ ID NO: 781303 - RNA, 20 nt, Artificial Sequence
  Synthetic
agcuggagguaggaagagaa

SEQ ID NO: 781304 - RNA, 20 nt, Artificial Sequence
  Synthetic
uuguguuugaaugaagagaa

SEQ ID NO: 781305 - RNA, 20 nt, Artificial Sequence
  Synthetic
uuguggagcuuugaagagaa

SEQ ID NO: 781306 - RNA, 20 nt, Artificial Sequence
  Synthetic
caauguuguauauaagagaa

SEQ ID NO: 781307 - RNA, 20 nt, Artificial Sequence
  Synthetic
aaugggaauucuuaagagaa

SEQ ID NO: 781308 - RNA, 20 nt, Artificial Sequence
  Synthetic
uauuccuaguaaacagagaa

SEQ ID NO: 781309 - RNA, 20 nt, Artificial Sequence
  Synthetic
uucuguuuaauuacagagaa

SEQ ID NO: 781310 - RNA, 20 nt, Artificial Sequence
  Synthetic
agggaacggaaagcagagaa

SEQ ID NO: 781311 - RNA, 20 nt, Artificial Sequence
  Synthetic
cagaaauguaaagcagagaa

SEQ ID NO: 781312 - RNA, 20 nt, Artificial Sequence
  Synthetic
accuaaaaagaagcagagaa

SEQ ID NO: 781313 - RNA, 20 nt, Artificial Sequence
  Synthetic
ucagacaugaccgcagagaa

SEQ ID NO: 781314 - RNA, 20 nt, Artificial Sequence
  Synthetic
cuacuccuacaggcagagaa

SEQ ID NO: 781315 - RNA, 20 nt, Artificial Sequence
  Synthetic
cugauguccugggcagagaa

SEQ ID NO: 781316 - RNA, 20 nt, Artificial Sequence
  Synthetic
auuuaggaauaugcagagaa

SEQ ID NO: 781317 - RNA, 20 nt, Artificial Sequence
  Synthetic
uagcaaaccacugcagagaa

SEQ ID NO: 781318 - RNA, 20 nt, Artificial Sequence
  Synthetic
accagagaaauaucagagaa

SEQ ID NO: 781319 - RNA, 20 nt, Artificial Sequence
  Synthetic
ugagacucaaaaagagagaa

SEQ ID NO: 781320 - RNA, 20 nt, Artificial Sequence
  Synthetic
ugggaauagacaagagagaa

SEQ ID NO: 781321 - RNA, 20 nt, Artificial Sequence
  Synthetic
uuaagggcagccagagagaa

SEQ ID NO: 781322 - RNA, 20 nt, Artificial Sequence
  Synthetic
uuaggggcagccagagagaa

SEQ ID NO: 781323 - RNA, 20 nt, Artificial Sequence
  Synthetic
ugugaaauguccagagagaa

SEQ ID NO: 781324 - RNA, 20 nt, Artificial Sequence
  Synthetic
cacugcaacagcagagagaa

SEQ ID NO: 781325 - RNA, 20 nt, Artificial Sequence
  Synthetic
cugccaagacagagagagaa

SEQ ID NO: 781326 - RNA, 20 nt, Artificial Sequence
  Synthetic
agauugagagagagagagaa

SEQ ID NO: 781327 - RNA, 20 nt, Artificial Sequence
  Synthetic
aacuaagccaggagagagaa

SEQ ID NO: 781328 - RNA, 20 nt, Artificial Sequence
  Synthetic
aaaugaaagccuagagagaa

SEQ ID NO: 781329 - RNA, 20 nt, Artificial Sequence
  Synthetic
ccagguagacaaggagagaa

SEQ ID NO: 781330 - RNA, 20 nt, Artificial Sequence
  Synthetic
aguuaggaaaauggagagaa

SEQ ID NO: 781331 - RNA, 20 nt, Artificial Sequence
  Synthetic
uuugaauugggaugagagaa

SEQ ID NO: 781332 - RNA, 20 nt, Artificial Sequence
  Synthetic
agauaaaccaugugagagaa

SEQ ID NO: 781333 - RNA, 20 nt, Artificial Sequence
  Synthetic
aagacucacuguugagagaa

SEQ ID NO: 781334 - RNA, 20 nt, Artificial Sequence
  Synthetic
auuuacaauucaauagagaa

SEQ ID NO: 781335 - RNA, 20 nt, Artificial Sequence
  Synthetic
aauuuccuucacauagagaa

SEQ ID NO: 781336 - RNA, 20 nt, Artificial Sequence
  Synthetic
cuggcuuugaagauagagaa

SEQ ID NO: 781337 - RNA, 20 nt, Artificial Sequence
  Synthetic
uuuuagacuaugauagagaa

SEQ ID NO: 781338 - RNA, 20 nt, Artificial Sequence
  Synthetic
aguaggaaauggguagagaa

SEQ ID NO: 781339 - RNA, 20 nt, Artificial Sequence
  Synthetic
acauguguguugguagagaa

SEQ ID NO: 781340 - RNA, 20 nt, Artificial Sequence
  Synthetic
ugaauuaaugauuuagagaa

SEQ ID NO: 781341 - RNA, 20 nt, Artificial Sequence
  Synthetic
cgaaagagugauuuagagaa

SEQ ID NO: 781342 - RNA, 20 nt, Artificial Sequence
  Synthetic
aaaaaugcauauuuagagaa

SEQ ID NO: 781343 - RNA, 20 nt, Artificial Sequence
  Synthetic
aagcugaaagaaaacgagaa

SEQ ID NO: 781344 - RNA, 20 nt, Artificial Sequence
  Synthetic
cuagcuagauaaaacgagaa

SEQ ID NO: 781345 - RNA, 20 nt, Artificial Sequence
  Synthetic
agccccaagucggccgagaa

SEQ ID NO: 781346 - RNA, 20 nt, Artificial Sequence
  Synthetic
aaguaggggaaaagcgagaa

SEQ ID NO: 781347 - RNA, 20 nt, Artificial Sequence
  Synthetic
ugaaugaaaugaagcgagaa

SEQ ID NO: 781348 - RNA, 20 nt, Artificial Sequence
  Synthetic
cugaggcaggagaaggagaa

SEQ ID NO: 781349 - RNA, 20 nt, Artificial Sequence
  Synthetic
aggaggcugaggcaggagaa

SEQ ID NO: 781350 - RNA, 20 nt, Artificial Sequence
  Synthetic
uggaggcugaggcaggagaa

SEQ ID NO: 781351 - RNA, 20 nt, Artificial Sequence
  Synthetic
aggagaaaaauucaggagaa

SEQ ID NO: 781352 - RNA, 20 nt, Artificial Sequence
  Synthetic
caacuauuaauucaggagaa

SEQ ID NO: 781353 - RNA, 20 nt, Artificial Sequence
  Synthetic
ucuuuuaccucuucggagaa

SEQ ID NO: 781354 - RNA, 20 nt, Artificial Sequence
  Synthetic
uaaccaagauuaagggagaa

SEQ ID NO: 781355 - RNA, 20 nt, Artificial Sequence
  Synthetic
ugcucucucagcagggagaa

SEQ ID NO: 781356 - RNA, 20 nt, Artificial Sequence
  Synthetic
caggaaggacagagggagaa

SEQ ID NO: 781357 - RNA, 20 nt, Artificial Sequence
  Synthetic
uaucaguuuucuagggagaa

SEQ ID NO: 781358 - RNA, 20 nt, Artificial Sequence
  Synthetic
auuacaacaucaggggagaa

SEQ ID NO: 781359 - RNA, 20 nt, Artificial Sequence
  Synthetic
ugaccugcuucaggggagaa

SEQ ID NO: 781360 - RNA, 20 nt, Artificial Sequence
  Synthetic
aaaaaaggaaggggggagaa

SEQ ID NO: 781361 - RNA, 20 nt, Artificial Sequence
  Synthetic
ccugaaagugauggggagaa

SEQ ID NO: 781362 - RNA, 20 nt, Artificial Sequence
  Synthetic
aaacagugcugcugggagaa

SEQ ID NO: 781363 - RNA, 20 nt, Artificial Sequence
  Synthetic
aagugauagaauugggagaa

SEQ ID NO: 781364 - RNA, 20 nt, Artificial Sequence
  Synthetic
cuuuaugagacaauggagaa

SEQ ID NO: 781365 - RNA, 20 nt, Artificial Sequence
  Synthetic
caaaaacaagcaauggagaa

SEQ ID NO: 781366 - RNA, 20 nt, Artificial Sequence
  Synthetic
aauaaucacaucauggagaa

SEQ ID NO: 781367 - RNA, 20 nt, Artificial Sequence
  Synthetic
aauagucacaucauggagaa

SEQ ID NO: 781368 - RNA, 20 nt, Artificial Sequence
  Synthetic
aaaaaaaaaaaacuggagaa

SEQ ID NO: 781369 - RNA, 20 nt, Artificial Sequence
  Synthetic
cuagaaauaugacuggagaa

SEQ ID NO: 781370 - RNA, 20 nt, Artificial Sequence
  Synthetic
auaaaauuaugccuggagaa

SEQ ID NO: 781371 - RNA, 20 nt, Artificial Sequence
  Synthetic
ccagcuuccuggcuggagaa

SEQ ID NO: 781372 - RNA, 20 nt, Artificial Sequence
  Synthetic
aaaaagacccugguggagaa

SEQ ID NO: 781373 - RNA, 20 nt, Artificial Sequence
  Synthetic
ccugaaagugauguggagaa

SEQ ID NO: 781374 - RNA, 20 nt, Artificial Sequence
  Synthetic
uauagaucaccuguggagaa

SEQ ID NO: 781375 - RNA, 20 nt, Artificial Sequence
  Synthetic
uuucgcugaaguguggagaa

SEQ ID NO: 781376 - RNA, 20 nt, Artificial Sequence
  Synthetic
aagucuuugaaaaaugagaa

SEQ ID NO: 781377 - RNA, 20 nt, Artificial Sequence
  Synthetic
aguaaaaucagaaaugagaa

SEQ ID NO: 781378 - RNA, 20 nt, Artificial Sequence
  Synthetic
ucuggauuauuaaaugagaa

SEQ ID NO: 781379 - RNA, 20 nt, Artificial Sequence
  Synthetic
aucugaaaagacaaugagaa

SEQ ID NO: 781380 - RNA, 20 nt, Artificial Sequence
  Synthetic
acuuaauucuauaaugagaa

SEQ ID NO: 781381 - RNA, 20 nt, Artificial Sequence
  Synthetic
acugcuuuuccccaugagaa

SEQ ID NO: 781382 - RNA, 20 nt, Artificial Sequence
  Synthetic
ucuucauagcagcaugagaa

SEQ ID NO: 781383 - RNA, 20 nt, Artificial Sequence
  Synthetic
uucuaaugaaugcaugagaa

SEQ ID NO: 781384 - RNA, 20 nt, Artificial Sequence
  Synthetic
uguugcaaugaagaugagaa

SEQ ID NO: 781385 - RNA, 20 nt, Artificial Sequence
  Synthetic
augaaaugaugagaugagaa

SEQ ID NO: 781386 - RNA, 20 nt, Artificial Sequence
  Synthetic
uauugugaaugcgaugagaa

SEQ ID NO: 781387 - RNA, 20 nt, Artificial Sequence
  Synthetic
ccucaugagaaggaugagaa

SEQ ID NO: 781388 - RNA, 20 nt, Artificial Sequence
  Synthetic
accucaucaagugaugagaa

SEQ ID NO: 781389 - RNA, 20 nt, Artificial Sequence
  Synthetic
auaagcugaugauaugagaa

SEQ ID NO: 781390 - RNA, 20 nt, Artificial Sequence
  Synthetic
ccuuauuuacauacugagaa

SEQ ID NO: 781391 - RNA, 20 nt, Artificial Sequence
  Synthetic
augguauauuuaccugagaa

SEQ ID NO: 781392 - RNA, 20 nt, Artificial Sequence
  Synthetic
cuuaggaaugggccugagaa

SEQ ID NO: 781393 - RNA, 20 nt, Artificial Sequence
  Synthetic
uuuucucuggaagcugagaa

SEQ ID NO: 781394 - RNA, 20 nt, Artificial Sequence
  Synthetic
uccauaugacccagugagaa

SEQ ID NO: 781395 - RNA, 20 nt, Artificial Sequence
  Synthetic
agguaaggggcuagugagaa

SEQ ID NO: 781396 - RNA, 20 nt, Artificial Sequence
  Synthetic
agaaugaugcuuggugagaa

SEQ ID NO: 781397 - RNA, 20 nt, Artificial Sequence
  Synthetic
caccacagaaguugugagaa

SEQ ID NO: 781398 - RNA, 20 nt, Artificial Sequence
  Synthetic
uauuucauuuuuugugagaa

SEQ ID NO: 781399 - RNA, 20 nt, Artificial Sequence
  Synthetic
uuugaaucuagaauugagaa

SEQ ID NO: 781400 - RNA, 20 nt, Artificial Sequence
  Synthetic
ugcacacauuccauugagaa

SEQ ID NO: 781401 - RNA, 20 nt, Artificial Sequence
  Synthetic
uauccuauauggauugagaa

SEQ ID NO: 781402 - RNA, 20 nt, Artificial Sequence
  Synthetic
cccguugugggacuugagaa

SEQ ID NO: 781403 - RNA, 20 nt, Artificial Sequence
  Synthetic
agaaauugaggccuugagaa

SEQ ID NO: 781404 - RNA, 20 nt, Artificial Sequence
  Synthetic
augugcagacuucuugagaa

SEQ ID NO: 781405 - RNA, 20 nt, Artificial Sequence
  Synthetic
caaaauagaaauguugagaa

SEQ ID NO: 781406 - RNA, 20 nt, Artificial Sequence
  Synthetic
aguaugaauaaaaaauagaa

SEQ ID NO: 781407 - RNA, 20 nt, Artificial Sequence
  Synthetic
cauguaucuuuaaaauagaa

SEQ ID NO: 781408 - RNA, 20 nt, Artificial Sequence
  Synthetic
acacauccagagaaauagaa

SEQ ID NO: 781409 - RNA, 20 nt, Artificial Sequence
  Synthetic
uuuauagacaggaaauagaa

SEQ ID NO: 781410 - RNA, 20 nt, Artificial Sequence
  Synthetic
agacauagcaauaaauagaa

SEQ ID NO: 781411 - RNA, 20 nt, Artificial Sequence
  Synthetic
uuaaauauuccuaaauagaa

SEQ ID NO: 781412 - RNA, 20 nt, Artificial Sequence
  Synthetic
uucugcuuccagcaauagaa

SEQ ID NO: 781413 - RNA, 20 nt, Artificial Sequence
  Synthetic
auguucauaaaauaauagaa

SEQ ID NO: 781414 - RNA, 20 nt, Artificial Sequence
  Synthetic
uuaugaugucaauaauagaa

SEQ ID NO: 781415 - RNA, 20 nt, Artificial Sequence
  Synthetic
uuuuguuuugcauaauagaa

SEQ ID NO: 781416 - RNA, 20 nt, Artificial Sequence
  Synthetic
ucaucaacauucuaauagaa

SEQ ID NO: 781417 - RNA, 20 nt, Artificial Sequence
  Synthetic
aagaaagcuggcacauagaa

SEQ ID NO: 781418 - RNA, 20 nt, Artificial Sequence
  Synthetic
cugagaaacaauacauagaa

SEQ ID NO: 781419 - RNA, 20 nt, Artificial Sequence
  Synthetic
ugguauacagggccauagaa

SEQ ID NO: 781420 - RNA, 20 nt, Artificial Sequence
  Synthetic
accacuuacuuagcauagaa

SEQ ID NO: 781421 - RNA, 20 nt, Artificial Sequence
  Synthetic
cugcccugaucugcauagaa

SEQ ID NO: 781422 - RNA, 20 nt, Artificial Sequence
  Synthetic
cagaauaaguguucauagaa

SEQ ID NO: 781423 - RNA, 20 nt, Artificial Sequence
  Synthetic
ugaugaauaaugagauagaa

SEQ ID NO: 781424 - RNA, 20 nt, Artificial Sequence
  Synthetic
aauaaagacuauagauagaa

SEQ ID NO: 781425 - RNA, 20 nt, Artificial Sequence
  Synthetic
aggagagagggaggauagaa

SEQ ID NO: 781426 - RNA, 20 nt, Artificial Sequence
  Synthetic
aaaaaaaaauaucuauagaa

SEQ ID NO: 781427 - RNA, 20 nt, Artificial Sequence
  Synthetic
cauuuuagcugaguauagaa

SEQ ID NO: 781428 - RNA, 20 nt, Artificial Sequence
  Synthetic
ccuaacaauuaauuauagaa

SEQ ID NO: 781429 - RNA, 20 nt, Artificial Sequence
  Synthetic
auauaauguuaguuauagaa

SEQ ID NO: 781430 - RNA, 20 nt, Artificial Sequence
  Synthetic
auuacuaucaauuuauagaa

SEQ ID NO: 781431 - RNA, 20 nt, Artificial Sequence
  Synthetic
caauaauggaagcacuagaa

SEQ ID NO: 781432 - RNA, 20 nt, Artificial Sequence
  Synthetic
ccauuuuuuuaagacuagaa

SEQ ID NO: 781433 - RNA, 20 nt, Artificial Sequence
  Synthetic
aguagaucuaaggacuagaa

SEQ ID NO: 781434 - RNA, 20 nt, Artificial Sequence
  Synthetic
aacuagaguuuggacuagaa

SEQ ID NO: 781435 - RNA, 20 nt, Artificial Sequence
  Synthetic
aagauugcacaugacuagaa

SEQ ID NO: 781436 - RNA, 20 nt, Artificial Sequence
  Synthetic
uccagcugggcagccuagaa

SEQ ID NO: 781437 - RNA, 20 nt, Artificial Sequence
  Synthetic
uguacucccagugccuagaa

SEQ ID NO: 781438 - RNA, 20 nt, Artificial Sequence
  Synthetic
uugaacaccgaguccuagaa

SEQ ID NO: 781439 - RNA, 20 nt, Artificial Sequence
  Synthetic
uguuaauacaugagcuagaa

SEQ ID NO: 781440 - RNA, 20 nt, Artificial Sequence
  Synthetic
acuaaaaugaugagcuagaa

SEQ ID NO: 781441 - RNA, 20 nt, Artificial Sequence
  Synthetic
aauugaauauaaaucuagaa

SEQ ID NO: 781442 - RNA, 20 nt, Artificial Sequence
  Synthetic
ugaagcaaugacuucuagaa

SEQ ID NO: 781443 - RNA, 20 nt, Artificial Sequence
  Synthetic
cccucucuuuauuucuagaa

SEQ ID NO: 781444 - RNA, 20 nt, Artificial Sequence
  Synthetic
uuuucugucuucaaguagaa

SEQ ID NO: 781445 - RNA, 20 nt, Artificial Sequence
  Synthetic
uagugauucaggaaguagaa

SEQ ID NO: 781446 - RNA, 20 nt, Artificial Sequence
  Synthetic
aaugccuuguggaaguagaa

SEQ ID NO: 781447 - RNA, 20 nt, Artificial Sequence
  Synthetic
ugcuauagaacacaguagaa

SEQ ID NO: 781448 - RNA, 20 nt, Artificial Sequence
  Synthetic
cuauccuccaaagaguagaa

SEQ ID NO: 781449 - RNA, 20 nt, Artificial Sequence
  Synthetic
caauacaccacagaguagaa

SEQ ID NO: 781450 - RNA, 20 nt, Artificial Sequence
  Synthetic
cauggacauagagaguagaa

SEQ ID NO: 781451 - RNA, 20 nt, Artificial Sequence
  Synthetic
cauugaaguagagaguagaa

SEQ ID NO: 781452 - RNA, 20 nt, Artificial Sequence
  Synthetic
agagaagaagaugaguagaa

SEQ ID NO: 781453 - RNA, 20 nt, Artificial Sequence
  Synthetic
ucagaaagaaaauaguagaa

SEQ ID NO: 781454 - RNA, 20 nt, Artificial Sequence
  Synthetic
ccauauaucuaauaguagaa

SEQ ID NO: 781455 - RNA, 20 nt, Artificial Sequence
  Synthetic
aggugaagggcauaguagaa

SEQ ID NO: 781456 - RNA, 20 nt, Artificial Sequence
  Synthetic
cuuaggauuaaguaguagaa

SEQ ID NO: 781457 - RNA, 20 nt, Artificial Sequence
  Synthetic
ucacaaggcagaagguagaa

SEQ ID NO: 781458 - RNA, 20 nt, Artificial Sequence
  Synthetic
agcaaggaaaauagguagaa

SEQ ID NO: 781459 - RNA, 20 nt, Artificial Sequence
  Synthetic
cauaaaacauugggguagaa

SEQ ID NO: 781460 - RNA, 20 nt, Artificial Sequence
  Synthetic
aggcagacagagugguagaa

SEQ ID NO: 781461 - RNA, 20 nt, Artificial Sequence
  Synthetic
auaaaugaggguugguagaa

SEQ ID NO: 781462 - RNA, 20 nt, Artificial Sequence
  Synthetic
uugcagaugucaauguagaa

SEQ ID NO: 781463 - RNA, 20 nt, Artificial Sequence
  Synthetic
uugagcauuaccauguagaa

SEQ ID NO: 781464 - RNA, 20 nt, Artificial Sequence
  Synthetic
cccccccccgccauguagaa

SEQ ID NO: 781465 - RNA, 20 nt, Artificial Sequence
  Synthetic
uuuccccuuuucauguagaa

SEQ ID NO: 781466 - RNA, 20 nt, Artificial Sequence
  Synthetic
agaugugucacacuguagaa

SEQ ID NO: 781467 - RNA, 20 nt, Artificial Sequence
  Synthetic
cuuguucuguucuuguagaa

SEQ ID NO: 781468 - RNA, 20 nt, Artificial Sequence
  Synthetic
auauacagcacuuuguagaa

SEQ ID NO: 781469 - RNA, 20 nt, Artificial Sequence
  Synthetic
cgccucugcacaaauuagaa

SEQ ID NO: 781470 - RNA, 20 nt, Artificial Sequence
  Synthetic
aauguuaaacacaauuagaa

SEQ ID NO: 781471 - RNA, 20 nt, Artificial Sequence
  Synthetic
aaauagguuuacaauuagaa

SEQ ID NO: 781472 - RNA, 20 nt, Artificial Sequence
  Synthetic
cauacauuugggaauuagaa

SEQ ID NO: 781473 - RNA, 20 nt, Artificial Sequence
  Synthetic
uuaacagccacccauuagaa

SEQ ID NO: 781474 - RNA, 20 nt, Artificial Sequence
  Synthetic
cacaaggaucugcauuagaa

SEQ ID NO: 781475 - RNA, 20 nt, Artificial Sequence
  Synthetic
cucuuuccuagucauuagaa

SEQ ID NO: 781476 - RNA, 20 nt, Artificial Sequence
  Synthetic
aaaagacauccagauuagaa

SEQ ID NO: 781477 - RNA, 20 nt, Artificial Sequence
  Synthetic
caggcucuaugggauuagaa

SEQ ID NO: 781478 - RNA, 20 nt, Artificial Sequence
  Synthetic
uugcguuaaaaguauuagaa

SEQ ID NO: 781479 - RNA, 20 nt, Artificial Sequence
  Synthetic
aauauuguauaguauuagaa

SEQ ID NO: 781480 - RNA, 20 nt, Artificial Sequence
  Synthetic
cgauuauuaaauuauuagaa

SEQ ID NO: 781481 - RNA, 20 nt, Artificial Sequence
  Synthetic
ccuaggaauacaacuuagaa

SEQ ID NO: 781482 - RNA, 20 nt, Artificial Sequence
  Synthetic
cagauuucaaagacuuagaa

SEQ ID NO: 781483 - RNA, 20 nt, Artificial Sequence
  Synthetic
cugauucaguagacuuagaa

SEQ ID NO: 781484 - RNA, 20 nt, Artificial Sequence
  Synthetic
uuucuaccccugccuuagaa

SEQ ID NO: 781485 - RNA, 20 nt, Artificial Sequence
  Synthetic
uauauaauaauagcuuagaa

SEQ ID NO: 781486 - RNA, 20 nt, Artificial Sequence
  Synthetic
ugagcaaaugcugcuuagaa

SEQ ID NO: 781487 - RNA, 20 nt, Artificial Sequence
  Synthetic
cgcauucauggaucuuagaa

SEQ ID NO: 781488 - RNA, 20 nt, Artificial Sequence
  Synthetic
ccaucucacaccaguuagaa

SEQ ID NO: 781489 - RNA, 20 nt, Artificial Sequence
  Synthetic
ucaucucacaccaguuagaa

SEQ ID NO: 781490 - RNA, 20 nt, Artificial Sequence
  Synthetic
ccaucucacgccaguuagaa

SEQ ID NO: 781491 - RNA, 20 nt, Artificial Sequence
  Synthetic
ccaucucacuccaguuagaa

SEQ ID NO: 781492 - RNA, 20 nt, Artificial Sequence
  Synthetic
ucaucucauuccaguuagaa

SEQ ID NO: 781493 - RNA, 20 nt, Artificial Sequence
  Synthetic
ccaucucacaucaguuagaa

SEQ ID NO: 781494 - RNA, 20 nt, Artificial Sequence
  Synthetic
caauguugcggauguuagaa

SEQ ID NO: 781495 - RNA, 20 nt, Artificial Sequence
  Synthetic
ucaccuuacaccuguuagaa

SEQ ID NO: 781496 - RNA, 20 nt, Artificial Sequence
  Synthetic
ucauuaaauucacuuuagaa

SEQ ID NO: 781497 - RNA, 20 nt, Artificial Sequence
  Synthetic
aacuuuguauuucuuuagaa

SEQ ID NO: 781498 - RNA, 20 nt, Artificial Sequence
  Synthetic
aaaauuccugaaguuuagaa

SEQ ID NO: 781499 - RNA, 20 nt, Artificial Sequence
  Synthetic
ucacaauacacaguuuagaa

SEQ ID NO: 781500 - RNA, 20 nt, Artificial Sequence
  Synthetic
caaaacguaaugguuuagaa

SEQ ID NO: 781501 - RNA, 20 nt, Artificial Sequence
  Synthetic
ucauggucaaacuuuuagaa

SEQ ID NO: 781502 - RNA, 20 nt, Artificial Sequence
  Synthetic
uucaaagauucuuuuuagaa

SEQ ID NO: 781503 - RNA, 20 nt, Artificial Sequence
  Synthetic
ccauuuuauuuuaaaacgaa

SEQ ID NO: 781504 - RNA, 20 nt, Artificial Sequence
  Synthetic
acucugaaaggacaaacgaa

SEQ ID NO: 781505 - RNA, 20 nt, Artificial Sequence
  Synthetic
acuacuuaaagucaaacgaa

SEQ ID NO: 781506 - RNA, 20 nt, Artificial Sequence
  Synthetic
aauccauaaucuagaacgaa

SEQ ID NO: 781507 - RNA, 20 nt, Artificial Sequence
  Synthetic
aggcagugcagaguaacgaa

SEQ ID NO: 781508 - RNA, 20 nt, Artificial Sequence
  Synthetic
uaaaaaacuagagucacgaa

SEQ ID NO: 781509 - RNA, 20 nt, Artificial Sequence
  Synthetic
aguccugugaaauucacgaa

SEQ ID NO: 781510 - RNA, 20 nt, Artificial Sequence
  Synthetic
acuguucaagaaaauacgaa

SEQ ID NO: 781511 - RNA, 20 nt, Artificial Sequence
  Synthetic
uuaaaacaaaaagauacgaa

SEQ ID NO: 781512 - RNA, 20 nt, Artificial Sequence
  Synthetic
aauaguagucauuauacgaa

SEQ ID NO: 781513 - RNA, 20 nt, Artificial Sequence
  Synthetic
ugcuaugaauagacuacgaa

SEQ ID NO: 781514 - RNA, 20 nt, Artificial Sequence
  Synthetic
caacgagaggcacuuacgaa

SEQ ID NO: 781515 - RNA, 20 nt, Artificial Sequence
  Synthetic
aggauuucagaguuuacgaa

SEQ ID NO: 781516 - RNA, 20 nt, Artificial Sequence
  Synthetic
auuaaagaagagcuaccgaa

SEQ ID NO: 781517 - RNA, 20 nt, Artificial Sequence
  Synthetic
uguagucccagcuacccgaa

SEQ ID NO: 781518 - RNA, 20 nt, Artificial Sequence
  Synthetic
uaaccuaucuuuuccccgaa

SEQ ID NO: 781519 - RNA, 20 nt, Artificial Sequence
  Synthetic
aggaaggaauuaagcccgaa

SEQ ID NO: 781520 - RNA, 20 nt, Artificial Sequence
  Synthetic
cacgaauuaggcacuccgaa

SEQ ID NO: 781521 - RNA, 20 nt, Artificial Sequence
  Synthetic
caacagagcaagacuccgaa

SEQ ID NO: 781522 - RNA, 20 nt, Artificial Sequence
  Synthetic
auauaugcagaaugggcgaa

SEQ ID NO: 781523 - RNA, 20 nt, Artificial Sequence
  Synthetic
agcaaaagaagcauggcgaa

SEQ ID NO: 781524 - RNA, 20 nt, Artificial Sequence
  Synthetic
acuguccaucaacaugcgaa

SEQ ID NO: 781525 - RNA, 20 nt, Artificial Sequence
  Synthetic
cauggcuuuauagcugcgaa

SEQ ID NO: 781526 - RNA, 20 nt, Artificial Sequence
  Synthetic
acucaguccugccuugcgaa

SEQ ID NO: 781527 - RNA, 20 nt, Artificial Sequence
  Synthetic
augaauaaauauuaaucgaa

SEQ ID NO: 781528 - RNA, 20 nt, Artificial Sequence
  Synthetic
acauuuuuuuuccuaucgaa

SEQ ID NO: 781529 - RNA, 20 nt, Artificial Sequence
  Synthetic
uuugugagcauaaagucgaa

SEQ ID NO: 781530 - RNA, 20 nt, Artificial Sequence
  Synthetic
auaaauuccuagccgucgaa

SEQ ID NO: 781531 - RNA, 20 nt, Artificial Sequence
  Synthetic
uauaaauauaauuuuucgaa

SEQ ID NO: 781532 - RNA, 20 nt, Artificial Sequence
  Synthetic
uaaaaaaaaaaaaaaaggaa

SEQ ID NO: 781533 - RNA, 20 nt, Artificial Sequence
  Synthetic
agaaauuaaaaaaaaaggaa

SEQ ID NO: 781534 - RNA, 20 nt, Artificial Sequence
  Synthetic
ugaauuuaagaaaaaaggaa

SEQ ID NO: 781535 - RNA, 20 nt, Artificial Sequence
  Synthetic
uaacuuaagagaaaaaggaa

SEQ ID NO: 781536 - RNA, 20 nt, Artificial Sequence
  Synthetic
aagugagagagaaaaaggaa

SEQ ID NO: 781537 - RNA, 20 nt, Artificial Sequence
  Synthetic
acauaaaaaggaaaaaggaa

SEQ ID NO: 781538 - RNA, 20 nt, Artificial Sequence
  Synthetic
aagcagauaccuaaaaggaa

SEQ ID NO: 781539 - RNA, 20 nt, Artificial Sequence
  Synthetic
auucucuguaguaaaaggaa

SEQ ID NO: 781540 - RNA, 20 nt, Artificial Sequence
  Synthetic
uaagucuuugggcaaaggaa

SEQ ID NO: 781541 - RNA, 20 nt, Artificial Sequence
  Synthetic
ugucuuuaaagucaaaggaa

SEQ ID NO: 781542 - RNA, 20 nt, Artificial Sequence
  Synthetic
aaauuuauauuucaaaggaa

SEQ ID NO: 781543 - RNA, 20 nt, Artificial Sequence
  Synthetic
cuacagaaaacagaaaggaa

SEQ ID NO: 781544 - RNA, 20 nt, Artificial Sequence
  Synthetic
cugcugcacccagaaaggaa

SEQ ID NO: 781545 - RNA, 20 nt, Artificial Sequence
  Synthetic
uugugaaaucgagaaaggaa

SEQ ID NO: 781546 - RNA, 20 nt, Artificial Sequence
  Synthetic
aggggcuagugagaaaggaa

SEQ ID NO: 781547 - RNA, 20 nt, Artificial Sequence
  Synthetic
aaggaacagaaggaaaggaa

SEQ ID NO: 781548 - RNA, 20 nt, Artificial Sequence
  Synthetic
cugugagcggaggaaaggaa

SEQ ID NO: 781549 - RNA, 20 nt, Artificial Sequence
  Synthetic
cuaauagaaggggaaaggaa

SEQ ID NO: 781550 - RNA, 20 nt, Artificial Sequence
  Synthetic
ucauuuauuagugaaaggaa

SEQ ID NO: 781551 - RNA, 20 nt, Artificial Sequence
  Synthetic
cuggguaauuuauaaaggaa

SEQ ID NO: 781552 - RNA, 20 nt, Artificial Sequence
  Synthetic
uaugacagcuuuuaaaggaa

SEQ ID NO: 781553 - RNA, 20 nt, Artificial Sequence
  Synthetic
ucuucuguuaaaacaaggaa

SEQ ID NO: 781554 - RNA, 20 nt, Artificial Sequence
  Synthetic
uuuaccucuauuacaaggaa

SEQ ID NO: 781555 - RNA, 20 nt, Artificial Sequence
  Synthetic
uugucugcacuuccaaggaa

SEQ ID NO: 781556 - RNA, 20 nt, Artificial Sequence
  Synthetic
ccugcaaggugggcaaggaa

SEQ ID NO: 781557 - RNA, 20 nt, Artificial Sequence
  Synthetic
ugaacagaaaucucaaggaa

SEQ ID NO: 781558 - RNA, 20 nt, Artificial Sequence
  Synthetic
aggaaaaggaacagaaggaa

SEQ ID NO: 781559 - RNA, 20 nt, Artificial Sequence
  Synthetic
uagaauaguuucagaaggaa

SEQ ID NO: 781560 - RNA, 20 nt, Artificial Sequence
  Synthetic
uggaauaguuucagaaggaa

SEQ ID NO: 781561 - RNA, 20 nt, Artificial Sequence
  Synthetic
ugccccuuugagagaaggaa

SEQ ID NO: 781562 - RNA, 20 nt, Artificial Sequence
  Synthetic
caguugcucuagagaaggaa

SEQ ID NO: 781563 - RNA, 20 nt, Artificial Sequence
  Synthetic
aaaaagauuuagagaaggaa

SEQ ID NO: 781564 - RNA, 20 nt, Artificial Sequence
  Synthetic
aagacaaagaaaggaaggaa

SEQ ID NO: 781565 - RNA, 20 nt, Artificial Sequence
  Synthetic
aaaggaaagaaaggaaggaa

SEQ ID NO: 781566 - RNA, 20 nt, Artificial Sequence
  Synthetic
agaccuagccaaggaaggaa

SEQ ID NO: 781567 - RNA, 20 nt, Artificial Sequence
  Synthetic
cugaaaggaggaggaaggaa

SEQ ID NO: 781568 - RNA, 20 nt, Artificial Sequence
  Synthetic
uccaugaaccugggaaggaa

SEQ ID NO: 781569 - RNA, 20 nt, Artificial Sequence
  Synthetic
aaccaguggcauggaaggaa

SEQ ID NO: 781570 - RNA, 20 nt, Artificial Sequence
  Synthetic
ccuuacuauacuggaaggaa

SEQ ID NO: 781571 - RNA, 20 nt, Artificial Sequence
  Synthetic
cuugaagugaacugaaggaa

SEQ ID NO: 781572 - RNA, 20 nt, Artificial Sequence
  Synthetic
ugaaaccaggugugaaggaa

SEQ ID NO: 781573 - RNA, 20 nt, Artificial Sequence
  Synthetic
agggagguggaaauaaggaa

SEQ ID NO: 781574 - RNA, 20 nt, Artificial Sequence
  Synthetic
uuuguauaugguauaaggaa

SEQ ID NO: 781575 - RNA, 20 nt, Artificial Sequence
  Synthetic
uuuguauaagggguaaggaa

SEQ ID NO: 781576 - RNA, 20 nt, Artificial Sequence
  Synthetic
uaaaucugacccuuaaggaa

SEQ ID NO: 781577 - RNA, 20 nt, Artificial Sequence
  Synthetic
uacucugauugguuaaggaa

SEQ ID NO: 781578 - RNA, 20 nt, Artificial Sequence
  Synthetic
accaucauauuguuaaggaa

SEQ ID NO: 781579 - RNA, 20 nt, Artificial Sequence
  Synthetic
uaggguuaaugaaacaggaa

SEQ ID NO: 781580 - RNA, 20 nt, Artificial Sequence
  Synthetic
aaacauaaccacaacaggaa

SEQ ID NO: 781581 - RNA, 20 nt, Artificial Sequence
  Synthetic
aacacuguagggaacaggaa

SEQ ID NO: 781582 - RNA, 20 nt, Artificial Sequence
  Synthetic
ugcucacugguuaacaggaa

SEQ ID NO: 781583 - RNA, 20 nt, Artificial Sequence
  Synthetic
cuugcuauauaacacaggaa

SEQ ID NO: 781584 - RNA, 20 nt, Artificial Sequence
  Synthetic
ucagcaaacuaacacaggaa

SEQ ID NO: 781585 - RNA, 20 nt, Artificial Sequence
  Synthetic
agaacacauggacacaggaa

SEQ ID NO: 781586 - RNA, 20 nt, Artificial Sequence
  Synthetic
agaucacauggacacaggaa

SEQ ID NO: 781587 - RNA, 20 nt, Artificial Sequence
  Synthetic
agaacacauggucacaggaa

SEQ ID NO: 781588 - RNA, 20 nt, Artificial Sequence
  Synthetic
auuuaguuagaagacaggaa

SEQ ID NO: 781589 - RNA, 20 nt, Artificial Sequence
  Synthetic
auaccacaugaauacaggaa

SEQ ID NO: 781590 - RNA, 20 nt, Artificial Sequence
  Synthetic
uuuuuaaaauauuacaggaa

SEQ ID NO: 781591 - RNA, 20 nt, Artificial Sequence
  Synthetic
cuuguggagaucaccaggaa

SEQ ID NO: 781592 - RNA, 20 nt, Artificial Sequence
  Synthetic
acucaaccugcccccaggaa

SEQ ID NO: 781593 - RNA, 20 nt, Artificial Sequence
  Synthetic
uaaacucuacaucccaggaa

SEQ ID NO: 781594 - RNA, 20 nt, Artificial Sequence
  Synthetic
uugucagcauuucccaggaa

SEQ ID NO: 781595 - RNA, 20 nt, Artificial Sequence
  Synthetic
ccugugaaagcagccaggaa

SEQ ID NO: 781596 - RNA, 20 nt, Artificial Sequence
  Synthetic
cuuaaaagggauuccaggaa

SEQ ID NO: 781597 - RNA, 20 nt, Artificial Sequence
  Synthetic
auauagaaacuuagcaggaa

SEQ ID NO: 781598 - RNA, 20 nt, Artificial Sequence
  Synthetic
agaacaccuggacgcaggaa

SEQ ID NO: 781599 - RNA, 20 nt, Artificial Sequence
  Synthetic
caggcauugaauaucaggaa

SEQ ID NO: 781600 - RNA, 20 nt, Artificial Sequence
  Synthetic
auucccauugaacucaggaa

SEQ ID NO: 781601 - RNA, 20 nt, Artificial Sequence
  Synthetic
caaguaaaguaacucaggaa

SEQ ID NO: 781602 - RNA, 20 nt, Artificial Sequence
  Synthetic
uaagugaaguaacucaggaa

SEQ ID NO: 781603 - RNA, 20 nt, Artificial Sequence
  Synthetic
auggucagauugcucaggaa

SEQ ID NO: 781604 - RNA, 20 nt, Artificial Sequence
  Synthetic
cuuuuccacuaucucaggaa

SEQ ID NO: 781605 - RNA, 20 nt, Artificial Sequence
  Synthetic
acacagccaagagucaggaa

SEQ ID NO: 781606 - RNA, 20 nt, Artificial Sequence
  Synthetic
uaagugaaguaauucaggaa

SEQ ID NO: 781607 - RNA, 20 nt, Artificial Sequence
  Synthetic
ugaaauaagacauucaggaa

SEQ ID NO: 781608 - RNA, 20 nt, Artificial Sequence
  Synthetic
cacagccauuacuucaggaa

SEQ ID NO: 781609 - RNA, 20 nt, Artificial Sequence
  Synthetic
aggggacauaguuucaggaa

SEQ ID NO: 781610 - RNA, 20 nt, Artificial Sequence
  Synthetic
aggggguauaguuucaggaa

SEQ ID NO: 781611 - RNA, 20 nt, Artificial Sequence
  Synthetic
uuuggaaaacuaaagaggaa

SEQ ID NO: 781612 - RNA, 20 nt, Artificial Sequence
  Synthetic
auuaaacgaguaaagaggaa

SEQ ID NO: 781613 - RNA, 20 nt, Artificial Sequence
  Synthetic
uucuuguaugucaagaggaa

SEQ ID NO: 781614 - RNA, 20 nt, Artificial Sequence
  Synthetic
cuaugggaagggaagaggaa

SEQ ID NO: 781615 - RNA, 20 nt, Artificial Sequence
  Synthetic
uagaguuacuuuaagaggaa

SEQ ID NO: 781616 - RNA, 20 nt, Artificial Sequence
  Synthetic
uaaaaucaaguggagaggaa

SEQ ID NO: 781617 - RNA, 20 nt, Artificial Sequence
  Synthetic
ugggacacuggcuagaggaa

SEQ ID NO: 781618 - RNA, 20 nt, Artificial Sequence
  Synthetic
auuauucaagguuagaggaa

SEQ ID NO: 781619 - RNA, 20 nt, Artificial Sequence
  Synthetic
acauaaccaugaaggaggaa

SEQ ID NO: 781620 - RNA, 20 nt, Artificial Sequence
  Synthetic
cauggaaugauaaggaggaa

SEQ ID NO: 781621 - RNA, 20 nt, Artificial Sequence
  Synthetic
agggaaggaaggaggaggaa

SEQ ID NO: 781622 - RNA, 20 nt, Artificial Sequence
  Synthetic
uggauuugggguaggaggaa

SEQ ID NO: 781623 - RNA, 20 nt, Artificial Sequence
  Synthetic
acagaggaaggagggaggaa

SEQ ID NO: 781624 - RNA, 20 nt, Artificial Sequence
  Synthetic
ugcuugaggugggggaggaa

SEQ ID NO: 781625 - RNA, 20 nt, Artificial Sequence
  Synthetic
uuacauccgauugggaggaa

SEQ ID NO: 781626 - RNA, 20 nt, Artificial Sequence
  Synthetic
aggcuguguguaaugaggaa

SEQ ID NO: 781627 - RNA, 20 nt, Artificial Sequence
  Synthetic
aaggugcuuuguaugaggaa

SEQ ID NO: 781628 - RNA, 20 nt, Artificial Sequence
  Synthetic
uacucagagucacugaggaa

SEQ ID NO: 781629 - RNA, 20 nt, Artificial Sequence
  Synthetic
agggacugugcccugaggaa

SEQ ID NO: 781630 - RNA, 20 nt, Artificial Sequence
  Synthetic
uucagaaauggagugaggaa

SEQ ID NO: 781631 - RNA, 20 nt, Artificial Sequence
  Synthetic
cuaaaagaggcauugaggaa

SEQ ID NO: 781632 - RNA, 20 nt, Artificial Sequence
  Synthetic
aguaaaauuuccuugaggaa

SEQ ID NO: 781633 - RNA, 20 nt, Artificial Sequence
  Synthetic
aaagguggcaucuugaggaa

SEQ ID NO: 781634 - RNA, 20 nt, Artificial Sequence
  Synthetic
aggaaaugagaaaauaggaa

SEQ ID NO: 781635 - RNA, 20 nt, Artificial Sequence
  Synthetic
acaaacucuuuaaauaggaa

SEQ ID NO: 781636 - RNA, 20 nt, Artificial Sequence
  Synthetic
uuuagaugaugcaauaggaa

SEQ ID NO: 781637 - RNA, 20 nt, Artificial Sequence
  Synthetic
uaauuccauuuacauaggaa

SEQ ID NO: 781638 - RNA, 20 nt, Artificial Sequence
  Synthetic
cccauguuguagcauaggaa

SEQ ID NO: 781639 - RNA, 20 nt, Artificial Sequence
  Synthetic
ugugcagagaaggauaggaa

SEQ ID NO: 781640 - RNA, 20 nt, Artificial Sequence
  Synthetic
uuucagagcacugauaggaa

SEQ ID NO: 781641 - RNA, 20 nt, Artificial Sequence
  Synthetic
aguaacagaagugauaggaa

SEQ ID NO: 781642 - RNA, 20 nt, Artificial Sequence
  Synthetic
aguaugauauaauauaggaa

SEQ ID NO: 781643 - RNA, 20 nt, Artificial Sequence
  Synthetic
agagcaaugcagacuaggaa

SEQ ID NO: 781644 - RNA, 20 nt, Artificial Sequence
  Synthetic
cugaaaauggagccuaggaa

SEQ ID NO: 781645 - RNA, 20 nt, Artificial Sequence
  Synthetic
agaguugguuuugcuaggaa

SEQ ID NO: 781646 - RNA, 20 nt, Artificial Sequence
  Synthetic
aguacuccuauuucuaggaa

SEQ ID NO: 781647 - RNA, 20 nt, Artificial Sequence
  Synthetic
aagcucagauaaaguaggaa

SEQ ID NO: 781648 - RNA, 20 nt, Artificial Sequence
  Synthetic
aaauuguuggagaguaggaa

SEQ ID NO: 781649 - RNA, 20 nt, Artificial Sequence
  Synthetic
uaaaaagacucagguaggaa

SEQ ID NO: 781650 - RNA, 20 nt, Artificial Sequence
  Synthetic
auguuucacugggguaggaa

SEQ ID NO: 781651 - RNA, 20 nt, Artificial Sequence
  Synthetic
uuuauaugcuaaauuaggaa

SEQ ID NO: 781652 - RNA, 20 nt, Artificial Sequence
  Synthetic
ucagaaacucacauuaggaa

SEQ ID NO: 781653 - RNA, 20 nt, Artificial Sequence
  Synthetic
aagucugcucacauuaggaa

SEQ ID NO: 781654 - RNA, 20 nt, Artificial Sequence
  Synthetic
caaaucuggggcauuaggaa

SEQ ID NO: 781655 - RNA, 20 nt, Artificial Sequence
  Synthetic
caucucgucaguauuaggaa

SEQ ID NO: 781656 - RNA, 20 nt, Artificial Sequence
  Synthetic
agauccuuagaaguuaggaa

SEQ ID NO: 781657 - RNA, 20 nt, Artificial Sequence
  Synthetic
uaguaaugggaaguuaggaa

SEQ ID NO: 781658 - RNA, 20 nt, Artificial Sequence
  Synthetic
agaggauaauucuuuaggaa

SEQ ID NO: 781659 - RNA, 20 nt, Artificial Sequence
  Synthetic
ucuaucccuuuguuuaggaa

SEQ ID NO: 781660 - RNA, 20 nt, Artificial Sequence
  Synthetic
auguaguuggaaucacggaa

SEQ ID NO: 781661 - RNA, 20 nt, Artificial Sequence
  Synthetic
ucuacauggaaacagcggaa

SEQ ID NO: 781662 - RNA, 20 nt, Artificial Sequence
  Synthetic
aagaguguaggugggcggaa

SEQ ID NO: 781663 - RNA, 20 nt, Artificial Sequence
  Synthetic
acuaugcuaagaaaagggaa

SEQ ID NO: 781664 - RNA, 20 nt, Artificial Sequence
  Synthetic
aucugggaaggaaaagggaa

SEQ ID NO: 781665 - RNA, 20 nt, Artificial Sequence
  Synthetic
agagggagagggaaagggaa

SEQ ID NO: 781666 - RNA, 20 nt, Artificial Sequence
  Synthetic
uauuugucaaugaaagggaa

SEQ ID NO: 781667 - RNA, 20 nt, Artificial Sequence
  Synthetic
aaacaaguggugaaagggaa

SEQ ID NO: 781668 - RNA, 20 nt, Artificial Sequence
  Synthetic
uaaagaaguaauaaagggaa

SEQ ID NO: 781669 - RNA, 20 nt, Artificial Sequence
  Synthetic
aauguugccuuccaagggaa

SEQ ID NO: 781670 - RNA, 20 nt, Artificial Sequence
  Synthetic
ccagcaacccagcaagggaa

SEQ ID NO: 781671 - RNA, 20 nt, Artificial Sequence
  Synthetic
agcaucccaugucaagggaa

SEQ ID NO: 781672 - RNA, 20 nt, Artificial Sequence
  Synthetic
agagaggggagggaagggaa

SEQ ID NO: 781673 - RNA, 20 nt, Artificial Sequence
  Synthetic
uaugagauguuggaagggaa

SEQ ID NO: 781674 - RNA, 20 nt, Artificial Sequence
  Synthetic
augcacgugugugaagggaa

SEQ ID NO: 781675 - RNA, 20 nt, Artificial Sequence
  Synthetic
auguccuuuaaauaagggaa

SEQ ID NO: 781676 - RNA, 20 nt, Artificial Sequence
  Synthetic
aagaguuuuaaauaagggaa

SEQ ID NO: 781677 - RNA, 20 nt, Artificial Sequence
  Synthetic
acucucacccacacagggaa

SEQ ID NO: 781678 - RNA, 20 nt, Artificial Sequence
  Synthetic
aaguggaugugaccagggaa

SEQ ID NO: 781679 - RNA, 20 nt, Artificial Sequence
  Synthetic
ucacagccaauaccagggaa

SEQ ID NO: 781680 - RNA, 20 nt, Artificial Sequence
  Synthetic
ugaagaaugaaagcagggaa

SEQ ID NO: 781681 - RNA, 20 nt, Artificial Sequence
  Synthetic
aggggauauauagcagggaa

SEQ ID NO: 781682 - RNA, 20 nt, Artificial Sequence
  Synthetic
auuuugucucuggcagggaa

SEQ ID NO: 781683 - RNA, 20 nt, Artificial Sequence
  Synthetic
uguuucuuacauucagggaa

SEQ ID NO: 781684 - RNA, 20 nt, Artificial Sequence
  Synthetic
uagguucuagaaagagggaa

SEQ ID NO: 781685 - RNA, 20 nt, Artificial Sequence
  Synthetic
uuauaagcagcaagagggaa

SEQ ID NO: 781686 - RNA, 20 nt, Artificial Sequence
  Synthetic
cacccauaaggcagagggaa

SEQ ID NO: 781687 - RNA, 20 nt, Artificial Sequence
  Synthetic
ugugagcugcucagagggaa

SEQ ID NO: 781688 - RNA, 20 nt, Artificial Sequence
  Synthetic
acagggagagggagagggaa

SEQ ID NO: 781689 - RNA, 20 nt, Artificial Sequence
  Synthetic
uggaauaguuuuagagggaa

SEQ ID NO: 781690 - RNA, 20 nt, Artificial Sequence
  Synthetic
aagaaaaaauauauagggaa

SEQ ID NO: 781691 - RNA, 20 nt, Artificial Sequence
  Synthetic
ccuuaaugaucucuagggaa

SEQ ID NO: 781692 - RNA, 20 nt, Artificial Sequence
  Synthetic
aaagaaaguauucuagggaa

SEQ ID NO: 781693 - RNA, 20 nt, Artificial Sequence
  Synthetic
aaagucucaaaauuagggaa

SEQ ID NO: 781694 - RNA, 20 nt, Artificial Sequence
  Synthetic
cuagucauuuccuuagggaa

SEQ ID NO: 781695 - RNA, 20 nt, Artificial Sequence
  Synthetic
agauguccacaaaacgggaa

SEQ ID NO: 781696 - RNA, 20 nt, Artificial Sequence
  Synthetic
uuaaauaggguacacgggaa

SEQ ID NO: 781697 - RNA, 20 nt, Artificial Sequence
  Synthetic
cugggagaaagugacgggaa

SEQ ID NO: 781698 - RNA, 20 nt, Artificial Sequence
  Synthetic
aggaucaacagauacgggaa

SEQ ID NO: 781699 - RNA, 20 nt, Artificial Sequence
  Synthetic
ccucaucugagacccgggaa

SEQ ID NO: 781700 - RNA, 20 nt, Artificial Sequence
  Synthetic
uuuugguuuucccucgggaa

SEQ ID NO: 781701 - RNA, 20 nt, Artificial Sequence
  Synthetic
uaugacuggacaaaggggaa

SEQ ID NO: 781702 - RNA, 20 nt, Artificial Sequence
  Synthetic
agggacuaauagaaggggaa

SEQ ID NO: 781703 - RNA, 20 nt, Artificial Sequence
  Synthetic
caaguggagaggaaggggaa

SEQ ID NO: 781704 - RNA, 20 nt, Artificial Sequence
  Synthetic
agauaguggugccaggggaa

SEQ ID NO: 781705 - RNA, 20 nt, Artificial Sequence
  Synthetic
uagugcugcaugcaggggaa

SEQ ID NO: 781706 - RNA, 20 nt, Artificial Sequence
  Synthetic
uaaggauucacucaggggaa

SEQ ID NO: 781707 - RNA, 20 nt, Artificial Sequence
  Synthetic
accaucagaaacuaggggaa

SEQ ID NO: 781708 - RNA, 20 nt, Artificial Sequence
  Synthetic
caaaaacaagcaacggggaa

SEQ ID NO: 781709 - RNA, 20 nt, Artificial Sequence
  Synthetic
cuucaggggagaagggggaa

SEQ ID NO: 781710 - RNA, 20 nt, Artificial Sequence
  Synthetic
aaaaauaaagguagggggaa

SEQ ID NO: 781711 - RNA, 20 nt, Artificial Sequence
  Synthetic
auaaagaaggguagggggaa

SEQ ID NO: 781712 - RNA, 20 nt, Artificial Sequence
  Synthetic
aaggguagugguagggggaa

SEQ ID NO: 781713 - RNA, 20 nt, Artificial Sequence
  Synthetic
accccagccaauggggggaa

SEQ ID NO: 781714 - RNA, 20 nt, Artificial Sequence
  Synthetic
uuaugaaaguauggggggaa

SEQ ID NO: 781715 - RNA, 20 nt, Artificial Sequence
  Synthetic
cugcugugggguggggggaa

SEQ ID NO: 781716 - RNA, 20 nt, Artificial Sequence
  Synthetic
uggccugugaggugggggaa

SEQ ID NO: 781717 - RNA, 20 nt, Artificial Sequence
  Synthetic
acuguuguggggugggggaa

SEQ ID NO: 781718 - RNA, 20 nt, Artificial Sequence
  Synthetic
aaaaaaaaaaaaauggggaa

SEQ ID NO: 781719 - RNA, 20 nt, Artificial Sequence
  Synthetic
aaaaaacaagaaauggggaa

SEQ ID NO: 781720 - RNA, 20 nt, Artificial Sequence
  Synthetic
caaaaacaagaaauggggaa

SEQ ID NO: 781721 - RNA, 20 nt, Artificial Sequence
  Synthetic
ugguuaagagaaauggggaa

SEQ ID NO: 781722 - RNA, 20 nt, Artificial Sequence
  Synthetic
uuguaugugcauauggggaa

SEQ ID NO: 781723 - RNA, 20 nt, Artificial Sequence
  Synthetic
agaacaagaucccuggggaa

SEQ ID NO: 781724 - RNA, 20 nt, Artificial Sequence
  Synthetic
aaugagggcugccuggggaa

SEQ ID NO: 781725 - RNA, 20 nt, Artificial Sequence
  Synthetic
aauagaugagggcuggggaa

SEQ ID NO: 781726 - RNA, 20 nt, Artificial Sequence
  Synthetic
aucagacaacccuuggggaa

SEQ ID NO: 781727 - RNA, 20 nt, Artificial Sequence
  Synthetic
acacuuaggcauuuggggaa

SEQ ID NO: 781728 - RNA, 20 nt, Artificial Sequence
  Synthetic
cccuugcaaauuuuggggaa

SEQ ID NO: 781729 - RNA, 20 nt, Artificial Sequence
  Synthetic
ccucucucuguaaaugggaa

SEQ ID NO: 781730 - RNA, 20 nt, Artificial Sequence
  Synthetic
aagcccaaagucaaugggaa

SEQ ID NO: 781731 - RNA, 20 nt, Artificial Sequence
  Synthetic
aauuucugugguaaugggaa

SEQ ID NO: 781732 - RNA, 20 nt, Artificial Sequence
  Synthetic
uaaaaagaauagcaugggaa

SEQ ID NO: 781733 - RNA, 20 nt, Artificial Sequence
  Synthetic
ugguuaccugaggaugggaa

SEQ ID NO: 781734 - RNA, 20 nt, Artificial Sequence
  Synthetic
agugggcugacugaugggaa

SEQ ID NO: 781735 - RNA, 20 nt, Artificial Sequence
  Synthetic
aggaaugguggugaugggaa

SEQ ID NO: 781736 - RNA, 20 nt, Artificial Sequence
  Synthetic
aaugaugucaucuaugggaa

SEQ ID NO: 781737 - RNA, 20 nt, Artificial Sequence
  Synthetic
cucacugcccaguaugggaa

SEQ ID NO: 781738 - RNA, 20 nt, Artificial Sequence
  Synthetic
caagaauacacaacugggaa

SEQ ID NO: 781739 - RNA, 20 nt, Artificial Sequence
  Synthetic
uauuuccaggagacugggaa

SEQ ID NO: 781740 - RNA, 20 nt, Artificial Sequence
  Synthetic
agaauugcuacuccugggaa

SEQ ID NO: 781741 - RNA, 20 nt, Artificial Sequence
  Synthetic
ugguuaccugaugcugggaa

SEQ ID NO: 781742 - RNA, 20 nt, Artificial Sequence
  Synthetic
uaucuguacacugcugggaa

SEQ ID NO: 781743 - RNA, 20 nt, Artificial Sequence
  Synthetic
aaggccuccggaagugggaa

SEQ ID NO: 781744 - RNA, 20 nt, Artificial Sequence
  Synthetic
augugauagaacagugggaa

SEQ ID NO: 781745 - RNA, 20 nt, Artificial Sequence
  Synthetic
uugauuuuuaacagugggaa

SEQ ID NO: 781746 - RNA, 20 nt, Artificial Sequence
  Synthetic
aaaguggcucucagugggaa

SEQ ID NO: 781747 - RNA, 20 nt, Artificial Sequence
  Synthetic
ugguugagaaagagugggaa

SEQ ID NO: 781748 - RNA, 20 nt, Artificial Sequence
  Synthetic
uuauuuaggggaggugggaa

SEQ ID NO: 781749 - RNA, 20 nt, Artificial Sequence
  Synthetic
uucucacucuuaggugggaa

SEQ ID NO: 781750 - RNA, 20 nt, Artificial Sequence
  Synthetic
acaaacacuccuggugggaa

SEQ ID NO: 781751 - RNA, 20 nt, Artificial Sequence
  Synthetic
aaaugaagugagauugggaa

SEQ ID NO: 781752 - RNA, 20 nt, Artificial Sequence
  Synthetic
caagggcaaagccuugggaa

SEQ ID NO: 781753 - RNA, 20 nt, Artificial Sequence
  Synthetic
uuuaaaagcaugcuugggaa

SEQ ID NO: 781754 - RNA, 20 nt, Artificial Sequence
  Synthetic
ugguaauauuaaguugggaa

SEQ ID NO: 781755 - RNA, 20 nt, Artificial Sequence
  Synthetic
cacugaguugggguugggaa

SEQ ID NO: 781756 - RNA, 20 nt, Artificial Sequence
  Synthetic
uuuuaccauaaguuugggaa

SEQ ID NO: 781757 - RNA, 20 nt, Artificial Sequence
  Synthetic
uaaugugauuacaaauggaa

SEQ ID NO: 781758 - RNA, 20 nt, Artificial Sequence
  Synthetic
uuuugccuugagaaauggaa

SEQ ID NO: 781759 - RNA, 20 nt, Artificial Sequence
  Synthetic
cacaguuggaggaaauggaa

SEQ ID NO: 781760 - RNA, 20 nt, Artificial Sequence
  Synthetic
auaaggaugaugaaauggaa

SEQ ID NO: 781761 - RNA, 20 nt, Artificial Sequence
  Synthetic
caguguauuuugaaauggaa

SEQ ID NO: 781762 - RNA, 20 nt, Artificial Sequence
  Synthetic
ugcuaaugaagacaauggaa

SEQ ID NO: 781763 - RNA, 20 nt, Artificial Sequence
  Synthetic
cagaaacuaggggaauggaa

SEQ ID NO: 781764 - RNA, 20 nt, Artificial Sequence
  Synthetic
uuuuucuuuguugaauggaa

SEQ ID NO: 781765 - RNA, 20 nt, Artificial Sequence
  Synthetic
aacauuccauguuaauggaa

SEQ ID NO: 781766 - RNA, 20 nt, Artificial Sequence
  Synthetic
aggaaucacuaaacauggaa

SEQ ID NO: 781767 - RNA, 20 nt, Artificial Sequence
  Synthetic
aggaagcgcuaaacauggaa

SEQ ID NO: 781768 - RNA, 20 nt, Artificial Sequence
  Synthetic
aaagcuaagaggacauggaa

SEQ ID NO: 781769 - RNA, 20 nt, Artificial Sequence
  Synthetic
auguuugaacauacauggaa

SEQ ID NO: 781770 - RNA, 20 nt, Artificial Sequence
  Synthetic
uuugauacuucuccauggaa

SEQ ID NO: 781771 - RNA, 20 nt, Artificial Sequence
  Synthetic
acucacaagguagcauggaa

SEQ ID NO: 781772 - RNA, 20 nt, Artificial Sequence
  Synthetic
uacccucucaaggcauggaa

SEQ ID NO: 781773 - RNA, 20 nt, Artificial Sequence
  Synthetic
caugucauaugggcauggaa

SEQ ID NO: 781774 - RNA, 20 nt, Artificial Sequence
  Synthetic
uugcaggcucagagauggaa

SEQ ID NO: 781775 - RNA, 20 nt, Artificial Sequence
  Synthetic
cuuuuucucagaggauggaa

SEQ ID NO: 781776 - RNA, 20 nt, Artificial Sequence
  Synthetic
augaaauuacauggauggaa

SEQ ID NO: 781777 - RNA, 20 nt, Artificial Sequence
  Synthetic
aggaagcacuaaauauggaa

SEQ ID NO: 781778 - RNA, 20 nt, Artificial Sequence
  Synthetic
aaggaaauaugaauauggaa

SEQ ID NO: 781779 - RNA, 20 nt, Artificial Sequence
  Synthetic
aaucugggguuucuauggaa

SEQ ID NO: 781780 - RNA, 20 nt, Artificial Sequence
  Synthetic
aguucugccuaauuauggaa

SEQ ID NO: 781781 - RNA, 20 nt, Artificial Sequence
  Synthetic
aacauuccaugcuuauggaa

SEQ ID NO: 781782 - RNA, 20 nt, Artificial Sequence
  Synthetic
uuugcucugauuaacuggaa

SEQ ID NO: 781783 - RNA, 20 nt, Artificial Sequence
  Synthetic
uguguucugagauacuggaa

SEQ ID NO: 781784 - RNA, 20 nt, Artificial Sequence
  Synthetic
uuagauaaagugaccuggaa

SEQ ID NO: 781785 - RNA, 20 nt, Artificial Sequence
  Synthetic
auuuuuaaaugacccuggaa

SEQ ID NO: 781786 - RNA, 20 nt, Artificial Sequence
  Synthetic
aaccauucacuccccuggaa

SEQ ID NO: 781787 - RNA, 20 nt, Artificial Sequence
  Synthetic
ccaggaacuagggccuggaa

SEQ ID NO: 781788 - RNA, 20 nt, Artificial Sequence
  Synthetic
cuuugccauucuuccuggaa

SEQ ID NO: 781789 - RNA, 20 nt, Artificial Sequence
  Synthetic
uucuggggcucaagcuggaa

SEQ ID NO: 781790 - RNA, 20 nt, Artificial Sequence
  Synthetic
uucacaugcugaaucuggaa

SEQ ID NO: 781791 - RNA, 20 nt, Artificial Sequence
  Synthetic
ccaauuucucccaucuggaa

SEQ ID NO: 781792 - RNA, 20 nt, Artificial Sequence
  Synthetic
uuucuuaauggcaucuggaa

SEQ ID NO: 781793 - RNA, 20 nt, Artificial Sequence
  Synthetic
uuucuucauggcaucuggaa

SEQ ID NO: 781794 - RNA, 20 nt, Artificial Sequence
  Synthetic
uuuucaagugagaucuggaa

SEQ ID NO: 781795 - RNA, 20 nt, Artificial Sequence
  Synthetic
uucaaaaucuuccucuggaa

SEQ ID NO: 781796 - RNA, 20 nt, Artificial Sequence
  Synthetic
cugagggagguucucuggaa

SEQ ID NO: 781797 - RNA, 20 nt, Artificial Sequence
  Synthetic
cugauuaaguuggucuggaa

SEQ ID NO: 781798 - RNA, 20 nt, Artificial Sequence
  Synthetic
auugcuuucucauucuggaa

SEQ ID NO: 781799 - RNA, 20 nt, Artificial Sequence
  Synthetic
cacaaguucuccuucuggaa

SEQ ID NO: 781800 - RNA, 20 nt, Artificial Sequence
  Synthetic
aaacugaaaaucuucuggaa

SEQ ID NO: 781801 - RNA, 20 nt, Artificial Sequence
  Synthetic
uaaccuaaaauguucuggaa

SEQ ID NO: 781802 - RNA, 20 nt, Artificial Sequence
  Synthetic
acaggaauaagaaaguggaa

SEQ ID NO: 781803 - RNA, 20 nt, Artificial Sequence
  Synthetic
cuaugaggguagaaguggaa

SEQ ID NO: 781804 - RNA, 20 nt, Artificial Sequence
  Synthetic
agacucuuccuacaguggaa

SEQ ID NO: 781805 - RNA, 20 nt, Artificial Sequence
  Synthetic
agcaaaacaagccaguggaa

SEQ ID NO: 781806 - RNA, 20 nt, Artificial Sequence
  Synthetic
auauuugcagccuaguggaa

SEQ ID NO: 781807 - RNA, 20 nt, Artificial Sequence
  Synthetic
cuaaugaauauguaguggaa

SEQ ID NO: 781808 - RNA, 20 nt, Artificial Sequence
  Synthetic
aaagcuuccacaacguggaa

SEQ ID NO: 781809 - RNA, 20 nt, Artificial Sequence
  Synthetic
uggagaauaagaagguggaa

SEQ ID NO: 781810 - RNA, 20 nt, Artificial Sequence
  Synthetic
acuugucccagcagguggaa

SEQ ID NO: 781811 - RNA, 20 nt, Artificial Sequence
  Synthetic
ucggugaaaaaaauguggaa

SEQ ID NO: 781812 - RNA, 20 nt, Artificial Sequence
  Synthetic
cuuuaaguuaaaauguggaa

SEQ ID NO: 781813 - RNA, 20 nt, Artificial Sequence
  Synthetic
aauaugcauacacuguggaa

SEQ ID NO: 781814 - RNA, 20 nt, Artificial Sequence
  Synthetic
uaacaauauaaucuguggaa

SEQ ID NO: 781815 - RNA, 20 nt, Artificial Sequence
  Synthetic
cagcgacccucucuguggaa

SEQ ID NO: 781816 - RNA, 20 nt, Artificial Sequence
  Synthetic
ucggcuaggacaguguggaa

SEQ ID NO: 781817 - RNA, 20 nt, Artificial Sequence
  Synthetic
uacauaaauuuuguguggaa

SEQ ID NO: 781818 - RNA, 20 nt, Artificial Sequence
  Synthetic
uauacccauacauuguggaa

SEQ ID NO: 781819 - RNA, 20 nt, Artificial Sequence
  Synthetic
aacuuguggucauuguggaa

SEQ ID NO: 781820 - RNA, 20 nt, Artificial Sequence
  Synthetic
agaccuggggaaaauuggaa

SEQ ID NO: 781821 - RNA, 20 nt, Artificial Sequence
  Synthetic
uauuauauaacaaauuggaa

SEQ ID NO: 781822 - RNA, 20 nt, Artificial Sequence
  Synthetic
aauuaauucuacaauuggaa

SEQ ID NO: 781823 - RNA, 20 nt, Artificial Sequence
  Synthetic
uaauacauacaugauuggaa

SEQ ID NO: 781824 - RNA, 20 nt, Artificial Sequence
  Synthetic
uuagcagaauuauauuggaa

SEQ ID NO: 781825 - RNA, 20 nt, Artificial Sequence
  Synthetic
aguauggaaaacacuuggaa

SEQ ID NO: 781826 - RNA, 20 nt, Artificial Sequence
  Synthetic
uuuguugaucccacuuggaa

SEQ ID NO: 781827 - RNA, 20 nt, Artificial Sequence
  Synthetic
ugugguauaauagcuuggaa

SEQ ID NO: 781828 - RNA, 20 nt, Artificial Sequence
  Synthetic
ugggucuggcugucuuggaa

SEQ ID NO: 781829 - RNA, 20 nt, Artificial Sequence
  Synthetic
uuuugcugcuguucuuggaa

SEQ ID NO: 781830 - RNA, 20 nt, Artificial Sequence
  Synthetic
uuuccauuucuuucuuggaa

SEQ ID NO: 781831 - RNA, 20 nt, Artificial Sequence
  Synthetic
cacauucaaagagguuggaa

SEQ ID NO: 781832 - RNA, 20 nt, Artificial Sequence
  Synthetic
cacugggagccauguuggaa

SEQ ID NO: 781833 - RNA, 20 nt, Artificial Sequence
  Synthetic
agggauaugagauguuggaa

SEQ ID NO: 781834 - RNA, 20 nt, Artificial Sequence
  Synthetic
aaaauacaucaaauuuggaa

SEQ ID NO: 781835 - RNA, 20 nt, Artificial Sequence
  Synthetic
uggaaugaaugcauuuggaa

SEQ ID NO: 781836 - RNA, 20 nt, Artificial Sequence
  Synthetic
aaaaaaaaaacgcuuuggaa

SEQ ID NO: 781837 - RNA, 20 nt, Artificial Sequence
  Synthetic
cacauaucaaaguuuuggaa

SEQ ID NO: 781838 - RNA, 20 nt, Artificial Sequence
  Synthetic
aacgaauuuugguuuuggaa

SEQ ID NO: 781839 - RNA, 20 nt, Artificial Sequence
  Synthetic
aagaagaaagaaaaaaugaa

SEQ ID NO: 781840 - RNA, 20 nt, Artificial Sequence
  Synthetic
auacuugugggaaaaaugaa

SEQ ID NO: 781841 - RNA, 20 nt, Artificial Sequence
  Synthetic
agaaacacauacaaaaugaa

SEQ ID NO: 781842 - RNA, 20 nt, Artificial Sequence
  Synthetic
uaucccacuugcaaaaugaa

SEQ ID NO: 781843 - RNA, 20 nt, Artificial Sequence
  Synthetic
cuucuggaucucaaaaugaa

SEQ ID NO: 781844 - RNA, 20 nt, Artificial Sequence
  Synthetic
aaaucauggcagaaaaugaa

SEQ ID NO: 781845 - RNA, 20 nt, Artificial Sequence
  Synthetic
acuagacuugagaaaaugaa

SEQ ID NO: 781846 - RNA, 20 nt, Artificial Sequence
  Synthetic
aagaguccugggaaaaugaa

SEQ ID NO: 781847 - RNA, 20 nt, Artificial Sequence
  Synthetic
aaaauauuuauuaaaaugaa

SEQ ID NO: 781848 - RNA, 20 nt, Artificial Sequence
  Synthetic
uguuuguuuguuaaaaugaa

SEQ ID NO: 781849 - RNA, 20 nt, Artificial Sequence
  Synthetic
aggugaguaaaacaaaugaa

SEQ ID NO: 781850 - RNA, 20 nt, Artificial Sequence
  Synthetic
aguguccaucaacaaaugaa

SEQ ID NO: 781851 - RNA, 20 nt, Artificial Sequence
  Synthetic
ccauaaaaucuccaaaugaa

SEQ ID NO: 781852 - RNA, 20 nt, Artificial Sequence
  Synthetic
uccaugauguugcaaaugaa

SEQ ID NO: 781853 - RNA, 20 nt, Artificial Sequence
  Synthetic
agacaaagugaagaaaugaa

SEQ ID NO: 781854 - RNA, 20 nt, Artificial Sequence
  Synthetic
aacuuuagagcagaaaugaa

SEQ ID NO: 781855 - RNA, 20 nt, Artificial Sequence
  Synthetic
agaugcucugaugaaaugaa

SEQ ID NO: 781856 - RNA, 20 nt, Artificial Sequence
  Synthetic
uuggugcaguaugaaaugaa

SEQ ID NO: 781857 - RNA, 20 nt, Artificial Sequence
  Synthetic
aauguccaucaauaaaugaa

SEQ ID NO: 781858 - RNA, 20 nt, Artificial Sequence
  Synthetic
auucauuguuccuaaaugaa

SEQ ID NO: 781859 - RNA, 20 nt, Artificial Sequence
  Synthetic
ugacuaucugaaacaaugaa

SEQ ID NO: 781860 - RNA, 20 nt, Artificial Sequence
  Synthetic
cuuucugccuacacaaugaa

SEQ ID NO: 781861 - RNA, 20 nt, Artificial Sequence
  Synthetic
aaaucacugacuacaaugaa

SEQ ID NO: 781862 - RNA, 20 nt, Artificial Sequence
  Synthetic
aacugaugaucaccaaugaa

SEQ ID NO: 781863 - RNA, 20 nt, Artificial Sequence
  Synthetic
aguguccaucgaccaaugaa

SEQ ID NO: 781864 - RNA, 20 nt, Artificial Sequence
  Synthetic
uaaaaacuucucccaaugaa

SEQ ID NO: 781865 - RNA, 20 nt, Artificial Sequence
  Synthetic
uuuucaaaaauuccaaugaa

SEQ ID NO: 781866 - RNA, 20 nt, Artificial Sequence
  Synthetic
auaaacuuagaagcaaugaa

SEQ ID NO: 781867 - RNA, 20 nt, Artificial Sequence
  Synthetic
aacagaugacuggcaaugaa

SEQ ID NO: 781868 - RNA, 20 nt, Artificial Sequence
  Synthetic
aauaucuuuuacucaaugaa

SEQ ID NO: 781869 - RNA, 20 nt, Artificial Sequence
  Synthetic
uuauaauauuugucaaugaa

SEQ ID NO: 781870 - RNA, 20 nt, Artificial Sequence
  Synthetic
ucauaagaaggaagaaugaa

SEQ ID NO: 781871 - RNA, 20 nt, Artificial Sequence
  Synthetic
auauauccugaaggaaugaa

SEQ ID NO: 781872 - RNA, 20 nt, Artificial Sequence
  Synthetic
ucaaguccccuuggaaugaa

SEQ ID NO: 781873 - RNA, 20 nt, Artificial Sequence
  Synthetic
acuauguaguuuggaaugaa

SEQ ID NO: 781874 - RNA, 20 nt, Artificial Sequence
  Synthetic
aggaaugaagaaugaaugaa

SEQ ID NO: 781875 - RNA, 20 nt, Artificial Sequence
  Synthetic
caagacuccagcugaaugaa

SEQ ID NO: 781876 - RNA, 20 nt, Artificial Sequence
  Synthetic
uaaauuaacacgugaaugaa

SEQ ID NO: 781877 - RNA, 20 nt, Artificial Sequence
  Synthetic
agagaaaaagugauaaugaa

SEQ ID NO: 781878 - RNA, 20 nt, Artificial Sequence
  Synthetic
acagagcuaaauauaaugaa

SEQ ID NO: 781879 - RNA, 20 nt, Artificial Sequence
  Synthetic
cuacuaaaacauauaaugaa

SEQ ID NO: 781880 - RNA, 20 nt, Artificial Sequence
  Synthetic
uuggacaaauauauaaugaa

SEQ ID NO: 781881 - RNA, 20 nt, Artificial Sequence
  Synthetic
auaugaaagaaacuaaugaa

SEQ ID NO: 781882 - RNA, 20 nt, Artificial Sequence
  Synthetic
acauauuugaaaguaaugaa

SEQ ID NO: 781883 - RNA, 20 nt, Artificial Sequence
  Synthetic
ugguguauguaaaacaugaa

SEQ ID NO: 781884 - RNA, 20 nt, Artificial Sequence
  Synthetic
ugaagaaagagaaacaugaa

SEQ ID NO: 781885 - RNA, 20 nt, Artificial Sequence
  Synthetic
auggauugccuaaacaugaa

SEQ ID NO: 781886 - RNA, 20 nt, Artificial Sequence
  Synthetic
aauuagaaguacaacaugaa

SEQ ID NO: 781887 - RNA, 20 nt, Artificial Sequence
  Synthetic
uuucuauuucccaacaugaa

SEQ ID NO: 781888 - RNA, 20 nt, Artificial Sequence
  Synthetic
cuuauaaaguuuaacaugaa

SEQ ID NO: 781889 - RNA, 20 nt, Artificial Sequence
  Synthetic
uugaguguuuuuaacaugaa

SEQ ID NO: 781890 - RNA, 20 nt, Artificial Sequence
  Synthetic
augacuggagaagacaugaa

SEQ ID NO: 781891 - RNA, 20 nt, Artificial Sequence
  Synthetic
aauggagaugaagacaugaa

SEQ ID NO: 781892 - RNA, 20 nt, Artificial Sequence
  Synthetic
uuuuauuuuuaggacaugaa

SEQ ID NO: 781893 - RNA, 20 nt, Artificial Sequence
  Synthetic
cagugauacagauacaugaa

SEQ ID NO: 781894 - RNA, 20 nt, Artificial Sequence
  Synthetic
caauuuuccuuguacaugaa

SEQ ID NO: 781895 - RNA, 20 nt, Artificial Sequence
  Synthetic
caagucacaucuuacaugaa

SEQ ID NO: 781896 - RNA, 20 nt, Artificial Sequence
  Synthetic
ugccucuguuaaaccaugaa

SEQ ID NO: 781897 - RNA, 20 nt, Artificial Sequence
  Synthetic
ccuuugcccuucaccaugaa

SEQ ID NO: 781898 - RNA, 20 nt, Artificial Sequence
  Synthetic
cauacgguauuuaccaugaa

SEQ ID NO: 781899 - RNA, 20 nt, Artificial Sequence
  Synthetic
acacggagugagagcaugaa

SEQ ID NO: 781900 - RNA, 20 nt, Artificial Sequence
  Synthetic
uacaguuucuuuagcaugaa

SEQ ID NO: 781901 - RNA, 20 nt, Artificial Sequence
  Synthetic
ucgagaguuuuuagcaugaa

SEQ ID NO: 781902 - RNA, 20 nt, Artificial Sequence
  Synthetic
uugagaguuuuuagcaugaa

SEQ ID NO: 781903 - RNA, 20 nt, Artificial Sequence
  Synthetic
cacuugcacugcggcaugaa

SEQ ID NO: 781904 - RNA, 20 nt, Artificial Sequence
  Synthetic
uguugaacaaaaugcaugaa

SEQ ID NO: 781905 - RNA, 20 nt, Artificial Sequence
  Synthetic
uuugaaaauagaugcaugaa

SEQ ID NO: 781906 - RNA, 20 nt, Artificial Sequence
  Synthetic
uuugcaucuuugugcaugaa

SEQ ID NO: 781907 - RNA, 20 nt, Artificial Sequence
  Synthetic
uuuuguaaaguuugcaugaa

SEQ ID NO: 781908 - RNA, 20 nt, Artificial Sequence
  Synthetic
cauuuuaaauccaucaugaa

SEQ ID NO: 781909 - RNA, 20 nt, Artificial Sequence
  Synthetic
cucauaguuuuuaucaugaa

SEQ ID NO: 781910 - RNA, 20 nt, Artificial Sequence
  Synthetic
cacaauggaaagcucaugaa

SEQ ID NO: 781911 - RNA, 20 nt, Artificial Sequence
  Synthetic
ccaagcugaaaauucaugaa

SEQ ID NO: 781912 - RNA, 20 nt, Artificial Sequence
  Synthetic
agccugauacauuucaugaa

SEQ ID NO: 781913 - RNA, 20 nt, Artificial Sequence
  Synthetic
cagagccuaaccaagaugaa

SEQ ID NO: 781914 - RNA, 20 nt, Artificial Sequence
  Synthetic
ugcucuggaccuaagaugaa

SEQ ID NO: 781915 - RNA, 20 nt, Artificial Sequence
  Synthetic
aacacuaacuuuaagaugaa

SEQ ID NO: 781916 - RNA, 20 nt, Artificial Sequence
  Synthetic
cucagggaaaaagagaugaa

SEQ ID NO: 781917 - RNA, 20 nt, Artificial Sequence
  Synthetic
agcguccaucaagagaugaa

SEQ ID NO: 781918 - RNA, 20 nt, Artificial Sequence
  Synthetic
uaccugagcccagagaugaa

SEQ ID NO: 781919 - RNA, 20 nt, Artificial Sequence
  Synthetic
aaaguauccucagagaugaa

SEQ ID NO: 781920 - RNA, 20 nt, Artificial Sequence
  Synthetic
auacuccagucauagaugaa

SEQ ID NO: 781921 - RNA, 20 nt, Artificial Sequence
  Synthetic
aguguccaucaguagaugaa

SEQ ID NO: 781922 - RNA, 20 nt, Artificial Sequence
  Synthetic
aaauaccuaauguagaugaa

SEQ ID NO: 781923 - RNA, 20 nt, Artificial Sequence
  Synthetic
cauuuaguaaauuagaugaa

SEQ ID NO: 781924 - RNA, 20 nt, Artificial Sequence
  Synthetic
acuguuuucagaacgaugaa

SEQ ID NO: 781925 - RNA, 20 nt, Artificial Sequence
  Synthetic
augcuagagaacaggaugaa

SEQ ID NO: 781926 - RNA, 20 nt, Artificial Sequence
  Synthetic
auucucugcuggaggaugaa

SEQ ID NO: 781927 - RNA, 20 nt, Artificial Sequence
  Synthetic
ucaauguuuuggaggaugaa

SEQ ID NO: 781928 - RNA, 20 nt, Artificial Sequence
  Synthetic
uuuaaaauuuauaggaugaa

SEQ ID NO: 781929 - RNA, 20 nt, Artificial Sequence
  Synthetic
uucaauagguuugggaugaa

SEQ ID NO: 781930 - RNA, 20 nt, Artificial Sequence
  Synthetic
uucaguagguuugggaugaa

SEQ ID NO: 781931 - RNA, 20 nt, Artificial Sequence
  Synthetic
ugaauuaauggauggaugaa

SEQ ID NO: 781932 - RNA, 20 nt, Artificial Sequence
  Synthetic
uuucugcuuaaguggaugaa

SEQ ID NO: 781933 - RNA, 20 nt, Artificial Sequence
  Synthetic
aguuuccaucaguggaugaa

SEQ ID NO: 781934 - RNA, 20 nt, Artificial Sequence
  Synthetic
cacucuaaccuuuggaugaa

SEQ ID NO: 781935 - RNA, 20 nt, Artificial Sequence
  Synthetic
uuuuugguuguuaugaugaa

SEQ ID NO: 781936 - RNA, 20 nt, Artificial Sequence
  Synthetic
aauuauaaaaugcugaugaa

SEQ ID NO: 781937 - RNA, 20 nt, Artificial Sequence
  Synthetic
cuaccagguuugcugaugaa

SEQ ID NO: 781938 - RNA, 20 nt, Artificial Sequence
  Synthetic
uuugauuucagauugaugaa

SEQ ID NO: 781939 - RNA, 20 nt, Artificial Sequence
  Synthetic
aagaccacgcuauugaugaa

SEQ ID NO: 781940 - RNA, 20 nt, Artificial Sequence
  Synthetic
cuguucucuugcuugaugaa

SEQ ID NO: 781941 - RNA, 20 nt, Artificial Sequence
  Synthetic
aguaaguugugguugaugaa

SEQ ID NO: 781942 - RNA, 20 nt, Artificial Sequence
  Synthetic
augaaaugaguuuugaugaa

SEQ ID NO: 781943 - RNA, 20 nt, Artificial Sequence
  Synthetic
caagcuauuuaaaauaugaa

SEQ ID NO: 781944 - RNA, 20 nt, Artificial Sequence
  Synthetic
uugaaguuuacaaauaugaa

SEQ ID NO: 781945 - RNA, 20 nt, Artificial Sequence
  Synthetic
uggagaugggagaauaugaa

SEQ ID NO: 781946 - RNA, 20 nt, Artificial Sequence
  Synthetic
uuaaaacuucaacauaugaa

SEQ ID NO: 781947 - RNA, 20 nt, Artificial Sequence
  Synthetic
aaggcucaaucugauaugaa

SEQ ID NO: 781948 - RNA, 20 nt, Artificial Sequence
  Synthetic
cuagacaguccauauaugaa

SEQ ID NO: 781949 - RNA, 20 nt, Artificial Sequence
  Synthetic
cauuucccauuauauaugaa

SEQ ID NO: 781950 - RNA, 20 nt, Artificial Sequence
  Synthetic
uucagguauugguauaugaa

SEQ ID NO: 781951 - RNA, 20 nt, Artificial Sequence
  Synthetic
aucauuuuagauuauaugaa

SEQ ID NO: 781952 - RNA, 20 nt, Artificial Sequence
  Synthetic
ucaccauggguuuauaugaa

SEQ ID NO: 781953 - RNA, 20 nt, Artificial Sequence
  Synthetic
cacauuucaaagucuaugaa

SEQ ID NO: 781954 - RNA, 20 nt, Artificial Sequence
  Synthetic
aauaaaaguaccaguaugaa

SEQ ID NO: 781955 - RNA, 20 nt, Artificial Sequence
  Synthetic
uuaauaauagccaguaugaa

SEQ ID NO: 781956 - RNA, 20 nt, Artificial Sequence
  Synthetic
aaccauguagcuaguaugaa

SEQ ID NO: 781957 - RNA, 20 nt, Artificial Sequence
  Synthetic
auucuuuuugaacguaugaa

SEQ ID NO: 781958 - RNA, 20 nt, Artificial Sequence
  Synthetic
aaguauagaaagcguaugaa

SEQ ID NO: 781959 - RNA, 20 nt, Artificial Sequence
  Synthetic
acaaaaauggaggguaugaa

SEQ ID NO: 781960 - RNA, 20 nt, Artificial Sequence
  Synthetic
agguuggucaaguguaugaa

SEQ ID NO: 781961 - RNA, 20 nt, Artificial Sequence
  Synthetic
uuuauuaucagaauuaugaa

SEQ ID NO: 781962 - RNA, 20 nt, Artificial Sequence
  Synthetic
caccauuuaucaguuaugaa

SEQ ID NO: 781963 - RNA, 20 nt, Artificial Sequence
  Synthetic
uuaaccuauuaauuuaugaa

SEQ ID NO: 781964 - RNA, 20 nt, Artificial Sequence
  Synthetic
uacaauauauguuuuaugaa

SEQ ID NO: 781965 - RNA, 20 nt, Artificial Sequence
  Synthetic
agucaauuaaugaaacugaa

SEQ ID NO: 781966 - RNA, 20 nt, Artificial Sequence
  Synthetic
uaaggugaagguaaacugaa

SEQ ID NO: 781967 - RNA, 20 nt, Artificial Sequence
  Synthetic
ucuucuuucaaacaacugaa

SEQ ID NO: 781968 - RNA, 20 nt, Artificial Sequence
  Synthetic
cugccuguucaucaacugaa

SEQ ID NO: 781969 - RNA, 20 nt, Artificial Sequence
  Synthetic
uaaagauugugauaacugaa

SEQ ID NO: 781970 - RNA, 20 nt, Artificial Sequence
  Synthetic
uacaaaggagaguaacugaa

SEQ ID NO: 781971 - RNA, 20 nt, Artificial Sequence
  Synthetic
auggaaaagugguaacugaa

SEQ ID NO: 781972 - RNA, 20 nt, Artificial Sequence
  Synthetic
agccugaagguguaacugaa

SEQ ID NO: 781973 - RNA, 20 nt, Artificial Sequence
  Synthetic
acuuaaaagacuuaacugaa

SEQ ID NO: 781974 - RNA, 20 nt, Artificial Sequence
  Synthetic
ucaauaauuuccacacugaa

SEQ ID NO: 781975 - RNA, 20 nt, Artificial Sequence
  Synthetic
ugcaaugggaauccacugaa

SEQ ID NO: 781976 - RNA, 20 nt, Artificial Sequence
  Synthetic
aucagauguugggcacugaa

SEQ ID NO: 781977 - RNA, 20 nt, Artificial Sequence
  Synthetic
uggaguuucaaaucacugaa

SEQ ID NO: 781978 - RNA, 20 nt, Artificial Sequence
  Synthetic
acuuuccuauuuucacugaa

SEQ ID NO: 781979 - RNA, 20 nt, Artificial Sequence
  Synthetic
uauaauaaauuaagacugaa

SEQ ID NO: 781980 - RNA, 20 nt, Artificial Sequence
  Synthetic
acguuaagggcaggacugaa

SEQ ID NO: 781981 - RNA, 20 nt, Artificial Sequence
  Synthetic
augagcugggcaugacugaa

SEQ ID NO: 781982 - RNA, 20 nt, Artificial Sequence
  Synthetic
caaguuguauaaauacugaa

SEQ ID NO: 781983 - RNA, 20 nt, Artificial Sequence
  Synthetic
acagccaauaucauacugaa

SEQ ID NO: 781984 - RNA, 20 nt, Artificial Sequence
  Synthetic
acagccaguaucauacugaa

SEQ ID NO: 781985 - RNA, 20 nt, Artificial Sequence
  Synthetic
acagccauuaucauacugaa

SEQ ID NO: 781986 - RNA, 20 nt, Artificial Sequence
  Synthetic
caaaauaccaagcuacugaa

SEQ ID NO: 781987 - RNA, 20 nt, Artificial Sequence
  Synthetic
uuuucuaaacucuuacugaa

SEQ ID NO: 781988 - RNA, 20 nt, Artificial Sequence
  Synthetic
aaagaaauccaaaaccugaa

SEQ ID NO: 781989 - RNA, 20 nt, Artificial Sequence
  Synthetic
uaaagcucuggaaaccugaa

SEQ ID NO: 781990 - RNA, 20 nt, Artificial Sequence
  Synthetic
uagaucuagcauaaccugaa

SEQ ID NO: 781991 - RNA, 20 nt, Artificial Sequence
  Synthetic
uuucucuguuuggaccugaa

SEQ ID NO: 781992 - RNA, 20 nt, Artificial Sequence
  Synthetic
uaggaugaugacgcccugaa

SEQ ID NO: 781993 - RNA, 20 nt, Artificial Sequence
  Synthetic
cagcuuaagaacucccugaa

SEQ ID NO: 781994 - RNA, 20 nt, Artificial Sequence
  Synthetic
cagcucaggcagucccugaa

SEQ ID NO: 781995 - RNA, 20 nt, Artificial Sequence
  Synthetic
uaaccaccauugucccugaa

SEQ ID NO: 781996 - RNA, 20 nt, Artificial Sequence
  Synthetic
acagguuacaauucccugaa

SEQ ID NO: 781997 - RNA, 20 nt, Artificial Sequence
  Synthetic
uuuccuccucaaggccugaa

SEQ ID NO: 781998 - RNA, 20 nt, Artificial Sequence
  Synthetic
cuaaaauucauaggccugaa

SEQ ID NO: 781999 - RNA, 20 nt, Artificial Sequence
  Synthetic
uuuguuaauuccauccugaa

SEQ ID NO: 782000 - RNA, 20 nt, Artificial Sequence
  Synthetic
ccccguacuuguguccugaa

SEQ ID NO: 782001 - RNA, 20 nt, Artificial Sequence
  Synthetic
uuugaaaaguuuguccugaa

SEQ ID NO: 782002 - RNA, 20 nt, Artificial Sequence
  Synthetic
aagcucuucacaaagcugaa

SEQ ID NO: 782003 - RNA, 20 nt, Artificial Sequence
  Synthetic
acggacaggugaaagcugaa

SEQ ID NO: 782004 - RNA, 20 nt, Artificial Sequence
  Synthetic
cuucugagacucaagcugaa

SEQ ID NO: 782005 - RNA, 20 nt, Artificial Sequence
  Synthetic
cugugacaugggaagcugaa

SEQ ID NO: 782006 - RNA, 20 nt, Artificial Sequence
  Synthetic
cugacaguauuuaagcugaa

SEQ ID NO: 782007 - RNA, 20 nt, Artificial Sequence
  Synthetic
uuuaauacugcacagcugaa

SEQ ID NO: 782008 - RNA, 20 nt, Artificial Sequence
  Synthetic
uaaggagaauggcagcugaa

SEQ ID NO: 782009 - RNA, 20 nt, Artificial Sequence
  Synthetic
uuucaaauuucagagcugaa

SEQ ID NO: 782010 - RNA, 20 nt, Artificial Sequence
  Synthetic
aaaugauuaagaaggcugaa

SEQ ID NO: 782011 - RNA, 20 nt, Artificial Sequence
  Synthetic
uguuucaguuucuggcugaa

SEQ ID NO: 782012 - RNA, 20 nt, Artificial Sequence
  Synthetic
ugucuagggaaaaugcugaa

SEQ ID NO: 782013 - RNA, 20 nt, Artificial Sequence
  Synthetic
uguuauucugaaaugcugaa

SEQ ID NO: 782014 - RNA, 20 nt, Artificial Sequence
  Synthetic
uauuugcacugaaugcugaa

SEQ ID NO: 782015 - RNA, 20 nt, Artificial Sequence
  Synthetic
cugcacccucacaugcugaa

SEQ ID NO: 782016 - RNA, 20 nt, Artificial Sequence
  Synthetic
agagcugcugggaugcugaa

SEQ ID NO: 782017 - RNA, 20 nt, Artificial Sequence
  Synthetic
uuccccaaaccuaugcugaa

SEQ ID NO: 782018 - RNA, 20 nt, Artificial Sequence
  Synthetic
agacgguauagugugcugaa

SEQ ID NO: 782019 - RNA, 20 nt, Artificial Sequence
  Synthetic
cuucgauuacguuugcugaa

SEQ ID NO: 782020 - RNA, 20 nt, Artificial Sequence
  Synthetic
cagagagaagcaaaucugaa

SEQ ID NO: 782021 - RNA, 20 nt, Artificial Sequence
  Synthetic
uuuaagaccuauaaucugaa

SEQ ID NO: 782022 - RNA, 20 nt, Artificial Sequence
  Synthetic
aaaagcacuuuuaaucugaa

SEQ ID NO: 782023 - RNA, 20 nt, Artificial Sequence
  Synthetic
uuccuuugccuucaucugaa

SEQ ID NO: 782024 - RNA, 20 nt, Artificial Sequence
  Synthetic
caaacauuaagggaucugaa

SEQ ID NO: 782025 - RNA, 20 nt, Artificial Sequence
  Synthetic
cuggauuuugaaacucugaa

SEQ ID NO: 782026 - RNA, 20 nt, Artificial Sequence
  Synthetic
caggcaguggcaacucugaa

SEQ ID NO: 782027 - RNA, 20 nt, Artificial Sequence
  Synthetic
uagaaaauggagacucugaa

SEQ ID NO: 782028 - RNA, 20 nt, Artificial Sequence
  Synthetic
uaauaaaacuuuacucugaa

SEQ ID NO: 782029 - RNA, 20 nt, Artificial Sequence
  Synthetic
aauuaccaaaagagucugaa

SEQ ID NO: 782030 - RNA, 20 nt, Artificial Sequence
  Synthetic
aaauagauacagugucugaa

SEQ ID NO: 782031 - RNA, 20 nt, Artificial Sequence
  Synthetic
caacucaggacaauucugaa

SEQ ID NO: 782032 - RNA, 20 nt, Artificial Sequence
  Synthetic
aaacuauguaacauucugaa

SEQ ID NO: 782033 - RNA, 20 nt, Artificial Sequence
  Synthetic
uaaagcauauacauucugaa

SEQ ID NO: 782034 - RNA, 20 nt, Artificial Sequence
  Synthetic
aggucccaacucauucugaa

SEQ ID NO: 782035 - RNA, 20 nt, Artificial Sequence
  Synthetic
uauccaucucucauucugaa

SEQ ID NO: 782036 - RNA, 20 nt, Artificial Sequence
  Synthetic
ucucuugaggguauucugaa

SEQ ID NO: 782037 - RNA, 20 nt, Artificial Sequence
  Synthetic
cuuaaagaucagguucugaa

SEQ ID NO: 782038 - RNA, 20 nt, Artificial Sequence
  Synthetic
auggaauuuuaauuucugaa

SEQ ID NO: 782039 - RNA, 20 nt, Artificial Sequence
  Synthetic
auaucauugauguuucugaa

SEQ ID NO: 782040 - RNA, 20 nt, Artificial Sequence
  Synthetic
acagagggagauuuucugaa

SEQ ID NO: 782041 - RNA, 20 nt, Artificial Sequence
  Synthetic
cucuacauuuuuuuucugaa

SEQ ID NO: 782042 - RNA, 20 nt, Artificial Sequence
  Synthetic
acaaucacuacaaaagugaa

SEQ ID NO: 782043 - RNA, 20 nt, Artificial Sequence
  Synthetic
cuccguaacauaaaagugaa

SEQ ID NO: 782044 - RNA, 20 nt, Artificial Sequence
  Synthetic
aaugauaaauacaaagugaa

SEQ ID NO: 782045 - RNA, 20 nt, Artificial Sequence
  Synthetic
auauuagccaugaaagugaa

SEQ ID NO: 782046 - RNA, 20 nt, Artificial Sequence
  Synthetic
uacuggcuugugaaagugaa

SEQ ID NO: 782047 - RNA, 20 nt, Artificial Sequence
  Synthetic
ugcauaguguuacaagugaa

SEQ ID NO: 782048 - RNA, 20 nt, Artificial Sequence
  Synthetic
uuuguuacuucccaagugaa

SEQ ID NO: 782049 - RNA, 20 nt, Artificial Sequence
  Synthetic
ugaaaaagcuuucaagugaa

SEQ ID NO: 782050 - RNA, 20 nt, Artificial Sequence
  Synthetic
ucuugucauacugaagugaa

SEQ ID NO: 782051 - RNA, 20 nt, Artificial Sequence
  Synthetic
auauauauucgugaagugaa

SEQ ID NO: 782052 - RNA, 20 nt, Artificial Sequence
  Synthetic
uuaaugaauaaguaagugaa

SEQ ID NO: 782053 - RNA, 20 nt, Artificial Sequence
  Synthetic
aacguuagggucccagugaa

SEQ ID NO: 782054 - RNA, 20 nt, Artificial Sequence
  Synthetic
cuaguggugaaagcagugaa

SEQ ID NO: 782055 - RNA, 20 nt, Artificial Sequence
  Synthetic
auccauuagacagcagugaa

SEQ ID NO: 782056 - RNA, 20 nt, Artificial Sequence
  Synthetic
aagagugacucaucagugaa

SEQ ID NO: 782057 - RNA, 20 nt, Artificial Sequence
  Synthetic
agagagagagaaagagugaa

SEQ ID NO: 782058 - RNA, 20 nt, Artificial Sequence
  Synthetic
uccuaaagcucaagagugaa

SEQ ID NO: 782059 - RNA, 20 nt, Artificial Sequence
  Synthetic
ccccuuuccaggggagugaa

SEQ ID NO: 782060 - RNA, 20 nt, Artificial Sequence
  Synthetic
auuagcugaagaugagugaa

SEQ ID NO: 782061 - RNA, 20 nt, Artificial Sequence
  Synthetic
agaaaaccguguugagugaa

SEQ ID NO: 782062 - RNA, 20 nt, Artificial Sequence
  Synthetic
cuagaggaggauauagugaa

SEQ ID NO: 782063 - RNA, 20 nt, Artificial Sequence
  Synthetic
uaauuuuuguauauagugaa

SEQ ID NO: 782064 - RNA, 20 nt, Artificial Sequence
  Synthetic
caaagucuaaagcuagugaa

SEQ ID NO: 782065 - RNA, 20 nt, Artificial Sequence
  Synthetic
auaaaucauuuauuagugaa

SEQ ID NO: 782066 - RNA, 20 nt, Artificial Sequence
  Synthetic
aaggaaggaaaauacgugaa

SEQ ID NO: 782067 - RNA, 20 nt, Artificial Sequence
  Synthetic
aaauuacuucaucucgugaa

SEQ ID NO: 782068 - RNA, 20 nt, Artificial Sequence
  Synthetic
cuuugggaggccaaggugaa

SEQ ID NO: 782069 - RNA, 20 nt, Artificial Sequence
  Synthetic
caaucauggcagaaggugaa

SEQ ID NO: 782070 - RNA, 20 nt, Artificial Sequence
  Synthetic
caaucauaguagaaggugaa

SEQ ID NO: 782071 - RNA, 20 nt, Artificial Sequence
  Synthetic
caaucaugguggaaggugaa

SEQ ID NO: 782072 - RNA, 20 nt, Artificial Sequence
  Synthetic
cuaaaaccuaguaaggugaa

SEQ ID NO: 782073 - RNA, 20 nt, Artificial Sequence
  Synthetic
uucaaaugccagcaggugaa

SEQ ID NO: 782074 - RNA, 20 nt, Artificial Sequence
  Synthetic
acaaaucuccagcaggugaa

SEQ ID NO: 782075 - RNA, 20 nt, Artificial Sequence
  Synthetic
cuuugggaggccgaggugaa

SEQ ID NO: 782076 - RNA, 20 nt, Artificial Sequence
  Synthetic
caaggcuuugauagggugaa

SEQ ID NO: 782077 - RNA, 20 nt, Artificial Sequence
  Synthetic
caggcacacagaggggugaa

SEQ ID NO: 782078 - RNA, 20 nt, Artificial Sequence
  Synthetic
agguuucccuacggggugaa

SEQ ID NO: 782079 - RNA, 20 nt, Artificial Sequence
  Synthetic
cuucuuccauucauggugaa

SEQ ID NO: 782080 - RNA, 20 nt, Artificial Sequence
  Synthetic
auugaacacuugcuggugaa

SEQ ID NO: 782081 - RNA, 20 nt, Artificial Sequence
  Synthetic
caguauaacauucuggugaa

SEQ ID NO: 782082 - RNA, 20 nt, Artificial Sequence
  Synthetic
aguuugaaacaaguggugaa

SEQ ID NO: 782083 - RNA, 20 nt, Artificial Sequence
  Synthetic
aaugguauaauauuggugaa

SEQ ID NO: 782084 - RNA, 20 nt, Artificial Sequence
  Synthetic
caauccaucagcuuggugaa

SEQ ID NO: 782085 - RNA, 20 nt, Artificial Sequence
  Synthetic
uuaauucauauguuggugaa

SEQ ID NO: 782086 - RNA, 20 nt, Artificial Sequence
  Synthetic
uaucuccacucuuuggugaa

SEQ ID NO: 782087 - RNA, 20 nt, Artificial Sequence
  Synthetic
aguuuuguaaguuuggugaa

SEQ ID NO: 782088 - RNA, 20 nt, Artificial Sequence
  Synthetic
uccaaaauucagaaugugaa

SEQ ID NO: 782089 - RNA, 20 nt, Artificial Sequence
  Synthetic
aacaugauucauaaugugaa

SEQ ID NO: 782090 - RNA, 20 nt, Artificial Sequence
  Synthetic
uuuuguaaaauuaaugugaa

SEQ ID NO: 782091 - RNA, 20 nt, Artificial Sequence
  Synthetic
aaauguuaaacggaugugaa

SEQ ID NO: 782092 - RNA, 20 nt, Artificial Sequence
  Synthetic
caacuugcaagggaugugaa

SEQ ID NO: 782093 - RNA, 20 nt, Artificial Sequence
  Synthetic
cuuuaccucauggaugugaa

SEQ ID NO: 782094 - RNA, 20 nt, Artificial Sequence
  Synthetic
uuucuuuuccuggaugugaa

SEQ ID NO: 782095 - RNA, 20 nt, Artificial Sequence
  Synthetic
cauacaacucaugaugugaa

SEQ ID NO: 782096 - RNA, 20 nt, Artificial Sequence
  Synthetic
aagugguguguguaugugaa

SEQ ID NO: 782097 - RNA, 20 nt, Artificial Sequence
  Synthetic
cuaaagagugugacugugaa

SEQ ID NO: 782098 - RNA, 20 nt, Artificial Sequence
  Synthetic
cuuuuugagauuacugugaa

SEQ ID NO: 782099 - RNA, 20 nt, Artificial Sequence
  Synthetic
ucaagaaguuuuacugugaa

SEQ ID NO: 782100 - RNA, 20 nt, Artificial Sequence
  Synthetic
ugguuaccagaggcugugaa

SEQ ID NO: 782101 - RNA, 20 nt, Artificial Sequence
  Synthetic
ccuauaugcacgugugugaa

SEQ ID NO: 782102 - RNA, 20 nt, Artificial Sequence
  Synthetic
cucuuugaagcaauugugaa

SEQ ID NO: 782103 - RNA, 20 nt, Artificial Sequence
  Synthetic
aaaugcagaaccauugugaa

SEQ ID NO: 782104 - RNA, 20 nt, Artificial Sequence
  Synthetic
aaauaaaauaagauugugaa

SEQ ID NO: 782105 - RNA, 20 nt, Artificial Sequence
  Synthetic
aggagggccuggauugugaa

SEQ ID NO: 782106 - RNA, 20 nt, Artificial Sequence
  Synthetic
cacgccuuugcuauugugaa

SEQ ID NO: 782107 - RNA, 20 nt, Artificial Sequence
  Synthetic
uuuuccuaauauuuugugaa

SEQ ID NO: 782108 - RNA, 20 nt, Artificial Sequence
  Synthetic
augucuauuagcaaauugaa

SEQ ID NO: 782109 - RNA, 20 nt, Artificial Sequence
  Synthetic
aaucacugagcauaauugaa

SEQ ID NO: 782110 - RNA, 20 nt, Artificial Sequence
  Synthetic
agaaaugcauacuaauugaa

SEQ ID NO: 782111 - RNA, 20 nt, Artificial Sequence
  Synthetic
uuaaugguuuacacauugaa

SEQ ID NO: 782112 - RNA, 20 nt, Artificial Sequence
  Synthetic
acuguaugcauuccauugaa

SEQ ID NO: 782113 - RNA, 20 nt, Artificial Sequence
  Synthetic
auggucuuuguuucauugaa

SEQ ID NO: 782114 - RNA, 20 nt, Artificial Sequence
  Synthetic
uaguugcagcaaagauugaa

SEQ ID NO: 782115 - RNA, 20 nt, Artificial Sequence
  Synthetic
cacuuuuacgucagauugaa

SEQ ID NO: 782116 - RNA, 20 nt, Artificial Sequence
  Synthetic
agaugggaagagggauugaa

SEQ ID NO: 782117 - RNA, 20 nt, Artificial Sequence
  Synthetic
aauuuuucaguuggauugaa

SEQ ID NO: 782118 - RNA, 20 nt, Artificial Sequence
  Synthetic
cucaauauaaauauauugaa

SEQ ID NO: 782119 - RNA, 20 nt, Artificial Sequence
  Synthetic
ccuaguugguggguauugaa

SEQ ID NO: 782120 - RNA, 20 nt, Artificial Sequence
  Synthetic
auuagaaacugauuauugaa

SEQ ID NO: 782121 - RNA, 20 nt, Artificial Sequence
  Synthetic
aauaacuaucauuuauugaa

SEQ ID NO: 782122 - RNA, 20 nt, Artificial Sequence
  Synthetic
caccaacaacuaaacuugaa

SEQ ID NO: 782123 - RNA, 20 nt, Artificial Sequence
  Synthetic
cucuuuugcagcaacuugaa

SEQ ID NO: 782124 - RNA, 20 nt, Artificial Sequence
  Synthetic
uuccaugcccuuaacuugaa

SEQ ID NO: 782125 - RNA, 20 nt, Artificial Sequence
  Synthetic
ugccagcagagacacuugaa

SEQ ID NO: 782126 - RNA, 20 nt, Artificial Sequence
  Synthetic
aucuauuuucaccacuugaa

SEQ ID NO: 782127 - RNA, 20 nt, Artificial Sequence
  Synthetic
acuuucuagaaugacuugaa

SEQ ID NO: 782128 - RNA, 20 nt, Artificial Sequence
  Synthetic
aaacauucuaauuacuugaa

SEQ ID NO: 782129 - RNA, 20 nt, Artificial Sequence
  Synthetic
aagcuguuuuguuacuugaa

SEQ ID NO: 782130 - RNA, 20 nt, Artificial Sequence
  Synthetic
acagcuugaauaaccuugaa

SEQ ID NO: 782131 - RNA, 20 nt, Artificial Sequence
  Synthetic
cacacuuuaguaaccuugaa

SEQ ID NO: 782132 - RNA, 20 nt, Artificial Sequence
  Synthetic
uaguucauuuucgccuugaa

SEQ ID NO: 782133 - RNA, 20 nt, Artificial Sequence
  Synthetic
uacuauaugagcuccuugaa

SEQ ID NO: 782134 - RNA, 20 nt, Artificial Sequence
  Synthetic
caucuccagaucuccuugaa

SEQ ID NO: 782135 - RNA, 20 nt, Artificial Sequence
  Synthetic
uuuggaauagauuccuugaa

SEQ ID NO: 782136 - RNA, 20 nt, Artificial Sequence
  Synthetic
cuuuauuuuucaagcuugaa

SEQ ID NO: 782137 - RNA, 20 nt, Artificial Sequence
  Synthetic
acaaagcacaaaugcuugaa

SEQ ID NO: 782138 - RNA, 20 nt, Artificial Sequence
  Synthetic
acaaaggagaaaugcuugaa

SEQ ID NO: 782139 - RNA, 20 nt, Artificial Sequence
  Synthetic
aagucacagugaugcuugaa

SEQ ID NO: 782140 - RNA, 20 nt, Artificial Sequence
  Synthetic
ugcaaaucaaacaucuugaa

SEQ ID NO: 782141 - RNA, 20 nt, Artificial Sequence
  Synthetic
acuuggcugugucucuugaa

SEQ ID NO: 782142 - RNA, 20 nt, Artificial Sequence
  Synthetic
uaauugcaaacugucuugaa

SEQ ID NO: 782143 - RNA, 20 nt, Artificial Sequence
  Synthetic
uuugugaauacauucuugaa

SEQ ID NO: 782144 - RNA, 20 nt, Artificial Sequence
  Synthetic
cauaaaauuuguuucuugaa

SEQ ID NO: 782145 - RNA, 20 nt, Artificial Sequence
  Synthetic
agaagauaaugaaaguugaa

SEQ ID NO: 782146 - RNA, 20 nt, Artificial Sequence
  Synthetic
uucgugagcauaaaguugaa

SEQ ID NO: 782147 - RNA, 20 nt, Artificial Sequence
  Synthetic
aguagcauuuuggaguugaa

SEQ ID NO: 782148 - RNA, 20 nt, Artificial Sequence
  Synthetic
cuaaacaaaaaaccguugaa

SEQ ID NO: 782149 - RNA, 20 nt, Artificial Sequence
  Synthetic
uacauuuuuuaaucguugaa

SEQ ID NO: 782150 - RNA, 20 nt, Artificial Sequence
  Synthetic
uauaaaaacacaagguugaa

SEQ ID NO: 782151 - RNA, 20 nt, Artificial Sequence
  Synthetic
aauggcauugcuggguugaa

SEQ ID NO: 782152 - RNA, 20 nt, Artificial Sequence
  Synthetic
aaugagauugcuggguugaa

SEQ ID NO: 782153 - RNA, 20 nt, Artificial Sequence
  Synthetic
uuuuuaaaaaaaugguugaa

SEQ ID NO: 782154 - RNA, 20 nt, Artificial Sequence
  Synthetic
ucaacuaggagcugguugaa

SEQ ID NO: 782155 - RNA, 20 nt, Artificial Sequence
  Synthetic
aacuaucuggaaauguugaa

SEQ ID NO: 782156 - RNA, 20 nt, Artificial Sequence
  Synthetic
agauuucaucccauguugaa

SEQ ID NO: 782157 - RNA, 20 nt, Artificial Sequence
  Synthetic
aggccauccaggauguugaa

SEQ ID NO: 782158 - RNA, 20 nt, Artificial Sequence
  Synthetic
ucagaguaguaacuguugaa

SEQ ID NO: 782159 - RNA, 20 nt, Artificial Sequence
  Synthetic
cuuccauauuuucuguugaa

SEQ ID NO: 782160 - RNA, 20 nt, Artificial Sequence
  Synthetic
cuugagcugcauguguugaa

SEQ ID NO: 782161 - RNA, 20 nt, Artificial Sequence
  Synthetic
agcuuguagucauuguugaa

SEQ ID NO: 782162 - RNA, 20 nt, Artificial Sequence
  Synthetic
cuuccuagagacuuguugaa

SEQ ID NO: 782163 - RNA, 20 nt, Artificial Sequence
  Synthetic
ucugaaagaucuuuguugaa

SEQ ID NO: 782164 - RNA, 20 nt, Artificial Sequence
  Synthetic
aucuauuuuucuuuguugaa

SEQ ID NO: 782165 - RNA, 20 nt, Artificial Sequence
  Synthetic
aaaauagguuaaaauuugaa

SEQ ID NO: 782166 - RNA, 20 nt, Artificial Sequence
  Synthetic
aauacaucucuaaauuugaa

SEQ ID NO: 782167 - RNA, 20 nt, Artificial Sequence
  Synthetic
uuucuuuuugaauauuugaa

SEQ ID NO: 782168 - RNA, 20 nt, Artificial Sequence
  Synthetic
augacccaaauuuauuugaa

SEQ ID NO: 782169 - RNA, 20 nt, Artificial Sequence
  Synthetic
ucaaacacauuuuauuugaa

SEQ ID NO: 782170 - RNA, 20 nt, Artificial Sequence
  Synthetic
ugucaccaacuuacuuugaa

SEQ ID NO: 782171 - RNA, 20 nt, Artificial Sequence
  Synthetic
acgaguucauguccuuugaa

SEQ ID NO: 782172 - RNA, 20 nt, Artificial Sequence
  Synthetic
aguuguuuauguccuuugaa

SEQ ID NO: 782173 - RNA, 20 nt, Artificial Sequence
  Synthetic
cacacaacuacugcuuugaa

SEQ ID NO: 782174 - RNA, 20 nt, Artificial Sequence
  Synthetic
aacaagagucuuucuuugaa

SEQ ID NO: 782175 - RNA, 20 nt, Artificial Sequence
  Synthetic
cacaaaguguuuucuuugaa

SEQ ID NO: 782176 - RNA, 20 nt, Artificial Sequence
  Synthetic
agaagccuuuuuucuuugaa

SEQ ID NO: 782177 - RNA, 20 nt, Artificial Sequence
  Synthetic
ucaguugauaaaaguuugaa

SEQ ID NO: 782178 - RNA, 20 nt, Artificial Sequence
  Synthetic
caaagcaggacaaguuugaa

SEQ ID NO: 782179 - RNA, 20 nt, Artificial Sequence
  Synthetic
uaguaaauacuaaguuugaa

SEQ ID NO: 782180 - RNA, 20 nt, Artificial Sequence
  Synthetic
uuaauaaaauagaguuugaa

SEQ ID NO: 782181 - RNA, 20 nt, Artificial Sequence
  Synthetic
acagucccaaggaguuugaa

SEQ ID NO: 782182 - RNA, 20 nt, Artificial Sequence
  Synthetic
cucucacuaauaauuuugaa

SEQ ID NO: 782183 - RNA, 20 nt, Artificial Sequence
  Synthetic
uuauccaaaaauauuuugaa

SEQ ID NO: 782184 - RNA, 20 nt, Artificial Sequence
  Synthetic
auaucuaucggucuuuugaa

SEQ ID NO: 782185 - RNA, 20 nt, Artificial Sequence
  Synthetic
aucuuagccauucuuuugaa

SEQ ID NO: 782186 - RNA, 20 nt, Artificial Sequence
  Synthetic
agacucaggauucuuuugaa

SEQ ID NO: 782187 - RNA, 20 nt, Artificial Sequence
  Synthetic
aguuauuggaggguuuugaa

SEQ ID NO: 782188 - RNA, 20 nt, Artificial Sequence
  Synthetic
uaaaguuuaccuguuuugaa

SEQ ID NO: 782189 - RNA, 20 nt, Artificial Sequence
  Synthetic
uuucuuccuccuguuuugaa

SEQ ID NO: 782190 - RNA, 20 nt, Artificial Sequence
  Synthetic
cacguuuguagauuuuugaa

SEQ ID NO: 782191 - RNA, 20 nt, Artificial Sequence
  Synthetic
uggaaaauguacuuuuugaa

SEQ ID NO: 782192 - RNA, 20 nt, Artificial Sequence
  Synthetic
aauuggcuaugcuuuuugaa

SEQ ID NO: 782193 - RNA, 20 nt, Artificial Sequence
  Synthetic
aaccuauugauguuuuugaa

SEQ ID NO: 782194 - RNA, 20 nt, Artificial Sequence
  Synthetic
uuucaaagaguguuuuugaa

SEQ ID NO: 782195 - RNA, 20 nt, Artificial Sequence
  Synthetic
ccuucauugacuuuuuugaa

SEQ ID NO: 782196 - RNA, 20 nt, Artificial Sequence
  Synthetic
ccaggagcugguuuuuugaa

SEQ ID NO: 782197 - RNA, 20 nt, Artificial Sequence
  Synthetic
ucuaaaugugcaaaaaauaa

SEQ ID NO: 782198 - RNA, 20 nt, Artificial Sequence
  Synthetic
uaucauagucuaaaaaauaa

SEQ ID NO: 782199 - RNA, 20 nt, Artificial Sequence
  Synthetic
ugcauuaauuuaaaaaauaa

SEQ ID NO: 782200 - RNA, 20 nt, Artificial Sequence
  Synthetic
cuuuuacuuuucaaaaauaa

SEQ ID NO: 782201 - RNA, 20 nt, Artificial Sequence
  Synthetic
agcauaagaaagaaaaauaa

SEQ ID NO: 782202 - RNA, 20 nt, Artificial Sequence
  Synthetic
ucuagccaugagaaaaauaa

SEQ ID NO: 782203 - RNA, 20 nt, Artificial Sequence
  Synthetic
aaucguuucaauaaaaauaa

SEQ ID NO: 782204 - RNA, 20 nt, Artificial Sequence
  Synthetic
uggguaguuaauaaaaauaa

SEQ ID NO: 782205 - RNA, 20 nt, Artificial Sequence
  Synthetic
auggugcauuaacaaaauaa

SEQ ID NO: 782206 - RNA, 20 nt, Artificial Sequence
  Synthetic
uauaaaguuuuccaaaauaa

SEQ ID NO: 782207 - RNA, 20 nt, Artificial Sequence
  Synthetic
cacacauaggcucaaaauaa

SEQ ID NO: 782208 - RNA, 20 nt, Artificial Sequence
  Synthetic
ucguguguguuucaaaauaa

SEQ ID NO: 782209 - RNA, 20 nt, Artificial Sequence
  Synthetic
cuacuuuucuaagaaaauaa

SEQ ID NO: 782210 - RNA, 20 nt, Artificial Sequence
  Synthetic
ccauguaagacagaaaauaa

SEQ ID NO: 782211 - RNA, 20 nt, Artificial Sequence
  Synthetic
cuugauggaagagaaaauaa

SEQ ID NO: 782212 - RNA, 20 nt, Artificial Sequence
  Synthetic
cagagaugaaaggaaaauaa

SEQ ID NO: 782213 - RNA, 20 nt, Artificial Sequence
  Synthetic
agagagcgauaugaaaauaa

SEQ ID NO: 782214 - RNA, 20 nt, Artificial Sequence
  Synthetic
ugaaggauaacugaaaauaa

SEQ ID NO: 782215 - RNA, 20 nt, Artificial Sequence
  Synthetic
acaucuuguucugaaaauaa

SEQ ID NO: 782216 - RNA, 20 nt, Artificial Sequence
  Synthetic
aggcaacaaugugaaaauaa

SEQ ID NO: 782217 - RNA, 20 nt, Artificial Sequence
  Synthetic
uaaaaaaaaaaauaaaauaa

SEQ ID NO: 782218 - RNA, 20 nt, Artificial Sequence
  Synthetic
agaugguaaaaauaaaauaa

SEQ ID NO: 782219 - RNA, 20 nt, Artificial Sequence
  Synthetic
aauaauauuucauaaaauaa

SEQ ID NO: 782220 - RNA, 20 nt, Artificial Sequence
  Synthetic
ugcuaggcuugauaaaauaa

SEQ ID NO: 782221 - RNA, 20 nt, Artificial Sequence
  Synthetic
caauaguauugcuaaaauaa

SEQ ID NO: 782222 - RNA, 20 nt, Artificial Sequence
  Synthetic
acaaccagccaguaaaauaa

SEQ ID NO: 782223 - RNA, 20 nt, Artificial Sequence
  Synthetic
uagaaucugcauuaaaauaa

SEQ ID NO: 782224 - RNA, 20 nt, Artificial Sequence
  Synthetic
aucuuuuuguuuuaaaauaa

SEQ ID NO: 782225 - RNA, 20 nt, Artificial Sequence
  Synthetic
uggaacauuuaaacaaauaa

SEQ ID NO: 782226 - RNA, 20 nt, Artificial Sequence
  Synthetic
cauuaucaaccaacaaauaa

SEQ ID NO: 782227 - RNA, 20 nt, Artificial Sequence
  Synthetic
uauucauugagaacaaauaa

SEQ ID NO: 782228 - RNA, 20 nt, Artificial Sequence
  Synthetic
uccuuaaggaauacaaauaa

SEQ ID NO: 782229 - RNA, 20 nt, Artificial Sequence
  Synthetic
agacucaugaauacaaauaa

SEQ ID NO: 782230 - RNA, 20 nt, Artificial Sequence
  Synthetic
cuggaauucuuuacaaauaa

SEQ ID NO: 782231 - RNA, 20 nt, Artificial Sequence
  Synthetic
uaaagaaaacauccaaauaa

SEQ ID NO: 782232 - RNA, 20 nt, Artificial Sequence
  Synthetic
uuucauuagguuccaaauaa

SEQ ID NO: 782233 - RNA, 20 nt, Artificial Sequence
  Synthetic
uuuaacuugagagcaaauaa

SEQ ID NO: 782234 - RNA, 20 nt, Artificial Sequence
  Synthetic
uuggaggauagagcaaauaa

SEQ ID NO: 782235 - RNA, 20 nt, Artificial Sequence
  Synthetic
ugagguccucuggcaaauaa

SEQ ID NO: 782236 - RNA, 20 nt, Artificial Sequence
  Synthetic
aauacuuuucccucaaauaa

SEQ ID NO: 782237 - RNA, 20 nt, Artificial Sequence
  Synthetic
caggcaggaaaaagaaauaa

SEQ ID NO: 782238 - RNA, 20 nt, Artificial Sequence
  Synthetic
caggcaagggaaagaaauaa

SEQ ID NO: 782239 - RNA, 20 nt, Artificial Sequence
  Synthetic
cuauauuacuaaagaaauaa

SEQ ID NO: 782240 - RNA, 20 nt, Artificial Sequence
  Synthetic
aaaauuauuugaagaaauaa

SEQ ID NO: 782241 - RNA, 20 nt, Artificial Sequence
  Synthetic
auaauucaaaugagaaauaa

SEQ ID NO: 782242 - RNA, 20 nt, Artificial Sequence
  Synthetic
agugaaguuaugagaaauaa

SEQ ID NO: 782243 - RNA, 20 nt, Artificial Sequence
  Synthetic
uccagaacggugagaaauaa

SEQ ID NO: 782244 - RNA, 20 nt, Artificial Sequence
  Synthetic
caggcaggagaaggaaauaa

SEQ ID NO: 782245 - RNA, 20 nt, Artificial Sequence
  Synthetic
aagcauaaggaaggaaauaa

SEQ ID NO: 782246 - RNA, 20 nt, Artificial Sequence
  Synthetic
uacacacagacuggaaauaa

SEQ ID NO: 782247 - RNA, 20 nt, Artificial Sequence
  Synthetic
ccgagaggggcuggaaauaa

SEQ ID NO: 782248 - RNA, 20 nt, Artificial Sequence
  Synthetic
acaguucuaaguggaaauaa

SEQ ID NO: 782249 - RNA, 20 nt, Artificial Sequence
  Synthetic
ucugcgcuccuuggaaauaa

SEQ ID NO: 782250 - RNA, 20 nt, Artificial Sequence
  Synthetic
uauuucuagguaugaaauaa

SEQ ID NO: 782251 - RNA, 20 nt, Artificial Sequence
  Synthetic
cccauguuugccugaaauaa

SEQ ID NO: 782252 - RNA, 20 nt, Artificial Sequence
  Synthetic
aauaaugacuggugaaauaa

SEQ ID NO: 782253 - RNA, 20 nt, Artificial Sequence
  Synthetic
agcucaacaucaauaaauaa

SEQ ID NO: 782254 - RNA, 20 nt, Artificial Sequence
  Synthetic
agagacacaucaauaaauaa

SEQ ID NO: 782255 - RNA, 20 nt, Artificial Sequence
  Synthetic
aauaucuacugaauaaauaa

SEQ ID NO: 782256 - RNA, 20 nt, Artificial Sequence
  Synthetic
cacagacaauaccuaaauaa

SEQ ID NO: 782257 - RNA, 20 nt, Artificial Sequence
  Synthetic
agaggacuggggcuaaauaa

SEQ ID NO: 782258 - RNA, 20 nt, Artificial Sequence
  Synthetic
agcuaguaagugcuaaauaa

SEQ ID NO: 782259 - RNA, 20 nt, Artificial Sequence
  Synthetic
uagucucauuugguaaauaa

SEQ ID NO: 782260 - RNA, 20 nt, Artificial Sequence
  Synthetic
cauucucaguauguaaauaa

SEQ ID NO: 782261 - RNA, 20 nt, Artificial Sequence
  Synthetic
caucagaaauuuguaaauaa

SEQ ID NO: 782262 - RNA, 20 nt, Artificial Sequence
  Synthetic
auacucaaaagauuaaauaa

SEQ ID NO: 782263 - RNA, 20 nt, Artificial Sequence
  Synthetic
uaugcauguccuuuaaauaa

SEQ ID NO: 782264 - RNA, 20 nt, Artificial Sequence
  Synthetic
aaugaagcuuguuuaaauaa

SEQ ID NO: 782265 - RNA, 20 nt, Artificial Sequence
  Synthetic
uugcaauacuaaaacaauaa

SEQ ID NO: 782266 - RNA, 20 nt, Artificial Sequence
  Synthetic
uaaauucauauaaacaauaa

SEQ ID NO: 782267 - RNA, 20 nt, Artificial Sequence
  Synthetic
cagugggaaguaaacaauaa

SEQ ID NO: 782268 - RNA, 20 nt, Artificial Sequence
  Synthetic
ugagaaccuaugaacaauaa

SEQ ID NO: 782269 - RNA, 20 nt, Artificial Sequence
  Synthetic
auggucauauguaacaauaa

SEQ ID NO: 782270 - RNA, 20 nt, Artificial Sequence
  Synthetic
aauuccuaauaacacaauaa

SEQ ID NO: 782271 - RNA, 20 nt, Artificial Sequence
  Synthetic
uuccuuggaaaccacaauaa

SEQ ID NO: 782272 - RNA, 20 nt, Artificial Sequence
  Synthetic
acuucaaaggaugacaauaa

SEQ ID NO: 782273 - RNA, 20 nt, Artificial Sequence
  Synthetic
uucuauccuuacuacaauaa

SEQ ID NO: 782274 - RNA, 20 nt, Artificial Sequence
  Synthetic
uuuguacaagguuacaauaa

SEQ ID NO: 782275 - RNA, 20 nt, Artificial Sequence
  Synthetic
uuuggguauauaaccaauaa

SEQ ID NO: 782276 - RNA, 20 nt, Artificial Sequence
  Synthetic
ucuggguauaugcccaauaa

SEQ ID NO: 782277 - RNA, 20 nt, Artificial Sequence
  Synthetic
uaaugggaaccucccaauaa

SEQ ID NO: 782278 - RNA, 20 nt, Artificial Sequence
  Synthetic
auagggaagauagccaauaa

SEQ ID NO: 782279 - RNA, 20 nt, Artificial Sequence
  Synthetic
caugcuuaguauuccaauaa

SEQ ID NO: 782280 - RNA, 20 nt, Artificial Sequence
  Synthetic
uaagaagagaaaagcaauaa

SEQ ID NO: 782281 - RNA, 20 nt, Artificial Sequence
  Synthetic
caacagcauccaagcaauaa

SEQ ID NO: 782282 - RNA, 20 nt, Artificial Sequence
  Synthetic
auuguuguuauuggcaauaa

SEQ ID NO: 782283 - RNA, 20 nt, Artificial Sequence
  Synthetic
acuggcaggaaaaucaauaa

SEQ ID NO: 782284 - RNA, 20 nt, Artificial Sequence
  Synthetic
agaauauuaaucaucaauaa

SEQ ID NO: 782285 - RNA, 20 nt, Artificial Sequence
  Synthetic
ugguuuucuauacucaauaa

SEQ ID NO: 782286 - RNA, 20 nt, Artificial Sequence
  Synthetic
ucuguaauaucugucaauaa

SEQ ID NO: 782287 - RNA, 20 nt, Artificial Sequence
  Synthetic
ugaauccucaaauucaauaa

SEQ ID NO: 782288 - RNA, 20 nt, Artificial Sequence
  Synthetic
uauucaacacucuucaauaa

SEQ ID NO: 782289 - RNA, 20 nt, Artificial Sequence
  Synthetic
ugucuauuuuuuuucaauaa

SEQ ID NO: 782290 - RNA, 20 nt, Artificial Sequence
  Synthetic
aguagaucagagaagaauaa

SEQ ID NO: 782291 - RNA, 20 nt, Artificial Sequence
  Synthetic
agaaacuagguuaagaauaa

SEQ ID NO: 782292 - RNA, 20 nt, Artificial Sequence
  Synthetic
ugaaggaacagcgagaauaa

SEQ ID NO: 782293 - RNA, 20 nt, Artificial Sequence
  Synthetic
auaccauaucaauagaauaa

SEQ ID NO: 782294 - RNA, 20 nt, Artificial Sequence
  Synthetic
cauuaauucacuuagaauaa

SEQ ID NO: 782295 - RNA, 20 nt, Artificial Sequence
  Synthetic
aaagagccaguaccgaauaa

SEQ ID NO: 782296 - RNA, 20 nt, Artificial Sequence
  Synthetic
uauuuuaauucaaggaauaa

SEQ ID NO: 782297 - RNA, 20 nt, Artificial Sequence
  Synthetic
aggacuugcgucaggaauaa

SEQ ID NO: 782298 - RNA, 20 nt, Artificial Sequence
  Synthetic
caguauuguuuagggaauaa

SEQ ID NO: 782299 - RNA, 20 nt, Artificial Sequence
  Synthetic
auuaacucaagauggaauaa

SEQ ID NO: 782300 - RNA, 20 nt, Artificial Sequence
  Synthetic
uccaaagaaguauggaauaa

SEQ ID NO: 782301 - RNA, 20 nt, Artificial Sequence
  Synthetic
uauuuguucucaaugaauaa

SEQ ID NO: 782302 - RNA, 20 nt, Artificial Sequence
  Synthetic
uuuuuggcuauaaugaauaa

SEQ ID NO: 782303 - RNA, 20 nt, Artificial Sequence
  Synthetic
cucaagaaguauaugaauaa

SEQ ID NO: 782304 - RNA, 20 nt, Artificial Sequence
  Synthetic
acgcaugaaucuaugaauaa

SEQ ID NO: 782305 - RNA, 20 nt, Artificial Sequence
  Synthetic
uggcugggaaaggugaauaa

SEQ ID NO: 782306 - RNA, 20 nt, Artificial Sequence
  Synthetic
cuuccuuacagggugaauaa

SEQ ID NO: 782307 - RNA, 20 nt, Artificial Sequence
  Synthetic
augggaaagaucuugaauaa

SEQ ID NO: 782308 - RNA, 20 nt, Artificial Sequence
  Synthetic
uucucucauuuguugaauaa

SEQ ID NO: 782309 - RNA, 20 nt, Artificial Sequence
  Synthetic
acuggggacauuuugaauaa

SEQ ID NO: 782310 - RNA, 20 nt, Artificial Sequence
  Synthetic
acuaauuauaaaaauaauaa

SEQ ID NO: 782311 - RNA, 20 nt, Artificial Sequence
  Synthetic
uauagacuacaaaauaauaa

SEQ ID NO: 782312 - RNA, 20 nt, Artificial Sequence
  Synthetic
uuaacacuuacaaauaauaa

SEQ ID NO: 782313 - RNA, 20 nt, Artificial Sequence
  Synthetic
uacuaugcaggaaauaauaa

SEQ ID NO: 782314 - RNA, 20 nt, Artificial Sequence
  Synthetic
accaguaacaacaauaauaa

SEQ ID NO: 782315 - RNA, 20 nt, Artificial Sequence
  Synthetic
ugucucugcaucaauaauaa

SEQ ID NO: 782316 - RNA, 20 nt, Artificial Sequence
  Synthetic
uauaaaaaaaauaauaauaa

SEQ ID NO: 782317 - RNA, 20 nt, Artificial Sequence
  Synthetic
cucaaauuagaucauaauaa

SEQ ID NO: 782318 - RNA, 20 nt, Artificial Sequence
  Synthetic
auacgacuugaugauaauaa

SEQ ID NO: 782319 - RNA, 20 nt, Artificial Sequence
  Synthetic
acuaugagagcauauaauaa

SEQ ID NO: 782320 - RNA, 20 nt, Artificial Sequence
  Synthetic
uaaauacaaaagacuaauaa

SEQ ID NO: 782321 - RNA, 20 nt, Artificial Sequence
  Synthetic
uuaaauggcauuacuaauaa

SEQ ID NO: 782322 - RNA, 20 nt, Artificial Sequence
  Synthetic
uacagccauacuccuaauaa

SEQ ID NO: 782323 - RNA, 20 nt, Artificial Sequence
  Synthetic
agauuccuuguagcuaauaa

SEQ ID NO: 782324 - RNA, 20 nt, Artificial Sequence
  Synthetic
caucauuauguggcuaauaa

SEQ ID NO: 782325 - RNA, 20 nt, Artificial Sequence
  Synthetic
aaacaccuuugugcuaauaa

SEQ ID NO: 782326 - RNA, 20 nt, Artificial Sequence
  Synthetic
cuaaacuaaagaaguaauaa

SEQ ID NO: 782327 - RNA, 20 nt, Artificial Sequence
  Synthetic
ucuggaaaauguaguaauaa

SEQ ID NO: 782328 - RNA, 20 nt, Artificial Sequence
  Synthetic
aaauagauguuggguaauaa

SEQ ID NO: 782329 - RNA, 20 nt, Artificial Sequence
  Synthetic
ugguuuuagugugguaauaa

SEQ ID NO: 782330 - RNA, 20 nt, Artificial Sequence
  Synthetic
agcaggccccaauguaauaa

SEQ ID NO: 782331 - RNA, 20 nt, Artificial Sequence
  Synthetic
ccaagcaugcacuguaauaa

SEQ ID NO: 782332 - RNA, 20 nt, Artificial Sequence
  Synthetic
acuacuguuggcuguaauaa

SEQ ID NO: 782333 - RNA, 20 nt, Artificial Sequence
  Synthetic
agaaauacggaguguaauaa

SEQ ID NO: 782334 - RNA, 20 nt, Artificial Sequence
  Synthetic
agacucccacacauuaauaa

SEQ ID NO: 782335 - RNA, 20 nt, Artificial Sequence
  Synthetic
uaacuuccacaucuuaauaa

SEQ ID NO: 782336 - RNA, 20 nt, Artificial Sequence
  Synthetic
acuaacaucuaaguuaauaa

SEQ ID NO: 782337 - RNA, 20 nt, Artificial Sequence
  Synthetic
ccaggugacagauuuaauaa

SEQ ID NO: 782338 - RNA, 20 nt, Artificial Sequence
  Synthetic
uaaagccauuuauuuaauaa

SEQ ID NO: 782339 - RNA, 20 nt, Artificial Sequence
  Synthetic
ucaacuuaaguguuuaauaa

SEQ ID NO: 782340 - RNA, 20 nt, Artificial Sequence
  Synthetic
uaauagcauaauuuuaauaa

SEQ ID NO: 782341 - RNA, 20 nt, Artificial Sequence
  Synthetic
uguaugcuguguuuuaauaa

SEQ ID NO: 782342 - RNA, 20 nt, Artificial Sequence
  Synthetic
uuuuuuuuuuuuuuuaauaa

SEQ ID NO: 782343 - RNA, 20 nt, Artificial Sequence
  Synthetic
auguccucguaaaaacauaa

SEQ ID NO: 782344 - RNA, 20 nt, Artificial Sequence
  Synthetic
acucauagaagaaaacauaa

SEQ ID NO: 782345 - RNA, 20 nt, Artificial Sequence
  Synthetic
uuuuauuaagaacaacauaa

SEQ ID NO: 782346 - RNA, 20 nt, Artificial Sequence
  Synthetic
aguggauauccagaacauaa

SEQ ID NO: 782347 - RNA, 20 nt, Artificial Sequence
  Synthetic
uauuaaauuuuagaacauaa

SEQ ID NO: 782348 - RNA, 20 nt, Artificial Sequence
  Synthetic
auucaguauguuuaacauaa

SEQ ID NO: 782349 - RNA, 20 nt, Artificial Sequence
  Synthetic
uauuuggaauacacacauaa

SEQ ID NO: 782350 - RNA, 20 nt, Artificial Sequence
  Synthetic
auacaaauaccuacacauaa

SEQ ID NO: 782351 - RNA, 20 nt, Artificial Sequence
  Synthetic
auuuaagggauaccacauaa

SEQ ID NO: 782352 - RNA, 20 nt, Artificial Sequence
  Synthetic
uuguggcaaacagcacauaa

SEQ ID NO: 782353 - RNA, 20 nt, Artificial Sequence
  Synthetic
ccuuuucuaucaucacauaa

SEQ ID NO: 782354 - RNA, 20 nt, Artificial Sequence
  Synthetic
acacacacacaaagacauaa

SEQ ID NO: 782355 - RNA, 20 nt, Artificial Sequence
  Synthetic
aggcuguagagcagacauaa

SEQ ID NO: 782356 - RNA, 20 nt, Artificial Sequence
  Synthetic
uacuaugaauagggacauaa

SEQ ID NO: 782357 - RNA, 20 nt, Artificial Sequence
  Synthetic
ugugaugaaugcauacauaa

SEQ ID NO: 782358 - RNA, 20 nt, Artificial Sequence
  Synthetic
ugaacaagcaaccuacauaa

SEQ ID NO: 782359 - RNA, 20 nt, Artificial Sequence
  Synthetic
cuugaacuguaucuacauaa

SEQ ID NO: 782360 - RNA, 20 nt, Artificial Sequence
  Synthetic
aauuucugccugguacauaa

SEQ ID NO: 782361 - RNA, 20 nt, Artificial Sequence
  Synthetic
aaggguauuacauuacauaa

SEQ ID NO: 782362 - RNA, 20 nt, Artificial Sequence
  Synthetic
caaagaaggccauuacauaa

SEQ ID NO: 782363 - RNA, 20 nt, Artificial Sequence
  Synthetic
aaaaaaaugguauuacauaa

SEQ ID NO: 782364 - RNA, 20 nt, Artificial Sequence
  Synthetic
cucauauauguaaaccauaa

SEQ ID NO: 782365 - RNA, 20 nt, Artificial Sequence
  Synthetic
ugcagauuuuaugaccauaa

SEQ ID NO: 782366 - RNA, 20 nt, Artificial Sequence
  Synthetic
cuccucucucccucccauaa

SEQ ID NO: 782367 - RNA, 20 nt, Artificial Sequence
  Synthetic
auaaaaagcauuagccauaa

SEQ ID NO: 782368 - RNA, 20 nt, Artificial Sequence
  Synthetic
auguugugcucuggccauaa

SEQ ID NO: 782369 - RNA, 20 nt, Artificial Sequence
  Synthetic
cuccauaccguccuccauaa

SEQ ID NO: 782370 - RNA, 20 nt, Artificial Sequence
  Synthetic
uaccauacuguucuccauaa

SEQ ID NO: 782371 - RNA, 20 nt, Artificial Sequence
  Synthetic
agccacgggaauuuccauaa

SEQ ID NO: 782372 - RNA, 20 nt, Artificial Sequence
  Synthetic
caauaaugccauuuccauaa

SEQ ID NO: 782373 - RNA, 20 nt, Artificial Sequence
  Synthetic
uuuuaugguauuuuccauaa

SEQ ID NO: 782374 - RNA, 20 nt, Artificial Sequence
  Synthetic
aauaaugaauaaaagcauaa

SEQ ID NO: 782375 - RNA, 20 nt, Artificial Sequence
  Synthetic
aucaacugaccaaagcauaa

SEQ ID NO: 782376 - RNA, 20 nt, Artificial Sequence
  Synthetic
aauuucuucucaaagcauaa

SEQ ID NO: 782377 - RNA, 20 nt, Artificial Sequence
  Synthetic
auagugcaguagcagcauaa

SEQ ID NO: 782378 - RNA, 20 nt, Artificial Sequence
  Synthetic
agccagcuaugugagcauaa

SEQ ID NO: 782379 - RNA, 20 nt, Artificial Sequence
  Synthetic
agggcagggguugagcauaa

SEQ ID NO: 782380 - RNA, 20 nt, Artificial Sequence
  Synthetic
uuugggcuaauguagcauaa

SEQ ID NO: 782381 - RNA, 20 nt, Artificial Sequence
  Synthetic
aauaaauaauaugggcauaa

SEQ ID NO: 782382 - RNA, 20 nt, Artificial Sequence
  Synthetic
augaaugguuaaaugcauaa

SEQ ID NO: 782383 - RNA, 20 nt, Artificial Sequence
  Synthetic
agauggaauacuaugcauaa

SEQ ID NO: 782384 - RNA, 20 nt, Artificial Sequence
  Synthetic
uucccaccaacagugcauaa

SEQ ID NO: 782385 - RNA, 20 nt, Artificial Sequence
  Synthetic
uuucuaguuugugugcauaa

SEQ ID NO: 782386 - RNA, 20 nt, Artificial Sequence
  Synthetic
cacugaaaucacuugcauaa

SEQ ID NO: 782387 - RNA, 20 nt, Artificial Sequence
  Synthetic
aagaauuaccaaaaucauaa

SEQ ID NO: 782388 - RNA, 20 nt, Artificial Sequence
  Synthetic
uggagguaauggaaucauaa

SEQ ID NO: 782389 - RNA, 20 nt, Artificial Sequence
  Synthetic
uuuucacccaauaaucauaa

SEQ ID NO: 782390 - RNA, 20 nt, Artificial Sequence
  Synthetic
aaaucuaugcaacaucauaa

SEQ ID NO: 782391 - RNA, 20 nt, Artificial Sequence
  Synthetic
caccuuuaugaacaucauaa

SEQ ID NO: 782392 - RNA, 20 nt, Artificial Sequence
  Synthetic
uuauacauucaccaucauaa

SEQ ID NO: 782393 - RNA, 20 nt, Artificial Sequence
  Synthetic
cucaggaaccuucaucauaa

SEQ ID NO: 782394 - RNA, 20 nt, Artificial Sequence
  Synthetic
uuuccaaguucuuaucauaa

SEQ ID NO: 782395 - RNA, 20 nt, Artificial Sequence
  Synthetic
ugcuccauucuuuaucauaa

SEQ ID NO: 782396 - RNA, 20 nt, Artificial Sequence
  Synthetic
caauauccauuaccucauaa

SEQ ID NO: 782397 - RNA, 20 nt, Artificial Sequence
  Synthetic
ccgggaaaaaaaugucauaa

SEQ ID NO: 782398 - RNA, 20 nt, Artificial Sequence
  Synthetic
uaacaggguaaaugucauaa

SEQ ID NO: 782399 - RNA, 20 nt, Artificial Sequence
  Synthetic
agcgcacgauagugucauaa

SEQ ID NO: 782400 - RNA, 20 nt, Artificial Sequence
  Synthetic
auggaugaauccauucauaa

SEQ ID NO: 782401 - RNA, 20 nt, Artificial Sequence
  Synthetic
uaggcugcaaauauucauaa

SEQ ID NO: 782402 - RNA, 20 nt, Artificial Sequence
  Synthetic
caguuaauacuacuucauaa

SEQ ID NO: 782403 - RNA, 20 nt, Artificial Sequence
  Synthetic
ccccaguaaaugguucauaa

SEQ ID NO: 782404 - RNA, 20 nt, Artificial Sequence
  Synthetic
uuaaaucauacauuucauaa

SEQ ID NO: 782405 - RNA, 20 nt, Artificial Sequence
  Synthetic
auguaauaggaguuucauaa

SEQ ID NO: 782406 - RNA, 20 nt, Artificial Sequence
  Synthetic
aaguauugauuuuuucauaa

SEQ ID NO: 782407 - RNA, 20 nt, Artificial Sequence
  Synthetic
ucuauucuucuaaaagauaa

SEQ ID NO: 782408 - RNA, 20 nt, Artificial Sequence
  Synthetic
aguguccaggcccaagauaa

SEQ ID NO: 782409 - RNA, 20 nt, Artificial Sequence
  Synthetic
uuacuagaaauucaagauaa

SEQ ID NO: 782410 - RNA, 20 nt, Artificial Sequence
  Synthetic
aaagaaaacauucaagauaa

SEQ ID NO: 782411 - RNA, 20 nt, Artificial Sequence
  Synthetic
uuuuauccaaaagaagauaa

SEQ ID NO: 782412 - RNA, 20 nt, Artificial Sequence
  Synthetic
cuauuuucacgagaagauaa

SEQ ID NO: 782413 - RNA, 20 nt, Artificial Sequence
  Synthetic
cugaauaaaagugaagauaa

SEQ ID NO: 782414 - RNA, 20 nt, Artificial Sequence
  Synthetic
uaaugguguaaauaagauaa

SEQ ID NO: 782415 - RNA, 20 nt, Artificial Sequence
  Synthetic
auucuucucuauuaagauaa

SEQ ID NO: 782416 - RNA, 20 nt, Artificial Sequence
  Synthetic
uagccuuuugcuuaagauaa

SEQ ID NO: 782417 - RNA, 20 nt, Artificial Sequence
  Synthetic
aacuaaucaguuuaagauaa

SEQ ID NO: 782418 - RNA, 20 nt, Artificial Sequence
  Synthetic
caagucugauuuuaagauaa

SEQ ID NO: 782419 - RNA, 20 nt, Artificial Sequence
  Synthetic
agaacugaacaaacagauaa

SEQ ID NO: 782420 - RNA, 20 nt, Artificial Sequence
  Synthetic
ugucuuuaucugacagauaa

SEQ ID NO: 782421 - RNA, 20 nt, Artificial Sequence
  Synthetic
aauguauccccuacagauaa

SEQ ID NO: 782422 - RNA, 20 nt, Artificial Sequence
  Synthetic
aggagaaauuaaccagauaa

SEQ ID NO: 782423 - RNA, 20 nt, Artificial Sequence
  Synthetic
aggagaaauuauccagauaa

SEQ ID NO: 782424 - RNA, 20 nt, Artificial Sequence
  Synthetic
ccaaguuguccugcagauaa

SEQ ID NO: 782425 - RNA, 20 nt, Artificial Sequence
  Synthetic
uggcuauauaccucagauaa

SEQ ID NO: 782426 - RNA, 20 nt, Artificial Sequence
  Synthetic
aucuggucuuucucagauaa

SEQ ID NO: 782427 - RNA, 20 nt, Artificial Sequence
  Synthetic
acauucaagggaagagauaa

SEQ ID NO: 782428 - RNA, 20 nt, Artificial Sequence
  Synthetic
ccugagagugucagagauaa

SEQ ID NO: 782429 - RNA, 20 nt, Artificial Sequence
  Synthetic
acaagacuuauucgagauaa

SEQ ID NO: 782430 - RNA, 20 nt, Artificial Sequence
  Synthetic
acaaaaaucagaggagauaa

SEQ ID NO: 782431 - RNA, 20 nt, Artificial Sequence
  Synthetic
ucuucaagucaaugagauaa

SEQ ID NO: 782432 - RNA, 20 nt, Artificial Sequence
  Synthetic
uuguauaaggggugagauaa

SEQ ID NO: 782433 - RNA, 20 nt, Artificial Sequence
  Synthetic
augaccaauguuugagauaa

SEQ ID NO: 782434 - RNA, 20 nt, Artificial Sequence
  Synthetic
ucaaaaugucagcuagauaa

SEQ ID NO: 782435 - RNA, 20 nt, Artificial Sequence
  Synthetic
uuccaucugagauuagauaa

SEQ ID NO: 782436 - RNA, 20 nt, Artificial Sequence
  Synthetic
aguagacacugguuagauaa

SEQ ID NO: 782437 - RNA, 20 nt, Artificial Sequence
  Synthetic
accgcauauguguuagauaa

SEQ ID NO: 782438 - RNA, 20 nt, Artificial Sequence
  Synthetic
aagaaccauuuuuuagauaa

SEQ ID NO: 782439 - RNA, 20 nt, Artificial Sequence
  Synthetic
uacuaauucauuuacgauaa

SEQ ID NO: 782440 - RNA, 20 nt, Artificial Sequence
  Synthetic
auuuuaagaaauaucgauaa

SEQ ID NO: 782441 - RNA, 20 nt, Artificial Sequence
  Synthetic
cuaaaugguuaaaaggauaa

SEQ ID NO: 782442 - RNA, 20 nt, Artificial Sequence
  Synthetic
cauuuccauuuaaaggauaa

SEQ ID NO: 782443 - RNA, 20 nt, Artificial Sequence
  Synthetic
ugaucagguaccaaggauaa

SEQ ID NO: 782444 - RNA, 20 nt, Artificial Sequence
  Synthetic
uauaaguuugcuaaggauaa

SEQ ID NO: 782445 - RNA, 20 nt, Artificial Sequence
  Synthetic
aggcaagauuuuaaggauaa

SEQ ID NO: 782446 - RNA, 20 nt, Artificial Sequence
  Synthetic
ccaaagaaucuccaggauaa

SEQ ID NO: 782447 - RNA, 20 nt, Artificial Sequence
  Synthetic
uaauaaucacaucaggauaa

SEQ ID NO: 782448 - RNA, 20 nt, Artificial Sequence
  Synthetic
caucuucuccuucaggauaa

SEQ ID NO: 782449 - RNA, 20 nt, Artificial Sequence
  Synthetic
uguuaguuugcugaggauaa

SEQ ID NO: 782450 - RNA, 20 nt, Artificial Sequence
  Synthetic
uguuauuucaccuaggauaa

SEQ ID NO: 782451 - RNA, 20 nt, Artificial Sequence
  Synthetic
ccuguacacauguaggauaa

SEQ ID NO: 782452 - RNA, 20 nt, Artificial Sequence
  Synthetic
uguuaauuugcuuaggauaa

SEQ ID NO: 782453 - RNA, 20 nt, Artificial Sequence
  Synthetic
uggaacagacuggcggauaa

SEQ ID NO: 782454 - RNA, 20 nt, Artificial Sequence
  Synthetic
aaaaaaaaugcaggggauaa

SEQ ID NO: 782455 - RNA, 20 nt, Artificial Sequence
  Synthetic
acagcgaagagaggggauaa

SEQ ID NO: 782456 - RNA, 20 nt, Artificial Sequence
  Synthetic
uaaagagaaaguggggauaa

SEQ ID NO: 782457 - RNA, 20 nt, Artificial Sequence
  Synthetic
uaugugaaagaaauggauaa

SEQ ID NO: 782458 - RNA, 20 nt, Artificial Sequence
  Synthetic
cauguuuguuaaauggauaa

SEQ ID NO: 782459 - RNA, 20 nt, Artificial Sequence
  Synthetic
uauaauauaggaauggauaa

SEQ ID NO: 782460 - RNA, 20 nt, Artificial Sequence
  Synthetic
uucauugaagggauggauaa

SEQ ID NO: 782461 - RNA, 20 nt, Artificial Sequence
  Synthetic
ucucuugauccccuggauaa

SEQ ID NO: 782462 - RNA, 20 nt, Artificial Sequence
  Synthetic
uauuccuauguuguggauaa

SEQ ID NO: 782463 - RNA, 20 nt, Artificial Sequence
  Synthetic
uuucuggaugaauuggauaa

SEQ ID NO: 782464 - RNA, 20 nt, Artificial Sequence
  Synthetic
uaaaguaaaaaaaaugauaa

SEQ ID NO: 782465 - RNA, 20 nt, Artificial Sequence
  Synthetic
auaauggagaauaaugauaa

SEQ ID NO: 782466 - RNA, 20 nt, Artificial Sequence
  Synthetic
auucuaaacucuaaugauaa

SEQ ID NO: 782467 - RNA, 20 nt, Artificial Sequence
  Synthetic
uuuaacccuugugaugauaa

SEQ ID NO: 782468 - RNA, 20 nt, Artificial Sequence
  Synthetic
uaaucuaucauugaugauaa

SEQ ID NO: 782469 - RNA, 20 nt, Artificial Sequence
  Synthetic
aagauucuuuccuaugauaa

SEQ ID NO: 782470 - RNA, 20 nt, Artificial Sequence
  Synthetic
aacaugguuuucuaugauaa

SEQ ID NO: 782471 - RNA, 20 nt, Artificial Sequence
  Synthetic
uugcccauucaguaugauaa

SEQ ID NO: 782472 - RNA, 20 nt, Artificial Sequence
  Synthetic
cuuucaccuguuuaugauaa

SEQ ID NO: 782473 - RNA, 20 nt, Artificial Sequence
  Synthetic
cugcauguucucacugauaa

SEQ ID NO: 782474 - RNA, 20 nt, Artificial Sequence
  Synthetic
auuguacaauguacugauaa

SEQ ID NO: 782475 - RNA, 20 nt, Artificial Sequence
  Synthetic
uucccaucugcuccugauaa

SEQ ID NO: 782476 - RNA, 20 nt, Artificial Sequence
  Synthetic
ugaauuauuucuucugauaa

SEQ ID NO: 782477 - RNA, 20 nt, Artificial Sequence
  Synthetic
aaagcaugaguaagugauaa

SEQ ID NO: 782478 - RNA, 20 nt, Artificial Sequence
  Synthetic
uugauuuauuggugugauaa

SEQ ID NO: 782479 - RNA, 20 nt, Artificial Sequence
  Synthetic
uaucuuguuuaaauugauaa

SEQ ID NO: 782480 - RNA, 20 nt, Artificial Sequence
  Synthetic
agcaccugaaucauugauaa

SEQ ID NO: 782481 - RNA, 20 nt, Artificial Sequence
  Synthetic
acaucauuauauauugauaa

SEQ ID NO: 782482 - RNA, 20 nt, Artificial Sequence
  Synthetic
ugcuuuggaagacuugauaa

SEQ ID NO: 782483 - RNA, 20 nt, Artificial Sequence
  Synthetic
aauucccaaguacuugauaa

SEQ ID NO: 782484 - RNA, 20 nt, Artificial Sequence
  Synthetic
ucaucugggcagcuugauaa

SEQ ID NO: 782485 - RNA, 20 nt, Artificial Sequence
  Synthetic
uccaaagccaggcuugauaa

SEQ ID NO: 782486 - RNA, 20 nt, Artificial Sequence
  Synthetic
cuuuauuuguugguugauaa

SEQ ID NO: 782487 - RNA, 20 nt, Artificial Sequence
  Synthetic
uuuaaguagaucuuugauaa

SEQ ID NO: 782488 - RNA, 20 nt, Artificial Sequence
  Synthetic
acccuaaucaaguuugauaa

SEQ ID NO: 782489 - RNA, 20 nt, Artificial Sequence
  Synthetic
cauaauuuaauuuuugauaa

SEQ ID NO: 782490 - RNA, 20 nt, Artificial Sequence
  Synthetic
uguauuuucauuuuugauaa

SEQ ID NO: 782491 - RNA, 20 nt, Artificial Sequence
  Synthetic
acacagaauauaaaauauaa

SEQ ID NO: 782492 - RNA, 20 nt, Artificial Sequence
  Synthetic
uauuuagggguaaaauauaa

SEQ ID NO: 782493 - RNA, 20 nt, Artificial Sequence
  Synthetic
uuaaaauaauucaaauauaa

SEQ ID NO: 782494 - RNA, 20 nt, Artificial Sequence
  Synthetic
uuacugcuggggaaauauaa

SEQ ID NO: 782495 - RNA, 20 nt, Artificial Sequence
  Synthetic
agauaucacaugaaauauaa

SEQ ID NO: 782496 - RNA, 20 nt, Artificial Sequence
  Synthetic
ucccugugaaguaaauauaa

SEQ ID NO: 782497 - RNA, 20 nt, Artificial Sequence
  Synthetic
augaaauaaguuaaauauaa

SEQ ID NO: 782498 - RNA, 20 nt, Artificial Sequence
  Synthetic
aaagaaaacccacaauauaa

SEQ ID NO: 782499 - RNA, 20 nt, Artificial Sequence
  Synthetic
auaaaauuuugacaauauaa

SEQ ID NO: 782500 - RNA, 20 nt, Artificial Sequence
  Synthetic
agguuagacaaagaauauaa

SEQ ID NO: 782501 - RNA, 20 nt, Artificial Sequence
  Synthetic
uggcuugugauagaauauaa

SEQ ID NO: 782502 - RNA, 20 nt, Artificial Sequence
  Synthetic
cuacauuaacauacauauaa

SEQ ID NO: 782503 - RNA, 20 nt, Artificial Sequence
  Synthetic
acuguuuuggauacauauaa

SEQ ID NO: 782504 - RNA, 20 nt, Artificial Sequence
  Synthetic
auaaaaaucacuccauauaa

SEQ ID NO: 782505 - RNA, 20 nt, Artificial Sequence
  Synthetic
ucagcuaguguuccauauaa

SEQ ID NO: 782506 - RNA, 20 nt, Artificial Sequence
  Synthetic
uuaauuuuauaagcauauaa

SEQ ID NO: 782507 - RNA, 20 nt, Artificial Sequence
  Synthetic
auuccuaauuuagcauauaa

SEQ ID NO: 782508 - RNA, 20 nt, Artificial Sequence
  Synthetic
cucuuaaauggaagauauaa

SEQ ID NO: 782509 - RNA, 20 nt, Artificial Sequence
  Synthetic
ccaaguuuuaaaauauauaa

SEQ ID NO: 782510 - RNA, 20 nt, Artificial Sequence
  Synthetic
acucauguugaaauauauaa

SEQ ID NO: 782511 - RNA, 20 nt, Artificial Sequence
  Synthetic
ucuguaaguggaauauauaa

SEQ ID NO: 782512 - RNA, 20 nt, Artificial Sequence
  Synthetic
uaauuuccauucauauauaa

SEQ ID NO: 782513 - RNA, 20 nt, Artificial Sequence
  Synthetic
cagaauguccugauauauaa

SEQ ID NO: 782514 - RNA, 20 nt, Artificial Sequence
  Synthetic
uagagcacaaauauauauaa

SEQ ID NO: 782515 - RNA, 20 nt, Artificial Sequence
  Synthetic
uugugcuaccaacuauauaa

SEQ ID NO: 782516 - RNA, 20 nt, Artificial Sequence
  Synthetic
aauuguaucauuguauauaa

SEQ ID NO: 782517 - RNA, 20 nt, Artificial Sequence
  Synthetic
agacauuuuuaauuauauaa

SEQ ID NO: 782518 - RNA, 20 nt, Artificial Sequence
  Synthetic
uucguuuucacuuuauauaa

SEQ ID NO: 782519 - RNA, 20 nt, Artificial Sequence
  Synthetic
acaaugggcagaaacuauaa

SEQ ID NO: 782520 - RNA, 20 nt, Artificial Sequence
  Synthetic
uuuuaggguuuuaacuauaa

SEQ ID NO: 782521 - RNA, 20 nt, Artificial Sequence
  Synthetic
aaaggaaaggaagacuauaa

SEQ ID NO: 782522 - RNA, 20 nt, Artificial Sequence
  Synthetic
cagguauaaucauacuauaa

SEQ ID NO: 782523 - RNA, 20 nt, Artificial Sequence
  Synthetic
uacucugugugauacuauaa

SEQ ID NO: 782524 - RNA, 20 nt, Artificial Sequence
  Synthetic
aguauauacauauacuauaa

SEQ ID NO: 782525 - RNA, 20 nt, Artificial Sequence
  Synthetic
aguagaagaguccccuauaa

SEQ ID NO: 782526 - RNA, 20 nt, Artificial Sequence
  Synthetic
aaagaaaucauuggcuauaa

SEQ ID NO: 782527 - RNA, 20 nt, Artificial Sequence
  Synthetic
ccaaagaaaaacugcuauaa

SEQ ID NO: 782528 - RNA, 20 nt, Artificial Sequence
  Synthetic
acucugccuaugcucuauaa

SEQ ID NO: 782529 - RNA, 20 nt, Artificial Sequence
  Synthetic
ugcuuguuuuuugucuauaa

SEQ ID NO: 782530 - RNA, 20 nt, Artificial Sequence
  Synthetic
uauuaagaauuguucuauaa

SEQ ID NO: 782531 - RNA, 20 nt, Artificial Sequence
  Synthetic
ccaguuuagaauuucuauaa

SEQ ID NO: 782532 - RNA, 20 nt, Artificial Sequence
  Synthetic
aauuagagaaagaaguauaa

SEQ ID NO: 782533 - RNA, 20 nt, Artificial Sequence
  Synthetic
aguugagaaucacaguauaa

SEQ ID NO: 782534 - RNA, 20 nt, Artificial Sequence
  Synthetic
cugcccauuugagaguauaa

SEQ ID NO: 782535 - RNA, 20 nt, Artificial Sequence
  Synthetic
uuuacuacugccuaguauaa

SEQ ID NO: 782536 - RNA, 20 nt, Artificial Sequence
  Synthetic
aagaaaagagugagguauaa

SEQ ID NO: 782537 - RNA, 20 nt, Artificial Sequence
  Synthetic
acagacaaugacugguauaa

SEQ ID NO: 782538 - RNA, 20 nt, Artificial Sequence
  Synthetic
uaguaaagugcaauguauaa

SEQ ID NO: 782539 - RNA, 20 nt, Artificial Sequence
  Synthetic
agcaguaguagaauguauaa

SEQ ID NO: 782540 - RNA, 20 nt, Artificial Sequence
  Synthetic
auaauggaaugacuguauaa

SEQ ID NO: 782541 - RNA, 20 nt, Artificial Sequence
  Synthetic
aaaaagauguuacuguauaa

SEQ ID NO: 782542 - RNA, 20 nt, Artificial Sequence
  Synthetic
ugcuaugaacaucuguauaa

SEQ ID NO: 782543 - RNA, 20 nt, Artificial Sequence
  Synthetic
cuuuuacuuuuucuguauaa

SEQ ID NO: 782544 - RNA, 20 nt, Artificial Sequence
  Synthetic
aaacauuuuugaguguauaa

SEQ ID NO: 782545 - RNA, 20 nt, Artificial Sequence
  Synthetic
aauaaaagccacuuguauaa

SEQ ID NO: 782546 - RNA, 20 nt, Artificial Sequence
  Synthetic
uugaguugauucuuguauaa

SEQ ID NO: 782547 - RNA, 20 nt, Artificial Sequence
  Synthetic
aaaucaacaguguuguauaa

SEQ ID NO: 782548 - RNA, 20 nt, Artificial Sequence
  Synthetic
uaguuagugucuuuguauaa

SEQ ID NO: 782549 - RNA, 20 nt, Artificial Sequence
  Synthetic
uugaguugauuuuuguauaa

SEQ ID NO: 782550 - RNA, 20 nt, Artificial Sequence
  Synthetic
ucaauuuuuuuuuuguauaa

SEQ ID NO: 782551 - RNA, 20 nt, Artificial Sequence
  Synthetic
acuuaaauuauaaauuauaa

SEQ ID NO: 782552 - RNA, 20 nt, Artificial Sequence
  Synthetic
cuguggugcuagaauuauaa

SEQ ID NO: 782553 - RNA, 20 nt, Artificial Sequence
  Synthetic
acauuggguacucauuauaa

SEQ ID NO: 782554 - RNA, 20 nt, Artificial Sequence
  Synthetic
agcaugguuuaauauuauaa

SEQ ID NO: 782555 - RNA, 20 nt, Artificial Sequence
  Synthetic
aaaaucuaggacuauuauaa

SEQ ID NO: 782556 - RNA, 20 nt, Artificial Sequence
  Synthetic
ugagguaauuacuauuauaa

SEQ ID NO: 782557 - RNA, 20 nt, Artificial Sequence
  Synthetic
uuucuuuuuucuuauuauaa

SEQ ID NO: 782558 - RNA, 20 nt, Artificial Sequence
  Synthetic
aucauuuuuucugcuuauaa

SEQ ID NO: 782559 - RNA, 20 nt, Artificial Sequence
  Synthetic
cuuuugugaggaucuuauaa

SEQ ID NO: 782560 - RNA, 20 nt, Artificial Sequence
  Synthetic
aagauccaucauucuuauaa

SEQ ID NO: 782561 - RNA, 20 nt, Artificial Sequence
  Synthetic
uacucuucccuuucuuauaa

SEQ ID NO: 782562 - RNA, 20 nt, Artificial Sequence
  Synthetic
aaggguugaagaaguuauaa

SEQ ID NO: 782563 - RNA, 20 nt, Artificial Sequence
  Synthetic
uauauacauuauaguuauaa

SEQ ID NO: 782564 - RNA, 20 nt, Artificial Sequence
  Synthetic
uagcuaaacuacuguuauaa

SEQ ID NO: 782565 - RNA, 20 nt, Artificial Sequence
  Synthetic
auaauuguaauguguuauaa

SEQ ID NO: 782566 - RNA, 20 nt, Artificial Sequence
  Synthetic
uagugaaaauguuguuauaa

SEQ ID NO: 782567 - RNA, 20 nt, Artificial Sequence
  Synthetic
caagacugaauaauuuauaa

SEQ ID NO: 782568 - RNA, 20 nt, Artificial Sequence
  Synthetic
ugagacuggguaauuuauaa

SEQ ID NO: 782569 - RNA, 20 nt, Artificial Sequence
  Synthetic
cgagauuggguaauuuauaa

SEQ ID NO: 782570 - RNA, 20 nt, Artificial Sequence
  Synthetic
uugguguaaaggauuuauaa

SEQ ID NO: 782571 - RNA, 20 nt, Artificial Sequence
  Synthetic
acuagugauaggauuuauaa

SEQ ID NO: 782572 - RNA, 20 nt, Artificial Sequence
  Synthetic
ugagacugggugauuuauaa

SEQ ID NO: 782573 - RNA, 20 nt, Artificial Sequence
  Synthetic
auuaaguguugacuuuauaa

SEQ ID NO: 782574 - RNA, 20 nt, Artificial Sequence
  Synthetic
auucuaauuuaucuuuauaa

SEQ ID NO: 782575 - RNA, 20 nt, Artificial Sequence
  Synthetic
aaguaauaacaauuuuauaa

SEQ ID NO: 782576 - RNA, 20 nt, Artificial Sequence
  Synthetic
uaaaugcucacauuuuauaa

SEQ ID NO: 782577 - RNA, 20 nt, Artificial Sequence
  Synthetic
cauguauuaauauuuuauaa

SEQ ID NO: 782578 - RNA, 20 nt, Artificial Sequence
  Synthetic
ccugcuucauuauuuuauaa

SEQ ID NO: 782579 - RNA, 20 nt, Artificial Sequence
  Synthetic
cugaacucccacuuuuauaa

SEQ ID NO: 782580 - RNA, 20 nt, Artificial Sequence
  Synthetic
ugcagaauuuccuuuuauaa

SEQ ID NO: 782581 - RNA, 20 nt, Artificial Sequence
  Synthetic
uucuggagccgcuuuuauaa

SEQ ID NO: 782582 - RNA, 20 nt, Artificial Sequence
  Synthetic
cucugaggucucuuuuauaa

SEQ ID NO: 782583 - RNA, 20 nt, Artificial Sequence
  Synthetic
caauuaauauucuuuuauaa

SEQ ID NO: 782584 - RNA, 20 nt, Artificial Sequence
  Synthetic
auauaucauuaguuuuauaa

SEQ ID NO: 782585 - RNA, 20 nt, Artificial Sequence
  Synthetic
aaaaucugaugguuuuauaa

SEQ ID NO: 782586 - RNA, 20 nt, Artificial Sequence
  Synthetic
aagaucugauuguuuuauaa

SEQ ID NO: 782587 - RNA, 20 nt, Artificial Sequence
  Synthetic
ucagaagacaauuuuuauaa

SEQ ID NO: 782588 - RNA, 20 nt, Artificial Sequence
  Synthetic
agcugacuagagaaaacuaa

SEQ ID NO: 782589 - RNA, 20 nt, Artificial Sequence
  Synthetic
caaaagucgaaacaaacuaa

SEQ ID NO: 782590 - RNA, 20 nt, Artificial Sequence
  Synthetic
cagucauguagccaaacuaa

SEQ ID NO: 782591 - RNA, 20 nt, Artificial Sequence
  Synthetic
aagagcgagagagaaacuaa

SEQ ID NO: 782592 - RNA, 20 nt, Artificial Sequence
  Synthetic
caggaaaaagaugaaacuaa

SEQ ID NO: 782593 - RNA, 20 nt, Artificial Sequence
  Synthetic
agaauuaugggauaaacuaa

SEQ ID NO: 782594 - RNA, 20 nt, Artificial Sequence
  Synthetic
aauuuuuauaauuaaacuaa

SEQ ID NO: 782595 - RNA, 20 nt, Artificial Sequence
  Synthetic
auauguagucauuaaacuaa

SEQ ID NO: 782596 - RNA, 20 nt, Artificial Sequence
  Synthetic
uauaaauuagaaccaacuaa

SEQ ID NO: 782597 - RNA, 20 nt, Artificial Sequence
  Synthetic
ugaaacagacucagaacuaa

SEQ ID NO: 782598 - RNA, 20 nt, Artificial Sequence
  Synthetic
agaggguguuagagaacuaa

SEQ ID NO: 782599 - RNA, 20 nt, Artificial Sequence
  Synthetic
ucuuuuugguugugaacuaa

SEQ ID NO: 782600 - RNA, 20 nt, Artificial Sequence
  Synthetic
acuaaaauaugaauaacuaa

SEQ ID NO: 782601 - RNA, 20 nt, Artificial Sequence
  Synthetic
uauaucacucugguaacuaa

SEQ ID NO: 782602 - RNA, 20 nt, Artificial Sequence
  Synthetic
uuaugaauauccuuaacuaa

SEQ ID NO: 782603 - RNA, 20 nt, Artificial Sequence
  Synthetic
uacauacaguucuuaacuaa

SEQ ID NO: 782604 - RNA, 20 nt, Artificial Sequence
  Synthetic
aacaggaaggaauacacuaa

SEQ ID NO: 782605 - RNA, 20 nt, Artificial Sequence
  Synthetic
acaaugguaaaaaccacuaa

SEQ ID NO: 782606 - RNA, 20 nt, Artificial Sequence
  Synthetic
agguuuaucagugccacuaa

SEQ ID NO: 782607 - RNA, 20 nt, Artificial Sequence
  Synthetic
ucgcauuuacauugcacuaa

SEQ ID NO: 782608 - RNA, 20 nt, Artificial Sequence
  Synthetic
aaauuuaaaaaaaucacuaa

SEQ ID NO: 782609 - RNA, 20 nt, Artificial Sequence
  Synthetic
aagugggaaacacucacuaa

SEQ ID NO: 782610 - RNA, 20 nt, Artificial Sequence
  Synthetic
augggucccacugucacuaa

SEQ ID NO: 782611 - RNA, 20 nt, Artificial Sequence
  Synthetic
uaaugugcuucaaagacuaa

SEQ ID NO: 782612 - RNA, 20 nt, Artificial Sequence
  Synthetic
cuaaccaccucagagacuaa

SEQ ID NO: 782613 - RNA, 20 nt, Artificial Sequence
  Synthetic
auuacuuaaguagggacuaa

SEQ ID NO: 782614 - RNA, 20 nt, Artificial Sequence
  Synthetic
cauguguguauuuggacuaa

SEQ ID NO: 782615 - RNA, 20 nt, Artificial Sequence
  Synthetic
agcccagccaaaaugacuaa

SEQ ID NO: 782616 - RNA, 20 nt, Artificial Sequence
  Synthetic
accuuccuuucaaugacuaa

SEQ ID NO: 782617 - RNA, 20 nt, Artificial Sequence
  Synthetic
uagauuuuuuuaaugacuaa

SEQ ID NO: 782618 - RNA, 20 nt, Artificial Sequence
  Synthetic
cccuucucuuggaugacuaa

SEQ ID NO: 782619 - RNA, 20 nt, Artificial Sequence
  Synthetic
uuacaaaaauauaugacuaa

SEQ ID NO: 782620 - RNA, 20 nt, Artificial Sequence
  Synthetic
auacugacuuuagugacuaa

SEQ ID NO: 782621 - RNA, 20 nt, Artificial Sequence
  Synthetic
cuguuucuuagggugacuaa

SEQ ID NO: 782622 - RNA, 20 nt, Artificial Sequence
  Synthetic
aaagcuaccucacauacuaa

SEQ ID NO: 782623 - RNA, 20 nt, Artificial Sequence
  Synthetic
aaucaagcaauacauacuaa

SEQ ID NO: 782624 - RNA, 20 nt, Artificial Sequence
  Synthetic
cugaagaacccugauacuaa

SEQ ID NO: 782625 - RNA, 20 nt, Artificial Sequence
  Synthetic
agaagcauaagugauacuaa

SEQ ID NO: 782626 - RNA, 20 nt, Artificial Sequence
  Synthetic
caauacacuguugauacuaa

SEQ ID NO: 782627 - RNA, 20 nt, Artificial Sequence
  Synthetic
uuauagcuauuauauacuaa

SEQ ID NO: 782628 - RNA, 20 nt, Artificial Sequence
  Synthetic
cugacuucaaacuauacuaa

SEQ ID NO: 782629 - RNA, 20 nt, Artificial Sequence
  Synthetic
ugcugucaaaugccuacuaa

SEQ ID NO: 782630 - RNA, 20 nt, Artificial Sequence
  Synthetic
ucuuuucaggaaaguacuaa

SEQ ID NO: 782631 - RNA, 20 nt, Artificial Sequence
  Synthetic
uuugagaaccacuguacuaa

SEQ ID NO: 782632 - RNA, 20 nt, Artificial Sequence
  Synthetic
auaagaaucacuuguacuaa

SEQ ID NO: 782633 - RNA, 20 nt, Artificial Sequence
  Synthetic
uauaaaauaagacuuacuaa

SEQ ID NO: 782634 - RNA, 20 nt, Artificial Sequence
  Synthetic
cauguaagaaaaguuacuaa

SEQ ID NO: 782635 - RNA, 20 nt, Artificial Sequence
  Synthetic
cugacuauaucaguuacuaa

SEQ ID NO: 782636 - RNA, 20 nt, Artificial Sequence
  Synthetic
aauaagucuuggccaccuaa

SEQ ID NO: 782637 - RNA, 20 nt, Artificial Sequence
  Synthetic
auguacauugugucaccuaa

SEQ ID NO: 782638 - RNA, 20 nt, Artificial Sequence
  Synthetic
cuuggaccuaaaagaccuaa

SEQ ID NO: 782639 - RNA, 20 nt, Artificial Sequence
  Synthetic
uauguaaauugaagaccuaa

SEQ ID NO: 782640 - RNA, 20 nt, Artificial Sequence
  Synthetic
cucaauuaauaaugaccuaa

SEQ ID NO: 782641 - RNA, 20 nt, Artificial Sequence
  Synthetic
uaugaacuauaaauaccuaa

SEQ ID NO: 782642 - RNA, 20 nt, Artificial Sequence
  Synthetic
aagcuccagucaguaccuaa

SEQ ID NO: 782643 - RNA, 20 nt, Artificial Sequence
  Synthetic
acucuuaaaaacuuaccuaa

SEQ ID NO: 782644 - RNA, 20 nt, Artificial Sequence
  Synthetic
uguaaaggguaaaacccuaa

SEQ ID NO: 782645 - RNA, 20 nt, Artificial Sequence
  Synthetic
ccugaaacuuucaccccuaa

SEQ ID NO: 782646 - RNA, 20 nt, Artificial Sequence
  Synthetic
uauuguugaaaaugcccuaa

SEQ ID NO: 782647 - RNA, 20 nt, Artificial Sequence
  Synthetic
cccaaaaaucaccucccuaa

SEQ ID NO: 782648 - RNA, 20 nt, Artificial Sequence
  Synthetic
ucauauauuggccucccuaa

SEQ ID NO: 782649 - RNA, 20 nt, Artificial Sequence
  Synthetic
ccacacuaaaugcucccuaa

SEQ ID NO: 782650 - RNA, 20 nt, Artificial Sequence
  Synthetic
uccacauuuuuuuucccuaa

SEQ ID NO: 782651 - RNA, 20 nt, Artificial Sequence
  Synthetic
aaccuggauugagagccuaa

SEQ ID NO: 782652 - RNA, 20 nt, Artificial Sequence
  Synthetic
uuuaaugaaaauuagccuaa

SEQ ID NO: 782653 - RNA, 20 nt, Artificial Sequence
  Synthetic
acaccuuuguuuuagccuaa

SEQ ID NO: 782654 - RNA, 20 nt, Artificial Sequence
  Synthetic
cuaacaaguaaaaauccuaa

SEQ ID NO: 782655 - RNA, 20 nt, Artificial Sequence
  Synthetic
acauaaguggaaaauccuaa

SEQ ID NO: 782656 - RNA, 20 nt, Artificial Sequence
  Synthetic
aagauaccaggaaauccuaa

SEQ ID NO: 782657 - RNA, 20 nt, Artificial Sequence
  Synthetic
auuuauuugccuaauccuaa

SEQ ID NO: 782658 - RNA, 20 nt, Artificial Sequence
  Synthetic
cuucuacuacuuaauccuaa

SEQ ID NO: 782659 - RNA, 20 nt, Artificial Sequence
  Synthetic
aagggaacccuuaauccuaa

SEQ ID NO: 782660 - RNA, 20 nt, Artificial Sequence
  Synthetic
uacuuguuagaauauccuaa

SEQ ID NO: 782661 - RNA, 20 nt, Artificial Sequence
  Synthetic
cccaagagcaauuauccuaa

SEQ ID NO: 782662 - RNA, 20 nt, Artificial Sequence
  Synthetic
uauucuaacuccccuccuaa

SEQ ID NO: 782663 - RNA, 20 nt, Artificial Sequence
  Synthetic
auuauaauaacucuuccuaa

SEQ ID NO: 782664 - RNA, 20 nt, Artificial Sequence
  Synthetic
uaauaguaaaguguuccuaa

SEQ ID NO: 782665 - RNA, 20 nt, Artificial Sequence
  Synthetic
uuaugacaacaguuuccuaa

SEQ ID NO: 782666 - RNA, 20 nt, Artificial Sequence
  Synthetic
uauacaaaauaaaaagcuaa

SEQ ID NO: 782667 - RNA, 20 nt, Artificial Sequence
  Synthetic
aggaauauuacagaagcuaa

SEQ ID NO: 782668 - RNA, 20 nt, Artificial Sequence
  Synthetic
uucuacaacuauuaagcuaa

SEQ ID NO: 782669 - RNA, 20 nt, Artificial Sequence
  Synthetic
aaaagauauaucacagcuaa

SEQ ID NO: 782670 - RNA, 20 nt, Artificial Sequence
  Synthetic
ucauaauaugugacagcuaa

SEQ ID NO: 782671 - RNA, 20 nt, Artificial Sequence
  Synthetic
uaaagcugaagagcagcuaa

SEQ ID NO: 782672 - RNA, 20 nt, Artificial Sequence
  Synthetic
aaggaaaaaugaucagcuaa

SEQ ID NO: 782673 - RNA, 20 nt, Artificial Sequence
  Synthetic
auacauuuucagucagcuaa

SEQ ID NO: 782674 - RNA, 20 nt, Artificial Sequence
  Synthetic
caugggaugcugucagcuaa

SEQ ID NO: 782675 - RNA, 20 nt, Artificial Sequence
  Synthetic
cuucacucaucuucagcuaa

SEQ ID NO: 782676 - RNA, 20 nt, Artificial Sequence
  Synthetic
acguagaauucaagagcuaa

SEQ ID NO: 782677 - RNA, 20 nt, Artificial Sequence
  Synthetic
aacaaacucuuacgagcuaa

SEQ ID NO: 782678 - RNA, 20 nt, Artificial Sequence
  Synthetic
aaaccuucauaaugagcuaa

SEQ ID NO: 782679 - RNA, 20 nt, Artificial Sequence
  Synthetic
aaugcuaaaugaugagcuaa

SEQ ID NO: 782680 - RNA, 20 nt, Artificial Sequence
  Synthetic
aaugaacaaagcugagcuaa

SEQ ID NO: 782681 - RNA, 20 nt, Artificial Sequence
  Synthetic
auuacaguauucugagcuaa

SEQ ID NO: 782682 - RNA, 20 nt, Artificial Sequence
  Synthetic
uacgugaagaauugagcuaa

SEQ ID NO: 782683 - RNA, 20 nt, Artificial Sequence
  Synthetic
auagaucaccgcauagcuaa

SEQ ID NO: 782684 - RNA, 20 nt, Artificial Sequence
  Synthetic
ucucaaagucauauagcuaa

SEQ ID NO: 782685 - RNA, 20 nt, Artificial Sequence
  Synthetic
cauauuuucauauuagcuaa

SEQ ID NO: 782686 - RNA, 20 nt, Artificial Sequence
  Synthetic
ugcauucacaacuuagcuaa

SEQ ID NO: 782687 - RNA, 20 nt, Artificial Sequence
  Synthetic
cucaaggccugaaaggcuaa

SEQ ID NO: 782688 - RNA, 20 nt, Artificial Sequence
  Synthetic
aucaugcagcuuaaggcuaa

SEQ ID NO: 782689 - RNA, 20 nt, Artificial Sequence
  Synthetic
uguguaagguaacaggcuaa

SEQ ID NO: 782690 - RNA, 20 nt, Artificial Sequence
  Synthetic
ugugccagugcccaggcuaa

SEQ ID NO: 782691 - RNA, 20 nt, Artificial Sequence
  Synthetic
uaagccauauauuaggcuaa

SEQ ID NO: 782692 - RNA, 20 nt, Artificial Sequence
  Synthetic
agugauuuuuagggggcuaa

SEQ ID NO: 782693 - RNA, 20 nt, Artificial Sequence
  Synthetic
cuaaguuaccaaauggcuaa

SEQ ID NO: 782694 - RNA, 20 nt, Artificial Sequence
  Synthetic
auaugaaggcaaauggcuaa

SEQ ID NO: 782695 - RNA, 20 nt, Artificial Sequence
  Synthetic
acaccagcuggcauggcuaa

SEQ ID NO: 782696 - RNA, 20 nt, Artificial Sequence
  Synthetic
caguuacuggguauggcuaa

SEQ ID NO: 782697 - RNA, 20 nt, Artificial Sequence
  Synthetic
caauagccacagguggcuaa

SEQ ID NO: 782698 - RNA, 20 nt, Artificial Sequence
  Synthetic
ucucuuagcaugguggcuaa

SEQ ID NO: 782699 - RNA, 20 nt, Artificial Sequence
  Synthetic
uauaccuuauuuaaugcuaa

SEQ ID NO: 782700 - RNA, 20 nt, Artificial Sequence
  Synthetic
uagugcguuugauaugcuaa

SEQ ID NO: 782701 - RNA, 20 nt, Artificial Sequence
  Synthetic
cagcacucgagcucugcuaa

SEQ ID NO: 782702 - RNA, 20 nt, Artificial Sequence
  Synthetic
aacuuacuuuuuucugcuaa

SEQ ID NO: 782703 - RNA, 20 nt, Artificial Sequence
  Synthetic
auaaaaaugguaagugcuaa

SEQ ID NO: 782704 - RNA, 20 nt, Artificial Sequence
  Synthetic
auaggaaggcugagugcuaa

SEQ ID NO: 782705 - RNA, 20 nt, Artificial Sequence
  Synthetic
ugaaauucagugugugcuaa

SEQ ID NO: 782706 - RNA, 20 nt, Artificial Sequence
  Synthetic
agagcaauaugaauugcuaa

SEQ ID NO: 782707 - RNA, 20 nt, Artificial Sequence
  Synthetic
uauguuucucagcuugcuaa

SEQ ID NO: 782708 - RNA, 20 nt, Artificial Sequence
  Synthetic
uccuugguuaaucuugcuaa

SEQ ID NO: 782709 - RNA, 20 nt, Artificial Sequence
  Synthetic
aguacaauggugguugcuaa

SEQ ID NO: 782710 - RNA, 20 nt, Artificial Sequence
  Synthetic
uaaguuaaaugauuugcuaa

SEQ ID NO: 782711 - RNA, 20 nt, Artificial Sequence
  Synthetic
acuuuguagaccuuugcuaa

SEQ ID NO: 782712 - RNA, 20 nt, Artificial Sequence
  Synthetic
agacuuccaaguuuugcuaa

SEQ ID NO: 782713 - RNA, 20 nt, Artificial Sequence
  Synthetic
uugugaaugacacaaucuaa

SEQ ID NO: 782714 - RNA, 20 nt, Artificial Sequence
  Synthetic
ugaaaacaguaccaaucuaa

SEQ ID NO: 782715 - RNA, 20 nt, Artificial Sequence
  Synthetic
uucuucucaaaucaaucuaa

SEQ ID NO: 782716 - RNA, 20 nt, Artificial Sequence
  Synthetic
auuauucacuguuaaucuaa

SEQ ID NO: 782717 - RNA, 20 nt, Artificial Sequence
  Synthetic
auauacuccagcacaucuaa

SEQ ID NO: 782718 - RNA, 20 nt, Artificial Sequence
  Synthetic
ugucuuuaaaaaccaucuaa

SEQ ID NO: 782719 - RNA, 20 nt, Artificial Sequence
  Synthetic
agaguacuauuggcaucuaa

SEQ ID NO: 782720 - RNA, 20 nt, Artificial Sequence
  Synthetic
uauuucccacuaagaucuaa

SEQ ID NO: 782721 - RNA, 20 nt, Artificial Sequence
  Synthetic
uucaugcaaaaaugaucuaa

SEQ ID NO: 782722 - RNA, 20 nt, Artificial Sequence
  Synthetic
aguaagguaugaauaucuaa

SEQ ID NO: 782723 - RNA, 20 nt, Artificial Sequence
  Synthetic
acauugcuugcuauaucuaa

SEQ ID NO: 782724 - RNA, 20 nt, Artificial Sequence
  Synthetic
uuuuucuacuuucuaucuaa

SEQ ID NO: 782725 - RNA, 20 nt, Artificial Sequence
  Synthetic
augcugcauugauuaucuaa

SEQ ID NO: 782726 - RNA, 20 nt, Artificial Sequence
  Synthetic
cuaacugugggcaacucuaa

SEQ ID NO: 782727 - RNA, 20 nt, Artificial Sequence
  Synthetic
uuauauaugaggaacucuaa

SEQ ID NO: 782728 - RNA, 20 nt, Artificial Sequence
  Synthetic
agaaaauaauggaacucuaa

SEQ ID NO: 782729 - RNA, 20 nt, Artificial Sequence
  Synthetic
ccuuuuuugcugaacucuaa

SEQ ID NO: 782730 - RNA, 20 nt, Artificial Sequence
  Synthetic
uaacauguuaauaacucuaa

SEQ ID NO: 782731 - RNA, 20 nt, Artificial Sequence
  Synthetic
uccucagauauuaacucuaa

SEQ ID NO: 782732 - RNA, 20 nt, Artificial Sequence
  Synthetic
agaugaaacggacacucuaa

SEQ ID NO: 782733 - RNA, 20 nt, Artificial Sequence
  Synthetic
uaaauuguuccagacucuaa

SEQ ID NO: 782734 - RNA, 20 nt, Artificial Sequence
  Synthetic
uucuuacauuccuacucuaa

SEQ ID NO: 782735 - RNA, 20 nt, Artificial Sequence
  Synthetic
agagcuugcauucccucuaa

SEQ ID NO: 782736 - RNA, 20 nt, Artificial Sequence
  Synthetic
ucaauucagcgugucucuaa

SEQ ID NO: 782737 - RNA, 20 nt, Artificial Sequence
  Synthetic
uuuaauuugcauuucucuaa

SEQ ID NO: 782738 - RNA, 20 nt, Artificial Sequence
  Synthetic
aacauauauccagagucuaa

SEQ ID NO: 782739 - RNA, 20 nt, Artificial Sequence
  Synthetic
cuucuccaguuagagucuaa

SEQ ID NO: 782740 - RNA, 20 nt, Artificial Sequence
  Synthetic
ucuaugauaauauagucuaa

SEQ ID NO: 782741 - RNA, 20 nt, Artificial Sequence
  Synthetic
aauuuucagagaaugucuaa

SEQ ID NO: 782742 - RNA, 20 nt, Artificial Sequence
  Synthetic
uuucauucuagaaugucuaa

SEQ ID NO: 782743 - RNA, 20 nt, Artificial Sequence
  Synthetic
ugcuugugacucaugucuaa

SEQ ID NO: 782744 - RNA, 20 nt, Artificial Sequence
  Synthetic
cucccuucacugcugucuaa

SEQ ID NO: 782745 - RNA, 20 nt, Artificial Sequence
  Synthetic
aagcagaggacagugucuaa

SEQ ID NO: 782746 - RNA, 20 nt, Artificial Sequence
  Synthetic
acaagacauguuuugucuaa

SEQ ID NO: 782747 - RNA, 20 nt, Artificial Sequence
  Synthetic
ucauaaaacuuacauucuaa

SEQ ID NO: 782748 - RNA, 20 nt, Artificial Sequence
  Synthetic
ccuccauucuuccauucuaa

SEQ ID NO: 782749 - RNA, 20 nt, Artificial Sequence
  Synthetic
cauuuuucagaucauucuaa

SEQ ID NO: 782750 - RNA, 20 nt, Artificial Sequence
  Synthetic
ccaaaauauguucauucuaa

SEQ ID NO: 782751 - RNA, 20 nt, Artificial Sequence
  Synthetic
cguggccucaaauauucuaa

SEQ ID NO: 782752 - RNA, 20 nt, Artificial Sequence
  Synthetic
caugugugcuuuacuucuaa

SEQ ID NO: 782753 - RNA, 20 nt, Artificial Sequence
  Synthetic
uuaucuaaauuuccuucuaa

SEQ ID NO: 782754 - RNA, 20 nt, Artificial Sequence
  Synthetic
caaccuguucacaguucuaa

SEQ ID NO: 782755 - RNA, 20 nt, Artificial Sequence
  Synthetic
uauaugggugccaguucuaa

SEQ ID NO: 782756 - RNA, 20 nt, Artificial Sequence
  Synthetic
auccuauucuuuuguucuaa

SEQ ID NO: 782757 - RNA, 20 nt, Artificial Sequence
  Synthetic
uuccaauaagcaauuucuaa

SEQ ID NO: 782758 - RNA, 20 nt, Artificial Sequence
  Synthetic
cgagacuggguaauuucuaa

SEQ ID NO: 782759 - RNA, 20 nt, Artificial Sequence
  Synthetic
agccauuucugcauuucuaa

SEQ ID NO: 782760 - RNA, 20 nt, Artificial Sequence
  Synthetic
accaugcuuuuuauuucuaa

SEQ ID NO: 782761 - RNA, 20 nt, Artificial Sequence
  Synthetic
uucuguuccuauguuucuaa

SEQ ID NO: 782762 - RNA, 20 nt, Artificial Sequence
  Synthetic
uauuucuguucauuuucuaa

SEQ ID NO: 782763 - RNA, 20 nt, Artificial Sequence
  Synthetic
aguuauccuuuauuuucuaa

SEQ ID NO: 782764 - RNA, 20 nt, Artificial Sequence
  Synthetic
acgugaauuuuguuuucuaa

SEQ ID NO: 782765 - RNA, 20 nt, Artificial Sequence
  Synthetic
ugagcaggagauuuuucuaa

SEQ ID NO: 782766 - RNA, 20 nt, Artificial Sequence
  Synthetic
cuuugaacauauuuuucuaa

SEQ ID NO: 782767 - RNA, 20 nt, Artificial Sequence
  Synthetic
auaucaaucacuuuuucuaa

SEQ ID NO: 782768 - RNA, 20 nt, Artificial Sequence
  Synthetic
acacugaaacuuuuuucuaa

SEQ ID NO: 782769 - RNA, 20 nt, Artificial Sequence
  Synthetic
uccuuuacuagaaaaaguaa

SEQ ID NO: 782770 - RNA, 20 nt, Artificial Sequence
  Synthetic
aaaaguagacagaaaaguaa

SEQ ID NO: 782771 - RNA, 20 nt, Artificial Sequence
  Synthetic
uauuuuaauuagaaaaguaa

SEQ ID NO: 782772 - RNA, 20 nt, Artificial Sequence
  Synthetic
uaagagauaaauaaaaguaa

SEQ ID NO: 782773 - RNA, 20 nt, Artificial Sequence
  Synthetic
aauuuaugauauaaaaguaa

SEQ ID NO: 782774 - RNA, 20 nt, Artificial Sequence
  Synthetic
uaugcacaauagcaaaguaa

SEQ ID NO: 782775 - RNA, 20 nt, Artificial Sequence
  Synthetic
cccucauuuuggcaaaguaa

SEQ ID NO: 782776 - RNA, 20 nt, Artificial Sequence
  Synthetic
uuaucacauauucaaaguaa

SEQ ID NO: 782777 - RNA, 20 nt, Artificial Sequence
  Synthetic
caaguuuauuaagaaaguaa

SEQ ID NO: 782778 - RNA, 20 nt, Artificial Sequence
  Synthetic
agucuaauuggggaaaguaa

SEQ ID NO: 782779 - RNA, 20 nt, Artificial Sequence
  Synthetic
caugcauagacugaaaguaa

SEQ ID NO: 782780 - RNA, 20 nt, Artificial Sequence
  Synthetic
uucuggaauaaauaaaguaa

SEQ ID NO: 782781 - RNA, 20 nt, Artificial Sequence
  Synthetic
aaauuacucugcuaaaguaa

SEQ ID NO: 782782 - RNA, 20 nt, Artificial Sequence
  Synthetic
augucuaacauuuaaaguaa

SEQ ID NO: 782783 - RNA, 20 nt, Artificial Sequence
  Synthetic
uucuugauuugaucaaguaa

SEQ ID NO: 782784 - RNA, 20 nt, Artificial Sequence
  Synthetic
uuaacgugagaaagaaguaa

SEQ ID NO: 782785 - RNA, 20 nt, Artificial Sequence
  Synthetic
uugguagaauuaggaaguaa

SEQ ID NO: 782786 - RNA, 20 nt, Artificial Sequence
  Synthetic
cguaggggaaugggaaguaa

SEQ ID NO: 782787 - RNA, 20 nt, Artificial Sequence
  Synthetic
aacugccuuuccugaaguaa

SEQ ID NO: 782788 - RNA, 20 nt, Artificial Sequence
  Synthetic
caucuuaugaaaauaaguaa

SEQ ID NO: 782789 - RNA, 20 nt, Artificial Sequence
  Synthetic
aucgauagauagauaaguaa

SEQ ID NO: 782790 - RNA, 20 nt, Artificial Sequence
  Synthetic
aacuagcaacugauaaguaa

SEQ ID NO: 782791 - RNA, 20 nt, Artificial Sequence
  Synthetic
aaauuaacuaaguuaaguaa

SEQ ID NO: 782792 - RNA, 20 nt, Artificial Sequence
  Synthetic
augagucaaggguuaaguaa

SEQ ID NO: 782793 - RNA, 20 nt, Artificial Sequence
  Synthetic
accuacaaggcaaacaguaa

SEQ ID NO: 782794 - RNA, 20 nt, Artificial Sequence
  Synthetic
aacaugggaggggacaguaa

SEQ ID NO: 782795 - RNA, 20 nt, Artificial Sequence
  Synthetic
aagcagccaguggacaguaa

SEQ ID NO: 782796 - RNA, 20 nt, Artificial Sequence
  Synthetic
uuuggguauauaaccaguaa

SEQ ID NO: 782797 - RNA, 20 nt, Artificial Sequence
  Synthetic
uuuggguauauacccaguaa

SEQ ID NO: 782798 - RNA, 20 nt, Artificial Sequence
  Synthetic
aagaagucaagccccaguaa

SEQ ID NO: 782799 - RNA, 20 nt, Artificial Sequence
  Synthetic
uugggcuauaugcccaguaa

SEQ ID NO: 782800 - RNA, 20 nt, Artificial Sequence
  Synthetic
uguuuggcaugagccaguaa

SEQ ID NO: 782801 - RNA, 20 nt, Artificial Sequence
  Synthetic
uuuggguauauauccaguaa

SEQ ID NO: 782802 - RNA, 20 nt, Artificial Sequence
  Synthetic
uuuggguauauaugcaguaa

SEQ ID NO: 782803 - RNA, 20 nt, Artificial Sequence
  Synthetic
cuaacaagacagugcaguaa

SEQ ID NO: 782804 - RNA, 20 nt, Artificial Sequence
  Synthetic
aucucuaggaggaucaguaa

SEQ ID NO: 782805 - RNA, 20 nt, Artificial Sequence
  Synthetic
uuuggauauauacucaguaa

SEQ ID NO: 782806 - RNA, 20 nt, Artificial Sequence
  Synthetic
uuuggauaucuacucaguaa

SEQ ID NO: 782807 - RNA, 20 nt, Artificial Sequence
  Synthetic
uaaagauacaaagucaguaa

SEQ ID NO: 782808 - RNA, 20 nt, Artificial Sequence
  Synthetic
auaaaugggugggucaguaa

SEQ ID NO: 782809 - RNA, 20 nt, Artificial Sequence
  Synthetic
uccagaagcauugucaguaa

SEQ ID NO: 782810 - RNA, 20 nt, Artificial Sequence
  Synthetic
uuuaacaaaugaaagaguaa

SEQ ID NO: 782811 - RNA, 20 nt, Artificial Sequence
  Synthetic
aaauaaagguacaagaguaa

SEQ ID NO: 782812 - RNA, 20 nt, Artificial Sequence
  Synthetic
aagugaggcagacagaguaa

SEQ ID NO: 782813 - RNA, 20 nt, Artificial Sequence
  Synthetic
aacugaauuaggcagaguaa

SEQ ID NO: 782814 - RNA, 20 nt, Artificial Sequence
  Synthetic
aaaugccugggagggaguaa

SEQ ID NO: 782815 - RNA, 20 nt, Artificial Sequence
  Synthetic
aauuagguaauagggaguaa

SEQ ID NO: 782816 - RNA, 20 nt, Artificial Sequence
  Synthetic
uguuacugcauagggaguaa

SEQ ID NO: 782817 - RNA, 20 nt, Artificial Sequence
  Synthetic
auagcaugggaauggaguaa

SEQ ID NO: 782818 - RNA, 20 nt, Artificial Sequence
  Synthetic
cacagugcaggauggaguaa

SEQ ID NO: 782819 - RNA, 20 nt, Artificial Sequence
  Synthetic
uuuuguauucuauggaguaa

SEQ ID NO: 782820 - RNA, 20 nt, Artificial Sequence
  Synthetic
cuuauugguaacuggaguaa

SEQ ID NO: 782821 - RNA, 20 nt, Artificial Sequence
  Synthetic
uuguuuucaaguuggaguaa

SEQ ID NO: 782822 - RNA, 20 nt, Artificial Sequence
  Synthetic
acucccacagguuggaguaa

SEQ ID NO: 782823 - RNA, 20 nt, Artificial Sequence
  Synthetic
uagaugugauagaugaguaa

SEQ ID NO: 782824 - RNA, 20 nt, Artificial Sequence
  Synthetic
ucucaggaguuacugaguaa

SEQ ID NO: 782825 - RNA, 20 nt, Artificial Sequence
  Synthetic
aaaucuuuaucucugaguaa

SEQ ID NO: 782826 - RNA, 20 nt, Artificial Sequence
  Synthetic
acagauauuacugugaguaa

SEQ ID NO: 782827 - RNA, 20 nt, Artificial Sequence
  Synthetic
caucuggagucaaauaguaa

SEQ ID NO: 782828 - RNA, 20 nt, Artificial Sequence
  Synthetic
uguguuacuaguaauaguaa

SEQ ID NO: 782829 - RNA, 20 nt, Artificial Sequence
  Synthetic
aacauuugaguagauaguaa

SEQ ID NO: 782830 - RNA, 20 nt, Artificial Sequence
  Synthetic
ucaaggagcucauauaguaa

SEQ ID NO: 782831 - RNA, 20 nt, Artificial Sequence
  Synthetic
cuuuccuuccaguauaguaa

SEQ ID NO: 782832 - RNA, 20 nt, Artificial Sequence
  Synthetic
uagacuuugcuaucuaguaa

SEQ ID NO: 782833 - RNA, 20 nt, Artificial Sequence
  Synthetic
cccuuuacuuuuucuaguaa

SEQ ID NO: 782834 - RNA, 20 nt, Artificial Sequence
  Synthetic
agaaaagcaugaaguaguaa

SEQ ID NO: 782835 - RNA, 20 nt, Artificial Sequence
  Synthetic
augcuuccucauaguaguaa

SEQ ID NO: 782836 - RNA, 20 nt, Artificial Sequence
  Synthetic
ugauagaacacagguaguaa

SEQ ID NO: 782837 - RNA, 20 nt, Artificial Sequence
  Synthetic
cccacuaccccagguaguaa

SEQ ID NO: 782838 - RNA, 20 nt, Artificial Sequence
  Synthetic
cuucuugguaacuguaguaa

SEQ ID NO: 782839 - RNA, 20 nt, Artificial Sequence
  Synthetic
agacuuugcugaauuaguaa

SEQ ID NO: 782840 - RNA, 20 nt, Artificial Sequence
  Synthetic
caaucauaauguauuaguaa

SEQ ID NO: 782841 - RNA, 20 nt, Artificial Sequence
  Synthetic
aauaauuacuaacuuaguaa

SEQ ID NO: 782842 - RNA, 20 nt, Artificial Sequence
  Synthetic
ugaagcuagaaaguuaguaa

SEQ ID NO: 782843 - RNA, 20 nt, Artificial Sequence
  Synthetic
cuuucuuaagauuuuaguaa

SEQ ID NO: 782844 - RNA, 20 nt, Artificial Sequence
  Synthetic
uggcaaaagccaaaacguaa

SEQ ID NO: 782845 - RNA, 20 nt, Artificial Sequence
  Synthetic
uaccagccuggccaacguaa

SEQ ID NO: 782846 - RNA, 20 nt, Artificial Sequence
  Synthetic
aguuccucaaaggaacguaa

SEQ ID NO: 782847 - RNA, 20 nt, Artificial Sequence
  Synthetic
auuauucaagaggcacguaa

SEQ ID NO: 782848 - RNA, 20 nt, Artificial Sequence
  Synthetic
uuucuuuacaucuuacguaa

SEQ ID NO: 782849 - RNA, 20 nt, Artificial Sequence
  Synthetic
ccaagagaagaaaaccguaa

SEQ ID NO: 782850 - RNA, 20 nt, Artificial Sequence
  Synthetic
agaggauggaagggccguaa

SEQ ID NO: 782851 - RNA, 20 nt, Artificial Sequence
  Synthetic
aaugaaucauuucuccguaa

SEQ ID NO: 782852 - RNA, 20 nt, Artificial Sequence
  Synthetic
agagcaaagcuaaagcguaa

SEQ ID NO: 782853 - RNA, 20 nt, Artificial Sequence
  Synthetic
ucugcuacacuuucucguaa

SEQ ID NO: 782854 - RNA, 20 nt, Artificial Sequence
  Synthetic
caguuaacacuacuucguaa

SEQ ID NO: 782855 - RNA, 20 nt, Artificial Sequence
  Synthetic
uaaugugucuuguuucguaa

SEQ ID NO: 782856 - RNA, 20 nt, Artificial Sequence
  Synthetic
aauauaaaauauaaagguaa

SEQ ID NO: 782857 - RNA, 20 nt, Artificial Sequence
  Synthetic
cgccaccucccacaagguaa

SEQ ID NO: 782858 - RNA, 20 nt, Artificial Sequence
  Synthetic
ucaaaaaggggccaagguaa

SEQ ID NO: 782859 - RNA, 20 nt, Artificial Sequence
  Synthetic
caaagauuggaagaagguaa

SEQ ID NO: 782860 - RNA, 20 nt, Artificial Sequence
  Synthetic
aguagagaauuagaagguaa

SEQ ID NO: 782861 - RNA, 20 nt, Artificial Sequence
  Synthetic
aacagucuuguggaagguaa

SEQ ID NO: 782862 - RNA, 20 nt, Artificial Sequence
  Synthetic
cucuuugaguuguaagguaa

SEQ ID NO: 782863 - RNA, 20 nt, Artificial Sequence
  Synthetic
ucugacauucucccagguaa

SEQ ID NO: 782864 - RNA, 20 nt, Artificial Sequence
  Synthetic
ccucauucauucccagguaa

SEQ ID NO: 782865 - RNA, 20 nt, Artificial Sequence
  Synthetic
aaggucugcacagcagguaa

SEQ ID NO: 782866 - RNA, 20 nt, Artificial Sequence
  Synthetic
auugaaaaaucuagagguaa

SEQ ID NO: 782867 - RNA, 20 nt, Artificial Sequence
  Synthetic
aacuuuaguauaauagguaa

SEQ ID NO: 782868 - RNA, 20 nt, Artificial Sequence
  Synthetic
caacugaaguucaaggguaa

SEQ ID NO: 782869 - RNA, 20 nt, Artificial Sequence
  Synthetic
ccuaaaguauuuaaggguaa

SEQ ID NO: 782870 - RNA, 20 nt, Artificial Sequence
  Synthetic
uuagacuaaaacuaggguaa

SEQ ID NO: 782871 - RNA, 20 nt, Artificial Sequence
  Synthetic
caauaauugccuagggguaa

SEQ ID NO: 782872 - RNA, 20 nt, Artificial Sequence
  Synthetic
uccagaaacauuagggguaa

SEQ ID NO: 782873 - RNA, 20 nt, Artificial Sequence
  Synthetic
uagugacuuuuucgggguaa

SEQ ID NO: 782874 - RNA, 20 nt, Artificial Sequence
  Synthetic
ugucaaccacaaggggguaa

SEQ ID NO: 782875 - RNA, 20 nt, Artificial Sequence
  Synthetic
aaauaccugagacuggguaa

SEQ ID NO: 782876 - RNA, 20 nt, Artificial Sequence
  Synthetic
agaaagaagacccuggguaa

SEQ ID NO: 782877 - RNA, 20 nt, Artificial Sequence
  Synthetic
cuuuuuugggggguggguaa

SEQ ID NO: 782878 - RNA, 20 nt, Artificial Sequence
  Synthetic
uguauacuuaaaaaugguaa

SEQ ID NO: 782879 - RNA, 20 nt, Artificial Sequence
  Synthetic
auuacauuacauaaugguaa

SEQ ID NO: 782880 - RNA, 20 nt, Artificial Sequence
  Synthetic
aggccauuacauaaugguaa

SEQ ID NO: 782881 - RNA, 20 nt, Artificial Sequence
  Synthetic
ucagauguguuacaugguaa

SEQ ID NO: 782882 - RNA, 20 nt, Artificial Sequence
  Synthetic
aauuuuccuuaccaugguaa

SEQ ID NO: 782883 - RNA, 20 nt, Artificial Sequence
  Synthetic
auucaaccuauagaugguaa

SEQ ID NO: 782884 - RNA, 20 nt, Artificial Sequence
  Synthetic
uuuucaagaaacacugguaa

SEQ ID NO: 782885 - RNA, 20 nt, Artificial Sequence
  Synthetic
uggaaacacuugacugguaa

SEQ ID NO: 782886 - RNA, 20 nt, Artificial Sequence
  Synthetic
aaggggcuggaaucugguaa

SEQ ID NO: 782887 - RNA, 20 nt, Artificial Sequence
  Synthetic
aaauguaaauguucugguaa

SEQ ID NO: 782888 - RNA, 20 nt, Artificial Sequence
  Synthetic
uuagcaaagccaagugguaa

SEQ ID NO: 782889 - RNA, 20 nt, Artificial Sequence
  Synthetic
aauucuaauagcagugguaa

SEQ ID NO: 782890 - RNA, 20 nt, Artificial Sequence
  Synthetic
ucuuuuaauuucugugguaa

SEQ ID NO: 782891 - RNA, 20 nt, Artificial Sequence
  Synthetic
uuuuauuccauuguugguaa

SEQ ID NO: 782892 - RNA, 20 nt, Artificial Sequence
  Synthetic
cccugaagaugguuugguaa

SEQ ID NO: 782893 - RNA, 20 nt, Artificial Sequence
  Synthetic
agaauaaugaauuuugguaa

SEQ ID NO: 782894 - RNA, 20 nt, Artificial Sequence
  Synthetic
ugugaucaauaaaaauguaa

SEQ ID NO: 782895 - RNA, 20 nt, Artificial Sequence
  Synthetic
aacuugacuuuaaaauguaa

SEQ ID NO: 782896 - RNA, 20 nt, Artificial Sequence
  Synthetic
ugugguagggugaaauguaa

SEQ ID NO: 782897 - RNA, 20 nt, Artificial Sequence
  Synthetic
uuacuuuguacuaaauguaa

SEQ ID NO: 782898 - RNA, 20 nt, Artificial Sequence
  Synthetic
auaauggcaauccaauguaa

SEQ ID NO: 782899 - RNA, 20 nt, Artificial Sequence
  Synthetic
cuucucuugggagaauguaa

SEQ ID NO: 782900 - RNA, 20 nt, Artificial Sequence
  Synthetic
auuauaaacugagaauguaa

SEQ ID NO: 782901 - RNA, 20 nt, Artificial Sequence
  Synthetic
uuuuauuuguaugaauguaa

SEQ ID NO: 782902 - RNA, 20 nt, Artificial Sequence
  Synthetic
uagauaauuguuuaauguaa

SEQ ID NO: 782903 - RNA, 20 nt, Artificial Sequence
  Synthetic
aaaugauuuaguacauguaa

SEQ ID NO: 782904 - RNA, 20 nt, Artificial Sequence
  Synthetic
caggaagacauaccauguaa

SEQ ID NO: 782905 - RNA, 20 nt, Artificial Sequence
  Synthetic
uuuguauguugagcauguaa

SEQ ID NO: 782906 - RNA, 20 nt, Artificial Sequence
  Synthetic
uuuaaauuagaggcauguaa

SEQ ID NO: 782907 - RNA, 20 nt, Artificial Sequence
  Synthetic
auguccgagccaagauguaa

SEQ ID NO: 782908 - RNA, 20 nt, Artificial Sequence
  Synthetic
agagaaacaucaggauguaa

SEQ ID NO: 782909 - RNA, 20 nt, Artificial Sequence
  Synthetic
caggggcuacagauauguaa

SEQ ID NO: 782910 - RNA, 20 nt, Artificial Sequence
  Synthetic
auauuacauaugcuauguaa

SEQ ID NO: 782911 - RNA, 20 nt, Artificial Sequence
  Synthetic
ugauugccacauguauguaa

SEQ ID NO: 782912 - RNA, 20 nt, Artificial Sequence
  Synthetic
aucccuuuaccauuauguaa

SEQ ID NO: 782913 - RNA, 20 nt, Artificial Sequence
  Synthetic
auacuucaaugauuauguaa

SEQ ID NO: 782914 - RNA, 20 nt, Artificial Sequence
  Synthetic
aguggcacagauuuauguaa

SEQ ID NO: 782915 - RNA, 20 nt, Artificial Sequence
  Synthetic
uauuacuguggucacuguaa

SEQ ID NO: 782916 - RNA, 20 nt, Artificial Sequence
  Synthetic
ugccuucaaagagacuguaa

SEQ ID NO: 782917 - RNA, 20 nt, Artificial Sequence
  Synthetic
caaaaauguguugacuguaa

SEQ ID NO: 782918 - RNA, 20 nt, Artificial Sequence
  Synthetic
cagagucuuuuuuacuguaa

SEQ ID NO: 782919 - RNA, 20 nt, Artificial Sequence
  Synthetic
acaagaccuucacccuguaa

SEQ ID NO: 782920 - RNA, 20 nt, Artificial Sequence
  Synthetic
uaaauuuaaauuuccuguaa

SEQ ID NO: 782921 - RNA, 20 nt, Artificial Sequence
  Synthetic
caccaaccuaacagcuguaa

SEQ ID NO: 782922 - RNA, 20 nt, Artificial Sequence
  Synthetic
agggcuucccucagcuguaa

SEQ ID NO: 782923 - RNA, 20 nt, Artificial Sequence
  Synthetic
ucauugauuuagagcuguaa

SEQ ID NO: 782924 - RNA, 20 nt, Artificial Sequence
  Synthetic
aaaccuaucaucggcuguaa

SEQ ID NO: 782925 - RNA, 20 nt, Artificial Sequence
  Synthetic
ugauagaggguuaucuguaa

SEQ ID NO: 782926 - RNA, 20 nt, Artificial Sequence
  Synthetic
ugcuuaguuguucucuguaa

SEQ ID NO: 782927 - RNA, 20 nt, Artificial Sequence
  Synthetic
cagcauuugcuugucuguaa

SEQ ID NO: 782928 - RNA, 20 nt, Artificial Sequence
  Synthetic
agcauucaaucauucuguaa

SEQ ID NO: 782929 - RNA, 20 nt, Artificial Sequence
  Synthetic
cugcauuuuuucuucuguaa

SEQ ID NO: 782930 - RNA, 20 nt, Artificial Sequence
  Synthetic
uauuccugccuuuucuguaa

SEQ ID NO: 782931 - RNA, 20 nt, Artificial Sequence
  Synthetic
auggauauuuuuuucuguaa

SEQ ID NO: 782932 - RNA, 20 nt, Artificial Sequence
  Synthetic
aggguuggaaauaaguguaa

SEQ ID NO: 782933 - RNA, 20 nt, Artificial Sequence
  Synthetic
ccugacagaaaacaguguaa

SEQ ID NO: 782934 - RNA, 20 nt, Artificial Sequence
  Synthetic
uuguccauguuggaguguaa

SEQ ID NO: 782935 - RNA, 20 nt, Artificial Sequence
  Synthetic
uuugcaucaaaaugguguaa

SEQ ID NO: 782936 - RNA, 20 nt, Artificial Sequence
  Synthetic
auuucauagaguugguguaa

SEQ ID NO: 782937 - RNA, 20 nt, Artificial Sequence
  Synthetic
uaauagcauguaauguguaa

SEQ ID NO: 782938 - RNA, 20 nt, Artificial Sequence
  Synthetic
cugccagauaaccuguguaa

SEQ ID NO: 782939 - RNA, 20 nt, Artificial Sequence
  Synthetic
cugaucacuuaccuguguaa

SEQ ID NO: 782940 - RNA, 20 nt, Artificial Sequence
  Synthetic
uacaugcauagauuguguaa

SEQ ID NO: 782941 - RNA, 20 nt, Artificial Sequence
  Synthetic
cacuguagcuucuuguguaa

SEQ ID NO: 782942 - RNA, 20 nt, Artificial Sequence
  Synthetic
cuaaccuuccaaaauuguaa

SEQ ID NO: 782943 - RNA, 20 nt, Artificial Sequence
  Synthetic
aauacuaauagaaauuguaa

SEQ ID NO: 782944 - RNA, 20 nt, Artificial Sequence
  Synthetic
cuacagcagaguaauuguaa

SEQ ID NO: 782945 - RNA, 20 nt, Artificial Sequence
  Synthetic
augguugccauacauuguaa

SEQ ID NO: 782946 - RNA, 20 nt, Artificial Sequence
  Synthetic
aucuucauucuacauuguaa

SEQ ID NO: 782947 - RNA, 20 nt, Artificial Sequence
  Synthetic
aucaaaaaauaaacuuguaa

SEQ ID NO: 782948 - RNA, 20 nt, Artificial Sequence
  Synthetic
uccuucuugccaccuuguaa

SEQ ID NO: 782949 - RNA, 20 nt, Artificial Sequence
  Synthetic
auauucuaccuuccuuguaa

SEQ ID NO: 782950 - RNA, 20 nt, Artificial Sequence
  Synthetic
auaaugucucuggcuuguaa

SEQ ID NO: 782951 - RNA, 20 nt, Artificial Sequence
  Synthetic
accacaucuguggcuuguaa

SEQ ID NO: 782952 - RNA, 20 nt, Artificial Sequence
  Synthetic
cuaauuucucccauuuguaa

SEQ ID NO: 782953 - RNA, 20 nt, Artificial Sequence
  Synthetic
aaguacuacauguuuuguaa

SEQ ID NO: 782954 - RNA, 20 nt, Artificial Sequence
  Synthetic
agcacaacuuuuuuuuguaa

SEQ ID NO: 782955 - RNA, 20 nt, Artificial Sequence
  Synthetic
acagcuuagaaaaaaauuaa

SEQ ID NO: 782956 - RNA, 20 nt, Artificial Sequence
  Synthetic
uuuguuuuagaaaaaauuaa

SEQ ID NO: 782957 - RNA, 20 nt, Artificial Sequence
  Synthetic
aaaaagugauaaaaaauuaa

SEQ ID NO: 782958 - RNA, 20 nt, Artificial Sequence
  Synthetic
uugaauucagagaaaauuaa

SEQ ID NO: 782959 - RNA, 20 nt, Artificial Sequence
  Synthetic
aacccuaaguauaaaauuaa

SEQ ID NO: 782960 - RNA, 20 nt, Artificial Sequence
  Synthetic
ugguuugccaugcaaauuaa

SEQ ID NO: 782961 - RNA, 20 nt, Artificial Sequence
  Synthetic
cuaagaauuuuagaaauuaa

SEQ ID NO: 782962 - RNA, 20 nt, Artificial Sequence
  Synthetic
aaauuagaaguggaaauuaa

SEQ ID NO: 782963 - RNA, 20 nt, Artificial Sequence
  Synthetic
aauguucccaaugaaauuaa

SEQ ID NO: 782964 - RNA, 20 nt, Artificial Sequence
  Synthetic
uuccaauuuggguaaauuaa

SEQ ID NO: 782965 - RNA, 20 nt, Artificial Sequence
  Synthetic
acagcaaaggaaacaauuaa

SEQ ID NO: 782966 - RNA, 20 nt, Artificial Sequence
  Synthetic
uggaugggugugacaauuaa

SEQ ID NO: 782967 - RNA, 20 nt, Artificial Sequence
  Synthetic
caaagaaagaagucaauuaa

SEQ ID NO: 782968 - RNA, 20 nt, Artificial Sequence
  Synthetic
aguagcuaaaaaagaauuaa

SEQ ID NO: 782969 - RNA, 20 nt, Artificial Sequence
  Synthetic
uuccuuccacauagaauuaa

SEQ ID NO: 782970 - RNA, 20 nt, Artificial Sequence
  Synthetic
agguuuuccuaaggaauuaa

SEQ ID NO: 782971 - RNA, 20 nt, Artificial Sequence
  Synthetic
uaagagaaaaagggaauuaa

SEQ ID NO: 782972 - RNA, 20 nt, Artificial Sequence
  Synthetic
uaaguaaaauaaugaauuaa

SEQ ID NO: 782973 - RNA, 20 nt, Artificial Sequence
  Synthetic
ugaaugaaaacaugaauuaa

SEQ ID NO: 782974 - RNA, 20 nt, Artificial Sequence
  Synthetic
uuaaacauuuggugaauuaa

SEQ ID NO: 782975 - RNA, 20 nt, Artificial Sequence
  Synthetic
auuaauacagauugaauuaa

SEQ ID NO: 782976 - RNA, 20 nt, Artificial Sequence
  Synthetic
cacaaucaauuuugaauuaa

SEQ ID NO: 782977 - RNA, 20 nt, Artificial Sequence
  Synthetic
uugaauuuucuguuaauuaa

SEQ ID NO: 782978 - RNA, 20 nt, Artificial Sequence
  Synthetic
auauauaaagcaaacauuaa

SEQ ID NO: 782979 - RNA, 20 nt, Artificial Sequence
  Synthetic
uaacauuacccuaacauuaa

SEQ ID NO: 782980 - RNA, 20 nt, Artificial Sequence
  Synthetic
uuuaaaaauggacacauuaa

SEQ ID NO: 782981 - RNA, 20 nt, Artificial Sequence
  Synthetic
aacaacagccugcacauuaa

SEQ ID NO: 782982 - RNA, 20 nt, Artificial Sequence
  Synthetic
auugugacuauggacauuaa

SEQ ID NO: 782983 - RNA, 20 nt, Artificial Sequence
  Synthetic
uuugaaaaauucuacauuaa

SEQ ID NO: 782984 - RNA, 20 nt, Artificial Sequence
  Synthetic
uauaugcaucuuuacauuaa

SEQ ID NO: 782985 - RNA, 20 nt, Artificial Sequence
  Synthetic
uaaauuaaaaacaccauuaa

SEQ ID NO: 782986 - RNA, 20 nt, Artificial Sequence
  Synthetic
uuuauccuguccaccauuaa

SEQ ID NO: 782987 - RNA, 20 nt, Artificial Sequence
  Synthetic
ucaaccuaggugcccauuaa

SEQ ID NO: 782988 - RNA, 20 nt, Artificial Sequence
  Synthetic
augccuccaggagccauuaa

SEQ ID NO: 782989 - RNA, 20 nt, Artificial Sequence
  Synthetic
auuagaacugagagcauuaa

SEQ ID NO: 782990 - RNA, 20 nt, Artificial Sequence
  Synthetic
aguguaauauugugcauuaa

SEQ ID NO: 782991 - RNA, 20 nt, Artificial Sequence
  Synthetic
agauguuuugcaaucauuaa

SEQ ID NO: 782992 - RNA, 20 nt, Artificial Sequence
  Synthetic
aucaguugacuaaucauuaa

SEQ ID NO: 782993 - RNA, 20 nt, Artificial Sequence
  Synthetic
agaucuuugaguaucauuaa

SEQ ID NO: 782994 - RNA, 20 nt, Artificial Sequence
  Synthetic
aaucaaaaagguaucauuaa

SEQ ID NO: 782995 - RNA, 20 nt, Artificial Sequence
  Synthetic
acuauugugggugucauuaa

SEQ ID NO: 782996 - RNA, 20 nt, Artificial Sequence
  Synthetic
uuauugaaagcauucauuaa

SEQ ID NO: 782997 - RNA, 20 nt, Artificial Sequence
  Synthetic
auagcuauaaaguucauuaa

SEQ ID NO: 782998 - RNA, 20 nt, Artificial Sequence
  Synthetic
ccaaaaaaaauguucauuaa

SEQ ID NO: 782999 - RNA, 20 nt, Artificial Sequence
  Synthetic
uuaaaugcaauguucauuaa

SEQ ID NO: 783000 - RNA, 20 nt, Artificial Sequence
  Synthetic
aaauaaggaacaaagauuaa

SEQ ID NO: 783001 - RNA, 20 nt, Artificial Sequence
  Synthetic
agguauuagucaaagauuaa

SEQ ID NO: 783002 - RNA, 20 nt, Artificial Sequence
  Synthetic
uauuuuaggagaaagauuaa

SEQ ID NO: 783003 - RNA, 20 nt, Artificial Sequence
  Synthetic
caugaccuccagaagauuaa

SEQ ID NO: 783004 - RNA, 20 nt, Artificial Sequence
  Synthetic
agaaggaagacgaagauuaa

SEQ ID NO: 783005 - RNA, 20 nt, Artificial Sequence
  Synthetic
ucuuacgagugugagauuaa

SEQ ID NO: 783006 - RNA, 20 nt, Artificial Sequence
  Synthetic
aaacacuguucuaggauuaa

SEQ ID NO: 783007 - RNA, 20 nt, Artificial Sequence
  Synthetic
ucuacuacccuuaggauuaa

SEQ ID NO: 783008 - RNA, 20 nt, Artificial Sequence
  Synthetic
caggauuguuuuaggauuaa

SEQ ID NO: 783009 - RNA, 20 nt, Artificial Sequence
  Synthetic
agagaugaaacugggauuaa

SEQ ID NO: 783010 - RNA, 20 nt, Artificial Sequence
  Synthetic
uguucaaaucauuggauuaa

SEQ ID NO: 783011 - RNA, 20 nt, Artificial Sequence
  Synthetic
caaguaaaacuaaugauuaa

SEQ ID NO: 783012 - RNA, 20 nt, Artificial Sequence
  Synthetic
uuguuauuggaacugauuaa

SEQ ID NO: 783013 - RNA, 20 nt, Artificial Sequence
  Synthetic
aaccagcagucauugauuaa

SEQ ID NO: 783014 - RNA, 20 nt, Artificial Sequence
  Synthetic
ucuuuacugcuguugauuaa

SEQ ID NO: 783015 - RNA, 20 nt, Artificial Sequence
  Synthetic
aacuuuuugaggaauauuaa

SEQ ID NO: 783016 - RNA, 20 nt, Artificial Sequence
  Synthetic
caccuaaauguuaauauuaa

SEQ ID NO: 783017 - RNA, 20 nt, Artificial Sequence
  Synthetic
cauuuuaaauaacauauuaa

SEQ ID NO: 783018 - RNA, 20 nt, Artificial Sequence
  Synthetic
aaaaauuauucccauauuaa

SEQ ID NO: 783019 - RNA, 20 nt, Artificial Sequence
  Synthetic
aaaguaaaauuggauauuaa

SEQ ID NO: 783020 - RNA, 20 nt, Artificial Sequence
  Synthetic
cuuaaacaaugcuauauuaa

SEQ ID NO: 783021 - RNA, 20 nt, Artificial Sequence
  Synthetic
uaaauuuagacuuauauuaa

SEQ ID NO: 783022 - RNA, 20 nt, Artificial Sequence
  Synthetic
uaaaauuuaauuuauauuaa

SEQ ID NO: 783023 - RNA, 20 nt, Artificial Sequence
  Synthetic
ccagggcacauuuauauuaa

SEQ ID NO: 783024 - RNA, 20 nt, Artificial Sequence
  Synthetic
cugucucaaaugacuauuaa

SEQ ID NO: 783025 - RNA, 20 nt, Artificial Sequence
  Synthetic
uucugauguuaugcuauuaa

SEQ ID NO: 783026 - RNA, 20 nt, Artificial Sequence
  Synthetic
auucaagagcuaucuauuaa

SEQ ID NO: 783027 - RNA, 20 nt, Artificial Sequence
  Synthetic
uuaaugauacuaaguauuaa

SEQ ID NO: 783028 - RNA, 20 nt, Artificial Sequence
  Synthetic
ugccauugugacaguauuaa

SEQ ID NO: 783029 - RNA, 20 nt, Artificial Sequence
  Synthetic
aaauggggcuuuuguauuaa

SEQ ID NO: 783030 - RNA, 20 nt, Artificial Sequence
  Synthetic
caaggggaggaaauuauuaa

SEQ ID NO: 783031 - RNA, 20 nt, Artificial Sequence
  Synthetic
auguauuuuucaauuauuaa

SEQ ID NO: 783032 - RNA, 20 nt, Artificial Sequence
  Synthetic
cugggugaucauauuauuaa

SEQ ID NO: 783033 - RNA, 20 nt, Artificial Sequence
  Synthetic
aaaugaaucuguauuauuaa

SEQ ID NO: 783034 - RNA, 20 nt, Artificial Sequence
  Synthetic
uucauauuuuaaguuauuaa

SEQ ID NO: 783035 - RNA, 20 nt, Artificial Sequence
  Synthetic
aaagauaggucaguuauuaa

SEQ ID NO: 783036 - RNA, 20 nt, Artificial Sequence
  Synthetic
uuuuuucagugcuuuauuaa

SEQ ID NO: 783037 - RNA, 20 nt, Artificial Sequence
  Synthetic
cacaaagccuauuuuauuaa

SEQ ID NO: 783038 - RNA, 20 nt, Artificial Sequence
  Synthetic
cagcugaauauuuuuauuaa

SEQ ID NO: 783039 - RNA, 20 nt, Artificial Sequence
  Synthetic
ucuggaauuauuuuuauuaa

SEQ ID NO: 783040 - RNA, 20 nt, Artificial Sequence
  Synthetic
ucaaauggagaaaaacuuaa

SEQ ID NO: 783041 - RNA, 20 nt, Artificial Sequence
  Synthetic
agauacagggcaaaacuuaa

SEQ ID NO: 783042 - RNA, 20 nt, Artificial Sequence
  Synthetic
ugagaccuauauaaacuuaa

SEQ ID NO: 783043 - RNA, 20 nt, Artificial Sequence
  Synthetic
ugucaacacucucaacuuaa

SEQ ID NO: 783044 - RNA, 20 nt, Artificial Sequence
  Synthetic
uuauaccacacggaacuuaa

SEQ ID NO: 783045 - RNA, 20 nt, Artificial Sequence
  Synthetic
uugggagaagcugaacuuaa

SEQ ID NO: 783046 - RNA, 20 nt, Artificial Sequence
  Synthetic
uauagucaguaauaacuuaa

SEQ ID NO: 783047 - RNA, 20 nt, Artificial Sequence
  Synthetic
aucaccacaaaguaacuuaa

SEQ ID NO: 783048 - RNA, 20 nt, Artificial Sequence
  Synthetic
uucauuuuuauuuaacuuaa

SEQ ID NO: 783049 - RNA, 20 nt, Artificial Sequence
  Synthetic
agagcuauaaaaacacuuaa

SEQ ID NO: 783050 - RNA, 20 nt, Artificial Sequence
  Synthetic
ugguaaaaaauaacacuuaa

SEQ ID NO: 783051 - RNA, 20 nt, Artificial Sequence
  Synthetic
ugacuuuugcuaacacuuaa

SEQ ID NO: 783052 - RNA, 20 nt, Artificial Sequence
  Synthetic
uuucucaagcaggcacuuaa

SEQ ID NO: 783053 - RNA, 20 nt, Artificial Sequence
  Synthetic
ucuuuggcaauaucacuuaa

SEQ ID NO: 783054 - RNA, 20 nt, Artificial Sequence
  Synthetic
acaaaugauuacagacuuaa

SEQ ID NO: 783055 - RNA, 20 nt, Artificial Sequence
  Synthetic
auuggcagauagagacuuaa

SEQ ID NO: 783056 - RNA, 20 nt, Artificial Sequence
  Synthetic
accagauuuuaaauacuuaa

SEQ ID NO: 783057 - RNA, 20 nt, Artificial Sequence
  Synthetic
caccugguuuaacuacuuaa

SEQ ID NO: 783058 - RNA, 20 nt, Artificial Sequence
  Synthetic
cagcuucucuuccuacuuaa

SEQ ID NO: 783059 - RNA, 20 nt, Artificial Sequence
  Synthetic
cuuacaccagugcuacuuaa

SEQ ID NO: 783060 - RNA, 20 nt, Artificial Sequence
  Synthetic
ccacuucagccucuacuuaa

SEQ ID NO: 783061 - RNA, 20 nt, Artificial Sequence
  Synthetic
uauaccuguuugguacuuaa

SEQ ID NO: 783062 - RNA, 20 nt, Artificial Sequence
  Synthetic
uuuaaaugcaauaaccuuaa

SEQ ID NO: 783063 - RNA, 20 nt, Artificial Sequence
  Synthetic
aguggcucauuucaccuuaa

SEQ ID NO: 783064 - RNA, 20 nt, Artificial Sequence
  Synthetic
aagggaaucugcuaccuuaa

SEQ ID NO: 783065 - RNA, 20 nt, Artificial Sequence
  Synthetic
auaaauagucucacccuuaa

SEQ ID NO: 783066 - RNA, 20 nt, Artificial Sequence
  Synthetic
aacauaaugggaagccuuaa

SEQ ID NO: 783067 - RNA, 20 nt, Artificial Sequence
  Synthetic
auuuccaaauaaugccuuaa

SEQ ID NO: 783068 - RNA, 20 nt, Artificial Sequence
  Synthetic
acuacuccuuuuauccuuaa

SEQ ID NO: 783069 - RNA, 20 nt, Artificial Sequence
  Synthetic
uuaucuauaggucuccuuaa

SEQ ID NO: 783070 - RNA, 20 nt, Artificial Sequence
  Synthetic
agccuuuguaucuuccuuaa

SEQ ID NO: 783071 - RNA, 20 nt, Artificial Sequence
  Synthetic
ucucuccuuccuuuccuuaa

SEQ ID NO: 783072 - RNA, 20 nt, Artificial Sequence
  Synthetic
uauggauuuuuaaagcuuaa

SEQ ID NO: 783073 - RNA, 20 nt, Artificial Sequence
  Synthetic
auaaguaaaaagaggcuuaa

SEQ ID NO: 783074 - RNA, 20 nt, Artificial Sequence
  Synthetic
auauuggagguggggcuuaa

SEQ ID NO: 783075 - RNA, 20 nt, Artificial Sequence
  Synthetic
aacugugcagccuggcuuaa

SEQ ID NO: 783076 - RNA, 20 nt, Artificial Sequence
  Synthetic
cuaucagguuucaugcuuaa

SEQ ID NO: 783077 - RNA, 20 nt, Artificial Sequence
  Synthetic
aaaauaucuaaacugcuuaa

SEQ ID NO: 783078 - RNA, 20 nt, Artificial Sequence
  Synthetic
uaucacaaccaucugcuuaa

SEQ ID NO: 783079 - RNA, 20 nt, Artificial Sequence
  Synthetic
ugcuguauuccucugcuuaa

SEQ ID NO: 783080 - RNA, 20 nt, Artificial Sequence
  Synthetic
uuuuccacagcagugcuuaa

SEQ ID NO: 783081 - RNA, 20 nt, Artificial Sequence
  Synthetic
aaggauaggaaauugcuuaa

SEQ ID NO: 783082 - RNA, 20 nt, Artificial Sequence
  Synthetic
aaucacccaugauugcuuaa

SEQ ID NO: 783083 - RNA, 20 nt, Artificial Sequence
  Synthetic
aaaggggaacuauugcuuaa

SEQ ID NO: 783084 - RNA, 20 nt, Artificial Sequence
  Synthetic
ugcuuugugcuguugcuuaa

SEQ ID NO: 783085 - RNA, 20 nt, Artificial Sequence
  Synthetic
auauuauaguuguugcuuaa

SEQ ID NO: 783086 - RNA, 20 nt, Artificial Sequence
  Synthetic
cuaaacauuauuuugcuuaa

SEQ ID NO: 783087 - RNA, 20 nt, Artificial Sequence
  Synthetic
ugagcaaacaaaaaucuuaa

SEQ ID NO: 783088 - RNA, 20 nt, Artificial Sequence
  Synthetic
agucagauuucaaaucuuaa

SEQ ID NO: 783089 - RNA, 20 nt, Artificial Sequence
  Synthetic
agauuguugaccaaucuuaa

SEQ ID NO: 783090 - RNA, 20 nt, Artificial Sequence
  Synthetic
cagagacacgucaaucuuaa

SEQ ID NO: 783091 - RNA, 20 nt, Artificial Sequence
  Synthetic
agcacuucauuuaaucuuaa

SEQ ID NO: 783092 - RNA, 20 nt, Artificial Sequence
  Synthetic
auauguuauuuuaaucuuaa

SEQ ID NO: 783093 - RNA, 20 nt, Artificial Sequence
  Synthetic
auuguuucucagcaucuuaa

SEQ ID NO: 783094 - RNA, 20 nt, Artificial Sequence
  Synthetic
aaacaauucauagaucuuaa

SEQ ID NO: 783095 - RNA, 20 nt, Artificial Sequence
  Synthetic
ugucuuguuucugaucuuaa

SEQ ID NO: 783096 - RNA, 20 nt, Artificial Sequence
  Synthetic
augaugcaaucaccucuuaa

SEQ ID NO: 783097 - RNA, 20 nt, Artificial Sequence
  Synthetic
auaacuggauaagcucuuaa

SEQ ID NO: 783098 - RNA, 20 nt, Artificial Sequence
  Synthetic
aaacagacuauggcucuuaa

SEQ ID NO: 783099 - RNA, 20 nt, Artificial Sequence
  Synthetic
auuauaucagagucucuuaa

SEQ ID NO: 783100 - RNA, 20 nt, Artificial Sequence
  Synthetic
accccaaccucuucucuuaa

SEQ ID NO: 783101 - RNA, 20 nt, Artificial Sequence
  Synthetic
caacaccauccaagucuuaa

SEQ ID NO: 783102 - RNA, 20 nt, Artificial Sequence
  Synthetic
uagugaauuuucagucuuaa

SEQ ID NO: 783103 - RNA, 20 nt, Artificial Sequence
  Synthetic
aucucugggaugggucuuaa

SEQ ID NO: 783104 - RNA, 20 nt, Artificial Sequence
  Synthetic
aguuguaguaacugucuuaa

SEQ ID NO: 783105 - RNA, 20 nt, Artificial Sequence
  Synthetic
uaauauuuauggugucuuaa

SEQ ID NO: 783106 - RNA, 20 nt, Artificial Sequence
  Synthetic
cuguaaguuagaauucuuaa

SEQ ID NO: 783107 - RNA, 20 nt, Artificial Sequence
  Synthetic
aauguuuaacacauucuuaa

SEQ ID NO: 783108 - RNA, 20 nt, Artificial Sequence
  Synthetic
uuuauaaucuucauucuuaa

SEQ ID NO: 783109 - RNA, 20 nt, Artificial Sequence
  Synthetic
aguuaagaacagauucuuaa

SEQ ID NO: 783110 - RNA, 20 nt, Artificial Sequence
  Synthetic
accuacuuaaaacuucuuaa

SEQ ID NO: 783111 - RNA, 20 nt, Artificial Sequence
  Synthetic
acuggggcuugacuucuuaa

SEQ ID NO: 783112 - RNA, 20 nt, Artificial Sequence
  Synthetic
aaaaccaauuaucuucuuaa

SEQ ID NO: 783113 - RNA, 20 nt, Artificial Sequence
  Synthetic
ucaaccuagugauuucuuaa

SEQ ID NO: 783114 - RNA, 20 nt, Artificial Sequence
  Synthetic
ucaucccaugucuuucuuaa

SEQ ID NO: 783115 - RNA, 20 nt, Artificial Sequence
  Synthetic
ugaaucacaaauuuucuuaa

SEQ ID NO: 783116 - RNA, 20 nt, Artificial Sequence
  Synthetic
uuauuauuccuuuuucuuaa

SEQ ID NO: 783117 - RNA, 20 nt, Artificial Sequence
  Synthetic
uuguuacagcaaaaaguuaa

SEQ ID NO: 783118 - RNA, 20 nt, Artificial Sequence
  Synthetic
uaauguaaaugacaaguuaa

SEQ ID NO: 783119 - RNA, 20 nt, Artificial Sequence
  Synthetic
uuagugucccuucaaguuaa

SEQ ID NO: 783120 - RNA, 20 nt, Artificial Sequence
  Synthetic
uuccauauggcugaaguuaa

SEQ ID NO: 783121 - RNA, 20 nt, Artificial Sequence
  Synthetic
uagaugagucuugaaguuaa

SEQ ID NO: 783122 - RNA, 20 nt, Artificial Sequence
  Synthetic
uuauguauaguuuaaguuaa

SEQ ID NO: 783123 - RNA, 20 nt, Artificial Sequence
  Synthetic
aaaaauaaaaaaacaguuaa

SEQ ID NO: 783124 - RNA, 20 nt, Artificial Sequence
  Synthetic
aaugcuaaaugaccaguuaa

SEQ ID NO: 783125 - RNA, 20 nt, Artificial Sequence
  Synthetic
ucuuuauaacugccaguuaa

SEQ ID NO: 783126 - RNA, 20 nt, Artificial Sequence
  Synthetic
ucaugcuacaugucaguuaa

SEQ ID NO: 783127 - RNA, 20 nt, Artificial Sequence
  Synthetic
uacggaaaguguucaguuaa

SEQ ID NO: 783128 - RNA, 20 nt, Artificial Sequence
  Synthetic
ugaauuucaggaagaguuaa

SEQ ID NO: 783129 - RNA, 20 nt, Artificial Sequence
  Synthetic
aauguuaaaugaagaguuaa

SEQ ID NO: 783130 - RNA, 20 nt, Artificial Sequence
  Synthetic
aaugcuaaaugacgaguuaa

SEQ ID NO: 783131 - RNA, 20 nt, Artificial Sequence
  Synthetic
aaugguaaaugacgaguuaa

SEQ ID NO: 783132 - RNA, 20 nt, Artificial Sequence
  Synthetic
uaauguaaaugacgaguuaa

SEQ ID NO: 783133 - RNA, 20 nt, Artificial Sequence
  Synthetic
aauguucaaugacgaguuaa

SEQ ID NO: 783134 - RNA, 20 nt, Artificial Sequence
  Synthetic
aaucaaggcauaggaguuaa

SEQ ID NO: 783135 - RNA, 20 nt, Artificial Sequence
  Synthetic
uagucuuacuuaggaguuaa

SEQ ID NO: 783136 - RNA, 20 nt, Artificial Sequence
  Synthetic
cccacaaucauaugaguuaa

SEQ ID NO: 783137 - RNA, 20 nt, Artificial Sequence
  Synthetic
aaagaauggagcauaguuaa

SEQ ID NO: 783138 - RNA, 20 nt, Artificial Sequence
  Synthetic
ccuugguuuaauauaguuaa

SEQ ID NO: 783139 - RNA, 20 nt, Artificial Sequence
  Synthetic
acaagaaaauauauaguuaa

SEQ ID NO: 783140 - RNA, 20 nt, Artificial Sequence
  Synthetic
aacaguuuauuccuaguuaa

SEQ ID NO: 783141 - RNA, 20 nt, Artificial Sequence
  Synthetic
uaaaacauacaucuaguuaa

SEQ ID NO: 783142 - RNA, 20 nt, Artificial Sequence
  Synthetic
ucuuuggagaaguuaguuaa

SEQ ID NO: 783143 - RNA, 20 nt, Artificial Sequence
  Synthetic
uugaaaaaacaucacguuaa

SEQ ID NO: 783144 - RNA, 20 nt, Artificial Sequence
  Synthetic
uuacuucuuucucacguuaa

SEQ ID NO: 783145 - RNA, 20 nt, Artificial Sequence
  Synthetic
aggucacaaugcugcguuaa

SEQ ID NO: 783146 - RNA, 20 nt, Artificial Sequence
  Synthetic
augcaauauuuucucguuaa

SEQ ID NO: 783147 - RNA, 20 nt, Artificial Sequence
  Synthetic
ucauagucaaaauagguuaa

SEQ ID NO: 783148 - RNA, 20 nt, Artificial Sequence
  Synthetic
uucauaaauuaauagguuaa

SEQ ID NO: 783149 - RNA, 20 nt, Artificial Sequence
  Synthetic
cucacccuaacaaggguuaa

SEQ ID NO: 783150 - RNA, 20 nt, Artificial Sequence
  Synthetic
agagugucaaggaggguuaa

SEQ ID NO: 783151 - RNA, 20 nt, Artificial Sequence
  Synthetic
uaugcuuacuaccugguuaa

SEQ ID NO: 783152 - RNA, 20 nt, Artificial Sequence
  Synthetic
uuggaaauaaagcugguuaa

SEQ ID NO: 783153 - RNA, 20 nt, Artificial Sequence
  Synthetic
uuaaucuaagugcugguuaa

SEQ ID NO: 783154 - RNA, 20 nt, Artificial Sequence
  Synthetic
aaugaaggaaaaaauguuaa

SEQ ID NO: 783155 - RNA, 20 nt, Artificial Sequence
  Synthetic
cuaacaagaagaaauguuaa

SEQ ID NO: 783156 - RNA, 20 nt, Artificial Sequence
  Synthetic
uauuuuauuuauaauguuaa

SEQ ID NO: 783157 - RNA, 20 nt, Artificial Sequence
  Synthetic
ucaucagaggguaauguuaa

SEQ ID NO: 783158 - RNA, 20 nt, Artificial Sequence
  Synthetic
aaaauaaaacuagauguuaa

SEQ ID NO: 783159 - RNA, 20 nt, Artificial Sequence
  Synthetic
uuuucauuuuuggauguuaa

SEQ ID NO: 783160 - RNA, 20 nt, Artificial Sequence
  Synthetic
aauaaauguguugauguuaa

SEQ ID NO: 783161 - RNA, 20 nt, Artificial Sequence
  Synthetic
uucuaaaguuucuauguuaa

SEQ ID NO: 783162 - RNA, 20 nt, Artificial Sequence
  Synthetic
ucuuaaucuagguauguuaa

SEQ ID NO: 783163 - RNA, 20 nt, Artificial Sequence
  Synthetic
auuuauugaaugccuguuaa

SEQ ID NO: 783164 - RNA, 20 nt, Artificial Sequence
  Synthetic
auacucacauccgcuguuaa

SEQ ID NO: 783165 - RNA, 20 nt, Artificial Sequence
  Synthetic
aaaaaaccagaaucuguuaa

SEQ ID NO: 783166 - RNA, 20 nt, Artificial Sequence
  Synthetic
agguucuuuauauguguuaa

SEQ ID NO: 783167 - RNA, 20 nt, Artificial Sequence
  Synthetic
cagcaauuauuuuguguuaa

SEQ ID NO: 783168 - RNA, 20 nt, Artificial Sequence
  Synthetic
aaauuaagagaaauuguuaa

SEQ ID NO: 783169 - RNA, 20 nt, Artificial Sequence
  Synthetic
agagcaucuggaauuguuaa

SEQ ID NO: 783170 - RNA, 20 nt, Artificial Sequence
  Synthetic
uucucugguuauauuguuaa

SEQ ID NO: 783171 - RNA, 20 nt, Artificial Sequence
  Synthetic
aaacuauugauuauuguuaa

SEQ ID NO: 783172 - RNA, 20 nt, Artificial Sequence
  Synthetic
agacuaauaaugguuguuaa

SEQ ID NO: 783173 - RNA, 20 nt, Artificial Sequence
  Synthetic
cuaggaauauugguuguuaa

SEQ ID NO: 783174 - RNA, 20 nt, Artificial Sequence
  Synthetic
uaacaauggauauuuguuaa

SEQ ID NO: 783175 - RNA, 20 nt, Artificial Sequence
  Synthetic
aauuucagagcuuuuguuaa

SEQ ID NO: 783176 - RNA, 20 nt, Artificial Sequence
  Synthetic
uacccauaaaaaaaauuuaa

SEQ ID NO: 783177 - RNA, 20 nt, Artificial Sequence
  Synthetic
agcugcugaaacaaauuuaa

SEQ ID NO: 783178 - RNA, 20 nt, Artificial Sequence
  Synthetic
ucuguuaaugacaaauuuaa

SEQ ID NO: 783179 - RNA, 20 nt, Artificial Sequence
  Synthetic
agagagaaaagcaaauuuaa

SEQ ID NO: 783180 - RNA, 20 nt, Artificial Sequence
  Synthetic
agcagagguacacaauuuaa

SEQ ID NO: 783181 - RNA, 20 nt, Artificial Sequence
  Synthetic
ucaucuuaaaaauaauuuaa

SEQ ID NO: 783182 - RNA, 20 nt, Artificial Sequence
  Synthetic
ugaauacuguuauaauuuaa

SEQ ID NO: 783183 - RNA, 20 nt, Artificial Sequence
  Synthetic
acauagaacuuguaauuuaa

SEQ ID NO: 783184 - RNA, 20 nt, Artificial Sequence
  Synthetic
uggcauuuagauuaauuuaa

SEQ ID NO: 783185 - RNA, 20 nt, Artificial Sequence
  Synthetic
aaccauuguuuaacauuuaa

SEQ ID NO: 783186 - RNA, 20 nt, Artificial Sequence
  Synthetic
acagugaauaucacauuuaa

SEQ ID NO: 783187 - RNA, 20 nt, Artificial Sequence
  Synthetic
uagaguuguaucacauuuaa

SEQ ID NO: 783188 - RNA, 20 nt, Artificial Sequence
  Synthetic
agcuuauuauauacauuuaa

SEQ ID NO: 783189 - RNA, 20 nt, Artificial Sequence
  Synthetic
ucuauuccauuuccauuuaa

SEQ ID NO: 783190 - RNA, 20 nt, Artificial Sequence
  Synthetic
ccaaauccuguggcauuuaa

SEQ ID NO: 783191 - RNA, 20 nt, Artificial Sequence
  Synthetic
aguaaccucaaugcauuuaa

SEQ ID NO: 783192 - RNA, 20 nt, Artificial Sequence
  Synthetic
uaagacucauaugcauuuaa

SEQ ID NO: 783193 - RNA, 20 nt, Artificial Sequence
  Synthetic
aguaaacaaccugcauuuaa

SEQ ID NO: 783194 - RNA, 20 nt, Artificial Sequence
  Synthetic
uauagauuuucuucauuuaa

SEQ ID NO: 783195 - RNA, 20 nt, Artificial Sequence
  Synthetic
uuacaugauaaaagauuuaa

SEQ ID NO: 783196 - RNA, 20 nt, Artificial Sequence
  Synthetic
accuacuugaacagauuuaa

SEQ ID NO: 783197 - RNA, 20 nt, Artificial Sequence
  Synthetic
augucugagccuagauuuaa

SEQ ID NO: 783198 - RNA, 20 nt, Artificial Sequence
  Synthetic
aacuauuguuuuagauuuaa

SEQ ID NO: 783199 - RNA, 20 nt, Artificial Sequence
  Synthetic
auacaggaaaaaggauuuaa

SEQ ID NO: 783200 - RNA, 20 nt, Artificial Sequence
  Synthetic
accuggggaaaaugauuuaa

SEQ ID NO: 783201 - RNA, 20 nt, Artificial Sequence
  Synthetic
cagaagauguacugauuuaa

SEQ ID NO: 783202 - RNA, 20 nt, Artificial Sequence
  Synthetic
agacuaauaaaaauauuuaa

SEQ ID NO: 783203 - RNA, 20 nt, Artificial Sequence
  Synthetic
aacucaugugaaauauuuaa

SEQ ID NO: 783204 - RNA, 20 nt, Artificial Sequence
  Synthetic
uggagaacauuaauauuuaa

SEQ ID NO: 783205 - RNA, 20 nt, Artificial Sequence
  Synthetic
auuuuauuguauauauuuaa

SEQ ID NO: 783206 - RNA, 20 nt, Artificial Sequence
  Synthetic
uucuacuuagguauauuuaa

SEQ ID NO: 783207 - RNA, 20 nt, Artificial Sequence
  Synthetic
ucaggucugugacuauuuaa

SEQ ID NO: 783208 - RNA, 20 nt, Artificial Sequence
  Synthetic
aucuuuuauuagcuauuuaa

SEQ ID NO: 783209 - RNA, 20 nt, Artificial Sequence
  Synthetic
caaaaguuagugcuauuuaa

SEQ ID NO: 783210 - RNA, 20 nt, Artificial Sequence
  Synthetic
uuuguuuauauucuauuuaa

SEQ ID NO: 783211 - RNA, 20 nt, Artificial Sequence
  Synthetic
auaaaaccuaaaguauuuaa

SEQ ID NO: 783212 - RNA, 20 nt, Artificial Sequence
  Synthetic
uacugaagaaauguauuuaa

SEQ ID NO: 783213 - RNA, 20 nt, Artificial Sequence
  Synthetic
auucuugauaauguauuuaa

SEQ ID NO: 783214 - RNA, 20 nt, Artificial Sequence
  Synthetic
ucauuuacagaauuauuuaa

SEQ ID NO: 783215 - RNA, 20 nt, Artificial Sequence
  Synthetic
aaagauaacuuauuauuuaa

SEQ ID NO: 783216 - RNA, 20 nt, Artificial Sequence
  Synthetic
uucuuauaauacuuauuuaa

SEQ ID NO: 783217 - RNA, 20 nt, Artificial Sequence
  Synthetic
cccacccuucccuuauuuaa

SEQ ID NO: 783218 - RNA, 20 nt, Artificial Sequence
  Synthetic
ccaggcauaauuuuauuuaa

SEQ ID NO: 783219 - RNA, 20 nt, Artificial Sequence
  Synthetic
uaauugccauuuuuauuuaa

SEQ ID NO: 783220 - RNA, 20 nt, Artificial Sequence
  Synthetic
ucuaugaccuuuuuauuuaa

SEQ ID NO: 783221 - RNA, 20 nt, Artificial Sequence
  Synthetic
aauauaguuuuuuuauuuaa

SEQ ID NO: 783222 - RNA, 20 nt, Artificial Sequence
  Synthetic
aauuacgguuugaacuuuaa

SEQ ID NO: 783223 - RNA, 20 nt, Artificial Sequence
  Synthetic
acaguguucagugacuuuaa

SEQ ID NO: 783224 - RNA, 20 nt, Artificial Sequence
  Synthetic
acucugcagcuguacuuuaa

SEQ ID NO: 783225 - RNA, 20 nt, Artificial Sequence
  Synthetic
uuucauaauauuuacuuuaa

SEQ ID NO: 783226 - RNA, 20 nt, Artificial Sequence
  Synthetic
aaccuuaauuaccccuuuaa

SEQ ID NO: 783227 - RNA, 20 nt, Artificial Sequence
  Synthetic
uuagguaacaagcccuuuaa

SEQ ID NO: 783228 - RNA, 20 nt, Artificial Sequence
  Synthetic
aguggagguagggccuuuaa

SEQ ID NO: 783229 - RNA, 20 nt, Artificial Sequence
  Synthetic
ucuuaguaaaaauccuuuaa

SEQ ID NO: 783230 - RNA, 20 nt, Artificial Sequence
  Synthetic
caucugugguuuuccuuuaa

SEQ ID NO: 783231 - RNA, 20 nt, Artificial Sequence
  Synthetic
cagauaaaaaaaagcuuuaa

SEQ ID NO: 783232 - RNA, 20 nt, Artificial Sequence
  Synthetic
uuaacgagucauugcuuuaa

SEQ ID NO: 783233 - RNA, 20 nt, Artificial Sequence
  Synthetic
uucuuuuuuaacaucuuuaa

SEQ ID NO: 783234 - RNA, 20 nt, Artificial Sequence
  Synthetic
uuaucuacuuccaucuuuaa

SEQ ID NO: 783235 - RNA, 20 nt, Artificial Sequence
  Synthetic
uacuuuaaaauugucuuuaa

SEQ ID NO: 783236 - RNA, 20 nt, Artificial Sequence
  Synthetic
uagguuauuauguucuuuaa

SEQ ID NO: 783237 - RNA, 20 nt, Artificial Sequence
  Synthetic
uaauauagcuauuucuuuaa

SEQ ID NO: 783238 - RNA, 20 nt, Artificial Sequence
  Synthetic
agugucccaucuuucuuuaa

SEQ ID NO: 783239 - RNA, 20 nt, Artificial Sequence
  Synthetic
ccaaagagguacaaguuuaa

SEQ ID NO: 783240 - RNA, 20 nt, Artificial Sequence
  Synthetic
uacaggaaaaagaaguuuaa

SEQ ID NO: 783241 - RNA, 20 nt, Artificial Sequence
  Synthetic
aauuauuccuagaaguuuaa

SEQ ID NO: 783242 - RNA, 20 nt, Artificial Sequence
  Synthetic
ccaaggacacugaaguuuaa

SEQ ID NO: 783243 - RNA, 20 nt, Artificial Sequence
  Synthetic
auuugacacugagaguuuaa

SEQ ID NO: 783244 - RNA, 20 nt, Artificial Sequence
  Synthetic
uucacuuuaaaugaguuuaa

SEQ ID NO: 783245 - RNA, 20 nt, Artificial Sequence
  Synthetic
uaaauggaauuuuaguuuaa

SEQ ID NO: 783246 - RNA, 20 nt, Artificial Sequence
  Synthetic
cauagauuguacagguuuaa

SEQ ID NO: 783247 - RNA, 20 nt, Artificial Sequence
  Synthetic
aaaugaguguccagguuuaa

SEQ ID NO: 783248 - RNA, 20 nt, Artificial Sequence
  Synthetic
uacaaaagaaagagguuuaa

SEQ ID NO: 783249 - RNA, 20 nt, Artificial Sequence
  Synthetic
uauaaaggaaagagguuuaa

SEQ ID NO: 783250 - RNA, 20 nt, Artificial Sequence
  Synthetic
ucagaaguagagagguuuaa

SEQ ID NO: 783251 - RNA, 20 nt, Artificial Sequence
  Synthetic
uugaaaacuaugagguuuaa

SEQ ID NO: 783252 - RNA, 20 nt, Artificial Sequence
  Synthetic
cugaauauuaaaauguuuaa

SEQ ID NO: 783253 - RNA, 20 nt, Artificial Sequence
  Synthetic
aucuuaaaacaaauguuuaa

SEQ ID NO: 783254 - RNA, 20 nt, Artificial Sequence
  Synthetic
agaggaucuugaauguuuaa

SEQ ID NO: 783255 - RNA, 20 nt, Artificial Sequence
  Synthetic
uuugucuucuacauguuuaa

SEQ ID NO: 783256 - RNA, 20 nt, Artificial Sequence
  Synthetic
agaaagcauuugauguuuaa

SEQ ID NO: 783257 - RNA, 20 nt, Artificial Sequence
  Synthetic
aaaauaaacuauguguuuaa

SEQ ID NO: 783258 - RNA, 20 nt, Artificial Sequence
  Synthetic
caccauuaaucauuguuuaa

SEQ ID NO: 783259 - RNA, 20 nt, Artificial Sequence
  Synthetic
uuggcauauuuauuguuuaa

SEQ ID NO: 783260 - RNA, 20 nt, Artificial Sequence
  Synthetic
uuuacugcccauuuguuuaa

SEQ ID NO: 783261 - RNA, 20 nt, Artificial Sequence
  Synthetic
ucaguuugacuuuuguuuaa

SEQ ID NO: 783262 - RNA, 20 nt, Artificial Sequence
  Synthetic
uguuuuuuguuuuuguuuaa

SEQ ID NO: 783263 - RNA, 20 nt, Artificial Sequence
  Synthetic
cugacucuuccaaauuuuaa

SEQ ID NO: 783264 - RNA, 20 nt, Artificial Sequence
  Synthetic
auguuuuacuuaaauuuuaa

SEQ ID NO: 783265 - RNA, 20 nt, Artificial Sequence
  Synthetic
aaaacaaaagagaauuuuaa

SEQ ID NO: 783266 - RNA, 20 nt, Artificial Sequence
  Synthetic
uauaaucaccuuaauuuuaa

SEQ ID NO: 783267 - RNA, 20 nt, Artificial Sequence
  Synthetic
uucaacuauugacauuuuaa

SEQ ID NO: 783268 - RNA, 20 nt, Artificial Sequence
  Synthetic
uccuuccaguaccauuuuaa

SEQ ID NO: 783269 - RNA, 20 nt, Artificial Sequence
  Synthetic
uuggauauaagccauuuuaa

SEQ ID NO: 783270 - RNA, 20 nt, Artificial Sequence
  Synthetic
cucauuauuuuccauuuuaa

SEQ ID NO: 783271 - RNA, 20 nt, Artificial Sequence
  Synthetic
uuauuuuucaagcauuuuaa

SEQ ID NO: 783272 - RNA, 20 nt, Artificial Sequence
  Synthetic
uaaugucucucucauuuuaa

SEQ ID NO: 783273 - RNA, 20 nt, Artificial Sequence
  Synthetic
acgaguuugggucauuuuaa

SEQ ID NO: 783274 - RNA, 20 nt, Artificial Sequence
  Synthetic
aauaaauauauucauuuuaa

SEQ ID NO: 783275 - RNA, 20 nt, Artificial Sequence
  Synthetic
ucuguuuuacaagauuuuaa

SEQ ID NO: 783276 - RNA, 20 nt, Artificial Sequence
  Synthetic
acaucaggcagagauuuuaa

SEQ ID NO: 783277 - RNA, 20 nt, Artificial Sequence
  Synthetic
uaacacuuuuaggauuuuaa

SEQ ID NO: 783278 - RNA, 20 nt, Artificial Sequence
  Synthetic
cugcuuaucaaauauuuuaa

SEQ ID NO: 783279 - RNA, 20 nt, Artificial Sequence
  Synthetic
cugcuuccuaaauauuuuaa

SEQ ID NO: 783280 - RNA, 20 nt, Artificial Sequence
  Synthetic
ucuacuauuuaauauuuuaa

SEQ ID NO: 783281 - RNA, 20 nt, Artificial Sequence
  Synthetic
ccucaugguugauauuuuaa

SEQ ID NO: 783282 - RNA, 20 nt, Artificial Sequence
  Synthetic
aaccaacaaauauauuuuaa

SEQ ID NO: 783283 - RNA, 20 nt, Artificial Sequence
  Synthetic
uaauuguaaaccuauuuuaa

SEQ ID NO: 783284 - RNA, 20 nt, Artificial Sequence
  Synthetic
aggaaacaagucuauuuuaa

SEQ ID NO: 783285 - RNA, 20 nt, Artificial Sequence
  Synthetic
uaguuaauauguuauuuuaa

SEQ ID NO: 783286 - RNA, 20 nt, Artificial Sequence
  Synthetic
acaguagcaauuuauuuuaa

SEQ ID NO: 783287 - RNA, 20 nt, Artificial Sequence
  Synthetic
cucuuguuagucacuuuuaa

SEQ ID NO: 783288 - RNA, 20 nt, Artificial Sequence
  Synthetic
ugucugccugguacuuuuaa

SEQ ID NO: 783289 - RNA, 20 nt, Artificial Sequence
  Synthetic
aauguaauugccccuuuuaa

SEQ ID NO: 783290 - RNA, 20 nt, Artificial Sequence
  Synthetic
uucauuugguuuccuuuuaa

SEQ ID NO: 783291 - RNA, 20 nt, Artificial Sequence
  Synthetic
uacaguaugacagcuuuuaa

SEQ ID NO: 783292 - RNA, 20 nt, Artificial Sequence
  Synthetic
aguaaucaaacuucuuuuaa

SEQ ID NO: 783293 - RNA, 20 nt, Artificial Sequence
  Synthetic
uaaccuagagagaguuuuaa

SEQ ID NO: 783294 - RNA, 20 nt, Artificial Sequence
  Synthetic
acauuuccagauaguuuuaa

SEQ ID NO: 783295 - RNA, 20 nt, Artificial Sequence
  Synthetic
ugaaguuaucuuaguuuuaa

SEQ ID NO: 783296 - RNA, 20 nt, Artificial Sequence
  Synthetic
cauccagaaguagguuuuaa

SEQ ID NO: 783297 - RNA, 20 nt, Artificial Sequence
  Synthetic
ugcuacaaaaaugguuuuaa

SEQ ID NO: 783298 - RNA, 20 nt, Artificial Sequence
  Synthetic
aaauuggaacuuuguuuuaa

SEQ ID NO: 783299 - RNA, 20 nt, Artificial Sequence
  Synthetic
cucuuuguagcaauuuuuaa

SEQ ID NO: 783300 - RNA, 20 nt, Artificial Sequence
  Synthetic
auuugcaaaauaauuuuuaa

SEQ ID NO: 783301 - RNA, 20 nt, Artificial Sequence
  Synthetic
uuaagaaugauaauuuuuaa

SEQ ID NO: 783302 - RNA, 20 nt, Artificial Sequence
  Synthetic
aaugugcaauucauuuuuaa

SEQ ID NO: 783303 - RNA, 20 nt, Artificial Sequence
  Synthetic
cuuuuuuuguucauuuuuaa

SEQ ID NO: 783304 - RNA, 20 nt, Artificial Sequence
  Synthetic
auacgaacaaagauuuuuaa

SEQ ID NO: 783305 - RNA, 20 nt, Artificial Sequence
  Synthetic
auuugugcacguauuuuuaa

SEQ ID NO: 783306 - RNA, 20 nt, Artificial Sequence
  Synthetic
acaaggcccuguauuuuuaa

SEQ ID NO: 783307 - RNA, 20 nt, Artificial Sequence
  Synthetic
aagacaacuauuauuuuuaa

SEQ ID NO: 783308 - RNA, 20 nt, Artificial Sequence
  Synthetic
aauucuaaagcacuuuuuaa

SEQ ID NO: 783309 - RNA, 20 nt, Artificial Sequence
  Synthetic
agucaagggaagcuuuuuaa

SEQ ID NO: 783310 - RNA, 20 nt, Artificial Sequence
  Synthetic
aaauuguuuuugcuuuuuaa

SEQ ID NO: 783311 - RNA, 20 nt, Artificial Sequence
  Synthetic
cauaauuucauucuuuuuaa

SEQ ID NO: 783312 - RNA, 20 nt, Artificial Sequence
  Synthetic
uauaaauuauuucuuuuuaa

SEQ ID NO: 783313 - RNA, 20 nt, Artificial Sequence
  Synthetic
uucauuauguuucuuuuuaa

SEQ ID NO: 783314 - RNA, 20 nt, Artificial Sequence
  Synthetic
ugucuugugccaguuuuuaa

SEQ ID NO: 783315 - RNA, 20 nt, Artificial Sequence
  Synthetic
ugucuugugccgguuuuuaa

SEQ ID NO: 783316 - RNA, 20 nt, Artificial Sequence
  Synthetic
agaagauaauugguuuuuaa

SEQ ID NO: 783317 - RNA, 20 nt, Artificial Sequence
  Synthetic
acugauggcuauguuuuuaa

SEQ ID NO: 783318 - RNA, 20 nt, Artificial Sequence
  Synthetic
aaugaaagucuuguuuuuaa

SEQ ID NO: 783319 - RNA, 20 nt, Artificial Sequence
  Synthetic
aaaaccucacaauuuuuuaa

SEQ ID NO: 783320 - RNA, 20 nt, Artificial Sequence
  Synthetic
cugaaauauacauuuuuuaa

SEQ ID NO: 783321 - RNA, 20 nt, Artificial Sequence
  Synthetic
uuuguuuguuuguuuuuuaa

SEQ ID NO: 783322 - RNA, 20 nt, Artificial Sequence
  Synthetic
caaauuucagauuuuuuuaa

SEQ ID NO: 783323 - RNA, 20 nt, Artificial Sequence
  Synthetic
uuuuuuuuguauuuuuuuaa

SEQ ID NO: 783324 - RNA, 20 nt, Artificial Sequence
  Synthetic
uagcaauaggguuuuuuuaa

SEQ ID NO: 783325 - RNA, 20 nt, Artificial Sequence
  Synthetic
uauaaaaugauuuuuuuuaa

SEQ ID NO: 783326 - RNA, 20 nt, Artificial Sequence
  Synthetic
agauaagcuuuuuuuuuuaa

SEQ ID NO: 783327 - RNA, 20 nt, Artificial Sequence
  Synthetic
agaauaaguuuuuuuuuuaa

SEQ ID NO: 783328 - RNA, 20 nt, Artificial Sequence
  Synthetic
aaaaaauaaaaaaaaaaaca

SEQ ID NO: 783329 - RNA, 20 nt, Artificial Sequence
  Synthetic
aagaaagaaaagaaaaaaca

SEQ ID NO: 783330 - RNA, 20 nt, Artificial Sequence
  Synthetic
uugagaguagagaaaaaaca

SEQ ID NO: 783331 - RNA, 20 nt, Artificial Sequence
  Synthetic
uaucuuuucaauaaaaaaca

SEQ ID NO: 783332 - RNA, 20 nt, Artificial Sequence
  Synthetic
acaaagagggauaaaaaaca

SEQ ID NO: 783333 - RNA, 20 nt, Artificial Sequence
  Synthetic
auguaaacaagacaaaaaca

SEQ ID NO: 783334 - RNA, 20 nt, Artificial Sequence
  Synthetic
ugcagacucagacaaaaaca

SEQ ID NO: 783335 - RNA, 20 nt, Artificial Sequence
  Synthetic
cauaaauuuuuacaaaaaca

SEQ ID NO: 783336 - RNA, 20 nt, Artificial Sequence
  Synthetic
accuguaguucagaaaaaca

SEQ ID NO: 783337 - RNA, 20 nt, Artificial Sequence
  Synthetic
cugauaauucuagaaaaaca

SEQ ID NO: 783338 - RNA, 20 nt, Artificial Sequence
  Synthetic
aguggaaauuaugaaaaaca

SEQ ID NO: 783339 - RNA, 20 nt, Artificial Sequence
  Synthetic
uuccucagaaacuaaaaaca

SEQ ID NO: 783340 - RNA, 20 nt, Artificial Sequence
  Synthetic
auuggcaaacacuaaaaaca

SEQ ID NO: 783341 - RNA, 20 nt, Artificial Sequence
  Synthetic
acaugugggagcuaaaaaca

SEQ ID NO: 783342 - RNA, 20 nt, Artificial Sequence
  Synthetic
uacaacuugaaguaaaaaca

SEQ ID NO: 783343 - RNA, 20 nt, Artificial Sequence
  Synthetic
uuucagaaauauuaaaaaca

SEQ ID NO: 783344 - RNA, 20 nt, Artificial Sequence
  Synthetic
caaagagaaaguuaaaaaca

SEQ ID NO: 783345 - RNA, 20 nt, Artificial Sequence
  Synthetic
acucacugcuuuccaaaaca

SEQ ID NO: 783346 - RNA, 20 nt, Artificial Sequence
  Synthetic
agcauuaagaaggcaaaaca

SEQ ID NO: 783347 - RNA, 20 nt, Artificial Sequence
  Synthetic
aguaucauacaaucaaaaca

SEQ ID NO: 783348 - RNA, 20 nt, Artificial Sequence
  Synthetic
cauucuggugucucaaaaca

SEQ ID NO: 783349 - RNA, 20 nt, Artificial Sequence
  Synthetic
acguguuaauacagaaaaca

SEQ ID NO: 783350 - RNA, 20 nt, Artificial Sequence
  Synthetic
cugcucugaggcagaaaaca

SEQ ID NO: 783351 - RNA, 20 nt, Artificial Sequence
  Synthetic
uuucggguucucagaaaaca

SEQ ID NO: 783352 - RNA, 20 nt, Artificial Sequence
  Synthetic
ucacacaaaaagagaaaaca

SEQ ID NO: 783353 - RNA, 20 nt, Artificial Sequence
  Synthetic
aucaguuggcagagaaaaca

SEQ ID NO: 783354 - RNA, 20 nt, Artificial Sequence
  Synthetic
agaggccuaaaaggaaaaca

SEQ ID NO: 783355 - RNA, 20 nt, Artificial Sequence
  Synthetic
uguaggguuaauggaaaaca

SEQ ID NO: 783356 - RNA, 20 nt, Artificial Sequence
  Synthetic
accaccacuuuaugaaaaca

SEQ ID NO: 783357 - RNA, 20 nt, Artificial Sequence
  Synthetic
cuuuggguccccugaaaaca

SEQ ID NO: 783358 - RNA, 20 nt, Artificial Sequence
  Synthetic
caagaaugaagcugaaaaca

SEQ ID NO: 783359 - RNA, 20 nt, Artificial Sequence
  Synthetic
agguaaucauaaauaaaaca

SEQ ID NO: 783360 - RNA, 20 nt, Artificial Sequence
  Synthetic
aaaguuaugaggauaaaaca

SEQ ID NO: 783361 - RNA, 20 nt, Artificial Sequence
  Synthetic
ugacuaaccacuauaaaaca

SEQ ID NO: 783362 - RNA, 20 nt, Artificial Sequence
  Synthetic
acuaguauuuaucuaaaaca

SEQ ID NO: 783363 - RNA, 20 nt, Artificial Sequence
  Synthetic
cugauaaaggcucuaaaaca

SEQ ID NO: 783364 - RNA, 20 nt, Artificial Sequence
  Synthetic
uaguuucauauaguaaaaca

SEQ ID NO: 783365 - RNA, 20 nt, Artificial Sequence
  Synthetic
uauuaagcacaauuaaaaca

SEQ ID NO: 783366 - RNA, 20 nt, Artificial Sequence
  Synthetic
auuauagacacauuaaaaca

SEQ ID NO: 783367 - RNA, 20 nt, Artificial Sequence
  Synthetic
augucugugguauuaaaaca

SEQ ID NO: 783368 - RNA, 20 nt, Artificial Sequence
  Synthetic
caugaucuucuguuaaaaca

SEQ ID NO: 783369 - RNA, 20 nt, Artificial Sequence
  Synthetic
aaaaaauaaguuuuaaaaca

SEQ ID NO: 783370 - RNA, 20 nt, Artificial Sequence
  Synthetic
auuuaucuaggaaacaaaca

SEQ ID NO: 783371 - RNA, 20 nt, Artificial Sequence
  Synthetic
ugaugaaaaaaacacaaaca

SEQ ID NO: 783372 - RNA, 20 nt, Artificial Sequence
  Synthetic
cacacacacacacacaaaca

SEQ ID NO: 783373 - RNA, 20 nt, Artificial Sequence
  Synthetic
ugcaaacugggacacaaaca

SEQ ID NO: 783374 - RNA, 20 nt, Artificial Sequence
  Synthetic
aaaauuacuagugacaaaca

SEQ ID NO: 783375 - RNA, 20 nt, Artificial Sequence
  Synthetic
cagcauuuaaucuacaaaca

SEQ ID NO: 783376 - RNA, 20 nt, Artificial Sequence
  Synthetic
auuaacaugugacccaaaca

SEQ ID NO: 783377 - RNA, 20 nt, Artificial Sequence
  Synthetic
cauuuuauucauuccaaaca

SEQ ID NO: 783378 - RNA, 20 nt, Artificial Sequence
  Synthetic
auaacaaaacaaagcaaaca

SEQ ID NO: 783379 - RNA, 20 nt, Artificial Sequence
  Synthetic
aacuauuuggaaagcaaaca

SEQ ID NO: 783380 - RNA, 20 nt, Artificial Sequence
  Synthetic
uggugauacucaggcaaaca

SEQ ID NO: 783381 - RNA, 20 nt, Artificial Sequence
  Synthetic
accauuauuucaggcaaaca

SEQ ID NO: 783382 - RNA, 20 nt, Artificial Sequence
  Synthetic
cagaauggggaaugcaaaca

SEQ ID NO: 783383 - RNA, 20 nt, Artificial Sequence
  Synthetic
aaauuguggugaugcaaaca

SEQ ID NO: 783384 - RNA, 20 nt, Artificial Sequence
  Synthetic
aaucaugucgucugcaaaca

SEQ ID NO: 783385 - RNA, 20 nt, Artificial Sequence
  Synthetic
acuuaccuuagaaucaaaca

SEQ ID NO: 783386 - RNA, 20 nt, Artificial Sequence
  Synthetic
uggacaacauuuaucaaaca

SEQ ID NO: 783387 - RNA, 20 nt, Artificial Sequence
  Synthetic
caccaaauuuugcucaaaca

SEQ ID NO: 783388 - RNA, 20 nt, Artificial Sequence
  Synthetic
cauccaggccaucucaaaca

SEQ ID NO: 783389 - RNA, 20 nt, Artificial Sequence
  Synthetic
acuaaauaagaggucaaaca

SEQ ID NO: 783390 - RNA, 20 nt, Artificial Sequence
  Synthetic
ucacuaggaaaauucaaaca

SEQ ID NO: 783391 - RNA, 20 nt, Artificial Sequence
  Synthetic
ucucugucuuguuucaaaca

SEQ ID NO: 783392 - RNA, 20 nt, Artificial Sequence
  Synthetic
aaaauucucauuuucaaaca

SEQ ID NO: 783393 - RNA, 20 nt, Artificial Sequence
  Synthetic
uuuuguuugcuuuucaaaca

SEQ ID NO: 783394 - RNA, 20 nt, Artificial Sequence
  Synthetic
uauaaugaugaaaagaaaca

SEQ ID NO: 783395 - RNA, 20 nt, Artificial Sequence
  Synthetic
auaccuucugaaaagaaaca

SEQ ID NO: 783396 - RNA, 20 nt, Artificial Sequence
  Synthetic
uuguguuuuacaaagaaaca

SEQ ID NO: 783397 - RNA, 20 nt, Artificial Sequence
  Synthetic
aaugauuugagaaagaaaca

SEQ ID NO: 783398 - RNA, 20 nt, Artificial Sequence
  Synthetic
uuuugugcuaggaagaaaca

SEQ ID NO: 783399 - RNA, 20 nt, Artificial Sequence
  Synthetic
aaguggcaguggaagaaaca

SEQ ID NO: 783400 - RNA, 20 nt, Artificial Sequence
  Synthetic
caaggcaggaaacagaaaca

SEQ ID NO: 783401 - RNA, 20 nt, Artificial Sequence
  Synthetic
agggagaagcuacagaaaca

SEQ ID NO: 783402 - RNA, 20 nt, Artificial Sequence
  Synthetic
auaaaauaaggagagaaaca

SEQ ID NO: 783403 - RNA, 20 nt, Artificial Sequence
  Synthetic
agagcuuuaccugagaaaca

SEQ ID NO: 783404 - RNA, 20 nt, Artificial Sequence
  Synthetic
ccuucucauuaauagaaaca

SEQ ID NO: 783405 - RNA, 20 nt, Artificial Sequence
  Synthetic
accaacaugccagcgaaaca

SEQ ID NO: 783406 - RNA, 20 nt, Artificial Sequence
  Synthetic
cauuccaggcagaggaaaca

SEQ ID NO: 783407 - RNA, 20 nt, Artificial Sequence
  Synthetic
aguggggagggagggaaaca

SEQ ID NO: 783408 - RNA, 20 nt, Artificial Sequence
  Synthetic
ugagagaaaauagggaaaca

SEQ ID NO: 783409 - RNA, 20 nt, Artificial Sequence
  Synthetic
aauguacaauucuggaaaca

SEQ ID NO: 783410 - RNA, 20 nt, Artificial Sequence
  Synthetic
aucagagucuucuggaaaca

SEQ ID NO: 783411 - RNA, 20 nt, Artificial Sequence
  Synthetic
cuuauccacucaaugaaaca

SEQ ID NO: 783412 - RNA, 20 nt, Artificial Sequence
  Synthetic
uaggguagggggaugaaaca

SEQ ID NO: 783413 - RNA, 20 nt, Artificial Sequence
  Synthetic
aacugauaucaacugaaaca

SEQ ID NO: 783414 - RNA, 20 nt, Artificial Sequence
  Synthetic
uaucuauauuguuugaaaca

SEQ ID NO: 783415 - RNA, 20 nt, Artificial Sequence
  Synthetic
uuugaguuagaaaauaaaca

SEQ ID NO: 783416 - RNA, 20 nt, Artificial Sequence
  Synthetic
uuuucuucuuaaaauaaaca

SEQ ID NO: 783417 - RNA, 20 nt, Artificial Sequence
  Synthetic
uaaaaaugcuacaauaaaca

SEQ ID NO: 783418 - RNA, 20 nt, Artificial Sequence
  Synthetic
aaaguaaaguagaauaaaca

SEQ ID NO: 783419 - RNA, 20 nt, Artificial Sequence
  Synthetic
auaaaauaaaauaauaaaca

SEQ ID NO: 783420 - RNA, 20 nt, Artificial Sequence
  Synthetic
cuuuuaacuguuaauaaaca

SEQ ID NO: 783421 - RNA, 20 nt, Artificial Sequence
  Synthetic
ugcuucugaagagauaaaca

SEQ ID NO: 783422 - RNA, 20 nt, Artificial Sequence
  Synthetic
agaggacaaaaauauaaaca

SEQ ID NO: 783423 - RNA, 20 nt, Artificial Sequence
  Synthetic
aaagucuugggauauaaaca

SEQ ID NO: 783424 - RNA, 20 nt, Artificial Sequence
  Synthetic
uuccuuuucuuauauaaaca

SEQ ID NO: 783425 - RNA, 20 nt, Artificial Sequence
  Synthetic
aaauaagacccuuauaaaca

SEQ ID NO: 783426 - RNA, 20 nt, Artificial Sequence
  Synthetic
ccagucuuauuuuauaaaca

SEQ ID NO: 783427 - RNA, 20 nt, Artificial Sequence
  Synthetic
auuauauuuaaaacuaaaca

SEQ ID NO: 783428 - RNA, 20 nt, Artificial Sequence
  Synthetic
cuacaaaguagcacuaaaca

SEQ ID NO: 783429 - RNA, 20 nt, Artificial Sequence
  Synthetic
ccugaaggaaucacuaaaca

SEQ ID NO: 783430 - RNA, 20 nt, Artificial Sequence
  Synthetic
ccugaaggaagcgcuaaaca

SEQ ID NO: 783431 - RNA, 20 nt, Artificial Sequence
  Synthetic
ucuugauuauaugcuaaaca

SEQ ID NO: 783432 - RNA, 20 nt, Artificial Sequence
  Synthetic
uuguuauaugacucuaaaca

SEQ ID NO: 783433 - RNA, 20 nt, Artificial Sequence
  Synthetic
caucccccucaaaguaaaca

SEQ ID NO: 783434 - RNA, 20 nt, Artificial Sequence
  Synthetic
aaaaaguacuaguguaaaca

SEQ ID NO: 783435 - RNA, 20 nt, Artificial Sequence
  Synthetic
uuguaauuuaaaauuaaaca

SEQ ID NO: 783436 - RNA, 20 nt, Artificial Sequence
  Synthetic
uaugagagaucaauuaaaca

SEQ ID NO: 783437 - RNA, 20 nt, Artificial Sequence
  Synthetic
uauauguguucaauuaaaca

SEQ ID NO: 783438 - RNA, 20 nt, Artificial Sequence
  Synthetic
uuuauuuuucugauuaaaca

SEQ ID NO: 783439 - RNA, 20 nt, Artificial Sequence
  Synthetic
auuucauagacuauuaaaca

SEQ ID NO: 783440 - RNA, 20 nt, Artificial Sequence
  Synthetic
caacgugcugaucuuaaaca

SEQ ID NO: 783441 - RNA, 20 nt, Artificial Sequence
  Synthetic
uucaguuaaagucuuaaaca

SEQ ID NO: 783442 - RNA, 20 nt, Artificial Sequence
  Synthetic
ucccaguacuaaguuaaaca

SEQ ID NO: 783443 - RNA, 20 nt, Artificial Sequence
  Synthetic
uuccacaaggcauuuaaaca

SEQ ID NO: 783444 - RNA, 20 nt, Artificial Sequence
  Synthetic
acaauauguaauuuuaaaca

SEQ ID NO: 783445 - RNA, 20 nt, Artificial Sequence
  Synthetic
ucccaacgaaaaaaacaaca

SEQ ID NO: 783446 - RNA, 20 nt, Artificial Sequence
  Synthetic
aaaauagaaacaaaacaaca

SEQ ID NO: 783447 - RNA, 20 nt, Artificial Sequence
  Synthetic
cuacaguaaccaaaacaaca

SEQ ID NO: 783448 - RNA, 20 nt, Artificial Sequence
  Synthetic
uuuuagggcugcaaacaaca

SEQ ID NO: 783449 - RNA, 20 nt, Artificial Sequence
  Synthetic
aaaaagucuaagaaacaaca

SEQ ID NO: 783450 - RNA, 20 nt, Artificial Sequence
  Synthetic
ucauggccugugcaacaaca

SEQ ID NO: 783451 - RNA, 20 nt, Artificial Sequence
  Synthetic
uccugucauuugcaacaaca

SEQ ID NO: 783452 - RNA, 20 nt, Artificial Sequence
  Synthetic
ugcauagggugaccacaaca

SEQ ID NO: 783453 - RNA, 20 nt, Artificial Sequence
  Synthetic
caguauucgauagcacaaca

SEQ ID NO: 783454 - RNA, 20 nt, Artificial Sequence
  Synthetic
uacuauuugauagcacaaca

SEQ ID NO: 783455 - RNA, 20 nt, Artificial Sequence
  Synthetic
uacuauuugcuagcacaaca

SEQ ID NO: 783456 - RNA, 20 nt, Artificial Sequence
  Synthetic
caagacaagccuggacaaca

SEQ ID NO: 783457 - RNA, 20 nt, Artificial Sequence
  Synthetic
uccugucauuuaugacaaca

SEQ ID NO: 783458 - RNA, 20 nt, Artificial Sequence
  Synthetic
ugaacaggcaaccuacaaca

SEQ ID NO: 783459 - RNA, 20 nt, Artificial Sequence
  Synthetic
ugaacagggaaccuacaaca

SEQ ID NO: 783460 - RNA, 20 nt, Artificial Sequence
  Synthetic
uccuuuccuaugcuacaaca

SEQ ID NO: 783461 - RNA, 20 nt, Artificial Sequence
  Synthetic
ucaauggcaaauguacaaca

SEQ ID NO: 783462 - RNA, 20 nt, Artificial Sequence
  Synthetic
aagagaccuauuguacaaca

SEQ ID NO: 783463 - RNA, 20 nt, Artificial Sequence
  Synthetic
aacuaaccaaucaaccaaca

SEQ ID NO: 783464 - RNA, 20 nt, Artificial Sequence
  Synthetic
augggugcagcacaccaaca

SEQ ID NO: 783465 - RNA, 20 nt, Artificial Sequence
  Synthetic
cugggugcagcacaccaaca

SEQ ID NO: 783466 - RNA, 20 nt, Artificial Sequence
  Synthetic
augggugcaggacaccaaca

SEQ ID NO: 783467 - RNA, 20 nt, Artificial Sequence
  Synthetic
aauuuacauucccaccaaca

SEQ ID NO: 783468 - RNA, 20 nt, Artificial Sequence
  Synthetic
cgagaccagccugaccaaca

SEQ ID NO: 783469 - RNA, 20 nt, Artificial Sequence
  Synthetic
ugagaccagccugaccaaca

SEQ ID NO: 783470 - RNA, 20 nt, Artificial Sequence
  Synthetic
cuagaccagccugaccaaca

SEQ ID NO: 783471 - RNA, 20 nt, Artificial Sequence
  Synthetic
caggaccagccugaccaaca

SEQ ID NO: 783472 - RNA, 20 nt, Artificial Sequence
  Synthetic
ugagaccggccugaccaaca

SEQ ID NO: 783473 - RNA, 20 nt, Artificial Sequence
  Synthetic
auugcuuagucugaccaaca

SEQ ID NO: 783474 - RNA, 20 nt, Artificial Sequence
  Synthetic
auggguggagcauaccaaca

SEQ ID NO: 783475 - RNA, 20 nt, Artificial Sequence
  Synthetic
caccccccccccccccaaca

SEQ ID NO: 783476 - RNA, 20 nt, Artificial Sequence
  Synthetic
uuaggagcugucccccaaca

SEQ ID NO: 783477 - RNA, 20 nt, Artificial Sequence
  Synthetic
aucugucauuugucccaaca

SEQ ID NO: 783478 - RNA, 20 nt, Artificial Sequence
  Synthetic
ccaaaguugacuucccaaca

SEQ ID NO: 783479 - RNA, 20 nt, Artificial Sequence
  Synthetic
agaguccagcccagccaaca

SEQ ID NO: 783480 - RNA, 20 nt, Artificial Sequence
  Synthetic
cgagaccaucccagccaaca

SEQ ID NO: 783481 - RNA, 20 nt, Artificial Sequence
  Synthetic
ugagaccagcccggccaaca

SEQ ID NO: 783482 - RNA, 20 nt, Artificial Sequence
  Synthetic
cgagaccagacuggccaaca

SEQ ID NO: 783483 - RNA, 20 nt, Artificial Sequence
  Synthetic
ugagaacagccuggccaaca

SEQ ID NO: 783484 - RNA, 20 nt, Artificial Sequence
  Synthetic
cgacaccagccuggccaaca

SEQ ID NO: 783485 - RNA, 20 nt, Artificial Sequence
  Synthetic
caagaccagccuggccaaca

SEQ ID NO: 783486 - RNA, 20 nt, Artificial Sequence
  Synthetic
cgagaccagccuggccaaca

SEQ ID NO: 783487 - RNA, 20 nt, Artificial Sequence
  Synthetic
ugagaccagccuggccaaca

SEQ ID NO: 783488 - RNA, 20 nt, Artificial Sequence
  Synthetic
ucaaggcagccuggccaaca

SEQ ID NO: 783489 - RNA, 20 nt, Artificial Sequence
  Synthetic
cgagacgagccuggccaaca

SEQ ID NO: 783490 - RNA, 20 nt, Artificial Sequence
  Synthetic
cgagacuagccuggccaaca

SEQ ID NO: 783491 - RNA, 20 nt, Artificial Sequence
  Synthetic
cgacaccauccuggccaaca

SEQ ID NO: 783492 - RNA, 20 nt, Artificial Sequence
  Synthetic
ugacaccauccuggccaaca

SEQ ID NO: 783493 - RNA, 20 nt, Artificial Sequence
  Synthetic
caagaccauccuggccaaca

SEQ ID NO: 783494 - RNA, 20 nt, Artificial Sequence
  Synthetic
cgagaccauccuggccaaca

SEQ ID NO: 783495 - RNA, 20 nt, Artificial Sequence
  Synthetic
ugagaccauccuggccaaca

SEQ ID NO: 783496 - RNA, 20 nt, Artificial Sequence
  Synthetic
cgagaccguccuggccaaca

SEQ ID NO: 783497 - RNA, 20 nt, Artificial Sequence
  Synthetic
cgagacuguccuggccaaca

SEQ ID NO: 783498 - RNA, 20 nt, Artificial Sequence
  Synthetic
ucgagaccaucuggccaaca

SEQ ID NO: 783499 - RNA, 20 nt, Artificial Sequence
  Synthetic
ugugccauuacacuccaaca

SEQ ID NO: 783500 - RNA, 20 nt, Artificial Sequence
  Synthetic
augggugcagcacuccaaca

SEQ ID NO: 783501 - RNA, 20 nt, Artificial Sequence
  Synthetic
uaaaccugugcuguccaaca

SEQ ID NO: 783502 - RNA, 20 nt, Artificial Sequence
  Synthetic
uggggauauucaaagcaaca

SEQ ID NO: 783503 - RNA, 20 nt, Artificial Sequence
  Synthetic
uuuggccauagaaagcaaca

SEQ ID NO: 783504 - RNA, 20 nt, Artificial Sequence
  Synthetic
ugauugauugagaagcaaca

SEQ ID NO: 783505 - RNA, 20 nt, Artificial Sequence
  Synthetic
ucauguccuuugcagcaaca

SEQ ID NO: 783506 - RNA, 20 nt, Artificial Sequence
  Synthetic
uuauguucuuugcagcaaca

SEQ ID NO: 783507 - RNA, 20 nt, Artificial Sequence
  Synthetic
ucaugucuuuugcagcaaca

SEQ ID NO: 783508 - RNA, 20 nt, Artificial Sequence
  Synthetic
uucaaguuucuucagcaaca

SEQ ID NO: 783509 - RNA, 20 nt, Artificial Sequence
  Synthetic
cgagaccagacugagcaaca

SEQ ID NO: 783510 - RNA, 20 nt, Artificial Sequence
  Synthetic
auccuauuaauuuagcaaca

SEQ ID NO: 783511 - RNA, 20 nt, Artificial Sequence
  Synthetic
ccuuuguggaacucgcaaca

SEQ ID NO: 783512 - RNA, 20 nt, Artificial Sequence
  Synthetic
auaacuuuguggaggcaaca

SEQ ID NO: 783513 - RNA, 20 nt, Artificial Sequence
  Synthetic
caagaccagccugggcaaca

SEQ ID NO: 783514 - RNA, 20 nt, Artificial Sequence
  Synthetic
cgagaccagccugggcaaca

SEQ ID NO: 783515 - RNA, 20 nt, Artificial Sequence
  Synthetic
ugagaccagccugggcaaca

SEQ ID NO: 783516 - RNA, 20 nt, Artificial Sequence
  Synthetic
ugagaucagccugggcaaca

SEQ ID NO: 783517 - RNA, 20 nt, Artificial Sequence
  Synthetic
ugagaucagucugggcaaca

SEQ ID NO: 783518 - RNA, 20 nt, Artificial Sequence
  Synthetic
aauaaacagaaauggcaaca

SEQ ID NO: 783519 - RNA, 20 nt, Artificial Sequence
  Synthetic
cuucuucaauaaaugcaaca

SEQ ID NO: 783520 - RNA, 20 nt, Artificial Sequence
  Synthetic
uaugucuugaaacugcaaca

SEQ ID NO: 783521 - RNA, 20 nt, Artificial Sequence
  Synthetic
uaguauuugauagugcaaca

SEQ ID NO: 783522 - RNA, 20 nt, Artificial Sequence
  Synthetic
aaaauugaaggacaucaaca

SEQ ID NO: 783523 - RNA, 20 nt, Artificial Sequence
  Synthetic
uugcaaugaagagaucaaca

SEQ ID NO: 783524 - RNA, 20 nt, Artificial Sequence
  Synthetic
uaagaccagccugaucaaca

SEQ ID NO: 783525 - RNA, 20 nt, Artificial Sequence
  Synthetic
aaaucacccuucacucaaca

SEQ ID NO: 783526 - RNA, 20 nt, Artificial Sequence
  Synthetic
uccucuuuugucccucaaca

SEQ ID NO: 783527 - RNA, 20 nt, Artificial Sequence
  Synthetic
aaagaccaaaauccucaaca

SEQ ID NO: 783528 - RNA, 20 nt, Artificial Sequence
  Synthetic
uuuuuccuguggucucaaca

SEQ ID NO: 783529 - RNA, 20 nt, Artificial Sequence
  Synthetic
aacgagacagaaagucaaca

SEQ ID NO: 783530 - RNA, 20 nt, Artificial Sequence
  Synthetic
uuucagauuuguagucaaca

SEQ ID NO: 783531 - RNA, 20 nt, Artificial Sequence
  Synthetic
cgagaccagccuggucaaca

SEQ ID NO: 783532 - RNA, 20 nt, Artificial Sequence
  Synthetic
ugagaccagccuggucaaca

SEQ ID NO: 783533 - RNA, 20 nt, Artificial Sequence
  Synthetic
acucacuaauuaauucaaca

SEQ ID NO: 783534 - RNA, 20 nt, Artificial Sequence
  Synthetic
caguacauguucauucaaca

SEQ ID NO: 783535 - RNA, 20 nt, Artificial Sequence
  Synthetic
augugaccuagacuucaaca

SEQ ID NO: 783536 - RNA, 20 nt, Artificial Sequence
  Synthetic
agccuagccuaccuucaaca

SEQ ID NO: 783537 - RNA, 20 nt, Artificial Sequence
  Synthetic
aacaacuuacauguucaaca

SEQ ID NO: 783538 - RNA, 20 nt, Artificial Sequence
  Synthetic
aaugaaaugaccuuucaaca

SEQ ID NO: 783539 - RNA, 20 nt, Artificial Sequence
  Synthetic
cauaagaaugaaaaagaaca

SEQ ID NO: 783540 - RNA, 20 nt, Artificial Sequence
  Synthetic
ugugaagugagaaaagaaca

SEQ ID NO: 783541 - RNA, 20 nt, Artificial Sequence
  Synthetic
uuuuccccagugaaagaaca

SEQ ID NO: 783542 - RNA, 20 nt, Artificial Sequence
  Synthetic
uuucuagagcauaaagaaca

SEQ ID NO: 783543 - RNA, 20 nt, Artificial Sequence
  Synthetic
agccaugaggguaaagaaca

SEQ ID NO: 783544 - RNA, 20 nt, Artificial Sequence
  Synthetic
aaaauauaggaagaagaaca

SEQ ID NO: 783545 - RNA, 20 nt, Artificial Sequence
  Synthetic
uccacaacuaaggaagaaca

SEQ ID NO: 783546 - RNA, 20 nt, Artificial Sequence
  Synthetic
uugucaucacuggaagaaca

SEQ ID NO: 783547 - RNA, 20 nt, Artificial Sequence
  Synthetic
caugauggaagauaagaaca

SEQ ID NO: 783548 - RNA, 20 nt, Artificial Sequence
  Synthetic
aggagauucuugacagaaca

SEQ ID NO: 783549 - RNA, 20 nt, Artificial Sequence
  Synthetic
ucccaguaaguagcagaaca

SEQ ID NO: 783550 - RNA, 20 nt, Artificial Sequence
  Synthetic
uugaaggacaaggcagaaca

SEQ ID NO: 783551 - RNA, 20 nt, Artificial Sequence
  Synthetic
ucccucauaaaaagagaaca

SEQ ID NO: 783552 - RNA, 20 nt, Artificial Sequence
  Synthetic
cuccaauggguaagagaaca

SEQ ID NO: 783553 - RNA, 20 nt, Artificial Sequence
  Synthetic
augggauauuuaggagaaca

SEQ ID NO: 783554 - RNA, 20 nt, Artificial Sequence
  Synthetic
cccacuuauaaaugagaaca

SEQ ID NO: 783555 - RNA, 20 nt, Artificial Sequence
  Synthetic
uucacuuauaagugagaaca

SEQ ID NO: 783556 - RNA, 20 nt, Artificial Sequence
  Synthetic
aguuauuucaguugagaaca

SEQ ID NO: 783557 - RNA, 20 nt, Artificial Sequence
  Synthetic
aaaaauauugcaauagaaca

SEQ ID NO: 783558 - RNA, 20 nt, Artificial Sequence
  Synthetic
auguuggauuacauagaaca

SEQ ID NO: 783559 - RNA, 20 nt, Artificial Sequence
  Synthetic
uuuuaaauauuuauagaaca

SEQ ID NO: 783560 - RNA, 20 nt, Artificial Sequence
  Synthetic
aaguguacuuuuauagaaca

SEQ ID NO: 783561 - RNA, 20 nt, Artificial Sequence
  Synthetic
auacauugauggcuagaaca

SEQ ID NO: 783562 - RNA, 20 nt, Artificial Sequence
  Synthetic
aaauuuaaacuauuagaaca

SEQ ID NO: 783563 - RNA, 20 nt, Artificial Sequence
  Synthetic
aggagacggaauuuagaaca

SEQ ID NO: 783564 - RNA, 20 nt, Artificial Sequence
  Synthetic
cuuugaagacauuuagaaca

SEQ ID NO: 783565 - RNA, 20 nt, Artificial Sequence
  Synthetic
agcaucauugguuuagaaca

SEQ ID NO: 783566 - RNA, 20 nt, Artificial Sequence
  Synthetic
cgagaccauccuggcgaaca

SEQ ID NO: 783567 - RNA, 20 nt, Artificial Sequence
  Synthetic
ccugccaucccaaaggaaca

SEQ ID NO: 783568 - RNA, 20 nt, Artificial Sequence
  Synthetic
aagaaguauauaaaggaaca

SEQ ID NO: 783569 - RNA, 20 nt, Artificial Sequence
  Synthetic
uguucgggagguaaggaaca

SEQ ID NO: 783570 - RNA, 20 nt, Artificial Sequence
  Synthetic
aguagggaagagcaggaaca

SEQ ID NO: 783571 - RNA, 20 nt, Artificial Sequence
  Synthetic
ucguguccuuugcaggaaca

SEQ ID NO: 783572 - RNA, 20 nt, Artificial Sequence
  Synthetic
cagaacuagggagaggaaca

SEQ ID NO: 783573 - RNA, 20 nt, Artificial Sequence
  Synthetic
aaauuuggaaaugaggaaca

SEQ ID NO: 783574 - RNA, 20 nt, Artificial Sequence
  Synthetic
caaaugaaugaauaggaaca

SEQ ID NO: 783575 - RNA, 20 nt, Artificial Sequence
  Synthetic
ucacgccuuuuguaggaaca

SEQ ID NO: 783576 - RNA, 20 nt, Artificial Sequence
  Synthetic
auguauuccaagagggaaca

SEQ ID NO: 783577 - RNA, 20 nt, Artificial Sequence
  Synthetic
cccagcucuuugggggaaca

SEQ ID NO: 783578 - RNA, 20 nt, Artificial Sequence
  Synthetic
uugagguuugcuggggaaca

SEQ ID NO: 783579 - RNA, 20 nt, Artificial Sequence
  Synthetic
ugacuauucugcugggaaca

SEQ ID NO: 783580 - RNA, 20 nt, Artificial Sequence
  Synthetic
cauuucugaaugauggaaca

SEQ ID NO: 783581 - RNA, 20 nt, Artificial Sequence
  Synthetic
ugaauagauuaacuggaaca

SEQ ID NO: 783582 - RNA, 20 nt, Artificial Sequence
  Synthetic
uggagauaauuguuggaaca

SEQ ID NO: 783583 - RNA, 20 nt, Artificial Sequence
  Synthetic
cuuuugaugggaaaugaaca

SEQ ID NO: 783584 - RNA, 20 nt, Artificial Sequence
  Synthetic
uggguaauuuauaaugaaca

SEQ ID NO: 783585 - RNA, 20 nt, Artificial Sequence
  Synthetic
agauagaaccaacaugaaca

SEQ ID NO: 783586 - RNA, 20 nt, Artificial Sequence
  Synthetic
aauaaagaauaacaugaaca

SEQ ID NO: 783587 - RNA, 20 nt, Artificial Sequence
  Synthetic
agucuuccaauucaugaaca

SEQ ID NO: 783588 - RNA, 20 nt, Artificial Sequence
  Synthetic
cugcaauaguuugaugaaca

SEQ ID NO: 783589 - RNA, 20 nt, Artificial Sequence
  Synthetic
uuggacuauggauaugaaca

SEQ ID NO: 783590 - RNA, 20 nt, Artificial Sequence
  Synthetic
uauuacagaaguuaugaaca

SEQ ID NO: 783591 - RNA, 20 nt, Artificial Sequence
  Synthetic
uuaaauauaguuuaugaaca

SEQ ID NO: 783592 - RNA, 20 nt, Artificial Sequence
  Synthetic
uguagggcagcagcugaaca

SEQ ID NO: 783593 - RNA, 20 nt, Artificial Sequence
  Synthetic
cugaauugucaugcugaaca

SEQ ID NO: 783594 - RNA, 20 nt, Artificial Sequence
  Synthetic
aacuaccaucagagugaaca

SEQ ID NO: 783595 - RNA, 20 nt, Artificial Sequence
  Synthetic
uccagggauaugagugaaca

SEQ ID NO: 783596 - RNA, 20 nt, Artificial Sequence
  Synthetic
acaagacacaaacgugaaca

SEQ ID NO: 783597 - RNA, 20 nt, Artificial Sequence
  Synthetic
cgagaccauccuggugaaca

SEQ ID NO: 783598 - RNA, 20 nt, Artificial Sequence
  Synthetic
uggucucucugaauugaaca

SEQ ID NO: 783599 - RNA, 20 nt, Artificial Sequence
  Synthetic
aaaggaaacuucauugaaca

SEQ ID NO: 783600 - RNA, 20 nt, Artificial Sequence
  Synthetic
cuauuuuggugacuugaaca

SEQ ID NO: 783601 - RNA, 20 nt, Artificial Sequence
  Synthetic
auaguagcuugucuugaaca

SEQ ID NO: 783602 - RNA, 20 nt, Artificial Sequence
  Synthetic
aaaacauguucauuugaaca

SEQ ID NO: 783603 - RNA, 20 nt, Artificial Sequence
  Synthetic
aaaauggcauuguuugaaca

SEQ ID NO: 783604 - RNA, 20 nt, Artificial Sequence
  Synthetic
caaaggucugaaaaauaaca

SEQ ID NO: 783605 - RNA, 20 nt, Artificial Sequence
  Synthetic
cauacaaaaguaaaauaaca

SEQ ID NO: 783606 - RNA, 20 nt, Artificial Sequence
  Synthetic
agaucucuguuuaaauaaca

SEQ ID NO: 783607 - RNA, 20 nt, Artificial Sequence
  Synthetic
uuuagaaaggaacaauaaca

SEQ ID NO: 783608 - RNA, 20 nt, Artificial Sequence
  Synthetic
aaaguaacacaagaauaaca

SEQ ID NO: 783609 - RNA, 20 nt, Artificial Sequence
  Synthetic
cagaagaauagcgaauaaca

SEQ ID NO: 783610 - RNA, 20 nt, Artificial Sequence
  Synthetic
aacugucuuuuugaauaaca

SEQ ID NO: 783611 - RNA, 20 nt, Artificial Sequence
  Synthetic
uuaaaagaggaauaauaaca

SEQ ID NO: 783612 - RNA, 20 nt, Artificial Sequence
  Synthetic
aaggcggggaauuaauaaca

SEQ ID NO: 783613 - RNA, 20 nt, Artificial Sequence
  Synthetic
aauauucaaacuuaauaaca

SEQ ID NO: 783614 - RNA, 20 nt, Artificial Sequence
  Synthetic
cuaauacuuggcacauaaca

SEQ ID NO: 783615 - RNA, 20 nt, Artificial Sequence
  Synthetic
cuuauuauugcagcauaaca

SEQ ID NO: 783616 - RNA, 20 nt, Artificial Sequence
  Synthetic
aguuaaggauauucauaaca

SEQ ID NO: 783617 - RNA, 20 nt, Artificial Sequence
  Synthetic
caagaaauuaacagauaaca

SEQ ID NO: 783618 - RNA, 20 nt, Artificial Sequence
  Synthetic
aucuucuuuuagggauaaca

SEQ ID NO: 783619 - RNA, 20 nt, Artificial Sequence
  Synthetic
cuauaagaaaccauauaaca

SEQ ID NO: 783620 - RNA, 20 nt, Artificial Sequence
  Synthetic
caaugggagcaacuauaaca

SEQ ID NO: 783621 - RNA, 20 nt, Artificial Sequence
  Synthetic
ucccucauuuaauuauaaca

SEQ ID NO: 783622 - RNA, 20 nt, Artificial Sequence
  Synthetic
uggaaaagcagauuauaaca

SEQ ID NO: 783623 - RNA, 20 nt, Artificial Sequence
  Synthetic
auuaguggagaguuauaaca

SEQ ID NO: 783624 - RNA, 20 nt, Artificial Sequence
  Synthetic
ucccuaaaucuaaacuaaca

SEQ ID NO: 783625 - RNA, 20 nt, Artificial Sequence
  Synthetic
aguuacuaugcucacuaaca

SEQ ID NO: 783626 - RNA, 20 nt, Artificial Sequence
  Synthetic
caagaccagccugacuaaca

SEQ ID NO: 783627 - RNA, 20 nt, Artificial Sequence
  Synthetic
uuauuaggauacaccuaaca

SEQ ID NO: 783628 - RNA, 20 nt, Artificial Sequence
  Synthetic
ugcuauuucucacccuaaca

SEQ ID NO: 783629 - RNA, 20 nt, Artificial Sequence
  Synthetic
uuauaguagccauccuaaca

SEQ ID NO: 783630 - RNA, 20 nt, Artificial Sequence
  Synthetic
aagccaucagacagcuaaca

SEQ ID NO: 783631 - RNA, 20 nt, Artificial Sequence
  Synthetic
uacaaguugggaggcuaaca

SEQ ID NO: 783632 - RNA, 20 nt, Artificial Sequence
  Synthetic
caagaccaguccggcuaaca

SEQ ID NO: 783633 - RNA, 20 nt, Artificial Sequence
  Synthetic
aacacugaagagggcuaaca

SEQ ID NO: 783634 - RNA, 20 nt, Artificial Sequence
  Synthetic
cgagaacaaccuggcuaaca

SEQ ID NO: 783635 - RNA, 20 nt, Artificial Sequence
  Synthetic
cgaaaccagccuggcuaaca

SEQ ID NO: 783636 - RNA, 20 nt, Artificial Sequence
  Synthetic
cgacaccauccuggcuaaca

SEQ ID NO: 783637 - RNA, 20 nt, Artificial Sequence
  Synthetic
caagaccauccuggcuaaca

SEQ ID NO: 783638 - RNA, 20 nt, Artificial Sequence
  Synthetic
agagaccauccuggcuaaca

SEQ ID NO: 783639 - RNA, 20 nt, Artificial Sequence
  Synthetic
cgagaccauccuggcuaaca

SEQ ID NO: 783640 - RNA, 20 nt, Artificial Sequence
  Synthetic
ugagaccauccuggcuaaca

SEQ ID NO: 783641 - RNA, 20 nt, Artificial Sequence
  Synthetic
cgggaccauccuggcuaaca

SEQ ID NO: 783642 - RNA, 20 nt, Artificial Sequence
  Synthetic
aguuccuucggucucuaaca

SEQ ID NO: 783643 - RNA, 20 nt, Artificial Sequence
  Synthetic
aaaauauaacuucucuaaca

SEQ ID NO: 783644 - RNA, 20 nt, Artificial Sequence
  Synthetic
uuuaaguuuauuuucuaaca

SEQ ID NO: 783645 - RNA, 20 nt, Artificial Sequence
  Synthetic
uuuugagcagggaaguaaca

SEQ ID NO: 783646 - RNA, 20 nt, Artificial Sequence
  Synthetic
uguuauuuuaagcaguaaca

SEQ ID NO: 783647 - RNA, 20 nt, Artificial Sequence
  Synthetic
auacauuuucuugaguaaca

SEQ ID NO: 783648 - RNA, 20 nt, Artificial Sequence
  Synthetic
cccaggggcuccagguaaca

SEQ ID NO: 783649 - RNA, 20 nt, Artificial Sequence
  Synthetic
uucauguuaccaugguaaca

SEQ ID NO: 783650 - RNA, 20 nt, Artificial Sequence
  Synthetic
cuuaucuguaauauguaaca

SEQ ID NO: 783651 - RNA, 20 nt, Artificial Sequence
  Synthetic
uauaacaaaaaacuguaaca

SEQ ID NO: 783652 - RNA, 20 nt, Artificial Sequence
  Synthetic
agcuguuuaucuguguaaca

SEQ ID NO: 783653 - RNA, 20 nt, Artificial Sequence
  Synthetic
cucuagagugcuuuguaaca

SEQ ID NO: 783654 - RNA, 20 nt, Artificial Sequence
  Synthetic
aacgaaacagaaaauuaaca

SEQ ID NO: 783655 - RNA, 20 nt, Artificial Sequence
  Synthetic
ucuaaaucugaaaauuaaca

SEQ ID NO: 783656 - RNA, 20 nt, Artificial Sequence
  Synthetic
aagaacuaggcaaauuaaca

SEQ ID NO: 783657 - RNA, 20 nt, Artificial Sequence
  Synthetic
auucuuccuuuccauuaaca

SEQ ID NO: 783658 - RNA, 20 nt, Artificial Sequence
  Synthetic
uuugugaguugugauuaaca

SEQ ID NO: 783659 - RNA, 20 nt, Artificial Sequence
  Synthetic
aaaggaauugucuauuaaca

SEQ ID NO: 783660 - RNA, 20 nt, Artificial Sequence
  Synthetic
aacauuucacgggcuuaaca

SEQ ID NO: 783661 - RNA, 20 nt, Artificial Sequence
  Synthetic
uugcacagguauucuuaaca

SEQ ID NO: 783662 - RNA, 20 nt, Artificial Sequence
  Synthetic
acuuuaugguuuucuuaaca

SEQ ID NO: 783663 - RNA, 20 nt, Artificial Sequence
  Synthetic
auuguaaauccuaguuaaca

SEQ ID NO: 783664 - RNA, 20 nt, Artificial Sequence
  Synthetic
aagaaaacuguggguuaaca

SEQ ID NO: 783665 - RNA, 20 nt, Artificial Sequence
  Synthetic
aaaaaaaaaauguguuaaca

SEQ ID NO: 783666 - RNA, 20 nt, Artificial Sequence
  Synthetic
agaaauuugcauauuuaaca

SEQ ID NO: 783667 - RNA, 20 nt, Artificial Sequence
  Synthetic
caguuaaaacaucuuuaaca

SEQ ID NO: 783668 - RNA, 20 nt, Artificial Sequence
  Synthetic
cacaacugucuguuuuaaca

SEQ ID NO: 783669 - RNA, 20 nt, Artificial Sequence
  Synthetic
ucuuauucccauuuuuaaca

SEQ ID NO: 783670 - RNA, 20 nt, Artificial Sequence
  Synthetic
aaacuuccugauuuuuaaca

SEQ ID NO: 783671 - RNA, 20 nt, Artificial Sequence
  Synthetic
uccuucucuauaaaaacaca

SEQ ID NO: 783672 - RNA, 20 nt, Artificial Sequence
  Synthetic
uuuuuaccucugaaaacaca

SEQ ID NO: 783673 - RNA, 20 nt, Artificial Sequence
  Synthetic
cucaaaacuauacaaacaca

SEQ ID NO: 783674 - RNA, 20 nt, Artificial Sequence
  Synthetic
uuggaagcuauacaaacaca

SEQ ID NO: 783675 - RNA, 20 nt, Artificial Sequence
  Synthetic
cugagugauagccaaacaca

SEQ ID NO: 783676 - RNA, 20 nt, Artificial Sequence
  Synthetic
cauaguuccaagcaaacaca

SEQ ID NO: 783677 - RNA, 20 nt, Artificial Sequence
  Synthetic
ucagauauucagcaaacaca

SEQ ID NO: 783678 - RNA, 20 nt, Artificial Sequence
  Synthetic
auugaaaauccagaaacaca

SEQ ID NO: 783679 - RNA, 20 nt, Artificial Sequence
  Synthetic
uccggccaaaaauaaacaca

SEQ ID NO: 783680 - RNA, 20 nt, Artificial Sequence
  Synthetic
ugggucccucccacaacaca

SEQ ID NO: 783681 - RNA, 20 nt, Artificial Sequence
  Synthetic
ccaguaugaugcucaacaca

SEQ ID NO: 783682 - RNA, 20 nt, Artificial Sequence
  Synthetic
cccuuuuucuauucaacaca

SEQ ID NO: 783683 - RNA, 20 nt, Artificial Sequence
  Synthetic
uuaaucuuuuuuucaacaca

SEQ ID NO: 783684 - RNA, 20 nt, Artificial Sequence
  Synthetic
auaaaaagugcaagaacaca

SEQ ID NO: 783685 - RNA, 20 nt, Artificial Sequence
  Synthetic
uuuuauuaguuaagaacaca

SEQ ID NO: 783686 - RNA, 20 nt, Artificial Sequence
  Synthetic
aauggaacaaugagaacaca

SEQ ID NO: 783687 - RNA, 20 nt, Artificial Sequence
  Synthetic
agcugaacaaugagaacaca

SEQ ID NO: 783688 - RNA, 20 nt, Artificial Sequence
  Synthetic
aauugaacaaugagaacaca

SEQ ID NO: 783689 - RNA, 20 nt, Artificial Sequence
  Synthetic
aguugagcaaugagaacaca

SEQ ID NO: 783690 - RNA, 20 nt, Artificial Sequence
  Synthetic
aguugaacgaugagaacaca

SEQ ID NO: 783691 - RNA, 20 nt, Artificial Sequence
  Synthetic
agcuaaaugaugagaacaca

SEQ ID NO: 783692 - RNA, 20 nt, Artificial Sequence
  Synthetic
agcuaagugaugagaacaca

SEQ ID NO: 783693 - RNA, 20 nt, Artificial Sequence
  Synthetic
aguggaacagugagaacaca

SEQ ID NO: 783694 - RNA, 20 nt, Artificial Sequence
  Synthetic
ugcaugaagucaggaacaca

SEQ ID NO: 783695 - RNA, 20 nt, Artificial Sequence
  Synthetic
auugugcuguggggaacaca

SEQ ID NO: 783696 - RNA, 20 nt, Artificial Sequence
  Synthetic
cauuguuuaaggugaacaca

SEQ ID NO: 783697 - RNA, 20 nt, Artificial Sequence
  Synthetic
ugggucccucccauaacaca

SEQ ID NO: 783698 - RNA, 20 nt, Artificial Sequence
  Synthetic
agggaaaucauauuaacaca

SEQ ID NO: 783699 - RNA, 20 nt, Artificial Sequence
  Synthetic
cccaaaugaaucuuaacaca

SEQ ID NO: 783700 - RNA, 20 nt, Artificial Sequence
  Synthetic
augcccuuuuuuuuaacaca

SEQ ID NO: 783701 - RNA, 20 nt, Artificial Sequence
  Synthetic
ucaccauauacccacacaca

SEQ ID NO: 783702 - RNA, 20 nt, Artificial Sequence
  Synthetic
uuaagggcuucccacacaca

SEQ ID NO: 783703 - RNA, 20 nt, Artificial Sequence
  Synthetic
uguaaaacaugagacacaca

SEQ ID NO: 783704 - RNA, 20 nt, Artificial Sequence
  Synthetic
caagugugagccaccacaca

SEQ ID NO: 783705 - RNA, 20 nt, Artificial Sequence
  Synthetic
aaccacuucauuaccacaca

SEQ ID NO: 783706 - RNA, 20 nt, Artificial Sequence
  Synthetic
uauguuccuuuccccacaca

SEQ ID NO: 783707 - RNA, 20 nt, Artificial Sequence
  Synthetic
aaucaauauagggccacaca

SEQ ID NO: 783708 - RNA, 20 nt, Artificial Sequence
  Synthetic
uuuuuuuuuuuuuccacaca

SEQ ID NO: 783709 - RNA, 20 nt, Artificial Sequence
  Synthetic
agcuaagcacugagcacaca

SEQ ID NO: 783710 - RNA, 20 nt, Artificial Sequence
  Synthetic
uaauaacuccacugcacaca

SEQ ID NO: 783711 - RNA, 20 nt, Artificial Sequence
  Synthetic
augcuaauaauaaucacaca

SEQ ID NO: 783712 - RNA, 20 nt, Artificial Sequence
  Synthetic
uggagucagagggucacaca

SEQ ID NO: 783713 - RNA, 20 nt, Artificial Sequence
  Synthetic
auauuugugguugucacaca

SEQ ID NO: 783714 - RNA, 20 nt, Artificial Sequence
  Synthetic
uccuuugaaguauucacaca

SEQ ID NO: 783715 - RNA, 20 nt, Artificial Sequence
  Synthetic
ugugaaguuuuaaagacaca

SEQ ID NO: 783716 - RNA, 20 nt, Artificial Sequence
  Synthetic
uauaccugcaagaagacaca

SEQ ID NO: 783717 - RNA, 20 nt, Artificial Sequence
  Synthetic
aggcuuuuucagaagacaca

SEQ ID NO: 783718 - RNA, 20 nt, Artificial Sequence
  Synthetic
aaauaaacuaggcagacaca

SEQ ID NO: 783719 - RNA, 20 nt, Artificial Sequence
  Synthetic
ugcagcauauaucagacaca

SEQ ID NO: 783720 - RNA, 20 nt, Artificial Sequence
  Synthetic
aauaaucuaugguagacaca

SEQ ID NO: 783721 - RNA, 20 nt, Artificial Sequence
  Synthetic
auuugaccacaaacgacaca

SEQ ID NO: 783722 - RNA, 20 nt, Artificial Sequence
  Synthetic
agaccuaacaccacgacaca

SEQ ID NO: 783723 - RNA, 20 nt, Artificial Sequence
  Synthetic
uuuuacugggauaggacaca

SEQ ID NO: 783724 - RNA, 20 nt, Artificial Sequence
  Synthetic
aaugagaacacauggacaca

SEQ ID NO: 783725 - RNA, 20 nt, Artificial Sequence
  Synthetic
agugagaacacauggacaca

SEQ ID NO: 783726 - RNA, 20 nt, Artificial Sequence
  Synthetic
aacgagagcccauggacaca

SEQ ID NO: 783727 - RNA, 20 nt, Artificial Sequence
  Synthetic
aaugaaaacauauggacaca

SEQ ID NO: 783728 - RNA, 20 nt, Artificial Sequence
  Synthetic
aagaaaacaauguggacaca

SEQ ID NO: 783729 - RNA, 20 nt, Artificial Sequence
  Synthetic
aaugagaacacuuggacaca

SEQ ID NO: 783730 - RNA, 20 nt, Artificial Sequence
  Synthetic
uucuauagcugaaugacaca

SEQ ID NO: 783731 - RNA, 20 nt, Artificial Sequence
  Synthetic
ugggucccucacaugacaca

SEQ ID NO: 783732 - RNA, 20 nt, Artificial Sequence
  Synthetic
caggucacucccaugacaca

SEQ ID NO: 783733 - RNA, 20 nt, Artificial Sequence
  Synthetic
cagguacaaccacugacaca

SEQ ID NO: 783734 - RNA, 20 nt, Artificial Sequence
  Synthetic
cuggucucucccuugacaca

SEQ ID NO: 783735 - RNA, 20 nt, Artificial Sequence
  Synthetic
auacacugugauuugacaca

SEQ ID NO: 783736 - RNA, 20 nt, Artificial Sequence
  Synthetic
acuagccucggaaauacaca

SEQ ID NO: 783737 - RNA, 20 nt, Artificial Sequence
  Synthetic
cagagaacuuuaaauacaca

SEQ ID NO: 783738 - RNA, 20 nt, Artificial Sequence
  Synthetic
cuaucucuacacaauacaca

SEQ ID NO: 783739 - RNA, 20 nt, Artificial Sequence
  Synthetic
cucaccauaccccauacaca

SEQ ID NO: 783740 - RNA, 20 nt, Artificial Sequence
  Synthetic
cuuauucacuaucauacaca

SEQ ID NO: 783741 - RNA, 20 nt, Artificial Sequence
  Synthetic
ucuacaauuucauauacaca

SEQ ID NO: 783742 - RNA, 20 nt, Artificial Sequence
  Synthetic
uaaguuuugaaaacuacaca

SEQ ID NO: 783743 - RNA, 20 nt, Artificial Sequence
  Synthetic
ugauucugauucacuacaca

SEQ ID NO: 783744 - RNA, 20 nt, Artificial Sequence
  Synthetic
aaauguguuaauacuacaca

SEQ ID NO: 783745 - RNA, 20 nt, Artificial Sequence
  Synthetic
aaaacacccugcaguacaca

SEQ ID NO: 783746 - RNA, 20 nt, Artificial Sequence
  Synthetic
uggagacagacacguacaca

SEQ ID NO: 783747 - RNA, 20 nt, Artificial Sequence
  Synthetic
auuuuucagcuugguacaca

SEQ ID NO: 783748 - RNA, 20 nt, Artificial Sequence
  Synthetic
ugcaaaacaaaauguacaca

SEQ ID NO: 783749 - RNA, 20 nt, Artificial Sequence
  Synthetic
aaaaggaaauaauguacaca

SEQ ID NO: 783750 - RNA, 20 nt, Artificial Sequence
  Synthetic
aauguauaaacauguacaca

SEQ ID NO: 783751 - RNA, 20 nt, Artificial Sequence
  Synthetic
acuguggaguaaauuacaca

SEQ ID NO: 783752 - RNA, 20 nt, Artificial Sequence
  Synthetic
ccuuauuugauaauuacaca

SEQ ID NO: 783753 - RNA, 20 nt, Artificial Sequence
  Synthetic
caauugucagcaguuacaca

SEQ ID NO: 783754 - RNA, 20 nt, Artificial Sequence
  Synthetic
cauauaagccacguuacaca

SEQ ID NO: 783755 - RNA, 20 nt, Artificial Sequence
  Synthetic
ccaucauauuguuuuacaca

SEQ ID NO: 783756 - RNA, 20 nt, Artificial Sequence
  Synthetic
aaccaacgacaaaaaccaca

SEQ ID NO: 783757 - RNA, 20 nt, Artificial Sequence
  Synthetic
aaaugcaaaucaaaaccaca

SEQ ID NO: 783758 - RNA, 20 nt, Artificial Sequence
  Synthetic
aaaugcaaaugaaaaccaca

SEQ ID NO: 783759 - RNA, 20 nt, Artificial Sequence
  Synthetic
auuuuacuuauccaaccaca

SEQ ID NO: 783760 - RNA, 20 nt, Artificial Sequence
  Synthetic
augggccuaaucuaaccaca

SEQ ID NO: 783761 - RNA, 20 nt, Artificial Sequence
  Synthetic
cccacaggcucaacaccaca

SEQ ID NO: 783762 - RNA, 20 nt, Artificial Sequence
  Synthetic
uguauauucucaccaccaca

SEQ ID NO: 783763 - RNA, 20 nt, Artificial Sequence
  Synthetic
uguccucagcacccaccaca

SEQ ID NO: 783764 - RNA, 20 nt, Artificial Sequence
  Synthetic
uaagcagcuucaucaccaca

SEQ ID NO: 783765 - RNA, 20 nt, Artificial Sequence
  Synthetic
ugucaauauuucagaccaca

SEQ ID NO: 783766 - RNA, 20 nt, Artificial Sequence
  Synthetic
cacugaaaagggugaccaca

SEQ ID NO: 783767 - RNA, 20 nt, Artificial Sequence
  Synthetic
uuccaagcuauuauaccaca

SEQ ID NO: 783768 - RNA, 20 nt, Artificial Sequence
  Synthetic
ccaugauucugccuaccaca

SEQ ID NO: 783769 - RNA, 20 nt, Artificial Sequence
  Synthetic
cucuacccugcaaacccaca

SEQ ID NO: 783770 - RNA, 20 nt, Artificial Sequence
  Synthetic
cuacaguccaauaacccaca

SEQ ID NO: 783771 - RNA, 20 nt, Artificial Sequence
  Synthetic
ucucuggagauacacccaca

SEQ ID NO: 783772 - RNA, 20 nt, Artificial Sequence
  Synthetic
auggucaucccaaccccaca

SEQ ID NO: 783773 - RNA, 20 nt, Artificial Sequence
  Synthetic
acauuuuuguauaccccaca

SEQ ID NO: 783774 - RNA, 20 nt, Artificial Sequence
  Synthetic
uucgauuucuuguccccaca

SEQ ID NO: 783775 - RNA, 20 nt, Artificial Sequence
  Synthetic
auaggaucaaaaagcccaca

SEQ ID NO: 783776 - RNA, 20 nt, Artificial Sequence
  Synthetic
uucuaucgccaccucccaca

SEQ ID NO: 783777 - RNA, 20 nt, Artificial Sequence
  Synthetic
ugauucaguuaccucccaca

SEQ ID NO: 783778 - RNA, 20 nt, Artificial Sequence
  Synthetic
uuuuccugagacuucccaca

SEQ ID NO: 783779 - RNA, 20 nt, Artificial Sequence
  Synthetic
aauuguucuuuguucccaca

SEQ ID NO: 783780 - RNA, 20 nt, Artificial Sequence
  Synthetic
caaaaaaacccaaagccaca

SEQ ID NO: 783781 - RNA, 20 nt, Artificial Sequence
  Synthetic
cuguacccugcaaagccaca

SEQ ID NO: 783782 - RNA, 20 nt, Artificial Sequence
  Synthetic
ucugccauuugcaagccaca

SEQ ID NO: 783783 - RNA, 20 nt, Artificial Sequence
  Synthetic
auaaaugaauugaagccaca

SEQ ID NO: 783784 - RNA, 20 nt, Artificial Sequence
  Synthetic
cagaaacgaaaagagccaca

SEQ ID NO: 783785 - RNA, 20 nt, Artificial Sequence
  Synthetic
aauacaagcucagagccaca

SEQ ID NO: 783786 - RNA, 20 nt, Artificial Sequence
  Synthetic
cuuuguuacuuauagccaca

SEQ ID NO: 783787 - RNA, 20 nt, Artificial Sequence
  Synthetic
aguuaauuuuguuagccaca

SEQ ID NO: 783788 - RNA, 20 nt, Artificial Sequence
  Synthetic
auccuugaggaaucgccaca

SEQ ID NO: 783789 - RNA, 20 nt, Artificial Sequence
  Synthetic
ucaugguggugagggccaca

SEQ ID NO: 783790 - RNA, 20 nt, Artificial Sequence
  Synthetic
ucauuuauugaauggccaca

SEQ ID NO: 783791 - RNA, 20 nt, Artificial Sequence
  Synthetic
ucgagaccauccuggccaca

SEQ ID NO: 783792 - RNA, 20 nt, Artificial Sequence
  Synthetic
ugcuguuacauguggccaca

SEQ ID NO: 783793 - RNA, 20 nt, Artificial Sequence
  Synthetic
auccauuggcuuuggccaca

SEQ ID NO: 783794 - RNA, 20 nt, Artificial Sequence
  Synthetic
uuugugaucguaaugccaca

SEQ ID NO: 783795 - RNA, 20 nt, Artificial Sequence
  Synthetic
cucuagaccucucugccaca

SEQ ID NO: 783796 - RNA, 20 nt, Artificial Sequence
  Synthetic
uuugccaucuuugugccaca

SEQ ID NO: 783797 - RNA, 20 nt, Artificial Sequence
  Synthetic
uuugaaauacauuugccaca

SEQ ID NO: 783798 - RNA, 20 nt, Artificial Sequence
  Synthetic
agcaauccaacaaauccaca

SEQ ID NO: 783799 - RNA, 20 nt, Artificial Sequence
  Synthetic
ugaaaaucuguuaauccaca

SEQ ID NO: 783800 - RNA, 20 nt, Artificial Sequence
  Synthetic
cucaaguugacagauccaca

SEQ ID NO: 783801 - RNA, 20 nt, Artificial Sequence
  Synthetic
caacaaugaaagccuccaca

SEQ ID NO: 783802 - RNA, 20 nt, Artificial Sequence
  Synthetic
ccacucagccuggcuccaca

SEQ ID NO: 783803 - RNA, 20 nt, Artificial Sequence
  Synthetic
augguucauaguaguccaca

SEQ ID NO: 783804 - RNA, 20 nt, Artificial Sequence
  Synthetic
auccuaccuacaauuccaca

SEQ ID NO: 783805 - RNA, 20 nt, Artificial Sequence
  Synthetic
augucccuucuacuuccaca

SEQ ID NO: 783806 - RNA, 20 nt, Artificial Sequence
  Synthetic
aauggacucacaguuccaca

SEQ ID NO: 783807 - RNA, 20 nt, Artificial Sequence
  Synthetic
aauugacucacaguuccaca

SEQ ID NO: 783808 - RNA, 20 nt, Artificial Sequence
  Synthetic
cuaauggcuucaguuccaca

SEQ ID NO: 783809 - RNA, 20 nt, Artificial Sequence
  Synthetic
ucuaacaucugauuuccaca

SEQ ID NO: 783810 - RNA, 20 nt, Artificial Sequence
  Synthetic
aaagccucuugguuuccaca

SEQ ID NO: 783811 - RNA, 20 nt, Artificial Sequence
  Synthetic
ccucagccucccaaagcaca

SEQ ID NO: 783812 - RNA, 20 nt, Artificial Sequence
  Synthetic
uauuuguuaagacaagcaca

SEQ ID NO: 783813 - RNA, 20 nt, Artificial Sequence
  Synthetic
cgccucaccccggaagcaca

SEQ ID NO: 783814 - RNA, 20 nt, Artificial Sequence
  Synthetic
auauauuuaaaugaagcaca

SEQ ID NO: 783815 - RNA, 20 nt, Artificial Sequence
  Synthetic
accaagugugcugaagcaca

SEQ ID NO: 783816 - RNA, 20 nt, Artificial Sequence
  Synthetic
agagacaugaaguaagcaca

SEQ ID NO: 783817 - RNA, 20 nt, Artificial Sequence
  Synthetic
uggcuggggcuuuaagcaca

SEQ ID NO: 783818 - RNA, 20 nt, Artificial Sequence
  Synthetic
cuguugcugcuuuaagcaca

SEQ ID NO: 783819 - RNA, 20 nt, Artificial Sequence
  Synthetic
cugaaaaccuuggcagcaca

SEQ ID NO: 783820 - RNA, 20 nt, Artificial Sequence
  Synthetic
acaaggaagagaagagcaca

SEQ ID NO: 783821 - RNA, 20 nt, Artificial Sequence
  Synthetic
ccggacuguggcagagcaca

SEQ ID NO: 783822 - RNA, 20 nt, Artificial Sequence
  Synthetic
auuacaguuucaugagcaca

SEQ ID NO: 783823 - RNA, 20 nt, Artificial Sequence
  Synthetic
uugccucucaaacuagcaca

SEQ ID NO: 783824 - RNA, 20 nt, Artificial Sequence
  Synthetic
uggggaaauaauuuagcaca

SEQ ID NO: 783825 - RNA, 20 nt, Artificial Sequence
  Synthetic
cuaaaagaaagaaaggcaca

SEQ ID NO: 783826 - RNA, 20 nt, Artificial Sequence
  Synthetic
aggcccauuccuaaggcaca

SEQ ID NO: 783827 - RNA, 20 nt, Artificial Sequence
  Synthetic
aaugaggauaaugaggcaca

SEQ ID NO: 783828 - RNA, 20 nt, Artificial Sequence
  Synthetic
ucauuuuuaaaauaggcaca

SEQ ID NO: 783829 - RNA, 20 nt, Artificial Sequence
  Synthetic
uugccauuuagcuaggcaca

SEQ ID NO: 783830 - RNA, 20 nt, Artificial Sequence
  Synthetic
ucauguccuuuguaggcaca

SEQ ID NO: 783831 - RNA, 20 nt, Artificial Sequence
  Synthetic
cagugagauuugggggcaca

SEQ ID NO: 783832 - RNA, 20 nt, Artificial Sequence
  Synthetic
uggggugguagaugggcaca

SEQ ID NO: 783833 - RNA, 20 nt, Artificial Sequence
  Synthetic
uuaaaaguugacugggcaca

SEQ ID NO: 783834 - RNA, 20 nt, Artificial Sequence
  Synthetic
auaucagcaauuugggcaca

SEQ ID NO: 783835 - RNA, 20 nt, Artificial Sequence
  Synthetic
aguguucaguuaauggcaca

SEQ ID NO: 783836 - RNA, 20 nt, Artificial Sequence
  Synthetic
auggaacaguuucuggcaca

SEQ ID NO: 783837 - RNA, 20 nt, Artificial Sequence
  Synthetic
uaacugggcaugguggcaca

SEQ ID NO: 783838 - RNA, 20 nt, Artificial Sequence
  Synthetic
cauuauacgugccaugcaca

SEQ ID NO: 783839 - RNA, 20 nt, Artificial Sequence
  Synthetic
cuguggcuguuccaugcaca

SEQ ID NO: 783840 - RNA, 20 nt, Artificial Sequence
  Synthetic
agcuaaacauugagugcaca

SEQ ID NO: 783841 - RNA, 20 nt, Artificial Sequence
  Synthetic
ucuaaugcuaaaugugcaca

SEQ ID NO: 783842 - RNA, 20 nt, Artificial Sequence
  Synthetic
ugcaauuaggagauugcaca

SEQ ID NO: 783843 - RNA, 20 nt, Artificial Sequence
  Synthetic
uaugugcuagauauugcaca

SEQ ID NO: 783844 - RNA, 20 nt, Artificial Sequence
  Synthetic
cuauuuuuucagcuugcaca

SEQ ID NO: 783845 - RNA, 20 nt, Artificial Sequence
  Synthetic
augcacccuauaaaaucaca

SEQ ID NO: 783846 - RNA, 20 nt, Artificial Sequence
  Synthetic
uuuaaccaaagcaaaucaca

SEQ ID NO: 783847 - RNA, 20 nt, Artificial Sequence
  Synthetic
auuugcuaaagcaaaucaca

SEQ ID NO: 783848 - RNA, 20 nt, Artificial Sequence
  Synthetic
aagaucuuaggcaaaucaca

SEQ ID NO: 783849 - RNA, 20 nt, Artificial Sequence
  Synthetic
ucaacagaacuuaaaucaca

SEQ ID NO: 783850 - RNA, 20 nt, Artificial Sequence
  Synthetic
ucagagcugauggaaucaca

SEQ ID NO: 783851 - RNA, 20 nt, Artificial Sequence
  Synthetic
caaguucaaaaguaaucaca

SEQ ID NO: 783852 - RNA, 20 nt, Artificial Sequence
  Synthetic
ucuuaauguguguaaucaca

SEQ ID NO: 783853 - RNA, 20 nt, Artificial Sequence
  Synthetic
auacuuucaucuuaaucaca

SEQ ID NO: 783854 - RNA, 20 nt, Artificial Sequence
  Synthetic
ucauaacucccaacaucaca

SEQ ID NO: 783855 - RNA, 20 nt, Artificial Sequence
  Synthetic
ucucuaacuguaacaucaca

SEQ ID NO: 783856 - RNA, 20 nt, Artificial Sequence
  Synthetic
aaugaaagcuuuccaucaca

SEQ ID NO: 783857 - RNA, 20 nt, Artificial Sequence
  Synthetic
augauuccauuaucaucaca

SEQ ID NO: 783858 - RNA, 20 nt, Artificial Sequence
  Synthetic
uaggcaagggcaagaucaca

SEQ ID NO: 783859 - RNA, 20 nt, Artificial Sequence
  Synthetic
aauugaacaaugagaucaca

SEQ ID NO: 783860 - RNA, 20 nt, Artificial Sequence
  Synthetic
acaauuugucuaggaucaca

SEQ ID NO: 783861 - RNA, 20 nt, Artificial Sequence
  Synthetic
ccugaggcgggcggaucaca

SEQ ID NO: 783862 - RNA, 20 nt, Artificial Sequence
  Synthetic
uuuagucauacaugaucaca

SEQ ID NO: 783863 - RNA, 20 nt, Artificial Sequence
  Synthetic
aaggcugacuagugaucaca

SEQ ID NO: 783864 - RNA, 20 nt, Artificial Sequence
  Synthetic
uucucucuuggcauaucaca

SEQ ID NO: 783865 - RNA, 20 nt, Artificial Sequence
  Synthetic
uuucucagcaaacuaucaca

SEQ ID NO: 783866 - RNA, 20 nt, Artificial Sequence
  Synthetic
auucugagcaaacuaucaca

SEQ ID NO: 783867 - RNA, 20 nt, Artificial Sequence
  Synthetic
agaacucacucacuaucaca

SEQ ID NO: 783868 - RNA, 20 nt, Artificial Sequence
  Synthetic
uugcaucaauauuuaucaca

SEQ ID NO: 783869 - RNA, 20 nt, Artificial Sequence
  Synthetic
agguuuugaauuuuaucaca

SEQ ID NO: 783870 - RNA, 20 nt, Artificial Sequence
  Synthetic
acuuauuuguaaaacucaca

SEQ ID NO: 783871 - RNA, 20 nt, Artificial Sequence
  Synthetic
ucaugcuacacaaacucaca

SEQ ID NO: 783872 - RNA, 20 nt, Artificial Sequence
  Synthetic
uaugacuugagaaacucaca

SEQ ID NO: 783873 - RNA, 20 nt, Artificial Sequence
  Synthetic
uacuaagacaacaacucaca

SEQ ID NO: 783874 - RNA, 20 nt, Artificial Sequence
  Synthetic
aaucuuuaccauaacucaca

SEQ ID NO: 783875 - RNA, 20 nt, Artificial Sequence
  Synthetic
uagacacauaaacacucaca

SEQ ID NO: 783876 - RNA, 20 nt, Artificial Sequence
  Synthetic
auacugauaauccacucaca

SEQ ID NO: 783877 - RNA, 20 nt, Artificial Sequence
  Synthetic
cuacaaauuguggacucaca

SEQ ID NO: 783878 - RNA, 20 nt, Artificial Sequence
  Synthetic
caugucacaagugacucaca

SEQ ID NO: 783879 - RNA, 20 nt, Artificial Sequence
  Synthetic
cuucucacuguaaccucaca

SEQ ID NO: 783880 - RNA, 20 nt, Artificial Sequence
  Synthetic
aagcaauuaaacaccucaca

SEQ ID NO: 783881 - RNA, 20 nt, Artificial Sequence
  Synthetic
ugcaaauuacccaucucaca

SEQ ID NO: 783882 - RNA, 20 nt, Artificial Sequence
  Synthetic
cucauuuugagacucucaca

SEQ ID NO: 783883 - RNA, 20 nt, Artificial Sequence
  Synthetic
agccacuaucaucucucaca

SEQ ID NO: 783884 - RNA, 20 nt, Artificial Sequence
  Synthetic
uuugauuccauucucucaca

SEQ ID NO: 783885 - RNA, 20 nt, Artificial Sequence
  Synthetic
cacucauauggauucucaca

SEQ ID NO: 783886 - RNA, 20 nt, Artificial Sequence
  Synthetic
uuagaaaguguuuucucaca

SEQ ID NO: 783887 - RNA, 20 nt, Artificial Sequence
  Synthetic
aguagacaaaaccagucaca

SEQ ID NO: 783888 - RNA, 20 nt, Artificial Sequence
  Synthetic
cacugagacuuucagucaca

SEQ ID NO: 783889 - RNA, 20 nt, Artificial Sequence
  Synthetic
auuggucacaacuagucaca

SEQ ID NO: 783890 - RNA, 20 nt, Artificial Sequence
  Synthetic
aucuauuuggacuagucaca

SEQ ID NO: 783891 - RNA, 20 nt, Artificial Sequence
  Synthetic
cagcucugaaucaggucaca

SEQ ID NO: 783892 - RNA, 20 nt, Artificial Sequence
  Synthetic
uaguuaugcccgaggucaca

SEQ ID NO: 783893 - RNA, 20 nt, Artificial Sequence
  Synthetic
auccaaacuaaaaugucaca

SEQ ID NO: 783894 - RNA, 20 nt, Artificial Sequence
  Synthetic
acaggaguaagcaugucaca

SEQ ID NO: 783895 - RNA, 20 nt, Artificial Sequence
  Synthetic
agaauagugucuaugucaca

SEQ ID NO: 783896 - RNA, 20 nt, Artificial Sequence
  Synthetic
cagauggaaugacugucaca

SEQ ID NO: 783897 - RNA, 20 nt, Artificial Sequence
  Synthetic
aaccacagagagcugucaca

SEQ ID NO: 783898 - RNA, 20 nt, Artificial Sequence
  Synthetic
uuggccagaugucugucaca

SEQ ID NO: 783899 - RNA, 20 nt, Artificial Sequence
  Synthetic
auuucugguugagugucaca

SEQ ID NO: 783900 - RNA, 20 nt, Artificial Sequence
  Synthetic
auaggcaaaccggugucaca

SEQ ID NO: 783901 - RNA, 20 nt, Artificial Sequence
  Synthetic
acauguacaggcuugucaca

SEQ ID NO: 783902 - RNA, 20 nt, Artificial Sequence
  Synthetic
acacaaauuaauuugucaca

SEQ ID NO: 783903 - RNA, 20 nt, Artificial Sequence
  Synthetic
aauguaaaugcacauucaca

SEQ ID NO: 783904 - RNA, 20 nt, Artificial Sequence
  Synthetic
uggcauuagauacauucaca

SEQ ID NO: 783905 - RNA, 20 nt, Artificial Sequence
  Synthetic
aaauucagucuucauucaca

SEQ ID NO: 783906 - RNA, 20 nt, Artificial Sequence
  Synthetic
cuugaaguguaagauucaca

SEQ ID NO: 783907 - RNA, 20 nt, Artificial Sequence
  Synthetic
uucaggaagaauuauucaca

SEQ ID NO: 783908 - RNA, 20 nt, Artificial Sequence
  Synthetic
aggguuacagaaacuucaca

SEQ ID NO: 783909 - RNA, 20 nt, Artificial Sequence
  Synthetic
uccauuauauuuacuucaca

SEQ ID NO: 783910 - RNA, 20 nt, Artificial Sequence
  Synthetic
cuuccugcuguaucuucaca

SEQ ID NO: 783911 - RNA, 20 nt, Artificial Sequence
  Synthetic
ccucuucugcugucuucaca

SEQ ID NO: 783912 - RNA, 20 nt, Artificial Sequence
  Synthetic
agcgaggcaccuucuucaca

SEQ ID NO: 783913 - RNA, 20 nt, Artificial Sequence
  Synthetic
aagcaagcaucuucuucaca

SEQ ID NO: 783914 - RNA, 20 nt, Artificial Sequence
  Synthetic
caaacaccuucuucuucaca

SEQ ID NO: 783915 - RNA, 20 nt, Artificial Sequence
  Synthetic
cuauuuaauggugguucaca

SEQ ID NO: 783916 - RNA, 20 nt, Artificial Sequence
  Synthetic
augagcacuuaauguucaca

SEQ ID NO: 783917 - RNA, 20 nt, Artificial Sequence
  Synthetic
uuuacaaagcacuguucaca

SEQ ID NO: 783918 - RNA, 20 nt, Artificial Sequence
  Synthetic
caaauauuaaauuguucaca

SEQ ID NO: 783919 - RNA, 20 nt, Artificial Sequence
  Synthetic
ccagucaugaacauuucaca

SEQ ID NO: 783920 - RNA, 20 nt, Artificial Sequence
  Synthetic
aagaauuuacacauuucaca

SEQ ID NO: 783921 - RNA, 20 nt, Artificial Sequence
  Synthetic
auucuggacaugauuucaca

SEQ ID NO: 783922 - RNA, 20 nt, Artificial Sequence
  Synthetic
auggcauuuugacuuucaca

SEQ ID NO: 783923 - RNA, 20 nt, Artificial Sequence
  Synthetic
uucauagggaaauuuucaca

SEQ ID NO: 783924 - RNA, 20 nt, Artificial Sequence
  Synthetic
ugucugccuucauuuucaca

SEQ ID NO: 783925 - RNA, 20 nt, Artificial Sequence
  Synthetic
ucuggaaauauguuuucaca

SEQ ID NO: 783926 - RNA, 20 nt, Artificial Sequence
  Synthetic
cccuccauggaaaaaagaca

SEQ ID NO: 783927 - RNA, 20 nt, Artificial Sequence
  Synthetic
uuuucucaaauaaaaagaca

SEQ ID NO: 783928 - RNA, 20 nt, Artificial Sequence
  Synthetic
acuauacaguaacaaagaca

SEQ ID NO: 783929 - RNA, 20 nt, Artificial Sequence
  Synthetic
uauucccaauaccaaagaca

SEQ ID NO: 783930 - RNA, 20 nt, Artificial Sequence
  Synthetic
aaucaauagaagcaaagaca

SEQ ID NO: 783931 - RNA, 20 nt, Artificial Sequence
  Synthetic
uacucacaauagcaaagaca

SEQ ID NO: 783932 - RNA, 20 nt, Artificial Sequence
  Synthetic
uauucacaauagcaaagaca

SEQ ID NO: 783933 - RNA, 20 nt, Artificial Sequence
  Synthetic
aggagaaagucucaaagaca

SEQ ID NO: 783934 - RNA, 20 nt, Artificial Sequence
  Synthetic
acacagccuguucaaagaca

SEQ ID NO: 783935 - RNA, 20 nt, Artificial Sequence
  Synthetic
cuuagccuuuaagaaagaca

SEQ ID NO: 783936 - RNA, 20 nt, Artificial Sequence
  Synthetic
uaugguagaguagaaagaca

SEQ ID NO: 783937 - RNA, 20 nt, Artificial Sequence
  Synthetic
acauauauauuuuaaagaca

SEQ ID NO: 783938 - RNA, 20 nt, Artificial Sequence
  Synthetic
uuagaugguuuuuaaagaca

SEQ ID NO: 783939 - RNA, 20 nt, Artificial Sequence
  Synthetic
ugaagaacaugaacaagaca

SEQ ID NO: 783940 - RNA, 20 nt, Artificial Sequence
  Synthetic
uuaaaaaccggcacaagaca

SEQ ID NO: 783941 - RNA, 20 nt, Artificial Sequence
  Synthetic
uuaaaaacuggcacaagaca

SEQ ID NO: 783942 - RNA, 20 nt, Artificial Sequence
  Synthetic
uugaaaacuggcacaagaca

SEQ ID NO: 783943 - RNA, 20 nt, Artificial Sequence
  Synthetic
auguaaaggcaagcaagaca

SEQ ID NO: 783944 - RNA, 20 nt, Artificial Sequence
  Synthetic
uugaaaagcaaggcaagaca

SEQ ID NO: 783945 - RNA, 20 nt, Artificial Sequence
  Synthetic
acuaugaaauccucaagaca

SEQ ID NO: 783946 - RNA, 20 nt, Artificial Sequence
  Synthetic
cucugagauagaagaagaca

SEQ ID NO: 783947 - RNA, 20 nt, Artificial Sequence
  Synthetic
auugacucauuccgaagaca

SEQ ID NO: 783948 - RNA, 20 nt, Artificial Sequence
  Synthetic
ugaggaaaaggaggaagaca

SEQ ID NO: 783949 - RNA, 20 nt, Artificial Sequence
  Synthetic
ugaacaucaggaggaagaca

SEQ ID NO: 783950 - RNA, 20 nt, Artificial Sequence
  Synthetic
caaaaauaucauugaagaca

SEQ ID NO: 783951 - RNA, 20 nt, Artificial Sequence
  Synthetic
uuuuugcuuuuuugaagaca

SEQ ID NO: 783952 - RNA, 20 nt, Artificial Sequence
  Synthetic
uuuugagaguugauaagaca

SEQ ID NO: 783953 - RNA, 20 nt, Artificial Sequence
  Synthetic
uagcggcccagacuaagaca

SEQ ID NO: 783954 - RNA, 20 nt, Artificial Sequence
  Synthetic
uguuuucuaucauuaagaca

SEQ ID NO: 783955 - RNA, 20 nt, Artificial Sequence
  Synthetic
aguagcugggaccacagaca

SEQ ID NO: 783956 - RNA, 20 nt, Artificial Sequence
  Synthetic
uugauucaaaugcacagaca

SEQ ID NO: 783957 - RNA, 20 nt, Artificial Sequence
  Synthetic
uuguauuuuuaguacagaca

SEQ ID NO: 783958 - RNA, 20 nt, Artificial Sequence
  Synthetic
uuuuauuuuuaguacagaca

SEQ ID NO: 783959 - RNA, 20 nt, Artificial Sequence
  Synthetic
uuauuuuuuuaguacagaca

SEQ ID NO: 783960 - RNA, 20 nt, Artificial Sequence
  Synthetic
aagugcugaaauuacagaca

SEQ ID NO: 783961 - RNA, 20 nt, Artificial Sequence
  Synthetic
ugcacaaaauuagccagaca

SEQ ID NO: 783962 - RNA, 20 nt, Artificial Sequence
  Synthetic
auggccaccauggccagaca

SEQ ID NO: 783963 - RNA, 20 nt, Artificial Sequence
  Synthetic
ugaucuuugaaaagcagaca

SEQ ID NO: 783964 - RNA, 20 nt, Artificial Sequence
  Synthetic
caacaaauguuaagcagaca

SEQ ID NO: 783965 - RNA, 20 nt, Artificial Sequence
  Synthetic
aaacaugggcugagcagaca

SEQ ID NO: 783966 - RNA, 20 nt, Artificial Sequence
  Synthetic
cuguguccuuguggcagaca

SEQ ID NO: 783967 - RNA, 20 nt, Artificial Sequence
  Synthetic
agagagguagggcucagaca

SEQ ID NO: 783968 - RNA, 20 nt, Artificial Sequence
  Synthetic
cuccagcauauauucagaca

SEQ ID NO: 783969 - RNA, 20 nt, Artificial Sequence
  Synthetic
aaagagggacacuucagaca

SEQ ID NO: 783970 - RNA, 20 nt, Artificial Sequence
  Synthetic
uuuauuuuauuuuucagaca

SEQ ID NO: 783971 - RNA, 20 nt, Artificial Sequence
  Synthetic
acaauuauuuugaagagaca

SEQ ID NO: 783972 - RNA, 20 nt, Artificial Sequence
  Synthetic
uuguauuuuuaacagagaca

SEQ ID NO: 783973 - RNA, 20 nt, Artificial Sequence
  Synthetic
agugacgccacacagagaca

SEQ ID NO: 783974 - RNA, 20 nt, Artificial Sequence
  Synthetic
uuugaaacaagacagagaca

SEQ ID NO: 783975 - RNA, 20 nt, Artificial Sequence
  Synthetic
aaaggagagugacagagaca

SEQ ID NO: 783976 - RNA, 20 nt, Artificial Sequence
  Synthetic
cuggcaaggccgcagagaca

SEQ ID NO: 783977 - RNA, 20 nt, Artificial Sequence
  Synthetic
ucucugcagaaagagagaca

SEQ ID NO: 783978 - RNA, 20 nt, Artificial Sequence
  Synthetic
aaugagugcuuagagagaca

SEQ ID NO: 783979 - RNA, 20 nt, Artificial Sequence
  Synthetic
uuguauuuuuaauagagaca

SEQ ID NO: 783980 - RNA, 20 nt, Artificial Sequence
  Synthetic
uuguguuuucaguagagaca

SEQ ID NO: 783981 - RNA, 20 nt, Artificial Sequence
  Synthetic
uuguacuuuuaguagagaca

SEQ ID NO: 783982 - RNA, 20 nt, Artificial Sequence
  Synthetic
uugcauuuuuaguagagaca

SEQ ID NO: 783983 - RNA, 20 nt, Artificial Sequence
  Synthetic
ucauauuuuuaguagagaca

SEQ ID NO: 783984 - RNA, 20 nt, Artificial Sequence
  Synthetic
uuguauuuuuaguagagaca

SEQ ID NO: 783985 - RNA, 20 nt, Artificial Sequence
  Synthetic
uuuuauuuuuaguagagaca

SEQ ID NO: 783986 - RNA, 20 nt, Artificial Sequence
  Synthetic
uucuguuuuuaguagagaca

SEQ ID NO: 783987 - RNA, 20 nt, Artificial Sequence
  Synthetic
ucguguuuuuaguagagaca

SEQ ID NO: 783988 - RNA, 20 nt, Artificial Sequence
  Synthetic
uuguguuuuuaguagagaca

SEQ ID NO: 783989 - RNA, 20 nt, Artificial Sequence
  Synthetic
ucauguucuuuguagagaca

SEQ ID NO: 783990 - RNA, 20 nt, Artificial Sequence
  Synthetic
uuuuguuauuauuagagaca

SEQ ID NO: 783991 - RNA, 20 nt, Artificial Sequence
  Synthetic
agagccuuccuugggagaca

SEQ ID NO: 783992 - RNA, 20 nt, Artificial Sequence
  Synthetic
uuguauuuuuaauggagaca

SEQ ID NO: 783993 - RNA, 20 nt, Artificial Sequence
  Synthetic
acauuuucuuucuggagaca

SEQ ID NO: 783994 - RNA, 20 nt, Artificial Sequence
  Synthetic
uuuuuguuuuucuggagaca

SEQ ID NO: 783995 - RNA, 20 nt, Artificial Sequence
  Synthetic
auaagcuuucaguggagaca

SEQ ID NO: 783996 - RNA, 20 nt, Artificial Sequence
  Synthetic
aaaauuuuuuuguggagaca

SEQ ID NO: 783997 - RNA, 20 nt, Artificial Sequence
  Synthetic
uccccuuuuuuuuggagaca

SEQ ID NO: 783998 - RNA, 20 nt, Artificial Sequence
  Synthetic
uuucaggguaauaugagaca

SEQ ID NO: 783999 - RNA, 20 nt, Artificial Sequence
  Synthetic
acacacauuuaccugagaca

SEQ ID NO: 784000 - RNA, 20 nt, Artificial Sequence
  Synthetic
cagaaguagacccugagaca

SEQ ID NO: 784001 - RNA, 20 nt, Artificial Sequence
  Synthetic
cauaagcaaauccugagaca

SEQ ID NO: 784002 - RNA, 20 nt, Artificial Sequence
  Synthetic
ccaaagucucaucugagaca

SEQ ID NO: 784003 - RNA, 20 nt, Artificial Sequence
  Synthetic
uauauauauaguuugagaca

SEQ ID NO: 784004 - RNA, 20 nt, Artificial Sequence
  Synthetic
uauuuauuuauuuugagaca

SEQ ID NO: 784005 - RNA, 20 nt, Artificial Sequence
  Synthetic
uuauuuuuucuuuugagaca

SEQ ID NO: 784006 - RNA, 20 nt, Artificial Sequence
  Synthetic
uuguuuuuauuuuugagaca

SEQ ID NO: 784007 - RNA, 20 nt, Artificial Sequence
  Synthetic
uauauauauuuuuugagaca

SEQ ID NO: 784008 - RNA, 20 nt, Artificial Sequence
  Synthetic
uuguuuguuuuuuugagaca

SEQ ID NO: 784009 - RNA, 20 nt, Artificial Sequence
  Synthetic
uuuuuuuuuuuuuugagaca

SEQ ID NO: 784010 - RNA, 20 nt, Artificial Sequence
  Synthetic
ccauauggaagaaauagaca

SEQ ID NO: 784011 - RNA, 20 nt, Artificial Sequence
  Synthetic
aauauggcugaccauagaca

SEQ ID NO: 784012 - RNA, 20 nt, Artificial Sequence
  Synthetic
ugaaccccaugagauagaca

SEQ ID NO: 784013 - RNA, 20 nt, Artificial Sequence
  Synthetic
ucuaaaagucuauauagaca

SEQ ID NO: 784014 - RNA, 20 nt, Artificial Sequence
  Synthetic
acuauauaaaucuauagaca

SEQ ID NO: 784015 - RNA, 20 nt, Artificial Sequence
  Synthetic
cuuacacccuuuuauagaca

SEQ ID NO: 784016 - RNA, 20 nt, Artificial Sequence
  Synthetic
uauaaugacaucacuagaca

SEQ ID NO: 784017 - RNA, 20 nt, Artificial Sequence
  Synthetic
ugcuuuaaaagagcuagaca

SEQ ID NO: 784018 - RNA, 20 nt, Artificial Sequence
  Synthetic
ccccugucagaaaguagaca

SEQ ID NO: 784019 - RNA, 20 nt, Artificial Sequence
  Synthetic
uugaauuuuccagguagaca

SEQ ID NO: 784020 - RNA, 20 nt, Artificial Sequence
  Synthetic
ucauugauaauugguagaca

SEQ ID NO: 784021 - RNA, 20 nt, Artificial Sequence
  Synthetic
aacccacauuguauuagaca

SEQ ID NO: 784022 - RNA, 20 nt, Artificial Sequence
  Synthetic
ucucagaguuaucuuagaca

SEQ ID NO: 784023 - RNA, 20 nt, Artificial Sequence
  Synthetic
cuuugcccuguucuuagaca

SEQ ID NO: 784024 - RNA, 20 nt, Artificial Sequence
  Synthetic
cuuacuuuaaauguuagaca

SEQ ID NO: 784025 - RNA, 20 nt, Artificial Sequence
  Synthetic
auagcucucugauuuagaca

SEQ ID NO: 784026 - RNA, 20 nt, Artificial Sequence
  Synthetic
uuucugcuuuuauuuagaca

SEQ ID NO: 784027 - RNA, 20 nt, Artificial Sequence
  Synthetic
aaaauguacaaggaccgaca

SEQ ID NO: 784028 - RNA, 20 nt, Artificial Sequence
  Synthetic
cgagaccagccuggccgaca

SEQ ID NO: 784029 - RNA, 20 nt, Artificial Sequence
  Synthetic
ucauguccuuugcagcgaca

SEQ ID NO: 784030 - RNA, 20 nt, Artificial Sequence
  Synthetic
aauaugaggauacaucgaca

SEQ ID NO: 784031 - RNA, 20 nt, Artificial Sequence
  Synthetic
agauaugauuuguaucgaca

SEQ ID NO: 784032 - RNA, 20 nt, Artificial Sequence
  Synthetic
auagugaugauagaaggaca

SEQ ID NO: 784033 - RNA, 20 nt, Artificial Sequence
  Synthetic
aaaaaucuucuugaaggaca

SEQ ID NO: 784034 - RNA, 20 nt, Artificial Sequence
  Synthetic
acccuguuuuuugaaggaca

SEQ ID NO: 784035 - RNA, 20 nt, Artificial Sequence
  Synthetic
ucaaccucuggauaaggaca

SEQ ID NO: 784036 - RNA, 20 nt, Artificial Sequence
  Synthetic
ucguguccuuuguaaggaca

SEQ ID NO: 784037 - RNA, 20 nt, Artificial Sequence
  Synthetic
auaccacugacuacaggaca

SEQ ID NO: 784038 - RNA, 20 nt, Artificial Sequence
  Synthetic
aggcagacaucuacaggaca

SEQ ID NO: 784039 - RNA, 20 nt, Artificial Sequence
  Synthetic
accccaaagcuaagaggaca

SEQ ID NO: 784040 - RNA, 20 nt, Artificial Sequence
  Synthetic
ccugagcugcuaugaggaca

SEQ ID NO: 784041 - RNA, 20 nt, Artificial Sequence
  Synthetic
uugaaagcuuccugaggaca

SEQ ID NO: 784042 - RNA, 20 nt, Artificial Sequence
  Synthetic
aguguguguaagguaggaca

SEQ ID NO: 784043 - RNA, 20 nt, Artificial Sequence
  Synthetic
uuaccaaagugauuaggaca

SEQ ID NO: 784044 - RNA, 20 nt, Artificial Sequence
  Synthetic
auucuucaucuuuuaggaca

SEQ ID NO: 784045 - RNA, 20 nt, Artificial Sequence
  Synthetic
ucauguccuuugcacggaca

SEQ ID NO: 784046 - RNA, 20 nt, Artificial Sequence
  Synthetic
uuccacagaucucucggaca

SEQ ID NO: 784047 - RNA, 20 nt, Artificial Sequence
  Synthetic
aauaccuaaauaaagggaca

SEQ ID NO: 784048 - RNA, 20 nt, Artificial Sequence
  Synthetic
uaggaauggauaaagggaca

SEQ ID NO: 784049 - RNA, 20 nt, Artificial Sequence
  Synthetic
cuaaucacaggcaagggaca

SEQ ID NO: 784050 - RNA, 20 nt, Artificial Sequence
  Synthetic
ucauguccuuugaagggaca

SEQ ID NO: 784051 - RNA, 20 nt, Artificial Sequence
  Synthetic
uuauguccuuugaagggaca

SEQ ID NO: 784052 - RNA, 20 nt, Artificial Sequence
  Synthetic
ucauguccuuggcagggaca

SEQ ID NO: 784053 - RNA, 20 nt, Artificial Sequence
  Synthetic
ucauguccuuugcagggaca

SEQ ID NO: 784054 - RNA, 20 nt, Artificial Sequence
  Synthetic
uacaccugugaagagggaca

SEQ ID NO: 784055 - RNA, 20 nt, Artificial Sequence
  Synthetic
cuagggucauccuagggaca

SEQ ID NO: 784056 - RNA, 20 nt, Artificial Sequence
  Synthetic
ucauguccguuguagggaca

SEQ ID NO: 784057 - RNA, 20 nt, Artificial Sequence
  Synthetic
ucacauccuuuguagggaca

SEQ ID NO: 784058 - RNA, 20 nt, Artificial Sequence
  Synthetic
ucacguccuuuguagggaca

SEQ ID NO: 784059 - RNA, 20 nt, Artificial Sequence
  Synthetic
ucauguccuuuguagggaca

SEQ ID NO: 784060 - RNA, 20 nt, Artificial Sequence
  Synthetic
ugccuaacucugaggggaca

SEQ ID NO: 784061 - RNA, 20 nt, Artificial Sequence
  Synthetic
uccuauaaaauuaggggaca

SEQ ID NO: 784062 - RNA, 20 nt, Artificial Sequence
  Synthetic
ucugaagggcaagggggaca

SEQ ID NO: 784063 - RNA, 20 nt, Artificial Sequence
  Synthetic
uccaacuuucuggggggaca

SEQ ID NO: 784064 - RNA, 20 nt, Artificial Sequence
  Synthetic
cuccucccacuguggggaca

SEQ ID NO: 784065 - RNA, 20 nt, Artificial Sequence
  Synthetic
aauuguuugcaaaugggaca

SEQ ID NO: 784066 - RNA, 20 nt, Artificial Sequence
  Synthetic
acugccuucaaacugggaca

SEQ ID NO: 784067 - RNA, 20 nt, Artificial Sequence
  Synthetic
uuuuaaucuugccugggaca

SEQ ID NO: 784068 - RNA, 20 nt, Artificial Sequence
  Synthetic
agagggaguagauugggaca

SEQ ID NO: 784069 - RNA, 20 nt, Artificial Sequence
  Synthetic
cuggcuguaccuuugggaca

SEQ ID NO: 784070 - RNA, 20 nt, Artificial Sequence
  Synthetic
caucucugaucucauggaca

SEQ ID NO: 784071 - RNA, 20 nt, Artificial Sequence
  Synthetic
auugaauauguauauggaca

SEQ ID NO: 784072 - RNA, 20 nt, Artificial Sequence
  Synthetic
uuacaguagagagcuggaca

SEQ ID NO: 784073 - RNA, 20 nt, Artificial Sequence
  Synthetic
uacaaaaaauuagcuggaca

SEQ ID NO: 784074 - RNA, 20 nt, Artificial Sequence
  Synthetic
acugacaaugcuucuggaca

SEQ ID NO: 784075 - RNA, 20 nt, Artificial Sequence
  Synthetic
caaacauccuauaguggaca

SEQ ID NO: 784076 - RNA, 20 nt, Artificial Sequence
  Synthetic
cuuuaagggagugguggaca

SEQ ID NO: 784077 - RNA, 20 nt, Artificial Sequence
  Synthetic
auccauauaguaauuggaca

SEQ ID NO: 784078 - RNA, 20 nt, Artificial Sequence
  Synthetic
caaugggggaaacuuggaca

SEQ ID NO: 784079 - RNA, 20 nt, Artificial Sequence
  Synthetic
agaugauaguggcuuggaca

SEQ ID NO: 784080 - RNA, 20 nt, Artificial Sequence
  Synthetic
uguauuucgguauuuggaca

SEQ ID NO: 784081 - RNA, 20 nt, Artificial Sequence
  Synthetic
cacuacaaacaguuuggaca

SEQ ID NO: 784082 - RNA, 20 nt, Artificial Sequence
  Synthetic
ugguaccaggaaaaaugaca

SEQ ID NO: 784083 - RNA, 20 nt, Artificial Sequence
  Synthetic
accauugacaccaaaugaca

SEQ ID NO: 784084 - RNA, 20 nt, Artificial Sequence
  Synthetic
ccaguaaaucaccaaugaca

SEQ ID NO: 784085 - RNA, 20 nt, Artificial Sequence
  Synthetic
ugaagaauaagucaaugaca

SEQ ID NO: 784086 - RNA, 20 nt, Artificial Sequence
  Synthetic
uauaaaccaaaagaaugaca

SEQ ID NO: 784087 - RNA, 20 nt, Artificial Sequence
  Synthetic
caugaaugacuuucaugaca

SEQ ID NO: 784088 - RNA, 20 nt, Artificial Sequence
  Synthetic
auguucuuccagugaugaca

SEQ ID NO: 784089 - RNA, 20 nt, Artificial Sequence
  Synthetic
cuaagauuaaggugaugaca

SEQ ID NO: 784090 - RNA, 20 nt, Artificial Sequence
  Synthetic
ucuaaauuggcaauaugaca

SEQ ID NO: 784091 - RNA, 20 nt, Artificial Sequence
  Synthetic
uaaugaccaucaauaugaca

SEQ ID NO: 784092 - RNA, 20 nt, Artificial Sequence
  Synthetic
aaggauacaguaauaugaca

SEQ ID NO: 784093 - RNA, 20 nt, Artificial Sequence
  Synthetic
auauuucuaguacuaugaca

SEQ ID NO: 784094 - RNA, 20 nt, Artificial Sequence
  Synthetic
aaauuugaaaagcuaugaca

SEQ ID NO: 784095 - RNA, 20 nt, Artificial Sequence
  Synthetic
aaaauauaaguauuaugaca

SEQ ID NO: 784096 - RNA, 20 nt, Artificial Sequence
  Synthetic
uucucuuucaaaaacugaca

SEQ ID NO: 784097 - RNA, 20 nt, Artificial Sequence
  Synthetic
ccuagacuuugaaacugaca

SEQ ID NO: 784098 - RNA, 20 nt, Artificial Sequence
  Synthetic
auauauuugaaacacugaca

SEQ ID NO: 784099 - RNA, 20 nt, Artificial Sequence
  Synthetic
auguucacauagcacugaca

SEQ ID NO: 784100 - RNA, 20 nt, Artificial Sequence
  Synthetic
ccacgcauuuuugacugaca

SEQ ID NO: 784101 - RNA, 20 nt, Artificial Sequence
  Synthetic
uggaaagacacaugcugaca

SEQ ID NO: 784102 - RNA, 20 nt, Artificial Sequence
  Synthetic
uucugucaaaaugucugaca

SEQ ID NO: 784103 - RNA, 20 nt, Artificial Sequence
  Synthetic
cacuucuagauauucugaca

SEQ ID NO: 784104 - RNA, 20 nt, Artificial Sequence
  Synthetic
aaguucugugaguucugaca

SEQ ID NO: 784105 - RNA, 20 nt, Artificial Sequence
  Synthetic
auagacuuccuuuucugaca

SEQ ID NO: 784106 - RNA, 20 nt, Artificial Sequence
  Synthetic
cacaguuuauuugagugaca

SEQ ID NO: 784107 - RNA, 20 nt, Artificial Sequence
  Synthetic
cuucagcuuuguuagugaca

SEQ ID NO: 784108 - RNA, 20 nt, Artificial Sequence
  Synthetic
ucauaguucaaaaggugaca

SEQ ID NO: 784109 - RNA, 20 nt, Artificial Sequence
  Synthetic
ccaaguccuugaaggugaca

SEQ ID NO: 784110 - RNA, 20 nt, Artificial Sequence
  Synthetic
aauccucaacaagggugaca

SEQ ID NO: 784111 - RNA, 20 nt, Artificial Sequence
  Synthetic
uacaucugcuuagggugaca

SEQ ID NO: 784112 - RNA, 20 nt, Artificial Sequence
  Synthetic
ugcauugcaugcuggugaca

SEQ ID NO: 784113 - RNA, 20 nt, Artificial Sequence
  Synthetic
aggcuucagcccaugugaca

SEQ ID NO: 784114 - RNA, 20 nt, Artificial Sequence
  Synthetic
auuuaugaaaaugugugaca

SEQ ID NO: 784115 - RNA, 20 nt, Artificial Sequence
  Synthetic
auuuucacccuaaauugaca

SEQ ID NO: 784116 - RNA, 20 nt, Artificial Sequence
  Synthetic
uuuuacaaaaguaauugaca

SEQ ID NO: 784117 - RNA, 20 nt, Artificial Sequence
  Synthetic
aaugaauuuaguaauugaca

SEQ ID NO: 784118 - RNA, 20 nt, Artificial Sequence
  Synthetic
uguuagcucauauauugaca

SEQ ID NO: 784119 - RNA, 20 nt, Artificial Sequence
  Synthetic
aaacuaaaugucuauugaca

SEQ ID NO: 784120 - RNA, 20 nt, Artificial Sequence
  Synthetic
ugggagccauucccuugaca

SEQ ID NO: 784121 - RNA, 20 nt, Artificial Sequence
  Synthetic
uuaaguuaaaaaucuugaca

SEQ ID NO: 784122 - RNA, 20 nt, Artificial Sequence
  Synthetic
caaaauaaucaaaguugaca

SEQ ID NO: 784123 - RNA, 20 nt, Artificial Sequence
  Synthetic
caacacaaaaccaguugaca

SEQ ID NO: 784124 - RNA, 20 nt, Artificial Sequence
  Synthetic
auuacuuaugccaguugaca

SEQ ID NO: 784125 - RNA, 20 nt, Artificial Sequence
  Synthetic
cugaaguuucaauguugaca

SEQ ID NO: 784126 - RNA, 20 nt, Artificial Sequence
  Synthetic
acauugcucuccuguugaca

SEQ ID NO: 784127 - RNA, 20 nt, Artificial Sequence
  Synthetic
ugugcaauuucuauuugaca

SEQ ID NO: 784128 - RNA, 20 nt, Artificial Sequence
  Synthetic
ccauuuuguguuauuugaca

SEQ ID NO: 784129 - RNA, 20 nt, Artificial Sequence
  Synthetic
uacuuucuugauguuugaca

SEQ ID NO: 784130 - RNA, 20 nt, Artificial Sequence
  Synthetic
uaacaaacauuuguuugaca

SEQ ID NO: 784131 - RNA, 20 nt, Artificial Sequence
  Synthetic
uggucaacugauuuuugaca

SEQ ID NO: 784132 - RNA, 20 nt, Artificial Sequence
  Synthetic
aaaauaaaauaaaaaauaca

SEQ ID NO: 784133 - RNA, 20 nt, Artificial Sequence
  Synthetic
aacacauuugcaaaaauaca

SEQ ID NO: 784134 - RNA, 20 nt, Artificial Sequence
  Synthetic
aauaaauaaauaaaaauaca

SEQ ID NO: 784135 - RNA, 20 nt, Artificial Sequence
  Synthetic
acaagaaacauaaaaauaca

SEQ ID NO: 784136 - RNA, 20 nt, Artificial Sequence
  Synthetic
ugagcuccuuuaaaaauaca

SEQ ID NO: 784137 - RNA, 20 nt, Artificial Sequence
  Synthetic
auuauaaugauuaaaauaca

SEQ ID NO: 784138 - RNA, 20 nt, Artificial Sequence
  Synthetic
ccauuuaacuuuaaaauaca

SEQ ID NO: 784139 - RNA, 20 nt, Artificial Sequence
  Synthetic
agcaggacaugucaaauaca

SEQ ID NO: 784140 - RNA, 20 nt, Artificial Sequence
  Synthetic
cauaucagguaugaaauaca

SEQ ID NO: 784141 - RNA, 20 nt, Artificial Sequence
  Synthetic
cauaaucacauugaaauaca

SEQ ID NO: 784142 - RNA, 20 nt, Artificial Sequence
  Synthetic
uuuccuuaugaauaaauaca

SEQ ID NO: 784143 - RNA, 20 nt, Artificial Sequence
  Synthetic
uggaagaaaagauaaauaca

SEQ ID NO: 784144 - RNA, 20 nt, Artificial Sequence
  Synthetic
ugaaaacaacacacaauaca

SEQ ID NO: 784145 - RNA, 20 nt, Artificial Sequence
  Synthetic
uauugagcaaaaccaauaca

SEQ ID NO: 784146 - RNA, 20 nt, Artificial Sequence
  Synthetic
ucaacuacagaagcaauaca

SEQ ID NO: 784147 - RNA, 20 nt, Artificial Sequence
  Synthetic
acaugacacccagcaauaca

SEQ ID NO: 784148 - RNA, 20 nt, Artificial Sequence
  Synthetic
auacuuuguuuagcaauaca

SEQ ID NO: 784149 - RNA, 20 nt, Artificial Sequence
  Synthetic
uacugcaaauggucaauaca

SEQ ID NO: 784150 - RNA, 20 nt, Artificial Sequence
  Synthetic
aucaaugauguuucaauaca

SEQ ID NO: 784151 - RNA, 20 nt, Artificial Sequence
  Synthetic
caaaucucuuucagaauaca

SEQ ID NO: 784152 - RNA, 20 nt, Artificial Sequence
  Synthetic
cuggcuggaucaggaauaca

SEQ ID NO: 784153 - RNA, 20 nt, Artificial Sequence
  Synthetic
aggagaugagagggaauaca

SEQ ID NO: 784154 - RNA, 20 nt, Artificial Sequence
  Synthetic
uggaagcaauagugaauaca

SEQ ID NO: 784155 - RNA, 20 nt, Artificial Sequence
  Synthetic
acagaaaauccaauaauaca

SEQ ID NO: 784156 - RNA, 20 nt, Artificial Sequence
  Synthetic
uuaaagucauuuauaauaca

SEQ ID NO: 784157 - RNA, 20 nt, Artificial Sequence
  Synthetic
uuuucuguaagucuaauaca

SEQ ID NO: 784158 - RNA, 20 nt, Artificial Sequence
  Synthetic
augcucucaguucuaauaca

SEQ ID NO: 784159 - RNA, 20 nt, Artificial Sequence
  Synthetic
agcacuuccuguguaauaca

SEQ ID NO: 784160 - RNA, 20 nt, Artificial Sequence
  Synthetic
uauaugcauauuguaauaca

SEQ ID NO: 784161 - RNA, 20 nt, Artificial Sequence
  Synthetic
uauaugcguauuguaauaca

SEQ ID NO: 784162 - RNA, 20 nt, Artificial Sequence
  Synthetic
cuuuauaaaauauuaauaca

SEQ ID NO: 784163 - RNA, 20 nt, Artificial Sequence
  Synthetic
aauguuuuccuaaacauaca

SEQ ID NO: 784164 - RNA, 20 nt, Artificial Sequence
  Synthetic
caaaucaguuuaaacauaca

SEQ ID NO: 784165 - RNA, 20 nt, Artificial Sequence
  Synthetic
aauaaauguuugaacauaca

SEQ ID NO: 784166 - RNA, 20 nt, Artificial Sequence
  Synthetic
cagguugucaauaacauaca

SEQ ID NO: 784167 - RNA, 20 nt, Artificial Sequence
  Synthetic
caccacuggaauaacauaca

SEQ ID NO: 784168 - RNA, 20 nt, Artificial Sequence
  Synthetic
agaacacauggacacauaca

SEQ ID NO: 784169 - RNA, 20 nt, Artificial Sequence
  Synthetic
uucucccauguagacauaca

SEQ ID NO: 784170 - RNA, 20 nt, Artificial Sequence
  Synthetic
caaacaaagauguacauaca

SEQ ID NO: 784171 - RNA, 20 nt, Artificial Sequence
  Synthetic
cacagauauaccugcauaca

SEQ ID NO: 784172 - RNA, 20 nt, Artificial Sequence
  Synthetic
uucccaagaagucucauaca

SEQ ID NO: 784173 - RNA, 20 nt, Artificial Sequence
  Synthetic
aaaugugguguauucauaca

SEQ ID NO: 784174 - RNA, 20 nt, Artificial Sequence
  Synthetic
ugaauaaauauguucauaca

SEQ ID NO: 784175 - RNA, 20 nt, Artificial Sequence
  Synthetic
uuaauagacacuuucauaca

SEQ ID NO: 784176 - RNA, 20 nt, Artificial Sequence
  Synthetic
agaccauagcaaaagauaca

SEQ ID NO: 784177 - RNA, 20 nt, Artificial Sequence
  Synthetic
agaaaauaaccagagauaca

SEQ ID NO: 784178 - RNA, 20 nt, Artificial Sequence
  Synthetic
agagguauaauaaggauaca

SEQ ID NO: 784179 - RNA, 20 nt, Artificial Sequence
  Synthetic
uagcaaagggcauggauaca

SEQ ID NO: 784180 - RNA, 20 nt, Artificial Sequence
  Synthetic
uauuuucacauuuggauaca

SEQ ID NO: 784181 - RNA, 20 nt, Artificial Sequence
  Synthetic
cuaacaacgucccugauaca

SEQ ID NO: 784182 - RNA, 20 nt, Artificial Sequence
  Synthetic
agacaaggggcucugauaca

SEQ ID NO: 784183 - RNA, 20 nt, Artificial Sequence
  Synthetic
cuaaaucacugcuugauaca

SEQ ID NO: 784184 - RNA, 20 nt, Artificial Sequence
  Synthetic
acuaccccuauuuugauaca

SEQ ID NO: 784185 - RNA, 20 nt, Artificial Sequence
  Synthetic
cuuuguaugcaaaauauaca

SEQ ID NO: 784186 - RNA, 20 nt, Artificial Sequence
  Synthetic
aguacugcagauaauauaca

SEQ ID NO: 784187 - RNA, 20 nt, Artificial Sequence
  Synthetic
auagauguuauuaauauaca

SEQ ID NO: 784188 - RNA, 20 nt, Artificial Sequence
  Synthetic
aaauaagauacccauauaca

SEQ ID NO: 784189 - RNA, 20 nt, Artificial Sequence
  Synthetic
ugaaaaauacugcauauaca

SEQ ID NO: 784190 - RNA, 20 nt, Artificial Sequence
  Synthetic
ucucucuaugcauauauaca

SEQ ID NO: 784191 - RNA, 20 nt, Artificial Sequence
  Synthetic
cuggaauaaaccuauauaca

SEQ ID NO: 784192 - RNA, 20 nt, Artificial Sequence
  Synthetic
agaagguaacacucuauaca

SEQ ID NO: 784193 - RNA, 20 nt, Artificial Sequence
  Synthetic
auuuccaccaacaguauaca

SEQ ID NO: 784194 - RNA, 20 nt, Artificial Sequence
  Synthetic
uguuuucaguacaguauaca

SEQ ID NO: 784195 - RNA, 20 nt, Artificial Sequence
  Synthetic
uugguacacacugguauaca

SEQ ID NO: 784196 - RNA, 20 nt, Artificial Sequence
  Synthetic
aaaguuuuauaguguauaca

SEQ ID NO: 784197 - RNA, 20 nt, Artificial Sequence
  Synthetic
auccauuuauauauuauaca

SEQ ID NO: 784198 - RNA, 20 nt, Artificial Sequence
  Synthetic
uagaugacuuauguuauaca

SEQ ID NO: 784199 - RNA, 20 nt, Artificial Sequence
  Synthetic
ucuuuaaagucuguuauaca

SEQ ID NO: 784200 - RNA, 20 nt, Artificial Sequence
  Synthetic
uacauuuuuauuuuuauaca

SEQ ID NO: 784201 - RNA, 20 nt, Artificial Sequence
  Synthetic
augucaaaccuaaaacuaca

SEQ ID NO: 784202 - RNA, 20 nt, Artificial Sequence
  Synthetic
caaugaauuuucaaacuaca

SEQ ID NO: 784203 - RNA, 20 nt, Artificial Sequence
  Synthetic
cucaaaaccacacaacuaca

SEQ ID NO: 784204 - RNA, 20 nt, Artificial Sequence
  Synthetic
auaucgccauagcaacuaca

SEQ ID NO: 784205 - RNA, 20 nt, Artificial Sequence
  Synthetic
cuuaaaguuuugcaacuaca

SEQ ID NO: 784206 - RNA, 20 nt, Artificial Sequence
  Synthetic
cucaaagccgcucaacuaca

SEQ ID NO: 784207 - RNA, 20 nt, Artificial Sequence
  Synthetic
aauaccaguagagaacuaca

SEQ ID NO: 784208 - RNA, 20 nt, Artificial Sequence
  Synthetic
caagacaagaauuaacuaca

SEQ ID NO: 784209 - RNA, 20 nt, Artificial Sequence
  Synthetic
agaacaguuccaacacuaca

SEQ ID NO: 784210 - RNA, 20 nt, Artificial Sequence
  Synthetic
agccaggcaaagacacuaca

SEQ ID NO: 784211 - RNA, 20 nt, Artificial Sequence
  Synthetic
aguccuuaaaauggacuaca

SEQ ID NO: 784212 - RNA, 20 nt, Artificial Sequence
  Synthetic
auuugaaaucuaugacuaca

SEQ ID NO: 784213 - RNA, 20 nt, Artificial Sequence
  Synthetic
aacaauuuccugugacuaca

SEQ ID NO: 784214 - RNA, 20 nt, Artificial Sequence
  Synthetic
ucuaggauuuugugacuaca

SEQ ID NO: 784215 - RNA, 20 nt, Artificial Sequence
  Synthetic
agcaauagcaaaauacuaca

SEQ ID NO: 784216 - RNA, 20 nt, Artificial Sequence
  Synthetic
uguuaaaaauauauacuaca

SEQ ID NO: 784217 - RNA, 20 nt, Artificial Sequence
  Synthetic
ugacuucaaacuauacuaca

SEQ ID NO: 784218 - RNA, 20 nt, Artificial Sequence
  Synthetic
caaacuaagaaacuacuaca

SEQ ID NO: 784219 - RNA, 20 nt, Artificial Sequence
  Synthetic
aaggguucauuagaccuaca

SEQ ID NO: 784220 - RNA, 20 nt, Artificial Sequence
  Synthetic
uuuuuaucuuaugaccuaca

SEQ ID NO: 784221 - RNA, 20 nt, Artificial Sequence
  Synthetic
cugaauuuaaauuaccuaca

SEQ ID NO: 784222 - RNA, 20 nt, Artificial Sequence
  Synthetic
uuagugauauugacccuaca

SEQ ID NO: 784223 - RNA, 20 nt, Artificial Sequence
  Synthetic
cacaugagccuaggccuaca

SEQ ID NO: 784224 - RNA, 20 nt, Artificial Sequence
  Synthetic
ugagucuagccuggccuaca

SEQ ID NO: 784225 - RNA, 20 nt, Artificial Sequence
  Synthetic
agagaggaagccugccuaca

SEQ ID NO: 784226 - RNA, 20 nt, Artificial Sequence
  Synthetic
cccugccuaucccuccuaca

SEQ ID NO: 784227 - RNA, 20 nt, Artificial Sequence
  Synthetic
uauuuaaauagaaagcuaca

SEQ ID NO: 784228 - RNA, 20 nt, Artificial Sequence
  Synthetic
uaaaaggaagaacagcuaca

SEQ ID NO: 784229 - RNA, 20 nt, Artificial Sequence
  Synthetic
cgccuguagucccagcuaca

SEQ ID NO: 784230 - RNA, 20 nt, Artificial Sequence
  Synthetic
uacuauggagaauagcuaca

SEQ ID NO: 784231 - RNA, 20 nt, Artificial Sequence
  Synthetic
uauucccuuuauuagcuaca

SEQ ID NO: 784232 - RNA, 20 nt, Artificial Sequence
  Synthetic
ccugaguagcuggggcuaca

SEQ ID NO: 784233 - RNA, 20 nt, Artificial Sequence
  Synthetic
aucaacuugacugggcuaca

SEQ ID NO: 784234 - RNA, 20 nt, Artificial Sequence
  Synthetic
auagagacuagcuggcuaca

SEQ ID NO: 784235 - RNA, 20 nt, Artificial Sequence
  Synthetic
uacauaauuacuaugcuaca

SEQ ID NO: 784236 - RNA, 20 nt, Artificial Sequence
  Synthetic
uacuuauuauaugugcuaca

SEQ ID NO: 784237 - RNA, 20 nt, Artificial Sequence
  Synthetic
cuucugaagucauugcuaca

SEQ ID NO: 784238 - RNA, 20 nt, Artificial Sequence
  Synthetic
uagggcuuuaugcaucuaca

SEQ ID NO: 784239 - RNA, 20 nt, Artificial Sequence
  Synthetic
uugaaauucagucaucuaca

SEQ ID NO: 784240 - RNA, 20 nt, Artificial Sequence
  Synthetic
acuggagaaaauuaucuaca

SEQ ID NO: 784241 - RNA, 20 nt, Artificial Sequence
  Synthetic
cuaucaacugcugcucuaca

SEQ ID NO: 784242 - RNA, 20 nt, Artificial Sequence
  Synthetic
agaagugaaagaucucuaca

SEQ ID NO: 784243 - RNA, 20 nt, Artificial Sequence
  Synthetic
uauugacaguagagucuaca

SEQ ID NO: 784244 - RNA, 20 nt, Artificial Sequence
  Synthetic
cucugccuuguaugucuaca

SEQ ID NO: 784245 - RNA, 20 nt, Artificial Sequence
  Synthetic
aauggcuaagauugucuaca

SEQ ID NO: 784246 - RNA, 20 nt, Artificial Sequence
  Synthetic
aauuuccaaauaauucuaca

SEQ ID NO: 784247 - RNA, 20 nt, Artificial Sequence
  Synthetic
aagcaaaaacacauucuaca

SEQ ID NO: 784248 - RNA, 20 nt, Artificial Sequence
  Synthetic
aauggacucaccauucuaca

SEQ ID NO: 784249 - RNA, 20 nt, Artificial Sequence
  Synthetic
acuuccaagcucauucuaca

SEQ ID NO: 784250 - RNA, 20 nt, Artificial Sequence
  Synthetic
aucagaucauauauucuaca

SEQ ID NO: 784251 - RNA, 20 nt, Artificial Sequence
  Synthetic
aguuuugaacuuauucuaca

SEQ ID NO: 784252 - RNA, 20 nt, Artificial Sequence
  Synthetic
ccugcagcaucuguucuaca

SEQ ID NO: 784253 - RNA, 20 nt, Artificial Sequence
  Synthetic
uucauauuucaaaaaguaca

SEQ ID NO: 784254 - RNA, 20 nt, Artificial Sequence
  Synthetic
aacagguuauaaaaaguaca

SEQ ID NO: 784255 - RNA, 20 nt, Artificial Sequence
  Synthetic
agaagcuagaagaaaguaca

SEQ ID NO: 784256 - RNA, 20 nt, Artificial Sequence
  Synthetic
caaaguuauuaggaaguaca

SEQ ID NO: 784257 - RNA, 20 nt, Artificial Sequence
  Synthetic
aacuuaaaauaugaaguaca

SEQ ID NO: 784258 - RNA, 20 nt, Artificial Sequence
  Synthetic
ugagagcucuuugaaguaca

SEQ ID NO: 784259 - RNA, 20 nt, Artificial Sequence
  Synthetic
uuaucaacuaccagaguaca

SEQ ID NO: 784260 - RNA, 20 nt, Artificial Sequence
  Synthetic
cagcuaccagucagaguaca

SEQ ID NO: 784261 - RNA, 20 nt, Artificial Sequence
  Synthetic
aaccagacuaagagaguaca

SEQ ID NO: 784262 - RNA, 20 nt, Artificial Sequence
  Synthetic
uuuuuaucuuugugaguaca

SEQ ID NO: 784263 - RNA, 20 nt, Artificial Sequence
  Synthetic
ccccacccuucccuaguaca

SEQ ID NO: 784264 - RNA, 20 nt, Artificial Sequence
  Synthetic
uuuaggagaaagcacguaca

SEQ ID NO: 784265 - RNA, 20 nt, Artificial Sequence
  Synthetic
uauaaagaaaacaucguaca

SEQ ID NO: 784266 - RNA, 20 nt, Artificial Sequence
  Synthetic
auggugggagccaagguaca

SEQ ID NO: 784267 - RNA, 20 nt, Artificial Sequence
  Synthetic
cgaauucuaccagagguaca

SEQ ID NO: 784268 - RNA, 20 nt, Artificial Sequence
  Synthetic
ugaaaacaaugagagguaca

SEQ ID NO: 784269 - RNA, 20 nt, Artificial Sequence
  Synthetic
ccacuuaagaguuagguaca

SEQ ID NO: 784270 - RNA, 20 nt, Artificial Sequence
  Synthetic
caauggggggaaaggguaca

SEQ ID NO: 784271 - RNA, 20 nt, Artificial Sequence
  Synthetic
uuaagauuaaauaggguaca

SEQ ID NO: 784272 - RNA, 20 nt, Artificial Sequence
  Synthetic
agaaacugucuagggguaca

SEQ ID NO: 784273 - RNA, 20 nt, Artificial Sequence
  Synthetic
auugccagugcugggguaca

SEQ ID NO: 784274 - RNA, 20 nt, Artificial Sequence
  Synthetic
ucaaagacaagcaugguaca

SEQ ID NO: 784275 - RNA, 20 nt, Artificial Sequence
  Synthetic
ugucccucuuaccugguaca

SEQ ID NO: 784276 - RNA, 20 nt, Artificial Sequence
  Synthetic
uuuucacuuuucuugguaca

SEQ ID NO: 784277 - RNA, 20 nt, Artificial Sequence
  Synthetic
uucauuaaaaauuugguaca

SEQ ID NO: 784278 - RNA, 20 nt, Artificial Sequence
  Synthetic
aaaaguuaacaaaauguaca

SEQ ID NO: 784279 - RNA, 20 nt, Artificial Sequence
  Synthetic
aaaaugacuccucauguaca

SEQ ID NO: 784280 - RNA, 20 nt, Artificial Sequence
  Synthetic
aacauacagauucauguaca

SEQ ID NO: 784281 - RNA, 20 nt, Artificial Sequence
  Synthetic
caagcaauccaggauguaca

SEQ ID NO: 784282 - RNA, 20 nt, Artificial Sequence
  Synthetic
cugaaagagugaacuguaca

SEQ ID NO: 784283 - RNA, 20 nt, Artificial Sequence
  Synthetic
uaacuuuucuuugguguaca

SEQ ID NO: 784284 - RNA, 20 nt, Artificial Sequence
  Synthetic
cauauacauucauguguaca

SEQ ID NO: 784285 - RNA, 20 nt, Artificial Sequence
  Synthetic
uaauguaaugucuguguaca

SEQ ID NO: 784286 - RNA, 20 nt, Artificial Sequence
  Synthetic
agaaucaugggaauuguaca

SEQ ID NO: 784287 - RNA, 20 nt, Artificial Sequence
  Synthetic
auucccaucaacauuguaca

SEQ ID NO: 784288 - RNA, 20 nt, Artificial Sequence
  Synthetic
agagaugaugagauuguaca

SEQ ID NO: 784289 - RNA, 20 nt, Artificial Sequence
  Synthetic
ugccuugacucuauuguaca

SEQ ID NO: 784290 - RNA, 20 nt, Artificial Sequence
  Synthetic
aaguuuaaaugacuuguaca

SEQ ID NO: 784291 - RNA, 20 nt, Artificial Sequence
  Synthetic
uaaagggcagcauuuguaca

SEQ ID NO: 784292 - RNA, 20 nt, Artificial Sequence
  Synthetic
uuagcuauaguauuuguaca

SEQ ID NO: 784293 - RNA, 20 nt, Artificial Sequence
  Synthetic
uuguguccuagcuuuguaca

SEQ ID NO: 784294 - RNA, 20 nt, Artificial Sequence
  Synthetic
aacuaaaggagaaaauuaca

SEQ ID NO: 784295 - RNA, 20 nt, Artificial Sequence
  Synthetic
aagacauucauaaaauuaca

SEQ ID NO: 784296 - RNA, 20 nt, Artificial Sequence
  Synthetic
caagcaaugcuaaaauuaca

SEQ ID NO: 784297 - RNA, 20 nt, Artificial Sequence
  Synthetic
agguaugacaugaaauuaca

SEQ ID NO: 784298 - RNA, 20 nt, Artificial Sequence
  Synthetic
uauuucauaacuaaauuaca

SEQ ID NO: 784299 - RNA, 20 nt, Artificial Sequence
  Synthetic
uagaagacuaaacaauuaca

SEQ ID NO: 784300 - RNA, 20 nt, Artificial Sequence
  Synthetic
ucuucugccugagaauuaca

SEQ ID NO: 784301 - RNA, 20 nt, Artificial Sequence
  Synthetic
cacaacacaugggaauuaca

SEQ ID NO: 784302 - RNA, 20 nt, Artificial Sequence
  Synthetic
uuggagguaauugaauuaca

SEQ ID NO: 784303 - RNA, 20 nt, Artificial Sequence
  Synthetic
uucaaaauuuucuaauuaca

SEQ ID NO: 784304 - RNA, 20 nt, Artificial Sequence
  Synthetic
uauugauugaauuaauuaca

SEQ ID NO: 784305 - RNA, 20 nt, Artificial Sequence
  Synthetic
uuuauuuuuucuuaauuaca

SEQ ID NO: 784306 - RNA, 20 nt, Artificial Sequence
  Synthetic
agguaaauaucaacauuaca

SEQ ID NO: 784307 - RNA, 20 nt, Artificial Sequence
  Synthetic
uguaauagucccacauuaca

SEQ ID NO: 784308 - RNA, 20 nt, Artificial Sequence
  Synthetic
uaaguaacguagacauuaca

SEQ ID NO: 784309 - RNA, 20 nt, Artificial Sequence
  Synthetic
acuuugcaaaggacauuaca

SEQ ID NO: 784310 - RNA, 20 nt, Artificial Sequence
  Synthetic
aggcagugcaggacauuaca

SEQ ID NO: 784311 - RNA, 20 nt, Artificial Sequence
  Synthetic
uauuccuauuccccauuaca

SEQ ID NO: 784312 - RNA, 20 nt, Artificial Sequence
  Synthetic
cuagauuaggcuucauuaca

SEQ ID NO: 784313 - RNA, 20 nt, Artificial Sequence
  Synthetic
cccaaguagcugggauuaca

SEQ ID NO: 784314 - RNA, 20 nt, Artificial Sequence
  Synthetic
accucucucuuuggauuaca

SEQ ID NO: 784315 - RNA, 20 nt, Artificial Sequence
  Synthetic
ugaauuuuuugaauauuaca

SEQ ID NO: 784316 - RNA, 20 nt, Artificial Sequence
  Synthetic
uuuguaauuaacauauuaca

SEQ ID NO: 784317 - RNA, 20 nt, Artificial Sequence
  Synthetic
auuguuuuaccucuauuaca

SEQ ID NO: 784318 - RNA, 20 nt, Artificial Sequence
  Synthetic
acacaaauuauauuauuaca

SEQ ID NO: 784319 - RNA, 20 nt, Artificial Sequence
  Synthetic
uugguauuauuauuauuaca

SEQ ID NO: 784320 - RNA, 20 nt, Artificial Sequence
  Synthetic
accuacaaauacaacuuaca

SEQ ID NO: 784321 - RNA, 20 nt, Artificial Sequence
  Synthetic
accuaggaauccaacuuaca

SEQ ID NO: 784322 - RNA, 20 nt, Artificial Sequence
  Synthetic
accuaggaaugcaacuuaca

SEQ ID NO: 784323 - RNA, 20 nt, Artificial Sequence
  Synthetic
ugacaaaacugggacuuaca

SEQ ID NO: 784324 - RNA, 20 nt, Artificial Sequence
  Synthetic
agugauaacauauacuuaca

SEQ ID NO: 784325 - RNA, 20 nt, Artificial Sequence
  Synthetic
uauagcaugauauacuuaca

SEQ ID NO: 784326 - RNA, 20 nt, Artificial Sequence
  Synthetic
ucaguacucagguacuuaca

SEQ ID NO: 784327 - RNA, 20 nt, Artificial Sequence
  Synthetic
agcugaaagcucaccuuaca

SEQ ID NO: 784328 - RNA, 20 nt, Artificial Sequence
  Synthetic
ugugaauauguuaccuuaca

SEQ ID NO: 784329 - RNA, 20 nt, Artificial Sequence
  Synthetic
aucuucgguguguccuuaca

SEQ ID NO: 784330 - RNA, 20 nt, Artificial Sequence
  Synthetic
accaugaagccuuccuuaca

SEQ ID NO: 784331 - RNA, 20 nt, Artificial Sequence
  Synthetic
uagcaaaggcauggcuuaca

SEQ ID NO: 784332 - RNA, 20 nt, Artificial Sequence
  Synthetic
uaacuaaagcagugcuuaca

SEQ ID NO: 784333 - RNA, 20 nt, Artificial Sequence
  Synthetic
ccaauuauggugugcuuaca

SEQ ID NO: 784334 - RNA, 20 nt, Artificial Sequence
  Synthetic
auucuccaauguugcuuaca

SEQ ID NO: 784335 - RNA, 20 nt, Artificial Sequence
  Synthetic
ccauuauuuucugucuuaca

SEQ ID NO: 784336 - RNA, 20 nt, Artificial Sequence
  Synthetic
aauguagcacugcaguuaca

SEQ ID NO: 784337 - RNA, 20 nt, Artificial Sequence
  Synthetic
aaguaguuuuuagaguuaca

SEQ ID NO: 784338 - RNA, 20 nt, Artificial Sequence
  Synthetic
agcaaagccaacuaguuaca

SEQ ID NO: 784339 - RNA, 20 nt, Artificial Sequence
  Synthetic
ucaaacagacauggguuaca

SEQ ID NO: 784340 - RNA, 20 nt, Artificial Sequence
  Synthetic
uaacucauuaagugguuaca

SEQ ID NO: 784341 - RNA, 20 nt, Artificial Sequence
  Synthetic
caaauggucuuuugguuaca

SEQ ID NO: 784342 - RNA, 20 nt, Artificial Sequence
  Synthetic
auaggugguuuuugguuaca

SEQ ID NO: 784343 - RNA, 20 nt, Artificial Sequence
  Synthetic
accuuggaaacuauguuaca

SEQ ID NO: 784344 - RNA, 20 nt, Artificial Sequence
  Synthetic
accuaugcaggauuguuaca

SEQ ID NO: 784345 - RNA, 20 nt, Artificial Sequence
  Synthetic
acaugugcagguuuguuaca

SEQ ID NO: 784346 - RNA, 20 nt, Artificial Sequence
  Synthetic
acauguguugguuuguuaca

SEQ ID NO: 784347 - RNA, 20 nt, Artificial Sequence
  Synthetic
cacaauauauguuuguuaca

SEQ ID NO: 784348 - RNA, 20 nt, Artificial Sequence
  Synthetic
auuuaggacauuuuguuaca

SEQ ID NO: 784349 - RNA, 20 nt, Artificial Sequence
  Synthetic
acaaguacauuuuuguuaca

SEQ ID NO: 784350 - RNA, 20 nt, Artificial Sequence
  Synthetic
caaggcacuugaaauuuaca

SEQ ID NO: 784351 - RNA, 20 nt, Artificial Sequence
  Synthetic
caaugaaugcucaauuuaca

SEQ ID NO: 784352 - RNA, 20 nt, Artificial Sequence
  Synthetic
aagaguggaaauaauuuaca

SEQ ID NO: 784353 - RNA, 20 nt, Artificial Sequence
  Synthetic
cauucuuuccaccauuuaca

SEQ ID NO: 784354 - RNA, 20 nt, Artificial Sequence
  Synthetic
aagaucaaucagcauuuaca

SEQ ID NO: 784355 - RNA, 20 nt, Artificial Sequence
  Synthetic
cacaaaccccaauauuuaca

SEQ ID NO: 784356 - RNA, 20 nt, Artificial Sequence
  Synthetic
uugaggagucuuuauuuaca

SEQ ID NO: 784357 - RNA, 20 nt, Artificial Sequence
  Synthetic
aauacuucuacaacuuuaca

SEQ ID NO: 784358 - RNA, 20 nt, Artificial Sequence
  Synthetic
agaagaaucugaccuuuaca

SEQ ID NO: 784359 - RNA, 20 nt, Artificial Sequence
  Synthetic
agcaaggcaccuccuuuaca

SEQ ID NO: 784360 - RNA, 20 nt, Artificial Sequence
  Synthetic
augauccuuuauaguuuaca

SEQ ID NO: 784361 - RNA, 20 nt, Artificial Sequence
  Synthetic
ucacaauauaaacguuuaca

SEQ ID NO: 784362 - RNA, 20 nt, Artificial Sequence
  Synthetic
aagaauuucugaauuuuaca

SEQ ID NO: 784363 - RNA, 20 nt, Artificial Sequence
  Synthetic
uuaacauccuucauuuuaca

SEQ ID NO: 784364 - RNA, 20 nt, Artificial Sequence
  Synthetic
ugcugaaccuggauuuuaca

SEQ ID NO: 784365 - RNA, 20 nt, Artificial Sequence
  Synthetic
uguuuauuuaauauuuuaca

SEQ ID NO: 784366 - RNA, 20 nt, Artificial Sequence
  Synthetic
acuuucauucguauuuuaca

SEQ ID NO: 784367 - RNA, 20 nt, Artificial Sequence
  Synthetic
ucugaggcauguauuuuaca

SEQ ID NO: 784368 - RNA, 20 nt, Artificial Sequence
  Synthetic
ucguccaaauuuauuuuaca

SEQ ID NO: 784369 - RNA, 20 nt, Artificial Sequence
  Synthetic
acgaaaaugucccuuuuaca

SEQ ID NO: 784370 - RNA, 20 nt, Artificial Sequence
  Synthetic
cuguuguagcugcuuuuaca

SEQ ID NO: 784371 - RNA, 20 nt, Artificial Sequence
  Synthetic
uuuccccucuuucuuuuaca

SEQ ID NO: 784372 - RNA, 20 nt, Artificial Sequence
  Synthetic
aaaggauaguuucuuuuaca

SEQ ID NO: 784373 - RNA, 20 nt, Artificial Sequence
  Synthetic
uucaguauucuauuuuuaca

SEQ ID NO: 784374 - RNA, 20 nt, Artificial Sequence
  Synthetic
cuacuuuggguauuuuuaca

SEQ ID NO: 784375 - RNA, 20 nt, Artificial Sequence
  Synthetic
caucucgacaacuuuuuaca

SEQ ID NO: 784376 - RNA, 20 nt, Artificial Sequence
  Synthetic
ucuuuugcccacuuuuuaca

SEQ ID NO: 784377 - RNA, 20 nt, Artificial Sequence
  Synthetic
uuuugaauuaaguuuuuaca

SEQ ID NO: 784378 - RNA, 20 nt, Artificial Sequence
  Synthetic
cuuugaaaauauuuuuuaca

SEQ ID NO: 784379 - RNA, 20 nt, Artificial Sequence
  Synthetic
aaaaaaaaaaaaaaaaacca

SEQ ID NO: 784380 - RNA, 20 nt, Artificial Sequence
  Synthetic
aucagucagcagcaaaacca

SEQ ID NO: 784381 - RNA, 20 nt, Artificial Sequence
  Synthetic
uauuuuaauuaagaaaacca

SEQ ID NO: 784382 - RNA, 20 nt, Artificial Sequence
  Synthetic
cacacuuaaaaaacaaacca

SEQ ID NO: 784383 - RNA, 20 nt, Artificial Sequence
  Synthetic
auaaugagaacuacaaacca

SEQ ID NO: 784384 - RNA, 20 nt, Artificial Sequence
  Synthetic
aagugaaaugcaccaaacca

SEQ ID NO: 784385 - RNA, 20 nt, Artificial Sequence
  Synthetic
uuuauuuuuucaccaaacca

SEQ ID NO: 784386 - RNA, 20 nt, Artificial Sequence
  Synthetic
ccaagcagcaguucaaacca

SEQ ID NO: 784387 - RNA, 20 nt, Artificial Sequence
  Synthetic
aaagaaaaucacagaaacca

SEQ ID NO: 784388 - RNA, 20 nt, Artificial Sequence
  Synthetic
aaauaaaaaaagagaaacca

SEQ ID NO: 784389 - RNA, 20 nt, Artificial Sequence
  Synthetic
aauuaaaaaaagagaaacca

SEQ ID NO: 784390 - RNA, 20 nt, Artificial Sequence
  Synthetic
auucauaaacauagaaacca

SEQ ID NO: 784391 - RNA, 20 nt, Artificial Sequence
  Synthetic
ugaaaaguagaaggaaacca

SEQ ID NO: 784392 - RNA, 20 nt, Artificial Sequence
  Synthetic
aaagcccucaagggaaacca

SEQ ID NO: 784393 - RNA, 20 nt, Artificial Sequence
  Synthetic
auauguuucaugugaaacca

SEQ ID NO: 784394 - RNA, 20 nt, Artificial Sequence
  Synthetic
uuuuugaauuguugaaacca

SEQ ID NO: 784395 - RNA, 20 nt, Artificial Sequence
  Synthetic
cugaauguauacauaaacca

SEQ ID NO: 784396 - RNA, 20 nt, Artificial Sequence
  Synthetic
uuaaucauaguccuaaacca

SEQ ID NO: 784397 - RNA, 20 nt, Artificial Sequence
  Synthetic
aucauuuaucaauuaaacca

SEQ ID NO: 784398 - RNA, 20 nt, Artificial Sequence
  Synthetic
ccauuaacuauauuaaacca

SEQ ID NO: 784399 - RNA, 20 nt, Artificial Sequence
  Synthetic
cuccucuagcuauuaaacca

SEQ ID NO: 784400 - RNA, 20 nt, Artificial Sequence
  Synthetic
aguagaauuauuuuaaacca

SEQ ID NO: 784401 - RNA, 20 nt, Artificial Sequence
  Synthetic
auuacagucagucacaacca

SEQ ID NO: 784402 - RNA, 20 nt, Artificial Sequence
  Synthetic
aggaaguuuacaaccaacca

SEQ ID NO: 784403 - RNA, 20 nt, Artificial Sequence
  Synthetic
ugaaaaaggcacuccaacca

SEQ ID NO: 784404 - RNA, 20 nt, Artificial Sequence
  Synthetic
uuaguaugucaaagcaacca

SEQ ID NO: 784405 - RNA, 20 nt, Artificial Sequence
  Synthetic
ucaaaacauggcugcaacca

SEQ ID NO: 784406 - RNA, 20 nt, Artificial Sequence
  Synthetic
aauuaggcugaugucaacca

SEQ ID NO: 784407 - RNA, 20 nt, Artificial Sequence
  Synthetic
ugucuggauggugucaacca

SEQ ID NO: 784408 - RNA, 20 nt, Artificial Sequence
  Synthetic
aaauuaacgaaauucaacca

SEQ ID NO: 784409 - RNA, 20 nt, Artificial Sequence
  Synthetic
cuugaaaacuuguucaacca

SEQ ID NO: 784410 - RNA, 20 nt, Artificial Sequence
  Synthetic
acacucaaguuaaagaacca

SEQ ID NO: 784411 - RNA, 20 nt, Artificial Sequence
  Synthetic
aguaaagacauucagaacca

SEQ ID NO: 784412 - RNA, 20 nt, Artificial Sequence
  Synthetic
aaaguguuaugggagaacca

SEQ ID NO: 784413 - RNA, 20 nt, Artificial Sequence
  Synthetic
ucaaauuuuauugagaacca

SEQ ID NO: 784414 - RNA, 20 nt, Artificial Sequence
  Synthetic
agaagaaaacuuuagaacca

SEQ ID NO: 784415 - RNA, 20 nt, Artificial Sequence
  Synthetic
cucauagagugaaggaacca

SEQ ID NO: 784416 - RNA, 20 nt, Artificial Sequence
  Synthetic
ucucuuucauacaggaacca

SEQ ID NO: 784417 - RNA, 20 nt, Artificial Sequence
  Synthetic
augauugcaaagaggaacca

SEQ ID NO: 784418 - RNA, 20 nt, Artificial Sequence
  Synthetic
uaauauuguucugggaacca

SEQ ID NO: 784419 - RNA, 20 nt, Artificial Sequence
  Synthetic
aggccauuuucauggaacca

SEQ ID NO: 784420 - RNA, 20 nt, Artificial Sequence
  Synthetic
uaugugcuuagaaugaacca

SEQ ID NO: 784421 - RNA, 20 nt, Artificial Sequence
  Synthetic
aguucuugaaaagugaacca

SEQ ID NO: 784422 - RNA, 20 nt, Artificial Sequence
  Synthetic
caggagaaucacuugaacca

SEQ ID NO: 784423 - RNA, 20 nt, Artificial Sequence
  Synthetic
caggagaaucccuugaacca

SEQ ID NO: 784424 - RNA, 20 nt, Artificial Sequence
  Synthetic
ucugagggguggaauaacca

SEQ ID NO: 784425 - RNA, 20 nt, Artificial Sequence
  Synthetic
ucuucaaucacuaauaacca

SEQ ID NO: 784426 - RNA, 20 nt, Artificial Sequence
  Synthetic
uuuuauagaugagauaacca

SEQ ID NO: 784427 - RNA, 20 nt, Artificial Sequence
  Synthetic
uugaaaaaaauauauaacca

SEQ ID NO: 784428 - RNA, 20 nt, Artificial Sequence
  Synthetic
auauguagaacaccuaacca

SEQ ID NO: 784429 - RNA, 20 nt, Artificial Sequence
  Synthetic
ccuguuauuuggaguaacca

SEQ ID NO: 784430 - RNA, 20 nt, Artificial Sequence
  Synthetic
auaacuuacuguaguaacca

SEQ ID NO: 784431 - RNA, 20 nt, Artificial Sequence
  Synthetic
cauacacaagcauguaacca

SEQ ID NO: 784432 - RNA, 20 nt, Artificial Sequence
  Synthetic
accauuagcaagauuaacca

SEQ ID NO: 784433 - RNA, 20 nt, Artificial Sequence
  Synthetic
ugaagcaucuccuuuaacca

SEQ ID NO: 784434 - RNA, 20 nt, Artificial Sequence
  Synthetic
ccuuugaacgguuuuaacca

SEQ ID NO: 784435 - RNA, 20 nt, Artificial Sequence
  Synthetic
ucuuaauuuuuuuuuaacca

SEQ ID NO: 784436 - RNA, 20 nt, Artificial Sequence
  Synthetic
aauaaauggcuggaacacca

SEQ ID NO: 784437 - RNA, 20 nt, Artificial Sequence
  Synthetic
aaaaugaaguguuaacacca

SEQ ID NO: 784438 - RNA, 20 nt, Artificial Sequence
  Synthetic
cccgccacacacacacacca

SEQ ID NO: 784439 - RNA, 20 nt, Artificial Sequence
  Synthetic
aaggggaacaucacacacca

SEQ ID NO: 784440 - RNA, 20 nt, Artificial Sequence
  Synthetic
aagguggcacauacacacca

SEQ ID NO: 784441 - RNA, 20 nt, Artificial Sequence
  Synthetic
aauguggcacauacacacca

SEQ ID NO: 784442 - RNA, 20 nt, Artificial Sequence
  Synthetic
ugcaggacagaaucacacca

SEQ ID NO: 784443 - RNA, 20 nt, Artificial Sequence
  Synthetic
uaaacugaaauaucacacca

SEQ ID NO: 784444 - RNA, 20 nt, Artificial Sequence
  Synthetic
uuaaaaaaaaaaggacacca

SEQ ID NO: 784445 - RNA, 20 nt, Artificial Sequence
  Synthetic
aacguggcacagauacacca

SEQ ID NO: 784446 - RNA, 20 nt, Artificial Sequence
  Synthetic
aaauugacacauauacacca

SEQ ID NO: 784447 - RNA, 20 nt, Artificial Sequence
  Synthetic
aauguggcacauauacacca

SEQ ID NO: 784448 - RNA, 20 nt, Artificial Sequence
  Synthetic
aaauuggcacauauacacca

SEQ ID NO: 784449 - RNA, 20 nt, Artificial Sequence
  Synthetic
aaugugguacauauacacca

SEQ ID NO: 784450 - RNA, 20 nt, Artificial Sequence
  Synthetic
aauacggugcauauacacca

SEQ ID NO: 784451 - RNA, 20 nt, Artificial Sequence
  Synthetic
aauguggcgcguauacacca

SEQ ID NO: 784452 - RNA, 20 nt, Artificial Sequence
  Synthetic
ugaccuugcaugcuacacca

SEQ ID NO: 784453 - RNA, 20 nt, Artificial Sequence
  Synthetic
ugagcuaaaaaucuacacca

SEQ ID NO: 784454 - RNA, 20 nt, Artificial Sequence
  Synthetic
ugcugggagaaaguacacca

SEQ ID NO: 784455 - RNA, 20 nt, Artificial Sequence
  Synthetic
aauguggcacauguacacca

SEQ ID NO: 784456 - RNA, 20 nt, Artificial Sequence
  Synthetic
cuucucucuuaaaaccacca

SEQ ID NO: 784457 - RNA, 20 nt, Artificial Sequence
  Synthetic
auggguacagcaaaccacca

SEQ ID NO: 784458 - RNA, 20 nt, Artificial Sequence
  Synthetic
auaggugcagcaaaccacca

SEQ ID NO: 784459 - RNA, 20 nt, Artificial Sequence
  Synthetic
augggugcagcaaaccacca

SEQ ID NO: 784460 - RNA, 20 nt, Artificial Sequence
  Synthetic
augugugcagcaaaccacca

SEQ ID NO: 784461 - RNA, 20 nt, Artificial Sequence
  Synthetic
auggguguggcaaaccacca

SEQ ID NO: 784462 - RNA, 20 nt, Artificial Sequence
  Synthetic
caaaagaugaagaaccacca

SEQ ID NO: 784463 - RNA, 20 nt, Artificial Sequence
  Synthetic
cugaucucugguaaccacca

SEQ ID NO: 784464 - RNA, 20 nt, Artificial Sequence
  Synthetic
agguguauauaaucccacca

SEQ ID NO: 784465 - RNA, 20 nt, Artificial Sequence
  Synthetic
auuuuagagucuucccacca

SEQ ID NO: 784466 - RNA, 20 nt, Artificial Sequence
  Synthetic
auuacaggcgugagccacca

SEQ ID NO: 784467 - RNA, 20 nt, Artificial Sequence
  Synthetic
cucgggugccuacgccacca

SEQ ID NO: 784468 - RNA, 20 nt, Artificial Sequence
  Synthetic
auaaacuuauaucgccacca

SEQ ID NO: 784469 - RNA, 20 nt, Artificial Sequence
  Synthetic
cgaggcagcuauggccacca

SEQ ID NO: 784470 - RNA, 20 nt, Artificial Sequence
  Synthetic
acaagugaguuuggccacca

SEQ ID NO: 784471 - RNA, 20 nt, Artificial Sequence
  Synthetic
aaauuuggucagugccacca

SEQ ID NO: 784472 - RNA, 20 nt, Artificial Sequence
  Synthetic
aauguggcacauauccacca

SEQ ID NO: 784473 - RNA, 20 nt, Artificial Sequence
  Synthetic
aguuugcccuuucuccacca

SEQ ID NO: 784474 - RNA, 20 nt, Artificial Sequence
  Synthetic
cuccccuuugccuuccacca

SEQ ID NO: 784475 - RNA, 20 nt, Artificial Sequence
  Synthetic
uuuuaaacucuuuuccacca

SEQ ID NO: 784476 - RNA, 20 nt, Artificial Sequence
  Synthetic
cuaucacaagaacagcacca

SEQ ID NO: 784477 - RNA, 20 nt, Artificial Sequence
  Synthetic
uuaugcucuauacagcacca

SEQ ID NO: 784478 - RNA, 20 nt, Artificial Sequence
  Synthetic
cucccugggacagagcacca

SEQ ID NO: 784479 - RNA, 20 nt, Artificial Sequence
  Synthetic
cuagccaagagcaggcacca

SEQ ID NO: 784480 - RNA, 20 nt, Artificial Sequence
  Synthetic
uaaaauguggcauggcacca

SEQ ID NO: 784481 - RNA, 20 nt, Artificial Sequence
  Synthetic
cauucucugagaaugcacca

SEQ ID NO: 784482 - RNA, 20 nt, Artificial Sequence
  Synthetic
uuuauuuuguuaaugcacca

SEQ ID NO: 784483 - RNA, 20 nt, Artificial Sequence
  Synthetic
aacgugguauacaugcacca

SEQ ID NO: 784484 - RNA, 20 nt, Artificial Sequence
  Synthetic
ugauauauauauaugcacca

SEQ ID NO: 784485 - RNA, 20 nt, Artificial Sequence
  Synthetic
uugaacucagcucugcacca

SEQ ID NO: 784486 - RNA, 20 nt, Artificial Sequence
  Synthetic
aaggaaaguuucuugcacca

SEQ ID NO: 784487 - RNA, 20 nt, Artificial Sequence
  Synthetic
uguguaucgcuuuugcacca

SEQ ID NO: 784488 - RNA, 20 nt, Artificial Sequence
  Synthetic
caagaccuccaaaaucacca

SEQ ID NO: 784489 - RNA, 20 nt, Artificial Sequence
  Synthetic
uuaaaauguauaaaucacca

SEQ ID NO: 784490 - RNA, 20 nt, Artificial Sequence
  Synthetic
cuaaagcuuuacuaucacca

SEQ ID NO: 784491 - RNA, 20 nt, Artificial Sequence
  Synthetic
aaccccugcccuccucacca

SEQ ID NO: 784492 - RNA, 20 nt, Artificial Sequence
  Synthetic
augcuaauuucuccucacca

SEQ ID NO: 784493 - RNA, 20 nt, Artificial Sequence
  Synthetic
acuguucaagguccucacca

SEQ ID NO: 784494 - RNA, 20 nt, Artificial Sequence
  Synthetic
aacuauuaaauaugucacca

SEQ ID NO: 784495 - RNA, 20 nt, Artificial Sequence
  Synthetic
cauaauaaucggauucacca

SEQ ID NO: 784496 - RNA, 20 nt, Artificial Sequence
  Synthetic
aaaaauccacauauucacca

SEQ ID NO: 784497 - RNA, 20 nt, Artificial Sequence
  Synthetic
uacaauuuugaaguucacca

SEQ ID NO: 784498 - RNA, 20 nt, Artificial Sequence
  Synthetic
cuauuuuuggcauuucacca

SEQ ID NO: 784499 - RNA, 20 nt, Artificial Sequence
  Synthetic
aaaagugaugaaaaagacca

SEQ ID NO: 784500 - RNA, 20 nt, Artificial Sequence
  Synthetic
uguauagauggaaaagacca

SEQ ID NO: 784501 - RNA, 20 nt, Artificial Sequence
  Synthetic
uauuuagagaguaaagacca

SEQ ID NO: 784502 - RNA, 20 nt, Artificial Sequence
  Synthetic
uggaaucaaauucaagacca

SEQ ID NO: 784503 - RNA, 20 nt, Artificial Sequence
  Synthetic
aaacagaggaaaacagacca

SEQ ID NO: 784504 - RNA, 20 nt, Artificial Sequence
  Synthetic
ugugaacuggaaucagacca

SEQ ID NO: 784505 - RNA, 20 nt, Artificial Sequence
  Synthetic
cccagcacuuugagagacca

SEQ ID NO: 784506 - RNA, 20 nt, Artificial Sequence
  Synthetic
aaagggguggcuggagacca

SEQ ID NO: 784507 - RNA, 20 nt, Artificial Sequence
  Synthetic
uaccuuugaccaauagacca

SEQ ID NO: 784508 - RNA, 20 nt, Artificial Sequence
  Synthetic
cagaagaaagaauucgacca

SEQ ID NO: 784509 - RNA, 20 nt, Artificial Sequence
  Synthetic
acaguccuggaccaggacca

SEQ ID NO: 784510 - RNA, 20 nt, Artificial Sequence
  Synthetic
ugcaugguugccagggacca

SEQ ID NO: 784511 - RNA, 20 nt, Artificial Sequence
  Synthetic
aaggaccuggccugggacca

SEQ ID NO: 784512 - RNA, 20 nt, Artificial Sequence
  Synthetic
aagguaaugcuuauggacca

SEQ ID NO: 784513 - RNA, 20 nt, Artificial Sequence
  Synthetic
cauugaaaacuucuggacca

SEQ ID NO: 784514 - RNA, 20 nt, Artificial Sequence
  Synthetic
auauauuucugaguggacca

SEQ ID NO: 784515 - RNA, 20 nt, Artificial Sequence
  Synthetic
uacagacaugcaaaugacca

SEQ ID NO: 784516 - RNA, 20 nt, Artificial Sequence
  Synthetic
ccaagcuggagcagugacca

SEQ ID NO: 784517 - RNA, 20 nt, Artificial Sequence
  Synthetic
aaaguaggcaguagugacca

SEQ ID NO: 784518 - RNA, 20 nt, Artificial Sequence
  Synthetic
uauuaaaguauaggugacca

SEQ ID NO: 784519 - RNA, 20 nt, Artificial Sequence
  Synthetic
auuuguggagggggugacca

SEQ ID NO: 784520 - RNA, 20 nt, Artificial Sequence
  Synthetic
ucagggcucuugggugacca

SEQ ID NO: 784521 - RNA, 20 nt, Artificial Sequence
  Synthetic
uuucagacagcaguugacca

SEQ ID NO: 784522 - RNA, 20 nt, Artificial Sequence
  Synthetic
uauuaaguauucuuugacca

SEQ ID NO: 784523 - RNA, 20 nt, Artificial Sequence
  Synthetic
uuucuguuuggguuugacca

SEQ ID NO: 784524 - RNA, 20 nt, Artificial Sequence
  Synthetic
ugagaccaacacaaauacca

SEQ ID NO: 784525 - RNA, 20 nt, Artificial Sequence
  Synthetic
agauuuauucagaaauacca

SEQ ID NO: 784526 - RNA, 20 nt, Artificial Sequence
  Synthetic
uagccaaaaauuaaauacca

SEQ ID NO: 784527 - RNA, 20 nt, Artificial Sequence
  Synthetic
auuggucacagccaauacca

SEQ ID NO: 784528 - RNA, 20 nt, Artificial Sequence
  Synthetic
ucaaugugaacuacauacca

SEQ ID NO: 784529 - RNA, 20 nt, Artificial Sequence
  Synthetic
uucuccagguuuacauacca

SEQ ID NO: 784530 - RNA, 20 nt, Artificial Sequence
  Synthetic
uuuuacugugacccauacca

SEQ ID NO: 784531 - RNA, 20 nt, Artificial Sequence
  Synthetic
ccugaauacaacagauacca

SEQ ID NO: 784532 - RNA, 20 nt, Artificial Sequence
  Synthetic
auucacauuuauugauacca

SEQ ID NO: 784533 - RNA, 20 nt, Artificial Sequence
  Synthetic
agugacccaucuugauacca

SEQ ID NO: 784534 - RNA, 20 nt, Artificial Sequence
  Synthetic
auauucaaauggauauacca

SEQ ID NO: 784535 - RNA, 20 nt, Artificial Sequence
  Synthetic
aaugugguaucuauauacca

SEQ ID NO: 784536 - RNA, 20 nt, Artificial Sequence
  Synthetic
uauuaucuagguauauacca

SEQ ID NO: 784537 - RNA, 20 nt, Artificial Sequence
  Synthetic
uagcuauuuaaccuauacca

SEQ ID NO: 784538 - RNA, 20 nt, Artificial Sequence
  Synthetic
augcagcccucaguauacca

SEQ ID NO: 784539 - RNA, 20 nt, Artificial Sequence
  Synthetic
uucaacaucacuaacuacca

SEQ ID NO: 784540 - RNA, 20 nt, Artificial Sequence
  Synthetic
ucaccaugauguaccuacca

SEQ ID NO: 784541 - RNA, 20 nt, Artificial Sequence
  Synthetic
ugguguaaauauuccuacca

SEQ ID NO: 784542 - RNA, 20 nt, Artificial Sequence
  Synthetic
cgagcagagaaaagcuacca

SEQ ID NO: 784543 - RNA, 20 nt, Artificial Sequence
  Synthetic
caccaucuuuauugcuacca

SEQ ID NO: 784544 - RNA, 20 nt, Artificial Sequence
  Synthetic
cauuuauuacacaucuacca

SEQ ID NO: 784545 - RNA, 20 nt, Artificial Sequence
  Synthetic
ucuugagaggaagucuacca

SEQ ID NO: 784546 - RNA, 20 nt, Artificial Sequence
  Synthetic
cucuaucuucucuucuacca

SEQ ID NO: 784547 - RNA, 20 nt, Artificial Sequence
  Synthetic
uaguuuaguaauuucuacca

SEQ ID NO: 784548 - RNA, 20 nt, Artificial Sequence
  Synthetic
aacuccuccaaauaguacca

SEQ ID NO: 784549 - RNA, 20 nt, Artificial Sequence
  Synthetic
caugaguguuauuaguacca

SEQ ID NO: 784550 - RNA, 20 nt, Artificial Sequence
  Synthetic
cugagggugaucagguacca

SEQ ID NO: 784551 - RNA, 20 nt, Artificial Sequence
  Synthetic
cacauccugcacauguacca

SEQ ID NO: 784552 - RNA, 20 nt, Artificial Sequence
  Synthetic
aacaggaucuauuuguacca

SEQ ID NO: 784553 - RNA, 20 nt, Artificial Sequence
  Synthetic
acaaaaaauucaaauuacca

SEQ ID NO: 784554 - RNA, 20 nt, Artificial Sequence
  Synthetic
uuaauuuaaauccauuacca

SEQ ID NO: 784555 - RNA, 20 nt, Artificial Sequence
  Synthetic
cauuucucucauuauuacca

SEQ ID NO: 784556 - RNA, 20 nt, Artificial Sequence
  Synthetic
ucuucagcuuuaccuuacca

SEQ ID NO: 784557 - RNA, 20 nt, Artificial Sequence
  Synthetic
ucugcgaauuuuccuuacca

SEQ ID NO: 784558 - RNA, 20 nt, Artificial Sequence
  Synthetic
ucuuaucauaacucuuacca

SEQ ID NO: 784559 - RNA, 20 nt, Artificial Sequence
  Synthetic
aguucuuguugcaguuacca

SEQ ID NO: 784560 - RNA, 20 nt, Artificial Sequence
  Synthetic
cguuuuggaccauguuacca

SEQ ID NO: 784561 - RNA, 20 nt, Artificial Sequence
  Synthetic
agacaugguucauguuacca

SEQ ID NO: 784562 - RNA, 20 nt, Artificial Sequence
  Synthetic
ucaacauucuauauuuacca

SEQ ID NO: 784563 - RNA, 20 nt, Artificial Sequence
  Synthetic
aaauaaaacuuuauuuacca

SEQ ID NO: 784564 - RNA, 20 nt, Artificial Sequence
  Synthetic
uuggucaagugacuuuacca

SEQ ID NO: 784565 - RNA, 20 nt, Artificial Sequence
  Synthetic
uaaauuaaaauucuuuacca

SEQ ID NO: 784566 - RNA, 20 nt, Artificial Sequence
  Synthetic
uuaucaucccccuuuuacca

SEQ ID NO: 784567 - RNA, 20 nt, Artificial Sequence
  Synthetic
aauuuguuauguuuuuacca

SEQ ID NO: 784568 - RNA, 20 nt, Artificial Sequence
  Synthetic
ugacacuuggguaaaaccca

SEQ ID NO: 784569 - RNA, 20 nt, Artificial Sequence
  Synthetic
acaaaguagaaagaaaccca

SEQ ID NO: 784570 - RNA, 20 nt, Artificial Sequence
  Synthetic
acacagggguuggaaaccca

SEQ ID NO: 784571 - RNA, 20 nt, Artificial Sequence
  Synthetic
aauuuugugcuugaaaccca

SEQ ID NO: 784572 - RNA, 20 nt, Artificial Sequence
  Synthetic
uaaacacugggcuaaaccca

SEQ ID NO: 784573 - RNA, 20 nt, Artificial Sequence
  Synthetic
uuuacuaacuuugcaaccca

SEQ ID NO: 784574 - RNA, 20 nt, Artificial Sequence
  Synthetic
agagcauuuacuggaaccca

SEQ ID NO: 784575 - RNA, 20 nt, Artificial Sequence
  Synthetic
auccacaaauguggaaccca

SEQ ID NO: 784576 - RNA, 20 nt, Artificial Sequence
  Synthetic
cuuuaagaucaaauaaccca

SEQ ID NO: 784577 - RNA, 20 nt, Artificial Sequence
  Synthetic
caaagcaauuuucacaccca

SEQ ID NO: 784578 - RNA, 20 nt, Artificial Sequence
  Synthetic
ucagaaagagaugacaccca

SEQ ID NO: 784579 - RNA, 20 nt, Artificial Sequence
  Synthetic
uuccaauaacauuacaccca

SEQ ID NO: 784580 - RNA, 20 nt, Artificial Sequence
  Synthetic
cagggugugauggccaccca

SEQ ID NO: 784581 - RNA, 20 nt, Artificial Sequence
  Synthetic
agcaaucucugaagcaccca

SEQ ID NO: 784582 - RNA, 20 nt, Artificial Sequence
  Synthetic
uuuuuuacucuucucaccca

SEQ ID NO: 784583 - RNA, 20 nt, Artificial Sequence
  Synthetic
aaaacagacacaaagaccca

SEQ ID NO: 784584 - RNA, 20 nt, Artificial Sequence
  Synthetic
agaacaugaaagaagaccca

SEQ ID NO: 784585 - RNA, 20 nt, Artificial Sequence
  Synthetic
uuaagacucaagaagaccca

SEQ ID NO: 784586 - RNA, 20 nt, Artificial Sequence
  Synthetic
agggaagaggggaagaccca

SEQ ID NO: 784587 - RNA, 20 nt, Artificial Sequence
  Synthetic
uuccaagacagccagaccca

SEQ ID NO: 784588 - RNA, 20 nt, Artificial Sequence
  Synthetic
acccucaaaaucuagaccca

SEQ ID NO: 784589 - RNA, 20 nt, Artificial Sequence
  Synthetic
uguguugugggagggaccca

SEQ ID NO: 784590 - RNA, 20 nt, Artificial Sequence
  Synthetic
cuuagugacagugggaccca

SEQ ID NO: 784591 - RNA, 20 nt, Artificial Sequence
  Synthetic
ccucuggaacuucugaccca

SEQ ID NO: 784592 - RNA, 20 nt, Artificial Sequence
  Synthetic
uccccaguuucagugaccca

SEQ ID NO: 784593 - RNA, 20 nt, Artificial Sequence
  Synthetic
aguaauguaggagugaccca

SEQ ID NO: 784594 - RNA, 20 nt, Artificial Sequence
  Synthetic
aauuagauuuuugugaccca

SEQ ID NO: 784595 - RNA, 20 nt, Artificial Sequence
  Synthetic
auaaccaguugcaauaccca

SEQ ID NO: 784596 - RNA, 20 nt, Artificial Sequence
  Synthetic
uugaaacucaaauauaccca

SEQ ID NO: 784597 - RNA, 20 nt, Artificial Sequence
  Synthetic
caaaggaguggagcuaccca

SEQ ID NO: 784598 - RNA, 20 nt, Artificial Sequence
  Synthetic
uuugcugaaaggauuaccca

SEQ ID NO: 784599 - RNA, 20 nt, Artificial Sequence
  Synthetic
cauuuucaguuaguuaccca

SEQ ID NO: 784600 - RNA, 20 nt, Artificial Sequence
  Synthetic
augucuggagaauuuaccca

SEQ ID NO: 784601 - RNA, 20 nt, Artificial Sequence
  Synthetic
accaucuuuuccuuuaccca

SEQ ID NO: 784602 - RNA, 20 nt, Artificial Sequence
  Synthetic
uacauagaugagaaacccca

SEQ ID NO: 784603 - RNA, 20 nt, Artificial Sequence
  Synthetic
acuagaaucugauaacccca

SEQ ID NO: 784604 - RNA, 20 nt, Artificial Sequence
  Synthetic
ucagugggaugcacacccca

SEQ ID NO: 784605 - RNA, 20 nt, Artificial Sequence
  Synthetic
ugugaauuccagacacccca

SEQ ID NO: 784606 - RNA, 20 nt, Artificial Sequence
  Synthetic
caacagauaaugacacccca

SEQ ID NO: 784607 - RNA, 20 nt, Artificial Sequence
  Synthetic
uucauagcagcaccacccca

SEQ ID NO: 784608 - RNA, 20 nt, Artificial Sequence
  Synthetic
aaugguccugggucacccca

SEQ ID NO: 784609 - RNA, 20 nt, Artificial Sequence
  Synthetic
ugucacucuuccugacccca

SEQ ID NO: 784610 - RNA, 20 nt, Artificial Sequence
  Synthetic
ugguggugauucauacccca

SEQ ID NO: 784611 - RNA, 20 nt, Artificial Sequence
  Synthetic
aaaugauaguaccuacccca

SEQ ID NO: 784612 - RNA, 20 nt, Artificial Sequence
  Synthetic
aacuagauuuuucuacccca

SEQ ID NO: 784613 - RNA, 20 nt, Artificial Sequence
  Synthetic
agauaccacuacaaccccca

SEQ ID NO: 784614 - RNA, 20 nt, Artificial Sequence
  Synthetic
ucauuuuaaaauaaccccca

SEQ ID NO: 784615 - RNA, 20 nt, Artificial Sequence
  Synthetic
uuauuuucucaaauccccca

SEQ ID NO: 784616 - RNA, 20 nt, Artificial Sequence
  Synthetic
auccuggaaccaauccccca

SEQ ID NO: 784617 - RNA, 20 nt, Artificial Sequence
  Synthetic
aagacagcugagaagcccca

SEQ ID NO: 784618 - RNA, 20 nt, Artificial Sequence
  Synthetic
ugauuucucacaucgcccca

SEQ ID NO: 784619 - RNA, 20 nt, Artificial Sequence
  Synthetic
cauuuucacaaaaggcccca

SEQ ID NO: 784620 - RNA, 20 nt, Artificial Sequence
  Synthetic
ccagcaucaaucuggcccca

SEQ ID NO: 784621 - RNA, 20 nt, Artificial Sequence
  Synthetic
uguacuggucuguggcccca

SEQ ID NO: 784622 - RNA, 20 nt, Artificial Sequence
  Synthetic
uucuaauuuauuuggcccca

SEQ ID NO: 784623 - RNA, 20 nt, Artificial Sequence
  Synthetic
uuuucauugccacugcccca

SEQ ID NO: 784624 - RNA, 20 nt, Artificial Sequence
  Synthetic
acacauacacuccugcccca

SEQ ID NO: 784625 - RNA, 20 nt, Artificial Sequence
  Synthetic
uaguguagauaaaaucccca

SEQ ID NO: 784626 - RNA, 20 nt, Artificial Sequence
  Synthetic
ccauuguaagacaaucccca

SEQ ID NO: 784627 - RNA, 20 nt, Artificial Sequence
  Synthetic
ccgaagguguuuacucccca

SEQ ID NO: 784628 - RNA, 20 nt, Artificial Sequence
  Synthetic
auauuuugaaaagcucccca

SEQ ID NO: 784629 - RNA, 20 nt, Artificial Sequence
  Synthetic
agggaugauuuugcucccca

SEQ ID NO: 784630 - RNA, 20 nt, Artificial Sequence
  Synthetic
cugucaaaauacagucccca

SEQ ID NO: 784631 - RNA, 20 nt, Artificial Sequence
  Synthetic
uuaaaucagaugagucccca

SEQ ID NO: 784632 - RNA, 20 nt, Artificial Sequence
  Synthetic
ccucccucuaguagucccca

SEQ ID NO: 784633 - RNA, 20 nt, Artificial Sequence
  Synthetic
uguagauuauguggucccca

SEQ ID NO: 784634 - RNA, 20 nt, Artificial Sequence
  Synthetic
ucaacuuaacaaauucccca

SEQ ID NO: 784635 - RNA, 20 nt, Artificial Sequence
  Synthetic
uagcuucauuccauucccca

SEQ ID NO: 784636 - RNA, 20 nt, Artificial Sequence
  Synthetic
acaucagcauuccuucccca

SEQ ID NO: 784637 - RNA, 20 nt, Artificial Sequence
  Synthetic
aguuggaagcugcuucccca

SEQ ID NO: 784638 - RNA, 20 nt, Artificial Sequence
  Synthetic
agauuacuacauuuucccca

SEQ ID NO: 784639 - RNA, 20 nt, Artificial Sequence
  Synthetic
auauauggcauaaaagccca

SEQ ID NO: 784640 - RNA, 20 nt, Artificial Sequence
  Synthetic
agccccacucgcaaagccca

SEQ ID NO: 784641 - RNA, 20 nt, Artificial Sequence
  Synthetic
ugguguucacuuaaagccca

SEQ ID NO: 784642 - RNA, 20 nt, Artificial Sequence
  Synthetic
acaaauaaugagcaagccca

SEQ ID NO: 784643 - RNA, 20 nt, Artificial Sequence
  Synthetic
cagcccaggcuugaagccca

SEQ ID NO: 784644 - RNA, 20 nt, Artificial Sequence
  Synthetic
agaaaaaaaaaauaagccca

SEQ ID NO: 784645 - RNA, 20 nt, Artificial Sequence
  Synthetic
caucuuaagaggccagccca

SEQ ID NO: 784646 - RNA, 20 nt, Artificial Sequence
  Synthetic
uaacaauuuuguccagccca

SEQ ID NO: 784647 - RNA, 20 nt, Artificial Sequence
  Synthetic
cugagaguuucagcagccca

SEQ ID NO: 784648 - RNA, 20 nt, Artificial Sequence
  Synthetic
ccaagauagagcucagccca

SEQ ID NO: 784649 - RNA, 20 nt, Artificial Sequence
  Synthetic
uggguggcaaauucagccca

SEQ ID NO: 784650 - RNA, 20 nt, Artificial Sequence
  Synthetic
aguugaacaacgagagccca

SEQ ID NO: 784651 - RNA, 20 nt, Artificial Sequence
  Synthetic
uugggccagaggggagccca

SEQ ID NO: 784652 - RNA, 20 nt, Artificial Sequence
  Synthetic
ccaauggagaugggagccca

SEQ ID NO: 784653 - RNA, 20 nt, Artificial Sequence
  Synthetic
aucuuugggcugcuagccca

SEQ ID NO: 784654 - RNA, 20 nt, Artificial Sequence
  Synthetic
aacagaguugcaguagccca

SEQ ID NO: 784655 - RNA, 20 nt, Artificial Sequence
  Synthetic
uaugccacagcaaaggccca

SEQ ID NO: 784656 - RNA, 20 nt, Artificial Sequence
  Synthetic
ucucagaauagggaggccca

SEQ ID NO: 784657 - RNA, 20 nt, Artificial Sequence
  Synthetic
ucagggaauagggaggccca

SEQ ID NO: 784658 - RNA, 20 nt, Artificial Sequence
  Synthetic
uguuacuacaucuaggccca

SEQ ID NO: 784659 - RNA, 20 nt, Artificial Sequence
  Synthetic
aguaucagaauaagggccca

SEQ ID NO: 784660 - RNA, 20 nt, Artificial Sequence
  Synthetic
ugguggaucaggggggccca

SEQ ID NO: 784661 - RNA, 20 nt, Artificial Sequence
  Synthetic
cuuugaaagcauggggccca

SEQ ID NO: 784662 - RNA, 20 nt, Artificial Sequence
  Synthetic
uugggcuccccucuggccca

SEQ ID NO: 784663 - RNA, 20 nt, Artificial Sequence
  Synthetic
ugagagccagcuguggccca

SEQ ID NO: 784664 - RNA, 20 nt, Artificial Sequence
  Synthetic
ucuucuuccaguguggccca

SEQ ID NO: 784665 - RNA, 20 nt, Artificial Sequence
  Synthetic
ugguggguguaauuggccca

SEQ ID NO: 784666 - RNA, 20 nt, Artificial Sequence
  Synthetic
uuuacuaacuauaaugccca

SEQ ID NO: 784667 - RNA, 20 nt, Artificial Sequence
  Synthetic
ugaaauccauuugaugccca

SEQ ID NO: 784668 - RNA, 20 nt, Artificial Sequence
  Synthetic
agucaauaaucuccugccca

SEQ ID NO: 784669 - RNA, 20 nt, Artificial Sequence
  Synthetic
cacaagggcagagcugccca

SEQ ID NO: 784670 - RNA, 20 nt, Artificial Sequence
  Synthetic
uacucuugagcaucugccca

SEQ ID NO: 784671 - RNA, 20 nt, Artificial Sequence
  Synthetic
agaaaacucugcucugccca

SEQ ID NO: 784672 - RNA, 20 nt, Artificial Sequence
  Synthetic
auaaaaauggcaagugccca

SEQ ID NO: 784673 - RNA, 20 nt, Artificial Sequence
  Synthetic
cagacgacagagugugccca

SEQ ID NO: 784674 - RNA, 20 nt, Artificial Sequence
  Synthetic
aagacuuaaaguauugccca

SEQ ID NO: 784675 - RNA, 20 nt, Artificial Sequence
  Synthetic
ucuauaaauccacuugccca

SEQ ID NO: 784676 - RNA, 20 nt, Artificial Sequence
  Synthetic
uagguuaaguuacuugccca

SEQ ID NO: 784677 - RNA, 20 nt, Artificial Sequence
  Synthetic
uaucuuauguuacuugccca

SEQ ID NO: 784678 - RNA, 20 nt, Artificial Sequence
  Synthetic
aaugaagcauaauuugccca

SEQ ID NO: 784679 - RNA, 20 nt, Artificial Sequence
  Synthetic
aaucaguuuuucuuugccca

SEQ ID NO: 784680 - RNA, 20 nt, Artificial Sequence
  Synthetic
aaagccaaaauaaaauccca

SEQ ID NO: 784681 - RNA, 20 nt, Artificial Sequence
  Synthetic
ccuaauggagaacaauccca

SEQ ID NO: 784682 - RNA, 20 nt, Artificial Sequence
  Synthetic
uguucuucaggacaauccca

SEQ ID NO: 784683 - RNA, 20 nt, Artificial Sequence
  Synthetic
ccaaagugcccuacauccca

SEQ ID NO: 784684 - RNA, 20 nt, Artificial Sequence
  Synthetic
ugaaccagccuggcauccca

SEQ ID NO: 784685 - RNA, 20 nt, Artificial Sequence
  Synthetic
ugaaccagccuugcauccca

SEQ ID NO: 784686 - RNA, 20 nt, Artificial Sequence
  Synthetic
ugaaccagcuuugcauccca

SEQ ID NO: 784687 - RNA, 20 nt, Artificial Sequence
  Synthetic
agugagcuuagaucauccca

SEQ ID NO: 784688 - RNA, 20 nt, Artificial Sequence
  Synthetic
caaugauugacuagauccca

SEQ ID NO: 784689 - RNA, 20 nt, Artificial Sequence
  Synthetic
uauggcugaauaauauccca

SEQ ID NO: 784690 - RNA, 20 nt, Artificial Sequence
  Synthetic
cugcucuuaaugauauccca

SEQ ID NO: 784691 - RNA, 20 nt, Artificial Sequence
  Synthetic
ugaaacaaccuucuauccca

SEQ ID NO: 784692 - RNA, 20 nt, Artificial Sequence
  Synthetic
ucuucucaagacuuauccca

SEQ ID NO: 784693 - RNA, 20 nt, Artificial Sequence
  Synthetic
auggagacugacaacuccca

SEQ ID NO: 784694 - RNA, 20 nt, Artificial Sequence
  Synthetic
uuacuuaguuuccacuccca

SEQ ID NO: 784695 - RNA, 20 nt, Artificial Sequence
  Synthetic
augggucucagggacuccca

SEQ ID NO: 784696 - RNA, 20 nt, Artificial Sequence
  Synthetic
agauuccuaggccccuccca

SEQ ID NO: 784697 - RNA, 20 nt, Artificial Sequence
  Synthetic
agguuucuucaugccuccca

SEQ ID NO: 784698 - RNA, 20 nt, Artificial Sequence
  Synthetic
ugguauaugccuagcuccca

SEQ ID NO: 784699 - RNA, 20 nt, Artificial Sequence
  Synthetic
augcaagaggugggcuccca

SEQ ID NO: 784700 - RNA, 20 nt, Artificial Sequence
  Synthetic
aggaaucuuuaacucuccca

SEQ ID NO: 784701 - RNA, 20 nt, Artificial Sequence
  Synthetic
aagaagucccaugucuccca

SEQ ID NO: 784702 - RNA, 20 nt, Artificial Sequence
  Synthetic
aaaaauaugaaauucuccca

SEQ ID NO: 784703 - RNA, 20 nt, Artificial Sequence
  Synthetic
cuuggaaaaaaacaguccca

SEQ ID NO: 784704 - RNA, 20 nt, Artificial Sequence
  Synthetic
ccuuaucuaacagaguccca

SEQ ID NO: 784705 - RNA, 20 nt, Artificial Sequence
  Synthetic
agaacacucaaguaguccca

SEQ ID NO: 784706 - RNA, 20 nt, Artificial Sequence
  Synthetic
ccccguggugcucuguccca

SEQ ID NO: 784707 - RNA, 20 nt, Artificial Sequence
  Synthetic
uauggcugcauaguguccca

SEQ ID NO: 784708 - RNA, 20 nt, Artificial Sequence
  Synthetic
uugugaucugggaauuccca

SEQ ID NO: 784709 - RNA, 20 nt, Artificial Sequence
  Synthetic
cagccuuugguuaauuccca

SEQ ID NO: 784710 - RNA, 20 nt, Artificial Sequence
  Synthetic
aauagguaacucucuuccca

SEQ ID NO: 784711 - RNA, 20 nt, Artificial Sequence
  Synthetic
cuuagacucuagucuuccca

SEQ ID NO: 784712 - RNA, 20 nt, Artificial Sequence
  Synthetic
aucuguauugauucuuccca

SEQ ID NO: 784713 - RNA, 20 nt, Artificial Sequence
  Synthetic
ccaccccacaacaguuccca

SEQ ID NO: 784714 - RNA, 20 nt, Artificial Sequence
  Synthetic
ucugggaaauguaguuccca

SEQ ID NO: 784715 - RNA, 20 nt, Artificial Sequence
  Synthetic
augcaagagguggguuccca

SEQ ID NO: 784716 - RNA, 20 nt, Artificial Sequence
  Synthetic
ucucaaagcggugguuccca

SEQ ID NO: 784717 - RNA, 20 nt, Artificial Sequence
  Synthetic
aaaccucugaugauuuccca

SEQ ID NO: 784718 - RNA, 20 nt, Artificial Sequence
  Synthetic
cuccagucugcucuuuccca

SEQ ID NO: 784719 - RNA, 20 nt, Artificial Sequence
  Synthetic
aaggguuccagaguuuccca

SEQ ID NO: 784720 - RNA, 20 nt, Artificial Sequence
  Synthetic
acugaucaugagguuuccca

SEQ ID NO: 784721 - RNA, 20 nt, Artificial Sequence
  Synthetic
auuauagaaacauuuuccca

SEQ ID NO: 784722 - RNA, 20 nt, Artificial Sequence
  Synthetic
caagucaauguauuuuccca

SEQ ID NO: 784723 - RNA, 20 nt, Artificial Sequence
  Synthetic
uauucacaauagaaaagcca

SEQ ID NO: 784724 - RNA, 20 nt, Artificial Sequence
  Synthetic
auuagccucaaacaaagcca

SEQ ID NO: 784725 - RNA, 20 nt, Artificial Sequence
  Synthetic
cagcagaauagucaaagcca

SEQ ID NO: 784726 - RNA, 20 nt, Artificial Sequence
  Synthetic
ccuucgcagcuauaaagcca

SEQ ID NO: 784727 - RNA, 20 nt, Artificial Sequence
  Synthetic
ugaauuaaccacuaaagcca

SEQ ID NO: 784728 - RNA, 20 nt, Artificial Sequence
  Synthetic
uaucaagguagaacaagcca

SEQ ID NO: 784729 - RNA, 20 nt, Artificial Sequence
  Synthetic
uuauauucuaucacaagcca

SEQ ID NO: 784730 - RNA, 20 nt, Artificial Sequence
  Synthetic
cuucugcccucgccaagcca

SEQ ID NO: 784731 - RNA, 20 nt, Artificial Sequence
  Synthetic
uucugcauccugccaagcca

SEQ ID NO: 784732 - RNA, 20 nt, Artificial Sequence
  Synthetic
uuuuccucuuugccaagcca

SEQ ID NO: 784733 - RNA, 20 nt, Artificial Sequence
  Synthetic
cauggccagagcagaagcca

SEQ ID NO: 784734 - RNA, 20 nt, Artificial Sequence
  Synthetic
uuucucuuugggagaagcca

SEQ ID NO: 784735 - RNA, 20 nt, Artificial Sequence
  Synthetic
agggaaguuguuagaagcca

SEQ ID NO: 784736 - RNA, 20 nt, Artificial Sequence
  Synthetic
ugacuucaagaacgaagcca

SEQ ID NO: 784737 - RNA, 20 nt, Artificial Sequence
  Synthetic
agaaaagaaggaggaagcca

SEQ ID NO: 784738 - RNA, 20 nt, Artificial Sequence
  Synthetic
ucaaaaaaucaaugaagcca

SEQ ID NO: 784739 - RNA, 20 nt, Artificial Sequence
  Synthetic
ugcucagaggacugaagcca

SEQ ID NO: 784740 - RNA, 20 nt, Artificial Sequence
  Synthetic
aaacaacaaaucugaagcca

SEQ ID NO: 784741 - RNA, 20 nt, Artificial Sequence
  Synthetic
uuuuagauaaaacuaagcca

SEQ ID NO: 784742 - RNA, 20 nt, Artificial Sequence
  Synthetic
agaaacaagcauguaagcca

SEQ ID NO: 784743 - RNA, 20 nt, Artificial Sequence
  Synthetic
acugggaacaaaaacagcca

SEQ ID NO: 784744 - RNA, 20 nt, Artificial Sequence
  Synthetic
ccugcuuggaccaacagcca

SEQ ID NO: 784745 - RNA, 20 nt, Artificial Sequence
  Synthetic
accaauucccccaacagcca

SEQ ID NO: 784746 - RNA, 20 nt, Artificial Sequence
  Synthetic
ugcuggggccucaccagcca

SEQ ID NO: 784747 - RNA, 20 nt, Artificial Sequence
  Synthetic
aauucuuaaaaacccagcca

SEQ ID NO: 784748 - RNA, 20 nt, Artificial Sequence
  Synthetic
ugagccaccacgcccagcca

SEQ ID NO: 784749 - RNA, 20 nt, Artificial Sequence
  Synthetic
caucccagccacuccagcca

SEQ ID NO: 784750 - RNA, 20 nt, Artificial Sequence
  Synthetic
ugucccagccacuccagcca

SEQ ID NO: 784751 - RNA, 20 nt, Artificial Sequence
  Synthetic
auacauucacgcuccagcca

SEQ ID NO: 784752 - RNA, 20 nt, Artificial Sequence
  Synthetic
ucaccacugcauuccagcca

SEQ ID NO: 784753 - RNA, 20 nt, Artificial Sequence
  Synthetic
auggcuaggugaugcagcca

SEQ ID NO: 784754 - RNA, 20 nt, Artificial Sequence
  Synthetic
uagaaugucgcucucagcca

SEQ ID NO: 784755 - RNA, 20 nt, Artificial Sequence
  Synthetic
aauacagugguucucagcca

SEQ ID NO: 784756 - RNA, 20 nt, Artificial Sequence
  Synthetic
cagagcaugucagucagcca

SEQ ID NO: 784757 - RNA, 20 nt, Artificial Sequence
  Synthetic
uucaugcuucucaagagcca

SEQ ID NO: 784758 - RNA, 20 nt, Artificial Sequence
  Synthetic
ugauguacuucacagagcca

SEQ ID NO: 784759 - RNA, 20 nt, Artificial Sequence
  Synthetic
agacauacaaggcagagcca

SEQ ID NO: 784760 - RNA, 20 nt, Artificial Sequence
  Synthetic
uuaaauaaaucagggagcca

SEQ ID NO: 784761 - RNA, 20 nt, Artificial Sequence
  Synthetic
cucucaaauggugggagcca

SEQ ID NO: 784762 - RNA, 20 nt, Artificial Sequence
  Synthetic
caggagaaccgcuugagcca

SEQ ID NO: 784763 - RNA, 20 nt, Artificial Sequence
  Synthetic
agcucuauucacaauagcca

SEQ ID NO: 784764 - RNA, 20 nt, Artificial Sequence
  Synthetic
cuuuaaaaagaucauagcca

SEQ ID NO: 784765 - RNA, 20 nt, Artificial Sequence
  Synthetic
cccuuugaagaucauagcca

SEQ ID NO: 784766 - RNA, 20 nt, Artificial Sequence
  Synthetic
aggacagagagaccuagcca

SEQ ID NO: 784767 - RNA, 20 nt, Artificial Sequence
  Synthetic
uugaaggagaaaucuagcca

SEQ ID NO: 784768 - RNA, 20 nt, Artificial Sequence
  Synthetic
caaagaaccaaaaguagcca

SEQ ID NO: 784769 - RNA, 20 nt, Artificial Sequence
  Synthetic
ugccuuauuuuagguagcca

SEQ ID NO: 784770 - RNA, 20 nt, Artificial Sequence
  Synthetic
auucacugugaguguagcca

SEQ ID NO: 784771 - RNA, 20 nt, Artificial Sequence
  Synthetic
ugaugaugcugaauuagcca

SEQ ID NO: 784772 - RNA, 20 nt, Artificial Sequence
  Synthetic
ucuugguacuaccuuagcca

SEQ ID NO: 784773 - RNA, 20 nt, Artificial Sequence
  Synthetic
aucuuggcuccuuuuagcca

SEQ ID NO: 784774 - RNA, 20 nt, Artificial Sequence
  Synthetic
cucugucucucuucccgcca

SEQ ID NO: 784775 - RNA, 20 nt, Artificial Sequence
  Synthetic
ccuggaggucucuagcgcca

SEQ ID NO: 784776 - RNA, 20 nt, Artificial Sequence
  Synthetic
ugccauuuccauaaaggcca

SEQ ID NO: 784777 - RNA, 20 nt, Artificial Sequence
  Synthetic
ucuauugaaaagcaaggcca

SEQ ID NO: 784778 - RNA, 20 nt, Artificial Sequence
  Synthetic
acccagugugagcaaggcca

SEQ ID NO: 784779 - RNA, 20 nt, Artificial Sequence
  Synthetic
agagaaagccaagaaggcca

SEQ ID NO: 784780 - RNA, 20 nt, Artificial Sequence
  Synthetic
ugaguuuuguauuaaggcca

SEQ ID NO: 784781 - RNA, 20 nt, Artificial Sequence
  Synthetic
agaaccauaaccccaggcca

SEQ ID NO: 784782 - RNA, 20 nt, Artificial Sequence
  Synthetic
uccagcacguugucaggcca

SEQ ID NO: 784783 - RNA, 20 nt, Artificial Sequence
  Synthetic
uguacuggaaguucaggcca

SEQ ID NO: 784784 - RNA, 20 nt, Artificial Sequence
  Synthetic
caucaagugggcagaggcca

SEQ ID NO: 784785 - RNA, 20 nt, Artificial Sequence
  Synthetic
acucuaggcucuagaggcca

SEQ ID NO: 784786 - RNA, 20 nt, Artificial Sequence
  Synthetic
auaagggccuuaggaggcca

SEQ ID NO: 784787 - RNA, 20 nt, Artificial Sequence
  Synthetic
cccagcacuuagggaggcca

SEQ ID NO: 784788 - RNA, 20 nt, Artificial Sequence
  Synthetic
cccagcacuucgggaggcca

SEQ ID NO: 784789 - RNA, 20 nt, Artificial Sequence
  Synthetic
cccagcacugugggaggcca

SEQ ID NO: 784790 - RNA, 20 nt, Artificial Sequence
  Synthetic
cucaacacuuugggaggcca

SEQ ID NO: 784791 - RNA, 20 nt, Artificial Sequence
  Synthetic
ccuaacacuuugggaggcca

SEQ ID NO: 784792 - RNA, 20 nt, Artificial Sequence
  Synthetic
uaauccacuuugggaggcca

SEQ ID NO: 784793 - RNA, 20 nt, Artificial Sequence
  Synthetic
ccaagcacuuugggaggcca

SEQ ID NO: 784794 - RNA, 20 nt, Artificial Sequence
  Synthetic
accagcacuuugggaggcca

SEQ ID NO: 784795 - RNA, 20 nt, Artificial Sequence
  Synthetic
cccagcacuuugggaggcca

SEQ ID NO: 784796 - RNA, 20 nt, Artificial Sequence
  Synthetic
ccccgcacuuugggaggcca

SEQ ID NO: 784797 - RNA, 20 nt, Artificial Sequence
  Synthetic
cccaggacuuugggaggcca

SEQ ID NO: 784798 - RNA, 20 nt, Artificial Sequence
  Synthetic
cucagugcuuugggaggcca

SEQ ID NO: 784799 - RNA, 20 nt, Artificial Sequence
  Synthetic
ccuagugcuuugggaggcca

SEQ ID NO: 784800 - RNA, 20 nt, Artificial Sequence
  Synthetic
cucggcauuuugggaggcca

SEQ ID NO: 784801 - RNA, 20 nt, Artificial Sequence
  Synthetic
cccagcauuuuuggaggcca

SEQ ID NO: 784802 - RNA, 20 nt, Artificial Sequence
  Synthetic
uuuccaccuaugugaggcca

SEQ ID NO: 784803 - RNA, 20 nt, Artificial Sequence
  Synthetic
uucuugcugaagauaggcca

SEQ ID NO: 784804 - RNA, 20 nt, Artificial Sequence
  Synthetic
uuccacagaucucuaggcca

SEQ ID NO: 784805 - RNA, 20 nt, Artificial Sequence
  Synthetic
ugcauaaggcuucuaggcca

SEQ ID NO: 784806 - RNA, 20 nt, Artificial Sequence
  Synthetic
ucuuguuucaaacacggcca

SEQ ID NO: 784807 - RNA, 20 nt, Artificial Sequence
  Synthetic
ugagccacugcgcccggcca

SEQ ID NO: 784808 - RNA, 20 nt, Artificial Sequence
  Synthetic
ugaaaaaauugaggcggcca

SEQ ID NO: 784809 - RNA, 20 nt, Artificial Sequence
  Synthetic
aaauaaggagggaucggcca

SEQ ID NO: 784810 - RNA, 20 nt, Artificial Sequence
  Synthetic
ccucaucgaaaagucggcca

SEQ ID NO: 784811 - RNA, 20 nt, Artificial Sequence
  Synthetic
uugccuucaaaaaggggcca

SEQ ID NO: 784812 - RNA, 20 nt, Artificial Sequence
  Synthetic
ccuaauucccuaaauggcca

SEQ ID NO: 784813 - RNA, 20 nt, Artificial Sequence
  Synthetic
agaaugugaaagaauggcca

SEQ ID NO: 784814 - RNA, 20 nt, Artificial Sequence
  Synthetic
acugauuugggacauggcca

SEQ ID NO: 784815 - RNA, 20 nt, Artificial Sequence
  Synthetic
aguauuggaaguccuggcca

SEQ ID NO: 784816 - RNA, 20 nt, Artificial Sequence
  Synthetic
aaacuugccuugucuggcca

SEQ ID NO: 784817 - RNA, 20 nt, Artificial Sequence
  Synthetic
aguguuggaaguucuggcca

SEQ ID NO: 784818 - RNA, 20 nt, Artificial Sequence
  Synthetic
agucaguaaaacaguggcca

SEQ ID NO: 784819 - RNA, 20 nt, Artificial Sequence
  Synthetic
ugugccuggaggaguggcca

SEQ ID NO: 784820 - RNA, 20 nt, Artificial Sequence
  Synthetic
uaguauaaauauuguggcca

SEQ ID NO: 784821 - RNA, 20 nt, Artificial Sequence
  Synthetic
auccagccagccauuggcca

SEQ ID NO: 784822 - RNA, 20 nt, Artificial Sequence
  Synthetic
cuacucuaugugcuuggcca

SEQ ID NO: 784823 - RNA, 20 nt, Artificial Sequence
  Synthetic
aaaaaaaaaaaaaaaugcca

SEQ ID NO: 784824 - RNA, 20 nt, Artificial Sequence
  Synthetic
aaauccuaugugaaaugcca

SEQ ID NO: 784825 - RNA, 20 nt, Artificial Sequence
  Synthetic
aggugcugugaagaaugcca

SEQ ID NO: 784826 - RNA, 20 nt, Artificial Sequence
  Synthetic
auucauuaaaaauaaugcca

SEQ ID NO: 784827 - RNA, 20 nt, Artificial Sequence
  Synthetic
cguaaauguauguaaugcca

SEQ ID NO: 784828 - RNA, 20 nt, Artificial Sequence
  Synthetic
ugaguauaacacacaugcca

SEQ ID NO: 784829 - RNA, 20 nt, Artificial Sequence
  Synthetic
acauagguauacacaugcca

SEQ ID NO: 784830 - RNA, 20 nt, Artificial Sequence
  Synthetic
uagaaaauguguucaugcca

SEQ ID NO: 784831 - RNA, 20 nt, Artificial Sequence
  Synthetic
uaaaucaauuaaauaugcca

SEQ ID NO: 784832 - RNA, 20 nt, Artificial Sequence
  Synthetic
cuauuuauuugaauaugcca

SEQ ID NO: 784833 - RNA, 20 nt, Artificial Sequence
  Synthetic
uggguaccuauuauaugcca

SEQ ID NO: 784834 - RNA, 20 nt, Artificial Sequence
  Synthetic
cacauuagaaauguaugcca

SEQ ID NO: 784835 - RNA, 20 nt, Artificial Sequence
  Synthetic
cuuaacacaaucaacugcca

SEQ ID NO: 784836 - RNA, 20 nt, Artificial Sequence
  Synthetic
auauuaauucccuacugcca

SEQ ID NO: 784837 - RNA, 20 nt, Artificial Sequence
  Synthetic
aguuuuuuuaaguacugcca

SEQ ID NO: 784838 - RNA, 20 nt, Artificial Sequence
  Synthetic
cuucauccaugucccugcca

SEQ ID NO: 784839 - RNA, 20 nt, Artificial Sequence
  Synthetic
aacuguacugaauccugcca

SEQ ID NO: 784840 - RNA, 20 nt, Artificial Sequence
  Synthetic
aaauacaauauuagcugcca

SEQ ID NO: 784841 - RNA, 20 nt, Artificial Sequence
  Synthetic
ugugaaauaagaggcugcca

SEQ ID NO: 784842 - RNA, 20 nt, Artificial Sequence
  Synthetic
uuguaugcuguaggcugcca

SEQ ID NO: 784843 - RNA, 20 nt, Artificial Sequence
  Synthetic
ccacaaacuuauggcugcca

SEQ ID NO: 784844 - RNA, 20 nt, Artificial Sequence
  Synthetic
ucucuccccaugugcugcca

SEQ ID NO: 784845 - RNA, 20 nt, Artificial Sequence
  Synthetic
cccauccauucuugcugcca

SEQ ID NO: 784846 - RNA, 20 nt, Artificial Sequence
  Synthetic
cucuaaguuucacucugcca

SEQ ID NO: 784847 - RNA, 20 nt, Artificial Sequence
  Synthetic
uuucauuauaguuucugcca

SEQ ID NO: 784848 - RNA, 20 nt, Artificial Sequence
  Synthetic
caaggguuaaacacgugcca

SEQ ID NO: 784849 - RNA, 20 nt, Artificial Sequence
  Synthetic
acguagguauacacgugcca

SEQ ID NO: 784850 - RNA, 20 nt, Artificial Sequence
  Synthetic
ugccugggaguugggugcca

SEQ ID NO: 784851 - RNA, 20 nt, Artificial Sequence
  Synthetic
agagacagauaguggugcca

SEQ ID NO: 784852 - RNA, 20 nt, Artificial Sequence
  Synthetic
aguucuccaaaaaugugcca

SEQ ID NO: 784853 - RNA, 20 nt, Artificial Sequence
  Synthetic
acauagguaaacaugugcca

SEQ ID NO: 784854 - RNA, 20 nt, Artificial Sequence
  Synthetic
acauagguauacaugugcca

SEQ ID NO: 784855 - RNA, 20 nt, Artificial Sequence
  Synthetic
aucagcuagaauaugugcca

SEQ ID NO: 784856 - RNA, 20 nt, Artificial Sequence
  Synthetic
aaaauaguuacuaugugcca

SEQ ID NO: 784857 - RNA, 20 nt, Artificial Sequence
  Synthetic
acaugaaggaaugugugcca

SEQ ID NO: 784858 - RNA, 20 nt, Artificial Sequence
  Synthetic
cacaagcccuuuuugugcca

SEQ ID NO: 784859 - RNA, 20 nt, Artificial Sequence
  Synthetic
ccaucaauucuccauugcca

SEQ ID NO: 784860 - RNA, 20 nt, Artificial Sequence
  Synthetic
acuaccugauuucauugcca

SEQ ID NO: 784861 - RNA, 20 nt, Artificial Sequence
  Synthetic
acucuaaaauuauauugcca

SEQ ID NO: 784862 - RNA, 20 nt, Artificial Sequence
  Synthetic
aaaaucauccugacuugcca

SEQ ID NO: 784863 - RNA, 20 nt, Artificial Sequence
  Synthetic
ucucaccuuuugacuugcca

SEQ ID NO: 784864 - RNA, 20 nt, Artificial Sequence
  Synthetic
aaaguuuucagaccuugcca

SEQ ID NO: 784865 - RNA, 20 nt, Artificial Sequence
  Synthetic
uuuuuccaaauuccuugcca

SEQ ID NO: 784866 - RNA, 20 nt, Artificial Sequence
  Synthetic
caaaauaauuuuucuugcca

SEQ ID NO: 784867 - RNA, 20 nt, Artificial Sequence
  Synthetic
aaauaguugcaugguugcca

SEQ ID NO: 784868 - RNA, 20 nt, Artificial Sequence
  Synthetic
ugucucagagacuguugcca

SEQ ID NO: 784869 - RNA, 20 nt, Artificial Sequence
  Synthetic
ugcccaucgaguuguugcca

SEQ ID NO: 784870 - RNA, 20 nt, Artificial Sequence
  Synthetic
agagauuaaauaauuugcca

SEQ ID NO: 784871 - RNA, 20 nt, Artificial Sequence
  Synthetic
acauagguauacauuugcca

SEQ ID NO: 784872 - RNA, 20 nt, Artificial Sequence
  Synthetic
uacuuguuuaacguuugcca

SEQ ID NO: 784873 - RNA, 20 nt, Artificial Sequence
  Synthetic
ccccacauuuuuuuuugcca

SEQ ID NO: 784874 - RNA, 20 nt, Artificial Sequence
  Synthetic
cauucuccuuugaaaaucca

SEQ ID NO: 784875 - RNA, 20 nt, Artificial Sequence
  Synthetic
uguaauucuaauaaaaucca

SEQ ID NO: 784876 - RNA, 20 nt, Artificial Sequence
  Synthetic
uuuauaaucaguaaaaucca

SEQ ID NO: 784877 - RNA, 20 nt, Artificial Sequence
  Synthetic
uugauuuuucuccaaaucca

SEQ ID NO: 784878 - RNA, 20 nt, Artificial Sequence
  Synthetic
ugaauuuuacuugcaaucca

SEQ ID NO: 784879 - RNA, 20 nt, Artificial Sequence
  Synthetic
uuauuucagcauagaaucca

SEQ ID NO: 784880 - RNA, 20 nt, Artificial Sequence
  Synthetic
ugauauuuccuacgaaucca

SEQ ID NO: 784881 - RNA, 20 nt, Artificial Sequence
  Synthetic
uguccccaugacugaaucca

SEQ ID NO: 784882 - RNA, 20 nt, Artificial Sequence
  Synthetic
acuauuucaucgcuaaucca

SEQ ID NO: 784883 - RNA, 20 nt, Artificial Sequence
  Synthetic
aauguacuaugacacaucca

SEQ ID NO: 784884 - RNA, 20 nt, Artificial Sequence
  Synthetic
uuaaaugcaacugacaucca

SEQ ID NO: 784885 - RNA, 20 nt, Artificial Sequence
  Synthetic
ucuguuagcucugccaucca

SEQ ID NO: 784886 - RNA, 20 nt, Artificial Sequence
  Synthetic
auuuaccaaagguccaucca

SEQ ID NO: 784887 - RNA, 20 nt, Artificial Sequence
  Synthetic
accaauauuccuagcaucca

SEQ ID NO: 784888 - RNA, 20 nt, Artificial Sequence
  Synthetic
aaaaugauauaaaucaucca

SEQ ID NO: 784889 - RNA, 20 nt, Artificial Sequence
  Synthetic
uauauauauaaagucaucca

SEQ ID NO: 784890 - RNA, 20 nt, Artificial Sequence
  Synthetic
cuguacaauggagucaucca

SEQ ID NO: 784891 - RNA, 20 nt, Artificial Sequence
  Synthetic
ugggaggauuacuucaucca

SEQ ID NO: 784892 - RNA, 20 nt, Artificial Sequence
  Synthetic
ugugaucucaucuucaucca

SEQ ID NO: 784893 - RNA, 20 nt, Artificial Sequence
  Synthetic
cuuucugaccauuucaucca

SEQ ID NO: 784894 - RNA, 20 nt, Artificial Sequence
  Synthetic
auccaugcaucuuucaucca

SEQ ID NO: 784895 - RNA, 20 nt, Artificial Sequence
  Synthetic
uuucaaggaagacagaucca

SEQ ID NO: 784896 - RNA, 20 nt, Artificial Sequence
  Synthetic
ucaaaaaguagaaugaucca

SEQ ID NO: 784897 - RNA, 20 nt, Artificial Sequence
  Synthetic
augucuuugggaaugaucca

SEQ ID NO: 784898 - RNA, 20 nt, Artificial Sequence
  Synthetic
ccccacccgccccugaucca

SEQ ID NO: 784899 - RNA, 20 nt, Artificial Sequence
  Synthetic
ugaagugacuucuugaucca

SEQ ID NO: 784900 - RNA, 20 nt, Artificial Sequence
  Synthetic
cacccccauuucuugaucca

SEQ ID NO: 784901 - RNA, 20 nt, Artificial Sequence
  Synthetic
caaagggcuaagaauaucca

SEQ ID NO: 784902 - RNA, 20 nt, Artificial Sequence
  Synthetic
auauccaaucagaauaucca

SEQ ID NO: 784903 - RNA, 20 nt, Artificial Sequence
  Synthetic
agcuauuaucuagauaucca

SEQ ID NO: 784904 - RNA, 20 nt, Artificial Sequence
  Synthetic
augccguugguugauaucca

SEQ ID NO: 784905 - RNA, 20 nt, Artificial Sequence
  Synthetic
agugguuaaaaauauaucca

SEQ ID NO: 784906 - RNA, 20 nt, Artificial Sequence
  Synthetic
aucaucaugcacuauaucca

SEQ ID NO: 784907 - RNA, 20 nt, Artificial Sequence
  Synthetic
aagacagcuuuggcuaucca

SEQ ID NO: 784908 - RNA, 20 nt, Artificial Sequence
  Synthetic
caauugucccucaguaucca

SEQ ID NO: 784909 - RNA, 20 nt, Artificial Sequence
  Synthetic
uccaauugcaaugguaucca

SEQ ID NO: 784910 - RNA, 20 nt, Artificial Sequence
  Synthetic
caguuggcccucuguaucca

SEQ ID NO: 784911 - RNA, 20 nt, Artificial Sequence
  Synthetic
cuguaaucuuccuuuaucca

SEQ ID NO: 784912 - RNA, 20 nt, Artificial Sequence
  Synthetic
aaacaggggaauuuuaucca

SEQ ID NO: 784913 - RNA, 20 nt, Artificial Sequence
  Synthetic
accuuggccccuuuuaucca

SEQ ID NO: 784914 - RNA, 20 nt, Artificial Sequence
  Synthetic
caguaacugccucaacucca

SEQ ID NO: 784915 - RNA, 20 nt, Artificial Sequence
  Synthetic
accucuuuugaagaacucca

SEQ ID NO: 784916 - RNA, 20 nt, Artificial Sequence
  Synthetic
acugagagucaggaacucca

SEQ ID NO: 784917 - RNA, 20 nt, Artificial Sequence
  Synthetic
aguauaagcaucuaacucca

SEQ ID NO: 784918 - RNA, 20 nt, Artificial Sequence
  Synthetic
cuaauuucaugguaacucca

SEQ ID NO: 784919 - RNA, 20 nt, Artificial Sequence
  Synthetic
ucuugggccuggacacucca

SEQ ID NO: 784920 - RNA, 20 nt, Artificial Sequence
  Synthetic
uuugugguccaaagacucca

SEQ ID NO: 784921 - RNA, 20 nt, Artificial Sequence
  Synthetic
uuuccucuacacagacucca

SEQ ID NO: 784922 - RNA, 20 nt, Artificial Sequence
  Synthetic
uauuaauacuaaugacucca

SEQ ID NO: 784923 - RNA, 20 nt, Artificial Sequence
  Synthetic
ugccaacuguuaugacucca

SEQ ID NO: 784924 - RNA, 20 nt, Artificial Sequence
  Synthetic
caucuugaucucugacucca

SEQ ID NO: 784925 - RNA, 20 nt, Artificial Sequence
  Synthetic
acuucuuucuuuuuacucca

SEQ ID NO: 784926 - RNA, 20 nt, Artificial Sequence
  Synthetic
agagcauuugccacccucca

SEQ ID NO: 784927 - RNA, 20 nt, Artificial Sequence
  Synthetic
auuuauuucaguacccucca

SEQ ID NO: 784928 - RNA, 20 nt, Artificial Sequence
  Synthetic
cucaggugaucugcccucca

SEQ ID NO: 784929 - RNA, 20 nt, Artificial Sequence
  Synthetic
cucuaccuuccuucccucca

SEQ ID NO: 784930 - RNA, 20 nt, Artificial Sequence
  Synthetic
uugcuaguuggaagccucca

SEQ ID NO: 784931 - RNA, 20 nt, Artificial Sequence
  Synthetic
caccacaaccuaugccucca

SEQ ID NO: 784932 - RNA, 20 nt, Artificial Sequence
  Synthetic
cacuacauagccugccucca

SEQ ID NO: 784933 - RNA, 20 nt, Artificial Sequence
  Synthetic
cacugcaaacucugccucca

SEQ ID NO: 784934 - RNA, 20 nt, Artificial Sequence
  Synthetic
ugaaauucaggaauccucca

SEQ ID NO: 784935 - RNA, 20 nt, Artificial Sequence
  Synthetic
acugauuauaaacuccucca

SEQ ID NO: 784936 - RNA, 20 nt, Artificial Sequence
  Synthetic
uuuuuucuaugacuccucca

SEQ ID NO: 784937 - RNA, 20 nt, Artificial Sequence
  Synthetic
uuuuccuacuuaguccucca

SEQ ID NO: 784938 - RNA, 20 nt, Artificial Sequence
  Synthetic
ccucuagccaccguccucca

SEQ ID NO: 784939 - RNA, 20 nt, Artificial Sequence
  Synthetic
auuuggggcacauuccucca

SEQ ID NO: 784940 - RNA, 20 nt, Artificial Sequence
  Synthetic
ucuucuuaaggcuuccucca

SEQ ID NO: 784941 - RNA, 20 nt, Artificial Sequence
  Synthetic
ccucuaaacgaguuccucca

SEQ ID NO: 784942 - RNA, 20 nt, Artificial Sequence
  Synthetic
ucuauccuuuuguuccucca

SEQ ID NO: 784943 - RNA, 20 nt, Artificial Sequence
  Synthetic
cuggcugagugagagcucca

SEQ ID NO: 784944 - RNA, 20 nt, Artificial Sequence
  Synthetic
uaggaaaagcccuagcucca

SEQ ID NO: 784945 - RNA, 20 nt, Artificial Sequence
  Synthetic
auacagaaaacauggcucca

SEQ ID NO: 784946 - RNA, 20 nt, Artificial Sequence
  Synthetic
aaaaagcccaaacugcucca

SEQ ID NO: 784947 - RNA, 20 nt, Artificial Sequence
  Synthetic
aacacugagaaaaaucucca

SEQ ID NO: 784948 - RNA, 20 nt, Artificial Sequence
  Synthetic
ugcuacagaucuaaucucca

SEQ ID NO: 784949 - RNA, 20 nt, Artificial Sequence
  Synthetic
augaugaauucucaucucca

SEQ ID NO: 784950 - RNA, 20 nt, Artificial Sequence
  Synthetic
uuuuaaaauggcuaucucca

SEQ ID NO: 784951 - RNA, 20 nt, Artificial Sequence
  Synthetic
aucaauuggcuguaucucca

SEQ ID NO: 784952 - RNA, 20 nt, Artificial Sequence
  Synthetic
ucuucauguggaccucucca

SEQ ID NO: 784953 - RNA, 20 nt, Artificial Sequence
  Synthetic
ugagaaaauugcccucucca

SEQ ID NO: 784954 - RNA, 20 nt, Artificial Sequence
  Synthetic
uuguugugaccagcucucca

SEQ ID NO: 784955 - RNA, 20 nt, Artificial Sequence
  Synthetic
uauguucugcaggcucucca

SEQ ID NO: 784956 - RNA, 20 nt, Artificial Sequence
  Synthetic
cacaugacauaaucucucca

SEQ ID NO: 784957 - RNA, 20 nt, Artificial Sequence
  Synthetic
caauacauguggagucucca

SEQ ID NO: 784958 - RNA, 20 nt, Artificial Sequence
  Synthetic
aauuguauacugagucucca

SEQ ID NO: 784959 - RNA, 20 nt, Artificial Sequence
  Synthetic
caauggggaaaaugucucca

SEQ ID NO: 784960 - RNA, 20 nt, Artificial Sequence
  Synthetic
acaaucuggaaaugucucca

SEQ ID NO: 784961 - RNA, 20 nt, Artificial Sequence
  Synthetic
caauggggaagaugucucca

SEQ ID NO: 784962 - RNA, 20 nt, Artificial Sequence
  Synthetic
uuaucuucccaaauucucca

SEQ ID NO: 784963 - RNA, 20 nt, Artificial Sequence
  Synthetic
aacuuuuugauacuucucca

SEQ ID NO: 784964 - RNA, 20 nt, Artificial Sequence
  Synthetic
cucaaaugucuccuucucca

SEQ ID NO: 784965 - RNA, 20 nt, Artificial Sequence
  Synthetic
aauaagggcagaguucucca

SEQ ID NO: 784966 - RNA, 20 nt, Artificial Sequence
  Synthetic
ucguuauuugaauuucucca

SEQ ID NO: 784967 - RNA, 20 nt, Artificial Sequence
  Synthetic
auuucucagugauuucucca

SEQ ID NO: 784968 - RNA, 20 nt, Artificial Sequence
  Synthetic
uaauugagacuauuucucca

SEQ ID NO: 784969 - RNA, 20 nt, Artificial Sequence
  Synthetic
auuuaaaccaccuuucucca

SEQ ID NO: 784970 - RNA, 20 nt, Artificial Sequence
  Synthetic
ugaaugcacccuuuucucca

SEQ ID NO: 784971 - RNA, 20 nt, Artificial Sequence
  Synthetic
cccuugaauguuuuucucca

SEQ ID NO: 784972 - RNA, 20 nt, Artificial Sequence
  Synthetic
cuaaaaacuuaaaaagucca

SEQ ID NO: 784973 - RNA, 20 nt, Artificial Sequence
  Synthetic
ucugggauaggcaaagucca

SEQ ID NO: 784974 - RNA, 20 nt, Artificial Sequence
  Synthetic
cagauugccaaagaagucca

SEQ ID NO: 784975 - RNA, 20 nt, Artificial Sequence
  Synthetic
uacggaggcugagaagucca

SEQ ID NO: 784976 - RNA, 20 nt, Artificial Sequence
  Synthetic
cauuuuuuaggaacagucca

SEQ ID NO: 784977 - RNA, 20 nt, Artificial Sequence
  Synthetic
cccagcacuuugggagucca

SEQ ID NO: 784978 - RNA, 20 nt, Artificial Sequence
  Synthetic
cccaggacuuugggagucca

SEQ ID NO: 784979 - RNA, 20 nt, Artificial Sequence
  Synthetic
aagagcccaggaugagucca

SEQ ID NO: 784980 - RNA, 20 nt, Artificial Sequence
  Synthetic
uauuuuaugaacauagucca

SEQ ID NO: 784981 - RNA, 20 nt, Artificial Sequence
  Synthetic
uuccuauucaggcuagucca

SEQ ID NO: 784982 - RNA, 20 nt, Artificial Sequence
  Synthetic
auuuaacauuuuuuagucca

SEQ ID NO: 784983 - RNA, 20 nt, Artificial Sequence
  Synthetic
uuucgaacucuugacgucca

SEQ ID NO: 784984 - RNA, 20 nt, Artificial Sequence
  Synthetic
aucucacugaagcaggucca

SEQ ID NO: 784985 - RNA, 20 nt, Artificial Sequence
  Synthetic
cucacaaggcagcaggucca

SEQ ID NO: 784986 - RNA, 20 nt, Artificial Sequence
  Synthetic
agccugcacuagacggucca

SEQ ID NO: 784987 - RNA, 20 nt, Artificial Sequence
  Synthetic
ccauccuccaacccggucca

SEQ ID NO: 784988 - RNA, 20 nt, Artificial Sequence
  Synthetic
auaaaauguucaggggucca

SEQ ID NO: 784989 - RNA, 20 nt, Artificial Sequence
  Synthetic
uuaguucuccacugggucca

SEQ ID NO: 784990 - RNA, 20 nt, Artificial Sequence
  Synthetic
agucagcaaacuauggucca

SEQ ID NO: 784991 - RNA, 20 nt, Artificial Sequence
  Synthetic
uugcuggugcugcuggucca

SEQ ID NO: 784992 - RNA, 20 nt, Artificial Sequence
  Synthetic
ccuagaauauaauuggucca

SEQ ID NO: 784993 - RNA, 20 nt, Artificial Sequence
  Synthetic
accaaauauguauuggucca

SEQ ID NO: 784994 - RNA, 20 nt, Artificial Sequence
  Synthetic
aaaaauauuguauuggucca

SEQ ID NO: 784995 - RNA, 20 nt, Artificial Sequence
  Synthetic
caguaucauuagaaugucca

SEQ ID NO: 784996 - RNA, 20 nt, Artificial Sequence
  Synthetic
aaaaucauucuagaugucca

SEQ ID NO: 784997 - RNA, 20 nt, Artificial Sequence
  Synthetic
aaaaacaagauauaugucca

SEQ ID NO: 784998 - RNA, 20 nt, Artificial Sequence
  Synthetic
auugaagaaauuacugucca

SEQ ID NO: 784999 - RNA, 20 nt, Artificial Sequence
  Synthetic
cagucccuucugucugucca

SEQ ID NO: 785000 - RNA, 20 nt, Artificial Sequence
  Synthetic
uguucccgucccugugucca

SEQ ID NO: 785001 - RNA, 20 nt, Artificial Sequence
  Synthetic
uauccacugagcugugucca

SEQ ID NO: 785002 - RNA, 20 nt, Artificial Sequence
  Synthetic
aagguuaaauaauuugucca

SEQ ID NO: 785003 - RNA, 20 nt, Artificial Sequence
  Synthetic
ugaaaugacuccuuugucca

SEQ ID NO: 785004 - RNA, 20 nt, Artificial Sequence
  Synthetic
aaaaacugauauaaauucca

SEQ ID NO: 785005 - RNA, 20 nt, Artificial Sequence
  Synthetic
cuguguucacaagaauucca

SEQ ID NO: 785006 - RNA, 20 nt, Artificial Sequence
  Synthetic
uuaugaaguaacuaauucca

SEQ ID NO: 785007 - RNA, 20 nt, Artificial Sequence
  Synthetic
augaaaauucauuaauucca

SEQ ID NO: 785008 - RNA, 20 nt, Artificial Sequence
  Synthetic
cuccacauuucuuaauucca

SEQ ID NO: 785009 - RNA, 20 nt, Artificial Sequence
  Synthetic
ugugccuucaauacauucca

SEQ ID NO: 785010 - RNA, 20 nt, Artificial Sequence
  Synthetic
cugaauagccauucauucca

SEQ ID NO: 785011 - RNA, 20 nt, Artificial Sequence
  Synthetic
uucacucugauaagauucca

SEQ ID NO: 785012 - RNA, 20 nt, Artificial Sequence
  Synthetic
uuaaauuucaaaugauucca

SEQ ID NO: 785013 - RNA, 20 nt, Artificial Sequence
  Synthetic
aaaacugaauuaugauucca

SEQ ID NO: 785014 - RNA, 20 nt, Artificial Sequence
  Synthetic
uggucuugaauuugauucca

SEQ ID NO: 785015 - RNA, 20 nt, Artificial Sequence
  Synthetic
uaaggcugaaaaauauucca

SEQ ID NO: 785016 - RNA, 20 nt, Artificial Sequence
  Synthetic
accaaacacacaauauucca

SEQ ID NO: 785017 - RNA, 20 nt, Artificial Sequence
  Synthetic
uauggcugaguaauauucca

SEQ ID NO: 785018 - RNA, 20 nt, Artificial Sequence
  Synthetic
ucuaguuuuccuauauucca

SEQ ID NO: 785019 - RNA, 20 nt, Artificial Sequence
  Synthetic
uauggcugcacaguauucca

SEQ ID NO: 785020 - RNA, 20 nt, Artificial Sequence
  Synthetic
uauggcuucacaguauucca

SEQ ID NO: 785021 - RNA, 20 nt, Artificial Sequence
  Synthetic
cauggccacauaguauucca

SEQ ID NO: 785022 - RNA, 20 nt, Artificial Sequence
  Synthetic
uauggcugcauaguauucca

SEQ ID NO: 785023 - RNA, 20 nt, Artificial Sequence
  Synthetic
ucuggcugcauaguauucca

SEQ ID NO: 785024 - RNA, 20 nt, Artificial Sequence
  Synthetic
uaugguugcauaguauucca

SEQ ID NO: 785025 - RNA, 20 nt, Artificial Sequence
  Synthetic
uauggauucauaguauucca

SEQ ID NO: 785026 - RNA, 20 nt, Artificial Sequence
  Synthetic
uauggcuacguaguauucca

SEQ ID NO: 785027 - RNA, 20 nt, Artificial Sequence
  Synthetic
uaugguugcguaguauucca

SEQ ID NO: 785028 - RNA, 20 nt, Artificial Sequence
  Synthetic
uaugacuguguaguauucca

SEQ ID NO: 785029 - RNA, 20 nt, Artificial Sequence
  Synthetic
uauggcuguguaguauucca

SEQ ID NO: 785030 - RNA, 20 nt, Artificial Sequence
  Synthetic
uuuaagauucaauuauucca

SEQ ID NO: 785031 - RNA, 20 nt, Artificial Sequence
  Synthetic
auguauauagguuuauucca

SEQ ID NO: 785032 - RNA, 20 nt, Artificial Sequence
  Synthetic
uuuguuuugacaaacuucca

SEQ ID NO: 785033 - RNA, 20 nt, Artificial Sequence
  Synthetic
cuacaaaugugaaacuucca

SEQ ID NO: 785034 - RNA, 20 nt, Artificial Sequence
  Synthetic
cuaaaauucaauaacuucca

SEQ ID NO: 785035 - RNA, 20 nt, Artificial Sequence
  Synthetic
cuauguguuaggcacuucca

SEQ ID NO: 785036 - RNA, 20 nt, Artificial Sequence
  Synthetic
aacacuugucugcacuucca

SEQ ID NO: 785037 - RNA, 20 nt, Artificial Sequence
  Synthetic
uguauuuuggcauacuucca

SEQ ID NO: 785038 - RNA, 20 nt, Artificial Sequence
  Synthetic
uauuuaaauguauacuucca

SEQ ID NO: 785039 - RNA, 20 nt, Artificial Sequence
  Synthetic
caggagaaugguuacuucca

SEQ ID NO: 785040 - RNA, 20 nt, Artificial Sequence
  Synthetic
ccuucuuuuuccaccuucca

SEQ ID NO: 785041 - RNA, 20 nt, Artificial Sequence
  Synthetic
uuaucucacugcaccuucca

SEQ ID NO: 785042 - RNA, 20 nt, Artificial Sequence
  Synthetic
agucucucccuggccuucca

SEQ ID NO: 785043 - RNA, 20 nt, Artificial Sequence
  Synthetic
auuacaaauguugccuucca

SEQ ID NO: 785044 - RNA, 20 nt, Artificial Sequence
  Synthetic
uuuggaagcagguccuucca

SEQ ID NO: 785045 - RNA, 20 nt, Artificial Sequence
  Synthetic
acuucaguuaaaagcuucca

SEQ ID NO: 785046 - RNA, 20 nt, Artificial Sequence
  Synthetic
ccuuaucauagcagcuucca

SEQ ID NO: 785047 - RNA, 20 nt, Artificial Sequence
  Synthetic
aaacuguagcagagcuucca

SEQ ID NO: 785048 - RNA, 20 nt, Artificial Sequence
  Synthetic
ugagugauggguggcuucca

SEQ ID NO: 785049 - RNA, 20 nt, Artificial Sequence
  Synthetic
uacauuugggaaugcuucca

SEQ ID NO: 785050 - RNA, 20 nt, Artificial Sequence
  Synthetic
aaaucacaacauaucuucca

SEQ ID NO: 785051 - RNA, 20 nt, Artificial Sequence
  Synthetic
uaguggaacuuucucuucca

SEQ ID NO: 785052 - RNA, 20 nt, Artificial Sequence
  Synthetic
uugucccaucaauucuucca

SEQ ID NO: 785053 - RNA, 20 nt, Artificial Sequence
  Synthetic
aauucuuauuuguucuucca

SEQ ID NO: 785054 - RNA, 20 nt, Artificial Sequence
  Synthetic
uaaguuucugauuucuucca

SEQ ID NO: 785055 - RNA, 20 nt, Artificial Sequence
  Synthetic
ugguaagguuaaaaguucca

SEQ ID NO: 785056 - RNA, 20 nt, Artificial Sequence
  Synthetic
auaauuuuuuuaaaguucca

SEQ ID NO: 785057 - RNA, 20 nt, Artificial Sequence
  Synthetic
ccaaacacucagaaguucca

SEQ ID NO: 785058 - RNA, 20 nt, Artificial Sequence
  Synthetic
caguaacucauucaguucca

SEQ ID NO: 785059 - RNA, 20 nt, Artificial Sequence
  Synthetic
ucaaggucagacagguucca

SEQ ID NO: 785060 - RNA, 20 nt, Artificial Sequence
  Synthetic
agacagaugaagagguucca

SEQ ID NO: 785061 - RNA, 20 nt, Artificial Sequence
  Synthetic
cuugcaaaccugggguucca

SEQ ID NO: 785062 - RNA, 20 nt, Artificial Sequence
  Synthetic
aggaauuaugugguguucca

SEQ ID NO: 785063 - RNA, 20 nt, Artificial Sequence
  Synthetic
uuccagaauuauguguucca

SEQ ID NO: 785064 - RNA, 20 nt, Artificial Sequence
  Synthetic
accccaaacucaaauuucca

SEQ ID NO: 785065 - RNA, 20 nt, Artificial Sequence
  Synthetic
acagcugaaggcaauuucca

SEQ ID NO: 785066 - RNA, 20 nt, Artificial Sequence
  Synthetic
ugaaucagagucaauuucca

SEQ ID NO: 785067 - RNA, 20 nt, Artificial Sequence
  Synthetic
auuaaaguguugaauuucca

SEQ ID NO: 785068 - RNA, 20 nt, Artificial Sequence
  Synthetic
aucauguuaucacauuucca

SEQ ID NO: 785069 - RNA, 20 nt, Artificial Sequence
  Synthetic
agauagcaguuacauuucca

SEQ ID NO: 785070 - RNA, 20 nt, Artificial Sequence
  Synthetic
uuugucaagaaucauuucca

SEQ ID NO: 785071 - RNA, 20 nt, Artificial Sequence
  Synthetic
caguuaauuaaugauuucca

SEQ ID NO: 785072 - RNA, 20 nt, Artificial Sequence
  Synthetic
ucuaucuuagucuauuucca

SEQ ID NO: 785073 - RNA, 20 nt, Artificial Sequence
  Synthetic
aucacaagguuuacuuucca

SEQ ID NO: 785074 - RNA, 20 nt, Artificial Sequence
  Synthetic
acauaaacuccaccuuucca

SEQ ID NO: 785075 - RNA, 20 nt, Artificial Sequence
  Synthetic
ugacuucaguccccuuucca

SEQ ID NO: 785076 - RNA, 20 nt, Artificial Sequence
  Synthetic
acaccucugcuuccuuucca

SEQ ID NO: 785077 - RNA, 20 nt, Artificial Sequence
  Synthetic
aagcuauguuuaucuuucca

SEQ ID NO: 785078 - RNA, 20 nt, Artificial Sequence
  Synthetic
aguaguguuuguaguuucca

SEQ ID NO: 785079 - RNA, 20 nt, Artificial Sequence
  Synthetic
aaaauauaggcagguuucca

SEQ ID NO: 785080 - RNA, 20 nt, Artificial Sequence
  Synthetic
uuaccuaucagugguuucca

SEQ ID NO: 785081 - RNA, 20 nt, Artificial Sequence
  Synthetic
aaauagaauggugguuucca

SEQ ID NO: 785082 - RNA, 20 nt, Artificial Sequence
  Synthetic
acccuuuauugugguuucca

SEQ ID NO: 785083 - RNA, 20 nt, Artificial Sequence
  Synthetic
cuaaucuucagauguuucca

SEQ ID NO: 785084 - RNA, 20 nt, Artificial Sequence
  Synthetic
cuaaguguuagcuguuucca

SEQ ID NO: 785085 - RNA, 20 nt, Artificial Sequence
  Synthetic
ucuuaaaguuaguguuucca

SEQ ID NO: 785086 - RNA, 20 nt, Artificial Sequence
  Synthetic
acacaaaaaagaauuuucca

SEQ ID NO: 785087 - RNA, 20 nt, Artificial Sequence
  Synthetic
uuauccuggaggauuuucca

SEQ ID NO: 785088 - RNA, 20 nt, Artificial Sequence
  Synthetic
aauagcaauugacuuuucca

SEQ ID NO: 785089 - RNA, 20 nt, Artificial Sequence
  Synthetic
ugcucuuaaaaccuuuucca

SEQ ID NO: 785090 - RNA, 20 nt, Artificial Sequence
  Synthetic
ccagauuuguagcuuuucca

SEQ ID NO: 785091 - RNA, 20 nt, Artificial Sequence
  Synthetic
agguugaaucuucuuuucca

SEQ ID NO: 785092 - RNA, 20 nt, Artificial Sequence
  Synthetic
agaggaagacaauuuuucca

SEQ ID NO: 785093 - RNA, 20 nt, Artificial Sequence
  Synthetic
aucucaaagaauuuuuucca

SEQ ID NO: 785094 - RNA, 20 nt, Artificial Sequence
  Synthetic
uuuucccugucuuuuuucca

SEQ ID NO: 785095 - RNA, 20 nt, Artificial Sequence
  Synthetic
uaauagguucuuuuuuucca

SEQ ID NO: 785096 - RNA, 20 nt, Artificial Sequence
  Synthetic
uuuuuuuuuuuuuuuuucca

SEQ ID NO: 785097 - RNA, 20 nt, Artificial Sequence
  Synthetic
auggaaagaaaaaaaaagca

SEQ ID NO: 785098 - RNA, 20 nt, Artificial Sequence
  Synthetic
aguaggauaaaaaaaaagca

SEQ ID NO: 785099 - RNA, 20 nt, Artificial Sequence
  Synthetic
uuagaagggggaaaaaagca

SEQ ID NO: 785100 - RNA, 20 nt, Artificial Sequence
  Synthetic
acaugacugauaaaaaagca

SEQ ID NO: 785101 - RNA, 20 nt, Artificial Sequence
  Synthetic
cuuaugggugauaaaaagca

SEQ ID NO: 785102 - RNA, 20 nt, Artificial Sequence
  Synthetic
uccuuugugaaccaaaagca

SEQ ID NO: 785103 - RNA, 20 nt, Artificial Sequence
  Synthetic
ugucuaaaacaccaaaagca

SEQ ID NO: 785104 - RNA, 20 nt, Artificial Sequence
  Synthetic
aguauaaauagccaaaagca

SEQ ID NO: 785105 - RNA, 20 nt, Artificial Sequence
  Synthetic
ucugggauacagcaaaagca

SEQ ID NO: 785106 - RNA, 20 nt, Artificial Sequence
  Synthetic
uaaaacagcaugcaaaagca

SEQ ID NO: 785107 - RNA, 20 nt, Artificial Sequence
  Synthetic
auuucauccaaggaaaagca

SEQ ID NO: 785108 - RNA, 20 nt, Artificial Sequence
  Synthetic
uucuauuauaaugaaaagca

SEQ ID NO: 785109 - RNA, 20 nt, Artificial Sequence
  Synthetic
uguuuuggcuaugaaaagca

SEQ ID NO: 785110 - RNA, 20 nt, Artificial Sequence
  Synthetic
caugcgcucagugaaaagca

SEQ ID NO: 785111 - RNA, 20 nt, Artificial Sequence
  Synthetic
agggaaucuauugaaaagca

SEQ ID NO: 785112 - RNA, 20 nt, Artificial Sequence
  Synthetic
uggaagucuauugaaaagca

SEQ ID NO: 785113 - RNA, 20 nt, Artificial Sequence
  Synthetic
agugugaagguugaaaagca

SEQ ID NO: 785114 - RNA, 20 nt, Artificial Sequence
  Synthetic
caucuguguuuugaaaagca

SEQ ID NO: 785115 - RNA, 20 nt, Artificial Sequence
  Synthetic
uuuauaaauauguaaaagca

SEQ ID NO: 785116 - RNA, 20 nt, Artificial Sequence
  Synthetic
caaaucaaugccacaaagca

SEQ ID NO: 785117 - RNA, 20 nt, Artificial Sequence
  Synthetic
uuucuuuaagagacaaagca

SEQ ID NO: 785118 - RNA, 20 nt, Artificial Sequence
  Synthetic
uaaaaagcuucuacaaagca

SEQ ID NO: 785119 - RNA, 20 nt, Artificial Sequence
  Synthetic
ucaauauuagauccaaagca

SEQ ID NO: 785120 - RNA, 20 nt, Artificial Sequence
  Synthetic
ucgagaucauaagcaaagca

SEQ ID NO: 785121 - RNA, 20 nt, Artificial Sequence
  Synthetic
aagguucucuaagcaaagca

SEQ ID NO: 785122 - RNA, 20 nt, Artificial Sequence
  Synthetic
cacugggauuaggcaaagca

SEQ ID NO: 785123 - RNA, 20 nt, Artificial Sequence
  Synthetic
auggcaaaaggaucaaagca

SEQ ID NO: 785124 - RNA, 20 nt, Artificial Sequence
  Synthetic
aaugaagggaccucaaagca

SEQ ID NO: 785125 - RNA, 20 nt, Artificial Sequence
  Synthetic
cugugaagcucuucaaagca

SEQ ID NO: 785126 - RNA, 20 nt, Artificial Sequence
  Synthetic
uuuuacaacugaagaaagca

SEQ ID NO: 785127 - RNA, 20 nt, Artificial Sequence
  Synthetic
uagcucugaaucagaaagca

SEQ ID NO: 785128 - RNA, 20 nt, Artificial Sequence
  Synthetic
aaagggcauaguagaaagca

SEQ ID NO: 785129 - RNA, 20 nt, Artificial Sequence
  Synthetic
cuagccugugguagaaagca

SEQ ID NO: 785130 - RNA, 20 nt, Artificial Sequence
  Synthetic
aaaaauaaaugaggaaagca

SEQ ID NO: 785131 - RNA, 20 nt, Artificial Sequence
  Synthetic
augaaccuauguggaaagca

SEQ ID NO: 785132 - RNA, 20 nt, Artificial Sequence
  Synthetic
caaaaugaagaaugaaagca

SEQ ID NO: 785133 - RNA, 20 nt, Artificial Sequence
  Synthetic
aaaaugauucaaauaaagca

SEQ ID NO: 785134 - RNA, 20 nt, Artificial Sequence
  Synthetic
ccagacacuacaauaaagca

SEQ ID NO: 785135 - RNA, 20 nt, Artificial Sequence
  Synthetic
ugaggagcaaaacuaaagca

SEQ ID NO: 785136 - RNA, 20 nt, Artificial Sequence
  Synthetic
uguaaggggcagguaaagca

SEQ ID NO: 785137 - RNA, 20 nt, Artificial Sequence
  Synthetic
cccuaaguacaauuaaagca

SEQ ID NO: 785138 - RNA, 20 nt, Artificial Sequence
  Synthetic
augauugaagcauuaaagca

SEQ ID NO: 785139 - RNA, 20 nt, Artificial Sequence
  Synthetic
augugcaguguguuaaagca

SEQ ID NO: 785140 - RNA, 20 nt, Artificial Sequence
  Synthetic
ccacugaaagguuuaaagca

SEQ ID NO: 785141 - RNA, 20 nt, Artificial Sequence
  Synthetic
aaaguuggcauuuuaaagca

SEQ ID NO: 785142 - RNA, 20 nt, Artificial Sequence
  Synthetic
uagaauuaauuuuuaaagca

SEQ ID NO: 785143 - RNA, 20 nt, Artificial Sequence
  Synthetic
aguaaguuuuuuaacaagca

SEQ ID NO: 785144 - RNA, 20 nt, Artificial Sequence
  Synthetic
aaaaaaagaaugcacaagca

SEQ ID NO: 785145 - RNA, 20 nt, Artificial Sequence
  Synthetic
agcagcaucaaagacaagca

SEQ ID NO: 785146 - RNA, 20 nt, Artificial Sequence
  Synthetic
aaaaaaaaaaaugacaagca

SEQ ID NO: 785147 - RNA, 20 nt, Artificial Sequence
  Synthetic
uccucaguuaagaccaagca

SEQ ID NO: 785148 - RNA, 20 nt, Artificial Sequence
  Synthetic
ugacccaccaggcccaagca

SEQ ID NO: 785149 - RNA, 20 nt, Artificial Sequence
  Synthetic
uaggugcuccuggccaagca

SEQ ID NO: 785150 - RNA, 20 nt, Artificial Sequence
  Synthetic
agcuagaaagcaagcaagca

SEQ ID NO: 785151 - RNA, 20 nt, Artificial Sequence
  Synthetic
ucucccuugccaggcaagca

SEQ ID NO: 785152 - RNA, 20 nt, Artificial Sequence
  Synthetic
accuaaagauguuucaagca

SEQ ID NO: 785153 - RNA, 20 nt, Artificial Sequence
  Synthetic
ccacauuauauuuucaagca

SEQ ID NO: 785154 - RNA, 20 nt, Artificial Sequence
  Synthetic
uguucuaagcaaaagaagca

SEQ ID NO: 785155 - RNA, 20 nt, Artificial Sequence
  Synthetic
aacuacugugugaagaagca

SEQ ID NO: 785156 - RNA, 20 nt, Artificial Sequence
  Synthetic
aguuaacuuauuaagaagca

SEQ ID NO: 785157 - RNA, 20 nt, Artificial Sequence
  Synthetic
acauuaaauuuuaagaagca

SEQ ID NO: 785158 - RNA, 20 nt, Artificial Sequence
  Synthetic
ccacagagggcgcagaagca

SEQ ID NO: 785159 - RNA, 20 nt, Artificial Sequence
  Synthetic
auaacauauggucagaagca

SEQ ID NO: 785160 - RNA, 20 nt, Artificial Sequence
  Synthetic
uaccuggccuucuagaagca

SEQ ID NO: 785161 - RNA, 20 nt, Artificial Sequence
  Synthetic
aacggccaucauuagaagca

SEQ ID NO: 785162 - RNA, 20 nt, Artificial Sequence
  Synthetic
uugaaugggagacggaagca

SEQ ID NO: 785163 - RNA, 20 nt, Artificial Sequence
  Synthetic
ucauguccuuugcggaagca

SEQ ID NO: 785164 - RNA, 20 nt, Artificial Sequence
  Synthetic
uugaaggaaaaauggaagca

SEQ ID NO: 785165 - RNA, 20 nt, Artificial Sequence
  Synthetic
uugcaggcuuaauggaagca

SEQ ID NO: 785166 - RNA, 20 nt, Artificial Sequence
  Synthetic
cuauauuuacuauggaagca

SEQ ID NO: 785167 - RNA, 20 nt, Artificial Sequence
  Synthetic
cccacgaaagcguggaagca

SEQ ID NO: 785168 - RNA, 20 nt, Artificial Sequence
  Synthetic
cagaggaaaaaaaugaagca

SEQ ID NO: 785169 - RNA, 20 nt, Artificial Sequence
  Synthetic
acagauaagaaaaugaagca

SEQ ID NO: 785170 - RNA, 20 nt, Artificial Sequence
  Synthetic
uagacaaggaaaaugaagca

SEQ ID NO: 785171 - RNA, 20 nt, Artificial Sequence
  Synthetic
ccuuauaaaauaaugaagca

SEQ ID NO: 785172 - RNA, 20 nt, Artificial Sequence
  Synthetic
agcacagccaccaugaagca

SEQ ID NO: 785173 - RNA, 20 nt, Artificial Sequence
  Synthetic
aggcaguggacagugaagca

SEQ ID NO: 785174 - RNA, 20 nt, Artificial Sequence
  Synthetic
uaucuucuaaaauugaagca

SEQ ID NO: 785175 - RNA, 20 nt, Artificial Sequence
  Synthetic
agacacgcugaauugaagca

SEQ ID NO: 785176 - RNA, 20 nt, Artificial Sequence
  Synthetic
uacuaaauggaaaauaagca

SEQ ID NO: 785177 - RNA, 20 nt, Artificial Sequence
  Synthetic
acuuacacuuaaaauaagca

SEQ ID NO: 785178 - RNA, 20 nt, Artificial Sequence
  Synthetic
ugucacccagauaauaagca

SEQ ID NO: 785179 - RNA, 20 nt, Artificial Sequence
  Synthetic
auucuuccuuuccauaagca

SEQ ID NO: 785180 - RNA, 20 nt, Artificial Sequence
  Synthetic
aacaaaucacaagauaagca

SEQ ID NO: 785181 - RNA, 20 nt, Artificial Sequence
  Synthetic
uuacauauuacagauaagca

SEQ ID NO: 785182 - RNA, 20 nt, Artificial Sequence
  Synthetic
aguguagagucauauaagca

SEQ ID NO: 785183 - RNA, 20 nt, Artificial Sequence
  Synthetic
auguccucuuuauauaagca

SEQ ID NO: 785184 - RNA, 20 nt, Artificial Sequence
  Synthetic
uucaugagagauuauaagca

SEQ ID NO: 785185 - RNA, 20 nt, Artificial Sequence
  Synthetic
uuacagagaacaacuaagca

SEQ ID NO: 785186 - RNA, 20 nt, Artificial Sequence
  Synthetic
aucacagugucuccuaagca

SEQ ID NO: 785187 - RNA, 20 nt, Artificial Sequence
  Synthetic
ucauagccuaguucuaagca

SEQ ID NO: 785188 - RNA, 20 nt, Artificial Sequence
  Synthetic
cuagcaauaagcaguaagca

SEQ ID NO: 785189 - RNA, 20 nt, Artificial Sequence
  Synthetic
cuagcaguaagcaguaagca

SEQ ID NO: 785190 - RNA, 20 nt, Artificial Sequence
  Synthetic
acauaugcccucaguaagca

SEQ ID NO: 785191 - RNA, 20 nt, Artificial Sequence
  Synthetic
aacuguaauuuuaguaagca

SEQ ID NO: 785192 - RNA, 20 nt, Artificial Sequence
  Synthetic
auuaauaacucacguaagca

SEQ ID NO: 785193 - RNA, 20 nt, Artificial Sequence
  Synthetic
aacaguguugcauguaagca

SEQ ID NO: 785194 - RNA, 20 nt, Artificial Sequence
  Synthetic
aaauauccaugacuuaagca

SEQ ID NO: 785195 - RNA, 20 nt, Artificial Sequence
  Synthetic
ccagaaucaauccuuaagca

SEQ ID NO: 785196 - RNA, 20 nt, Artificial Sequence
  Synthetic
caugagugggucuuuaagca

SEQ ID NO: 785197 - RNA, 20 nt, Artificial Sequence
  Synthetic
cuacaguaaccaaaacagca

SEQ ID NO: 785198 - RNA, 20 nt, Artificial Sequence
  Synthetic
cuacgguaaccaaaacagca

SEQ ID NO: 785199 - RNA, 20 nt, Artificial Sequence
  Synthetic
cuacuguaaccaaaacagca

SEQ ID NO: 785200 - RNA, 20 nt, Artificial Sequence
  Synthetic
cuauaauaaucaaaacagca

SEQ ID NO: 785201 - RNA, 20 nt, Artificial Sequence
  Synthetic
uaucacaugggaaaacagca

SEQ ID NO: 785202 - RNA, 20 nt, Artificial Sequence
  Synthetic
auggcuuacauaaaacagca

SEQ ID NO: 785203 - RNA, 20 nt, Artificial Sequence
  Synthetic
uggcuggcauccaaacagca

SEQ ID NO: 785204 - RNA, 20 nt, Artificial Sequence
  Synthetic
ucacuaucacgacaacagca

SEQ ID NO: 785205 - RNA, 20 nt, Artificial Sequence
  Synthetic
uuacuaucacgagaacagca

SEQ ID NO: 785206 - RNA, 20 nt, Artificial Sequence
  Synthetic
ucacuaucaggagaacagca

SEQ ID NO: 785207 - RNA, 20 nt, Artificial Sequence
  Synthetic
ucacuaucaugagaacagca

SEQ ID NO: 785208 - RNA, 20 nt, Artificial Sequence
  Synthetic
ccgcuaucaugagaacagca

SEQ ID NO: 785209 - RNA, 20 nt, Artificial Sequence
  Synthetic
aguggagagugagaacagca

SEQ ID NO: 785210 - RNA, 20 nt, Artificial Sequence
  Synthetic
uuuuggcagguagaacagca

SEQ ID NO: 785211 - RNA, 20 nt, Artificial Sequence
  Synthetic
agggaagcaucguaacagca

SEQ ID NO: 785212 - RNA, 20 nt, Artificial Sequence
  Synthetic
aaaaaaaaaaaaacacagca

SEQ ID NO: 785213 - RNA, 20 nt, Artificial Sequence
  Synthetic
uaguuuuccaguacacagca

SEQ ID NO: 785214 - RNA, 20 nt, Artificial Sequence
  Synthetic
aaacuggggugaccacagca

SEQ ID NO: 785215 - RNA, 20 nt, Artificial Sequence
  Synthetic
uugggaguaaaagcacagca

SEQ ID NO: 785216 - RNA, 20 nt, Artificial Sequence
  Synthetic
ucaucugagagaucacagca

SEQ ID NO: 785217 - RNA, 20 nt, Artificial Sequence
  Synthetic
aagcucacucagggacagca

SEQ ID NO: 785218 - RNA, 20 nt, Artificial Sequence
  Synthetic
aaugaaaaucuuugacagca

SEQ ID NO: 785219 - RNA, 20 nt, Artificial Sequence
  Synthetic
cguuuccugucauuacagca

SEQ ID NO: 785220 - RNA, 20 nt, Artificial Sequence
  Synthetic
acuauuaaaauauuacagca

SEQ ID NO: 785221 - RNA, 20 nt, Artificial Sequence
  Synthetic
uagcacaucucuuuacagca

SEQ ID NO: 785222 - RNA, 20 nt, Artificial Sequence
  Synthetic
cugcacaucucuuuacagca

SEQ ID NO: 785223 - RNA, 20 nt, Artificial Sequence
  Synthetic
ugcaagugugagaaccagca

SEQ ID NO: 785224 - RNA, 20 nt, Artificial Sequence
  Synthetic
augggugcagcacaccagca

SEQ ID NO: 785225 - RNA, 20 nt, Artificial Sequence
  Synthetic
uucuaaaugucagaccagca

SEQ ID NO: 785226 - RNA, 20 nt, Artificial Sequence
  Synthetic
acagauccagcaacccagca

SEQ ID NO: 785227 - RNA, 20 nt, Artificial Sequence
  Synthetic
ucagaaagcuccacccagca

SEQ ID NO: 785228 - RNA, 20 nt, Artificial Sequence
  Synthetic
augagccaccucacccagca

SEQ ID NO: 785229 - RNA, 20 nt, Artificial Sequence
  Synthetic
aaugacacuguaccccagca

SEQ ID NO: 785230 - RNA, 20 nt, Artificial Sequence
  Synthetic
cgguaaagaagggcccagca

SEQ ID NO: 785231 - RNA, 20 nt, Artificial Sequence
  Synthetic
ugacagacauaaucccagca

SEQ ID NO: 785232 - RNA, 20 nt, Artificial Sequence
  Synthetic
cugggagacaccucccagca

SEQ ID NO: 785233 - RNA, 20 nt, Artificial Sequence
  Synthetic
cucuaucuucaaagccagca

SEQ ID NO: 785234 - RNA, 20 nt, Artificial Sequence
  Synthetic
aaaaaaaaaacaggccagca

SEQ ID NO: 785235 - RNA, 20 nt, Artificial Sequence
  Synthetic
caagaccagccuggccagca

SEQ ID NO: 785236 - RNA, 20 nt, Artificial Sequence
  Synthetic
agagagaaugagugccagca

SEQ ID NO: 785237 - RNA, 20 nt, Artificial Sequence
  Synthetic
agggagaaugagugccagca

SEQ ID NO: 785238 - RNA, 20 nt, Artificial Sequence
  Synthetic
aagcaccaucaucuccagca

SEQ ID NO: 785239 - RNA, 20 nt, Artificial Sequence
  Synthetic
aucacaacuccucuccagca

SEQ ID NO: 785240 - RNA, 20 nt, Artificial Sequence
  Synthetic
uuagugguggauguccagca

SEQ ID NO: 785241 - RNA, 20 nt, Artificial Sequence
  Synthetic
ugagacuccacaaagcagca

SEQ ID NO: 785242 - RNA, 20 nt, Artificial Sequence
  Synthetic
cuaucauaagaacagcagca

SEQ ID NO: 785243 - RNA, 20 nt, Artificial Sequence
  Synthetic
caacacaguucccagcagca

SEQ ID NO: 785244 - RNA, 20 nt, Artificial Sequence
  Synthetic
uaguugguaaagcagcagca

SEQ ID NO: 785245 - RNA, 20 nt, Artificial Sequence
  Synthetic
uuagcucauuuagagcagca

SEQ ID NO: 785246 - RNA, 20 nt, Artificial Sequence
  Synthetic
uugaacaaacaggagcagca

SEQ ID NO: 785247 - RNA, 20 nt, Artificial Sequence
  Synthetic
aagagugaggaguagcagca

SEQ ID NO: 785248 - RNA, 20 nt, Artificial Sequence
  Synthetic
uccucauccuuugggcagca

SEQ ID NO: 785249 - RNA, 20 nt, Artificial Sequence
  Synthetic
acacauucuacauggcagca

SEQ ID NO: 785250 - RNA, 20 nt, Artificial Sequence
  Synthetic
uaccauuggaacuggcagca

SEQ ID NO: 785251 - RNA, 20 nt, Artificial Sequence
  Synthetic
cccuucugcugugugcagca

SEQ ID NO: 785252 - RNA, 20 nt, Artificial Sequence
  Synthetic
aauuguccugaguugcagca

SEQ ID NO: 785253 - RNA, 20 nt, Artificial Sequence
  Synthetic
uuaagaaaguaaaaucagca

SEQ ID NO: 785254 - RNA, 20 nt, Artificial Sequence
  Synthetic
aucaaccucacuaaucagca

SEQ ID NO: 785255 - RNA, 20 nt, Artificial Sequence
  Synthetic
caucaaaaguaugaucagca

SEQ ID NO: 785256 - RNA, 20 nt, Artificial Sequence
  Synthetic
agguccucugauuaucagca

SEQ ID NO: 785257 - RNA, 20 nt, Artificial Sequence
  Synthetic
agcaaccugcuuuaucagca

SEQ ID NO: 785258 - RNA, 20 nt, Artificial Sequence
  Synthetic
uuugucuaaugaacucagca

SEQ ID NO: 785259 - RNA, 20 nt, Artificial Sequence
  Synthetic
cugucaguuguaucucagca

SEQ ID NO: 785260 - RNA, 20 nt, Artificial Sequence
  Synthetic
ucacuggaaggcucucagca

SEQ ID NO: 785261 - RNA, 20 nt, Artificial Sequence
  Synthetic
agggauaugcucucucagca

SEQ ID NO: 785262 - RNA, 20 nt, Artificial Sequence
  Synthetic
cugucagcugugucucagca

SEQ ID NO: 785263 - RNA, 20 nt, Artificial Sequence
  Synthetic
ucagagccacaaggucagca

SEQ ID NO: 785264 - RNA, 20 nt, Artificial Sequence
  Synthetic
caauagaacauaugucagca

SEQ ID NO: 785265 - RNA, 20 nt, Artificial Sequence
  Synthetic
auguuuaucuucugucagca

SEQ ID NO: 785266 - RNA, 20 nt, Artificial Sequence
  Synthetic
aaaagagcauaucuucagca

SEQ ID NO: 785267 - RNA, 20 nt, Artificial Sequence
  Synthetic
aauugacacacaguucagca

SEQ ID NO: 785268 - RNA, 20 nt, Artificial Sequence
  Synthetic
aauugacucacaguucagca

SEQ ID NO: 785269 - RNA, 20 nt, Artificial Sequence
  Synthetic
aauugacucauaguucagca

SEQ ID NO: 785270 - RNA, 20 nt, Artificial Sequence
  Synthetic
acauguacauuauuucagca

SEQ ID NO: 785271 - RNA, 20 nt, Artificial Sequence
  Synthetic
aacggagauaucuuucagca

SEQ ID NO: 785272 - RNA, 20 nt, Artificial Sequence
  Synthetic
aaaucauccccaaaagagca

SEQ ID NO: 785273 - RNA, 20 nt, Artificial Sequence
  Synthetic
uaaaagggcaaggaagagca

SEQ ID NO: 785274 - RNA, 20 nt, Artificial Sequence
  Synthetic
aacauguuauaugaagagca

SEQ ID NO: 785275 - RNA, 20 nt, Artificial Sequence
  Synthetic
uucuucuccagugaagagca

SEQ ID NO: 785276 - RNA, 20 nt, Artificial Sequence
  Synthetic
aagugaaguugcuaagagca

SEQ ID NO: 785277 - RNA, 20 nt, Artificial Sequence
  Synthetic
ccagccugggugacagagca

SEQ ID NO: 785278 - RNA, 20 nt, Artificial Sequence
  Synthetic
aaaaugccugguacagagca

SEQ ID NO: 785279 - RNA, 20 nt, Artificial Sequence
  Synthetic
ccaaagccuaauccagagca

SEQ ID NO: 785280 - RNA, 20 nt, Artificial Sequence
  Synthetic
augagaacaaaaagagagca

SEQ ID NO: 785281 - RNA, 20 nt, Artificial Sequence
  Synthetic
aaauggcgaacaggagagca

SEQ ID NO: 785282 - RNA, 20 nt, Artificial Sequence
  Synthetic
agaggagcaggaggagagca

SEQ ID NO: 785283 - RNA, 20 nt, Artificial Sequence
  Synthetic
ugacuuuggaggggagagca

SEQ ID NO: 785284 - RNA, 20 nt, Artificial Sequence
  Synthetic
uauuuggcugcaugagagca

SEQ ID NO: 785285 - RNA, 20 nt, Artificial Sequence
  Synthetic
ugacugcacauaugagagca

SEQ ID NO: 785286 - RNA, 20 nt, Artificial Sequence
  Synthetic
aaaaaaaaaauuauagagca

SEQ ID NO: 785287 - RNA, 20 nt, Artificial Sequence
  Synthetic
accauuuaagaaguagagca

SEQ ID NO: 785288 - RNA, 20 nt, Artificial Sequence
  Synthetic
auaaugauaauauuagagca

SEQ ID NO: 785289 - RNA, 20 nt, Artificial Sequence
  Synthetic
augccaacaaacuuagagca

SEQ ID NO: 785290 - RNA, 20 nt, Artificial Sequence
  Synthetic
caccacccagguagcgagca

SEQ ID NO: 785291 - RNA, 20 nt, Artificial Sequence
  Synthetic
ccagaaugucuagaggagca

SEQ ID NO: 785292 - RNA, 20 nt, Artificial Sequence
  Synthetic
uguuaguacaacagggagca

SEQ ID NO: 785293 - RNA, 20 nt, Artificial Sequence
  Synthetic
uuccugggacacugggagca

SEQ ID NO: 785294 - RNA, 20 nt, Artificial Sequence
  Synthetic
uguauguaacugugggagca

SEQ ID NO: 785295 - RNA, 20 nt, Artificial Sequence
  Synthetic
ugaucagaagcaauggagca

SEQ ID NO: 785296 - RNA, 20 nt, Artificial Sequence
  Synthetic
uggaaaagugagcuggagca

SEQ ID NO: 785297 - RNA, 20 nt, Artificial Sequence
  Synthetic
aauacauaccugaaugagca

SEQ ID NO: 785298 - RNA, 20 nt, Artificial Sequence
  Synthetic
agggguuaaaaacaugagca

SEQ ID NO: 785299 - RNA, 20 nt, Artificial Sequence
  Synthetic
auucuuccuacccaugagca

SEQ ID NO: 785300 - RNA, 20 nt, Artificial Sequence
  Synthetic
auucuuccuauccaugagca

SEQ ID NO: 785301 - RNA, 20 nt, Artificial Sequence
  Synthetic
uagcuagucagauaugagca

SEQ ID NO: 785302 - RNA, 20 nt, Artificial Sequence
  Synthetic
augaauuugguuuaugagca

SEQ ID NO: 785303 - RNA, 20 nt, Artificial Sequence
  Synthetic
aagaggaaagaaacugagca

SEQ ID NO: 785304 - RNA, 20 nt, Artificial Sequence
  Synthetic
aaugacuaggaaccugagca

SEQ ID NO: 785305 - RNA, 20 nt, Artificial Sequence
  Synthetic
auacaaaaauuagcugagca

SEQ ID NO: 785306 - RNA, 20 nt, Artificial Sequence
  Synthetic
uaugucauuauaucugagca

SEQ ID NO: 785307 - RNA, 20 nt, Artificial Sequence
  Synthetic
uuaauugguugaagugagca

SEQ ID NO: 785308 - RNA, 20 nt, Artificial Sequence
  Synthetic
caaagaaugcagagugagca

SEQ ID NO: 785309 - RNA, 20 nt, Artificial Sequence
  Synthetic
ugaguggaaucuagugagca

SEQ ID NO: 785310 - RNA, 20 nt, Artificial Sequence
  Synthetic
aguaaaacccagugugagca

SEQ ID NO: 785311 - RNA, 20 nt, Artificial Sequence
  Synthetic
aacaagaaacuccuugagca

SEQ ID NO: 785312 - RNA, 20 nt, Artificial Sequence
  Synthetic
ucauuuuucaaauuugagca

SEQ ID NO: 785313 - RNA, 20 nt, Artificial Sequence
  Synthetic
ucacuuuugugcuuugagca

SEQ ID NO: 785314 - RNA, 20 nt, Artificial Sequence
  Synthetic
ucaguauaaauuuuugagca

SEQ ID NO: 785315 - RNA, 20 nt, Artificial Sequence
  Synthetic
aaaguguccauuuuugagca

SEQ ID NO: 785316 - RNA, 20 nt, Artificial Sequence
  Synthetic
uuuuaaaagaaaaaauagca

SEQ ID NO: 785317 - RNA, 20 nt, Artificial Sequence
  Synthetic
cauuucaacuagaaauagca

SEQ ID NO: 785318 - RNA, 20 nt, Artificial Sequence
  Synthetic
aagauaaauuugaaauagca

SEQ ID NO: 785319 - RNA, 20 nt, Artificial Sequence
  Synthetic
uccagguaaaaagaauagca

SEQ ID NO: 785320 - RNA, 20 nt, Artificial Sequence
  Synthetic
ccacuaucaugagaauagca

SEQ ID NO: 785321 - RNA, 20 nt, Artificial Sequence
  Synthetic
aaggcgggaugggaauagca

SEQ ID NO: 785322 - RNA, 20 nt, Artificial Sequence
  Synthetic
ugcaaugagaaaacauagca

SEQ ID NO: 785323 - RNA, 20 nt, Artificial Sequence
  Synthetic
ucccuaggcugcacauagca

SEQ ID NO: 785324 - RNA, 20 nt, Artificial Sequence
  Synthetic
cacuuauaggggacauagca

SEQ ID NO: 785325 - RNA, 20 nt, Artificial Sequence
  Synthetic
aaaaaaaaaaacugauagca

SEQ ID NO: 785326 - RNA, 20 nt, Artificial Sequence
  Synthetic
ccagauggagggugauagca

SEQ ID NO: 785327 - RNA, 20 nt, Artificial Sequence
  Synthetic
ugcagucaagcacuauagca

SEQ ID NO: 785328 - RNA, 20 nt, Artificial Sequence
  Synthetic
uaaauaauuugaguauagca

SEQ ID NO: 785329 - RNA, 20 nt, Artificial Sequence
  Synthetic
cauccaaaaaguguauagca

SEQ ID NO: 785330 - RNA, 20 nt, Artificial Sequence
  Synthetic
uaaagcauguaguuauagca

SEQ ID NO: 785331 - RNA, 20 nt, Artificial Sequence
  Synthetic
uuagaguuagaacacuagca

SEQ ID NO: 785332 - RNA, 20 nt, Artificial Sequence
  Synthetic
ccaccagagagacacuagca

SEQ ID NO: 785333 - RNA, 20 nt, Artificial Sequence
  Synthetic
cuucucaaccgcaccuagca

SEQ ID NO: 785334 - RNA, 20 nt, Artificial Sequence
  Synthetic
uuuuacucuuauagcuagca

SEQ ID NO: 785335 - RNA, 20 nt, Artificial Sequence
  Synthetic
aaaaggaacacaggcuagca

SEQ ID NO: 785336 - RNA, 20 nt, Artificial Sequence
  Synthetic
uacaacaccagaugcuagca

SEQ ID NO: 785337 - RNA, 20 nt, Artificial Sequence
  Synthetic
uacauaacaaucaucuagca

SEQ ID NO: 785338 - RNA, 20 nt, Artificial Sequence
  Synthetic
uauauugcaaaacucuagca

SEQ ID NO: 785339 - RNA, 20 nt, Artificial Sequence
  Synthetic
aguuugugugggcucuagca

SEQ ID NO: 785340 - RNA, 20 nt, Artificial Sequence
  Synthetic
aggguuggggagaaguagca

SEQ ID NO: 785341 - RNA, 20 nt, Artificial Sequence
  Synthetic
caaguccuaagacaguagca

SEQ ID NO: 785342 - RNA, 20 nt, Artificial Sequence
  Synthetic
acuaaauucuuugaguagca

SEQ ID NO: 785343 - RNA, 20 nt, Artificial Sequence
  Synthetic
ucaaaagcauuauaguagca

SEQ ID NO: 785344 - RNA, 20 nt, Artificial Sequence
  Synthetic
ugaacuuggugguaguagca

SEQ ID NO: 785345 - RNA, 20 nt, Artificial Sequence
  Synthetic
aagacaaaagaaagguagca

SEQ ID NO: 785346 - RNA, 20 nt, Artificial Sequence
  Synthetic
ugcuccuggaggugguagca

SEQ ID NO: 785347 - RNA, 20 nt, Artificial Sequence
  Synthetic
uguucaggguaaauguagca

SEQ ID NO: 785348 - RNA, 20 nt, Artificial Sequence
  Synthetic
auuauuauucccauguagca

SEQ ID NO: 785349 - RNA, 20 nt, Artificial Sequence
  Synthetic
agauaaacugaaguguagca

SEQ ID NO: 785350 - RNA, 20 nt, Artificial Sequence
  Synthetic
caucuguggucuuuguagca

SEQ ID NO: 785351 - RNA, 20 nt, Artificial Sequence
  Synthetic
aaauacaaaaaaaauuagca

SEQ ID NO: 785352 - RNA, 20 nt, Artificial Sequence
  Synthetic
aaaaauacaaaaaauuagca

SEQ ID NO: 785353 - RNA, 20 nt, Artificial Sequence
  Synthetic
uaaaaauacaaaaauuagca

SEQ ID NO: 785354 - RNA, 20 nt, Artificial Sequence
  Synthetic
uguguccuuuuaaauuagca

SEQ ID NO: 785355 - RNA, 20 nt, Artificial Sequence
  Synthetic
cuaccaugcagcaauuagca

SEQ ID NO: 785356 - RNA, 20 nt, Artificial Sequence
  Synthetic
auacucaugcaucauuagca

SEQ ID NO: 785357 - RNA, 20 nt, Artificial Sequence
  Synthetic
auucauuuugcucauuagca

SEQ ID NO: 785358 - RNA, 20 nt, Artificial Sequence
  Synthetic
uaaaaaugcaaaacuuagca

SEQ ID NO: 785359 - RNA, 20 nt, Artificial Sequence
  Synthetic
auauuacaaauaacuuagca

SEQ ID NO: 785360 - RNA, 20 nt, Artificial Sequence
  Synthetic
aaucugagaguggcuuagca

SEQ ID NO: 785361 - RNA, 20 nt, Artificial Sequence
  Synthetic
agauuuaagaucucuuagca

SEQ ID NO: 785362 - RNA, 20 nt, Artificial Sequence
  Synthetic
ucuagcuggaagucuuagca

SEQ ID NO: 785363 - RNA, 20 nt, Artificial Sequence
  Synthetic
acaaauucccuugguuagca

SEQ ID NO: 785364 - RNA, 20 nt, Artificial Sequence
  Synthetic
augggauuuaaguguuagca

SEQ ID NO: 785365 - RNA, 20 nt, Artificial Sequence
  Synthetic
agaucuagggaaguuuagca

SEQ ID NO: 785366 - RNA, 20 nt, Artificial Sequence
  Synthetic
ugucacucuuauuuuuagca

SEQ ID NO: 785367 - RNA, 20 nt, Artificial Sequence
  Synthetic
cagugaaaaaugaaaacgca

SEQ ID NO: 785368 - RNA, 20 nt, Artificial Sequence
  Synthetic
aacugggugguucuaacgca

SEQ ID NO: 785369 - RNA, 20 nt, Artificial Sequence
  Synthetic
caggcgcccgccaccacgca

SEQ ID NO: 785370 - RNA, 20 nt, Artificial Sequence
  Synthetic
ucagcaagcgccaccacgca

SEQ ID NO: 785371 - RNA, 20 nt, Artificial Sequence
  Synthetic
uaauuuccuuuugacccgca

SEQ ID NO: 785372 - RNA, 20 nt, Artificial Sequence
  Synthetic
aaugaaaacauauggccgca

SEQ ID NO: 785373 - RNA, 20 nt, Artificial Sequence
  Synthetic
aauagacucacaguuccgca

SEQ ID NO: 785374 - RNA, 20 nt, Artificial Sequence
  Synthetic
ugaagcuugggccaagcgca

SEQ ID NO: 785375 - RNA, 20 nt, Artificial Sequence
  Synthetic
aucugcccaugacuggcgca

SEQ ID NO: 785376 - RNA, 20 nt, Artificial Sequence
  Synthetic
auucucagcaaacuaucgca

SEQ ID NO: 785377 - RNA, 20 nt, Artificial Sequence
  Synthetic
uuucucagcaaacuaucgca

SEQ ID NO: 785378 - RNA, 20 nt, Artificial Sequence
  Synthetic
auucucaguaaacuaucgca

SEQ ID NO: 785379 - RNA, 20 nt, Artificial Sequence
  Synthetic
agggaugccauucuaucgca

SEQ ID NO: 785380 - RNA, 20 nt, Artificial Sequence
  Synthetic
cagacuaugugcccuucgca

SEQ ID NO: 785381 - RNA, 20 nt, Artificial Sequence
  Synthetic
auggaaaacaaaaaaaggca

SEQ ID NO: 785382 - RNA, 20 nt, Artificial Sequence
  Synthetic
ucuaaaagcuggaaaaggca

SEQ ID NO: 785383 - RNA, 20 nt, Artificial Sequence
  Synthetic
aucuaaugcuggaaaaggca

SEQ ID NO: 785384 - RNA, 20 nt, Artificial Sequence
  Synthetic
uaccauucaggacaaaggca

SEQ ID NO: 785385 - RNA, 20 nt, Artificial Sequence
  Synthetic
uauuuugaaauggaaaggca

SEQ ID NO: 785386 - RNA, 20 nt, Artificial Sequence
  Synthetic
accacaaggggguaaaggca

SEQ ID NO: 785387 - RNA, 20 nt, Artificial Sequence
  Synthetic
aaucuuacccucucaaggca

SEQ ID NO: 785388 - RNA, 20 nt, Artificial Sequence
  Synthetic
cacaaucuuggcagaaggca

SEQ ID NO: 785389 - RNA, 20 nt, Artificial Sequence
  Synthetic
ugauccacccuucuaaggca

SEQ ID NO: 785390 - RNA, 20 nt, Artificial Sequence
  Synthetic
agggaggaagggaacaggca

SEQ ID NO: 785391 - RNA, 20 nt, Artificial Sequence
  Synthetic
aaauagccuagccacaggca

SEQ ID NO: 785392 - RNA, 20 nt, Artificial Sequence
  Synthetic
auauucacuaaucacaggca

SEQ ID NO: 785393 - RNA, 20 nt, Artificial Sequence
  Synthetic
cuuugacugggagacaggca

SEQ ID NO: 785394 - RNA, 20 nt, Artificial Sequence
  Synthetic
uaccauucaggauacaggca

SEQ ID NO: 785395 - RNA, 20 nt, Artificial Sequence
  Synthetic
agccacagggaguacaggca

SEQ ID NO: 785396 - RNA, 20 nt, Artificial Sequence
  Synthetic
acgauaauccccaccaggca

SEQ ID NO: 785397 - RNA, 20 nt, Artificial Sequence
  Synthetic
cacaacuauggcaccaggca

SEQ ID NO: 785398 - RNA, 20 nt, Artificial Sequence
  Synthetic
uacagugucucgaccaggca

SEQ ID NO: 785399 - RNA, 20 nt, Artificial Sequence
  Synthetic
cugcccaauaggaccaggca

SEQ ID NO: 785400 - RNA, 20 nt, Artificial Sequence
  Synthetic
cuuucuaaguggaccaggca

SEQ ID NO: 785401 - RNA, 20 nt, Artificial Sequence
  Synthetic
aauacaaaaucagccaggca

SEQ ID NO: 785402 - RNA, 20 nt, Artificial Sequence
  Synthetic
aaggaaugaucagccaggca

SEQ ID NO: 785403 - RNA, 20 nt, Artificial Sequence
  Synthetic
auuaggcuuucagccaggca

SEQ ID NO: 785404 - RNA, 20 nt, Artificial Sequence
  Synthetic
uacagauagauagccaggca

SEQ ID NO: 785405 - RNA, 20 nt, Artificial Sequence
  Synthetic
acaaaaaaauuagccaggca

SEQ ID NO: 785406 - RNA, 20 nt, Artificial Sequence
  Synthetic
uagaaaaaauuagccaggca

SEQ ID NO: 785407 - RNA, 20 nt, Artificial Sequence
  Synthetic
aauaaaaaauuagccaggca

SEQ ID NO: 785408 - RNA, 20 nt, Artificial Sequence
  Synthetic
acacaaaaauuagccaggca

SEQ ID NO: 785409 - RNA, 20 nt, Artificial Sequence
  Synthetic
auacaaaaauuagccaggca

SEQ ID NO: 785410 - RNA, 20 nt, Artificial Sequence
  Synthetic
auagaaaaauuagccaggca

SEQ ID NO: 785411 - RNA, 20 nt, Artificial Sequence
  Synthetic
aauacaaaauuagccaggca

SEQ ID NO: 785412 - RNA, 20 nt, Artificial Sequence
  Synthetic
uuuugauucagggccaggca

SEQ ID NO: 785413 - RNA, 20 nt, Artificial Sequence
  Synthetic
auaccaaucuuggccaggca

SEQ ID NO: 785414 - RNA, 20 nt, Artificial Sequence
  Synthetic
auuauccaguuggccaggca

SEQ ID NO: 785415 - RNA, 20 nt, Artificial Sequence
  Synthetic
uacaaaaaauuugccaggca

SEQ ID NO: 785416 - RNA, 20 nt, Artificial Sequence
  Synthetic
ugggaaaauuauuccaggca

SEQ ID NO: 785417 - RNA, 20 nt, Artificial Sequence
  Synthetic
uuuuuuuucuacugcaggca

SEQ ID NO: 785418 - RNA, 20 nt, Artificial Sequence
  Synthetic
auaggaaaugccugcaggca

SEQ ID NO: 785419 - RNA, 20 nt, Artificial Sequence
  Synthetic
accacugcuggcugcaggca

SEQ ID NO: 785420 - RNA, 20 nt, Artificial Sequence
  Synthetic
uuggccaggacaaucaggca

SEQ ID NO: 785421 - RNA, 20 nt, Artificial Sequence
  Synthetic
aauuuuacagggaucaggca

SEQ ID NO: 785422 - RNA, 20 nt, Artificial Sequence
  Synthetic
caauuuauacagcucaggca

SEQ ID NO: 785423 - RNA, 20 nt, Artificial Sequence
  Synthetic
uucuagcuucagcucaggca

SEQ ID NO: 785424 - RNA, 20 nt, Artificial Sequence
  Synthetic
acaguucuaagggucaggca

SEQ ID NO: 785425 - RNA, 20 nt, Artificial Sequence
  Synthetic
aaugaauggcuauucaggca

SEQ ID NO: 785426 - RNA, 20 nt, Artificial Sequence
  Synthetic
uuacucaguauuuucaggca

SEQ ID NO: 785427 - RNA, 20 nt, Artificial Sequence
  Synthetic
uuagaagcaaggaagaggca

SEQ ID NO: 785428 - RNA, 20 nt, Artificial Sequence
  Synthetic
accagaagcuggaagaggca

SEQ ID NO: 785429 - RNA, 20 nt, Artificial Sequence
  Synthetic
auugugaacauuaagaggca

SEQ ID NO: 785430 - RNA, 20 nt, Artificial Sequence
  Synthetic
cuuugaauguaggagaggca

SEQ ID NO: 785431 - RNA, 20 nt, Artificial Sequence
  Synthetic
cuuucaugaucauagaggca

SEQ ID NO: 785432 - RNA, 20 nt, Artificial Sequence
  Synthetic
caauuguacacuuagaggca

SEQ ID NO: 785433 - RNA, 20 nt, Artificial Sequence
  Synthetic
cucaacuggagcaggaggca

SEQ ID NO: 785434 - RNA, 20 nt, Artificial Sequence
  Synthetic
ugucucccagucaggaggca

SEQ ID NO: 785435 - RNA, 20 nt, Artificial Sequence
  Synthetic
uucaggacaagccggaggca

SEQ ID NO: 785436 - RNA, 20 nt, Artificial Sequence
  Synthetic
ucauggcucugauggaggca

SEQ ID NO: 785437 - RNA, 20 nt, Artificial Sequence
  Synthetic
uuuggaucagaguggaggca

SEQ ID NO: 785438 - RNA, 20 nt, Artificial Sequence
  Synthetic
agaucucaaagaaugaggca

SEQ ID NO: 785439 - RNA, 20 nt, Artificial Sequence
  Synthetic
uccaggacugagaugaggca

SEQ ID NO: 785440 - RNA, 20 nt, Artificial Sequence
  Synthetic
auacucaggaggcugaggca

SEQ ID NO: 785441 - RNA, 20 nt, Artificial Sequence
  Synthetic
cuacuugggaggcugaggca

SEQ ID NO: 785442 - RNA, 20 nt, Artificial Sequence
  Synthetic
aaaaugagacaggugaggca

SEQ ID NO: 785443 - RNA, 20 nt, Artificial Sequence
  Synthetic
cuguccuugccuuugaggca

SEQ ID NO: 785444 - RNA, 20 nt, Artificial Sequence
  Synthetic
agcugggucuaaaauaggca

SEQ ID NO: 785445 - RNA, 20 nt, Artificial Sequence
  Synthetic
ucaugcuuguugaauaggca

SEQ ID NO: 785446 - RNA, 20 nt, Artificial Sequence
  Synthetic
uuagaacuggguaauaggca

SEQ ID NO: 785447 - RNA, 20 nt, Artificial Sequence
  Synthetic
uaccauucaggacauaggca

SEQ ID NO: 785448 - RNA, 20 nt, Artificial Sequence
  Synthetic
aggaaugggagagauaggca

SEQ ID NO: 785449 - RNA, 20 nt, Artificial Sequence
  Synthetic
aauguacucagggauaggca

SEQ ID NO: 785450 - RNA, 20 nt, Artificial Sequence
  Synthetic
ccuuguaggagggauaggca

SEQ ID NO: 785451 - RNA, 20 nt, Artificial Sequence
  Synthetic
acagagugaaaauauaggca

SEQ ID NO: 785452 - RNA, 20 nt, Artificial Sequence
  Synthetic
uaccauucaggauauaggca

SEQ ID NO: 785453 - RNA, 20 nt, Artificial Sequence
  Synthetic
aggaggugcaaguauaggca

SEQ ID NO: 785454 - RNA, 20 nt, Artificial Sequence
  Synthetic
aguagcugggauuauaggca

SEQ ID NO: 785455 - RNA, 20 nt, Artificial Sequence
  Synthetic
ugauucuuaugugcuaggca

SEQ ID NO: 785456 - RNA, 20 nt, Artificial Sequence
  Synthetic
ugaauguaaaacucuaggca

SEQ ID NO: 785457 - RNA, 20 nt, Artificial Sequence
  Synthetic
aacauauuuaucaguaggca

SEQ ID NO: 785458 - RNA, 20 nt, Artificial Sequence
  Synthetic
uaccauucaggacguaggca

SEQ ID NO: 785459 - RNA, 20 nt, Artificial Sequence
  Synthetic
cauccacucuagguuaggca

SEQ ID NO: 785460 - RNA, 20 nt, Artificial Sequence
  Synthetic
uggacaaguauauuuaggca

SEQ ID NO: 785461 - RNA, 20 nt, Artificial Sequence
  Synthetic
ucacuuuuacaguuuaggca

SEQ ID NO: 785462 - RNA, 20 nt, Artificial Sequence
  Synthetic
agucuccugcaggcccggca

SEQ ID NO: 785463 - RNA, 20 nt, Artificial Sequence
  Synthetic
cacaccacugcacuccggca

SEQ ID NO: 785464 - RNA, 20 nt, Artificial Sequence
  Synthetic
caacuggaagccaaagggca

SEQ ID NO: 785465 - RNA, 20 nt, Artificial Sequence
  Synthetic
uaucagcaaaagaaagggca

SEQ ID NO: 785466 - RNA, 20 nt, Artificial Sequence
  Synthetic
aggcagaggaaacaagggca

SEQ ID NO: 785467 - RNA, 20 nt, Artificial Sequence
  Synthetic
aagcauggggcccaagggca

SEQ ID NO: 785468 - RNA, 20 nt, Artificial Sequence
  Synthetic
auucucugagaucaagggca

SEQ ID NO: 785469 - RNA, 20 nt, Artificial Sequence
  Synthetic
ugucaauaacauacagggca

SEQ ID NO: 785470 - RNA, 20 nt, Artificial Sequence
  Synthetic
uguagcaucugagcagggca

SEQ ID NO: 785471 - RNA, 20 nt, Artificial Sequence
  Synthetic
auacaaaaauuagcagggca

SEQ ID NO: 785472 - RNA, 20 nt, Artificial Sequence
  Synthetic
uacugugaaaagucagggca

SEQ ID NO: 785473 - RNA, 20 nt, Artificial Sequence
  Synthetic
uaucccuggugaggagggca

SEQ ID NO: 785474 - RNA, 20 nt, Artificial Sequence
  Synthetic
uggugcacucagggagggca

SEQ ID NO: 785475 - RNA, 20 nt, Artificial Sequence
  Synthetic
ccuuacauggugggagggca

SEQ ID NO: 785476 - RNA, 20 nt, Artificial Sequence
  Synthetic
uguugccuggaaauagggca

SEQ ID NO: 785477 - RNA, 20 nt, Artificial Sequence
  Synthetic
agugcuauuuaagccgggca

SEQ ID NO: 785478 - RNA, 20 nt, Artificial Sequence
  Synthetic
uacauauuggcagccgggca

SEQ ID NO: 785479 - RNA, 20 nt, Artificial Sequence
  Synthetic
uacaaaaaauuagccgggca

SEQ ID NO: 785480 - RNA, 20 nt, Artificial Sequence
  Synthetic
aagaaaaaauuagccgggca

SEQ ID NO: 785481 - RNA, 20 nt, Artificial Sequence
  Synthetic
auacaaaaauuagccgggca

SEQ ID NO: 785482 - RNA, 20 nt, Artificial Sequence
  Synthetic
acagaaaaauuagccgggca

SEQ ID NO: 785483 - RNA, 20 nt, Artificial Sequence
  Synthetic
aauacaaaauuagccgggca

SEQ ID NO: 785484 - RNA, 20 nt, Artificial Sequence
  Synthetic
uuguuuuuggaggccgggca

SEQ ID NO: 785485 - RNA, 20 nt, Artificial Sequence
  Synthetic
uaagauaaauaggccgggca

SEQ ID NO: 785486 - RNA, 20 nt, Artificial Sequence
  Synthetic
agagaauucugggccgggca

SEQ ID NO: 785487 - RNA, 20 nt, Artificial Sequence
  Synthetic
auaaaaaaacuggccgggca

SEQ ID NO: 785488 - RNA, 20 nt, Artificial Sequence
  Synthetic
acaaauggugaauccgggca

SEQ ID NO: 785489 - RNA, 20 nt, Artificial Sequence
  Synthetic
uggagggacggaaaggggca

SEQ ID NO: 785490 - RNA, 20 nt, Artificial Sequence
  Synthetic
agaaguuugcugcaggggca

SEQ ID NO: 785491 - RNA, 20 nt, Artificial Sequence
  Synthetic
agauuauguugggaggggca

SEQ ID NO: 785492 - RNA, 20 nt, Artificial Sequence
  Synthetic
cugucaaggggugaggggca

SEQ ID NO: 785493 - RNA, 20 nt, Artificial Sequence
  Synthetic
uggcacuguuccagggggca

SEQ ID NO: 785494 - RNA, 20 nt, Artificial Sequence
  Synthetic
cacuauuccuuccgggggca

SEQ ID NO: 785495 - RNA, 20 nt, Artificial Sequence
  Synthetic
cugucgcgagguggggggca

SEQ ID NO: 785496 - RNA, 20 nt, Artificial Sequence
  Synthetic
cuguuggcggguggggggca

SEQ ID NO: 785497 - RNA, 20 nt, Artificial Sequence
  Synthetic
ucugcaaaucuuggggggca

SEQ ID NO: 785498 - RNA, 20 nt, Artificial Sequence
  Synthetic
uaagaaaguuaaauggggca

SEQ ID NO: 785499 - RNA, 20 nt, Artificial Sequence
  Synthetic
agccacaguaggauggggca

SEQ ID NO: 785500 - RNA, 20 nt, Artificial Sequence
  Synthetic
aaaaagcaaaaacuggggca

SEQ ID NO: 785501 - RNA, 20 nt, Artificial Sequence
  Synthetic
accugauuuuaaaaugggca

SEQ ID NO: 785502 - RNA, 20 nt, Artificial Sequence
  Synthetic
uacacauaaacgaaugggca

SEQ ID NO: 785503 - RNA, 20 nt, Artificial Sequence
  Synthetic
ucaggacaaaggcaugggca

SEQ ID NO: 785504 - RNA, 20 nt, Artificial Sequence
  Synthetic
ucaggacauaggcaugggca

SEQ ID NO: 785505 - RNA, 20 nt, Artificial Sequence
  Synthetic
ucaggacguaggcaugggca

SEQ ID NO: 785506 - RNA, 20 nt, Artificial Sequence
  Synthetic
auacaaaaauuagaugggca

SEQ ID NO: 785507 - RNA, 20 nt, Artificial Sequence
  Synthetic
uauaacaugucauaugggca

SEQ ID NO: 785508 - RNA, 20 nt, Artificial Sequence
  Synthetic
uacugggaaacuacugggca

SEQ ID NO: 785509 - RNA, 20 nt, Artificial Sequence
  Synthetic
auggggcuauugccugggca

SEQ ID NO: 785510 - RNA, 20 nt, Artificial Sequence
  Synthetic
aaaaaaaaaauagcugggca

SEQ ID NO: 785511 - RNA, 20 nt, Artificial Sequence
  Synthetic
uacaaaaaaauagcugggca

SEQ ID NO: 785512 - RNA, 20 nt, Artificial Sequence
  Synthetic
acaaaaaaauuagcugggca

SEQ ID NO: 785513 - RNA, 20 nt, Artificial Sequence
  Synthetic
uacaaaaaauuagcugggca

SEQ ID NO: 785514 - RNA, 20 nt, Artificial Sequence
  Synthetic
auacaaaaauuagcugggca

SEQ ID NO: 785515 - RNA, 20 nt, Artificial Sequence
  Synthetic
cuacaaaaauuagcugggca

SEQ ID NO: 785516 - RNA, 20 nt, Artificial Sequence
  Synthetic
aauacaaaauuagcugggca

SEQ ID NO: 785517 - RNA, 20 nt, Artificial Sequence
  Synthetic
aaugaaauuuaggcugggca

SEQ ID NO: 785518 - RNA, 20 nt, Artificial Sequence
  Synthetic
aauguucucucggcugggca

SEQ ID NO: 785519 - RNA, 20 nt, Artificial Sequence
  Synthetic
acaucaauuucggcugggca

SEQ ID NO: 785520 - RNA, 20 nt, Artificial Sequence
  Synthetic
uuaaaaagaggggcugggca

SEQ ID NO: 785521 - RNA, 20 nt, Artificial Sequence
  Synthetic
aaagaugaauuggcugggca

SEQ ID NO: 785522 - RNA, 20 nt, Artificial Sequence
  Synthetic
cauaucaaguuggcugggca

SEQ ID NO: 785523 - RNA, 20 nt, Artificial Sequence
  Synthetic
aaaaaaagucuugcugggca

SEQ ID NO: 785524 - RNA, 20 nt, Artificial Sequence
  Synthetic
agauuccuucucucugggca

SEQ ID NO: 785525 - RNA, 20 nt, Artificial Sequence
  Synthetic
acuaggcacucuucugggca

SEQ ID NO: 785526 - RNA, 20 nt, Artificial Sequence
  Synthetic
ucaggacauaggcgugggca

SEQ ID NO: 785527 - RNA, 20 nt, Artificial Sequence
  Synthetic
auccaccugcaaggugggca

SEQ ID NO: 785528 - RNA, 20 nt, Artificial Sequence
  Synthetic
auacaaacauuaggugggca

SEQ ID NO: 785529 - RNA, 20 nt, Artificial Sequence
  Synthetic
uuucacagauggggugggca

SEQ ID NO: 785530 - RNA, 20 nt, Artificial Sequence
  Synthetic
uacauacucaggauugggca

SEQ ID NO: 785531 - RNA, 20 nt, Artificial Sequence
  Synthetic
uacaaaaaauuaguugggca

SEQ ID NO: 785532 - RNA, 20 nt, Artificial Sequence
  Synthetic
cuuugaggaagaaaauggca

SEQ ID NO: 785533 - RNA, 20 nt, Artificial Sequence
  Synthetic
ucaaucuacagcaaauggca

SEQ ID NO: 785534 - RNA, 20 nt, Artificial Sequence
  Synthetic
uagcagggaacuaaauggca

SEQ ID NO: 785535 - RNA, 20 nt, Artificial Sequence
  Synthetic
cuuuccaacucauaauggca

SEQ ID NO: 785536 - RNA, 20 nt, Artificial Sequence
  Synthetic
agcucagagugcuaauggca

SEQ ID NO: 785537 - RNA, 20 nt, Artificial Sequence
  Synthetic
ucauuaauagaaacauggca

SEQ ID NO: 785538 - RNA, 20 nt, Artificial Sequence
  Synthetic
ccagccugggcaacauggca

SEQ ID NO: 785539 - RNA, 20 nt, Artificial Sequence
  Synthetic
agaagaggaguaagauggca

SEQ ID NO: 785540 - RNA, 20 nt, Artificial Sequence
  Synthetic
uagagaagggguagauggca

SEQ ID NO: 785541 - RNA, 20 nt, Artificial Sequence
  Synthetic
ugaguggaggcaggauggca

SEQ ID NO: 785542 - RNA, 20 nt, Artificial Sequence
  Synthetic
auucucagcaaacuauggca

SEQ ID NO: 785543 - RNA, 20 nt, Artificial Sequence
  Synthetic
cauuguauuauccuauggca

SEQ ID NO: 785544 - RNA, 20 nt, Artificial Sequence
  Synthetic
aauaaggucuuccuauggca

SEQ ID NO: 785545 - RNA, 20 nt, Artificial Sequence
  Synthetic
uacaagugaagucuauggca

SEQ ID NO: 785546 - RNA, 20 nt, Artificial Sequence
  Synthetic
caagagagaaaaguauggca

SEQ ID NO: 785547 - RNA, 20 nt, Artificial Sequence
  Synthetic
aaauauaguauuuuauggca

SEQ ID NO: 785548 - RNA, 20 nt, Artificial Sequence
  Synthetic
uggauauauguuaacuggca

SEQ ID NO: 785549 - RNA, 20 nt, Artificial Sequence
  Synthetic
aagcaguuuauucccuggca

SEQ ID NO: 785550 - RNA, 20 nt, Artificial Sequence
  Synthetic
uaaaauuuauuucccuggca

SEQ ID NO: 785551 - RNA, 20 nt, Artificial Sequence
  Synthetic
acaagacagguggccuggca

SEQ ID NO: 785552 - RNA, 20 nt, Artificial Sequence
  Synthetic
aaauggcaaagugccuggca

SEQ ID NO: 785553 - RNA, 20 nt, Artificial Sequence
  Synthetic
aauuccuugcuugccuggca

SEQ ID NO: 785554 - RNA, 20 nt, Artificial Sequence
  Synthetic
ugagagcaguuugccuggca

SEQ ID NO: 785555 - RNA, 20 nt, Artificial Sequence
  Synthetic
uuaacaaaagccuccuggca

SEQ ID NO: 785556 - RNA, 20 nt, Artificial Sequence
  Synthetic
aagcaaaaugcaagcuggca

SEQ ID NO: 785557 - RNA, 20 nt, Artificial Sequence
  Synthetic
uagggagacaccagcuggca

SEQ ID NO: 785558 - RNA, 20 nt, Artificial Sequence
  Synthetic
agccucccaugcagcuggca

SEQ ID NO: 785559 - RNA, 20 nt, Artificial Sequence
  Synthetic
aaagacacccaaugcuggca

SEQ ID NO: 785560 - RNA, 20 nt, Artificial Sequence
  Synthetic
caaacauuuugucucuggca

SEQ ID NO: 785561 - RNA, 20 nt, Artificial Sequence
  Synthetic
uuuuuucuuaaugucuggca

SEQ ID NO: 785562 - RNA, 20 nt, Artificial Sequence
  Synthetic
aaguaaaaguugaaguggca

SEQ ID NO: 785563 - RNA, 20 nt, Artificial Sequence
  Synthetic
agauaggucaaacaguggca

SEQ ID NO: 785564 - RNA, 20 nt, Artificial Sequence
  Synthetic
auacgaaggaaacaguggca

SEQ ID NO: 785565 - RNA, 20 nt, Artificial Sequence
  Synthetic
auauuuuucaaccaguggca

SEQ ID NO: 785566 - RNA, 20 nt, Artificial Sequence
  Synthetic
ccguaggcagugcaguggca

SEQ ID NO: 785567 - RNA, 20 nt, Artificial Sequence
  Synthetic
aacugaauuugauaguggca

SEQ ID NO: 785568 - RNA, 20 nt, Artificial Sequence
  Synthetic
agagagugaaacuaguggca

SEQ ID NO: 785569 - RNA, 20 nt, Artificial Sequence
  Synthetic
cagagcccccaguaguggca

SEQ ID NO: 785570 - RNA, 20 nt, Artificial Sequence
  Synthetic
uuugggagagggugguggca

SEQ ID NO: 785571 - RNA, 20 nt, Artificial Sequence
  Synthetic
uguuauuuuaaaauguggca

SEQ ID NO: 785572 - RNA, 20 nt, Artificial Sequence
  Synthetic
aucacagaagagauguggca

SEQ ID NO: 785573 - RNA, 20 nt, Artificial Sequence
  Synthetic
uaaauugaaaguuuguggca

SEQ ID NO: 785574 - RNA, 20 nt, Artificial Sequence
  Synthetic
aaauacuuccaaaauuggca

SEQ ID NO: 785575 - RNA, 20 nt, Artificial Sequence
  Synthetic
uaauauuguuaaaauuggca

SEQ ID NO: 785576 - RNA, 20 nt, Artificial Sequence
  Synthetic
aaaaccuagacacauuggca

SEQ ID NO: 785577 - RNA, 20 nt, Artificial Sequence
  Synthetic
uguuuggguuuccauuggca

SEQ ID NO: 785578 - RNA, 20 nt, Artificial Sequence
  Synthetic
uuagauuggguggauuggca

SEQ ID NO: 785579 - RNA, 20 nt, Artificial Sequence
  Synthetic
acuguguuauaauauuggca

SEQ ID NO: 785580 - RNA, 20 nt, Artificial Sequence
  Synthetic
uuauucugguguuauuggca

SEQ ID NO: 785581 - RNA, 20 nt, Artificial Sequence
  Synthetic
uaugugaaagaaacuuggca

SEQ ID NO: 785582 - RNA, 20 nt, Artificial Sequence
  Synthetic
augaguucauguccuuggca

SEQ ID NO: 785583 - RNA, 20 nt, Artificial Sequence
  Synthetic
uuacccaugagagcuuggca

SEQ ID NO: 785584 - RNA, 20 nt, Artificial Sequence
  Synthetic
aacaauguguuuucuuggca

SEQ ID NO: 785585 - RNA, 20 nt, Artificial Sequence
  Synthetic
uucuauauuguaaguuggca

SEQ ID NO: 785586 - RNA, 20 nt, Artificial Sequence
  Synthetic
uuaaaaugaaaguguuggca

SEQ ID NO: 785587 - RNA, 20 nt, Artificial Sequence
  Synthetic
auaauucuuuaacuuuggca

SEQ ID NO: 785588 - RNA, 20 nt, Artificial Sequence
  Synthetic
aguauaguccaucuuuggca

SEQ ID NO: 785589 - RNA, 20 nt, Artificial Sequence
  Synthetic
caauaugaaaaaaaaaugca

SEQ ID NO: 785590 - RNA, 20 nt, Artificial Sequence
  Synthetic
uaaugaaaguaaaaaaugca

SEQ ID NO: 785591 - RNA, 20 nt, Artificial Sequence
  Synthetic
ucauacuuuuaaaaaaugca

SEQ ID NO: 785592 - RNA, 20 nt, Artificial Sequence
  Synthetic
auucuaaaauuaaaaaugca

SEQ ID NO: 785593 - RNA, 20 nt, Artificial Sequence
  Synthetic
aagaucauuucgaaaaugca

SEQ ID NO: 785594 - RNA, 20 nt, Artificial Sequence
  Synthetic
caugacagguuacaaaugca

SEQ ID NO: 785595 - RNA, 20 nt, Artificial Sequence
  Synthetic
aauaaauaauagcaaaugca

SEQ ID NO: 785596 - RNA, 20 nt, Artificial Sequence
  Synthetic
uauacauucggagaaaugca

SEQ ID NO: 785597 - RNA, 20 nt, Artificial Sequence
  Synthetic
uuggagugggaggaaaugca

SEQ ID NO: 785598 - RNA, 20 nt, Artificial Sequence
  Synthetic
accauuucuauugaaaugca

SEQ ID NO: 785599 - RNA, 20 nt, Artificial Sequence
  Synthetic
cauuccagaauauaaaugca

SEQ ID NO: 785600 - RNA, 20 nt, Artificial Sequence
  Synthetic
aaagauguaauguaaaugca

SEQ ID NO: 785601 - RNA, 20 nt, Artificial Sequence
  Synthetic
aauugucuguuuuaaaugca

SEQ ID NO: 785602 - RNA, 20 nt, Artificial Sequence
  Synthetic
caaucaaguuaagcaaugca

SEQ ID NO: 785603 - RNA, 20 nt, Artificial Sequence
  Synthetic
cucagucugauggcaaugca

SEQ ID NO: 785604 - RNA, 20 nt, Artificial Sequence
  Synthetic
ucaggcaaacuaucaaugca

SEQ ID NO: 785605 - RNA, 20 nt, Artificial Sequence
  Synthetic
aaucaggguaaaagaaugca

SEQ ID NO: 785606 - RNA, 20 nt, Artificial Sequence
  Synthetic
ucaaagaagaauagaaugca

SEQ ID NO: 785607 - RNA, 20 nt, Artificial Sequence
  Synthetic
agucauagauugggaaugca

SEQ ID NO: 785608 - RNA, 20 nt, Artificial Sequence
  Synthetic
uuagagacugacugaaugca

SEQ ID NO: 785609 - RNA, 20 nt, Artificial Sequence
  Synthetic
ccaaggaacauuugaaugca

SEQ ID NO: 785610 - RNA, 20 nt, Artificial Sequence
  Synthetic
auauacuagaaauuaaugca

SEQ ID NO: 785611 - RNA, 20 nt, Artificial Sequence
  Synthetic
augauuaagugauuaaugca

SEQ ID NO: 785612 - RNA, 20 nt, Artificial Sequence
  Synthetic
uucaauaaauuauuaaugca

SEQ ID NO: 785613 - RNA, 20 nt, Artificial Sequence
  Synthetic
uucaauccagguuuaaugca

SEQ ID NO: 785614 - RNA, 20 nt, Artificial Sequence
  Synthetic
caaugucgauguuuaaugca

SEQ ID NO: 785615 - RNA, 20 nt, Artificial Sequence
  Synthetic
aaagauaugagacccaugca

SEQ ID NO: 785616 - RNA, 20 nt, Artificial Sequence
  Synthetic
caggcaugcgcugccaugca

SEQ ID NO: 785617 - RNA, 20 nt, Artificial Sequence
  Synthetic
acugcgugugcgagcaugca

SEQ ID NO: 785618 - RNA, 20 nt, Artificial Sequence
  Synthetic
acuugggaggggagcaugca

SEQ ID NO: 785619 - RNA, 20 nt, Artificial Sequence
  Synthetic
agucugauucagaucaugca

SEQ ID NO: 785620 - RNA, 20 nt, Artificial Sequence
  Synthetic
uauugugaacuacucaugca

SEQ ID NO: 785621 - RNA, 20 nt, Artificial Sequence
  Synthetic
auccauggaugaaagaugca

SEQ ID NO: 785622 - RNA, 20 nt, Artificial Sequence
  Synthetic
uuaggaauaaaagagaugca

SEQ ID NO: 785623 - RNA, 20 nt, Artificial Sequence
  Synthetic
cugcagcuuuucuagaugca

SEQ ID NO: 785624 - RNA, 20 nt, Artificial Sequence
  Synthetic
cuaagccuuugacggaugca

SEQ ID NO: 785625 - RNA, 20 nt, Artificial Sequence
  Synthetic
uaaauugucaaauggaugca

SEQ ID NO: 785626 - RNA, 20 nt, Artificial Sequence
  Synthetic
auuguuaucuuauggaugca

SEQ ID NO: 785627 - RNA, 20 nt, Artificial Sequence
  Synthetic
auccaggucacgcugaugca

SEQ ID NO: 785628 - RNA, 20 nt, Artificial Sequence
  Synthetic
auguuuaacccucugaugca

SEQ ID NO: 785629 - RNA, 20 nt, Artificial Sequence
  Synthetic
uuaguacaaugucugaugca

SEQ ID NO: 785630 - RNA, 20 nt, Artificial Sequence
  Synthetic
uccugucauuaagugaugca

SEQ ID NO: 785631 - RNA, 20 nt, Artificial Sequence
  Synthetic
ugauagacuugcuugaugca

SEQ ID NO: 785632 - RNA, 20 nt, Artificial Sequence
  Synthetic
aagaauccagguuugaugca

SEQ ID NO: 785633 - RNA, 20 nt, Artificial Sequence
  Synthetic
uucugaauauuuuugaugca

SEQ ID NO: 785634 - RNA, 20 nt, Artificial Sequence
  Synthetic
uucuguuauugccauaugca

SEQ ID NO: 785635 - RNA, 20 nt, Artificial Sequence
  Synthetic
aaacaaggauuugauaugca

SEQ ID NO: 785636 - RNA, 20 nt, Artificial Sequence
  Synthetic
cuuuggaagaaaacuaugca

SEQ ID NO: 785637 - RNA, 20 nt, Artificial Sequence
  Synthetic
auccucuucacugcuaugca

SEQ ID NO: 785638 - RNA, 20 nt, Artificial Sequence
  Synthetic
auugcuauuuuuucuaugca

SEQ ID NO: 785639 - RNA, 20 nt, Artificial Sequence
  Synthetic
uuuagaacuaacaguaugca

SEQ ID NO: 785640 - RNA, 20 nt, Artificial Sequence
  Synthetic
uuagauuuauauaguaugca

SEQ ID NO: 785641 - RNA, 20 nt, Artificial Sequence
  Synthetic
ugagccacagcugguaugca

SEQ ID NO: 785642 - RNA, 20 nt, Artificial Sequence
  Synthetic
acuacuuuuuugauuaugca

SEQ ID NO: 785643 - RNA, 20 nt, Artificial Sequence
  Synthetic
uagaucaacacuauuaugca

SEQ ID NO: 785644 - RNA, 20 nt, Artificial Sequence
  Synthetic
aagcucuuuuaucuuaugca

SEQ ID NO: 785645 - RNA, 20 nt, Artificial Sequence
  Synthetic
ugcacaaacugauuuaugca

SEQ ID NO: 785646 - RNA, 20 nt, Artificial Sequence
  Synthetic
agcuugacaguauuuaugca

SEQ ID NO: 785647 - RNA, 20 nt, Artificial Sequence
  Synthetic
cauuuuaugcauuuuaugca

SEQ ID NO: 785648 - RNA, 20 nt, Artificial Sequence
  Synthetic
aaagaacucucaaaacugca

SEQ ID NO: 785649 - RNA, 20 nt, Artificial Sequence
  Synthetic
aauccugaugacaaacugca

SEQ ID NO: 785650 - RNA, 20 nt, Artificial Sequence
  Synthetic
caaccaacucugaaacugca

SEQ ID NO: 785651 - RNA, 20 nt, Artificial Sequence
  Synthetic
ugcacugguucagaacugca

SEQ ID NO: 785652 - RNA, 20 nt, Artificial Sequence
  Synthetic
agggauauaugauaacugca

SEQ ID NO: 785653 - RNA, 20 nt, Artificial Sequence
  Synthetic
accgaaaaccaaacacugca

SEQ ID NO: 785654 - RNA, 20 nt, Artificial Sequence
  Synthetic
acagaaaaugaaacacugca

SEQ ID NO: 785655 - RNA, 20 nt, Artificial Sequence
  Synthetic
uucuugaguuuaacacugca

SEQ ID NO: 785656 - RNA, 20 nt, Artificial Sequence
  Synthetic
agggaaguauauucacugca

SEQ ID NO: 785657 - RNA, 20 nt, Artificial Sequence
  Synthetic
auuuuagaaacaggacugca

SEQ ID NO: 785658 - RNA, 20 nt, Artificial Sequence
  Synthetic
cccuaucccaagauacugca

SEQ ID NO: 785659 - RNA, 20 nt, Artificial Sequence
  Synthetic
ccaaaggagacuauacugca

SEQ ID NO: 785660 - RNA, 20 nt, Artificial Sequence
  Synthetic
auuaugcuccuuauacugca

SEQ ID NO: 785661 - RNA, 20 nt, Artificial Sequence
  Synthetic
caguguuuccaauuacugca

SEQ ID NO: 785662 - RNA, 20 nt, Artificial Sequence
  Synthetic
ugccuauggauccaccugca

SEQ ID NO: 785663 - RNA, 20 nt, Artificial Sequence
  Synthetic
cuugggaacuuagaccugca

SEQ ID NO: 785664 - RNA, 20 nt, Artificial Sequence
  Synthetic
cagagacuacaugaccugca

SEQ ID NO: 785665 - RNA, 20 nt, Artificial Sequence
  Synthetic
uccuaacuguugucccugca

SEQ ID NO: 785666 - RNA, 20 nt, Artificial Sequence
  Synthetic
aacaaucaucugagccugca

SEQ ID NO: 785667 - RNA, 20 nt, Artificial Sequence
  Synthetic
ucagagacuauuauccugca

SEQ ID NO: 785668 - RNA, 20 nt, Artificial Sequence
  Synthetic
ucuggaacuuuuuuccugca

SEQ ID NO: 785669 - RNA, 20 nt, Artificial Sequence
  Synthetic
uucucuucagaaaagcugca

SEQ ID NO: 785670 - RNA, 20 nt, Artificial Sequence
  Synthetic
ugcuuaacugaaaagcugca

SEQ ID NO: 785671 - RNA, 20 nt, Artificial Sequence
  Synthetic
aaggagcccugccagcugca

SEQ ID NO: 785672 - RNA, 20 nt, Artificial Sequence
  Synthetic
acaucaggaggugagcugca

SEQ ID NO: 785673 - RNA, 20 nt, Artificial Sequence
  Synthetic
ccaaaugcugaauagcugca

SEQ ID NO: 785674 - RNA, 20 nt, Artificial Sequence
  Synthetic
uaaucagaacacuagcugca

SEQ ID NO: 785675 - RNA, 20 nt, Artificial Sequence
  Synthetic
acugcuuuucaaaggcugca

SEQ ID NO: 785676 - RNA, 20 nt, Artificial Sequence
  Synthetic
ccugggaggucaaggcugca

SEQ ID NO: 785677 - RNA, 20 nt, Artificial Sequence
  Synthetic
cuugguuguggauggcugca

SEQ ID NO: 785678 - RNA, 20 nt, Artificial Sequence
  Synthetic
auaauaauuguuaugcugca

SEQ ID NO: 785679 - RNA, 20 nt, Artificial Sequence
  Synthetic
cagacacauuugcugcugca

SEQ ID NO: 785680 - RNA, 20 nt, Artificial Sequence
  Synthetic
ccaggcagaaguuugcugca

SEQ ID NO: 785681 - RNA, 20 nt, Artificial Sequence
  Synthetic
augcggauuuuaaaucugca

SEQ ID NO: 785682 - RNA, 20 nt, Artificial Sequence
  Synthetic
cauacaacaggcaaucugca

SEQ ID NO: 785683 - RNA, 20 nt, Artificial Sequence
  Synthetic
ucacuaagaaaccaucugca

SEQ ID NO: 785684 - RNA, 20 nt, Artificial Sequence
  Synthetic
uauaauugcugggaucugca

SEQ ID NO: 785685 - RNA, 20 nt, Artificial Sequence
  Synthetic
auucaaguaauaacucugca

SEQ ID NO: 785686 - RNA, 20 nt, Artificial Sequence
  Synthetic
ccaguacuccugacucugca

SEQ ID NO: 785687 - RNA, 20 nt, Artificial Sequence
  Synthetic
ugggagauuggcucucugca

SEQ ID NO: 785688 - RNA, 20 nt, Artificial Sequence
  Synthetic
aauugauucaccauucugca

SEQ ID NO: 785689 - RNA, 20 nt, Artificial Sequence
  Synthetic
cuaguauguuguauucugca

SEQ ID NO: 785690 - RNA, 20 nt, Artificial Sequence
  Synthetic
uaaaauaaagagcuucugca

SEQ ID NO: 785691 - RNA, 20 nt, Artificial Sequence
  Synthetic
ucauucuagaaaguucugca

SEQ ID NO: 785692 - RNA, 20 nt, Artificial Sequence
  Synthetic
uuauugccucaauuucugca

SEQ ID NO: 785693 - RNA, 20 nt, Artificial Sequence
  Synthetic
cuuuuguauauauuucugca

SEQ ID NO: 785694 - RNA, 20 nt, Artificial Sequence
  Synthetic
cucuauaacauaaaagugca

SEQ ID NO: 785695 - RNA, 20 nt, Artificial Sequence
  Synthetic
aaauauucaauuaaagugca

SEQ ID NO: 785696 - RNA, 20 nt, Artificial Sequence
  Synthetic
cagaaauggagagaagugca

SEQ ID NO: 785697 - RNA, 20 nt, Artificial Sequence
  Synthetic
aauuaauguacugaagugca

SEQ ID NO: 785698 - RNA, 20 nt, Artificial Sequence
  Synthetic
aaaacacuuggaacagugca

SEQ ID NO: 785699 - RNA, 20 nt, Artificial Sequence
  Synthetic
uuuuucuggauaucagugca

SEQ ID NO: 785700 - RNA, 20 nt, Artificial Sequence
  Synthetic
augauaagaaagagagugca

SEQ ID NO: 785701 - RNA, 20 nt, Artificial Sequence
  Synthetic
uuucuauuuuaaauagugca

SEQ ID NO: 785702 - RNA, 20 nt, Artificial Sequence
  Synthetic
uuuccccgaacccuagugca

SEQ ID NO: 785703 - RNA, 20 nt, Artificial Sequence
  Synthetic
aagaaagccagucuagugca

SEQ ID NO: 785704 - RNA, 20 nt, Artificial Sequence
  Synthetic
uuuagucaagucuuagugca

SEQ ID NO: 785705 - RNA, 20 nt, Artificial Sequence
  Synthetic
aaggcaauauuaaacgugca

SEQ ID NO: 785706 - RNA, 20 nt, Artificial Sequence
  Synthetic
auacaaaaauuagccgugca

SEQ ID NO: 785707 - RNA, 20 nt, Artificial Sequence
  Synthetic
ucaagguggugacaggugca

SEQ ID NO: 785708 - RNA, 20 nt, Artificial Sequence
  Synthetic
cacucauugagcuaggugca

SEQ ID NO: 785709 - RNA, 20 nt, Artificial Sequence
  Synthetic
uaauguuagaggauggugca

SEQ ID NO: 785710 - RNA, 20 nt, Artificial Sequence
  Synthetic
caaaaacacacaguggugca

SEQ ID NO: 785711 - RNA, 20 nt, Artificial Sequence
  Synthetic
ugcagugguagaguggugca

SEQ ID NO: 785712 - RNA, 20 nt, Artificial Sequence
  Synthetic
uagccaggcgugguggugca

SEQ ID NO: 785713 - RNA, 20 nt, Artificial Sequence
  Synthetic
uuccucuauuugaaugugca

SEQ ID NO: 785714 - RNA, 20 nt, Artificial Sequence
  Synthetic
cuaugugcuuaacaugugca

SEQ ID NO: 785715 - RNA, 20 nt, Artificial Sequence
  Synthetic
caggcaagagagcaugugca

SEQ ID NO: 785716 - RNA, 20 nt, Artificial Sequence
  Synthetic
ugaggacacgaauaugugca

SEQ ID NO: 785717 - RNA, 20 nt, Artificial Sequence
  Synthetic
ccucagucagugccugugca

SEQ ID NO: 785718 - RNA, 20 nt, Artificial Sequence
  Synthetic
caauacagcauagcugugca

SEQ ID NO: 785719 - RNA, 20 nt, Artificial Sequence
  Synthetic
ugggggggguguucugugca

SEQ ID NO: 785720 - RNA, 20 nt, Artificial Sequence
  Synthetic
auuccuaccaacagugugca

SEQ ID NO: 785721 - RNA, 20 nt, Artificial Sequence
  Synthetic
uuaugugcuuacagugugca

SEQ ID NO: 785722 - RNA, 20 nt, Artificial Sequence
  Synthetic
cugaagugugggggugugca

SEQ ID NO: 785723 - RNA, 20 nt, Artificial Sequence
  Synthetic
caucuguuucuaauugugca

SEQ ID NO: 785724 - RNA, 20 nt, Artificial Sequence
  Synthetic
acuuuuguagugauugugca

SEQ ID NO: 785725 - RNA, 20 nt, Artificial Sequence
  Synthetic
auaagucaugaccuugugca

SEQ ID NO: 785726 - RNA, 20 nt, Artificial Sequence
  Synthetic
uguguuaggaaacaauugca

SEQ ID NO: 785727 - RNA, 20 nt, Artificial Sequence
  Synthetic
aauucugggaaccaauugca

SEQ ID NO: 785728 - RNA, 20 nt, Artificial Sequence
  Synthetic
aguuuuccuucuccauugca

SEQ ID NO: 785729 - RNA, 20 nt, Artificial Sequence
  Synthetic
uguucauuauuuagauugca

SEQ ID NO: 785730 - RNA, 20 nt, Artificial Sequence
  Synthetic
agaacagauuggugauugca

SEQ ID NO: 785731 - RNA, 20 nt, Artificial Sequence
  Synthetic
accagguacagcauauugca

SEQ ID NO: 785732 - RNA, 20 nt, Artificial Sequence
  Synthetic
uauggcugcauaguauugca

SEQ ID NO: 785733 - RNA, 20 nt, Artificial Sequence
  Synthetic
uacggcugaguaguauugca

SEQ ID NO: 785734 - RNA, 20 nt, Artificial Sequence
  Synthetic
cuuuugguaguuuuauugca

SEQ ID NO: 785735 - RNA, 20 nt, Artificial Sequence
  Synthetic
accuaggaauacaacuugca

SEQ ID NO: 785736 - RNA, 20 nt, Artificial Sequence
  Synthetic
aaucauaucaaagacuugca

SEQ ID NO: 785737 - RNA, 20 nt, Artificial Sequence
  Synthetic
auggcagcagaauacuugca

SEQ ID NO: 785738 - RNA, 20 nt, Artificial Sequence
  Synthetic
aaccauuucaaacccuugca

SEQ ID NO: 785739 - RNA, 20 nt, Artificial Sequence
  Synthetic
uagaauguuucuagcuugca

SEQ ID NO: 785740 - RNA, 20 nt, Artificial Sequence
  Synthetic
caugggucugaaggcuugca

SEQ ID NO: 785741 - RNA, 20 nt, Artificial Sequence
  Synthetic
agaugcaaaacaggcuugca

SEQ ID NO: 785742 - RNA, 20 nt, Artificial Sequence
  Synthetic
ucauccagcuucugcuugca

SEQ ID NO: 785743 - RNA, 20 nt, Artificial Sequence
  Synthetic
uaaacagcuaaaaucuugca

SEQ ID NO: 785744 - RNA, 20 nt, Artificial Sequence
  Synthetic
cacacacacacgaucuugca

SEQ ID NO: 785745 - RNA, 20 nt, Artificial Sequence
  Synthetic
uugggggaaaaccucuugca

SEQ ID NO: 785746 - RNA, 20 nt, Artificial Sequence
  Synthetic
uagaguuguauuuucuugca

SEQ ID NO: 785747 - RNA, 20 nt, Artificial Sequence
  Synthetic
acaaguuuaguaaaguugca

SEQ ID NO: 785748 - RNA, 20 nt, Artificial Sequence
  Synthetic
uaaaucuguguucaguugca

SEQ ID NO: 785749 - RNA, 20 nt, Artificial Sequence
  Synthetic
uucuuagacaaauaguugca

SEQ ID NO: 785750 - RNA, 20 nt, Artificial Sequence
  Synthetic
uccacuccuuuggcguugca

SEQ ID NO: 785751 - RNA, 20 nt, Artificial Sequence
  Synthetic
aauuuuaaauaccgguugca

SEQ ID NO: 785752 - RNA, 20 nt, Artificial Sequence
  Synthetic
ucacagcuauuaugguugca

SEQ ID NO: 785753 - RNA, 20 nt, Artificial Sequence
  Synthetic
ccccuuccccaaaauuugca

SEQ ID NO: 785754 - RNA, 20 nt, Artificial Sequence
  Synthetic
aaaaaauccuaaaauuugca

SEQ ID NO: 785755 - RNA, 20 nt, Artificial Sequence
  Synthetic
auagaacuuugaaauuugca

SEQ ID NO: 785756 - RNA, 20 nt, Artificial Sequence
  Synthetic
uaucuguaucucaauuugca

SEQ ID NO: 785757 - RNA, 20 nt, Artificial Sequence
  Synthetic
ucuuuuauuaguaauuugca

SEQ ID NO: 785758 - RNA, 20 nt, Artificial Sequence
  Synthetic
auuuacaccauuaauuugca

SEQ ID NO: 785759 - RNA, 20 nt, Artificial Sequence
  Synthetic
cauuuuaguuuuaauuugca

SEQ ID NO: 785760 - RNA, 20 nt, Artificial Sequence
  Synthetic
aucuguugggcacauuugca

SEQ ID NO: 785761 - RNA, 20 nt, Artificial Sequence
  Synthetic
ucuuuugguuuccauuugca

SEQ ID NO: 785762 - RNA, 20 nt, Artificial Sequence
  Synthetic
ucuuucccgcaauauuugca

SEQ ID NO: 785763 - RNA, 20 nt, Artificial Sequence
  Synthetic
uaugucacauuuuauuugca

SEQ ID NO: 785764 - RNA, 20 nt, Artificial Sequence
  Synthetic
auacaguaaaauccuuugca

SEQ ID NO: 785765 - RNA, 20 nt, Artificial Sequence
  Synthetic
ugaacauuugguccuuugca

SEQ ID NO: 785766 - RNA, 20 nt, Artificial Sequence
  Synthetic
augagaucauguccuuugca

SEQ ID NO: 785767 - RNA, 20 nt, Artificial Sequence
  Synthetic
augacuucauguccuuugca

SEQ ID NO: 785768 - RNA, 20 nt, Artificial Sequence
  Synthetic
augaguucauguccuuugca

SEQ ID NO: 785769 - RNA, 20 nt, Artificial Sequence
  Synthetic
uuuuugaauugagcuuugca

SEQ ID NO: 785770 - RNA, 20 nt, Artificial Sequence
  Synthetic
uuuuccugcauggcuuugca

SEQ ID NO: 785771 - RNA, 20 nt, Artificial Sequence
  Synthetic
ucugcccuuguggcuuugca

SEQ ID NO: 785772 - RNA, 20 nt, Artificial Sequence
  Synthetic
uccaccccuguggguuugca

SEQ ID NO: 785773 - RNA, 20 nt, Artificial Sequence
  Synthetic
aauugacucacugguuugca

SEQ ID NO: 785774 - RNA, 20 nt, Artificial Sequence
  Synthetic
ucacaccuugaauguuugca

SEQ ID NO: 785775 - RNA, 20 nt, Artificial Sequence
  Synthetic
ucaugguaauguuguuugca

SEQ ID NO: 785776 - RNA, 20 nt, Artificial Sequence
  Synthetic
auacaauauuagauuuugca

SEQ ID NO: 785777 - RNA, 20 nt, Artificial Sequence
  Synthetic
ucaugaaauaauauuuugca

SEQ ID NO: 785778 - RNA, 20 nt, Artificial Sequence
  Synthetic
aaugucuuuuauauuuugca

SEQ ID NO: 785779 - RNA, 20 nt, Artificial Sequence
  Synthetic
acugccccauaacuuuugca

SEQ ID NO: 785780 - RNA, 20 nt, Artificial Sequence
  Synthetic
uuuagacaucuaguuuugca

SEQ ID NO: 785781 - RNA, 20 nt, Artificial Sequence
  Synthetic
uuuauuuagucauuuuugca

SEQ ID NO: 785782 - RNA, 20 nt, Artificial Sequence
  Synthetic
uauuguacuauauuuuugca

SEQ ID NO: 785783 - RNA, 20 nt, Artificial Sequence
  Synthetic
aguuuacugaacuuuuugca

SEQ ID NO: 785784 - RNA, 20 nt, Artificial Sequence
  Synthetic
cuucauucaagguuuuugca

SEQ ID NO: 785785 - RNA, 20 nt, Artificial Sequence
  Synthetic
aagagcacagaaaaaaauca

SEQ ID NO: 785786 - RNA, 20 nt, Artificial Sequence
  Synthetic
uggaaacaauaaaaaaauca

SEQ ID NO: 785787 - RNA, 20 nt, Artificial Sequence
  Synthetic
acauuauggcuaaaaaauca

SEQ ID NO: 785788 - RNA, 20 nt, Artificial Sequence
  Synthetic
cacuguugucucaaaaauca

SEQ ID NO: 785789 - RNA, 20 nt, Artificial Sequence
  Synthetic
aggaaaaaggagaaaaauca

SEQ ID NO: 785790 - RNA, 20 nt, Artificial Sequence
  Synthetic
cuguggacuaauaaaaauca

SEQ ID NO: 785791 - RNA, 20 nt, Artificial Sequence
  Synthetic
cauaaaaacuaacaaaauca

SEQ ID NO: 785792 - RNA, 20 nt, Artificial Sequence
  Synthetic
aagcuagguguccaaaauca

SEQ ID NO: 785793 - RNA, 20 nt, Artificial Sequence
  Synthetic
uacaaaagagaucaaaauca

SEQ ID NO: 785794 - RNA, 20 nt, Artificial Sequence
  Synthetic
caagacacuuaucaaaauca

SEQ ID NO: 785795 - RNA, 20 nt, Artificial Sequence
  Synthetic
acuuuugagucucaaaauca

SEQ ID NO: 785796 - RNA, 20 nt, Artificial Sequence
  Synthetic
auagggacaaaagaaaauca

SEQ ID NO: 785797 - RNA, 20 nt, Artificial Sequence
  Synthetic
aauauuaaagaauaaaauca

SEQ ID NO: 785798 - RNA, 20 nt, Artificial Sequence
  Synthetic
uuuaaaugaagauaaaauca

SEQ ID NO: 785799 - RNA, 20 nt, Artificial Sequence
  Synthetic
uuagaauauggguaaaauca

SEQ ID NO: 785800 - RNA, 20 nt, Artificial Sequence
  Synthetic
uaggcauguauguaaaauca

SEQ ID NO: 785801 - RNA, 20 nt, Artificial Sequence
  Synthetic
auauugaaauuguaaaauca

SEQ ID NO: 785802 - RNA, 20 nt, Artificial Sequence
  Synthetic
ccucaggaaacuuaaaauca

SEQ ID NO: 785803 - RNA, 20 nt, Artificial Sequence
  Synthetic
aaggaauucauuuaaaauca

SEQ ID NO: 785804 - RNA, 20 nt, Artificial Sequence
  Synthetic
uuguauagaaucgcaaauca

SEQ ID NO: 785805 - RNA, 20 nt, Artificial Sequence
  Synthetic
auugcucaaugaucaaauca

SEQ ID NO: 785806 - RNA, 20 nt, Artificial Sequence
  Synthetic
aauguguaaugaucaaauca

SEQ ID NO: 785807 - RNA, 20 nt, Artificial Sequence
  Synthetic
ucugacaucaagucaaauca

SEQ ID NO: 785808 - RNA, 20 nt, Artificial Sequence
  Synthetic
aguaaaagaaaaagaaauca

SEQ ID NO: 785809 - RNA, 20 nt, Artificial Sequence
  Synthetic
caguccaggagaagaaauca

SEQ ID NO: 785810 - RNA, 20 nt, Artificial Sequence
  Synthetic
auauauaaauacagaaauca

SEQ ID NO: 785811 - RNA, 20 nt, Artificial Sequence
  Synthetic
uaaauuuguuucagaaauca

SEQ ID NO: 785812 - RNA, 20 nt, Artificial Sequence
  Synthetic
acaagucaaaccugaaauca

SEQ ID NO: 785813 - RNA, 20 nt, Artificial Sequence
  Synthetic
aguagcuugcaaauaaauca

SEQ ID NO: 785814 - RNA, 20 nt, Artificial Sequence
  Synthetic
uggucauauuaaauaaauca

SEQ ID NO: 785815 - RNA, 20 nt, Artificial Sequence
  Synthetic
aaaucugauuccauaaauca

SEQ ID NO: 785816 - RNA, 20 nt, Artificial Sequence
  Synthetic
aaaauauuggggauaaauca

SEQ ID NO: 785817 - RNA, 20 nt, Artificial Sequence
  Synthetic
auuuccuguuagcuaaauca

SEQ ID NO: 785818 - RNA, 20 nt, Artificial Sequence
  Synthetic
aggauuuauggaguaaauca

SEQ ID NO: 785819 - RNA, 20 nt, Artificial Sequence
  Synthetic
cugcuuucagaaaacaauca

SEQ ID NO: 785820 - RNA, 20 nt, Artificial Sequence
  Synthetic
cuuagccaugcuaacaauca

SEQ ID NO: 785821 - RNA, 20 nt, Artificial Sequence
  Synthetic
uauugacauugacacaauca

SEQ ID NO: 785822 - RNA, 20 nt, Artificial Sequence
  Synthetic
cuggagaggccucacaauca

SEQ ID NO: 785823 - RNA, 20 nt, Artificial Sequence
  Synthetic
cuagggaggccucacaauca

SEQ ID NO: 785824 - RNA, 20 nt, Artificial Sequence
  Synthetic
ucaguuuuaagagacaauca

SEQ ID NO: 785825 - RNA, 20 nt, Artificial Sequence
  Synthetic
aaauccaccugggacaauca

SEQ ID NO: 785826 - RNA, 20 nt, Artificial Sequence
  Synthetic
ccucaggaaacuuacaauca

SEQ ID NO: 785827 - RNA, 20 nt, Artificial Sequence
  Synthetic
ccuccggaaacuuacaauca

SEQ ID NO: 785828 - RNA, 20 nt, Artificial Sequence
  Synthetic
aaugagaguuuuaccaauca

SEQ ID NO: 785829 - RNA, 20 nt, Artificial Sequence
  Synthetic
aaguaccuauaacccaauca

SEQ ID NO: 785830 - RNA, 20 nt, Artificial Sequence
  Synthetic
aaacacauagcacccaauca

SEQ ID NO: 785831 - RNA, 20 nt, Artificial Sequence
  Synthetic
auguagcucagccccaauca

SEQ ID NO: 785832 - RNA, 20 nt, Artificial Sequence
  Synthetic
ugguaggguuuggccaauca

SEQ ID NO: 785833 - RNA, 20 nt, Artificial Sequence
  Synthetic
aacauuacguuaagcaauca

SEQ ID NO: 785834 - RNA, 20 nt, Artificial Sequence
  Synthetic
agaagugaaaagagcaauca

SEQ ID NO: 785835 - RNA, 20 nt, Artificial Sequence
  Synthetic
ccuucccuaauuagcaauca

SEQ ID NO: 785836 - RNA, 20 nt, Artificial Sequence
  Synthetic
cauuauaacaacaucaauca

SEQ ID NO: 785837 - RNA, 20 nt, Artificial Sequence
  Synthetic
cugcaagugaaguucaauca

SEQ ID NO: 785838 - RNA, 20 nt, Artificial Sequence
  Synthetic
ccguauaaaagguucaauca

SEQ ID NO: 785839 - RNA, 20 nt, Artificial Sequence
  Synthetic
uguaaugugaguuucaauca

SEQ ID NO: 785840 - RNA, 20 nt, Artificial Sequence
  Synthetic
agaaaugacccaaagaauca

SEQ ID NO: 785841 - RNA, 20 nt, Artificial Sequence
  Synthetic
uaggaauuguacaagaauca

SEQ ID NO: 785842 - RNA, 20 nt, Artificial Sequence
  Synthetic
ugagggagagagaagaauca

SEQ ID NO: 785843 - RNA, 20 nt, Artificial Sequence
  Synthetic
aguggccuuaugaagaauca

SEQ ID NO: 785844 - RNA, 20 nt, Artificial Sequence
  Synthetic
cccugugguaggcagaauca

SEQ ID NO: 785845 - RNA, 20 nt, Artificial Sequence
  Synthetic
cuggggaggccucagaauca

SEQ ID NO: 785846 - RNA, 20 nt, Artificial Sequence
  Synthetic
agagauguagaguagaauca

SEQ ID NO: 785847 - RNA, 20 nt, Artificial Sequence
  Synthetic
aaaaaccagguacggaauca

SEQ ID NO: 785848 - RNA, 20 nt, Artificial Sequence
  Synthetic
cagugguaaccugggaauca

SEQ ID NO: 785849 - RNA, 20 nt, Artificial Sequence
  Synthetic
uacuuguuaggauggaauca

SEQ ID NO: 785850 - RNA, 20 nt, Artificial Sequence
  Synthetic
cagcuguaaaagaugaauca

SEQ ID NO: 785851 - RNA, 20 nt, Artificial Sequence
  Synthetic
agugggagguaacugaauca

SEQ ID NO: 785852 - RNA, 20 nt, Artificial Sequence
  Synthetic
ugugggagguaacugaauca

SEQ ID NO: 785853 - RNA, 20 nt, Artificial Sequence
  Synthetic
agguggagguaacugaauca

SEQ ID NO: 785854 - RNA, 20 nt, Artificial Sequence
  Synthetic
uucugauaacaagugaauca

SEQ ID NO: 785855 - RNA, 20 nt, Artificial Sequence
  Synthetic
aggugcagauaauugaauca

SEQ ID NO: 785856 - RNA, 20 nt, Artificial Sequence
  Synthetic
agguggagauaauugaauca

SEQ ID NO: 785857 - RNA, 20 nt, Artificial Sequence
  Synthetic
agggggaaguaauugaauca

SEQ ID NO: 785858 - RNA, 20 nt, Artificial Sequence
  Synthetic
agugagagguaauugaauca

SEQ ID NO: 785859 - RNA, 20 nt, Artificial Sequence
  Synthetic
cgugggagguaauugaauca

SEQ ID NO: 785860 - RNA, 20 nt, Artificial Sequence
  Synthetic
aauaauaacaauaauaauca

SEQ ID NO: 785861 - RNA, 20 nt, Artificial Sequence
  Synthetic
ugugcuuauucacauaauca

SEQ ID NO: 785862 - RNA, 20 nt, Artificial Sequence
  Synthetic
ugaaaccauccccauaauca

SEQ ID NO: 785863 - RNA, 20 nt, Artificial Sequence
  Synthetic
cacguaaggaaggauaauca

SEQ ID NO: 785864 - RNA, 20 nt, Artificial Sequence
  Synthetic
auucagccuaaguauaauca

SEQ ID NO: 785865 - RNA, 20 nt, Artificial Sequence
  Synthetic
ccucaggaaacuuauaauca

SEQ ID NO: 785866 - RNA, 20 nt, Artificial Sequence
  Synthetic
ccuaacuucauuuauaauca

SEQ ID NO: 785867 - RNA, 20 nt, Artificial Sequence
  Synthetic
uucccauuuugaacuaauca

SEQ ID NO: 785868 - RNA, 20 nt, Artificial Sequence
  Synthetic
aagaguaaggccaguaauca

SEQ ID NO: 785869 - RNA, 20 nt, Artificial Sequence
  Synthetic
uucuuguagaaagguaauca

SEQ ID NO: 785870 - RNA, 20 nt, Artificial Sequence
  Synthetic
uuccugagauccuguaauca

SEQ ID NO: 785871 - RNA, 20 nt, Artificial Sequence
  Synthetic
agugggagguaauuuaauca

SEQ ID NO: 785872 - RNA, 20 nt, Artificial Sequence
  Synthetic
uuuguuuuguuguuuaauca

SEQ ID NO: 785873 - RNA, 20 nt, Artificial Sequence
  Synthetic
aaaaguuuuuaaaaacauca

SEQ ID NO: 785874 - RNA, 20 nt, Artificial Sequence
  Synthetic
ucaugcaugagaaaacauca

SEQ ID NO: 785875 - RNA, 20 nt, Artificial Sequence
  Synthetic
uuguaacaaauaaaacauca

SEQ ID NO: 785876 - RNA, 20 nt, Artificial Sequence
  Synthetic
auuauuaagaggaaacauca

SEQ ID NO: 785877 - RNA, 20 nt, Artificial Sequence
  Synthetic
cagcuucuauuacaacauca

SEQ ID NO: 785878 - RNA, 20 nt, Artificial Sequence
  Synthetic
aucucccuaguccaacauca

SEQ ID NO: 785879 - RNA, 20 nt, Artificial Sequence
  Synthetic
uccuuucauuugcaacauca

SEQ ID NO: 785880 - RNA, 20 nt, Artificial Sequence
  Synthetic
aaaauuauguuauaacauca

SEQ ID NO: 785881 - RNA, 20 nt, Artificial Sequence
  Synthetic
ccuaggaaaaagacacauca

SEQ ID NO: 785882 - RNA, 20 nt, Artificial Sequence
  Synthetic
uucuaauuaaagacacauca

SEQ ID NO: 785883 - RNA, 20 nt, Artificial Sequence
  Synthetic
aucuacagauuuacacauca

SEQ ID NO: 785884 - RNA, 20 nt, Artificial Sequence
  Synthetic
uauuaaaacuucccacauca

SEQ ID NO: 785885 - RNA, 20 nt, Artificial Sequence
  Synthetic
aaugugaaacaagcacauca

SEQ ID NO: 785886 - RNA, 20 nt, Artificial Sequence
  Synthetic
ugcuacaguacugcacauca

SEQ ID NO: 785887 - RNA, 20 nt, Artificial Sequence
  Synthetic
aaugcauaauaaucacauca

SEQ ID NO: 785888 - RNA, 20 nt, Artificial Sequence
  Synthetic
aauggguaauaaucacauca

SEQ ID NO: 785889 - RNA, 20 nt, Artificial Sequence
  Synthetic
aauaugaaauagucacauca

SEQ ID NO: 785890 - RNA, 20 nt, Artificial Sequence
  Synthetic
uuaugcucuuggucacauca

SEQ ID NO: 785891 - RNA, 20 nt, Artificial Sequence
  Synthetic
auaauagguuuuggacauca

SEQ ID NO: 785892 - RNA, 20 nt, Artificial Sequence
  Synthetic
cauauauuugaccuacauca

SEQ ID NO: 785893 - RNA, 20 nt, Artificial Sequence
  Synthetic
uucugcuuaaggcuacauca

SEQ ID NO: 785894 - RNA, 20 nt, Artificial Sequence
  Synthetic
caggacuuuaguuuacauca

SEQ ID NO: 785895 - RNA, 20 nt, Artificial Sequence
  Synthetic
cugaugaauucuaaccauca

SEQ ID NO: 785896 - RNA, 20 nt, Artificial Sequence
  Synthetic
agcaggagaugucaccauca

SEQ ID NO: 785897 - RNA, 20 nt, Artificial Sequence
  Synthetic
acauccagcugggaccauca

SEQ ID NO: 785898 - RNA, 20 nt, Artificial Sequence
  Synthetic
caaguuaaaucaucccauca

SEQ ID NO: 785899 - RNA, 20 nt, Artificial Sequence
  Synthetic
uaaaaugcaugaugccauca

SEQ ID NO: 785900 - RNA, 20 nt, Artificial Sequence
  Synthetic
cuuucuucuauacuccauca

SEQ ID NO: 785901 - RNA, 20 nt, Artificial Sequence
  Synthetic
aaggaagcaacuguccauca

SEQ ID NO: 785902 - RNA, 20 nt, Artificial Sequence
  Synthetic
uugaugcuuacuguccauca

SEQ ID NO: 785903 - RNA, 20 nt, Artificial Sequence
  Synthetic
uggucuuccaccuuccauca

SEQ ID NO: 785904 - RNA, 20 nt, Artificial Sequence
  Synthetic
aagacauaggguuuccauca

SEQ ID NO: 785905 - RNA, 20 nt, Artificial Sequence
  Synthetic
auaaaaagaaaaaagcauca

SEQ ID NO: 785906 - RNA, 20 nt, Artificial Sequence
  Synthetic
aaacaauaugaaaagcauca

SEQ ID NO: 785907 - RNA, 20 nt, Artificial Sequence
  Synthetic
uuuauacuccuaaagcauca

SEQ ID NO: 785908 - RNA, 20 nt, Artificial Sequence
  Synthetic
ugggucccagaucagcauca

SEQ ID NO: 785909 - RNA, 20 nt, Artificial Sequence
  Synthetic
aguuauuuccccuagcauca

SEQ ID NO: 785910 - RNA, 20 nt, Artificial Sequence
  Synthetic
uaguugauaaauuagcauca

SEQ ID NO: 785911 - RNA, 20 nt, Artificial Sequence
  Synthetic
uugggugauccuuagcauca

SEQ ID NO: 785912 - RNA, 20 nt, Artificial Sequence
  Synthetic
uugaaaauucauuggcauca

SEQ ID NO: 785913 - RNA, 20 nt, Artificial Sequence
  Synthetic
uaaugguguggucugcauca

SEQ ID NO: 785914 - RNA, 20 nt, Artificial Sequence
  Synthetic
aagaaaagaacauugcauca

SEQ ID NO: 785915 - RNA, 20 nt, Artificial Sequence
  Synthetic
uacgaugaaaaaaaucauca

SEQ ID NO: 785916 - RNA, 20 nt, Artificial Sequence
  Synthetic
aaucaaauguauuaucauca

SEQ ID NO: 785917 - RNA, 20 nt, Artificial Sequence
  Synthetic
ccuacccccaccccucauca

SEQ ID NO: 785918 - RNA, 20 nt, Artificial Sequence
  Synthetic
aaaaccccuuugccucauca

SEQ ID NO: 785919 - RNA, 20 nt, Artificial Sequence
  Synthetic
aauaucuuucuaucucauca

SEQ ID NO: 785920 - RNA, 20 nt, Artificial Sequence
  Synthetic
caugggagguacucucauca

SEQ ID NO: 785921 - RNA, 20 nt, Artificial Sequence
  Synthetic
cucagcaucacuagucauca

SEQ ID NO: 785922 - RNA, 20 nt, Artificial Sequence
  Synthetic
aucucugggcgaggucauca

SEQ ID NO: 785923 - RNA, 20 nt, Artificial Sequence
  Synthetic
caaaaagcuauaugucauca

SEQ ID NO: 785924 - RNA, 20 nt, Artificial Sequence
  Synthetic
uuggagaugagaauucauca

SEQ ID NO: 785925 - RNA, 20 nt, Artificial Sequence
  Synthetic
aacauuaauugaauucauca

SEQ ID NO: 785926 - RNA, 20 nt, Artificial Sequence
  Synthetic
uuuugcaucaauguucauca

SEQ ID NO: 785927 - RNA, 20 nt, Artificial Sequence
  Synthetic
uuuugcaucgauguucauca

SEQ ID NO: 785928 - RNA, 20 nt, Artificial Sequence
  Synthetic
uuucgcauugauguucauca

SEQ ID NO: 785929 - RNA, 20 nt, Artificial Sequence
  Synthetic
aaaaagacaagcuuucauca

SEQ ID NO: 785930 - RNA, 20 nt, Artificial Sequence
  Synthetic
uaauaaugaaaaaaagauca

SEQ ID NO: 785931 - RNA, 20 nt, Artificial Sequence
  Synthetic
cguggcauauccaaagauca

SEQ ID NO: 785932 - RNA, 20 nt, Artificial Sequence
  Synthetic
aggcugggauuccaagauca

SEQ ID NO: 785933 - RNA, 20 nt, Artificial Sequence
  Synthetic
ugggcaacuuaauaagauca

SEQ ID NO: 785934 - RNA, 20 nt, Artificial Sequence
  Synthetic
agacagacaauguaagauca

SEQ ID NO: 785935 - RNA, 20 nt, Artificial Sequence
  Synthetic
uggugaacccuuacagauca

SEQ ID NO: 785936 - RNA, 20 nt, Artificial Sequence
  Synthetic
aauguauagugaucagauca

SEQ ID NO: 785937 - RNA, 20 nt, Artificial Sequence
  Synthetic
uggagauucuucagagauca

SEQ ID NO: 785938 - RNA, 20 nt, Artificial Sequence
  Synthetic
agguacuuacaaggagauca

SEQ ID NO: 785939 - RNA, 20 nt, Artificial Sequence
  Synthetic
cgcuugaaccugggagauca

SEQ ID NO: 785940 - RNA, 20 nt, Artificial Sequence
  Synthetic
aggauagaagucugagauca

SEQ ID NO: 785941 - RNA, 20 nt, Artificial Sequence
  Synthetic
acuuaauucaaaauagauca

SEQ ID NO: 785942 - RNA, 20 nt, Artificial Sequence
  Synthetic
aaaaauuaagcccuagauca

SEQ ID NO: 785943 - RNA, 20 nt, Artificial Sequence
  Synthetic
auuuuggaaaaaguagauca

SEQ ID NO: 785944 - RNA, 20 nt, Artificial Sequence
  Synthetic
aauguagagcccuuagauca

SEQ ID NO: 785945 - RNA, 20 nt, Artificial Sequence
  Synthetic
uuuaggguagguuuagauca

SEQ ID NO: 785946 - RNA, 20 nt, Artificial Sequence
  Synthetic
ugguuuucaaagcacgauca

SEQ ID NO: 785947 - RNA, 20 nt, Artificial Sequence
  Synthetic
uuaggauuggguaaggauca

SEQ ID NO: 785948 - RNA, 20 nt, Artificial Sequence
  Synthetic
uuauguacuucauaggauca

SEQ ID NO: 785949 - RNA, 20 nt, Artificial Sequence
  Synthetic
uuuaagacuagaagggauca

SEQ ID NO: 785950 - RNA, 20 nt, Artificial Sequence
  Synthetic
uuugccuggcuuugggauca

SEQ ID NO: 785951 - RNA, 20 nt, Artificial Sequence
  Synthetic
aaauguaguggaauggauca

SEQ ID NO: 785952 - RNA, 20 nt, Artificial Sequence
  Synthetic
uuccuccaaaugguggauca

SEQ ID NO: 785953 - RNA, 20 nt, Artificial Sequence
  Synthetic
aaugggcuucacaaugauca

SEQ ID NO: 785954 - RNA, 20 nt, Artificial Sequence
  Synthetic
cuuagaaaagagaaugauca

SEQ ID NO: 785955 - RNA, 20 nt, Artificial Sequence
  Synthetic
ugguuuucacagcaugauca

SEQ ID NO: 785956 - RNA, 20 nt, Artificial Sequence
  Synthetic
uuaaacaauaaauaugauca

SEQ ID NO: 785957 - RNA, 20 nt, Artificial Sequence
  Synthetic
cuuugagugcuguaugauca

SEQ ID NO: 785958 - RNA, 20 nt, Artificial Sequence
  Synthetic
uaaaaacauucaccugauca

SEQ ID NO: 785959 - RNA, 20 nt, Artificial Sequence
  Synthetic
aauauuuccuauucugauca

SEQ ID NO: 785960 - RNA, 20 nt, Artificial Sequence
  Synthetic
uaacauuguacuagugauca

SEQ ID NO: 785961 - RNA, 20 nt, Artificial Sequence
  Synthetic
augauaacaaguguugauca

SEQ ID NO: 785962 - RNA, 20 nt, Artificial Sequence
  Synthetic
caagugaugauauuugauca

SEQ ID NO: 785963 - RNA, 20 nt, Artificial Sequence
  Synthetic
acuuaacccaccaaauauca

SEQ ID NO: 785964 - RNA, 20 nt, Artificial Sequence
  Synthetic
uuugcaucauaccaauauca

SEQ ID NO: 785965 - RNA, 20 nt, Artificial Sequence
  Synthetic
acaaagguuauccaauauca

SEQ ID NO: 785966 - RNA, 20 nt, Artificial Sequence
  Synthetic
ucuagacaauaguaauauca

SEQ ID NO: 785967 - RNA, 20 nt, Artificial Sequence
  Synthetic
uauaaaauauguuaauauca

SEQ ID NO: 785968 - RNA, 20 nt, Artificial Sequence
  Synthetic
uuagaaaucacuacauauca

SEQ ID NO: 785969 - RNA, 20 nt, Artificial Sequence
  Synthetic
ccuccauaaauuacauauca

SEQ ID NO: 785970 - RNA, 20 nt, Artificial Sequence
  Synthetic
ucuagcauuaguccauauca

SEQ ID NO: 785971 - RNA, 20 nt, Artificial Sequence
  Synthetic
cuuagguugauuccauauca

SEQ ID NO: 785972 - RNA, 20 nt, Artificial Sequence
  Synthetic
uuuagguugauuccauauca

SEQ ID NO: 785973 - RNA, 20 nt, Artificial Sequence
  Synthetic
uuggcauaaaauucauauca

SEQ ID NO: 785974 - RNA, 20 nt, Artificial Sequence
  Synthetic
agaggacugaaaagauauca

SEQ ID NO: 785975 - RNA, 20 nt, Artificial Sequence
  Synthetic
agaccaagcaggagauauca

SEQ ID NO: 785976 - RNA, 20 nt, Artificial Sequence
  Synthetic
cuaccaucuuugagauauca

SEQ ID NO: 785977 - RNA, 20 nt, Artificial Sequence
  Synthetic
uuccaagccaaaauauauca

SEQ ID NO: 785978 - RNA, 20 nt, Artificial Sequence
  Synthetic
cugaagaaaggaauauauca

SEQ ID NO: 785979 - RNA, 20 nt, Artificial Sequence
  Synthetic
cggcaucauguaauauauca

SEQ ID NO: 785980 - RNA, 20 nt, Artificial Sequence
  Synthetic
acuaauuuaugcauauauca

SEQ ID NO: 785981 - RNA, 20 nt, Artificial Sequence
  Synthetic
auaauauguuggauauauca

SEQ ID NO: 785982 - RNA, 20 nt, Artificial Sequence
  Synthetic
aauguggcacauauauauca

SEQ ID NO: 785983 - RNA, 20 nt, Artificial Sequence
  Synthetic
caaauauccaaacuauauca

SEQ ID NO: 785984 - RNA, 20 nt, Artificial Sequence
  Synthetic
uccauuucaaaaaccuauca

SEQ ID NO: 785985 - RNA, 20 nt, Artificial Sequence
  Synthetic
uguugcuaaugaagcuauca

SEQ ID NO: 785986 - RNA, 20 nt, Artificial Sequence
  Synthetic
cccccucccagcugcuauca

SEQ ID NO: 785987 - RNA, 20 nt, Artificial Sequence
  Synthetic
agccaguccaaaaucuauca

SEQ ID NO: 785988 - RNA, 20 nt, Artificial Sequence
  Synthetic
caagcauaauaguucuauca

SEQ ID NO: 785989 - RNA, 20 nt, Artificial Sequence
  Synthetic
auauaggcaugcaaguauca

SEQ ID NO: 785990 - RNA, 20 nt, Artificial Sequence
  Synthetic
acaaauaucccuuaguauca

SEQ ID NO: 785991 - RNA, 20 nt, Artificial Sequence
  Synthetic
caauuuuaaauaggguauca

SEQ ID NO: 785992 - RNA, 20 nt, Artificial Sequence
  Synthetic
augacaagaauuggguauca

SEQ ID NO: 785993 - RNA, 20 nt, Artificial Sequence
  Synthetic
accuagguauacauguauca

SEQ ID NO: 785994 - RNA, 20 nt, Artificial Sequence
  Synthetic
uaaugaaagaggcuguauca

SEQ ID NO: 785995 - RNA, 20 nt, Artificial Sequence
  Synthetic
acacugaaauugcuguauca

SEQ ID NO: 785996 - RNA, 20 nt, Artificial Sequence
  Synthetic
uaaguguauuucaauuauca

SEQ ID NO: 785997 - RNA, 20 nt, Artificial Sequence
  Synthetic
uaagaaucuaaacauuauca

SEQ ID NO: 785998 - RNA, 20 nt, Artificial Sequence
  Synthetic
cuguuacagagacauuauca

SEQ ID NO: 785999 - RNA, 20 nt, Artificial Sequence
  Synthetic
uuggaugaucaauauuauca

SEQ ID NO: 786000 - RNA, 20 nt, Artificial Sequence
  Synthetic
uugugauuacuuuauuauca

SEQ ID NO: 786001 - RNA, 20 nt, Artificial Sequence
  Synthetic
aauaugcagaauacuuauca

SEQ ID NO: 786002 - RNA, 20 nt, Artificial Sequence
  Synthetic
auugucgcuuaggcuuauca

SEQ ID NO: 786003 - RNA, 20 nt, Artificial Sequence
  Synthetic
uuucuaucaaaaucuuauca

SEQ ID NO: 786004 - RNA, 20 nt, Artificial Sequence
  Synthetic
uuaguaccaauaucuuauca

SEQ ID NO: 786005 - RNA, 20 nt, Artificial Sequence
  Synthetic
uuguugauuacuucuuauca

SEQ ID NO: 786006 - RNA, 20 nt, Artificial Sequence
  Synthetic
aauagguuaauggguuauca

SEQ ID NO: 786007 - RNA, 20 nt, Artificial Sequence
  Synthetic
ucuggcuuuauauguuauca

SEQ ID NO: 786008 - RNA, 20 nt, Artificial Sequence
  Synthetic
auauuccuacucauuuauca

SEQ ID NO: 786009 - RNA, 20 nt, Artificial Sequence
  Synthetic
uuucagcagcaacuuuauca

SEQ ID NO: 786010 - RNA, 20 nt, Artificial Sequence
  Synthetic
aguguauauauaguuuauca

SEQ ID NO: 786011 - RNA, 20 nt, Artificial Sequence
  Synthetic
aguugagcuggauuuuauca

SEQ ID NO: 786012 - RNA, 20 nt, Artificial Sequence
  Synthetic
aaaggaauuagcuuuuauca

SEQ ID NO: 786013 - RNA, 20 nt, Artificial Sequence
  Synthetic
agugaaaaugucuuuuauca

SEQ ID NO: 786014 - RNA, 20 nt, Artificial Sequence
  Synthetic
agaguuaaauucuuuuauca

SEQ ID NO: 786015 - RNA, 20 nt, Artificial Sequence
  Synthetic
uuuaaaaaauuguuuuauca

SEQ ID NO: 786016 - RNA, 20 nt, Artificial Sequence
  Synthetic
cagugcauauuguuuuauca

SEQ ID NO: 786017 - RNA, 20 nt, Artificial Sequence
  Synthetic
cagcuuaaaaaaaaaacuca

SEQ ID NO: 786018 - RNA, 20 nt, Artificial Sequence
  Synthetic
aucauguuucagaaaacuca

SEQ ID NO: 786019 - RNA, 20 nt, Artificial Sequence
  Synthetic
cagcuuccagagaaaacuca

SEQ ID NO: 786020 - RNA, 20 nt, Artificial Sequence
  Synthetic
cucaaauguagucaaacuca

SEQ ID NO: 786021 - RNA, 20 nt, Artificial Sequence
  Synthetic
ucugaaccccaauaaacuca

SEQ ID NO: 786022 - RNA, 20 nt, Artificial Sequence
  Synthetic
auaaauaccaacuaaacuca

SEQ ID NO: 786023 - RNA, 20 nt, Artificial Sequence
  Synthetic
aaaugacuugccccaacuca

SEQ ID NO: 786024 - RNA, 20 nt, Artificial Sequence
  Synthetic
aagcaagcuuguucaacuca

SEQ ID NO: 786025 - RNA, 20 nt, Artificial Sequence
  Synthetic
uaauaugaaaacagaacuca

SEQ ID NO: 786026 - RNA, 20 nt, Artificial Sequence
  Synthetic
aaaacugaaauaggaacuca

SEQ ID NO: 786027 - RNA, 20 nt, Artificial Sequence
  Synthetic
aaucaaaacaauggaacuca

SEQ ID NO: 786028 - RNA, 20 nt, Artificial Sequence
  Synthetic
auucaaaacaauugaacuca

SEQ ID NO: 786029 - RNA, 20 nt, Artificial Sequence
  Synthetic
aauuaaaacuauugaacuca

SEQ ID NO: 786030 - RNA, 20 nt, Artificial Sequence
  Synthetic
ccuucuucucaucuaacuca

SEQ ID NO: 786031 - RNA, 20 nt, Artificial Sequence
  Synthetic
aacaagaaaauaguaacuca

SEQ ID NO: 786032 - RNA, 20 nt, Artificial Sequence
  Synthetic
uaguuaucuguuguaacuca

SEQ ID NO: 786033 - RNA, 20 nt, Artificial Sequence
  Synthetic
aaaccucccaagaacacuca

SEQ ID NO: 786034 - RNA, 20 nt, Artificial Sequence
  Synthetic
auguugaaaccuaacacuca

SEQ ID NO: 786035 - RNA, 20 nt, Artificial Sequence
  Synthetic
uaccaagggaugcacacuca

SEQ ID NO: 786036 - RNA, 20 nt, Artificial Sequence
  Synthetic
auugaacauaaugacacuca

SEQ ID NO: 786037 - RNA, 20 nt, Artificial Sequence
  Synthetic
uggugagguccuuacacuca

SEQ ID NO: 786038 - RNA, 20 nt, Artificial Sequence
  Synthetic
acugauuguaagagcacuca

SEQ ID NO: 786039 - RNA, 20 nt, Artificial Sequence
  Synthetic
uguacuugaaacugcacuca

SEQ ID NO: 786040 - RNA, 20 nt, Artificial Sequence
  Synthetic
ccuagaggguggugcacuca

SEQ ID NO: 786041 - RNA, 20 nt, Artificial Sequence
  Synthetic
auucuuaaacauugcacuca

SEQ ID NO: 786042 - RNA, 20 nt, Artificial Sequence
  Synthetic
cccuuggaagucaucacuca

SEQ ID NO: 786043 - RNA, 20 nt, Artificial Sequence
  Synthetic
ucugccacauauaucacuca

SEQ ID NO: 786044 - RNA, 20 nt, Artificial Sequence
  Synthetic
auucagcagaagcucacuca

SEQ ID NO: 786045 - RNA, 20 nt, Artificial Sequence
  Synthetic
ucagaagugucucucacuca

SEQ ID NO: 786046 - RNA, 20 nt, Artificial Sequence
  Synthetic
aagauuggaaacgagacuca

SEQ ID NO: 786047 - RNA, 20 nt, Artificial Sequence
  Synthetic
uuagauaugggugagacuca

SEQ ID NO: 786048 - RNA, 20 nt, Artificial Sequence
  Synthetic
cuauuuuuaauguagacuca

SEQ ID NO: 786049 - RNA, 20 nt, Artificial Sequence
  Synthetic
cuuaauagccuugcgacuca

SEQ ID NO: 786050 - RNA, 20 nt, Artificial Sequence
  Synthetic
aaugagaacacauggacuca

SEQ ID NO: 786051 - RNA, 20 nt, Artificial Sequence
  Synthetic
augugcagucugaugacuca

SEQ ID NO: 786052 - RNA, 20 nt, Artificial Sequence
  Synthetic
augagacauuuuaugacuca

SEQ ID NO: 786053 - RNA, 20 nt, Artificial Sequence
  Synthetic
cauuccuucacagugacuca

SEQ ID NO: 786054 - RNA, 20 nt, Artificial Sequence
  Synthetic
auuggguauuuauugacuca

SEQ ID NO: 786055 - RNA, 20 nt, Artificial Sequence
  Synthetic
aauaaaugcacaaauacuca

SEQ ID NO: 786056 - RNA, 20 nt, Artificial Sequence
  Synthetic
agucaucaugcagauacuca

SEQ ID NO: 786057 - RNA, 20 nt, Artificial Sequence
  Synthetic
uucaguuccaaggauacuca

SEQ ID NO: 786058 - RNA, 20 nt, Artificial Sequence
  Synthetic
uugccucgaaaugauacuca

SEQ ID NO: 786059 - RNA, 20 nt, Artificial Sequence
  Synthetic
caauuauuuaauuauacuca

SEQ ID NO: 786060 - RNA, 20 nt, Artificial Sequence
  Synthetic
uuucaaacauugacuacuca

SEQ ID NO: 786061 - RNA, 20 nt, Artificial Sequence
  Synthetic
ccuguaguaccagcuacuca

SEQ ID NO: 786062 - RNA, 20 nt, Artificial Sequence
  Synthetic
aaauauauguaauguacuca

SEQ ID NO: 786063 - RNA, 20 nt, Artificial Sequence
  Synthetic
uugcuuugcuuuuguacuca

SEQ ID NO: 786064 - RNA, 20 nt, Artificial Sequence
  Synthetic
uaggcagaauaacuuacuca

SEQ ID NO: 786065 - RNA, 20 nt, Artificial Sequence
  Synthetic
agaggcuguaaucuuacuca

SEQ ID NO: 786066 - RNA, 20 nt, Artificial Sequence
  Synthetic
aauauuuugagucuuacuca

SEQ ID NO: 786067 - RNA, 20 nt, Artificial Sequence
  Synthetic
agaauaacauuucuuacuca

SEQ ID NO: 786068 - RNA, 20 nt, Artificial Sequence
  Synthetic
aauuucucauuucuuacuca

SEQ ID NO: 786069 - RNA, 20 nt, Artificial Sequence
  Synthetic
uauuaacuuuauguuacuca

SEQ ID NO: 786070 - RNA, 20 nt, Artificial Sequence
  Synthetic
auacacauccucuuuacuca

SEQ ID NO: 786071 - RNA, 20 nt, Artificial Sequence
  Synthetic
cugaaauccuucuuuacuca

SEQ ID NO: 786072 - RNA, 20 nt, Artificial Sequence
  Synthetic
ccucagggagcuuuuacuca

SEQ ID NO: 786073 - RNA, 20 nt, Artificial Sequence
  Synthetic
aaccaacauagcaaaccuca

SEQ ID NO: 786074 - RNA, 20 nt, Artificial Sequence
  Synthetic
aucagaaggcugaaaccuca

SEQ ID NO: 786075 - RNA, 20 nt, Artificial Sequence
  Synthetic
uaucugucauaucaaccuca

SEQ ID NO: 786076 - RNA, 20 nt, Artificial Sequence
  Synthetic
aaauuuuaacagacaccuca

SEQ ID NO: 786077 - RNA, 20 nt, Artificial Sequence
  Synthetic
aggaaacuauuaccaccuca

SEQ ID NO: 786078 - RNA, 20 nt, Artificial Sequence
  Synthetic
caaaaucccaguucaccuca

SEQ ID NO: 786079 - RNA, 20 nt, Artificial Sequence
  Synthetic
cugcaggaaugaagaccuca

SEQ ID NO: 786080 - RNA, 20 nt, Artificial Sequence
  Synthetic
uuuuauggguugggaccuca

SEQ ID NO: 786081 - RNA, 20 nt, Artificial Sequence
  Synthetic
cuuugugcuucuggaccuca

SEQ ID NO: 786082 - RNA, 20 nt, Artificial Sequence
  Synthetic
ucaccauagacuugaccuca

SEQ ID NO: 786083 - RNA, 20 nt, Artificial Sequence
  Synthetic
aacaaauuucagauaccuca

SEQ ID NO: 786084 - RNA, 20 nt, Artificial Sequence
  Synthetic
uuaucucagagacuaccuca

SEQ ID NO: 786085 - RNA, 20 nt, Artificial Sequence
  Synthetic
cacaaugauauacuaccuca

SEQ ID NO: 786086 - RNA, 20 nt, Artificial Sequence
  Synthetic
auuugguuuucuuuaccuca

SEQ ID NO: 786087 - RNA, 20 nt, Artificial Sequence
  Synthetic
cguugaaauccucacccuca

SEQ ID NO: 786088 - RNA, 20 nt, Artificial Sequence
  Synthetic
acuugcuacuuuuacccuca

SEQ ID NO: 786089 - RNA, 20 nt, Artificial Sequence
  Synthetic
uaacaaagaaggagcccuca

SEQ ID NO: 786090 - RNA, 20 nt, Artificial Sequence
  Synthetic
uucugugcuuaaggcccuca

SEQ ID NO: 786091 - RNA, 20 nt, Artificial Sequence
  Synthetic
acagaccauugaggcccuca

SEQ ID NO: 786092 - RNA, 20 nt, Artificial Sequence
  Synthetic
cugcaggggcagggcccuca

SEQ ID NO: 786093 - RNA, 20 nt, Artificial Sequence
  Synthetic
agacaaaaucucugcccuca

SEQ ID NO: 786094 - RNA, 20 nt, Artificial Sequence
  Synthetic
ccaaucguauacaucccuca

SEQ ID NO: 786095 - RNA, 20 nt, Artificial Sequence
  Synthetic
ucauggggacagaucccuca

SEQ ID NO: 786096 - RNA, 20 nt, Artificial Sequence
  Synthetic
ccucagggcacagucccuca

SEQ ID NO: 786097 - RNA, 20 nt, Artificial Sequence
  Synthetic
agcaaauuaacuuucccuca

SEQ ID NO: 786098 - RNA, 20 nt, Artificial Sequence
  Synthetic
uauuagcugcuaaagccuca

SEQ ID NO: 786099 - RNA, 20 nt, Artificial Sequence
  Synthetic
cagcguuauccacagccuca

SEQ ID NO: 786100 - RNA, 20 nt, Artificial Sequence
  Synthetic
aauaggcucuggcagccuca

SEQ ID NO: 786101 - RNA, 20 nt, Artificial Sequence
  Synthetic
ccccugaacacagagccuca

SEQ ID NO: 786102 - RNA, 20 nt, Artificial Sequence
  Synthetic
uggcuccuggggaggccuca

SEQ ID NO: 786103 - RNA, 20 nt, Artificial Sequence
  Synthetic
acauggcuggggaggccuca

SEQ ID NO: 786104 - RNA, 20 nt, Artificial Sequence
  Synthetic
cuguuucuggggaggccuca

SEQ ID NO: 786105 - RNA, 20 nt, Artificial Sequence
  Synthetic
uggcacaggcaauggccuca

SEQ ID NO: 786106 - RNA, 20 nt, Artificial Sequence
  Synthetic
cucuugaacuucuggccuca

SEQ ID NO: 786107 - RNA, 20 nt, Artificial Sequence
  Synthetic
aagaaaaagauuuggccuca

SEQ ID NO: 786108 - RNA, 20 nt, Artificial Sequence
  Synthetic
uaauguccugcacugccuca

SEQ ID NO: 786109 - RNA, 20 nt, Artificial Sequence
  Synthetic
cggcagcaaucccugccuca

SEQ ID NO: 786110 - RNA, 20 nt, Artificial Sequence
  Synthetic
cuuacuacacuccugccuca

SEQ ID NO: 786111 - RNA, 20 nt, Artificial Sequence
  Synthetic
aaacauuucccucugccuca

SEQ ID NO: 786112 - RNA, 20 nt, Artificial Sequence
  Synthetic
acaguagggaaugugccuca

SEQ ID NO: 786113 - RNA, 20 nt, Artificial Sequence
  Synthetic
auuggaaaaacaaauccuca

SEQ ID NO: 786114 - RNA, 20 nt, Artificial Sequence
  Synthetic
uuugaagauaaacauccuca

SEQ ID NO: 786115 - RNA, 20 nt, Artificial Sequence
  Synthetic
cauugaaauuugcauccuca

SEQ ID NO: 786116 - RNA, 20 nt, Artificial Sequence
  Synthetic
uccaaacuuuugcauccuca

SEQ ID NO: 786117 - RNA, 20 nt, Artificial Sequence
  Synthetic
cagcagauauaucauccuca

SEQ ID NO: 786118 - RNA, 20 nt, Artificial Sequence
  Synthetic
ucaucucguugauauccuca

SEQ ID NO: 786119 - RNA, 20 nt, Artificial Sequence
  Synthetic
uucagaagucuuuauccuca

SEQ ID NO: 786120 - RNA, 20 nt, Artificial Sequence
  Synthetic
ugaggaggcuuuccuccuca

SEQ ID NO: 786121 - RNA, 20 nt, Artificial Sequence
  Synthetic
ucucaauauuugaguccuca

SEQ ID NO: 786122 - RNA, 20 nt, Artificial Sequence
  Synthetic
ucugcaaauugugguccuca

SEQ ID NO: 786123 - RNA, 20 nt, Artificial Sequence
  Synthetic
uuuaaauuuuauuguccuca

SEQ ID NO: 786124 - RNA, 20 nt, Artificial Sequence
  Synthetic
uaaaagacucccauuccuca

SEQ ID NO: 786125 - RNA, 20 nt, Artificial Sequence
  Synthetic
cucuuuggacauauuccuca

SEQ ID NO: 786126 - RNA, 20 nt, Artificial Sequence
  Synthetic
ugauaauaccaccuuccuca

SEQ ID NO: 786127 - RNA, 20 nt, Artificial Sequence
  Synthetic
cuggaaugcuccguuccuca

SEQ ID NO: 786128 - RNA, 20 nt, Artificial Sequence
  Synthetic
agguguaauucuguuccuca

SEQ ID NO: 786129 - RNA, 20 nt, Artificial Sequence
  Synthetic
uuuuucuuuuuauuuccuca

SEQ ID NO: 786130 - RNA, 20 nt, Artificial Sequence
  Synthetic
ugugaaccuuaagaagcuca

SEQ ID NO: 786131 - RNA, 20 nt, Artificial Sequence
  Synthetic
auuaagcuuccuuaagcuca

SEQ ID NO: 786132 - RNA, 20 nt, Artificial Sequence
  Synthetic
ucagauuauauuuaagcuca

SEQ ID NO: 786133 - RNA, 20 nt, Artificial Sequence
  Synthetic
cagaacaacacaacagcuca

SEQ ID NO: 786134 - RNA, 20 nt, Artificial Sequence
  Synthetic
uauuugguugucacagcuca

SEQ ID NO: 786135 - RNA, 20 nt, Artificial Sequence
  Synthetic
agacucugauccccagcuca

SEQ ID NO: 786136 - RNA, 20 nt, Artificial Sequence
  Synthetic
cauuucauguccccagcuca

SEQ ID NO: 786137 - RNA, 20 nt, Artificial Sequence
  Synthetic
augaaagagguugcagcuca

SEQ ID NO: 786138 - RNA, 20 nt, Artificial Sequence
  Synthetic
uggaggaucaccagagcuca

SEQ ID NO: 786139 - RNA, 20 nt, Artificial Sequence
  Synthetic
aaauagcuuuuuguagcuca

SEQ ID NO: 786140 - RNA, 20 nt, Artificial Sequence
  Synthetic
cacuuuuaaagggccgcuca

SEQ ID NO: 786141 - RNA, 20 nt, Artificial Sequence
  Synthetic
cuucuagcagcaaaggcuca

SEQ ID NO: 786142 - RNA, 20 nt, Artificial Sequence
  Synthetic
uggaaacaaacugaggcuca

SEQ ID NO: 786143 - RNA, 20 nt, Artificial Sequence
  Synthetic
ucuuccagcuugggggcuca

SEQ ID NO: 786144 - RNA, 20 nt, Artificial Sequence
  Synthetic
aaauuguacuuccuggcuca

SEQ ID NO: 786145 - RNA, 20 nt, Artificial Sequence
  Synthetic
uggaagguuuauuuggcuca

SEQ ID NO: 786146 - RNA, 20 nt, Artificial Sequence
  Synthetic
aaaauaaccaaaaaugcuca

SEQ ID NO: 786147 - RNA, 20 nt, Artificial Sequence
  Synthetic
ucaaagaaauuucaugcuca

SEQ ID NO: 786148 - RNA, 20 nt, Artificial Sequence
  Synthetic
cuugagauaagagaugcuca

SEQ ID NO: 786149 - RNA, 20 nt, Artificial Sequence
  Synthetic
aauauuaucuaauaugcuca

SEQ ID NO: 786150 - RNA, 20 nt, Artificial Sequence
  Synthetic
cauaggauuucuuaugcuca

SEQ ID NO: 786151 - RNA, 20 nt, Artificial Sequence
  Synthetic
uuggguuaacauacugcuca

SEQ ID NO: 786152 - RNA, 20 nt, Artificial Sequence
  Synthetic
uaguuuuaauggccugcuca

SEQ ID NO: 786153 - RNA, 20 nt, Artificial Sequence
  Synthetic
uacagugcauggccugcuca

SEQ ID NO: 786154 - RNA, 20 nt, Artificial Sequence
  Synthetic
aguucaucuccugcugcuca

SEQ ID NO: 786155 - RNA, 20 nt, Artificial Sequence
  Synthetic
ucgcacauagugagugcuca

SEQ ID NO: 786156 - RNA, 20 nt, Artificial Sequence
  Synthetic
aguguucacuuccgugcuca

SEQ ID NO: 786157 - RNA, 20 nt, Artificial Sequence
  Synthetic
augggacagaguugugcuca

SEQ ID NO: 786158 - RNA, 20 nt, Artificial Sequence
  Synthetic
caaauguugauaauugcuca

SEQ ID NO: 786159 - RNA, 20 nt, Artificial Sequence
  Synthetic
aggguucauacacuugcuca

SEQ ID NO: 786160 - RNA, 20 nt, Artificial Sequence
  Synthetic
agauuuaagagacuugcuca

SEQ ID NO: 786161 - RNA, 20 nt, Artificial Sequence
  Synthetic
ccaagaaaaaagcuugcuca

SEQ ID NO: 786162 - RNA, 20 nt, Artificial Sequence
  Synthetic
cagggaagagagcuugcuca

SEQ ID NO: 786163 - RNA, 20 nt, Artificial Sequence
  Synthetic
uucagcuuaguucuugcuca

SEQ ID NO: 786164 - RNA, 20 nt, Artificial Sequence
  Synthetic
ugagauuagucauuugcuca

SEQ ID NO: 786165 - RNA, 20 nt, Artificial Sequence
  Synthetic
aaaagcagucacuuugcuca

SEQ ID NO: 786166 - RNA, 20 nt, Artificial Sequence
  Synthetic
augaaucuacaguuugcuca

SEQ ID NO: 786167 - RNA, 20 nt, Artificial Sequence
  Synthetic
ccucagggaguuuuugcuca

SEQ ID NO: 786168 - RNA, 20 nt, Artificial Sequence
  Synthetic
acauuugaacagaaaucuca

SEQ ID NO: 786169 - RNA, 20 nt, Artificial Sequence
  Synthetic
uugacaggugagaaaucuca

SEQ ID NO: 786170 - RNA, 20 nt, Artificial Sequence
  Synthetic
acucuugguuuuaaaucuca

SEQ ID NO: 786171 - RNA, 20 nt, Artificial Sequence
  Synthetic
acugaauagcuguaaucuca

SEQ ID NO: 786172 - RNA, 20 nt, Artificial Sequence
  Synthetic
ucacuuucuaaaacaucuca

SEQ ID NO: 786173 - RNA, 20 nt, Artificial Sequence
  Synthetic
ccacuuccauugccaucuca

SEQ ID NO: 786174 - RNA, 20 nt, Artificial Sequence
  Synthetic
aauuacucaaaagcaucuca

SEQ ID NO: 786175 - RNA, 20 nt, Artificial Sequence
  Synthetic
uuugaaaauuaaucaucuca

SEQ ID NO: 786176 - RNA, 20 nt, Artificial Sequence
  Synthetic
cugauuuuaacaagaucuca

SEQ ID NO: 786177 - RNA, 20 nt, Artificial Sequence
  Synthetic
uccugcucucauggaucuca

SEQ ID NO: 786178 - RNA, 20 nt, Artificial Sequence
  Synthetic
caacuggaucucugaucuca

SEQ ID NO: 786179 - RNA, 20 nt, Artificial Sequence
  Synthetic
uuuuaacagaaaauaucuca

SEQ ID NO: 786180 - RNA, 20 nt, Artificial Sequence
  Synthetic
aaccuuacacauguaucuca

SEQ ID NO: 786181 - RNA, 20 nt, Artificial Sequence
  Synthetic
aaaaagugcuauguaucuca

SEQ ID NO: 786182 - RNA, 20 nt, Artificial Sequence
  Synthetic
aagaugagcuguguaucuca

SEQ ID NO: 786183 - RNA, 20 nt, Artificial Sequence
  Synthetic
uaacuuagaaacuuaucuca

SEQ ID NO: 786184 - RNA, 20 nt, Artificial Sequence
  Synthetic
cuugagcaucucuuaucuca

SEQ ID NO: 786185 - RNA, 20 nt, Artificial Sequence
  Synthetic
uuacaauaagauuuaucuca

SEQ ID NO: 786186 - RNA, 20 nt, Artificial Sequence
  Synthetic
ucuauuugagacaacucuca

SEQ ID NO: 786187 - RNA, 20 nt, Artificial Sequence
  Synthetic
aaaagucuugaccacucuca

SEQ ID NO: 786188 - RNA, 20 nt, Artificial Sequence
  Synthetic
uaugaagauauagacucuca

SEQ ID NO: 786189 - RNA, 20 nt, Artificial Sequence
  Synthetic
aaugcuggcuuugacucuca

SEQ ID NO: 786190 - RNA, 20 nt, Artificial Sequence
  Synthetic
ucaauuacaugauacucuca

SEQ ID NO: 786191 - RNA, 20 nt, Artificial Sequence
  Synthetic
uguccuauggccuacucuca

SEQ ID NO: 786192 - RNA, 20 nt, Artificial Sequence
  Synthetic
caauuacauuguuacucuca

SEQ ID NO: 786193 - RNA, 20 nt, Artificial Sequence
  Synthetic
cuauaagacauuaccucuca

SEQ ID NO: 786194 - RNA, 20 nt, Artificial Sequence
  Synthetic
ucccucauuccacccucuca

SEQ ID NO: 786195 - RNA, 20 nt, Artificial Sequence
  Synthetic
ucacacaccggggccucuca

SEQ ID NO: 786196 - RNA, 20 nt, Artificial Sequence
  Synthetic
caaauauguccuuccucuca

SEQ ID NO: 786197 - RNA, 20 nt, Artificial Sequence
  Synthetic
uaggcuuucauuuccucuca

SEQ ID NO: 786198 - RNA, 20 nt, Artificial Sequence
  Synthetic
caaaccuugccaagcucuca

SEQ ID NO: 786199 - RNA, 20 nt, Artificial Sequence
  Synthetic
uguacuucaaagagcucuca

SEQ ID NO: 786200 - RNA, 20 nt, Artificial Sequence
  Synthetic
uuuguucaggugugcucuca

SEQ ID NO: 786201 - RNA, 20 nt, Artificial Sequence
  Synthetic
aaaugagaauugugcucuca

SEQ ID NO: 786202 - RNA, 20 nt, Artificial Sequence
  Synthetic
agaugaaaucuuugcucuca

SEQ ID NO: 786203 - RNA, 20 nt, Artificial Sequence
  Synthetic
aagaaaucauacaucucuca

SEQ ID NO: 786204 - RNA, 20 nt, Artificial Sequence
  Synthetic
aauauuacaaugaucucuca

SEQ ID NO: 786205 - RNA, 20 nt, Artificial Sequence
  Synthetic
uuuucaccagugaucucuca

SEQ ID NO: 786206 - RNA, 20 nt, Artificial Sequence
  Synthetic
ugaaagaugaguaucucuca

SEQ ID NO: 786207 - RNA, 20 nt, Artificial Sequence
  Synthetic
cuuagucugugacucucuca

SEQ ID NO: 786208 - RNA, 20 nt, Artificial Sequence
  Synthetic
uggauuaaucaucucucuca

SEQ ID NO: 786209 - RNA, 20 nt, Artificial Sequence
  Synthetic
ccacuguuuuccuucucuca

SEQ ID NO: 786210 - RNA, 20 nt, Artificial Sequence
  Synthetic
ucugaguuuuuguucucuca

SEQ ID NO: 786211 - RNA, 20 nt, Artificial Sequence
  Synthetic
aauaaauuaccccagucuca

SEQ ID NO: 786212 - RNA, 20 nt, Artificial Sequence
  Synthetic
aaugaacaaaauaggucuca

SEQ ID NO: 786213 - RNA, 20 nt, Artificial Sequence
  Synthetic
aauaaaauaugacugucuca

SEQ ID NO: 786214 - RNA, 20 nt, Artificial Sequence
  Synthetic
ccaaguuacaaagugucuca

SEQ ID NO: 786215 - RNA, 20 nt, Artificial Sequence
  Synthetic
uucaauauuguugugucuca

SEQ ID NO: 786216 - RNA, 20 nt, Artificial Sequence
  Synthetic
aagguauucauaaauucuca

SEQ ID NO: 786217 - RNA, 20 nt, Artificial Sequence
  Synthetic
aaaaagguaaauaauucuca

SEQ ID NO: 786218 - RNA, 20 nt, Artificial Sequence
  Synthetic
cauuuaagacaacauucuca

SEQ ID NO: 786219 - RNA, 20 nt, Artificial Sequence
  Synthetic
ucaacugugacccauucuca

SEQ ID NO: 786220 - RNA, 20 nt, Artificial Sequence
  Synthetic
agaaggccugcauauucuca

SEQ ID NO: 786221 - RNA, 20 nt, Artificial Sequence
  Synthetic
uucauuacaugguauucuca

SEQ ID NO: 786222 - RNA, 20 nt, Artificial Sequence
  Synthetic
uaccuaacuuauacuucuca

SEQ ID NO: 786223 - RNA, 20 nt, Artificial Sequence
  Synthetic
cuauacucauuuacuucuca

SEQ ID NO: 786224 - RNA, 20 nt, Artificial Sequence
  Synthetic
aguuccacuaggccuucuca

SEQ ID NO: 786225 - RNA, 20 nt, Artificial Sequence
  Synthetic
cacuguccacugccuucuca

SEQ ID NO: 786226 - RNA, 20 nt, Artificial Sequence
  Synthetic
cugagaaaguuuccuucuca

SEQ ID NO: 786227 - RNA, 20 nt, Artificial Sequence
  Synthetic
uuaaagcugcaagcuucuca

SEQ ID NO: 786228 - RNA, 20 nt, Artificial Sequence
  Synthetic
cuugucucucaagcuucuca

SEQ ID NO: 786229 - RNA, 20 nt, Artificial Sequence
  Synthetic
auaaggagcucagcuucuca

SEQ ID NO: 786230 - RNA, 20 nt, Artificial Sequence
  Synthetic
aaagguuauugcucuucuca

SEQ ID NO: 786231 - RNA, 20 nt, Artificial Sequence
  Synthetic
uagguuccacucucuucuca

SEQ ID NO: 786232 - RNA, 20 nt, Artificial Sequence
  Synthetic
caacaauaucuuucuucuca

SEQ ID NO: 786233 - RNA, 20 nt, Artificial Sequence
  Synthetic
uucuauuaacuaaguucuca

SEQ ID NO: 786234 - RNA, 20 nt, Artificial Sequence
  Synthetic
uugauuacucacaguucuca

SEQ ID NO: 786235 - RNA, 20 nt, Artificial Sequence
  Synthetic
ucuucucucuguaguucuca

SEQ ID NO: 786236 - RNA, 20 nt, Artificial Sequence
  Synthetic
uuguuuuuuaaugguucuca

SEQ ID NO: 786237 - RNA, 20 nt, Artificial Sequence
  Synthetic
uuucccccauacuguucuca

SEQ ID NO: 786238 - RNA, 20 nt, Artificial Sequence
  Synthetic
ugaaaauaucaguguucuca

SEQ ID NO: 786239 - RNA, 20 nt, Artificial Sequence
  Synthetic
uaauccuggagaauuucuca

SEQ ID NO: 786240 - RNA, 20 nt, Artificial Sequence
  Synthetic
agagaccuuuccauuucuca

SEQ ID NO: 786241 - RNA, 20 nt, Artificial Sequence
  Synthetic
uugucuuuucagauuucuca

SEQ ID NO: 786242 - RNA, 20 nt, Artificial Sequence
  Synthetic
cagguuggagauauuucuca

SEQ ID NO: 786243 - RNA, 20 nt, Artificial Sequence
  Synthetic
auuuaaaguucuauuucuca

SEQ ID NO: 786244 - RNA, 20 nt, Artificial Sequence
  Synthetic
cucaggaauaaacuuucuca

SEQ ID NO: 786245 - RNA, 20 nt, Artificial Sequence
  Synthetic
uugacuuuucugcuuucuca

SEQ ID NO: 786246 - RNA, 20 nt, Artificial Sequence
  Synthetic
aucaucagggugguuucuca

SEQ ID NO: 786247 - RNA, 20 nt, Artificial Sequence
  Synthetic
augccaguaaaauuuucuca

SEQ ID NO: 786248 - RNA, 20 nt, Artificial Sequence
  Synthetic
aguaaccauuauuuuucuca

SEQ ID NO: 786249 - RNA, 20 nt, Artificial Sequence
  Synthetic
aggcauagugacaaaaguca

SEQ ID NO: 786250 - RNA, 20 nt, Artificial Sequence
  Synthetic
caaacuuguaccaaaaguca

SEQ ID NO: 786251 - RNA, 20 nt, Artificial Sequence
  Synthetic
uuucuuacugugaaaaguca

SEQ ID NO: 786252 - RNA, 20 nt, Artificial Sequence
  Synthetic
uuuagucacucuaaaaguca

SEQ ID NO: 786253 - RNA, 20 nt, Artificial Sequence
  Synthetic
cacaauacacuacaaaguca

SEQ ID NO: 786254 - RNA, 20 nt, Artificial Sequence
  Synthetic
uguggccaagcccaaaguca

SEQ ID NO: 786255 - RNA, 20 nt, Artificial Sequence
  Synthetic
agaaggaaagaagaaaguca

SEQ ID NO: 786256 - RNA, 20 nt, Artificial Sequence
  Synthetic
agaucaccucgagaaaguca

SEQ ID NO: 786257 - RNA, 20 nt, Artificial Sequence
  Synthetic
auuuucaauuuauaaaguca

SEQ ID NO: 786258 - RNA, 20 nt, Artificial Sequence
  Synthetic
uauaaccccaucacaaguca

SEQ ID NO: 786259 - RNA, 20 nt, Artificial Sequence
  Synthetic
agaaaagcuugagcaaguca

SEQ ID NO: 786260 - RNA, 20 nt, Artificial Sequence
  Synthetic
cagagaccuaaaucaaguca

SEQ ID NO: 786261 - RNA, 20 nt, Artificial Sequence
  Synthetic
cuggagaaauacucaaguca

SEQ ID NO: 786262 - RNA, 20 nt, Artificial Sequence
  Synthetic
uuuugaauguguucaaguca

SEQ ID NO: 786263 - RNA, 20 nt, Artificial Sequence
  Synthetic
caaagcaaccaaggaaguca

SEQ ID NO: 786264 - RNA, 20 nt, Artificial Sequence
  Synthetic
cacuugagccugggaaguca

SEQ ID NO: 786265 - RNA, 20 nt, Artificial Sequence
  Synthetic
uggaaaggggacugaaguca

SEQ ID NO: 786266 - RNA, 20 nt, Artificial Sequence
  Synthetic
agaauuuucaugugaaguca

SEQ ID NO: 786267 - RNA, 20 nt, Artificial Sequence
  Synthetic
aauaaagcuuuuugaaguca

SEQ ID NO: 786268 - RNA, 20 nt, Artificial Sequence
  Synthetic
auaggacccccaauaaguca

SEQ ID NO: 786269 - RNA, 20 nt, Artificial Sequence
  Synthetic
cauaaauugagaauaaguca

SEQ ID NO: 786270 - RNA, 20 nt, Artificial Sequence
  Synthetic
uaagaauggggaauaaguca

SEQ ID NO: 786271 - RNA, 20 nt, Artificial Sequence
  Synthetic
uagagacagaaucuaaguca

SEQ ID NO: 786272 - RNA, 20 nt, Artificial Sequence
  Synthetic
uuccaaauuauucuaaguca

SEQ ID NO: 786273 - RNA, 20 nt, Artificial Sequence
  Synthetic
uauaaaggaugauuaaguca

SEQ ID NO: 786274 - RNA, 20 nt, Artificial Sequence
  Synthetic
uguuuaccuugcuuaaguca

SEQ ID NO: 786275 - RNA, 20 nt, Artificial Sequence
  Synthetic
aaaggcagcagccccaguca

SEQ ID NO: 786276 - RNA, 20 nt, Artificial Sequence
  Synthetic
uuuuaaaaauuagccaguca

SEQ ID NO: 786277 - RNA, 20 nt, Artificial Sequence
  Synthetic
acacagaaacaggccaguca

SEQ ID NO: 786278 - RNA, 20 nt, Artificial Sequence
  Synthetic
ucugggcaucagagcaguca

SEQ ID NO: 786279 - RNA, 20 nt, Artificial Sequence
  Synthetic
auuauauucugaaucaguca

SEQ ID NO: 786280 - RNA, 20 nt, Artificial Sequence
  Synthetic
aaucuauucaccaucaguca

SEQ ID NO: 786281 - RNA, 20 nt, Artificial Sequence
  Synthetic
ucaaugucaggcaucaguca

SEQ ID NO: 786282 - RNA, 20 nt, Artificial Sequence
  Synthetic
cagugacccuaccucaguca

SEQ ID NO: 786283 - RNA, 20 nt, Artificial Sequence
  Synthetic
uauccaacacaagucaguca

SEQ ID NO: 786284 - RNA, 20 nt, Artificial Sequence
  Synthetic
aagcccagcugagucaguca

SEQ ID NO: 786285 - RNA, 20 nt, Artificial Sequence
  Synthetic
ugagaggaagcaaagaguca

SEQ ID NO: 786286 - RNA, 20 nt, Artificial Sequence
  Synthetic
uguggguugugaaagaguca

SEQ ID NO: 786287 - RNA, 20 nt, Artificial Sequence
  Synthetic
uuuaugaugugacagaguca

SEQ ID NO: 786288 - RNA, 20 nt, Artificial Sequence
  Synthetic
ucauggggccaagagaguca

SEQ ID NO: 786289 - RNA, 20 nt, Artificial Sequence
  Synthetic
cugggcuggauggagaguca

SEQ ID NO: 786290 - RNA, 20 nt, Artificial Sequence
  Synthetic
aaauaggguguugagaguca

SEQ ID NO: 786291 - RNA, 20 nt, Artificial Sequence
  Synthetic
agccauguacaauagaguca

SEQ ID NO: 786292 - RNA, 20 nt, Artificial Sequence
  Synthetic
aaguggggacgguggaguca

SEQ ID NO: 786293 - RNA, 20 nt, Artificial Sequence
  Synthetic
cuugagauucauuugaguca

SEQ ID NO: 786294 - RNA, 20 nt, Artificial Sequence
  Synthetic
uaacauacacaaaauaguca

SEQ ID NO: 786295 - RNA, 20 nt, Artificial Sequence
  Synthetic
aauauaaacaggaauaguca

SEQ ID NO: 786296 - RNA, 20 nt, Artificial Sequence
  Synthetic
aaauugcagcauaauaguca

SEQ ID NO: 786297 - RNA, 20 nt, Artificial Sequence
  Synthetic
auacaacuauaaccuaguca

SEQ ID NO: 786298 - RNA, 20 nt, Artificial Sequence
  Synthetic
aaauuaagagcugcuaguca

SEQ ID NO: 786299 - RNA, 20 nt, Artificial Sequence
  Synthetic
cucuuugcugcaauuaguca

SEQ ID NO: 786300 - RNA, 20 nt, Artificial Sequence
  Synthetic
aaaagugaguguauuaguca

SEQ ID NO: 786301 - RNA, 20 nt, Artificial Sequence
  Synthetic
auaucuaucuuuauuaguca

SEQ ID NO: 786302 - RNA, 20 nt, Artificial Sequence
  Synthetic
ugagaauaauuucuuaguca

SEQ ID NO: 786303 - RNA, 20 nt, Artificial Sequence
  Synthetic
acguuaaaaauauuuaguca

SEQ ID NO: 786304 - RNA, 20 nt, Artificial Sequence
  Synthetic
acaacuuaacaguaucguca

SEQ ID NO: 786305 - RNA, 20 nt, Artificial Sequence
  Synthetic
uucagacaagaaagucguca

SEQ ID NO: 786306 - RNA, 20 nt, Artificial Sequence
  Synthetic
aaaaaguguaggaaagguca

SEQ ID NO: 786307 - RNA, 20 nt, Artificial Sequence
  Synthetic
aacuuuaaaauacaagguca

SEQ ID NO: 786308 - RNA, 20 nt, Artificial Sequence
  Synthetic
uucagauguuuccaagguca

SEQ ID NO: 786309 - RNA, 20 nt, Artificial Sequence
  Synthetic
uaauguacaguugaagguca

SEQ ID NO: 786310 - RNA, 20 nt, Artificial Sequence
  Synthetic
aaaucauuuuccccagguca

SEQ ID NO: 786311 - RNA, 20 nt, Artificial Sequence
  Synthetic
ucaaaauuucuuucagguca

SEQ ID NO: 786312 - RNA, 20 nt, Artificial Sequence
  Synthetic
cacuugagcccaggagguca

SEQ ID NO: 786313 - RNA, 20 nt, Artificial Sequence
  Synthetic
aggcuuauuucaggagguca

SEQ ID NO: 786314 - RNA, 20 nt, Artificial Sequence
  Synthetic
aucugagcccagggagguca

SEQ ID NO: 786315 - RNA, 20 nt, Artificial Sequence
  Synthetic
ugcuugagccugggagguca

SEQ ID NO: 786316 - RNA, 20 nt, Artificial Sequence
  Synthetic
aucuuucaaaaaugagguca

SEQ ID NO: 786317 - RNA, 20 nt, Artificial Sequence
  Synthetic
ucucagugacauauagguca

SEQ ID NO: 786318 - RNA, 20 nt, Artificial Sequence
  Synthetic
uuccacagaucucuagguca

SEQ ID NO: 786319 - RNA, 20 nt, Artificial Sequence
  Synthetic
caguuucaaagucuagguca

SEQ ID NO: 786320 - RNA, 20 nt, Artificial Sequence
  Synthetic
cuuugggaacauuuagguca

SEQ ID NO: 786321 - RNA, 20 nt, Artificial Sequence
  Synthetic
uccuggugccaaaaggguca

SEQ ID NO: 786322 - RNA, 20 nt, Artificial Sequence
  Synthetic
aacagugguuaccaggguca

SEQ ID NO: 786323 - RNA, 20 nt, Artificial Sequence
  Synthetic
ugaacccaaagagaggguca

SEQ ID NO: 786324 - RNA, 20 nt, Artificial Sequence
  Synthetic
cgaguuccacaaagggguca

SEQ ID NO: 786325 - RNA, 20 nt, Artificial Sequence
  Synthetic
ugaagaauucaaagggguca

SEQ ID NO: 786326 - RNA, 20 nt, Artificial Sequence
  Synthetic
cccggaagcacaagggguca

SEQ ID NO: 786327 - RNA, 20 nt, Artificial Sequence
  Synthetic
uaacgggaagugugggguca

SEQ ID NO: 786328 - RNA, 20 nt, Artificial Sequence
  Synthetic
ucugcaaaagggcuggguca

SEQ ID NO: 786329 - RNA, 20 nt, Artificial Sequence
  Synthetic
uauccuucaaagaaugguca

SEQ ID NO: 786330 - RNA, 20 nt, Artificial Sequence
  Synthetic
ccagugaugacucaugguca

SEQ ID NO: 786331 - RNA, 20 nt, Artificial Sequence
  Synthetic
ucucauggugcuuaugguca

SEQ ID NO: 786332 - RNA, 20 nt, Artificial Sequence
  Synthetic
uacagcuacucuucugguca

SEQ ID NO: 786333 - RNA, 20 nt, Artificial Sequence
  Synthetic
uuucuggucucucgugguca

SEQ ID NO: 786334 - RNA, 20 nt, Artificial Sequence
  Synthetic
uauugucuauagugugguca

SEQ ID NO: 786335 - RNA, 20 nt, Artificial Sequence
  Synthetic
agggcuguugaauuugguca

SEQ ID NO: 786336 - RNA, 20 nt, Artificial Sequence
  Synthetic
ucauggauggauuuugguca

SEQ ID NO: 786337 - RNA, 20 nt, Artificial Sequence
  Synthetic
caaaaagugaguaaauguca

SEQ ID NO: 786338 - RNA, 20 nt, Artificial Sequence
  Synthetic
cacugcccagaccaauguca

SEQ ID NO: 786339 - RNA, 20 nt, Artificial Sequence
  Synthetic
aaaucucccaggcaauguca

SEQ ID NO: 786340 - RNA, 20 nt, Artificial Sequence
  Synthetic
caugaccaagcucaauguca

SEQ ID NO: 786341 - RNA, 20 nt, Artificial Sequence
  Synthetic
cccacaauccccacauguca

SEQ ID NO: 786342 - RNA, 20 nt, Artificial Sequence
  Synthetic
augguaauccccacauguca

SEQ ID NO: 786343 - RNA, 20 nt, Artificial Sequence
  Synthetic
aaguucaaaacuccauguca

SEQ ID NO: 786344 - RNA, 20 nt, Artificial Sequence
  Synthetic
cauggguaaauugcauguca

SEQ ID NO: 786345 - RNA, 20 nt, Artificial Sequence
  Synthetic
auauagguaaacucauguca

SEQ ID NO: 786346 - RNA, 20 nt, Artificial Sequence
  Synthetic
aauaauuuucuuucauguca

SEQ ID NO: 786347 - RNA, 20 nt, Artificial Sequence
  Synthetic
cccauaauccccagauguca

SEQ ID NO: 786348 - RNA, 20 nt, Artificial Sequence
  Synthetic
ugaaagacucggagauguca

SEQ ID NO: 786349 - RNA, 20 nt, Artificial Sequence
  Synthetic
ugccuaaaacauagauguca

SEQ ID NO: 786350 - RNA, 20 nt, Artificial Sequence
  Synthetic
uguuaguuagcuugauguca

SEQ ID NO: 786351 - RNA, 20 nt, Artificial Sequence
  Synthetic
uuauuugaagagcuauguca

SEQ ID NO: 786352 - RNA, 20 nt, Artificial Sequence
  Synthetic
aaaaaaaaaaaauuauguca

SEQ ID NO: 786353 - RNA, 20 nt, Artificial Sequence
  Synthetic
caaacccccaaguuauguca

SEQ ID NO: 786354 - RNA, 20 nt, Artificial Sequence
  Synthetic
uaaaaaauuauuuuauguca

SEQ ID NO: 786355 - RNA, 20 nt, Artificial Sequence
  Synthetic
ucuagcuuucuuuuauguca

SEQ ID NO: 786356 - RNA, 20 nt, Artificial Sequence
  Synthetic
caugcauuuguaaccuguca

SEQ ID NO: 786357 - RNA, 20 nt, Artificial Sequence
  Synthetic
ucacacaccggggccuguca

SEQ ID NO: 786358 - RNA, 20 nt, Artificial Sequence
  Synthetic
ucacacacuggggccuguca

SEQ ID NO: 786359 - RNA, 20 nt, Artificial Sequence
  Synthetic
aucuguagaagaugcuguca

SEQ ID NO: 786360 - RNA, 20 nt, Artificial Sequence
  Synthetic
cccacauugaaaaucuguca

SEQ ID NO: 786361 - RNA, 20 nt, Artificial Sequence
  Synthetic
uuugcuugucugcucuguca

SEQ ID NO: 786362 - RNA, 20 nt, Artificial Sequence
  Synthetic
acauuccugggagucuguca

SEQ ID NO: 786363 - RNA, 20 nt, Artificial Sequence
  Synthetic
aggaagagaaaggucuguca

SEQ ID NO: 786364 - RNA, 20 nt, Artificial Sequence
  Synthetic
auuaucuccaccuucuguca

SEQ ID NO: 786365 - RNA, 20 nt, Artificial Sequence
  Synthetic
uuucagguuaucuucuguca

SEQ ID NO: 786366 - RNA, 20 nt, Artificial Sequence
  Synthetic
acauuguugaauuucuguca

SEQ ID NO: 786367 - RNA, 20 nt, Artificial Sequence
  Synthetic
uacugucugugaaaguguca

SEQ ID NO: 786368 - RNA, 20 nt, Artificial Sequence
  Synthetic
agacagaguuccaaguguca

SEQ ID NO: 786369 - RNA, 20 nt, Artificial Sequence
  Synthetic
ugaaagacagugaaguguca

SEQ ID NO: 786370 - RNA, 20 nt, Artificial Sequence
  Synthetic
ccaggcacauuccaguguca

SEQ ID NO: 786371 - RNA, 20 nt, Artificial Sequence
  Synthetic
uugaugaagacagaguguca

SEQ ID NO: 786372 - RNA, 20 nt, Artificial Sequence
  Synthetic
acauucagguaguaguguca

SEQ ID NO: 786373 - RNA, 20 nt, Artificial Sequence
  Synthetic
uccauaauccccacguguca

SEQ ID NO: 786374 - RNA, 20 nt, Artificial Sequence
  Synthetic
uccaaaauccccagguguca

SEQ ID NO: 786375 - RNA, 20 nt, Artificial Sequence
  Synthetic
acacguagcuuaugguguca

SEQ ID NO: 786376 - RNA, 20 nt, Artificial Sequence
  Synthetic
uaacuuacauacauguguca

SEQ ID NO: 786377 - RNA, 20 nt, Artificial Sequence
  Synthetic
cccauaauccccauguguca

SEQ ID NO: 786378 - RNA, 20 nt, Artificial Sequence
  Synthetic
aguagcaccaggauguguca

SEQ ID NO: 786379 - RNA, 20 nt, Artificial Sequence
  Synthetic
aagacaccuuuuauguguca

SEQ ID NO: 786380 - RNA, 20 nt, Artificial Sequence
  Synthetic
caaaaacauccaguguguca

SEQ ID NO: 786381 - RNA, 20 nt, Artificial Sequence
  Synthetic
auuauaauccccguguguca

SEQ ID NO: 786382 - RNA, 20 nt, Artificial Sequence
  Synthetic
acauagguaaacuuguguca

SEQ ID NO: 786383 - RNA, 20 nt, Artificial Sequence
  Synthetic
aauaauaaauaaaauuguca

SEQ ID NO: 786384 - RNA, 20 nt, Artificial Sequence
  Synthetic
uaugauauuagaaauuguca

SEQ ID NO: 786385 - RNA, 20 nt, Artificial Sequence
  Synthetic
uccuaaagacagaauuguca

SEQ ID NO: 786386 - RNA, 20 nt, Artificial Sequence
  Synthetic
uuaugauuguauaauuguca

SEQ ID NO: 786387 - RNA, 20 nt, Artificial Sequence
  Synthetic
aucauaauacaauauuguca

SEQ ID NO: 786388 - RNA, 20 nt, Artificial Sequence
  Synthetic
uaaaaauuguauuauuguca

SEQ ID NO: 786389 - RNA, 20 nt, Artificial Sequence
  Synthetic
agcuaaacagugcguuguca

SEQ ID NO: 786390 - RNA, 20 nt, Artificial Sequence
  Synthetic
acuuuggaguacuguuguca

SEQ ID NO: 786391 - RNA, 20 nt, Artificial Sequence
  Synthetic
uguguccauuuguguuguca

SEQ ID NO: 786392 - RNA, 20 nt, Artificial Sequence
  Synthetic
uuccccagcaaaauuuguca

SEQ ID NO: 786393 - RNA, 20 nt, Artificial Sequence
  Synthetic
uguguaaaagugcuuuguca

SEQ ID NO: 786394 - RNA, 20 nt, Artificial Sequence
  Synthetic
aaauguauuucauuuuguca

SEQ ID NO: 786395 - RNA, 20 nt, Artificial Sequence
  Synthetic
ucaauuaucuccuuuuguca

SEQ ID NO: 786396 - RNA, 20 nt, Artificial Sequence
  Synthetic
uuuuucaauaauuuuuguca

SEQ ID NO: 786397 - RNA, 20 nt, Artificial Sequence
  Synthetic
auaaaauguaguuuuuguca

SEQ ID NO: 786398 - RNA, 20 nt, Artificial Sequence
  Synthetic
cuacuuucuaaaaaaauuca

SEQ ID NO: 786399 - RNA, 20 nt, Artificial Sequence
  Synthetic
auuuguuugauaaaaauuca

SEQ ID NO: 786400 - RNA, 20 nt, Artificial Sequence
  Synthetic
ucuuucaaaaauaaaauuca

SEQ ID NO: 786401 - RNA, 20 nt, Artificial Sequence
  Synthetic
ucauguaugacuaaaauuca

SEQ ID NO: 786402 - RNA, 20 nt, Artificial Sequence
  Synthetic
uuauaaugauuuaaaauuca

SEQ ID NO: 786403 - RNA, 20 nt, Artificial Sequence
  Synthetic
uaaacaggaauacaaauuca

SEQ ID NO: 786404 - RNA, 20 nt, Artificial Sequence
  Synthetic
uauaaaaaaauagaaauuca

SEQ ID NO: 786405 - RNA, 20 nt, Artificial Sequence
  Synthetic
aucauaagaauagaaauuca

SEQ ID NO: 786406 - RNA, 20 nt, Artificial Sequence
  Synthetic
aauggcauaucugaaauuca

SEQ ID NO: 786407 - RNA, 20 nt, Artificial Sequence
  Synthetic
auucaugaaguauaaauuca

SEQ ID NO: 786408 - RNA, 20 nt, Artificial Sequence
  Synthetic
uagagcccacccuaaauuca

SEQ ID NO: 786409 - RNA, 20 nt, Artificial Sequence
  Synthetic
ucaauauuggauuaaauuca

SEQ ID NO: 786410 - RNA, 20 nt, Artificial Sequence
  Synthetic
auuuuggagauuacaauuca

SEQ ID NO: 786411 - RNA, 20 nt, Artificial Sequence
  Synthetic
auuacagggauuacaauuca

SEQ ID NO: 786412 - RNA, 20 nt, Artificial Sequence
  Synthetic
aaauuaaaaccagcaauuca

SEQ ID NO: 786413 - RNA, 20 nt, Artificial Sequence
  Synthetic
uacauuuuuaaaucaauuca

SEQ ID NO: 786414 - RNA, 20 nt, Artificial Sequence
  Synthetic
auuuuuuagaacucaauuca

SEQ ID NO: 786415 - RNA, 20 nt, Artificial Sequence
  Synthetic
uggaauaagaauucaauuca

SEQ ID NO: 786416 - RNA, 20 nt, Artificial Sequence
  Synthetic
aacagauuaaggagaauuca

SEQ ID NO: 786417 - RNA, 20 nt, Artificial Sequence
  Synthetic
cacuugagcccaggaauuca

SEQ ID NO: 786418 - RNA, 20 nt, Artificial Sequence
  Synthetic
cagggaaaauacggaauuca

SEQ ID NO: 786419 - RNA, 20 nt, Artificial Sequence
  Synthetic
agaacccuaaguggaauuca

SEQ ID NO: 786420 - RNA, 20 nt, Artificial Sequence
  Synthetic
aagccaccugaaguaauuca

SEQ ID NO: 786421 - RNA, 20 nt, Artificial Sequence
  Synthetic
uuucucuacccaguaauuca

SEQ ID NO: 786422 - RNA, 20 nt, Artificial Sequence
  Synthetic
augaaagaggauguaauuca

SEQ ID NO: 786423 - RNA, 20 nt, Artificial Sequence
  Synthetic
caaaagagaaauuuaauuca

SEQ ID NO: 786424 - RNA, 20 nt, Artificial Sequence
  Synthetic
aaauguguuauuuuaauuca

SEQ ID NO: 786425 - RNA, 20 nt, Artificial Sequence
  Synthetic
cccauggagaaaaacauuca

SEQ ID NO: 786426 - RNA, 20 nt, Artificial Sequence
  Synthetic
aaugguaaagacaacauuca

SEQ ID NO: 786427 - RNA, 20 nt, Artificial Sequence
  Synthetic
cauagaaggggccacauuca

SEQ ID NO: 786428 - RNA, 20 nt, Artificial Sequence
  Synthetic
aaguguuguuuucacauuca

SEQ ID NO: 786429 - RNA, 20 nt, Artificial Sequence
  Synthetic
uccaaaucuggugacauuca

SEQ ID NO: 786430 - RNA, 20 nt, Artificial Sequence
  Synthetic
caaggucuauagaccauuca

SEQ ID NO: 786431 - RNA, 20 nt, Artificial Sequence
  Synthetic
agcaagcauucauccauuca

SEQ ID NO: 786432 - RNA, 20 nt, Artificial Sequence
  Synthetic
aguccugcaagcuccauuca

SEQ ID NO: 786433 - RNA, 20 nt, Artificial Sequence
  Synthetic
uucaugaaaaucuccauuca

SEQ ID NO: 786434 - RNA, 20 nt, Artificial Sequence
  Synthetic
ccucaggcuucuuccauuca

SEQ ID NO: 786435 - RNA, 20 nt, Artificial Sequence
  Synthetic
auaguguauccaagcauuca

SEQ ID NO: 786436 - RNA, 20 nt, Artificial Sequence
  Synthetic
ugagugcaguggugcauuca

SEQ ID NO: 786437 - RNA, 20 nt, Artificial Sequence
  Synthetic
ucuuugucuccuugcauuca

SEQ ID NO: 786438 - RNA, 20 nt, Artificial Sequence
  Synthetic
ucaauuuaauagaucauuca

SEQ ID NO: 786439 - RNA, 20 nt, Artificial Sequence
  Synthetic
uaagaugauuugaucauuca

SEQ ID NO: 786440 - RNA, 20 nt, Artificial Sequence
  Synthetic
uucugcugcucccucauuca

SEQ ID NO: 786441 - RNA, 20 nt, Artificial Sequence
  Synthetic
aagaguaggaaggucauuca

SEQ ID NO: 786442 - RNA, 20 nt, Artificial Sequence
  Synthetic
aucaagggcugugucauuca

SEQ ID NO: 786443 - RNA, 20 nt, Artificial Sequence
  Synthetic
uccacacuccccuucauuca

SEQ ID NO: 786444 - RNA, 20 nt, Artificial Sequence
  Synthetic
ccuagaauccucuucauuca

SEQ ID NO: 786445 - RNA, 20 nt, Artificial Sequence
  Synthetic
caguggcggugguucauuca

SEQ ID NO: 786446 - RNA, 20 nt, Artificial Sequence
  Synthetic
agaaaauucuuaaagauuca

SEQ ID NO: 786447 - RNA, 20 nt, Artificial Sequence
  Synthetic
cucacugaacaauagauuca

SEQ ID NO: 786448 - RNA, 20 nt, Artificial Sequence
  Synthetic
cucacuggacaauagauuca

SEQ ID NO: 786449 - RNA, 20 nt, Artificial Sequence
  Synthetic
caaauagaaaaguagauuca

SEQ ID NO: 786450 - RNA, 20 nt, Artificial Sequence
  Synthetic
caacuuugauuuuagauuca

SEQ ID NO: 786451 - RNA, 20 nt, Artificial Sequence
  Synthetic
auaaagccauggccgauuca

SEQ ID NO: 786452 - RNA, 20 nt, Artificial Sequence
  Synthetic
auuuguuugacaaggauuca

SEQ ID NO: 786453 - RNA, 20 nt, Artificial Sequence
  Synthetic
uucaugaaccaagggauuca

SEQ ID NO: 786454 - RNA, 20 nt, Artificial Sequence
  Synthetic
aauuuaauuugauggauuca

SEQ ID NO: 786455 - RNA, 20 nt, Artificial Sequence
  Synthetic
auaucucaauucaugauuca

SEQ ID NO: 786456 - RNA, 20 nt, Artificial Sequence
  Synthetic
agugacagagcucugauuca

SEQ ID NO: 786457 - RNA, 20 nt, Artificial Sequence
  Synthetic
ccaaguuuccaagugauuca

SEQ ID NO: 786458 - RNA, 20 nt, Artificial Sequence
  Synthetic
ucaugauggaaaaauauuca

SEQ ID NO: 786459 - RNA, 20 nt, Artificial Sequence
  Synthetic
ucuucauuuacaaauauuca

SEQ ID NO: 786460 - RNA, 20 nt, Artificial Sequence
  Synthetic
acauaacaugacaauauuca

SEQ ID NO: 786461 - RNA, 20 nt, Artificial Sequence
  Synthetic
uuuuacaauuucaauauuca

SEQ ID NO: 786462 - RNA, 20 nt, Artificial Sequence
  Synthetic
auucccacagaacauauuca

SEQ ID NO: 786463 - RNA, 20 nt, Artificial Sequence
  Synthetic
aagacaaguuaacauauuca

SEQ ID NO: 786464 - RNA, 20 nt, Artificial Sequence
  Synthetic
aauauguguacacauauuca

SEQ ID NO: 786465 - RNA, 20 nt, Artificial Sequence
  Synthetic
auaauaauuguacauauuca

SEQ ID NO: 786466 - RNA, 20 nt, Artificial Sequence
  Synthetic
acaaggcaggcccauauuca

SEQ ID NO: 786467 - RNA, 20 nt, Artificial Sequence
  Synthetic
acuugaccaauccauauuca

SEQ ID NO: 786468 - RNA, 20 nt, Artificial Sequence
  Synthetic
ccaaagaaggcugauauuca

SEQ ID NO: 786469 - RNA, 20 nt, Artificial Sequence
  Synthetic
cugaggauuugauauauuca

SEQ ID NO: 786470 - RNA, 20 nt, Artificial Sequence
  Synthetic
auaaagguuguauauauuca

SEQ ID NO: 786471 - RNA, 20 nt, Artificial Sequence
  Synthetic
auacaacucaccuauauuca

SEQ ID NO: 786472 - RNA, 20 nt, Artificial Sequence
  Synthetic
auaagauaaggaacuauuca

SEQ ID NO: 786473 - RNA, 20 nt, Artificial Sequence
  Synthetic
cagggacaugugacuauuca

SEQ ID NO: 786474 - RNA, 20 nt, Artificial Sequence
  Synthetic
cagaauuuucacccuauuca

SEQ ID NO: 786475 - RNA, 20 nt, Artificial Sequence
  Synthetic
aauuauuucuucccuauuca

SEQ ID NO: 786476 - RNA, 20 nt, Artificial Sequence
  Synthetic
aagaggaaguagccuauuca

SEQ ID NO: 786477 - RNA, 20 nt, Artificial Sequence
  Synthetic
auuaauuuacuuccuauuca

SEQ ID NO: 786478 - RNA, 20 nt, Artificial Sequence
  Synthetic
aacagcuaucaagcuauuca

SEQ ID NO: 786479 - RNA, 20 nt, Artificial Sequence
  Synthetic
acucguuauuggucuauuca

SEQ ID NO: 786480 - RNA, 20 nt, Artificial Sequence
  Synthetic
acuuguuauuggucuauuca

SEQ ID NO: 786481 - RNA, 20 nt, Artificial Sequence
  Synthetic
auuaguguggaaaguauuca

SEQ ID NO: 786482 - RNA, 20 nt, Artificial Sequence
  Synthetic
uuuugcaaaugcgguauuca

SEQ ID NO: 786483 - RNA, 20 nt, Artificial Sequence
  Synthetic
ucugguucuuaauguauuca

SEQ ID NO: 786484 - RNA, 20 nt, Artificial Sequence
  Synthetic
auaaaaacuguauguauuca

SEQ ID NO: 786485 - RNA, 20 nt, Artificial Sequence
  Synthetic
auuagggucucuuguauuca

SEQ ID NO: 786486 - RNA, 20 nt, Artificial Sequence
  Synthetic
uaacccuaaaaaauuauuca

SEQ ID NO: 786487 - RNA, 20 nt, Artificial Sequence
  Synthetic
cagaaggauaaaauuauuca

SEQ ID NO: 786488 - RNA, 20 nt, Artificial Sequence
  Synthetic
caaugaaacaacauuauuca

SEQ ID NO: 786489 - RNA, 20 nt, Artificial Sequence
  Synthetic
ucaaagcauaaaguuauuca

SEQ ID NO: 786490 - RNA, 20 nt, Artificial Sequence
  Synthetic
uuccaaaaugauguuauuca

SEQ ID NO: 786491 - RNA, 20 nt, Artificial Sequence
  Synthetic
ccagugaccccauuuauuca

SEQ ID NO: 786492 - RNA, 20 nt, Artificial Sequence
  Synthetic
caacaauauugauuuauuca

SEQ ID NO: 786493 - RNA, 20 nt, Artificial Sequence
  Synthetic
ucaaccaauuacuuuauuca

SEQ ID NO: 786494 - RNA, 20 nt, Artificial Sequence
  Synthetic
uuuuugguauguuuuauuca

SEQ ID NO: 786495 - RNA, 20 nt, Artificial Sequence
  Synthetic
caagccagcccaaaacuuca

SEQ ID NO: 786496 - RNA, 20 nt, Artificial Sequence
  Synthetic
ugcaggaacauaaaacuuca

SEQ ID NO: 786497 - RNA, 20 nt, Artificial Sequence
  Synthetic
ucucuggaaauacaacuuca

SEQ ID NO: 786498 - RNA, 20 nt, Artificial Sequence
  Synthetic
uagcccagcagugaacuuca

SEQ ID NO: 786499 - RNA, 20 nt, Artificial Sequence
  Synthetic
uaccuuuuuuuugaacuuca

SEQ ID NO: 786500 - RNA, 20 nt, Artificial Sequence
  Synthetic
uguguuacaaauacacuuca

SEQ ID NO: 786501 - RNA, 20 nt, Artificial Sequence
  Synthetic
aggggcucauagccacuuca

SEQ ID NO: 786502 - RNA, 20 nt, Artificial Sequence
  Synthetic
uguucuaccacuucacuuca

SEQ ID NO: 786503 - RNA, 20 nt, Artificial Sequence
  Synthetic
uucauaauguuaagacuuca

SEQ ID NO: 786504 - RNA, 20 nt, Artificial Sequence
  Synthetic
aguguagcacauagacuuca

SEQ ID NO: 786505 - RNA, 20 nt, Artificial Sequence
  Synthetic
aauuuugcaugacgacuuca

SEQ ID NO: 786506 - RNA, 20 nt, Artificial Sequence
  Synthetic
acccuuuuaaagggacuuca

SEQ ID NO: 786507 - RNA, 20 nt, Artificial Sequence
  Synthetic
aagaauccggcuggacuuca

SEQ ID NO: 786508 - RNA, 20 nt, Artificial Sequence
  Synthetic
uugucaucuuucugacuuca

SEQ ID NO: 786509 - RNA, 20 nt, Artificial Sequence
  Synthetic
agaaaguguuggugacuuca

SEQ ID NO: 786510 - RNA, 20 nt, Artificial Sequence
  Synthetic
ucaaaguguacuugacuuca

SEQ ID NO: 786511 - RNA, 20 nt, Artificial Sequence
  Synthetic
agaguauuccaaauacuuca

SEQ ID NO: 786512 - RNA, 20 nt, Artificial Sequence
  Synthetic
ccugucuugccuauacuuca

SEQ ID NO: 786513 - RNA, 20 nt, Artificial Sequence
  Synthetic
aagugaaguggucuacuuca

SEQ ID NO: 786514 - RNA, 20 nt, Artificial Sequence
  Synthetic
aaauacgaccuauuacuuca

SEQ ID NO: 786515 - RNA, 20 nt, Artificial Sequence
  Synthetic
aagggucacugguuacuuca

SEQ ID NO: 786516 - RNA, 20 nt, Artificial Sequence
  Synthetic
aaauaauucucuuuacuuca

SEQ ID NO: 786517 - RNA, 20 nt, Artificial Sequence
  Synthetic
aaaaauuuccaccaccuuca

SEQ ID NO: 786518 - RNA, 20 nt, Artificial Sequence
  Synthetic
caaaaguagucccaccuuca

SEQ ID NO: 786519 - RNA, 20 nt, Artificial Sequence
  Synthetic
ucaaaucccugucaccuuca

SEQ ID NO: 786520 - RNA, 20 nt, Artificial Sequence
  Synthetic
caagagaaugaagaccuuca

SEQ ID NO: 786521 - RNA, 20 nt, Artificial Sequence
  Synthetic
accuaaaucuucuaccuuca

SEQ ID NO: 786522 - RNA, 20 nt, Artificial Sequence
  Synthetic
uauguucauaaguaccuuca

SEQ ID NO: 786523 - RNA, 20 nt, Artificial Sequence
  Synthetic
uuugcaagguuuuaccuuca

SEQ ID NO: 786524 - RNA, 20 nt, Artificial Sequence
  Synthetic
uucaacugucagucccuuca

SEQ ID NO: 786525 - RNA, 20 nt, Artificial Sequence
  Synthetic
agauauguuuauagccuuca

SEQ ID NO: 786526 - RNA, 20 nt, Artificial Sequence
  Synthetic
uagaaaaucaaaugccuuca

SEQ ID NO: 786527 - RNA, 20 nt, Artificial Sequence
  Synthetic
cucaauauaucuugccuuca

SEQ ID NO: 786528 - RNA, 20 nt, Artificial Sequence
  Synthetic
caaaucuaugaaauccuuca

SEQ ID NO: 786529 - RNA, 20 nt, Artificial Sequence
  Synthetic
aucucuccauuccuccuuca

SEQ ID NO: 786530 - RNA, 20 nt, Artificial Sequence
  Synthetic
ccaaaccugccaguccuuca

SEQ ID NO: 786531 - RNA, 20 nt, Artificial Sequence
  Synthetic
auuccaccuucaguccuuca

SEQ ID NO: 786532 - RNA, 20 nt, Artificial Sequence
  Synthetic
uggcaacauaccuuccuuca

SEQ ID NO: 786533 - RNA, 20 nt, Artificial Sequence
  Synthetic
auuugugucacuuuccuuca

SEQ ID NO: 786534 - RNA, 20 nt, Artificial Sequence
  Synthetic
cagucacagagcuagcuuca

SEQ ID NO: 786535 - RNA, 20 nt, Artificial Sequence
  Synthetic
acuuaaacaaacacgcuuca

SEQ ID NO: 786536 - RNA, 20 nt, Artificial Sequence
  Synthetic
cuaaaucaaggaaggcuuca

SEQ ID NO: 786537 - RNA, 20 nt, Artificial Sequence
  Synthetic
acccuguaaggaaggcuuca

SEQ ID NO: 786538 - RNA, 20 nt, Artificial Sequence
  Synthetic
agucaguuuuugaggcuuca

SEQ ID NO: 786539 - RNA, 20 nt, Artificial Sequence
  Synthetic
acacacccucuggggcuuca

SEQ ID NO: 786540 - RNA, 20 nt, Artificial Sequence
  Synthetic
uuguuagccacauggcuuca

SEQ ID NO: 786541 - RNA, 20 nt, Artificial Sequence
  Synthetic
cucaagaccagauggcuuca

SEQ ID NO: 786542 - RNA, 20 nt, Artificial Sequence
  Synthetic
uagucucaugaccugcuuca

SEQ ID NO: 786543 - RNA, 20 nt, Artificial Sequence
  Synthetic
aucuuggcacuuuugcuuca

SEQ ID NO: 786544 - RNA, 20 nt, Artificial Sequence
  Synthetic
cgugcuuuauuaaaucuuca

SEQ ID NO: 786545 - RNA, 20 nt, Artificial Sequence
  Synthetic
ccuuuaccaaaccaucuuca

SEQ ID NO: 786546 - RNA, 20 nt, Artificial Sequence
  Synthetic
aaccuauauuagcaucuuca

SEQ ID NO: 786547 - RNA, 20 nt, Artificial Sequence
  Synthetic
uacugccuuagagaucuuca

SEQ ID NO: 786548 - RNA, 20 nt, Artificial Sequence
  Synthetic
aguuucugaaaaacucuuca

SEQ ID NO: 786549 - RNA, 20 nt, Artificial Sequence
  Synthetic
auguccuaaucaccucuuca

SEQ ID NO: 786550 - RNA, 20 nt, Artificial Sequence
  Synthetic
cgaugugaaggaccucuuca

SEQ ID NO: 786551 - RNA, 20 nt, Artificial Sequence
  Synthetic
augugagcucuaccucuuca

SEQ ID NO: 786552 - RNA, 20 nt, Artificial Sequence
  Synthetic
acaaucuggacggcucuuca

SEQ ID NO: 786553 - RNA, 20 nt, Artificial Sequence
  Synthetic
uucagaugcuaugcucuuca

SEQ ID NO: 786554 - RNA, 20 nt, Artificial Sequence
  Synthetic
auuggaacauaaucucuuca

SEQ ID NO: 786555 - RNA, 20 nt, Artificial Sequence
  Synthetic
uuccucagacucucucuuca

SEQ ID NO: 786556 - RNA, 20 nt, Artificial Sequence
  Synthetic
uuuggcaaaaaucgucuuca

SEQ ID NO: 786557 - RNA, 20 nt, Artificial Sequence
  Synthetic
cccccacuggaaggucuuca

SEQ ID NO: 786558 - RNA, 20 nt, Artificial Sequence
  Synthetic
cauuuuguguauggucuuca

SEQ ID NO: 786559 - RNA, 20 nt, Artificial Sequence
  Synthetic
cacuuagcauaaugucuuca

SEQ ID NO: 786560 - RNA, 20 nt, Artificial Sequence
  Synthetic
cuuaaguaagucugucuuca

SEQ ID NO: 786561 - RNA, 20 nt, Artificial Sequence
  Synthetic
uauauauguuuuugucuuca

SEQ ID NO: 786562 - RNA, 20 nt, Artificial Sequence
  Synthetic
aucuuugacugaauucuuca

SEQ ID NO: 786563 - RNA, 20 nt, Artificial Sequence
  Synthetic
ucaacuuuucguauucuuca

SEQ ID NO: 786564 - RNA, 20 nt, Artificial Sequence
  Synthetic
uacugauuuuagcuucuuca

SEQ ID NO: 786565 - RNA, 20 nt, Artificial Sequence
  Synthetic
aaaccagauggucuucuuca

SEQ ID NO: 786566 - RNA, 20 nt, Artificial Sequence
  Synthetic
cacacacacuuuguucuuca

SEQ ID NO: 786567 - RNA, 20 nt, Artificial Sequence
  Synthetic
ugcuguuggggcuuucuuca

SEQ ID NO: 786568 - RNA, 20 nt, Artificial Sequence
  Synthetic
agccugguuuucuuucuuca

SEQ ID NO: 786569 - RNA, 20 nt, Artificial Sequence
  Synthetic
ucaccaucaucguuucuuca

SEQ ID NO: 786570 - RNA, 20 nt, Artificial Sequence
  Synthetic
ucaaucaugaauuuucuuca

SEQ ID NO: 786571 - RNA, 20 nt, Artificial Sequence
  Synthetic
accuuuuaauuuuuucuuca

SEQ ID NO: 786572 - RNA, 20 nt, Artificial Sequence
  Synthetic
aauaucugugaaaaaguuca

SEQ ID NO: 786573 - RNA, 20 nt, Artificial Sequence
  Synthetic
ucccaggcacauaaaguuca

SEQ ID NO: 786574 - RNA, 20 nt, Artificial Sequence
  Synthetic
ccaaaaggcggacaaguuca

SEQ ID NO: 786575 - RNA, 20 nt, Artificial Sequence
  Synthetic
uaaguugcuuuccaaguuca

SEQ ID NO: 786576 - RNA, 20 nt, Artificial Sequence
  Synthetic
ugagggaucucucaaguuca

SEQ ID NO: 786577 - RNA, 20 nt, Artificial Sequence
  Synthetic
acugggauuuaagaaguuca

SEQ ID NO: 786578 - RNA, 20 nt, Artificial Sequence
  Synthetic
uguuauagcuuagaaguuca

SEQ ID NO: 786579 - RNA, 20 nt, Artificial Sequence
  Synthetic
auuuugaaaaaggaaguuca

SEQ ID NO: 786580 - RNA, 20 nt, Artificial Sequence
  Synthetic
ugcuugacaacugaaguuca

SEQ ID NO: 786581 - RNA, 20 nt, Artificial Sequence
  Synthetic
aagcauuuugguuaaguuca

SEQ ID NO: 786582 - RNA, 20 nt, Artificial Sequence
  Synthetic
uuuuuucacuuuuaaguuca

SEQ ID NO: 786583 - RNA, 20 nt, Artificial Sequence
  Synthetic
uccaacagcugcccaguuca

SEQ ID NO: 786584 - RNA, 20 nt, Artificial Sequence
  Synthetic
ugcuugagccccagaguuca

SEQ ID NO: 786585 - RNA, 20 nt, Artificial Sequence
  Synthetic
agcaaaccccucagaguuca

SEQ ID NO: 786586 - RNA, 20 nt, Artificial Sequence
  Synthetic
caucugaggucaggaguuca

SEQ ID NO: 786587 - RNA, 20 nt, Artificial Sequence
  Synthetic
caccugagguccggaguuca

SEQ ID NO: 786588 - RNA, 20 nt, Artificial Sequence
  Synthetic
agggaaaacuuaauaguuca

SEQ ID NO: 786589 - RNA, 20 nt, Artificial Sequence
  Synthetic
auuucucccuagauaguuca

SEQ ID NO: 786590 - RNA, 20 nt, Artificial Sequence
  Synthetic
ucuuugcacuguauaguuca

SEQ ID NO: 786591 - RNA, 20 nt, Artificial Sequence
  Synthetic
auuaaaccucauguaguuca

SEQ ID NO: 786592 - RNA, 20 nt, Artificial Sequence
  Synthetic
uuucuuaagacuguaguuca

SEQ ID NO: 786593 - RNA, 20 nt, Artificial Sequence
  Synthetic
aacugguuauucaacguuca

SEQ ID NO: 786594 - RNA, 20 nt, Artificial Sequence
  Synthetic
uugguacacaaggccguuca

SEQ ID NO: 786595 - RNA, 20 nt, Artificial Sequence
  Synthetic
uuuauaugggaccagguuca

SEQ ID NO: 786596 - RNA, 20 nt, Artificial Sequence
  Synthetic
uccauuccuucccagguuca

SEQ ID NO: 786597 - RNA, 20 nt, Artificial Sequence
  Synthetic
aaccuccgccuccagguuca

SEQ ID NO: 786598 - RNA, 20 nt, Artificial Sequence
  Synthetic
uuuauaaagacucagguuca

SEQ ID NO: 786599 - RNA, 20 nt, Artificial Sequence
  Synthetic
cucacccaucgcuagguuca

SEQ ID NO: 786600 - RNA, 20 nt, Artificial Sequence
  Synthetic
uaacuuuuaaauuagguuca

SEQ ID NO: 786601 - RNA, 20 nt, Artificial Sequence
  Synthetic
uuaggaguuauuuagguuca

SEQ ID NO: 786602 - RNA, 20 nt, Artificial Sequence
  Synthetic
auggaguauuuuaggguuca

SEQ ID NO: 786603 - RNA, 20 nt, Artificial Sequence
  Synthetic
agcaaauucauagggguuca

SEQ ID NO: 786604 - RNA, 20 nt, Artificial Sequence
  Synthetic
uccuccaguuccuggguuca

SEQ ID NO: 786605 - RNA, 20 nt, Artificial Sequence
  Synthetic
accucugacucccugguuca

SEQ ID NO: 786606 - RNA, 20 nt, Artificial Sequence
  Synthetic
cagagaaucacugugguuca

SEQ ID NO: 786607 - RNA, 20 nt, Artificial Sequence
  Synthetic
uacgguugaagugugguuca

SEQ ID NO: 786608 - RNA, 20 nt, Artificial Sequence
  Synthetic
cuauucuuguccuugguuca

SEQ ID NO: 786609 - RNA, 20 nt, Artificial Sequence
  Synthetic
agagagaaauaguugguuca

SEQ ID NO: 786610 - RNA, 20 nt, Artificial Sequence
  Synthetic
cgaguauaguaaaauguuca

SEQ ID NO: 786611 - RNA, 20 nt, Artificial Sequence
  Synthetic
aauuacaaaagaaauguuca

SEQ ID NO: 786612 - RNA, 20 nt, Artificial Sequence
  Synthetic
cugcauacuugaaauguuca

SEQ ID NO: 786613 - RNA, 20 nt, Artificial Sequence
  Synthetic
uagucauuacuaaauguuca

SEQ ID NO: 786614 - RNA, 20 nt, Artificial Sequence
  Synthetic
cuauggccucuaaauguuca

SEQ ID NO: 786615 - RNA, 20 nt, Artificial Sequence
  Synthetic
aaagacgggaaagauguuca

SEQ ID NO: 786616 - RNA, 20 nt, Artificial Sequence
  Synthetic
uuauaauuuuaauauguuca

SEQ ID NO: 786617 - RNA, 20 nt, Artificial Sequence
  Synthetic
aaaucauucuucuauguuca

SEQ ID NO: 786618 - RNA, 20 nt, Artificial Sequence
  Synthetic
auugcucuaagguauguuca

SEQ ID NO: 786619 - RNA, 20 nt, Artificial Sequence
  Synthetic
cuguauuuuccuacuguuca

SEQ ID NO: 786620 - RNA, 20 nt, Artificial Sequence
  Synthetic
uauuuauauucuacuguuca

SEQ ID NO: 786621 - RNA, 20 nt, Artificial Sequence
  Synthetic
agaguugacaaagcuguuca

SEQ ID NO: 786622 - RNA, 20 nt, Artificial Sequence
  Synthetic
acaacuugcacagcuguuca

SEQ ID NO: 786623 - RNA, 20 nt, Artificial Sequence
  Synthetic
aagauaauuuuaucuguuca

SEQ ID NO: 786624 - RNA, 20 nt, Artificial Sequence
  Synthetic
aaugaaagaaugucuguuca

SEQ ID NO: 786625 - RNA, 20 nt, Artificial Sequence
  Synthetic
caauguccucuaaguguuca

SEQ ID NO: 786626 - RNA, 20 nt, Artificial Sequence
  Synthetic
accucugcucuagguguuca

SEQ ID NO: 786627 - RNA, 20 nt, Artificial Sequence
  Synthetic
uauugggaggaugguguuca

SEQ ID NO: 786628 - RNA, 20 nt, Artificial Sequence
  Synthetic
ucugcuuguggcuguguuca

SEQ ID NO: 786629 - RNA, 20 nt, Artificial Sequence
  Synthetic
cccuugaggcucuguguuca

SEQ ID NO: 786630 - RNA, 20 nt, Artificial Sequence
  Synthetic
aagguuaagugacuuguuca

SEQ ID NO: 786631 - RNA, 20 nt, Artificial Sequence
  Synthetic
ugggguuuuuuaguuguuca

SEQ ID NO: 786632 - RNA, 20 nt, Artificial Sequence
  Synthetic
uguucgaggucauuuguuca

SEQ ID NO: 786633 - RNA, 20 nt, Artificial Sequence
  Synthetic
ucaacccuccauuuuguuca

SEQ ID NO: 786634 - RNA, 20 nt, Artificial Sequence
  Synthetic
ugaggaguguagaaauuuca

SEQ ID NO: 786635 - RNA, 20 nt, Artificial Sequence
  Synthetic
auaacaguaggagaauuuca

SEQ ID NO: 786636 - RNA, 20 nt, Artificial Sequence
  Synthetic
aaaacucuucaugaauuuca

SEQ ID NO: 786637 - RNA, 20 nt, Artificial Sequence
  Synthetic
uuuuuacccuccuaauuuca

SEQ ID NO: 786638 - RNA, 20 nt, Artificial Sequence
  Synthetic
agauacaguaauuaauuuca

SEQ ID NO: 786639 - RNA, 20 nt, Artificial Sequence
  Synthetic
ugugacuugaaaacauuuca

SEQ ID NO: 786640 - RNA, 20 nt, Artificial Sequence
  Synthetic
caaccuaaugucacauuuca

SEQ ID NO: 786641 - RNA, 20 nt, Artificial Sequence
  Synthetic
uacacugaaaagacauuuca

SEQ ID NO: 786642 - RNA, 20 nt, Artificial Sequence
  Synthetic
aaaggucuauguacauuuca

SEQ ID NO: 786643 - RNA, 20 nt, Artificial Sequence
  Synthetic
uauuuagugaaaucauuuca

SEQ ID NO: 786644 - RNA, 20 nt, Artificial Sequence
  Synthetic
ccaauucuauccucauuuca

SEQ ID NO: 786645 - RNA, 20 nt, Artificial Sequence
  Synthetic
aacuguauuuggucauuuca

SEQ ID NO: 786646 - RNA, 20 nt, Artificial Sequence
  Synthetic
aagcaagaagauucauuuca

SEQ ID NO: 786647 - RNA, 20 nt, Artificial Sequence
  Synthetic
auauguacuuauucauuuca

SEQ ID NO: 786648 - RNA, 20 nt, Artificial Sequence
  Synthetic
aaauagacuuguucauuuca

SEQ ID NO: 786649 - RNA, 20 nt, Artificial Sequence
  Synthetic
caggagaaggggagauuuca

SEQ ID NO: 786650 - RNA, 20 nt, Artificial Sequence
  Synthetic
caacuuacugcuagauuuca

SEQ ID NO: 786651 - RNA, 20 nt, Artificial Sequence
  Synthetic
ucuuuuaucaguagauuuca

SEQ ID NO: 786652 - RNA, 20 nt, Artificial Sequence
  Synthetic
ccucuaaggauuagauuuca

SEQ ID NO: 786653 - RNA, 20 nt, Artificial Sequence
  Synthetic
acuucagaauauggauuuca

SEQ ID NO: 786654 - RNA, 20 nt, Artificial Sequence
  Synthetic
caaguaaccugaugauuuca

SEQ ID NO: 786655 - RNA, 20 nt, Artificial Sequence
  Synthetic
uaauaggcauugugauuuca

SEQ ID NO: 786656 - RNA, 20 nt, Artificial Sequence
  Synthetic
auuaggccacuuugauuuca

SEQ ID NO: 786657 - RNA, 20 nt, Artificial Sequence
  Synthetic
uaggcuauugcaauauuuca

SEQ ID NO: 786658 - RNA, 20 nt, Artificial Sequence
  Synthetic
augaccuguguaauauuuca

SEQ ID NO: 786659 - RNA, 20 nt, Artificial Sequence
  Synthetic
uaaaugaaauacauauuuca

SEQ ID NO: 786660 - RNA, 20 nt, Artificial Sequence
  Synthetic
uuuguuauugucauauuuca

SEQ ID NO: 786661 - RNA, 20 nt, Artificial Sequence
  Synthetic
uggauauuagauauauuuca

SEQ ID NO: 786662 - RNA, 20 nt, Artificial Sequence
  Synthetic
auuuauuuaaaucuauuuca

SEQ ID NO: 786663 - RNA, 20 nt, Artificial Sequence
  Synthetic
uguggcugaauaguauuuca

SEQ ID NO: 786664 - RNA, 20 nt, Artificial Sequence
  Synthetic
uaugacuauguaguauuuca

SEQ ID NO: 786665 - RNA, 20 nt, Artificial Sequence
  Synthetic
agucaugucauguuauuuca

SEQ ID NO: 786666 - RNA, 20 nt, Artificial Sequence
  Synthetic
caaucuuuguuguuauuuca

SEQ ID NO: 786667 - RNA, 20 nt, Artificial Sequence
  Synthetic
ccaagaaaaaauuuauuuca

SEQ ID NO: 786668 - RNA, 20 nt, Artificial Sequence
  Synthetic
uuaugauugucuuuauuuca

SEQ ID NO: 786669 - RNA, 20 nt, Artificial Sequence
  Synthetic
cgucuuccuucuaacuuuca

SEQ ID NO: 786670 - RNA, 20 nt, Artificial Sequence
  Synthetic
ugcaauuggauuaacuuuca

SEQ ID NO: 786671 - RNA, 20 nt, Artificial Sequence
  Synthetic
aguccaccccuucacuuuca

SEQ ID NO: 786672 - RNA, 20 nt, Artificial Sequence
  Synthetic
uuauauuauucuuacuuuca

SEQ ID NO: 786673 - RNA, 20 nt, Artificial Sequence
  Synthetic
cauucuacuugacccuuuca

SEQ ID NO: 786674 - RNA, 20 nt, Artificial Sequence
  Synthetic
aucuucuuuucucccuuuca

SEQ ID NO: 786675 - RNA, 20 nt, Artificial Sequence
  Synthetic
aauuuauaauacuccuuuca

SEQ ID NO: 786676 - RNA, 20 nt, Artificial Sequence
  Synthetic
agacaaacgcuguccuuuca

SEQ ID NO: 786677 - RNA, 20 nt, Artificial Sequence
  Synthetic
cguccucuuuuguccuuuca

SEQ ID NO: 786678 - RNA, 20 nt, Artificial Sequence
  Synthetic
uaacuaaaaccuuccuuuca

SEQ ID NO: 786679 - RNA, 20 nt, Artificial Sequence
  Synthetic
ugacucuugaaaagcuuuca

SEQ ID NO: 786680 - RNA, 20 nt, Artificial Sequence
  Synthetic
agauguauuagaagcuuuca

SEQ ID NO: 786681 - RNA, 20 nt, Artificial Sequence
  Synthetic
ugaauuguacauagcuuuca

SEQ ID NO: 786682 - RNA, 20 nt, Artificial Sequence
  Synthetic
agaaauguucuuggcuuuca

SEQ ID NO: 786683 - RNA, 20 nt, Artificial Sequence
  Synthetic
agacuugguuugcucuuuca

SEQ ID NO: 786684 - RNA, 20 nt, Artificial Sequence
  Synthetic
auggcuucucuucucuuuca

SEQ ID NO: 786685 - RNA, 20 nt, Artificial Sequence
  Synthetic
cugacuagccaugucuuuca

SEQ ID NO: 786686 - RNA, 20 nt, Artificial Sequence
  Synthetic
cucaagaaugcugucuuuca

SEQ ID NO: 786687 - RNA, 20 nt, Artificial Sequence
  Synthetic
cucauuagguacuucuuuca

SEQ ID NO: 786688 - RNA, 20 nt, Artificial Sequence
  Synthetic
ugucauuuggucuucuuuca

SEQ ID NO: 786689 - RNA, 20 nt, Artificial Sequence
  Synthetic
ccuucacuuauguucuuuca

SEQ ID NO: 786690 - RNA, 20 nt, Artificial Sequence
  Synthetic
acauaaugucuuuucuuuca

SEQ ID NO: 786691 - RNA, 20 nt, Artificial Sequence
  Synthetic
aguccuauucaaaaguuuca

SEQ ID NO: 786692 - RNA, 20 nt, Artificial Sequence
  Synthetic
aggaaaauggcaaaguuuca

SEQ ID NO: 786693 - RNA, 20 nt, Artificial Sequence
  Synthetic
aaucuacagcuaaaguuuca

SEQ ID NO: 786694 - RNA, 20 nt, Artificial Sequence
  Synthetic
cagauauucuuaaaguuuca

SEQ ID NO: 786695 - RNA, 20 nt, Artificial Sequence
  Synthetic
uaagaucuaauacaguuuca

SEQ ID NO: 786696 - RNA, 20 nt, Artificial Sequence
  Synthetic
uuacuauuuuaauaguuuca

SEQ ID NO: 786697 - RNA, 20 nt, Artificial Sequence
  Synthetic
uaagagaauuuggcguuuca

SEQ ID NO: 786698 - RNA, 20 nt, Artificial Sequence
  Synthetic
uggugacauucaagguuuca

SEQ ID NO: 786699 - RNA, 20 nt, Artificial Sequence
  Synthetic
auaucacuucugggguuuca

SEQ ID NO: 786700 - RNA, 20 nt, Artificial Sequence
  Synthetic
aaaaggaaaacaugguuuca

SEQ ID NO: 786701 - RNA, 20 nt, Artificial Sequence
  Synthetic
ugauuauggggaugguuuca

SEQ ID NO: 786702 - RNA, 20 nt, Artificial Sequence
  Synthetic
ugaaaauuuaauugguuuca

SEQ ID NO: 786703 - RNA, 20 nt, Artificial Sequence
  Synthetic
acagccccaggaauguuuca

SEQ ID NO: 786704 - RNA, 20 nt, Artificial Sequence
  Synthetic
auuauuauauccauguuuca

SEQ ID NO: 786705 - RNA, 20 nt, Artificial Sequence
  Synthetic
aaucaauuuggcauguuuca

SEQ ID NO: 786706 - RNA, 20 nt, Artificial Sequence
  Synthetic
uugguagauugcauguuuca

SEQ ID NO: 786707 - RNA, 20 nt, Artificial Sequence
  Synthetic
ugacaaccaaauauguuuca

SEQ ID NO: 786708 - RNA, 20 nt, Artificial Sequence
  Synthetic
uuuaaggaaauacuguuuca

SEQ ID NO: 786709 - RNA, 20 nt, Artificial Sequence
  Synthetic
aagugcucaugauuguuuca

SEQ ID NO: 786710 - RNA, 20 nt, Artificial Sequence
  Synthetic
aauaugaaauuguuguuuca

SEQ ID NO: 786711 - RNA, 20 nt, Artificial Sequence
  Synthetic
uucuaggagggaaauuuuca

SEQ ID NO: 786712 - RNA, 20 nt, Artificial Sequence
  Synthetic
uacauuuuccagaauuuuca

SEQ ID NO: 786713 - RNA, 20 nt, Artificial Sequence
  Synthetic
ccuuaaagucugaauuuuca

SEQ ID NO: 786714 - RNA, 20 nt, Artificial Sequence
  Synthetic
uuaacuuuucuuaauuuuca

SEQ ID NO: 786715 - RNA, 20 nt, Artificial Sequence
  Synthetic
uuuauuauguuuaauuuuca

SEQ ID NO: 786716 - RNA, 20 nt, Artificial Sequence
  Synthetic
uuuugauuaccacauuuuca

SEQ ID NO: 786717 - RNA, 20 nt, Artificial Sequence
  Synthetic
acuuuguauucacauuuuca

SEQ ID NO: 786718 - RNA, 20 nt, Artificial Sequence
  Synthetic
aagaaaggaggccauuuuca

SEQ ID NO: 786719 - RNA, 20 nt, Artificial Sequence
  Synthetic
ucaacuuuuucucauuuuca

SEQ ID NO: 786720 - RNA, 20 nt, Artificial Sequence
  Synthetic
aaauacugaagucauuuuca

SEQ ID NO: 786721 - RNA, 20 nt, Artificial Sequence
  Synthetic
aaaaucaauucagauuuuca

SEQ ID NO: 786722 - RNA, 20 nt, Artificial Sequence
  Synthetic
ugcaaggcuacugauuuuca

SEQ ID NO: 786723 - RNA, 20 nt, Artificial Sequence
  Synthetic
cccucagcauaauauuuuca

SEQ ID NO: 786724 - RNA, 20 nt, Artificial Sequence
  Synthetic
uacuauaaccuauauuuuca

SEQ ID NO: 786725 - RNA, 20 nt, Artificial Sequence
  Synthetic
caaauuuuaaccuauuuuca

SEQ ID NO: 786726 - RNA, 20 nt, Artificial Sequence
  Synthetic
ugugggaccagcuauuuuca

SEQ ID NO: 786727 - RNA, 20 nt, Artificial Sequence
  Synthetic
cuguuauuuagcuauuuuca

SEQ ID NO: 786728 - RNA, 20 nt, Artificial Sequence
  Synthetic
auuuccccacuguauuuuca

SEQ ID NO: 786729 - RNA, 20 nt, Artificial Sequence
  Synthetic
uauuaaaagccuuauuuuca

SEQ ID NO: 786730 - RNA, 20 nt, Artificial Sequence
  Synthetic
accgaguauucuuauuuuca

SEQ ID NO: 786731 - RNA, 20 nt, Artificial Sequence
  Synthetic
ugugugugagacacuuuuca

SEQ ID NO: 786732 - RNA, 20 nt, Artificial Sequence
  Synthetic
aagauguuuagcacuuuuca

SEQ ID NO: 786733 - RNA, 20 nt, Artificial Sequence
  Synthetic
caaacacaggugacuuuuca

SEQ ID NO: 786734 - RNA, 20 nt, Artificial Sequence
  Synthetic
caaacauuaccuacuuuuca

SEQ ID NO: 786735 - RNA, 20 nt, Artificial Sequence
  Synthetic
caaagcucaguuccuuuuca

SEQ ID NO: 786736 - RNA, 20 nt, Artificial Sequence
  Synthetic
cacuauuaagcaucuuuuca

SEQ ID NO: 786737 - RNA, 20 nt, Artificial Sequence
  Synthetic
caacucccacacucuuuuca

SEQ ID NO: 786738 - RNA, 20 nt, Artificial Sequence
  Synthetic
agaggaggacggucuuuuca

SEQ ID NO: 786739 - RNA, 20 nt, Artificial Sequence
  Synthetic
ucuaugauuuugucuuuuca

SEQ ID NO: 786740 - RNA, 20 nt, Artificial Sequence
  Synthetic
agacuuugaggaaguuuuca

SEQ ID NO: 786741 - RNA, 20 nt, Artificial Sequence
  Synthetic
uacucauucagcaguuuuca

SEQ ID NO: 786742 - RNA, 20 nt, Artificial Sequence
  Synthetic
cuccuuccguucaguuuuca

SEQ ID NO: 786743 - RNA, 20 nt, Artificial Sequence
  Synthetic
ugauauugacauaguuuuca

SEQ ID NO: 786744 - RNA, 20 nt, Artificial Sequence
  Synthetic
ucauccaggcccuguuuuca

SEQ ID NO: 786745 - RNA, 20 nt, Artificial Sequence
  Synthetic
acagauuugugcuguuuuca

SEQ ID NO: 786746 - RNA, 20 nt, Artificial Sequence
  Synthetic
aaguggccauucuguuuuca

SEQ ID NO: 786747 - RNA, 20 nt, Artificial Sequence
  Synthetic
uucuugagaaauuguuuuca

SEQ ID NO: 786748 - RNA, 20 nt, Artificial Sequence
  Synthetic
auaguaacuuaaauuuuuca

SEQ ID NO: 786749 - RNA, 20 nt, Artificial Sequence
  Synthetic
aaggugaccucaauuuuuca

SEQ ID NO: 786750 - RNA, 20 nt, Artificial Sequence
  Synthetic
ucaaauguaauaauuuuuca

SEQ ID NO: 786751 - RNA, 20 nt, Artificial Sequence
  Synthetic
aucaggguuaauauuuuuca

SEQ ID NO: 786752 - RNA, 20 nt, Artificial Sequence
  Synthetic
agucagaggccuauuuuuca

SEQ ID NO: 786753 - RNA, 20 nt, Artificial Sequence
  Synthetic
cucacuaaggcucuuuuuca

SEQ ID NO: 786754 - RNA, 20 nt, Artificial Sequence
  Synthetic
caugaucucauucuuuuuca

SEQ ID NO: 786755 - RNA, 20 nt, Artificial Sequence
  Synthetic
ugucauaauuauguuuuuca

SEQ ID NO: 786756 - RNA, 20 nt, Artificial Sequence
  Synthetic
caacaggcaguuguuuuuca

SEQ ID NO: 786757 - RNA, 20 nt, Artificial Sequence
  Synthetic
aaacuugucuucuuuuuuca

SEQ ID NO: 786758 - RNA, 20 nt, Artificial Sequence
  Synthetic
ccaauguuguucuuuuuuca

SEQ ID NO: 786759 - RNA, 20 nt, Artificial Sequence
  Synthetic
agaauuacccauuuuuuuca

SEQ ID NO: 786760 - RNA, 20 nt, Artificial Sequence
  Synthetic
uggaaaaccuauuuuuuuca

SEQ ID NO: 786761 - RNA, 20 nt, Artificial Sequence
  Synthetic
cgauuugagcuuuuuuuuca

SEQ ID NO: 786762 - RNA, 20 nt, Artificial Sequence
  Synthetic
uaauccauuuuuuuuuuuca

SEQ ID NO: 786763 - RNA, 20 nt, Artificial Sequence
  Synthetic
uaaaaaaaaaaaaaaaaaga

SEQ ID NO: 786764 - RNA, 20 nt, Artificial Sequence
  Synthetic
uucaaagagaaaaaaaaaga

SEQ ID NO: 786765 - RNA, 20 nt, Artificial Sequence
  Synthetic
uacucggccacaaaaaaaga

SEQ ID NO: 786766 - RNA, 20 nt, Artificial Sequence
  Synthetic
uuuuuuccuggaaaaaaaga

SEQ ID NO: 786767 - RNA, 20 nt, Artificial Sequence
  Synthetic
acuuugaaauauaaaaaaga

SEQ ID NO: 786768 - RNA, 20 nt, Artificial Sequence
  Synthetic
cucuuccaucuuaaaaaaga

SEQ ID NO: 786769 - RNA, 20 nt, Artificial Sequence
  Synthetic
uagaggaaaagacaaaaaga

SEQ ID NO: 786770 - RNA, 20 nt, Artificial Sequence
  Synthetic
auaaguuucauacaaaaaga

SEQ ID NO: 786771 - RNA, 20 nt, Artificial Sequence
  Synthetic
acuaauauuagagaaaaaga

SEQ ID NO: 786772 - RNA, 20 nt, Artificial Sequence
  Synthetic
uuccaaucaauagaaaaaga

SEQ ID NO: 786773 - RNA, 20 nt, Artificial Sequence
  Synthetic
ugaguauacauagaaaaaga

SEQ ID NO: 786774 - RNA, 20 nt, Artificial Sequence
  Synthetic
cucaaagacuuagaaaaaga

SEQ ID NO: 786775 - RNA, 20 nt, Artificial Sequence
  Synthetic
auuuuaauccuggaaaaaga

SEQ ID NO: 786776 - RNA, 20 nt, Artificial Sequence
  Synthetic
cccuggaagguggaaaaaga

SEQ ID NO: 786777 - RNA, 20 nt, Artificial Sequence
  Synthetic
auugcagagcuugaaaaaga

SEQ ID NO: 786778 - RNA, 20 nt, Artificial Sequence
  Synthetic
aacucaccauuugaaaaaga

SEQ ID NO: 786779 - RNA, 20 nt, Artificial Sequence
  Synthetic
aaugguuaauaauaaaaaga

SEQ ID NO: 786780 - RNA, 20 nt, Artificial Sequence
  Synthetic
uuuauauaaaaguaaaaaga

SEQ ID NO: 786781 - RNA, 20 nt, Artificial Sequence
  Synthetic
aaauaacgaaaguaaaaaga

SEQ ID NO: 786782 - RNA, 20 nt, Artificial Sequence
  Synthetic
uaggaaaacauuuaaaaaga

SEQ ID NO: 786783 - RNA, 20 nt, Artificial Sequence
  Synthetic
auuuuuauauuuuaaaaaga

SEQ ID NO: 786784 - RNA, 20 nt, Artificial Sequence
  Synthetic
uaugcucuggacacaaaaga

SEQ ID NO: 786785 - RNA, 20 nt, Artificial Sequence
  Synthetic
uggccuuggaccacaaaaga

SEQ ID NO: 786786 - RNA, 20 nt, Artificial Sequence
  Synthetic
aucuggcacucaccaaaaga

SEQ ID NO: 786787 - RNA, 20 nt, Artificial Sequence
  Synthetic
caagccauauagccaaaaga

SEQ ID NO: 786788 - RNA, 20 nt, Artificial Sequence
  Synthetic
uugccuccagaggcaaaaga

SEQ ID NO: 786789 - RNA, 20 nt, Artificial Sequence
  Synthetic
augugauuauaggcaaaaga

SEQ ID NO: 786790 - RNA, 20 nt, Artificial Sequence
  Synthetic
uacuauaugagugcaaaaga

SEQ ID NO: 786791 - RNA, 20 nt, Artificial Sequence
  Synthetic
aggugcuagaugucaaaaga

SEQ ID NO: 786792 - RNA, 20 nt, Artificial Sequence
  Synthetic
uuucugcauccuucaaaaga

SEQ ID NO: 786793 - RNA, 20 nt, Artificial Sequence
  Synthetic
uucuuaauuaguucaaaaga

SEQ ID NO: 786794 - RNA, 20 nt, Artificial Sequence
  Synthetic
aaaaggaaagaaagaaaaga

SEQ ID NO: 786795 - RNA, 20 nt, Artificial Sequence
  Synthetic
uaucuaugugaaagaaaaga

SEQ ID NO: 786796 - RNA, 20 nt, Artificial Sequence
  Synthetic
aggaauggaggaagaaaaga

SEQ ID NO: 786797 - RNA, 20 nt, Artificial Sequence
  Synthetic
acaaaugcauuaagaaaaga

SEQ ID NO: 786798 - RNA, 20 nt, Artificial Sequence
  Synthetic
agcaaaagccagagaaaaga

SEQ ID NO: 786799 - RNA, 20 nt, Artificial Sequence
  Synthetic
ucaaauuccuggagaaaaga

SEQ ID NO: 786800 - RNA, 20 nt, Artificial Sequence
  Synthetic
agccuagaagguagaaaaga

SEQ ID NO: 786801 - RNA, 20 nt, Artificial Sequence
  Synthetic
agaagguuaaugcgaaaaga

SEQ ID NO: 786802 - RNA, 20 nt, Artificial Sequence
  Synthetic
acccuggguaaaggaaaaga

SEQ ID NO: 786803 - RNA, 20 nt, Artificial Sequence
  Synthetic
cuuggaaaugaaggaaaaga

SEQ ID NO: 786804 - RNA, 20 nt, Artificial Sequence
  Synthetic
agcucaaaggcaggaaaaga

SEQ ID NO: 786805 - RNA, 20 nt, Artificial Sequence
  Synthetic
uucuaaacaauaggaaaaga

SEQ ID NO: 786806 - RNA, 20 nt, Artificial Sequence
  Synthetic
agaagguugcuuggaaaaga

SEQ ID NO: 786807 - RNA, 20 nt, Artificial Sequence
  Synthetic
uccauaagcacaugaaaaga

SEQ ID NO: 786808 - RNA, 20 nt, Artificial Sequence
  Synthetic
auuuacuacuucugaaaaga

SEQ ID NO: 786809 - RNA, 20 nt, Artificial Sequence
  Synthetic
augugaagugugugaaaaga

SEQ ID NO: 786810 - RNA, 20 nt, Artificial Sequence
  Synthetic
uugagacauauuugaaaaga

SEQ ID NO: 786811 - RNA, 20 nt, Artificial Sequence
  Synthetic
aaagcagggauaauaaaaga

SEQ ID NO: 786812 - RNA, 20 nt, Artificial Sequence
  Synthetic
cugcacucccuaauaaaaga

SEQ ID NO: 786813 - RNA, 20 nt, Artificial Sequence
  Synthetic
ugauggacugugauaaaaga

SEQ ID NO: 786814 - RNA, 20 nt, Artificial Sequence
  Synthetic
acuauaugugaacuaaaaga

SEQ ID NO: 786815 - RNA, 20 nt, Artificial Sequence
  Synthetic
uugacaaucagacuaaaaga

SEQ ID NO: 786816 - RNA, 20 nt, Artificial Sequence
  Synthetic
aaaaaagaugggcuaaaaga

SEQ ID NO: 786817 - RNA, 20 nt, Artificial Sequence
  Synthetic
aacauacaucugcuaaaaga

SEQ ID NO: 786818 - RNA, 20 nt, Artificial Sequence
  Synthetic
acccauaguguauuaaaaga

SEQ ID NO: 786819 - RNA, 20 nt, Artificial Sequence
  Synthetic
agcagcaacagcuuaaaaga

SEQ ID NO: 786820 - RNA, 20 nt, Artificial Sequence
  Synthetic
aacuuugaaaucuuaaaaga

SEQ ID NO: 786821 - RNA, 20 nt, Artificial Sequence
  Synthetic
uacaacuuaucuuuaaaaga

SEQ ID NO: 786822 - RNA, 20 nt, Artificial Sequence
  Synthetic
aaggaaggagagaacaaaga

SEQ ID NO: 786823 - RNA, 20 nt, Artificial Sequence
  Synthetic
uuacuaguaaguaacaaaga

SEQ ID NO: 786824 - RNA, 20 nt, Artificial Sequence
  Synthetic
cuuauuuuuauuaacaaaga

SEQ ID NO: 786825 - RNA, 20 nt, Artificial Sequence
  Synthetic
aguacauaugaacacaaaga

SEQ ID NO: 786826 - RNA, 20 nt, Artificial Sequence
  Synthetic
aaacuaaaaagacacaaaga

SEQ ID NO: 786827 - RNA, 20 nt, Artificial Sequence
  Synthetic
agaacauauggacacaaaga

SEQ ID NO: 786828 - RNA, 20 nt, Artificial Sequence
  Synthetic
auucccuuguggcacaaaga

SEQ ID NO: 786829 - RNA, 20 nt, Artificial Sequence
  Synthetic
aagaucaagaaagacaaaga

SEQ ID NO: 786830 - RNA, 20 nt, Artificial Sequence
  Synthetic
aagaucaaaagagacaaaga

SEQ ID NO: 786831 - RNA, 20 nt, Artificial Sequence
  Synthetic
acuguaagaagagacaaaga

SEQ ID NO: 786832 - RNA, 20 nt, Artificial Sequence
  Synthetic
cucuaagauuuauacaaaga

SEQ ID NO: 786833 - RNA, 20 nt, Artificial Sequence
  Synthetic
cuuuagggcuguuacaaaga

SEQ ID NO: 786834 - RNA, 20 nt, Artificial Sequence
  Synthetic
uauguugaaugagccaaaga

SEQ ID NO: 786835 - RNA, 20 nt, Artificial Sequence
  Synthetic
uuggccaaccaugccaaaga

SEQ ID NO: 786836 - RNA, 20 nt, Artificial Sequence
  Synthetic
ccauagggugaugccaaaga

SEQ ID NO: 786837 - RNA, 20 nt, Artificial Sequence
  Synthetic
aaaguuucuagauccaaaga

SEQ ID NO: 786838 - RNA, 20 nt, Artificial Sequence
  Synthetic
acuacacaagguuccaaaga

SEQ ID NO: 786839 - RNA, 20 nt, Artificial Sequence
  Synthetic
uagcaggagggaagcaaaga

SEQ ID NO: 786840 - RNA, 20 nt, Artificial Sequence
  Synthetic
uuccacuagcugagcaaaga

SEQ ID NO: 786841 - RNA, 20 nt, Artificial Sequence
  Synthetic
auuacagugcugaucaaaga

SEQ ID NO: 786842 - RNA, 20 nt, Artificial Sequence
  Synthetic
uaugugccuuagcucaaaga

SEQ ID NO: 786843 - RNA, 20 nt, Artificial Sequence
  Synthetic
ucaccaugauaucucaaaga

SEQ ID NO: 786844 - RNA, 20 nt, Artificial Sequence
  Synthetic
auuugaacaugucucaaaga

SEQ ID NO: 786845 - RNA, 20 nt, Artificial Sequence
  Synthetic
aagugaauacaauucaaaga

SEQ ID NO: 786846 - RNA, 20 nt, Artificial Sequence
  Synthetic
uuuagugguuaauucaaaga

SEQ ID NO: 786847 - RNA, 20 nt, Artificial Sequence
  Synthetic
agagguuauacauucaaaga

SEQ ID NO: 786848 - RNA, 20 nt, Artificial Sequence
  Synthetic
aaaagagaagguuucaaaga

SEQ ID NO: 786849 - RNA, 20 nt, Artificial Sequence
  Synthetic
auuucuuuuauuuucaaaga

SEQ ID NO: 786850 - RNA, 20 nt, Artificial Sequence
  Synthetic
aaaaagaaaaaaaagaaaga

SEQ ID NO: 786851 - RNA, 20 nt, Artificial Sequence
  Synthetic
auaauaauaaaaaagaaaga

SEQ ID NO: 786852 - RNA, 20 nt, Artificial Sequence
  Synthetic
ccguagcauauaaagaaaga

SEQ ID NO: 786853 - RNA, 20 nt, Artificial Sequence
  Synthetic
auuuuuccauuaaagaaaga

SEQ ID NO: 786854 - RNA, 20 nt, Artificial Sequence
  Synthetic
cucauucaacagaagaaaga

SEQ ID NO: 786855 - RNA, 20 nt, Artificial Sequence
  Synthetic
uguggauagcugaagaaaga

SEQ ID NO: 786856 - RNA, 20 nt, Artificial Sequence
  Synthetic
aaaaauugaucacagaaaga

SEQ ID NO: 786857 - RNA, 20 nt, Artificial Sequence
  Synthetic
auaugagagauacagaaaga

SEQ ID NO: 786858 - RNA, 20 nt, Artificial Sequence
  Synthetic
agugucauuuagcagaaaga

SEQ ID NO: 786859 - RNA, 20 nt, Artificial Sequence
  Synthetic
uuugugggcuggcagaaaga

SEQ ID NO: 786860 - RNA, 20 nt, Artificial Sequence
  Synthetic
acacaacagauucagaaaga

SEQ ID NO: 786861 - RNA, 20 nt, Artificial Sequence
  Synthetic
acuccauaaaaagagaaaga

SEQ ID NO: 786862 - RNA, 20 nt, Artificial Sequence
  Synthetic
uucuaaaagagagagaaaga

SEQ ID NO: 786863 - RNA, 20 nt, Artificial Sequence
  Synthetic
caacugcacagauagaaaga

SEQ ID NO: 786864 - RNA, 20 nt, Artificial Sequence
  Synthetic
augcauuuuggauagaaaga

SEQ ID NO: 786865 - RNA, 20 nt, Artificial Sequence
  Synthetic
uuaaaaguccucuagaaaga

SEQ ID NO: 786866 - RNA, 20 nt, Artificial Sequence
  Synthetic
agugauagguucuagaaaga

SEQ ID NO: 786867 - RNA, 20 nt, Artificial Sequence
  Synthetic
caauucgaauauuagaaaga

SEQ ID NO: 786868 - RNA, 20 nt, Artificial Sequence
  Synthetic
uuuaaaauguaaaggaaaga

SEQ ID NO: 786869 - RNA, 20 nt, Artificial Sequence
  Synthetic
auuucuauuuggaggaaaga

SEQ ID NO: 786870 - RNA, 20 nt, Artificial Sequence
  Synthetic
uagccugagcaacggaaaga

SEQ ID NO: 786871 - RNA, 20 nt, Artificial Sequence
  Synthetic
ccuggaugcuuugggaaaga

SEQ ID NO: 786872 - RNA, 20 nt, Artificial Sequence
  Synthetic
augcuuacugaguggaaaga

SEQ ID NO: 786873 - RNA, 20 nt, Artificial Sequence
  Synthetic
auacuuaugacaaugaaaga

SEQ ID NO: 786874 - RNA, 20 nt, Artificial Sequence
  Synthetic
cugcacaugggaaugaaaga

SEQ ID NO: 786875 - RNA, 20 nt, Artificial Sequence
  Synthetic
uugcccaaagcagugaaaga

SEQ ID NO: 786876 - RNA, 20 nt, Artificial Sequence
  Synthetic
aguaguuugugagugaaaga

SEQ ID NO: 786877 - RNA, 20 nt, Artificial Sequence
  Synthetic
aagacugaauuugugaaaga

SEQ ID NO: 786878 - RNA, 20 nt, Artificial Sequence
  Synthetic
uagucagaacaauugaaaga

SEQ ID NO: 786879 - RNA, 20 nt, Artificial Sequence
  Synthetic
ucacaucagaaguugaaaga

SEQ ID NO: 786880 - RNA, 20 nt, Artificial Sequence
  Synthetic
uacuagaagaaaaauaaaga

SEQ ID NO: 786881 - RNA, 20 nt, Artificial Sequence
  Synthetic
caggugcacacaaauaaaga

SEQ ID NO: 786882 - RNA, 20 nt, Artificial Sequence
  Synthetic
uaagggcauggaaauaaaga

SEQ ID NO: 786883 - RNA, 20 nt, Artificial Sequence
  Synthetic
uaccaugguagcaauaaaga

SEQ ID NO: 786884 - RNA, 20 nt, Artificial Sequence
  Synthetic
uaauguaacaugaauaaaga

SEQ ID NO: 786885 - RNA, 20 nt, Artificial Sequence
  Synthetic
cauaauuguuuuaauaaaga

SEQ ID NO: 786886 - RNA, 20 nt, Artificial Sequence
  Synthetic
acuauuucaaaagauaaaga

SEQ ID NO: 786887 - RNA, 20 nt, Artificial Sequence
  Synthetic
aauacucaagaagauaaaga

SEQ ID NO: 786888 - RNA, 20 nt, Artificial Sequence
  Synthetic
uccucgauaggggauaaaga

SEQ ID NO: 786889 - RNA, 20 nt, Artificial Sequence
  Synthetic
cccagggggcaugauaaaga

SEQ ID NO: 786890 - RNA, 20 nt, Artificial Sequence
  Synthetic
uuuugcaaaugauauaaaga

SEQ ID NO: 786891 - RNA, 20 nt, Artificial Sequence
  Synthetic
aauuuuguaagcuauaaaga

SEQ ID NO: 786892 - RNA, 20 nt, Artificial Sequence
  Synthetic
aggaguuauucaacuaaaga

SEQ ID NO: 786893 - RNA, 20 nt, Artificial Sequence
  Synthetic
ucucccauuuuuacuaaaga

SEQ ID NO: 786894 - RNA, 20 nt, Artificial Sequence
  Synthetic
caaaauacauuaccuaaaga

SEQ ID NO: 786895 - RNA, 20 nt, Artificial Sequence
  Synthetic
auggggccugaaaguaaaga

SEQ ID NO: 786896 - RNA, 20 nt, Artificial Sequence
  Synthetic
auaaaguuuccaaguaaaga

SEQ ID NO: 786897 - RNA, 20 nt, Artificial Sequence
  Synthetic
auuguagaguucaguaaaga

SEQ ID NO: 786898 - RNA, 20 nt, Artificial Sequence
  Synthetic
aacuaaaauaggaguaaaga

SEQ ID NO: 786899 - RNA, 20 nt, Artificial Sequence
  Synthetic
uuuuguaguuuuaguaaaga

SEQ ID NO: 786900 - RNA, 20 nt, Artificial Sequence
  Synthetic
uuuacuauuuuuaguaaaga

SEQ ID NO: 786901 - RNA, 20 nt, Artificial Sequence
  Synthetic
uuggcuuauaaucguaaaga

SEQ ID NO: 786902 - RNA, 20 nt, Artificial Sequence
  Synthetic
ugaaauaggggcgguaaaga

SEQ ID NO: 786903 - RNA, 20 nt, Artificial Sequence
  Synthetic
aagugagcuguggguaaaga

SEQ ID NO: 786904 - RNA, 20 nt, Artificial Sequence
  Synthetic
uuugguuuuggguguaaaga

SEQ ID NO: 786905 - RNA, 20 nt, Artificial Sequence
  Synthetic
ccuggcuccuuuuguaaaga

SEQ ID NO: 786906 - RNA, 20 nt, Artificial Sequence
  Synthetic
uuaaggaaugaaauuaaaga

SEQ ID NO: 786907 - RNA, 20 nt, Artificial Sequence
  Synthetic
uuaaguccugaaauuaaaga

SEQ ID NO: 786908 - RNA, 20 nt, Artificial Sequence
  Synthetic
aaaauaagaaggauuaaaga

SEQ ID NO: 786909 - RNA, 20 nt, Artificial Sequence
  Synthetic
auuauuauuauuauuaaaga

SEQ ID NO: 786910 - RNA, 20 nt, Artificial Sequence
  Synthetic
aaaaagaguguuauuaaaga

SEQ ID NO: 786911 - RNA, 20 nt, Artificial Sequence
  Synthetic
uuuugaagugaucuuaaaga

SEQ ID NO: 786912 - RNA, 20 nt, Artificial Sequence
  Synthetic
uaaguuuugaauguuaaaga

SEQ ID NO: 786913 - RNA, 20 nt, Artificial Sequence
  Synthetic
ucugacuagaguuuuaaaga

SEQ ID NO: 786914 - RNA, 20 nt, Artificial Sequence
  Synthetic
acaaaagcaacaaaacaaga

SEQ ID NO: 786915 - RNA, 20 nt, Artificial Sequence
  Synthetic
aaaacaaaggcaaaacaaga

SEQ ID NO: 786916 - RNA, 20 nt, Artificial Sequence
  Synthetic
ucuacauaugcaaaacaaga

SEQ ID NO: 786917 - RNA, 20 nt, Artificial Sequence
  Synthetic
aagaguacaguugaacaaga

SEQ ID NO: 786918 - RNA, 20 nt, Artificial Sequence
  Synthetic
cagaaaguuggaacacaaga

SEQ ID NO: 786919 - RNA, 20 nt, Artificial Sequence
  Synthetic
acaugaagucucacacaaga

SEQ ID NO: 786920 - RNA, 20 nt, Artificial Sequence
  Synthetic
uaaggcugacagacacaaga

SEQ ID NO: 786921 - RNA, 20 nt, Artificial Sequence
  Synthetic
uguucaaauaacccacaaga

SEQ ID NO: 786922 - RNA, 20 nt, Artificial Sequence
  Synthetic
uuggauacagacucacaaga

SEQ ID NO: 786923 - RNA, 20 nt, Artificial Sequence
  Synthetic
ugaaaguuauacucacaaga

SEQ ID NO: 786924 - RNA, 20 nt, Artificial Sequence
  Synthetic
uuuguguuugauagacaaga

SEQ ID NO: 786925 - RNA, 20 nt, Artificial Sequence
  Synthetic
uucaaugaaaaucgacaaga

SEQ ID NO: 786926 - RNA, 20 nt, Artificial Sequence
  Synthetic
cagagaucugaaugacaaga

SEQ ID NO: 786927 - RNA, 20 nt, Artificial Sequence
  Synthetic
aaauacucuaacugacaaga

SEQ ID NO: 786928 - RNA, 20 nt, Artificial Sequence
  Synthetic
agcaggagaaagauacaaga

SEQ ID NO: 786929 - RNA, 20 nt, Artificial Sequence
  Synthetic
uagacuggagcuguacaaga

SEQ ID NO: 786930 - RNA, 20 nt, Artificial Sequence
  Synthetic
aaguuucucaaauuacaaga

SEQ ID NO: 786931 - RNA, 20 nt, Artificial Sequence
  Synthetic
caaugcuggacaaaccaaga

SEQ ID NO: 786932 - RNA, 20 nt, Artificial Sequence
  Synthetic
uauaaccaaccaaaccaaga

SEQ ID NO: 786933 - RNA, 20 nt, Artificial Sequence
  Synthetic
auuaaagguagaaaccaaga

SEQ ID NO: 786934 - RNA, 20 nt, Artificial Sequence
  Synthetic
uaguaaauacccaaccaaga

SEQ ID NO: 786935 - RNA, 20 nt, Artificial Sequence
  Synthetic
uauacuuuggguaaccaaga

SEQ ID NO: 786936 - RNA, 20 nt, Artificial Sequence
  Synthetic
uaucagaccuuccaccaaga

SEQ ID NO: 786937 - RNA, 20 nt, Artificial Sequence
  Synthetic
auuauucaccaugaccaaga

SEQ ID NO: 786938 - RNA, 20 nt, Artificial Sequence
  Synthetic
caugaaagaauguaccaaga

SEQ ID NO: 786939 - RNA, 20 nt, Artificial Sequence
  Synthetic
uagaaacuuaagagccaaga

SEQ ID NO: 786940 - RNA, 20 nt, Artificial Sequence
  Synthetic
aggauaacaggaggccaaga

SEQ ID NO: 786941 - RNA, 20 nt, Artificial Sequence
  Synthetic
agcacauugggaggccaaga

SEQ ID NO: 786942 - RNA, 20 nt, Artificial Sequence
  Synthetic
ucaauguagaauggccaaga

SEQ ID NO: 786943 - RNA, 20 nt, Artificial Sequence
  Synthetic
uaagaucaaccuggccaaga

SEQ ID NO: 786944 - RNA, 20 nt, Artificial Sequence
  Synthetic
caagaccagccuggccaaga

SEQ ID NO: 786945 - RNA, 20 nt, Artificial Sequence
  Synthetic
caagaccagucuggccaaga

SEQ ID NO: 786946 - RNA, 20 nt, Artificial Sequence
  Synthetic
aggcagaauaaaauccaaga

SEQ ID NO: 786947 - RNA, 20 nt, Artificial Sequence
  Synthetic
uucauuucucugauccaaga

SEQ ID NO: 786948 - RNA, 20 nt, Artificial Sequence
  Synthetic
uaaguauguagacuccaaga

SEQ ID NO: 786949 - RNA, 20 nt, Artificial Sequence
  Synthetic
augacauccacauuccaaga

SEQ ID NO: 786950 - RNA, 20 nt, Artificial Sequence
  Synthetic
cagauuugcauauuccaaga

SEQ ID NO: 786951 - RNA, 20 nt, Artificial Sequence
  Synthetic
agagagaauguauuccaaga

SEQ ID NO: 786952 - RNA, 20 nt, Artificial Sequence
  Synthetic
uggaggauucacuuccaaga

SEQ ID NO: 786953 - RNA, 20 nt, Artificial Sequence
  Synthetic
uaacuuucuuauuuccaaga

SEQ ID NO: 786954 - RNA, 20 nt, Artificial Sequence
  Synthetic
aauauaagcaggaagcaaga

SEQ ID NO: 786955 - RNA, 20 nt, Artificial Sequence
  Synthetic
uuguauuauaagcagcaaga

SEQ ID NO: 786956 - RNA, 20 nt, Artificial Sequence
  Synthetic
agauuaugucaucagcaaga

SEQ ID NO: 786957 - RNA, 20 nt, Artificial Sequence
  Synthetic
uugguuguuuuaaggcaaga

SEQ ID NO: 786958 - RNA, 20 nt, Artificial Sequence
  Synthetic
caggacauuacauggcaaga

SEQ ID NO: 786959 - RNA, 20 nt, Artificial Sequence
  Synthetic
uuugucacaugauggcaaga

SEQ ID NO: 786960 - RNA, 20 nt, Artificial Sequence
  Synthetic
caaagaaguggcuggcaaga

SEQ ID NO: 786961 - RNA, 20 nt, Artificial Sequence
  Synthetic
ugugaccuaaucuggcaaga

SEQ ID NO: 786962 - RNA, 20 nt, Artificial Sequence
  Synthetic
uccuuuacaagguggcaaga

SEQ ID NO: 786963 - RNA, 20 nt, Artificial Sequence
  Synthetic
uucauccacauguugcaaga

SEQ ID NO: 786964 - RNA, 20 nt, Artificial Sequence
  Synthetic
ucugugcauuugaaucaaga

SEQ ID NO: 786965 - RNA, 20 nt, Artificial Sequence
  Synthetic
uucaaaugacaucaucaaga

SEQ ID NO: 786966 - RNA, 20 nt, Artificial Sequence
  Synthetic
aaaggaucaauucaucaaga

SEQ ID NO: 786967 - RNA, 20 nt, Artificial Sequence
  Synthetic
cuuggagucagagaucaaga

SEQ ID NO: 786968 - RNA, 20 nt, Artificial Sequence
  Synthetic
aauugugggugugaucaaga

SEQ ID NO: 786969 - RNA, 20 nt, Artificial Sequence
  Synthetic
auacaaaaauuaacucaaga

SEQ ID NO: 786970 - RNA, 20 nt, Artificial Sequence
  Synthetic
cucuugacugacccucaaga

SEQ ID NO: 786971 - RNA, 20 nt, Artificial Sequence
  Synthetic
uacuuaaagaaagcucaaga

SEQ ID NO: 786972 - RNA, 20 nt, Artificial Sequence
  Synthetic
uaggaaagccuaucucaaga

SEQ ID NO: 786973 - RNA, 20 nt, Artificial Sequence
  Synthetic
aagaagguaauuucucaaga

SEQ ID NO: 786974 - RNA, 20 nt, Artificial Sequence
  Synthetic
ucuguaaaggaaagucaaga

SEQ ID NO: 786975 - RNA, 20 nt, Artificial Sequence
  Synthetic
aaauaaaauaaaggucaaga

SEQ ID NO: 786976 - RNA, 20 nt, Artificial Sequence
  Synthetic
cuguagacaaauggucaaga

SEQ ID NO: 786977 - RNA, 20 nt, Artificial Sequence
  Synthetic
acagcuaugcagugucaaga

SEQ ID NO: 786978 - RNA, 20 nt, Artificial Sequence
  Synthetic
ugcucuuuguugugucaaga

SEQ ID NO: 786979 - RNA, 20 nt, Artificial Sequence
  Synthetic
auaaguaguuaaauucaaga

SEQ ID NO: 786980 - RNA, 20 nt, Artificial Sequence
  Synthetic
augggaacugcaauucaaga

SEQ ID NO: 786981 - RNA, 20 nt, Artificial Sequence
  Synthetic
auacaaaaaucaauucaaga

SEQ ID NO: 786982 - RNA, 20 nt, Artificial Sequence
  Synthetic
uguggaagaagaauucaaga

SEQ ID NO: 786983 - RNA, 20 nt, Artificial Sequence
  Synthetic
augaguugcagaauucaaga

SEQ ID NO: 786984 - RNA, 20 nt, Artificial Sequence
  Synthetic
auacaaaaauuaauucaaga

SEQ ID NO: 786985 - RNA, 20 nt, Artificial Sequence
  Synthetic
aaaaauuaauuaauucaaga

SEQ ID NO: 786986 - RNA, 20 nt, Artificial Sequence
  Synthetic
uacccagccccuauucaaga

SEQ ID NO: 786987 - RNA, 20 nt, Artificial Sequence
  Synthetic
ugcuauacucaacuucaaga

SEQ ID NO: 786988 - RNA, 20 nt, Artificial Sequence
  Synthetic
uaauguaagucacuucaaga

SEQ ID NO: 786989 - RNA, 20 nt, Artificial Sequence
  Synthetic
uuaauucugucacuucaaga

SEQ ID NO: 786990 - RNA, 20 nt, Artificial Sequence
  Synthetic
uccuucaguucacuucaaga

SEQ ID NO: 786991 - RNA, 20 nt, Artificial Sequence
  Synthetic
aaaaauuaagaauuucaaga

SEQ ID NO: 786992 - RNA, 20 nt, Artificial Sequence
  Synthetic
cagugcuacauuuuucaaga

SEQ ID NO: 786993 - RNA, 20 nt, Artificial Sequence
  Synthetic
ugcugugaaaaaaaagaaga

SEQ ID NO: 786994 - RNA, 20 nt, Artificial Sequence
  Synthetic
uuggaauacaaaaaagaaga

SEQ ID NO: 786995 - RNA, 20 nt, Artificial Sequence
  Synthetic
agaaagacacacaaagaaga

SEQ ID NO: 786996 - RNA, 20 nt, Artificial Sequence
  Synthetic
augccuacacagaaagaaga

SEQ ID NO: 786997 - RNA, 20 nt, Artificial Sequence
  Synthetic
cagagagaagguaaagaaga

SEQ ID NO: 786998 - RNA, 20 nt, Artificial Sequence
  Synthetic
acgaggauacagcaagaaga

SEQ ID NO: 786999 - RNA, 20 nt, Artificial Sequence
  Synthetic
uuaaaauauagucaagaaga

SEQ ID NO: 787000 - RNA, 20 nt, Artificial Sequence
  Synthetic
ccauaagaagaagaagaaga

SEQ ID NO: 787001 - RNA, 20 nt, Artificial Sequence
  Synthetic
augggaguggaagaagaaga

SEQ ID NO: 787002 - RNA, 20 nt, Artificial Sequence
  Synthetic
uucuggcuuagagaagaaga

SEQ ID NO: 787003 - RNA, 20 nt, Artificial Sequence
  Synthetic
aaauggcaaugagaagaaga

SEQ ID NO: 787004 - RNA, 20 nt, Artificial Sequence
  Synthetic
uucauuuuuagugaagaaga

SEQ ID NO: 787005 - RNA, 20 nt, Artificial Sequence
  Synthetic
cugcugccaugugaagaaga

SEQ ID NO: 787006 - RNA, 20 nt, Artificial Sequence
  Synthetic
uuuagaaguggaacagaaga

SEQ ID NO: 787007 - RNA, 20 nt, Artificial Sequence
  Synthetic
uaaaaauaauacacagaaga

SEQ ID NO: 787008 - RNA, 20 nt, Artificial Sequence
  Synthetic
caaugauagaagccagaaga

SEQ ID NO: 787009 - RNA, 20 nt, Artificial Sequence
  Synthetic
acaaaugguaggccagaaga

SEQ ID NO: 787010 - RNA, 20 nt, Artificial Sequence
  Synthetic
caugugaagacagcagaaga

SEQ ID NO: 787011 - RNA, 20 nt, Artificial Sequence
  Synthetic
aaaguuuggccaucagaaga

SEQ ID NO: 787012 - RNA, 20 nt, Artificial Sequence
  Synthetic
uuuucuuauucaucagaaga

SEQ ID NO: 787013 - RNA, 20 nt, Artificial Sequence
  Synthetic
cuauucucuauuucagaaga

SEQ ID NO: 787014 - RNA, 20 nt, Artificial Sequence
  Synthetic
cauuauuccucaagagaaga

SEQ ID NO: 787015 - RNA, 20 nt, Artificial Sequence
  Synthetic
uggcguagaauaagagaaga

SEQ ID NO: 787016 - RNA, 20 nt, Artificial Sequence
  Synthetic
ugcugacgcuguagagaaga

SEQ ID NO: 787017 - RNA, 20 nt, Artificial Sequence
  Synthetic
cuagaauuuggaggagaaga

SEQ ID NO: 787018 - RNA, 20 nt, Artificial Sequence
  Synthetic
uccuacccaaggggagaaga

SEQ ID NO: 787019 - RNA, 20 nt, Artificial Sequence
  Synthetic
aagcuauacacuggagaaga

SEQ ID NO: 787020 - RNA, 20 nt, Artificial Sequence
  Synthetic
aaccguauagaaugagaaga

SEQ ID NO: 787021 - RNA, 20 nt, Artificial Sequence
  Synthetic
aaaguucguagaugagaaga

SEQ ID NO: 787022 - RNA, 20 nt, Artificial Sequence
  Synthetic
ccuugaguuagaugagaaga

SEQ ID NO: 787023 - RNA, 20 nt, Artificial Sequence
  Synthetic
cuagcggagcuaugagaaga

SEQ ID NO: 787024 - RNA, 20 nt, Artificial Sequence
  Synthetic
accucagccuucugagaaga

SEQ ID NO: 787025 - RNA, 20 nt, Artificial Sequence
  Synthetic
cuaguagagcugugagaaga

SEQ ID NO: 787026 - RNA, 20 nt, Artificial Sequence
  Synthetic
uuuacaaggacacuagaaga

SEQ ID NO: 787027 - RNA, 20 nt, Artificial Sequence
  Synthetic
caggaaagaauucacgaaga

SEQ ID NO: 787028 - RNA, 20 nt, Artificial Sequence
  Synthetic
acauucuccuuuugcgaaga

SEQ ID NO: 787029 - RNA, 20 nt, Artificial Sequence
  Synthetic
caaaaguagucaaaggaaga

SEQ ID NO: 787030 - RNA, 20 nt, Artificial Sequence
  Synthetic
agaaggaaaggaaaggaaga

SEQ ID NO: 787031 - RNA, 20 nt, Artificial Sequence
  Synthetic
cuuugccaagccaaggaaga

SEQ ID NO: 787032 - RNA, 20 nt, Artificial Sequence
  Synthetic
ccaucugcaaaccaggaaga

SEQ ID NO: 787033 - RNA, 20 nt, Artificial Sequence
  Synthetic
cgaaggguauuccaggaaga

SEQ ID NO: 787034 - RNA, 20 nt, Artificial Sequence
  Synthetic
cgugagggcuuucaggaaga

SEQ ID NO: 787035 - RNA, 20 nt, Artificial Sequence
  Synthetic
ugagaauuuugagaggaaga

SEQ ID NO: 787036 - RNA, 20 nt, Artificial Sequence
  Synthetic
aaacucuuccaaagggaaga

SEQ ID NO: 787037 - RNA, 20 nt, Artificial Sequence
  Synthetic
auauuagcugccagggaaga

SEQ ID NO: 787038 - RNA, 20 nt, Artificial Sequence
  Synthetic
ugugaaagugucagggaaga

SEQ ID NO: 787039 - RNA, 20 nt, Artificial Sequence
  Synthetic
aaguaacuccggagggaaga

SEQ ID NO: 787040 - RNA, 20 nt, Artificial Sequence
  Synthetic
aaguaaaaguuucgggaaga

SEQ ID NO: 787041 - RNA, 20 nt, Artificial Sequence
  Synthetic
aagcugagcuaaggggaaga

SEQ ID NO: 787042 - RNA, 20 nt, Artificial Sequence
  Synthetic
uggaaauauugaggggaaga

SEQ ID NO: 787043 - RNA, 20 nt, Artificial Sequence
  Synthetic
ucuuccuuaauaggggaaga

SEQ ID NO: 787044 - RNA, 20 nt, Artificial Sequence
  Synthetic
cauagaagcuuaggggaaga

SEQ ID NO: 787045 - RNA, 20 nt, Artificial Sequence
  Synthetic
aggugaaaaccuggggaaga

SEQ ID NO: 787046 - RNA, 20 nt, Artificial Sequence
  Synthetic
caaagggagagaugggaaga

SEQ ID NO: 787047 - RNA, 20 nt, Artificial Sequence
  Synthetic
cuguacuuuaaaauggaaga

SEQ ID NO: 787048 - RNA, 20 nt, Artificial Sequence
  Synthetic
aguuuccacucuguggaaga

SEQ ID NO: 787049 - RNA, 20 nt, Artificial Sequence
  Synthetic
uuugagcaaagauuggaaga

SEQ ID NO: 787050 - RNA, 20 nt, Artificial Sequence
  Synthetic
uggagaaagagauuggaaga

SEQ ID NO: 787051 - RNA, 20 nt, Artificial Sequence
  Synthetic
ccccagugaauaaaugaaga

SEQ ID NO: 787052 - RNA, 20 nt, Artificial Sequence
  Synthetic
uccauacugaucaaugaaga

SEQ ID NO: 787053 - RNA, 20 nt, Artificial Sequence
  Synthetic
cuguggagagggaaugaaga

SEQ ID NO: 787054 - RNA, 20 nt, Artificial Sequence
  Synthetic
auucaacaaguuaaugaaga

SEQ ID NO: 787055 - RNA, 20 nt, Artificial Sequence
  Synthetic
auguccuguguuaaugaaga

SEQ ID NO: 787056 - RNA, 20 nt, Artificial Sequence
  Synthetic
uuaaauauauuuaaugaaga

SEQ ID NO: 787057 - RNA, 20 nt, Artificial Sequence
  Synthetic
uugguagcaaaagaugaaga

SEQ ID NO: 787058 - RNA, 20 nt, Artificial Sequence
  Synthetic
uaacaacaguuagaugaaga

SEQ ID NO: 787059 - RNA, 20 nt, Artificial Sequence
  Synthetic
uuuauaauagaggaugaaga

SEQ ID NO: 787060 - RNA, 20 nt, Artificial Sequence
  Synthetic
ucauagaugacggaugaaga

SEQ ID NO: 787061 - RNA, 20 nt, Artificial Sequence
  Synthetic
aauacaaagaaauaugaaga

SEQ ID NO: 787062 - RNA, 20 nt, Artificial Sequence
  Synthetic
uuucugccaccauaugaaga

SEQ ID NO: 787063 - RNA, 20 nt, Artificial Sequence
  Synthetic
uuccaaggucauuaugaaga

SEQ ID NO: 787064 - RNA, 20 nt, Artificial Sequence
  Synthetic
uagugagauauuccugaaga

SEQ ID NO: 787065 - RNA, 20 nt, Artificial Sequence
  Synthetic
aguugggaccuuccugaaga

SEQ ID NO: 787066 - RNA, 20 nt, Artificial Sequence
  Synthetic
uuucuucacaaagcugaaga

SEQ ID NO: 787067 - RNA, 20 nt, Artificial Sequence
  Synthetic
caguuucuauauucugaaga

SEQ ID NO: 787068 - RNA, 20 nt, Artificial Sequence
  Synthetic
ucaaauucuguuagugaaga

SEQ ID NO: 787069 - RNA, 20 nt, Artificial Sequence
  Synthetic
aagagccaagaaggugaaga

SEQ ID NO: 787070 - RNA, 20 nt, Artificial Sequence
  Synthetic
ucaaaguacaccugugaaga

SEQ ID NO: 787071 - RNA, 20 nt, Artificial Sequence
  Synthetic
cuuccugccaccugugaaga

SEQ ID NO: 787072 - RNA, 20 nt, Artificial Sequence
  Synthetic
uuccugccaccuugugaaga

SEQ ID NO: 787073 - RNA, 20 nt, Artificial Sequence
  Synthetic
uagagaauuuaaauugaaga

SEQ ID NO: 787074 - RNA, 20 nt, Artificial Sequence
  Synthetic
aauccuauguggauugaaga

SEQ ID NO: 787075 - RNA, 20 nt, Artificial Sequence
  Synthetic
cuuucuucuuuuauugaaga

SEQ ID NO: 787076 - RNA, 20 nt, Artificial Sequence
  Synthetic
agaaaucacuagguugaaga

SEQ ID NO: 787077 - RNA, 20 nt, Artificial Sequence
  Synthetic
ucaaaaaagguguuugaaga

SEQ ID NO: 787078 - RNA, 20 nt, Artificial Sequence
  Synthetic
augaggcauggagaauaaga

SEQ ID NO: 787079 - RNA, 20 nt, Artificial Sequence
  Synthetic
uggccacauauagaauaaga

SEQ ID NO: 787080 - RNA, 20 nt, Artificial Sequence
  Synthetic
aaauacaucucuuaauaaga

SEQ ID NO: 787081 - RNA, 20 nt, Artificial Sequence
  Synthetic
auuuaaagccccacauaaga

SEQ ID NO: 787082 - RNA, 20 nt, Artificial Sequence
  Synthetic
uuaaugaaaguaccauaaga

SEQ ID NO: 787083 - RNA, 20 nt, Artificial Sequence
  Synthetic
auugcuguacagccauaaga

SEQ ID NO: 787084 - RNA, 20 nt, Artificial Sequence
  Synthetic
aguuguuuucuugcauaaga

SEQ ID NO: 787085 - RNA, 20 nt, Artificial Sequence
  Synthetic
agcacaauguugucauaaga

SEQ ID NO: 787086 - RNA, 20 nt, Artificial Sequence
  Synthetic
agucauauuucuucauaaga

SEQ ID NO: 787087 - RNA, 20 nt, Artificial Sequence
  Synthetic
cauuacuuauuuucauaaga

SEQ ID NO: 787088 - RNA, 20 nt, Artificial Sequence
  Synthetic
uagaugagacucagauaaga

SEQ ID NO: 787089 - RNA, 20 nt, Artificial Sequence
  Synthetic
aaaaaaaaggucagauaaga

SEQ ID NO: 787090 - RNA, 20 nt, Artificial Sequence
  Synthetic
aguguaaagaguggauaaga

SEQ ID NO: 787091 - RNA, 20 nt, Artificial Sequence
  Synthetic
caaaaaagaauaugauaaga

SEQ ID NO: 787092 - RNA, 20 nt, Artificial Sequence
  Synthetic
ccuccuaaguagguauaaga

SEQ ID NO: 787093 - RNA, 20 nt, Artificial Sequence
  Synthetic
uaaguagaaacauuauaaga

SEQ ID NO: 787094 - RNA, 20 nt, Artificial Sequence
  Synthetic
aaccauagaucauuauaaga

SEQ ID NO: 787095 - RNA, 20 nt, Artificial Sequence
  Synthetic
cauugaaggguuuuauaaga

SEQ ID NO: 787096 - RNA, 20 nt, Artificial Sequence
  Synthetic
uagauaaggcaaaacuaaga

SEQ ID NO: 787097 - RNA, 20 nt, Artificial Sequence
  Synthetic
ugacuucccaaagacuaaga

SEQ ID NO: 787098 - RNA, 20 nt, Artificial Sequence
  Synthetic
agggcuauuuuagacuaaga

SEQ ID NO: 787099 - RNA, 20 nt, Artificial Sequence
  Synthetic
cccaaguaaugaaccuaaga

SEQ ID NO: 787100 - RNA, 20 nt, Artificial Sequence
  Synthetic
aauauuuaauaucccuaaga

SEQ ID NO: 787101 - RNA, 20 nt, Artificial Sequence
  Synthetic
agaggugaccuggccuaaga

SEQ ID NO: 787102 - RNA, 20 nt, Artificial Sequence
  Synthetic
uuggauuuuuuuagcuaaga

SEQ ID NO: 787103 - RNA, 20 nt, Artificial Sequence
  Synthetic
uagcaaaagcagugcuaaga

SEQ ID NO: 787104 - RNA, 20 nt, Artificial Sequence
  Synthetic
uuaaucgucauuugcuaaga

SEQ ID NO: 787105 - RNA, 20 nt, Artificial Sequence
  Synthetic
auugguuaugucaucuaaga

SEQ ID NO: 787106 - RNA, 20 nt, Artificial Sequence
  Synthetic
ucccuaguagaugucuaaga

SEQ ID NO: 787107 - RNA, 20 nt, Artificial Sequence
  Synthetic
uccucuuaauuguucuaaga

SEQ ID NO: 787108 - RNA, 20 nt, Artificial Sequence
  Synthetic
uugggauuuuuaaaguaaga

SEQ ID NO: 787109 - RNA, 20 nt, Artificial Sequence
  Synthetic
cauucuagggaacaguaaga

SEQ ID NO: 787110 - RNA, 20 nt, Artificial Sequence
  Synthetic
uuuugagaagaggaguaaga

SEQ ID NO: 787111 - RNA, 20 nt, Artificial Sequence
  Synthetic
auaaauuugagcuaguaaga

SEQ ID NO: 787112 - RNA, 20 nt, Artificial Sequence
  Synthetic
aaaguaguuaacugguaaga

SEQ ID NO: 787113 - RNA, 20 nt, Artificial Sequence
  Synthetic
auuccaagaaggauguaaga

SEQ ID NO: 787114 - RNA, 20 nt, Artificial Sequence
  Synthetic
aauaauaacaauauguaaga

SEQ ID NO: 787115 - RNA, 20 nt, Artificial Sequence
  Synthetic
uucuucacagcucuguaaga

SEQ ID NO: 787116 - RNA, 20 nt, Artificial Sequence
  Synthetic
aucaggagaagaguguaaga

SEQ ID NO: 787117 - RNA, 20 nt, Artificial Sequence
  Synthetic
uuuacaauccucuuguaaga

SEQ ID NO: 787118 - RNA, 20 nt, Artificial Sequence
  Synthetic
caaucuaauccaaauuaaga

SEQ ID NO: 787119 - RNA, 20 nt, Artificial Sequence
  Synthetic
acucaaaagggacauuaaga

SEQ ID NO: 787120 - RNA, 20 nt, Artificial Sequence
  Synthetic
agguguaaaacccauuaaga

SEQ ID NO: 787121 - RNA, 20 nt, Artificial Sequence
  Synthetic
aauuuugguaagcauuaaga

SEQ ID NO: 787122 - RNA, 20 nt, Artificial Sequence
  Synthetic
uguugaaaaaaagauuaaga

SEQ ID NO: 787123 - RNA, 20 nt, Artificial Sequence
  Synthetic
agcagugaaugcgauuaaga

SEQ ID NO: 787124 - RNA, 20 nt, Artificial Sequence
  Synthetic
uacuuaggaaaugauuaaga

SEQ ID NO: 787125 - RNA, 20 nt, Artificial Sequence
  Synthetic
auuuacaacuuugauuaaga

SEQ ID NO: 787126 - RNA, 20 nt, Artificial Sequence
  Synthetic
uagaaauaaacauauuaaga

SEQ ID NO: 787127 - RNA, 20 nt, Artificial Sequence
  Synthetic
caaauuggugauuauuaaga

SEQ ID NO: 787128 - RNA, 20 nt, Artificial Sequence
  Synthetic
ucacaauuaguuuauuaaga

SEQ ID NO: 787129 - RNA, 20 nt, Artificial Sequence
  Synthetic
cuuucaaugaacacuuaaga

SEQ ID NO: 787130 - RNA, 20 nt, Artificial Sequence
  Synthetic
cagaugcagucaaguuaaga

SEQ ID NO: 787131 - RNA, 20 nt, Artificial Sequence
  Synthetic
ugcagcugauaugguuaaga

SEQ ID NO: 787132 - RNA, 20 nt, Artificial Sequence
  Synthetic
aacacuauauaaauuuaaga

SEQ ID NO: 787133 - RNA, 20 nt, Artificial Sequence
  Synthetic
uguggggaaugucuuuaaga

SEQ ID NO: 787134 - RNA, 20 nt, Artificial Sequence
  Synthetic
cgugugugcuuucuuuaaga

SEQ ID NO: 787135 - RNA, 20 nt, Artificial Sequence
  Synthetic
auggauaauuauguuuaaga

SEQ ID NO: 787136 - RNA, 20 nt, Artificial Sequence
  Synthetic
ccauugcuucuuguuuaaga

SEQ ID NO: 787137 - RNA, 20 nt, Artificial Sequence
  Synthetic
cagaauuccaaguuuuaaga

SEQ ID NO: 787138 - RNA, 20 nt, Artificial Sequence
  Synthetic
cuuuuguuacuguuuuaaga

SEQ ID NO: 787139 - RNA, 20 nt, Artificial Sequence
  Synthetic
aacagccaucuuuuuuaaga

SEQ ID NO: 787140 - RNA, 20 nt, Artificial Sequence
  Synthetic
ucugccauccuaaaaacaga

SEQ ID NO: 787141 - RNA, 20 nt, Artificial Sequence
  Synthetic
aucaaaaagcuaaaaacaga

SEQ ID NO: 787142 - RNA, 20 nt, Artificial Sequence
  Synthetic
uggggaggugagaaaacaga

SEQ ID NO: 787143 - RNA, 20 nt, Artificial Sequence
  Synthetic
cuuuacaaaaaucaaacaga

SEQ ID NO: 787144 - RNA, 20 nt, Artificial Sequence
  Synthetic
aaaacaaauucugaaacaga

SEQ ID NO: 787145 - RNA, 20 nt, Artificial Sequence
  Synthetic
aaagagagaagugaaacaga

SEQ ID NO: 787146 - RNA, 20 nt, Artificial Sequence
  Synthetic
uucauccuuaucccaacaga

SEQ ID NO: 787147 - RNA, 20 nt, Artificial Sequence
  Synthetic
ucccagugaagggcaacaga

SEQ ID NO: 787148 - RNA, 20 nt, Artificial Sequence
  Synthetic
ucugaacaccucucaacaga

SEQ ID NO: 787149 - RNA, 20 nt, Artificial Sequence
  Synthetic
uuaaauuggaauucaacaga

SEQ ID NO: 787150 - RNA, 20 nt, Artificial Sequence
  Synthetic
uuaagaaugcagagaacaga

SEQ ID NO: 787151 - RNA, 20 nt, Artificial Sequence
  Synthetic
aagagucaucagagaacaga

SEQ ID NO: 787152 - RNA, 20 nt, Artificial Sequence
  Synthetic
ugcauugaggagagaacaga

SEQ ID NO: 787153 - RNA, 20 nt, Artificial Sequence
  Synthetic
uagugacagaauagaacaga

SEQ ID NO: 787154 - RNA, 20 nt, Artificial Sequence
  Synthetic
aaaaaaagcccaggaacaga

SEQ ID NO: 787155 - RNA, 20 nt, Artificial Sequence
  Synthetic
acugcagauugcauaacaga

SEQ ID NO: 787156 - RNA, 20 nt, Artificial Sequence
  Synthetic
uucugagugcaucuaacaga

SEQ ID NO: 787157 - RNA, 20 nt, Artificial Sequence
  Synthetic
acauauucaaguuuaacaga

SEQ ID NO: 787158 - RNA, 20 nt, Artificial Sequence
  Synthetic
ugccaaucagcaaacacaga

SEQ ID NO: 787159 - RNA, 20 nt, Artificial Sequence
  Synthetic
ccuagugagaucaacacaga

SEQ ID NO: 787160 - RNA, 20 nt, Artificial Sequence
  Synthetic
agauaugccaggcacacaga

SEQ ID NO: 787161 - RNA, 20 nt, Artificial Sequence
  Synthetic
augaaggaaaaucacacaga

SEQ ID NO: 787162 - RNA, 20 nt, Artificial Sequence
  Synthetic
cagagaugacuagacacaga

SEQ ID NO: 787163 - RNA, 20 nt, Artificial Sequence
  Synthetic
ccuuaaaggaaaaccacaga

SEQ ID NO: 787164 - RNA, 20 nt, Artificial Sequence
  Synthetic
cuaauuuucuucaccacaga

SEQ ID NO: 787165 - RNA, 20 nt, Artificial Sequence
  Synthetic
cagugggugcagcccacaga

SEQ ID NO: 787166 - RNA, 20 nt, Artificial Sequence
  Synthetic
ucaggugcggagcccacaga

SEQ ID NO: 787167 - RNA, 20 nt, Artificial Sequence
  Synthetic
aaacuuccauaucccacaga

SEQ ID NO: 787168 - RNA, 20 nt, Artificial Sequence
  Synthetic
auugaaauauuugccacaga

SEQ ID NO: 787169 - RNA, 20 nt, Artificial Sequence
  Synthetic
agcacccucaccuccacaga

SEQ ID NO: 787170 - RNA, 20 nt, Artificial Sequence
  Synthetic
cuucccgaagccuccacaga

SEQ ID NO: 787171 - RNA, 20 nt, Artificial Sequence
  Synthetic
uuccuacugcaaagcacaga

SEQ ID NO: 787172 - RNA, 20 nt, Artificial Sequence
  Synthetic
caauuuuacuucugcacaga

SEQ ID NO: 787173 - RNA, 20 nt, Artificial Sequence
  Synthetic
ugaagguaaagaaucacaga

SEQ ID NO: 787174 - RNA, 20 nt, Artificial Sequence
  Synthetic
cagagauuucccaucacaga

SEQ ID NO: 787175 - RNA, 20 nt, Artificial Sequence
  Synthetic
augaagagucaacucacaga

SEQ ID NO: 787176 - RNA, 20 nt, Artificial Sequence
  Synthetic
agcuuuauacgggucacaga

SEQ ID NO: 787177 - RNA, 20 nt, Artificial Sequence
  Synthetic
uuaauaaaagaauucacaga

SEQ ID NO: 787178 - RNA, 20 nt, Artificial Sequence
  Synthetic
ugacugaaaucauucacaga

SEQ ID NO: 787179 - RNA, 20 nt, Artificial Sequence
  Synthetic
ccuccaugacacuucacaga

SEQ ID NO: 787180 - RNA, 20 nt, Artificial Sequence
  Synthetic
aucucaaaaaauuucacaga

SEQ ID NO: 787181 - RNA, 20 nt, Artificial Sequence
  Synthetic
uugggucaggaaaagacaga

SEQ ID NO: 787182 - RNA, 20 nt, Artificial Sequence
  Synthetic
cauacaugaacaaagacaga

SEQ ID NO: 787183 - RNA, 20 nt, Artificial Sequence
  Synthetic
auagaccauggacagacaga

SEQ ID NO: 787184 - RNA, 20 nt, Artificial Sequence
  Synthetic
aaaagggcauuucagacaga

SEQ ID NO: 787185 - RNA, 20 nt, Artificial Sequence
  Synthetic
augaauuuauuagagacaga

SEQ ID NO: 787186 - RNA, 20 nt, Artificial Sequence
  Synthetic
acuugaaccugggagacaga

SEQ ID NO: 787187 - RNA, 20 nt, Artificial Sequence
  Synthetic
aaccaaaagagugagacaga

SEQ ID NO: 787188 - RNA, 20 nt, Artificial Sequence
  Synthetic
uggcagaucugugagacaga

SEQ ID NO: 787189 - RNA, 20 nt, Artificial Sequence
  Synthetic
uuuaaaagagaauagacaga

SEQ ID NO: 787190 - RNA, 20 nt, Artificial Sequence
  Synthetic
caaaguuucaacuagacaga

SEQ ID NO: 787191 - RNA, 20 nt, Artificial Sequence
  Synthetic
acuccagccugggcgacaga

SEQ ID NO: 787192 - RNA, 20 nt, Artificial Sequence
  Synthetic
acaagaguaucaaggacaga

SEQ ID NO: 787193 - RNA, 20 nt, Artificial Sequence
  Synthetic
ugaagucaaaaugggacaga

SEQ ID NO: 787194 - RNA, 20 nt, Artificial Sequence
  Synthetic
caaagggaaaaauggacaga

SEQ ID NO: 787195 - RNA, 20 nt, Artificial Sequence
  Synthetic
acuucagccuggaugacaga

SEQ ID NO: 787196 - RNA, 20 nt, Artificial Sequence
  Synthetic
cuaugaauacugaugacaga

SEQ ID NO: 787197 - RNA, 20 nt, Artificial Sequence
  Synthetic
cauggaagaucucugacaga

SEQ ID NO: 787198 - RNA, 20 nt, Artificial Sequence
  Synthetic
auaauugaaucugugacaga

SEQ ID NO: 787199 - RNA, 20 nt, Artificial Sequence
  Synthetic
agacugagugaauugacaga

SEQ ID NO: 787200 - RNA, 20 nt, Artificial Sequence
  Synthetic
aauaucagccggaauacaga

SEQ ID NO: 787201 - RNA, 20 nt, Artificial Sequence
  Synthetic
aauugaauuuugaauacaga

SEQ ID NO: 787202 - RNA, 20 nt, Artificial Sequence
  Synthetic
uuauauuuuuaucauacaga

SEQ ID NO: 787203 - RNA, 20 nt, Artificial Sequence
  Synthetic
aguacaaauucucauacaga

SEQ ID NO: 787204 - RNA, 20 nt, Artificial Sequence
  Synthetic
uuucaacuuuuagauacaga

SEQ ID NO: 787205 - RNA, 20 nt, Artificial Sequence
  Synthetic
aggauauguguauauacaga

SEQ ID NO: 787206 - RNA, 20 nt, Artificial Sequence
  Synthetic
aauuuuauuuuauauacaga

SEQ ID NO: 787207 - RNA, 20 nt, Artificial Sequence
  Synthetic
cuagguagaaagauuacaga

SEQ ID NO: 787208 - RNA, 20 nt, Artificial Sequence
  Synthetic
agcaacacugugauuacaga

SEQ ID NO: 787209 - RNA, 20 nt, Artificial Sequence
  Synthetic
uuuccuagaaauauuacaga

SEQ ID NO: 787210 - RNA, 20 nt, Artificial Sequence
  Synthetic
uuucagggaugacuuacaga

SEQ ID NO: 787211 - RNA, 20 nt, Artificial Sequence
  Synthetic
cuauaagaagacaaaccaga

SEQ ID NO: 787212 - RNA, 20 nt, Artificial Sequence
  Synthetic
auugaaggaagacaaccaga

SEQ ID NO: 787213 - RNA, 20 nt, Artificial Sequence
  Synthetic
uagaaaauaugggcaccaga

SEQ ID NO: 787214 - RNA, 20 nt, Artificial Sequence
  Synthetic
cuuaucugagaaagaccaga

SEQ ID NO: 787215 - RNA, 20 nt, Artificial Sequence
  Synthetic
aaggaaagcucaagaccaga

SEQ ID NO: 787216 - RNA, 20 nt, Artificial Sequence
  Synthetic
cucaggaguuugagaccaga

SEQ ID NO: 787217 - RNA, 20 nt, Artificial Sequence
  Synthetic
aaaaaaagcccaggaccaga

SEQ ID NO: 787218 - RNA, 20 nt, Artificial Sequence
  Synthetic
aaaaaaaguccaggaccaga

SEQ ID NO: 787219 - RNA, 20 nt, Artificial Sequence
  Synthetic
aaaaagaguccaggaccaga

SEQ ID NO: 787220 - RNA, 20 nt, Artificial Sequence
  Synthetic
uugcuuuucucucuaccaga

SEQ ID NO: 787221 - RNA, 20 nt, Artificial Sequence
  Synthetic
uauguuucuaauuuaccaga

SEQ ID NO: 787222 - RNA, 20 nt, Artificial Sequence
  Synthetic
aagagguuccaaaacccaga

SEQ ID NO: 787223 - RNA, 20 nt, Artificial Sequence
  Synthetic
aaaacuggaaagaacccaga

SEQ ID NO: 787224 - RNA, 20 nt, Artificial Sequence
  Synthetic
aggggucuuaguaacccaga

SEQ ID NO: 787225 - RNA, 20 nt, Artificial Sequence
  Synthetic
agcucagaugagcccccaga

SEQ ID NO: 787226 - RNA, 20 nt, Artificial Sequence
  Synthetic
cccauacaaauguccccaga

SEQ ID NO: 787227 - RNA, 20 nt, Artificial Sequence
  Synthetic
aaaucaccauaaagcccaga

SEQ ID NO: 787228 - RNA, 20 nt, Artificial Sequence
  Synthetic
cuguguacuuuuagcccaga

SEQ ID NO: 787229 - RNA, 20 nt, Artificial Sequence
  Synthetic
agaauagaugggugcccaga

SEQ ID NO: 787230 - RNA, 20 nt, Artificial Sequence
  Synthetic
uaaaauauacuaaucccaga

SEQ ID NO: 787231 - RNA, 20 nt, Artificial Sequence
  Synthetic
ugguuuuucugcaucccaga

SEQ ID NO: 787232 - RNA, 20 nt, Artificial Sequence
  Synthetic
ucuggaagcuucaucccaga

SEQ ID NO: 787233 - RNA, 20 nt, Artificial Sequence
  Synthetic
uucagcuagcuggucccaga

SEQ ID NO: 787234 - RNA, 20 nt, Artificial Sequence
  Synthetic
auuucuaaugaauucccaga

SEQ ID NO: 787235 - RNA, 20 nt, Artificial Sequence
  Synthetic
uuucccuuuuccuucccaga

SEQ ID NO: 787236 - RNA, 20 nt, Artificial Sequence
  Synthetic
aauaauuaaaacaagccaga

SEQ ID NO: 787237 - RNA, 20 nt, Artificial Sequence
  Synthetic
uugaacuagccccagccaga

SEQ ID NO: 787238 - RNA, 20 nt, Artificial Sequence
  Synthetic
ucauaaagucaucagccaga

SEQ ID NO: 787239 - RNA, 20 nt, Artificial Sequence
  Synthetic
cuaaaaaaaucuuagccaga

SEQ ID NO: 787240 - RNA, 20 nt, Artificial Sequence
  Synthetic
agaaaggaacagacgccaga

SEQ ID NO: 787241 - RNA, 20 nt, Artificial Sequence
  Synthetic
cuuacagggaaaaggccaga

SEQ ID NO: 787242 - RNA, 20 nt, Artificial Sequence
  Synthetic
ugguccugccuugggccaga

SEQ ID NO: 787243 - RNA, 20 nt, Artificial Sequence
  Synthetic
agcacauuuuaaaugccaga

SEQ ID NO: 787244 - RNA, 20 nt, Artificial Sequence
  Synthetic
aaacuuacaaccaugccaga

SEQ ID NO: 787245 - RNA, 20 nt, Artificial Sequence
  Synthetic
aagacaaagaugaugccaga

SEQ ID NO: 787246 - RNA, 20 nt, Artificial Sequence
  Synthetic
auauggaucagucauccaga

SEQ ID NO: 787247 - RNA, 20 nt, Artificial Sequence
  Synthetic
auuauaacaugucauccaga

SEQ ID NO: 787248 - RNA, 20 nt, Artificial Sequence
  Synthetic
uucaacuuuuaagauccaga

SEQ ID NO: 787249 - RNA, 20 nt, Artificial Sequence
  Synthetic
ccuucauuuugagauccaga

SEQ ID NO: 787250 - RNA, 20 nt, Artificial Sequence
  Synthetic
uaauagauaaaauauccaga

SEQ ID NO: 787251 - RNA, 20 nt, Artificial Sequence
  Synthetic
auuggcccuuaguauccaga

SEQ ID NO: 787252 - RNA, 20 nt, Artificial Sequence
  Synthetic
cuacauugcagaacuccaga

SEQ ID NO: 787253 - RNA, 20 nt, Artificial Sequence
  Synthetic
cuacugggaaggacuccaga

SEQ ID NO: 787254 - RNA, 20 nt, Artificial Sequence
  Synthetic
ugggaucccaggccuccaga

SEQ ID NO: 787255 - RNA, 20 nt, Artificial Sequence
  Synthetic
acucaguuuuugaguccaga

SEQ ID NO: 787256 - RNA, 20 nt, Artificial Sequence
  Synthetic
acuuucuauaacgguccaga

SEQ ID NO: 787257 - RNA, 20 nt, Artificial Sequence
  Synthetic
caacuaauaauguguccaga

SEQ ID NO: 787258 - RNA, 20 nt, Artificial Sequence
  Synthetic
uuaaauacacccauuccaga

SEQ ID NO: 787259 - RNA, 20 nt, Artificial Sequence
  Synthetic
aauugcaaucagauuccaga

SEQ ID NO: 787260 - RNA, 20 nt, Artificial Sequence
  Synthetic
uagggaauuaauauuccaga

SEQ ID NO: 787261 - RNA, 20 nt, Artificial Sequence
  Synthetic
aaucauuauuuccuuccaga

SEQ ID NO: 787262 - RNA, 20 nt, Artificial Sequence
  Synthetic
aauaggcaagggcuuccaga

SEQ ID NO: 787263 - RNA, 20 nt, Artificial Sequence
  Synthetic
uaacuggggaaaguuccaga

SEQ ID NO: 787264 - RNA, 20 nt, Artificial Sequence
  Synthetic
uauuuuauuaaauuuccaga

SEQ ID NO: 787265 - RNA, 20 nt, Artificial Sequence
  Synthetic
ucaugauuuuaaaaagcaga

SEQ ID NO: 787266 - RNA, 20 nt, Artificial Sequence
  Synthetic
auaagacuuugaaaagcaga

SEQ ID NO: 787267 - RNA, 20 nt, Artificial Sequence
  Synthetic
ucuaugaaaguaaaagcaga

SEQ ID NO: 787268 - RNA, 20 nt, Artificial Sequence
  Synthetic
auguuaacucagaaagcaga

SEQ ID NO: 787269 - RNA, 20 nt, Artificial Sequence
  Synthetic
uauauaaaacuccaagcaga

SEQ ID NO: 787270 - RNA, 20 nt, Artificial Sequence
  Synthetic
aaaaccaacuggcaagcaga

SEQ ID NO: 787271 - RNA, 20 nt, Artificial Sequence
  Synthetic
cauuuuaguugucaagcaga

SEQ ID NO: 787272 - RNA, 20 nt, Artificial Sequence
  Synthetic
uuacuuucucuggaagcaga

SEQ ID NO: 787273 - RNA, 20 nt, Artificial Sequence
  Synthetic
aaugaauuuguggaagcaga

SEQ ID NO: 787274 - RNA, 20 nt, Artificial Sequence
  Synthetic
agaguaccuauugaagcaga

SEQ ID NO: 787275 - RNA, 20 nt, Artificial Sequence
  Synthetic
uuuauuaaccauuaagcaga

SEQ ID NO: 787276 - RNA, 20 nt, Artificial Sequence
  Synthetic
uggccacauguaacagcaga

SEQ ID NO: 787277 - RNA, 20 nt, Artificial Sequence
  Synthetic
uccuugcugcacacagcaga

SEQ ID NO: 787278 - RNA, 20 nt, Artificial Sequence
  Synthetic
uucuuuuaaaaaccagcaga

SEQ ID NO: 787279 - RNA, 20 nt, Artificial Sequence
  Synthetic
uccagcagaccugcagcaga

SEQ ID NO: 787280 - RNA, 20 nt, Artificial Sequence
  Synthetic
uauacauucuuaucagcaga

SEQ ID NO: 787281 - RNA, 20 nt, Artificial Sequence
  Synthetic
agcuacuccucaagagcaga

SEQ ID NO: 787282 - RNA, 20 nt, Artificial Sequence
  Synthetic
cuuaaaaagugaagagcaga

SEQ ID NO: 787283 - RNA, 20 nt, Artificial Sequence
  Synthetic
uuuuaaauauccagagcaga

SEQ ID NO: 787284 - RNA, 20 nt, Artificial Sequence
  Synthetic
auauacuuuuguagagcaga

SEQ ID NO: 787285 - RNA, 20 nt, Artificial Sequence
  Synthetic
caaccauuaucaggagcaga

SEQ ID NO: 787286 - RNA, 20 nt, Artificial Sequence
  Synthetic
agucaacugaugggagcaga

SEQ ID NO: 787287 - RNA, 20 nt, Artificial Sequence
  Synthetic
acacuagcaaguauagcaga

SEQ ID NO: 787288 - RNA, 20 nt, Artificial Sequence
  Synthetic
cacauucaaaagcuagcaga

SEQ ID NO: 787289 - RNA, 20 nt, Artificial Sequence
  Synthetic
cuaagcccaaaguuagcaga

SEQ ID NO: 787290 - RNA, 20 nt, Artificial Sequence
  Synthetic
aaagucucuauuuuagcaga

SEQ ID NO: 787291 - RNA, 20 nt, Artificial Sequence
  Synthetic
uaagugauacuaaaggcaga

SEQ ID NO: 787292 - RNA, 20 nt, Artificial Sequence
  Synthetic
cuguaucuucacaaggcaga

SEQ ID NO: 787293 - RNA, 20 nt, Artificial Sequence
  Synthetic
acuuuauuuaccaaggcaga

SEQ ID NO: 787294 - RNA, 20 nt, Artificial Sequence
  Synthetic
aaggaaucccagaaggcaga

SEQ ID NO: 787295 - RNA, 20 nt, Artificial Sequence
  Synthetic
agaagggcaauccaggcaga

SEQ ID NO: 787296 - RNA, 20 nt, Artificial Sequence
  Synthetic
acuggucacuuccaggcaga

SEQ ID NO: 787297 - RNA, 20 nt, Artificial Sequence
  Synthetic
agacaaacaaagcaggcaga

SEQ ID NO: 787298 - RNA, 20 nt, Artificial Sequence
  Synthetic
ugaagacuauuucaggcaga

SEQ ID NO: 787299 - RNA, 20 nt, Artificial Sequence
  Synthetic
acaaggaggagagaggcaga

SEQ ID NO: 787300 - RNA, 20 nt, Artificial Sequence
  Synthetic
cuuugggaggccgaggcaga

SEQ ID NO: 787301 - RNA, 20 nt, Artificial Sequence
  Synthetic
uacaauuaccaugaggcaga

SEQ ID NO: 787302 - RNA, 20 nt, Artificial Sequence
  Synthetic
cuuugggaggcugaggcaga

SEQ ID NO: 787303 - RNA, 20 nt, Artificial Sequence
  Synthetic
aggguugguguugaggcaga

SEQ ID NO: 787304 - RNA, 20 nt, Artificial Sequence
  Synthetic
uagaaggucuuugcggcaga

SEQ ID NO: 787305 - RNA, 20 nt, Artificial Sequence
  Synthetic
aucuuuguaaaaagggcaga

SEQ ID NO: 787306 - RNA, 20 nt, Artificial Sequence
  Synthetic
cuuggcuuggcgagggcaga

SEQ ID NO: 787307 - RNA, 20 nt, Artificial Sequence
  Synthetic
agagacugaaaaggggcaga

SEQ ID NO: 787308 - RNA, 20 nt, Artificial Sequence
  Synthetic
uugggggauuggggggcaga

SEQ ID NO: 787309 - RNA, 20 nt, Artificial Sequence
  Synthetic
aaagauucagugugggcaga

SEQ ID NO: 787310 - RNA, 20 nt, Artificial Sequence
  Synthetic
agggagcaggauugggcaga

SEQ ID NO: 787311 - RNA, 20 nt, Artificial Sequence
  Synthetic
caacaggagacuugggcaga

SEQ ID NO: 787312 - RNA, 20 nt, Artificial Sequence
  Synthetic
caucuuacaugaauggcaga

SEQ ID NO: 787313 - RNA, 20 nt, Artificial Sequence
  Synthetic
cugaaggcuugcauggcaga

SEQ ID NO: 787314 - RNA, 20 nt, Artificial Sequence
  Synthetic
aaacuuacaaucauggcaga

SEQ ID NO: 787315 - RNA, 20 nt, Artificial Sequence
  Synthetic
aagcuuccagucguggcaga

SEQ ID NO: 787316 - RNA, 20 nt, Artificial Sequence
  Synthetic
aagaaggcaacuguggcaga

SEQ ID NO: 787317 - RNA, 20 nt, Artificial Sequence
  Synthetic
uaaaaaacauaaaaugcaga

SEQ ID NO: 787318 - RNA, 20 nt, Artificial Sequence
  Synthetic
cuggcuuggcaggaugcaga

SEQ ID NO: 787319 - RNA, 20 nt, Artificial Sequence
  Synthetic
uuacucauaagggaugcaga

SEQ ID NO: 787320 - RNA, 20 nt, Artificial Sequence
  Synthetic
auggaagagaaauaugcaga

SEQ ID NO: 787321 - RNA, 20 nt, Artificial Sequence
  Synthetic
aaacaaaauaauuaugcaga

SEQ ID NO: 787322 - RNA, 20 nt, Artificial Sequence
  Synthetic
aacuauguuaacacugcaga

SEQ ID NO: 787323 - RNA, 20 nt, Artificial Sequence
  Synthetic
ucuauaggccaagcugcaga

SEQ ID NO: 787324 - RNA, 20 nt, Artificial Sequence
  Synthetic
cucugcugggacagugcaga

SEQ ID NO: 787325 - RNA, 20 nt, Artificial Sequence
  Synthetic
cacuguucuuugagugcaga

SEQ ID NO: 787326 - RNA, 20 nt, Artificial Sequence
  Synthetic
aguaaaggagguggugcaga

SEQ ID NO: 787327 - RNA, 20 nt, Artificial Sequence
  Synthetic
agacugguugaaauugcaga

SEQ ID NO: 787328 - RNA, 20 nt, Artificial Sequence
  Synthetic
uucucaagccacauugcaga

SEQ ID NO: 787329 - RNA, 20 nt, Artificial Sequence
  Synthetic
uuuuuuuuuugauuugcaga

SEQ ID NO: 787330 - RNA, 20 nt, Artificial Sequence
  Synthetic
auuuagcacuuauuugcaga

SEQ ID NO: 787331 - RNA, 20 nt, Artificial Sequence
  Synthetic
aauuauauuuuauuugcaga

SEQ ID NO: 787332 - RNA, 20 nt, Artificial Sequence
  Synthetic
uuuucuuauuacuuugcaga

SEQ ID NO: 787333 - RNA, 20 nt, Artificial Sequence
  Synthetic
cccucuuccugguuugcaga

SEQ ID NO: 787334 - RNA, 20 nt, Artificial Sequence
  Synthetic
agagaaaagcuguuugcaga

SEQ ID NO: 787335 - RNA, 20 nt, Artificial Sequence
  Synthetic
cagaauuuggcaaaaucaga

SEQ ID NO: 787336 - RNA, 20 nt, Artificial Sequence
  Synthetic
uucaaagccuaggcaucaga

SEQ ID NO: 787337 - RNA, 20 nt, Artificial Sequence
  Synthetic
cacuucucacacucaucaga

SEQ ID NO: 787338 - RNA, 20 nt, Artificial Sequence
  Synthetic
acuguuaaaaagucaucaga

SEQ ID NO: 787339 - RNA, 20 nt, Artificial Sequence
  Synthetic
auaauugaaaugucaucaga

SEQ ID NO: 787340 - RNA, 20 nt, Artificial Sequence
  Synthetic
cagguuugucaaagaucaga

SEQ ID NO: 787341 - RNA, 20 nt, Artificial Sequence
  Synthetic
uuacuuuguuaaagaucaga

SEQ ID NO: 787342 - RNA, 20 nt, Artificial Sequence
  Synthetic
aguugugauuggagaucaga

SEQ ID NO: 787343 - RNA, 20 nt, Artificial Sequence
  Synthetic
uagugaaucaugagaucaga

SEQ ID NO: 787344 - RNA, 20 nt, Artificial Sequence
  Synthetic
aagauuaugacuugaucaga

SEQ ID NO: 787345 - RNA, 20 nt, Artificial Sequence
  Synthetic
uuuauuauuuuuugaucaga

SEQ ID NO: 787346 - RNA, 20 nt, Artificial Sequence
  Synthetic
uguuaauaccacauaucaga

SEQ ID NO: 787347 - RNA, 20 nt, Artificial Sequence
  Synthetic
acacaauggggccuaucaga

SEQ ID NO: 787348 - RNA, 20 nt, Artificial Sequence
  Synthetic
aaaaaaaaaauuguaucaga

SEQ ID NO: 787349 - RNA, 20 nt, Artificial Sequence
  Synthetic
caugccaaguaauuaucaga

SEQ ID NO: 787350 - RNA, 20 nt, Artificial Sequence
  Synthetic
aacaaauauugcuuaucaga

SEQ ID NO: 787351 - RNA, 20 nt, Artificial Sequence
  Synthetic
uguacacaucagaacucaga

SEQ ID NO: 787352 - RNA, 20 nt, Artificial Sequence
  Synthetic
uuaaaucuccuuaacucaga

SEQ ID NO: 787353 - RNA, 20 nt, Artificial Sequence
  Synthetic
auggacuuugaagacucaga

SEQ ID NO: 787354 - RNA, 20 nt, Artificial Sequence
  Synthetic
auagacacuggagacucaga

SEQ ID NO: 787355 - RNA, 20 nt, Artificial Sequence
  Synthetic
uuauuauacccauacucaga

SEQ ID NO: 787356 - RNA, 20 nt, Artificial Sequence
  Synthetic
aauagauaccacuacucaga

SEQ ID NO: 787357 - RNA, 20 nt, Artificial Sequence
  Synthetic
uguaaucccagcuacucaga

SEQ ID NO: 787358 - RNA, 20 nt, Artificial Sequence
  Synthetic
caucagagagaguacucaga

SEQ ID NO: 787359 - RNA, 20 nt, Artificial Sequence
  Synthetic
uucaauguuacuuacucaga

SEQ ID NO: 787360 - RNA, 20 nt, Artificial Sequence
  Synthetic
ucccaaacaaaaaccucaga

SEQ ID NO: 787361 - RNA, 20 nt, Artificial Sequence
  Synthetic
aggauuaauaaaaccucaga

SEQ ID NO: 787362 - RNA, 20 nt, Artificial Sequence
  Synthetic
uuggcagaaguucccucaga

SEQ ID NO: 787363 - RNA, 20 nt, Artificial Sequence
  Synthetic
cagcuggaagggagcucaga

SEQ ID NO: 787364 - RNA, 20 nt, Artificial Sequence
  Synthetic
uuguucuggacaugcucaga

SEQ ID NO: 787365 - RNA, 20 nt, Artificial Sequence
  Synthetic
ugcuuaaaaaccugcucaga

SEQ ID NO: 787366 - RNA, 20 nt, Artificial Sequence
  Synthetic
cuggcugugagcugcucaga

SEQ ID NO: 787367 - RNA, 20 nt, Artificial Sequence
  Synthetic
aacagacaauucaucucaga

SEQ ID NO: 787368 - RNA, 20 nt, Artificial Sequence
  Synthetic
ugaguucuaaagaucucaga

SEQ ID NO: 787369 - RNA, 20 nt, Artificial Sequence
  Synthetic
caggcagagguggucucaga

SEQ ID NO: 787370 - RNA, 20 nt, Artificial Sequence
  Synthetic
cagacugagguggucucaga

SEQ ID NO: 787371 - RNA, 20 nt, Artificial Sequence
  Synthetic
caggcugagguggucucaga

SEQ ID NO: 787372 - RNA, 20 nt, Artificial Sequence
  Synthetic
uguaaucccaucuucucaga

SEQ ID NO: 787373 - RNA, 20 nt, Artificial Sequence
  Synthetic
uccagaacacuguucucaga

SEQ ID NO: 787374 - RNA, 20 nt, Artificial Sequence
  Synthetic
uuuauguagaauuucucaga

SEQ ID NO: 787375 - RNA, 20 nt, Artificial Sequence
  Synthetic
auucccaagucuuucucaga

SEQ ID NO: 787376 - RNA, 20 nt, Artificial Sequence
  Synthetic
auuauaagaaggaagucaga

SEQ ID NO: 787377 - RNA, 20 nt, Artificial Sequence
  Synthetic
uuugcagcuuuuaagucaga

SEQ ID NO: 787378 - RNA, 20 nt, Artificial Sequence
  Synthetic
agccaacaugaagagucaga

SEQ ID NO: 787379 - RNA, 20 nt, Artificial Sequence
  Synthetic
aucuuaagaauggagucaga

SEQ ID NO: 787380 - RNA, 20 nt, Artificial Sequence
  Synthetic
ugaagaacaggcaggucaga

SEQ ID NO: 787381 - RNA, 20 nt, Artificial Sequence
  Synthetic
agaugcauauucaggucaga

SEQ ID NO: 787382 - RNA, 20 nt, Artificial Sequence
  Synthetic
uuauuuauucagaggucaga

SEQ ID NO: 787383 - RNA, 20 nt, Artificial Sequence
  Synthetic
uuugcauguguauggucaga

SEQ ID NO: 787384 - RNA, 20 nt, Artificial Sequence
  Synthetic
aaacugaaacaagugucaga

SEQ ID NO: 787385 - RNA, 20 nt, Artificial Sequence
  Synthetic
uaaauacaugaugugucaga

SEQ ID NO: 787386 - RNA, 20 nt, Artificial Sequence
  Synthetic
agacuaagacaaaauucaga

SEQ ID NO: 787387 - RNA, 20 nt, Artificial Sequence
  Synthetic
acagcuauugaaaauucaga

SEQ ID NO: 787388 - RNA, 20 nt, Artificial Sequence
  Synthetic
auuaauauaaagaauucaga

SEQ ID NO: 787389 - RNA, 20 nt, Artificial Sequence
  Synthetic
cuacuugcuuugcauucaga

SEQ ID NO: 787390 - RNA, 20 nt, Artificial Sequence
  Synthetic
uaauaucaaacagauucaga

SEQ ID NO: 787391 - RNA, 20 nt, Artificial Sequence
  Synthetic
aaaaaauuauucacuucaga

SEQ ID NO: 787392 - RNA, 20 nt, Artificial Sequence
  Synthetic
agaagcagcuugacuucaga

SEQ ID NO: 787393 - RNA, 20 nt, Artificial Sequence
  Synthetic
acauacacaacaccuucaga

SEQ ID NO: 787394 - RNA, 20 nt, Artificial Sequence
  Synthetic
ugauguuggugaccuucaga

SEQ ID NO: 787395 - RNA, 20 nt, Artificial Sequence
  Synthetic
ucuuccccagagccuucaga

SEQ ID NO: 787396 - RNA, 20 nt, Artificial Sequence
  Synthetic
ugacggaaguaggcuucaga

SEQ ID NO: 787397 - RNA, 20 nt, Artificial Sequence
  Synthetic
cgcuccccaaaugcuucaga

SEQ ID NO: 787398 - RNA, 20 nt, Artificial Sequence
  Synthetic
ucugugucuucaaguucaga

SEQ ID NO: 787399 - RNA, 20 nt, Artificial Sequence
  Synthetic
aauugugaucaggguucaga

SEQ ID NO: 787400 - RNA, 20 nt, Artificial Sequence
  Synthetic
aauaggcuaugaauuucaga

SEQ ID NO: 787401 - RNA, 20 nt, Artificial Sequence
  Synthetic
aaauuacuuuacauuucaga

SEQ ID NO: 787402 - RNA, 20 nt, Artificial Sequence
  Synthetic
auguagcccucaguuucaga

SEQ ID NO: 787403 - RNA, 20 nt, Artificial Sequence
  Synthetic
uuguuuagaauaguuucaga

SEQ ID NO: 787404 - RNA, 20 nt, Artificial Sequence
  Synthetic
uugauuggaauaguuucaga

SEQ ID NO: 787405 - RNA, 20 nt, Artificial Sequence
  Synthetic
ccaaacaacucuguuucaga

SEQ ID NO: 787406 - RNA, 20 nt, Artificial Sequence
  Synthetic
ucagacauuaaauuuucaga

SEQ ID NO: 787407 - RNA, 20 nt, Artificial Sequence
  Synthetic
aaaccauguuucuuuucaga

SEQ ID NO: 787408 - RNA, 20 nt, Artificial Sequence
  Synthetic
uugcuuaagacuuuuucaga

SEQ ID NO: 787409 - RNA, 20 nt, Artificial Sequence
  Synthetic
cuaucuauggaaaaaagaga

SEQ ID NO: 787410 - RNA, 20 nt, Artificial Sequence
  Synthetic
aaauuaaaauaaaaaagaga

SEQ ID NO: 787411 - RNA, 20 nt, Artificial Sequence
  Synthetic
ucauuucuaggaaaaagaga

SEQ ID NO: 787412 - RNA, 20 nt, Artificial Sequence
  Synthetic
auuugaaauaacaaaagaga

SEQ ID NO: 787413 - RNA, 20 nt, Artificial Sequence
  Synthetic
uuuuauauagccaaaagaga

SEQ ID NO: 787414 - RNA, 20 nt, Artificial Sequence
  Synthetic
uccauauuaaucaaaagaga

SEQ ID NO: 787415 - RNA, 20 nt, Artificial Sequence
  Synthetic
aggcagaaaaagaaaagaga

SEQ ID NO: 787416 - RNA, 20 nt, Artificial Sequence
  Synthetic
cuaauaaaacagaaaagaga

SEQ ID NO: 787417 - RNA, 20 nt, Artificial Sequence
  Synthetic
aaguguggugggaaaagaga

SEQ ID NO: 787418 - RNA, 20 nt, Artificial Sequence
  Synthetic
aaagagauuuauaaaagaga

SEQ ID NO: 787419 - RNA, 20 nt, Artificial Sequence
  Synthetic
cugaauuguaguaaaagaga

SEQ ID NO: 787420 - RNA, 20 nt, Artificial Sequence
  Synthetic
aucaacuugagagaaagaga

SEQ ID NO: 787421 - RNA, 20 nt, Artificial Sequence
  Synthetic
acucagagagaugaaagaga

SEQ ID NO: 787422 - RNA, 20 nt, Artificial Sequence
  Synthetic
uuuaaggguugugaaagaga

SEQ ID NO: 787423 - RNA, 20 nt, Artificial Sequence
  Synthetic
uggugucugauugaaagaga

SEQ ID NO: 787424 - RNA, 20 nt, Artificial Sequence
  Synthetic
ccuuucuagaaauaaagaga

SEQ ID NO: 787425 - RNA, 20 nt, Artificial Sequence
  Synthetic
ugacaauagggauaaagaga

SEQ ID NO: 787426 - RNA, 20 nt, Artificial Sequence
  Synthetic
agggagaggugaacaagaga

SEQ ID NO: 787427 - RNA, 20 nt, Artificial Sequence
  Synthetic
uccaaagguaggacaagaga

SEQ ID NO: 787428 - RNA, 20 nt, Artificial Sequence
  Synthetic
ugcuacauaacuacaagaga

SEQ ID NO: 787429 - RNA, 20 nt, Artificial Sequence
  Synthetic
uccuuuagucauccaagaga

SEQ ID NO: 787430 - RNA, 20 nt, Artificial Sequence
  Synthetic
cagggcaguuuuccaagaga

SEQ ID NO: 787431 - RNA, 20 nt, Artificial Sequence
  Synthetic
ccuauucagcaagcaagaga

SEQ ID NO: 787432 - RNA, 20 nt, Artificial Sequence
  Synthetic
acuagguuugcugcaagaga

SEQ ID NO: 787433 - RNA, 20 nt, Artificial Sequence
  Synthetic
aaguaaaguuaaucaagaga

SEQ ID NO: 787434 - RNA, 20 nt, Artificial Sequence
  Synthetic
auuagcaggccaucaagaga

SEQ ID NO: 787435 - RNA, 20 nt, Artificial Sequence
  Synthetic
ugaacagaaaucucaagaga

SEQ ID NO: 787436 - RNA, 20 nt, Artificial Sequence
  Synthetic
accaauacauauucaagaga

SEQ ID NO: 787437 - RNA, 20 nt, Artificial Sequence
  Synthetic
auaaaucaauucagaagaga

SEQ ID NO: 787438 - RNA, 20 nt, Artificial Sequence
  Synthetic
aauaagggaaagagaagaga

SEQ ID NO: 787439 - RNA, 20 nt, Artificial Sequence
  Synthetic
cucaaaacggcuagaagaga

SEQ ID NO: 787440 - RNA, 20 nt, Artificial Sequence
  Synthetic
uuuuguauuuuuagaagaga

SEQ ID NO: 787441 - RNA, 20 nt, Artificial Sequence
  Synthetic
aacacaugugacggaagaga

SEQ ID NO: 787442 - RNA, 20 nt, Artificial Sequence
  Synthetic
aagaaaguggauggaagaga

SEQ ID NO: 787443 - RNA, 20 nt, Artificial Sequence
  Synthetic
agacuagcucugugaagaga

SEQ ID NO: 787444 - RNA, 20 nt, Artificial Sequence
  Synthetic
uuauagauuauuugaagaga

SEQ ID NO: 787445 - RNA, 20 nt, Artificial Sequence
  Synthetic
aagaaggguaaaauaagaga

SEQ ID NO: 787446 - RNA, 20 nt, Artificial Sequence
  Synthetic
agccccgggagaauaagaga

SEQ ID NO: 787447 - RNA, 20 nt, Artificial Sequence
  Synthetic
cuaaauggagaccuaagaga

SEQ ID NO: 787448 - RNA, 20 nt, Artificial Sequence
  Synthetic
aaaacugucaaucuaagaga

SEQ ID NO: 787449 - RNA, 20 nt, Artificial Sequence
  Synthetic
aaggauuccaguguaagaga

SEQ ID NO: 787450 - RNA, 20 nt, Artificial Sequence
  Synthetic
uuaaaaguuagcuuaagaga

SEQ ID NO: 787451 - RNA, 20 nt, Artificial Sequence
  Synthetic
acuaccaaaagguuaagaga

SEQ ID NO: 787452 - RNA, 20 nt, Artificial Sequence
  Synthetic
ugaucaguaucuuuaagaga

SEQ ID NO: 787453 - RNA, 20 nt, Artificial Sequence
  Synthetic
uuuaauuuaauuuuaagaga

SEQ ID NO: 787454 - RNA, 20 nt, Artificial Sequence
  Synthetic
auauuccuaguaaacagaga

SEQ ID NO: 787455 - RNA, 20 nt, Artificial Sequence
  Synthetic
cugcuggggcccaacagaga

SEQ ID NO: 787456 - RNA, 20 nt, Artificial Sequence
  Synthetic
uaauugaucaagaacagaga

SEQ ID NO: 787457 - RNA, 20 nt, Artificial Sequence
  Synthetic
cuaacgccauuccacagaga

SEQ ID NO: 787458 - RNA, 20 nt, Artificial Sequence
  Synthetic
agcagugccuggcacagaga

SEQ ID NO: 787459 - RNA, 20 nt, Artificial Sequence
  Synthetic
ccagaggagaacuacagaga

SEQ ID NO: 787460 - RNA, 20 nt, Artificial Sequence
  Synthetic
agcaagacucaguacagaga

SEQ ID NO: 787461 - RNA, 20 nt, Artificial Sequence
  Synthetic
cucucucucgaaaccagaga

SEQ ID NO: 787462 - RNA, 20 nt, Artificial Sequence
  Synthetic
acacacuguacaaccagaga

SEQ ID NO: 787463 - RNA, 20 nt, Artificial Sequence
  Synthetic
ccagacagagaagccagaga

SEQ ID NO: 787464 - RNA, 20 nt, Artificial Sequence
  Synthetic
uucuuccgcuuugccagaga

SEQ ID NO: 787465 - RNA, 20 nt, Artificial Sequence
  Synthetic
aggaaacgaagauccagaga

SEQ ID NO: 787466 - RNA, 20 nt, Artificial Sequence
  Synthetic
uaaauguuccacagcagaga

SEQ ID NO: 787467 - RNA, 20 nt, Artificial Sequence
  Synthetic
uuuuguauuuuuagcagaga

SEQ ID NO: 787468 - RNA, 20 nt, Artificial Sequence
  Synthetic
cuagcaaaccacugcagaga

SEQ ID NO: 787469 - RNA, 20 nt, Artificial Sequence
  Synthetic
agaagcacuugcugcagaga

SEQ ID NO: 787470 - RNA, 20 nt, Artificial Sequence
  Synthetic
aacaggaaccucugcagaga

SEQ ID NO: 787471 - RNA, 20 nt, Artificial Sequence
  Synthetic
cuggacgugcagugcagaga

SEQ ID NO: 787472 - RNA, 20 nt, Artificial Sequence
  Synthetic
ucuccuccuuugugcagaga

SEQ ID NO: 787473 - RNA, 20 nt, Artificial Sequence
  Synthetic
auauucuaguauugcagaga

SEQ ID NO: 787474 - RNA, 20 nt, Artificial Sequence
  Synthetic
uuuguauuuuuuugcagaga

SEQ ID NO: 787475 - RNA, 20 nt, Artificial Sequence
  Synthetic
cuuaugaguaagaucagaga

SEQ ID NO: 787476 - RNA, 20 nt, Artificial Sequence
  Synthetic
cgauuuugcaggcucagaga

SEQ ID NO: 787477 - RNA, 20 nt, Artificial Sequence
  Synthetic
uagcagaacauggucagaga

SEQ ID NO: 787478 - RNA, 20 nt, Artificial Sequence
  Synthetic
uuggaacacacaaagagaga

SEQ ID NO: 787479 - RNA, 20 nt, Artificial Sequence
  Synthetic
acaaggcaggacaagagaga

SEQ ID NO: 787480 - RNA, 20 nt, Artificial Sequence
  Synthetic
ugcuagugaaugaagagaga

SEQ ID NO: 787481 - RNA, 20 nt, Artificial Sequence
  Synthetic
aagaguccuccuaagagaga

SEQ ID NO: 787482 - RNA, 20 nt, Artificial Sequence
  Synthetic
auuggugguauuaagagaga

SEQ ID NO: 787483 - RNA, 20 nt, Artificial Sequence
  Synthetic
ccuggugguuuuaagagaga

SEQ ID NO: 787484 - RNA, 20 nt, Artificial Sequence
  Synthetic
uauguuaggacacagagaga

SEQ ID NO: 787485 - RNA, 20 nt, Artificial Sequence
  Synthetic
ucugagcuugcacagagaga

SEQ ID NO: 787486 - RNA, 20 nt, Artificial Sequence
  Synthetic
aacugaggcucacagagaga

SEQ ID NO: 787487 - RNA, 20 nt, Artificial Sequence
  Synthetic
agaugcccugcccagagaga

SEQ ID NO: 787488 - RNA, 20 nt, Artificial Sequence
  Synthetic
uaccuuccagagcagagaga

SEQ ID NO: 787489 - RNA, 20 nt, Artificial Sequence
  Synthetic
uggcuucagaaucagagaga

SEQ ID NO: 787490 - RNA, 20 nt, Artificial Sequence
  Synthetic
acugccaagacagagagaga

SEQ ID NO: 787491 - RNA, 20 nt, Artificial Sequence
  Synthetic
aacagagagagagagagaga

SEQ ID NO: 787492 - RNA, 20 nt, Artificial Sequence
  Synthetic
gagagagagagagagagaga

SEQ ID NO: 787493 - RNA, 20 nt, Artificial Sequence
  Synthetic
uauggagagagagagagaga

SEQ ID NO: 787494 - RNA, 20 nt, Artificial Sequence
  Synthetic
aaaacaaguggagagagaga

SEQ ID NO: 787495 - RNA, 20 nt, Artificial Sequence
  Synthetic
uuuuuuaauugagagagaga

SEQ ID NO: 787496 - RNA, 20 nt, Artificial Sequence
  Synthetic
agucauagaggugagagaga

SEQ ID NO: 787497 - RNA, 20 nt, Artificial Sequence
  Synthetic
agauaggggugauagagaga

SEQ ID NO: 787498 - RNA, 20 nt, Artificial Sequence
  Synthetic
uuccucugagacuagagaga

SEQ ID NO: 787499 - RNA, 20 nt, Artificial Sequence
  Synthetic
agagaagugugaaggagaga

SEQ ID NO: 787500 - RNA, 20 nt, Artificial Sequence
  Synthetic
uaacaauuucccaggagaga

SEQ ID NO: 787501 - RNA, 20 nt, Artificial Sequence
  Synthetic
ucagaggccaaagggagaga

SEQ ID NO: 787502 - RNA, 20 nt, Artificial Sequence
  Synthetic
aauaaagagcaagggagaga

SEQ ID NO: 787503 - RNA, 20 nt, Artificial Sequence
  Synthetic
aaggaagagagagggagaga

SEQ ID NO: 787504 - RNA, 20 nt, Artificial Sequence
  Synthetic
acgcacuuaggugggagaga

SEQ ID NO: 787505 - RNA, 20 nt, Artificial Sequence
  Synthetic
caguuaggaaaauggagaga

SEQ ID NO: 787506 - RNA, 20 nt, Artificial Sequence
  Synthetic
aaggaaccaacaaugagaga

SEQ ID NO: 787507 - RNA, 20 nt, Artificial Sequence
  Synthetic
aaaauacugaagaugagaga

SEQ ID NO: 787508 - RNA, 20 nt, Artificial Sequence
  Synthetic
agggcaacacagaugagaga

SEQ ID NO: 787509 - RNA, 20 nt, Artificial Sequence
  Synthetic
auauaaaaauggaugagaga

SEQ ID NO: 787510 - RNA, 20 nt, Artificial Sequence
  Synthetic
ccuaaugggauucugagaga

SEQ ID NO: 787511 - RNA, 20 nt, Artificial Sequence
  Synthetic
ugaauaggagcggugagaga

SEQ ID NO: 787512 - RNA, 20 nt, Artificial Sequence
  Synthetic
ugaauaggaguggugagaga

SEQ ID NO: 787513 - RNA, 20 nt, Artificial Sequence
  Synthetic
uugaacuuuguggugagaga

SEQ ID NO: 787514 - RNA, 20 nt, Artificial Sequence
  Synthetic
uuucucuaaugugugagaga

SEQ ID NO: 787515 - RNA, 20 nt, Artificial Sequence
  Synthetic
cauguggaucccuugagaga

SEQ ID NO: 787516 - RNA, 20 nt, Artificial Sequence
  Synthetic
uaagacucacuguugagaga

SEQ ID NO: 787517 - RNA, 20 nt, Artificial Sequence
  Synthetic
uugcuugccccuuugagaga

SEQ ID NO: 787518 - RNA, 20 nt, Artificial Sequence
  Synthetic
aaacaggauucuaauagaga

SEQ ID NO: 787519 - RNA, 20 nt, Artificial Sequence
  Synthetic
uuuuguauuuuuaauagaga

SEQ ID NO: 787520 - RNA, 20 nt, Artificial Sequence
  Synthetic
aaaagacaaaaucauagaga

SEQ ID NO: 787521 - RNA, 20 nt, Artificial Sequence
  Synthetic
acauagcauuuucauagaga

SEQ ID NO: 787522 - RNA, 20 nt, Artificial Sequence
  Synthetic
augaauacauuauauagaga

SEQ ID NO: 787523 - RNA, 20 nt, Artificial Sequence
  Synthetic
accuuguguuuuuauagaga

SEQ ID NO: 787524 - RNA, 20 nt, Artificial Sequence
  Synthetic
ucaucaaauaaugcuagaga

SEQ ID NO: 787525 - RNA, 20 nt, Artificial Sequence
  Synthetic
cuuuuccuaauaucuagaga

SEQ ID NO: 787526 - RNA, 20 nt, Artificial Sequence
  Synthetic
uuccauggcaacucuagaga

SEQ ID NO: 787527 - RNA, 20 nt, Artificial Sequence
  Synthetic
auguuugaagucucuagaga

SEQ ID NO: 787528 - RNA, 20 nt, Artificial Sequence
  Synthetic
ugaugaaaacauucuagaga

SEQ ID NO: 787529 - RNA, 20 nt, Artificial Sequence
  Synthetic
aaaacgaugcaaaguagaga

SEQ ID NO: 787530 - RNA, 20 nt, Artificial Sequence
  Synthetic
uuuuguauuuuaaguagaga

SEQ ID NO: 787531 - RNA, 20 nt, Artificial Sequence
  Synthetic
uuuuuuauuuucaguagaga

SEQ ID NO: 787532 - RNA, 20 nt, Artificial Sequence
  Synthetic
uuaaaauagaguaguagaga

SEQ ID NO: 787533 - RNA, 20 nt, Artificial Sequence
  Synthetic
uuuuguaucuuuaguagaga

SEQ ID NO: 787534 - RNA, 20 nt, Artificial Sequence
  Synthetic
uuuuguaauuuuaguagaga

SEQ ID NO: 787535 - RNA, 20 nt, Artificial Sequence
  Synthetic
uugugcauuuuuaguagaga

SEQ ID NO: 787536 - RNA, 20 nt, Artificial Sequence
  Synthetic
uuucauauuuuuaguagaga

SEQ ID NO: 787537 - RNA, 20 nt, Artificial Sequence
  Synthetic
uuuuauauuuuuaguagaga

SEQ ID NO: 787538 - RNA, 20 nt, Artificial Sequence
  Synthetic
uuuucuauuuuuaguagaga

SEQ ID NO: 787539 - RNA, 20 nt, Artificial Sequence
  Synthetic
uuugguauuuuuaguagaga

SEQ ID NO: 787540 - RNA, 20 nt, Artificial Sequence
  Synthetic
uuuuguauuuuuaguagaga

SEQ ID NO: 787541 - RNA, 20 nt, Artificial Sequence
  Synthetic
uuuuuuauuuuuaguagaga

SEQ ID NO: 787542 - RNA, 20 nt, Artificial Sequence
  Synthetic
uuuuguguuuuuaguagaga

SEQ ID NO: 787543 - RNA, 20 nt, Artificial Sequence
  Synthetic
uuuggauuuuuuaguagaga

SEQ ID NO: 787544 - RNA, 20 nt, Artificial Sequence
  Synthetic
uuuguauuuuuuaguagaga

SEQ ID NO: 787545 - RNA, 20 nt, Artificial Sequence
  Synthetic
uuuguguuuuuuaguagaga

SEQ ID NO: 787546 - RNA, 20 nt, Artificial Sequence
  Synthetic
uuguauuuuuuuaguagaga

SEQ ID NO: 787547 - RNA, 20 nt, Artificial Sequence
  Synthetic
ugagaagaagaugguagaga

SEQ ID NO: 787548 - RNA, 20 nt, Artificial Sequence
  Synthetic
uuuuguauuuuugguagaga

SEQ ID NO: 787549 - RNA, 20 nt, Artificial Sequence
  Synthetic
aaaaauuuuuuugguagaga

SEQ ID NO: 787550 - RNA, 20 nt, Artificial Sequence
  Synthetic
uuuugcugucaauguagaga

SEQ ID NO: 787551 - RNA, 20 nt, Artificial Sequence
  Synthetic
uuuuuaauuuuauguagaga

SEQ ID NO: 787552 - RNA, 20 nt, Artificial Sequence
  Synthetic
cauacauuuuuauguagaga

SEQ ID NO: 787553 - RNA, 20 nt, Artificial Sequence
  Synthetic
auuuuuguuuucuguagaga

SEQ ID NO: 787554 - RNA, 20 nt, Artificial Sequence
  Synthetic
uuuugaauucuuuguagaga

SEQ ID NO: 787555 - RNA, 20 nt, Artificial Sequence
  Synthetic
uuuugcauuuuuuguagaga

SEQ ID NO: 787556 - RNA, 20 nt, Artificial Sequence
  Synthetic
uuguuuuuuuuuuguagaga

SEQ ID NO: 787557 - RNA, 20 nt, Artificial Sequence
  Synthetic
aaaaaucaaacaauuagaga

SEQ ID NO: 787558 - RNA, 20 nt, Artificial Sequence
  Synthetic
uucacagagaagauuagaga

SEQ ID NO: 787559 - RNA, 20 nt, Artificial Sequence
  Synthetic
acuaacuuaucauuuagaga

SEQ ID NO: 787560 - RNA, 20 nt, Artificial Sequence
  Synthetic
auuuaaaaaagauuuagaga

SEQ ID NO: 787561 - RNA, 20 nt, Artificial Sequence
  Synthetic
auauauaauggauuuagaga

SEQ ID NO: 787562 - RNA, 20 nt, Artificial Sequence
  Synthetic
aaaaaaugcauauuuagaga

SEQ ID NO: 787563 - RNA, 20 nt, Artificial Sequence
  Synthetic
uacaaaugugauuuuagaga

SEQ ID NO: 787564 - RNA, 20 nt, Artificial Sequence
  Synthetic
uuuguauuuuuuuuuagaga

SEQ ID NO: 787565 - RNA, 20 nt, Artificial Sequence
  Synthetic
ccuagcuagauaaaacgaga

SEQ ID NO: 787566 - RNA, 20 nt, Artificial Sequence
  Synthetic
uacccacuauguccccgaga

SEQ ID NO: 787567 - RNA, 20 nt, Artificial Sequence
  Synthetic
aaggccauauauucccgaga

SEQ ID NO: 787568 - RNA, 20 nt, Artificial Sequence
  Synthetic
uuuuuuuuuuuuucccgaga

SEQ ID NO: 787569 - RNA, 20 nt, Artificial Sequence
  Synthetic
agcacuuugggaggccgaga

SEQ ID NO: 787570 - RNA, 20 nt, Artificial Sequence
  Synthetic
accaggcagaaauuccgaga

SEQ ID NO: 787571 - RNA, 20 nt, Artificial Sequence
  Synthetic
uuuuuuuuuuuuuuccgaga

SEQ ID NO: 787572 - RNA, 20 nt, Artificial Sequence
  Synthetic
augaaugaaaugaagcgaga

SEQ ID NO: 787573 - RNA, 20 nt, Artificial Sequence
  Synthetic
uuuuuuuuuuuuuugcgaga

SEQ ID NO: 787574 - RNA, 20 nt, Artificial Sequence
  Synthetic
ucauaucuacccuaucgaga

SEQ ID NO: 787575 - RNA, 20 nt, Artificial Sequence
  Synthetic
agcuucuguugaguucgaga

SEQ ID NO: 787576 - RNA, 20 nt, Artificial Sequence
  Synthetic
uauugcuaaaauaaaggaga

SEQ ID NO: 787577 - RNA, 20 nt, Artificial Sequence
  Synthetic
caaccaacaaauaaaggaga

SEQ ID NO: 787578 - RNA, 20 nt, Artificial Sequence
  Synthetic
uuuucugcuuauaaaggaga

SEQ ID NO: 787579 - RNA, 20 nt, Artificial Sequence
  Synthetic
aaucauuggauuaaaggaga

SEQ ID NO: 787580 - RNA, 20 nt, Artificial Sequence
  Synthetic
agcuuagaaguucaaggaga

SEQ ID NO: 787581 - RNA, 20 nt, Artificial Sequence
  Synthetic
uagaagggggaggaaggaga

SEQ ID NO: 787582 - RNA, 20 nt, Artificial Sequence
  Synthetic
aggaaaggucaugaaggaga

SEQ ID NO: 787583 - RNA, 20 nt, Artificial Sequence
  Synthetic
caaaaaagaaaaacaggaga

SEQ ID NO: 787584 - RNA, 20 nt, Artificial Sequence
  Synthetic
aggaaacaaaacacaggaga

SEQ ID NO: 787585 - RNA, 20 nt, Artificial Sequence
  Synthetic
aacaggggaaacacaggaga

SEQ ID NO: 787586 - RNA, 20 nt, Artificial Sequence
  Synthetic
uuuaaaagaccgacaggaga

SEQ ID NO: 787587 - RNA, 20 nt, Artificial Sequence
  Synthetic
aauugcuugaacccaggaga

SEQ ID NO: 787588 - RNA, 20 nt, Artificial Sequence
  Synthetic
cuguaaaagcagccaggaga

SEQ ID NO: 787589 - RNA, 20 nt, Artificial Sequence
  Synthetic
agugaaaggagagcaggaga

SEQ ID NO: 787590 - RNA, 20 nt, Artificial Sequence
  Synthetic
cagggcaaucaggcaggaga

SEQ ID NO: 787591 - RNA, 20 nt, Artificial Sequence
  Synthetic
agaccaagcuaaagaggaga

SEQ ID NO: 787592 - RNA, 20 nt, Artificial Sequence
  Synthetic
uaggagccacuaagaggaga

SEQ ID NO: 787593 - RNA, 20 nt, Artificial Sequence
  Synthetic
aacucaucaagcagaggaga

SEQ ID NO: 787594 - RNA, 20 nt, Artificial Sequence
  Synthetic
agaacaaggcucagaggaga

SEQ ID NO: 787595 - RNA, 20 nt, Artificial Sequence
  Synthetic
aaacagcaaaagagaggaga

SEQ ID NO: 787596 - RNA, 20 nt, Artificial Sequence
  Synthetic
cuagaaucugggagaggaga

SEQ ID NO: 787597 - RNA, 20 nt, Artificial Sequence
  Synthetic
uaacacucuaguagaggaga

SEQ ID NO: 787598 - RNA, 20 nt, Artificial Sequence
  Synthetic
aagagagggacgggaggaga

SEQ ID NO: 787599 - RNA, 20 nt, Artificial Sequence
  Synthetic
uuugagacuuugggaggaga

SEQ ID NO: 787600 - RNA, 20 nt, Artificial Sequence
  Synthetic
ugcauuucugugugaggaga

SEQ ID NO: 787601 - RNA, 20 nt, Artificial Sequence
  Synthetic
cagugaaaagcaauaggaga

SEQ ID NO: 787602 - RNA, 20 nt, Artificial Sequence
  Synthetic
aaggcaaugguauuaggaga

SEQ ID NO: 787603 - RNA, 20 nt, Artificial Sequence
  Synthetic
uuguuuguuuauuuaggaga

SEQ ID NO: 787604 - RNA, 20 nt, Artificial Sequence
  Synthetic
uucagcuagagauacggaga

SEQ ID NO: 787605 - RNA, 20 nt, Artificial Sequence
  Synthetic
ucacuuuuauguuacggaga

SEQ ID NO: 787606 - RNA, 20 nt, Artificial Sequence
  Synthetic
cuucagugguaccccggaga

SEQ ID NO: 787607 - RNA, 20 nt, Artificial Sequence
  Synthetic
ugauuggggcagaagggaga

SEQ ID NO: 787608 - RNA, 20 nt, Artificial Sequence
  Synthetic
cacuguugagagaagggaga

SEQ ID NO: 787609 - RNA, 20 nt, Artificial Sequence
  Synthetic
agagacagaacgaagggaga

SEQ ID NO: 787610 - RNA, 20 nt, Artificial Sequence
  Synthetic
uuaaccaagauuaagggaga

SEQ ID NO: 787611 - RNA, 20 nt, Artificial Sequence
  Synthetic
aaugguuacuuccagggaga

SEQ ID NO: 787612 - RNA, 20 nt, Artificial Sequence
  Synthetic
agaacaacuaagcagggaga

SEQ ID NO: 787613 - RNA, 20 nt, Artificial Sequence
  Synthetic
augcucucucagcagggaga

SEQ ID NO: 787614 - RNA, 20 nt, Artificial Sequence
  Synthetic
agguuuuaccuucagggaga

SEQ ID NO: 787615 - RNA, 20 nt, Artificial Sequence
  Synthetic
aggagagaggcagagggaga

SEQ ID NO: 787616 - RNA, 20 nt, Artificial Sequence
  Synthetic
cagagacagggagagggaga

SEQ ID NO: 787617 - RNA, 20 nt, Artificial Sequence
  Synthetic
ucccccaaaaaggagggaga

SEQ ID NO: 787618 - RNA, 20 nt, Artificial Sequence
  Synthetic
uaaggcaagaaggagggaga

SEQ ID NO: 787619 - RNA, 20 nt, Artificial Sequence
  Synthetic
cuauuacauaaggagggaga

SEQ ID NO: 787620 - RNA, 20 nt, Artificial Sequence
  Synthetic
aaagggaggagggagggaga

SEQ ID NO: 787621 - RNA, 20 nt, Artificial Sequence
  Synthetic
agcuauuuaggggagggaga

SEQ ID NO: 787622 - RNA, 20 nt, Artificial Sequence
  Synthetic
uuaucaguuuucuagggaga

SEQ ID NO: 787623 - RNA, 20 nt, Artificial Sequence
  Synthetic
cagaaauaggaguagggaga

SEQ ID NO: 787624 - RNA, 20 nt, Artificial Sequence
  Synthetic
uauuacaacaucaggggaga

SEQ ID NO: 787625 - RNA, 20 nt, Artificial Sequence
  Synthetic
augaccugcuucaggggaga

SEQ ID NO: 787626 - RNA, 20 nt, Artificial Sequence
  Synthetic
uuuaaaucacugaggggaga

SEQ ID NO: 787627 - RNA, 20 nt, Artificial Sequence
  Synthetic
agagauugguaauggggaga

SEQ ID NO: 787628 - RNA, 20 nt, Artificial Sequence
  Synthetic
acauccucgggguggggaga

SEQ ID NO: 787629 - RNA, 20 nt, Artificial Sequence
  Synthetic
caagggaagaauuggggaga

SEQ ID NO: 787630 - RNA, 20 nt, Artificial Sequence
  Synthetic
aagaacaugacuuggggaga

SEQ ID NO: 787631 - RNA, 20 nt, Artificial Sequence
  Synthetic
agacccucauguuggggaga

SEQ ID NO: 787632 - RNA, 20 nt, Artificial Sequence
  Synthetic
auaaaaguuugaaugggaga

SEQ ID NO: 787633 - RNA, 20 nt, Artificial Sequence
  Synthetic
aauaaugaccuaaugggaga

SEQ ID NO: 787634 - RNA, 20 nt, Artificial Sequence
  Synthetic
aagcaauaggagaugggaga

SEQ ID NO: 787635 - RNA, 20 nt, Artificial Sequence
  Synthetic
aauggcgugaaccugggaga

SEQ ID NO: 787636 - RNA, 20 nt, Artificial Sequence
  Synthetic
ugaauacgaguggugggaga

SEQ ID NO: 787637 - RNA, 20 nt, Artificial Sequence
  Synthetic
ugccuacaguuugugggaga

SEQ ID NO: 787638 - RNA, 20 nt, Artificial Sequence
  Synthetic
aaagugauagaauugggaga

SEQ ID NO: 787639 - RNA, 20 nt, Artificial Sequence
  Synthetic
cagaucacgagguugggaga

SEQ ID NO: 787640 - RNA, 20 nt, Artificial Sequence
  Synthetic
ucacuucaguuaaauggaga

SEQ ID NO: 787641 - RNA, 20 nt, Artificial Sequence
  Synthetic
caaccuucaaccaauggaga

SEQ ID NO: 787642 - RNA, 20 nt, Artificial Sequence
  Synthetic
acgaugagaacacauggaga

SEQ ID NO: 787643 - RNA, 20 nt, Artificial Sequence
  Synthetic
uucuauuguuaccauggaga

SEQ ID NO: 787644 - RNA, 20 nt, Artificial Sequence
  Synthetic
cauagaagguuccauggaga

SEQ ID NO: 787645 - RNA, 20 nt, Artificial Sequence
  Synthetic
uccaaauuuugcacuggaga

SEQ ID NO: 787646 - RNA, 20 nt, Artificial Sequence
  Synthetic
ccuagaaauaugacuggaga

SEQ ID NO: 787647 - RNA, 20 nt, Artificial Sequence
  Synthetic
auugauucacauacuggaga

SEQ ID NO: 787648 - RNA, 20 nt, Artificial Sequence
  Synthetic
ugcagguucauaccuggaga

SEQ ID NO: 787649 - RNA, 20 nt, Artificial Sequence
  Synthetic
uccaaggagaguccuggaga

SEQ ID NO: 787650 - RNA, 20 nt, Artificial Sequence
  Synthetic
aagcagaaggaagcuggaga

SEQ ID NO: 787651 - RNA, 20 nt, Artificial Sequence
  Synthetic
cuaaacaucuaggcuggaga

SEQ ID NO: 787652 - RNA, 20 nt, Artificial Sequence
  Synthetic
uccagcuuccuggcuggaga

SEQ ID NO: 787653 - RNA, 20 nt, Artificial Sequence
  Synthetic
uccauccucaguucuggaga

SEQ ID NO: 787654 - RNA, 20 nt, Artificial Sequence
  Synthetic
uugcacgacuucaguggaga

SEQ ID NO: 787655 - RNA, 20 nt, Artificial Sequence
  Synthetic
agagagggagagaguggaga

SEQ ID NO: 787656 - RNA, 20 nt, Artificial Sequence
  Synthetic
uuuuuguacuuuaguggaga

SEQ ID NO: 787657 - RNA, 20 nt, Artificial Sequence
  Synthetic
uuuuguaucuuuaguggaga

SEQ ID NO: 787658 - RNA, 20 nt, Artificial Sequence
  Synthetic
uuuuguauuuuuaguggaga

SEQ ID NO: 787659 - RNA, 20 nt, Artificial Sequence
  Synthetic
ugaaaccuccucuguggaga

SEQ ID NO: 787660 - RNA, 20 nt, Artificial Sequence
  Synthetic
auaauagcauucuguggaga

SEQ ID NO: 787661 - RNA, 20 nt, Artificial Sequence
  Synthetic
uggguauggggguguggaga

SEQ ID NO: 787662 - RNA, 20 nt, Artificial Sequence
  Synthetic
auuauccuuaucauuggaga

SEQ ID NO: 787663 - RNA, 20 nt, Artificial Sequence
  Synthetic
acuucaaaauugauuggaga

SEQ ID NO: 787664 - RNA, 20 nt, Artificial Sequence
  Synthetic
aggcagcacgaccuuggaga

SEQ ID NO: 787665 - RNA, 20 nt, Artificial Sequence
  Synthetic
auuucuaaauugguuggaga

SEQ ID NO: 787666 - RNA, 20 nt, Artificial Sequence
  Synthetic
cuagcuuuguauguuggaga

SEQ ID NO: 787667 - RNA, 20 nt, Artificial Sequence
  Synthetic
uauagguuauuuuuuggaga

SEQ ID NO: 787668 - RNA, 20 nt, Artificial Sequence
  Synthetic
aguucagaaucaaaaugaga

SEQ ID NO: 787669 - RNA, 20 nt, Artificial Sequence
  Synthetic
aguggacaaggcaaaugaga

SEQ ID NO: 787670 - RNA, 20 nt, Artificial Sequence
  Synthetic
cucuggauuauuaaaugaga

SEQ ID NO: 787671 - RNA, 20 nt, Artificial Sequence
  Synthetic
aaaaggagugaucaaugaga

SEQ ID NO: 787672 - RNA, 20 nt, Artificial Sequence
  Synthetic
uuccagguuucucaaugaga

SEQ ID NO: 787673 - RNA, 20 nt, Artificial Sequence
  Synthetic
cugugaaaauaagaaugaga

SEQ ID NO: 787674 - RNA, 20 nt, Artificial Sequence
  Synthetic
aaguugaaaucagaaugaga

SEQ ID NO: 787675 - RNA, 20 nt, Artificial Sequence
  Synthetic
aaggagagcucagaaugaga

SEQ ID NO: 787676 - RNA, 20 nt, Artificial Sequence
  Synthetic
ugggcuaugauagaaugaga

SEQ ID NO: 787677 - RNA, 20 nt, Artificial Sequence
  Synthetic
agcuuuuaaucugaaugaga

SEQ ID NO: 787678 - RNA, 20 nt, Artificial Sequence
  Synthetic
agaaagcaucuugaaugaga

SEQ ID NO: 787679 - RNA, 20 nt, Artificial Sequence
  Synthetic
uacuuaauucuauaaugaga

SEQ ID NO: 787680 - RNA, 20 nt, Artificial Sequence
  Synthetic
aaagacuucuuguaaugaga

SEQ ID NO: 787681 - RNA, 20 nt, Artificial Sequence
  Synthetic
ccauguuucuauuaaugaga

SEQ ID NO: 787682 - RNA, 20 nt, Artificial Sequence
  Synthetic
aacugggagggaacaugaga

SEQ ID NO: 787683 - RNA, 20 nt, Artificial Sequence
  Synthetic
uccaaagaaaccacaugaga

SEQ ID NO: 787684 - RNA, 20 nt, Artificial Sequence
  Synthetic
uucacacuauauccaugaga

SEQ ID NO: 787685 - RNA, 20 nt, Artificial Sequence
  Synthetic
uacauuauagaggcaugaga

SEQ ID NO: 787686 - RNA, 20 nt, Artificial Sequence
  Synthetic
cucucaauggccucaugaga

SEQ ID NO: 787687 - RNA, 20 nt, Artificial Sequence
  Synthetic
augcugagcuagucaugaga

SEQ ID NO: 787688 - RNA, 20 nt, Artificial Sequence
  Synthetic
cagagaaugagcagaugaga

SEQ ID NO: 787689 - RNA, 20 nt, Artificial Sequence
  Synthetic
aaacaaagcaggagaugaga

SEQ ID NO: 787690 - RNA, 20 nt, Artificial Sequence
  Synthetic
aaugaaaugaugagaugaga

SEQ ID NO: 787691 - RNA, 20 nt, Artificial Sequence
  Synthetic
auauuaagaucaggaugaga

SEQ ID NO: 787692 - RNA, 20 nt, Artificial Sequence
  Synthetic
agggaaucuaugggaugaga

SEQ ID NO: 787693 - RNA, 20 nt, Artificial Sequence
  Synthetic
ugaacugcacucauaugaga

SEQ ID NO: 787694 - RNA, 20 nt, Artificial Sequence
  Synthetic
aauaagcugaugauaugaga

SEQ ID NO: 787695 - RNA, 20 nt, Artificial Sequence
  Synthetic
ucuacugcauuuguaugaga

SEQ ID NO: 787696 - RNA, 20 nt, Artificial Sequence
  Synthetic
aaaaugaaucuauuaugaga

SEQ ID NO: 787697 - RNA, 20 nt, Artificial Sequence
  Synthetic
uuauuuauuuauuuaugaga

SEQ ID NO: 787698 - RNA, 20 nt, Artificial Sequence
  Synthetic
uauguauauauaaacugaga

SEQ ID NO: 787699 - RNA, 20 nt, Artificial Sequence
  Synthetic
uuccuacuaaugaacugaga

SEQ ID NO: 787700 - RNA, 20 nt, Artificial Sequence
  Synthetic
aaaaaaaagagguacugaga

SEQ ID NO: 787701 - RNA, 20 nt, Artificial Sequence
  Synthetic
uggaagaaaagucccugaga

SEQ ID NO: 787702 - RNA, 20 nt, Artificial Sequence
  Synthetic
uacuuuaaggggagcugaga

SEQ ID NO: 787703 - RNA, 20 nt, Artificial Sequence
  Synthetic
cugcaaacauauagcugaga

SEQ ID NO: 787704 - RNA, 20 nt, Artificial Sequence
  Synthetic
agcuacucaggaggcugaga

SEQ ID NO: 787705 - RNA, 20 nt, Artificial Sequence
  Synthetic
agcacuuugggaggcugaga

SEQ ID NO: 787706 - RNA, 20 nt, Artificial Sequence
  Synthetic
uaaccaucccagggcugaga

SEQ ID NO: 787707 - RNA, 20 nt, Artificial Sequence
  Synthetic
aaaguguagucagucugaga

SEQ ID NO: 787708 - RNA, 20 nt, Artificial Sequence
  Synthetic
aguguacaaaaauucugaga

SEQ ID NO: 787709 - RNA, 20 nt, Artificial Sequence
  Synthetic
ucugaauaauuauucugaga

SEQ ID NO: 787710 - RNA, 20 nt, Artificial Sequence
  Synthetic
uuuuuuuuuuucuucugaga

SEQ ID NO: 787711 - RNA, 20 nt, Artificial Sequence
  Synthetic
ucaauuuucuuuuucugaga

SEQ ID NO: 787712 - RNA, 20 nt, Artificial Sequence
  Synthetic
aaauuuuuuuuuuucugaga

SEQ ID NO: 787713 - RNA, 20 nt, Artificial Sequence
  Synthetic
aacaauucaaaaaagugaga

SEQ ID NO: 787714 - RNA, 20 nt, Artificial Sequence
  Synthetic
agucauggcagaaagugaga

SEQ ID NO: 787715 - RNA, 20 nt, Artificial Sequence
  Synthetic
uaaaacaaauagcagugaga

SEQ ID NO: 787716 - RNA, 20 nt, Artificial Sequence
  Synthetic
caugugagggugcagugaga

SEQ ID NO: 787717 - RNA, 20 nt, Artificial Sequence
  Synthetic
cuggaccugcuucagugaga

SEQ ID NO: 787718 - RNA, 20 nt, Artificial Sequence
  Synthetic
aaaaaaguaagagagugaga

SEQ ID NO: 787719 - RNA, 20 nt, Artificial Sequence
  Synthetic
ccauucuaacuggagugaga

SEQ ID NO: 787720 - RNA, 20 nt, Artificial Sequence
  Synthetic
cugaacaaaggauagugaga

SEQ ID NO: 787721 - RNA, 20 nt, Artificial Sequence
  Synthetic
uauuuuaucuacuagugaga

SEQ ID NO: 787722 - RNA, 20 nt, Artificial Sequence
  Synthetic
uugaaaucaggcuagugaga

SEQ ID NO: 787723 - RNA, 20 nt, Artificial Sequence
  Synthetic
agaaguagauuguagugaga

SEQ ID NO: 787724 - RNA, 20 nt, Artificial Sequence
  Synthetic
ccauucuaacuggcgugaga

SEQ ID NO: 787725 - RNA, 20 nt, Artificial Sequence
  Synthetic
caucguggcauaaggugaga

SEQ ID NO: 787726 - RNA, 20 nt, Artificial Sequence
  Synthetic
acaacaugaugcaggugaga

SEQ ID NO: 787727 - RNA, 20 nt, Artificial Sequence
  Synthetic
uugcuucugaggaggugaga

SEQ ID NO: 787728 - RNA, 20 nt, Artificial Sequence
  Synthetic
agaaggaacugggggugaga

SEQ ID NO: 787729 - RNA, 20 nt, Artificial Sequence
  Synthetic
uacauauuguuauggugaga

SEQ ID NO: 787730 - RNA, 20 nt, Artificial Sequence
  Synthetic
uuuaagagaaaaaugugaga

SEQ ID NO: 787731 - RNA, 20 nt, Artificial Sequence
  Synthetic
aaaagaaugaaaaugugaga

SEQ ID NO: 787732 - RNA, 20 nt, Artificial Sequence
  Synthetic
uuaauguuagaaaugugaga

SEQ ID NO: 787733 - RNA, 20 nt, Artificial Sequence
  Synthetic
ccuuucuaacugaugugaga

SEQ ID NO: 787734 - RNA, 20 nt, Artificial Sequence
  Synthetic
cucucgacuuuucugugaga

SEQ ID NO: 787735 - RNA, 20 nt, Artificial Sequence
  Synthetic
ccagucugacgggugugaga

SEQ ID NO: 787736 - RNA, 20 nt, Artificial Sequence
  Synthetic
ccaguaugaauggugugaga

SEQ ID NO: 787737 - RNA, 20 nt, Artificial Sequence
  Synthetic
ccauucuaacuggugugaga

SEQ ID NO: 787738 - RNA, 20 nt, Artificial Sequence
  Synthetic
uuaaacaaaugugugugaga

SEQ ID NO: 787739 - RNA, 20 nt, Artificial Sequence
  Synthetic
uuauuucauuuuuugugaga

SEQ ID NO: 787740 - RNA, 20 nt, Artificial Sequence
  Synthetic
uuuuuuuuuuuuuugugaga

SEQ ID NO: 787741 - RNA, 20 nt, Artificial Sequence
  Synthetic
auacaaaaaaaaaauugaga

SEQ ID NO: 787742 - RNA, 20 nt, Artificial Sequence
  Synthetic
uaggguauucaaaauugaga

SEQ ID NO: 787743 - RNA, 20 nt, Artificial Sequence
  Synthetic
aaugccuauaggaauugaga

SEQ ID NO: 787744 - RNA, 20 nt, Artificial Sequence
  Synthetic
uggcaaugaaaacauugaga

SEQ ID NO: 787745 - RNA, 20 nt, Artificial Sequence
  Synthetic
uagaaaagcacucauugaga

SEQ ID NO: 787746 - RNA, 20 nt, Artificial Sequence
  Synthetic
caugguauucuucauugaga

SEQ ID NO: 787747 - RNA, 20 nt, Artificial Sequence
  Synthetic
ugcauguaauuucauugaga

SEQ ID NO: 787748 - RNA, 20 nt, Artificial Sequence
  Synthetic
aaacuguagagauauugaga

SEQ ID NO: 787749 - RNA, 20 nt, Artificial Sequence
  Synthetic
aguuaaagaaauacuugaga

SEQ ID NO: 787750 - RNA, 20 nt, Artificial Sequence
  Synthetic
aaagaaaaugauacuugaga

SEQ ID NO: 787751 - RNA, 20 nt, Artificial Sequence
  Synthetic
aauagcacagguacuugaga

SEQ ID NO: 787752 - RNA, 20 nt, Artificial Sequence
  Synthetic
uuaaguuaugcaccuugaga

SEQ ID NO: 787753 - RNA, 20 nt, Artificial Sequence
  Synthetic
aucauugucaacccuugaga

SEQ ID NO: 787754 - RNA, 20 nt, Artificial Sequence
  Synthetic
caauguguguucccuugaga

SEQ ID NO: 787755 - RNA, 20 nt, Artificial Sequence
  Synthetic
aagaaauugaggccuugaga

SEQ ID NO: 787756 - RNA, 20 nt, Artificial Sequence
  Synthetic
ucccauuccaugccuugaga

SEQ ID NO: 787757 - RNA, 20 nt, Artificial Sequence
  Synthetic
auugguaugaguucuugaga

SEQ ID NO: 787758 - RNA, 20 nt, Artificial Sequence
  Synthetic
uggcugugaucaaguugaga

SEQ ID NO: 787759 - RNA, 20 nt, Artificial Sequence
  Synthetic
uuuuugguuauaaguugaga

SEQ ID NO: 787760 - RNA, 20 nt, Artificial Sequence
  Synthetic
cugagaaaagucaguugaga

SEQ ID NO: 787761 - RNA, 20 nt, Artificial Sequence
  Synthetic
uuuguuuuguuuuguugaga

SEQ ID NO: 787762 - RNA, 20 nt, Artificial Sequence
  Synthetic
uaaagcuuucaaauuugaga

SEQ ID NO: 787763 - RNA, 20 nt, Artificial Sequence
  Synthetic
cguucaaaaagaauuugaga

SEQ ID NO: 787764 - RNA, 20 nt, Artificial Sequence
  Synthetic
uuuuucugaagaauuugaga

SEQ ID NO: 787765 - RNA, 20 nt, Artificial Sequence
  Synthetic
auguauguauguauuugaga

SEQ ID NO: 787766 - RNA, 20 nt, Artificial Sequence
  Synthetic
auuauuauuauuauuugaga

SEQ ID NO: 787767 - RNA, 20 nt, Artificial Sequence
  Synthetic
aauuauuuauuuauuugaga

SEQ ID NO: 787768 - RNA, 20 nt, Artificial Sequence
  Synthetic
caccugcauaaacuuugaga

SEQ ID NO: 787769 - RNA, 20 nt, Artificial Sequence
  Synthetic
uggauauacugacuuugaga

SEQ ID NO: 787770 - RNA, 20 nt, Artificial Sequence
  Synthetic
cuaagcaggugacuuugaga

SEQ ID NO: 787771 - RNA, 20 nt, Artificial Sequence
  Synthetic
uuuuguuuguuuguuugaga

SEQ ID NO: 787772 - RNA, 20 nt, Artificial Sequence
  Synthetic
uuguuuuguuuuguuugaga

SEQ ID NO: 787773 - RNA, 20 nt, Artificial Sequence
  Synthetic
cuuuuuuguuccuuuugaga

SEQ ID NO: 787774 - RNA, 20 nt, Artificial Sequence
  Synthetic
uuuuuguuuuuguuuugaga

SEQ ID NO: 787775 - RNA, 20 nt, Artificial Sequence
  Synthetic
uuguuuuguuauuuuugaga

SEQ ID NO: 787776 - RNA, 20 nt, Artificial Sequence
  Synthetic
cuauguauuuauuuuugaga

SEQ ID NO: 787777 - RNA, 20 nt, Artificial Sequence
  Synthetic
uuauuuauuuauuuuugaga

SEQ ID NO: 787778 - RNA, 20 nt, Artificial Sequence
  Synthetic
uuuuuuuuuucuuuuugaga

SEQ ID NO: 787779 - RNA, 20 nt, Artificial Sequence
  Synthetic
uucuuuauuuguuuuugaga

SEQ ID NO: 787780 - RNA, 20 nt, Artificial Sequence
  Synthetic
uuguuuguuuguuuuugaga

SEQ ID NO: 787781 - RNA, 20 nt, Artificial Sequence
  Synthetic
uauuuauuuauuuuuugaga

SEQ ID NO: 787782 - RNA, 20 nt, Artificial Sequence
  Synthetic
uuucuuuuuauuuuuugaga

SEQ ID NO: 787783 - RNA, 20 nt, Artificial Sequence
  Synthetic
auuguuuuuauuuuuugaga

SEQ ID NO: 787784 - RNA, 20 nt, Artificial Sequence
  Synthetic
augaacuuucuuuuuugaga

SEQ ID NO: 787785 - RNA, 20 nt, Artificial Sequence
  Synthetic
uaccaugauguuuuuugaga

SEQ ID NO: 787786 - RNA, 20 nt, Artificial Sequence
  Synthetic
uuuauuuuauuuuuuugaga

SEQ ID NO: 787787 - RNA, 20 nt, Artificial Sequence
  Synthetic
uuuuuuuccuuuuuuugaga

SEQ ID NO: 787788 - RNA, 20 nt, Artificial Sequence
  Synthetic
uuuuuuuucuuuuuuugaga

SEQ ID NO: 787789 - RNA, 20 nt, Artificial Sequence
  Synthetic
uuuguuuuguuuuuuugaga

SEQ ID NO: 787790 - RNA, 20 nt, Artificial Sequence
  Synthetic
ucuuuaauuuuuuuuugaga

SEQ ID NO: 787791 - RNA, 20 nt, Artificial Sequence
  Synthetic
cuucuucuuuuuuuuugaga

SEQ ID NO: 787792 - RNA, 20 nt, Artificial Sequence
  Synthetic
auacuuuuuuuuuuuugaga

SEQ ID NO: 787793 - RNA, 20 nt, Artificial Sequence
  Synthetic
uccuuuuuuuuuuuuugaga

SEQ ID NO: 787794 - RNA, 20 nt, Artificial Sequence
  Synthetic
auuuuuuuuuuuuuuugaga

SEQ ID NO: 787795 - RNA, 20 nt, Artificial Sequence
  Synthetic
uuuuuuuuuuuuuuuugaga

SEQ ID NO: 787796 - RNA, 20 nt, Artificial Sequence
  Synthetic
uauggaucaagaaaaauaga

SEQ ID NO: 787797 - RNA, 20 nt, Artificial Sequence
  Synthetic
aagaagagacaucaaauaga

SEQ ID NO: 787798 - RNA, 20 nt, Artificial Sequence
  Synthetic
uaccagaucuuguaaauaga

SEQ ID NO: 787799 - RNA, 20 nt, Artificial Sequence
  Synthetic
aaacucauuguuuaaauaga

SEQ ID NO: 787800 - RNA, 20 nt, Artificial Sequence
  Synthetic
uaaggcauauacccaauaga

SEQ ID NO: 787801 - RNA, 20 nt, Artificial Sequence
  Synthetic
uggcauccuuuuccaauaga

SEQ ID NO: 787802 - RNA, 20 nt, Artificial Sequence
  Synthetic
aauuucuguacuucaauaga

SEQ ID NO: 787803 - RNA, 20 nt, Artificial Sequence
  Synthetic
acacaugguaguucaauaga

SEQ ID NO: 787804 - RNA, 20 nt, Artificial Sequence
  Synthetic
auaggaaacauuucaauaga

SEQ ID NO: 787805 - RNA, 20 nt, Artificial Sequence
  Synthetic
cuuaacaaaugaagaauaga

SEQ ID NO: 787806 - RNA, 20 nt, Artificial Sequence
  Synthetic
aaacauccuccuagaauaga

SEQ ID NO: 787807 - RNA, 20 nt, Artificial Sequence
  Synthetic
uuuggcuccucuagaauaga

SEQ ID NO: 787808 - RNA, 20 nt, Artificial Sequence
  Synthetic
uuguugaauaaaugaauaga

SEQ ID NO: 787809 - RNA, 20 nt, Artificial Sequence
  Synthetic
uucuuuauugcaugaauaga

SEQ ID NO: 787810 - RNA, 20 nt, Artificial Sequence
  Synthetic
cccuuugucagaugaauaga

SEQ ID NO: 787811 - RNA, 20 nt, Artificial Sequence
  Synthetic
agauagaaucucugaauaga

SEQ ID NO: 787812 - RNA, 20 nt, Artificial Sequence
  Synthetic
aguuaagacccaauaauaga

SEQ ID NO: 787813 - RNA, 20 nt, Artificial Sequence
  Synthetic
aaugcuugcucaauaauaga

SEQ ID NO: 787814 - RNA, 20 nt, Artificial Sequence
  Synthetic
aauauuaguaauauaauaga

SEQ ID NO: 787815 - RNA, 20 nt, Artificial Sequence
  Synthetic
agaaacuagggacuaauaga

SEQ ID NO: 787816 - RNA, 20 nt, Artificial Sequence
  Synthetic
aguguuuguguaguaauaga

SEQ ID NO: 787817 - RNA, 20 nt, Artificial Sequence
  Synthetic
ucugcguuuagacacauaga

SEQ ID NO: 787818 - RNA, 20 nt, Artificial Sequence
  Synthetic
uauaaccaaagccacauaga

SEQ ID NO: 787819 - RNA, 20 nt, Artificial Sequence
  Synthetic
aaagaaagcuggcacauaga

SEQ ID NO: 787820 - RNA, 20 nt, Artificial Sequence
  Synthetic
uaaaaggaaaacaucauaga

SEQ ID NO: 787821 - RNA, 20 nt, Artificial Sequence
  Synthetic
uuccugaaugacuucauaga

SEQ ID NO: 787822 - RNA, 20 nt, Artificial Sequence
  Synthetic
ccagaauaaguguucauaga

SEQ ID NO: 787823 - RNA, 20 nt, Artificial Sequence
  Synthetic
auuaaaauacauuucauaga

SEQ ID NO: 787824 - RNA, 20 nt, Artificial Sequence
  Synthetic
uguuaacuacuuuucauaga

SEQ ID NO: 787825 - RNA, 20 nt, Artificial Sequence
  Synthetic
cugguggagaaaaagauaga

SEQ ID NO: 787826 - RNA, 20 nt, Artificial Sequence
  Synthetic
uguacuuacacaaagauaga

SEQ ID NO: 787827 - RNA, 20 nt, Artificial Sequence
  Synthetic
uggauggauagaaagauaga

SEQ ID NO: 787828 - RNA, 20 nt, Artificial Sequence
  Synthetic
uagauacaacagaagauaga

SEQ ID NO: 787829 - RNA, 20 nt, Artificial Sequence
  Synthetic
caccagaaauaagagauaga

SEQ ID NO: 787830 - RNA, 20 nt, Artificial Sequence
  Synthetic
augaguaacaaggagauaga

SEQ ID NO: 787831 - RNA, 20 nt, Artificial Sequence
  Synthetic
acugaacacuuggagauaga

SEQ ID NO: 787832 - RNA, 20 nt, Artificial Sequence
  Synthetic
ugaagaguuuuggagauaga

SEQ ID NO: 787833 - RNA, 20 nt, Artificial Sequence
  Synthetic
cugaugaauaaugagauaga

SEQ ID NO: 787834 - RNA, 20 nt, Artificial Sequence
  Synthetic
cauagauagugagggauaga

SEQ ID NO: 787835 - RNA, 20 nt, Artificial Sequence
  Synthetic
ugugcuuggcacaugauaga

SEQ ID NO: 787836 - RNA, 20 nt, Artificial Sequence
  Synthetic
augacaauagugaugauaga

SEQ ID NO: 787837 - RNA, 20 nt, Artificial Sequence
  Synthetic
auuugcaaaaauaugauaga

SEQ ID NO: 787838 - RNA, 20 nt, Artificial Sequence
  Synthetic
accgcugcugagcugauaga

SEQ ID NO: 787839 - RNA, 20 nt, Artificial Sequence
  Synthetic
uauaauaacauauugauaga

SEQ ID NO: 787840 - RNA, 20 nt, Artificial Sequence
  Synthetic
ccucuucaguuguugauaga

SEQ ID NO: 787841 - RNA, 20 nt, Artificial Sequence
  Synthetic
uuucuagacauacauauaga

SEQ ID NO: 787842 - RNA, 20 nt, Artificial Sequence
  Synthetic
cacuggcuucaauauauaga

SEQ ID NO: 787843 - RNA, 20 nt, Artificial Sequence
  Synthetic
uaauuuaaaguuuauauaga

SEQ ID NO: 787844 - RNA, 20 nt, Artificial Sequence
  Synthetic
aaagaacaagagacuauaga

SEQ ID NO: 787845 - RNA, 20 nt, Artificial Sequence
  Synthetic
ugagauauucaaccuauaga

SEQ ID NO: 787846 - RNA, 20 nt, Artificial Sequence
  Synthetic
ucuuguaaacagccuauaga

SEQ ID NO: 787847 - RNA, 20 nt, Artificial Sequence
  Synthetic
aaaaaaaaaauaucuauaga

SEQ ID NO: 787848 - RNA, 20 nt, Artificial Sequence
  Synthetic
ucagauaaaauaucuauaga

SEQ ID NO: 787849 - RNA, 20 nt, Artificial Sequence
  Synthetic
caaagugccugccguauaga

SEQ ID NO: 787850 - RNA, 20 nt, Artificial Sequence
  Synthetic
ugauuaauuggagguauaga

SEQ ID NO: 787851 - RNA, 20 nt, Artificial Sequence
  Synthetic
ccagacaguagguguauaga

SEQ ID NO: 787852 - RNA, 20 nt, Artificial Sequence
  Synthetic
uauauugagaguuguauaga

SEQ ID NO: 787853 - RNA, 20 nt, Artificial Sequence
  Synthetic
uucucagcuggaauuauaga

SEQ ID NO: 787854 - RNA, 20 nt, Artificial Sequence
  Synthetic
accuaacaauuaauuauaga

SEQ ID NO: 787855 - RNA, 20 nt, Artificial Sequence
  Synthetic
uagaagcuugucauuauaga

SEQ ID NO: 787856 - RNA, 20 nt, Artificial Sequence
  Synthetic
aggcuaaccaaaguuauaga

SEQ ID NO: 787857 - RNA, 20 nt, Artificial Sequence
  Synthetic
cauauaauguuaguuauaga

SEQ ID NO: 787858 - RNA, 20 nt, Artificial Sequence
  Synthetic
aggugccugugauuuauaga

SEQ ID NO: 787859 - RNA, 20 nt, Artificial Sequence
  Synthetic
agagaacagaauuuuauaga

SEQ ID NO: 787860 - RNA, 20 nt, Artificial Sequence
  Synthetic
uaaaauaaaaugaaacuaga

SEQ ID NO: 787861 - RNA, 20 nt, Artificial Sequence
  Synthetic
ucaauaauggaagcacuaga

SEQ ID NO: 787862 - RNA, 20 nt, Artificial Sequence
  Synthetic
uccauuuuuuuaagacuaga

SEQ ID NO: 787863 - RNA, 20 nt, Artificial Sequence
  Synthetic
aaagugagagggggacuaga

SEQ ID NO: 787864 - RNA, 20 nt, Artificial Sequence
  Synthetic
uauuuaauuuggugacuaga

SEQ ID NO: 787865 - RNA, 20 nt, Artificial Sequence
  Synthetic
agacccuggggacuacuaga

SEQ ID NO: 787866 - RNA, 20 nt, Artificial Sequence
  Synthetic
agacauuggggacuacuaga

SEQ ID NO: 787867 - RNA, 20 nt, Artificial Sequence
  Synthetic
acuccuaucaaaaaccuaga

SEQ ID NO: 787868 - RNA, 20 nt, Artificial Sequence
  Synthetic
uguacuuacacaaaccuaga

SEQ ID NO: 787869 - RNA, 20 nt, Artificial Sequence
  Synthetic
aaucuuucuuagaaccuaga

SEQ ID NO: 787870 - RNA, 20 nt, Artificial Sequence
  Synthetic
aucuucuauauggaccuaga

SEQ ID NO: 787871 - RNA, 20 nt, Artificial Sequence
  Synthetic
ugugcaucaaauuaccuaga

SEQ ID NO: 787872 - RNA, 20 nt, Artificial Sequence
  Synthetic
aggcacccaagagcccuaga

SEQ ID NO: 787873 - RNA, 20 nt, Artificial Sequence
  Synthetic
aaaugaacucaaagccuaga

SEQ ID NO: 787874 - RNA, 20 nt, Artificial Sequence
  Synthetic
ccugagaccagcagccuaga

SEQ ID NO: 787875 - RNA, 20 nt, Artificial Sequence
  Synthetic
cuccagcugggcagccuaga

SEQ ID NO: 787876 - RNA, 20 nt, Artificial Sequence
  Synthetic
acucagguucuaugccuaga

SEQ ID NO: 787877 - RNA, 20 nt, Artificial Sequence
  Synthetic
cuagcuaugaaaguccuaga

SEQ ID NO: 787878 - RNA, 20 nt, Artificial Sequence
  Synthetic
aacagguggggauuccuaga

SEQ ID NO: 787879 - RNA, 20 nt, Artificial Sequence
  Synthetic
acuucaaauaacuuccuaga

SEQ ID NO: 787880 - RNA, 20 nt, Artificial Sequence
  Synthetic
acaguggaagaaaagcuaga

SEQ ID NO: 787881 - RNA, 20 nt, Artificial Sequence
  Synthetic
uguggaacagucaagcuaga

SEQ ID NO: 787882 - RNA, 20 nt, Artificial Sequence
  Synthetic
cuuuuaaaguggaagcuaga

SEQ ID NO: 787883 - RNA, 20 nt, Artificial Sequence
  Synthetic
auuuaugaccuacagcuaga

SEQ ID NO: 787884 - RNA, 20 nt, Artificial Sequence
  Synthetic
cuuccuuuccugcagcuaga

SEQ ID NO: 787885 - RNA, 20 nt, Artificial Sequence
  Synthetic
auguuaauacaugagcuaga

SEQ ID NO: 787886 - RNA, 20 nt, Artificial Sequence
  Synthetic
aaagcuucagcugagcuaga

SEQ ID NO: 787887 - RNA, 20 nt, Artificial Sequence
  Synthetic
agaaguuucaaauggcuaga

SEQ ID NO: 787888 - RNA, 20 nt, Artificial Sequence
  Synthetic
uguucucuuggauugcuaga

SEQ ID NO: 787889 - RNA, 20 nt, Artificial Sequence
  Synthetic
aagacuacuuauaaucuaga

SEQ ID NO: 787890 - RNA, 20 nt, Artificial Sequence
  Synthetic
ucaaaagccaauagucuaga

SEQ ID NO: 787891 - RNA, 20 nt, Artificial Sequence
  Synthetic
aaauacacccugcuucuaga

SEQ ID NO: 787892 - RNA, 20 nt, Artificial Sequence
  Synthetic
aaauaauaucuauuucuaga

SEQ ID NO: 787893 - RNA, 20 nt, Artificial Sequence
  Synthetic
uauucaccaagaaaaguaga

SEQ ID NO: 787894 - RNA, 20 nt, Artificial Sequence
  Synthetic
uuuccauucugaaaaguaga

SEQ ID NO: 787895 - RNA, 20 nt, Artificial Sequence
  Synthetic
aagacuuacauaaaaguaga

SEQ ID NO: 787896 - RNA, 20 nt, Artificial Sequence
  Synthetic
agaugugagcauaaaguaga

SEQ ID NO: 787897 - RNA, 20 nt, Artificial Sequence
  Synthetic
ugcuuaagggauaaaguaga

SEQ ID NO: 787898 - RNA, 20 nt, Artificial Sequence
  Synthetic
cucucagcaucccaaguaga

SEQ ID NO: 787899 - RNA, 20 nt, Artificial Sequence
  Synthetic
cccugaagcaaagaaguaga

SEQ ID NO: 787900 - RNA, 20 nt, Artificial Sequence
  Synthetic
aaaugccuuguggaaguaga

SEQ ID NO: 787901 - RNA, 20 nt, Artificial Sequence
  Synthetic
auggaagcaacagcaguaga

SEQ ID NO: 787902 - RNA, 20 nt, Artificial Sequence
  Synthetic
accuucagaauggcaguaga

SEQ ID NO: 787903 - RNA, 20 nt, Artificial Sequence
  Synthetic
uucacauuugaaucaguaga

SEQ ID NO: 787904 - RNA, 20 nt, Artificial Sequence
  Synthetic
uucuaaaaccacagaguaga

SEQ ID NO: 787905 - RNA, 20 nt, Artificial Sequence
  Synthetic
acaauacaccacagaguaga

SEQ ID NO: 787906 - RNA, 20 nt, Artificial Sequence
  Synthetic
ucauggacauagagaguaga

SEQ ID NO: 787907 - RNA, 20 nt, Artificial Sequence
  Synthetic
aaccaauaagggagaguaga

SEQ ID NO: 787908 - RNA, 20 nt, Artificial Sequence
  Synthetic
acuccaaaaaagggaguaga

SEQ ID NO: 787909 - RNA, 20 nt, Artificial Sequence
  Synthetic
uacaauuuuugaauaguaga

SEQ ID NO: 787910 - RNA, 20 nt, Artificial Sequence
  Synthetic
aaacuuacaaucauaguaga

SEQ ID NO: 787911 - RNA, 20 nt, Artificial Sequence
  Synthetic
aucauaaaaauuauaguaga

SEQ ID NO: 787912 - RNA, 20 nt, Artificial Sequence
  Synthetic
ccuuaggauuaaguaguaga

SEQ ID NO: 787913 - RNA, 20 nt, Artificial Sequence
  Synthetic
uuccaaacugucuuaguaga

SEQ ID NO: 787914 - RNA, 20 nt, Artificial Sequence
  Synthetic
uagaugccaauuaacguaga

SEQ ID NO: 787915 - RNA, 20 nt, Artificial Sequence
  Synthetic
agaacacauggacacguaga

SEQ ID NO: 787916 - RNA, 20 nt, Artificial Sequence
  Synthetic
uuagcuauuuucaagguaga

SEQ ID NO: 787917 - RNA, 20 nt, Artificial Sequence
  Synthetic
uucacaaggcagaagguaga

SEQ ID NO: 787918 - RNA, 20 nt, Artificial Sequence
  Synthetic
cuucuaaauaguaagguaga

SEQ ID NO: 787919 - RNA, 20 nt, Artificial Sequence
  Synthetic
caaagacacaacgagguaga

SEQ ID NO: 787920 - RNA, 20 nt, Artificial Sequence
  Synthetic
caucagcucugggagguaga

SEQ ID NO: 787921 - RNA, 20 nt, Artificial Sequence
  Synthetic
acucgggagccugagguaga

SEQ ID NO: 787922 - RNA, 20 nt, Artificial Sequence
  Synthetic
aacucuagagaagggguaga

SEQ ID NO: 787923 - RNA, 20 nt, Artificial Sequence
  Synthetic
uuauuucccaaauggguaga

SEQ ID NO: 787924 - RNA, 20 nt, Artificial Sequence
  Synthetic
agcuuaaauaauuggguaga

SEQ ID NO: 787925 - RNA, 20 nt, Artificial Sequence
  Synthetic
aggaugggaaguuggguaga

SEQ ID NO: 787926 - RNA, 20 nt, Artificial Sequence
  Synthetic
agaauugagaaaaugguaga

SEQ ID NO: 787927 - RNA, 20 nt, Artificial Sequence
  Synthetic
caaaauagccaaaugguaga

SEQ ID NO: 787928 - RNA, 20 nt, Artificial Sequence
  Synthetic
cuaauaucagagaugguaga

SEQ ID NO: 787929 - RNA, 20 nt, Artificial Sequence
  Synthetic
aaaguaguuuauaugguaga

SEQ ID NO: 787930 - RNA, 20 nt, Artificial Sequence
  Synthetic
aaagguuggaaucugguaga

SEQ ID NO: 787931 - RNA, 20 nt, Artificial Sequence
  Synthetic
agcuggagaucagugguaga

SEQ ID NO: 787932 - RNA, 20 nt, Artificial Sequence
  Synthetic
cuuagcuuuggggugguaga

SEQ ID NO: 787933 - RNA, 20 nt, Artificial Sequence
  Synthetic
auuucaaaaauaaauguaga

SEQ ID NO: 787934 - RNA, 20 nt, Artificial Sequence
  Synthetic
aggucaaaaacuaauguaga

SEQ ID NO: 787935 - RNA, 20 nt, Artificial Sequence
  Synthetic
caaugagaucgugauguaga

SEQ ID NO: 787936 - RNA, 20 nt, Artificial Sequence
  Synthetic
aauggagauuuguauguaga

SEQ ID NO: 787937 - RNA, 20 nt, Artificial Sequence
  Synthetic
uuacuuuauucuccuguaga

SEQ ID NO: 787938 - RNA, 20 nt, Artificial Sequence
  Synthetic
aauuacacuguaucuguaga

SEQ ID NO: 787939 - RNA, 20 nt, Artificial Sequence
  Synthetic
caguuucaguuuucuguaga

SEQ ID NO: 787940 - RNA, 20 nt, Artificial Sequence
  Synthetic
uuuuguauuuuuaguguaga

SEQ ID NO: 787941 - RNA, 20 nt, Artificial Sequence
  Synthetic
aucgagcuuuuauguguaga

SEQ ID NO: 787942 - RNA, 20 nt, Artificial Sequence
  Synthetic
cauucaaagcaguguguaga

SEQ ID NO: 787943 - RNA, 20 nt, Artificial Sequence
  Synthetic
aauaaaaguauguguguaga

SEQ ID NO: 787944 - RNA, 20 nt, Artificial Sequence
  Synthetic
aaagccugauauauuguaga

SEQ ID NO: 787945 - RNA, 20 nt, Artificial Sequence
  Synthetic
agcaaaaugaagcuuguaga

SEQ ID NO: 787946 - RNA, 20 nt, Artificial Sequence
  Synthetic
uauauucaucuucuuguaga

SEQ ID NO: 787947 - RNA, 20 nt, Artificial Sequence
  Synthetic
aaaauaaacaugguuguaga

SEQ ID NO: 787948 - RNA, 20 nt, Artificial Sequence
  Synthetic
aaaggaaaagcauuuguaga

SEQ ID NO: 787949 - RNA, 20 nt, Artificial Sequence
  Synthetic
cuaaaaauacaaaaauuaga

SEQ ID NO: 787950 - RNA, 20 nt, Artificial Sequence
  Synthetic
cacagguauuugaaauuaga

SEQ ID NO: 787951 - RNA, 20 nt, Artificial Sequence
  Synthetic
cccaaguaaacuaaauuaga

SEQ ID NO: 787952 - RNA, 20 nt, Artificial Sequence
  Synthetic
aaaauagguuuacaauuaga

SEQ ID NO: 787953 - RNA, 20 nt, Artificial Sequence
  Synthetic
cagggacaaagucaauuaga

SEQ ID NO: 787954 - RNA, 20 nt, Artificial Sequence
  Synthetic
ccugugaguagagaauuaga

SEQ ID NO: 787955 - RNA, 20 nt, Artificial Sequence
  Synthetic
cuucaaugcacugaauuaga

SEQ ID NO: 787956 - RNA, 20 nt, Artificial Sequence
  Synthetic
uuaaugugucuauaauuaga

SEQ ID NO: 787957 - RNA, 20 nt, Artificial Sequence
  Synthetic
uauuuuauguuuccauuaga

SEQ ID NO: 787958 - RNA, 20 nt, Artificial Sequence
  Synthetic
acacaaggaucugcauuaga

SEQ ID NO: 787959 - RNA, 20 nt, Artificial Sequence
  Synthetic
cacaaucauaauucauuaga

SEQ ID NO: 787960 - RNA, 20 nt, Artificial Sequence
  Synthetic
uuaaaaaccuguggauuaga

SEQ ID NO: 787961 - RNA, 20 nt, Artificial Sequence
  Synthetic
ucaggaaagacaugauuaga

SEQ ID NO: 787962 - RNA, 20 nt, Artificial Sequence
  Synthetic
agauugcaguaaauauuaga

SEQ ID NO: 787963 - RNA, 20 nt, Artificial Sequence
  Synthetic
accccacugucaauauuaga

SEQ ID NO: 787964 - RNA, 20 nt, Artificial Sequence
  Synthetic
agcguggaaaauauauuaga

SEQ ID NO: 787965 - RNA, 20 nt, Artificial Sequence
  Synthetic
uaauauuguauaguauuaga

SEQ ID NO: 787966 - RNA, 20 nt, Artificial Sequence
  Synthetic
cucaaggugaugguauuaga

SEQ ID NO: 787967 - RNA, 20 nt, Artificial Sequence
  Synthetic
auauuuaauaguuuauuaga

SEQ ID NO: 787968 - RNA, 20 nt, Artificial Sequence
  Synthetic
accuaggaauacaacuuaga

SEQ ID NO: 787969 - RNA, 20 nt, Artificial Sequence
  Synthetic
cugauuucuaagaacuuaga

SEQ ID NO: 787970 - RNA, 20 nt, Artificial Sequence
  Synthetic
aggcaggaccaagacuuaga

SEQ ID NO: 787971 - RNA, 20 nt, Artificial Sequence
  Synthetic
caagguaguuauuacuuaga

SEQ ID NO: 787972 - RNA, 20 nt, Artificial Sequence
  Synthetic
aaaaaaaugacuuacuuaga

SEQ ID NO: 787973 - RNA, 20 nt, Artificial Sequence
  Synthetic
ccuccccuacaucccuuaga

SEQ ID NO: 787974 - RNA, 20 nt, Artificial Sequence
  Synthetic
uuuucuaccccugccuuaga

SEQ ID NO: 787975 - RNA, 20 nt, Artificial Sequence
  Synthetic
cuaaaaacagaaugcuuaga

SEQ ID NO: 787976 - RNA, 20 nt, Artificial Sequence
  Synthetic
cagcagugcccccucuuaga

SEQ ID NO: 787977 - RNA, 20 nt, Artificial Sequence
  Synthetic
ugcccaauugagcucuuaga

SEQ ID NO: 787978 - RNA, 20 nt, Artificial Sequence
  Synthetic
agauuuccaugaaaguuaga

SEQ ID NO: 787979 - RNA, 20 nt, Artificial Sequence
  Synthetic
cacuccugagggaaguuaga

SEQ ID NO: 787980 - RNA, 20 nt, Artificial Sequence
  Synthetic
agucaguaagaccaguuaga

SEQ ID NO: 787981 - RNA, 20 nt, Artificial Sequence
  Synthetic
uggguagguggauaguuaga

SEQ ID NO: 787982 - RNA, 20 nt, Artificial Sequence
  Synthetic
acuccugauuuuuaguuaga

SEQ ID NO: 787983 - RNA, 20 nt, Artificial Sequence
  Synthetic
uugauuuucaaaagguuaga

SEQ ID NO: 787984 - RNA, 20 nt, Artificial Sequence
  Synthetic
cuuaggugaggaauguuaga

SEQ ID NO: 787985 - RNA, 20 nt, Artificial Sequence
  Synthetic
caacgcaagcagauguuaga

SEQ ID NO: 787986 - RNA, 20 nt, Artificial Sequence
  Synthetic
aagugcuuugcacuguuaga

SEQ ID NO: 787987 - RNA, 20 nt, Artificial Sequence
  Synthetic
cuuaaaaaccuccuguuaga

SEQ ID NO: 787988 - RNA, 20 nt, Artificial Sequence
  Synthetic
uucuaaaaauagguguuaga

SEQ ID NO: 787989 - RNA, 20 nt, Artificial Sequence
  Synthetic
uuuauuucauugguguuaga

SEQ ID NO: 787990 - RNA, 20 nt, Artificial Sequence
  Synthetic
uaguugacaauaaauuuaga

SEQ ID NO: 787991 - RNA, 20 nt, Artificial Sequence
  Synthetic
aucaacaaauagaauuuaga

SEQ ID NO: 787992 - RNA, 20 nt, Artificial Sequence
  Synthetic
cacauagaauauaauuuaga

SEQ ID NO: 787993 - RNA, 20 nt, Artificial Sequence
  Synthetic
acauaaguuuaccauuuaga

SEQ ID NO: 787994 - RNA, 20 nt, Artificial Sequence
  Synthetic
agaguagcagagcauuuaga

SEQ ID NO: 787995 - RNA, 20 nt, Artificial Sequence
  Synthetic
uuuucugguuaagauuuaga

SEQ ID NO: 787996 - RNA, 20 nt, Artificial Sequence
  Synthetic
ugaaaguucugauauuuaga

SEQ ID NO: 787997 - RNA, 20 nt, Artificial Sequence
  Synthetic
cagcuaaagcaguauuuaga

SEQ ID NO: 787998 - RNA, 20 nt, Artificial Sequence
  Synthetic
aaaauaaauauuuauuuaga

SEQ ID NO: 787999 - RNA, 20 nt, Artificial Sequence
  Synthetic
uauacaaaguugacuuuaga

SEQ ID NO: 788000 - RNA, 20 nt, Artificial Sequence
  Synthetic
aguuucaugcauacuuuaga

SEQ ID NO: 788001 - RNA, 20 nt, Artificial Sequence
  Synthetic
uguaaauauaguacuuuaga

SEQ ID NO: 788002 - RNA, 20 nt, Artificial Sequence
  Synthetic
caauaaacuuuagcuuuaga

SEQ ID NO: 788003 - RNA, 20 nt, Artificial Sequence
  Synthetic
ucacagucacacucuuuaga

SEQ ID NO: 788004 - RNA, 20 nt, Artificial Sequence
  Synthetic
aaaaauuccugaaguuuaga

SEQ ID NO: 788005 - RNA, 20 nt, Artificial Sequence
  Synthetic
uaaggagccugagguuuaga

SEQ ID NO: 788006 - RNA, 20 nt, Artificial Sequence
  Synthetic
ccaaaacguaaugguuuaga

SEQ ID NO: 788007 - RNA, 20 nt, Artificial Sequence
  Synthetic
cugaacucuucugguuuaga

SEQ ID NO: 788008 - RNA, 20 nt, Artificial Sequence
  Synthetic
uucauggucaaacuuuuaga

SEQ ID NO: 788009 - RNA, 20 nt, Artificial Sequence
  Synthetic
cuuccuuaauaacuuuuaga

SEQ ID NO: 788010 - RNA, 20 nt, Artificial Sequence
  Synthetic
ugaaauaaacuucuuuuaga

SEQ ID NO: 788011 - RNA, 20 nt, Artificial Sequence
  Synthetic
uugauuggaauaguuuuaga

SEQ ID NO: 788012 - RNA, 20 nt, Artificial Sequence
  Synthetic
uugcuuggaauaguuuuaga

SEQ ID NO: 788013 - RNA, 20 nt, Artificial Sequence
  Synthetic
agucuauuucuaguuuuaga

SEQ ID NO: 788014 - RNA, 20 nt, Artificial Sequence
  Synthetic
uuuuguucuuauguuuuaga

SEQ ID NO: 788015 - RNA, 20 nt, Artificial Sequence
  Synthetic
aagacgcuagguguuuuaga

SEQ ID NO: 788016 - RNA, 20 nt, Artificial Sequence
  Synthetic
acuauggcuuccuuuuuaga

SEQ ID NO: 788017 - RNA, 20 nt, Artificial Sequence
  Synthetic
auucaaagauucuuuuuaga

SEQ ID NO: 788018 - RNA, 20 nt, Artificial Sequence
  Synthetic
uuuucuuuuuuuuuuuuaga

SEQ ID NO: 788019 - RNA, 20 nt, Artificial Sequence
  Synthetic
uuuuuuuuuuuuuuuuuaga

SEQ ID NO: 788020 - RNA, 20 nt, Artificial Sequence
  Synthetic
augaacaugggaagaaacga

SEQ ID NO: 788021 - RNA, 20 nt, Artificial Sequence
  Synthetic
uuuacaucuguuagaaacga

SEQ ID NO: 788022 - RNA, 20 nt, Artificial Sequence
  Synthetic
agaagucgagaaguaaacga

SEQ ID NO: 788023 - RNA, 20 nt, Artificial Sequence
  Synthetic
uuuccuucauuugccaacga

SEQ ID NO: 788024 - RNA, 20 nt, Artificial Sequence
  Synthetic
uccacuauuaucuucaacga

SEQ ID NO: 788025 - RNA, 20 nt, Artificial Sequence
  Synthetic
aguucuaagagacagaacga

SEQ ID NO: 788026 - RNA, 20 nt, Artificial Sequence
  Synthetic
caauaguuugcugagaacga

SEQ ID NO: 788027 - RNA, 20 nt, Artificial Sequence
  Synthetic
aaagacaauuuguugaacga

SEQ ID NO: 788028 - RNA, 20 nt, Artificial Sequence
  Synthetic
uggaggaaaagcaauaacga

SEQ ID NO: 788029 - RNA, 20 nt, Artificial Sequence
  Synthetic
uucaggcaauuggaacacga

SEQ ID NO: 788030 - RNA, 20 nt, Artificial Sequence
  Synthetic
auugugaacuguccacacga

SEQ ID NO: 788031 - RNA, 20 nt, Artificial Sequence
  Synthetic
uggucagaaaagauacacga

SEQ ID NO: 788032 - RNA, 20 nt, Artificial Sequence
  Synthetic
uguuuucuuuugauacacga

SEQ ID NO: 788033 - RNA, 20 nt, Artificial Sequence
  Synthetic
aaaacugucuuuguacacga

SEQ ID NO: 788034 - RNA, 20 nt, Artificial Sequence
  Synthetic
agaaucauuugagcccacga

SEQ ID NO: 788035 - RNA, 20 nt, Artificial Sequence
  Synthetic
cuucucaccuuaugccacga

SEQ ID NO: 788036 - RNA, 20 nt, Artificial Sequence
  Synthetic
auuaaaacacaggugcacga

SEQ ID NO: 788037 - RNA, 20 nt, Artificial Sequence
  Synthetic
aggaugcugacaacucacga

SEQ ID NO: 788038 - RNA, 20 nt, Artificial Sequence
  Synthetic
auggauucaaaaccucacga

SEQ ID NO: 788039 - RNA, 20 nt, Artificial Sequence
  Synthetic
aguuagaugaagaaagacga

SEQ ID NO: 788040 - RNA, 20 nt, Artificial Sequence
  Synthetic
aagaagaaccagaaagacga

SEQ ID NO: 788041 - RNA, 20 nt, Artificial Sequence
  Synthetic
ucaggaagagugacagacga

SEQ ID NO: 788042 - RNA, 20 nt, Artificial Sequence
  Synthetic
uuaauuccaaugagagacga

SEQ ID NO: 788043 - RNA, 20 nt, Artificial Sequence
  Synthetic
aagauuuuggguugagacga

SEQ ID NO: 788044 - RNA, 20 nt, Artificial Sequence
  Synthetic
ucauucuuuuuuaaugacga

SEQ ID NO: 788045 - RNA, 20 nt, Artificial Sequence
  Synthetic
auucuagaauauacauacga

SEQ ID NO: 788046 - RNA, 20 nt, Artificial Sequence
  Synthetic
uuuaaaacaaaaagauacga

SEQ ID NO: 788047 - RNA, 20 nt, Artificial Sequence
  Synthetic
ccucuguacuaaauauacga

SEQ ID NO: 788048 - RNA, 20 nt, Artificial Sequence
  Synthetic
aaaggaagcacguauuacga

SEQ ID NO: 788049 - RNA, 20 nt, Artificial Sequence
  Synthetic
auuuauuuauuuauuuacga

SEQ ID NO: 788050 - RNA, 20 nt, Artificial Sequence
  Synthetic
uaggauuucagaguuuacga

SEQ ID NO: 788051 - RNA, 20 nt, Artificial Sequence
  Synthetic
ccaaacagcagauaaaccga

SEQ ID NO: 788052 - RNA, 20 nt, Artificial Sequence
  Synthetic
agcauaaaaaaggcaaccga

SEQ ID NO: 788053 - RNA, 20 nt, Artificial Sequence
  Synthetic
uuaaauauuuucuccaccga

SEQ ID NO: 788054 - RNA, 20 nt, Artificial Sequence
  Synthetic
cuggaggaaagaggcaccga

SEQ ID NO: 788055 - RNA, 20 nt, Artificial Sequence
  Synthetic
auugccauguuagagaccga

SEQ ID NO: 788056 - RNA, 20 nt, Artificial Sequence
  Synthetic
ugacugagaugcuggaccga

SEQ ID NO: 788057 - RNA, 20 nt, Artificial Sequence
  Synthetic
acauuuggaagaaauaccga

SEQ ID NO: 788058 - RNA, 20 nt, Artificial Sequence
  Synthetic
cugguggcguaggcacccga

SEQ ID NO: 788059 - RNA, 20 nt, Artificial Sequence
  Synthetic
aagaaaagcuugggacccga

SEQ ID NO: 788060 - RNA, 20 nt, Artificial Sequence
  Synthetic
aaggugccuggcgugcccga

SEQ ID NO: 788061 - RNA, 20 nt, Artificial Sequence
  Synthetic
uauaaguugacccuucccga

SEQ ID NO: 788062 - RNA, 20 nt, Artificial Sequence
  Synthetic
cuugcacaggaaugggccga

SEQ ID NO: 788063 - RNA, 20 nt, Artificial Sequence
  Synthetic
acagcugggaugcucuccga

SEQ ID NO: 788064 - RNA, 20 nt, Artificial Sequence
  Synthetic
uuuuacuuguuccaguccga

SEQ ID NO: 788065 - RNA, 20 nt, Artificial Sequence
  Synthetic
aaauacauauuggauuccga

SEQ ID NO: 788066 - RNA, 20 nt, Artificial Sequence
  Synthetic
auauagaaauaaagaagcga

SEQ ID NO: 788067 - RNA, 20 nt, Artificial Sequence
  Synthetic
acuuugggaggcugaagcga

SEQ ID NO: 788068 - RNA, 20 nt, Artificial Sequence
  Synthetic
uggaacauugaguacagcga

SEQ ID NO: 788069 - RNA, 20 nt, Artificial Sequence
  Synthetic
aucagaaugagaaggagcga

SEQ ID NO: 788070 - RNA, 20 nt, Artificial Sequence
  Synthetic
cugaagcauuuggggagcga

SEQ ID NO: 788071 - RNA, 20 nt, Artificial Sequence
  Synthetic
ccccaucaaaaagugagcga

SEQ ID NO: 788072 - RNA, 20 nt, Artificial Sequence
  Synthetic
cucagccaugaaccuagcga

SEQ ID NO: 788073 - RNA, 20 nt, Artificial Sequence
  Synthetic
accuauaaucugaaaggcga

SEQ ID NO: 788074 - RNA, 20 nt, Artificial Sequence
  Synthetic
acaaucauggcagaaggcga

SEQ ID NO: 788075 - RNA, 20 nt, Artificial Sequence
  Synthetic
uucucccauuuuacaggcga

SEQ ID NO: 788076 - RNA, 20 nt, Artificial Sequence
  Synthetic
agagggugggaugggggcga

SEQ ID NO: 788077 - RNA, 20 nt, Artificial Sequence
  Synthetic
ccugucgggggguggggcga

SEQ ID NO: 788078 - RNA, 20 nt, Artificial Sequence
  Synthetic
cugcgcuccaaccugggcga

SEQ ID NO: 788079 - RNA, 20 nt, Artificial Sequence
  Synthetic
aguaaccaggggcugggcga

SEQ ID NO: 788080 - RNA, 20 nt, Artificial Sequence
  Synthetic
ccccaucaaaaagugggcga

SEQ ID NO: 788081 - RNA, 20 nt, Artificial Sequence
  Synthetic
ccccauccaaaagugggcga

SEQ ID NO: 788082 - RNA, 20 nt, Artificial Sequence
  Synthetic
uaugcucacuaacauggcga

SEQ ID NO: 788083 - RNA, 20 nt, Artificial Sequence
  Synthetic
aagcaaaagaagcauggcga

SEQ ID NO: 788084 - RNA, 20 nt, Artificial Sequence
  Synthetic
aaggugucagccucuggcga

SEQ ID NO: 788085 - RNA, 20 nt, Artificial Sequence
  Synthetic
uauagccuucaugguggcga

SEQ ID NO: 788086 - RNA, 20 nt, Artificial Sequence
  Synthetic
ccuuuuccuuggcuuggcga

SEQ ID NO: 788087 - RNA, 20 nt, Artificial Sequence
  Synthetic
auuaugggucaagaaugcga

SEQ ID NO: 788088 - RNA, 20 nt, Artificial Sequence
  Synthetic
auggucacaccuaacugcga

SEQ ID NO: 788089 - RNA, 20 nt, Artificial Sequence
  Synthetic
ccauggcuuuauagcugcga

SEQ ID NO: 788090 - RNA, 20 nt, Artificial Sequence
  Synthetic
uacauuuauagcaaaaucga

SEQ ID NO: 788091 - RNA, 20 nt, Artificial Sequence
  Synthetic
aaugaauaaauauuaaucga

SEQ ID NO: 788092 - RNA, 20 nt, Artificial Sequence
  Synthetic
uacauuuuuuuuccuaucga

SEQ ID NO: 788093 - RNA, 20 nt, Artificial Sequence
  Synthetic
uuuacuuaucuaucuaucga

SEQ ID NO: 788094 - RNA, 20 nt, Artificial Sequence
  Synthetic
auugaacugguaucuaucga

SEQ ID NO: 788095 - RNA, 20 nt, Artificial Sequence
  Synthetic
uggcuuucuucauaccucga

SEQ ID NO: 788096 - RNA, 20 nt, Artificial Sequence
  Synthetic
aaaagaagaaccccgcucga

SEQ ID NO: 788097 - RNA, 20 nt, Artificial Sequence
  Synthetic
cucaucuguggguggcucga

SEQ ID NO: 788098 - RNA, 20 nt, Artificial Sequence
  Synthetic
aaacaaagcugaagucucga

SEQ ID NO: 788099 - RNA, 20 nt, Artificial Sequence
  Synthetic
agagaagccuacagucucga

SEQ ID NO: 788100 - RNA, 20 nt, Artificial Sequence
  Synthetic
caguuucuuccuagucucga

SEQ ID NO: 788101 - RNA, 20 nt, Artificial Sequence
  Synthetic
auuugugagcauaaagucga

SEQ ID NO: 788102 - RNA, 20 nt, Artificial Sequence
  Synthetic
augagaggagagugagucga

SEQ ID NO: 788103 - RNA, 20 nt, Artificial Sequence
  Synthetic
aagaucuuugugugagucga

SEQ ID NO: 788104 - RNA, 20 nt, Artificial Sequence
  Synthetic
caguuucuucauagggucga

SEQ ID NO: 788105 - RNA, 20 nt, Artificial Sequence
  Synthetic
uuuauccauucauuggucga

SEQ ID NO: 788106 - RNA, 20 nt, Artificial Sequence
  Synthetic
aauauccagaaaaaugucga

SEQ ID NO: 788107 - RNA, 20 nt, Artificial Sequence
  Synthetic
cacacaccggggccugucga

SEQ ID NO: 788108 - RNA, 20 nt, Artificial Sequence
  Synthetic
auuaauuuuuauggugucga

SEQ ID NO: 788109 - RNA, 20 nt, Artificial Sequence
  Synthetic
aaaauacguuaaaaauucga

SEQ ID NO: 788110 - RNA, 20 nt, Artificial Sequence
  Synthetic
aauuauuagaaugaauucga

SEQ ID NO: 788111 - RNA, 20 nt, Artificial Sequence
  Synthetic
cuggggauuaacaucuucga

SEQ ID NO: 788112 - RNA, 20 nt, Artificial Sequence
  Synthetic
cuugauaaguggaaguucga

SEQ ID NO: 788113 - RNA, 20 nt, Artificial Sequence
  Synthetic
cuuuccugcagcauguucga

SEQ ID NO: 788114 - RNA, 20 nt, Artificial Sequence
  Synthetic
uaaaaaaaucaguuguucga

SEQ ID NO: 788115 - RNA, 20 nt, Artificial Sequence
  Synthetic
cauaaauaggcaauuuucga

SEQ ID NO: 788116 - RNA, 20 nt, Artificial Sequence
  Synthetic
uuaaaaaaaaaaaaaaagga

SEQ ID NO: 788117 - RNA, 20 nt, Artificial Sequence
  Synthetic
aaggagaaaaaaaaaaagga

SEQ ID NO: 788118 - RNA, 20 nt, Artificial Sequence
  Synthetic
cagaaauuaaaaaaaaagga

SEQ ID NO: 788119 - RNA, 20 nt, Artificial Sequence
  Synthetic
aaagaagguccaaaaaagga

SEQ ID NO: 788120 - RNA, 20 nt, Artificial Sequence
  Synthetic
aauguuucccccaaaaagga

SEQ ID NO: 788121 - RNA, 20 nt, Artificial Sequence
  Synthetic
aaagugagagagaaaaagga

SEQ ID NO: 788122 - RNA, 20 nt, Artificial Sequence
  Synthetic
uacauaaaaaggaaaaagga

SEQ ID NO: 788123 - RNA, 20 nt, Artificial Sequence
  Synthetic
acauacucaaaagaaaagga

SEQ ID NO: 788124 - RNA, 20 nt, Artificial Sequence
  Synthetic
uaaaugcucuaagaaaagga

SEQ ID NO: 788125 - RNA, 20 nt, Artificial Sequence
  Synthetic
uccuaaagguaagaaaagga

SEQ ID NO: 788126 - RNA, 20 nt, Artificial Sequence
  Synthetic
acugaagacacagaaaagga

SEQ ID NO: 788127 - RNA, 20 nt, Artificial Sequence
  Synthetic
cugaaguccccagaaaagga

SEQ ID NO: 788128 - RNA, 20 nt, Artificial Sequence
  Synthetic
cacuacauuggggaaaagga

SEQ ID NO: 788129 - RNA, 20 nt, Artificial Sequence
  Synthetic
auaggcucaaaauaaaagga

SEQ ID NO: 788130 - RNA, 20 nt, Artificial Sequence
  Synthetic
auggagacagaauaaaagga

SEQ ID NO: 788131 - RNA, 20 nt, Artificial Sequence
  Synthetic
ccugcugcguaguaaaagga

SEQ ID NO: 788132 - RNA, 20 nt, Artificial Sequence
  Synthetic
uaucacuugugguaaaagga

SEQ ID NO: 788133 - RNA, 20 nt, Artificial Sequence
  Synthetic
auaaauaccuauacaaagga

SEQ ID NO: 788134 - RNA, 20 nt, Artificial Sequence
  Synthetic
ugacacuauugcucaaagga

SEQ ID NO: 788135 - RNA, 20 nt, Artificial Sequence
  Synthetic
agaggaagacaaagaaagga

SEQ ID NO: 788136 - RNA, 20 nt, Artificial Sequence
  Synthetic
agaaagaaagaaagaaagga

SEQ ID NO: 788137 - RNA, 20 nt, Artificial Sequence
  Synthetic
agagagguagaaagaaagga

SEQ ID NO: 788138 - RNA, 20 nt, Artificial Sequence
  Synthetic
aaaaaaaaggaaagaaagga

SEQ ID NO: 788139 - RNA, 20 nt, Artificial Sequence
  Synthetic
cuuugaaaaaugagaaagga

SEQ ID NO: 788140 - RNA, 20 nt, Artificial Sequence
  Synthetic
uauuaaauuauuagaaagga

SEQ ID NO: 788141 - RNA, 20 nt, Artificial Sequence
  Synthetic
ucugacccuuaaggaaagga

SEQ ID NO: 788142 - RNA, 20 nt, Artificial Sequence
  Synthetic
aaaguauucuagggaaagga

SEQ ID NO: 788143 - RNA, 20 nt, Artificial Sequence
  Synthetic
aaaagugguaacugaaagga

SEQ ID NO: 788144 - RNA, 20 nt, Artificial Sequence
  Synthetic
uaucaaagugagugaaagga

SEQ ID NO: 788145 - RNA, 20 nt, Artificial Sequence
  Synthetic
ucauuuucgccuugaaagga

SEQ ID NO: 788146 - RNA, 20 nt, Artificial Sequence
  Synthetic
uuuuugaauauuugaaagga

SEQ ID NO: 788147 - RNA, 20 nt, Artificial Sequence
  Synthetic
agcaacuggaucauaaagga

SEQ ID NO: 788148 - RNA, 20 nt, Artificial Sequence
  Synthetic
aguaaaugguucauaaagga

SEQ ID NO: 788149 - RNA, 20 nt, Artificial Sequence
  Synthetic
auuucugcauuucuaaagga

SEQ ID NO: 788150 - RNA, 20 nt, Artificial Sequence
  Synthetic
uggcaauccaauguaaagga

SEQ ID NO: 788151 - RNA, 20 nt, Artificial Sequence
  Synthetic
uuuaaauuuccuguaaagga

SEQ ID NO: 788152 - RNA, 20 nt, Artificial Sequence
  Synthetic
caccagugcuacuuaaagga

SEQ ID NO: 788153 - RNA, 20 nt, Artificial Sequence
  Synthetic
aagcuuuuuuuuuuaaagga

SEQ ID NO: 788154 - RNA, 20 nt, Artificial Sequence
  Synthetic
uauuaauuuagcaacaagga

SEQ ID NO: 788155 - RNA, 20 nt, Artificial Sequence
  Synthetic
uauucugcugggaacaagga

SEQ ID NO: 788156 - RNA, 20 nt, Artificial Sequence
  Synthetic
uagauuaacuggaacaagga

SEQ ID NO: 788157 - RNA, 20 nt, Artificial Sequence
  Synthetic
cguuuuaauucacacaagga

SEQ ID NO: 788158 - RNA, 20 nt, Artificial Sequence
  Synthetic
ucauaacagcccuacaagga

SEQ ID NO: 788159 - RNA, 20 nt, Artificial Sequence
  Synthetic
ccuauuccccauuacaagga

SEQ ID NO: 788160 - RNA, 20 nt, Artificial Sequence
  Synthetic
uuuuaccucuauuacaagga

SEQ ID NO: 788161 - RNA, 20 nt, Artificial Sequence
  Synthetic
cagcuuuuaccacccaagga

SEQ ID NO: 788162 - RNA, 20 nt, Artificial Sequence
  Synthetic
agucccaugucucccaagga

SEQ ID NO: 788163 - RNA, 20 nt, Artificial Sequence
  Synthetic
ucaauguauuuucccaagga

SEQ ID NO: 788164 - RNA, 20 nt, Artificial Sequence
  Synthetic
aagaaggaggaagccaagga

SEQ ID NO: 788165 - RNA, 20 nt, Artificial Sequence
  Synthetic
cagagagaccuagccaagga

SEQ ID NO: 788166 - RNA, 20 nt, Artificial Sequence
  Synthetic
cuugucugcacuuccaagga

SEQ ID NO: 788167 - RNA, 20 nt, Artificial Sequence
  Synthetic
auuaccguaugaagcaagga

SEQ ID NO: 788168 - RNA, 20 nt, Artificial Sequence
  Synthetic
ccuguuagcuaaaucaagga

SEQ ID NO: 788169 - RNA, 20 nt, Artificial Sequence
  Synthetic
auaaauaauagacucaagga

SEQ ID NO: 788170 - RNA, 20 nt, Artificial Sequence
  Synthetic
uugaacagaaaucucaagga

SEQ ID NO: 788171 - RNA, 20 nt, Artificial Sequence
  Synthetic
ugaagacagagugucaagga

SEQ ID NO: 788172 - RNA, 20 nt, Artificial Sequence
  Synthetic
acuagaguuuuaaagaagga

SEQ ID NO: 788173 - RNA, 20 nt, Artificial Sequence
  Synthetic
cucagaagaaacaagaagga

SEQ ID NO: 788174 - RNA, 20 nt, Artificial Sequence
  Synthetic
uuguuuuaaggcaagaagga

SEQ ID NO: 788175 - RNA, 20 nt, Artificial Sequence
  Synthetic
ucaguucacuucaagaagga

SEQ ID NO: 788176 - RNA, 20 nt, Artificial Sequence
  Synthetic
ccauccuaaaaacagaagga

SEQ ID NO: 788177 - RNA, 20 nt, Artificial Sequence
  Synthetic
caggaagagaaccagaagga

SEQ ID NO: 788178 - RNA, 20 nt, Artificial Sequence
  Synthetic
aagguaggacaagagaagga

SEQ ID NO: 788179 - RNA, 20 nt, Artificial Sequence
  Synthetic
aacaaaacacaggagaagga

SEQ ID NO: 788180 - RNA, 20 nt, Artificial Sequence
  Synthetic
aaagcacucauugagaagga

SEQ ID NO: 788181 - RNA, 20 nt, Artificial Sequence
  Synthetic
uuagaacaaccauagaagga

SEQ ID NO: 788182 - RNA, 20 nt, Artificial Sequence
  Synthetic
uggagaaaaagauagaagga

SEQ ID NO: 788183 - RNA, 20 nt, Artificial Sequence
  Synthetic
auaaaaugaaacuagaagga

SEQ ID NO: 788184 - RNA, 20 nt, Artificial Sequence
  Synthetic
agaaagaaaagaaggaagga

SEQ ID NO: 788185 - RNA, 20 nt, Artificial Sequence
  Synthetic
aggaaaggaagaaggaagga

SEQ ID NO: 788186 - RNA, 20 nt, Artificial Sequence
  Synthetic
aaggaagaaggaaggaagga

SEQ ID NO: 788187 - RNA, 20 nt, Artificial Sequence
  Synthetic
auauagcugcacaggaagga

SEQ ID NO: 788188 - RNA, 20 nt, Artificial Sequence
  Synthetic
aggcaggaaggcaggaagga

SEQ ID NO: 788189 - RNA, 20 nt, Artificial Sequence
  Synthetic
uggggacuacagaggaagga

SEQ ID NO: 788190 - RNA, 20 nt, Artificial Sequence
  Synthetic
acugaaaggaggaggaagga

SEQ ID NO: 788191 - RNA, 20 nt, Artificial Sequence
  Synthetic
agggagggagggaggaagga

SEQ ID NO: 788192 - RNA, 20 nt, Artificial Sequence
  Synthetic
uaaagguuggugaggaagga

SEQ ID NO: 788193 - RNA, 20 nt, Artificial Sequence
  Synthetic
uuuucaaauaguaggaagga

SEQ ID NO: 788194 - RNA, 20 nt, Artificial Sequence
  Synthetic
ugugucccuggagggaagga

SEQ ID NO: 788195 - RNA, 20 nt, Artificial Sequence
  Synthetic
uuuggcucuggggggaagga

SEQ ID NO: 788196 - RNA, 20 nt, Artificial Sequence
  Synthetic
uaagagaagguggggaagga

SEQ ID NO: 788197 - RNA, 20 nt, Artificial Sequence
  Synthetic
acuaguagaugugggaagga

SEQ ID NO: 788198 - RNA, 20 nt, Artificial Sequence
  Synthetic
aaccuguccaacuggaagga

SEQ ID NO: 788199 - RNA, 20 nt, Artificial Sequence
  Synthetic
aggguaauuuauuggaagga

SEQ ID NO: 788200 - RNA, 20 nt, Artificial Sequence
  Synthetic
caugcuuccuaaaugaagga

SEQ ID NO: 788201 - RNA, 20 nt, Artificial Sequence
  Synthetic
ccaucacagcagcugaagga

SEQ ID NO: 788202 - RNA, 20 nt, Artificial Sequence
  Synthetic
cuauucaaguuagugaagga

SEQ ID NO: 788203 - RNA, 20 nt, Artificial Sequence
  Synthetic
uugaaaccaggugugaagga

SEQ ID NO: 788204 - RNA, 20 nt, Artificial Sequence
  Synthetic
augcugaagauaaauaagga

SEQ ID NO: 788205 - RNA, 20 nt, Artificial Sequence
  Synthetic
aaaauaauaguaaauaagga

SEQ ID NO: 788206 - RNA, 20 nt, Artificial Sequence
  Synthetic
cacaggcuauuacauaagga

SEQ ID NO: 788207 - RNA, 20 nt, Artificial Sequence
  Synthetic
aguaggggaagagauaagga

SEQ ID NO: 788208 - RNA, 20 nt, Artificial Sequence
  Synthetic
uuuuguauaugguauaagga

SEQ ID NO: 788209 - RNA, 20 nt, Artificial Sequence
  Synthetic
uucagauguauguauaagga

SEQ ID NO: 788210 - RNA, 20 nt, Artificial Sequence
  Synthetic
aucuuacaacugaguaagga

SEQ ID NO: 788211 - RNA, 20 nt, Artificial Sequence
  Synthetic
aguugauaagcacguaagga

SEQ ID NO: 788212 - RNA, 20 nt, Artificial Sequence
  Synthetic
uuuuguauaagggguaagga

SEQ ID NO: 788213 - RNA, 20 nt, Artificial Sequence
  Synthetic
aaacugaaaauugguaagga

SEQ ID NO: 788214 - RNA, 20 nt, Artificial Sequence
  Synthetic
agagacaaauaauguaagga

SEQ ID NO: 788215 - RNA, 20 nt, Artificial Sequence
  Synthetic
cauuauucacccuguaagga

SEQ ID NO: 788216 - RNA, 20 nt, Artificial Sequence
  Synthetic
uuuuguauaagguguaagga

SEQ ID NO: 788217 - RNA, 20 nt, Artificial Sequence
  Synthetic
uuuuguauaugguguaagga

SEQ ID NO: 788218 - RNA, 20 nt, Artificial Sequence
  Synthetic
cuacgaagaaagauuaagga

SEQ ID NO: 788219 - RNA, 20 nt, Artificial Sequence
  Synthetic
uaccaucauauuguuaagga

SEQ ID NO: 788220 - RNA, 20 nt, Artificial Sequence
  Synthetic
uuuuauccaagguuuaagga

SEQ ID NO: 788221 - RNA, 20 nt, Artificial Sequence
  Synthetic
cuagaacaaaugaaacagga

SEQ ID NO: 788222 - RNA, 20 nt, Artificial Sequence
  Synthetic
uucaaacuaaagcaacagga

SEQ ID NO: 788223 - RNA, 20 nt, Artificial Sequence
  Synthetic
aggagagagggagaacagga

SEQ ID NO: 788224 - RNA, 20 nt, Artificial Sequence
  Synthetic
cuagaaucuaacacacagga

SEQ ID NO: 788225 - RNA, 20 nt, Artificial Sequence
  Synthetic
ugaguagagaagacacagga

SEQ ID NO: 788226 - RNA, 20 nt, Artificial Sequence
  Synthetic
aaaguuuaauugacacagga

SEQ ID NO: 788227 - RNA, 20 nt, Artificial Sequence
  Synthetic
agcuuuacagcuacacagga

SEQ ID NO: 788228 - RNA, 20 nt, Artificial Sequence
  Synthetic
uuuagaagggcuacacagga

SEQ ID NO: 788229 - RNA, 20 nt, Artificial Sequence
  Synthetic
cucuuuaauaugccacagga

SEQ ID NO: 788230 - RNA, 20 nt, Artificial Sequence
  Synthetic
auauauauagcugcacagga

SEQ ID NO: 788231 - RNA, 20 nt, Artificial Sequence
  Synthetic
uagccuuggcccagacagga

SEQ ID NO: 788232 - RNA, 20 nt, Artificial Sequence
  Synthetic
agggauggugggagacagga

SEQ ID NO: 788233 - RNA, 20 nt, Artificial Sequence
  Synthetic
aaacuacaacuaugacagga

SEQ ID NO: 788234 - RNA, 20 nt, Artificial Sequence
  Synthetic
aggauaaaugcuugacagga

SEQ ID NO: 788235 - RNA, 20 nt, Artificial Sequence
  Synthetic
cauaccacaugaauacagga

SEQ ID NO: 788236 - RNA, 20 nt, Artificial Sequence
  Synthetic
cuuuaagaaauuauacagga

SEQ ID NO: 788237 - RNA, 20 nt, Artificial Sequence
  Synthetic
uauguacuuuaaguacagga

SEQ ID NO: 788238 - RNA, 20 nt, Artificial Sequence
  Synthetic
aaaucugucuuguuacagga

SEQ ID NO: 788239 - RNA, 20 nt, Artificial Sequence
  Synthetic
cuccuuuuaauuuuacagga

SEQ ID NO: 788240 - RNA, 20 nt, Artificial Sequence
  Synthetic
acuuguggagaucaccagga

SEQ ID NO: 788241 - RNA, 20 nt, Artificial Sequence
  Synthetic
uuucaccauguucaccagga

SEQ ID NO: 788242 - RNA, 20 nt, Artificial Sequence
  Synthetic
uuuaaauucccagaccagga

SEQ ID NO: 788243 - RNA, 20 nt, Artificial Sequence
  Synthetic
agaugcagccaggaccagga

SEQ ID NO: 788244 - RNA, 20 nt, Artificial Sequence
  Synthetic
cggggaagaccuuaccagga

SEQ ID NO: 788245 - RNA, 20 nt, Artificial Sequence
  Synthetic
agaaucgcuugaacccagga

SEQ ID NO: 788246 - RNA, 20 nt, Artificial Sequence
  Synthetic
agaauugcuugaacccagga

SEQ ID NO: 788247 - RNA, 20 nt, Artificial Sequence
  Synthetic
cacucaaccugcccccagga

SEQ ID NO: 788248 - RNA, 20 nt, Artificial Sequence
  Synthetic
aaugcuagaucugcccagga

SEQ ID NO: 788249 - RNA, 20 nt, Artificial Sequence
  Synthetic
aaguuacuuugaucccagga

SEQ ID NO: 788250 - RNA, 20 nt, Artificial Sequence
  Synthetic
cuugucagcauuucccagga

SEQ ID NO: 788251 - RNA, 20 nt, Artificial Sequence
  Synthetic
auuaggaaaaagagccagga

SEQ ID NO: 788252 - RNA, 20 nt, Artificial Sequence
  Synthetic
ugucaccauguuagccagga

SEQ ID NO: 788253 - RNA, 20 nt, Artificial Sequence
  Synthetic
uuucaccauguuagccagga

SEQ ID NO: 788254 - RNA, 20 nt, Artificial Sequence
  Synthetic
uuucaccguguuagccagga

SEQ ID NO: 788255 - RNA, 20 nt, Artificial Sequence
  Synthetic
uuuuaccguguuagccagga

SEQ ID NO: 788256 - RNA, 20 nt, Artificial Sequence
  Synthetic
uuucacuguguuagccagga

SEQ ID NO: 788257 - RNA, 20 nt, Artificial Sequence
  Synthetic
uuucuccuuguuagccagga

SEQ ID NO: 788258 - RNA, 20 nt, Artificial Sequence
  Synthetic
uuucaccguguucgccagga

SEQ ID NO: 788259 - RNA, 20 nt, Artificial Sequence
  Synthetic
ucucaccauguuggccagga

SEQ ID NO: 788260 - RNA, 20 nt, Artificial Sequence
  Synthetic
auucaccauguuggccagga

SEQ ID NO: 788261 - RNA, 20 nt, Artificial Sequence
  Synthetic
uuucaccauguuggccagga

SEQ ID NO: 788262 - RNA, 20 nt, Artificial Sequence
  Synthetic
uuucgccauguuggccagga

SEQ ID NO: 788263 - RNA, 20 nt, Artificial Sequence
  Synthetic
uuucaccuuguuggccagga

SEQ ID NO: 788264 - RNA, 20 nt, Artificial Sequence
  Synthetic
uuguaauaucagugccagga

SEQ ID NO: 788265 - RNA, 20 nt, Artificial Sequence
  Synthetic
aucuuacaggaacuccagga

SEQ ID NO: 788266 - RNA, 20 nt, Artificial Sequence
  Synthetic
agaagacagcagaagcagga

SEQ ID NO: 788267 - RNA, 20 nt, Artificial Sequence
  Synthetic
agggugacccggaagcagga

SEQ ID NO: 788268 - RNA, 20 nt, Artificial Sequence
  Synthetic
cagagaguugggaagcagga

SEQ ID NO: 788269 - RNA, 20 nt, Artificial Sequence
  Synthetic
cuugugaagauacagcagga

SEQ ID NO: 788270 - RNA, 20 nt, Artificial Sequence
  Synthetic
uucuucacauggcagcagga

SEQ ID NO: 788271 - RNA, 20 nt, Artificial Sequence
  Synthetic
aaaggaucaagcgagcagga

SEQ ID NO: 788272 - RNA, 20 nt, Artificial Sequence
  Synthetic
agaaggagaugauagcagga

SEQ ID NO: 788273 - RNA, 20 nt, Artificial Sequence
  Synthetic
aggaauauagcuuagcagga

SEQ ID NO: 788274 - RNA, 20 nt, Artificial Sequence
  Synthetic
uucuucacaaggccgcagga

SEQ ID NO: 788275 - RNA, 20 nt, Artificial Sequence
  Synthetic
caaggcaagacaaggcagga

SEQ ID NO: 788276 - RNA, 20 nt, Artificial Sequence
  Synthetic
cccacaagagggaggcagga

SEQ ID NO: 788277 - RNA, 20 nt, Artificial Sequence
  Synthetic
acaagugaguggaggcagga

SEQ ID NO: 788278 - RNA, 20 nt, Artificial Sequence
  Synthetic
uuugggaggcugaggcagga

SEQ ID NO: 788279 - RNA, 20 nt, Artificial Sequence
  Synthetic
cugaccugugugaggcagga

SEQ ID NO: 788280 - RNA, 20 nt, Artificial Sequence
  Synthetic
uuaaagaguaaugggcagga

SEQ ID NO: 788281 - RNA, 20 nt, Artificial Sequence
  Synthetic
aauccaaaagccuggcagga

SEQ ID NO: 788282 - RNA, 20 nt, Artificial Sequence
  Synthetic
uucuucacaagguggcagga

SEQ ID NO: 788283 - RNA, 20 nt, Artificial Sequence
  Synthetic
cucuucacaggguggcagga

SEQ ID NO: 788284 - RNA, 20 nt, Artificial Sequence
  Synthetic
cuucuauucaagcugcagga

SEQ ID NO: 788285 - RNA, 20 nt, Artificial Sequence
  Synthetic
acaggcauugaauaucagga

SEQ ID NO: 788286 - RNA, 20 nt, Artificial Sequence
  Synthetic
cacuuugcuaacacucagga

SEQ ID NO: 788287 - RNA, 20 nt, Artificial Sequence
  Synthetic
caggucacacggccucagga

SEQ ID NO: 788288 - RNA, 20 nt, Artificial Sequence
  Synthetic
cgguugucacuugcucagga

SEQ ID NO: 788289 - RNA, 20 nt, Artificial Sequence
  Synthetic
ucaugcaucaagucucagga

SEQ ID NO: 788290 - RNA, 20 nt, Artificial Sequence
  Synthetic
ucagugucaccaagucagga

SEQ ID NO: 788291 - RNA, 20 nt, Artificial Sequence
  Synthetic
aauaagcauagaagucagga

SEQ ID NO: 788292 - RNA, 20 nt, Artificial Sequence
  Synthetic
cugagaucaaggugucagga

SEQ ID NO: 788293 - RNA, 20 nt, Artificial Sequence
  Synthetic
cuauugacauuuauucagga

SEQ ID NO: 788294 - RNA, 20 nt, Artificial Sequence
  Synthetic
acuugugaagaucuucagga

SEQ ID NO: 788295 - RNA, 20 nt, Artificial Sequence
  Synthetic
cuggcugaauaucuucagga

SEQ ID NO: 788296 - RNA, 20 nt, Artificial Sequence
  Synthetic
ccagagcuccuucuucagga

SEQ ID NO: 788297 - RNA, 20 nt, Artificial Sequence
  Synthetic
augauaugaaguguucagga

SEQ ID NO: 788298 - RNA, 20 nt, Artificial Sequence
  Synthetic
ugauauaaaucauuucagga

SEQ ID NO: 788299 - RNA, 20 nt, Artificial Sequence
  Synthetic
agcuucucuauauuucagga

SEQ ID NO: 788300 - RNA, 20 nt, Artificial Sequence
  Synthetic
uuuacuucucccuuucagga

SEQ ID NO: 788301 - RNA, 20 nt, Artificial Sequence
  Synthetic
cuugaaaggacaaaagagga

SEQ ID NO: 788302 - RNA, 20 nt, Artificial Sequence
  Synthetic
aaaagaagaaagaaagagga

SEQ ID NO: 788303 - RNA, 20 nt, Artificial Sequence
  Synthetic
uauauugcacagaaagagga

SEQ ID NO: 788304 - RNA, 20 nt, Artificial Sequence
  Synthetic
uuuuggaaaacuaaagagga

SEQ ID NO: 788305 - RNA, 20 nt, Artificial Sequence
  Synthetic
aauagaaaauaacaagagga

SEQ ID NO: 788306 - RNA, 20 nt, Artificial Sequence
  Synthetic
ugaggauggcaccaagagga

SEQ ID NO: 788307 - RNA, 20 nt, Artificial Sequence
  Synthetic
ugaggacaguaccaagagga

SEQ ID NO: 788308 - RNA, 20 nt, Artificial Sequence
  Synthetic
cuuccucaauuagaagagga

SEQ ID NO: 788309 - RNA, 20 nt, Artificial Sequence
  Synthetic
ugugaaaaugaggaagagga

SEQ ID NO: 788310 - RNA, 20 nt, Artificial Sequence
  Synthetic
uuagaguuacuuuaagagga

SEQ ID NO: 788311 - RNA, 20 nt, Artificial Sequence
  Synthetic
ccuuaugaauuuuaagagga

SEQ ID NO: 788312 - RNA, 20 nt, Artificial Sequence
  Synthetic
acacuggggacuacagagga

SEQ ID NO: 788313 - RNA, 20 nt, Artificial Sequence
  Synthetic
agucaaguguuuccagagga

SEQ ID NO: 788314 - RNA, 20 nt, Artificial Sequence
  Synthetic
uugugugacucagcagagga

SEQ ID NO: 788315 - RNA, 20 nt, Artificial Sequence
  Synthetic
uggaaagcaugggcagagga

SEQ ID NO: 788316 - RNA, 20 nt, Artificial Sequence
  Synthetic
ccucucuuuuucucagagga

SEQ ID NO: 788317 - RNA, 20 nt, Artificial Sequence
  Synthetic
agcaucugauagucagagga

SEQ ID NO: 788318 - RNA, 20 nt, Artificial Sequence
  Synthetic
uggggaguagggagagagga

SEQ ID NO: 788319 - RNA, 20 nt, Artificial Sequence
  Synthetic
uugcggcccuagggagagga

SEQ ID NO: 788320 - RNA, 20 nt, Artificial Sequence
  Synthetic
acaacaggugcuggagagga

SEQ ID NO: 788321 - RNA, 20 nt, Artificial Sequence
  Synthetic
aaucagauccccugagagga

SEQ ID NO: 788322 - RNA, 20 nt, Artificial Sequence
  Synthetic
uuguugaauuugauagagga

SEQ ID NO: 788323 - RNA, 20 nt, Artificial Sequence
  Synthetic
aauuauucaagguuagagga

SEQ ID NO: 788324 - RNA, 20 nt, Artificial Sequence
  Synthetic
uauagaauaauguuagagga

SEQ ID NO: 788325 - RNA, 20 nt, Artificial Sequence
  Synthetic
uaggcacuccgaaaggagga

SEQ ID NO: 788326 - RNA, 20 nt, Artificial Sequence
  Synthetic
uaaaaagagaacaaggagga

SEQ ID NO: 788327 - RNA, 20 nt, Artificial Sequence
  Synthetic
aguaagggaaggaaggagga

SEQ ID NO: 788328 - RNA, 20 nt, Artificial Sequence
  Synthetic
aggggagaagggaaggagga

SEQ ID NO: 788329 - RNA, 20 nt, Artificial Sequence
  Synthetic
agguagugagggaaggagga

SEQ ID NO: 788330 - RNA, 20 nt, Artificial Sequence
  Synthetic
acauggaaugauaaggagga

SEQ ID NO: 788331 - RNA, 20 nt, Artificial Sequence
  Synthetic
aggagacagcgacaggagga

SEQ ID NO: 788332 - RNA, 20 nt, Artificial Sequence
  Synthetic
agacugugguagcaggagga

SEQ ID NO: 788333 - RNA, 20 nt, Artificial Sequence
  Synthetic
aggaggcugaggcaggagga

SEQ ID NO: 788334 - RNA, 20 nt, Artificial Sequence
  Synthetic
caguggggagaagaggagga

SEQ ID NO: 788335 - RNA, 20 nt, Artificial Sequence
  Synthetic
uauuuccauuaagaggagga

SEQ ID NO: 788336 - RNA, 20 nt, Artificial Sequence
  Synthetic
aaucacugaaaggaggagga

SEQ ID NO: 788337 - RNA, 20 nt, Artificial Sequence
  Synthetic
cuuugauuaggugaggagga

SEQ ID NO: 788338 - RNA, 20 nt, Artificial Sequence
  Synthetic
cacuuggaaggguaggagga

SEQ ID NO: 788339 - RNA, 20 nt, Artificial Sequence
  Synthetic
uuggauuugggguaggagga

SEQ ID NO: 788340 - RNA, 20 nt, Artificial Sequence
  Synthetic
uugauggauggaucggagga

SEQ ID NO: 788341 - RNA, 20 nt, Artificial Sequence
  Synthetic
uguugaauggaaagggagga

SEQ ID NO: 788342 - RNA, 20 nt, Artificial Sequence
  Synthetic
agagagagagagagggagga

SEQ ID NO: 788343 - RNA, 20 nt, Artificial Sequence
  Synthetic
uacagaggaaggagggagga

SEQ ID NO: 788344 - RNA, 20 nt, Artificial Sequence
  Synthetic
agggagggagggagggagga

SEQ ID NO: 788345 - RNA, 20 nt, Artificial Sequence
  Synthetic
uguguguagaugggggagga

SEQ ID NO: 788346 - RNA, 20 nt, Artificial Sequence
  Synthetic
uguaguuuagugggggagga

SEQ ID NO: 788347 - RNA, 20 nt, Artificial Sequence
  Synthetic
auuagaagguaaugggagga

SEQ ID NO: 788348 - RNA, 20 nt, Artificial Sequence
  Synthetic
uaggguggagggugggagga

SEQ ID NO: 788349 - RNA, 20 nt, Artificial Sequence
  Synthetic
aaacauaaaaugugggagga

SEQ ID NO: 788350 - RNA, 20 nt, Artificial Sequence
  Synthetic
cuuacauccgauugggagga

SEQ ID NO: 788351 - RNA, 20 nt, Artificial Sequence
  Synthetic
aaacuuacaaucauggagga

SEQ ID NO: 788352 - RNA, 20 nt, Artificial Sequence
  Synthetic
agaaagguucucauggagga

SEQ ID NO: 788353 - RNA, 20 nt, Artificial Sequence
  Synthetic
agagagggagggauggagga

SEQ ID NO: 788354 - RNA, 20 nt, Artificial Sequence
  Synthetic
aagacacacaugauggagga

SEQ ID NO: 788355 - RNA, 20 nt, Artificial Sequence
  Synthetic
aguacauccauuauggagga

SEQ ID NO: 788356 - RNA, 20 nt, Artificial Sequence
  Synthetic
cauugucauuuaguggagga

SEQ ID NO: 788357 - RNA, 20 nt, Artificial Sequence
  Synthetic
uagguuauuuuaguggagga

SEQ ID NO: 788358 - RNA, 20 nt, Artificial Sequence
  Synthetic
ucaugcacaaccuuggagga

SEQ ID NO: 788359 - RNA, 20 nt, Artificial Sequence
  Synthetic
aaggcccauaaaaaugagga

SEQ ID NO: 788360 - RNA, 20 nt, Artificial Sequence
  Synthetic
cauugaagagaaaaugagga

SEQ ID NO: 788361 - RNA, 20 nt, Artificial Sequence
  Synthetic
uuucuaaaugaaaaugagga

SEQ ID NO: 788362 - RNA, 20 nt, Artificial Sequence
  Synthetic
uaaguggaagacaaugagga

SEQ ID NO: 788363 - RNA, 20 nt, Artificial Sequence
  Synthetic
uaccugggaaugaaugagga

SEQ ID NO: 788364 - RNA, 20 nt, Artificial Sequence
  Synthetic
uaggcuguguguaaugagga

SEQ ID NO: 788365 - RNA, 20 nt, Artificial Sequence
  Synthetic
cucacucaucaucaugagga

SEQ ID NO: 788366 - RNA, 20 nt, Artificial Sequence
  Synthetic
uaaaugcccagugaugagga

SEQ ID NO: 788367 - RNA, 20 nt, Artificial Sequence
  Synthetic
uaaucuaguuaaacugagga

SEQ ID NO: 788368 - RNA, 20 nt, Artificial Sequence
  Synthetic
uccaucuccagaacugagga

SEQ ID NO: 788369 - RNA, 20 nt, Artificial Sequence
  Synthetic
aaagccacagggacugagga

SEQ ID NO: 788370 - RNA, 20 nt, Artificial Sequence
  Synthetic
cucagaugguagagugagga

SEQ ID NO: 788371 - RNA, 20 nt, Artificial Sequence
  Synthetic
agaaggagaaugagugagga

SEQ ID NO: 788372 - RNA, 20 nt, Artificial Sequence
  Synthetic
uaguuuaucccuggugagga

SEQ ID NO: 788373 - RNA, 20 nt, Artificial Sequence
  Synthetic
augauuaagauuggugagga

SEQ ID NO: 788374 - RNA, 20 nt, Artificial Sequence
  Synthetic
caugugaauuaaugugagga

SEQ ID NO: 788375 - RNA, 20 nt, Artificial Sequence
  Synthetic
agaaggauaggaauugagga

SEQ ID NO: 788376 - RNA, 20 nt, Artificial Sequence
  Synthetic
aaggcaagauauauugagga

SEQ ID NO: 788377 - RNA, 20 nt, Artificial Sequence
  Synthetic
ucacaaaagucccuugagga

SEQ ID NO: 788378 - RNA, 20 nt, Artificial Sequence
  Synthetic
uuagcugaagugguugagga

SEQ ID NO: 788379 - RNA, 20 nt, Artificial Sequence
  Synthetic
uaaaaguaugaaaaauagga

SEQ ID NO: 788380 - RNA, 20 nt, Artificial Sequence
  Synthetic
uuuuagaugaugcaauagga

SEQ ID NO: 788381 - RNA, 20 nt, Artificial Sequence
  Synthetic
uuauaucaaauucaauagga

SEQ ID NO: 788382 - RNA, 20 nt, Artificial Sequence
  Synthetic
ucagacagcaccucauagga

SEQ ID NO: 788383 - RNA, 20 nt, Artificial Sequence
  Synthetic
augcaaauccagagauagga

SEQ ID NO: 788384 - RNA, 20 nt, Artificial Sequence
  Synthetic
caaacagugcccauauagga

SEQ ID NO: 788385 - RNA, 20 nt, Artificial Sequence
  Synthetic
aaguuaaaagcgauauagga

SEQ ID NO: 788386 - RNA, 20 nt, Artificial Sequence
  Synthetic
uugguuucuuagcuauagga

SEQ ID NO: 788387 - RNA, 20 nt, Artificial Sequence
  Synthetic
ugaaaauguccucuauagga

SEQ ID NO: 788388 - RNA, 20 nt, Artificial Sequence
  Synthetic
agauagguaugauuauagga

SEQ ID NO: 788389 - RNA, 20 nt, Artificial Sequence
  Synthetic
uaagcaaaacaaaacuagga

SEQ ID NO: 788390 - RNA, 20 nt, Artificial Sequence
  Synthetic
aaauugcaaauaaacuagga

SEQ ID NO: 788391 - RNA, 20 nt, Artificial Sequence
  Synthetic
uugucaucuguaaacuagga

SEQ ID NO: 788392 - RNA, 20 nt, Artificial Sequence
  Synthetic
cuucuugauuuaaacuagga

SEQ ID NO: 788393 - RNA, 20 nt, Artificial Sequence
  Synthetic
ucugaaaauggagccuagga

SEQ ID NO: 788394 - RNA, 20 nt, Artificial Sequence
  Synthetic
auaggaccagaggccuagga

SEQ ID NO: 788395 - RNA, 20 nt, Artificial Sequence
  Synthetic
ccuccuggggaaggcuagga

SEQ ID NO: 788396 - RNA, 20 nt, Artificial Sequence
  Synthetic
uuuugguuguacaucuagga

SEQ ID NO: 788397 - RNA, 20 nt, Artificial Sequence
  Synthetic
uuucuugcuuuugucuagga

SEQ ID NO: 788398 - RNA, 20 nt, Artificial Sequence
  Synthetic
accuguuacuuuuucuagga

SEQ ID NO: 788399 - RNA, 20 nt, Artificial Sequence
  Synthetic
cauuuauaaaguaaguagga

SEQ ID NO: 788400 - RNA, 20 nt, Artificial Sequence
  Synthetic
ccagcucagccacaguagga

SEQ ID NO: 788401 - RNA, 20 nt, Artificial Sequence
  Synthetic
aagcagacaucacaguagga

SEQ ID NO: 788402 - RNA, 20 nt, Artificial Sequence
  Synthetic
uugagaauuuuccaguagga

SEQ ID NO: 788403 - RNA, 20 nt, Artificial Sequence
  Synthetic
acagcaaaggaucaguagga

SEQ ID NO: 788404 - RNA, 20 nt, Artificial Sequence
  Synthetic
augaagggacaagaguagga

SEQ ID NO: 788405 - RNA, 20 nt, Artificial Sequence
  Synthetic
cuuuuucuggacacguagga

SEQ ID NO: 788406 - RNA, 20 nt, Artificial Sequence
  Synthetic
acaagaaugaugacguagga

SEQ ID NO: 788407 - RNA, 20 nt, Artificial Sequence
  Synthetic
uuaaaaagacucagguagga

SEQ ID NO: 788408 - RNA, 20 nt, Artificial Sequence
  Synthetic
cccaggaagcugagguagga

SEQ ID NO: 788409 - RNA, 20 nt, Artificial Sequence
  Synthetic
cuauagcuuuuuagguagga

SEQ ID NO: 788410 - RNA, 20 nt, Artificial Sequence
  Synthetic
caguuuaggcauggguagga

SEQ ID NO: 788411 - RNA, 20 nt, Artificial Sequence
  Synthetic
ugugagccuuauggguagga

SEQ ID NO: 788412 - RNA, 20 nt, Artificial Sequence
  Synthetic
ccacguuacacaugguagga

SEQ ID NO: 788413 - RNA, 20 nt, Artificial Sequence
  Synthetic
acuuccuuuuauauguagga

SEQ ID NO: 788414 - RNA, 20 nt, Artificial Sequence
  Synthetic
uagaauaccaagaauuagga

SEQ ID NO: 788415 - RNA, 20 nt, Artificial Sequence
  Synthetic
uuggaaggugguuauuagga

SEQ ID NO: 788416 - RNA, 20 nt, Artificial Sequence
  Synthetic
ucaccaguaaggacuuagga

SEQ ID NO: 788417 - RNA, 20 nt, Artificial Sequence
  Synthetic
agaugcuccucaccuuagga

SEQ ID NO: 788418 - RNA, 20 nt, Artificial Sequence
  Synthetic
aggaaggaucauccuuagga

SEQ ID NO: 788419 - RNA, 20 nt, Artificial Sequence
  Synthetic
cugagaugaaacaguuagga

SEQ ID NO: 788420 - RNA, 20 nt, Artificial Sequence
  Synthetic
uuuauuacucccaguuagga

SEQ ID NO: 788421 - RNA, 20 nt, Artificial Sequence
  Synthetic
augauuaagcuugguuagga

SEQ ID NO: 788422 - RNA, 20 nt, Artificial Sequence
  Synthetic
ucaucucaccccuguuagga

SEQ ID NO: 788423 - RNA, 20 nt, Artificial Sequence
  Synthetic
uuuauugguacuuguuagga

SEQ ID NO: 788424 - RNA, 20 nt, Artificial Sequence
  Synthetic
aaugaagaggcuauuuagga

SEQ ID NO: 788425 - RNA, 20 nt, Artificial Sequence
  Synthetic
aaaagguguuggcuuuagga

SEQ ID NO: 788426 - RNA, 20 nt, Artificial Sequence
  Synthetic
aaagucuccaaaguuuagga

SEQ ID NO: 788427 - RNA, 20 nt, Artificial Sequence
  Synthetic
aaaguguauucuuuuuagga

SEQ ID NO: 788428 - RNA, 20 nt, Artificial Sequence
  Synthetic
cccuccuucuguuuuuagga

SEQ ID NO: 788429 - RNA, 20 nt, Artificial Sequence
  Synthetic
augaacaaugaauaaacgga

SEQ ID NO: 788430 - RNA, 20 nt, Artificial Sequence
  Synthetic
ugcccugaaaacugaacgga

SEQ ID NO: 788431 - RNA, 20 nt, Artificial Sequence
  Synthetic
agaaauuuguaaauaacgga

SEQ ID NO: 788432 - RNA, 20 nt, Artificial Sequence
  Synthetic
agucagugccugugcacgga

SEQ ID NO: 788433 - RNA, 20 nt, Artificial Sequence
  Synthetic
uucugauaaugaccuacgga

SEQ ID NO: 788434 - RNA, 20 nt, Artificial Sequence
  Synthetic
uuuuucuuucccacaccgga

SEQ ID NO: 788435 - RNA, 20 nt, Artificial Sequence
  Synthetic
acugcugcauuguacccgga

SEQ ID NO: 788436 - RNA, 20 nt, Artificial Sequence
  Synthetic
cagagcuaaguaacuccgga

SEQ ID NO: 788437 - RNA, 20 nt, Artificial Sequence
  Synthetic
aucuacauggaaacagcgga

SEQ ID NO: 788438 - RNA, 20 nt, Artificial Sequence
  Synthetic
uuuucaggcucauaggcgga

SEQ ID NO: 788439 - RNA, 20 nt, Artificial Sequence
  Synthetic
uaauugcauuuucuaucgga

SEQ ID NO: 788440 - RNA, 20 nt, Artificial Sequence
  Synthetic
cucugaaauggggucucgga

SEQ ID NO: 788441 - RNA, 20 nt, Artificial Sequence
  Synthetic
agcaguguguugaauucgga

SEQ ID NO: 788442 - RNA, 20 nt, Artificial Sequence
  Synthetic
aggaaagaaaaaaaaaggga

SEQ ID NO: 788443 - RNA, 20 nt, Artificial Sequence
  Synthetic
ugaucacugauaaaaaggga

SEQ ID NO: 788444 - RNA, 20 nt, Artificial Sequence
  Synthetic
agcacaaaagccaaaaggga

SEQ ID NO: 788445 - RNA, 20 nt, Artificial Sequence
  Synthetic
agcucuaggcagaaaaggga

SEQ ID NO: 788446 - RNA, 20 nt, Artificial Sequence
  Synthetic
aaugaagcauggaaaaggga

SEQ ID NO: 788447 - RNA, 20 nt, Artificial Sequence
  Synthetic
uccaggagaaugaaaaggga

SEQ ID NO: 788448 - RNA, 20 nt, Artificial Sequence
  Synthetic
aaggagaauaugaaaaggga

SEQ ID NO: 788449 - RNA, 20 nt, Artificial Sequence
  Synthetic
uuauuuggccuuaaaaggga

SEQ ID NO: 788450 - RNA, 20 nt, Artificial Sequence
  Synthetic
ugaaauccuccccaaaggga

SEQ ID NO: 788451 - RNA, 20 nt, Artificial Sequence
  Synthetic
auaggcucaaagcaaaggga

SEQ ID NO: 788452 - RNA, 20 nt, Artificial Sequence
  Synthetic
cuguggcaaccucaaaggga

SEQ ID NO: 788453 - RNA, 20 nt, Artificial Sequence
  Synthetic
caauucaauagagaaaggga

SEQ ID NO: 788454 - RNA, 20 nt, Artificial Sequence
  Synthetic
acaaaaaaaggggaaaggga

SEQ ID NO: 788455 - RNA, 20 nt, Artificial Sequence
  Synthetic
cccaaggaguuugaaaggga

SEQ ID NO: 788456 - RNA, 20 nt, Artificial Sequence
  Synthetic
acagacuggaaauaaaggga

SEQ ID NO: 788457 - RNA, 20 nt, Artificial Sequence
  Synthetic
aaucugcuaccuuaaaggga

SEQ ID NO: 788458 - RNA, 20 nt, Artificial Sequence
  Synthetic
aucagagucucuuaaaggga

SEQ ID NO: 788459 - RNA, 20 nt, Artificial Sequence
  Synthetic
uuauuagcuaaaccaaggga

SEQ ID NO: 788460 - RNA, 20 nt, Artificial Sequence
  Synthetic
aaaauuauauugccaaggga

SEQ ID NO: 788461 - RNA, 20 nt, Artificial Sequence
  Synthetic
aaauguugccuuccaaggga

SEQ ID NO: 788462 - RNA, 20 nt, Artificial Sequence
  Synthetic
uccagcaacccagcaaggga

SEQ ID NO: 788463 - RNA, 20 nt, Artificial Sequence
  Synthetic
uaggcaggguaaucaaggga

SEQ ID NO: 788464 - RNA, 20 nt, Artificial Sequence
  Synthetic
uauagaaugagaagaaggga

SEQ ID NO: 788465 - RNA, 20 nt, Artificial Sequence
  Synthetic
caacaucaggggagaaggga

SEQ ID NO: 788466 - RNA, 20 nt, Artificial Sequence
  Synthetic
auaaguguucauagaaggga

SEQ ID NO: 788467 - RNA, 20 nt, Artificial Sequence
  Synthetic
caaagaaaggaaggaaggga

SEQ ID NO: 788468 - RNA, 20 nt, Artificial Sequence
  Synthetic
agggaagggaagggaaggga

SEQ ID NO: 788469 - RNA, 20 nt, Artificial Sequence
  Synthetic
aggggagggaagggaaggga

SEQ ID NO: 788470 - RNA, 20 nt, Artificial Sequence
  Synthetic
aggagaggggagggaaggga

SEQ ID NO: 788471 - RNA, 20 nt, Artificial Sequence
  Synthetic
auaaagguagggggaaggga

SEQ ID NO: 788472 - RNA, 20 nt, Artificial Sequence
  Synthetic
ucuuuguuucauugaaggga

SEQ ID NO: 788473 - RNA, 20 nt, Artificial Sequence
  Synthetic
aggagaaaugcuugaaggga

SEQ ID NO: 788474 - RNA, 20 nt, Artificial Sequence
  Synthetic
cuaggagcugguugaaggga

SEQ ID NO: 788475 - RNA, 20 nt, Artificial Sequence
  Synthetic
caaaaagaguguugaaggga

SEQ ID NO: 788476 - RNA, 20 nt, Artificial Sequence
  Synthetic
cauguccuuuaaauaaggga

SEQ ID NO: 788477 - RNA, 20 nt, Artificial Sequence
  Synthetic
aauuauuuuuaaauaaggga

SEQ ID NO: 788478 - RNA, 20 nt, Artificial Sequence
  Synthetic
ucugcaucaauaauaaggga

SEQ ID NO: 788479 - RNA, 20 nt, Artificial Sequence
  Synthetic
cuucccuuucuuauaaggga

SEQ ID NO: 788480 - RNA, 20 nt, Artificial Sequence
  Synthetic
ucuuucuucucaguaaggga

SEQ ID NO: 788481 - RNA, 20 nt, Artificial Sequence
  Synthetic
uaaauguuaauauuaaggga

SEQ ID NO: 788482 - RNA, 20 nt, Artificial Sequence
  Synthetic
ucaagcaggcacuuaaggga

SEQ ID NO: 788483 - RNA, 20 nt, Artificial Sequence
  Synthetic
aaucuagguauguuaaggga

SEQ ID NO: 788484 - RNA, 20 nt, Artificial Sequence
  Synthetic
caggccaucucaaacaggga

SEQ ID NO: 788485 - RNA, 20 nt, Artificial Sequence
  Synthetic
agaaaauagggaaacaggga

SEQ ID NO: 788486 - RNA, 20 nt, Artificial Sequence
  Synthetic
uggcauuguuugaacaggga

SEQ ID NO: 788487 - RNA, 20 nt, Artificial Sequence
  Synthetic
agggcuggaggacacaggga

SEQ ID NO: 788488 - RNA, 20 nt, Artificial Sequence
  Synthetic
agaacacauggacacaggga

SEQ ID NO: 788489 - RNA, 20 nt, Artificial Sequence
  Synthetic
agagcccauggacacaggga

SEQ ID NO: 788490 - RNA, 20 nt, Artificial Sequence
  Synthetic
aaaacauauggacacaggga

SEQ ID NO: 788491 - RNA, 20 nt, Artificial Sequence
  Synthetic
agagauuggaugcacaggga

SEQ ID NO: 788492 - RNA, 20 nt, Artificial Sequence
  Synthetic
uuucaucuuaaucacaggga

SEQ ID NO: 788493 - RNA, 20 nt, Artificial Sequence
  Synthetic
uuuuuauuuuuauacaggga

SEQ ID NO: 788494 - RNA, 20 nt, Artificial Sequence
  Synthetic
aacauggcugcaaccaggga

SEQ ID NO: 788495 - RNA, 20 nt, Artificial Sequence
  Synthetic
ugguugccagggaccaggga

SEQ ID NO: 788496 - RNA, 20 nt, Artificial Sequence
  Synthetic
cugaaggcaauuuccaggga

SEQ ID NO: 788497 - RNA, 20 nt, Artificial Sequence
  Synthetic
ugggugauaaaaagcaggga

SEQ ID NO: 788498 - RNA, 20 nt, Artificial Sequence
  Synthetic
augaagaaugaaagcaggga

SEQ ID NO: 788499 - RNA, 20 nt, Artificial Sequence
  Synthetic
caccaaauagacagcaggga

SEQ ID NO: 788500 - RNA, 20 nt, Artificial Sequence
  Synthetic
ucacauguuucuagcaggga

SEQ ID NO: 788501 - RNA, 20 nt, Artificial Sequence
  Synthetic
aauaauuucuuagucaggga

SEQ ID NO: 788502 - RNA, 20 nt, Artificial Sequence
  Synthetic
uaugggaccagguucaggga

SEQ ID NO: 788503 - RNA, 20 nt, Artificial Sequence
  Synthetic
agaaaaaaaagaaagaggga

SEQ ID NO: 788504 - RNA, 20 nt, Artificial Sequence
  Synthetic
auugaucacagaaagaggga

SEQ ID NO: 788505 - RNA, 20 nt, Artificial Sequence
  Synthetic
aggaggaaauggaagaggga

SEQ ID NO: 788506 - RNA, 20 nt, Artificial Sequence
  Synthetic
uauguguauauacagaggga

SEQ ID NO: 788507 - RNA, 20 nt, Artificial Sequence
  Synthetic
aggcaacuguggcagaggga

SEQ ID NO: 788508 - RNA, 20 nt, Artificial Sequence
  Synthetic
acuugagagaaagagaggga

SEQ ID NO: 788509 - RNA, 20 nt, Artificial Sequence
  Synthetic
caacacagaugagagaggga

SEQ ID NO: 788510 - RNA, 20 nt, Artificial Sequence
  Synthetic
agaaggaagcuggagaggga

SEQ ID NO: 788511 - RNA, 20 nt, Artificial Sequence
  Synthetic
agggagagaguggagaggga

SEQ ID NO: 788512 - RNA, 20 nt, Artificial Sequence
  Synthetic
aguaaaucaguugagaggga

SEQ ID NO: 788513 - RNA, 20 nt, Artificial Sequence
  Synthetic
auuagaaugaauucgaggga

SEQ ID NO: 788514 - RNA, 20 nt, Artificial Sequence
  Synthetic
aagagaaccagaaggaggga

SEQ ID NO: 788515 - RNA, 20 nt, Artificial Sequence
  Synthetic
agggagggaggaaggaggga

SEQ ID NO: 788516 - RNA, 20 nt, Artificial Sequence
  Synthetic
acuacuagagggaggaggga

SEQ ID NO: 788517 - RNA, 20 nt, Artificial Sequence
  Synthetic
aaaaaggggaaagggaggga

SEQ ID NO: 788518 - RNA, 20 nt, Artificial Sequence
  Synthetic
agaagaaagucagggaggga

SEQ ID NO: 788519 - RNA, 20 nt, Artificial Sequence
  Synthetic
aaaaaagaaagagggaggga

SEQ ID NO: 788520 - RNA, 20 nt, Artificial Sequence
  Synthetic
acagaugagagagggaggga

SEQ ID NO: 788521 - RNA, 20 nt, Artificial Sequence
  Synthetic
agagaguggagagggaggga

SEQ ID NO: 788522 - RNA, 20 nt, Artificial Sequence
  Synthetic
agggaggaaggagggaggga

SEQ ID NO: 788523 - RNA, 20 nt, Artificial Sequence
  Synthetic
aggggaaagggagggaggga

SEQ ID NO: 788524 - RNA, 20 nt, Artificial Sequence
  Synthetic
aggaaggagggagggaggga

SEQ ID NO: 788525 - RNA, 20 nt, Artificial Sequence
  Synthetic
aggagggagggagggaggga

SEQ ID NO: 788526 - RNA, 20 nt, Artificial Sequence
  Synthetic
ugugugagagaggggaggga

SEQ ID NO: 788527 - RNA, 20 nt, Artificial Sequence
  Synthetic
agggaaggagaggggaggga

SEQ ID NO: 788528 - RNA, 20 nt, Artificial Sequence
  Synthetic
cgaaaggaggaggggaggga

SEQ ID NO: 788529 - RNA, 20 nt, Artificial Sequence
  Synthetic
acuacuagaguggggaggga

SEQ ID NO: 788530 - RNA, 20 nt, Artificial Sequence
  Synthetic
agugugugucccuggaggga

SEQ ID NO: 788531 - RNA, 20 nt, Artificial Sequence
  Synthetic
augugugugagguggaggga

SEQ ID NO: 788532 - RNA, 20 nt, Artificial Sequence
  Synthetic
cagaauucagugaugaggga

SEQ ID NO: 788533 - RNA, 20 nt, Artificial Sequence
  Synthetic
uuuugugagguagugaggga

SEQ ID NO: 788534 - RNA, 20 nt, Artificial Sequence
  Synthetic
aucuguggcaaugugaggga

SEQ ID NO: 788535 - RNA, 20 nt, Artificial Sequence
  Synthetic
auuuuauauacacauaggga

SEQ ID NO: 788536 - RNA, 20 nt, Artificial Sequence
  Synthetic
auguugaauaagacuaggga

SEQ ID NO: 788537 - RNA, 20 nt, Artificial Sequence
  Synthetic
acaguauagaaaccuaggga

SEQ ID NO: 788538 - RNA, 20 nt, Artificial Sequence
  Synthetic
uccuuaaugaucucuaggga

SEQ ID NO: 788539 - RNA, 20 nt, Artificial Sequence
  Synthetic
auucaaaaaagaaguaggga

SEQ ID NO: 788540 - RNA, 20 nt, Artificial Sequence
  Synthetic
uuuuguauuuuuaguaggga

SEQ ID NO: 788541 - RNA, 20 nt, Artificial Sequence
  Synthetic
acauccuagugagguaggga

SEQ ID NO: 788542 - RNA, 20 nt, Artificial Sequence
  Synthetic
uuuaucaaacaugguaggga

SEQ ID NO: 788543 - RNA, 20 nt, Artificial Sequence
  Synthetic
ccaugauugcuaauuaggga

SEQ ID NO: 788544 - RNA, 20 nt, Artificial Sequence
  Synthetic
acuagucauuuccuuaggga

SEQ ID NO: 788545 - RNA, 20 nt, Artificial Sequence
  Synthetic
aaguagcauuuucuuaggga

SEQ ID NO: 788546 - RNA, 20 nt, Artificial Sequence
  Synthetic
uguaauaacugaguuaggga

SEQ ID NO: 788547 - RNA, 20 nt, Artificial Sequence
  Synthetic
aggauuauuauaguuaggga

SEQ ID NO: 788548 - RNA, 20 nt, Artificial Sequence
  Synthetic
aauccucuuguaagacggga

SEQ ID NO: 788549 - RNA, 20 nt, Artificial Sequence
  Synthetic
agaacacauggacaccggga

SEQ ID NO: 788550 - RNA, 20 nt, Artificial Sequence
  Synthetic
ugcugcucaggccagcggga

SEQ ID NO: 788551 - RNA, 20 nt, Artificial Sequence
  Synthetic
ucggggagggggcagcggga

SEQ ID NO: 788552 - RNA, 20 nt, Artificial Sequence
  Synthetic
cagaaguuucaaaggcggga

SEQ ID NO: 788553 - RNA, 20 nt, Artificial Sequence
  Synthetic
aaggggagcugaaaagggga

SEQ ID NO: 788554 - RNA, 20 nt, Artificial Sequence
  Synthetic
caguuucagcccaaagggga

SEQ ID NO: 788555 - RNA, 20 nt, Artificial Sequence
  Synthetic
augguggaaagcaaagggga

SEQ ID NO: 788556 - RNA, 20 nt, Artificial Sequence
  Synthetic
cgagguggggggcaagggga

SEQ ID NO: 788557 - RNA, 20 nt, Artificial Sequence
  Synthetic
ucaaguggagaggaagggga

SEQ ID NO: 788558 - RNA, 20 nt, Artificial Sequence
  Synthetic
uaaaagagcuagacagggga

SEQ ID NO: 788559 - RNA, 20 nt, Artificial Sequence
  Synthetic
uaacuauaaugcccagggga

SEQ ID NO: 788560 - RNA, 20 nt, Artificial Sequence
  Synthetic
aauagaaacauggcagggga

SEQ ID NO: 788561 - RNA, 20 nt, Artificial Sequence
  Synthetic
cuagugcugcaugcagggga

SEQ ID NO: 788562 - RNA, 20 nt, Artificial Sequence
  Synthetic
cuaaggauucacucagggga

SEQ ID NO: 788563 - RNA, 20 nt, Artificial Sequence
  Synthetic
auucccuuuugcucagggga

SEQ ID NO: 788564 - RNA, 20 nt, Artificial Sequence
  Synthetic
caccggggccucucagggga

SEQ ID NO: 788565 - RNA, 20 nt, Artificial Sequence
  Synthetic
cuaaugugugagagagggga

SEQ ID NO: 788566 - RNA, 20 nt, Artificial Sequence
  Synthetic
cgggggguggggcgagggga

SEQ ID NO: 788567 - RNA, 20 nt, Artificial Sequence
  Synthetic
acuccgaaaggaggagggga

SEQ ID NO: 788568 - RNA, 20 nt, Artificial Sequence
  Synthetic
aggcccaagggaugagggga

SEQ ID NO: 788569 - RNA, 20 nt, Artificial Sequence
  Synthetic
auuuuaaggcccugagggga

SEQ ID NO: 788570 - RNA, 20 nt, Artificial Sequence
  Synthetic
ccugucguggggugagggga

SEQ ID NO: 788571 - RNA, 20 nt, Artificial Sequence
  Synthetic
agaggugaguggugagggga

SEQ ID NO: 788572 - RNA, 20 nt, Artificial Sequence
  Synthetic
aaauaacuggcucuagggga

SEQ ID NO: 788573 - RNA, 20 nt, Artificial Sequence
  Synthetic
ccucaacgguccuuagggga

SEQ ID NO: 788574 - RNA, 20 nt, Artificial Sequence
  Synthetic
aggggugggagguuagggga

SEQ ID NO: 788575 - RNA, 20 nt, Artificial Sequence
  Synthetic
agguaauugaaucacgggga

SEQ ID NO: 788576 - RNA, 20 nt, Artificial Sequence
  Synthetic
ccagaucagcaucacgggga

SEQ ID NO: 788577 - RNA, 20 nt, Artificial Sequence
  Synthetic
aguaaaauauuuagcgggga

SEQ ID NO: 788578 - RNA, 20 nt, Artificial Sequence
  Synthetic
ugggguggggggaaggggga

SEQ ID NO: 788579 - RNA, 20 nt, Artificial Sequence
  Synthetic
caaauuuuggggaaggggga

SEQ ID NO: 788580 - RNA, 20 nt, Artificial Sequence
  Synthetic
aggcucuguguucaggggga

SEQ ID NO: 788581 - RNA, 20 nt, Artificial Sequence
  Synthetic
aacuucuggucugaggggga

SEQ ID NO: 788582 - RNA, 20 nt, Artificial Sequence
  Synthetic
ccuguuuacuuugaggggga

SEQ ID NO: 788583 - RNA, 20 nt, Artificial Sequence
  Synthetic
caaaaauaaagguaggggga

SEQ ID NO: 788584 - RNA, 20 nt, Artificial Sequence
  Synthetic
uggggugaggggacggggga

SEQ ID NO: 788585 - RNA, 20 nt, Artificial Sequence
  Synthetic
agagagagagaagcggggga

SEQ ID NO: 788586 - RNA, 20 nt, Artificial Sequence
  Synthetic
acugugguggggucggggga

SEQ ID NO: 788587 - RNA, 20 nt, Artificial Sequence
  Synthetic
ccuguuguggggucggggga

SEQ ID NO: 788588 - RNA, 20 nt, Artificial Sequence
  Synthetic
uggggugggggaagggggga

SEQ ID NO: 788589 - RNA, 20 nt, Artificial Sequence
  Synthetic
uggggucgggggagggggga

SEQ ID NO: 788590 - RNA, 20 nt, Artificial Sequence
  Synthetic
ugggguggggggagggggga

SEQ ID NO: 788591 - RNA, 20 nt, Artificial Sequence
  Synthetic
uuuaugaaaguaugggggga

SEQ ID NO: 788592 - RNA, 20 nt, Artificial Sequence
  Synthetic
auuccacagaccugggggga

SEQ ID NO: 788593 - RNA, 20 nt, Artificial Sequence
  Synthetic
uacuuuuggcucugggggga

SEQ ID NO: 788594 - RNA, 20 nt, Artificial Sequence
  Synthetic
cuguguucaaggugggggga

SEQ ID NO: 788595 - RNA, 20 nt, Artificial Sequence
  Synthetic
ccugucguggggugggggga

SEQ ID NO: 788596 - RNA, 20 nt, Artificial Sequence
  Synthetic
acugugguggggugggggga

SEQ ID NO: 788597 - RNA, 20 nt, Artificial Sequence
  Synthetic
acugcuguggggugggggga

SEQ ID NO: 788598 - RNA, 20 nt, Artificial Sequence
  Synthetic
ccugcuguggggugggggga

SEQ ID NO: 788599 - RNA, 20 nt, Artificial Sequence
  Synthetic
acuguuguggggugggggga

SEQ ID NO: 788600 - RNA, 20 nt, Artificial Sequence
  Synthetic
ccuguuguggggugggggga

SEQ ID NO: 788601 - RNA, 20 nt, Artificial Sequence
  Synthetic
ugcugauuggcuugggggga

SEQ ID NO: 788602 - RNA, 20 nt, Artificial Sequence
  Synthetic
ccccaucaaaaaguggggga

SEQ ID NO: 788603 - RNA, 20 nt, Artificial Sequence
  Synthetic
cagugagagaaaguggggga

SEQ ID NO: 788604 - RNA, 20 nt, Artificial Sequence
  Synthetic
uuggccugugagguggggga

SEQ ID NO: 788605 - RNA, 20 nt, Artificial Sequence
  Synthetic
ugaagcugaggguuggggga

SEQ ID NO: 788606 - RNA, 20 nt, Artificial Sequence
  Synthetic
uaaaaccagauguuggggga

SEQ ID NO: 788607 - RNA, 20 nt, Artificial Sequence
  Synthetic
uugguuaagagaaaugggga

SEQ ID NO: 788608 - RNA, 20 nt, Artificial Sequence
  Synthetic
aucauuuacugagaugggga

SEQ ID NO: 788609 - RNA, 20 nt, Artificial Sequence
  Synthetic
cauugguagcuugaugggga

SEQ ID NO: 788610 - RNA, 20 nt, Artificial Sequence
  Synthetic
uucagagauccuccugggga

SEQ ID NO: 788611 - RNA, 20 nt, Artificial Sequence
  Synthetic
agaaacaauuuagcugggga

SEQ ID NO: 788612 - RNA, 20 nt, Artificial Sequence
  Synthetic
aaauagaugagggcugggga

SEQ ID NO: 788613 - RNA, 20 nt, Artificial Sequence
  Synthetic
ugacacagaaacucugggga

SEQ ID NO: 788614 - RNA, 20 nt, Artificial Sequence
  Synthetic
ugaaucaggaacucugggga

SEQ ID NO: 788615 - RNA, 20 nt, Artificial Sequence
  Synthetic
uaaaucagaaucucugggga

SEQ ID NO: 788616 - RNA, 20 nt, Artificial Sequence
  Synthetic
ugucagaagcucucugggga

SEQ ID NO: 788617 - RNA, 20 nt, Artificial Sequence
  Synthetic
uaauuggggaggucugggga

SEQ ID NO: 788618 - RNA, 20 nt, Artificial Sequence
  Synthetic
auagcaguuucuucugggga

SEQ ID NO: 788619 - RNA, 20 nt, Artificial Sequence
  Synthetic
ucauaucaguaaagugggga

SEQ ID NO: 788620 - RNA, 20 nt, Artificial Sequence
  Synthetic
aguguaagagaaggugggga

SEQ ID NO: 788621 - RNA, 20 nt, Artificial Sequence
  Synthetic
acucaagcuuagugugggga

SEQ ID NO: 788622 - RNA, 20 nt, Artificial Sequence
  Synthetic
uauugcacacauugugggga

SEQ ID NO: 788623 - RNA, 20 nt, Artificial Sequence
  Synthetic
uucacaaaaagacuugggga

SEQ ID NO: 788624 - RNA, 20 nt, Artificial Sequence
  Synthetic
ccaccauauacccuugggga

SEQ ID NO: 788625 - RNA, 20 nt, Artificial Sequence
  Synthetic
aaaaugacccgauuugggga

SEQ ID NO: 788626 - RNA, 20 nt, Artificial Sequence
  Synthetic
uuuaagauuuucuuugggga

SEQ ID NO: 788627 - RNA, 20 nt, Artificial Sequence
  Synthetic
ccccuugcaaauuuugggga

SEQ ID NO: 788628 - RNA, 20 nt, Artificial Sequence
  Synthetic
uugaaaucuauaaaauggga

SEQ ID NO: 788629 - RNA, 20 nt, Artificial Sequence
  Synthetic
aauuaugagaacaaauggga

SEQ ID NO: 788630 - RNA, 20 nt, Artificial Sequence
  Synthetic
aggacagagggagaauggga

SEQ ID NO: 788631 - RNA, 20 nt, Artificial Sequence
  Synthetic
ucaggcucuugagaauggga

SEQ ID NO: 788632 - RNA, 20 nt, Artificial Sequence
  Synthetic
uaauuucugugguaauggga

SEQ ID NO: 788633 - RNA, 20 nt, Artificial Sequence
  Synthetic
auuauuauuauuacauggga

SEQ ID NO: 788634 - RNA, 20 nt, Artificial Sequence
  Synthetic
cagauucauaaaccauggga

SEQ ID NO: 788635 - RNA, 20 nt, Artificial Sequence
  Synthetic
aucacgagaacagcauggga

SEQ ID NO: 788636 - RNA, 20 nt, Artificial Sequence
  Synthetic
aauccccagaugucauggga

SEQ ID NO: 788637 - RNA, 20 nt, Artificial Sequence
  Synthetic
aauccccaggugucauggga

SEQ ID NO: 788638 - RNA, 20 nt, Artificial Sequence
  Synthetic
cuagagauacggagauggga

SEQ ID NO: 788639 - RNA, 20 nt, Artificial Sequence
  Synthetic
uugguaauggggagauggga

SEQ ID NO: 788640 - RNA, 20 nt, Artificial Sequence
  Synthetic
uuaauaacuuuuagauggga

SEQ ID NO: 788641 - RNA, 20 nt, Artificial Sequence
  Synthetic
augguuaccugaggauggga

SEQ ID NO: 788642 - RNA, 20 nt, Artificial Sequence
  Synthetic
ccucugguccuaugauggga

SEQ ID NO: 788643 - RNA, 20 nt, Artificial Sequence
  Synthetic
ccucugggcuugugauggga

SEQ ID NO: 788644 - RNA, 20 nt, Artificial Sequence
  Synthetic
auaaauuaaaagauauggga

SEQ ID NO: 788645 - RNA, 20 nt, Artificial Sequence
  Synthetic
aagcagagcagccuauggga

SEQ ID NO: 788646 - RNA, 20 nt, Artificial Sequence
  Synthetic
caaugaugucaucuauggga

SEQ ID NO: 788647 - RNA, 20 nt, Artificial Sequence
  Synthetic
aucuacuugccauuauggga

SEQ ID NO: 788648 - RNA, 20 nt, Artificial Sequence
  Synthetic
aauucccauguguuauggga

SEQ ID NO: 788649 - RNA, 20 nt, Artificial Sequence
  Synthetic
aauuauaagcuuuuauggga

SEQ ID NO: 788650 - RNA, 20 nt, Artificial Sequence
  Synthetic
aguacuuaaaaaaacuggga

SEQ ID NO: 788651 - RNA, 20 nt, Artificial Sequence
  Synthetic
auacaaaaaauuaacuggga

SEQ ID NO: 788652 - RNA, 20 nt, Artificial Sequence
  Synthetic
agacaagggaagcacuggga

SEQ ID NO: 788653 - RNA, 20 nt, Artificial Sequence
  Synthetic
auauuuccaggagacuggga

SEQ ID NO: 788654 - RNA, 20 nt, Artificial Sequence
  Synthetic
auuuguagagcauacuggga

SEQ ID NO: 788655 - RNA, 20 nt, Artificial Sequence
  Synthetic
uuacauuugagcuacuggga

SEQ ID NO: 788656 - RNA, 20 nt, Artificial Sequence
  Synthetic
aaauguccaugaaccuggga

SEQ ID NO: 788657 - RNA, 20 nt, Artificial Sequence
  Synthetic
aaagcuacacagaccuggga

SEQ ID NO: 788658 - RNA, 20 nt, Artificial Sequence
  Synthetic
uuuaagaaaaaugccuggga

SEQ ID NO: 788659 - RNA, 20 nt, Artificial Sequence
  Synthetic
aacccccacacguccuggga

SEQ ID NO: 788660 - RNA, 20 nt, Artificial Sequence
  Synthetic
agccaugauagcagcuggga

SEQ ID NO: 788661 - RNA, 20 nt, Artificial Sequence
  Synthetic
cagggacacuggagcuggga

SEQ ID NO: 788662 - RNA, 20 nt, Artificial Sequence
  Synthetic
agcgcuuugggaggcuggga

SEQ ID NO: 788663 - RNA, 20 nt, Artificial Sequence
  Synthetic
uguuuagaguacggcuggga

SEQ ID NO: 788664 - RNA, 20 nt, Artificial Sequence
  Synthetic
uuuugccauguuggcuggga

SEQ ID NO: 788665 - RNA, 20 nt, Artificial Sequence
  Synthetic
auuguaccagcaugcuggga

SEQ ID NO: 788666 - RNA, 20 nt, Artificial Sequence
  Synthetic
uuuaagacaugaugcuggga

SEQ ID NO: 788667 - RNA, 20 nt, Artificial Sequence
  Synthetic
uugaguucugacugcuggga

SEQ ID NO: 788668 - RNA, 20 nt, Artificial Sequence
  Synthetic
cugauucaguagaucuggga

SEQ ID NO: 788669 - RNA, 20 nt, Artificial Sequence
  Synthetic
agggaacgugaucucuggga

SEQ ID NO: 788670 - RNA, 20 nt, Artificial Sequence
  Synthetic
ucccuggagaaagucuggga

SEQ ID NO: 788671 - RNA, 20 nt, Artificial Sequence
  Synthetic
cugugucaguuggucuggga

SEQ ID NO: 788672 - RNA, 20 nt, Artificial Sequence
  Synthetic
acauuugagcugaaguggga

SEQ ID NO: 788673 - RNA, 20 nt, Artificial Sequence
  Synthetic
ucagaaggggcagaguggga

SEQ ID NO: 788674 - RNA, 20 nt, Artificial Sequence
  Synthetic
uugggagugggggaguggga

SEQ ID NO: 788675 - RNA, 20 nt, Artificial Sequence
  Synthetic
uacuuuugaaaaagguggga

SEQ ID NO: 788676 - RNA, 20 nt, Artificial Sequence
  Synthetic
cuaggaguuggaagguggga

SEQ ID NO: 788677 - RNA, 20 nt, Artificial Sequence
  Synthetic
cuugggaggcugagguggga

SEQ ID NO: 788678 - RNA, 20 nt, Artificial Sequence
  Synthetic
ccagcaggggugagguggga

SEQ ID NO: 788679 - RNA, 20 nt, Artificial Sequence
  Synthetic
agaagggcgagaggguggga

SEQ ID NO: 788680 - RNA, 20 nt, Artificial Sequence
  Synthetic
aagcaaaaaacgggguggga

SEQ ID NO: 788681 - RNA, 20 nt, Artificial Sequence
  Synthetic
uguguccuuacaugguggga

SEQ ID NO: 788682 - RNA, 20 nt, Artificial Sequence
  Synthetic
uacaaacacuccugguggga

SEQ ID NO: 788683 - RNA, 20 nt, Artificial Sequence
  Synthetic
caaagaugaaauauguggga

SEQ ID NO: 788684 - RNA, 20 nt, Artificial Sequence
  Synthetic
uguuggauguguguguggga

SEQ ID NO: 788685 - RNA, 20 nt, Artificial Sequence
  Synthetic
aauuccuacauguuguggga

SEQ ID NO: 788686 - RNA, 20 nt, Artificial Sequence
  Synthetic
aauccccacguguuguggga

SEQ ID NO: 788687 - RNA, 20 nt, Artificial Sequence
  Synthetic
aauucccauguguuguggga

SEQ ID NO: 788688 - RNA, 20 nt, Artificial Sequence
  Synthetic
aauuccuacuuguuguggga

SEQ ID NO: 788689 - RNA, 20 nt, Artificial Sequence
  Synthetic
aaucugagggaaaauuggga

SEQ ID NO: 788690 - RNA, 20 nt, Artificial Sequence
  Synthetic
uaagcacaccauaauuggga

SEQ ID NO: 788691 - RNA, 20 nt, Artificial Sequence
  Synthetic
aaaaugaagugagauuggga

SEQ ID NO: 788692 - RNA, 20 nt, Artificial Sequence
  Synthetic
ccagugcugggugauuggga

SEQ ID NO: 788693 - RNA, 20 nt, Artificial Sequence
  Synthetic
uggucugcugacacuuggga

SEQ ID NO: 788694 - RNA, 20 nt, Artificial Sequence
  Synthetic
agcuaaacuggagcuuggga

SEQ ID NO: 788695 - RNA, 20 nt, Artificial Sequence
  Synthetic
uugacuggucucucuuggga

SEQ ID NO: 788696 - RNA, 20 nt, Artificial Sequence
  Synthetic
uuccugguuuagucuuggga

SEQ ID NO: 788697 - RNA, 20 nt, Artificial Sequence
  Synthetic
uaaauuuucuggucuuggga

SEQ ID NO: 788698 - RNA, 20 nt, Artificial Sequence
  Synthetic
ugaugaauucuuucuuggga

SEQ ID NO: 788699 - RNA, 20 nt, Artificial Sequence
  Synthetic
cugguaauauuaaguuggga

SEQ ID NO: 788700 - RNA, 20 nt, Artificial Sequence
  Synthetic
uuuuguguuaaagguuggga

SEQ ID NO: 788701 - RNA, 20 nt, Artificial Sequence
  Synthetic
uaggggagguaugguuggga

SEQ ID NO: 788702 - RNA, 20 nt, Artificial Sequence
  Synthetic
uguacagcugcugguuggga

SEQ ID NO: 788703 - RNA, 20 nt, Artificial Sequence
  Synthetic
agacuuagauuauguuggga

SEQ ID NO: 788704 - RNA, 20 nt, Artificial Sequence
  Synthetic
acuuugagugacuguuggga

SEQ ID NO: 788705 - RNA, 20 nt, Artificial Sequence
  Synthetic
acuuugggugacuguuggga

SEQ ID NO: 788706 - RNA, 20 nt, Artificial Sequence
  Synthetic
ugaagacgugccauuuggga

SEQ ID NO: 788707 - RNA, 20 nt, Artificial Sequence
  Synthetic
ucagaguugcagauuuggga

SEQ ID NO: 788708 - RNA, 20 nt, Artificial Sequence
  Synthetic
aagggacaugagauuuggga

SEQ ID NO: 788709 - RNA, 20 nt, Artificial Sequence
  Synthetic
ugaugacaugagauuuggga

SEQ ID NO: 788710 - RNA, 20 nt, Artificial Sequence
  Synthetic
ucauccauguuccuuuggga

SEQ ID NO: 788711 - RNA, 20 nt, Artificial Sequence
  Synthetic
auuuuaccauaaguuuggga

SEQ ID NO: 788712 - RNA, 20 nt, Artificial Sequence
  Synthetic
caaaagagcaagguuuggga

SEQ ID NO: 788713 - RNA, 20 nt, Artificial Sequence
  Synthetic
auugucgucauauuuuggga

SEQ ID NO: 788714 - RNA, 20 nt, Artificial Sequence
  Synthetic
cuggaaaguauguuuuggga

SEQ ID NO: 788715 - RNA, 20 nt, Artificial Sequence
  Synthetic
ucuagucuuaaaaaaaugga

SEQ ID NO: 788716 - RNA, 20 nt, Artificial Sequence
  Synthetic
agggauuugacaaaaaugga

SEQ ID NO: 788717 - RNA, 20 nt, Artificial Sequence
  Synthetic
cagagggauauaaaaaugga

SEQ ID NO: 788718 - RNA, 20 nt, Artificial Sequence
  Synthetic
aacagcuaauuaaaaaugga

SEQ ID NO: 788719 - RNA, 20 nt, Artificial Sequence
  Synthetic
uuucccuugaacaaaaugga

SEQ ID NO: 788720 - RNA, 20 nt, Artificial Sequence
  Synthetic
uaccucuaaaagaaaaugga

SEQ ID NO: 788721 - RNA, 20 nt, Artificial Sequence
  Synthetic
augaaaaagccuaaaaugga

SEQ ID NO: 788722 - RNA, 20 nt, Artificial Sequence
  Synthetic
ugagaggguguagaaaugga

SEQ ID NO: 788723 - RNA, 20 nt, Artificial Sequence
  Synthetic
acaaggaggaaauaaaugga

SEQ ID NO: 788724 - RNA, 20 nt, Artificial Sequence
  Synthetic
auguauaauauauaaaugga

SEQ ID NO: 788725 - RNA, 20 nt, Artificial Sequence
  Synthetic
ucauagaagcaguaaaugga

SEQ ID NO: 788726 - RNA, 20 nt, Artificial Sequence
  Synthetic
aaaagcugauuuuaaaugga

SEQ ID NO: 788727 - RNA, 20 nt, Artificial Sequence
  Synthetic
cuuucguuugaaucaaugga

SEQ ID NO: 788728 - RNA, 20 nt, Artificial Sequence
  Synthetic
acccuggcagcaagaaugga

SEQ ID NO: 788729 - RNA, 20 nt, Artificial Sequence
  Synthetic
acacauaagaucagaaugga

SEQ ID NO: 788730 - RNA, 20 nt, Artificial Sequence
  Synthetic
agugcugcugggagaaugga

SEQ ID NO: 788731 - RNA, 20 nt, Artificial Sequence
  Synthetic
ugaaaggacaaacgaaugga

SEQ ID NO: 788732 - RNA, 20 nt, Artificial Sequence
  Synthetic
ugcuaagaaaagggaaugga

SEQ ID NO: 788733 - RNA, 20 nt, Artificial Sequence
  Synthetic
uagccauucuuuugaaugga

SEQ ID NO: 788734 - RNA, 20 nt, Artificial Sequence
  Synthetic
acuugagagcaaauaaugga

SEQ ID NO: 788735 - RNA, 20 nt, Artificial Sequence
  Synthetic
agcauaauuuuaauaaugga

SEQ ID NO: 788736 - RNA, 20 nt, Artificial Sequence
  Synthetic
acauuuggugaauuaaugga

SEQ ID NO: 788737 - RNA, 20 nt, Artificial Sequence
  Synthetic
ugucgucaauacuuaaugga

SEQ ID NO: 788738 - RNA, 20 nt, Artificial Sequence
  Synthetic
cuugcuuuguauuuaaugga

SEQ ID NO: 788739 - RNA, 20 nt, Artificial Sequence
  Synthetic
uauaggaagaagaacaugga

SEQ ID NO: 788740 - RNA, 20 nt, Artificial Sequence
  Synthetic
ugucuagccugucacaugga

SEQ ID NO: 788741 - RNA, 20 nt, Artificial Sequence
  Synthetic
cagugccacacugacaugga

SEQ ID NO: 788742 - RNA, 20 nt, Artificial Sequence
  Synthetic
cauuugcaaaaauacaugga

SEQ ID NO: 788743 - RNA, 20 nt, Artificial Sequence
  Synthetic
augacaugaaauuacaugga

SEQ ID NO: 788744 - RNA, 20 nt, Artificial Sequence
  Synthetic
cccugucuuuuuuccaugga

SEQ ID NO: 788745 - RNA, 20 nt, Artificial Sequence
  Synthetic
ucaguauuuucaggcaugga

SEQ ID NO: 788746 - RNA, 20 nt, Artificial Sequence
  Synthetic
uuuucaaccaguggcaugga

SEQ ID NO: 788747 - RNA, 20 nt, Artificial Sequence
  Synthetic
uacaaugucugaugcaugga

SEQ ID NO: 788748 - RNA, 20 nt, Artificial Sequence
  Synthetic
uucauuugcaacaucaugga

SEQ ID NO: 788749 - RNA, 20 nt, Artificial Sequence
  Synthetic
aagcuauaugucaucaugga

SEQ ID NO: 788750 - RNA, 20 nt, Artificial Sequence
  Synthetic
agaacacauggacucaugga

SEQ ID NO: 788751 - RNA, 20 nt, Artificial Sequence
  Synthetic
agagaaaggucugucaugga

SEQ ID NO: 788752 - RNA, 20 nt, Artificial Sequence
  Synthetic
aggcacauaaaguucaugga

SEQ ID NO: 788753 - RNA, 20 nt, Artificial Sequence
  Synthetic
uaaguuaccaaguucaugga

SEQ ID NO: 788754 - RNA, 20 nt, Artificial Sequence
  Synthetic
auuuggucuucuuucaugga

SEQ ID NO: 788755 - RNA, 20 nt, Artificial Sequence
  Synthetic
cucuggacacaaaagaugga

SEQ ID NO: 788756 - RNA, 20 nt, Artificial Sequence
  Synthetic
acaucucuuaauaagaugga

SEQ ID NO: 788757 - RNA, 20 nt, Artificial Sequence
  Synthetic
aucccaggccuccagaugga

SEQ ID NO: 788758 - RNA, 20 nt, Artificial Sequence
  Synthetic
uuugcaggcucagagaugga

SEQ ID NO: 788759 - RNA, 20 nt, Artificial Sequence
  Synthetic
agaagaguucuggagaugga

SEQ ID NO: 788760 - RNA, 20 nt, Artificial Sequence
  Synthetic
ugaaucuauuaugagaugga

SEQ ID NO: 788761 - RNA, 20 nt, Artificial Sequence
  Synthetic
acauaguuaccaacgaugga

SEQ ID NO: 788762 - RNA, 20 nt, Artificial Sequence
  Synthetic
aguuggaaaagaucgaugga

SEQ ID NO: 788763 - RNA, 20 nt, Artificial Sequence
  Synthetic
aaagaagaugccaggaugga

SEQ ID NO: 788764 - RNA, 20 nt, Artificial Sequence
  Synthetic
ucuuuuucucagaggaugga

SEQ ID NO: 788765 - RNA, 20 nt, Artificial Sequence
  Synthetic
aaauccagagauaggaugga

SEQ ID NO: 788766 - RNA, 20 nt, Artificial Sequence
  Synthetic
uguauuggccuggggaugga

SEQ ID NO: 788767 - RNA, 20 nt, Artificial Sequence
  Synthetic
uaaguggauggauggaugga

SEQ ID NO: 788768 - RNA, 20 nt, Artificial Sequence
  Synthetic
uagaugaauaaguggaugga

SEQ ID NO: 788769 - RNA, 20 nt, Artificial Sequence
  Synthetic
aucugcauuguuuggaugga

SEQ ID NO: 788770 - RNA, 20 nt, Artificial Sequence
  Synthetic
acauucaaaauaaugaugga

SEQ ID NO: 788771 - RNA, 20 nt, Artificial Sequence
  Synthetic
ugucaugauuccaugaugga

SEQ ID NO: 788772 - RNA, 20 nt, Artificial Sequence
  Synthetic
accuuuugaacuaugaugga

SEQ ID NO: 788773 - RNA, 20 nt, Artificial Sequence
  Synthetic
cagagaaagaugcugaugga

SEQ ID NO: 788774 - RNA, 20 nt, Artificial Sequence
  Synthetic
uuaaucuuuuugcugaugga

SEQ ID NO: 788775 - RNA, 20 nt, Artificial Sequence
  Synthetic
cccuaggagauucugaugga

SEQ ID NO: 788776 - RNA, 20 nt, Artificial Sequence
  Synthetic
aaauaugauugauugaugga

SEQ ID NO: 788777 - RNA, 20 nt, Artificial Sequence
  Synthetic
agagggagccauuugaugga

SEQ ID NO: 788778 - RNA, 20 nt, Artificial Sequence
  Synthetic
uggaaggagguaaauaugga

SEQ ID NO: 788779 - RNA, 20 nt, Artificial Sequence
  Synthetic
aaagugaagauacauaugga

SEQ ID NO: 788780 - RNA, 20 nt, Artificial Sequence
  Synthetic
uuuaaaggagcagauaugga

SEQ ID NO: 788781 - RNA, 20 nt, Artificial Sequence
  Synthetic
aacagaaugauggauaugga

SEQ ID NO: 788782 - RNA, 20 nt, Artificial Sequence
  Synthetic
uuaucuucauuuuauaugga

SEQ ID NO: 788783 - RNA, 20 nt, Artificial Sequence
  Synthetic
ucugucugcuuaacuaugga

SEQ ID NO: 788784 - RNA, 20 nt, Artificial Sequence
  Synthetic
cuuugacaauugacuaugga

SEQ ID NO: 788785 - RNA, 20 nt, Artificial Sequence
  Synthetic
cuuuggcaucacccuaugga

SEQ ID NO: 788786 - RNA, 20 nt, Artificial Sequence
  Synthetic
uguaagauacugaguaugga

SEQ ID NO: 788787 - RNA, 20 nt, Artificial Sequence
  Synthetic
agcucagaaccacguaugga

SEQ ID NO: 788788 - RNA, 20 nt, Artificial Sequence
  Synthetic
ccuagaugaagauguaugga

SEQ ID NO: 788789 - RNA, 20 nt, Artificial Sequence
  Synthetic
ucaugucuccaguguaugga

SEQ ID NO: 788790 - RNA, 20 nt, Artificial Sequence
  Synthetic
agcaagggaacaaaacugga

SEQ ID NO: 788791 - RNA, 20 nt, Artificial Sequence
  Synthetic
aaugggguggugaaacugga

SEQ ID NO: 788792 - RNA, 20 nt, Artificial Sequence
  Synthetic
aaagauugugaagaacugga

SEQ ID NO: 788793 - RNA, 20 nt, Artificial Sequence
  Synthetic
caaaagaaauuauaacugga

SEQ ID NO: 788794 - RNA, 20 nt, Artificial Sequence
  Synthetic
uuuugcucugauuaacugga

SEQ ID NO: 788795 - RNA, 20 nt, Artificial Sequence
  Synthetic
agcagagagaagacacugga

SEQ ID NO: 788796 - RNA, 20 nt, Artificial Sequence
  Synthetic
acaugcugucccccacugga

SEQ ID NO: 788797 - RNA, 20 nt, Artificial Sequence
  Synthetic
ugucuccguuucccacugga

SEQ ID NO: 788798 - RNA, 20 nt, Artificial Sequence
  Synthetic
aguaaggaaacaucacugga

SEQ ID NO: 788799 - RNA, 20 nt, Artificial Sequence
  Synthetic
cagucucuuuuaugacugga

SEQ ID NO: 788800 - RNA, 20 nt, Artificial Sequence
  Synthetic
acacacuggggccuacugga

SEQ ID NO: 788801 - RNA, 20 nt, Artificial Sequence
  Synthetic
uccuuuaaaaugguacugga

SEQ ID NO: 788802 - RNA, 20 nt, Artificial Sequence
  Synthetic
agauggggcuagaaccugga

SEQ ID NO: 788803 - RNA, 20 nt, Artificial Sequence
  Synthetic
cagucaucuuggaaccugga

SEQ ID NO: 788804 - RNA, 20 nt, Artificial Sequence
  Synthetic
acaauauguaugaaccugga

SEQ ID NO: 788805 - RNA, 20 nt, Artificial Sequence
  Synthetic
auacaucagaaucaccugga

SEQ ID NO: 788806 - RNA, 20 nt, Artificial Sequence
  Synthetic
auucuguaucuugaccugga

SEQ ID NO: 788807 - RNA, 20 nt, Artificial Sequence
  Synthetic
aguucaguugccacccugga

SEQ ID NO: 788808 - RNA, 20 nt, Artificial Sequence
  Synthetic
auccaagucagcccccugga

SEQ ID NO: 788809 - RNA, 20 nt, Artificial Sequence
  Synthetic
ccuguuugagauggccugga

SEQ ID NO: 788810 - RNA, 20 nt, Artificial Sequence
  Synthetic
auuucaaucaauauccugga

SEQ ID NO: 788811 - RNA, 20 nt, Artificial Sequence
  Synthetic
ucauguuuaacucuccugga

SEQ ID NO: 788812 - RNA, 20 nt, Artificial Sequence
  Synthetic
uauuuuuuuuuuuuccugga

SEQ ID NO: 788813 - RNA, 20 nt, Artificial Sequence
  Synthetic
ucacaucagaaucagcugga

SEQ ID NO: 788814 - RNA, 20 nt, Artificial Sequence
  Synthetic
ucacgucagaaucagcugga

SEQ ID NO: 788815 - RNA, 20 nt, Artificial Sequence
  Synthetic
cucucauagauucagcugga

SEQ ID NO: 788816 - RNA, 20 nt, Artificial Sequence
  Synthetic
caaguaaguuaagagcugga

SEQ ID NO: 788817 - RNA, 20 nt, Artificial Sequence
  Synthetic
uguagugccugguagcugga

SEQ ID NO: 788818 - RNA, 20 nt, Artificial Sequence
  Synthetic
aaggcaacaaacacgcugga

SEQ ID NO: 788819 - RNA, 20 nt, Artificial Sequence
  Synthetic
uuuccaaacucugggcugga

SEQ ID NO: 788820 - RNA, 20 nt, Artificial Sequence
  Synthetic
cacaaaagauuaaugcugga

SEQ ID NO: 788821 - RNA, 20 nt, Artificial Sequence
  Synthetic
uacaguaugauguugcugga

SEQ ID NO: 788822 - RNA, 20 nt, Artificial Sequence
  Synthetic
uguauguuucacaaucugga

SEQ ID NO: 788823 - RNA, 20 nt, Artificial Sequence
  Synthetic
cuucacaugcugaaucugga

SEQ ID NO: 788824 - RNA, 20 nt, Artificial Sequence
  Synthetic
cugaugucuauagaucugga

SEQ ID NO: 788825 - RNA, 20 nt, Artificial Sequence
  Synthetic
aaaauggaucuggaucugga

SEQ ID NO: 788826 - RNA, 20 nt, Artificial Sequence
  Synthetic
agaugguaguauuaucugga

SEQ ID NO: 788827 - RNA, 20 nt, Artificial Sequence
  Synthetic
uuuaccagcucuacucugga

SEQ ID NO: 788828 - RNA, 20 nt, Artificial Sequence
  Synthetic
ccuguuucuucaccucugga

SEQ ID NO: 788829 - RNA, 20 nt, Artificial Sequence
  Synthetic
ugagguuauaauccucugga

SEQ ID NO: 788830 - RNA, 20 nt, Artificial Sequence
  Synthetic
auuuguuuggcuccucugga

SEQ ID NO: 788831 - RNA, 20 nt, Artificial Sequence
  Synthetic
cuccuucucucugcucugga

SEQ ID NO: 788832 - RNA, 20 nt, Artificial Sequence
  Synthetic
agacauaagaacucucugga

SEQ ID NO: 788833 - RNA, 20 nt, Artificial Sequence
  Synthetic
uggagagagguaagucugga

SEQ ID NO: 788834 - RNA, 20 nt, Artificial Sequence
  Synthetic
uuugggggucucagucugga

SEQ ID NO: 788835 - RNA, 20 nt, Artificial Sequence
  Synthetic
acaaagucauggagucugga

SEQ ID NO: 788836 - RNA, 20 nt, Artificial Sequence
  Synthetic
auuuccuguagcugucugga

SEQ ID NO: 788837 - RNA, 20 nt, Artificial Sequence
  Synthetic
acauauucauuaguucugga

SEQ ID NO: 788838 - RNA, 20 nt, Artificial Sequence
  Synthetic
ugauuacuguguguucugga

SEQ ID NO: 788839 - RNA, 20 nt, Artificial Sequence
  Synthetic
augcguuucaaauuucugga

SEQ ID NO: 788840 - RNA, 20 nt, Artificial Sequence
  Synthetic
uuaaggaaagguuuucugga

SEQ ID NO: 788841 - RNA, 20 nt, Artificial Sequence
  Synthetic
aauaggaagaacaaagugga

SEQ ID NO: 788842 - RNA, 20 nt, Artificial Sequence
  Synthetic
aauuaagaaaagaaagugga

SEQ ID NO: 788843 - RNA, 20 nt, Artificial Sequence
  Synthetic
uggguagaugaauaagugga

SEQ ID NO: 788844 - RNA, 20 nt, Artificial Sequence
  Synthetic
aauaugaugguaacagugga

SEQ ID NO: 788845 - RNA, 20 nt, Artificial Sequence
  Synthetic
uagacucuuccuacagugga

SEQ ID NO: 788846 - RNA, 20 nt, Artificial Sequence
  Synthetic
aagcaaaacaagccagugga

SEQ ID NO: 788847 - RNA, 20 nt, Artificial Sequence
  Synthetic
cugagagcaauuucagugga

SEQ ID NO: 788848 - RNA, 20 nt, Artificial Sequence
  Synthetic
aagggugguuugagagugga

SEQ ID NO: 788849 - RNA, 20 nt, Artificial Sequence
  Synthetic
agaucugagcucugagugga

SEQ ID NO: 788850 - RNA, 20 nt, Artificial Sequence
  Synthetic
ugacagaauguuugagugga

SEQ ID NO: 788851 - RNA, 20 nt, Artificial Sequence
  Synthetic
agugaugucuugguagugga

SEQ ID NO: 788852 - RNA, 20 nt, Artificial Sequence
  Synthetic
auuuuuggguaauuagugga

SEQ ID NO: 788853 - RNA, 20 nt, Artificial Sequence
  Synthetic
auaaugcuauguuuagugga

SEQ ID NO: 788854 - RNA, 20 nt, Artificial Sequence
  Synthetic
caaagcuuccacaacgugga

SEQ ID NO: 788855 - RNA, 20 nt, Artificial Sequence
  Synthetic
cgagucacaucuuacgugga

SEQ ID NO: 788856 - RNA, 20 nt, Artificial Sequence
  Synthetic
acgccuaagcuguccgugga

SEQ ID NO: 788857 - RNA, 20 nt, Artificial Sequence
  Synthetic
cagagagagauaggcgugga

SEQ ID NO: 788858 - RNA, 20 nt, Artificial Sequence
  Synthetic
acaggagggagaaaggugga

SEQ ID NO: 788859 - RNA, 20 nt, Artificial Sequence
  Synthetic
ugacacuagguacaggugga

SEQ ID NO: 788860 - RNA, 20 nt, Artificial Sequence
  Synthetic
aacuugucccagcaggugga

SEQ ID NO: 788861 - RNA, 20 nt, Artificial Sequence
  Synthetic
aaguaggcugaggaggugga

SEQ ID NO: 788862 - RNA, 20 nt, Artificial Sequence
  Synthetic
cuuugggaggcugaggugga

SEQ ID NO: 788863 - RNA, 20 nt, Artificial Sequence
  Synthetic
aaguaugugugugaggugga

SEQ ID NO: 788864 - RNA, 20 nt, Artificial Sequence
  Synthetic
acuuggagauagagggugga

SEQ ID NO: 788865 - RNA, 20 nt, Artificial Sequence
  Synthetic
ugggguggggggagggugga

SEQ ID NO: 788866 - RNA, 20 nt, Artificial Sequence
  Synthetic
aggaucuacucuagggugga

SEQ ID NO: 788867 - RNA, 20 nt, Artificial Sequence
  Synthetic
uagucacauggaggggugga

SEQ ID NO: 788868 - RNA, 20 nt, Artificial Sequence
  Synthetic
aagcugcaguggugggugga

SEQ ID NO: 788869 - RNA, 20 nt, Artificial Sequence
  Synthetic
aauuagccaggcauggugga

SEQ ID NO: 788870 - RNA, 20 nt, Artificial Sequence
  Synthetic
uagcaacuauuccuggugga

SEQ ID NO: 788871 - RNA, 20 nt, Artificial Sequence
  Synthetic
ccuuugcccuugcuggugga

SEQ ID NO: 788872 - RNA, 20 nt, Artificial Sequence
  Synthetic
cauacuaaguguguggugga

SEQ ID NO: 788873 - RNA, 20 nt, Artificial Sequence
  Synthetic
aucggugaaaaaaaugugga

SEQ ID NO: 788874 - RNA, 20 nt, Artificial Sequence
  Synthetic
agugcugaagcaaaugugga

SEQ ID NO: 788875 - RNA, 20 nt, Artificial Sequence
  Synthetic
uauauguagagcaaugugga

SEQ ID NO: 788876 - RNA, 20 nt, Artificial Sequence
  Synthetic
aaaauguuagucuaugugga

SEQ ID NO: 788877 - RNA, 20 nt, Artificial Sequence
  Synthetic
ucccuuuaauucuaugugga

SEQ ID NO: 788878 - RNA, 20 nt, Artificial Sequence
  Synthetic
uaaauuauauucuaugugga

SEQ ID NO: 788879 - RNA, 20 nt, Artificial Sequence
  Synthetic
uauuagccagacacugugga

SEQ ID NO: 788880 - RNA, 20 nt, Artificial Sequence
  Synthetic
uuuaaccuggcaucugugga

SEQ ID NO: 788881 - RNA, 20 nt, Artificial Sequence
  Synthetic
cauuuuuaguuaucugugga

SEQ ID NO: 788882 - RNA, 20 nt, Artificial Sequence
  Synthetic
accucucuuugcucugugga

SEQ ID NO: 788883 - RNA, 20 nt, Artificial Sequence
  Synthetic
cucggcuaggacagugugga

SEQ ID NO: 788884 - RNA, 20 nt, Artificial Sequence
  Synthetic
agggacuauuagagugugga

SEQ ID NO: 788885 - RNA, 20 nt, Artificial Sequence
  Synthetic
acuuagugauagggugugga

SEQ ID NO: 788886 - RNA, 20 nt, Artificial Sequence
  Synthetic
uguuuaugagugggugugga

SEQ ID NO: 788887 - RNA, 20 nt, Artificial Sequence
  Synthetic
aggcccacccacauugugga

SEQ ID NO: 788888 - RNA, 20 nt, Artificial Sequence
  Synthetic
aagugucuguucauugugga

SEQ ID NO: 788889 - RNA, 20 nt, Artificial Sequence
  Synthetic
ccuaaauaauuccuugugga

SEQ ID NO: 788890 - RNA, 20 nt, Artificial Sequence
  Synthetic
auuuauuauuuccuugugga

SEQ ID NO: 788891 - RNA, 20 nt, Artificial Sequence
  Synthetic
aggaaaaacagucuugugga

SEQ ID NO: 788892 - RNA, 20 nt, Artificial Sequence
  Synthetic
aguuuauggagucuugugga

SEQ ID NO: 788893 - RNA, 20 nt, Artificial Sequence
  Synthetic
caagaucauuuuguugugga

SEQ ID NO: 788894 - RNA, 20 nt, Artificial Sequence
  Synthetic
ccaaugggaaaauuugugga

SEQ ID NO: 788895 - RNA, 20 nt, Artificial Sequence
  Synthetic
uuuaaaagucaauuugugga

SEQ ID NO: 788896 - RNA, 20 nt, Artificial Sequence
  Synthetic
aauggcagaagauuugugga

SEQ ID NO: 788897 - RNA, 20 nt, Artificial Sequence
  Synthetic
aaauuauuucuauuugugga

SEQ ID NO: 788898 - RNA, 20 nt, Artificial Sequence
  Synthetic
uuuaauggugcguuugugga

SEQ ID NO: 788899 - RNA, 20 nt, Artificial Sequence
  Synthetic
cucuguauugaaaaauugga

SEQ ID NO: 788900 - RNA, 20 nt, Artificial Sequence
  Synthetic
aaaaauauuguaaaauugga

SEQ ID NO: 788901 - RNA, 20 nt, Artificial Sequence
  Synthetic
uaugacaauaacaaauugga

SEQ ID NO: 788902 - RNA, 20 nt, Artificial Sequence
  Synthetic
uagaugcaagauaaauugga

SEQ ID NO: 788903 - RNA, 20 nt, Artificial Sequence
  Synthetic
uguaaaauucuacaauugga

SEQ ID NO: 788904 - RNA, 20 nt, Artificial Sequence
  Synthetic
uggauaccauugcaauugga

SEQ ID NO: 788905 - RNA, 20 nt, Artificial Sequence
  Synthetic
aauaaaaugagggcauugga

SEQ ID NO: 788906 - RNA, 20 nt, Artificial Sequence
  Synthetic
cuguaacuuggaagauugga

SEQ ID NO: 788907 - RNA, 20 nt, Artificial Sequence
  Synthetic
aaguagaaugggagauugga

SEQ ID NO: 788908 - RNA, 20 nt, Artificial Sequence
  Synthetic
uaauuggagaguagauugga

SEQ ID NO: 788909 - RNA, 20 nt, Artificial Sequence
  Synthetic
acaaaaagaaggggauugga

SEQ ID NO: 788910 - RNA, 20 nt, Artificial Sequence
  Synthetic
augagaugggaguuauugga

SEQ ID NO: 788911 - RNA, 20 nt, Artificial Sequence
  Synthetic
uuauaggguaauuuauugga

SEQ ID NO: 788912 - RNA, 20 nt, Artificial Sequence
  Synthetic
uaguauggaaaacacuugga

SEQ ID NO: 788913 - RNA, 20 nt, Artificial Sequence
  Synthetic
ugaagccuuuaagacuugga

SEQ ID NO: 788914 - RNA, 20 nt, Artificial Sequence
  Synthetic
aguuaaaauacugacuugga

SEQ ID NO: 788915 - RNA, 20 nt, Artificial Sequence
  Synthetic
uguaaucccagcuacuugga

SEQ ID NO: 788916 - RNA, 20 nt, Artificial Sequence
  Synthetic
cgaccugguuaguacuugga

SEQ ID NO: 788917 - RNA, 20 nt, Artificial Sequence
  Synthetic
uguguugcccuucccuugga

SEQ ID NO: 788918 - RNA, 20 nt, Artificial Sequence
  Synthetic
auuugaaagcuugccuugga

SEQ ID NO: 788919 - RNA, 20 nt, Artificial Sequence
  Synthetic
aacaucuugagguccuugga

SEQ ID NO: 788920 - RNA, 20 nt, Artificial Sequence
  Synthetic
uuuacuuaagccagcuugga

SEQ ID NO: 788921 - RNA, 20 nt, Artificial Sequence
  Synthetic
agaugugaacuuaucuugga

SEQ ID NO: 788922 - RNA, 20 nt, Artificial Sequence
  Synthetic
caaagugaauagcucuugga

SEQ ID NO: 788923 - RNA, 20 nt, Artificial Sequence
  Synthetic
aaaauauacaugcucuugga

SEQ ID NO: 788924 - RNA, 20 nt, Artificial Sequence
  Synthetic
aauuaaaaaaacuucuugga

SEQ ID NO: 788925 - RNA, 20 nt, Artificial Sequence
  Synthetic
aaauuauguuuguucuugga

SEQ ID NO: 788926 - RNA, 20 nt, Artificial Sequence
  Synthetic
uuuuccauuucuuucuugga

SEQ ID NO: 788927 - RNA, 20 nt, Artificial Sequence
  Synthetic
agauuauuuuuuuucuugga

SEQ ID NO: 788928 - RNA, 20 nt, Artificial Sequence
  Synthetic
uguugucucuaggaguugga

SEQ ID NO: 788929 - RNA, 20 nt, Artificial Sequence
  Synthetic
ucuuaacuugaauaguugga

SEQ ID NO: 788930 - RNA, 20 nt, Artificial Sequence
  Synthetic
uucuucacacaguaguugga

SEQ ID NO: 788931 - RNA, 20 nt, Artificial Sequence
  Synthetic
ucacauucaaagagguugga

SEQ ID NO: 788932 - RNA, 20 nt, Artificial Sequence
  Synthetic
agggcagcagugagguugga

SEQ ID NO: 788933 - RNA, 20 nt, Artificial Sequence
  Synthetic
aaguagaaggugagguugga

SEQ ID NO: 788934 - RNA, 20 nt, Artificial Sequence
  Synthetic
cauaggcuguugggguugga

SEQ ID NO: 788935 - RNA, 20 nt, Artificial Sequence
  Synthetic
cagggauaugagauguugga

SEQ ID NO: 788936 - RNA, 20 nt, Artificial Sequence
  Synthetic
ucccuaaucgcucuguugga

SEQ ID NO: 788937 - RNA, 20 nt, Artificial Sequence
  Synthetic
uuuguucauauucuguugga

SEQ ID NO: 788938 - RNA, 20 nt, Artificial Sequence
  Synthetic
ugaucuccacaaguguugga

SEQ ID NO: 788939 - RNA, 20 nt, Artificial Sequence
  Synthetic
uaugucguagcauuguugga

SEQ ID NO: 788940 - RNA, 20 nt, Artificial Sequence
  Synthetic
cugggcuuuucuuuguugga

SEQ ID NO: 788941 - RNA, 20 nt, Artificial Sequence
  Synthetic
uggauaccuaucaauuugga

SEQ ID NO: 788942 - RNA, 20 nt, Artificial Sequence
  Synthetic
uuguuuuguuauaauuugga

SEQ ID NO: 788943 - RNA, 20 nt, Artificial Sequence
  Synthetic
uuauggaucuuacauuugga

SEQ ID NO: 788944 - RNA, 20 nt, Artificial Sequence
  Synthetic
aagagguuauaccauuugga

SEQ ID NO: 788945 - RNA, 20 nt, Artificial Sequence
  Synthetic
auuucaacaugagauuugga

SEQ ID NO: 788946 - RNA, 20 nt, Artificial Sequence
  Synthetic
aauucaagaugagauuugga

SEQ ID NO: 788947 - RNA, 20 nt, Artificial Sequence
  Synthetic
aggagaaacaaaacuuugga

SEQ ID NO: 788948 - RNA, 20 nt, Artificial Sequence
  Synthetic
ucaauauuauacacuuugga

SEQ ID NO: 788949 - RNA, 20 nt, Artificial Sequence
  Synthetic
uguaaucccagcacuuugga

SEQ ID NO: 788950 - RNA, 20 nt, Artificial Sequence
  Synthetic
uaugauccuagcacuuugga

SEQ ID NO: 788951 - RNA, 20 nt, Artificial Sequence
  Synthetic
auuguggggaugacuuugga

SEQ ID NO: 788952 - RNA, 20 nt, Artificial Sequence
  Synthetic
ucucuuguccuaccuuugga

SEQ ID NO: 788953 - RNA, 20 nt, Artificial Sequence
  Synthetic
uaggaaguggggccuuugga

SEQ ID NO: 788954 - RNA, 20 nt, Artificial Sequence
  Synthetic
auagguccugcaucuuugga

SEQ ID NO: 788955 - RNA, 20 nt, Artificial Sequence
  Synthetic
aguuuccuggccucuuugga

SEQ ID NO: 788956 - RNA, 20 nt, Artificial Sequence
  Synthetic
uuguucaccuuuucuuugga

SEQ ID NO: 788957 - RNA, 20 nt, Artificial Sequence
  Synthetic
auacuugccacaaguuugga

SEQ ID NO: 788958 - RNA, 20 nt, Artificial Sequence
  Synthetic
acagguuggaacaguuugga

SEQ ID NO: 788959 - RNA, 20 nt, Artificial Sequence
  Synthetic
agagucugguacaguuugga

SEQ ID NO: 788960 - RNA, 20 nt, Artificial Sequence
  Synthetic
cuauggaagcuauguuugga

SEQ ID NO: 788961 - RNA, 20 nt, Artificial Sequence
  Synthetic
caaaagucuaaguguuugga

SEQ ID NO: 788962 - RNA, 20 nt, Artificial Sequence
  Synthetic
uacaaucugcauuguuugga

SEQ ID NO: 788963 - RNA, 20 nt, Artificial Sequence
  Synthetic
cuacccauuacaauuuugga

SEQ ID NO: 788964 - RNA, 20 nt, Artificial Sequence
  Synthetic
ucauuuauuuauauuuugga

SEQ ID NO: 788965 - RNA, 20 nt, Artificial Sequence
  Synthetic
ucaaagagagagcuuuugga

SEQ ID NO: 788966 - RNA, 20 nt, Artificial Sequence
  Synthetic
uacugggaaugucuuuugga

SEQ ID NO: 788967 - RNA, 20 nt, Artificial Sequence
  Synthetic
uuggugcuuguucuuuugga

SEQ ID NO: 788968 - RNA, 20 nt, Artificial Sequence
  Synthetic
auuucaacaucaguuuugga

SEQ ID NO: 788969 - RNA, 20 nt, Artificial Sequence
  Synthetic
aguugcuccaacuuuuugga

SEQ ID NO: 788970 - RNA, 20 nt, Artificial Sequence
  Synthetic
auuacagaagacuuuuugga

SEQ ID NO: 788971 - RNA, 20 nt, Artificial Sequence
  Synthetic
cagauuaaaaaaaaaaauga

SEQ ID NO: 788972 - RNA, 20 nt, Artificial Sequence
  Synthetic
uaaccuguuaccaaaaauga

SEQ ID NO: 788973 - RNA, 20 nt, Artificial Sequence
  Synthetic
cuuacacuuuagaaaaauga

SEQ ID NO: 788974 - RNA, 20 nt, Artificial Sequence
  Synthetic
aauauguccaggaaaaauga

SEQ ID NO: 788975 - RNA, 20 nt, Artificial Sequence
  Synthetic
cauacuugugggaaaaauga

SEQ ID NO: 788976 - RNA, 20 nt, Artificial Sequence
  Synthetic
ccuuuacuuugccaaaauga

SEQ ID NO: 788977 - RNA, 20 nt, Artificial Sequence
  Synthetic
aaaugcuaucaucaaaauga

SEQ ID NO: 788978 - RNA, 20 nt, Artificial Sequence
  Synthetic
ccuucuggaucucaaaauga

SEQ ID NO: 788979 - RNA, 20 nt, Artificial Sequence
  Synthetic
aaaaucauggcagaaaauga

SEQ ID NO: 788980 - RNA, 20 nt, Artificial Sequence
  Synthetic
uaguuuuaaucagaaaauga

SEQ ID NO: 788981 - RNA, 20 nt, Artificial Sequence
  Synthetic
uucaguaagccggaaaauga

SEQ ID NO: 788982 - RNA, 20 nt, Artificial Sequence
  Synthetic
uuguuuguuuguuaaaauga

SEQ ID NO: 788983 - RNA, 20 nt, Artificial Sequence
  Synthetic
uuuaguaauaacacaaauga

SEQ ID NO: 788984 - RNA, 20 nt, Artificial Sequence
  Synthetic
agucagacucugacaaauga

SEQ ID NO: 788985 - RNA, 20 nt, Artificial Sequence
  Synthetic
aggauacagaagccaaauga

SEQ ID NO: 788986 - RNA, 20 nt, Artificial Sequence
  Synthetic
cccauaaaaucuccaaauga

SEQ ID NO: 788987 - RNA, 20 nt, Artificial Sequence
  Synthetic
ugacauaaucuaucaaauga

SEQ ID NO: 788988 - RNA, 20 nt, Artificial Sequence
  Synthetic
agcagggaaggaagaaauga

SEQ ID NO: 788989 - RNA, 20 nt, Artificial Sequence
  Synthetic
aucacacagcuaagaaauga

SEQ ID NO: 788990 - RNA, 20 nt, Artificial Sequence
  Synthetic
ugcauuggagacagaaauga

SEQ ID NO: 788991 - RNA, 20 nt, Artificial Sequence
  Synthetic
acgaucugagacagaaauga

SEQ ID NO: 788992 - RNA, 20 nt, Artificial Sequence
  Synthetic
ucagaauuuggcagaaauga

SEQ ID NO: 788993 - RNA, 20 nt, Artificial Sequence
  Synthetic
uuggcccacugcagaaauga

SEQ ID NO: 788994 - RNA, 20 nt, Artificial Sequence
  Synthetic
cuggguacauaacgaaauga

SEQ ID NO: 788995 - RNA, 20 nt, Artificial Sequence
  Synthetic
auaggacuuucaggaaauga

SEQ ID NO: 788996 - RNA, 20 nt, Artificial Sequence
  Synthetic
uguauaguucuuggaaauga

SEQ ID NO: 788997 - RNA, 20 nt, Artificial Sequence
  Synthetic
agauuccccuuuggaaauga

SEQ ID NO: 788998 - RNA, 20 nt, Artificial Sequence
  Synthetic
auuggugcaguaugaaauga

SEQ ID NO: 788999 - RNA, 20 nt, Artificial Sequence
  Synthetic
auugccauuuacugaaauga

SEQ ID NO: 789000 - RNA, 20 nt, Artificial Sequence
  Synthetic
auucaccaagguugaaauga

SEQ ID NO: 789001 - RNA, 20 nt, Artificial Sequence
  Synthetic
auaaaaugggagauaaauga

SEQ ID NO: 789002 - RNA, 20 nt, Artificial Sequence
  Synthetic
aauggcugagggauaaauga

SEQ ID NO: 789003 - RNA, 20 nt, Artificial Sequence
  Synthetic
accauaagguggauaaauga

SEQ ID NO: 789004 - RNA, 20 nt, Artificial Sequence
  Synthetic
aucagauaaaugauaaauga

SEQ ID NO: 789005 - RNA, 20 nt, Artificial Sequence
  Synthetic
uugguuuaauugauaaauga

SEQ ID NO: 789006 - RNA, 20 nt, Artificial Sequence
  Synthetic
ugggaguauacacuaaauga

SEQ ID NO: 789007 - RNA, 20 nt, Artificial Sequence
  Synthetic
aguacaugcuuccuaaauga

SEQ ID NO: 789008 - RNA, 20 nt, Artificial Sequence
  Synthetic
uuguuuaagauucuaaauga

SEQ ID NO: 789009 - RNA, 20 nt, Artificial Sequence
  Synthetic
aagaaucacugaguaaauga

SEQ ID NO: 789010 - RNA, 20 nt, Artificial Sequence
  Synthetic
auuuccagauagguaaauga

SEQ ID NO: 789011 - RNA, 20 nt, Artificial Sequence
  Synthetic
cauuucagggugguaaauga

SEQ ID NO: 789012 - RNA, 20 nt, Artificial Sequence
  Synthetic
aaacaaggaaauguaaauga

SEQ ID NO: 789013 - RNA, 20 nt, Artificial Sequence
  Synthetic
accauguuauaauuaaauga

SEQ ID NO: 789014 - RNA, 20 nt, Artificial Sequence
  Synthetic
aaucccaauuaguuaaauga

SEQ ID NO: 789015 - RNA, 20 nt, Artificial Sequence
  Synthetic
agaggaggaguuuuaaauga

SEQ ID NO: 789016 - RNA, 20 nt, Artificial Sequence
  Synthetic
aggucauacugaaacaauga

SEQ ID NO: 789017 - RNA, 20 nt, Artificial Sequence
  Synthetic
uguggcuucagcaacaauga

SEQ ID NO: 789018 - RNA, 20 nt, Artificial Sequence
  Synthetic
aagauuaaaaauaacaauga

SEQ ID NO: 789019 - RNA, 20 nt, Artificial Sequence
  Synthetic
ucaucccuaaauaacaauga

SEQ ID NO: 789020 - RNA, 20 nt, Artificial Sequence
  Synthetic
aggaagcauuuagccaauga

SEQ ID NO: 789021 - RNA, 20 nt, Artificial Sequence
  Synthetic
uuucauuuaaccuccaauga

SEQ ID NO: 789022 - RNA, 20 nt, Artificial Sequence
  Synthetic
uacaggggagaaggcaauga

SEQ ID NO: 789023 - RNA, 20 nt, Artificial Sequence
  Synthetic
cuggaucacuugugcaauga

SEQ ID NO: 789024 - RNA, 20 nt, Artificial Sequence
  Synthetic
uauuuuaucacaaucaauga

SEQ ID NO: 789025 - RNA, 20 nt, Artificial Sequence
  Synthetic
aaacuaucauacaucaauga

SEQ ID NO: 789026 - RNA, 20 nt, Artificial Sequence
  Synthetic
aacuuaugagcacucaauga

SEQ ID NO: 789027 - RNA, 20 nt, Artificial Sequence
  Synthetic
cccuucaaaaaagucaauga

SEQ ID NO: 789028 - RNA, 20 nt, Artificial Sequence
  Synthetic
uggcagccaagcaagaauga

SEQ ID NO: 789029 - RNA, 20 nt, Artificial Sequence
  Synthetic
caagacacagucaagaauga

SEQ ID NO: 789030 - RNA, 20 nt, Artificial Sequence
  Synthetic
uaaggaagaaagaagaauga

SEQ ID NO: 789031 - RNA, 20 nt, Artificial Sequence
  Synthetic
aaugcacagaauaagaauga

SEQ ID NO: 789032 - RNA, 20 nt, Artificial Sequence
  Synthetic
uguuaguuugcuaagaauga

SEQ ID NO: 789033 - RNA, 20 nt, Artificial Sequence
  Synthetic
aaagaccuauuacagaauga

SEQ ID NO: 789034 - RNA, 20 nt, Artificial Sequence
  Synthetic
ucucauugcuuccagaauga

SEQ ID NO: 789035 - RNA, 20 nt, Artificial Sequence
  Synthetic
ccuaagaucaugcagaauga

SEQ ID NO: 789036 - RNA, 20 nt, Artificial Sequence
  Synthetic
ugauaguuugcucagaauga

SEQ ID NO: 789037 - RNA, 20 nt, Artificial Sequence
  Synthetic
cuggaggaagaagagaauga

SEQ ID NO: 789038 - RNA, 20 nt, Artificial Sequence
  Synthetic
cgauaguuuacugagaauga

SEQ ID NO: 789039 - RNA, 20 nt, Artificial Sequence
  Synthetic
ccauaguuugcugagaauga

SEQ ID NO: 789040 - RNA, 20 nt, Artificial Sequence
  Synthetic
cgauaguuugcugagaauga

SEQ ID NO: 789041 - RNA, 20 nt, Artificial Sequence
  Synthetic
uguuaguuugcugagaauga

SEQ ID NO: 789042 - RNA, 20 nt, Artificial Sequence
  Synthetic
uauuaagcaugaccgaauga

SEQ ID NO: 789043 - RNA, 20 nt, Artificial Sequence
  Synthetic
uuucuuuucuuaaggaauga

SEQ ID NO: 789044 - RNA, 20 nt, Artificial Sequence
  Synthetic
uggcuccuccauaggaauga

SEQ ID NO: 789045 - RNA, 20 nt, Artificial Sequence
  Synthetic
ugucugagagguaggaauga

SEQ ID NO: 789046 - RNA, 20 nt, Artificial Sequence
  Synthetic
ugggaugaugaggggaauga

SEQ ID NO: 789047 - RNA, 20 nt, Artificial Sequence
  Synthetic
ucucaaaguagugggaauga

SEQ ID NO: 789048 - RNA, 20 nt, Artificial Sequence
  Synthetic
accuugagaggguggaauga

SEQ ID NO: 789049 - RNA, 20 nt, Artificial Sequence
  Synthetic
augaacaaauaaaugaauga

SEQ ID NO: 789050 - RNA, 20 nt, Artificial Sequence
  Synthetic
uugguugcagcaaugaauga

SEQ ID NO: 789051 - RNA, 20 nt, Artificial Sequence
  Synthetic
aguauuuguagaaugaauga

SEQ ID NO: 789052 - RNA, 20 nt, Artificial Sequence
  Synthetic
cuuaauacgugaaugaauga

SEQ ID NO: 789053 - RNA, 20 nt, Artificial Sequence
  Synthetic
auguuuguuaucaugaauga

SEQ ID NO: 789054 - RNA, 20 nt, Artificial Sequence
  Synthetic
caagaguuuucuaugaauga

SEQ ID NO: 789055 - RNA, 20 nt, Artificial Sequence
  Synthetic
cuucaucagucacugaauga

SEQ ID NO: 789056 - RNA, 20 nt, Artificial Sequence
  Synthetic
uacuuuaaauuccugaauga

SEQ ID NO: 789057 - RNA, 20 nt, Artificial Sequence
  Synthetic
uuauaauaaaagcugaauga

SEQ ID NO: 789058 - RNA, 20 nt, Artificial Sequence
  Synthetic
uaaagagcauuucugaauga

SEQ ID NO: 789059 - RNA, 20 nt, Artificial Sequence
  Synthetic
aguguagauucauugaauga

SEQ ID NO: 789060 - RNA, 20 nt, Artificial Sequence
  Synthetic
auuuacauucaaaauaauga

SEQ ID NO: 789061 - RNA, 20 nt, Artificial Sequence
  Synthetic
acuguauguuuaaauaauga

SEQ ID NO: 789062 - RNA, 20 nt, Artificial Sequence
  Synthetic
aaacaugaaaauaauaauga

SEQ ID NO: 789063 - RNA, 20 nt, Artificial Sequence
  Synthetic
ucaaaaauuacagauaauga

SEQ ID NO: 789064 - RNA, 20 nt, Artificial Sequence
  Synthetic
uagagaaaaagugauaauga

SEQ ID NO: 789065 - RNA, 20 nt, Artificial Sequence
  Synthetic
uaaugcaauaaaccuaauga

SEQ ID NO: 789066 - RNA, 20 nt, Artificial Sequence
  Synthetic
uuuagaguucuugcuaauga

SEQ ID NO: 789067 - RNA, 20 nt, Artificial Sequence
  Synthetic
cuuacaagagcuucuaauga

SEQ ID NO: 789068 - RNA, 20 nt, Artificial Sequence
  Synthetic
cucuuccuugcuucuaauga

SEQ ID NO: 789069 - RNA, 20 nt, Artificial Sequence
  Synthetic
aacauauuugaaaguaauga

SEQ ID NO: 789070 - RNA, 20 nt, Artificial Sequence
  Synthetic
uacagugaaugcaguaauga

SEQ ID NO: 789071 - RNA, 20 nt, Artificial Sequence
  Synthetic
auucagcuggaagguaauga

SEQ ID NO: 789072 - RNA, 20 nt, Artificial Sequence
  Synthetic
uuucaacauaaugguaauga

SEQ ID NO: 789073 - RNA, 20 nt, Artificial Sequence
  Synthetic
uauuuaauacuacuuaauga

SEQ ID NO: 789074 - RNA, 20 nt, Artificial Sequence
  Synthetic
aaauccgcuugucuuaauga

SEQ ID NO: 789075 - RNA, 20 nt, Artificial Sequence
  Synthetic
uaaguaucuuuguuuaauga

SEQ ID NO: 789076 - RNA, 20 nt, Artificial Sequence
  Synthetic
uuuuauuacccaaaacauga

SEQ ID NO: 789077 - RNA, 20 nt, Artificial Sequence
  Synthetic
cacuggcuaaaacaacauga

SEQ ID NO: 789078 - RNA, 20 nt, Artificial Sequence
  Synthetic
cuuccuucuccccaacauga

SEQ ID NO: 789079 - RNA, 20 nt, Artificial Sequence
  Synthetic
auauuaaaaaugcaacauga

SEQ ID NO: 789080 - RNA, 20 nt, Artificial Sequence
  Synthetic
cauuauuccauugaacauga

SEQ ID NO: 789081 - RNA, 20 nt, Artificial Sequence
  Synthetic
auaauugaaaaguaacauga

SEQ ID NO: 789082 - RNA, 20 nt, Artificial Sequence
  Synthetic
agagguaaagacacacauga

SEQ ID NO: 789083 - RNA, 20 nt, Artificial Sequence
  Synthetic
ucauaucaggauacacauga

SEQ ID NO: 789084 - RNA, 20 nt, Artificial Sequence
  Synthetic
uuguugagaacaccacauga

SEQ ID NO: 789085 - RNA, 20 nt, Artificial Sequence
  Synthetic
aaauguagaaggccacauga

SEQ ID NO: 789086 - RNA, 20 nt, Artificial Sequence
  Synthetic
uuuucacugauggcacauga

SEQ ID NO: 789087 - RNA, 20 nt, Artificial Sequence
  Synthetic
ccagagacaacugcacauga

SEQ ID NO: 789088 - RNA, 20 nt, Artificial Sequence
  Synthetic
cuugauaugucaucacauga

SEQ ID NO: 789089 - RNA, 20 nt, Artificial Sequence
  Synthetic
acacauccuuugucacauga

SEQ ID NO: 789090 - RNA, 20 nt, Artificial Sequence
  Synthetic
caugacuggagaagacauga

SEQ ID NO: 789091 - RNA, 20 nt, Artificial Sequence
  Synthetic
aagaggugauuaggacauga

SEQ ID NO: 789092 - RNA, 20 nt, Artificial Sequence
  Synthetic
uguuuucacucuggacauga

SEQ ID NO: 789093 - RNA, 20 nt, Artificial Sequence
  Synthetic
agaguuaucuucugacauga

SEQ ID NO: 789094 - RNA, 20 nt, Artificial Sequence
  Synthetic
uucuauuauugaauacauga

SEQ ID NO: 789095 - RNA, 20 nt, Artificial Sequence
  Synthetic
uaauauaagucuauacauga

SEQ ID NO: 789096 - RNA, 20 nt, Artificial Sequence
  Synthetic
uuuccaaauuuuauacauga

SEQ ID NO: 789097 - RNA, 20 nt, Artificial Sequence
  Synthetic
agugggugcuugcuacauga

SEQ ID NO: 789098 - RNA, 20 nt, Artificial Sequence
  Synthetic
auagaacaaugucuacauga

SEQ ID NO: 789099 - RNA, 20 nt, Artificial Sequence
  Synthetic
acuguuuauucauuacauga

SEQ ID NO: 789100 - RNA, 20 nt, Artificial Sequence
  Synthetic
agugcuauuuuauuacauga

SEQ ID NO: 789101 - RNA, 20 nt, Artificial Sequence
  Synthetic
agauaaauuuauuuacauga

SEQ ID NO: 789102 - RNA, 20 nt, Artificial Sequence
  Synthetic
aggacaauacaaaaccauga

SEQ ID NO: 789103 - RNA, 20 nt, Artificial Sequence
  Synthetic
cauuuacagugaaaccauga

SEQ ID NO: 789104 - RNA, 20 nt, Artificial Sequence
  Synthetic
augggauuacauaaccauga

SEQ ID NO: 789105 - RNA, 20 nt, Artificial Sequence
  Synthetic
uguggcccucaccaccauga

SEQ ID NO: 789106 - RNA, 20 nt, Artificial Sequence
  Synthetic
caaaaccaucgccaccauga

SEQ ID NO: 789107 - RNA, 20 nt, Artificial Sequence
  Synthetic
uuaugauguaagcaccauga

SEQ ID NO: 789108 - RNA, 20 nt, Artificial Sequence
  Synthetic
uagaaggaggaugaccauga

SEQ ID NO: 789109 - RNA, 20 nt, Artificial Sequence
  Synthetic
cugaaguaauuugaccauga

SEQ ID NO: 789110 - RNA, 20 nt, Artificial Sequence
  Synthetic
uggagacucaaauaccauga

SEQ ID NO: 789111 - RNA, 20 nt, Artificial Sequence
  Synthetic
caguguaaugaguaccauga

SEQ ID NO: 789112 - RNA, 20 nt, Artificial Sequence
  Synthetic
cauguacugacuacccauga

SEQ ID NO: 789113 - RNA, 20 nt, Artificial Sequence
  Synthetic
augaauaacugaagccauga

SEQ ID NO: 789114 - RNA, 20 nt, Artificial Sequence
  Synthetic
uccauaucaagcagccauga

SEQ ID NO: 789115 - RNA, 20 nt, Artificial Sequence
  Synthetic
aaguggugauuaggccauga

SEQ ID NO: 789116 - RNA, 20 nt, Artificial Sequence
  Synthetic
aauuaaucuaaaugccauga

SEQ ID NO: 789117 - RNA, 20 nt, Artificial Sequence
  Synthetic
cuaauaagauaaauccauga

SEQ ID NO: 789118 - RNA, 20 nt, Artificial Sequence
  Synthetic
auuuauugugagcuccauga

SEQ ID NO: 789119 - RNA, 20 nt, Artificial Sequence
  Synthetic
uauaagaaauaucuccauga

SEQ ID NO: 789120 - RNA, 20 nt, Artificial Sequence
  Synthetic
cuucucaucuaauuccauga

SEQ ID NO: 789121 - RNA, 20 nt, Artificial Sequence
  Synthetic
agaaggaagucuuuccauga

SEQ ID NO: 789122 - RNA, 20 nt, Artificial Sequence
  Synthetic
agcagagagguuuuccauga

SEQ ID NO: 789123 - RNA, 20 nt, Artificial Sequence
  Synthetic
cugucacaagaacagcauga

SEQ ID NO: 789124 - RNA, 20 nt, Artificial Sequence
  Synthetic
cacacggagugagagcauga

SEQ ID NO: 789125 - RNA, 20 nt, Artificial Sequence
  Synthetic
ccacagugggaggagcauga

SEQ ID NO: 789126 - RNA, 20 nt, Artificial Sequence
  Synthetic
uuuauccugaaugagcauga

SEQ ID NO: 789127 - RNA, 20 nt, Artificial Sequence
  Synthetic
accauuagaaauuagcauga

SEQ ID NO: 789128 - RNA, 20 nt, Artificial Sequence
  Synthetic
ugagaaagugauuagcauga

SEQ ID NO: 789129 - RNA, 20 nt, Artificial Sequence
  Synthetic
aucgagaguuuuuagcauga

SEQ ID NO: 789130 - RNA, 20 nt, Artificial Sequence
  Synthetic
auugagaguuuuuagcauga

SEQ ID NO: 789131 - RNA, 20 nt, Artificial Sequence
  Synthetic
ugagggcacucaacgcauga

SEQ ID NO: 789132 - RNA, 20 nt, Artificial Sequence
  Synthetic
agagggaugaauaggcauga

SEQ ID NO: 789133 - RNA, 20 nt, Artificial Sequence
  Synthetic
aaaaaauuagcugggcauga

SEQ ID NO: 789134 - RNA, 20 nt, Artificial Sequence
  Synthetic
cuucuuaaaaagaugcauga

SEQ ID NO: 789135 - RNA, 20 nt, Artificial Sequence
  Synthetic
caauggcuuuagaugcauga

SEQ ID NO: 789136 - RNA, 20 nt, Artificial Sequence
  Synthetic
caaacaugcugagugcauga

SEQ ID NO: 789137 - RNA, 20 nt, Artificial Sequence
  Synthetic
uuuugcaucuuugugcauga

SEQ ID NO: 789138 - RNA, 20 nt, Artificial Sequence
  Synthetic
aagguacaucauuugcauga

SEQ ID NO: 789139 - RNA, 20 nt, Artificial Sequence
  Synthetic
aaaaaaccaauuaaucauga

SEQ ID NO: 789140 - RNA, 20 nt, Artificial Sequence
  Synthetic
uucaggaaaacacaucauga

SEQ ID NO: 789141 - RNA, 20 nt, Artificial Sequence
  Synthetic
auuugaaaauuccaucauga

SEQ ID NO: 789142 - RNA, 20 nt, Artificial Sequence
  Synthetic
ugaauauuuuuccaucauga

SEQ ID NO: 789143 - RNA, 20 nt, Artificial Sequence
  Synthetic
uuaaauuguaugcaucauga

SEQ ID NO: 789144 - RNA, 20 nt, Artificial Sequence
  Synthetic
aagaggugauugcaucauga

SEQ ID NO: 789145 - RNA, 20 nt, Artificial Sequence
  Synthetic
ucagcuagaaaucaucauga

SEQ ID NO: 789146 - RNA, 20 nt, Artificial Sequence
  Synthetic
aaaucuccugcucaucauga

SEQ ID NO: 789147 - RNA, 20 nt, Artificial Sequence
  Synthetic
uugcuuugcagucaucauga

SEQ ID NO: 789148 - RNA, 20 nt, Artificial Sequence
  Synthetic
uauauuacauuucaucauga

SEQ ID NO: 789149 - RNA, 20 nt, Artificial Sequence
  Synthetic
uguuuuugauucuaucauga

SEQ ID NO: 789150 - RNA, 20 nt, Artificial Sequence
  Synthetic
uaacauuuuuaguaucauga

SEQ ID NO: 789151 - RNA, 20 nt, Artificial Sequence
  Synthetic
auacaaaaauuaacucauga

SEQ ID NO: 789152 - RNA, 20 nt, Artificial Sequence
  Synthetic
acuuuaccuguuccucauga

SEQ ID NO: 789153 - RNA, 20 nt, Artificial Sequence
  Synthetic
acacagaggaaaggucauga

SEQ ID NO: 789154 - RNA, 20 nt, Artificial Sequence
  Synthetic
uugacuucucaaggucauga

SEQ ID NO: 789155 - RNA, 20 nt, Artificial Sequence
  Synthetic
acugcuuuucuaggucauga

SEQ ID NO: 789156 - RNA, 20 nt, Artificial Sequence
  Synthetic
uagguaaacuugugucauga

SEQ ID NO: 789157 - RNA, 20 nt, Artificial Sequence
  Synthetic
acccucauaggcauucauga

SEQ ID NO: 789158 - RNA, 20 nt, Artificial Sequence
  Synthetic
accaaagggaucauucauga

SEQ ID NO: 789159 - RNA, 20 nt, Artificial Sequence
  Synthetic
uucugugggucccuucauga

SEQ ID NO: 789160 - RNA, 20 nt, Artificial Sequence
  Synthetic
caagauuaaaagcuucauga

SEQ ID NO: 789161 - RNA, 20 nt, Artificial Sequence
  Synthetic
uuagaccauaggcuucauga

SEQ ID NO: 789162 - RNA, 20 nt, Artificial Sequence
  Synthetic
caauacugccugcuucauga

SEQ ID NO: 789163 - RNA, 20 nt, Artificial Sequence
  Synthetic
ucucuccuccccguucauga

SEQ ID NO: 789164 - RNA, 20 nt, Artificial Sequence
  Synthetic
ugaugcuaauccguucauga

SEQ ID NO: 789165 - RNA, 20 nt, Artificial Sequence
  Synthetic
aguaaucagacauuucauga

SEQ ID NO: 789166 - RNA, 20 nt, Artificial Sequence
  Synthetic
cacauuuuaaguuuucauga

SEQ ID NO: 789167 - RNA, 20 nt, Artificial Sequence
  Synthetic
uaguauaacuucaaagauga

SEQ ID NO: 789168 - RNA, 20 nt, Artificial Sequence
  Synthetic
cugaaguaggaacaagauga

SEQ ID NO: 789169 - RNA, 20 nt, Artificial Sequence
  Synthetic
acagagccuaaccaagauga

SEQ ID NO: 789170 - RNA, 20 nt, Artificial Sequence
  Synthetic
acguuuaggcaggaagauga

SEQ ID NO: 789171 - RNA, 20 nt, Artificial Sequence
  Synthetic
acuacuggcauugaagauga

SEQ ID NO: 789172 - RNA, 20 nt, Artificial Sequence
  Synthetic
uugcucuggaccuaagauga

SEQ ID NO: 789173 - RNA, 20 nt, Artificial Sequence
  Synthetic
agucaaaaaacaacagauga

SEQ ID NO: 789174 - RNA, 20 nt, Artificial Sequence
  Synthetic
augacccagaucacagauga

SEQ ID NO: 789175 - RNA, 20 nt, Artificial Sequence
  Synthetic
auacugauuaagacagauga

SEQ ID NO: 789176 - RNA, 20 nt, Artificial Sequence
  Synthetic
agugaggguagagcagauga

SEQ ID NO: 789177 - RNA, 20 nt, Artificial Sequence
  Synthetic
uaucucuguguugcagauga

SEQ ID NO: 789178 - RNA, 20 nt, Artificial Sequence
  Synthetic
uggggcaaguuuucagauga

SEQ ID NO: 789179 - RNA, 20 nt, Artificial Sequence
  Synthetic
acucagggaaaaagagauga

SEQ ID NO: 789180 - RNA, 20 nt, Artificial Sequence
  Synthetic
aaggagaggaagagagauga

SEQ ID NO: 789181 - RNA, 20 nt, Artificial Sequence
  Synthetic
ucuagaaaagauagagauga

SEQ ID NO: 789182 - RNA, 20 nt, Artificial Sequence
  Synthetic
agguaagugccaggagauga

SEQ ID NO: 789183 - RNA, 20 nt, Artificial Sequence
  Synthetic
cuaagccugagaggagauga

SEQ ID NO: 789184 - RNA, 20 nt, Artificial Sequence
  Synthetic
ugagagaucaauggagauga

SEQ ID NO: 789185 - RNA, 20 nt, Artificial Sequence
  Synthetic
aucauccaugcuggagauga

SEQ ID NO: 789186 - RNA, 20 nt, Artificial Sequence
  Synthetic
uauagaacuuucugagauga

SEQ ID NO: 789187 - RNA, 20 nt, Artificial Sequence
  Synthetic
cgaagagucaggugagauga

SEQ ID NO: 789188 - RNA, 20 nt, Artificial Sequence
  Synthetic
augauaaauacuugagauga

SEQ ID NO: 789189 - RNA, 20 nt, Artificial Sequence
  Synthetic
uacuacugugaaauagauga

SEQ ID NO: 789190 - RNA, 20 nt, Artificial Sequence
  Synthetic
ucugcuuuauagauagauga

SEQ ID NO: 789191 - RNA, 20 nt, Artificial Sequence
  Synthetic
auauaccuaaugcuagauga

SEQ ID NO: 789192 - RNA, 20 nt, Artificial Sequence
  Synthetic
gaaauaccuaauguagauga

SEQ ID NO: 789193 - RNA, 20 nt, Artificial Sequence
  Synthetic
caggaucucucugacgauga

SEQ ID NO: 789194 - RNA, 20 nt, Artificial Sequence
  Synthetic
cugugucuugccugcgauga

SEQ ID NO: 789195 - RNA, 20 nt, Artificial Sequence
  Synthetic
ugugaaacuuccaaggauga

SEQ ID NO: 789196 - RNA, 20 nt, Artificial Sequence
  Synthetic
ugcugaaguggcaaggauga

SEQ ID NO: 789197 - RNA, 20 nt, Artificial Sequence
  Synthetic
uccaucaaaucccaggauga

SEQ ID NO: 789198 - RNA, 20 nt, Artificial Sequence
  Synthetic
uucaauguuuuggaggauga

SEQ ID NO: 789199 - RNA, 20 nt, Artificial Sequence
  Synthetic
uguuaguuugcugaggauga

SEQ ID NO: 789200 - RNA, 20 nt, Artificial Sequence
  Synthetic
aaaaaguucucuuaggauga

SEQ ID NO: 789201 - RNA, 20 nt, Artificial Sequence
  Synthetic
caucuaggcccaagggauga

SEQ ID NO: 789202 - RNA, 20 nt, Artificial Sequence
  Synthetic
ucauuguuauuuagggauga

SEQ ID NO: 789203 - RNA, 20 nt, Artificial Sequence
  Synthetic
uaagcagggagaugggauga

SEQ ID NO: 789204 - RNA, 20 nt, Artificial Sequence
  Synthetic
auucaauagguuugggauga

SEQ ID NO: 789205 - RNA, 20 nt, Artificial Sequence
  Synthetic
auucaguagguuugggauga

SEQ ID NO: 789206 - RNA, 20 nt, Artificial Sequence
  Synthetic
uucaaagaucagguggauga

SEQ ID NO: 789207 - RNA, 20 nt, Artificial Sequence
  Synthetic
ccacucuaaccuuuggauga

SEQ ID NO: 789208 - RNA, 20 nt, Artificial Sequence
  Synthetic
cuauucugggguuuggauga

SEQ ID NO: 789209 - RNA, 20 nt, Artificial Sequence
  Synthetic
aacaaagcaauuuuggauga

SEQ ID NO: 789210 - RNA, 20 nt, Artificial Sequence
  Synthetic
auauuuggagccaaugauga

SEQ ID NO: 789211 - RNA, 20 nt, Artificial Sequence
  Synthetic
agcaauaguaauaaugauga

SEQ ID NO: 789212 - RNA, 20 nt, Artificial Sequence
  Synthetic
uuuuugcagagccaugauga

SEQ ID NO: 789213 - RNA, 20 nt, Artificial Sequence
  Synthetic
cauuaugaaccucaugauga

SEQ ID NO: 789214 - RNA, 20 nt, Artificial Sequence
  Synthetic
cauggucauggagaugauga

SEQ ID NO: 789215 - RNA, 20 nt, Artificial Sequence
  Synthetic
uuaaguagaugggaugauga

SEQ ID NO: 789216 - RNA, 20 nt, Artificial Sequence
  Synthetic
agaccuuuguaugaugauga

SEQ ID NO: 789217 - RNA, 20 nt, Artificial Sequence
  Synthetic
aacuugaauaauuaugauga

SEQ ID NO: 789218 - RNA, 20 nt, Artificial Sequence
  Synthetic
aauggcucccauuaugauga

SEQ ID NO: 789219 - RNA, 20 nt, Artificial Sequence
  Synthetic
uuuggggucugaacugauga

SEQ ID NO: 789220 - RNA, 20 nt, Artificial Sequence
  Synthetic
auuagaucauuaacugauga

SEQ ID NO: 789221 - RNA, 20 nt, Artificial Sequence
  Synthetic
ccucauucagugacugauga

SEQ ID NO: 789222 - RNA, 20 nt, Artificial Sequence
  Synthetic
ccaggaucugugccugauga

SEQ ID NO: 789223 - RNA, 20 nt, Artificial Sequence
  Synthetic
cugggguuugauccugauga

SEQ ID NO: 789224 - RNA, 20 nt, Artificial Sequence
  Synthetic
uauauaccaccuccugauga

SEQ ID NO: 789225 - RNA, 20 nt, Artificial Sequence
  Synthetic
cucaugaugauggcugauga

SEQ ID NO: 789226 - RNA, 20 nt, Artificial Sequence
  Synthetic
ugcaaugccaccagugauga

SEQ ID NO: 789227 - RNA, 20 nt, Artificial Sequence
  Synthetic
ucuacagaauucagugauga

SEQ ID NO: 789228 - RNA, 20 nt, Artificial Sequence
  Synthetic
uuuaaugaggaauuugauga

SEQ ID NO: 789229 - RNA, 20 nt, Artificial Sequence
  Synthetic
uugaugauuuucuuugauga

SEQ ID NO: 789230 - RNA, 20 nt, Artificial Sequence
  Synthetic
agacugaggaauuuugauga

SEQ ID NO: 789231 - RNA, 20 nt, Artificial Sequence
  Synthetic
agagagaagaaaaaauauga

SEQ ID NO: 789232 - RNA, 20 nt, Artificial Sequence
  Synthetic
auguacuuuuugaaauauga

SEQ ID NO: 789233 - RNA, 20 nt, Artificial Sequence
  Synthetic
agcucuguuccuaaauauga

SEQ ID NO: 789234 - RNA, 20 nt, Artificial Sequence
  Synthetic
cccuguguaaaacaauauga

SEQ ID NO: 789235 - RNA, 20 nt, Artificial Sequence
  Synthetic
cugauacuuuaacaauauga

SEQ ID NO: 789236 - RNA, 20 nt, Artificial Sequence
  Synthetic
uuuuguguuucacaauauga

SEQ ID NO: 789237 - RNA, 20 nt, Artificial Sequence
  Synthetic
aauucaccuacucaauauga

SEQ ID NO: 789238 - RNA, 20 nt, Artificial Sequence
  Synthetic
aacuuaaauauucaauauga

SEQ ID NO: 789239 - RNA, 20 nt, Artificial Sequence
  Synthetic
cuggagaugggagaauauga

SEQ ID NO: 789240 - RNA, 20 nt, Artificial Sequence
  Synthetic
aggaguaaacgugaauauga

SEQ ID NO: 789241 - RNA, 20 nt, Artificial Sequence
  Synthetic
auucauaacaucuaauauga

SEQ ID NO: 789242 - RNA, 20 nt, Artificial Sequence
  Synthetic
auuaggcugcagucauauga

SEQ ID NO: 789243 - RNA, 20 nt, Artificial Sequence
  Synthetic
auagauaacaggucauauga

SEQ ID NO: 789244 - RNA, 20 nt, Artificial Sequence
  Synthetic
aaauauugagccagauauga

SEQ ID NO: 789245 - RNA, 20 nt, Artificial Sequence
  Synthetic
aauuugacaucuagauauga

SEQ ID NO: 789246 - RNA, 20 nt, Artificial Sequence
  Synthetic
accaacagccaaggauauga

SEQ ID NO: 789247 - RNA, 20 nt, Artificial Sequence
  Synthetic
uaauauucagaaauauauga

SEQ ID NO: 789248 - RNA, 20 nt, Artificial Sequence
  Synthetic
auguauuuuuaaguauauga

SEQ ID NO: 789249 - RNA, 20 nt, Artificial Sequence
  Synthetic
ucuuguucuucaguauauga

SEQ ID NO: 789250 - RNA, 20 nt, Artificial Sequence
  Synthetic
uguuuuuguguauuauauga

SEQ ID NO: 789251 - RNA, 20 nt, Artificial Sequence
  Synthetic
cagaaauguaucuuauauga

SEQ ID NO: 789252 - RNA, 20 nt, Artificial Sequence
  Synthetic
uuucuuucuuuuuuauauga

SEQ ID NO: 789253 - RNA, 20 nt, Artificial Sequence
  Synthetic
ugucaccuuuugaacuauga

SEQ ID NO: 789254 - RNA, 20 nt, Artificial Sequence
  Synthetic
auuuauugaauacacuauga

SEQ ID NO: 789255 - RNA, 20 nt, Artificial Sequence
  Synthetic
auguaggccaaugacuauga

SEQ ID NO: 789256 - RNA, 20 nt, Artificial Sequence
  Synthetic
acccucaugaaugccuauga

SEQ ID NO: 789257 - RNA, 20 nt, Artificial Sequence
  Synthetic
cuaggccucugguccuauga

SEQ ID NO: 789258 - RNA, 20 nt, Artificial Sequence
  Synthetic
aaaugucucuaaugcuauga

SEQ ID NO: 789259 - RNA, 20 nt, Artificial Sequence
  Synthetic
cugguuccuucacucuauga

SEQ ID NO: 789260 - RNA, 20 nt, Artificial Sequence
  Synthetic
uauuuuggcauugucuauga

SEQ ID NO: 789261 - RNA, 20 nt, Artificial Sequence
  Synthetic
uacugagguuuggaguauga

SEQ ID NO: 789262 - RNA, 20 nt, Artificial Sequence
  Synthetic
augauguuuucaacguauga

SEQ ID NO: 789263 - RNA, 20 nt, Artificial Sequence
  Synthetic
cuguuuaagauuggguauga

SEQ ID NO: 789264 - RNA, 20 nt, Artificial Sequence
  Synthetic
uuuacuuccuuuugguauga

SEQ ID NO: 789265 - RNA, 20 nt, Artificial Sequence
  Synthetic
auuuuaugaacaauguauga

SEQ ID NO: 789266 - RNA, 20 nt, Artificial Sequence
  Synthetic
aaauaucaucacuuguauga

SEQ ID NO: 789267 - RNA, 20 nt, Artificial Sequence
  Synthetic
uaucaauuuagcuuguauga

SEQ ID NO: 789268 - RNA, 20 nt, Artificial Sequence
  Synthetic
uuguggguuugcuuguauga

SEQ ID NO: 789269 - RNA, 20 nt, Artificial Sequence
  Synthetic
uguacaauucagaauuauga

SEQ ID NO: 789270 - RNA, 20 nt, Artificial Sequence
  Synthetic
cugugauggaaacauuauga

SEQ ID NO: 789271 - RNA, 20 nt, Artificial Sequence
  Synthetic
uuuaucauuuaccauuauga

SEQ ID NO: 789272 - RNA, 20 nt, Artificial Sequence
  Synthetic
uagcccuuagcucauuauga

SEQ ID NO: 789273 - RNA, 20 nt, Artificial Sequence
  Synthetic
aggcaaagggaggauuauga

SEQ ID NO: 789274 - RNA, 20 nt, Artificial Sequence
  Synthetic
augauauuuucaacuuauga

SEQ ID NO: 789275 - RNA, 20 nt, Artificial Sequence
  Synthetic
augauguuuucaacuuauga

SEQ ID NO: 789276 - RNA, 20 nt, Artificial Sequence
  Synthetic
uguuaauaaaauacuuauga

SEQ ID NO: 789277 - RNA, 20 nt, Artificial Sequence
  Synthetic
cuuucuuggggcccuuauga

SEQ ID NO: 789278 - RNA, 20 nt, Artificial Sequence
  Synthetic
cccacuuauuuagcuuauga

SEQ ID NO: 789279 - RNA, 20 nt, Artificial Sequence
  Synthetic
agaugcuccucaucuuauga

SEQ ID NO: 789280 - RNA, 20 nt, Artificial Sequence
  Synthetic
uccucauauaauucuuauga

SEQ ID NO: 789281 - RNA, 20 nt, Artificial Sequence
  Synthetic
uacuguucccuuucuuauga

SEQ ID NO: 789282 - RNA, 20 nt, Artificial Sequence
  Synthetic
uagucuuuccuuucuuauga

SEQ ID NO: 789283 - RNA, 20 nt, Artificial Sequence
  Synthetic
ucuccucaccaagguuauga

SEQ ID NO: 789284 - RNA, 20 nt, Artificial Sequence
  Synthetic
uguucaucaguugguuauga

SEQ ID NO: 789285 - RNA, 20 nt, Artificial Sequence
  Synthetic
uaauaaccagcauguuauga

SEQ ID NO: 789286 - RNA, 20 nt, Artificial Sequence
  Synthetic
uucucuuaaaaaauuuauga

SEQ ID NO: 789287 - RNA, 20 nt, Artificial Sequence
  Synthetic
auaacauuuucaauuuauga

SEQ ID NO: 789288 - RNA, 20 nt, Artificial Sequence
  Synthetic
agcucucauggaauuuauga

SEQ ID NO: 789289 - RNA, 20 nt, Artificial Sequence
  Synthetic
uauuuaacccagauuuauga

SEQ ID NO: 789290 - RNA, 20 nt, Artificial Sequence
  Synthetic
caggaagccccacuuuauga

SEQ ID NO: 789291 - RNA, 20 nt, Artificial Sequence
  Synthetic
augauuuuuugacuuuauga

SEQ ID NO: 789292 - RNA, 20 nt, Artificial Sequence
  Synthetic
caagaauauaagcuuuauga

SEQ ID NO: 789293 - RNA, 20 nt, Artificial Sequence
  Synthetic
uccuuguucucuuuuuauga

SEQ ID NO: 789294 - RNA, 20 nt, Artificial Sequence
  Synthetic
uuugcagagaagaaaacuga

SEQ ID NO: 789295 - RNA, 20 nt, Artificial Sequence
  Synthetic
uuuuuuuuuuuacaaacuga

SEQ ID NO: 789296 - RNA, 20 nt, Artificial Sequence
  Synthetic
uuccaagauggagaaacuga

SEQ ID NO: 789297 - RNA, 20 nt, Artificial Sequence
  Synthetic
uuuuaagacgaggaaacuga

SEQ ID NO: 789298 - RNA, 20 nt, Artificial Sequence
  Synthetic
uuuuugcccucugaaacuga

SEQ ID NO: 789299 - RNA, 20 nt, Artificial Sequence
  Synthetic
cugagcauaacauaaacuga

SEQ ID NO: 789300 - RNA, 20 nt, Artificial Sequence
  Synthetic
ucuuuguguugauaaacuga

SEQ ID NO: 789301 - RNA, 20 nt, Artificial Sequence
  Synthetic
agcaauaagugcuaaacuga

SEQ ID NO: 789302 - RNA, 20 nt, Artificial Sequence
  Synthetic
ugauuuugaagaagaacuga

SEQ ID NO: 789303 - RNA, 20 nt, Artificial Sequence
  Synthetic
uaaaaucagagcagaacuga

SEQ ID NO: 789304 - RNA, 20 nt, Artificial Sequence
  Synthetic
uacgaucagagcagaacuga

SEQ ID NO: 789305 - RNA, 20 nt, Artificial Sequence
  Synthetic
aacgagggacagagaacuga

SEQ ID NO: 789306 - RNA, 20 nt, Artificial Sequence
  Synthetic
ucagcaauuccuagaacuga

SEQ ID NO: 789307 - RNA, 20 nt, Artificial Sequence
  Synthetic
cguauuuuaauuagaacuga

SEQ ID NO: 789308 - RNA, 20 nt, Artificial Sequence
  Synthetic
uccuucuugaagugaacuga

SEQ ID NO: 789309 - RNA, 20 nt, Artificial Sequence
  Synthetic
aagaaaaaaguaauaacuga

SEQ ID NO: 789310 - RNA, 20 nt, Artificial Sequence
  Synthetic
aaucggugaagcauaacuga

SEQ ID NO: 789311 - RNA, 20 nt, Artificial Sequence
  Synthetic
caaaguguguaauuaacuga

SEQ ID NO: 789312 - RNA, 20 nt, Artificial Sequence
  Synthetic
uaucaacagagaaacacuga

SEQ ID NO: 789313 - RNA, 20 nt, Artificial Sequence
  Synthetic
ugauuuucuuucaacacuga

SEQ ID NO: 789314 - RNA, 20 nt, Artificial Sequence
  Synthetic
uccugaauacaccacacuga

SEQ ID NO: 789315 - RNA, 20 nt, Artificial Sequence
  Synthetic
uggaaauaaucccacacuga

SEQ ID NO: 789316 - RNA, 20 nt, Artificial Sequence
  Synthetic
uucaauaauuuccacacuga

SEQ ID NO: 789317 - RNA, 20 nt, Artificial Sequence
  Synthetic
uccugaauacagcacacuga

SEQ ID NO: 789318 - RNA, 20 nt, Artificial Sequence
  Synthetic
uucugaauacagcacacuga

SEQ ID NO: 789319 - RNA, 20 nt, Artificial Sequence
  Synthetic
cagugccccacagacacuga

SEQ ID NO: 789320 - RNA, 20 nt, Artificial Sequence
  Synthetic
caagggggugaggacacuga

SEQ ID NO: 789321 - RNA, 20 nt, Artificial Sequence
  Synthetic
cucuuuuauuuauacacuga

SEQ ID NO: 789322 - RNA, 20 nt, Artificial Sequence
  Synthetic
uucaaccguaagaccacuga

SEQ ID NO: 789323 - RNA, 20 nt, Artificial Sequence
  Synthetic
uggggugugcaucccacuga

SEQ ID NO: 789324 - RNA, 20 nt, Artificial Sequence
  Synthetic
uuucuccagucugccacuga

SEQ ID NO: 789325 - RNA, 20 nt, Artificial Sequence
  Synthetic
cuuuucaauucauccacuga

SEQ ID NO: 789326 - RNA, 20 nt, Artificial Sequence
  Synthetic
uuuauccauucauccacuga

SEQ ID NO: 789327 - RNA, 20 nt, Artificial Sequence
  Synthetic
cacuucuuaauauccacuga

SEQ ID NO: 789328 - RNA, 20 nt, Artificial Sequence
  Synthetic
uauuguggugaguccacuga

SEQ ID NO: 789329 - RNA, 20 nt, Artificial Sequence
  Synthetic
agacuauuuaaaggcacuga

SEQ ID NO: 789330 - RNA, 20 nt, Artificial Sequence
  Synthetic
agcuuguuuuaaaucacuga

SEQ ID NO: 789331 - RNA, 20 nt, Artificial Sequence
  Synthetic
uuuauccaguccaucacuga

SEQ ID NO: 789332 - RNA, 20 nt, Artificial Sequence
  Synthetic
uuaauccagucuaucacuga

SEQ ID NO: 789333 - RNA, 20 nt, Artificial Sequence
  Synthetic
uuuauccagucuaucacuga

SEQ ID NO: 789334 - RNA, 20 nt, Artificial Sequence
  Synthetic
uuccucuacuuagucacuga

SEQ ID NO: 789335 - RNA, 20 nt, Artificial Sequence
  Synthetic
cccuucugcauuuucacuga

SEQ ID NO: 789336 - RNA, 20 nt, Artificial Sequence
  Synthetic
uacuuuccuauuuucacuga

SEQ ID NO: 789337 - RNA, 20 nt, Artificial Sequence
  Synthetic
uucagagcauuuuucacuga

SEQ ID NO: 789338 - RNA, 20 nt, Artificial Sequence
  Synthetic
acaaugguguaaaagacuga

SEQ ID NO: 789339 - RNA, 20 nt, Artificial Sequence
  Synthetic
agagaagggaaagagacuga

SEQ ID NO: 789340 - RNA, 20 nt, Artificial Sequence
  Synthetic
aaaccaagaguggagacuga

SEQ ID NO: 789341 - RNA, 20 nt, Artificial Sequence
  Synthetic
uuagccuguccauagacuga

SEQ ID NO: 789342 - RNA, 20 nt, Artificial Sequence
  Synthetic
uuuaggaagguuuagacuga

SEQ ID NO: 789343 - RNA, 20 nt, Artificial Sequence
  Synthetic
acuguucccugaaggacuga

SEQ ID NO: 789344 - RNA, 20 nt, Artificial Sequence
  Synthetic
auuuuagucaggaggacuga

SEQ ID NO: 789345 - RNA, 20 nt, Artificial Sequence
  Synthetic
acacaaaaagacuggacuga

SEQ ID NO: 789346 - RNA, 20 nt, Artificial Sequence
  Synthetic
ccuucuagugggcugacuga

SEQ ID NO: 789347 - RNA, 20 nt, Artificial Sequence
  Synthetic
agcuucucccaaaauacuga

SEQ ID NO: 789348 - RNA, 20 nt, Artificial Sequence
  Synthetic
auucauucuacaaauacuga

SEQ ID NO: 789349 - RNA, 20 nt, Artificial Sequence
  Synthetic
uuuauaacauagcauacuga

SEQ ID NO: 789350 - RNA, 20 nt, Artificial Sequence
  Synthetic
caaucccccauggauacuga

SEQ ID NO: 789351 - RNA, 20 nt, Artificial Sequence
  Synthetic
aaaugaguuaaugauacuga

SEQ ID NO: 789352 - RNA, 20 nt, Artificial Sequence
  Synthetic
uacaccagguacuauacuga

SEQ ID NO: 789353 - RNA, 20 nt, Artificial Sequence
  Synthetic
uaauuucccugguauacuga

SEQ ID NO: 789354 - RNA, 20 nt, Artificial Sequence
  Synthetic
aaaauagguaagacuacuga

SEQ ID NO: 789355 - RNA, 20 nt, Artificial Sequence
  Synthetic
ccaaaauaccaagcuacuga

SEQ ID NO: 789356 - RNA, 20 nt, Artificial Sequence
  Synthetic
aggcuacgggaagcuacuga

SEQ ID NO: 789357 - RNA, 20 nt, Artificial Sequence
  Synthetic
uacaagcaagaaucuacuga

SEQ ID NO: 789358 - RNA, 20 nt, Artificial Sequence
  Synthetic
uuuguccauucaucuacuga

SEQ ID NO: 789359 - RNA, 20 nt, Artificial Sequence
  Synthetic
cgucaauuggcagguacuga

SEQ ID NO: 789360 - RNA, 20 nt, Artificial Sequence
  Synthetic
cucaauaaauuagguacuga

SEQ ID NO: 789361 - RNA, 20 nt, Artificial Sequence
  Synthetic
uuagccagucaugguacuga

SEQ ID NO: 789362 - RNA, 20 nt, Artificial Sequence
  Synthetic
acaaagagaugaauuacuga

SEQ ID NO: 789363 - RNA, 20 nt, Artificial Sequence
  Synthetic
auaauaauacuaauuacuga

SEQ ID NO: 789364 - RNA, 20 nt, Artificial Sequence
  Synthetic
caagcugcccugcuuacuga

SEQ ID NO: 789365 - RNA, 20 nt, Artificial Sequence
  Synthetic
uggcaacugucauuuacuga

SEQ ID NO: 789366 - RNA, 20 nt, Artificial Sequence
  Synthetic
uuaaucgagucuuuuacuga

SEQ ID NO: 789367 - RNA, 20 nt, Artificial Sequence
  Synthetic
acgaugagggaaaaaccuga

SEQ ID NO: 789368 - RNA, 20 nt, Artificial Sequence
  Synthetic
augagcaugauggaaccuga

SEQ ID NO: 789369 - RNA, 20 nt, Artificial Sequence
  Synthetic
cuagaucuagcauaaccuga

SEQ ID NO: 789370 - RNA, 20 nt, Artificial Sequence
  Synthetic
cuaccuaacaucacaccuga

SEQ ID NO: 789371 - RNA, 20 nt, Artificial Sequence
  Synthetic
aagugcguccugccaccuga

SEQ ID NO: 789372 - RNA, 20 nt, Artificial Sequence
  Synthetic
acaacuucaaaagcaccuga

SEQ ID NO: 789373 - RNA, 20 nt, Artificial Sequence
  Synthetic
cuguugaugaggucaccuga

SEQ ID NO: 789374 - RNA, 20 nt, Artificial Sequence
  Synthetic
aauuuguaaaauauaccuga

SEQ ID NO: 789375 - RNA, 20 nt, Artificial Sequence
  Synthetic
acacagucugcauuaccuga

SEQ ID NO: 789376 - RNA, 20 nt, Artificial Sequence
  Synthetic
auggcuucuuaucccccuga

SEQ ID NO: 789377 - RNA, 20 nt, Artificial Sequence
  Synthetic
uauacagacacauccccuga

SEQ ID NO: 789378 - RNA, 20 nt, Artificial Sequence
  Synthetic
accccaccugcguccccuga

SEQ ID NO: 789379 - RNA, 20 nt, Artificial Sequence
  Synthetic
uuuuauuuuuuuuccccuga

SEQ ID NO: 789380 - RNA, 20 nt, Artificial Sequence
  Synthetic
aauagaggagguggcccuga

SEQ ID NO: 789381 - RNA, 20 nt, Artificial Sequence
  Synthetic
auaggaauauuacucccuga

SEQ ID NO: 789382 - RNA, 20 nt, Artificial Sequence
  Synthetic
uauauguuucgccucccuga

SEQ ID NO: 789383 - RNA, 20 nt, Artificial Sequence
  Synthetic
cccugaccccgucucccuga

SEQ ID NO: 789384 - RNA, 20 nt, Artificial Sequence
  Synthetic
caccagacacuguucccuga

SEQ ID NO: 789385 - RNA, 20 nt, Artificial Sequence
  Synthetic
uaaacucuauuguucccuga

SEQ ID NO: 789386 - RNA, 20 nt, Artificial Sequence
  Synthetic
uagaauaaaguggagccuga

SEQ ID NO: 789387 - RNA, 20 nt, Artificial Sequence
  Synthetic
uuuuuauugugauagccuga

SEQ ID NO: 789388 - RNA, 20 nt, Artificial Sequence
  Synthetic
acuaaaauucauaggccuga

SEQ ID NO: 789389 - RNA, 20 nt, Artificial Sequence
  Synthetic
uguauaccagagaauccuga

SEQ ID NO: 789390 - RNA, 20 nt, Artificial Sequence
  Synthetic
uauaucauuaaacauccuga

SEQ ID NO: 789391 - RNA, 20 nt, Artificial Sequence
  Synthetic
auuuucccccauuauccuga

SEQ ID NO: 789392 - RNA, 20 nt, Artificial Sequence
  Synthetic
aaauagguuacaacuccuga

SEQ ID NO: 789393 - RNA, 20 nt, Artificial Sequence
  Synthetic
uuuaguuaaaagccuccuga

SEQ ID NO: 789394 - RNA, 20 nt, Artificial Sequence
  Synthetic
ugcccuaaaagagcuccuga

SEQ ID NO: 789395 - RNA, 20 nt, Artificial Sequence
  Synthetic
uggcuuacaagagcuccuga

SEQ ID NO: 789396 - RNA, 20 nt, Artificial Sequence
  Synthetic
ucggaaugaagugcuccuga

SEQ ID NO: 789397 - RNA, 20 nt, Artificial Sequence
  Synthetic
ucagaaugaaagauuccuga

SEQ ID NO: 789398 - RNA, 20 nt, Artificial Sequence
  Synthetic
uaaccauauuuauuuccuga

SEQ ID NO: 789399 - RNA, 20 nt, Artificial Sequence
  Synthetic
cuguuaaauuauuuuccuga

SEQ ID NO: 789400 - RNA, 20 nt, Artificial Sequence
  Synthetic
ccucagaauacaaaagcuga

SEQ ID NO: 789401 - RNA, 20 nt, Artificial Sequence
  Synthetic
ccugucacuaacaaagcuga

SEQ ID NO: 789402 - RNA, 20 nt, Artificial Sequence
  Synthetic
aaacuaaagaagaaagcuga

SEQ ID NO: 789403 - RNA, 20 nt, Artificial Sequence
  Synthetic
cagcauucaccacaagcuga

SEQ ID NO: 789404 - RNA, 20 nt, Artificial Sequence
  Synthetic
auuauuuagcaccaagcuga

SEQ ID NO: 789405 - RNA, 20 nt, Artificial Sequence
  Synthetic
ucuucugagacucaagcuga

SEQ ID NO: 789406 - RNA, 20 nt, Artificial Sequence
  Synthetic
ugugcagaaauugaagcuga

SEQ ID NO: 789407 - RNA, 20 nt, Artificial Sequence
  Synthetic
auaugcagaagauaagcuga

SEQ ID NO: 789408 - RNA, 20 nt, Artificial Sequence
  Synthetic
ucacuucuuugauaagcuga

SEQ ID NO: 789409 - RNA, 20 nt, Artificial Sequence
  Synthetic
agacaagggcugacagcuga

SEQ ID NO: 789410 - RNA, 20 nt, Artificial Sequence
  Synthetic
agauuguuaccuacagcuga

SEQ ID NO: 789411 - RNA, 20 nt, Artificial Sequence
  Synthetic
uuauuccccuuuacagcuga

SEQ ID NO: 789412 - RNA, 20 nt, Artificial Sequence
  Synthetic
aggaaugggcugccagcuga

SEQ ID NO: 789413 - RNA, 20 nt, Artificial Sequence
  Synthetic
ucaaccaucacagcagcuga

SEQ ID NO: 789414 - RNA, 20 nt, Artificial Sequence
  Synthetic
uaugauucggucagagcuga

SEQ ID NO: 789415 - RNA, 20 nt, Artificial Sequence
  Synthetic
ccaggagaaaagagagcuga

SEQ ID NO: 789416 - RNA, 20 nt, Artificial Sequence
  Synthetic
ugagcucucaugagagcuga

SEQ ID NO: 789417 - RNA, 20 nt, Artificial Sequence
  Synthetic
ccccuaaaacugagagcuga

SEQ ID NO: 789418 - RNA, 20 nt, Artificial Sequence
  Synthetic
accaaacagcuuugagcuga

SEQ ID NO: 789419 - RNA, 20 nt, Artificial Sequence
  Synthetic
uauuuaccuaccauagcuga

SEQ ID NO: 789420 - RNA, 20 nt, Artificial Sequence
  Synthetic
cauuguauagagauagcuga

SEQ ID NO: 789421 - RNA, 20 nt, Artificial Sequence
  Synthetic
aaaauuuauucauuagcuga

SEQ ID NO: 789422 - RNA, 20 nt, Artificial Sequence
  Synthetic
ugacuguauagcuuagcuga

SEQ ID NO: 789423 - RNA, 20 nt, Artificial Sequence
  Synthetic
ucuugguaguggaaggcuga

SEQ ID NO: 789424 - RNA, 20 nt, Artificial Sequence
  Synthetic
auaacaaauuggaaggcuga

SEQ ID NO: 789425 - RNA, 20 nt, Artificial Sequence
  Synthetic
cucugacaaaugaaggcuga

SEQ ID NO: 789426 - RNA, 20 nt, Artificial Sequence
  Synthetic
acuguguggacagaggcuga

SEQ ID NO: 789427 - RNA, 20 nt, Artificial Sequence
  Synthetic
acucaggaggccgaggcuga

SEQ ID NO: 789428 - RNA, 20 nt, Artificial Sequence
  Synthetic
uguucugaauaugaggcuga

SEQ ID NO: 789429 - RNA, 20 nt, Artificial Sequence
  Synthetic
cuuucggaugcugaggcuga

SEQ ID NO: 789430 - RNA, 20 nt, Artificial Sequence
  Synthetic
cuggcuacucaguaggcuga

SEQ ID NO: 789431 - RNA, 20 nt, Artificial Sequence
  Synthetic
uucacuaauuugugggcuga

SEQ ID NO: 789432 - RNA, 20 nt, Artificial Sequence
  Synthetic
uuuuuaaaaucaauggcuga

SEQ ID NO: 789433 - RNA, 20 nt, Artificial Sequence
  Synthetic
cacucggggaccauggcuga

SEQ ID NO: 789434 - RNA, 20 nt, Artificial Sequence
  Synthetic
cacuuuugcuucauggcuga

SEQ ID NO: 789435 - RNA, 20 nt, Artificial Sequence
  Synthetic
cuucucuuaaaccuggcuga

SEQ ID NO: 789436 - RNA, 20 nt, Artificial Sequence
  Synthetic
aaaaaaguuuaauuggcuga

SEQ ID NO: 789437 - RNA, 20 nt, Artificial Sequence
  Synthetic
uuccuuuucuuguuggcuga

SEQ ID NO: 789438 - RNA, 20 nt, Artificial Sequence
  Synthetic
uugucuagggaaaaugcuga

SEQ ID NO: 789439 - RNA, 20 nt, Artificial Sequence
  Synthetic
aauugauaaagaaaugcuga

SEQ ID NO: 789440 - RNA, 20 nt, Artificial Sequence
  Synthetic
uuugaagaggaauaugcuga

SEQ ID NO: 789441 - RNA, 20 nt, Artificial Sequence
  Synthetic
ccuugaaaauauuaugcuga

SEQ ID NO: 789442 - RNA, 20 nt, Artificial Sequence
  Synthetic
aguguuuauguuucugcuga

SEQ ID NO: 789443 - RNA, 20 nt, Artificial Sequence
  Synthetic
uucaauuuacuuagugcuga

SEQ ID NO: 789444 - RNA, 20 nt, Artificial Sequence
  Synthetic
cggggaugguucugugcuga

SEQ ID NO: 789445 - RNA, 20 nt, Artificial Sequence
  Synthetic
uggcaggcuggaauugcuga

SEQ ID NO: 789446 - RNA, 20 nt, Artificial Sequence
  Synthetic
aucaggguggcgguugcuga

SEQ ID NO: 789447 - RNA, 20 nt, Artificial Sequence
  Synthetic
uacaauuagaaauuugcuga

SEQ ID NO: 789448 - RNA, 20 nt, Artificial Sequence
  Synthetic
auuauauagauauuugcuga

SEQ ID NO: 789449 - RNA, 20 nt, Artificial Sequence
  Synthetic
uaacuuuugcuuuuugcuga

SEQ ID NO: 789450 - RNA, 20 nt, Artificial Sequence
  Synthetic
agucuuaaucuuuuugcuga

SEQ ID NO: 789451 - RNA, 20 nt, Artificial Sequence
  Synthetic
ugaauucucccaaaaucuga

SEQ ID NO: 789452 - RNA, 20 nt, Artificial Sequence
  Synthetic
augcggaagagaaaaucuga

SEQ ID NO: 789453 - RNA, 20 nt, Artificial Sequence
  Synthetic
uuuaaaccuggaaaaucuga

SEQ ID NO: 789454 - RNA, 20 nt, Artificial Sequence
  Synthetic
uuuuucagaauaaaaucuga

SEQ ID NO: 789455 - RNA, 20 nt, Artificial Sequence
  Synthetic
aauaagaaauuucaaucuga

SEQ ID NO: 789456 - RNA, 20 nt, Artificial Sequence
  Synthetic
auucuaaggucagaaucuga

SEQ ID NO: 789457 - RNA, 20 nt, Artificial Sequence
  Synthetic
caaauacaaauggaaucuga

SEQ ID NO: 789458 - RNA, 20 nt, Artificial Sequence
  Synthetic
uauaaaauacuggaaucuga

SEQ ID NO: 789459 - RNA, 20 nt, Artificial Sequence
  Synthetic
agauucuaucuggaaucuga

SEQ ID NO: 789460 - RNA, 20 nt, Artificial Sequence
  Synthetic
caugaaaggaaugaaucuga

SEQ ID NO: 789461 - RNA, 20 nt, Artificial Sequence
  Synthetic
cuucuauauuugacaucuga

SEQ ID NO: 789462 - RNA, 20 nt, Artificial Sequence
  Synthetic
cacacaaaaaccccaucuga

SEQ ID NO: 789463 - RNA, 20 nt, Artificial Sequence
  Synthetic
uuugcaaguuaugcaucuga

SEQ ID NO: 789464 - RNA, 20 nt, Artificial Sequence
  Synthetic
acaaauauaaaaucaucuga

SEQ ID NO: 789465 - RNA, 20 nt, Artificial Sequence
  Synthetic
auaagucucaggagaucuga

SEQ ID NO: 789466 - RNA, 20 nt, Artificial Sequence
  Synthetic
ugauuucacaugagaucuga

SEQ ID NO: 789467 - RNA, 20 nt, Artificial Sequence
  Synthetic
auaagucucaugagaucuga

SEQ ID NO: 789468 - RNA, 20 nt, Artificial Sequence
  Synthetic
auuagucucaugagaucuga

SEQ ID NO: 789469 - RNA, 20 nt, Artificial Sequence
  Synthetic
ugaguucucaugagaucuga

SEQ ID NO: 789470 - RNA, 20 nt, Artificial Sequence
  Synthetic
cuuggaguuauuagaucuga

SEQ ID NO: 789471 - RNA, 20 nt, Artificial Sequence
  Synthetic
cucaugauagcgggaucuga

SEQ ID NO: 789472 - RNA, 20 nt, Artificial Sequence
  Synthetic
uccuauugaaaaugaucuga

SEQ ID NO: 789473 - RNA, 20 nt, Artificial Sequence
  Synthetic
aauccaaacaaaauaucuga

SEQ ID NO: 789474 - RNA, 20 nt, Artificial Sequence
  Synthetic
uacagaguugaacuaucuga

SEQ ID NO: 789475 - RNA, 20 nt, Artificial Sequence
  Synthetic
agcaauucaguccuaucuga

SEQ ID NO: 789476 - RNA, 20 nt, Artificial Sequence
  Synthetic
agagggaacaguguaucuga

SEQ ID NO: 789477 - RNA, 20 nt, Artificial Sequence
  Synthetic
uuuugauuguucuuaucuga

SEQ ID NO: 789478 - RNA, 20 nt, Artificial Sequence
  Synthetic
auucuuaguugaaacucuga

SEQ ID NO: 789479 - RNA, 20 nt, Artificial Sequence
  Synthetic
uacuggaccagcaacucuga

SEQ ID NO: 789480 - RNA, 20 nt, Artificial Sequence
  Synthetic
ucccaagcccugaacucuga

SEQ ID NO: 789481 - RNA, 20 nt, Artificial Sequence
  Synthetic
agguucccuguucacucuga

SEQ ID NO: 789482 - RNA, 20 nt, Artificial Sequence
  Synthetic
aggcugccuguucacucuga

SEQ ID NO: 789483 - RNA, 20 nt, Artificial Sequence
  Synthetic
agguugccuguucacucuga

SEQ ID NO: 789484 - RNA, 20 nt, Artificial Sequence
  Synthetic
agguugcuuguucacucuga

SEQ ID NO: 789485 - RNA, 20 nt, Artificial Sequence
  Synthetic
auagaaaauggagacucuga

SEQ ID NO: 789486 - RNA, 20 nt, Artificial Sequence
  Synthetic
uguucucaggacuacucuga

SEQ ID NO: 789487 - RNA, 20 nt, Artificial Sequence
  Synthetic
uuugauuugcauuacucuga

SEQ ID NO: 789488 - RNA, 20 nt, Artificial Sequence
  Synthetic
accuguaaaucuaccucuga

SEQ ID NO: 789489 - RNA, 20 nt, Artificial Sequence
  Synthetic
aaggucaauuaucccucuga

SEQ ID NO: 789490 - RNA, 20 nt, Artificial Sequence
  Synthetic
cuacagcaugaauccucuga

SEQ ID NO: 789491 - RNA, 20 nt, Artificial Sequence
  Synthetic
cuagguagcgauuccucuga

SEQ ID NO: 789492 - RNA, 20 nt, Artificial Sequence
  Synthetic
uagccuuguaauagcucuga

SEQ ID NO: 789493 - RNA, 20 nt, Artificial Sequence
  Synthetic
aaauugaaaauaugcucuga

SEQ ID NO: 789494 - RNA, 20 nt, Artificial Sequence
  Synthetic
caccauauuaacugcucuga

SEQ ID NO: 789495 - RNA, 20 nt, Artificial Sequence
  Synthetic
uuucugaggagaaucucuga

SEQ ID NO: 789496 - RNA, 20 nt, Artificial Sequence
  Synthetic
cuaguagagguucucucuga

SEQ ID NO: 789497 - RNA, 20 nt, Artificial Sequence
  Synthetic
uaagcaagaggagucucuga

SEQ ID NO: 789498 - RNA, 20 nt, Artificial Sequence
  Synthetic
aaaacauauguggucucuga

SEQ ID NO: 789499 - RNA, 20 nt, Artificial Sequence
  Synthetic
uuugauuugcaugucucuga

SEQ ID NO: 789500 - RNA, 20 nt, Artificial Sequence
  Synthetic
acacaaaagaucuucucuga

SEQ ID NO: 789501 - RNA, 20 nt, Artificial Sequence
  Synthetic
uuugauuugcaguucucuga

SEQ ID NO: 789502 - RNA, 20 nt, Artificial Sequence
  Synthetic
uuugauuugcauuucucuga

SEQ ID NO: 789503 - RNA, 20 nt, Artificial Sequence
  Synthetic
cucaguuuucauuucucuga

SEQ ID NO: 789504 - RNA, 20 nt, Artificial Sequence
  Synthetic
uuugauuugcguuucucuga

SEQ ID NO: 789505 - RNA, 20 nt, Artificial Sequence
  Synthetic
uacuuuccuguuuucucuga

SEQ ID NO: 789506 - RNA, 20 nt, Artificial Sequence
  Synthetic
uccuguuuguuuuucucuga

SEQ ID NO: 789507 - RNA, 20 nt, Artificial Sequence
  Synthetic
auauugugguuaaagucuga

SEQ ID NO: 789508 - RNA, 20 nt, Artificial Sequence
  Synthetic
uuuuaacaaagccagucuga

SEQ ID NO: 789509 - RNA, 20 nt, Artificial Sequence
  Synthetic
uuuuagaagacucagucuga

SEQ ID NO: 789510 - RNA, 20 nt, Artificial Sequence
  Synthetic
augauccgcuguuagucuga

SEQ ID NO: 789511 - RNA, 20 nt, Artificial Sequence
  Synthetic
ugaguucucacgaggucuga

SEQ ID NO: 789512 - RNA, 20 nt, Artificial Sequence
  Synthetic
aggacuuugcaugggucuga

SEQ ID NO: 789513 - RNA, 20 nt, Artificial Sequence
  Synthetic
uucauuaacuucuggucuga

SEQ ID NO: 789514 - RNA, 20 nt, Artificial Sequence
  Synthetic
ucucuagagcaacugucuga

SEQ ID NO: 789515 - RNA, 20 nt, Artificial Sequence
  Synthetic
auaccauguuagcugucuga

SEQ ID NO: 789516 - RNA, 20 nt, Artificial Sequence
  Synthetic
uauccagagaugcugucuga

SEQ ID NO: 789517 - RNA, 20 nt, Artificial Sequence
  Synthetic
aagaggucaaaagugucuga

SEQ ID NO: 789518 - RNA, 20 nt, Artificial Sequence
  Synthetic
ucauuucugccaaauucuga

SEQ ID NO: 789519 - RNA, 20 nt, Artificial Sequence
  Synthetic
aaaacuauguaacauucuga

SEQ ID NO: 789520 - RNA, 20 nt, Artificial Sequence
  Synthetic
uccaucuacugccauucuga

SEQ ID NO: 789521 - RNA, 20 nt, Artificial Sequence
  Synthetic
aaggucccaacucauucuga

SEQ ID NO: 789522 - RNA, 20 nt, Artificial Sequence
  Synthetic
ucucuuuauccucauucuga

SEQ ID NO: 789523 - RNA, 20 nt, Artificial Sequence
  Synthetic
agcucccuaggagauucuga

SEQ ID NO: 789524 - RNA, 20 nt, Artificial Sequence
  Synthetic
ugacccuacuaugauucuga

SEQ ID NO: 789525 - RNA, 20 nt, Artificial Sequence
  Synthetic
uagcuggauaguuauucuga

SEQ ID NO: 789526 - RNA, 20 nt, Artificial Sequence
  Synthetic
cggucauugucaacuucuga

SEQ ID NO: 789527 - RNA, 20 nt, Artificial Sequence
  Synthetic
auaugcggcguuacuucuga

SEQ ID NO: 789528 - RNA, 20 nt, Artificial Sequence
  Synthetic
cuauuugaaagcccuucuga

SEQ ID NO: 789529 - RNA, 20 nt, Artificial Sequence
  Synthetic
auuuuacuaccaucuucuga

SEQ ID NO: 789530 - RNA, 20 nt, Artificial Sequence
  Synthetic
caauucucucccucuucuga

SEQ ID NO: 789531 - RNA, 20 nt, Artificial Sequence
  Synthetic
auuaauuuauauucuucuga

SEQ ID NO: 789532 - RNA, 20 nt, Artificial Sequence
  Synthetic
cuucuccacuacaguucuga

SEQ ID NO: 789533 - RNA, 20 nt, Artificial Sequence
  Synthetic
ucuuaaagaucagguucuga

SEQ ID NO: 789534 - RNA, 20 nt, Artificial Sequence
  Synthetic
aggcuuuaaguagguucuga

SEQ ID NO: 789535 - RNA, 20 nt, Artificial Sequence
  Synthetic
auucuuugggucauuucuga

SEQ ID NO: 789536 - RNA, 20 nt, Artificial Sequence
  Synthetic
cuucucuccuauauuucuga

SEQ ID NO: 789537 - RNA, 20 nt, Artificial Sequence
  Synthetic
auaugcggcauuauuucuga

SEQ ID NO: 789538 - RNA, 20 nt, Artificial Sequence
  Synthetic
aauuguuccaaacuuucuga

SEQ ID NO: 789539 - RNA, 20 nt, Artificial Sequence
  Synthetic
uaaaaugugaaacuuucuga

SEQ ID NO: 789540 - RNA, 20 nt, Artificial Sequence
  Synthetic
auccuuagcccacuuucuga

SEQ ID NO: 789541 - RNA, 20 nt, Artificial Sequence
  Synthetic
auccuuugcccacuuucuga

SEQ ID NO: 789542 - RNA, 20 nt, Artificial Sequence
  Synthetic
ucaaaaaucuugcuuucuga

SEQ ID NO: 789543 - RNA, 20 nt, Artificial Sequence
  Synthetic
uagucaugaauucuuucuga

SEQ ID NO: 789544 - RNA, 20 nt, Artificial Sequence
  Synthetic
uauuauuuggcaguuucuga

SEQ ID NO: 789545 - RNA, 20 nt, Artificial Sequence
  Synthetic
uccauuccccuaguuucuga

SEQ ID NO: 789546 - RNA, 20 nt, Artificial Sequence
  Synthetic
auaguguccacauuuucuga

SEQ ID NO: 789547 - RNA, 20 nt, Artificial Sequence
  Synthetic
aagaccaaggucaaaaguga

SEQ ID NO: 789548 - RNA, 20 nt, Artificial Sequence
  Synthetic
ugaaacuuacuuaaaaguga

SEQ ID NO: 789549 - RNA, 20 nt, Artificial Sequence
  Synthetic
uccaaaugaaaacaaaguga

SEQ ID NO: 789550 - RNA, 20 nt, Artificial Sequence
  Synthetic
caaagugaauaacaaaguga

SEQ ID NO: 789551 - RNA, 20 nt, Artificial Sequence
  Synthetic
ccugaguguuagcaaaguga

SEQ ID NO: 789552 - RNA, 20 nt, Artificial Sequence
  Synthetic
uauauuagccaugaaaguga

SEQ ID NO: 789553 - RNA, 20 nt, Artificial Sequence
  Synthetic
auugguguaccugaaaguga

SEQ ID NO: 789554 - RNA, 20 nt, Artificial Sequence
  Synthetic
acuaaauuucaauaaaguga

SEQ ID NO: 789555 - RNA, 20 nt, Artificial Sequence
  Synthetic
cuaagaaaauccuaaaguga

SEQ ID NO: 789556 - RNA, 20 nt, Artificial Sequence
  Synthetic
ucugcuuaauucuaaaguga

SEQ ID NO: 789557 - RNA, 20 nt, Artificial Sequence
  Synthetic
ccuuugaaaaauccaaguga

SEQ ID NO: 789558 - RNA, 20 nt, Artificial Sequence
  Synthetic
uucuuugaucucagaaguga

SEQ ID NO: 789559 - RNA, 20 nt, Artificial Sequence
  Synthetic
cacaugacaucgagaaguga

SEQ ID NO: 789560 - RNA, 20 nt, Artificial Sequence
  Synthetic
agauguagacguagaaguga

SEQ ID NO: 789561 - RNA, 20 nt, Artificial Sequence
  Synthetic
uaaagaaguugacgaaguga

SEQ ID NO: 789562 - RNA, 20 nt, Artificial Sequence
  Synthetic
uaaagaucugaaggaaguga

SEQ ID NO: 789563 - RNA, 20 nt, Artificial Sequence
  Synthetic
ugcuauuuauaaggaaguga

SEQ ID NO: 789564 - RNA, 20 nt, Artificial Sequence
  Synthetic
uaggguggugauggaaguga

SEQ ID NO: 789565 - RNA, 20 nt, Artificial Sequence
  Synthetic
auugagagauucugaaguga

SEQ ID NO: 789566 - RNA, 20 nt, Artificial Sequence
  Synthetic
uuuccacgcauuugaaguga

SEQ ID NO: 789567 - RNA, 20 nt, Artificial Sequence
  Synthetic
cccugaaagaacauaaguga

SEQ ID NO: 789568 - RNA, 20 nt, Artificial Sequence
  Synthetic
aaacuaagcuucauaaguga

SEQ ID NO: 789569 - RNA, 20 nt, Artificial Sequence
  Synthetic
caaacuguucuccuaaguga

SEQ ID NO: 789570 - RNA, 20 nt, Artificial Sequence
  Synthetic
cucaaaaauaugcuaaguga

SEQ ID NO: 789571 - RNA, 20 nt, Artificial Sequence
  Synthetic
cauugguucuguuuaaguga

SEQ ID NO: 789572 - RNA, 20 nt, Artificial Sequence
  Synthetic
uucuagcauaggaacaguga

SEQ ID NO: 789573 - RNA, 20 nt, Artificial Sequence
  Synthetic
uacaauagggugaacaguga

SEQ ID NO: 789574 - RNA, 20 nt, Artificial Sequence
  Synthetic
uaauauuuuauucacaguga

SEQ ID NO: 789575 - RNA, 20 nt, Artificial Sequence
  Synthetic
ucucaaaauuaucccaguga

SEQ ID NO: 789576 - RNA, 20 nt, Artificial Sequence
  Synthetic
uaacguuagggucccaguga

SEQ ID NO: 789577 - RNA, 20 nt, Artificial Sequence
  Synthetic
accagccacucagccaguga

SEQ ID NO: 789578 - RNA, 20 nt, Artificial Sequence
  Synthetic
cauguuguuuuagccaguga

SEQ ID NO: 789579 - RNA, 20 nt, Artificial Sequence
  Synthetic
auuacucugauggccaguga

SEQ ID NO: 789580 - RNA, 20 nt, Artificial Sequence
  Synthetic
augucucugauggccaguga

SEQ ID NO: 789581 - RNA, 20 nt, Artificial Sequence
  Synthetic
aguucucugauggccaguga

SEQ ID NO: 789582 - RNA, 20 nt, Artificial Sequence
  Synthetic
auuucucugauggccaguga

SEQ ID NO: 789583 - RNA, 20 nt, Artificial Sequence
  Synthetic
ucuuugugaaacagcaguga

SEQ ID NO: 789584 - RNA, 20 nt, Artificial Sequence
  Synthetic
uauccauuagacagcaguga

SEQ ID NO: 789585 - RNA, 20 nt, Artificial Sequence
  Synthetic
ugcaggggcuguagcaguga

SEQ ID NO: 789586 - RNA, 20 nt, Artificial Sequence
  Synthetic
uuaagguuaaugugcaguga

SEQ ID NO: 789587 - RNA, 20 nt, Artificial Sequence
  Synthetic
cuauugaaacaaaucaguga

SEQ ID NO: 789588 - RNA, 20 nt, Artificial Sequence
  Synthetic
acccaaaugcccaucaguga

SEQ ID NO: 789589 - RNA, 20 nt, Artificial Sequence
  Synthetic
uaaaaugucuguaucaguga

SEQ ID NO: 789590 - RNA, 20 nt, Artificial Sequence
  Synthetic
cuuuuuuuuugcuucaguga

SEQ ID NO: 789591 - RNA, 20 nt, Artificial Sequence
  Synthetic
caaacucuucauuucaguga

SEQ ID NO: 789592 - RNA, 20 nt, Artificial Sequence
  Synthetic
acaauuugauguuucaguga

SEQ ID NO: 789593 - RNA, 20 nt, Artificial Sequence
  Synthetic
uuugagugagugaagaguga

SEQ ID NO: 789594 - RNA, 20 nt, Artificial Sequence
  Synthetic
auguagcagggucagaguga

SEQ ID NO: 789595 - RNA, 20 nt, Artificial Sequence
  Synthetic
augacaacaccugagaguga

SEQ ID NO: 789596 - RNA, 20 nt, Artificial Sequence
  Synthetic
uuuaucucaaaauagaguga

SEQ ID NO: 789597 - RNA, 20 nt, Artificial Sequence
  Synthetic
auaccucccucauagaguga

SEQ ID NO: 789598 - RNA, 20 nt, Artificial Sequence
  Synthetic
uuuccuauuacuuagaguga

SEQ ID NO: 789599 - RNA, 20 nt, Artificial Sequence
  Synthetic
ucuuaucuuuuggggaguga

SEQ ID NO: 789600 - RNA, 20 nt, Artificial Sequence
  Synthetic
aggcuugggagguggaguga

SEQ ID NO: 789601 - RNA, 20 nt, Artificial Sequence
  Synthetic
aguaguuucacuuggaguga

SEQ ID NO: 789602 - RNA, 20 nt, Artificial Sequence
  Synthetic
cauuagcugaagaugaguga

SEQ ID NO: 789603 - RNA, 20 nt, Artificial Sequence
  Synthetic
aaacaggaaccuaugaguga

SEQ ID NO: 789604 - RNA, 20 nt, Artificial Sequence
  Synthetic
agaagcucuuaacugaguga

SEQ ID NO: 789605 - RNA, 20 nt, Artificial Sequence
  Synthetic
ucuguugaauuagugaguga

SEQ ID NO: 789606 - RNA, 20 nt, Artificial Sequence
  Synthetic
aagaaaaccguguugaguga

SEQ ID NO: 789607 - RNA, 20 nt, Artificial Sequence
  Synthetic
aagguuucuuauuugaguga

SEQ ID NO: 789608 - RNA, 20 nt, Artificial Sequence
  Synthetic
caaaaacaguaaaauaguga

SEQ ID NO: 789609 - RNA, 20 nt, Artificial Sequence
  Synthetic
cuaagaucaggaaauaguga

SEQ ID NO: 789610 - RNA, 20 nt, Artificial Sequence
  Synthetic
ccuauaugcaaacauaguga

SEQ ID NO: 789611 - RNA, 20 nt, Artificial Sequence
  Synthetic
ucuuauuuuauacauaguga

SEQ ID NO: 789612 - RNA, 20 nt, Artificial Sequence
  Synthetic
cuauagagagaggauaguga

SEQ ID NO: 789613 - RNA, 20 nt, Artificial Sequence
  Synthetic
aaucaaaagauuuauaguga

SEQ ID NO: 789614 - RNA, 20 nt, Artificial Sequence
  Synthetic
aauaaaugaccuccuaguga

SEQ ID NO: 789615 - RNA, 20 nt, Artificial Sequence
  Synthetic
uccuucuaaaggaguaguga

SEQ ID NO: 789616 - RNA, 20 nt, Artificial Sequence
  Synthetic
aacuuuuugugagguaguga

SEQ ID NO: 789617 - RNA, 20 nt, Artificial Sequence
  Synthetic
uuuuuauuucucuguaguga

SEQ ID NO: 789618 - RNA, 20 nt, Artificial Sequence
  Synthetic
cuguucaucagaauuaguga

SEQ ID NO: 789619 - RNA, 20 nt, Artificial Sequence
  Synthetic
uucucuauucaaguuaguga

SEQ ID NO: 789620 - RNA, 20 nt, Artificial Sequence
  Synthetic
cccuauucucauuuuaguga

SEQ ID NO: 789621 - RNA, 20 nt, Artificial Sequence
  Synthetic
uucaguuccauguaacguga

SEQ ID NO: 789622 - RNA, 20 nt, Artificial Sequence
  Synthetic
aauuaauuccaguuacguga

SEQ ID NO: 789623 - RNA, 20 nt, Artificial Sequence
  Synthetic
cuagccaacagaagccguga

SEQ ID NO: 789624 - RNA, 20 nt, Artificial Sequence
  Synthetic
cugccauggaggcagcguga

SEQ ID NO: 789625 - RNA, 20 nt, Artificial Sequence
  Synthetic
aaaaaauuagccaggcguga

SEQ ID NO: 789626 - RNA, 20 nt, Artificial Sequence
  Synthetic
uggacacagggaaaagguga

SEQ ID NO: 789627 - RNA, 20 nt, Artificial Sequence
  Synthetic
aaaccuaacacucaagguga

SEQ ID NO: 789628 - RNA, 20 nt, Artificial Sequence
  Synthetic
acaaucauggcagaagguga

SEQ ID NO: 789629 - RNA, 20 nt, Artificial Sequence
  Synthetic
acaaucauaguagaagguga

SEQ ID NO: 789630 - RNA, 20 nt, Artificial Sequence
  Synthetic
acaaucaugguggaagguga

SEQ ID NO: 789631 - RNA, 20 nt, Artificial Sequence
  Synthetic
aaugcaucuuauuaagguga

SEQ ID NO: 789632 - RNA, 20 nt, Artificial Sequence
  Synthetic
auuaugaaugcaacagguga

SEQ ID NO: 789633 - RNA, 20 nt, Artificial Sequence
  Synthetic
aauuguggagagccagguga

SEQ ID NO: 789634 - RNA, 20 nt, Artificial Sequence
  Synthetic
uuucaaaugccagcagguga

SEQ ID NO: 789635 - RNA, 20 nt, Artificial Sequence
  Synthetic
ucuguacacagaagagguga

SEQ ID NO: 789636 - RNA, 20 nt, Artificial Sequence
  Synthetic
aauagguguuacugagguga

SEQ ID NO: 789637 - RNA, 20 nt, Artificial Sequence
  Synthetic
uucagugggaccugagguga

SEQ ID NO: 789638 - RNA, 20 nt, Artificial Sequence
  Synthetic
agagaauguuagugagguga

SEQ ID NO: 789639 - RNA, 20 nt, Artificial Sequence
  Synthetic
aagauaauugcuugagguga

SEQ ID NO: 789640 - RNA, 20 nt, Artificial Sequence
  Synthetic
augguaaauguuugagguga

SEQ ID NO: 789641 - RNA, 20 nt, Artificial Sequence
  Synthetic
augaagcccaaaauagguga

SEQ ID NO: 789642 - RNA, 20 nt, Artificial Sequence
  Synthetic
aauaaguacaggauagguga

SEQ ID NO: 789643 - RNA, 20 nt, Artificial Sequence
  Synthetic
ugggcuuaauaucuagguga

SEQ ID NO: 789644 - RNA, 20 nt, Artificial Sequence
  Synthetic
auauauauaucucuagguga

SEQ ID NO: 789645 - RNA, 20 nt, Artificial Sequence
  Synthetic
uguuacucaguuguagguga

SEQ ID NO: 789646 - RNA, 20 nt, Artificial Sequence
  Synthetic
aacacugaucaaaaggguga

SEQ ID NO: 789647 - RNA, 20 nt, Artificial Sequence
  Synthetic
augacuaaaauucaggguga

SEQ ID NO: 789648 - RNA, 20 nt, Artificial Sequence
  Synthetic
aucauuucuacuucggguga

SEQ ID NO: 789649 - RNA, 20 nt, Artificial Sequence
  Synthetic
cggggccugucaagggguga

SEQ ID NO: 789650 - RNA, 20 nt, Artificial Sequence
  Synthetic
agguacagguggagggguga

SEQ ID NO: 789651 - RNA, 20 nt, Artificial Sequence
  Synthetic
cugggaaggguaggggguga

SEQ ID NO: 789652 - RNA, 20 nt, Artificial Sequence
  Synthetic
uggucccaucugggggguga

SEQ ID NO: 789653 - RNA, 20 nt, Artificial Sequence
  Synthetic
ugaguaaaugauggggguga

SEQ ID NO: 789654 - RNA, 20 nt, Artificial Sequence
  Synthetic
cggggccugucgugggguga

SEQ ID NO: 789655 - RNA, 20 nt, Artificial Sequence
  Synthetic
cugcacuccagccuggguga

SEQ ID NO: 789656 - RNA, 20 nt, Artificial Sequence
  Synthetic
uaugcucacugccuggguga

SEQ ID NO: 789657 - RNA, 20 nt, Artificial Sequence
  Synthetic
uauguucacuaucuggguga

SEQ ID NO: 789658 - RNA, 20 nt, Artificial Sequence
  Synthetic
aagugguuaccucuggguga

SEQ ID NO: 789659 - RNA, 20 nt, Artificial Sequence
  Synthetic
uuauuucuuggucuggguga

SEQ ID NO: 789660 - RNA, 20 nt, Artificial Sequence
  Synthetic
ccccaucaaaaaguggguga

SEQ ID NO: 789661 - RNA, 20 nt, Artificial Sequence
  Synthetic
aauguacauaauuuggguga

SEQ ID NO: 789662 - RNA, 20 nt, Artificial Sequence
  Synthetic
cugguauuaaacaaugguga

SEQ ID NO: 789663 - RNA, 20 nt, Artificial Sequence
  Synthetic
agacucucucuucaugguga

SEQ ID NO: 789664 - RNA, 20 nt, Artificial Sequence
  Synthetic
uuuuauaacuguuaugguga

SEQ ID NO: 789665 - RNA, 20 nt, Artificial Sequence
  Synthetic
ccaagaucagggccugguga

SEQ ID NO: 789666 - RNA, 20 nt, Artificial Sequence
  Synthetic
cagacuccacaaucugguga

SEQ ID NO: 789667 - RNA, 20 nt, Artificial Sequence
  Synthetic
uggcauuuggugucugguga

SEQ ID NO: 789668 - RNA, 20 nt, Artificial Sequence
  Synthetic
uuaucagaggugagugguga

SEQ ID NO: 789669 - RNA, 20 nt, Artificial Sequence
  Synthetic
cuagagauggauagugguga

SEQ ID NO: 789670 - RNA, 20 nt, Artificial Sequence
  Synthetic
aauauauuuuauagugguga

SEQ ID NO: 789671 - RNA, 20 nt, Artificial Sequence
  Synthetic
accaagcuaaaaggugguga

SEQ ID NO: 789672 - RNA, 20 nt, Artificial Sequence
  Synthetic
agaccagugucaggugguga

SEQ ID NO: 789673 - RNA, 20 nt, Artificial Sequence
  Synthetic
agaaggaggaauggugguga

SEQ ID NO: 789674 - RNA, 20 nt, Artificial Sequence
  Synthetic
cagaacccucauggugguga

SEQ ID NO: 789675 - RNA, 20 nt, Artificial Sequence
  Synthetic
cuggagauggauggugguga

SEQ ID NO: 789676 - RNA, 20 nt, Artificial Sequence
  Synthetic
uggggcauaaacugugguga

SEQ ID NO: 789677 - RNA, 20 nt, Artificial Sequence
  Synthetic
agcaagcaucagcuugguga

SEQ ID NO: 789678 - RNA, 20 nt, Artificial Sequence
  Synthetic
aucauuacauguguugguga

SEQ ID NO: 789679 - RNA, 20 nt, Artificial Sequence
  Synthetic
auauugauugacuuugguga

SEQ ID NO: 789680 - RNA, 20 nt, Artificial Sequence
  Synthetic
acauggcaugauuuugguga

SEQ ID NO: 789681 - RNA, 20 nt, Artificial Sequence
  Synthetic
uuuuaacaaacuuuugguga

SEQ ID NO: 789682 - RNA, 20 nt, Artificial Sequence
  Synthetic
cauuauuuuuauaaauguga

SEQ ID NO: 789683 - RNA, 20 nt, Artificial Sequence
  Synthetic
uugaaggauuguaaauguga

SEQ ID NO: 789684 - RNA, 20 nt, Artificial Sequence
  Synthetic
uugacccucaaacaauguga

SEQ ID NO: 789685 - RNA, 20 nt, Artificial Sequence
  Synthetic
uuccugggacaacaauguga

SEQ ID NO: 789686 - RNA, 20 nt, Artificial Sequence
  Synthetic
cuggaucuguggcaauguga

SEQ ID NO: 789687 - RNA, 20 nt, Artificial Sequence
  Synthetic
cucugcauccugcaauguga

SEQ ID NO: 789688 - RNA, 20 nt, Artificial Sequence
  Synthetic
aagcuggggccagaauguga

SEQ ID NO: 789689 - RNA, 20 nt, Artificial Sequence
  Synthetic
auccaaaauucagaauguga

SEQ ID NO: 789690 - RNA, 20 nt, Artificial Sequence
  Synthetic
uaacaugauucauaauguga

SEQ ID NO: 789691 - RNA, 20 nt, Artificial Sequence
  Synthetic
auugcauggauuuaauguga

SEQ ID NO: 789692 - RNA, 20 nt, Artificial Sequence
  Synthetic
uagcuccuuucagcauguga

SEQ ID NO: 789693 - RNA, 20 nt, Artificial Sequence
  Synthetic
cacaaauaaauaucauguga

SEQ ID NO: 789694 - RNA, 20 nt, Artificial Sequence
  Synthetic
aauccccaugugucauguga

SEQ ID NO: 789695 - RNA, 20 nt, Artificial Sequence
  Synthetic
aucucaugggguucauguga

SEQ ID NO: 789696 - RNA, 20 nt, Artificial Sequence
  Synthetic
ccaacuuacaagcgauguga

SEQ ID NO: 789697 - RNA, 20 nt, Artificial Sequence
  Synthetic
acaacuuacaagggauguga

SEQ ID NO: 789698 - RNA, 20 nt, Artificial Sequence
  Synthetic
ccaacuuacaagggauguga

SEQ ID NO: 789699 - RNA, 20 nt, Artificial Sequence
  Synthetic
acaacuugcaagggauguga

SEQ ID NO: 789700 - RNA, 20 nt, Artificial Sequence
  Synthetic
agagccucuuauggauguga

SEQ ID NO: 789701 - RNA, 20 nt, Artificial Sequence
  Synthetic
caaaugcuacaaugauguga

SEQ ID NO: 789702 - RNA, 20 nt, Artificial Sequence
  Synthetic
ugauauauauauauauguga

SEQ ID NO: 789703 - RNA, 20 nt, Artificial Sequence
  Synthetic
ucauuccuuucucuauguga

SEQ ID NO: 789704 - RNA, 20 nt, Artificial Sequence
  Synthetic
ccauucugacugguauguga

SEQ ID NO: 789705 - RNA, 20 nt, Artificial Sequence
  Synthetic
caagugguguguguauguga

SEQ ID NO: 789706 - RNA, 20 nt, Artificial Sequence
  Synthetic
uuaguauuuaaauuauguga

SEQ ID NO: 789707 - RNA, 20 nt, Artificial Sequence
  Synthetic
uccugauagcuguuauguga

SEQ ID NO: 789708 - RNA, 20 nt, Artificial Sequence
  Synthetic
agaugccugccuuuauguga

SEQ ID NO: 789709 - RNA, 20 nt, Artificial Sequence
  Synthetic
cauugguucuguuuauguga

SEQ ID NO: 789710 - RNA, 20 nt, Artificial Sequence
  Synthetic
cggcuuuguuuacacuguga

SEQ ID NO: 789711 - RNA, 20 nt, Artificial Sequence
  Synthetic
aggucccugagucacuguga

SEQ ID NO: 789712 - RNA, 20 nt, Artificial Sequence
  Synthetic
uucaagaaguuuuacuguga

SEQ ID NO: 789713 - RNA, 20 nt, Artificial Sequence
  Synthetic
aauuacaguauuuccuguga

SEQ ID NO: 789714 - RNA, 20 nt, Artificial Sequence
  Synthetic
caagacuguuuuuccuguga

SEQ ID NO: 789715 - RNA, 20 nt, Artificial Sequence
  Synthetic
uacaaggcagaaagcuguga

SEQ ID NO: 789716 - RNA, 20 nt, Artificial Sequence
  Synthetic
aggacagcaucaagcuguga

SEQ ID NO: 789717 - RNA, 20 nt, Artificial Sequence
  Synthetic
augguuaccagaggcuguga

SEQ ID NO: 789718 - RNA, 20 nt, Artificial Sequence
  Synthetic
aaaaaguuagcuggcuguga

SEQ ID NO: 789719 - RNA, 20 nt, Artificial Sequence
  Synthetic
ccauccuucagcugcuguga

SEQ ID NO: 789720 - RNA, 20 nt, Artificial Sequence
  Synthetic
uugcaggcacugugcuguga

SEQ ID NO: 789721 - RNA, 20 nt, Artificial Sequence
  Synthetic
caaucuagauguugcuguga

SEQ ID NO: 789722 - RNA, 20 nt, Artificial Sequence
  Synthetic
agguacaguaaaaucuguga

SEQ ID NO: 789723 - RNA, 20 nt, Artificial Sequence
  Synthetic
uucaauccguuuaucuguga

SEQ ID NO: 789724 - RNA, 20 nt, Artificial Sequence
  Synthetic
uuuuucuuuuuucucuguga

SEQ ID NO: 789725 - RNA, 20 nt, Artificial Sequence
  Synthetic
ccagauuguggagucuguga

SEQ ID NO: 789726 - RNA, 20 nt, Artificial Sequence
  Synthetic
cuagaccucugggucuguga

SEQ ID NO: 789727 - RNA, 20 nt, Artificial Sequence
  Synthetic
cggguaauugcauucuguga

SEQ ID NO: 789728 - RNA, 20 nt, Artificial Sequence
  Synthetic
caauuccuauccuucuguga

SEQ ID NO: 789729 - RNA, 20 nt, Artificial Sequence
  Synthetic
aaauuacuuaauuucuguga

SEQ ID NO: 789730 - RNA, 20 nt, Artificial Sequence
  Synthetic
ccucacuaccaaaaguguga

SEQ ID NO: 789731 - RNA, 20 nt, Artificial Sequence
  Synthetic
agaggagaagagaaguguga

SEQ ID NO: 789732 - RNA, 20 nt, Artificial Sequence
  Synthetic
uugacccucaaacaguguga

SEQ ID NO: 789733 - RNA, 20 nt, Artificial Sequence
  Synthetic
aguguauacuacucguguga

SEQ ID NO: 789734 - RNA, 20 nt, Artificial Sequence
  Synthetic
aaucuugaaaccagguguga

SEQ ID NO: 789735 - RNA, 20 nt, Artificial Sequence
  Synthetic
agggugaccacaggguguga

SEQ ID NO: 789736 - RNA, 20 nt, Artificial Sequence
  Synthetic
auaauaugcuggggguguga

SEQ ID NO: 789737 - RNA, 20 nt, Artificial Sequence
  Synthetic
uagcuuuacuagcuguguga

SEQ ID NO: 789738 - RNA, 20 nt, Artificial Sequence
  Synthetic
cuggauaccugaguguguga

SEQ ID NO: 789739 - RNA, 20 nt, Artificial Sequence
  Synthetic
aaugugucugcuuuguguga

SEQ ID NO: 789740 - RNA, 20 nt, Artificial Sequence
  Synthetic
ugaauuuggacacauuguga

SEQ ID NO: 789741 - RNA, 20 nt, Artificial Sequence
  Synthetic
ugaagccuacuugauuguga

SEQ ID NO: 789742 - RNA, 20 nt, Artificial Sequence
  Synthetic
cccuaauacucauauuguga

SEQ ID NO: 789743 - RNA, 20 nt, Artificial Sequence
  Synthetic
acuuuauauuguacuuguga

SEQ ID NO: 789744 - RNA, 20 nt, Artificial Sequence
  Synthetic
acugaauaccuuacuuguga

SEQ ID NO: 789745 - RNA, 20 nt, Artificial Sequence
  Synthetic
ucucuccugcugccuuguga

SEQ ID NO: 789746 - RNA, 20 nt, Artificial Sequence
  Synthetic
aaguccacacuuccuuguga

SEQ ID NO: 789747 - RNA, 20 nt, Artificial Sequence
  Synthetic
cugguggaugaggcuuguga

SEQ ID NO: 789748 - RNA, 20 nt, Artificial Sequence
  Synthetic
uuaggccucugggcuuguga

SEQ ID NO: 789749 - RNA, 20 nt, Artificial Sequence
  Synthetic
aaauauugaagcucuuguga

SEQ ID NO: 789750 - RNA, 20 nt, Artificial Sequence
  Synthetic
acaggcugacugucuuguga

SEQ ID NO: 789751 - RNA, 20 nt, Artificial Sequence
  Synthetic
agauaauccguaaguuguga

SEQ ID NO: 789752 - RNA, 20 nt, Artificial Sequence
  Synthetic
accucuucagguuguuguga

SEQ ID NO: 789753 - RNA, 20 nt, Artificial Sequence
  Synthetic
aaagaguuguagauuuguga

SEQ ID NO: 789754 - RNA, 20 nt, Artificial Sequence
  Synthetic
cgagcaaguccuuuuuguga

SEQ ID NO: 789755 - RNA, 20 nt, Artificial Sequence
  Synthetic
aaaacaucauaaaaaauuga

SEQ ID NO: 789756 - RNA, 20 nt, Artificial Sequence
  Synthetic
cauuuccacaacaaaauuga

SEQ ID NO: 789757 - RNA, 20 nt, Artificial Sequence
  Synthetic
ugaaugauccagaaaauuga

SEQ ID NO: 789758 - RNA, 20 nt, Artificial Sequence
  Synthetic
aggucacaugaacaaauuga

SEQ ID NO: 789759 - RNA, 20 nt, Artificial Sequence
  Synthetic
aaugucuauuagcaaauuga

SEQ ID NO: 789760 - RNA, 20 nt, Artificial Sequence
  Synthetic
agaggcauccuagaaauuga

SEQ ID NO: 789761 - RNA, 20 nt, Artificial Sequence
  Synthetic
ccaagguuugcugaaauuga

SEQ ID NO: 789762 - RNA, 20 nt, Artificial Sequence
  Synthetic
aagaguagagaauaaauuga

SEQ ID NO: 789763 - RNA, 20 nt, Artificial Sequence
  Synthetic
acauaaaaaugguaaauuga

SEQ ID NO: 789764 - RNA, 20 nt, Artificial Sequence
  Synthetic
auucucaaaguguaaauuga

SEQ ID NO: 789765 - RNA, 20 nt, Artificial Sequence
  Synthetic
aaaaaaaaguauccaauuga

SEQ ID NO: 789766 - RNA, 20 nt, Artificial Sequence
  Synthetic
caaagccccuuuccaauuga

SEQ ID NO: 789767 - RNA, 20 nt, Artificial Sequence
  Synthetic
uauagcccuggaagaauuga

SEQ ID NO: 789768 - RNA, 20 nt, Artificial Sequence
  Synthetic
ccauggcaauggagaauuga

SEQ ID NO: 789769 - RNA, 20 nt, Artificial Sequence
  Synthetic
ugcucuuuagcaggaauuga

SEQ ID NO: 789770 - RNA, 20 nt, Artificial Sequence
  Synthetic
agaauguaaaaaugaauuga

SEQ ID NO: 789771 - RNA, 20 nt, Artificial Sequence
  Synthetic
cuaugauagcauauaauuga

SEQ ID NO: 789772 - RNA, 20 nt, Artificial Sequence
  Synthetic
caugaagaacuauuaauuga

SEQ ID NO: 789773 - RNA, 20 nt, Artificial Sequence
  Synthetic
cagguaucaacguuaauuga

SEQ ID NO: 789774 - RNA, 20 nt, Artificial Sequence
  Synthetic
agacaguagggaaacauuga

SEQ ID NO: 789775 - RNA, 20 nt, Artificial Sequence
  Synthetic
uuuaaugguuuacacauuga

SEQ ID NO: 789776 - RNA, 20 nt, Artificial Sequence
  Synthetic
cauugaacaucagacauuga

SEQ ID NO: 789777 - RNA, 20 nt, Artificial Sequence
  Synthetic
uuucuacaaauagacauuga

SEQ ID NO: 789778 - RNA, 20 nt, Artificial Sequence
  Synthetic
ccagguaagagggacauuga

SEQ ID NO: 789779 - RNA, 20 nt, Artificial Sequence
  Synthetic
cugaccuugacugacauuga

SEQ ID NO: 789780 - RNA, 20 nt, Artificial Sequence
  Synthetic
uuuaucuaacaauacauuga

SEQ ID NO: 789781 - RNA, 20 nt, Artificial Sequence
  Synthetic
uguaaguacagaaccauuga

SEQ ID NO: 789782 - RNA, 20 nt, Artificial Sequence
  Synthetic
uucauccaguccaccauuga

SEQ ID NO: 789783 - RNA, 20 nt, Artificial Sequence
  Synthetic
uauaucugaucuaccauuga

SEQ ID NO: 789784 - RNA, 20 nt, Artificial Sequence
  Synthetic
uauguuuuagaaggcauuga

SEQ ID NO: 789785 - RNA, 20 nt, Artificial Sequence
  Synthetic
uuaauccaguauaucauuga

SEQ ID NO: 789786 - RNA, 20 nt, Artificial Sequence
  Synthetic
uuaauccagucuaucauuga

SEQ ID NO: 789787 - RNA, 20 nt, Artificial Sequence
  Synthetic
uuuauccagucuaucauuga

SEQ ID NO: 789788 - RNA, 20 nt, Artificial Sequence
  Synthetic
uuaauccggucuaucauuga

SEQ ID NO: 789789 - RNA, 20 nt, Artificial Sequence
  Synthetic
aaaagauuaagacucauuga

SEQ ID NO: 789790 - RNA, 20 nt, Artificial Sequence
  Synthetic
aauagaugggaauucauuga

SEQ ID NO: 789791 - RNA, 20 nt, Artificial Sequence
  Synthetic
aggaacuuucuccagauuga

SEQ ID NO: 789792 - RNA, 20 nt, Artificial Sequence
  Synthetic
uucacacaaucagagauuga

SEQ ID NO: 789793 - RNA, 20 nt, Artificial Sequence
  Synthetic
uguuaguuugcugagauuga

SEQ ID NO: 789794 - RNA, 20 nt, Artificial Sequence
  Synthetic
ugucagaucccauagauuga

SEQ ID NO: 789795 - RNA, 20 nt, Artificial Sequence
  Synthetic
uuuaucuacuugucgauuga

SEQ ID NO: 789796 - RNA, 20 nt, Artificial Sequence
  Synthetic
accagaaacccuaggauuga

SEQ ID NO: 789797 - RNA, 20 nt, Artificial Sequence
  Synthetic
cuuuucuguuuuaggauuga

SEQ ID NO: 789798 - RNA, 20 nt, Artificial Sequence
  Synthetic
cuacucaguaaugggauuga

SEQ ID NO: 789799 - RNA, 20 nt, Artificial Sequence
  Synthetic
ugaagaaaauucaugauuga

SEQ ID NO: 789800 - RNA, 20 nt, Artificial Sequence
  Synthetic
ucaaaaauaugauugauuga

SEQ ID NO: 789801 - RNA, 20 nt, Artificial Sequence
  Synthetic
aaaagggauggaaauauuga

SEQ ID NO: 789802 - RNA, 20 nt, Artificial Sequence
  Synthetic
uauuaccaacuaaauauuga

SEQ ID NO: 789803 - RNA, 20 nt, Artificial Sequence
  Synthetic
agugcaauguggaauauuga

SEQ ID NO: 789804 - RNA, 20 nt, Artificial Sequence
  Synthetic
uucacugcuguacauauuga

SEQ ID NO: 789805 - RNA, 20 nt, Artificial Sequence
  Synthetic
uuaauuccuugucauauuga

SEQ ID NO: 789806 - RNA, 20 nt, Artificial Sequence
  Synthetic
uacacauacacugauauuga

SEQ ID NO: 789807 - RNA, 20 nt, Artificial Sequence
  Synthetic
uauucagguaauuauauuga

SEQ ID NO: 789808 - RNA, 20 nt, Artificial Sequence
  Synthetic
ucccacuccaaaccuauuga

SEQ ID NO: 789809 - RNA, 20 nt, Artificial Sequence
  Synthetic
auucuuggcaccccuauuga

SEQ ID NO: 789810 - RNA, 20 nt, Artificial Sequence
  Synthetic
uaacugggauuuaguauuga

SEQ ID NO: 789811 - RNA, 20 nt, Artificial Sequence
  Synthetic
cucaauaaauuagguauuga

SEQ ID NO: 789812 - RNA, 20 nt, Artificial Sequence
  Synthetic
cucgauaaauuagguauuga

SEQ ID NO: 789813 - RNA, 20 nt, Artificial Sequence
  Synthetic
cccuaguugguggguauuga

SEQ ID NO: 789814 - RNA, 20 nt, Artificial Sequence
  Synthetic
cuuuaauaaaaauguauuga

SEQ ID NO: 789815 - RNA, 20 nt, Artificial Sequence
  Synthetic
uuucccuuggaauguauuga

SEQ ID NO: 789816 - RNA, 20 nt, Artificial Sequence
  Synthetic
caccucugccuguguauuga

SEQ ID NO: 789817 - RNA, 20 nt, Artificial Sequence
  Synthetic
ugggacuacuuuuguauuga

SEQ ID NO: 789818 - RNA, 20 nt, Artificial Sequence
  Synthetic
uguauccagucuauuauuga

SEQ ID NO: 789819 - RNA, 20 nt, Artificial Sequence
  Synthetic
aucagcugugaacuuauuga

SEQ ID NO: 789820 - RNA, 20 nt, Artificial Sequence
  Synthetic
caaaccauaucaguuauuga

SEQ ID NO: 789821 - RNA, 20 nt, Artificial Sequence
  Synthetic
cucaauaaacuaguuauuga

SEQ ID NO: 789822 - RNA, 20 nt, Artificial Sequence
  Synthetic
auuugacagacauuuauuga

SEQ ID NO: 789823 - RNA, 20 nt, Artificial Sequence
  Synthetic
augcaacagccauuuauuga

SEQ ID NO: 789824 - RNA, 20 nt, Artificial Sequence
  Synthetic
uuuaaccguucauuuauuga

SEQ ID NO: 789825 - RNA, 20 nt, Artificial Sequence
  Synthetic
ugggacaaguucuuuauuga

SEQ ID NO: 789826 - RNA, 20 nt, Artificial Sequence
  Synthetic
agaaaugagauaaaacuuga

SEQ ID NO: 789827 - RNA, 20 nt, Artificial Sequence
  Synthetic
uuagaauuuucuaaacuuga

SEQ ID NO: 789828 - RNA, 20 nt, Artificial Sequence
  Synthetic
acuucagagggacaacuuga

SEQ ID NO: 789829 - RNA, 20 nt, Artificial Sequence
  Synthetic
uuuccaugcccuuaacuuga

SEQ ID NO: 789830 - RNA, 20 nt, Artificial Sequence
  Synthetic
uuucugaaagauacacuuga

SEQ ID NO: 789831 - RNA, 20 nt, Artificial Sequence
  Synthetic
uaucaaaaguaagcacuuga

SEQ ID NO: 789832 - RNA, 20 nt, Artificial Sequence
  Synthetic
ccugacugaccaucacuuga

SEQ ID NO: 789833 - RNA, 20 nt, Artificial Sequence
  Synthetic
aauuugaagaugagacuuga

SEQ ID NO: 789834 - RNA, 20 nt, Artificial Sequence
  Synthetic
ugcaacggaaguagacuuga

SEQ ID NO: 789835 - RNA, 20 nt, Artificial Sequence
  Synthetic
aaaggacuggcaggacuuga

SEQ ID NO: 789836 - RNA, 20 nt, Artificial Sequence
  Synthetic
uauauauauaugggacuuga

SEQ ID NO: 789837 - RNA, 20 nt, Artificial Sequence
  Synthetic
cugccugguaguauacuuga

SEQ ID NO: 789838 - RNA, 20 nt, Artificial Sequence
  Synthetic
ccauauuaggagcaccuuga

SEQ ID NO: 789839 - RNA, 20 nt, Artificial Sequence
  Synthetic
uccuaaugucaucaccuuga

SEQ ID NO: 789840 - RNA, 20 nt, Artificial Sequence
  Synthetic
aagaauuuaaucuaccuuga

SEQ ID NO: 789841 - RNA, 20 nt, Artificial Sequence
  Synthetic
uagaaaaaaaaaacccuuga

SEQ ID NO: 789842 - RNA, 20 nt, Artificial Sequence
  Synthetic
cagcccaugguuucccuuga

SEQ ID NO: 789843 - RNA, 20 nt, Artificial Sequence
  Synthetic
uaaauuacguguagccuuga

SEQ ID NO: 789844 - RNA, 20 nt, Artificial Sequence
  Synthetic
aggcuuagguguugccuuga

SEQ ID NO: 789845 - RNA, 20 nt, Artificial Sequence
  Synthetic
uucauucucaugcuccuuga

SEQ ID NO: 789846 - RNA, 20 nt, Artificial Sequence
  Synthetic
ugggauggccaaguccuuga

SEQ ID NO: 789847 - RNA, 20 nt, Artificial Sequence
  Synthetic
acauuuuggcugguccuuga

SEQ ID NO: 789848 - RNA, 20 nt, Artificial Sequence
  Synthetic
auuugcugccauaagcuuga

SEQ ID NO: 789849 - RNA, 20 nt, Artificial Sequence
  Synthetic
cuaauccucucacagcuuga

SEQ ID NO: 789850 - RNA, 20 nt, Artificial Sequence
  Synthetic
augaaaggagcccagcuuga

SEQ ID NO: 789851 - RNA, 20 nt, Artificial Sequence
  Synthetic
aauaaauguggauagcuuga

SEQ ID NO: 789852 - RNA, 20 nt, Artificial Sequence
  Synthetic
ucuaauuuaaauuagcuuga

SEQ ID NO: 789853 - RNA, 20 nt, Artificial Sequence
  Synthetic
uuucaggcuuuuuggcuuga

SEQ ID NO: 789854 - RNA, 20 nt, Artificial Sequence
  Synthetic
uacaaagcacaaaugcuuga

SEQ ID NO: 789855 - RNA, 20 nt, Artificial Sequence
  Synthetic
cacaaaggagaaaugcuuga

SEQ ID NO: 789856 - RNA, 20 nt, Artificial Sequence
  Synthetic
cauaaagaauaaaugcuuga

SEQ ID NO: 789857 - RNA, 20 nt, Artificial Sequence
  Synthetic
aacaaagaauaauugcuuga

SEQ ID NO: 789858 - RNA, 20 nt, Artificial Sequence
  Synthetic
cuuugaucuuauuugcuuga

SEQ ID NO: 789859 - RNA, 20 nt, Artificial Sequence
  Synthetic
auucauucagagaaucuuga

SEQ ID NO: 789860 - RNA, 20 nt, Artificial Sequence
  Synthetic
auuuucaaagaagaucuuga

SEQ ID NO: 789861 - RNA, 20 nt, Artificial Sequence
  Synthetic
ugucaacuauuagaucuuga

SEQ ID NO: 789862 - RNA, 20 nt, Artificial Sequence
  Synthetic
uggaggcaauuggaucuuga

SEQ ID NO: 789863 - RNA, 20 nt, Artificial Sequence
  Synthetic
uaaguauuggacacucuuga

SEQ ID NO: 789864 - RNA, 20 nt, Artificial Sequence
  Synthetic
aguuuucaauucccucuuga

SEQ ID NO: 789865 - RNA, 20 nt, Artificial Sequence
  Synthetic
uaauuuauaccugcucuuga

SEQ ID NO: 789866 - RNA, 20 nt, Artificial Sequence
  Synthetic
uuuguccauucaucucuuga

SEQ ID NO: 789867 - RNA, 20 nt, Artificial Sequence
  Synthetic
uagaugugcucuucucuuga

SEQ ID NO: 789868 - RNA, 20 nt, Artificial Sequence
  Synthetic
auggugggcuuuucucuuga

SEQ ID NO: 789869 - RNA, 20 nt, Artificial Sequence
  Synthetic
auauuugaucagggucuuga

SEQ ID NO: 789870 - RNA, 20 nt, Artificial Sequence
  Synthetic
auuauuaauaucugucuuga

SEQ ID NO: 789871 - RNA, 20 nt, Artificial Sequence
  Synthetic
cuucuuaucuaaauucuuga

SEQ ID NO: 789872 - RNA, 20 nt, Artificial Sequence
  Synthetic
ucauuuaacaacauucuuga

SEQ ID NO: 789873 - RNA, 20 nt, Artificial Sequence
  Synthetic
auuugugaauacauucuuga

SEQ ID NO: 789874 - RNA, 20 nt, Artificial Sequence
  Synthetic
aauggguuuaagauucuuga

SEQ ID NO: 789875 - RNA, 20 nt, Artificial Sequence
  Synthetic
agaaggaaagugauucuuga

SEQ ID NO: 789876 - RNA, 20 nt, Artificial Sequence
  Synthetic
cuuauucauauacuucuuga

SEQ ID NO: 789877 - RNA, 20 nt, Artificial Sequence
  Synthetic
aaauaaauauuucuucuuga

SEQ ID NO: 789878 - RNA, 20 nt, Artificial Sequence
  Synthetic
uaagcauuuuaauuucuuga

SEQ ID NO: 789879 - RNA, 20 nt, Artificial Sequence
  Synthetic
uaauaauucucauuucuuga

SEQ ID NO: 789880 - RNA, 20 nt, Artificial Sequence
  Synthetic
uauaauacuucauuucuuga

SEQ ID NO: 789881 - RNA, 20 nt, Artificial Sequence
  Synthetic
caucgucccauauuucuuga

SEQ ID NO: 789882 - RNA, 20 nt, Artificial Sequence
  Synthetic
acauaaaauuuguuucuuga

SEQ ID NO: 789883 - RNA, 20 nt, Artificial Sequence
  Synthetic
auucgugagcauaaaguuga

SEQ ID NO: 789884 - RNA, 20 nt, Artificial Sequence
  Synthetic
uuauacagacguaaaguuga

SEQ ID NO: 789885 - RNA, 20 nt, Artificial Sequence
  Synthetic
ugagauguguaagaaguuga

SEQ ID NO: 789886 - RNA, 20 nt, Artificial Sequence
  Synthetic
acauaaaagacagaaguuga

SEQ ID NO: 789887 - RNA, 20 nt, Artificial Sequence
  Synthetic
cguguucuaaauacaguuga

SEQ ID NO: 789888 - RNA, 20 nt, Artificial Sequence
  Synthetic
uuaugauaauguacaguuga

SEQ ID NO: 789889 - RNA, 20 nt, Artificial Sequence
  Synthetic
uauuuuacaaacccaguuga

SEQ ID NO: 789890 - RNA, 20 nt, Artificial Sequence
  Synthetic
auggacuaagcagcaguuga

SEQ ID NO: 789891 - RNA, 20 nt, Artificial Sequence
  Synthetic
auuuuaguauggagaguuga

SEQ ID NO: 789892 - RNA, 20 nt, Artificial Sequence
  Synthetic
aaaagggaagugagaguuga

SEQ ID NO: 789893 - RNA, 20 nt, Artificial Sequence
  Synthetic
uucauuuuaguaggaguuga

SEQ ID NO: 789894 - RNA, 20 nt, Artificial Sequence
  Synthetic
acauuugcccagggaguuga

SEQ ID NO: 789895 - RNA, 20 nt, Artificial Sequence
  Synthetic
aaguagcauuuuggaguuga

SEQ ID NO: 789896 - RNA, 20 nt, Artificial Sequence
  Synthetic
auaucuuuaaaucuaguuga

SEQ ID NO: 789897 - RNA, 20 nt, Artificial Sequence
  Synthetic
uggacaacaggauuaguuga

SEQ ID NO: 789898 - RNA, 20 nt, Artificial Sequence
  Synthetic
aagaaagucuguuuaguuga

SEQ ID NO: 789899 - RNA, 20 nt, Artificial Sequence
  Synthetic
aauguguuaacaaacguuga

SEQ ID NO: 789900 - RNA, 20 nt, Artificial Sequence
  Synthetic
uuuauccaauccaacguuga

SEQ ID NO: 789901 - RNA, 20 nt, Artificial Sequence
  Synthetic
aagcacugguuaaucguuga

SEQ ID NO: 789902 - RNA, 20 nt, Artificial Sequence
  Synthetic
aauuucacuuuacucguuga

SEQ ID NO: 789903 - RNA, 20 nt, Artificial Sequence
  Synthetic
uuuuuuuguauaaagguuga

SEQ ID NO: 789904 - RNA, 20 nt, Artificial Sequence
  Synthetic
uaauguagaugacagguuga

SEQ ID NO: 789905 - RNA, 20 nt, Artificial Sequence
  Synthetic
uaauguagaugaaggguuga

SEQ ID NO: 789906 - RNA, 20 nt, Artificial Sequence
  Synthetic
aaaccuagaugacggguuga

SEQ ID NO: 789907 - RNA, 20 nt, Artificial Sequence
  Synthetic
uaauguagaugacggguuga

SEQ ID NO: 789908 - RNA, 20 nt, Artificial Sequence
  Synthetic
aaggguaguggggggguuga

SEQ ID NO: 789909 - RNA, 20 nt, Artificial Sequence
  Synthetic
cucaacuaggagcugguuga

SEQ ID NO: 789910 - RNA, 20 nt, Artificial Sequence
  Synthetic
cucccaucuccauugguuga

SEQ ID NO: 789911 - RNA, 20 nt, Artificial Sequence
  Synthetic
aauuagauccuauugguuga

SEQ ID NO: 789912 - RNA, 20 nt, Artificial Sequence
  Synthetic
uucaugcauugcuugguuga

SEQ ID NO: 789913 - RNA, 20 nt, Artificial Sequence
  Synthetic
ugaaaagucuacaauguuga

SEQ ID NO: 789914 - RNA, 20 nt, Artificial Sequence
  Synthetic
aaguguucugaccauguuga

SEQ ID NO: 789915 - RNA, 20 nt, Artificial Sequence
  Synthetic
uguauccauucgcauguuga

SEQ ID NO: 789916 - RNA, 20 nt, Artificial Sequence
  Synthetic
uauacugcugugcauguuga

SEQ ID NO: 789917 - RNA, 20 nt, Artificial Sequence
  Synthetic
aaauaaggacaucauguuga

SEQ ID NO: 789918 - RNA, 20 nt, Artificial Sequence
  Synthetic
aauaauaaaauggauguuga

SEQ ID NO: 789919 - RNA, 20 nt, Artificial Sequence
  Synthetic
ucuguaacuagcacuguuga

SEQ ID NO: 789920 - RNA, 20 nt, Artificial Sequence
  Synthetic
aggaaauaagugacuguuga

SEQ ID NO: 789921 - RNA, 20 nt, Artificial Sequence
  Synthetic
caggugguggcuccuguuga

SEQ ID NO: 789922 - RNA, 20 nt, Artificial Sequence
  Synthetic
agauacaaaaagaguguuga

SEQ ID NO: 789923 - RNA, 20 nt, Artificial Sequence
  Synthetic
ccuuuugaucuugguguuga

SEQ ID NO: 789924 - RNA, 20 nt, Artificial Sequence
  Synthetic
ugugccuguguguguguuga

SEQ ID NO: 789925 - RNA, 20 nt, Artificial Sequence
  Synthetic
uaaccagugagcauuguuga

SEQ ID NO: 789926 - RNA, 20 nt, Artificial Sequence
  Synthetic
cagcagguuucuguuguuga

SEQ ID NO: 789927 - RNA, 20 nt, Artificial Sequence
  Synthetic
ucuauauuauguguuguuga

SEQ ID NO: 789928 - RNA, 20 nt, Artificial Sequence
  Synthetic
uuuauccauucauuuguuga

SEQ ID NO: 789929 - RNA, 20 nt, Artificial Sequence
  Synthetic
uugagaugcauaaaauuuga

SEQ ID NO: 789930 - RNA, 20 nt, Artificial Sequence
  Synthetic
aacuggaagaaacaauuuga

SEQ ID NO: 789931 - RNA, 20 nt, Artificial Sequence
  Synthetic
aaaaauagcugagaauuuga

SEQ ID NO: 789932 - RNA, 20 nt, Artificial Sequence
  Synthetic
auuucaacauaggaauuuga

SEQ ID NO: 789933 - RNA, 20 nt, Artificial Sequence
  Synthetic
cugaaaauaauauaauuuga

SEQ ID NO: 789934 - RNA, 20 nt, Artificial Sequence
  Synthetic
aagaacaguagguaauuuga

SEQ ID NO: 789935 - RNA, 20 nt, Artificial Sequence
  Synthetic
uaugcaagaauuuaauuuga

SEQ ID NO: 789936 - RNA, 20 nt, Artificial Sequence
  Synthetic
auaaguuuuucaacauuuga

SEQ ID NO: 789937 - RNA, 20 nt, Artificial Sequence
  Synthetic
uaggagagggagccauuuga

SEQ ID NO: 789938 - RNA, 20 nt, Artificial Sequence
  Synthetic
ucaauaaaaggugcauuuga

SEQ ID NO: 789939 - RNA, 20 nt, Artificial Sequence
  Synthetic
aauuaguagaaaucauuuga

SEQ ID NO: 789940 - RNA, 20 nt, Artificial Sequence
  Synthetic
ugaguucucaugagauuuga

SEQ ID NO: 789941 - RNA, 20 nt, Artificial Sequence
  Synthetic
uacuuuaaggcaggauuuga

SEQ ID NO: 789942 - RNA, 20 nt, Artificial Sequence
  Synthetic
accaucauccugggauuuga

SEQ ID NO: 789943 - RNA, 20 nt, Artificial Sequence
  Synthetic
uuaugaccacauugauuuga

SEQ ID NO: 789944 - RNA, 20 nt, Artificial Sequence
  Synthetic
uauacacuguaaauauuuga

SEQ ID NO: 789945 - RNA, 20 nt, Artificial Sequence
  Synthetic
aacuucacauuuauauuuga

SEQ ID NO: 789946 - RNA, 20 nt, Artificial Sequence
  Synthetic
agugaaauguaacuauuuga

SEQ ID NO: 789947 - RNA, 20 nt, Artificial Sequence
  Synthetic
uugggcacaacaguauuuga

SEQ ID NO: 789948 - RNA, 20 nt, Artificial Sequence
  Synthetic
ugagauggauggguauuuga

SEQ ID NO: 789949 - RNA, 20 nt, Artificial Sequence
  Synthetic
acuuacuguaaauuauuuga

SEQ ID NO: 789950 - RNA, 20 nt, Artificial Sequence
  Synthetic
uaauguauucccuuauuuga

SEQ ID NO: 789951 - RNA, 20 nt, Artificial Sequence
  Synthetic
auuuaauuuaucuuauuuga

SEQ ID NO: 789952 - RNA, 20 nt, Artificial Sequence
  Synthetic
uugucucugcucuuauuuga

SEQ ID NO: 789953 - RNA, 20 nt, Artificial Sequence
  Synthetic
aucaaacacauuuuauuuga

SEQ ID NO: 789954 - RNA, 20 nt, Artificial Sequence
  Synthetic
acuguucugagaaacuuuga

SEQ ID NO: 789955 - RNA, 20 nt, Artificial Sequence
  Synthetic
aaugcugauagaaacuuuga

SEQ ID NO: 789956 - RNA, 20 nt, Artificial Sequence
  Synthetic
caccaguaaauaaacuuuga

SEQ ID NO: 789957 - RNA, 20 nt, Artificial Sequence
  Synthetic
uuuguucugguaaacuuuga

SEQ ID NO: 789958 - RNA, 20 nt, Artificial Sequence
  Synthetic
uacuggaccagcaacuuuga

SEQ ID NO: 789959 - RNA, 20 nt, Artificial Sequence
  Synthetic
uaacuaugcuaucacuuuga

SEQ ID NO: 789960 - RNA, 20 nt, Artificial Sequence
  Synthetic
ucacuuguggaagacuuuga

SEQ ID NO: 789961 - RNA, 20 nt, Artificial Sequence
  Synthetic
acacucaucaaugacuuuga

SEQ ID NO: 789962 - RNA, 20 nt, Artificial Sequence
  Synthetic
aaauuuagauaauacuuuga

SEQ ID NO: 789963 - RNA, 20 nt, Artificial Sequence
  Synthetic
auaaaugagguauacuuuga

SEQ ID NO: 789964 - RNA, 20 nt, Artificial Sequence
  Synthetic
cuaagcaauuauuacuuuga

SEQ ID NO: 789965 - RNA, 20 nt, Artificial Sequence
  Synthetic
augucaccaacuuacuuuga

SEQ ID NO: 789966 - RNA, 20 nt, Artificial Sequence
  Synthetic
aaccuucuccuuaccuuuga

SEQ ID NO: 789967 - RNA, 20 nt, Artificial Sequence
  Synthetic
cuuuaagaaauucccuuuga

SEQ ID NO: 789968 - RNA, 20 nt, Artificial Sequence
  Synthetic
acagaaagcuaagccuuuga

SEQ ID NO: 789969 - RNA, 20 nt, Artificial Sequence
  Synthetic
uguauuaaguaagccuuuga

SEQ ID NO: 789970 - RNA, 20 nt, Artificial Sequence
  Synthetic
aacgaguucauguccuuuga

SEQ ID NO: 789971 - RNA, 20 nt, Artificial Sequence
  Synthetic
aaaaacuagaauuccuuuga

SEQ ID NO: 789972 - RNA, 20 nt, Artificial Sequence
  Synthetic
ucugaugggcuuuccuuuga

SEQ ID NO: 789973 - RNA, 20 nt, Artificial Sequence
  Synthetic
aaaaucucgggaagcuuuga

SEQ ID NO: 789974 - RNA, 20 nt, Artificial Sequence
  Synthetic
auuuuuguacauagcuuuga

SEQ ID NO: 789975 - RNA, 20 nt, Artificial Sequence
  Synthetic
ucucaaaggacaggcuuuga

SEQ ID NO: 789976 - RNA, 20 nt, Artificial Sequence
  Synthetic
aagaacagaaauggcuuuga

SEQ ID NO: 789977 - RNA, 20 nt, Artificial Sequence
  Synthetic
aaucuauuggggugcuuuga

SEQ ID NO: 789978 - RNA, 20 nt, Artificial Sequence
  Synthetic
uucccuuacagucucuuuga

SEQ ID NO: 789979 - RNA, 20 nt, Artificial Sequence
  Synthetic
uugcccugaccauucuuuga

SEQ ID NO: 789980 - RNA, 20 nt, Artificial Sequence
  Synthetic
ucacaaaguguuuucuuuga

SEQ ID NO: 789981 - RNA, 20 nt, Artificial Sequence
  Synthetic
cagaagccuuuuuucuuuga

SEQ ID NO: 789982 - RNA, 20 nt, Artificial Sequence
  Synthetic
ucaaagcaggacaaguuuga

SEQ ID NO: 789983 - RNA, 20 nt, Artificial Sequence
  Synthetic
uuuaucacccauaaguuuga

SEQ ID NO: 789984 - RNA, 20 nt, Artificial Sequence
  Synthetic
cuaguaaauacuaaguuuga

SEQ ID NO: 789985 - RNA, 20 nt, Artificial Sequence
  Synthetic
aagcccaugucccaguuuga

SEQ ID NO: 789986 - RNA, 20 nt, Artificial Sequence
  Synthetic
cagcuggcugcugaguuuga

SEQ ID NO: 789987 - RNA, 20 nt, Artificial Sequence
  Synthetic
aaauuacaugcuugguuuga

SEQ ID NO: 789988 - RNA, 20 nt, Artificial Sequence
  Synthetic
aguugucuucaaauguuuga

SEQ ID NO: 789989 - RNA, 20 nt, Artificial Sequence
  Synthetic
cgaacccucacacuguuuga

SEQ ID NO: 789990 - RNA, 20 nt, Artificial Sequence
  Synthetic
cuaacccucacauuguuuga

SEQ ID NO: 789991 - RNA, 20 nt, Artificial Sequence
  Synthetic
aauuuuuaagauuuguuuga

SEQ ID NO: 789992 - RNA, 20 nt, Artificial Sequence
  Synthetic
aauguuuucguuuuguuuga

SEQ ID NO: 789993 - RNA, 20 nt, Artificial Sequence
  Synthetic
auacaacaaauaaauuuuga

SEQ ID NO: 789994 - RNA, 20 nt, Artificial Sequence
  Synthetic
acagucaaaaacaauuuuga

SEQ ID NO: 789995 - RNA, 20 nt, Artificial Sequence
  Synthetic
ucacuuuccaauaauuuuga

SEQ ID NO: 789996 - RNA, 20 nt, Artificial Sequence
  Synthetic
uuuucccagugagauuuuga

SEQ ID NO: 789997 - RNA, 20 nt, Artificial Sequence
  Synthetic
uccuugggucuagauuuuga

SEQ ID NO: 789998 - RNA, 20 nt, Artificial Sequence
  Synthetic
aaauuuccaguugauuuuga

SEQ ID NO: 789999 - RNA, 20 nt, Artificial Sequence
  Synthetic
cugcuguagggguauuuuga

SEQ ID NO: 790000 - RNA, 20 nt, Artificial Sequence
  Synthetic
acuucuuuguguuauuuuga

SEQ ID NO: 790001 - RNA, 20 nt, Artificial Sequence
  Synthetic
acacaggugaaaacuuuuga

SEQ ID NO: 790002 - RNA, 20 nt, Artificial Sequence
  Synthetic
aauuaaugugaaccuuuuga

SEQ ID NO: 790003 - RNA, 20 nt, Artificial Sequence
  Synthetic
aggaaacucuacccuuuuga

SEQ ID NO: 790004 - RNA, 20 nt, Artificial Sequence
  Synthetic
aaguauuacccgccuuuuga

SEQ ID NO: 790005 - RNA, 20 nt, Artificial Sequence
  Synthetic
uuuaucuauucuccuuuuga

SEQ ID NO: 790006 - RNA, 20 nt, Artificial Sequence
  Synthetic
ugcuucaugaaugcuuuuga

SEQ ID NO: 790007 - RNA, 20 nt, Artificial Sequence
  Synthetic
ucaaaagaaccaucuuuuga

SEQ ID NO: 790008 - RNA, 20 nt, Artificial Sequence
  Synthetic
augaucuccaccucuuuuga

SEQ ID NO: 790009 - RNA, 20 nt, Artificial Sequence
  Synthetic
acaggcugacucucuuuuga

SEQ ID NO: 790010 - RNA, 20 nt, Artificial Sequence
  Synthetic
auguguuuguauaguuuuga

SEQ ID NO: 790011 - RNA, 20 nt, Artificial Sequence
  Synthetic
uuaauugugauguguuuuga

SEQ ID NO: 790012 - RNA, 20 nt, Artificial Sequence
  Synthetic
ugucuuccuuuguguuuuga

SEQ ID NO: 790013 - RNA, 20 nt, Artificial Sequence
  Synthetic
aaagauguuuaaauuuuuga

SEQ ID NO: 790014 - RNA, 20 nt, Artificial Sequence
  Synthetic
ucacccccacagauuuuuga

SEQ ID NO: 790015 - RNA, 20 nt, Artificial Sequence
  Synthetic
ugcucaauaaauauuuuuga

SEQ ID NO: 790016 - RNA, 20 nt, Artificial Sequence
  Synthetic
uauuuuaccuauauuuuuga

SEQ ID NO: 790017 - RNA, 20 nt, Artificial Sequence
  Synthetic
aaacauggcaguauuuuuga

SEQ ID NO: 790018 - RNA, 20 nt, Artificial Sequence
  Synthetic
caagggaaucuuauuuuuga

SEQ ID NO: 790019 - RNA, 20 nt, Artificial Sequence
  Synthetic
uggaucuagaaacuuuuuga

SEQ ID NO: 790020 - RNA, 20 nt, Artificial Sequence
  Synthetic
auccuucccccacuuuuuga

SEQ ID NO: 790021 - RNA, 20 nt, Artificial Sequence
  Synthetic
auccuucgcccacuuuuuga

SEQ ID NO: 790022 - RNA, 20 nt, Artificial Sequence
  Synthetic
uuaccuuggccccuuuuuga

SEQ ID NO: 790023 - RNA, 20 nt, Artificial Sequence
  Synthetic
caaaaucucuguguuuuuga

SEQ ID NO: 790024 - RNA, 20 nt, Artificial Sequence
  Synthetic
ucuagucacgaauuuuuuga

SEQ ID NO: 790025 - RNA, 20 nt, Artificial Sequence
  Synthetic
ucaugccuaacauuuuuuga

SEQ ID NO: 790026 - RNA, 20 nt, Artificial Sequence
  Synthetic
uggauucauugauuuuuuga

SEQ ID NO: 790027 - RNA, 20 nt, Artificial Sequence
  Synthetic
uggcuucauugauuuuuuga

SEQ ID NO: 790028 - RNA, 20 nt, Artificial Sequence
  Synthetic
accuucauugacuuuuuuga

SEQ ID NO: 790029 - RNA, 20 nt, Artificial Sequence
  Synthetic
aggauucuuugcuuuuuuga

SEQ ID NO: 790030 - RNA, 20 nt, Artificial Sequence
  Synthetic
auaaugacccuguuuuuuga

SEQ ID NO: 790031 - RNA, 20 nt, Artificial Sequence
  Synthetic
acaauuaugaguuuuuuuga

SEQ ID NO: 790032 - RNA, 20 nt, Artificial Sequence
  Synthetic
cuuuugcccauuuuuuuuga

SEQ ID NO: 790033 - RNA, 20 nt, Artificial Sequence
  Synthetic
ucuuucuuuuuuuuuuuuga

SEQ ID NO: 790034 - RNA, 20 nt, Artificial Sequence
  Synthetic
uagaugcugaaaaaaaaaua

SEQ ID NO: 790035 - RNA, 20 nt, Artificial Sequence
  Synthetic
agauuuugggaaaaaaaaua

SEQ ID NO: 790036 - RNA, 20 nt, Artificial Sequence
  Synthetic
acuguaaucuuaaaaaaaua

SEQ ID NO: 790037 - RNA, 20 nt, Artificial Sequence
  Synthetic
ccucauuuuuuaaaaaaaua

SEQ ID NO: 790038 - RNA, 20 nt, Artificial Sequence
  Synthetic
aauacaaauggcaaaaaaua

SEQ ID NO: 790039 - RNA, 20 nt, Artificial Sequence
  Synthetic
ucacauuuagggaaaaaaua

SEQ ID NO: 790040 - RNA, 20 nt, Artificial Sequence
  Synthetic
uacaggagacauaaaaaaua

SEQ ID NO: 790041 - RNA, 20 nt, Artificial Sequence
  Synthetic
ucuuucuauuguaaaaaaua

SEQ ID NO: 790042 - RNA, 20 nt, Artificial Sequence
  Synthetic
ccuuaacaauuuaaaaaaua

SEQ ID NO: 790043 - RNA, 20 nt, Artificial Sequence
  Synthetic
auguuuugcuuuaaaaaaua

SEQ ID NO: 790044 - RNA, 20 nt, Artificial Sequence
  Synthetic
uugugucauucacaaaaaua

SEQ ID NO: 790045 - RNA, 20 nt, Artificial Sequence
  Synthetic
aaguaauuuuaccaaaaaua

SEQ ID NO: 790046 - RNA, 20 nt, Artificial Sequence
  Synthetic
aagcauaagaaagaaaaaua

SEQ ID NO: 790047 - RNA, 20 nt, Artificial Sequence
  Synthetic
ccagaaguuaaugaaaaaua

SEQ ID NO: 790048 - RNA, 20 nt, Artificial Sequence
  Synthetic
cuuccugcaagugaaaaaua

SEQ ID NO: 790049 - RNA, 20 nt, Artificial Sequence
  Synthetic
cacucaugaaaauaaaaaua

SEQ ID NO: 790050 - RNA, 20 nt, Artificial Sequence
  Synthetic
uuuuuaaaugaauaaaaaua

SEQ ID NO: 790051 - RNA, 20 nt, Artificial Sequence
  Synthetic
uuggguaguuaauaaaaaua

SEQ ID NO: 790052 - RNA, 20 nt, Artificial Sequence
  Synthetic
aauuauacuacauaaaaaua

SEQ ID NO: 790053 - RNA, 20 nt, Artificial Sequence
  Synthetic
accacauggugauaaaaaua

SEQ ID NO: 790054 - RNA, 20 nt, Artificial Sequence
  Synthetic
uugauauagcuauaaaaaua

SEQ ID NO: 790055 - RNA, 20 nt, Artificial Sequence
  Synthetic
agaaguuuaggcuaaaaaua

SEQ ID NO: 790056 - RNA, 20 nt, Artificial Sequence
  Synthetic
cauucuccauauuaaaaaua

SEQ ID NO: 790057 - RNA, 20 nt, Artificial Sequence
  Synthetic
ucauuucuaucuuaaaaaua

SEQ ID NO: 790058 - RNA, 20 nt, Artificial Sequence
  Synthetic
auauauaaauuuuaaaaaua

SEQ ID NO: 790059 - RNA, 20 nt, Artificial Sequence
  Synthetic
uccuugcuacacacaaaaua

SEQ ID NO: 790060 - RNA, 20 nt, Artificial Sequence
  Synthetic
uuuccagugugcacaaaaua

SEQ ID NO: 790061 - RNA, 20 nt, Artificial Sequence
  Synthetic
caaaauucauauacaaaaua

SEQ ID NO: 790062 - RNA, 20 nt, Artificial Sequence
  Synthetic
uuuaauugcuucccaaaaua

SEQ ID NO: 790063 - RNA, 20 nt, Artificial Sequence
  Synthetic
auagcaugucagccaaaaua

SEQ ID NO: 790064 - RNA, 20 nt, Artificial Sequence
  Synthetic
auauauaccacuccaaaaua

SEQ ID NO: 790065 - RNA, 20 nt, Artificial Sequence
  Synthetic
aaaacugauagagcaaaaua

SEQ ID NO: 790066 - RNA, 20 nt, Artificial Sequence
  Synthetic
caguaccauguaucaaaaua

SEQ ID NO: 790067 - RNA, 20 nt, Artificial Sequence
  Synthetic
cagacuggagaaagaaaaua

SEQ ID NO: 790068 - RNA, 20 nt, Artificial Sequence
  Synthetic
uuaccguucaacagaaaaua

SEQ ID NO: 790069 - RNA, 20 nt, Artificial Sequence
  Synthetic
ugucaaauugagagaaaaua

SEQ ID NO: 790070 - RNA, 20 nt, Artificial Sequence
  Synthetic
aaagcaaacuagagaaaaua

SEQ ID NO: 790071 - RNA, 20 nt, Artificial Sequence
  Synthetic
aaguuugggaguagaaaaua

SEQ ID NO: 790072 - RNA, 20 nt, Artificial Sequence
  Synthetic
ugauaguggcaaggaaaaua

SEQ ID NO: 790073 - RNA, 20 nt, Artificial Sequence
  Synthetic
caggguucagaaggaaaaua

SEQ ID NO: 790074 - RNA, 20 nt, Artificial Sequence
  Synthetic
auaagcauaagaggaaaaua

SEQ ID NO: 790075 - RNA, 20 nt, Artificial Sequence
  Synthetic
acuaaauggcagggaaaaua

SEQ ID NO: 790076 - RNA, 20 nt, Artificial Sequence
  Synthetic
aagacuugcaugggaaaaua

SEQ ID NO: 790077 - RNA, 20 nt, Artificial Sequence
  Synthetic
auggacagugcuggaaaaua

SEQ ID NO: 790078 - RNA, 20 nt, Artificial Sequence
  Synthetic
aaauauuuucaaugaaaaua

SEQ ID NO: 790079 - RNA, 20 nt, Artificial Sequence
  Synthetic
cuauaaaaguaaugaaaaua

SEQ ID NO: 790080 - RNA, 20 nt, Artificial Sequence
  Synthetic
cuuuagcuaauaugaaaaua

SEQ ID NO: 790081 - RNA, 20 nt, Artificial Sequence
  Synthetic
ucagaaguggagugaaaaua

SEQ ID NO: 790082 - RNA, 20 nt, Artificial Sequence
  Synthetic
ucagaauguccgugaaaaua

SEQ ID NO: 790083 - RNA, 20 nt, Artificial Sequence
  Synthetic
ucuguucuugggugaaaaua

SEQ ID NO: 790084 - RNA, 20 nt, Artificial Sequence
  Synthetic
ugaugagagaauugaaaaua

SEQ ID NO: 790085 - RNA, 20 nt, Artificial Sequence
  Synthetic
cucuuggaacauugaaaaua

SEQ ID NO: 790086 - RNA, 20 nt, Artificial Sequence
  Synthetic
uguuaaagaauuugaaaaua

SEQ ID NO: 790087 - RNA, 20 nt, Artificial Sequence
  Synthetic
cuaaauuugcuuugaaaaua

SEQ ID NO: 790088 - RNA, 20 nt, Artificial Sequence
  Synthetic
uuguuuucucuuugaaaaua

SEQ ID NO: 790089 - RNA, 20 nt, Artificial Sequence
  Synthetic
uaaaguauaaaaauaaaaua

SEQ ID NO: 790090 - RNA, 20 nt, Artificial Sequence
  Synthetic
ucauggcuaaaaauaaaaua

SEQ ID NO: 790091 - RNA, 20 nt, Artificial Sequence
  Synthetic
ugaagaaaagaaauaaaaua

SEQ ID NO: 790092 - RNA, 20 nt, Artificial Sequence
  Synthetic
aaccauggcuaccuaaaaua

SEQ ID NO: 790093 - RNA, 20 nt, Artificial Sequence
  Synthetic
uucugucacauccuaaaaua

SEQ ID NO: 790094 - RNA, 20 nt, Artificial Sequence
  Synthetic
ccuuugaguauucuaaaaua

SEQ ID NO: 790095 - RNA, 20 nt, Artificial Sequence
  Synthetic
aucuuaaaaacaguaaaaua

SEQ ID NO: 790096 - RNA, 20 nt, Artificial Sequence
  Synthetic
cacaaccagccaguaaaaua

SEQ ID NO: 790097 - RNA, 20 nt, Artificial Sequence
  Synthetic
uuuucuuuacuaguaaaaua

SEQ ID NO: 790098 - RNA, 20 nt, Artificial Sequence
  Synthetic
aauaggggcuggguaaaaua

SEQ ID NO: 790099 - RNA, 20 nt, Artificial Sequence
  Synthetic
cauaagaggaauuuaaaaua

SEQ ID NO: 790100 - RNA, 20 nt, Artificial Sequence
  Synthetic
aaauugaggaauuuaaaaua

SEQ ID NO: 790101 - RNA, 20 nt, Artificial Sequence
  Synthetic
uuaguaaacacaaacaaaua

SEQ ID NO: 790102 - RNA, 20 nt, Artificial Sequence
  Synthetic
cguaauucaauaaacaaaua

SEQ ID NO: 790103 - RNA, 20 nt, Artificial Sequence
  Synthetic
aaaagucauagacacaaaua

SEQ ID NO: 790104 - RNA, 20 nt, Artificial Sequence
  Synthetic
cuuuuucguugucacaaaua

SEQ ID NO: 790105 - RNA, 20 nt, Artificial Sequence
  Synthetic
aaacaaacagaaaccaaaua

SEQ ID NO: 790106 - RNA, 20 nt, Artificial Sequence
  Synthetic
aaugacccuaucuccaaaua

SEQ ID NO: 790107 - RNA, 20 nt, Artificial Sequence
  Synthetic
aaccaaaaacauuccaaaua

SEQ ID NO: 790108 - RNA, 20 nt, Artificial Sequence
  Synthetic
ugcgaccagccuggcaaaua

SEQ ID NO: 790109 - RNA, 20 nt, Artificial Sequence
  Synthetic
cuuaaagauuuuggcaaaua

SEQ ID NO: 790110 - RNA, 20 nt, Artificial Sequence
  Synthetic
aauauguacuaaugcaaaua

SEQ ID NO: 790111 - RNA, 20 nt, Artificial Sequence
  Synthetic
aaaauguaagacugcaaaua

SEQ ID NO: 790112 - RNA, 20 nt, Artificial Sequence
  Synthetic
auacugucaccuugcaaaua

SEQ ID NO: 790113 - RNA, 20 nt, Artificial Sequence
  Synthetic
ccauguguaauuaucaaaua

SEQ ID NO: 790114 - RNA, 20 nt, Artificial Sequence
  Synthetic
aaauacuuuucccucaaaua

SEQ ID NO: 790115 - RNA, 20 nt, Artificial Sequence
  Synthetic
uuuuucucuuuccucaaaua

SEQ ID NO: 790116 - RNA, 20 nt, Artificial Sequence
  Synthetic
agguagaaauuagucaaaua

SEQ ID NO: 790117 - RNA, 20 nt, Artificial Sequence
  Synthetic
uucauacauauugucaaaua

SEQ ID NO: 790118 - RNA, 20 nt, Artificial Sequence
  Synthetic
ugcauaaaaaucuucaaaua

SEQ ID NO: 790119 - RNA, 20 nt, Artificial Sequence
  Synthetic
cggaauugccauuucaaaua

SEQ ID NO: 790120 - RNA, 20 nt, Artificial Sequence
  Synthetic
uaagcucauuauuucaaaua

SEQ ID NO: 790121 - RNA, 20 nt, Artificial Sequence
  Synthetic
agggagacauuuuucaaaua

SEQ ID NO: 790122 - RNA, 20 nt, Artificial Sequence
  Synthetic
caggaagagaaaaagaaaua

SEQ ID NO: 790123 - RNA, 20 nt, Artificial Sequence
  Synthetic
aaacaguuuacaaagaaaua

SEQ ID NO: 790124 - RNA, 20 nt, Artificial Sequence
  Synthetic
agcaaagccuccaagaaaua

SEQ ID NO: 790125 - RNA, 20 nt, Artificial Sequence
  Synthetic
aacaaagccuucaagaaaua

SEQ ID NO: 790126 - RNA, 20 nt, Artificial Sequence
  Synthetic
cuuggcaguaagaagaaaua

SEQ ID NO: 790127 - RNA, 20 nt, Artificial Sequence
  Synthetic
ucgcauuuuuuacagaaaua

SEQ ID NO: 790128 - RNA, 20 nt, Artificial Sequence
  Synthetic
aagaaggcagaccagaaaua

SEQ ID NO: 790129 - RNA, 20 nt, Artificial Sequence
  Synthetic
aaacaaaggaaagagaaaua

SEQ ID NO: 790130 - RNA, 20 nt, Artificial Sequence
  Synthetic
auucuaaacagagagaaaua

SEQ ID NO: 790131 - RNA, 20 nt, Artificial Sequence
  Synthetic
ugccuucaccaggagaaaua

SEQ ID NO: 790132 - RNA, 20 nt, Artificial Sequence
  Synthetic
aagugaaguuaugagaaaua

SEQ ID NO: 790133 - RNA, 20 nt, Artificial Sequence
  Synthetic
aguuucuugccugagaaaua

SEQ ID NO: 790134 - RNA, 20 nt, Artificial Sequence
  Synthetic
aguaaaauagaauagaaaua

SEQ ID NO: 790135 - RNA, 20 nt, Artificial Sequence
  Synthetic
uuaaguuaaacauagaaaua

SEQ ID NO: 790136 - RNA, 20 nt, Artificial Sequence
  Synthetic
cucagcauuuacuagaaaua

SEQ ID NO: 790137 - RNA, 20 nt, Artificial Sequence
  Synthetic
aacauaaacauuuagaaaua

SEQ ID NO: 790138 - RNA, 20 nt, Artificial Sequence
  Synthetic
uguauuuucaucaggaaaua

SEQ ID NO: 790139 - RNA, 20 nt, Artificial Sequence
  Synthetic
acauucaaauucaggaaaua

SEQ ID NO: 790140 - RNA, 20 nt, Artificial Sequence
  Synthetic
uuccauuuucuuaggaaaua

SEQ ID NO: 790141 - RNA, 20 nt, Artificial Sequence
  Synthetic
uuucuuuggggagggaaaua

SEQ ID NO: 790142 - RNA, 20 nt, Artificial Sequence
  Synthetic
agacguauuguagggaaaua

SEQ ID NO: 790143 - RNA, 20 nt, Artificial Sequence
  Synthetic
caggguuguugggggaaaua

SEQ ID NO: 790144 - RNA, 20 nt, Artificial Sequence
  Synthetic
aggggauaaauugggaaaua

SEQ ID NO: 790145 - RNA, 20 nt, Artificial Sequence
  Synthetic
cacucuguugccuggaaaua

SEQ ID NO: 790146 - RNA, 20 nt, Artificial Sequence
  Synthetic
agagaggaaagcuggaaaua

SEQ ID NO: 790147 - RNA, 20 nt, Artificial Sequence
  Synthetic
ugucaccagauuuggaaaua

SEQ ID NO: 790148 - RNA, 20 nt, Artificial Sequence
  Synthetic
uaauaaacuuaaaugaaaua

SEQ ID NO: 790149 - RNA, 20 nt, Artificial Sequence
  Synthetic
auuggagguuaaaugaaaua

SEQ ID NO: 790150 - RNA, 20 nt, Artificial Sequence
  Synthetic
ucuaauuuuucaaugaaaua

SEQ ID NO: 790151 - RNA, 20 nt, Artificial Sequence
  Synthetic
aagaaaaaaggaaugaaaua

SEQ ID NO: 790152 - RNA, 20 nt, Artificial Sequence
  Synthetic
aaacuuaauagcaugaaaua

SEQ ID NO: 790153 - RNA, 20 nt, Artificial Sequence
  Synthetic
uuauuucuagguaugaaaua

SEQ ID NO: 790154 - RNA, 20 nt, Artificial Sequence
  Synthetic
cauuaugggauuaugaaaua

SEQ ID NO: 790155 - RNA, 20 nt, Artificial Sequence
  Synthetic
acagaagauaaccugaaaua

SEQ ID NO: 790156 - RNA, 20 nt, Artificial Sequence
  Synthetic
aguuaugguuuggugaaaua

SEQ ID NO: 790157 - RNA, 20 nt, Artificial Sequence
  Synthetic
cuuuccuucucugugaaaua

SEQ ID NO: 790158 - RNA, 20 nt, Artificial Sequence
  Synthetic
ccauaugagcauuugaaaua

SEQ ID NO: 790159 - RNA, 20 nt, Artificial Sequence
  Synthetic
acaacagaguguuugaaaua

SEQ ID NO: 790160 - RNA, 20 nt, Artificial Sequence
  Synthetic
uuuccuucaggaaauaaaua

SEQ ID NO: 790161 - RNA, 20 nt, Artificial Sequence
  Synthetic
uguuugagacucaauaaaua

SEQ ID NO: 790162 - RNA, 20 nt, Artificial Sequence
  Synthetic
agcacacauggacauaaaua

SEQ ID NO: 790163 - RNA, 20 nt, Artificial Sequence
  Synthetic
aaccccaccagccauaaaua

SEQ ID NO: 790164 - RNA, 20 nt, Artificial Sequence
  Synthetic
cuucuaauauuucauaaaua

SEQ ID NO: 790165 - RNA, 20 nt, Artificial Sequence
  Synthetic
uauaaaggugaagauaaaua

SEQ ID NO: 790166 - RNA, 20 nt, Artificial Sequence
  Synthetic
cuauauaucucauauaaaua

SEQ ID NO: 790167 - RNA, 20 nt, Artificial Sequence
  Synthetic
uagugauuuguguauaaaua

SEQ ID NO: 790168 - RNA, 20 nt, Artificial Sequence
  Synthetic
aauaauugacuuuauaaaua

SEQ ID NO: 790169 - RNA, 20 nt, Artificial Sequence
  Synthetic
aaugaaggaagcacuaaaua

SEQ ID NO: 790170 - RNA, 20 nt, Artificial Sequence
  Synthetic
caacauccaauuacuaaaua

SEQ ID NO: 790171 - RNA, 20 nt, Artificial Sequence
  Synthetic
aagcuaguaagugcuaaaua

SEQ ID NO: 790172 - RNA, 20 nt, Artificial Sequence
  Synthetic
uccaggagguaaucuaaaua

SEQ ID NO: 790173 - RNA, 20 nt, Artificial Sequence
  Synthetic
aguaaccaaugcucuaaaua

SEQ ID NO: 790174 - RNA, 20 nt, Artificial Sequence
  Synthetic
ugagcauacagaaguaaaua

SEQ ID NO: 790175 - RNA, 20 nt, Artificial Sequence
  Synthetic
agcagugggcuaaguaaaua

SEQ ID NO: 790176 - RNA, 20 nt, Artificial Sequence
  Synthetic
ugcaaaaauaauaguaaaua

SEQ ID NO: 790177 - RNA, 20 nt, Artificial Sequence
  Synthetic
uauuuggaaggagguaaaua

SEQ ID NO: 790178 - RNA, 20 nt, Artificial Sequence
  Synthetic
agaauaauauuagguaaaua

SEQ ID NO: 790179 - RNA, 20 nt, Artificial Sequence
  Synthetic
agaauacauugauguaaaua

SEQ ID NO: 790180 - RNA, 20 nt, Artificial Sequence
  Synthetic
ccauucucaguauguaaaua

SEQ ID NO: 790181 - RNA, 20 nt, Artificial Sequence
  Synthetic
cuuaaucaaaguuguaaaua

SEQ ID NO: 790182 - RNA, 20 nt, Artificial Sequence
  Synthetic
cuugggguuaagauuaaaua

SEQ ID NO: 790183 - RNA, 20 nt, Artificial Sequence
  Synthetic
auguuucugaggauuaaaua

SEQ ID NO: 790184 - RNA, 20 nt, Artificial Sequence
  Synthetic
uucuaauaaacuauuaaaua

SEQ ID NO: 790185 - RNA, 20 nt, Artificial Sequence
  Synthetic
auacaaaaauguauuaaaua

SEQ ID NO: 790186 - RNA, 20 nt, Artificial Sequence
  Synthetic
ccaacaccauuuauuaaaua

SEQ ID NO: 790187 - RNA, 20 nt, Artificial Sequence
  Synthetic
ccgacaccauuuauuaaaua

SEQ ID NO: 790188 - RNA, 20 nt, Artificial Sequence
  Synthetic
ccagcaccauuuauuaaaua

SEQ ID NO: 790189 - RNA, 20 nt, Artificial Sequence
  Synthetic
ucaugaugcuuuauuaaaua

SEQ ID NO: 790190 - RNA, 20 nt, Artificial Sequence
  Synthetic
ccagcaccguuuauuaaaua

SEQ ID NO: 790191 - RNA, 20 nt, Artificial Sequence
  Synthetic
uacuuagagacacuuaaaua

SEQ ID NO: 790192 - RNA, 20 nt, Artificial Sequence
  Synthetic
acaauauguggucuuaaaua

SEQ ID NO: 790193 - RNA, 20 nt, Artificial Sequence
  Synthetic
ccuuaaacugagguuaaaua

SEQ ID NO: 790194 - RNA, 20 nt, Artificial Sequence
  Synthetic
auaaaaucugguguuaaaua

SEQ ID NO: 790195 - RNA, 20 nt, Artificial Sequence
  Synthetic
auuaugaucagauuuaaaua

SEQ ID NO: 790196 - RNA, 20 nt, Artificial Sequence
  Synthetic
uuaugcauguccuuuaaaua

SEQ ID NO: 790197 - RNA, 20 nt, Artificial Sequence
  Synthetic
aaaugaagcuuguuuaaaua

SEQ ID NO: 790198 - RNA, 20 nt, Artificial Sequence
  Synthetic
uauauauaaaauuuuaaaua

SEQ ID NO: 790199 - RNA, 20 nt, Artificial Sequence
  Synthetic
agcuacaagaguuuuaaaua

SEQ ID NO: 790200 - RNA, 20 nt, Artificial Sequence
  Synthetic
ugaauaauuauuuuuaaaua

SEQ ID NO: 790201 - RNA, 20 nt, Artificial Sequence
  Synthetic
cuuuuagaaagaaaacaaua

SEQ ID NO: 790202 - RNA, 20 nt, Artificial Sequence
  Synthetic
agcuuuuguggaaaacaaua

SEQ ID NO: 790203 - RNA, 20 nt, Artificial Sequence
  Synthetic
uucugcaauaugaaacaaua

SEQ ID NO: 790204 - RNA, 20 nt, Artificial Sequence
  Synthetic
ccagugggaaguaaacaaua

SEQ ID NO: 790205 - RNA, 20 nt, Artificial Sequence
  Synthetic
ucuaaaggaagagaacaaua

SEQ ID NO: 790206 - RNA, 20 nt, Artificial Sequence
  Synthetic
uaaauguaaaucuaacaaua

SEQ ID NO: 790207 - RNA, 20 nt, Artificial Sequence
  Synthetic
uauggucauauguaacaaua

SEQ ID NO: 790208 - RNA, 20 nt, Artificial Sequence
  Synthetic
cauucuccauauuaacaaua

SEQ ID NO: 790209 - RNA, 20 nt, Artificial Sequence
  Synthetic
uaucuuuaauucacacaaua

SEQ ID NO: 790210 - RNA, 20 nt, Artificial Sequence
  Synthetic
cuacuccaaaauccacaaua

SEQ ID NO: 790211 - RNA, 20 nt, Artificial Sequence
  Synthetic
uacuguuucauagcacaaua

SEQ ID NO: 790212 - RNA, 20 nt, Artificial Sequence
  Synthetic
agcuguaaagaaucacaaua

SEQ ID NO: 790213 - RNA, 20 nt, Artificial Sequence
  Synthetic
cguguggacaguucacaaua

SEQ ID NO: 790214 - RNA, 20 nt, Artificial Sequence
  Synthetic
ugcaugaguaguucacaaua

SEQ ID NO: 790215 - RNA, 20 nt, Artificial Sequence
  Synthetic
ucucaauaauuuagacaaua

SEQ ID NO: 790216 - RNA, 20 nt, Artificial Sequence
  Synthetic
uuuaggaugaggugacaaua

SEQ ID NO: 790217 - RNA, 20 nt, Artificial Sequence
  Synthetic
agaugugaaaaaauacaaua

SEQ ID NO: 790218 - RNA, 20 nt, Artificial Sequence
  Synthetic
uagauucuagggauacaaua

SEQ ID NO: 790219 - RNA, 20 nt, Artificial Sequence
  Synthetic
uuuucuucucuuauacaaua

SEQ ID NO: 790220 - RNA, 20 nt, Artificial Sequence
  Synthetic
auaagaaagcugcuacaaua

SEQ ID NO: 790221 - RNA, 20 nt, Artificial Sequence
  Synthetic
ugcagugaggggcaccaaua

SEQ ID NO: 790222 - RNA, 20 nt, Artificial Sequence
  Synthetic
cccuaggagguugaccaaua

SEQ ID NO: 790223 - RNA, 20 nt, Artificial Sequence
  Synthetic
uucaggcacaaauaccaaua

SEQ ID NO: 790224 - RNA, 20 nt, Artificial Sequence
  Synthetic
ugucaagaaguuacccaaua

SEQ ID NO: 790225 - RNA, 20 nt, Artificial Sequence
  Synthetic
acaacaacaauaagccaaua

SEQ ID NO: 790226 - RNA, 20 nt, Artificial Sequence
  Synthetic
caguaucugcagagccaaua

SEQ ID NO: 790227 - RNA, 20 nt, Artificial Sequence
  Synthetic
cgaaaacagccuagccaaua

SEQ ID NO: 790228 - RNA, 20 nt, Artificial Sequence
  Synthetic
cgagaacagccuggccaaua

SEQ ID NO: 790229 - RNA, 20 nt, Artificial Sequence
  Synthetic
cgagaccagcuuugccaaua

SEQ ID NO: 790230 - RNA, 20 nt, Artificial Sequence
  Synthetic
ugcaagucuuaaauccaaua

SEQ ID NO: 790231 - RNA, 20 nt, Artificial Sequence
  Synthetic
aaccagcuuuauuuccaaua

SEQ ID NO: 790232 - RNA, 20 nt, Artificial Sequence
  Synthetic
uuuauuaaguguuuccaaua

SEQ ID NO: 790233 - RNA, 20 nt, Artificial Sequence
  Synthetic
uuaagaagagaaaagcaaua

SEQ ID NO: 790234 - RNA, 20 nt, Artificial Sequence
  Synthetic
acucauuuccaauagcaaua

SEQ ID NO: 790235 - RNA, 20 nt, Artificial Sequence
  Synthetic
auuucaggacaaaggcaaua

SEQ ID NO: 790236 - RNA, 20 nt, Artificial Sequence
  Synthetic
aaaauucaugaaaggcaaua

SEQ ID NO: 790237 - RNA, 20 nt, Artificial Sequence
  Synthetic
auuuauuuaaaugggcaaua

SEQ ID NO: 790238 - RNA, 20 nt, Artificial Sequence
  Synthetic
uccagucccaaauggcaaua

SEQ ID NO: 790239 - RNA, 20 nt, Artificial Sequence
  Synthetic
uuuacgcucuugcugcaaua

SEQ ID NO: 790240 - RNA, 20 nt, Artificial Sequence
  Synthetic
aauaucaguuguuugcaaua

SEQ ID NO: 790241 - RNA, 20 nt, Artificial Sequence
  Synthetic
aagaaaaccugaaaucaaua

SEQ ID NO: 790242 - RNA, 20 nt, Artificial Sequence
  Synthetic
auuugcagaaggaaucaaua

SEQ ID NO: 790243 - RNA, 20 nt, Artificial Sequence
  Synthetic
aaaacaaacaauaaucaaua

SEQ ID NO: 790244 - RNA, 20 nt, Artificial Sequence
  Synthetic
uggauuuaaauuaaucaaua

SEQ ID NO: 790245 - RNA, 20 nt, Artificial Sequence
  Synthetic
agaaaacacgaagaucaaua

SEQ ID NO: 790246 - RNA, 20 nt, Artificial Sequence
  Synthetic
uucuugcaaauguaucaaua

SEQ ID NO: 790247 - RNA, 20 nt, Artificial Sequence
  Synthetic
ucaccuuaaauaccucaaua

SEQ ID NO: 790248 - RNA, 20 nt, Artificial Sequence
  Synthetic
aguuuacugaaaagucaaua

SEQ ID NO: 790249 - RNA, 20 nt, Artificial Sequence
  Synthetic
auuaaacaaguaagucaaua

SEQ ID NO: 790250 - RNA, 20 nt, Artificial Sequence
  Synthetic
uccauaaauaccagucaaua

SEQ ID NO: 790251 - RNA, 20 nt, Artificial Sequence
  Synthetic
cucuguaauaucugucaaua

SEQ ID NO: 790252 - RNA, 20 nt, Artificial Sequence
  Synthetic
ucacaggacaacauucaaua

SEQ ID NO: 790253 - RNA, 20 nt, Artificial Sequence
  Synthetic
uaagcccuuccuauucaaua

SEQ ID NO: 790254 - RNA, 20 nt, Artificial Sequence
  Synthetic
auauucaacacucuucaaua

SEQ ID NO: 790255 - RNA, 20 nt, Artificial Sequence
  Synthetic
aauugacucacaguucaaua

SEQ ID NO: 790256 - RNA, 20 nt, Artificial Sequence
  Synthetic
uccuacaguucauuucaaua

SEQ ID NO: 790257 - RNA, 20 nt, Artificial Sequence
  Synthetic
aauguaagagugaaagaaua

SEQ ID NO: 790258 - RNA, 20 nt, Artificial Sequence
  Synthetic
auucagagauugaaagaaua

SEQ ID NO: 790259 - RNA, 20 nt, Artificial Sequence
  Synthetic
uuuugcucuuauaaagaaua

SEQ ID NO: 790260 - RNA, 20 nt, Artificial Sequence
  Synthetic
uauaggcaaugccaagaaua

SEQ ID NO: 790261 - RNA, 20 nt, Artificial Sequence
  Synthetic
aaaaaguguuggcaagaaua

SEQ ID NO: 790262 - RNA, 20 nt, Artificial Sequence
  Synthetic
aaggagggucaggaagaaua

SEQ ID NO: 790263 - RNA, 20 nt, Artificial Sequence
  Synthetic
uuaugggugauugaagaaua

SEQ ID NO: 790264 - RNA, 20 nt, Artificial Sequence
  Synthetic
uggaggggacauuaagaaua

SEQ ID NO: 790265 - RNA, 20 nt, Artificial Sequence
  Synthetic
cuguuuaauuuaccagaaua

SEQ ID NO: 790266 - RNA, 20 nt, Artificial Sequence
  Synthetic
uauuguugugucucagaaua

SEQ ID NO: 790267 - RNA, 20 nt, Artificial Sequence
  Synthetic
aaucacuguacuucagaaua

SEQ ID NO: 790268 - RNA, 20 nt, Artificial Sequence
  Synthetic
acauuagaggcaagagaaua

SEQ ID NO: 790269 - RNA, 20 nt, Artificial Sequence
  Synthetic
ucaugaggauacagagaaua

SEQ ID NO: 790270 - RNA, 20 nt, Artificial Sequence
  Synthetic
augaaggaacagcgagaaua

SEQ ID NO: 790271 - RNA, 20 nt, Artificial Sequence
  Synthetic
ccuucacuaaaaugagaaua

SEQ ID NO: 790272 - RNA, 20 nt, Artificial Sequence
  Synthetic
acugauugacaaauagaaua

SEQ ID NO: 790273 - RNA, 20 nt, Artificial Sequence
  Synthetic
uacuuccagauaauagaaua

SEQ ID NO: 790274 - RNA, 20 nt, Artificial Sequence
  Synthetic
agauaggauauaguagaaua

SEQ ID NO: 790275 - RNA, 20 nt, Artificial Sequence
  Synthetic
aaacgugaaaucuuagaaua

SEQ ID NO: 790276 - RNA, 20 nt, Artificial Sequence
  Synthetic
acuauguaccucuuagaaua

SEQ ID NO: 790277 - RNA, 20 nt, Artificial Sequence
  Synthetic
ugucacguucauuuagaaua

SEQ ID NO: 790278 - RNA, 20 nt, Artificial Sequence
  Synthetic
aauauugaauguuuagaaua

SEQ ID NO: 790279 - RNA, 20 nt, Artificial Sequence
  Synthetic
cuuaguuuuuuuuuagaaua

SEQ ID NO: 790280 - RNA, 20 nt, Artificial Sequence
  Synthetic
aaaaaaaaaaaaaaggaaua

SEQ ID NO: 790281 - RNA, 20 nt, Artificial Sequence
  Synthetic
aaaagggaauggaaggaaua

SEQ ID NO: 790282 - RNA, 20 nt, Artificial Sequence
  Synthetic
aagcaucgcccccaggaaua

SEQ ID NO: 790283 - RNA, 20 nt, Artificial Sequence
  Synthetic
aucaggauuggggaggaaua

SEQ ID NO: 790284 - RNA, 20 nt, Artificial Sequence
  Synthetic
agaagaaagccugaggaaua

SEQ ID NO: 790285 - RNA, 20 nt, Artificial Sequence
  Synthetic
uuaucuauuuaauaggaaua

SEQ ID NO: 790286 - RNA, 20 nt, Artificial Sequence
  Synthetic
uucucuguuuacuaggaaua

SEQ ID NO: 790287 - RNA, 20 nt, Artificial Sequence
  Synthetic
uuguugugucucagggaaua

SEQ ID NO: 790288 - RNA, 20 nt, Artificial Sequence
  Synthetic
ugccuuuaugugagggaaua

SEQ ID NO: 790289 - RNA, 20 nt, Artificial Sequence
  Synthetic
ugagaagacaauggggaaua

SEQ ID NO: 790290 - RNA, 20 nt, Artificial Sequence
  Synthetic
aaagagagagcuugggaaua

SEQ ID NO: 790291 - RNA, 20 nt, Artificial Sequence
  Synthetic
caauucaugaacauggaaua

SEQ ID NO: 790292 - RNA, 20 nt, Artificial Sequence
  Synthetic
cuccaaagaaguauggaaua

SEQ ID NO: 790293 - RNA, 20 nt, Artificial Sequence
  Synthetic
uuucuguuucugcuggaaua

SEQ ID NO: 790294 - RNA, 20 nt, Artificial Sequence
  Synthetic
auucuuuugaaaaaugaaua

SEQ ID NO: 790295 - RNA, 20 nt, Artificial Sequence
  Synthetic
ugaaaucguagaaaugaaua

SEQ ID NO: 790296 - RNA, 20 nt, Artificial Sequence
  Synthetic
cauuaauaaggaaaugaaua

SEQ ID NO: 790297 - RNA, 20 nt, Artificial Sequence
  Synthetic
agaaugaaauccaaugaaua

SEQ ID NO: 790298 - RNA, 20 nt, Artificial Sequence
  Synthetic
uuauuuguucucaaugaaua

SEQ ID NO: 790299 - RNA, 20 nt, Artificial Sequence
  Synthetic
aauuuccccuagaaugaaua

SEQ ID NO: 790300 - RNA, 20 nt, Artificial Sequence
  Synthetic
ugauaucuucauaaugaaua

SEQ ID NO: 790301 - RNA, 20 nt, Artificial Sequence
  Synthetic
ucaacuuagccccaugaaua

SEQ ID NO: 790302 - RNA, 20 nt, Artificial Sequence
  Synthetic
uagagggcagggcaugaaua

SEQ ID NO: 790303 - RNA, 20 nt, Artificial Sequence
  Synthetic
cuauuaaggaaauaugaaua

SEQ ID NO: 790304 - RNA, 20 nt, Artificial Sequence
  Synthetic
ccucaagaaguauaugaaua

SEQ ID NO: 790305 - RNA, 20 nt, Artificial Sequence
  Synthetic
uugagagccuacuaugaaua

SEQ ID NO: 790306 - RNA, 20 nt, Artificial Sequence
  Synthetic
aacgcaugaaucuaugaaua

SEQ ID NO: 790307 - RNA, 20 nt, Artificial Sequence
  Synthetic
cauugaaugaauacugaaua

SEQ ID NO: 790308 - RNA, 20 nt, Artificial Sequence
  Synthetic
ccagcaccauuuacugaaua

SEQ ID NO: 790309 - RNA, 20 nt, Artificial Sequence
  Synthetic
auuucccuaaucccugaaua

SEQ ID NO: 790310 - RNA, 20 nt, Artificial Sequence
  Synthetic
uaacuucuucaggcugaaua

SEQ ID NO: 790311 - RNA, 20 nt, Artificial Sequence
  Synthetic
cuucucuugcuugcugaaua

SEQ ID NO: 790312 - RNA, 20 nt, Artificial Sequence
  Synthetic
aagcuggugagaucugaaua

SEQ ID NO: 790313 - RNA, 20 nt, Artificial Sequence
  Synthetic
uguauagauuccucugaaua

SEQ ID NO: 790314 - RNA, 20 nt, Artificial Sequence
  Synthetic
uaagaggcuaugugugaaua

SEQ ID NO: 790315 - RNA, 20 nt, Artificial Sequence
  Synthetic
cuuucuucaugcauugaaua

SEQ ID NO: 790316 - RNA, 20 nt, Artificial Sequence
  Synthetic
agaaagggcaaacuugaaua

SEQ ID NO: 790317 - RNA, 20 nt, Artificial Sequence
  Synthetic
cuucucucauuuguugaaua

SEQ ID NO: 790318 - RNA, 20 nt, Artificial Sequence
  Synthetic
aagggcaucagaaaauaaua

SEQ ID NO: 790319 - RNA, 20 nt, Artificial Sequence
  Synthetic
aaaacugucagcaaauaaua

SEQ ID NO: 790320 - RNA, 20 nt, Artificial Sequence
  Synthetic
cauaacuugaucaaauaaua

SEQ ID NO: 790321 - RNA, 20 nt, Artificial Sequence
  Synthetic
uaagcaagggagaaauaaua

SEQ ID NO: 790322 - RNA, 20 nt, Artificial Sequence
  Synthetic
acuuuagaaaauaaauaaua

SEQ ID NO: 790323 - RNA, 20 nt, Artificial Sequence
  Synthetic
uuccagaaauguaaauaaua

SEQ ID NO: 790324 - RNA, 20 nt, Artificial Sequence
  Synthetic
cacaacuacauacaauaaua

SEQ ID NO: 790325 - RNA, 20 nt, Artificial Sequence
  Synthetic
augucucugcaucaauaaua

SEQ ID NO: 790326 - RNA, 20 nt, Artificial Sequence
  Synthetic
ugaguugaaguagaauaaua

SEQ ID NO: 790327 - RNA, 20 nt, Artificial Sequence
  Synthetic
uucugucauuuggaauaaua

SEQ ID NO: 790328 - RNA, 20 nt, Artificial Sequence
  Synthetic
aaagauuaaaaauaauaaua

SEQ ID NO: 790329 - RNA, 20 nt, Artificial Sequence
  Synthetic
uccuuaucucaguaauaaua

SEQ ID NO: 790330 - RNA, 20 nt, Artificial Sequence
  Synthetic
uuuuuuuauuacacauaaua

SEQ ID NO: 790331 - RNA, 20 nt, Artificial Sequence
  Synthetic
uaagaaauucugacauaaua

SEQ ID NO: 790332 - RNA, 20 nt, Artificial Sequence
  Synthetic
ugagaucacccaccauaaua

SEQ ID NO: 790333 - RNA, 20 nt, Artificial Sequence
  Synthetic
uguugagaggugucauaaua

SEQ ID NO: 790334 - RNA, 20 nt, Artificial Sequence
  Synthetic
uaaauuuuaaaaugauaaua

SEQ ID NO: 790335 - RNA, 20 nt, Artificial Sequence
  Synthetic
ugacuaaguccaugauaaua

SEQ ID NO: 790336 - RNA, 20 nt, Artificial Sequence
  Synthetic
ugguacuguaccauauaaua

SEQ ID NO: 790337 - RNA, 20 nt, Artificial Sequence
  Synthetic
aacuaugagagcauauaaua

SEQ ID NO: 790338 - RNA, 20 nt, Artificial Sequence
  Synthetic
uuugcgucuuaacuauaaua

SEQ ID NO: 790339 - RNA, 20 nt, Artificial Sequence
  Synthetic
uucacuaccacaguauaaua

SEQ ID NO: 790340 - RNA, 20 nt, Artificial Sequence
  Synthetic
agaucaagagagguauaaua

SEQ ID NO: 790341 - RNA, 20 nt, Artificial Sequence
  Synthetic
uggugaaugacuguauaaua

SEQ ID NO: 790342 - RNA, 20 nt, Artificial Sequence
  Synthetic
aagagugauuaguuauaaua

SEQ ID NO: 790343 - RNA, 20 nt, Artificial Sequence
  Synthetic
uauuguuuauucuacuaaua

SEQ ID NO: 790344 - RNA, 20 nt, Artificial Sequence
  Synthetic
uauuuauugaacaccuaaua

SEQ ID NO: 790345 - RNA, 20 nt, Artificial Sequence
  Synthetic
uuacagccauacuccuaaua

SEQ ID NO: 790346 - RNA, 20 nt, Artificial Sequence
  Synthetic
ccuucaaggugcuccuaaua

SEQ ID NO: 790347 - RNA, 20 nt, Artificial Sequence
  Synthetic
aaucaaaagaugagcuaaua

SEQ ID NO: 790348 - RNA, 20 nt, Artificial Sequence
  Synthetic
ucaucauuauguggcuaaua

SEQ ID NO: 790349 - RNA, 20 nt, Artificial Sequence
  Synthetic
aggagaaaaacaugcuaaua

SEQ ID NO: 790350 - RNA, 20 nt, Artificial Sequence
  Synthetic
agcuuauaauuugucuaaua

SEQ ID NO: 790351 - RNA, 20 nt, Artificial Sequence
  Synthetic
accuguaacuucuucuaaua

SEQ ID NO: 790352 - RNA, 20 nt, Artificial Sequence
  Synthetic
ucucaaacuacuuucuaaua

SEQ ID NO: 790353 - RNA, 20 nt, Artificial Sequence
  Synthetic
cucuguuucuuuuucuaaua

SEQ ID NO: 790354 - RNA, 20 nt, Artificial Sequence
  Synthetic
caacauugcuugaaguaaua

SEQ ID NO: 790355 - RNA, 20 nt, Artificial Sequence
  Synthetic
aggcaguagaaagaguaaua

SEQ ID NO: 790356 - RNA, 20 nt, Artificial Sequence
  Synthetic
cuuguauuaauuagguaaua

SEQ ID NO: 790357 - RNA, 20 nt, Artificial Sequence
  Synthetic
uggcuuguauggggguaaua

SEQ ID NO: 790358 - RNA, 20 nt, Artificial Sequence
  Synthetic
acuacugagcaaugguaaua

SEQ ID NO: 790359 - RNA, 20 nt, Artificial Sequence
  Synthetic
augguuuuagugugguaaua

SEQ ID NO: 790360 - RNA, 20 nt, Artificial Sequence
  Synthetic
aaacacauauugugguaaua

SEQ ID NO: 790361 - RNA, 20 nt, Artificial Sequence
  Synthetic
ugauauagguaaauguaaua

SEQ ID NO: 790362 - RNA, 20 nt, Artificial Sequence
  Synthetic
uacaggaaagcaauguaaua

SEQ ID NO: 790363 - RNA, 20 nt, Artificial Sequence
  Synthetic
auuuucaagaaucuguaaua

SEQ ID NO: 790364 - RNA, 20 nt, Artificial Sequence
  Synthetic
ccauuuucuccucuguaaua

SEQ ID NO: 790365 - RNA, 20 nt, Artificial Sequence
  Synthetic
agugucacaagguuguaaua

SEQ ID NO: 790366 - RNA, 20 nt, Artificial Sequence
  Synthetic
uugcuaaguuauuuguaaua

SEQ ID NO: 790367 - RNA, 20 nt, Artificial Sequence
  Synthetic
uaugcaaaacaaaauuaaua

SEQ ID NO: 790368 - RNA, 20 nt, Artificial Sequence
  Synthetic
acugggcuaucuaauuaaua

SEQ ID NO: 790369 - RNA, 20 nt, Artificial Sequence
  Synthetic
ucugaggugaguaauuaaua

SEQ ID NO: 790370 - RNA, 20 nt, Artificial Sequence
  Synthetic
ugcuucugugagcauuaaua

SEQ ID NO: 790371 - RNA, 20 nt, Artificial Sequence
  Synthetic
accuucucuuuugauuaaua

SEQ ID NO: 790372 - RNA, 20 nt, Artificial Sequence
  Synthetic
cacauggaaaccacuuaaua

SEQ ID NO: 790373 - RNA, 20 nt, Artificial Sequence
  Synthetic
cacacuugccuaccuuaaua

SEQ ID NO: 790374 - RNA, 20 nt, Artificial Sequence
  Synthetic
auucauuuccucucuuaaua

SEQ ID NO: 790375 - RNA, 20 nt, Artificial Sequence
  Synthetic
cuuuguuuugcuucuuaaua

SEQ ID NO: 790376 - RNA, 20 nt, Artificial Sequence
  Synthetic
agcccucagagcaguuaaua

SEQ ID NO: 790377 - RNA, 20 nt, Artificial Sequence
  Synthetic
uuaguaguaccuaguuaaua

SEQ ID NO: 790378 - RNA, 20 nt, Artificial Sequence
  Synthetic
uuuuaugguuuauguuaaua

SEQ ID NO: 790379 - RNA, 20 nt, Artificial Sequence
  Synthetic
aaauuaaacaucuguuaaua

SEQ ID NO: 790380 - RNA, 20 nt, Artificial Sequence
  Synthetic
cuuccauucaaaauuuaaua

SEQ ID NO: 790381 - RNA, 20 nt, Artificial Sequence
  Synthetic
uuuacagguuaaauuuaaua

SEQ ID NO: 790382 - RNA, 20 nt, Artificial Sequence
  Synthetic
auaaagagagggauuuaaua

SEQ ID NO: 790383 - RNA, 20 nt, Artificial Sequence
  Synthetic
uuguaaaaaauuauuuaaua

SEQ ID NO: 790384 - RNA, 20 nt, Artificial Sequence
  Synthetic
auaaagccauuuauuuaaua

SEQ ID NO: 790385 - RNA, 20 nt, Artificial Sequence
  Synthetic
uauauaacaaaccuuuaaua

SEQ ID NO: 790386 - RNA, 20 nt, Artificial Sequence
  Synthetic
uaccaaaaaaacuuuuaaua

SEQ ID NO: 790387 - RNA, 20 nt, Artificial Sequence
  Synthetic
augauuuguaaguuuuaaua

SEQ ID NO: 790388 - RNA, 20 nt, Artificial Sequence
  Synthetic
cuagauuuggaguuuuaaua

SEQ ID NO: 790389 - RNA, 20 nt, Artificial Sequence
  Synthetic
aauacuggucauuuuuaaua

SEQ ID NO: 790390 - RNA, 20 nt, Artificial Sequence
  Synthetic
uuuuuuuuuuuuuuuuaaua

SEQ ID NO: 790391 - RNA, 20 nt, Artificial Sequence
  Synthetic
aacucauagaagaaaacaua

SEQ ID NO: 790392 - RNA, 20 nt, Artificial Sequence
  Synthetic
agauaaacaaugaaaacaua

SEQ ID NO: 790393 - RNA, 20 nt, Artificial Sequence
  Synthetic
aguugaacaaugaaaacaua

SEQ ID NO: 790394 - RNA, 20 nt, Artificial Sequence
  Synthetic
uguuuugguaauaaaacaua

SEQ ID NO: 790395 - RNA, 20 nt, Artificial Sequence
  Synthetic
agaaugaggauuaaaacaua

SEQ ID NO: 790396 - RNA, 20 nt, Artificial Sequence
  Synthetic
caauaccuuggugaaacaua

SEQ ID NO: 790397 - RNA, 20 nt, Artificial Sequence
  Synthetic
ugcauguggaaauaaacaua

SEQ ID NO: 790398 - RNA, 20 nt, Artificial Sequence
  Synthetic
aaaaugucaguauaaacaua

SEQ ID NO: 790399 - RNA, 20 nt, Artificial Sequence
  Synthetic
aagaagaaagcaagaacaua

SEQ ID NO: 790400 - RNA, 20 nt, Artificial Sequence
  Synthetic
uuugauacagcaagaacaua

SEQ ID NO: 790401 - RNA, 20 nt, Artificial Sequence
  Synthetic
agcuaaaugaugagaacaua

SEQ ID NO: 790402 - RNA, 20 nt, Artificial Sequence
  Synthetic
cacuuacgagugagaacaua

SEQ ID NO: 790403 - RNA, 20 nt, Artificial Sequence
  Synthetic
aucauuccuuauagaacaua

SEQ ID NO: 790404 - RNA, 20 nt, Artificial Sequence
  Synthetic
uaaaaaggugaucgaacaua

SEQ ID NO: 790405 - RNA, 20 nt, Artificial Sequence
  Synthetic
uguguggggaaaggaacaua

SEQ ID NO: 790406 - RNA, 20 nt, Artificial Sequence
  Synthetic
agugggauuucuggaacaua

SEQ ID NO: 790407 - RNA, 20 nt, Artificial Sequence
  Synthetic
uggcuacuuaguggaacaua

SEQ ID NO: 790408 - RNA, 20 nt, Artificial Sequence
  Synthetic
ugaagguacuuaugaacaua

SEQ ID NO: 790409 - RNA, 20 nt, Artificial Sequence
  Synthetic
augauuuuuuauugaacaua

SEQ ID NO: 790410 - RNA, 20 nt, Artificial Sequence
  Synthetic
acagaaaauugaauaacaua

SEQ ID NO: 790411 - RNA, 20 nt, Artificial Sequence
  Synthetic
aauaccugugcuauaacaua

SEQ ID NO: 790412 - RNA, 20 nt, Artificial Sequence
  Synthetic
uaguagcccaauuuaacaua

SEQ ID NO: 790413 - RNA, 20 nt, Artificial Sequence
  Synthetic
agauacuaaauuaacacaua

SEQ ID NO: 790414 - RNA, 20 nt, Artificial Sequence
  Synthetic
ugguaaccacuagacacaua

SEQ ID NO: 790415 - RNA, 20 nt, Artificial Sequence
  Synthetic
cauacaaauaccuacacaua

SEQ ID NO: 790416 - RNA, 20 nt, Artificial Sequence
  Synthetic
uucaggaugcauaccacaua

SEQ ID NO: 790417 - RNA, 20 nt, Artificial Sequence
  Synthetic
cgcgcaugcacgcgcacaua

SEQ ID NO: 790418 - RNA, 20 nt, Artificial Sequence
  Synthetic
aaauucuaccaaaucacaua

SEQ ID NO: 790419 - RNA, 20 nt, Artificial Sequence
  Synthetic
ugccucucuaugaucacaua

SEQ ID NO: 790420 - RNA, 20 nt, Artificial Sequence
  Synthetic
acacucgcauuuaucacaua

SEQ ID NO: 790421 - RNA, 20 nt, Artificial Sequence
  Synthetic
ugaggcaggugggucacaua

SEQ ID NO: 790422 - RNA, 20 nt, Artificial Sequence
  Synthetic
uaugaggauacaaagacaua

SEQ ID NO: 790423 - RNA, 20 nt, Artificial Sequence
  Synthetic
ucaaacuguacaaagacaua

SEQ ID NO: 790424 - RNA, 20 nt, Artificial Sequence
  Synthetic
ccacaaaggaggaagacaua

SEQ ID NO: 790425 - RNA, 20 nt, Artificial Sequence
  Synthetic
uaggcuguagagcagacaua

SEQ ID NO: 790426 - RNA, 20 nt, Artificial Sequence
  Synthetic
agaagugaaauugagacaua

SEQ ID NO: 790427 - RNA, 20 nt, Artificial Sequence
  Synthetic
agaguaggccauaggacaua

SEQ ID NO: 790428 - RNA, 20 nt, Artificial Sequence
  Synthetic
cuacaguaguggcugacaua

SEQ ID NO: 790429 - RNA, 20 nt, Artificial Sequence
  Synthetic
auuauucugucagugacaua

SEQ ID NO: 790430 - RNA, 20 nt, Artificial Sequence
  Synthetic
caauuugaucaaaauacaua

SEQ ID NO: 790431 - RNA, 20 nt, Artificial Sequence
  Synthetic
caauaagcaaauaauacaua

SEQ ID NO: 790432 - RNA, 20 nt, Artificial Sequence
  Synthetic
cuacaaagugaagauacaua

SEQ ID NO: 790433 - RNA, 20 nt, Artificial Sequence
  Synthetic
ucauacuuuaaauauacaua

SEQ ID NO: 790434 - RNA, 20 nt, Artificial Sequence
  Synthetic
uucccccccaauuauacaua

SEQ ID NO: 790435 - RNA, 20 nt, Artificial Sequence
  Synthetic
uguaucuucccaacuacaua

SEQ ID NO: 790436 - RNA, 20 nt, Artificial Sequence
  Synthetic
acugaaaaaaauccuacaua

SEQ ID NO: 790437 - RNA, 20 nt, Artificial Sequence
  Synthetic
caguuucagcucucuacaua

SEQ ID NO: 790438 - RNA, 20 nt, Artificial Sequence
  Synthetic
aauugggugcauucuacaua

SEQ ID NO: 790439 - RNA, 20 nt, Artificial Sequence
  Synthetic
uuuguuuggauuucuacaua

SEQ ID NO: 790440 - RNA, 20 nt, Artificial Sequence
  Synthetic
aaagacucuauuucuacaua

SEQ ID NO: 790441 - RNA, 20 nt, Artificial Sequence
  Synthetic
caguuucagcuuucuacaua

SEQ ID NO: 790442 - RNA, 20 nt, Artificial Sequence
  Synthetic
auuagagaaacaaguacaua

SEQ ID NO: 790443 - RNA, 20 nt, Artificial Sequence
  Synthetic
cuuacuucacacaguacaua

SEQ ID NO: 790444 - RNA, 20 nt, Artificial Sequence
  Synthetic
aagguuuaggggaguacaua

SEQ ID NO: 790445 - RNA, 20 nt, Artificial Sequence
  Synthetic
caauuucugccugguacaua

SEQ ID NO: 790446 - RNA, 20 nt, Artificial Sequence
  Synthetic
augcaaaucugcauuacaua

SEQ ID NO: 790447 - RNA, 20 nt, Artificial Sequence
  Synthetic
uauucacaggcuauuacaua

SEQ ID NO: 790448 - RNA, 20 nt, Artificial Sequence
  Synthetic
uacaagaagaaacuuacaua

SEQ ID NO: 790449 - RNA, 20 nt, Artificial Sequence
  Synthetic
cuauucacaaaauuuacaua

SEQ ID NO: 790450 - RNA, 20 nt, Artificial Sequence
  Synthetic
augcaguuauuauuuacaua

SEQ ID NO: 790451 - RNA, 20 nt, Artificial Sequence
  Synthetic
cucagacauuauuuuacaua

SEQ ID NO: 790452 - RNA, 20 nt, Artificial Sequence
  Synthetic
uaguuguaacaaaaaccaua

SEQ ID NO: 790453 - RNA, 20 nt, Artificial Sequence
  Synthetic
aacccaaacagaaaaccaua

SEQ ID NO: 790454 - RNA, 20 nt, Artificial Sequence
  Synthetic
ugugcugugaggaaaccaua

SEQ ID NO: 790455 - RNA, 20 nt, Artificial Sequence
  Synthetic
cuuuacaacuauuaaccaua

SEQ ID NO: 790456 - RNA, 20 nt, Artificial Sequence
  Synthetic
auucauagucauacaccaua

SEQ ID NO: 790457 - RNA, 20 nt, Artificial Sequence
  Synthetic
ccgaaggaugagagaccaua

SEQ ID NO: 790458 - RNA, 20 nt, Artificial Sequence
  Synthetic
uaguugugagauagaccaua

SEQ ID NO: 790459 - RNA, 20 nt, Artificial Sequence
  Synthetic
uggugaaguaaaugaccaua

SEQ ID NO: 790460 - RNA, 20 nt, Artificial Sequence
  Synthetic
uguagcuaaugacuaccaua

SEQ ID NO: 790461 - RNA, 20 nt, Artificial Sequence
  Synthetic
uaaggacaauaucuaccaua

SEQ ID NO: 790462 - RNA, 20 nt, Artificial Sequence
  Synthetic
auaagccacuuaaacccaua

SEQ ID NO: 790463 - RNA, 20 nt, Artificial Sequence
  Synthetic
aagaaucacuugaacccaua

SEQ ID NO: 790464 - RNA, 20 nt, Artificial Sequence
  Synthetic
ugccgggaguugcacccaua

SEQ ID NO: 790465 - RNA, 20 nt, Artificial Sequence
  Synthetic
aaaaucccuuccuacccaua

SEQ ID NO: 790466 - RNA, 20 nt, Artificial Sequence
  Synthetic
ucucauuuacuuuacccaua

SEQ ID NO: 790467 - RNA, 20 nt, Artificial Sequence
  Synthetic
agaccagccacuuccccaua

SEQ ID NO: 790468 - RNA, 20 nt, Artificial Sequence
  Synthetic
aacugggcgcagagcccaua

SEQ ID NO: 790469 - RNA, 20 nt, Artificial Sequence
  Synthetic
ucgauugucuauggcccaua

SEQ ID NO: 790470 - RNA, 20 nt, Artificial Sequence
  Synthetic
aguauguauugcuucccaua

SEQ ID NO: 790471 - RNA, 20 nt, Artificial Sequence
  Synthetic
auaacauuuucacagccaua

SEQ ID NO: 790472 - RNA, 20 nt, Artificial Sequence
  Synthetic
cugaauccucauuagccaua

SEQ ID NO: 790473 - RNA, 20 nt, Artificial Sequence
  Synthetic
uauaggcuuugcgggccaua

SEQ ID NO: 790474 - RNA, 20 nt, Artificial Sequence
  Synthetic
cagagaauguucuggccaua

SEQ ID NO: 790475 - RNA, 20 nt, Artificial Sequence
  Synthetic
uauuacuugaauuggccaua

SEQ ID NO: 790476 - RNA, 20 nt, Artificial Sequence
  Synthetic
cucaagccacagaugccaua

SEQ ID NO: 790477 - RNA, 20 nt, Artificial Sequence
  Synthetic
uugucuuacccuuugccaua

SEQ ID NO: 790478 - RNA, 20 nt, Artificial Sequence
  Synthetic
uuacuggcagugaauccaua

SEQ ID NO: 790479 - RNA, 20 nt, Artificial Sequence
  Synthetic
cuaaaaucuaaacauccaua

SEQ ID NO: 790480 - RNA, 20 nt, Artificial Sequence
  Synthetic
aaaugcauacuccauccaua

SEQ ID NO: 790481 - RNA, 20 nt, Artificial Sequence
  Synthetic
augaaccuuuuagauccaua

SEQ ID NO: 790482 - RNA, 20 nt, Artificial Sequence
  Synthetic
aggccugcaugauauccaua

SEQ ID NO: 790483 - RNA, 20 nt, Artificial Sequence
  Synthetic
ucaaauuuaaucuauccaua

SEQ ID NO: 790484 - RNA, 20 nt, Artificial Sequence
  Synthetic
ugauucaccucugcuccaua

SEQ ID NO: 790485 - RNA, 20 nt, Artificial Sequence
  Synthetic
agcauacgugcaucuccaua

SEQ ID NO: 790486 - RNA, 20 nt, Artificial Sequence
  Synthetic
uggagaaugagguguccaua

SEQ ID NO: 790487 - RNA, 20 nt, Artificial Sequence
  Synthetic
uuaaugcauugaauuccaua

SEQ ID NO: 790488 - RNA, 20 nt, Artificial Sequence
  Synthetic
agaggaauugugauuccaua

SEQ ID NO: 790489 - RNA, 20 nt, Artificial Sequence
  Synthetic
uaaaaugucacuauuccaua

SEQ ID NO: 790490 - RNA, 20 nt, Artificial Sequence
  Synthetic
ccuauuucaucuauuccaua

SEQ ID NO: 790491 - RNA, 20 nt, Artificial Sequence
  Synthetic
uguuuugaggaacuuccaua

SEQ ID NO: 790492 - RNA, 20 nt, Artificial Sequence
  Synthetic
ccaugucuauuucuuccaua

SEQ ID NO: 790493 - RNA, 20 nt, Artificial Sequence
  Synthetic
uaaacagacuuucuuccaua

SEQ ID NO: 790494 - RNA, 20 nt, Artificial Sequence
  Synthetic
cuuugggacucuuuuccaua

SEQ ID NO: 790495 - RNA, 20 nt, Artificial Sequence
  Synthetic
caacacuucaguuuuccaua

SEQ ID NO: 790496 - RNA, 20 nt, Artificial Sequence
  Synthetic
auaacguauauuuuuccaua

SEQ ID NO: 790497 - RNA, 20 nt, Artificial Sequence
  Synthetic
uucuuuaagaaaaaagcaua

SEQ ID NO: 790498 - RNA, 20 nt, Artificial Sequence
  Synthetic
caaauuugugcaaaagcaua

SEQ ID NO: 790499 - RNA, 20 nt, Artificial Sequence
  Synthetic
cgccugcagguaaaagcaua

SEQ ID NO: 790500 - RNA, 20 nt, Artificial Sequence
  Synthetic
caucaacugaccaaagcaua

SEQ ID NO: 790501 - RNA, 20 nt, Artificial Sequence
  Synthetic
uaauuucuucucaaagcaua

SEQ ID NO: 790502 - RNA, 20 nt, Artificial Sequence
  Synthetic
ugugcauccaauaaagcaua

SEQ ID NO: 790503 - RNA, 20 nt, Artificial Sequence
  Synthetic
cuaauaagaacacaagcaua

SEQ ID NO: 790504 - RNA, 20 nt, Artificial Sequence
  Synthetic
auaggaaaacaguaagcaua

SEQ ID NO: 790505 - RNA, 20 nt, Artificial Sequence
  Synthetic
uccugugaagaaacagcaua

SEQ ID NO: 790506 - RNA, 20 nt, Artificial Sequence
  Synthetic
uggagaguuaucagagcaua

SEQ ID NO: 790507 - RNA, 20 nt, Artificial Sequence
  Synthetic
cagccagcuaugugagcaua

SEQ ID NO: 790508 - RNA, 20 nt, Artificial Sequence
  Synthetic
aaauagaauaagauagcaua

SEQ ID NO: 790509 - RNA, 20 nt, Artificial Sequence
  Synthetic
agaagacauacacuagcaua

SEQ ID NO: 790510 - RNA, 20 nt, Artificial Sequence
  Synthetic
uuaauucaaugacuagcaua

SEQ ID NO: 790511 - RNA, 20 nt, Artificial Sequence
  Synthetic
uuauuuuaugaccuagcaua

SEQ ID NO: 790512 - RNA, 20 nt, Artificial Sequence
  Synthetic
uucauccacauuguagcaua

SEQ ID NO: 790513 - RNA, 20 nt, Artificial Sequence
  Synthetic
auuggccaaagccaggcaua

SEQ ID NO: 790514 - RNA, 20 nt, Artificial Sequence
  Synthetic
aacagggauacagaggcaua

SEQ ID NO: 790515 - RNA, 20 nt, Artificial Sequence
  Synthetic
aauucgaccaaggaggcaua

SEQ ID NO: 790516 - RNA, 20 nt, Artificial Sequence
  Synthetic
auuuuguuuuaugaggcaua

SEQ ID NO: 790517 - RNA, 20 nt, Artificial Sequence
  Synthetic
uuucaguaaaauuaggcaua

SEQ ID NO: 790518 - RNA, 20 nt, Artificial Sequence
  Synthetic
aaucguagaacuuaggcaua

SEQ ID NO: 790519 - RNA, 20 nt, Artificial Sequence
  Synthetic
aaguggaauugaagggcaua

SEQ ID NO: 790520 - RNA, 20 nt, Artificial Sequence
  Synthetic
auacaucugguucuggcaua

SEQ ID NO: 790521 - RNA, 20 nt, Artificial Sequence
  Synthetic
aaacuuaccaucguggcaua

SEQ ID NO: 790522 - RNA, 20 nt, Artificial Sequence
  Synthetic
cacauuaguauaaaugcaua

SEQ ID NO: 790523 - RNA, 20 nt, Artificial Sequence
  Synthetic
aaugaaugguuaaaugcaua

SEQ ID NO: 790524 - RNA, 20 nt, Artificial Sequence
  Synthetic
agaagguucaugaaugcaua

SEQ ID NO: 790525 - RNA, 20 nt, Artificial Sequence
  Synthetic
cacagaugaagagaugcaua

SEQ ID NO: 790526 - RNA, 20 nt, Artificial Sequence
  Synthetic
auuggccucugggaugcaua

SEQ ID NO: 790527 - RNA, 20 nt, Artificial Sequence
  Synthetic
auguaaauaauaacugcaua

SEQ ID NO: 790528 - RNA, 20 nt, Artificial Sequence
  Synthetic
aaaaauaguacagcugcaua

SEQ ID NO: 790529 - RNA, 20 nt, Artificial Sequence
  Synthetic
uuacaguuaugugcugcaua

SEQ ID NO: 790530 - RNA, 20 nt, Artificial Sequence
  Synthetic
caguugcauucuucugcaua

SEQ ID NO: 790531 - RNA, 20 nt, Artificial Sequence
  Synthetic
uaguuuccguuuucugcaua

SEQ ID NO: 790532 - RNA, 20 nt, Artificial Sequence
  Synthetic
auucccaccaacagugcaua

SEQ ID NO: 790533 - RNA, 20 nt, Artificial Sequence
  Synthetic
uaaccuucacguugugcaua

SEQ ID NO: 790534 - RNA, 20 nt, Artificial Sequence
  Synthetic
auguuuccuaucauugcaua

SEQ ID NO: 790535 - RNA, 20 nt, Artificial Sequence
  Synthetic
acauucuaucacuuugcaua

SEQ ID NO: 790536 - RNA, 20 nt, Artificial Sequence
  Synthetic
cacacuaugauguuugcaua

SEQ ID NO: 790537 - RNA, 20 nt, Artificial Sequence
  Synthetic
cauaaagucaaaaaaucaua

SEQ ID NO: 790538 - RNA, 20 nt, Artificial Sequence
  Synthetic
auguuacuaagaaaaucaua

SEQ ID NO: 790539 - RNA, 20 nt, Artificial Sequence
  Synthetic
caaauuuguggggaaucaua

SEQ ID NO: 790540 - RNA, 20 nt, Artificial Sequence
  Synthetic
uguaaugcacuugaaucaua

SEQ ID NO: 790541 - RNA, 20 nt, Artificial Sequence
  Synthetic
uuauuuaauuagccaucaua

SEQ ID NO: 790542 - RNA, 20 nt, Artificial Sequence
  Synthetic
agggaacuaauuccaucaua

SEQ ID NO: 790543 - RNA, 20 nt, Artificial Sequence
  Synthetic
aaauaaaucagcucaucaua

SEQ ID NO: 790544 - RNA, 20 nt, Artificial Sequence
  Synthetic
agugggauugcuggaucaua

SEQ ID NO: 790545 - RNA, 20 nt, Artificial Sequence
  Synthetic
agugagguugcuggaucaua

SEQ ID NO: 790546 - RNA, 20 nt, Artificial Sequence
  Synthetic
aguuuauuaaaaugaucaua

SEQ ID NO: 790547 - RNA, 20 nt, Artificial Sequence
  Synthetic
uuaugaaaaauaauaucaua

SEQ ID NO: 790548 - RNA, 20 nt, Artificial Sequence
  Synthetic
uuuaaugaaaugauaucaua

SEQ ID NO: 790549 - RNA, 20 nt, Artificial Sequence
  Synthetic
acauauauauauauaucaua

SEQ ID NO: 790550 - RNA, 20 nt, Artificial Sequence
  Synthetic
caccuuuuuaggcuaucaua

SEQ ID NO: 790551 - RNA, 20 nt, Artificial Sequence
  Synthetic
caaacucuccucguaucaua

SEQ ID NO: 790552 - RNA, 20 nt, Artificial Sequence
  Synthetic
uuauaugcuacgguaucaua

SEQ ID NO: 790553 - RNA, 20 nt, Artificial Sequence
  Synthetic
augcuccauucuuuaucaua

SEQ ID NO: 790554 - RNA, 20 nt, Artificial Sequence
  Synthetic
uccucuccauuccacucaua

SEQ ID NO: 790555 - RNA, 20 nt, Artificial Sequence
  Synthetic
uaaggaauacacuacucaua

SEQ ID NO: 790556 - RNA, 20 nt, Artificial Sequence
  Synthetic
ugugaugauauuuacucaua

SEQ ID NO: 790557 - RNA, 20 nt, Artificial Sequence
  Synthetic
ugaagauuaaugaccucaua

SEQ ID NO: 790558 - RNA, 20 nt, Artificial Sequence
  Synthetic
aguuauuuguauuccucaua

SEQ ID NO: 790559 - RNA, 20 nt, Artificial Sequence
  Synthetic
ccauauuucaaaugcucaua

SEQ ID NO: 790560 - RNA, 20 nt, Artificial Sequence
  Synthetic
aacugagaauaaaucucaua

SEQ ID NO: 790561 - RNA, 20 nt, Artificial Sequence
  Synthetic
ugcagcauuagauucucaua

SEQ ID NO: 790562 - RNA, 20 nt, Artificial Sequence
  Synthetic
ucaggcauuagauucucaua

SEQ ID NO: 790563 - RNA, 20 nt, Artificial Sequence
  Synthetic
uuaugagaaguugagucaua

SEQ ID NO: 790564 - RNA, 20 nt, Artificial Sequence
  Synthetic
cucacauucuuaaggucaua

SEQ ID NO: 790565 - RNA, 20 nt, Artificial Sequence
  Synthetic
aguaguauugucaggucaua

SEQ ID NO: 790566 - RNA, 20 nt, Artificial Sequence
  Synthetic
uggaagguaauuaggucaua

SEQ ID NO: 790567 - RNA, 20 nt, Artificial Sequence
  Synthetic
auauggaaacugcggucaua

SEQ ID NO: 790568 - RNA, 20 nt, Artificial Sequence
  Synthetic
ucccuucucacugggucaua

SEQ ID NO: 790569 - RNA, 20 nt, Artificial Sequence
  Synthetic
auaacaggguaaaugucaua

SEQ ID NO: 790570 - RNA, 20 nt, Artificial Sequence
  Synthetic
caucucuauuaaaugucaua

SEQ ID NO: 790571 - RNA, 20 nt, Artificial Sequence
  Synthetic
aguagaaugguuuugucaua

SEQ ID NO: 790572 - RNA, 20 nt, Artificial Sequence
  Synthetic
ccuuccucuuaaaauucaua

SEQ ID NO: 790573 - RNA, 20 nt, Artificial Sequence
  Synthetic
uaaucuaaagcaaauucaua

SEQ ID NO: 790574 - RNA, 20 nt, Artificial Sequence
  Synthetic
agugaaguggucaauucaua

SEQ ID NO: 790575 - RNA, 20 nt, Artificial Sequence
  Synthetic
aucacugaauagaauucaua

SEQ ID NO: 790576 - RNA, 20 nt, Artificial Sequence
  Synthetic
cuauuuuaaaaacauucaua

SEQ ID NO: 790577 - RNA, 20 nt, Artificial Sequence
  Synthetic
aauggaugaauccauucaua

SEQ ID NO: 790578 - RNA, 20 nt, Artificial Sequence
  Synthetic
uugacauucauucauucaua

SEQ ID NO: 790579 - RNA, 20 nt, Artificial Sequence
  Synthetic
caauauaaauaauauucaua

SEQ ID NO: 790580 - RNA, 20 nt, Artificial Sequence
  Synthetic
aauccauguauuuauucaua

SEQ ID NO: 790581 - RNA, 20 nt, Artificial Sequence
  Synthetic
uccaccuuccuugcuucaua

SEQ ID NO: 790582 - RNA, 20 nt, Artificial Sequence
  Synthetic
uuuccuuuguucucuucaua

SEQ ID NO: 790583 - RNA, 20 nt, Artificial Sequence
  Synthetic
acuaguaugaauucuucaua

SEQ ID NO: 790584 - RNA, 20 nt, Artificial Sequence
  Synthetic
cagaaccuugauucuucaua

SEQ ID NO: 790585 - RNA, 20 nt, Artificial Sequence
  Synthetic
caaucacauccuucuucaua

SEQ ID NO: 790586 - RNA, 20 nt, Artificial Sequence
  Synthetic
acccgugagcuuucuucaua

SEQ ID NO: 790587 - RNA, 20 nt, Artificial Sequence
  Synthetic
aaacuacuuuaaaguucaua

SEQ ID NO: 790588 - RNA, 20 nt, Artificial Sequence
  Synthetic
uaagguuaaaugaguucaua

SEQ ID NO: 790589 - RNA, 20 nt, Artificial Sequence
  Synthetic
uccuaaaagcaauguucaua

SEQ ID NO: 790590 - RNA, 20 nt, Artificial Sequence
  Synthetic
aaacuacuuuaaauuucaua

SEQ ID NO: 790591 - RNA, 20 nt, Artificial Sequence
  Synthetic
aaacuacuuuacauuucaua

SEQ ID NO: 790592 - RNA, 20 nt, Artificial Sequence
  Synthetic
aauguaguaccuauuucaua

SEQ ID NO: 790593 - RNA, 20 nt, Artificial Sequence
  Synthetic
agcuuugguaguauuucaua

SEQ ID NO: 790594 - RNA, 20 nt, Artificial Sequence
  Synthetic
aagaauuugcaacuuucaua

SEQ ID NO: 790595 - RNA, 20 nt, Artificial Sequence
  Synthetic
augggcaugucaguuucaua

SEQ ID NO: 790596 - RNA, 20 nt, Artificial Sequence
  Synthetic
aaagcaaaugagguuucaua

SEQ ID NO: 790597 - RNA, 20 nt, Artificial Sequence
  Synthetic
ugagagcugaugguuucaua

SEQ ID NO: 790598 - RNA, 20 nt, Artificial Sequence
  Synthetic
ccaccagggucuuuuucaua

SEQ ID NO: 790599 - RNA, 20 nt, Artificial Sequence
  Synthetic
uguuugucuacaaaaagaua

SEQ ID NO: 790600 - RNA, 20 nt, Artificial Sequence
  Synthetic
agaaaauuggacaaaagaua

SEQ ID NO: 790601 - RNA, 20 nt, Artificial Sequence
  Synthetic
uaagaaaaacauaaaagaua

SEQ ID NO: 790602 - RNA, 20 nt, Artificial Sequence
  Synthetic
aauccauaaauuaaaagaua

SEQ ID NO: 790603 - RNA, 20 nt, Artificial Sequence
  Synthetic
uuuauguauccacaaagaua

SEQ ID NO: 790604 - RNA, 20 nt, Artificial Sequence
  Synthetic
uaacaauuacuacaaagaua

SEQ ID NO: 790605 - RNA, 20 nt, Artificial Sequence
  Synthetic
aauucacaguugcaaagaua

SEQ ID NO: 790606 - RNA, 20 nt, Artificial Sequence
  Synthetic
caauagcauuuucaaagaua

SEQ ID NO: 790607 - RNA, 20 nt, Artificial Sequence
  Synthetic
agggagugauuugaaagaua

SEQ ID NO: 790608 - RNA, 20 nt, Artificial Sequence
  Synthetic
uguuccauguucuaaagaua

SEQ ID NO: 790609 - RNA, 20 nt, Artificial Sequence
  Synthetic
uaagaggccagaacaagaua

SEQ ID NO: 790610 - RNA, 20 nt, Artificial Sequence
  Synthetic
aaagagaaacuaacaagaua

SEQ ID NO: 790611 - RNA, 20 nt, Artificial Sequence
  Synthetic
uauuugcaauagccaagaua

SEQ ID NO: 790612 - RNA, 20 nt, Artificial Sequence
  Synthetic
caauuugcaauugcaagaua

SEQ ID NO: 790613 - RNA, 20 nt, Artificial Sequence
  Synthetic
uugcgucaaagaucaagaua

SEQ ID NO: 790614 - RNA, 20 nt, Artificial Sequence
  Synthetic
uucuccaucagaucaagaua

SEQ ID NO: 790615 - RNA, 20 nt, Artificial Sequence
  Synthetic
aaguaguauacuagaagaua

SEQ ID NO: 790616 - RNA, 20 nt, Artificial Sequence
  Synthetic
ucugaauaaaagugaagaua

SEQ ID NO: 790617 - RNA, 20 nt, Artificial Sequence
  Synthetic
ucauauuuucagauaagaua

SEQ ID NO: 790618 - RNA, 20 nt, Artificial Sequence
  Synthetic
auauacaaguugauaagaua

SEQ ID NO: 790619 - RNA, 20 nt, Artificial Sequence
  Synthetic
cauuugaggaucaacagaua

SEQ ID NO: 790620 - RNA, 20 nt, Artificial Sequence
  Synthetic
cuuaucccauaucacagaua

SEQ ID NO: 790621 - RNA, 20 nt, Artificial Sequence
  Synthetic
acccacacacccuacagaua

SEQ ID NO: 790622 - RNA, 20 nt, Artificial Sequence
  Synthetic
aucuuaaguuuguacagaua

SEQ ID NO: 790623 - RNA, 20 nt, Artificial Sequence
  Synthetic
uuuacauucaguuacagaua

SEQ ID NO: 790624 - RNA, 20 nt, Artificial Sequence
  Synthetic
uaguggguagaggccagaua

SEQ ID NO: 790625 - RNA, 20 nt, Artificial Sequence
  Synthetic
auuuuuuaaaggagcagaua

SEQ ID NO: 790626 - RNA, 20 nt, Artificial Sequence
  Synthetic
agccgcagacaaggcagaua

SEQ ID NO: 790627 - RNA, 20 nt, Artificial Sequence
  Synthetic
ucuuugcuuuuaggcagaua

SEQ ID NO: 790628 - RNA, 20 nt, Artificial Sequence
  Synthetic
agaagaacccuaugcagaua

SEQ ID NO: 790629 - RNA, 20 nt, Artificial Sequence
  Synthetic
uuggcuauauaccucagaua

SEQ ID NO: 790630 - RNA, 20 nt, Artificial Sequence
  Synthetic
caucuggucuuucucagaua

SEQ ID NO: 790631 - RNA, 20 nt, Artificial Sequence
  Synthetic
agauauaaauaauucagaua

SEQ ID NO: 790632 - RNA, 20 nt, Artificial Sequence
  Synthetic
ucuuuauaugauuucagaua

SEQ ID NO: 790633 - RNA, 20 nt, Artificial Sequence
  Synthetic
cagagaacuucaaagagaua

SEQ ID NO: 790634 - RNA, 20 nt, Artificial Sequence
  Synthetic
aggagguagagaaagagaua

SEQ ID NO: 790635 - RNA, 20 nt, Artificial Sequence
  Synthetic
aacuaguaggggaagagaua

SEQ ID NO: 790636 - RNA, 20 nt, Artificial Sequence
  Synthetic
acuaaaguuuuucagagaua

SEQ ID NO: 790637 - RNA, 20 nt, Artificial Sequence
  Synthetic
uuccucugaaaugagagaua

SEQ ID NO: 790638 - RNA, 20 nt, Artificial Sequence
  Synthetic
uccuacauuacugagagaua

SEQ ID NO: 790639 - RNA, 20 nt, Artificial Sequence
  Synthetic
uuuguauauggugagagaua

SEQ ID NO: 790640 - RNA, 20 nt, Artificial Sequence
  Synthetic
ucaucuguacaauagagaua

SEQ ID NO: 790641 - RNA, 20 nt, Artificial Sequence
  Synthetic
uggugguucagcuagagaua

SEQ ID NO: 790642 - RNA, 20 nt, Artificial Sequence
  Synthetic
aaugaggguuuaaggagaua

SEQ ID NO: 790643 - RNA, 20 nt, Artificial Sequence
  Synthetic
aacaaaaaucagaggagaua

SEQ ID NO: 790644 - RNA, 20 nt, Artificial Sequence
  Synthetic
auaaaugaaugagggagaua

SEQ ID NO: 790645 - RNA, 20 nt, Artificial Sequence
  Synthetic
auauacaaaauagggagaua

SEQ ID NO: 790646 - RNA, 20 nt, Artificial Sequence
  Synthetic
auggugagaaacuggagaua

SEQ ID NO: 790647 - RNA, 20 nt, Artificial Sequence
  Synthetic
ugugacccuauuuggagaua

SEQ ID NO: 790648 - RNA, 20 nt, Artificial Sequence
  Synthetic
cccauauuauuacugagaua

SEQ ID NO: 790649 - RNA, 20 nt, Artificial Sequence
  Synthetic
cuuguauaaggggugagaua

SEQ ID NO: 790650 - RNA, 20 nt, Artificial Sequence
  Synthetic
uuuauguacagugugagaua

SEQ ID NO: 790651 - RNA, 20 nt, Artificial Sequence
  Synthetic
caguuaaagcauuugagaua

SEQ ID NO: 790652 - RNA, 20 nt, Artificial Sequence
  Synthetic
uaauuugcaacuaauagaua

SEQ ID NO: 790653 - RNA, 20 nt, Artificial Sequence
  Synthetic
aaccuauaaauuaauagaua

SEQ ID NO: 790654 - RNA, 20 nt, Artificial Sequence
  Synthetic
cagaugguauuuaauagaua

SEQ ID NO: 790655 - RNA, 20 nt, Artificial Sequence
  Synthetic
uggauacuauuacauagaua

SEQ ID NO: 790656 - RNA, 20 nt, Artificial Sequence
  Synthetic
uuugcaauacaucauagaua

SEQ ID NO: 790657 - RNA, 20 nt, Artificial Sequence
  Synthetic
ccuauucuaugucauagaua

SEQ ID NO: 790658 - RNA, 20 nt, Artificial Sequence
  Synthetic
caucuauauauauauagaua

SEQ ID NO: 790659 - RNA, 20 nt, Artificial Sequence
  Synthetic
uuacaugcuuuuuauagaua

SEQ ID NO: 790660 - RNA, 20 nt, Artificial Sequence
  Synthetic
uuuguucacauagcuagaua

SEQ ID NO: 790661 - RNA, 20 nt, Artificial Sequence
  Synthetic
uuuuccuggaaaucuagaua

SEQ ID NO: 790662 - RNA, 20 nt, Artificial Sequence
  Synthetic
uuuuguauuuuaaguagaua

SEQ ID NO: 790663 - RNA, 20 nt, Artificial Sequence
  Synthetic
agagaccuccugaguagaua

SEQ ID NO: 790664 - RNA, 20 nt, Artificial Sequence
  Synthetic
aaaaaucuuuugcguagaua

SEQ ID NO: 790665 - RNA, 20 nt, Artificial Sequence
  Synthetic
cugguugcucuagguagaua

SEQ ID NO: 790666 - RNA, 20 nt, Artificial Sequence
  Synthetic
aaucuaauauaaauuagaua

SEQ ID NO: 790667 - RNA, 20 nt, Artificial Sequence
  Synthetic
cuacuuuaaugaauuagaua

SEQ ID NO: 790668 - RNA, 20 nt, Artificial Sequence
  Synthetic
ugcaaaucauacauuagaua

SEQ ID NO: 790669 - RNA, 20 nt, Artificial Sequence
  Synthetic
aauaaaagaacuauuagaua

SEQ ID NO: 790670 - RNA, 20 nt, Artificial Sequence
  Synthetic
uggauguuagaacuuagaua

SEQ ID NO: 790671 - RNA, 20 nt, Artificial Sequence
  Synthetic
ucucugguguuucuuagaua

SEQ ID NO: 790672 - RNA, 20 nt, Artificial Sequence
  Synthetic
ucuuugaacuuaguuagaua

SEQ ID NO: 790673 - RNA, 20 nt, Artificial Sequence
  Synthetic
acggcaguaccuguuagaua

SEQ ID NO: 790674 - RNA, 20 nt, Artificial Sequence
  Synthetic
uaccugcuguguguuagaua

SEQ ID NO: 790675 - RNA, 20 nt, Artificial Sequence
  Synthetic
auugauuaauaguuuagaua

SEQ ID NO: 790676 - RNA, 20 nt, Artificial Sequence
  Synthetic
acauuugauuuuuuuagaua

SEQ ID NO: 790677 - RNA, 20 nt, Artificial Sequence
  Synthetic
aaauaauaauaaaaacgaua

SEQ ID NO: 790678 - RNA, 20 nt, Artificial Sequence
  Synthetic
agguuugaggugagacgaua

SEQ ID NO: 790679 - RNA, 20 nt, Artificial Sequence
  Synthetic
aaguaccaaaaucuacgaua

SEQ ID NO: 790680 - RNA, 20 nt, Artificial Sequence
  Synthetic
uuaucucacuuaguacgaua

SEQ ID NO: 790681 - RNA, 20 nt, Artificial Sequence
  Synthetic
caauaaaccuacuaccgaua

SEQ ID NO: 790682 - RNA, 20 nt, Artificial Sequence
  Synthetic
ccauaaaugccaucucgaua

SEQ ID NO: 790683 - RNA, 20 nt, Artificial Sequence
  Synthetic
cuaauuuuaaugucucgaua

SEQ ID NO: 790684 - RNA, 20 nt, Artificial Sequence
  Synthetic
uguaguaguaagaaaggaua

SEQ ID NO: 790685 - RNA, 20 nt, Artificial Sequence
  Synthetic
ugguagaaagggaaaggaua

SEQ ID NO: 790686 - RNA, 20 nt, Artificial Sequence
  Synthetic
acaaguguugaucaaggaua

SEQ ID NO: 790687 - RNA, 20 nt, Artificial Sequence
  Synthetic
aauaacuuccuagaaggaua

SEQ ID NO: 790688 - RNA, 20 nt, Artificial Sequence
  Synthetic
ucagauuuuguugaaggaua

SEQ ID NO: 790689 - RNA, 20 nt, Artificial Sequence
  Synthetic
ugaagaaugaaagcaggaua

SEQ ID NO: 790690 - RNA, 20 nt, Artificial Sequence
  Synthetic
ccagagacaaacucaggaua

SEQ ID NO: 790691 - RNA, 20 nt, Artificial Sequence
  Synthetic
uaaagaaaugagucaggaua

SEQ ID NO: 790692 - RNA, 20 nt, Artificial Sequence
  Synthetic
cguccuuguacuucaggaua

SEQ ID NO: 790693 - RNA, 20 nt, Artificial Sequence
  Synthetic
uaguccacaugaagaggaua

SEQ ID NO: 790694 - RNA, 20 nt, Artificial Sequence
  Synthetic
aacacuggaaaaggaggaua

SEQ ID NO: 790695 - RNA, 20 nt, Artificial Sequence
  Synthetic
uagaaaacugcaggaggaua

SEQ ID NO: 790696 - RNA, 20 nt, Artificial Sequence
  Synthetic
uguguguguuguggaggaua

SEQ ID NO: 790697 - RNA, 20 nt, Artificial Sequence
  Synthetic
uaugcuaaguacugaggaua

SEQ ID NO: 790698 - RNA, 20 nt, Artificial Sequence
  Synthetic
aaaaugacagggauaggaua

SEQ ID NO: 790699 - RNA, 20 nt, Artificial Sequence
  Synthetic
uauugugugacuauaggaua

SEQ ID NO: 790700 - RNA, 20 nt, Artificial Sequence
  Synthetic
cucucccagauucuaggaua

SEQ ID NO: 790701 - RNA, 20 nt, Artificial Sequence
  Synthetic
ucaggaaaaaaaguaggaua

SEQ ID NO: 790702 - RNA, 20 nt, Artificial Sequence
  Synthetic
agcuuagucacaguaggaua

SEQ ID NO: 790703 - RNA, 20 nt, Artificial Sequence
  Synthetic
agguuccugggauuaggaua

SEQ ID NO: 790704 - RNA, 20 nt, Artificial Sequence
  Synthetic
ugcaacuuauauuacggaua

SEQ ID NO: 790705 - RNA, 20 nt, Artificial Sequence
  Synthetic
ucaucuccauucugcggaua

SEQ ID NO: 790706 - RNA, 20 nt, Artificial Sequence
  Synthetic
auggagacucugaagggaua

SEQ ID NO: 790707 - RNA, 20 nt, Artificial Sequence
  Synthetic
ucauguccuuuguagggaua

SEQ ID NO: 790708 - RNA, 20 nt, Artificial Sequence
  Synthetic
uaauauuaagggaggggaua

SEQ ID NO: 790709 - RNA, 20 nt, Artificial Sequence
  Synthetic
aggaauggggaaaugggaua

SEQ ID NO: 790710 - RNA, 20 nt, Artificial Sequence
  Synthetic
aauaauucagauaugggaua

SEQ ID NO: 790711 - RNA, 20 nt, Artificial Sequence
  Synthetic
ugugguccacuccugggaua

SEQ ID NO: 790712 - RNA, 20 nt, Artificial Sequence
  Synthetic
ccuugcaguaucuugggaua

SEQ ID NO: 790713 - RNA, 20 nt, Artificial Sequence
  Synthetic
uaaauccuucuguugggaua

SEQ ID NO: 790714 - RNA, 20 nt, Artificial Sequence
  Synthetic
ccuccaucacacaauggaua

SEQ ID NO: 790715 - RNA, 20 nt, Artificial Sequence
  Synthetic
auaaagagccagaauggaua

SEQ ID NO: 790716 - RNA, 20 nt, Artificial Sequence
  Synthetic
uacuucugaaaagauggaua

SEQ ID NO: 790717 - RNA, 20 nt, Artificial Sequence
  Synthetic
agggcuacacaggauggaua

SEQ ID NO: 790718 - RNA, 20 nt, Artificial Sequence
  Synthetic
uuugaacagaaugauggaua

SEQ ID NO: 790719 - RNA, 20 nt, Artificial Sequence
  Synthetic
ucacaauauaguuauggaua

SEQ ID NO: 790720 - RNA, 20 nt, Artificial Sequence
  Synthetic
uagccaaauauuuauggaua

SEQ ID NO: 790721 - RNA, 20 nt, Artificial Sequence
  Synthetic
aucggugggucugcuggaua

SEQ ID NO: 790722 - RNA, 20 nt, Artificial Sequence
  Synthetic
acaauuucaaccucuggaua

SEQ ID NO: 790723 - RNA, 20 nt, Artificial Sequence
  Synthetic
caguuucauuccucuggaua

SEQ ID NO: 790724 - RNA, 20 nt, Artificial Sequence
  Synthetic
aauacuaccaauaguggaua

SEQ ID NO: 790725 - RNA, 20 nt, Artificial Sequence
  Synthetic
agaaucugugaauguggaua

SEQ ID NO: 790726 - RNA, 20 nt, Artificial Sequence
  Synthetic
auaccacucugguguggaua

SEQ ID NO: 790727 - RNA, 20 nt, Artificial Sequence
  Synthetic
aaaugcaaggauuguggaua

SEQ ID NO: 790728 - RNA, 20 nt, Artificial Sequence
  Synthetic
auuucuggaugaauuggaua

SEQ ID NO: 790729 - RNA, 20 nt, Artificial Sequence
  Synthetic
agcaaguuuaauauuggaua

SEQ ID NO: 790730 - RNA, 20 nt, Artificial Sequence
  Synthetic
acugacuaagccuuuggaua

SEQ ID NO: 790731 - RNA, 20 nt, Artificial Sequence
  Synthetic
ugucuuguauccuuuggaua

SEQ ID NO: 790732 - RNA, 20 nt, Artificial Sequence
  Synthetic
uuugggggaugguuuggaua

SEQ ID NO: 790733 - RNA, 20 nt, Artificial Sequence
  Synthetic
aacaacuucaauuuuggaua

SEQ ID NO: 790734 - RNA, 20 nt, Artificial Sequence
  Synthetic
aaucccaagcauuuuggaua

SEQ ID NO: 790735 - RNA, 20 nt, Artificial Sequence
  Synthetic
caacgauaagauuuuggaua

SEQ ID NO: 790736 - RNA, 20 nt, Artificial Sequence
  Synthetic
uuucauccaagaaaaugaua

SEQ ID NO: 790737 - RNA, 20 nt, Artificial Sequence
  Synthetic
auacuaguuauaaaaugaua

SEQ ID NO: 790738 - RNA, 20 nt, Artificial Sequence
  Synthetic
ugccauacaaagaaaugaua

SEQ ID NO: 790739 - RNA, 20 nt, Artificial Sequence
  Synthetic
ugcugagucaggaaaugaua

SEQ ID NO: 790740 - RNA, 20 nt, Artificial Sequence
  Synthetic
auuugccuucuccaaugaua

SEQ ID NO: 790741 - RNA, 20 nt, Artificial Sequence
  Synthetic
ccuguugacauggaaugaua

SEQ ID NO: 790742 - RNA, 20 nt, Artificial Sequence
  Synthetic
auuauacaaucauaaugaua

SEQ ID NO: 790743 - RNA, 20 nt, Artificial Sequence
  Synthetic
uagucacaaaagccaugaua

SEQ ID NO: 790744 - RNA, 20 nt, Artificial Sequence
  Synthetic
uuuucauacuagccaugaua

SEQ ID NO: 790745 - RNA, 20 nt, Artificial Sequence
  Synthetic
aauaaacaaaaggcaugaua

SEQ ID NO: 790746 - RNA, 20 nt, Artificial Sequence
  Synthetic
uaccugagcaagagaugaua

SEQ ID NO: 790747 - RNA, 20 nt, Artificial Sequence
  Synthetic
acuuugccuaguagaugaua

SEQ ID NO: 790748 - RNA, 20 nt, Artificial Sequence
  Synthetic
agagacuguuuuagaugaua

SEQ ID NO: 790749 - RNA, 20 nt, Artificial Sequence
  Synthetic
cuaaucuaucauugaugaua

SEQ ID NO: 790750 - RNA, 20 nt, Artificial Sequence
  Synthetic
auaucagucgcuauaugaua

SEQ ID NO: 790751 - RNA, 20 nt, Artificial Sequence
  Synthetic
aauuuugucuuuauaugaua

SEQ ID NO: 790752 - RNA, 20 nt, Artificial Sequence
  Synthetic
uaagauucuuuccuaugaua

SEQ ID NO: 790753 - RNA, 20 nt, Artificial Sequence
  Synthetic
ccguggaagcugcuaugaua

SEQ ID NO: 790754 - RNA, 20 nt, Artificial Sequence
  Synthetic
agauucgaaacucuaugaua

SEQ ID NO: 790755 - RNA, 20 nt, Artificial Sequence
  Synthetic
ugcaacaauagaaacugaua

SEQ ID NO: 790756 - RNA, 20 nt, Artificial Sequence
  Synthetic
uuuuccuucaauaacugaua

SEQ ID NO: 790757 - RNA, 20 nt, Artificial Sequence
  Synthetic
uuuauuuugcaucacugaua

SEQ ID NO: 790758 - RNA, 20 nt, Artificial Sequence
  Synthetic
aagauagugaaugacugaua

SEQ ID NO: 790759 - RNA, 20 nt, Artificial Sequence
  Synthetic
uggaagacucaauacugaua

SEQ ID NO: 790760 - RNA, 20 nt, Artificial Sequence
  Synthetic
uauguucaaagauacugaua

SEQ ID NO: 790761 - RNA, 20 nt, Artificial Sequence
  Synthetic
aaaauaguagcauccugaua

SEQ ID NO: 790762 - RNA, 20 nt, Artificial Sequence
  Synthetic
cauguuuagugcagcugaua

SEQ ID NO: 790763 - RNA, 20 nt, Artificial Sequence
  Synthetic
ugcaaaccauauaucugaua

SEQ ID NO: 790764 - RNA, 20 nt, Artificial Sequence
  Synthetic
agcagugagaaagucugaua

SEQ ID NO: 790765 - RNA, 20 nt, Artificial Sequence
  Synthetic
auaccagugggauucugaua

SEQ ID NO: 790766 - RNA, 20 nt, Artificial Sequence
  Synthetic
acaaaugaaccaaagugaua

SEQ ID NO: 790767 - RNA, 20 nt, Artificial Sequence
  Synthetic
aaaggaacaaacaagugaua

SEQ ID NO: 790768 - RNA, 20 nt, Artificial Sequence
  Synthetic
ugcuugacuucacagugaua

SEQ ID NO: 790769 - RNA, 20 nt, Artificial Sequence
  Synthetic
agaucuuaaaggcagugaua

SEQ ID NO: 790770 - RNA, 20 nt, Artificial Sequence
  Synthetic
ugcaccaguguggagugaua

SEQ ID NO: 790771 - RNA, 20 nt, Artificial Sequence
  Synthetic
cccaaaugcugauagugaua

SEQ ID NO: 790772 - RNA, 20 nt, Artificial Sequence
  Synthetic
uuugggaaaaaggggugaua

SEQ ID NO: 790773 - RNA, 20 nt, Artificial Sequence
  Synthetic
uuuugaauuaaggggugaua

SEQ ID NO: 790774 - RNA, 20 nt, Artificial Sequence
  Synthetic
ugguguaguaaauggugaua

SEQ ID NO: 790775 - RNA, 20 nt, Artificial Sequence
  Synthetic
aaaauagcucuuuggugaua

SEQ ID NO: 790776 - RNA, 20 nt, Artificial Sequence
  Synthetic
aaugugaaugcaaugugaua

SEQ ID NO: 790777 - RNA, 20 nt, Artificial Sequence
  Synthetic
uaauugccuuaucugugaua

SEQ ID NO: 790778 - RNA, 20 nt, Artificial Sequence
  Synthetic
augagcuuuccauugugaua

SEQ ID NO: 790779 - RNA, 20 nt, Artificial Sequence
  Synthetic
auuauacacacacauugaua

SEQ ID NO: 790780 - RNA, 20 nt, Artificial Sequence
  Synthetic
ucuacuaguguccauugaua

SEQ ID NO: 790781 - RNA, 20 nt, Artificial Sequence
  Synthetic
aaaagagcaaaagauugaua

SEQ ID NO: 790782 - RNA, 20 nt, Artificial Sequence
  Synthetic
uguccuuuauucuauugaua

SEQ ID NO: 790783 - RNA, 20 nt, Artificial Sequence
  Synthetic
aggugggauauuuauugaua

SEQ ID NO: 790784 - RNA, 20 nt, Artificial Sequence
  Synthetic
uaguuuaggaaugcuugaua

SEQ ID NO: 790785 - RNA, 20 nt, Artificial Sequence
  Synthetic
uccuucauggcugcuugaua

SEQ ID NO: 790786 - RNA, 20 nt, Artificial Sequence
  Synthetic
augacuuuucaaaguugaua

SEQ ID NO: 790787 - RNA, 20 nt, Artificial Sequence
  Synthetic
auauauauaucaaguugaua

SEQ ID NO: 790788 - RNA, 20 nt, Artificial Sequence
  Synthetic
ucuaugaguagcgguugaua

SEQ ID NO: 790789 - RNA, 20 nt, Artificial Sequence
  Synthetic
uauaggaucagauguugaua

SEQ ID NO: 790790 - RNA, 20 nt, Artificial Sequence
  Synthetic
ucuucuuuaguuuguugaua

SEQ ID NO: 790791 - RNA, 20 nt, Artificial Sequence
  Synthetic
uagaaugugaauauuugaua

SEQ ID NO: 790792 - RNA, 20 nt, Artificial Sequence
  Synthetic
uccuuucacucacuuugaua

SEQ ID NO: 790793 - RNA, 20 nt, Artificial Sequence
  Synthetic
acguaaacaaggcuuugaua

SEQ ID NO: 790794 - RNA, 20 nt, Artificial Sequence
  Synthetic
uacccuaaucaaguuugaua

SEQ ID NO: 790795 - RNA, 20 nt, Artificial Sequence
  Synthetic
acuuuauguacuguuugaua

SEQ ID NO: 790796 - RNA, 20 nt, Artificial Sequence
  Synthetic
auguauuuucauuuuugaua

SEQ ID NO: 790797 - RNA, 20 nt, Artificial Sequence
  Synthetic
uuucuuauuuuuuuuugaua

SEQ ID NO: 790798 - RNA, 20 nt, Artificial Sequence
  Synthetic
ugauuuuauucaaaaauaua

SEQ ID NO: 790799 - RNA, 20 nt, Artificial Sequence
  Synthetic
caauuuugcagaaaaauaua

SEQ ID NO: 790800 - RNA, 20 nt, Artificial Sequence
  Synthetic
uuacuguaauuaaaaauaua

SEQ ID NO: 790801 - RNA, 20 nt, Artificial Sequence
  Synthetic
uucucuuaguucaaaauaua

SEQ ID NO: 790802 - RNA, 20 nt, Artificial Sequence
  Synthetic
aacaucaggaagaaaauaua

SEQ ID NO: 790803 - RNA, 20 nt, Artificial Sequence
  Synthetic
agauaauggcaacaaauaua

SEQ ID NO: 790804 - RNA, 20 nt, Artificial Sequence
  Synthetic
uacaggaaacagcaaauaua

SEQ ID NO: 790805 - RNA, 20 nt, Artificial Sequence
  Synthetic
uaaauagaauuucaaauaua

SEQ ID NO: 790806 - RNA, 20 nt, Artificial Sequence
  Synthetic
uuuguauccauagaaauaua

SEQ ID NO: 790807 - RNA, 20 nt, Artificial Sequence
  Synthetic
ucagaguuggaugaaauaua

SEQ ID NO: 790808 - RNA, 20 nt, Artificial Sequence
  Synthetic
cacaauaauggugaaauaua

SEQ ID NO: 790809 - RNA, 20 nt, Artificial Sequence
  Synthetic
uacuucaauaucuaaauaua

SEQ ID NO: 790810 - RNA, 20 nt, Artificial Sequence
  Synthetic
acuguaggaagguaaauaua

SEQ ID NO: 790811 - RNA, 20 nt, Artificial Sequence
  Synthetic
ccucugaaagccacaauaua

SEQ ID NO: 790812 - RNA, 20 nt, Artificial Sequence
  Synthetic
acuuggugggcuucaauaua

SEQ ID NO: 790813 - RNA, 20 nt, Artificial Sequence
  Synthetic
uucagaauucuuucaauaua

SEQ ID NO: 790814 - RNA, 20 nt, Artificial Sequence
  Synthetic
aauuagagaaggagaauaua

SEQ ID NO: 790815 - RNA, 20 nt, Artificial Sequence
  Synthetic
cacuuauaagugagaauaua

SEQ ID NO: 790816 - RNA, 20 nt, Artificial Sequence
  Synthetic
auggcuugugauagaauaua

SEQ ID NO: 790817 - RNA, 20 nt, Artificial Sequence
  Synthetic
uuuuuccaggguagaauaua

SEQ ID NO: 790818 - RNA, 20 nt, Artificial Sequence
  Synthetic
aucagcauuuuuagaauaua

SEQ ID NO: 790819 - RNA, 20 nt, Artificial Sequence
  Synthetic
cagccccucucgggaauaua

SEQ ID NO: 790820 - RNA, 20 nt, Artificial Sequence
  Synthetic
aaggcuuucugcugaauaua

SEQ ID NO: 790821 - RNA, 20 nt, Artificial Sequence
  Synthetic
uucaugaaggcuugaauaua

SEQ ID NO: 790822 - RNA, 20 nt, Artificial Sequence
  Synthetic
uaggcugaguaaauaauaua

SEQ ID NO: 790823 - RNA, 20 nt, Artificial Sequence
  Synthetic
uuguugugaaacauaauaua

SEQ ID NO: 790824 - RNA, 20 nt, Artificial Sequence
  Synthetic
ucaugucauaguauaauaua

SEQ ID NO: 790825 - RNA, 20 nt, Artificial Sequence
  Synthetic
auguccauuagccuaauaua

SEQ ID NO: 790826 - RNA, 20 nt, Artificial Sequence
  Synthetic
uacauuuuaaaauuaauaua

SEQ ID NO: 790827 - RNA, 20 nt, Artificial Sequence
  Synthetic
agaauauguuaauuaauaua

SEQ ID NO: 790828 - RNA, 20 nt, Artificial Sequence
  Synthetic
acauacacgaauaacauaua

SEQ ID NO: 790829 - RNA, 20 nt, Artificial Sequence
  Synthetic
aaugauacagguaacauaua

SEQ ID NO: 790830 - RNA, 20 nt, Artificial Sequence
  Synthetic
aaacagaccaaacacauaua

SEQ ID NO: 790831 - RNA, 20 nt, Artificial Sequence
  Synthetic
auaucaaauccucacauaua

SEQ ID NO: 790832 - RNA, 20 nt, Artificial Sequence
  Synthetic
ucccaggacauucacauaua

SEQ ID NO: 790833 - RNA, 20 nt, Artificial Sequence
  Synthetic
uugacauacaaagacauaua

SEQ ID NO: 790834 - RNA, 20 nt, Artificial Sequence
  Synthetic
cuuggcaagagggacauaua

SEQ ID NO: 790835 - RNA, 20 nt, Artificial Sequence
  Synthetic
aauaauugcuuugacauaua

SEQ ID NO: 790836 - RNA, 20 nt, Artificial Sequence
  Synthetic
ugcuguagaaauaccauaua

SEQ ID NO: 790837 - RNA, 20 nt, Artificial Sequence
  Synthetic
caauucauguuucccauaua

SEQ ID NO: 790838 - RNA, 20 nt, Artificial Sequence
  Synthetic
aauugaauagauuccauaua

SEQ ID NO: 790839 - RNA, 20 nt, Artificial Sequence
  Synthetic
aacauuauuccuuccauaua

SEQ ID NO: 790840 - RNA, 20 nt, Artificial Sequence
  Synthetic
cgagagaaaaaaagcauaua

SEQ ID NO: 790841 - RNA, 20 nt, Artificial Sequence
  Synthetic
cuuaauuuuauaagcauaua

SEQ ID NO: 790842 - RNA, 20 nt, Artificial Sequence
  Synthetic
agcuaaacauagagcauaua

SEQ ID NO: 790843 - RNA, 20 nt, Artificial Sequence
  Synthetic
agaaagaaaaauagcauaua

SEQ ID NO: 790844 - RNA, 20 nt, Artificial Sequence
  Synthetic
uauauguaucugugcauaua

SEQ ID NO: 790845 - RNA, 20 nt, Artificial Sequence
  Synthetic
uuccaguguauauucauaua

SEQ ID NO: 790846 - RNA, 20 nt, Artificial Sequence
  Synthetic
auuaucuuauacuucauaua

SEQ ID NO: 790847 - RNA, 20 nt, Artificial Sequence
  Synthetic
ugugguagcccuuucauaua

SEQ ID NO: 790848 - RNA, 20 nt, Artificial Sequence
  Synthetic
aacucucauauuuucauaua

SEQ ID NO: 790849 - RNA, 20 nt, Artificial Sequence
  Synthetic
agaacuaaacuuuucauaua

SEQ ID NO: 790850 - RNA, 20 nt, Artificial Sequence
  Synthetic
cacuguggguuuuucauaua

SEQ ID NO: 790851 - RNA, 20 nt, Artificial Sequence
  Synthetic
cugaaaauguugaagauaua

SEQ ID NO: 790852 - RNA, 20 nt, Artificial Sequence
  Synthetic
uugacaccuuaucagauaua

SEQ ID NO: 790853 - RNA, 20 nt, Artificial Sequence
  Synthetic
ugcugucauggagagauaua

SEQ ID NO: 790854 - RNA, 20 nt, Artificial Sequence
  Synthetic
ccauucuacuauuagauaua

SEQ ID NO: 790855 - RNA, 20 nt, Artificial Sequence
  Synthetic
ccuagauuucagaggauaua

SEQ ID NO: 790856 - RNA, 20 nt, Artificial Sequence
  Synthetic
agguuuguuaccuggauaua

SEQ ID NO: 790857 - RNA, 20 nt, Artificial Sequence
  Synthetic
caguguuauuucuggauaua

SEQ ID NO: 790858 - RNA, 20 nt, Artificial Sequence
  Synthetic
agaaaugagauaaugauaua

SEQ ID NO: 790859 - RNA, 20 nt, Artificial Sequence
  Synthetic
ugaguaucuauaaugauaua

SEQ ID NO: 790860 - RNA, 20 nt, Artificial Sequence
  Synthetic
aaauaguauuuaaugauaua

SEQ ID NO: 790861 - RNA, 20 nt, Artificial Sequence
  Synthetic
ugaaacaucgcauugauaua

SEQ ID NO: 790862 - RNA, 20 nt, Artificial Sequence
  Synthetic
auauauuauuucuugauaua

SEQ ID NO: 790863 - RNA, 20 nt, Artificial Sequence
  Synthetic
aaauuuuaaauuuugauaua

SEQ ID NO: 790864 - RNA, 20 nt, Artificial Sequence
  Synthetic
uuaggcaauauuuugauaua

SEQ ID NO: 790865 - RNA, 20 nt, Artificial Sequence
  Synthetic
aaaaaaagaaaaaauauaua

SEQ ID NO: 790866 - RNA, 20 nt, Artificial Sequence
  Synthetic
cuucagcacccaaauauaua

SEQ ID NO: 790867 - RNA, 20 nt, Artificial Sequence
  Synthetic
uaugauauaugaaauauaua

SEQ ID NO: 790868 - RNA, 20 nt, Artificial Sequence
  Synthetic
auuaauaaccagaauauaua

SEQ ID NO: 790869 - RNA, 20 nt, Artificial Sequence
  Synthetic
ugucuaucuuugaauauaua

SEQ ID NO: 790870 - RNA, 20 nt, Artificial Sequence
  Synthetic
uauaugcaguauaauauaua

SEQ ID NO: 790871 - RNA, 20 nt, Artificial Sequence
  Synthetic
aacacgcacacacauauaua

SEQ ID NO: 790872 - RNA, 20 nt, Artificial Sequence
  Synthetic
uuuagcuuucuccauauaua

SEQ ID NO: 790873 - RNA, 20 nt, Artificial Sequence
  Synthetic
uauaagacuaagcauauaua

SEQ ID NO: 790874 - RNA, 20 nt, Artificial Sequence
  Synthetic
uucuguaucucucauauaua

SEQ ID NO: 790875 - RNA, 20 nt, Artificial Sequence
  Synthetic
uccuaguaauaagauauaua

SEQ ID NO: 790876 - RNA, 20 nt, Artificial Sequence
  Synthetic
uauuacuuaacugauauaua

SEQ ID NO: 790877 - RNA, 20 nt, Artificial Sequence
  Synthetic
caauaagagaaauauauaua

SEQ ID NO: 790878 - RNA, 20 nt, Artificial Sequence
  Synthetic
augugggguacauauauaua

SEQ ID NO: 790879 - RNA, 20 nt, Artificial Sequence
  Synthetic
auacuauaaauauauauaua

SEQ ID NO: 790880 - RNA, 20 nt, Artificial Sequence
  Synthetic
uauauauauauauauauaua

SEQ ID NO: 790881 - RNA, 20 nt, Artificial Sequence
  Synthetic
uguuuauauauauauauaua

SEQ ID NO: 790882 - RNA, 20 nt, Artificial Sequence
  Synthetic
ugugugcguauauauauaua

SEQ ID NO: 790883 - RNA, 20 nt, Artificial Sequence
  Synthetic
uggaugacuuuauauauaua

SEQ ID NO: 790884 - RNA, 20 nt, Artificial Sequence
  Synthetic
ugaaaaagaaccuauauaua

SEQ ID NO: 790885 - RNA, 20 nt, Artificial Sequence
  Synthetic
uauuccacaauguauauaua

SEQ ID NO: 790886 - RNA, 20 nt, Artificial Sequence
  Synthetic
uaucuuuuacccacuauaua

SEQ ID NO: 790887 - RNA, 20 nt, Artificial Sequence
  Synthetic
auauuacaugucacuauaua

SEQ ID NO: 790888 - RNA, 20 nt, Artificial Sequence
  Synthetic
auauuauauuuuacuauaua

SEQ ID NO: 790889 - RNA, 20 nt, Artificial Sequence
  Synthetic
ucuuucuaugagucuauaua

SEQ ID NO: 790890 - RNA, 20 nt, Artificial Sequence
  Synthetic
ucaauccguuuuucuauaua

SEQ ID NO: 790891 - RNA, 20 nt, Artificial Sequence
  Synthetic
aaaaaaaaaguaaguauaua

SEQ ID NO: 790892 - RNA, 20 nt, Artificial Sequence
  Synthetic
uggugauaguacaguauaua

SEQ ID NO: 790893 - RNA, 20 nt, Artificial Sequence
  Synthetic
uuuacucacuuuaguauaua

SEQ ID NO: 790894 - RNA, 20 nt, Artificial Sequence
  Synthetic
uauauucuuugggguauaua

SEQ ID NO: 790895 - RNA, 20 nt, Artificial Sequence
  Synthetic
caggauuuauaaauuauaua

SEQ ID NO: 790896 - RNA, 20 nt, Artificial Sequence
  Synthetic
aagacauuuuuaauuauaua

SEQ ID NO: 790897 - RNA, 20 nt, Artificial Sequence
  Synthetic
auaggaccuuuuauuauaua

SEQ ID NO: 790898 - RNA, 20 nt, Artificial Sequence
  Synthetic
uguaugaucucacuuauaua

SEQ ID NO: 790899 - RNA, 20 nt, Artificial Sequence
  Synthetic
aauaguaucauucuuauaua

SEQ ID NO: 790900 - RNA, 20 nt, Artificial Sequence
  Synthetic
ccggagauccuaguuauaua

SEQ ID NO: 790901 - RNA, 20 nt, Artificial Sequence
  Synthetic
uaaacaggcaugguuauaua

SEQ ID NO: 790902 - RNA, 20 nt, Artificial Sequence
  Synthetic
uuguauauauauguuauaua

SEQ ID NO: 790903 - RNA, 20 nt, Artificial Sequence
  Synthetic
ugugaauauauauuuauaua

SEQ ID NO: 790904 - RNA, 20 nt, Artificial Sequence
  Synthetic
cuggccuauuuauuuauaua

SEQ ID NO: 790905 - RNA, 20 nt, Artificial Sequence
  Synthetic
aaguacauauaguuuauaua

SEQ ID NO: 790906 - RNA, 20 nt, Artificial Sequence
  Synthetic
agaaccuuuguguuuauaua

SEQ ID NO: 790907 - RNA, 20 nt, Artificial Sequence
  Synthetic
uaauuuauggauuuuauaua

SEQ ID NO: 790908 - RNA, 20 nt, Artificial Sequence
  Synthetic
ucaauuauguauuuuauaua

SEQ ID NO: 790909 - RNA, 20 nt, Artificial Sequence
  Synthetic
uuaugucuguauuuuauaua

SEQ ID NO: 790910 - RNA, 20 nt, Artificial Sequence
  Synthetic
cgaaauugauguuuuauaua

SEQ ID NO: 790911 - RNA, 20 nt, Artificial Sequence
  Synthetic
ucaagcauuccuaaacuaua

SEQ ID NO: 790912 - RNA, 20 nt, Artificial Sequence
  Synthetic
accucaugacaccaacuaua

SEQ ID NO: 790913 - RNA, 20 nt, Artificial Sequence
  Synthetic
uuaaaauaaccuccacuaua

SEQ ID NO: 790914 - RNA, 20 nt, Artificial Sequence
  Synthetic
ugaaguuaaucugcacuaua

SEQ ID NO: 790915 - RNA, 20 nt, Artificial Sequence
  Synthetic
auauuuuuugaaagacuaua

SEQ ID NO: 790916 - RNA, 20 nt, Artificial Sequence
  Synthetic
uuugauguggccagacuaua

SEQ ID NO: 790917 - RNA, 20 nt, Artificial Sequence
  Synthetic
ucuuuacuuucuugacuaua

SEQ ID NO: 790918 - RNA, 20 nt, Artificial Sequence
  Synthetic
cuugaagagcauauacuaua

SEQ ID NO: 790919 - RNA, 20 nt, Artificial Sequence
  Synthetic
caacuucaaacuauacuaua

SEQ ID NO: 790920 - RNA, 20 nt, Artificial Sequence
  Synthetic
aaaaucuaccugcuacuaua

SEQ ID NO: 790921 - RNA, 20 nt, Artificial Sequence
  Synthetic
ccaauaauuucauuacuaua

SEQ ID NO: 790922 - RNA, 20 nt, Artificial Sequence
  Synthetic
agucuaaaauauuuacuaua

SEQ ID NO: 790923 - RNA, 20 nt, Artificial Sequence
  Synthetic
uuuuaugcuuuucaccuaua

SEQ ID NO: 790924 - RNA, 20 nt, Artificial Sequence
  Synthetic
uagguuagaggugaccuaua

SEQ ID NO: 790925 - RNA, 20 nt, Artificial Sequence
  Synthetic
agauauaaugcuuaccuaua

SEQ ID NO: 790926 - RNA, 20 nt, Artificial Sequence
  Synthetic
cagaggagccugucccuaua

SEQ ID NO: 790927 - RNA, 20 nt, Artificial Sequence
  Synthetic
uauucuuggcauugccuaua

SEQ ID NO: 790928 - RNA, 20 nt, Artificial Sequence
  Synthetic
uuccaagaauaaauccuaua

SEQ ID NO: 790929 - RNA, 20 nt, Artificial Sequence
  Synthetic
auuaaguuugccauccuaua

SEQ ID NO: 790930 - RNA, 20 nt, Artificial Sequence
  Synthetic
aaggccacugugcuccuaua

SEQ ID NO: 790931 - RNA, 20 nt, Artificial Sequence
  Synthetic
cacaaaacucaaaagcuaua

SEQ ID NO: 790932 - RNA, 20 nt, Artificial Sequence
  Synthetic
ucuaacacuuaucagcuaua

SEQ ID NO: 790933 - RNA, 20 nt, Artificial Sequence
  Synthetic
uacugcacauccaggcuaua

SEQ ID NO: 790934 - RNA, 20 nt, Artificial Sequence
  Synthetic
ucagagauuuauaggcuaua

SEQ ID NO: 790935 - RNA, 20 nt, Artificial Sequence
  Synthetic
uuaggauuuucuuggcuaua

SEQ ID NO: 790936 - RNA, 20 nt, Artificial Sequence
  Synthetic
acauccaucuuuuggcuaua

SEQ ID NO: 790937 - RNA, 20 nt, Artificial Sequence
  Synthetic
aaucuuauagccaugcuaua

SEQ ID NO: 790938 - RNA, 20 nt, Artificial Sequence
  Synthetic
aauuggaggggcuugcuaua

SEQ ID NO: 790939 - RNA, 20 nt, Artificial Sequence
  Synthetic
uuaucugagugguugcuaua

SEQ ID NO: 790940 - RNA, 20 nt, Artificial Sequence
  Synthetic
ucuaauauucagaaucuaua

SEQ ID NO: 790941 - RNA, 20 nt, Artificial Sequence
  Synthetic
ucuaauauccauaaucuaua

SEQ ID NO: 790942 - RNA, 20 nt, Artificial Sequence
  Synthetic
acuaccaauuccuaucuaua

SEQ ID NO: 790943 - RNA, 20 nt, Artificial Sequence
  Synthetic
ucccuucuucucauucuaua

SEQ ID NO: 790944 - RNA, 20 nt, Artificial Sequence
  Synthetic
uuaacauauauacuucuaua

SEQ ID NO: 790945 - RNA, 20 nt, Artificial Sequence
  Synthetic
uguaaaccuuauguucuaua

SEQ ID NO: 790946 - RNA, 20 nt, Artificial Sequence
  Synthetic
uuauuaagaauuguucuaua

SEQ ID NO: 790947 - RNA, 20 nt, Artificial Sequence
  Synthetic
aaacauagcccuuuucuaua

SEQ ID NO: 790948 - RNA, 20 nt, Artificial Sequence
  Synthetic
ugauagaauguuuuucuaua

SEQ ID NO: 790949 - RNA, 20 nt, Artificial Sequence
  Synthetic
ugcuaugaaugaaaaguaua

SEQ ID NO: 790950 - RNA, 20 nt, Artificial Sequence
  Synthetic
aucuucuugguuaaaguaua

SEQ ID NO: 790951 - RNA, 20 nt, Artificial Sequence
  Synthetic
agacagguaaagcaaguaua

SEQ ID NO: 790952 - RNA, 20 nt, Artificial Sequence
  Synthetic
aaauuagagaaagaaguaua

SEQ ID NO: 790953 - RNA, 20 nt, Artificial Sequence
  Synthetic
aauuugcauacauaaguaua

SEQ ID NO: 790954 - RNA, 20 nt, Artificial Sequence
  Synthetic
uuuuuaugauguuaaguaua

SEQ ID NO: 790955 - RNA, 20 nt, Artificial Sequence
  Synthetic
ugguaagaaugaacaguaua

SEQ ID NO: 790956 - RNA, 20 nt, Artificial Sequence
  Synthetic
uagucaaucaugacaguaua

SEQ ID NO: 790957 - RNA, 20 nt, Artificial Sequence
  Synthetic
acugcccauuugagaguaua

SEQ ID NO: 790958 - RNA, 20 nt, Artificial Sequence
  Synthetic
agaauugguccuagaguaua

SEQ ID NO: 790959 - RNA, 20 nt, Artificial Sequence
  Synthetic
aauguccaccuuagaguaua

SEQ ID NO: 790960 - RNA, 20 nt, Artificial Sequence
  Synthetic
uauuuucuucagugaguaua

SEQ ID NO: 790961 - RNA, 20 nt, Artificial Sequence
  Synthetic
ugccuauaucaaauaguaua

SEQ ID NO: 790962 - RNA, 20 nt, Artificial Sequence
  Synthetic
uuucucuaagagauaguaua

SEQ ID NO: 790963 - RNA, 20 nt, Artificial Sequence
  Synthetic
ucuuuaccuccucuaguaua

SEQ ID NO: 790964 - RNA, 20 nt, Artificial Sequence
  Synthetic
cacuuucuuuggcacguaua

SEQ ID NO: 790965 - RNA, 20 nt, Artificial Sequence
  Synthetic
auaaucuguggaaagguaua

SEQ ID NO: 790966 - RNA, 20 nt, Artificial Sequence
  Synthetic
cauguuggccaagagguaua

SEQ ID NO: 790967 - RNA, 20 nt, Artificial Sequence
  Synthetic
uagacgugaugugagguaua

SEQ ID NO: 790968 - RNA, 20 nt, Artificial Sequence
  Synthetic
uuuauuaugugguagguaua

SEQ ID NO: 790969 - RNA, 20 nt, Artificial Sequence
  Synthetic
uaauguuaauguuagguaua

SEQ ID NO: 790970 - RNA, 20 nt, Artificial Sequence
  Synthetic
acuaaugacuuaucgguaua

SEQ ID NO: 790971 - RNA, 20 nt, Artificial Sequence
  Synthetic
auuccuuccccaaggguaua

SEQ ID NO: 790972 - RNA, 20 nt, Artificial Sequence
  Synthetic
uuugccacagaagggguaua

SEQ ID NO: 790973 - RNA, 20 nt, Artificial Sequence
  Synthetic
ugcccauguguguggguaua

SEQ ID NO: 790974 - RNA, 20 nt, Artificial Sequence
  Synthetic
ugggugucauuaaugguaua

SEQ ID NO: 790975 - RNA, 20 nt, Artificial Sequence
  Synthetic
uaauuuuuguauaugguaua

SEQ ID NO: 790976 - RNA, 20 nt, Artificial Sequence
  Synthetic
aguucacaguaucugguaua

SEQ ID NO: 790977 - RNA, 20 nt, Artificial Sequence
  Synthetic
aagccuuggcaggugguaua

SEQ ID NO: 790978 - RNA, 20 nt, Artificial Sequence
  Synthetic
uguuugcagugcuugguaua

SEQ ID NO: 790979 - RNA, 20 nt, Artificial Sequence
  Synthetic
auggacaaacaaaauguaua

SEQ ID NO: 790980 - RNA, 20 nt, Artificial Sequence
  Synthetic
caaguucaauuuaauguaua

SEQ ID NO: 790981 - RNA, 20 nt, Artificial Sequence
  Synthetic
uucuaaauacaacauguaua

SEQ ID NO: 790982 - RNA, 20 nt, Artificial Sequence
  Synthetic
uauuuauaguaccauguaua

SEQ ID NO: 790983 - RNA, 20 nt, Artificial Sequence
  Synthetic
aguuggaaaugucauguaua

SEQ ID NO: 790984 - RNA, 20 nt, Artificial Sequence
  Synthetic
auaaccauugaauauguaua

SEQ ID NO: 790985 - RNA, 20 nt, Artificial Sequence
  Synthetic
uggacucauauauauguaua

SEQ ID NO: 790986 - RNA, 20 nt, Artificial Sequence
  Synthetic
uggcuucagauguauguaua

SEQ ID NO: 790987 - RNA, 20 nt, Artificial Sequence
  Synthetic
auauaacaguuguauguaua

SEQ ID NO: 790988 - RNA, 20 nt, Artificial Sequence
  Synthetic
uauccacacuuuuauguaua

SEQ ID NO: 790989 - RNA, 20 nt, Artificial Sequence
  Synthetic
cagguuuauuuuuauguaua

SEQ ID NO: 790990 - RNA, 20 nt, Artificial Sequence
  Synthetic
uggauugcaucuacuguaua

SEQ ID NO: 790991 - RNA, 20 nt, Artificial Sequence
  Synthetic
aaaaaagauguuacuguaua

SEQ ID NO: 790992 - RNA, 20 nt, Artificial Sequence
  Synthetic
uaaagcuguauaucuguaua

SEQ ID NO: 790993 - RNA, 20 nt, Artificial Sequence
  Synthetic
aaaacauuuuugaguguaua

SEQ ID NO: 790994 - RNA, 20 nt, Artificial Sequence
  Synthetic
agucacuuuuacauuguaua

SEQ ID NO: 790995 - RNA, 20 nt, Artificial Sequence
  Synthetic
aaugaauaacccauuguaua

SEQ ID NO: 790996 - RNA, 20 nt, Artificial Sequence
  Synthetic
ugaggaguuuugcuuguaua

SEQ ID NO: 790997 - RNA, 20 nt, Artificial Sequence
  Synthetic
uuuuuccagauucuuguaua

SEQ ID NO: 790998 - RNA, 20 nt, Artificial Sequence
  Synthetic
uuugaguugauucuuguaua

SEQ ID NO: 790999 - RNA, 20 nt, Artificial Sequence
  Synthetic
aaaaucaacaguguuguaua

SEQ ID NO: 791000 - RNA, 20 nt, Artificial Sequence
  Synthetic
uucuguguuuuauuuguaua

SEQ ID NO: 791001 - RNA, 20 nt, Artificial Sequence
  Synthetic
cuugaauuaauuuuuguaua

SEQ ID NO: 791002 - RNA, 20 nt, Artificial Sequence
  Synthetic
aauuaauuaauuuuuguaua

SEQ ID NO: 791003 - RNA, 20 nt, Artificial Sequence
  Synthetic
caugaguuaauuuuuguaua

SEQ ID NO: 791004 - RNA, 20 nt, Artificial Sequence
  Synthetic
cuugaguuaauuuuuguaua

SEQ ID NO: 791005 - RNA, 20 nt, Artificial Sequence
  Synthetic
cuugaauugauuuuuguaua

SEQ ID NO: 791006 - RNA, 20 nt, Artificial Sequence
  Synthetic
cuugaguugauuuuuguaua

SEQ ID NO: 791007 - RNA, 20 nt, Artificial Sequence
  Synthetic
uuugauuugauuuuuguaua

SEQ ID NO: 791008 - RNA, 20 nt, Artificial Sequence
  Synthetic
accaaacuaucaaaauuaua

SEQ ID NO: 791009 - RNA, 20 nt, Artificial Sequence
  Synthetic
ccauacuuaauaaaauuaua

SEQ ID NO: 791010 - RNA, 20 nt, Artificial Sequence
  Synthetic
aaaaacugcauaaaauuaua

SEQ ID NO: 791011 - RNA, 20 nt, Artificial Sequence
  Synthetic
cuuuuuucuuugaaauuaua

SEQ ID NO: 791012 - RNA, 20 nt, Artificial Sequence
  Synthetic
cuagacagcucucaauuaua

SEQ ID NO: 791013 - RNA, 20 nt, Artificial Sequence
  Synthetic
ucaggacacuaagaauuaua

SEQ ID NO: 791014 - RNA, 20 nt, Artificial Sequence
  Synthetic
uuaguauaugaauaauuaua

SEQ ID NO: 791015 - RNA, 20 nt, Artificial Sequence
  Synthetic
ucauucgucuaauaauuaua

SEQ ID NO: 791016 - RNA, 20 nt, Artificial Sequence
  Synthetic
uuguuuuuggaaacauuaua

SEQ ID NO: 791017 - RNA, 20 nt, Artificial Sequence
  Synthetic
uaugaauaauacacauuaua

SEQ ID NO: 791018 - RNA, 20 nt, Artificial Sequence
  Synthetic
auaucucaaagcacauuaua

SEQ ID NO: 791019 - RNA, 20 nt, Artificial Sequence
  Synthetic
agaaugagaagagcauuaua

SEQ ID NO: 791020 - RNA, 20 nt, Artificial Sequence
  Synthetic
aagagcauaagagcauuaua

SEQ ID NO: 791021 - RNA, 20 nt, Artificial Sequence
  Synthetic
cuucugauuggaucauuaua

SEQ ID NO: 791022 - RNA, 20 nt, Artificial Sequence
  Synthetic
aaauaauaacacagauuaua

SEQ ID NO: 791023 - RNA, 20 nt, Artificial Sequence
  Synthetic
aauccacaacuaggauuaua

SEQ ID NO: 791024 - RNA, 20 nt, Artificial Sequence
  Synthetic
uggggauuauggggauuaua

SEQ ID NO: 791025 - RNA, 20 nt, Artificial Sequence
  Synthetic
accuaaauaaguggauuaua

SEQ ID NO: 791026 - RNA, 20 nt, Artificial Sequence
  Synthetic
uaucacaucauaauauuaua

SEQ ID NO: 791027 - RNA, 20 nt, Artificial Sequence
  Synthetic
uuuuaguguuccauauuaua

SEQ ID NO: 791028 - RNA, 20 nt, Artificial Sequence
  Synthetic
cacauuacaaagauauuaua

SEQ ID NO: 791029 - RNA, 20 nt, Artificial Sequence
  Synthetic
agcgggaaugcuauauuaua

SEQ ID NO: 791030 - RNA, 20 nt, Artificial Sequence
  Synthetic
cuguuuacuccucuauuaua

SEQ ID NO: 791031 - RNA, 20 nt, Artificial Sequence
  Synthetic
accaagccaggauuauuaua

SEQ ID NO: 791032 - RNA, 20 nt, Artificial Sequence
  Synthetic
augaugaauaaaaacuuaua

SEQ ID NO: 791033 - RNA, 20 nt, Artificial Sequence
  Synthetic
uuauccuuagcaaacuuaua

SEQ ID NO: 791034 - RNA, 20 nt, Artificial Sequence
  Synthetic
uacacccuagccaacuuaua

SEQ ID NO: 791035 - RNA, 20 nt, Artificial Sequence
  Synthetic
uauuuuugcagacacuuaua

SEQ ID NO: 791036 - RNA, 20 nt, Artificial Sequence
  Synthetic
auguuaaauaaucacuuaua

SEQ ID NO: 791037 - RNA, 20 nt, Artificial Sequence
  Synthetic
cuuuccauagaucacuuaua

SEQ ID NO: 791038 - RNA, 20 nt, Artificial Sequence
  Synthetic
cuugaauuuaacuacuuaua

SEQ ID NO: 791039 - RNA, 20 nt, Artificial Sequence
  Synthetic
ucauaacuuacuuacuuaua

SEQ ID NO: 791040 - RNA, 20 nt, Artificial Sequence
  Synthetic
ugggcuucauuucccuuaua

SEQ ID NO: 791041 - RNA, 20 nt, Artificial Sequence
  Synthetic
aaauaggcauuugccuuaua

SEQ ID NO: 791042 - RNA, 20 nt, Artificial Sequence
  Synthetic
uauacuauucuuuccuuaua

SEQ ID NO: 791043 - RNA, 20 nt, Artificial Sequence
  Synthetic
aguuuauccuuuuccuuaua

SEQ ID NO: 791044 - RNA, 20 nt, Artificial Sequence
  Synthetic
ccuguuaaaauacgcuuaua

SEQ ID NO: 791045 - RNA, 20 nt, Artificial Sequence
  Synthetic
ugucuucgaaucugcuuaua

SEQ ID NO: 791046 - RNA, 20 nt, Artificial Sequence
  Synthetic
aauuucuuacauaucuuaua

SEQ ID NO: 791047 - RNA, 20 nt, Artificial Sequence
  Synthetic
aguaguuucauuaucuuaua

SEQ ID NO: 791048 - RNA, 20 nt, Artificial Sequence
  Synthetic
uuacucuucccuuucuuaua

SEQ ID NO: 791049 - RNA, 20 nt, Artificial Sequence
  Synthetic
aaaggguugaagaaguuaua

SEQ ID NO: 791050 - RNA, 20 nt, Artificial Sequence
  Synthetic
uauucaaaaagacaguuaua

SEQ ID NO: 791051 - RNA, 20 nt, Artificial Sequence
  Synthetic
cuuuaagcaagggaguuaua

SEQ ID NO: 791052 - RNA, 20 nt, Artificial Sequence
  Synthetic
caaaccacaaauggguuaua

SEQ ID NO: 791053 - RNA, 20 nt, Artificial Sequence
  Synthetic
uuugccuuguccauguuaua

SEQ ID NO: 791054 - RNA, 20 nt, Artificial Sequence
  Synthetic
ugacacuuccucuuguuaua

SEQ ID NO: 791055 - RNA, 20 nt, Artificial Sequence
  Synthetic
ucaaaagaaggaaauuuaua

SEQ ID NO: 791056 - RNA, 20 nt, Artificial Sequence
  Synthetic
caagugcauucucauuuaua

SEQ ID NO: 791057 - RNA, 20 nt, Artificial Sequence
  Synthetic
ccacauauuuaauauuuaua

SEQ ID NO: 791058 - RNA, 20 nt, Artificial Sequence
  Synthetic
cugcuuuguugauauuuaua

SEQ ID NO: 791059 - RNA, 20 nt, Artificial Sequence
  Synthetic
aaguauuguugcuauuuaua

SEQ ID NO: 791060 - RNA, 20 nt, Artificial Sequence
  Synthetic
cauaauuugcauuauuuaua

SEQ ID NO: 791061 - RNA, 20 nt, Artificial Sequence
  Synthetic
aacacaauucauuauuuaua

SEQ ID NO: 791062 - RNA, 20 nt, Artificial Sequence
  Synthetic
uuucuuacgauaacuuuaua

SEQ ID NO: 791063 - RNA, 20 nt, Artificial Sequence
  Synthetic
aacacauuuugagcuuuaua

SEQ ID NO: 791064 - RNA, 20 nt, Artificial Sequence
  Synthetic
auaggcaagaaugcuuuaua

SEQ ID NO: 791065 - RNA, 20 nt, Artificial Sequence
  Synthetic
uguucaagaguugcuuuaua

SEQ ID NO: 791066 - RNA, 20 nt, Artificial Sequence
  Synthetic
uguaccugguuugcuuuaua

SEQ ID NO: 791067 - RNA, 20 nt, Artificial Sequence
  Synthetic
aauauuuuuacaucuuuaua

SEQ ID NO: 791068 - RNA, 20 nt, Artificial Sequence
  Synthetic
uuuccuuaaauuucuuuaua

SEQ ID NO: 791069 - RNA, 20 nt, Artificial Sequence
  Synthetic
aguucgaggagacguuuaua

SEQ ID NO: 791070 - RNA, 20 nt, Artificial Sequence
  Synthetic
ccuuuguugcauuguuuaua

SEQ ID NO: 791071 - RNA, 20 nt, Artificial Sequence
  Synthetic
ugcgugaagccuuguuuaua

SEQ ID NO: 791072 - RNA, 20 nt, Artificial Sequence
  Synthetic
auaaaggucuguuguuuaua

SEQ ID NO: 791073 - RNA, 20 nt, Artificial Sequence
  Synthetic
aggacaugcauaauuuuaua

SEQ ID NO: 791074 - RNA, 20 nt, Artificial Sequence
  Synthetic
acaguaugacuaauuuuaua

SEQ ID NO: 791075 - RNA, 20 nt, Artificial Sequence
  Synthetic
aaauaaauuugcauuuuaua

SEQ ID NO: 791076 - RNA, 20 nt, Artificial Sequence
  Synthetic
ccaauuaucuucauuuuaua

SEQ ID NO: 791077 - RNA, 20 nt, Artificial Sequence
  Synthetic
cugagagaugggauuuuaua

SEQ ID NO: 791078 - RNA, 20 nt, Artificial Sequence
  Synthetic
auguuccaugugauuuuaua

SEQ ID NO: 791079 - RNA, 20 nt, Artificial Sequence
  Synthetic
acuaaacgagauauuuuaua

SEQ ID NO: 791080 - RNA, 20 nt, Artificial Sequence
  Synthetic
augguauccuguauuuuaua

SEQ ID NO: 791081 - RNA, 20 nt, Artificial Sequence
  Synthetic
cccugcuucauuauuuuaua

SEQ ID NO: 791082 - RNA, 20 nt, Artificial Sequence
  Synthetic
ccuugauugaaccuuuuaua

SEQ ID NO: 791083 - RNA, 20 nt, Artificial Sequence
  Synthetic
uguacacuuuuccuuuuaua

SEQ ID NO: 791084 - RNA, 20 nt, Artificial Sequence
  Synthetic
cggaaagagcagcuuuuaua

SEQ ID NO: 791085 - RNA, 20 nt, Artificial Sequence
  Synthetic
uuucuggagccgcuuuuaua

SEQ ID NO: 791086 - RNA, 20 nt, Artificial Sequence
  Synthetic
ucucugaggucucuuuuaua

SEQ ID NO: 791087 - RNA, 20 nt, Artificial Sequence
  Synthetic
uuuugaauggaaguuuuaua

SEQ ID NO: 791088 - RNA, 20 nt, Artificial Sequence
  Synthetic
auugcuuuguaaguuuuaua

SEQ ID NO: 791089 - RNA, 20 nt, Artificial Sequence
  Synthetic
ugagauccaaugguuuuaua

SEQ ID NO: 791090 - RNA, 20 nt, Artificial Sequence
  Synthetic
caaaaucugaugguuuuaua

SEQ ID NO: 791091 - RNA, 20 nt, Artificial Sequence
  Synthetic
cgggaucugaugguuuuaua

SEQ ID NO: 791092 - RNA, 20 nt, Artificial Sequence
  Synthetic
cgaggucugaugguuuuaua

SEQ ID NO: 791093 - RNA, 20 nt, Artificial Sequence
  Synthetic
ugagauuugaugguuuuaua

SEQ ID NO: 791094 - RNA, 20 nt, Artificial Sequence
  Synthetic
aagcaaauaaauguuuuaua

SEQ ID NO: 791095 - RNA, 20 nt, Artificial Sequence
  Synthetic
caagaucugauuguuuuaua

SEQ ID NO: 791096 - RNA, 20 nt, Artificial Sequence
  Synthetic
ugcuguguacuggaaaacua

SEQ ID NO: 791097 - RNA, 20 nt, Artificial Sequence
  Synthetic
uagcaaaaagaugaaaacua

SEQ ID NO: 791098 - RNA, 20 nt, Artificial Sequence
  Synthetic
uugugaagacuugaaaacua

SEQ ID NO: 791099 - RNA, 20 nt, Artificial Sequence
  Synthetic
caauggaacuuauaaaacua

SEQ ID NO: 791100 - RNA, 20 nt, Artificial Sequence
  Synthetic
acugguuuagacuaaaacua

SEQ ID NO: 791101 - RNA, 20 nt, Artificial Sequence
  Synthetic
auugacuaaaauuaaaacua

SEQ ID NO: 791102 - RNA, 20 nt, Artificial Sequence
  Synthetic
uucacauuuuauuaaaacua

SEQ ID NO: 791103 - RNA, 20 nt, Artificial Sequence
  Synthetic
uuucucuuuuaaacaaacua

SEQ ID NO: 791104 - RNA, 20 nt, Artificial Sequence
  Synthetic
uggcaaaaaaucacaaacua

SEQ ID NO: 791105 - RNA, 20 nt, Artificial Sequence
  Synthetic
uuucucagcaagacaaacua

SEQ ID NO: 791106 - RNA, 20 nt, Artificial Sequence
  Synthetic
augaaugguuguacaaacua

SEQ ID NO: 791107 - RNA, 20 nt, Artificial Sequence
  Synthetic
cacaccaccuucccaaacua

SEQ ID NO: 791108 - RNA, 20 nt, Artificial Sequence
  Synthetic
uaaaauccaccuccaaacua

SEQ ID NO: 791109 - RNA, 20 nt, Artificial Sequence
  Synthetic
ccaucauucucagcaaacua

SEQ ID NO: 791110 - RNA, 20 nt, Artificial Sequence
  Synthetic
aagcaagagucagcaaacua

SEQ ID NO: 791111 - RNA, 20 nt, Artificial Sequence
  Synthetic
aauuucuugaacagaaacua

SEQ ID NO: 791112 - RNA, 20 nt, Artificial Sequence
  Synthetic
caacaaaccaucagaaacua

SEQ ID NO: 791113 - RNA, 20 nt, Artificial Sequence
  Synthetic
cuuuugguacagagaaacua

SEQ ID NO: 791114 - RNA, 20 nt, Artificial Sequence
  Synthetic
aaagagcgagagagaaacua

SEQ ID NO: 791115 - RNA, 20 nt, Artificial Sequence
  Synthetic
aaagaagauguaggaaacua

SEQ ID NO: 791116 - RNA, 20 nt, Artificial Sequence
  Synthetic
caaaucuaggcuugaaacua

SEQ ID NO: 791117 - RNA, 20 nt, Artificial Sequence
  Synthetic
aguuuagguaauauaaacua

SEQ ID NO: 791118 - RNA, 20 nt, Artificial Sequence
  Synthetic
aguugagauucuauaaacua

SEQ ID NO: 791119 - RNA, 20 nt, Artificial Sequence
  Synthetic
cagcaaguguuuguaaacua

SEQ ID NO: 791120 - RNA, 20 nt, Artificial Sequence
  Synthetic
aaugggaucuaauuaaacua

SEQ ID NO: 791121 - RNA, 20 nt, Artificial Sequence
  Synthetic
ucaucucugacuuuaaacua

SEQ ID NO: 791122 - RNA, 20 nt, Artificial Sequence
  Synthetic
cuggggagaccucacaacua

SEQ ID NO: 791123 - RNA, 20 nt, Artificial Sequence
  Synthetic
ugucgcucauucuacaacua

SEQ ID NO: 791124 - RNA, 20 nt, Artificial Sequence
  Synthetic
ccuucaauacccaccaacua

SEQ ID NO: 791125 - RNA, 20 nt, Artificial Sequence
  Synthetic
auaaacaagcaugccaacua

SEQ ID NO: 791126 - RNA, 20 nt, Artificial Sequence
  Synthetic
ugcaauuauggaggcaacua

SEQ ID NO: 791127 - RNA, 20 nt, Artificial Sequence
  Synthetic
aaaugugguaagugcaacua

SEQ ID NO: 791128 - RNA, 20 nt, Artificial Sequence
  Synthetic
uaaaaucucauaaucaacua

SEQ ID NO: 791129 - RNA, 20 nt, Artificial Sequence
  Synthetic
agaccagugauuuucaacua

SEQ ID NO: 791130 - RNA, 20 nt, Artificial Sequence
  Synthetic
aaauuauguuuuaagaacua

SEQ ID NO: 791131 - RNA, 20 nt, Artificial Sequence
  Synthetic
ucaaaagguuuacagaacua

SEQ ID NO: 791132 - RNA, 20 nt, Artificial Sequence
  Synthetic
aucuggauucaagagaacua

SEQ ID NO: 791133 - RNA, 20 nt, Artificial Sequence
  Synthetic
aaacaccacugugagaacua

SEQ ID NO: 791134 - RNA, 20 nt, Artificial Sequence
  Synthetic
ugauguggacagacgaacua

SEQ ID NO: 791135 - RNA, 20 nt, Artificial Sequence
  Synthetic
uaggcagaaauccugaacua

SEQ ID NO: 791136 - RNA, 20 nt, Artificial Sequence
  Synthetic
aaacaggggucagugaacua

SEQ ID NO: 791137 - RNA, 20 nt, Artificial Sequence
  Synthetic
augucucuugguaauaacua

SEQ ID NO: 791138 - RNA, 20 nt, Artificial Sequence
  Synthetic
aaucauacauauuauaacua

SEQ ID NO: 791139 - RNA, 20 nt, Artificial Sequence
  Synthetic
uagaaaaacuaaacuaacua

SEQ ID NO: 791140 - RNA, 20 nt, Artificial Sequence
  Synthetic
cuuauuguauguaguaacua

SEQ ID NO: 791141 - RNA, 20 nt, Artificial Sequence
  Synthetic
auaguguuugcauguaacua

SEQ ID NO: 791142 - RNA, 20 nt, Artificial Sequence
  Synthetic
caauauaauauuauuaacua

SEQ ID NO: 791143 - RNA, 20 nt, Artificial Sequence
  Synthetic
auuuucugucugcuuaacua

SEQ ID NO: 791144 - RNA, 20 nt, Artificial Sequence
  Synthetic
auacauacaguucuuaacua

SEQ ID NO: 791145 - RNA, 20 nt, Artificial Sequence
  Synthetic
uguauguagaagguuaacua

SEQ ID NO: 791146 - RNA, 20 nt, Artificial Sequence
  Synthetic
caguaauuauauuuuaacua

SEQ ID NO: 791147 - RNA, 20 nt, Artificial Sequence
  Synthetic
acagauucaacuuuuaacua

SEQ ID NO: 791148 - RNA, 20 nt, Artificial Sequence
  Synthetic
ucacuauaagauaaacacua

SEQ ID NO: 791149 - RNA, 20 nt, Artificial Sequence
  Synthetic
aauuuucauuacuaacacua

SEQ ID NO: 791150 - RNA, 20 nt, Artificial Sequence
  Synthetic
auccuucuuuuaauacacua

SEQ ID NO: 791151 - RNA, 20 nt, Artificial Sequence
  Synthetic
acauuugguuaaaaccacua

SEQ ID NO: 791152 - RNA, 20 nt, Artificial Sequence
  Synthetic
auaggugcagcaaaccacua

SEQ ID NO: 791153 - RNA, 20 nt, Artificial Sequence
  Synthetic
acaccacauguaagccacua

SEQ ID NO: 791154 - RNA, 20 nt, Artificial Sequence
  Synthetic
aaaaccuagucuuuccacua

SEQ ID NO: 791155 - RNA, 20 nt, Artificial Sequence
  Synthetic
aaaaaguacauuuuccacua

SEQ ID NO: 791156 - RNA, 20 nt, Artificial Sequence
  Synthetic
uuguccaugguaaagcacua

SEQ ID NO: 791157 - RNA, 20 nt, Artificial Sequence
  Synthetic
uucuaugguuugaagcacua

SEQ ID NO: 791158 - RNA, 20 nt, Artificial Sequence
  Synthetic
cgccuguaaucccagcacua

SEQ ID NO: 791159 - RNA, 20 nt, Artificial Sequence
  Synthetic
auuauaguagaugggcacua

SEQ ID NO: 791160 - RNA, 20 nt, Artificial Sequence
  Synthetic
aaacacuaguuugugcacua

SEQ ID NO: 791161 - RNA, 20 nt, Artificial Sequence
  Synthetic
ccucuauuuagaaaucacua

SEQ ID NO: 791162 - RNA, 20 nt, Artificial Sequence
  Synthetic
cugauaauagagaaucacua

SEQ ID NO: 791163 - RNA, 20 nt, Artificial Sequence
  Synthetic
acucacacaugagaucacua

SEQ ID NO: 791164 - RNA, 20 nt, Artificial Sequence
  Synthetic
uguggucacuaugaucacua

SEQ ID NO: 791165 - RNA, 20 nt, Artificial Sequence
  Synthetic
cuucuguguugaucucacua

SEQ ID NO: 791166 - RNA, 20 nt, Artificial Sequence
  Synthetic
uauucugacagaagucacua

SEQ ID NO: 791167 - RNA, 20 nt, Artificial Sequence
  Synthetic
uauaaauuugagagucacua

SEQ ID NO: 791168 - RNA, 20 nt, Artificial Sequence
  Synthetic
caugggucccacugucacua

SEQ ID NO: 791169 - RNA, 20 nt, Artificial Sequence
  Synthetic
uuaaaaaauaauugucacua

SEQ ID NO: 791170 - RNA, 20 nt, Artificial Sequence
  Synthetic
uuaauucuuucaguucacua

SEQ ID NO: 791171 - RNA, 20 nt, Artificial Sequence
  Synthetic
aacaucacagguuuucacua

SEQ ID NO: 791172 - RNA, 20 nt, Artificial Sequence
  Synthetic
uuucaacuuaaaaaagacua

SEQ ID NO: 791173 - RNA, 20 nt, Artificial Sequence
  Synthetic
cacggcauuccucaagacua

SEQ ID NO: 791174 - RNA, 20 nt, Artificial Sequence
  Synthetic
ugugauguugaauaagacua

SEQ ID NO: 791175 - RNA, 20 nt, Artificial Sequence
  Synthetic
aggaguggagaaacagacua

SEQ ID NO: 791176 - RNA, 20 nt, Artificial Sequence
  Synthetic
aucagaggugguucagacua

SEQ ID NO: 791177 - RNA, 20 nt, Artificial Sequence
  Synthetic
ucuaaccaccucagagacua

SEQ ID NO: 791178 - RNA, 20 nt, Artificial Sequence
  Synthetic
ugcuuugaggagugagacua

SEQ ID NO: 791179 - RNA, 20 nt, Artificial Sequence
  Synthetic
aaaaguaaucucauagacua

SEQ ID NO: 791180 - RNA, 20 nt, Artificial Sequence
  Synthetic
uuuauguuuauuuuagacua

SEQ ID NO: 791181 - RNA, 20 nt, Artificial Sequence
  Synthetic
uuguuuaaauagaaggacua

SEQ ID NO: 791182 - RNA, 20 nt, Artificial Sequence
  Synthetic
uaccuacauucuaaggacua

SEQ ID NO: 791183 - RNA, 20 nt, Artificial Sequence
  Synthetic
auagcaacuacaagggacua

SEQ ID NO: 791184 - RNA, 20 nt, Artificial Sequence
  Synthetic
ugcagcagggugcuggacua

SEQ ID NO: 791185 - RNA, 20 nt, Artificial Sequence
  Synthetic
uaagccaugauguuggacua

SEQ ID NO: 791186 - RNA, 20 nt, Artificial Sequence
  Synthetic
ucaacuuuaauuuuggacua

SEQ ID NO: 791187 - RNA, 20 nt, Artificial Sequence
  Synthetic
uagcccagccaaaaugacua

SEQ ID NO: 791188 - RNA, 20 nt, Artificial Sequence
  Synthetic
cuccaccucuaaaaugacua

SEQ ID NO: 791189 - RNA, 20 nt, Artificial Sequence
  Synthetic
aaccuuccuuucaaugacua

SEQ ID NO: 791190 - RNA, 20 nt, Artificial Sequence
  Synthetic
cucacagucucacaugacua

SEQ ID NO: 791191 - RNA, 20 nt, Artificial Sequence
  Synthetic
agaaagagaucuuaugacua

SEQ ID NO: 791192 - RNA, 20 nt, Artificial Sequence
  Synthetic
uagaaaugacaacgugacua

SEQ ID NO: 791193 - RNA, 20 nt, Artificial Sequence
  Synthetic
uuggugauucuguuugacua

SEQ ID NO: 791194 - RNA, 20 nt, Artificial Sequence
  Synthetic
accauucuuuaaaaauacua

SEQ ID NO: 791195 - RNA, 20 nt, Artificial Sequence
  Synthetic
uugugaugcucaaaauacua

SEQ ID NO: 791196 - RNA, 20 nt, Artificial Sequence
  Synthetic
uuauuaacuuagaaauacua

SEQ ID NO: 791197 - RNA, 20 nt, Artificial Sequence
  Synthetic
uacuaggauguagaauacua

SEQ ID NO: 791198 - RNA, 20 nt, Artificial Sequence
  Synthetic
uggguguggugggaauacua

SEQ ID NO: 791199 - RNA, 20 nt, Artificial Sequence
  Synthetic
ugcauuacuauuuaauacua

SEQ ID NO: 791200 - RNA, 20 nt, Artificial Sequence
  Synthetic
uucuagaaguaggcauacua

SEQ ID NO: 791201 - RNA, 20 nt, Artificial Sequence
  Synthetic
uuaauugaucucucauacua

SEQ ID NO: 791202 - RNA, 20 nt, Artificial Sequence
  Synthetic
uaagacauuuguggauacua

SEQ ID NO: 791203 - RNA, 20 nt, Artificial Sequence
  Synthetic
cuugcaggucugugauacua

SEQ ID NO: 791204 - RNA, 20 nt, Artificial Sequence
  Synthetic
uaaucaccaauuugauacua

SEQ ID NO: 791205 - RNA, 20 nt, Artificial Sequence
  Synthetic
aguagucaguaucacuacua

SEQ ID NO: 791206 - RNA, 20 nt, Artificial Sequence
  Synthetic
ccgagaaauauuuacuacua

SEQ ID NO: 791207 - RNA, 20 nt, Artificial Sequence
  Synthetic
uuucuaaauaaagccuacua

SEQ ID NO: 791208 - RNA, 20 nt, Artificial Sequence
  Synthetic
caucuuuuuucauccuacua

SEQ ID NO: 791209 - RNA, 20 nt, Artificial Sequence
  Synthetic
uuuugacuucaaagcuacua

SEQ ID NO: 791210 - RNA, 20 nt, Artificial Sequence
  Synthetic
aucuguaaucccagcuacua

SEQ ID NO: 791211 - RNA, 20 nt, Artificial Sequence
  Synthetic
uauauauauauuagcuacua

SEQ ID NO: 791212 - RNA, 20 nt, Artificial Sequence
  Synthetic
acauccaucuucugcuacua

SEQ ID NO: 791213 - RNA, 20 nt, Artificial Sequence
  Synthetic
cuuacauccaggugcuacua

SEQ ID NO: 791214 - RNA, 20 nt, Artificial Sequence
  Synthetic
uccuucuuagacaucuacua

SEQ ID NO: 791215 - RNA, 20 nt, Artificial Sequence
  Synthetic
uuaucauacuuuaucuacua

SEQ ID NO: 791216 - RNA, 20 nt, Artificial Sequence
  Synthetic
aaauauuguuuguucuacua

SEQ ID NO: 791217 - RNA, 20 nt, Artificial Sequence
  Synthetic
aaaugaaaaauaauguacua

SEQ ID NO: 791218 - RNA, 20 nt, Artificial Sequence
  Synthetic
ugagggauuaucauguacua

SEQ ID NO: 791219 - RNA, 20 nt, Artificial Sequence
  Synthetic
uuuggagauacuauguacua

SEQ ID NO: 791220 - RNA, 20 nt, Artificial Sequence
  Synthetic
agaaugggggcccuguacua

SEQ ID NO: 791221 - RNA, 20 nt, Artificial Sequence
  Synthetic
ugcuuucuuuguuauuacua

SEQ ID NO: 791222 - RNA, 20 nt, Artificial Sequence
  Synthetic
uuaugaauaguuuauuacua

SEQ ID NO: 791223 - RNA, 20 nt, Artificial Sequence
  Synthetic
ccaccauugagcacuuacua

SEQ ID NO: 791224 - RNA, 20 nt, Artificial Sequence
  Synthetic
auccaacucugaucuuacua

SEQ ID NO: 791225 - RNA, 20 nt, Artificial Sequence
  Synthetic
uauuggucucuuucuuacua

SEQ ID NO: 791226 - RNA, 20 nt, Artificial Sequence
  Synthetic
aaucucauccuaauuuacua

SEQ ID NO: 791227 - RNA, 20 nt, Artificial Sequence
  Synthetic
uaacuacauaauauuuacua

SEQ ID NO: 791228 - RNA, 20 nt, Artificial Sequence
  Synthetic
auuaaagggcauauuuacua

SEQ ID NO: 791229 - RNA, 20 nt, Artificial Sequence
  Synthetic
uguccuaacuauauuuacua

SEQ ID NO: 791230 - RNA, 20 nt, Artificial Sequence
  Synthetic
caugauuucauucuuuacua

SEQ ID NO: 791231 - RNA, 20 nt, Artificial Sequence
  Synthetic
acaauggugcuucuuuacua

SEQ ID NO: 791232 - RNA, 20 nt, Artificial Sequence
  Synthetic
uuuacugggagaguuuacua

SEQ ID NO: 791233 - RNA, 20 nt, Artificial Sequence
  Synthetic
aauuuuuuuuccuuuuacua

SEQ ID NO: 791234 - RNA, 20 nt, Artificial Sequence
  Synthetic
cauucauucagcuuuuacua

SEQ ID NO: 791235 - RNA, 20 nt, Artificial Sequence
  Synthetic
aaaccacauaccaaaaccua

SEQ ID NO: 791236 - RNA, 20 nt, Artificial Sequence
  Synthetic
aaagcaaguauuaaaaccua

SEQ ID NO: 791237 - RNA, 20 nt, Artificial Sequence
  Synthetic
uugaacaguauagaaaccua

SEQ ID NO: 791238 - RNA, 20 nt, Artificial Sequence
  Synthetic
agaacaaggcucacaaccua

SEQ ID NO: 791239 - RNA, 20 nt, Artificial Sequence
  Synthetic
uaaacucugcuuacaaccua

SEQ ID NO: 791240 - RNA, 20 nt, Artificial Sequence
  Synthetic
cccauuaagaaggcaaccua

SEQ ID NO: 791241 - RNA, 20 nt, Artificial Sequence
  Synthetic
agguaugugagcugaaccua

SEQ ID NO: 791242 - RNA, 20 nt, Artificial Sequence
  Synthetic
cagaauggaaagauaaccua

SEQ ID NO: 791243 - RNA, 20 nt, Artificial Sequence
  Synthetic
aucacuauuaguauaaccua

SEQ ID NO: 791244 - RNA, 20 nt, Artificial Sequence
  Synthetic
caacccgugaacuuaaccua

SEQ ID NO: 791245 - RNA, 20 nt, Artificial Sequence
  Synthetic
aaacgaaaucaaaacaccua

SEQ ID NO: 791246 - RNA, 20 nt, Artificial Sequence
  Synthetic
acaaaugagggagacaccua

SEQ ID NO: 791247 - RNA, 20 nt, Artificial Sequence
  Synthetic
cauuuuuccauuaccaccua

SEQ ID NO: 791248 - RNA, 20 nt, Artificial Sequence
  Synthetic
cucaggacucucaucaccua

SEQ ID NO: 791249 - RNA, 20 nt, Artificial Sequence
  Synthetic
aagagaggagaagucaccua

SEQ ID NO: 791250 - RNA, 20 nt, Artificial Sequence
  Synthetic
agcuagaauuuugucaccua

SEQ ID NO: 791251 - RNA, 20 nt, Artificial Sequence
  Synthetic
ucuuucagcacauucaccua

SEQ ID NO: 791252 - RNA, 20 nt, Artificial Sequence
  Synthetic
agcaaaauaacugagaccua

SEQ ID NO: 791253 - RNA, 20 nt, Artificial Sequence
  Synthetic
cugauucugauaaugaccua

SEQ ID NO: 791254 - RNA, 20 nt, Artificial Sequence
  Synthetic
agggucucccacaugaccua

SEQ ID NO: 791255 - RNA, 20 nt, Artificial Sequence
  Synthetic
cuaggguggcaugugaccua

SEQ ID NO: 791256 - RNA, 20 nt, Artificial Sequence
  Synthetic
uguguguacaaaaauaccua

SEQ ID NO: 791257 - RNA, 20 nt, Artificial Sequence
  Synthetic
uguaacgucuugcauaccua

SEQ ID NO: 791258 - RNA, 20 nt, Artificial Sequence
  Synthetic
aguuaggacuguuauaccua

SEQ ID NO: 791259 - RNA, 20 nt, Artificial Sequence
  Synthetic
cuauuuuaugauccuaccua

SEQ ID NO: 791260 - RNA, 20 nt, Artificial Sequence
  Synthetic
aucagaggaaucgcuaccua

SEQ ID NO: 791261 - RNA, 20 nt, Artificial Sequence
  Synthetic
uaaauaaaggacucuaccua

SEQ ID NO: 791262 - RNA, 20 nt, Artificial Sequence
  Synthetic
auuugacuaauuucuaccua

SEQ ID NO: 791263 - RNA, 20 nt, Artificial Sequence
  Synthetic
aacagaagaguagguaccua

SEQ ID NO: 791264 - RNA, 20 nt, Artificial Sequence
  Synthetic
uguggcugagcugguaccua

SEQ ID NO: 791265 - RNA, 20 nt, Artificial Sequence
  Synthetic
cuucucauuacaauuaccua

SEQ ID NO: 791266 - RNA, 20 nt, Artificial Sequence
  Synthetic
cauuuggauuucauuaccua

SEQ ID NO: 791267 - RNA, 20 nt, Artificial Sequence
  Synthetic
aacauagauaagauuaccua

SEQ ID NO: 791268 - RNA, 20 nt, Artificial Sequence
  Synthetic
aaaaguauaugacuuaccua

SEQ ID NO: 791269 - RNA, 20 nt, Artificial Sequence
  Synthetic
aaagcuuuuuuacuuaccua

SEQ ID NO: 791270 - RNA, 20 nt, Artificial Sequence
  Synthetic
cagaaggauuuauuuaccua

SEQ ID NO: 791271 - RNA, 20 nt, Artificial Sequence
  Synthetic
uaggcaaaaaauaaacccua

SEQ ID NO: 791272 - RNA, 20 nt, Artificial Sequence
  Synthetic
uugcuuuagaguaaacccua

SEQ ID NO: 791273 - RNA, 20 nt, Artificial Sequence
  Synthetic
uuuuuauuuggggcacccua

SEQ ID NO: 791274 - RNA, 20 nt, Artificial Sequence
  Synthetic
ccuucuuuggcaucacccua

SEQ ID NO: 791275 - RNA, 20 nt, Artificial Sequence
  Synthetic
aacuuuuuccccucacccua

SEQ ID NO: 791276 - RNA, 20 nt, Artificial Sequence
  Synthetic
uaauuugaagcuggacccua

SEQ ID NO: 791277 - RNA, 20 nt, Artificial Sequence
  Synthetic
ccacuugcuaagugacccua

SEQ ID NO: 791278 - RNA, 20 nt, Artificial Sequence
  Synthetic
aaacuguuauauuuacccua

SEQ ID NO: 791279 - RNA, 20 nt, Artificial Sequence
  Synthetic
ugcccaaagacuuaccccua

SEQ ID NO: 791280 - RNA, 20 nt, Artificial Sequence
  Synthetic
aaaaugagucucugccccua

SEQ ID NO: 791281 - RNA, 20 nt, Artificial Sequence
  Synthetic
uugucugguaccaagcccua

SEQ ID NO: 791282 - RNA, 20 nt, Artificial Sequence
  Synthetic
acaugucaugagcagcccua

SEQ ID NO: 791283 - RNA, 20 nt, Artificial Sequence
  Synthetic
aauuaaguccuaacgcccua

SEQ ID NO: 791284 - RNA, 20 nt, Artificial Sequence
  Synthetic
accacacuaaaugcucccua

SEQ ID NO: 791285 - RNA, 20 nt, Artificial Sequence
  Synthetic
uauuuucacaacagucccua

SEQ ID NO: 791286 - RNA, 20 nt, Artificial Sequence
  Synthetic
uuaaauguugcuauucccua

SEQ ID NO: 791287 - RNA, 20 nt, Artificial Sequence
  Synthetic
agaguuacuguucuucccua

SEQ ID NO: 791288 - RNA, 20 nt, Artificial Sequence
  Synthetic
cauuggcuuugauuucccua

SEQ ID NO: 791289 - RNA, 20 nt, Artificial Sequence
  Synthetic
cauuuaggcuuuaaagccua

SEQ ID NO: 791290 - RNA, 20 nt, Artificial Sequence
  Synthetic
cauugccuucaugaagccua

SEQ ID NO: 791291 - RNA, 20 nt, Artificial Sequence
  Synthetic
agugaugcucuugaagccua

SEQ ID NO: 791292 - RNA, 20 nt, Artificial Sequence
  Synthetic
cuacaaaucuguacagccua

SEQ ID NO: 791293 - RNA, 20 nt, Artificial Sequence
  Synthetic
caccacuucacuccagccua

SEQ ID NO: 791294 - RNA, 20 nt, Artificial Sequence
  Synthetic
ugauuugccgcagcagccua

SEQ ID NO: 791295 - RNA, 20 nt, Artificial Sequence
  Synthetic
auuaaaagcagagcagccua

SEQ ID NO: 791296 - RNA, 20 nt, Artificial Sequence
  Synthetic
ccccugcuaugugcagccua

SEQ ID NO: 791297 - RNA, 20 nt, Artificial Sequence
  Synthetic
cuguagaguaagucagccua

SEQ ID NO: 791298 - RNA, 20 nt, Artificial Sequence
  Synthetic
uuuuuaagaacaagagccua

SEQ ID NO: 791299 - RNA, 20 nt, Artificial Sequence
  Synthetic
aacagugcugugggagccua

SEQ ID NO: 791300 - RNA, 20 nt, Artificial Sequence
  Synthetic
cuguugcaacuuugagccua

SEQ ID NO: 791301 - RNA, 20 nt, Artificial Sequence
  Synthetic
cauauuucauaaauagccua

SEQ ID NO: 791302 - RNA, 20 nt, Artificial Sequence
  Synthetic
cuuguuuaucaauuagccua

SEQ ID NO: 791303 - RNA, 20 nt, Artificial Sequence
  Synthetic
cuuuaaaaaugccuggccua

SEQ ID NO: 791304 - RNA, 20 nt, Artificial Sequence
  Synthetic
uuuuauguaacaaaugccua

SEQ ID NO: 791305 - RNA, 20 nt, Artificial Sequence
  Synthetic
aaaucagucccaaaugccua

SEQ ID NO: 791306 - RNA, 20 nt, Artificial Sequence
  Synthetic
uaccugcaaugaaaugccua

SEQ ID NO: 791307 - RNA, 20 nt, Artificial Sequence
  Synthetic
uaccuuucuagacaugccua

SEQ ID NO: 791308 - RNA, 20 nt, Artificial Sequence
  Synthetic
uucuccuauaaaacugccua

SEQ ID NO: 791309 - RNA, 20 nt, Artificial Sequence
  Synthetic
augcauuuacaaacugccua

SEQ ID NO: 791310 - RNA, 20 nt, Artificial Sequence
  Synthetic
ccaugccacugcacugccua

SEQ ID NO: 791311 - RNA, 20 nt, Artificial Sequence
  Synthetic
ucaauggaaaaggcugccua

SEQ ID NO: 791312 - RNA, 20 nt, Artificial Sequence
  Synthetic
aaaggucagaaacuugccua

SEQ ID NO: 791313 - RNA, 20 nt, Artificial Sequence
  Synthetic
aagguugagaaacuugccua

SEQ ID NO: 791314 - RNA, 20 nt, Artificial Sequence
  Synthetic
aauauuuuagagguugccua

SEQ ID NO: 791315 - RNA, 20 nt, Artificial Sequence
  Synthetic
uuuguuuuugauuuugccua

SEQ ID NO: 791316 - RNA, 20 nt, Artificial Sequence
  Synthetic
uuaccauuccaaaaauccua

SEQ ID NO: 791317 - RNA, 20 nt, Artificial Sequence
  Synthetic
uuacuauuccaaaaauccua

SEQ ID NO: 791318 - RNA, 20 nt, Artificial Sequence
  Synthetic
uaauuggccaccaaauccua

SEQ ID NO: 791319 - RNA, 20 nt, Artificial Sequence
  Synthetic
aucuuauacagcaaauccua

SEQ ID NO: 791320 - RNA, 20 nt, Artificial Sequence
  Synthetic
agacuauaccuucaauccua

SEQ ID NO: 791321 - RNA, 20 nt, Artificial Sequence
  Synthetic
aguuaacaaugggaauccua

SEQ ID NO: 791322 - RNA, 20 nt, Artificial Sequence
  Synthetic
aauuuuaugguguaauccua

SEQ ID NO: 791323 - RNA, 20 nt, Artificial Sequence
  Synthetic
caagggaacccuuaauccua

SEQ ID NO: 791324 - RNA, 20 nt, Artificial Sequence
  Synthetic
caggacacaaucccauccua

SEQ ID NO: 791325 - RNA, 20 nt, Artificial Sequence
  Synthetic
uuuacaaaauuaggauccua

SEQ ID NO: 791326 - RNA, 20 nt, Artificial Sequence
  Synthetic
cugggauuugauggauccua

SEQ ID NO: 791327 - RNA, 20 nt, Artificial Sequence
  Synthetic
agugggauugcuggauccua

SEQ ID NO: 791328 - RNA, 20 nt, Artificial Sequence
  Synthetic
ccuuuucuagaaauauccua

SEQ ID NO: 791329 - RNA, 20 nt, Artificial Sequence
  Synthetic
ucacaaccaagacuauccua

SEQ ID NO: 791330 - RNA, 20 nt, Artificial Sequence
  Synthetic
ucccaagagcaauuauccua

SEQ ID NO: 791331 - RNA, 20 nt, Artificial Sequence
  Synthetic
auagucauuguauuauccua

SEQ ID NO: 791332 - RNA, 20 nt, Artificial Sequence
  Synthetic
aagaucacuuucuuauccua

SEQ ID NO: 791333 - RNA, 20 nt, Artificial Sequence
  Synthetic
acuaaguuauaguuauccua

SEQ ID NO: 791334 - RNA, 20 nt, Artificial Sequence
  Synthetic
uaucuuguuuuuuuauccua

SEQ ID NO: 791335 - RNA, 20 nt, Artificial Sequence
  Synthetic
agauaaucagauaacuccua

SEQ ID NO: 791336 - RNA, 20 nt, Artificial Sequence
  Synthetic
ccauauuggucaaccuccua

SEQ ID NO: 791337 - RNA, 20 nt, Artificial Sequence
  Synthetic
caggaaauucugaccuccua

SEQ ID NO: 791338 - RNA, 20 nt, Artificial Sequence
  Synthetic
ccacccacaucuaccuccua

SEQ ID NO: 791339 - RNA, 20 nt, Artificial Sequence
  Synthetic
uuuuuuuccuuggccuccua

SEQ ID NO: 791340 - RNA, 20 nt, Artificial Sequence
  Synthetic
cacuauauaguuuccuccua

SEQ ID NO: 791341 - RNA, 20 nt, Artificial Sequence
  Synthetic
ugcuacucugggagcuccua

SEQ ID NO: 791342 - RNA, 20 nt, Artificial Sequence
  Synthetic
aauaauuguauaggcuccua

SEQ ID NO: 791343 - RNA, 20 nt, Artificial Sequence
  Synthetic
caaugauaagaaugcuccua

SEQ ID NO: 791344 - RNA, 20 nt, Artificial Sequence
  Synthetic
caauaggguuugugcuccua

SEQ ID NO: 791345 - RNA, 20 nt, Artificial Sequence
  Synthetic
uaucuucaagauugcuccua

SEQ ID NO: 791346 - RNA, 20 nt, Artificial Sequence
  Synthetic
cccuccaucagaaucuccua

SEQ ID NO: 791347 - RNA, 20 nt, Artificial Sequence
  Synthetic
uauuuauucuacuucuccua

SEQ ID NO: 791348 - RNA, 20 nt, Artificial Sequence
  Synthetic
aauguuuucccuuucuccua

SEQ ID NO: 791349 - RNA, 20 nt, Artificial Sequence
  Synthetic
uuuggccucccaaaguccua

SEQ ID NO: 791350 - RNA, 20 nt, Artificial Sequence
  Synthetic
aaaucuggggggaaguccua

SEQ ID NO: 791351 - RNA, 20 nt, Artificial Sequence
  Synthetic
uguucauuggagagguccua

SEQ ID NO: 791352 - RNA, 20 nt, Artificial Sequence
  Synthetic
cagaagacucuuagguccua

SEQ ID NO: 791353 - RNA, 20 nt, Artificial Sequence
  Synthetic
aaagagacucaaauguccua

SEQ ID NO: 791354 - RNA, 20 nt, Artificial Sequence
  Synthetic
uggaaaucuagaaauuccua

SEQ ID NO: 791355 - RNA, 20 nt, Artificial Sequence
  Synthetic
uugaugugagaagauuccua

SEQ ID NO: 791356 - RNA, 20 nt, Artificial Sequence
  Synthetic
aaaauguguuauuauuccua

SEQ ID NO: 791357 - RNA, 20 nt, Artificial Sequence
  Synthetic
ucaaauuacuuuuauuccua

SEQ ID NO: 791358 - RNA, 20 nt, Artificial Sequence
  Synthetic
accugucguaguacuuccua

SEQ ID NO: 791359 - RNA, 20 nt, Artificial Sequence
  Synthetic
uuuuucauucuugcuuccua

SEQ ID NO: 791360 - RNA, 20 nt, Artificial Sequence
  Synthetic
aaaaauuaauuaucuuccua

SEQ ID NO: 791361 - RNA, 20 nt, Artificial Sequence
  Synthetic
uuucgaauaaggucuuccua

SEQ ID NO: 791362 - RNA, 20 nt, Artificial Sequence
  Synthetic
ccaaggucccagaguuccua

SEQ ID NO: 791363 - RNA, 20 nt, Artificial Sequence
  Synthetic
agaugggaacacauuuccua

SEQ ID NO: 791364 - RNA, 20 nt, Artificial Sequence
  Synthetic
uuuugcauguggcuuuccua

SEQ ID NO: 791365 - RNA, 20 nt, Artificial Sequence
  Synthetic
uuugcuuaagugcuuuccua

SEQ ID NO: 791366 - RNA, 20 nt, Artificial Sequence
  Synthetic
caggauuucuuucuuuccua

SEQ ID NO: 791367 - RNA, 20 nt, Artificial Sequence
  Synthetic
uuuuuuaauuaaguuuccua

SEQ ID NO: 791368 - RNA, 20 nt, Artificial Sequence
  Synthetic
cauuuauauucaguuuccua

SEQ ID NO: 791369 - RNA, 20 nt, Artificial Sequence
  Synthetic
uacuucuaugaauuuuccua

SEQ ID NO: 791370 - RNA, 20 nt, Artificial Sequence
  Synthetic
caguaaauaauucaaagcua

SEQ ID NO: 791371 - RNA, 20 nt, Artificial Sequence
  Synthetic
augccauuguaaacaagcua

SEQ ID NO: 791372 - RNA, 20 nt, Artificial Sequence
  Synthetic
auuuacuauaugccaagcua

SEQ ID NO: 791373 - RNA, 20 nt, Artificial Sequence
  Synthetic
aauuucucagcagcaagcua

SEQ ID NO: 791374 - RNA, 20 nt, Artificial Sequence
  Synthetic
uauauucacaccucaagcua

SEQ ID NO: 791375 - RNA, 20 nt, Artificial Sequence
  Synthetic
aauguugucuuuggaagcua

SEQ ID NO: 791376 - RNA, 20 nt, Artificial Sequence
  Synthetic
uuacuuuuauuucuaagcua

SEQ ID NO: 791377 - RNA, 20 nt, Artificial Sequence
  Synthetic
uuuuaaguuaauuacagcua

SEQ ID NO: 791378 - RNA, 20 nt, Artificial Sequence
  Synthetic
uccuucuucucauccagcua

SEQ ID NO: 791379 - RNA, 20 nt, Artificial Sequence
  Synthetic
cuuuguuuccgaggcagcua

SEQ ID NO: 791380 - RNA, 20 nt, Artificial Sequence
  Synthetic
uacauuuuacccaucagcua

SEQ ID NO: 791381 - RNA, 20 nt, Artificial Sequence
  Synthetic
aaaaaacuguaucucagcua

SEQ ID NO: 791382 - RNA, 20 nt, Artificial Sequence
  Synthetic
aauaauuaguaguucagcua

SEQ ID NO: 791383 - RNA, 20 nt, Artificial Sequence
  Synthetic
uggaauuauuuuuucagcua

SEQ ID NO: 791384 - RNA, 20 nt, Artificial Sequence
  Synthetic
agcucugucuuacagagcua

SEQ ID NO: 791385 - RNA, 20 nt, Artificial Sequence
  Synthetic
ugaaagggcauauagagcua

SEQ ID NO: 791386 - RNA, 20 nt, Artificial Sequence
  Synthetic
aauguuaaguuugggagcua

SEQ ID NO: 791387 - RNA, 20 nt, Artificial Sequence
  Synthetic
acauuuaggauuuggagcua

SEQ ID NO: 791388 - RNA, 20 nt, Artificial Sequence
  Synthetic
ugcaugcaaacaaugagcua

SEQ ID NO: 791389 - RNA, 20 nt, Artificial Sequence
  Synthetic
cauuacaguauucugagcua

SEQ ID NO: 791390 - RNA, 20 nt, Artificial Sequence
  Synthetic
ucuuuuccaucuuugagcua

SEQ ID NO: 791391 - RNA, 20 nt, Artificial Sequence
  Synthetic
auggaaaauggaaauagcua

SEQ ID NO: 791392 - RNA, 20 nt, Artificial Sequence
  Synthetic
aaugauauuuacaauagcua

SEQ ID NO: 791393 - RNA, 20 nt, Artificial Sequence
  Synthetic
aauagcaaaaacacuagcua

SEQ ID NO: 791394 - RNA, 20 nt, Artificial Sequence
  Synthetic
uccagagacaaagcuagcua

SEQ ID NO: 791395 - RNA, 20 nt, Artificial Sequence
  Synthetic
agggaacugaaaucuagcua

SEQ ID NO: 791396 - RNA, 20 nt, Artificial Sequence
  Synthetic
cuucauucuuagucuagcua

SEQ ID NO: 791397 - RNA, 20 nt, Artificial Sequence
  Synthetic
cucagccuccugaguagcua

SEQ ID NO: 791398 - RNA, 20 nt, Artificial Sequence
  Synthetic
ugcuuaucuuuauguagcua

SEQ ID NO: 791399 - RNA, 20 nt, Artificial Sequence
  Synthetic
ucuggucuggacuuuagcua

SEQ ID NO: 791400 - RNA, 20 nt, Artificial Sequence
  Synthetic
auucuaauuaucuuuagcua

SEQ ID NO: 791401 - RNA, 20 nt, Artificial Sequence
  Synthetic
cauuuuggaaaauuacgcua

SEQ ID NO: 791402 - RNA, 20 nt, Artificial Sequence
  Synthetic
auuguucaaagauuacgcua

SEQ ID NO: 791403 - RNA, 20 nt, Artificial Sequence
  Synthetic
ccuagcauuugaaaccgcua

SEQ ID NO: 791404 - RNA, 20 nt, Artificial Sequence
  Synthetic
aaaagcugcucuuuccgcua

SEQ ID NO: 791405 - RNA, 20 nt, Artificial Sequence
  Synthetic
aucggccucccuaagcgcua

SEQ ID NO: 791406 - RNA, 20 nt, Artificial Sequence
  Synthetic
auaaauuacuuugggcgcua

SEQ ID NO: 791407 - RNA, 20 nt, Artificial Sequence
  Synthetic
agcacuuaagcaaaaggcua

SEQ ID NO: 791408 - RNA, 20 nt, Artificial Sequence
  Synthetic
ccucaaggccugaaaggcua

SEQ ID NO: 791409 - RNA, 20 nt, Artificial Sequence
  Synthetic
caaacuauacuacaaggcua

SEQ ID NO: 791410 - RNA, 20 nt, Artificial Sequence
  Synthetic
aagacuuuuucagaaggcua

SEQ ID NO: 791411 - RNA, 20 nt, Artificial Sequence
  Synthetic
ccuagcacuuuggaaggcua

SEQ ID NO: 791412 - RNA, 20 nt, Artificial Sequence
  Synthetic
auugagcuggagagaggcua

SEQ ID NO: 791413 - RNA, 20 nt, Artificial Sequence
  Synthetic
cccagcuacucaggaggcua

SEQ ID NO: 791414 - RNA, 20 nt, Artificial Sequence
  Synthetic
cccagcuacucgggaggcua

SEQ ID NO: 791415 - RNA, 20 nt, Artificial Sequence
  Synthetic
cccagcuacuugggaggcua

SEQ ID NO: 791416 - RNA, 20 nt, Artificial Sequence
  Synthetic
cccagcaauuugggaggcua

SEQ ID NO: 791417 - RNA, 20 nt, Artificial Sequence
  Synthetic
aaauaauaugcuggaggcua

SEQ ID NO: 791418 - RNA, 20 nt, Artificial Sequence
  Synthetic
auuauaaauguuugaggcua

SEQ ID NO: 791419 - RNA, 20 nt, Artificial Sequence
  Synthetic
aucaaaagagaauuaggcua

SEQ ID NO: 791420 - RNA, 20 nt, Artificial Sequence
  Synthetic
aaaaacuguaacaagggcua

SEQ ID NO: 791421 - RNA, 20 nt, Artificial Sequence
  Synthetic
cuagguguuggccagggcua

SEQ ID NO: 791422 - RNA, 20 nt, Artificial Sequence
  Synthetic
aggugagcagcagcgggcua

SEQ ID NO: 791423 - RNA, 20 nt, Artificial Sequence
  Synthetic
ugucaggggguggggggcua

SEQ ID NO: 791424 - RNA, 20 nt, Artificial Sequence
  Synthetic
cuguuggggguggggggcua

SEQ ID NO: 791425 - RNA, 20 nt, Artificial Sequence
  Synthetic
cucagccucuuggggggcua

SEQ ID NO: 791426 - RNA, 20 nt, Artificial Sequence
  Synthetic
auggguuacuuccugggcua

SEQ ID NO: 791427 - RNA, 20 nt, Artificial Sequence
  Synthetic
uuaaauacacagcugggcua

SEQ ID NO: 791428 - RNA, 20 nt, Artificial Sequence
  Synthetic
acccaucagaaagugggcua

SEQ ID NO: 791429 - RNA, 20 nt, Artificial Sequence
  Synthetic
ccugauuguuagcauggcua

SEQ ID NO: 791430 - RNA, 20 nt, Artificial Sequence
  Synthetic
ugcuucauggcugauggcua

SEQ ID NO: 791431 - RNA, 20 nt, Artificial Sequence
  Synthetic
uauaugccaagcuauggcua

SEQ ID NO: 791432 - RNA, 20 nt, Artificial Sequence
  Synthetic
aaucagaagcucuauggcua

SEQ ID NO: 791433 - RNA, 20 nt, Artificial Sequence
  Synthetic
ucaguuacuggguauggcua

SEQ ID NO: 791434 - RNA, 20 nt, Artificial Sequence
  Synthetic
cucaguaucuuauguggcua

SEQ ID NO: 791435 - RNA, 20 nt, Artificial Sequence
  Synthetic
aaagagaauuaacuuggcua

SEQ ID NO: 791436 - RNA, 20 nt, Artificial Sequence
  Synthetic
cucacggcuucuguuggcua

SEQ ID NO: 791437 - RNA, 20 nt, Artificial Sequence
  Synthetic
auuugaucucuuguuggcua

SEQ ID NO: 791438 - RNA, 20 nt, Artificial Sequence
  Synthetic
ugguauuuaauuuuuggcua

SEQ ID NO: 791439 - RNA, 20 nt, Artificial Sequence
  Synthetic
uuugucugggagcaaugcua

SEQ ID NO: 791440 - RNA, 20 nt, Artificial Sequence
  Synthetic
uaucagccaggcugaugcua

SEQ ID NO: 791441 - RNA, 20 nt, Artificial Sequence
  Synthetic
aguuauuuugucugaugcua

SEQ ID NO: 791442 - RNA, 20 nt, Artificial Sequence
  Synthetic
cacuagcucccuugaugcua

SEQ ID NO: 791443 - RNA, 20 nt, Artificial Sequence
  Synthetic
uugaauaaauuaauaugcua

SEQ ID NO: 791444 - RNA, 20 nt, Artificial Sequence
  Synthetic
ccuucuuucuuuauaugcua

SEQ ID NO: 791445 - RNA, 20 nt, Artificial Sequence
  Synthetic
agggucaugugaaacugcua

SEQ ID NO: 791446 - RNA, 20 nt, Artificial Sequence
  Synthetic
uuuuuaagagacuccugcua

SEQ ID NO: 791447 - RNA, 20 nt, Artificial Sequence
  Synthetic
aaucauuugugcuccugcua

SEQ ID NO: 791448 - RNA, 20 nt, Artificial Sequence
  Synthetic
ugcugcugcugcugcugcua

SEQ ID NO: 791449 - RNA, 20 nt, Artificial Sequence
  Synthetic
caaacauucacgaucugcua

SEQ ID NO: 791450 - RNA, 20 nt, Artificial Sequence
  Synthetic
acagcacucgagcucugcua

SEQ ID NO: 791451 - RNA, 20 nt, Artificial Sequence
  Synthetic
aaacucuuugcuuucugcua

SEQ ID NO: 791452 - RNA, 20 nt, Artificial Sequence
  Synthetic
auacaguaugauaagugcua

SEQ ID NO: 791453 - RNA, 20 nt, Artificial Sequence
  Synthetic
acaggaagagcccagugcua

SEQ ID NO: 791454 - RNA, 20 nt, Artificial Sequence
  Synthetic
uauaggaaggcugagugcua

SEQ ID NO: 791455 - RNA, 20 nt, Artificial Sequence
  Synthetic
ccaacagccugauagugcua

SEQ ID NO: 791456 - RNA, 20 nt, Artificial Sequence
  Synthetic
uugcugagauguuagugcua

SEQ ID NO: 791457 - RNA, 20 nt, Artificial Sequence
  Synthetic
acauagguauacacgugcua

SEQ ID NO: 791458 - RNA, 20 nt, Artificial Sequence
  Synthetic
aauauuagagcacggugcua

SEQ ID NO: 791459 - RNA, 20 nt, Artificial Sequence
  Synthetic
augaaauucagugugugcua

SEQ ID NO: 791460 - RNA, 20 nt, Artificial Sequence
  Synthetic
auguuucagaauuugugcua

SEQ ID NO: 791461 - RNA, 20 nt, Artificial Sequence
  Synthetic
aaugauaauguauauugcua

SEQ ID NO: 791462 - RNA, 20 nt, Artificial Sequence
  Synthetic
aaucuuaauuauuauugcua

SEQ ID NO: 791463 - RNA, 20 nt, Artificial Sequence
  Synthetic
aagugcaguggcccuugcua

SEQ ID NO: 791464 - RNA, 20 nt, Artificial Sequence
  Synthetic
aaguacaauggugguugcua

SEQ ID NO: 791465 - RNA, 20 nt, Artificial Sequence
  Synthetic
uaaggaagagucuguugcua

SEQ ID NO: 791466 - RNA, 20 nt, Artificial Sequence
  Synthetic
ugguguguaggaauuugcua

SEQ ID NO: 791467 - RNA, 20 nt, Artificial Sequence
  Synthetic
accuucgguucuguuugcua

SEQ ID NO: 791468 - RNA, 20 nt, Artificial Sequence
  Synthetic
accagaaagaacaaaaucua

SEQ ID NO: 791469 - RNA, 20 nt, Artificial Sequence
  Synthetic
uaacuuuuaaauaaaaucua

SEQ ID NO: 791470 - RNA, 20 nt, Artificial Sequence
  Synthetic
aaaaguuccauuaaaaucua

SEQ ID NO: 791471 - RNA, 20 nt, Artificial Sequence
  Synthetic
aaauuugugaggcaaaucua

SEQ ID NO: 791472 - RNA, 20 nt, Artificial Sequence
  Synthetic
ugcucucuagggcaaaucua

SEQ ID NO: 791473 - RNA, 20 nt, Artificial Sequence
  Synthetic
ugguuggcuucagaaaucua

SEQ ID NO: 791474 - RNA, 20 nt, Artificial Sequence
  Synthetic
ucaccagaggacuaaaucua

SEQ ID NO: 791475 - RNA, 20 nt, Artificial Sequence
  Synthetic
caguugugaauguaaaucua

SEQ ID NO: 791476 - RNA, 20 nt, Artificial Sequence
  Synthetic
ugacuuaaauguacaaucua

SEQ ID NO: 791477 - RNA, 20 nt, Artificial Sequence
  Synthetic
caucauuaaauuacaaucua

SEQ ID NO: 791478 - RNA, 20 nt, Artificial Sequence
  Synthetic
auaauugcuaugccaaucua

SEQ ID NO: 791479 - RNA, 20 nt, Artificial Sequence
  Synthetic
agaguucgagauccaaucua

SEQ ID NO: 791480 - RNA, 20 nt, Artificial Sequence
  Synthetic
cuuuuaacuaaagcaaucua

SEQ ID NO: 791481 - RNA, 20 nt, Artificial Sequence
  Synthetic
uaacagcagucaucaaucua

SEQ ID NO: 791482 - RNA, 20 nt, Artificial Sequence
  Synthetic
accaauugaaucagaaucua

SEQ ID NO: 791483 - RNA, 20 nt, Artificial Sequence
  Synthetic
uacugaaaugagggaaucua

SEQ ID NO: 791484 - RNA, 20 nt, Artificial Sequence
  Synthetic
aaaauguuccuuugaaucua

SEQ ID NO: 791485 - RNA, 20 nt, Artificial Sequence
  Synthetic
aaucgguauauaauaaucua

SEQ ID NO: 791486 - RNA, 20 nt, Artificial Sequence
  Synthetic
cuaaagaaguugauaaucua

SEQ ID NO: 791487 - RNA, 20 nt, Artificial Sequence
  Synthetic
aaaaagacaaaacuaaucua

SEQ ID NO: 791488 - RNA, 20 nt, Artificial Sequence
  Synthetic
acguugaaauuccuaaucua

SEQ ID NO: 791489 - RNA, 20 nt, Artificial Sequence
  Synthetic
aaaacauguaaucuaaucua

SEQ ID NO: 791490 - RNA, 20 nt, Artificial Sequence
  Synthetic
cuuuuucaaagucuaaucua

SEQ ID NO: 791491 - RNA, 20 nt, Artificial Sequence
  Synthetic
cacaacucauuuguaaucua

SEQ ID NO: 791492 - RNA, 20 nt, Artificial Sequence
  Synthetic
aaacuggcaaaauuaaucua

SEQ ID NO: 791493 - RNA, 20 nt, Artificial Sequence
  Synthetic
aaagaaaggcaauuaaucua

SEQ ID NO: 791494 - RNA, 20 nt, Artificial Sequence
  Synthetic
cacaugacuuuugacaucua

SEQ ID NO: 791495 - RNA, 20 nt, Artificial Sequence
  Synthetic
augucuuuaaaaaccaucua

SEQ ID NO: 791496 - RNA, 20 nt, Artificial Sequence
  Synthetic
auuaccagauguagcaucua

SEQ ID NO: 791497 - RNA, 20 nt, Artificial Sequence
  Synthetic
ugaagaacaagaaucaucua

SEQ ID NO: 791498 - RNA, 20 nt, Artificial Sequence
  Synthetic
uuauguguaaaccucaucua

SEQ ID NO: 791499 - RNA, 20 nt, Artificial Sequence
  Synthetic
uauauuugcuuucucaucua

SEQ ID NO: 791500 - RNA, 20 nt, Artificial Sequence
  Synthetic
auuaaagacuauuucaucua

SEQ ID NO: 791501 - RNA, 20 nt, Artificial Sequence
  Synthetic
caaguccaaaguuucaucua

SEQ ID NO: 791502 - RNA, 20 nt, Artificial Sequence
  Synthetic
ucuagguaaugaaagaucua

SEQ ID NO: 791503 - RNA, 20 nt, Artificial Sequence
  Synthetic
aaugccaacuuuaagaucua

SEQ ID NO: 791504 - RNA, 20 nt, Artificial Sequence
  Synthetic
uagggaauacaguagaucua

SEQ ID NO: 791505 - RNA, 20 nt, Artificial Sequence
  Synthetic
uugaguaaugauuagaucua

SEQ ID NO: 791506 - RNA, 20 nt, Artificial Sequence
  Synthetic
uuugggggcacaaggaucua

SEQ ID NO: 791507 - RNA, 20 nt, Artificial Sequence
  Synthetic
agagcauuuagauggaucua

SEQ ID NO: 791508 - RNA, 20 nt, Artificial Sequence
  Synthetic
uuccuucuuauaaugaucua

SEQ ID NO: 791509 - RNA, 20 nt, Artificial Sequence
  Synthetic
aauuucuaguuaaugaucua

SEQ ID NO: 791510 - RNA, 20 nt, Artificial Sequence
  Synthetic
aacucccuauaagugaucua

SEQ ID NO: 791511 - RNA, 20 nt, Artificial Sequence
  Synthetic
agaagaugacaauugaucua

SEQ ID NO: 791512 - RNA, 20 nt, Artificial Sequence
  Synthetic
acuauaaaauaaaauaucua

SEQ ID NO: 791513 - RNA, 20 nt, Artificial Sequence
  Synthetic
uagaauacuuaaaauaucua

SEQ ID NO: 791514 - RNA, 20 nt, Artificial Sequence
  Synthetic
acuauaaaaucaaauaucua

SEQ ID NO: 791515 - RNA, 20 nt, Artificial Sequence
  Synthetic
aucaauuagaauaauaucua

SEQ ID NO: 791516 - RNA, 20 nt, Artificial Sequence
  Synthetic
ucuacuacuaauaauaucua

SEQ ID NO: 791517 - RNA, 20 nt, Artificial Sequence
  Synthetic
cugacaauuaaucauaucua

SEQ ID NO: 791518 - RNA, 20 nt, Artificial Sequence
  Synthetic
aaggucguaacauauaucua

SEQ ID NO: 791519 - RNA, 20 nt, Artificial Sequence
  Synthetic
aacauugcuugcuauaucua

SEQ ID NO: 791520 - RNA, 20 nt, Artificial Sequence
  Synthetic
uugucagugauuuauaucua

SEQ ID NO: 791521 - RNA, 20 nt, Artificial Sequence
  Synthetic
ugucuaccaugaacuaucua

SEQ ID NO: 791522 - RNA, 20 nt, Artificial Sequence
  Synthetic
aagugaaauuuaacuaucua

SEQ ID NO: 791523 - RNA, 20 nt, Artificial Sequence
  Synthetic
aaaaggaacuaaucuaucua

SEQ ID NO: 791524 - RNA, 20 nt, Artificial Sequence
  Synthetic
auuuuucuacuuucuaucua

SEQ ID NO: 791525 - RNA, 20 nt, Artificial Sequence
  Synthetic
cuauauaaugaaaguaucua

SEQ ID NO: 791526 - RNA, 20 nt, Artificial Sequence
  Synthetic
uuauauuucacuauuaucua

SEQ ID NO: 791527 - RNA, 20 nt, Artificial Sequence
  Synthetic
ccauuuguuuguguuaucua

SEQ ID NO: 791528 - RNA, 20 nt, Artificial Sequence
  Synthetic
aucugauugauguuuaucua

SEQ ID NO: 791529 - RNA, 20 nt, Artificial Sequence
  Synthetic
cauuccaguacaaaacucua

SEQ ID NO: 791530 - RNA, 20 nt, Artificial Sequence
  Synthetic
auaacauguuaauaacucua

SEQ ID NO: 791531 - RNA, 20 nt, Artificial Sequence
  Synthetic
uugcuaguguucuaacucua

SEQ ID NO: 791532 - RNA, 20 nt, Artificial Sequence
  Synthetic
uuaauagaaaagacacucua

SEQ ID NO: 791533 - RNA, 20 nt, Artificial Sequence
  Synthetic
uagaugaaacggacacucua

SEQ ID NO: 791534 - RNA, 20 nt, Artificial Sequence
  Synthetic
caacuuuuuaucccacucua

SEQ ID NO: 791535 - RNA, 20 nt, Artificial Sequence
  Synthetic
ucuuuuuuuuucccacucua

SEQ ID NO: 791536 - RNA, 20 nt, Artificial Sequence
  Synthetic
auuuuguuuucuucacucua

SEQ ID NO: 791537 - RNA, 20 nt, Artificial Sequence
  Synthetic
caauugaucuacagacucua

SEQ ID NO: 791538 - RNA, 20 nt, Artificial Sequence
  Synthetic
uuaaauuguuccagacucua

SEQ ID NO: 791539 - RNA, 20 nt, Artificial Sequence
  Synthetic
agacacuuuacuagacucua

SEQ ID NO: 791540 - RNA, 20 nt, Artificial Sequence
  Synthetic
aguaaaagccauauacucua

SEQ ID NO: 791541 - RNA, 20 nt, Artificial Sequence
  Synthetic
auacagguuuuacuacucua

SEQ ID NO: 791542 - RNA, 20 nt, Artificial Sequence
  Synthetic
agaaaccaggaucuacucua

SEQ ID NO: 791543 - RNA, 20 nt, Artificial Sequence
  Synthetic
ccuccgccucuugaccucua

SEQ ID NO: 791544 - RNA, 20 nt, Artificial Sequence
  Synthetic
cuccucucaacaacccucua

SEQ ID NO: 791545 - RNA, 20 nt, Artificial Sequence
  Synthetic
cagagcuugcauucccucua

SEQ ID NO: 791546 - RNA, 20 nt, Artificial Sequence
  Synthetic
auuauugugagaagccucua

SEQ ID NO: 791547 - RNA, 20 nt, Artificial Sequence
  Synthetic
uccagucgcuguugccucua

SEQ ID NO: 791548 - RNA, 20 nt, Artificial Sequence
  Synthetic
aaaguuuguaagauccucua

SEQ ID NO: 791549 - RNA, 20 nt, Artificial Sequence
  Synthetic
uucauguugcuguuccucua

SEQ ID NO: 791550 - RNA, 20 nt, Artificial Sequence
  Synthetic
cuacugaaucagaagcucua

SEQ ID NO: 791551 - RNA, 20 nt, Artificial Sequence
  Synthetic
cacuuuuauuuuaagcucua

SEQ ID NO: 791552 - RNA, 20 nt, Artificial Sequence
  Synthetic
ucaauugggaaacagcucua

SEQ ID NO: 791553 - RNA, 20 nt, Artificial Sequence
  Synthetic
ucauucucuauggagcucua

SEQ ID NO: 791554 - RNA, 20 nt, Artificial Sequence
  Synthetic
agaugacaaggcaggcucua

SEQ ID NO: 791555 - RNA, 20 nt, Artificial Sequence
  Synthetic
ugagguuuucagaggcucua

SEQ ID NO: 791556 - RNA, 20 nt, Artificial Sequence
  Synthetic
augucaaauaacuggcucua

SEQ ID NO: 791557 - RNA, 20 nt, Artificial Sequence
  Synthetic
aguuauuuuugguggcucua

SEQ ID NO: 791558 - RNA, 20 nt, Artificial Sequence
  Synthetic
uuaguaggcguuuggcucua

SEQ ID NO: 791559 - RNA, 20 nt, Artificial Sequence
  Synthetic
ucggccacaggccugcucua

SEQ ID NO: 791560 - RNA, 20 nt, Artificial Sequence
  Synthetic
ucaugcagaguauugcucua

SEQ ID NO: 791561 - RNA, 20 nt, Artificial Sequence
  Synthetic
uauugacacugguugcucua

SEQ ID NO: 791562 - RNA, 20 nt, Artificial Sequence
  Synthetic
uuaugauuuauuuugcucua

SEQ ID NO: 791563 - RNA, 20 nt, Artificial Sequence
  Synthetic
cuauugugaucucaucucua

SEQ ID NO: 791564 - RNA, 20 nt, Artificial Sequence
  Synthetic
cuuggccuugaagaucucua

SEQ ID NO: 791565 - RNA, 20 nt, Artificial Sequence
  Synthetic
uccagucucucaacucucua

SEQ ID NO: 791566 - RNA, 20 nt, Artificial Sequence
  Synthetic
uaaauagucauugcucucua

SEQ ID NO: 791567 - RNA, 20 nt, Artificial Sequence
  Synthetic
acucuccuggagggucucua

SEQ ID NO: 791568 - RNA, 20 nt, Artificial Sequence
  Synthetic
ugacuuagauucugucucua

SEQ ID NO: 791569 - RNA, 20 nt, Artificial Sequence
  Synthetic
aaaugcuauuucauucucua

SEQ ID NO: 791570 - RNA, 20 nt, Artificial Sequence
  Synthetic
uuuuucucuaugauucucua

SEQ ID NO: 791571 - RNA, 20 nt, Artificial Sequence
  Synthetic
uguacacgaaauauucucua

SEQ ID NO: 791572 - RNA, 20 nt, Artificial Sequence
  Synthetic
ugucuuucguaacuucucua

SEQ ID NO: 791573 - RNA, 20 nt, Artificial Sequence
  Synthetic
uacuucguguuuguucucua

SEQ ID NO: 791574 - RNA, 20 nt, Artificial Sequence
  Synthetic
auuuauucuugcuuucucua

SEQ ID NO: 791575 - RNA, 20 nt, Artificial Sequence
  Synthetic
uuauuccuuuuguuucucua

SEQ ID NO: 791576 - RNA, 20 nt, Artificial Sequence
  Synthetic
aauagcauaaccaaagucua

SEQ ID NO: 791577 - RNA, 20 nt, Artificial Sequence
  Synthetic
agcccaugaggucaagucua

SEQ ID NO: 791578 - RNA, 20 nt, Artificial Sequence
  Synthetic
aagauuacaagugaagucua

SEQ ID NO: 791579 - RNA, 20 nt, Artificial Sequence
  Synthetic
aguguuucuguuuaagucua

SEQ ID NO: 791580 - RNA, 20 nt, Artificial Sequence
  Synthetic
uuucucauguaaacagucua

SEQ ID NO: 791581 - RNA, 20 nt, Artificial Sequence
  Synthetic
uguuuaagccacccagucua

SEQ ID NO: 791582 - RNA, 20 nt, Artificial Sequence
  Synthetic
uuuauaaauuacccagucua

SEQ ID NO: 791583 - RNA, 20 nt, Artificial Sequence
  Synthetic
uuuauaaggcauccagucua

SEQ ID NO: 791584 - RNA, 20 nt, Artificial Sequence
  Synthetic
uagcucaaaacaucagucua

SEQ ID NO: 791585 - RNA, 20 nt, Artificial Sequence
  Synthetic
uuuugcuauuaucuagucua

SEQ ID NO: 791586 - RNA, 20 nt, Artificial Sequence
  Synthetic
cugaugcaaugucuagucua

SEQ ID NO: 791587 - RNA, 20 nt, Artificial Sequence
  Synthetic
aaguuauaucuucuagucua

SEQ ID NO: 791588 - RNA, 20 nt, Artificial Sequence
  Synthetic
ugcuucagugagauggucua

SEQ ID NO: 791589 - RNA, 20 nt, Artificial Sequence
  Synthetic
agcguuaaauaacuggucua

SEQ ID NO: 791590 - RNA, 20 nt, Artificial Sequence
  Synthetic
aguugaaaaucacuggucua

SEQ ID NO: 791591 - RNA, 20 nt, Artificial Sequence
  Synthetic
aauuuauuuaugaaugucua

SEQ ID NO: 791592 - RNA, 20 nt, Artificial Sequence
  Synthetic
ugugcuuccucuuaugucua

SEQ ID NO: 791593 - RNA, 20 nt, Artificial Sequence
  Synthetic
aacuugggagaaacugucua

SEQ ID NO: 791594 - RNA, 20 nt, Artificial Sequence
  Synthetic
acacagccaaagauugucua

SEQ ID NO: 791595 - RNA, 20 nt, Artificial Sequence
  Synthetic
auugugucuucgauugucua

SEQ ID NO: 791596 - RNA, 20 nt, Artificial Sequence
  Synthetic
auucauuuacauauugucua

SEQ ID NO: 791597 - RNA, 20 nt, Artificial Sequence
  Synthetic
uuuaaggaucccuaauucua

SEQ ID NO: 791598 - RNA, 20 nt, Artificial Sequence
  Synthetic
uuacauuguuucuaauucua

SEQ ID NO: 791599 - RNA, 20 nt, Artificial Sequence
  Synthetic
cuguuugacucuuaauucua

SEQ ID NO: 791600 - RNA, 20 nt, Artificial Sequence
  Synthetic
cucugaguaccuacauucua

SEQ ID NO: 791601 - RNA, 20 nt, Artificial Sequence
  Synthetic
uuaaauggauuuacauucua

SEQ ID NO: 791602 - RNA, 20 nt, Artificial Sequence
  Synthetic
agguagaaacaagcauucua

SEQ ID NO: 791603 - RNA, 20 nt, Artificial Sequence
  Synthetic
uacuucaacugugcauucua

SEQ ID NO: 791604 - RNA, 20 nt, Artificial Sequence
  Synthetic
cagcuggcugcaugauucua

SEQ ID NO: 791605 - RNA, 20 nt, Artificial Sequence
  Synthetic
uauauucuauagugauucua

SEQ ID NO: 791606 - RNA, 20 nt, Artificial Sequence
  Synthetic
uuuucaacucugugauucua

SEQ ID NO: 791607 - RNA, 20 nt, Artificial Sequence
  Synthetic
uucuuccacaauugauucua

SEQ ID NO: 791608 - RNA, 20 nt, Artificial Sequence
  Synthetic
auuuuccauguuugauucua

SEQ ID NO: 791609 - RNA, 20 nt, Artificial Sequence
  Synthetic
aaaggaagggacauauucua

SEQ ID NO: 791610 - RNA, 20 nt, Artificial Sequence
  Synthetic
auauauaaucauauauucua

SEQ ID NO: 791611 - RNA, 20 nt, Artificial Sequence
  Synthetic
ccuggaccaauuauauucua

SEQ ID NO: 791612 - RNA, 20 nt, Artificial Sequence
  Synthetic
cagcacuaggcacuauucua

SEQ ID NO: 791613 - RNA, 20 nt, Artificial Sequence
  Synthetic
cuuaaaaagaaaguauucua

SEQ ID NO: 791614 - RNA, 20 nt, Artificial Sequence
  Synthetic
uauggcugcauaguauucua

SEQ ID NO: 791615 - RNA, 20 nt, Artificial Sequence
  Synthetic
ugcagaguuuuuguauucua

SEQ ID NO: 791616 - RNA, 20 nt, Artificial Sequence
  Synthetic
uuaaucucuuaauuauucua

SEQ ID NO: 791617 - RNA, 20 nt, Artificial Sequence
  Synthetic
aaauaaaauauauuauucua

SEQ ID NO: 791618 - RNA, 20 nt, Artificial Sequence
  Synthetic
auaaagaccccaaacuucua

SEQ ID NO: 791619 - RNA, 20 nt, Artificial Sequence
  Synthetic
aagaacauucuccccuucua

SEQ ID NO: 791620 - RNA, 20 nt, Artificial Sequence
  Synthetic
aaggcagagagcuccuucua

SEQ ID NO: 791621 - RNA, 20 nt, Artificial Sequence
  Synthetic
cugucuucaauuuccuucua

SEQ ID NO: 791622 - RNA, 20 nt, Artificial Sequence
  Synthetic
agggcugaagcaggcuucua

SEQ ID NO: 791623 - RNA, 20 nt, Artificial Sequence
  Synthetic
uugugauguuguaucuucua

SEQ ID NO: 791624 - RNA, 20 nt, Artificial Sequence
  Synthetic
aaugccuagguuaucuucua

SEQ ID NO: 791625 - RNA, 20 nt, Artificial Sequence
  Synthetic
aacuccuaacaauucuucua

SEQ ID NO: 791626 - RNA, 20 nt, Artificial Sequence
  Synthetic
ugagaaaauugcuucuucua

SEQ ID NO: 791627 - RNA, 20 nt, Artificial Sequence
  Synthetic
aaugccuagguuuucuucua

SEQ ID NO: 791628 - RNA, 20 nt, Artificial Sequence
  Synthetic
auugccuagguuuucuucua

SEQ ID NO: 791629 - RNA, 20 nt, Artificial Sequence
  Synthetic
agagcacuaacaaaguucua

SEQ ID NO: 791630 - RNA, 20 nt, Artificial Sequence
  Synthetic
uuuucagucagcaaguucua

SEQ ID NO: 791631 - RNA, 20 nt, Artificial Sequence
  Synthetic
uauauauacuugaaguucua

SEQ ID NO: 791632 - RNA, 20 nt, Artificial Sequence
  Synthetic
uaauuauacuuuaaguucua

SEQ ID NO: 791633 - RNA, 20 nt, Artificial Sequence
  Synthetic
uuauuauacuuuaaguucua

SEQ ID NO: 791634 - RNA, 20 nt, Artificial Sequence
  Synthetic
uaacucaagaaaggguucua

SEQ ID NO: 791635 - RNA, 20 nt, Artificial Sequence
  Synthetic
uuugguaugguaugguucua

SEQ ID NO: 791636 - RNA, 20 nt, Artificial Sequence
  Synthetic
augauucauauuugguucua

SEQ ID NO: 791637 - RNA, 20 nt, Artificial Sequence
  Synthetic
uuugguaaguuuugguucua

SEQ ID NO: 791638 - RNA, 20 nt, Artificial Sequence
  Synthetic
uuuauuuaguuuugguucua

SEQ ID NO: 791639 - RNA, 20 nt, Artificial Sequence
  Synthetic
uuugaggucacaauguucua

SEQ ID NO: 791640 - RNA, 20 nt, Artificial Sequence
  Synthetic
uugcauacuauucuguucua

SEQ ID NO: 791641 - RNA, 20 nt, Artificial Sequence
  Synthetic
uuaggaucuacuguguucua

SEQ ID NO: 791642 - RNA, 20 nt, Artificial Sequence
  Synthetic
agacugaguucauuguucua

SEQ ID NO: 791643 - RNA, 20 nt, Artificial Sequence
  Synthetic
uguuaaguccauuuguucua

SEQ ID NO: 791644 - RNA, 20 nt, Artificial Sequence
  Synthetic
ucccccuuuuaaaauuucua

SEQ ID NO: 791645 - RNA, 20 nt, Artificial Sequence
  Synthetic
aucauaguggggaauuucua

SEQ ID NO: 791646 - RNA, 20 nt, Artificial Sequence
  Synthetic
aaauaaauuguuaauuucua

SEQ ID NO: 791647 - RNA, 20 nt, Artificial Sequence
  Synthetic
uuauugaauaaacauuucua

SEQ ID NO: 791648 - RNA, 20 nt, Artificial Sequence
  Synthetic
aauauaaucaugcauuucua

SEQ ID NO: 791649 - RNA, 20 nt, Artificial Sequence
  Synthetic
auagguggcucucauuucua

SEQ ID NO: 791650 - RNA, 20 nt, Artificial Sequence
  Synthetic
uaaucuacaucagauuucua

SEQ ID NO: 791651 - RNA, 20 nt, Artificial Sequence
  Synthetic
aaaauaugaguagauuucua

SEQ ID NO: 791652 - RNA, 20 nt, Artificial Sequence
  Synthetic
auuccaaguuuggauuucua

SEQ ID NO: 791653 - RNA, 20 nt, Artificial Sequence
  Synthetic
aggaaucaaugcuauuucua

SEQ ID NO: 791654 - RNA, 20 nt, Artificial Sequence
  Synthetic
uguaauauaauuuauuucua

SEQ ID NO: 791655 - RNA, 20 nt, Artificial Sequence
  Synthetic
acuuauugcuauacuuucua

SEQ ID NO: 791656 - RNA, 20 nt, Artificial Sequence
  Synthetic
uuaagugucacuacuuucua

SEQ ID NO: 791657 - RNA, 20 nt, Artificial Sequence
  Synthetic
ucugcuuauuucucuuucua

SEQ ID NO: 791658 - RNA, 20 nt, Artificial Sequence
  Synthetic
caauugucuucaaguuucua

SEQ ID NO: 791659 - RNA, 20 nt, Artificial Sequence
  Synthetic
cuuuucauauaugguuucua

SEQ ID NO: 791660 - RNA, 20 nt, Artificial Sequence
  Synthetic
auucuguuccuauguuucua

SEQ ID NO: 791661 - RNA, 20 nt, Artificial Sequence
  Synthetic
acauuugcaguuuguuucua

SEQ ID NO: 791662 - RNA, 20 nt, Artificial Sequence
  Synthetic
uuguaacacagcauuuucua

SEQ ID NO: 791663 - RNA, 20 nt, Artificial Sequence
  Synthetic
agauauuauuucauuuucua

SEQ ID NO: 791664 - RNA, 20 nt, Artificial Sequence
  Synthetic
uugcagcacaguauuuucua

SEQ ID NO: 791665 - RNA, 20 nt, Artificial Sequence
  Synthetic
cauuauuucauuauuuucua

SEQ ID NO: 791666 - RNA, 20 nt, Artificial Sequence
  Synthetic
cauuugguaucccuuuucua

SEQ ID NO: 791667 - RNA, 20 nt, Artificial Sequence
  Synthetic
caggaucucaaucuuuucua

SEQ ID NO: 791668 - RNA, 20 nt, Artificial Sequence
  Synthetic
uugaauuuugaucuuuucua

SEQ ID NO: 791669 - RNA, 20 nt, Artificial Sequence
  Synthetic
ccaacuuuaucaguuuucua

SEQ ID NO: 791670 - RNA, 20 nt, Artificial Sequence
  Synthetic
uccauuucuuccaaaaagua

SEQ ID NO: 791671 - RNA, 20 nt, Artificial Sequence
  Synthetic
ugucuauuuaggaaaaagua

SEQ ID NO: 791672 - RNA, 20 nt, Artificial Sequence
  Synthetic
aaaauaccuaugaaaaagua

SEQ ID NO: 791673 - RNA, 20 nt, Artificial Sequence
  Synthetic
uauacaaaagguaaaaagua

SEQ ID NO: 791674 - RNA, 20 nt, Artificial Sequence
  Synthetic
ccucuccuuaagcaaaagua

SEQ ID NO: 791675 - RNA, 20 nt, Artificial Sequence
  Synthetic
uccugcaagagagaaaagua

SEQ ID NO: 791676 - RNA, 20 nt, Artificial Sequence
  Synthetic
uguccaaccacuacaaagua

SEQ ID NO: 791677 - RNA, 20 nt, Artificial Sequence
  Synthetic
aagaccaacuaaccaaagua

SEQ ID NO: 791678 - RNA, 20 nt, Artificial Sequence
  Synthetic
ugucuuugcuacccaaagua

SEQ ID NO: 791679 - RNA, 20 nt, Artificial Sequence
  Synthetic
caauuuccaaagagaaagua

SEQ ID NO: 791680 - RNA, 20 nt, Artificial Sequence
  Synthetic
ucagagaaaacaggaaagua

SEQ ID NO: 791681 - RNA, 20 nt, Artificial Sequence
  Synthetic
cagaagaagacaggaaagua

SEQ ID NO: 791682 - RNA, 20 nt, Artificial Sequence
  Synthetic
aagucuaauuggggaaagua

SEQ ID NO: 791683 - RNA, 20 nt, Artificial Sequence
  Synthetic
augauaugcccuggaaagua

SEQ ID NO: 791684 - RNA, 20 nt, Artificial Sequence
  Synthetic
auacuaauaaaaugaaagua

SEQ ID NO: 791685 - RNA, 20 nt, Artificial Sequence
  Synthetic
uaaauaauuaaaugaaagua

SEQ ID NO: 791686 - RNA, 20 nt, Artificial Sequence
  Synthetic
agugcaguuggaugaaagua

SEQ ID NO: 791687 - RNA, 20 nt, Artificial Sequence
  Synthetic
uauguguauuuaugaaagua

SEQ ID NO: 791688 - RNA, 20 nt, Artificial Sequence
  Synthetic
uuauuauguauaauaaagua

SEQ ID NO: 791689 - RNA, 20 nt, Artificial Sequence
  Synthetic
aaauccagauaccuaaagua

SEQ ID NO: 791690 - RNA, 20 nt, Artificial Sequence
  Synthetic
uaaauuacucugcuaaagua

SEQ ID NO: 791691 - RNA, 20 nt, Artificial Sequence
  Synthetic
uagaagaugagauuaaagua

SEQ ID NO: 791692 - RNA, 20 nt, Artificial Sequence
  Synthetic
caugucuaacauuuaaagua

SEQ ID NO: 791693 - RNA, 20 nt, Artificial Sequence
  Synthetic
uuuuuucuaauuuuaaagua

SEQ ID NO: 791694 - RNA, 20 nt, Artificial Sequence
  Synthetic
auccagcaaugaaacaagua

SEQ ID NO: 791695 - RNA, 20 nt, Artificial Sequence
  Synthetic
uucugaauguugaacaagua

SEQ ID NO: 791696 - RNA, 20 nt, Artificial Sequence
  Synthetic
aauuuagaccuuaacaagua

SEQ ID NO: 791697 - RNA, 20 nt, Artificial Sequence
  Synthetic
uaccauucaggacacaagua

SEQ ID NO: 791698 - RNA, 20 nt, Artificial Sequence
  Synthetic
cuucauuuuucccacaagua

SEQ ID NO: 791699 - RNA, 20 nt, Artificial Sequence
  Synthetic
uucucacccccucacaagua

SEQ ID NO: 791700 - RNA, 20 nt, Artificial Sequence
  Synthetic
cugggaaaugcugacaagua

SEQ ID NO: 791701 - RNA, 20 nt, Artificial Sequence
  Synthetic
auuuacacuaugcccaagua

SEQ ID NO: 791702 - RNA, 20 nt, Artificial Sequence
  Synthetic
auauaaauuauagccaagua

SEQ ID NO: 791703 - RNA, 20 nt, Artificial Sequence
  Synthetic
aaacaggugaaauccaagua

SEQ ID NO: 791704 - RNA, 20 nt, Artificial Sequence
  Synthetic
cacucuauuuccagcaagua

SEQ ID NO: 791705 - RNA, 20 nt, Artificial Sequence
  Synthetic
cauauauaagaaaucaagua

SEQ ID NO: 791706 - RNA, 20 nt, Artificial Sequence
  Synthetic
caaagacuucauaucaagua

SEQ ID NO: 791707 - RNA, 20 nt, Artificial Sequence
  Synthetic
aguuacuaaauucucaagua

SEQ ID NO: 791708 - RNA, 20 nt, Artificial Sequence
  Synthetic
aauuacacuccaaagaagua

SEQ ID NO: 791709 - RNA, 20 nt, Artificial Sequence
  Synthetic
agcauacauaacaagaagua

SEQ ID NO: 791710 - RNA, 20 nt, Artificial Sequence
  Synthetic
uaugaaagauucaagaagua

SEQ ID NO: 791711 - RNA, 20 nt, Artificial Sequence
  Synthetic
cuucuccuuaacgagaagua

SEQ ID NO: 791712 - RNA, 20 nt, Artificial Sequence
  Synthetic
uuuaauauagcugagaagua

SEQ ID NO: 791713 - RNA, 20 nt, Artificial Sequence
  Synthetic
ugguggugaguugagaagua

SEQ ID NO: 791714 - RNA, 20 nt, Artificial Sequence
  Synthetic
uauuuugucuaauagaagua

SEQ ID NO: 791715 - RNA, 20 nt, Artificial Sequence
  Synthetic
uagaaaccuucaccgaagua

SEQ ID NO: 791716 - RNA, 20 nt, Artificial Sequence
  Synthetic
auguuggggagaaggaagua

SEQ ID NO: 791717 - RNA, 20 nt, Artificial Sequence
  Synthetic
auaagugucaggaggaagua

SEQ ID NO: 791718 - RNA, 20 nt, Artificial Sequence
  Synthetic
aggaaggaagggaggaagua

SEQ ID NO: 791719 - RNA, 20 nt, Artificial Sequence
  Synthetic
cuugguagaauuaggaagua

SEQ ID NO: 791720 - RNA, 20 nt, Artificial Sequence
  Synthetic
auauuaugcugagggaagua

SEQ ID NO: 791721 - RNA, 20 nt, Artificial Sequence
  Synthetic
accaaagaaugggggaagua

SEQ ID NO: 791722 - RNA, 20 nt, Artificial Sequence
  Synthetic
aagagacaucacuggaagua

SEQ ID NO: 791723 - RNA, 20 nt, Artificial Sequence
  Synthetic
auggacaagggguggaagua

SEQ ID NO: 791724 - RNA, 20 nt, Artificial Sequence
  Synthetic
acuauaggaaaaaugaagua

SEQ ID NO: 791725 - RNA, 20 nt, Artificial Sequence
  Synthetic
uuucuucaaauucugaagua

SEQ ID NO: 791726 - RNA, 20 nt, Artificial Sequence
  Synthetic
aaaauucaaaauuugaagua

SEQ ID NO: 791727 - RNA, 20 nt, Artificial Sequence
  Synthetic
uuagcuguagauuugaagua

SEQ ID NO: 791728 - RNA, 20 nt, Artificial Sequence
  Synthetic
aauagaaaacuuuugaagua

SEQ ID NO: 791729 - RNA, 20 nt, Artificial Sequence
  Synthetic
aacacaagaaaaaauaagua

SEQ ID NO: 791730 - RNA, 20 nt, Artificial Sequence
  Synthetic
cauuacugcaaaaauaagua

SEQ ID NO: 791731 - RNA, 20 nt, Artificial Sequence
  Synthetic
aagagauaaaacaauaagua

SEQ ID NO: 791732 - RNA, 20 nt, Artificial Sequence
  Synthetic
uauuugauguagaauaagua

SEQ ID NO: 791733 - RNA, 20 nt, Artificial Sequence
  Synthetic
agccucuuccauaauaagua

SEQ ID NO: 791734 - RNA, 20 nt, Artificial Sequence
  Synthetic
aacuauugccuguauaagua

SEQ ID NO: 791735 - RNA, 20 nt, Artificial Sequence
  Synthetic
aaaauuuuagucacuaagua

SEQ ID NO: 791736 - RNA, 20 nt, Artificial Sequence
  Synthetic
auaagaaggauaaguaagua

SEQ ID NO: 791737 - RNA, 20 nt, Artificial Sequence
  Synthetic
cccuauaauuuuauuaagua

SEQ ID NO: 791738 - RNA, 20 nt, Artificial Sequence
  Synthetic
uuacaaauauuacuuaagua

SEQ ID NO: 791739 - RNA, 20 nt, Artificial Sequence
  Synthetic
ucaaugaagcauuuuaagua

SEQ ID NO: 791740 - RNA, 20 nt, Artificial Sequence
  Synthetic
cuucaguaaccaaaacagua

SEQ ID NO: 791741 - RNA, 20 nt, Artificial Sequence
  Synthetic
aauuauuguggaaaacagua

SEQ ID NO: 791742 - RNA, 20 nt, Artificial Sequence
  Synthetic
ugauuccaaaauaaacagua

SEQ ID NO: 791743 - RNA, 20 nt, Artificial Sequence
  Synthetic
aagagauguccuaaacagua

SEQ ID NO: 791744 - RNA, 20 nt, Artificial Sequence
  Synthetic
agguagagucaacaacagua

SEQ ID NO: 791745 - RNA, 20 nt, Artificial Sequence
  Synthetic
ugauuaucaggagaacagua

SEQ ID NO: 791746 - RNA, 20 nt, Artificial Sequence
  Synthetic
aaccauuauggagaacagua

SEQ ID NO: 791747 - RNA, 20 nt, Artificial Sequence
  Synthetic
ucaguaccaugagaacagua

SEQ ID NO: 791748 - RNA, 20 nt, Artificial Sequence
  Synthetic
acaggaagagagacacagua

SEQ ID NO: 791749 - RNA, 20 nt, Artificial Sequence
  Synthetic
agauauuccagaagacagua

SEQ ID NO: 791750 - RNA, 20 nt, Artificial Sequence
  Synthetic
auaaauuacuuuggacagua

SEQ ID NO: 791751 - RNA, 20 nt, Artificial Sequence
  Synthetic
auucucugcauucuacagua

SEQ ID NO: 791752 - RNA, 20 nt, Artificial Sequence
  Synthetic
acagcaccugauguacagua

SEQ ID NO: 791753 - RNA, 20 nt, Artificial Sequence
  Synthetic
uugccucugcuauuacagua

SEQ ID NO: 791754 - RNA, 20 nt, Artificial Sequence
  Synthetic
uuuuuucucacugcccagua

SEQ ID NO: 791755 - RNA, 20 nt, Artificial Sequence
  Synthetic
ccuccacauugcugccagua

SEQ ID NO: 791756 - RNA, 20 nt, Artificial Sequence
  Synthetic
aaagacggaagcuagcagua

SEQ ID NO: 791757 - RNA, 20 nt, Artificial Sequence
  Synthetic
agucaggaagccaggcagua

SEQ ID NO: 791758 - RNA, 20 nt, Artificial Sequence
  Synthetic
aauagagaauagaggcagua

SEQ ID NO: 791759 - RNA, 20 nt, Artificial Sequence
  Synthetic
aaaaguaaauggaggcagua

SEQ ID NO: 791760 - RNA, 20 nt, Artificial Sequence
  Synthetic
auaaauuuccuugggcagua

SEQ ID NO: 791761 - RNA, 20 nt, Artificial Sequence
  Synthetic
ugcugugcucccuggcagua

SEQ ID NO: 791762 - RNA, 20 nt, Artificial Sequence
  Synthetic
ccccuaaguggaaugcagua

SEQ ID NO: 791763 - RNA, 20 nt, Artificial Sequence
  Synthetic
aggcaguuaaauaugcagua

SEQ ID NO: 791764 - RNA, 20 nt, Artificial Sequence
  Synthetic
aaucucucagguuugcagua

SEQ ID NO: 791765 - RNA, 20 nt, Artificial Sequence
  Synthetic
aucaccaacuauaaucagua

SEQ ID NO: 791766 - RNA, 20 nt, Artificial Sequence
  Synthetic
cccaucuucauugaucagua

SEQ ID NO: 791767 - RNA, 20 nt, Artificial Sequence
  Synthetic
acguuuuaaaaauaucagua

SEQ ID NO: 791768 - RNA, 20 nt, Artificial Sequence
  Synthetic
uuagauaaaaauuaucagua

SEQ ID NO: 791769 - RNA, 20 nt, Artificial Sequence
  Synthetic
cacucuuuauguuaucagua

SEQ ID NO: 791770 - RNA, 20 nt, Artificial Sequence
  Synthetic
auuaaauaguguuaucagua

SEQ ID NO: 791771 - RNA, 20 nt, Artificial Sequence
  Synthetic
auuucuuuaaaaucucagua

SEQ ID NO: 791772 - RNA, 20 nt, Artificial Sequence
  Synthetic
aguucucuuucuucucagua

SEQ ID NO: 791773 - RNA, 20 nt, Artificial Sequence
  Synthetic
uuaaagauacaaagucagua

SEQ ID NO: 791774 - RNA, 20 nt, Artificial Sequence
  Synthetic
uguaguuucauguuucagua

SEQ ID NO: 791775 - RNA, 20 nt, Artificial Sequence
  Synthetic
cagaaagacuauuuucagua

SEQ ID NO: 791776 - RNA, 20 nt, Artificial Sequence
  Synthetic
uuaauccuguauuuucagua

SEQ ID NO: 791777 - RNA, 20 nt, Artificial Sequence
  Synthetic
aaaauaaagguacaagagua

SEQ ID NO: 791778 - RNA, 20 nt, Artificial Sequence
  Synthetic
uucccacuuaugcaagagua

SEQ ID NO: 791779 - RNA, 20 nt, Artificial Sequence
  Synthetic
uauguaagucuucaagagua

SEQ ID NO: 791780 - RNA, 20 nt, Artificial Sequence
  Synthetic
uaauguuugaaagaagagua

SEQ ID NO: 791781 - RNA, 20 nt, Artificial Sequence
  Synthetic
ugugcaugggggacagagua

SEQ ID NO: 791782 - RNA, 20 nt, Artificial Sequence
  Synthetic
uaugaaccacauccagagua

SEQ ID NO: 791783 - RNA, 20 nt, Artificial Sequence
  Synthetic
uaacugaauuaggcagagua

SEQ ID NO: 791784 - RNA, 20 nt, Artificial Sequence
  Synthetic
caugggcauucaagagagua

SEQ ID NO: 791785 - RNA, 20 nt, Artificial Sequence
  Synthetic
agauuaccauacagagagua

SEQ ID NO: 791786 - RNA, 20 nt, Artificial Sequence
  Synthetic
uaauugaaauacugagagua

SEQ ID NO: 791787 - RNA, 20 nt, Artificial Sequence
  Synthetic
ccugccagcuauugagagua

SEQ ID NO: 791788 - RNA, 20 nt, Artificial Sequence
  Synthetic
aucuaccaagaaauagagua

SEQ ID NO: 791789 - RNA, 20 nt, Artificial Sequence
  Synthetic
accuuauuucacauagagua

SEQ ID NO: 791790 - RNA, 20 nt, Artificial Sequence
  Synthetic
cauacucugaauauagagua

SEQ ID NO: 791791 - RNA, 20 nt, Artificial Sequence
  Synthetic
accugaagagaacuagagua

SEQ ID NO: 791792 - RNA, 20 nt, Artificial Sequence
  Synthetic
augauguagcagcuagagua

SEQ ID NO: 791793 - RNA, 20 nt, Artificial Sequence
  Synthetic
uagagccuuuguuuagagua

SEQ ID NO: 791794 - RNA, 20 nt, Artificial Sequence
  Synthetic
aauagcugcagccucgagua

SEQ ID NO: 791795 - RNA, 20 nt, Artificial Sequence
  Synthetic
aaugcuugauaaaaggagua

SEQ ID NO: 791796 - RNA, 20 nt, Artificial Sequence
  Synthetic
uacagguuucagcaggagua

SEQ ID NO: 791797 - RNA, 20 nt, Artificial Sequence
  Synthetic
agagaucagaaauaggagua

SEQ ID NO: 791798 - RNA, 20 nt, Artificial Sequence
  Synthetic
acaguuucauuuagggagua

SEQ ID NO: 791799 - RNA, 20 nt, Artificial Sequence
  Synthetic
cuaggauacauuggggagua

SEQ ID NO: 791800 - RNA, 20 nt, Artificial Sequence
  Synthetic
aaucagaguuuuugggagua

SEQ ID NO: 791801 - RNA, 20 nt, Artificial Sequence
  Synthetic
ugaugcugagguuuggagua

SEQ ID NO: 791802 - RNA, 20 nt, Artificial Sequence
  Synthetic
auugcuauuggaaaugagua

SEQ ID NO: 791803 - RNA, 20 nt, Artificial Sequence
  Synthetic
auggugagccggaaugagua

SEQ ID NO: 791804 - RNA, 20 nt, Artificial Sequence
  Synthetic
uuugggagugggaaugagua

SEQ ID NO: 791805 - RNA, 20 nt, Artificial Sequence
  Synthetic
uaacuuuuuuauaaugagua

SEQ ID NO: 791806 - RNA, 20 nt, Artificial Sequence
  Synthetic
aagaauuucaaacaugagua

SEQ ID NO: 791807 - RNA, 20 nt, Artificial Sequence
  Synthetic
auagaugugauagaugagua

SEQ ID NO: 791808 - RNA, 20 nt, Artificial Sequence
  Synthetic
ugucaugagauuccugagua

SEQ ID NO: 791809 - RNA, 20 nt, Artificial Sequence
  Synthetic
uccguuucuccaucugagua

SEQ ID NO: 791810 - RNA, 20 nt, Artificial Sequence
  Synthetic
uaaaucuuuaucucugagua

SEQ ID NO: 791811 - RNA, 20 nt, Artificial Sequence
  Synthetic
aaggagaggcugucugagua

SEQ ID NO: 791812 - RNA, 20 nt, Artificial Sequence
  Synthetic
aaacucgaaauaugugagua

SEQ ID NO: 791813 - RNA, 20 nt, Artificial Sequence
  Synthetic
aagaagcucacaauugagua

SEQ ID NO: 791814 - RNA, 20 nt, Artificial Sequence
  Synthetic
ccagcaccguuuauugagua

SEQ ID NO: 791815 - RNA, 20 nt, Artificial Sequence
  Synthetic
aauaacagggccuuugagua

SEQ ID NO: 791816 - RNA, 20 nt, Artificial Sequence
  Synthetic
auauauuccacuuuugagua

SEQ ID NO: 791817 - RNA, 20 nt, Artificial Sequence
  Synthetic
cccacaacagaaaaauagua

SEQ ID NO: 791818 - RNA, 20 nt, Artificial Sequence
  Synthetic
aauacuucaucugaauagua

SEQ ID NO: 791819 - RNA, 20 nt, Artificial Sequence
  Synthetic
acuacaguacaauaauagua

SEQ ID NO: 791820 - RNA, 20 nt, Artificial Sequence
  Synthetic
aacauuuagaggccauagua

SEQ ID NO: 791821 - RNA, 20 nt, Artificial Sequence
  Synthetic
ucgcacuucugggcauagua

SEQ ID NO: 791822 - RNA, 20 nt, Artificial Sequence
  Synthetic
ugguguccuguugcauagua

SEQ ID NO: 791823 - RNA, 20 nt, Artificial Sequence
  Synthetic
uagcccucagaaucauagua

SEQ ID NO: 791824 - RNA, 20 nt, Artificial Sequence
  Synthetic
aucucaucacuuucauagua

SEQ ID NO: 791825 - RNA, 20 nt, Artificial Sequence
  Synthetic
auuacaaggaagggauagua

SEQ ID NO: 791826 - RNA, 20 nt, Artificial Sequence
  Synthetic
aauucagcaaaaauauagua

SEQ ID NO: 791827 - RNA, 20 nt, Artificial Sequence
  Synthetic
uuauggcuaacaauauagua

SEQ ID NO: 791828 - RNA, 20 nt, Artificial Sequence
  Synthetic
agcucuucaugaauauagua

SEQ ID NO: 791829 - RNA, 20 nt, Artificial Sequence
  Synthetic
ccuuuccuuccaguauagua

SEQ ID NO: 791830 - RNA, 20 nt, Artificial Sequence
  Synthetic
uucuuuguaguuuccuagua

SEQ ID NO: 791831 - RNA, 20 nt, Artificial Sequence
  Synthetic
agaacuuccccaaucuagua

SEQ ID NO: 791832 - RNA, 20 nt, Artificial Sequence
  Synthetic
cagaaaagcaugaaguagua

SEQ ID NO: 791833 - RNA, 20 nt, Artificial Sequence
  Synthetic
ugauuaaugcaggaguagua

SEQ ID NO: 791834 - RNA, 20 nt, Artificial Sequence
  Synthetic
uagugguaguaguaguagua

SEQ ID NO: 791835 - RNA, 20 nt, Artificial Sequence
  Synthetic
caugucauguccagguagua

SEQ ID NO: 791836 - RNA, 20 nt, Artificial Sequence
  Synthetic
cauaagcaaauaguguagua

SEQ ID NO: 791837 - RNA, 20 nt, Artificial Sequence
  Synthetic
ugaaauauauuauuguagua

SEQ ID NO: 791838 - RNA, 20 nt, Artificial Sequence
  Synthetic
uaugugccuuuauuguagua

SEQ ID NO: 791839 - RNA, 20 nt, Artificial Sequence
  Synthetic
cuuccaauaaaaaauuagua

SEQ ID NO: 791840 - RNA, 20 nt, Artificial Sequence
  Synthetic
uuauaugauaagaauuagua

SEQ ID NO: 791841 - RNA, 20 nt, Artificial Sequence
  Synthetic
ugugaucguagacauuagua

SEQ ID NO: 791842 - RNA, 20 nt, Artificial Sequence
  Synthetic
uuucagcauuuguauuagua

SEQ ID NO: 791843 - RNA, 20 nt, Artificial Sequence
  Synthetic
cuuauauaaagcacuuagua

SEQ ID NO: 791844 - RNA, 20 nt, Artificial Sequence
  Synthetic
augaagcuagaaaguuagua

SEQ ID NO: 791845 - RNA, 20 nt, Artificial Sequence
  Synthetic
uguuguuuuguuaguuagua

SEQ ID NO: 791846 - RNA, 20 nt, Artificial Sequence
  Synthetic
aagucugcaaauauuuagua

SEQ ID NO: 791847 - RNA, 20 nt, Artificial Sequence
  Synthetic
auucuggagacauuuuagua

SEQ ID NO: 791848 - RNA, 20 nt, Artificial Sequence
  Synthetic
uaaaguucuugauuuuagua

SEQ ID NO: 791849 - RNA, 20 nt, Artificial Sequence
  Synthetic
uacaguauacauuuuuagua

SEQ ID NO: 791850 - RNA, 20 nt, Artificial Sequence
  Synthetic
aaguuccucaaaggaacgua

SEQ ID NO: 791851 - RNA, 20 nt, Artificial Sequence
  Synthetic
aaguguucaugaagcacgua

SEQ ID NO: 791852 - RNA, 20 nt, Artificial Sequence
  Synthetic
uacaacuaaaauagcacgua

SEQ ID NO: 791853 - RNA, 20 nt, Artificial Sequence
  Synthetic
ugcaaaaauaugaucacgua

SEQ ID NO: 791854 - RNA, 20 nt, Artificial Sequence
  Synthetic
ucuuaccucaaguucacgua

SEQ ID NO: 791855 - RNA, 20 nt, Artificial Sequence
  Synthetic
acaugggauuaacauacgua

SEQ ID NO: 791856 - RNA, 20 nt, Artificial Sequence
  Synthetic
caguuucagcuuucuacgua

SEQ ID NO: 791857 - RNA, 20 nt, Artificial Sequence
  Synthetic
uuuucuuuacaucuuacgua

SEQ ID NO: 791858 - RNA, 20 nt, Artificial Sequence
  Synthetic
aaaaggagacacuuuacgua

SEQ ID NO: 791859 - RNA, 20 nt, Artificial Sequence
  Synthetic
caaucaacacuuuuuacgua

SEQ ID NO: 791860 - RNA, 20 nt, Artificial Sequence
  Synthetic
cccaagagaagaaaaccgua

SEQ ID NO: 791861 - RNA, 20 nt, Artificial Sequence
  Synthetic
agccacuauggaaaaccgua

SEQ ID NO: 791862 - RNA, 20 nt, Artificial Sequence
  Synthetic
uuugaaaaggaaacaccgua

SEQ ID NO: 791863 - RNA, 20 nt, Artificial Sequence
  Synthetic
aagguugcugaagacccgua

SEQ ID NO: 791864 - RNA, 20 nt, Artificial Sequence
  Synthetic
uauaauuacacuaucccgua

SEQ ID NO: 791865 - RNA, 20 nt, Artificial Sequence
  Synthetic
uucaggcuuugugggccgua

SEQ ID NO: 791866 - RNA, 20 nt, Artificial Sequence
  Synthetic
acccagcucaucuuuccgua

SEQ ID NO: 791867 - RNA, 20 nt, Artificial Sequence
  Synthetic
agauacugcagguaagcgua

SEQ ID NO: 791868 - RNA, 20 nt, Artificial Sequence
  Synthetic
acacacacacaaauugcgua

SEQ ID NO: 791869 - RNA, 20 nt, Artificial Sequence
  Synthetic
aauaaaggacaaaaaucgua

SEQ ID NO: 791870 - RNA, 20 nt, Artificial Sequence
  Synthetic
aguggaauugcuguaucgua

SEQ ID NO: 791871 - RNA, 20 nt, Artificial Sequence
  Synthetic
aauuucaugaaaguuucgua

SEQ ID NO: 791872 - RNA, 20 nt, Artificial Sequence
  Synthetic
ccuaaacauagaaaaaggua

SEQ ID NO: 791873 - RNA, 20 nt, Artificial Sequence
  Synthetic
aguuucauguacaaaaggua

SEQ ID NO: 791874 - RNA, 20 nt, Artificial Sequence
  Synthetic
uacucagcaaauaaaaggua

SEQ ID NO: 791875 - RNA, 20 nt, Artificial Sequence
  Synthetic
uuuaauucuucuaaaaggua

SEQ ID NO: 791876 - RNA, 20 nt, Artificial Sequence
  Synthetic
ugaugucaaaaauaaaggua

SEQ ID NO: 791877 - RNA, 20 nt, Artificial Sequence
  Synthetic
ucgccaccucccacaaggua

SEQ ID NO: 791878 - RNA, 20 nt, Artificial Sequence
  Synthetic
aacuauauuaaaccaaggua

SEQ ID NO: 791879 - RNA, 20 nt, Artificial Sequence
  Synthetic
uucaaaaaggggccaaggua

SEQ ID NO: 791880 - RNA, 20 nt, Artificial Sequence
  Synthetic
cuggaaaugucuccaaggua

SEQ ID NO: 791881 - RNA, 20 nt, Artificial Sequence
  Synthetic
uuuucuuucaugucaaggua

SEQ ID NO: 791882 - RNA, 20 nt, Artificial Sequence
  Synthetic
auuuagaaaucacuaaggua

SEQ ID NO: 791883 - RNA, 20 nt, Artificial Sequence
  Synthetic
uaugguguaauccuaaggua

SEQ ID NO: 791884 - RNA, 20 nt, Artificial Sequence
  Synthetic
aaaaacucauucuuaaggua

SEQ ID NO: 791885 - RNA, 20 nt, Artificial Sequence
  Synthetic
uauuuaucagauaacaggua

SEQ ID NO: 791886 - RNA, 20 nt, Artificial Sequence
  Synthetic
ccugcugauaagcacaggua

SEQ ID NO: 791887 - RNA, 20 nt, Artificial Sequence
  Synthetic
uaugacugaaugcacaggua

SEQ ID NO: 791888 - RNA, 20 nt, Artificial Sequence
  Synthetic
ccagaaccaaaaaccaggua

SEQ ID NO: 791889 - RNA, 20 nt, Artificial Sequence
  Synthetic
acucaagcaccaaccaggua

SEQ ID NO: 791890 - RNA, 20 nt, Artificial Sequence
  Synthetic
aucugacauucucccaggua

SEQ ID NO: 791891 - RNA, 20 nt, Artificial Sequence
  Synthetic
acaaagagauggagcaggua

SEQ ID NO: 791892 - RNA, 20 nt, Artificial Sequence
  Synthetic
cauguuaugaauugcaggua

SEQ ID NO: 791893 - RNA, 20 nt, Artificial Sequence
  Synthetic
agagauggguuggucaggua

SEQ ID NO: 791894 - RNA, 20 nt, Artificial Sequence
  Synthetic
uguagauagauauucaggua

SEQ ID NO: 791895 - RNA, 20 nt, Artificial Sequence
  Synthetic
uuucuuuuuacguucaggua

SEQ ID NO: 791896 - RNA, 20 nt, Artificial Sequence
  Synthetic
ucagacagaaaaaagaggua

SEQ ID NO: 791897 - RNA, 20 nt, Artificial Sequence
  Synthetic
aaugcuuucgagaagaggua

SEQ ID NO: 791898 - RNA, 20 nt, Artificial Sequence
  Synthetic
ugugcuaguacuaagaggua

SEQ ID NO: 791899 - RNA, 20 nt, Artificial Sequence
  Synthetic
aacugaaagauuaagaggua

SEQ ID NO: 791900 - RNA, 20 nt, Artificial Sequence
  Synthetic
uugcuuuuauuucagaggua

SEQ ID NO: 791901 - RNA, 20 nt, Artificial Sequence
  Synthetic
caacugcuucaagagaggua

SEQ ID NO: 791902 - RNA, 20 nt, Artificial Sequence
  Synthetic
caaggagaggaagagaggua

SEQ ID NO: 791903 - RNA, 20 nt, Artificial Sequence
  Synthetic
ucucuauuaucagagaggua

SEQ ID NO: 791904 - RNA, 20 nt, Artificial Sequence
  Synthetic
aaaguagguggagagaggua

SEQ ID NO: 791905 - RNA, 20 nt, Artificial Sequence
  Synthetic
ugacacucuacauagaggua

SEQ ID NO: 791906 - RNA, 20 nt, Artificial Sequence
  Synthetic
uguuugccuaagucgaggua

SEQ ID NO: 791907 - RNA, 20 nt, Artificial Sequence
  Synthetic
aggauggaguaaaggaggua

SEQ ID NO: 791908 - RNA, 20 nt, Artificial Sequence
  Synthetic
aaucugaagagaaggaggua

SEQ ID NO: 791909 - RNA, 20 nt, Artificial Sequence
  Synthetic
aaagugguguucgggaggua

SEQ ID NO: 791910 - RNA, 20 nt, Artificial Sequence
  Synthetic
ugcugggaguaggggaggua

SEQ ID NO: 791911 - RNA, 20 nt, Artificial Sequence
  Synthetic
ucacacauguaggggaggua

SEQ ID NO: 791912 - RNA, 20 nt, Artificial Sequence
  Synthetic
cuaaccuaguuugggaggua

SEQ ID NO: 791913 - RNA, 20 nt, Artificial Sequence
  Synthetic
aaccccugcaaguggaggua

SEQ ID NO: 791914 - RNA, 20 nt, Artificial Sequence
  Synthetic
ugugaaugagaguggaggua

SEQ ID NO: 791915 - RNA, 20 nt, Artificial Sequence
  Synthetic
caaaggguaguguggaggua

SEQ ID NO: 791916 - RNA, 20 nt, Artificial Sequence
  Synthetic
cugccucccugacugaggua

SEQ ID NO: 791917 - RNA, 20 nt, Artificial Sequence
  Synthetic
uucaggucucagcugaggua

SEQ ID NO: 791918 - RNA, 20 nt, Artificial Sequence
  Synthetic
cacaacauccuagugaggua

SEQ ID NO: 791919 - RNA, 20 nt, Artificial Sequence
  Synthetic
cacagggauugugugaggua

SEQ ID NO: 791920 - RNA, 20 nt, Artificial Sequence
  Synthetic
auuggaggcaucuugaggua

SEQ ID NO: 791921 - RNA, 20 nt, Artificial Sequence
  Synthetic
uuucuucugugcaauaggua

SEQ ID NO: 791922 - RNA, 20 nt, Artificial Sequence
  Synthetic
uagaguggaaaugauaggua

SEQ ID NO: 791923 - RNA, 20 nt, Artificial Sequence
  Synthetic
uacuucaauaaagcuaggua

SEQ ID NO: 791924 - RNA, 20 nt, Artificial Sequence
  Synthetic
caacauucucuaaguaggua

SEQ ID NO: 791925 - RNA, 20 nt, Artificial Sequence
  Synthetic
ugaaagugaauauguaggua

SEQ ID NO: 791926 - RNA, 20 nt, Artificial Sequence
  Synthetic
uggauguuauaacuuaggua

SEQ ID NO: 791927 - RNA, 20 nt, Artificial Sequence
  Synthetic
aggaauaagagacuuaggua

SEQ ID NO: 791928 - RNA, 20 nt, Artificial Sequence
  Synthetic
ucucaaaaugaguuuaggua

SEQ ID NO: 791929 - RNA, 20 nt, Artificial Sequence
  Synthetic
auccauuauggaggacggua

SEQ ID NO: 791930 - RNA, 20 nt, Artificial Sequence
  Synthetic
ugcaaaccauacacccggua

SEQ ID NO: 791931 - RNA, 20 nt, Artificial Sequence
  Synthetic
uucuacuucuuuccucggua

SEQ ID NO: 791932 - RNA, 20 nt, Artificial Sequence
  Synthetic
cagcuacugaaucaagggua

SEQ ID NO: 791933 - RNA, 20 nt, Artificial Sequence
  Synthetic
cacacaaauaaagaagggua

SEQ ID NO: 791934 - RNA, 20 nt, Artificial Sequence
  Synthetic
accugaugcugggaagggua

SEQ ID NO: 791935 - RNA, 20 nt, Artificial Sequence
  Synthetic
uaaccuuuggaugaagggua

SEQ ID NO: 791936 - RNA, 20 nt, Artificial Sequence
  Synthetic
acagaugagaagccagggua

SEQ ID NO: 791937 - RNA, 20 nt, Artificial Sequence
  Synthetic
ccauaaaaaugaggagggua

SEQ ID NO: 791938 - RNA, 20 nt, Artificial Sequence
  Synthetic
auauaagcuuuaugagggua

SEQ ID NO: 791939 - RNA, 20 nt, Artificial Sequence
  Synthetic
uuuagacuaaaacuagggua

SEQ ID NO: 791940 - RNA, 20 nt, Artificial Sequence
  Synthetic
cucaacaacccucuagggua

SEQ ID NO: 791941 - RNA, 20 nt, Artificial Sequence
  Synthetic
ugagggguggggguagggua

SEQ ID NO: 791942 - RNA, 20 nt, Artificial Sequence
  Synthetic
ucagcaaaggaaagcgggua

SEQ ID NO: 791943 - RNA, 20 nt, Artificial Sequence
  Synthetic
ugauuuuuguauaaggggua

SEQ ID NO: 791944 - RNA, 20 nt, Artificial Sequence
  Synthetic
ccagggaccagggaggggua

SEQ ID NO: 791945 - RNA, 20 nt, Artificial Sequence
  Synthetic
ucaauaauugccuaggggua

SEQ ID NO: 791946 - RNA, 20 nt, Artificial Sequence
  Synthetic
ugauagagugucuaggggua

SEQ ID NO: 791947 - RNA, 20 nt, Artificial Sequence
  Synthetic
ugcugggaggcuccggggua

SEQ ID NO: 791948 - RNA, 20 nt, Artificial Sequence
  Synthetic
caugaugaggggugggggua

SEQ ID NO: 791949 - RNA, 20 nt, Artificial Sequence
  Synthetic
uucuaacucuacuuggggua

SEQ ID NO: 791950 - RNA, 20 nt, Artificial Sequence
  Synthetic
ccaauucuucccuuggggua

SEQ ID NO: 791951 - RNA, 20 nt, Artificial Sequence
  Synthetic
aaaauaaugauggaugggua

SEQ ID NO: 791952 - RNA, 20 nt, Artificial Sequence
  Synthetic
augcauuuagugacugggua

SEQ ID NO: 791953 - RNA, 20 nt, Artificial Sequence
  Synthetic
ucaaagucaguuacugggua

SEQ ID NO: 791954 - RNA, 20 nt, Artificial Sequence
  Synthetic
ucugguucugauccugggua

SEQ ID NO: 791955 - RNA, 20 nt, Artificial Sequence
  Synthetic
auacaaaaauuagcugggua

SEQ ID NO: 791956 - RNA, 20 nt, Artificial Sequence
  Synthetic
agcucucacauaucugggua

SEQ ID NO: 791957 - RNA, 20 nt, Artificial Sequence
  Synthetic
ucuuuuuuggggggugggua

SEQ ID NO: 791958 - RNA, 20 nt, Artificial Sequence
  Synthetic
auuugagaggugggugggua

SEQ ID NO: 791959 - RNA, 20 nt, Artificial Sequence
  Synthetic
ucagaauggaguggugggua

SEQ ID NO: 791960 - RNA, 20 nt, Artificial Sequence
  Synthetic
auacugauugguggugggua

SEQ ID NO: 791961 - RNA, 20 nt, Artificial Sequence
  Synthetic
agcugcacugggauugggua

SEQ ID NO: 791962 - RNA, 20 nt, Artificial Sequence
  Synthetic
auaccaugcagucuugggua

SEQ ID NO: 791963 - RNA, 20 nt, Artificial Sequence
  Synthetic
uuauuuugagauaaauggua

SEQ ID NO: 791964 - RNA, 20 nt, Artificial Sequence
  Synthetic
uaugugaggguggaauggua

SEQ ID NO: 791965 - RNA, 20 nt, Artificial Sequence
  Synthetic
uggacaucaugguaauggua

SEQ ID NO: 791966 - RNA, 20 nt, Artificial Sequence
  Synthetic
aacauuuaucaaacauggua

SEQ ID NO: 791967 - RNA, 20 nt, Artificial Sequence
  Synthetic
uuaaauccauuaccauggua

SEQ ID NO: 791968 - RNA, 20 nt, Artificial Sequence
  Synthetic
cuaucaagcuauucauggua

SEQ ID NO: 791969 - RNA, 20 nt, Artificial Sequence
  Synthetic
uauucaaccuauagauggua

SEQ ID NO: 791970 - RNA, 20 nt, Artificial Sequence
  Synthetic
uguucuagagcaugauggua

SEQ ID NO: 791971 - RNA, 20 nt, Artificial Sequence
  Synthetic
cauaagagcauuauauggua

SEQ ID NO: 791972 - RNA, 20 nt, Artificial Sequence
  Synthetic
caaccugagguauuauggua

SEQ ID NO: 791973 - RNA, 20 nt, Artificial Sequence
  Synthetic
cuggaaacacuugacuggua

SEQ ID NO: 791974 - RNA, 20 nt, Artificial Sequence
  Synthetic
uaaaaacugccuuccuggua

SEQ ID NO: 791975 - RNA, 20 nt, Artificial Sequence
  Synthetic
caaggggcuggaaucuggua

SEQ ID NO: 791976 - RNA, 20 nt, Artificial Sequence
  Synthetic
ugggagaguaacaucuggua

SEQ ID NO: 791977 - RNA, 20 nt, Artificial Sequence
  Synthetic
uggaauuagauucucuggua

SEQ ID NO: 791978 - RNA, 20 nt, Artificial Sequence
  Synthetic
cagucugcacuaaaguggua

SEQ ID NO: 791979 - RNA, 20 nt, Artificial Sequence
  Synthetic
uguucaguaggacaguggua

SEQ ID NO: 791980 - RNA, 20 nt, Artificial Sequence
  Synthetic
aaauucuaauagcaguggua

SEQ ID NO: 791981 - RNA, 20 nt, Artificial Sequence
  Synthetic
accugaggguuucaguggua

SEQ ID NO: 791982 - RNA, 20 nt, Artificial Sequence
  Synthetic
uuugcugaacaguaguggua

SEQ ID NO: 791983 - RNA, 20 nt, Artificial Sequence
  Synthetic
ugagcaaaguccucguggua

SEQ ID NO: 791984 - RNA, 20 nt, Artificial Sequence
  Synthetic
aguuaaguugggauguggua

SEQ ID NO: 791985 - RNA, 20 nt, Artificial Sequence
  Synthetic
auaaaaucauggcuguggua

SEQ ID NO: 791986 - RNA, 20 nt, Artificial Sequence
  Synthetic
uuacuuguuaaaguguggua

SEQ ID NO: 791987 - RNA, 20 nt, Artificial Sequence
  Synthetic
uuaaauuagcuuuuguggua

SEQ ID NO: 791988 - RNA, 20 nt, Artificial Sequence
  Synthetic
aaauaaacugaaaauuggua

SEQ ID NO: 791989 - RNA, 20 nt, Artificial Sequence
  Synthetic
aaagggacuguuaauuggua

SEQ ID NO: 791990 - RNA, 20 nt, Artificial Sequence
  Synthetic
caagaaaggcaacauuggua

SEQ ID NO: 791991 - RNA, 20 nt, Artificial Sequence
  Synthetic
uaacaggcaacggauuggua

SEQ ID NO: 791992 - RNA, 20 nt, Artificial Sequence
  Synthetic
ugagugugcaucccuuggua

SEQ ID NO: 791993 - RNA, 20 nt, Artificial Sequence
  Synthetic
aaucauuuauuugcuuggua

SEQ ID NO: 791994 - RNA, 20 nt, Artificial Sequence
  Synthetic
ugucaagucauuucuuggua

SEQ ID NO: 791995 - RNA, 20 nt, Artificial Sequence
  Synthetic
uauuauuuuacuuguuggua

SEQ ID NO: 791996 - RNA, 20 nt, Artificial Sequence
  Synthetic
uggcuuuaggaaauuuggua

SEQ ID NO: 791997 - RNA, 20 nt, Artificial Sequence
  Synthetic
cauuuacuucucauuuggua

SEQ ID NO: 791998 - RNA, 20 nt, Artificial Sequence
  Synthetic
uaauggaaauguauuuggua

SEQ ID NO: 791999 - RNA, 20 nt, Artificial Sequence
  Synthetic
aaaaugaaggaaguuuggua

SEQ ID NO: 792000 - RNA, 20 nt, Artificial Sequence
  Synthetic
cauggagcugcaguuuggua

SEQ ID NO: 792001 - RNA, 20 nt, Artificial Sequence
  Synthetic
aaaaaacagaguuuuuggua

SEQ ID NO: 792002 - RNA, 20 nt, Artificial Sequence
  Synthetic
cacagauaacuaaaaaugua

SEQ ID NO: 792003 - RNA, 20 nt, Artificial Sequence
  Synthetic
ccagauggcaauaaaaugua

SEQ ID NO: 792004 - RNA, 20 nt, Artificial Sequence
  Synthetic
aaauaguuaaaacaaaugua

SEQ ID NO: 792005 - RNA, 20 nt, Artificial Sequence
  Synthetic
uuuauaugcaaagaaaugua

SEQ ID NO: 792006 - RNA, 20 nt, Artificial Sequence
  Synthetic
uuuuauacaucagaaaugua

SEQ ID NO: 792007 - RNA, 20 nt, Artificial Sequence
  Synthetic
uuguauagagaggaaaugua

SEQ ID NO: 792008 - RNA, 20 nt, Artificial Sequence
  Synthetic
aaaacgaauucugaaaugua

SEQ ID NO: 792009 - RNA, 20 nt, Artificial Sequence
  Synthetic
auuuugaagaucuaaaugua

SEQ ID NO: 792010 - RNA, 20 nt, Artificial Sequence
  Synthetic
uuaaaauaucauuaaaugua

SEQ ID NO: 792011 - RNA, 20 nt, Artificial Sequence
  Synthetic
uuuagccauuccacaaugua

SEQ ID NO: 792012 - RNA, 20 nt, Artificial Sequence
  Synthetic
auuugcugaaagacaaugua

SEQ ID NO: 792013 - RNA, 20 nt, Artificial Sequence
  Synthetic
agaggacguuugacaaugua

SEQ ID NO: 792014 - RNA, 20 nt, Artificial Sequence
  Synthetic
auagcuaagaaaccaaugua

SEQ ID NO: 792015 - RNA, 20 nt, Artificial Sequence
  Synthetic
uucugucaguaagcaaugua

SEQ ID NO: 792016 - RNA, 20 nt, Artificial Sequence
  Synthetic
agauuuaucacaggaaugua

SEQ ID NO: 792017 - RNA, 20 nt, Artificial Sequence
  Synthetic
uuuuuauuuguaugaaugua

SEQ ID NO: 792018 - RNA, 20 nt, Artificial Sequence
  Synthetic
caaauguauuguugaaugua

SEQ ID NO: 792019 - RNA, 20 nt, Artificial Sequence
  Synthetic
aaaaagagacaaauaaugua

SEQ ID NO: 792020 - RNA, 20 nt, Artificial Sequence
  Synthetic
uauauguucaagauaaugua

SEQ ID NO: 792021 - RNA, 20 nt, Artificial Sequence
  Synthetic
uauuuucaaagauuaaugua

SEQ ID NO: 792022 - RNA, 20 nt, Artificial Sequence
  Synthetic
ucugaaagguauuuaaugua

SEQ ID NO: 792023 - RNA, 20 nt, Artificial Sequence
  Synthetic
acuucucaaacuuuaaugua

SEQ ID NO: 792024 - RNA, 20 nt, Artificial Sequence
  Synthetic
uauauuuccuuuuuaaugua

SEQ ID NO: 792025 - RNA, 20 nt, Artificial Sequence
  Synthetic
aagcuuucaucacacaugua

SEQ ID NO: 792026 - RNA, 20 nt, Artificial Sequence
  Synthetic
uuucuuaaaugguacaugua

SEQ ID NO: 792027 - RNA, 20 nt, Artificial Sequence
  Synthetic
ccuugcccucccaccaugua

SEQ ID NO: 792028 - RNA, 20 nt, Artificial Sequence
  Synthetic
ccucucuuuucuaccaugua

SEQ ID NO: 792029 - RNA, 20 nt, Artificial Sequence
  Synthetic
acaaagccuuuugccaugua

SEQ ID NO: 792030 - RNA, 20 nt, Artificial Sequence
  Synthetic
augccauggcugagcaugua

SEQ ID NO: 792031 - RNA, 20 nt, Artificial Sequence
  Synthetic
aaaauauuuuggggcaugua

SEQ ID NO: 792032 - RNA, 20 nt, Artificial Sequence
  Synthetic
uugucuaaauaaaucaugua

SEQ ID NO: 792033 - RNA, 20 nt, Artificial Sequence
  Synthetic
ugauuauauuuuaucaugua

SEQ ID NO: 792034 - RNA, 20 nt, Artificial Sequence
  Synthetic
cuugugugagacuucaugua

SEQ ID NO: 792035 - RNA, 20 nt, Artificial Sequence
  Synthetic
acaggaagagaaaagaugua

SEQ ID NO: 792036 - RNA, 20 nt, Artificial Sequence
  Synthetic
auacuuauaugaaagaugua

SEQ ID NO: 792037 - RNA, 20 nt, Artificial Sequence
  Synthetic
uuugcucacucuucgaugua

SEQ ID NO: 792038 - RNA, 20 nt, Artificial Sequence
  Synthetic
ugcuugguuuuaaggaugua

SEQ ID NO: 792039 - RNA, 20 nt, Artificial Sequence
  Synthetic
uagagaaacaucaggaugua

SEQ ID NO: 792040 - RNA, 20 nt, Artificial Sequence
  Synthetic
ccuagaauucagaggaugua

SEQ ID NO: 792041 - RNA, 20 nt, Artificial Sequence
  Synthetic
ccuagauuucagaggaugua

SEQ ID NO: 792042 - RNA, 20 nt, Artificial Sequence
  Synthetic
uugggcgaccuugggaugua

SEQ ID NO: 792043 - RNA, 20 nt, Artificial Sequence
  Synthetic
aguagcagaagauggaugua

SEQ ID NO: 792044 - RNA, 20 nt, Artificial Sequence
  Synthetic
uaggaaaaauuaaugaugua

SEQ ID NO: 792045 - RNA, 20 nt, Artificial Sequence
  Synthetic
auccaccauaaaaauaugua

SEQ ID NO: 792046 - RNA, 20 nt, Artificial Sequence
  Synthetic
uccaaaugugaaaauaugua

SEQ ID NO: 792047 - RNA, 20 nt, Artificial Sequence
  Synthetic
agaaugaaaugauauaugua

SEQ ID NO: 792048 - RNA, 20 nt, Artificial Sequence
  Synthetic
uuuuuuucuauauauaugua

SEQ ID NO: 792049 - RNA, 20 nt, Artificial Sequence
  Synthetic
accaucaccuccuauaugua

SEQ ID NO: 792050 - RNA, 20 nt, Artificial Sequence
  Synthetic
uaguuuaguuuuucuaugua

SEQ ID NO: 792051 - RNA, 20 nt, Artificial Sequence
  Synthetic
caaaaaauaauaaguaugua

SEQ ID NO: 792052 - RNA, 20 nt, Artificial Sequence
  Synthetic
auaguauugccugguaugua

SEQ ID NO: 792053 - RNA, 20 nt, Artificial Sequence
  Synthetic
uuacagaagaguuguaugua

SEQ ID NO: 792054 - RNA, 20 nt, Artificial Sequence
  Synthetic
uauacuucaaugauuaugua

SEQ ID NO: 792055 - RNA, 20 nt, Artificial Sequence
  Synthetic
uuuuguugauuucuuaugua

SEQ ID NO: 792056 - RNA, 20 nt, Artificial Sequence
  Synthetic
ucuuauauaugaguuaugua

SEQ ID NO: 792057 - RNA, 20 nt, Artificial Sequence
  Synthetic
aguuuuaucuauguuaugua

SEQ ID NO: 792058 - RNA, 20 nt, Artificial Sequence
  Synthetic
ucgcuuaaaauauuuaugua

SEQ ID NO: 792059 - RNA, 20 nt, Artificial Sequence
  Synthetic
aagauacagacuuuuaugua

SEQ ID NO: 792060 - RNA, 20 nt, Artificial Sequence
  Synthetic
uacacaugguucaaacugua

SEQ ID NO: 792061 - RNA, 20 nt, Artificial Sequence
  Synthetic
uucaugcuaaagaaacugua

SEQ ID NO: 792062 - RNA, 20 nt, Artificial Sequence
  Synthetic
uccucuguuaugaaacugua

SEQ ID NO: 792063 - RNA, 20 nt, Artificial Sequence
  Synthetic
uacaguguuuguaaacugua

SEQ ID NO: 792064 - RNA, 20 nt, Artificial Sequence
  Synthetic
ugggcauuuauacaacugua

SEQ ID NO: 792065 - RNA, 20 nt, Artificial Sequence
  Synthetic
aauacugaucacuaacugua

SEQ ID NO: 792066 - RNA, 20 nt, Artificial Sequence
  Synthetic
ugauccuaggaaacacugua

SEQ ID NO: 792067 - RNA, 20 nt, Artificial Sequence
  Synthetic
uuuauagaugcuacacugua

SEQ ID NO: 792068 - RNA, 20 nt, Artificial Sequence
  Synthetic
caaagaugugugccacugua

SEQ ID NO: 792069 - RNA, 20 nt, Artificial Sequence
  Synthetic
aguuuggaaagaagacugua

SEQ ID NO: 792070 - RNA, 20 nt, Artificial Sequence
  Synthetic
cugccuucaaagagacugua

SEQ ID NO: 792071 - RNA, 20 nt, Artificial Sequence
  Synthetic
aagauaaugaaacuacugua

SEQ ID NO: 792072 - RNA, 20 nt, Artificial Sequence
  Synthetic
cagcaacaauauuuacugua

SEQ ID NO: 792073 - RNA, 20 nt, Artificial Sequence
  Synthetic
uacuccugcugaaaccugua

SEQ ID NO: 792074 - RNA, 20 nt, Artificial Sequence
  Synthetic
uugccauuauucacccugua

SEQ ID NO: 792075 - RNA, 20 nt, Artificial Sequence
  Synthetic
acucacucuuuuucccugua

SEQ ID NO: 792076 - RNA, 20 nt, Artificial Sequence
  Synthetic
cugcuguuuugguuccugua

SEQ ID NO: 792077 - RNA, 20 nt, Artificial Sequence
  Synthetic
aaagucucuuguaagcugua

SEQ ID NO: 792078 - RNA, 20 nt, Artificial Sequence
  Synthetic
uucauugauuuagagcugua

SEQ ID NO: 792079 - RNA, 20 nt, Artificial Sequence
  Synthetic
ugaccacucuaguagcugua

SEQ ID NO: 792080 - RNA, 20 nt, Artificial Sequence
  Synthetic
cagcaagaaacuuagcugua

SEQ ID NO: 792081 - RNA, 20 nt, Artificial Sequence
  Synthetic
auauaaccccaaaggcugua

SEQ ID NO: 792082 - RNA, 20 nt, Artificial Sequence
  Synthetic
aaaaccuaucaucggcugua

SEQ ID NO: 792083 - RNA, 20 nt, Artificial Sequence
  Synthetic
caugguggcacauggcugua

SEQ ID NO: 792084 - RNA, 20 nt, Artificial Sequence
  Synthetic
uuauuaggaguauggcugua

SEQ ID NO: 792085 - RNA, 20 nt, Artificial Sequence
  Synthetic
cucagaggauucaugcugua

SEQ ID NO: 792086 - RNA, 20 nt, Artificial Sequence
  Synthetic
cagaauacuguucugcugua

SEQ ID NO: 792087 - RNA, 20 nt, Artificial Sequence
  Synthetic
uuacaacccuguuugcugua

SEQ ID NO: 792088 - RNA, 20 nt, Artificial Sequence
  Synthetic
agacagugccgugaucugua

SEQ ID NO: 792089 - RNA, 20 nt, Artificial Sequence
  Synthetic
uagcaaugcgaauaucugua

SEQ ID NO: 792090 - RNA, 20 nt, Artificial Sequence
  Synthetic
ugguuuaccccuuaucugua

SEQ ID NO: 792091 - RNA, 20 nt, Artificial Sequence
  Synthetic
auguuaucauggacucugua

SEQ ID NO: 792092 - RNA, 20 nt, Artificial Sequence
  Synthetic
uauguaccuuacucucugua

SEQ ID NO: 792093 - RNA, 20 nt, Artificial Sequence
  Synthetic
uaacuuuuucagucucugua

SEQ ID NO: 792094 - RNA, 20 nt, Artificial Sequence
  Synthetic
caccuuucugauucucugua

SEQ ID NO: 792095 - RNA, 20 nt, Artificial Sequence
  Synthetic
uagucuuucuaauuucugua

SEQ ID NO: 792096 - RNA, 20 nt, Artificial Sequence
  Synthetic
acaaaaucaacauuucugua

SEQ ID NO: 792097 - RNA, 20 nt, Artificial Sequence
  Synthetic
uuuagcaaacaguuucugua

SEQ ID NO: 792098 - RNA, 20 nt, Artificial Sequence
  Synthetic
ccccucugccuuuuucugua

SEQ ID NO: 792099 - RNA, 20 nt, Artificial Sequence
  Synthetic
agugaucacuaaaaagugua

SEQ ID NO: 792100 - RNA, 20 nt, Artificial Sequence
  Synthetic
auguuugguagaaaagugua

SEQ ID NO: 792101 - RNA, 20 nt, Artificial Sequence
  Synthetic
acaacugaauggaaagugua

SEQ ID NO: 792102 - RNA, 20 nt, Artificial Sequence
  Synthetic
uacucuacaugagaagugua

SEQ ID NO: 792103 - RNA, 20 nt, Artificial Sequence
  Synthetic
uagggauggaauacagugua

SEQ ID NO: 792104 - RNA, 20 nt, Artificial Sequence
  Synthetic
uugaucaugucuccagugua

SEQ ID NO: 792105 - RNA, 20 nt, Artificial Sequence
  Synthetic
uaaacaauuacaucagugua

SEQ ID NO: 792106 - RNA, 20 nt, Artificial Sequence
  Synthetic
auuacaggcacuucagugua

SEQ ID NO: 792107 - RNA, 20 nt, Artificial Sequence
  Synthetic
ucaauguaauuuucagugua

SEQ ID NO: 792108 - RNA, 20 nt, Artificial Sequence
  Synthetic
uuaagaguguaaagagugua

SEQ ID NO: 792109 - RNA, 20 nt, Artificial Sequence
  Synthetic
agaaacaaugaaugagugua

SEQ ID NO: 792110 - RNA, 20 nt, Artificial Sequence
  Synthetic
cacagcugaaagguagugua

SEQ ID NO: 792111 - RNA, 20 nt, Artificial Sequence
  Synthetic
caggcuugcugguuagugua

SEQ ID NO: 792112 - RNA, 20 nt, Artificial Sequence
  Synthetic
uaauuuuuguauaaggugua

SEQ ID NO: 792113 - RNA, 20 nt, Artificial Sequence
  Synthetic
ugauuuuuguauaaggugua

SEQ ID NO: 792114 - RNA, 20 nt, Artificial Sequence
  Synthetic
cagccauucuaacaggugua

SEQ ID NO: 792115 - RNA, 20 nt, Artificial Sequence
  Synthetic
ucaggauugggcagggugua

SEQ ID NO: 792116 - RNA, 20 nt, Artificial Sequence
  Synthetic
cugaccccuuaccgggugua

SEQ ID NO: 792117 - RNA, 20 nt, Artificial Sequence
  Synthetic
caaucccauuucugggugua

SEQ ID NO: 792118 - RNA, 20 nt, Artificial Sequence
  Synthetic
cuuuugauucagugggugua

SEQ ID NO: 792119 - RNA, 20 nt, Artificial Sequence
  Synthetic
agaauuucagagugggugua

SEQ ID NO: 792120 - RNA, 20 nt, Artificial Sequence
  Synthetic
uaauuuuuguauauggugua

SEQ ID NO: 792121 - RNA, 20 nt, Artificial Sequence
  Synthetic
cacuggggggcuguggugua

SEQ ID NO: 792122 - RNA, 20 nt, Artificial Sequence
  Synthetic
ucccaugagauacaugugua

SEQ ID NO: 792123 - RNA, 20 nt, Artificial Sequence
  Synthetic
uugaguucuucccaugugua

SEQ ID NO: 792124 - RNA, 20 nt, Artificial Sequence
  Synthetic
auuuuuuuuuugcaugugua

SEQ ID NO: 792125 - RNA, 20 nt, Artificial Sequence
  Synthetic
ugcugguuaguuacugugua

SEQ ID NO: 792126 - RNA, 20 nt, Artificial Sequence
  Synthetic
uguguugagacaccugugua

SEQ ID NO: 792127 - RNA, 20 nt, Artificial Sequence
  Synthetic
uaaaauaauacagcugugua

SEQ ID NO: 792128 - RNA, 20 nt, Artificial Sequence
  Synthetic
aagaacaaagugugugugua

SEQ ID NO: 792129 - RNA, 20 nt, Artificial Sequence
  Synthetic
acuacauuucucauugugua

SEQ ID NO: 792130 - RNA, 20 nt, Artificial Sequence
  Synthetic
caugagcauuggauugugua

SEQ ID NO: 792131 - RNA, 20 nt, Artificial Sequence
  Synthetic
uaaaagaaagcccuugugua

SEQ ID NO: 792132 - RNA, 20 nt, Artificial Sequence
  Synthetic
aguuaauuucagguugugua

SEQ ID NO: 792133 - RNA, 20 nt, Artificial Sequence
  Synthetic
acuccacagugcuuugugua

SEQ ID NO: 792134 - RNA, 20 nt, Artificial Sequence
  Synthetic
cacugaaaucauuuugugua

SEQ ID NO: 792135 - RNA, 20 nt, Artificial Sequence
  Synthetic
uguuccuguuguuuugugua

SEQ ID NO: 792136 - RNA, 20 nt, Artificial Sequence
  Synthetic
uuuaagcuaauuuuugugua

SEQ ID NO: 792137 - RNA, 20 nt, Artificial Sequence
  Synthetic
ucaaguuauagaaaauugua

SEQ ID NO: 792138 - RNA, 20 nt, Artificial Sequence
  Synthetic
uaucugcuuugcaaauugua

SEQ ID NO: 792139 - RNA, 20 nt, Artificial Sequence
  Synthetic
auucauuucagggaauugua

SEQ ID NO: 792140 - RNA, 20 nt, Artificial Sequence
  Synthetic
auuaugaaaauggaauugua

SEQ ID NO: 792141 - RNA, 20 nt, Artificial Sequence
  Synthetic
aacacuuagaggacauugua

SEQ ID NO: 792142 - RNA, 20 nt, Artificial Sequence
  Synthetic
aaugguugccauacauugua

SEQ ID NO: 792143 - RNA, 20 nt, Artificial Sequence
  Synthetic
cagcuauccucugcauugua

SEQ ID NO: 792144 - RNA, 20 nt, Artificial Sequence
  Synthetic
aauguagagauugcauugua

SEQ ID NO: 792145 - RNA, 20 nt, Artificial Sequence
  Synthetic
uacuuaagacucucauugua

SEQ ID NO: 792146 - RNA, 20 nt, Artificial Sequence
  Synthetic
ugcacuguccccagauugua

SEQ ID NO: 792147 - RNA, 20 nt, Artificial Sequence
  Synthetic
uucacacaauauggauugua

SEQ ID NO: 792148 - RNA, 20 nt, Artificial Sequence
  Synthetic
aaaucuaagacauuauugua

SEQ ID NO: 792149 - RNA, 20 nt, Artificial Sequence
  Synthetic
agauagaagggauuauugua

SEQ ID NO: 792150 - RNA, 20 nt, Artificial Sequence
  Synthetic
aaucucccacuauuauugua

SEQ ID NO: 792151 - RNA, 20 nt, Artificial Sequence
  Synthetic
uaagugccaagcuuauugua

SEQ ID NO: 792152 - RNA, 20 nt, Artificial Sequence
  Synthetic
aaauaaauguguuuauugua

SEQ ID NO: 792153 - RNA, 20 nt, Artificial Sequence
  Synthetic
uguucaguggacaacuugua

SEQ ID NO: 792154 - RNA, 20 nt, Artificial Sequence
  Synthetic
aaucagugaaauaacuugua

SEQ ID NO: 792155 - RNA, 20 nt, Artificial Sequence
  Synthetic
aacacuuagaguaacuugua

SEQ ID NO: 792156 - RNA, 20 nt, Artificial Sequence
  Synthetic
cuucuaguauacuacuugua

SEQ ID NO: 792157 - RNA, 20 nt, Artificial Sequence
  Synthetic
aguaaguguauguacuugua

SEQ ID NO: 792158 - RNA, 20 nt, Artificial Sequence
  Synthetic
uucuucacaaaaaccuugua

SEQ ID NO: 792159 - RNA, 20 nt, Artificial Sequence
  Synthetic
auaauacagccuuccuugua

SEQ ID NO: 792160 - RNA, 20 nt, Artificial Sequence
  Synthetic
ccacucucuucuagcuugua

SEQ ID NO: 792161 - RNA, 20 nt, Artificial Sequence
  Synthetic
ccacucucuucuggcuugua

SEQ ID NO: 792162 - RNA, 20 nt, Artificial Sequence
  Synthetic
acauuagcaaugaucuugua

SEQ ID NO: 792163 - RNA, 20 nt, Artificial Sequence
  Synthetic
cuucauuagaagcucuugua

SEQ ID NO: 792164 - RNA, 20 nt, Artificial Sequence
  Synthetic
aacuuguuaaaugucuugua

SEQ ID NO: 792165 - RNA, 20 nt, Artificial Sequence
  Synthetic
uaaauaauggugaaguugua

SEQ ID NO: 792166 - RNA, 20 nt, Artificial Sequence
  Synthetic
cugaauauaggugaguugua

SEQ ID NO: 792167 - RNA, 20 nt, Artificial Sequence
  Synthetic
uugacuagguuauaguugua

SEQ ID NO: 792168 - RNA, 20 nt, Artificial Sequence
  Synthetic
augaguucauguccguugua

SEQ ID NO: 792169 - RNA, 20 nt, Artificial Sequence
  Synthetic
uuuauauaagcaagguugua

SEQ ID NO: 792170 - RNA, 20 nt, Artificial Sequence
  Synthetic
uacuauacaucuagguugua

SEQ ID NO: 792171 - RNA, 20 nt, Artificial Sequence
  Synthetic
agugcaauugcuggguugua

SEQ ID NO: 792172 - RNA, 20 nt, Artificial Sequence
  Synthetic
ccaacucauuaucuguugua

SEQ ID NO: 792173 - RNA, 20 nt, Artificial Sequence
  Synthetic
aaugacaccauuguguugua

SEQ ID NO: 792174 - RNA, 20 nt, Artificial Sequence
  Synthetic
uugauaauugguuuguugua

SEQ ID NO: 792175 - RNA, 20 nt, Artificial Sequence
  Synthetic
aaugugaaaagaaauuugua

SEQ ID NO: 792176 - RNA, 20 nt, Artificial Sequence
  Synthetic
aaugaacacacacauuugua

SEQ ID NO: 792177 - RNA, 20 nt, Artificial Sequence
  Synthetic
uccaucuggggacauuugua

SEQ ID NO: 792178 - RNA, 20 nt, Artificial Sequence
  Synthetic
agugguuauaaauauuugua

SEQ ID NO: 792179 - RNA, 20 nt, Artificial Sequence
  Synthetic
uaauagaguuaauauuugua

SEQ ID NO: 792180 - RNA, 20 nt, Artificial Sequence
  Synthetic
cguaggaguauauauuugua

SEQ ID NO: 792181 - RNA, 20 nt, Artificial Sequence
  Synthetic
cauuuauaagaaacuuugua

SEQ ID NO: 792182 - RNA, 20 nt, Artificial Sequence
  Synthetic
acuguguaagguacuuugua

SEQ ID NO: 792183 - RNA, 20 nt, Artificial Sequence
  Synthetic
acaggauuucacccuuugua

SEQ ID NO: 792184 - RNA, 20 nt, Artificial Sequence
  Synthetic
augaguucacauccuuugua

SEQ ID NO: 792185 - RNA, 20 nt, Artificial Sequence
  Synthetic
augaguucaaguccuuugua

SEQ ID NO: 792186 - RNA, 20 nt, Artificial Sequence
  Synthetic
augaguucacguccuuugua

SEQ ID NO: 792187 - RNA, 20 nt, Artificial Sequence
  Synthetic
augaguucauguccuuugua

SEQ ID NO: 792188 - RNA, 20 nt, Artificial Sequence
  Synthetic
augcguucguguccuuugua

SEQ ID NO: 792189 - RNA, 20 nt, Artificial Sequence
  Synthetic
ucaccccuaaaggcuuugua

SEQ ID NO: 792190 - RNA, 20 nt, Artificial Sequence
  Synthetic
uuuaguauucugucuuugua

SEQ ID NO: 792191 - RNA, 20 nt, Artificial Sequence
  Synthetic
ucccauaucauuucuuugua

SEQ ID NO: 792192 - RNA, 20 nt, Artificial Sequence
  Synthetic
caaaaguuuauuucuuugua

SEQ ID NO: 792193 - RNA, 20 nt, Artificial Sequence
  Synthetic
uuaacuuaaaggcguuugua

SEQ ID NO: 792194 - RNA, 20 nt, Artificial Sequence
  Synthetic
ugugucagcuccuguuugua

SEQ ID NO: 792195 - RNA, 20 nt, Artificial Sequence
  Synthetic
uuuaaaaaguacauuuugua

SEQ ID NO: 792196 - RNA, 20 nt, Artificial Sequence
  Synthetic
ccuguuauuuuacuuuugua

SEQ ID NO: 792197 - RNA, 20 nt, Artificial Sequence
  Synthetic
ugucuugggccucuuuugua

SEQ ID NO: 792198 - RNA, 20 nt, Artificial Sequence
  Synthetic
ugauuuugaucucuuuugua

SEQ ID NO: 792199 - RNA, 20 nt, Artificial Sequence
  Synthetic
uaaguacuacauguuuugua

SEQ ID NO: 792200 - RNA, 20 nt, Artificial Sequence
  Synthetic
uauuguuuuuaauuuuugua

SEQ ID NO: 792201 - RNA, 20 nt, Artificial Sequence
  Synthetic
uaucucaguccauuuuugua

SEQ ID NO: 792202 - RNA, 20 nt, Artificial Sequence
  Synthetic
uauuguuaagaguuuuugua

SEQ ID NO: 792203 - RNA, 20 nt, Artificial Sequence
  Synthetic
cuggagaaaggguuuuugua

SEQ ID NO: 792204 - RNA, 20 nt, Artificial Sequence
  Synthetic
cuaaguaaaaaaaaaaauua

SEQ ID NO: 792205 - RNA, 20 nt, Artificial Sequence
  Synthetic
uuuuguuuuagaaaaaauua

SEQ ID NO: 792206 - RNA, 20 nt, Artificial Sequence
  Synthetic
acuggagacugaaaaaauua

SEQ ID NO: 792207 - RNA, 20 nt, Artificial Sequence
  Synthetic
aucuauacagacaaaaauua

SEQ ID NO: 792208 - RNA, 20 nt, Artificial Sequence
  Synthetic
auuauuaaguauaaaaauua

SEQ ID NO: 792209 - RNA, 20 nt, Artificial Sequence
  Synthetic
cucccaaagucucaaaauua

SEQ ID NO: 792210 - RNA, 20 nt, Artificial Sequence
  Synthetic
ucugugugacgucaaaauua

SEQ ID NO: 792211 - RNA, 20 nt, Artificial Sequence
  Synthetic
uguccuuucuuucaaaauua

SEQ ID NO: 792212 - RNA, 20 nt, Artificial Sequence
  Synthetic
uuuuccagaagagaaaauua

SEQ ID NO: 792213 - RNA, 20 nt, Artificial Sequence
  Synthetic
cucaagggauaggaaaauua

SEQ ID NO: 792214 - RNA, 20 nt, Artificial Sequence
  Synthetic
cuaauuauuauggaaaauua

SEQ ID NO: 792215 - RNA, 20 nt, Artificial Sequence
  Synthetic
ucauuuugagaauaaaauua

SEQ ID NO: 792216 - RNA, 20 nt, Artificial Sequence
  Synthetic
auuauucgucucuaaaauua

SEQ ID NO: 792217 - RNA, 20 nt, Artificial Sequence
  Synthetic
ugcuaaccacuguaaaauua

SEQ ID NO: 792218 - RNA, 20 nt, Artificial Sequence
  Synthetic
uaauuuuuaaauuaaaauua

SEQ ID NO: 792219 - RNA, 20 nt, Artificial Sequence
  Synthetic
uuuauugcauguuaaaauua

SEQ ID NO: 792220 - RNA, 20 nt, Artificial Sequence
  Synthetic
agaauuucccuuuaaaauua

SEQ ID NO: 792221 - RNA, 20 nt, Artificial Sequence
  Synthetic
cuuuuuccauuuuaaaauua

SEQ ID NO: 792222 - RNA, 20 nt, Artificial Sequence
  Synthetic
uauucaaaguuuuaaaauua

SEQ ID NO: 792223 - RNA, 20 nt, Artificial Sequence
  Synthetic
uguaucaggaccucaaauua

SEQ ID NO: 792224 - RNA, 20 nt, Artificial Sequence
  Synthetic
aguaauguauuuucaaauua

SEQ ID NO: 792225 - RNA, 20 nt, Artificial Sequence
  Synthetic
acugucuaaaauagaaauua

SEQ ID NO: 792226 - RNA, 20 nt, Artificial Sequence
  Synthetic
cuacaauuggaaggaaauua

SEQ ID NO: 792227 - RNA, 20 nt, Artificial Sequence
  Synthetic
cuggauaaauaaggaaauua

SEQ ID NO: 792228 - RNA, 20 nt, Artificial Sequence
  Synthetic
aauggggauuaaggaaauua

SEQ ID NO: 792229 - RNA, 20 nt, Artificial Sequence
  Synthetic
agucacaguugaggaaauua

SEQ ID NO: 792230 - RNA, 20 nt, Artificial Sequence
  Synthetic
aaaaugucauaaugaaauua

SEQ ID NO: 792231 - RNA, 20 nt, Artificial Sequence
  Synthetic
cauuaacuacuaugaaauua

SEQ ID NO: 792232 - RNA, 20 nt, Artificial Sequence
  Synthetic
aguagcucaugcugaaauua

SEQ ID NO: 792233 - RNA, 20 nt, Artificial Sequence
  Synthetic
cugacacuugauugaaauua

SEQ ID NO: 792234 - RNA, 20 nt, Artificial Sequence
  Synthetic
aauauauuaaaaauaaauua

SEQ ID NO: 792235 - RNA, 20 nt, Artificial Sequence
  Synthetic
aauaauugcugaauaaauua

SEQ ID NO: 792236 - RNA, 20 nt, Artificial Sequence
  Synthetic
auuaguauauugauaaauua

SEQ ID NO: 792237 - RNA, 20 nt, Artificial Sequence
  Synthetic
ugaugacaauguauaaauua

SEQ ID NO: 792238 - RNA, 20 nt, Artificial Sequence
  Synthetic
uuugauaacuuccuaaauua

SEQ ID NO: 792239 - RNA, 20 nt, Artificial Sequence
  Synthetic
uaaaauccaaaucuaaauua

SEQ ID NO: 792240 - RNA, 20 nt, Artificial Sequence
  Synthetic
uguaggugcuuaguaaauua

SEQ ID NO: 792241 - RNA, 20 nt, Artificial Sequence
  Synthetic
cauuaucaaaaauuaaauua

SEQ ID NO: 792242 - RNA, 20 nt, Artificial Sequence
  Synthetic
uuaucaauauuauuaaauua

SEQ ID NO: 792243 - RNA, 20 nt, Artificial Sequence
  Synthetic
cuacuacauacuuuaaauua

SEQ ID NO: 792244 - RNA, 20 nt, Artificial Sequence
  Synthetic
aauaacauauuuuuaaauua

SEQ ID NO: 792245 - RNA, 20 nt, Artificial Sequence
  Synthetic
uuggggacgccccacaauua

SEQ ID NO: 792246 - RNA, 20 nt, Artificial Sequence
  Synthetic
cagauaauuuugcacaauua

SEQ ID NO: 792247 - RNA, 20 nt, Artificial Sequence
  Synthetic
uauucucauguggacaauua

SEQ ID NO: 792248 - RNA, 20 nt, Artificial Sequence
  Synthetic
ugcaucagccuucccaauua

SEQ ID NO: 792249 - RNA, 20 nt, Artificial Sequence
  Synthetic
aaaggacacuaauccaauua

SEQ ID NO: 792250 - RNA, 20 nt, Artificial Sequence
  Synthetic
aucauaauacauugcaauua

SEQ ID NO: 792251 - RNA, 20 nt, Artificial Sequence
  Synthetic
uguccuaccauuaucaauua

SEQ ID NO: 792252 - RNA, 20 nt, Artificial Sequence
  Synthetic
agcacagcaaaacucaauua

SEQ ID NO: 792253 - RNA, 20 nt, Artificial Sequence
  Synthetic
aaguauuucuuucucaauua

SEQ ID NO: 792254 - RNA, 20 nt, Artificial Sequence
  Synthetic
uuuacaaauuuauucaauua

SEQ ID NO: 792255 - RNA, 20 nt, Artificial Sequence
  Synthetic
ucaucuucucucuucaauua

SEQ ID NO: 792256 - RNA, 20 nt, Artificial Sequence
  Synthetic
uaguagcuaaaaaagaauua

SEQ ID NO: 792257 - RNA, 20 nt, Artificial Sequence
  Synthetic
aaaacaugauucaagaauua

SEQ ID NO: 792258 - RNA, 20 nt, Artificial Sequence
  Synthetic
uacauggaggcccagaauua

SEQ ID NO: 792259 - RNA, 20 nt, Artificial Sequence
  Synthetic
caagaaugauuugagaauua

SEQ ID NO: 792260 - RNA, 20 nt, Artificial Sequence
  Synthetic
uaucuuuucuuauagaauua

SEQ ID NO: 792261 - RNA, 20 nt, Artificial Sequence
  Synthetic
uagauuuguuucuagaauua

SEQ ID NO: 792262 - RNA, 20 nt, Artificial Sequence
  Synthetic
cacaaaaaagaguagaauua

SEQ ID NO: 792263 - RNA, 20 nt, Artificial Sequence
  Synthetic
cccacaacaaguaggaauua

SEQ ID NO: 792264 - RNA, 20 nt, Artificial Sequence
  Synthetic
uaauauuccagacggaauua

SEQ ID NO: 792265 - RNA, 20 nt, Artificial Sequence
  Synthetic
accuaacugcgagggaauua

SEQ ID NO: 792266 - RNA, 20 nt, Artificial Sequence
  Synthetic
uaucaaguacuugggaauua

SEQ ID NO: 792267 - RNA, 20 nt, Artificial Sequence
  Synthetic
uuguggugaguugggaauua

SEQ ID NO: 792268 - RNA, 20 nt, Artificial Sequence
  Synthetic
cugaaugaaaacaugaauua

SEQ ID NO: 792269 - RNA, 20 nt, Artificial Sequence
  Synthetic
uucugaggaggcaugaauua

SEQ ID NO: 792270 - RNA, 20 nt, Artificial Sequence
  Synthetic
auuccugggaagaugaauua

SEQ ID NO: 792271 - RNA, 20 nt, Artificial Sequence
  Synthetic
aauaugcaggauaugaauua

SEQ ID NO: 792272 - RNA, 20 nt, Artificial Sequence
  Synthetic
cacaauggaacuaugaauua

SEQ ID NO: 792273 - RNA, 20 nt, Artificial Sequence
  Synthetic
ugguguaugacuaugaauua

SEQ ID NO: 792274 - RNA, 20 nt, Artificial Sequence
  Synthetic
aaugaugagauuaugaauua

SEQ ID NO: 792275 - RNA, 20 nt, Artificial Sequence
  Synthetic
uguaauuacaaacugaauua

SEQ ID NO: 792276 - RNA, 20 nt, Artificial Sequence
  Synthetic
ccaaaucucaccuugaauua

SEQ ID NO: 792277 - RNA, 20 nt, Artificial Sequence
  Synthetic
aucucuaauaauuugaauua

SEQ ID NO: 792278 - RNA, 20 nt, Artificial Sequence
  Synthetic
uguaugaucaaaaauaauua

SEQ ID NO: 792279 - RNA, 20 nt, Artificial Sequence
  Synthetic
aguggucauuaaaauaauua

SEQ ID NO: 792280 - RNA, 20 nt, Artificial Sequence
  Synthetic
aguugcuuuugaaauaauua

SEQ ID NO: 792281 - RNA, 20 nt, Artificial Sequence
  Synthetic
uagccuaauuuaaauaauua

SEQ ID NO: 792282 - RNA, 20 nt, Artificial Sequence
  Synthetic
cuaaacuaauucaauaauua

SEQ ID NO: 792283 - RNA, 20 nt, Artificial Sequence
  Synthetic
agacaguacuucaauaauua

SEQ ID NO: 792284 - RNA, 20 nt, Artificial Sequence
  Synthetic
uuauagauuaaacauaauua

SEQ ID NO: 792285 - RNA, 20 nt, Artificial Sequence
  Synthetic
uuuucucauauacauaauua

SEQ ID NO: 792286 - RNA, 20 nt, Artificial Sequence
  Synthetic
acuauuuauguucauaauua

SEQ ID NO: 792287 - RNA, 20 nt, Artificial Sequence
  Synthetic
uuagggaaaguguauaauua

SEQ ID NO: 792288 - RNA, 20 nt, Artificial Sequence
  Synthetic
uucuauuaggauacuaauua

SEQ ID NO: 792289 - RNA, 20 nt, Artificial Sequence
  Synthetic
uuuuuaguucugccuaauua

SEQ ID NO: 792290 - RNA, 20 nt, Artificial Sequence
  Synthetic
augauuggaauuccuaauua

SEQ ID NO: 792291 - RNA, 20 nt, Artificial Sequence
  Synthetic
ccacccaugauugcuaauua

SEQ ID NO: 792292 - RNA, 20 nt, Artificial Sequence
  Synthetic
cugugucaacaaucuaauua

SEQ ID NO: 792293 - RNA, 20 nt, Artificial Sequence
  Synthetic
caugggaagaccaguaauua

SEQ ID NO: 792294 - RNA, 20 nt, Artificial Sequence
  Synthetic
uacaguauaggcaguaauua

SEQ ID NO: 792295 - RNA, 20 nt, Artificial Sequence
  Synthetic
aaguuugggggacguaauua

SEQ ID NO: 792296 - RNA, 20 nt, Artificial Sequence
  Synthetic
auuugcauuuaagguaauua

SEQ ID NO: 792297 - RNA, 20 nt, Artificial Sequence
  Synthetic
cucuuaaucucauguaauua

SEQ ID NO: 792298 - RNA, 20 nt, Artificial Sequence
  Synthetic
uuuagauuuuauuguaauua

SEQ ID NO: 792299 - RNA, 20 nt, Artificial Sequence
  Synthetic
acauaguagauuauuaauua

SEQ ID NO: 792300 - RNA, 20 nt, Artificial Sequence
  Synthetic
uuaaggauaguuauuaauua

SEQ ID NO: 792301 - RNA, 20 nt, Artificial Sequence
  Synthetic
caaaauagagugcuuaauua

SEQ ID NO: 792302 - RNA, 20 nt, Artificial Sequence
  Synthetic
cauuuaucgagcuuuaauua

SEQ ID NO: 792303 - RNA, 20 nt, Artificial Sequence
  Synthetic
augaaucagaucuuuaauua

SEQ ID NO: 792304 - RNA, 20 nt, Artificial Sequence
  Synthetic
agaauauaaacaaaacauua

SEQ ID NO: 792305 - RNA, 20 nt, Artificial Sequence
  Synthetic
aauauauaaagcaaacauua

SEQ ID NO: 792306 - RNA, 20 nt, Artificial Sequence
  Synthetic
uaaaacuuccagaaacauua

SEQ ID NO: 792307 - RNA, 20 nt, Artificial Sequence
  Synthetic
auuuuauauuauaaacauua

SEQ ID NO: 792308 - RNA, 20 nt, Artificial Sequence
  Synthetic
aucuaagaaagauaacauua

SEQ ID NO: 792309 - RNA, 20 nt, Artificial Sequence
  Synthetic
uuuauuaaaagguaacauua

SEQ ID NO: 792310 - RNA, 20 nt, Artificial Sequence
  Synthetic
auucacacuauuucacauua

SEQ ID NO: 792311 - RNA, 20 nt, Artificial Sequence
  Synthetic
agagaguaauaaagacauua

SEQ ID NO: 792312 - RNA, 20 nt, Artificial Sequence
  Synthetic
uuaguguggauuugacauua

SEQ ID NO: 792313 - RNA, 20 nt, Artificial Sequence
  Synthetic
ucaaauaagggaauacauua

SEQ ID NO: 792314 - RNA, 20 nt, Artificial Sequence
  Synthetic
cucccacugaaucuacauua

SEQ ID NO: 792315 - RNA, 20 nt, Artificial Sequence
  Synthetic
uggggaucuaauguacauua

SEQ ID NO: 792316 - RNA, 20 nt, Artificial Sequence
  Synthetic
cucucauuuuaguuacauua

SEQ ID NO: 792317 - RNA, 20 nt, Artificial Sequence
  Synthetic
aggcuauaagaaaaccauua

SEQ ID NO: 792318 - RNA, 20 nt, Artificial Sequence
  Synthetic
augaaaugauaaaaccauua

SEQ ID NO: 792319 - RNA, 20 nt, Artificial Sequence
  Synthetic
augcacaaaauuaaccauua

SEQ ID NO: 792320 - RNA, 20 nt, Artificial Sequence
  Synthetic
caucucucagaaucccauua

SEQ ID NO: 792321 - RNA, 20 nt, Artificial Sequence
  Synthetic
aaagagacccuuucccauua

SEQ ID NO: 792322 - RNA, 20 nt, Artificial Sequence
  Synthetic
uguaguccuuaaggccauua

SEQ ID NO: 792323 - RNA, 20 nt, Artificial Sequence
  Synthetic
uuaacacuuucgggccauua

SEQ ID NO: 792324 - RNA, 20 nt, Artificial Sequence
  Synthetic
cagauaucuacuugccauua

SEQ ID NO: 792325 - RNA, 20 nt, Artificial Sequence
  Synthetic
aaaacaugaugaauccauua

SEQ ID NO: 792326 - RNA, 20 nt, Artificial Sequence
  Synthetic
uuuuuaauuguacuccauua

SEQ ID NO: 792327 - RNA, 20 nt, Artificial Sequence
  Synthetic
auaacagaacauuuccauua

SEQ ID NO: 792328 - RNA, 20 nt, Artificial Sequence
  Synthetic
agaugcuacauuuuccauua

SEQ ID NO: 792329 - RNA, 20 nt, Artificial Sequence
  Synthetic
cuuuggagacuuaagcauua

SEQ ID NO: 792330 - RNA, 20 nt, Artificial Sequence
  Synthetic
uaggauugcuaugagcauua

SEQ ID NO: 792331 - RNA, 20 nt, Artificial Sequence
  Synthetic
uauucuacuaauaugcauua

SEQ ID NO: 792332 - RNA, 20 nt, Artificial Sequence
  Synthetic
cuuggauggagugugcauua

SEQ ID NO: 792333 - RNA, 20 nt, Artificial Sequence
  Synthetic
caguguaauauugugcauua

SEQ ID NO: 792334 - RNA, 20 nt, Artificial Sequence
  Synthetic
uuuugcaaaaaaaaucauua

SEQ ID NO: 792335 - RNA, 20 nt, Artificial Sequence
  Synthetic
aacaaaauaucaaaucauua

SEQ ID NO: 792336 - RNA, 20 nt, Artificial Sequence
  Synthetic
uacauauuuauaaaucauua

SEQ ID NO: 792337 - RNA, 20 nt, Artificial Sequence
  Synthetic
agaggcuagaacaaucauua

SEQ ID NO: 792338 - RNA, 20 nt, Artificial Sequence
  Synthetic
aaucaguugacuaaucauua

SEQ ID NO: 792339 - RNA, 20 nt, Artificial Sequence
  Synthetic
cccuucccuagagaucauua

SEQ ID NO: 792340 - RNA, 20 nt, Artificial Sequence
  Synthetic
caaggccagccugaucauua

SEQ ID NO: 792341 - RNA, 20 nt, Artificial Sequence
  Synthetic
aguuuagacaaauaucauua

SEQ ID NO: 792342 - RNA, 20 nt, Artificial Sequence
  Synthetic
uaaucaaaaagguaucauua

SEQ ID NO: 792343 - RNA, 20 nt, Artificial Sequence
  Synthetic
uugaagagauguuaucauua

SEQ ID NO: 792344 - RNA, 20 nt, Artificial Sequence
  Synthetic
auaauuauaauaacucauua

SEQ ID NO: 792345 - RNA, 20 nt, Artificial Sequence
  Synthetic
caaaagagggguagucauua

SEQ ID NO: 792346 - RNA, 20 nt, Artificial Sequence
  Synthetic
agacuuaaucuuugucauua

SEQ ID NO: 792347 - RNA, 20 nt, Artificial Sequence
  Synthetic
cugauacaaauuauucauua

SEQ ID NO: 792348 - RNA, 20 nt, Artificial Sequence
  Synthetic
uagagagggcuuauucauua

SEQ ID NO: 792349 - RNA, 20 nt, Artificial Sequence
  Synthetic
augucaaucauacuucauua

SEQ ID NO: 792350 - RNA, 20 nt, Artificial Sequence
  Synthetic
auguucuauaauguucauua

SEQ ID NO: 792351 - RNA, 20 nt, Artificial Sequence
  Synthetic
uucuuaugguacuuucauua

SEQ ID NO: 792352 - RNA, 20 nt, Artificial Sequence
  Synthetic
auucaaaauuauuuucauua

SEQ ID NO: 792353 - RNA, 20 nt, Artificial Sequence
  Synthetic
uauaacguggaaaaagauua

SEQ ID NO: 792354 - RNA, 20 nt, Artificial Sequence
  Synthetic
aaauaaaguaacaaagauua

SEQ ID NO: 792355 - RNA, 20 nt, Artificial Sequence
  Synthetic
caaaaugaagcgaaagauua

SEQ ID NO: 792356 - RNA, 20 nt, Artificial Sequence
  Synthetic
uagauaauuuuuaaagauua

SEQ ID NO: 792357 - RNA, 20 nt, Artificial Sequence
  Synthetic
agugacauuaaccaagauua

SEQ ID NO: 792358 - RNA, 20 nt, Artificial Sequence
  Synthetic
aggaagccuuaagaagauua

SEQ ID NO: 792359 - RNA, 20 nt, Artificial Sequence
  Synthetic
aaaaaguaagaggaagauua

SEQ ID NO: 792360 - RNA, 20 nt, Artificial Sequence
  Synthetic
auagaguauggauaagauua

SEQ ID NO: 792361 - RNA, 20 nt, Artificial Sequence
  Synthetic
uuuaugcuauuguaagauua

SEQ ID NO: 792362 - RNA, 20 nt, Artificial Sequence
  Synthetic
uuaaguaacuaaacagauua

SEQ ID NO: 792363 - RNA, 20 nt, Artificial Sequence
  Synthetic
uagagauggagaacagauua

SEQ ID NO: 792364 - RNA, 20 nt, Artificial Sequence
  Synthetic
uuauuagcaucuccagauua

SEQ ID NO: 792365 - RNA, 20 nt, Artificial Sequence
  Synthetic
ucugaauugcucucagauua

SEQ ID NO: 792366 - RNA, 20 nt, Artificial Sequence
  Synthetic
aaagagacauucucagauua

SEQ ID NO: 792367 - RNA, 20 nt, Artificial Sequence
  Synthetic
cagauggcacauucagauua

SEQ ID NO: 792368 - RNA, 20 nt, Artificial Sequence
  Synthetic
acugagggcuaaagagauua

SEQ ID NO: 792369 - RNA, 20 nt, Artificial Sequence
  Synthetic
acaaauagguggagagauua

SEQ ID NO: 792370 - RNA, 20 nt, Artificial Sequence
  Synthetic
auuaauacaaagguagauua

SEQ ID NO: 792371 - RNA, 20 nt, Artificial Sequence
  Synthetic
auuauuuuauaguuagauua

SEQ ID NO: 792372 - RNA, 20 nt, Artificial Sequence
  Synthetic
acccuccaacagagcgauua

SEQ ID NO: 792373 - RNA, 20 nt, Artificial Sequence
  Synthetic
uagauagaauggggcgauua

SEQ ID NO: 792374 - RNA, 20 nt, Artificial Sequence
  Synthetic
uauauaccccaaaaggauua

SEQ ID NO: 792375 - RNA, 20 nt, Artificial Sequence
  Synthetic
ucacaaccuagggaggauua

SEQ ID NO: 792376 - RNA, 20 nt, Artificial Sequence
  Synthetic
ucaauagguuuguaggauua

SEQ ID NO: 792377 - RNA, 20 nt, Artificial Sequence
  Synthetic
uauuauaugaauuaggauua

SEQ ID NO: 792378 - RNA, 20 nt, Artificial Sequence
  Synthetic
cucuacuacccuuaggauua

SEQ ID NO: 792379 - RNA, 20 nt, Artificial Sequence
  Synthetic
uggaauaaaccagcggauua

SEQ ID NO: 792380 - RNA, 20 nt, Artificial Sequence
  Synthetic
aggcccauauucagggauua

SEQ ID NO: 792381 - RNA, 20 nt, Artificial Sequence
  Synthetic
cccaugacacauggggauua

SEQ ID NO: 792382 - RNA, 20 nt, Artificial Sequence
  Synthetic
ccuuugacaccuggggauua

SEQ ID NO: 792383 - RNA, 20 nt, Artificial Sequence
  Synthetic
cccaugacaucuggggauua

SEQ ID NO: 792384 - RNA, 20 nt, Artificial Sequence
  Synthetic
cccuugacacguggggauua

SEQ ID NO: 792385 - RNA, 20 nt, Artificial Sequence
  Synthetic
cuccugaguagcugggauua

SEQ ID NO: 792386 - RNA, 20 nt, Artificial Sequence
  Synthetic
cucccaaagugcugggauua

SEQ ID NO: 792387 - RNA, 20 nt, Artificial Sequence
  Synthetic
cagaccugcuauugggauua

SEQ ID NO: 792388 - RNA, 20 nt, Artificial Sequence
  Synthetic
aucuaaugacuaauggauua

SEQ ID NO: 792389 - RNA, 20 nt, Artificial Sequence
  Synthetic
agaacaaaugggauggauua

SEQ ID NO: 792390 - RNA, 20 nt, Artificial Sequence
  Synthetic
uagcauuguuggauggauua

SEQ ID NO: 792391 - RNA, 20 nt, Artificial Sequence
  Synthetic
auauugaagccaguggauua

SEQ ID NO: 792392 - RNA, 20 nt, Artificial Sequence
  Synthetic
aaauuacaaaauguggauua

SEQ ID NO: 792393 - RNA, 20 nt, Artificial Sequence
  Synthetic
acauuagacuuauuggauua

SEQ ID NO: 792394 - RNA, 20 nt, Artificial Sequence
  Synthetic
ucaauaagaaaagaugauua

SEQ ID NO: 792395 - RNA, 20 nt, Artificial Sequence
  Synthetic
ccacauauacaauaugauua

SEQ ID NO: 792396 - RNA, 20 nt, Artificial Sequence
  Synthetic
cguuaauuugcuuaugauua

SEQ ID NO: 792397 - RNA, 20 nt, Artificial Sequence
  Synthetic
uuuguuauuggaacugauua

SEQ ID NO: 792398 - RNA, 20 nt, Artificial Sequence
  Synthetic
ucuuugaaguucucugauua

SEQ ID NO: 792399 - RNA, 20 nt, Artificial Sequence
  Synthetic
cagauguguaucagugauua

SEQ ID NO: 792400 - RNA, 20 nt, Artificial Sequence
  Synthetic
aaggcagcaauuggugauua

SEQ ID NO: 792401 - RNA, 20 nt, Artificial Sequence
  Synthetic
ccccuuaucaaacuugauua

SEQ ID NO: 792402 - RNA, 20 nt, Artificial Sequence
  Synthetic
ucaggauaaggaguugauua

SEQ ID NO: 792403 - RNA, 20 nt, Artificial Sequence
  Synthetic
acugauaaaagauuugauua

SEQ ID NO: 792404 - RNA, 20 nt, Artificial Sequence
  Synthetic
aaaagaaagaaaaaauauua

SEQ ID NO: 792405 - RNA, 20 nt, Artificial Sequence
  Synthetic
agacuguaaacaaaauauua

SEQ ID NO: 792406 - RNA, 20 nt, Artificial Sequence
  Synthetic
uauccuauuuuaaaauauua

SEQ ID NO: 792407 - RNA, 20 nt, Artificial Sequence
  Synthetic
aagauaagaaagaaauauua

SEQ ID NO: 792408 - RNA, 20 nt, Artificial Sequence
  Synthetic
agggacauucuuaaauauua

SEQ ID NO: 792409 - RNA, 20 nt, Artificial Sequence
  Synthetic
ugaaacagacaccaauauua

SEQ ID NO: 792410 - RNA, 20 nt, Artificial Sequence
  Synthetic
aaccucucuacccaauauua

SEQ ID NO: 792411 - RNA, 20 nt, Artificial Sequence
  Synthetic
cuaauuggcucccaauauua

SEQ ID NO: 792412 - RNA, 20 nt, Artificial Sequence
  Synthetic
aacaagaugacggaauauua

SEQ ID NO: 792413 - RNA, 20 nt, Artificial Sequence
  Synthetic
caaaggaaagguuaauauua

SEQ ID NO: 792414 - RNA, 20 nt, Artificial Sequence
  Synthetic
acaccuaaauguuaauauua

SEQ ID NO: 792415 - RNA, 20 nt, Artificial Sequence
  Synthetic
aaauaugcccuuuaauauua

SEQ ID NO: 792416 - RNA, 20 nt, Artificial Sequence
  Synthetic
ccuaccucacuuccauauua

SEQ ID NO: 792417 - RNA, 20 nt, Artificial Sequence
  Synthetic
uuuuauuaauaagcauauua

SEQ ID NO: 792418 - RNA, 20 nt, Artificial Sequence
  Synthetic
uucucuguuuaagcauauua

SEQ ID NO: 792419 - RNA, 20 nt, Artificial Sequence
  Synthetic
acugacauacuuucauauua

SEQ ID NO: 792420 - RNA, 20 nt, Artificial Sequence
  Synthetic
ugauuagacacaagauauua

SEQ ID NO: 792421 - RNA, 20 nt, Artificial Sequence
  Synthetic
acauaaauggauagauauua

SEQ ID NO: 792422 - RNA, 20 nt, Artificial Sequence
  Synthetic
aaguaauaauuucgauauua

SEQ ID NO: 792423 - RNA, 20 nt, Artificial Sequence
  Synthetic
aggcuuuuuagaggauauua

SEQ ID NO: 792424 - RNA, 20 nt, Artificial Sequence
  Synthetic
auuaucaagugaggauauua

SEQ ID NO: 792425 - RNA, 20 nt, Artificial Sequence
  Synthetic
auaccauaguuaggauauua

SEQ ID NO: 792426 - RNA, 20 nt, Artificial Sequence
  Synthetic
uucgcaggcuuuugauauua

SEQ ID NO: 792427 - RNA, 20 nt, Artificial Sequence
  Synthetic
acugguagauaaauauauua

SEQ ID NO: 792428 - RNA, 20 nt, Artificial Sequence
  Synthetic
agguaauuauggauauauua

SEQ ID NO: 792429 - RNA, 20 nt, Artificial Sequence
  Synthetic
ccaaugguucugauauauua

SEQ ID NO: 792430 - RNA, 20 nt, Artificial Sequence
  Synthetic
uuuagucgacaacuauauua

SEQ ID NO: 792431 - RNA, 20 nt, Artificial Sequence
  Synthetic
uauuuagagaaauuauauua

SEQ ID NO: 792432 - RNA, 20 nt, Artificial Sequence
  Synthetic
cuccuuugcaacuuauauua

SEQ ID NO: 792433 - RNA, 20 nt, Artificial Sequence
  Synthetic
uggauuugaacuuuauauua

SEQ ID NO: 792434 - RNA, 20 nt, Artificial Sequence
  Synthetic
acaaaaaaaaaaaacuauua

SEQ ID NO: 792435 - RNA, 20 nt, Artificial Sequence
  Synthetic
auaauuuuccugaacuauua

SEQ ID NO: 792436 - RNA, 20 nt, Artificial Sequence
  Synthetic
aagacauuuuugaacuauua

SEQ ID NO: 792437 - RNA, 20 nt, Artificial Sequence
  Synthetic
auauuucugccuaacuauua

SEQ ID NO: 792438 - RNA, 20 nt, Artificial Sequence
  Synthetic
agaaaauaugcacacuauua

SEQ ID NO: 792439 - RNA, 20 nt, Artificial Sequence
  Synthetic
ucauuuaugccucacuauua

SEQ ID NO: 792440 - RNA, 20 nt, Artificial Sequence
  Synthetic
caaaaacuaucagacuauua

SEQ ID NO: 792441 - RNA, 20 nt, Artificial Sequence
  Synthetic
aagaggcucagagacuauua

SEQ ID NO: 792442 - RNA, 20 nt, Artificial Sequence
  Synthetic
uugccccucuuccccuauua

SEQ ID NO: 792443 - RNA, 20 nt, Artificial Sequence
  Synthetic
agaggccagaagagcuauua

SEQ ID NO: 792444 - RNA, 20 nt, Artificial Sequence
  Synthetic
agaaauguuuugagcuauua

SEQ ID NO: 792445 - RNA, 20 nt, Artificial Sequence
  Synthetic
acaaaaguaucagucuauua

SEQ ID NO: 792446 - RNA, 20 nt, Artificial Sequence
  Synthetic
uuucucuuagguuucuauua

SEQ ID NO: 792447 - RNA, 20 nt, Artificial Sequence
  Synthetic
acauaucaccuaaaguauua

SEQ ID NO: 792448 - RNA, 20 nt, Artificial Sequence
  Synthetic
uuuuuuuaauagaaguauua

SEQ ID NO: 792449 - RNA, 20 nt, Artificial Sequence
  Synthetic
uuuaaugauacuaaguauua

SEQ ID NO: 792450 - RNA, 20 nt, Artificial Sequence
  Synthetic
auuuauugauaacaguauua

SEQ ID NO: 792451 - RNA, 20 nt, Artificial Sequence
  Synthetic
uugccauugugacaguauua

SEQ ID NO: 792452 - RNA, 20 nt, Artificial Sequence
  Synthetic
cauagaaauggagaguauua

SEQ ID NO: 792453 - RNA, 20 nt, Artificial Sequence
  Synthetic
ccaucacaauaugaguauua

SEQ ID NO: 792454 - RNA, 20 nt, Artificial Sequence
  Synthetic
ugcaacaaccugagguauua

SEQ ID NO: 792455 - RNA, 20 nt, Artificial Sequence
  Synthetic
aaucaguuuucuggguauua

SEQ ID NO: 792456 - RNA, 20 nt, Artificial Sequence
  Synthetic
cuuuucugguuuugguauua

SEQ ID NO: 792457 - RNA, 20 nt, Artificial Sequence
  Synthetic
aaauuaacggauauguauua

SEQ ID NO: 792458 - RNA, 20 nt, Artificial Sequence
  Synthetic
ucuaaaccaguacuguauua

SEQ ID NO: 792459 - RNA, 20 nt, Artificial Sequence
  Synthetic
auuuaguuuuaucuguauua

SEQ ID NO: 792460 - RNA, 20 nt, Artificial Sequence
  Synthetic
cacagaauagaaguguauua

SEQ ID NO: 792461 - RNA, 20 nt, Artificial Sequence
  Synthetic
aaaauggggcuuuuguauua

SEQ ID NO: 792462 - RNA, 20 nt, Artificial Sequence
  Synthetic
aaauauugaguuuuguauua

SEQ ID NO: 792463 - RNA, 20 nt, Artificial Sequence
  Synthetic
ugaggcaacguaaauuauua

SEQ ID NO: 792464 - RNA, 20 nt, Artificial Sequence
  Synthetic
cauguauuuuucaauuauua

SEQ ID NO: 792465 - RNA, 20 nt, Artificial Sequence
  Synthetic
uaagaaagcacuaauuauua

SEQ ID NO: 792466 - RNA, 20 nt, Artificial Sequence
  Synthetic
cuggcuuguuuuaauuauua

SEQ ID NO: 792467 - RNA, 20 nt, Artificial Sequence
  Synthetic
uuauucauaauauauuauua

SEQ ID NO: 792468 - RNA, 20 nt, Artificial Sequence
  Synthetic
uuaauacaagcuucuuauua

SEQ ID NO: 792469 - RNA, 20 nt, Artificial Sequence
  Synthetic
ccacaaauaacaaguuauua

SEQ ID NO: 792470 - RNA, 20 nt, Artificial Sequence
  Synthetic
cuuuuaaaauacaguuauua

SEQ ID NO: 792471 - RNA, 20 nt, Artificial Sequence
  Synthetic
caaagauaggucaguuauua

SEQ ID NO: 792472 - RNA, 20 nt, Artificial Sequence
  Synthetic
caagaccagaaaauuuauua

SEQ ID NO: 792473 - RNA, 20 nt, Artificial Sequence
  Synthetic
cauagcaucugaauuuauua

SEQ ID NO: 792474 - RNA, 20 nt, Artificial Sequence
  Synthetic
aucugacaaauaauuuauua

SEQ ID NO: 792475 - RNA, 20 nt, Artificial Sequence
  Synthetic
uacagcauggauauuuauua

SEQ ID NO: 792476 - RNA, 20 nt, Artificial Sequence
  Synthetic
ugauaacucauuauuuauua

SEQ ID NO: 792477 - RNA, 20 nt, Artificial Sequence
  Synthetic
ucaugugacucacuuuauua

SEQ ID NO: 792478 - RNA, 20 nt, Artificial Sequence
  Synthetic
caauagcguggucuuuauua

SEQ ID NO: 792479 - RNA, 20 nt, Artificial Sequence
  Synthetic
uauccucaucuauuuuauua

SEQ ID NO: 792480 - RNA, 20 nt, Artificial Sequence
  Synthetic
auuguccccuucuuuuauua

SEQ ID NO: 792481 - RNA, 20 nt, Artificial Sequence
  Synthetic
uucagaguaaaguuuuauua

SEQ ID NO: 792482 - RNA, 20 nt, Artificial Sequence
  Synthetic
cucuggaauuauuuuuauua

SEQ ID NO: 792483 - RNA, 20 nt, Artificial Sequence
  Synthetic
uaauaacacucuuuuuauua

SEQ ID NO: 792484 - RNA, 20 nt, Artificial Sequence
  Synthetic
auuugcccauuuuuuuauua

SEQ ID NO: 792485 - RNA, 20 nt, Artificial Sequence
  Synthetic
ucaucaaacuuaaaaacuua

SEQ ID NO: 792486 - RNA, 20 nt, Artificial Sequence
  Synthetic
auacaauauaccaaaacuua

SEQ ID NO: 792487 - RNA, 20 nt, Artificial Sequence
  Synthetic
auaaguaaaccacaaacuua

SEQ ID NO: 792488 - RNA, 20 nt, Artificial Sequence
  Synthetic
uuuuucccuucccaaacuua

SEQ ID NO: 792489 - RNA, 20 nt, Artificial Sequence
  Synthetic
agaaaucgaucucaaacuua

SEQ ID NO: 792490 - RNA, 20 nt, Artificial Sequence
  Synthetic
aaguuuucacuucaaacuua

SEQ ID NO: 792491 - RNA, 20 nt, Artificial Sequence
  Synthetic
aaaaccagacaggaaacuua

SEQ ID NO: 792492 - RNA, 20 nt, Artificial Sequence
  Synthetic
cuauggcuugccuaaacuua

SEQ ID NO: 792493 - RNA, 20 nt, Artificial Sequence
  Synthetic
uauaaguugugagcaacuua

SEQ ID NO: 792494 - RNA, 20 nt, Artificial Sequence
  Synthetic
acagacucagaaagaacuua

SEQ ID NO: 792495 - RNA, 20 nt, Artificial Sequence
  Synthetic
caugcauguugaagaacuua

SEQ ID NO: 792496 - RNA, 20 nt, Artificial Sequence
  Synthetic
aaaccuaaccucagaacuua

SEQ ID NO: 792497 - RNA, 20 nt, Artificial Sequence
  Synthetic
aaagucucuagaggaacuua

SEQ ID NO: 792498 - RNA, 20 nt, Artificial Sequence
  Synthetic
acaagguacagaugaacuua

SEQ ID NO: 792499 - RNA, 20 nt, Artificial Sequence
  Synthetic
auugggagaagcugaacuua

SEQ ID NO: 792500 - RNA, 20 nt, Artificial Sequence
  Synthetic
ccugguuugaauugaacuua

SEQ ID NO: 792501 - RNA, 20 nt, Artificial Sequence
  Synthetic
uugcucagagaaauaacuua

SEQ ID NO: 792502 - RNA, 20 nt, Artificial Sequence
  Synthetic
aaaauguuuucauuaacuua

SEQ ID NO: 792503 - RNA, 20 nt, Artificial Sequence
  Synthetic
aagugauggguucacacuua

SEQ ID NO: 792504 - RNA, 20 nt, Artificial Sequence
  Synthetic
caucguucaacucccacuua

SEQ ID NO: 792505 - RNA, 20 nt, Artificial Sequence
  Synthetic
uuuuccuagucucccacuua

SEQ ID NO: 792506 - RNA, 20 nt, Artificial Sequence
  Synthetic
accauacugcauuccacuua

SEQ ID NO: 792507 - RNA, 20 nt, Artificial Sequence
  Synthetic
cauaacagagcuuccacuua

SEQ ID NO: 792508 - RNA, 20 nt, Artificial Sequence
  Synthetic
auuauuucuggaagcacuua

SEQ ID NO: 792509 - RNA, 20 nt, Artificial Sequence
  Synthetic
cuuucucaagcaggcacuua

SEQ ID NO: 792510 - RNA, 20 nt, Artificial Sequence
  Synthetic
uccuuuuguguaugcacuua

SEQ ID NO: 792511 - RNA, 20 nt, Artificial Sequence
  Synthetic
ugaaguaaaugcaucacuua

SEQ ID NO: 792512 - RNA, 20 nt, Artificial Sequence
  Synthetic
uuugugggaauuaucacuua

SEQ ID NO: 792513 - RNA, 20 nt, Artificial Sequence
  Synthetic
caggaagcuguucucacuua

SEQ ID NO: 792514 - RNA, 20 nt, Artificial Sequence
  Synthetic
uauguagcuuuucucacuua

SEQ ID NO: 792515 - RNA, 20 nt, Artificial Sequence
  Synthetic
auucucaggcagaagacuua

SEQ ID NO: 792516 - RNA, 20 nt, Artificial Sequence
  Synthetic
aaagauuagagagagacuua

SEQ ID NO: 792517 - RNA, 20 nt, Artificial Sequence
  Synthetic
aaccuacacaaagggacuua

SEQ ID NO: 792518 - RNA, 20 nt, Artificial Sequence
  Synthetic
aaagagguuuaauggacuua

SEQ ID NO: 792519 - RNA, 20 nt, Artificial Sequence
  Synthetic
uuaauucaaagauggacuua

SEQ ID NO: 792520 - RNA, 20 nt, Artificial Sequence
  Synthetic
uuaaccauaccaaugacuua

SEQ ID NO: 792521 - RNA, 20 nt, Artificial Sequence
  Synthetic
auuuauguuggaaugacuua

SEQ ID NO: 792522 - RNA, 20 nt, Artificial Sequence
  Synthetic
uucucauguuauaugacuua

SEQ ID NO: 792523 - RNA, 20 nt, Artificial Sequence
  Synthetic
agggguuuucuuuugacuua

SEQ ID NO: 792524 - RNA, 20 nt, Artificial Sequence
  Synthetic
uggaauuuggagaauacuua

SEQ ID NO: 792525 - RNA, 20 nt, Artificial Sequence
  Synthetic
uuaauucauuuacauacuua

SEQ ID NO: 792526 - RNA, 20 nt, Artificial Sequence
  Synthetic
aaguuuguuuaggauacuua

SEQ ID NO: 792527 - RNA, 20 nt, Artificial Sequence
  Synthetic
ucccuuuaauuuuauacuua

SEQ ID NO: 792528 - RNA, 20 nt, Artificial Sequence
  Synthetic
uuuauuucauuuuauacuua

SEQ ID NO: 792529 - RNA, 20 nt, Artificial Sequence
  Synthetic
uccuuuucuggaacuacuua

SEQ ID NO: 792530 - RNA, 20 nt, Artificial Sequence
  Synthetic
cugcaaaaagggaguacuua

SEQ ID NO: 792531 - RNA, 20 nt, Artificial Sequence
  Synthetic
ccuugcuuuaauuguacuua

SEQ ID NO: 792532 - RNA, 20 nt, Artificial Sequence
  Synthetic
auuuguauuaaaauuacuua

SEQ ID NO: 792533 - RNA, 20 nt, Artificial Sequence
  Synthetic
uuuuaauaaaacauuacuua

SEQ ID NO: 792534 - RNA, 20 nt, Artificial Sequence
  Synthetic
caugaagacagacuuacuua

SEQ ID NO: 792535 - RNA, 20 nt, Artificial Sequence
  Synthetic
auaaguuugugguuuacuua

SEQ ID NO: 792536 - RNA, 20 nt, Artificial Sequence
  Synthetic
aaauucuuacaacaaccuua

SEQ ID NO: 792537 - RNA, 20 nt, Artificial Sequence
  Synthetic
ucaugguauacauaaccuua

SEQ ID NO: 792538 - RNA, 20 nt, Artificial Sequence
  Synthetic
cuucccauuugcuaaccuua

SEQ ID NO: 792539 - RNA, 20 nt, Artificial Sequence
  Synthetic
cuuauguaugguuaaccuua

SEQ ID NO: 792540 - RNA, 20 nt, Artificial Sequence
  Synthetic
ccccucauuuauccaccuua

SEQ ID NO: 792541 - RNA, 20 nt, Artificial Sequence
  Synthetic
aaaaaaauuaggugaccuua

SEQ ID NO: 792542 - RNA, 20 nt, Artificial Sequence
  Synthetic
uugguguccucuuuaccuua

SEQ ID NO: 792543 - RNA, 20 nt, Artificial Sequence
  Synthetic
auaauaugagguuuaccuua

SEQ ID NO: 792544 - RNA, 20 nt, Artificial Sequence
  Synthetic
agcaaguguaugaacccuua

SEQ ID NO: 792545 - RNA, 20 nt, Artificial Sequence
  Synthetic
auuacuaaaucugacccuua

SEQ ID NO: 792546 - RNA, 20 nt, Artificial Sequence
  Synthetic
caauauaguuucuacccuua

SEQ ID NO: 792547 - RNA, 20 nt, Artificial Sequence
  Synthetic
agaccauagcagcccccuua

SEQ ID NO: 792548 - RNA, 20 nt, Artificial Sequence
  Synthetic
uugccaguuuucuccccuua

SEQ ID NO: 792549 - RNA, 20 nt, Artificial Sequence
  Synthetic
cuuuguaaauuaggcccuua

SEQ ID NO: 792550 - RNA, 20 nt, Artificial Sequence
  Synthetic
cuaagaaugggaaucccuua

SEQ ID NO: 792551 - RNA, 20 nt, Artificial Sequence
  Synthetic
uaaaacuaaacauucccuua

SEQ ID NO: 792552 - RNA, 20 nt, Artificial Sequence
  Synthetic
uccaagggagagaagccuua

SEQ ID NO: 792553 - RNA, 20 nt, Artificial Sequence
  Synthetic
acauuauucugugagccuua

SEQ ID NO: 792554 - RNA, 20 nt, Artificial Sequence
  Synthetic
ucacuguaauuuccgccuua

SEQ ID NO: 792555 - RNA, 20 nt, Artificial Sequence
  Synthetic
uguaaaccauaauggccuua

SEQ ID NO: 792556 - RNA, 20 nt, Artificial Sequence
  Synthetic
ucuauuggguauaugccuua

SEQ ID NO: 792557 - RNA, 20 nt, Artificial Sequence
  Synthetic
cucaaagacuuuaugccuua

SEQ ID NO: 792558 - RNA, 20 nt, Artificial Sequence
  Synthetic
uauaauuggcaguugccuua

SEQ ID NO: 792559 - RNA, 20 nt, Artificial Sequence
  Synthetic
accauuccguaaaauccuua

SEQ ID NO: 792560 - RNA, 20 nt, Artificial Sequence
  Synthetic
aauucuucauguuauccuua

SEQ ID NO: 792561 - RNA, 20 nt, Artificial Sequence
  Synthetic
aacuacuccuuuuauccuua

SEQ ID NO: 792562 - RNA, 20 nt, Artificial Sequence
  Synthetic
aguuggagaucaucuccuua

SEQ ID NO: 792563 - RNA, 20 nt, Artificial Sequence
  Synthetic
agccuuaucuguaguccuua

SEQ ID NO: 792564 - RNA, 20 nt, Artificial Sequence
  Synthetic
aaauacuugugcuguccuua

SEQ ID NO: 792565 - RNA, 20 nt, Artificial Sequence
  Synthetic
cccuuuauuuguauuccuua

SEQ ID NO: 792566 - RNA, 20 nt, Artificial Sequence
  Synthetic
cauuuuuaaaaacuuccuua

SEQ ID NO: 792567 - RNA, 20 nt, Artificial Sequence
  Synthetic
agcuagguuucaguuccuua

SEQ ID NO: 792568 - RNA, 20 nt, Artificial Sequence
  Synthetic
uucucuccuuccuuuccuua

SEQ ID NO: 792569 - RNA, 20 nt, Artificial Sequence
  Synthetic
uuccuggcugaguuuccuua

SEQ ID NO: 792570 - RNA, 20 nt, Artificial Sequence
  Synthetic
ucuuuuuuuucuuuuccuua

SEQ ID NO: 792571 - RNA, 20 nt, Artificial Sequence
  Synthetic
cauauuuggugaaaagcuua

SEQ ID NO: 792572 - RNA, 20 nt, Artificial Sequence
  Synthetic
cucccgggccugaaagcuua

SEQ ID NO: 792573 - RNA, 20 nt, Artificial Sequence
  Synthetic
aauuuucaccuucaagcuua

SEQ ID NO: 792574 - RNA, 20 nt, Artificial Sequence
  Synthetic
ccuuugucucuucaagcuua

SEQ ID NO: 792575 - RNA, 20 nt, Artificial Sequence
  Synthetic
uuaggaggauuucaagcuua

SEQ ID NO: 792576 - RNA, 20 nt, Artificial Sequence
  Synthetic
uucaguaacauagaagcuua

SEQ ID NO: 792577 - RNA, 20 nt, Artificial Sequence
  Synthetic
ccuccccaauuagaagcuua

SEQ ID NO: 792578 - RNA, 20 nt, Artificial Sequence
  Synthetic
uuuuagcuaagaacagcuua

SEQ ID NO: 792579 - RNA, 20 nt, Artificial Sequence
  Synthetic
cucuguaaucaugcagcuua

SEQ ID NO: 792580 - RNA, 20 nt, Artificial Sequence
  Synthetic
ugaaguugcuuaucagcuua

SEQ ID NO: 792581 - RNA, 20 nt, Artificial Sequence
  Synthetic
uuagugaagacaagagcuua

SEQ ID NO: 792582 - RNA, 20 nt, Artificial Sequence
  Synthetic
cuaacucgucaucuagcuua

SEQ ID NO: 792583 - RNA, 20 nt, Artificial Sequence
  Synthetic
aaauuuauuacuguagcuua

SEQ ID NO: 792584 - RNA, 20 nt, Artificial Sequence
  Synthetic
uauccuaaauaacaggcuua

SEQ ID NO: 792585 - RNA, 20 nt, Artificial Sequence
  Synthetic
caaguucauggaggggcuua

SEQ ID NO: 792586 - RNA, 20 nt, Artificial Sequence
  Synthetic
uaguccaacaucauggcuua

SEQ ID NO: 792587 - RNA, 20 nt, Artificial Sequence
  Synthetic
uuaaaaagauuuauggcuua

SEQ ID NO: 792588 - RNA, 20 nt, Artificial Sequence
  Synthetic
aagcacucuauuuuggcuua

SEQ ID NO: 792589 - RNA, 20 nt, Artificial Sequence
  Synthetic
uaucaucaagguaaugcuua

SEQ ID NO: 792590 - RNA, 20 nt, Artificial Sequence
  Synthetic
ugucaaacuagccaugcuua

SEQ ID NO: 792591 - RNA, 20 nt, Artificial Sequence
  Synthetic
auuaagcuuacaucugcuua

SEQ ID NO: 792592 - RNA, 20 nt, Artificial Sequence
  Synthetic
ccacaugugaccucugcuua

SEQ ID NO: 792593 - RNA, 20 nt, Artificial Sequence
  Synthetic
uugaugguugauucugcuua

SEQ ID NO: 792594 - RNA, 20 nt, Artificial Sequence
  Synthetic
acuaauuauuuuucugcuua

SEQ ID NO: 792595 - RNA, 20 nt, Artificial Sequence
  Synthetic
caaugaauggaaagugcuua

SEQ ID NO: 792596 - RNA, 20 nt, Artificial Sequence
  Synthetic
auagauucucauggugcuua

SEQ ID NO: 792597 - RNA, 20 nt, Artificial Sequence
  Synthetic
accaucuuuucaugugcuua

SEQ ID NO: 792598 - RNA, 20 nt, Artificial Sequence
  Synthetic
uaaaggcauuucugugcuua

SEQ ID NO: 792599 - RNA, 20 nt, Artificial Sequence
  Synthetic
uaguauuuugcuauugcuua

SEQ ID NO: 792600 - RNA, 20 nt, Artificial Sequence
  Synthetic
uugcuuugugcuguugcuua

SEQ ID NO: 792601 - RNA, 20 nt, Artificial Sequence
  Synthetic
ugacuccuuacuuuugcuua

SEQ ID NO: 792602 - RNA, 20 nt, Artificial Sequence
  Synthetic
uagaccagauguuuugcuua

SEQ ID NO: 792603 - RNA, 20 nt, Artificial Sequence
  Synthetic
uugaaaggcagcaaaucuua

SEQ ID NO: 792604 - RNA, 20 nt, Artificial Sequence
  Synthetic
cucuuauuaaagaaaucuua

SEQ ID NO: 792605 - RNA, 20 nt, Artificial Sequence
  Synthetic
auuucaacuuggcaaucuua

SEQ ID NO: 792606 - RNA, 20 nt, Artificial Sequence
  Synthetic
agucuauuagcauaaucuua

SEQ ID NO: 792607 - RNA, 20 nt, Artificial Sequence
  Synthetic
acaauucacaaguaaucuua

SEQ ID NO: 792608 - RNA, 20 nt, Artificial Sequence
  Synthetic
uuucacuuagcguaaucuua

SEQ ID NO: 792609 - RNA, 20 nt, Artificial Sequence
  Synthetic
aaaagauaaaauuaaucuua

SEQ ID NO: 792610 - RNA, 20 nt, Artificial Sequence
  Synthetic
ucccccaauaauuaaucuua

SEQ ID NO: 792611 - RNA, 20 nt, Artificial Sequence
  Synthetic
cagcacuucauuuaaucuua

SEQ ID NO: 792612 - RNA, 20 nt, Artificial Sequence
  Synthetic
uuuacuggcucaacaucuua

SEQ ID NO: 792613 - RNA, 20 nt, Artificial Sequence
  Synthetic
auuuuuaugaucacaucuua

SEQ ID NO: 792614 - RNA, 20 nt, Artificial Sequence
  Synthetic
cuaaauccucuuucaucuua

SEQ ID NO: 792615 - RNA, 20 nt, Artificial Sequence
  Synthetic
aaaaaaaucccaagaucuua

SEQ ID NO: 792616 - RNA, 20 nt, Artificial Sequence
  Synthetic
ugcgggauugcuagaucuua

SEQ ID NO: 792617 - RNA, 20 nt, Artificial Sequence
  Synthetic
cccagggggacaugaucuua

SEQ ID NO: 792618 - RNA, 20 nt, Artificial Sequence
  Synthetic
ccucauucugcaugaucuua

SEQ ID NO: 792619 - RNA, 20 nt, Artificial Sequence
  Synthetic
uucacuauuuccugaucuua

SEQ ID NO: 792620 - RNA, 20 nt, Artificial Sequence
  Synthetic
uugucuuguuucugaucuua

SEQ ID NO: 792621 - RNA, 20 nt, Artificial Sequence
  Synthetic
ugaugaaaauggugaucuua

SEQ ID NO: 792622 - RNA, 20 nt, Artificial Sequence
  Synthetic
auuuauauauugugaucuua

SEQ ID NO: 792623 - RNA, 20 nt, Artificial Sequence
  Synthetic
uguucugcaguuugaucuua

SEQ ID NO: 792624 - RNA, 20 nt, Artificial Sequence
  Synthetic
uaaauacaaaugguaucuua

SEQ ID NO: 792625 - RNA, 20 nt, Artificial Sequence
  Synthetic
augcccacaacuguaucuua

SEQ ID NO: 792626 - RNA, 20 nt, Artificial Sequence
  Synthetic
cuguauacauuguuaucuua

SEQ ID NO: 792627 - RNA, 20 nt, Artificial Sequence
  Synthetic
cgaguuuucuuguuaucuua

SEQ ID NO: 792628 - RNA, 20 nt, Artificial Sequence
  Synthetic
cauaccuaauauuuaucuua

SEQ ID NO: 792629 - RNA, 20 nt, Artificial Sequence
  Synthetic
auaauaaaaucuaccucuua

SEQ ID NO: 792630 - RNA, 20 nt, Artificial Sequence
  Synthetic
aguuggaauguuaccucuua

SEQ ID NO: 792631 - RNA, 20 nt, Artificial Sequence
  Synthetic
aguucugcaucagccucuua

SEQ ID NO: 792632 - RNA, 20 nt, Artificial Sequence
  Synthetic
uauucacacauagccucuua

SEQ ID NO: 792633 - RNA, 20 nt, Artificial Sequence
  Synthetic
uucauauugucuuccucuua

SEQ ID NO: 792634 - RNA, 20 nt, Artificial Sequence
  Synthetic
aauaacuggauaagcucuua

SEQ ID NO: 792635 - RNA, 20 nt, Artificial Sequence
  Synthetic
cuuccguaacugagcucuua

SEQ ID NO: 792636 - RNA, 20 nt, Artificial Sequence
  Synthetic
uucugcuauuauagcucuua

SEQ ID NO: 792637 - RNA, 20 nt, Artificial Sequence
  Synthetic
uccccacuuuguggcucuua

SEQ ID NO: 792638 - RNA, 20 nt, Artificial Sequence
  Synthetic
aucaguguuaucugcucuua

SEQ ID NO: 792639 - RNA, 20 nt, Artificial Sequence
  Synthetic
aaauugcauguaaucucuua

SEQ ID NO: 792640 - RNA, 20 nt, Artificial Sequence
  Synthetic
aggaauguauagaucucuua

SEQ ID NO: 792641 - RNA, 20 nt, Artificial Sequence
  Synthetic
uucccacaacaucucucuua

SEQ ID NO: 792642 - RNA, 20 nt, Artificial Sequence
  Synthetic
aguuauuuugcucucucuua

SEQ ID NO: 792643 - RNA, 20 nt, Artificial Sequence
  Synthetic
aagaugacgugagucucuua

SEQ ID NO: 792644 - RNA, 20 nt, Artificial Sequence
  Synthetic
auaagcaguuuauucucuua

SEQ ID NO: 792645 - RNA, 20 nt, Artificial Sequence
  Synthetic
cagaacaucaguuucucuua

SEQ ID NO: 792646 - RNA, 20 nt, Artificial Sequence
  Synthetic
ccggcagccaagaagucuua

SEQ ID NO: 792647 - RNA, 20 nt, Artificial Sequence
  Synthetic
agcaguuaagaugagucuua

SEQ ID NO: 792648 - RNA, 20 nt, Artificial Sequence
  Synthetic
cuugggauauaauagucuua

SEQ ID NO: 792649 - RNA, 20 nt, Artificial Sequence
  Synthetic
cuucccaaccccuagucuua

SEQ ID NO: 792650 - RNA, 20 nt, Artificial Sequence
  Synthetic
acagacagauucuagucuua

SEQ ID NO: 792651 - RNA, 20 nt, Artificial Sequence
  Synthetic
ccuggagccccugggucuua

SEQ ID NO: 792652 - RNA, 20 nt, Artificial Sequence
  Synthetic
uaacaccaucaguggucuua

SEQ ID NO: 792653 - RNA, 20 nt, Artificial Sequence
  Synthetic
ccacuacuguuaaugucuua

SEQ ID NO: 792654 - RNA, 20 nt, Artificial Sequence
  Synthetic
auuuguauguggaugucuua

SEQ ID NO: 792655 - RNA, 20 nt, Artificial Sequence
  Synthetic
uuccaacaugucuugucuua

SEQ ID NO: 792656 - RNA, 20 nt, Artificial Sequence
  Synthetic
uccagagcauguuugucuua

SEQ ID NO: 792657 - RNA, 20 nt, Artificial Sequence
  Synthetic
ugucuauaauaaaauucuua

SEQ ID NO: 792658 - RNA, 20 nt, Artificial Sequence
  Synthetic
uagaaauauuaaaauucuua

SEQ ID NO: 792659 - RNA, 20 nt, Artificial Sequence
  Synthetic
aguuacucuacaaauucuua

SEQ ID NO: 792660 - RNA, 20 nt, Artificial Sequence
  Synthetic
uuagauauuuguaauucuua

SEQ ID NO: 792661 - RNA, 20 nt, Artificial Sequence
  Synthetic
aaguuucucucacauucuua

SEQ ID NO: 792662 - RNA, 20 nt, Artificial Sequence
  Synthetic
cuaggaaaaacucauucuua

SEQ ID NO: 792663 - RNA, 20 nt, Artificial Sequence
  Synthetic
auuuauaaucuucauucuua

SEQ ID NO: 792664 - RNA, 20 nt, Artificial Sequence
  Synthetic
caguuaagaacagauucuua

SEQ ID NO: 792665 - RNA, 20 nt, Artificial Sequence
  Synthetic
aaaagguuuggugauucuua

SEQ ID NO: 792666 - RNA, 20 nt, Artificial Sequence
  Synthetic
cacacucuacucccuucuua

SEQ ID NO: 792667 - RNA, 20 nt, Artificial Sequence
  Synthetic
uugaaaaacuucccuucuua

SEQ ID NO: 792668 - RNA, 20 nt, Artificial Sequence
  Synthetic
ugaaaaugccuuccuucuua

SEQ ID NO: 792669 - RNA, 20 nt, Artificial Sequence
  Synthetic
uuuuugccagaagcuucuua

SEQ ID NO: 792670 - RNA, 20 nt, Artificial Sequence
  Synthetic
aggugagaaaaaucuucuua

SEQ ID NO: 792671 - RNA, 20 nt, Artificial Sequence
  Synthetic
aaaaaccaauuaucuucuua

SEQ ID NO: 792672 - RNA, 20 nt, Artificial Sequence
  Synthetic
ccuucuucuucuucuucuua

SEQ ID NO: 792673 - RNA, 20 nt, Artificial Sequence
  Synthetic
cuaauagguguaaguucuua

SEQ ID NO: 792674 - RNA, 20 nt, Artificial Sequence
  Synthetic
ugaauaucaucaauuucuua

SEQ ID NO: 792675 - RNA, 20 nt, Artificial Sequence
  Synthetic
aggacaguguuuauuucuua

SEQ ID NO: 792676 - RNA, 20 nt, Artificial Sequence
  Synthetic
caugaacucauccuuucuua

SEQ ID NO: 792677 - RNA, 20 nt, Artificial Sequence
  Synthetic
cuucuuuuucuaguuucuua

SEQ ID NO: 792678 - RNA, 20 nt, Artificial Sequence
  Synthetic
auaaaguuuucuguuucuua

SEQ ID NO: 792679 - RNA, 20 nt, Artificial Sequence
  Synthetic
aagaagaauccauuuucuua

SEQ ID NO: 792680 - RNA, 20 nt, Artificial Sequence
  Synthetic
cauuacaauuucuuuucuua

SEQ ID NO: 792681 - RNA, 20 nt, Artificial Sequence
  Synthetic
aucuuuaaaaaguuuucuua

SEQ ID NO: 792682 - RNA, 20 nt, Artificial Sequence
  Synthetic
auuauuauuccuuuuucuua

SEQ ID NO: 792683 - RNA, 20 nt, Artificial Sequence
  Synthetic
uuacuaaaauuuuuuucuua

SEQ ID NO: 792684 - RNA, 20 nt, Artificial Sequence
  Synthetic
aguggaggaggaaaaaguua

SEQ ID NO: 792685 - RNA, 20 nt, Artificial Sequence
  Synthetic
agggugaggggaaaaaguua

SEQ ID NO: 792686 - RNA, 20 nt, Artificial Sequence
  Synthetic
acuuuaaggaccaaaaguua

SEQ ID NO: 792687 - RNA, 20 nt, Artificial Sequence
  Synthetic
uaguuauuuuaagaaaguua

SEQ ID NO: 792688 - RNA, 20 nt, Artificial Sequence
  Synthetic
aguuguuacuuguaaaguua

SEQ ID NO: 792689 - RNA, 20 nt, Artificial Sequence
  Synthetic
auuagugucccuucaaguua

SEQ ID NO: 792690 - RNA, 20 nt, Artificial Sequence
  Synthetic
acuuuugaguaaagaaguua

SEQ ID NO: 792691 - RNA, 20 nt, Artificial Sequence
  Synthetic
uauuuuaagucaagaaguua

SEQ ID NO: 792692 - RNA, 20 nt, Artificial Sequence
  Synthetic
aagcccuaggccggaaguua

SEQ ID NO: 792693 - RNA, 20 nt, Artificial Sequence
  Synthetic
auuccauauggcugaaguua

SEQ ID NO: 792694 - RNA, 20 nt, Artificial Sequence
  Synthetic
aauuaggauauaauaaguua

SEQ ID NO: 792695 - RNA, 20 nt, Artificial Sequence
  Synthetic
auugagauacagauaaguua

SEQ ID NO: 792696 - RNA, 20 nt, Artificial Sequence
  Synthetic
cuacaucaguggauaaguua

SEQ ID NO: 792697 - RNA, 20 nt, Artificial Sequence
  Synthetic
aagugacagaagcuaaguua

SEQ ID NO: 792698 - RNA, 20 nt, Artificial Sequence
  Synthetic
uauaaaaauauaguaaguua

SEQ ID NO: 792699 - RNA, 20 nt, Artificial Sequence
  Synthetic
uacaugacuuggguaaguua

SEQ ID NO: 792700 - RNA, 20 nt, Artificial Sequence
  Synthetic
augcuuauaaaauuaaguua

SEQ ID NO: 792701 - RNA, 20 nt, Artificial Sequence
  Synthetic
auuauaauuggauuaaguua

SEQ ID NO: 792702 - RNA, 20 nt, Artificial Sequence
  Synthetic
acauauauacacuuaaguua

SEQ ID NO: 792703 - RNA, 20 nt, Artificial Sequence
  Synthetic
uaauaaagggaaaacaguua

SEQ ID NO: 792704 - RNA, 20 nt, Artificial Sequence
  Synthetic
auauaaaaguuauccaguua

SEQ ID NO: 792705 - RNA, 20 nt, Artificial Sequence
  Synthetic
augguuaccauuuccaguua

SEQ ID NO: 792706 - RNA, 20 nt, Artificial Sequence
  Synthetic
acacgauaauggcucaguua

SEQ ID NO: 792707 - RNA, 20 nt, Artificial Sequence
  Synthetic
uauaaauugaugcucaguua

SEQ ID NO: 792708 - RNA, 20 nt, Artificial Sequence
  Synthetic
acucacucauucuucaguua

SEQ ID NO: 792709 - RNA, 20 nt, Artificial Sequence
  Synthetic
agacuacaaaguuucaguua

SEQ ID NO: 792710 - RNA, 20 nt, Artificial Sequence
  Synthetic
uggccucauaaaaagaguua

SEQ ID NO: 792711 - RNA, 20 nt, Artificial Sequence
  Synthetic
acacauuagagaaagaguua

SEQ ID NO: 792712 - RNA, 20 nt, Artificial Sequence
  Synthetic
aacagcuaaggaaagaguua

SEQ ID NO: 792713 - RNA, 20 nt, Artificial Sequence
  Synthetic
uuaauuaaugucaagaguua

SEQ ID NO: 792714 - RNA, 20 nt, Artificial Sequence
  Synthetic
auacuauaaccucagaguua

SEQ ID NO: 792715 - RNA, 20 nt, Artificial Sequence
  Synthetic
uucucuuuaaaauagaguua

SEQ ID NO: 792716 - RNA, 20 nt, Artificial Sequence
  Synthetic
ucuuguuguaucaggaguua

SEQ ID NO: 792717 - RNA, 20 nt, Artificial Sequence
  Synthetic
uaaucaaggcauaggaguua

SEQ ID NO: 792718 - RNA, 20 nt, Artificial Sequence
  Synthetic
auagucuuacuuaggaguua

SEQ ID NO: 792719 - RNA, 20 nt, Artificial Sequence
  Synthetic
acuuuggagagcgggaguua

SEQ ID NO: 792720 - RNA, 20 nt, Artificial Sequence
  Synthetic
agaagccuguauuggaguua

SEQ ID NO: 792721 - RNA, 20 nt, Artificial Sequence
  Synthetic
uggccucauaaaaugaguua

SEQ ID NO: 792722 - RNA, 20 nt, Artificial Sequence
  Synthetic
ccaguguaauaacugaguua

SEQ ID NO: 792723 - RNA, 20 nt, Artificial Sequence
  Synthetic
aauucuaggaaucugaguua

SEQ ID NO: 792724 - RNA, 20 nt, Artificial Sequence
  Synthetic
uaaaauucccuucugaguua

SEQ ID NO: 792725 - RNA, 20 nt, Artificial Sequence
  Synthetic
caaugacacauaaauaguua

SEQ ID NO: 792726 - RNA, 20 nt, Artificial Sequence
  Synthetic
aauggacuuaauaauaguua

SEQ ID NO: 792727 - RNA, 20 nt, Artificial Sequence
  Synthetic
ugauuaagucaggauaguua

SEQ ID NO: 792728 - RNA, 20 nt, Artificial Sequence
  Synthetic
ucacauucacaauauaguua

SEQ ID NO: 792729 - RNA, 20 nt, Artificial Sequence
  Synthetic
caucaggauuauuauaguua

SEQ ID NO: 792730 - RNA, 20 nt, Artificial Sequence
  Synthetic
ugaguuuggcuuuauaguua

SEQ ID NO: 792731 - RNA, 20 nt, Artificial Sequence
  Synthetic
auguauaacaaaacuaguua

SEQ ID NO: 792732 - RNA, 20 nt, Artificial Sequence
  Synthetic
ucaauuuauuuagcuaguua

SEQ ID NO: 792733 - RNA, 20 nt, Artificial Sequence
  Synthetic
aaauggcaaugggcuaguua

SEQ ID NO: 792734 - RNA, 20 nt, Artificial Sequence
  Synthetic
uccuuucuuggaucuaguua

SEQ ID NO: 792735 - RNA, 20 nt, Artificial Sequence
  Synthetic
caaauccauauuucuaguua

SEQ ID NO: 792736 - RNA, 20 nt, Artificial Sequence
  Synthetic
augagugaacaagguaguua

SEQ ID NO: 792737 - RNA, 20 nt, Artificial Sequence
  Synthetic
auauuugcauuugguaguua

SEQ ID NO: 792738 - RNA, 20 nt, Artificial Sequence
  Synthetic
cagcaccacagguguaguua

SEQ ID NO: 792739 - RNA, 20 nt, Artificial Sequence
  Synthetic
uugcuugaguuuauuaguua

SEQ ID NO: 792740 - RNA, 20 nt, Artificial Sequence
  Synthetic
augaauuauucuuaacguua

SEQ ID NO: 792741 - RNA, 20 nt, Artificial Sequence
  Synthetic
agaaggaccauuugacguua

SEQ ID NO: 792742 - RNA, 20 nt, Artificial Sequence
  Synthetic
caaagacuucucacccguua

SEQ ID NO: 792743 - RNA, 20 nt, Artificial Sequence
  Synthetic
aauuuuuucuuggaucguua

SEQ ID NO: 792744 - RNA, 20 nt, Artificial Sequence
  Synthetic
ugacuccuuacuucucguua

SEQ ID NO: 792745 - RNA, 20 nt, Artificial Sequence
  Synthetic
ugugaauaucuaaaagguua

SEQ ID NO: 792746 - RNA, 20 nt, Artificial Sequence
  Synthetic
acugcaggaggauaagguua

SEQ ID NO: 792747 - RNA, 20 nt, Artificial Sequence
  Synthetic
aagaaaaucugaccagguua

SEQ ID NO: 792748 - RNA, 20 nt, Artificial Sequence
  Synthetic
cccagcuacucgggagguua

SEQ ID NO: 792749 - RNA, 20 nt, Artificial Sequence
  Synthetic
ugucgaggggugggagguua

SEQ ID NO: 792750 - RNA, 20 nt, Artificial Sequence
  Synthetic
cguggggauuauggagguua

SEQ ID NO: 792751 - RNA, 20 nt, Artificial Sequence
  Synthetic
uugaguauauauugagguua

SEQ ID NO: 792752 - RNA, 20 nt, Artificial Sequence
  Synthetic
uuaccauauaacauagguua

SEQ ID NO: 792753 - RNA, 20 nt, Artificial Sequence
  Synthetic
ugguuuaaaaaauuagguua

SEQ ID NO: 792754 - RNA, 20 nt, Artificial Sequence
  Synthetic
aagacagcagaagaggguua

SEQ ID NO: 792755 - RNA, 20 nt, Artificial Sequence
  Synthetic
cucaaacaaugugaggguua

SEQ ID NO: 792756 - RNA, 20 nt, Artificial Sequence
  Synthetic
aggaaagcggguagggguua

SEQ ID NO: 792757 - RNA, 20 nt, Artificial Sequence
  Synthetic
ucucaggggaugggggguua

SEQ ID NO: 792758 - RNA, 20 nt, Artificial Sequence
  Synthetic
aaugguagugguggggguua

SEQ ID NO: 792759 - RNA, 20 nt, Artificial Sequence
  Synthetic
cccaggacguguggggguua

SEQ ID NO: 792760 - RNA, 20 nt, Artificial Sequence
  Synthetic
cuccuguugaaaugggguua

SEQ ID NO: 792761 - RNA, 20 nt, Artificial Sequence
  Synthetic
ucugcccuggccugggguua

SEQ ID NO: 792762 - RNA, 20 nt, Artificial Sequence
  Synthetic
uaaugucaauauuuggguua

SEQ ID NO: 792763 - RNA, 20 nt, Artificial Sequence
  Synthetic
aggauaagauacaaugguua

SEQ ID NO: 792764 - RNA, 20 nt, Artificial Sequence
  Synthetic
agugaugguaagaaugguua

SEQ ID NO: 792765 - RNA, 20 nt, Artificial Sequence
  Synthetic
cuacuaugaaauuaugguua

SEQ ID NO: 792766 - RNA, 20 nt, Artificial Sequence
  Synthetic
cauuuaucaacaacugguua

SEQ ID NO: 792767 - RNA, 20 nt, Artificial Sequence
  Synthetic
ugauaaaucuuaccugguua

SEQ ID NO: 792768 - RNA, 20 nt, Artificial Sequence
  Synthetic
auuggaaauaaagcugguua

SEQ ID NO: 792769 - RNA, 20 nt, Artificial Sequence
  Synthetic
aaucacugagcugcugguua

SEQ ID NO: 792770 - RNA, 20 nt, Artificial Sequence
  Synthetic
aggguauaaacaucugguua

SEQ ID NO: 792771 - RNA, 20 nt, Artificial Sequence
  Synthetic
auucccagcuguggugguua

SEQ ID NO: 792772 - RNA, 20 nt, Artificial Sequence
  Synthetic
cuucugcuggccugugguua

SEQ ID NO: 792773 - RNA, 20 nt, Artificial Sequence
  Synthetic
auaaauacucugauugguua

SEQ ID NO: 792774 - RNA, 20 nt, Artificial Sequence
  Synthetic
cugucagagucauuugguua

SEQ ID NO: 792775 - RNA, 20 nt, Artificial Sequence
  Synthetic
aaaugaaggaaaaaauguua

SEQ ID NO: 792776 - RNA, 20 nt, Artificial Sequence
  Synthetic
aaaacuuaccaaaaauguua

SEQ ID NO: 792777 - RNA, 20 nt, Artificial Sequence
  Synthetic
uacaguucuugaaaauguua

SEQ ID NO: 792778 - RNA, 20 nt, Artificial Sequence
  Synthetic
caugcuagcuuuaaauguua

SEQ ID NO: 792779 - RNA, 20 nt, Artificial Sequence
  Synthetic
uccaauaugguauaauguua

SEQ ID NO: 792780 - RNA, 20 nt, Artificial Sequence
  Synthetic
uauaauaagauguaauguua

SEQ ID NO: 792781 - RNA, 20 nt, Artificial Sequence
  Synthetic
uauuauuaccuuuaauguua

SEQ ID NO: 792782 - RNA, 20 nt, Artificial Sequence
  Synthetic
uaaguuaaaaauccauguua

SEQ ID NO: 792783 - RNA, 20 nt, Artificial Sequence
  Synthetic
uguguuuccuuuucauguua

SEQ ID NO: 792784 - RNA, 20 nt, Artificial Sequence
  Synthetic
cagagaauacugagauguua

SEQ ID NO: 792785 - RNA, 20 nt, Artificial Sequence
  Synthetic
auuuucauuuuuggauguua

SEQ ID NO: 792786 - RNA, 20 nt, Artificial Sequence
  Synthetic
uguuauuagagaugauguua

SEQ ID NO: 792787 - RNA, 20 nt, Artificial Sequence
  Synthetic
uucuuuuaauugugauguua

SEQ ID NO: 792788 - RNA, 20 nt, Artificial Sequence
  Synthetic
aaacaauuaccaauauguua

SEQ ID NO: 792789 - RNA, 20 nt, Artificial Sequence
  Synthetic
ucuauguuaagcauauguua

SEQ ID NO: 792790 - RNA, 20 nt, Artificial Sequence
  Synthetic
uucuuaaucuagguauguua

SEQ ID NO: 792791 - RNA, 20 nt, Artificial Sequence
  Synthetic
ucuuuguaucucuuauguua

SEQ ID NO: 792792 - RNA, 20 nt, Artificial Sequence
  Synthetic
caccuuucacuuuuauguua

SEQ ID NO: 792793 - RNA, 20 nt, Artificial Sequence
  Synthetic
ucagaauauagaaacuguua

SEQ ID NO: 792794 - RNA, 20 nt, Artificial Sequence
  Synthetic
caaacuaguaggaacuguua

SEQ ID NO: 792795 - RNA, 20 nt, Artificial Sequence
  Synthetic
auuccaguggauaacuguua

SEQ ID NO: 792796 - RNA, 20 nt, Artificial Sequence
  Synthetic
caauauuuuuauaacuguua

SEQ ID NO: 792797 - RNA, 20 nt, Artificial Sequence
  Synthetic
uuauagucuacacacuguua

SEQ ID NO: 792798 - RNA, 20 nt, Artificial Sequence
  Synthetic
aaauguuugaaggacuguua

SEQ ID NO: 792799 - RNA, 20 nt, Artificial Sequence
  Synthetic
uauuuauugaaugccuguua

SEQ ID NO: 792800 - RNA, 20 nt, Artificial Sequence
  Synthetic
uaccaauccguugccuguua

SEQ ID NO: 792801 - RNA, 20 nt, Artificial Sequence
  Synthetic
aaaaaaaccagaaucuguua

SEQ ID NO: 792802 - RNA, 20 nt, Artificial Sequence
  Synthetic
aauugacuugucaucuguua

SEQ ID NO: 792803 - RNA, 20 nt, Artificial Sequence
  Synthetic
cuagugguuguuaucuguua

SEQ ID NO: 792804 - RNA, 20 nt, Artificial Sequence
  Synthetic
aacaaugccucugucuguua

SEQ ID NO: 792805 - RNA, 20 nt, Artificial Sequence
  Synthetic
cacaaaagaaaaaaguguua

SEQ ID NO: 792806 - RNA, 20 nt, Artificial Sequence
  Synthetic
aaaaucuuaacaaaguguua

SEQ ID NO: 792807 - RNA, 20 nt, Artificial Sequence
  Synthetic
acuugggaccacaaguguua

SEQ ID NO: 792808 - RNA, 20 nt, Artificial Sequence
  Synthetic
aagagacuaugcuaguguua

SEQ ID NO: 792809 - RNA, 20 nt, Artificial Sequence
  Synthetic
uguugaauucccauguguua

SEQ ID NO: 792810 - RNA, 20 nt, Artificial Sequence
  Synthetic
aaucuaauggaauuguguua

SEQ ID NO: 792811 - RNA, 20 nt, Artificial Sequence
  Synthetic
aaaaauuauucauuguguua

SEQ ID NO: 792812 - RNA, 20 nt, Artificial Sequence
  Synthetic
ucucuccugggaaauuguua

SEQ ID NO: 792813 - RNA, 20 nt, Artificial Sequence
  Synthetic
ccguauuuuuuaaauuguua

SEQ ID NO: 792814 - RNA, 20 nt, Artificial Sequence
  Synthetic
cucauaaggaggcauuguua

SEQ ID NO: 792815 - RNA, 20 nt, Artificial Sequence
  Synthetic
augaggauaguugauuguua

SEQ ID NO: 792816 - RNA, 20 nt, Artificial Sequence
  Synthetic
uuaaaugguacauauuguua

SEQ ID NO: 792817 - RNA, 20 nt, Artificial Sequence
  Synthetic
cuguuaccaucauauuguua

SEQ ID NO: 792818 - RNA, 20 nt, Artificial Sequence
  Synthetic
acucccauuaacccuuguua

SEQ ID NO: 792819 - RNA, 20 nt, Artificial Sequence
  Synthetic
aagacuaauaaugguuguua

SEQ ID NO: 792820 - RNA, 20 nt, Artificial Sequence
  Synthetic
aauuuuuguuguuguuguua

SEQ ID NO: 792821 - RNA, 20 nt, Artificial Sequence
  Synthetic
agaaaagaaaagauuuguua

SEQ ID NO: 792822 - RNA, 20 nt, Artificial Sequence
  Synthetic
aaggagaauaagauuuguua

SEQ ID NO: 792823 - RNA, 20 nt, Artificial Sequence
  Synthetic
caaguuauuguuauuuguua

SEQ ID NO: 792824 - RNA, 20 nt, Artificial Sequence
  Synthetic
cagucugugguauuuuguua

SEQ ID NO: 792825 - RNA, 20 nt, Artificial Sequence
  Synthetic
aauucccacugcuuuuguua

SEQ ID NO: 792826 - RNA, 20 nt, Artificial Sequence
  Synthetic
auucaugggugcuuuuguua

SEQ ID NO: 792827 - RNA, 20 nt, Artificial Sequence
  Synthetic
uguuggauguguuuuuguua

SEQ ID NO: 792828 - RNA, 20 nt, Artificial Sequence
  Synthetic
cucagaaaaaaaaaaauuua

SEQ ID NO: 792829 - RNA, 20 nt, Artificial Sequence
  Synthetic
cccaaacaaacaaaaauuua

SEQ ID NO: 792830 - RNA, 20 nt, Artificial Sequence
  Synthetic
aaaggaaccgccaaaauuua

SEQ ID NO: 792831 - RNA, 20 nt, Artificial Sequence
  Synthetic
cauaaaacuaucaaaauuua

SEQ ID NO: 792832 - RNA, 20 nt, Artificial Sequence
  Synthetic
uauauguggcagaaaauuua

SEQ ID NO: 792833 - RNA, 20 nt, Artificial Sequence
  Synthetic
aaaagccuggagaaaauuua

SEQ ID NO: 792834 - RNA, 20 nt, Artificial Sequence
  Synthetic
cgcuuaagaacuaaaauuua

SEQ ID NO: 792835 - RNA, 20 nt, Artificial Sequence
  Synthetic
ccuggcacaauuaaaauuua

SEQ ID NO: 792836 - RNA, 20 nt, Artificial Sequence
  Synthetic
aucaucuauaagcaaauuua

SEQ ID NO: 792837 - RNA, 20 nt, Artificial Sequence
  Synthetic
cauccauauaaagaaauuua

SEQ ID NO: 792838 - RNA, 20 nt, Artificial Sequence
  Synthetic
uguaggcaugaagaaauuua

SEQ ID NO: 792839 - RNA, 20 nt, Artificial Sequence
  Synthetic
aacuagaccugggaaauuua

SEQ ID NO: 792840 - RNA, 20 nt, Artificial Sequence
  Synthetic
agauuuuacuuugaaauuua

SEQ ID NO: 792841 - RNA, 20 nt, Artificial Sequence
  Synthetic
aauauguaagaauaaauuua

SEQ ID NO: 792842 - RNA, 20 nt, Artificial Sequence
  Synthetic
uucuuaauuguauaaauuua

SEQ ID NO: 792843 - RNA, 20 nt, Artificial Sequence
  Synthetic
uuuuuguuuguauaaauuua

SEQ ID NO: 792844 - RNA, 20 nt, Artificial Sequence
  Synthetic
agagggacacauuaaauuua

SEQ ID NO: 792845 - RNA, 20 nt, Artificial Sequence
  Synthetic
aacauuauggauuaaauuua

SEQ ID NO: 792846 - RNA, 20 nt, Artificial Sequence
  Synthetic
uacaucucugcuuaaauuua

SEQ ID NO: 792847 - RNA, 20 nt, Artificial Sequence
  Synthetic
aguaacuaaaagacaauuua

SEQ ID NO: 792848 - RNA, 20 nt, Artificial Sequence
  Synthetic
cauagcaacgauacaauuua

SEQ ID NO: 792849 - RNA, 20 nt, Artificial Sequence
  Synthetic
uucacaagcuauccaauuua

SEQ ID NO: 792850 - RNA, 20 nt, Artificial Sequence
  Synthetic
auguccuccuugucaauuua

SEQ ID NO: 792851 - RNA, 20 nt, Artificial Sequence
  Synthetic
uuguugacucuaagaauuua

SEQ ID NO: 792852 - RNA, 20 nt, Artificial Sequence
  Synthetic
uugcacagugacagaauuua

SEQ ID NO: 792853 - RNA, 20 nt, Artificial Sequence
  Synthetic
uucagaauauuuggaauuua

SEQ ID NO: 792854 - RNA, 20 nt, Artificial Sequence
  Synthetic
augacaucaccaugaauuua

SEQ ID NO: 792855 - RNA, 20 nt, Artificial Sequence
  Synthetic
auggaugaaagaugaauuua

SEQ ID NO: 792856 - RNA, 20 nt, Artificial Sequence
  Synthetic
ucuuuacauuucugaauuua

SEQ ID NO: 792857 - RNA, 20 nt, Artificial Sequence
  Synthetic
agaauaugccugugaauuua

SEQ ID NO: 792858 - RNA, 20 nt, Artificial Sequence
  Synthetic
aacuuuaugcguugaauuua

SEQ ID NO: 792859 - RNA, 20 nt, Artificial Sequence
  Synthetic
uuuaugacuuuaauaauuua

SEQ ID NO: 792860 - RNA, 20 nt, Artificial Sequence
  Synthetic
uacauuuuguggauaauuua

SEQ ID NO: 792861 - RNA, 20 nt, Artificial Sequence
  Synthetic
aaaagaaagcugauaauuua

SEQ ID NO: 792862 - RNA, 20 nt, Artificial Sequence
  Synthetic
uucuauuuuuuuauaauuua

SEQ ID NO: 792863 - RNA, 20 nt, Artificial Sequence
  Synthetic
auauuuggccugguaauuua

SEQ ID NO: 792864 - RNA, 20 nt, Artificial Sequence
  Synthetic
uugcccugauauguaauuua

SEQ ID NO: 792865 - RNA, 20 nt, Artificial Sequence
  Synthetic
agcugugggcuuguaauuua

SEQ ID NO: 792866 - RNA, 20 nt, Artificial Sequence
  Synthetic
uaauuucauauauuaauuua

SEQ ID NO: 792867 - RNA, 20 nt, Artificial Sequence
  Synthetic
uccaacaaauauuuaauuua

SEQ ID NO: 792868 - RNA, 20 nt, Artificial Sequence
  Synthetic
cucccauaucuuuuaauuua

SEQ ID NO: 792869 - RNA, 20 nt, Artificial Sequence
  Synthetic
auggauuuauuuuuaauuua

SEQ ID NO: 792870 - RNA, 20 nt, Artificial Sequence
  Synthetic
cuagggaauagcaacauuua

SEQ ID NO: 792871 - RNA, 20 nt, Artificial Sequence
  Synthetic
uaauauuagccuaacauuua

SEQ ID NO: 792872 - RNA, 20 nt, Artificial Sequence
  Synthetic
uaaccauuguuuaacauuua

SEQ ID NO: 792873 - RNA, 20 nt, Artificial Sequence
  Synthetic
aauaugaggaugcacauuua

SEQ ID NO: 792874 - RNA, 20 nt, Artificial Sequence
  Synthetic
aucuacuucuuucacauuua

SEQ ID NO: 792875 - RNA, 20 nt, Artificial Sequence
  Synthetic
uauucaauucaugacauuua

SEQ ID NO: 792876 - RNA, 20 nt, Artificial Sequence
  Synthetic
caaauaauuauauacauuua

SEQ ID NO: 792877 - RNA, 20 nt, Artificial Sequence
  Synthetic
aagcuuauuauauacauuua

SEQ ID NO: 792878 - RNA, 20 nt, Artificial Sequence
  Synthetic
aaaauacauaccuacauuua

SEQ ID NO: 792879 - RNA, 20 nt, Artificial Sequence
  Synthetic
ucaagcauaaauuacauuua

SEQ ID NO: 792880 - RNA, 20 nt, Artificial Sequence
  Synthetic
aguuucagguauuacauuua

SEQ ID NO: 792881 - RNA, 20 nt, Artificial Sequence
  Synthetic
uagaaguugguuuacauuua

SEQ ID NO: 792882 - RNA, 20 nt, Artificial Sequence
  Synthetic
auuuagccuguuuacauuua

SEQ ID NO: 792883 - RNA, 20 nt, Artificial Sequence
  Synthetic
uaguguauauuuuacauuua

SEQ ID NO: 792884 - RNA, 20 nt, Artificial Sequence
  Synthetic
caucucagaaccuccauuua

SEQ ID NO: 792885 - RNA, 20 nt, Artificial Sequence
  Synthetic
cuuucuuaccauuccauuua

SEQ ID NO: 792886 - RNA, 20 nt, Artificial Sequence
  Synthetic
uugaauucccauuccauuua

SEQ ID NO: 792887 - RNA, 20 nt, Artificial Sequence
  Synthetic
agguuaaaaacuagcauuua

SEQ ID NO: 792888 - RNA, 20 nt, Artificial Sequence
  Synthetic
cuguaaaauuaaggcauuua

SEQ ID NO: 792889 - RNA, 20 nt, Artificial Sequence
  Synthetic
cccuaucgagauggcauuua

SEQ ID NO: 792890 - RNA, 20 nt, Artificial Sequence
  Synthetic
auuaaugaacauugcauuua

SEQ ID NO: 792891 - RNA, 20 nt, Artificial Sequence
  Synthetic
uauuaaaaaucuugcauuua

SEQ ID NO: 792892 - RNA, 20 nt, Artificial Sequence
  Synthetic
auuuagaccauuugcauuua

SEQ ID NO: 792893 - RNA, 20 nt, Artificial Sequence
  Synthetic
aaaguaaaccuuugcauuua

SEQ ID NO: 792894 - RNA, 20 nt, Artificial Sequence
  Synthetic
aauacaugucuuugcauuua

SEQ ID NO: 792895 - RNA, 20 nt, Artificial Sequence
  Synthetic
uggguuugaaauuucauuua

SEQ ID NO: 792896 - RNA, 20 nt, Artificial Sequence
  Synthetic
caucauaacaguuucauuua

SEQ ID NO: 792897 - RNA, 20 nt, Artificial Sequence
  Synthetic
aaaaaaaacuuagagauuua

SEQ ID NO: 792898 - RNA, 20 nt, Artificial Sequence
  Synthetic
agauaucauggugagauuua

SEQ ID NO: 792899 - RNA, 20 nt, Artificial Sequence
  Synthetic
uguacuaauugcuagauuua

SEQ ID NO: 792900 - RNA, 20 nt, Artificial Sequence
  Synthetic
ucuuagucucucuagauuua

SEQ ID NO: 792901 - RNA, 20 nt, Artificial Sequence
  Synthetic
uuagaguagauuuagauuua

SEQ ID NO: 792902 - RNA, 20 nt, Artificial Sequence
  Synthetic
ucccuguuaguuuagauuua

SEQ ID NO: 792903 - RNA, 20 nt, Artificial Sequence
  Synthetic
caacuauuguuuuagauuua

SEQ ID NO: 792904 - RNA, 20 nt, Artificial Sequence
  Synthetic
caaaaacuaaaaaggauuua

SEQ ID NO: 792905 - RNA, 20 nt, Artificial Sequence
  Synthetic
augcucuguagugggauuua

SEQ ID NO: 792906 - RNA, 20 nt, Artificial Sequence
  Synthetic
uaccagaggcuguggauuua

SEQ ID NO: 792907 - RNA, 20 nt, Artificial Sequence
  Synthetic
ugacuucauagaaugauuua

SEQ ID NO: 792908 - RNA, 20 nt, Artificial Sequence
  Synthetic
aaaaaauuccccaugauuua

SEQ ID NO: 792909 - RNA, 20 nt, Artificial Sequence
  Synthetic
aacaugagagagaugauuua

SEQ ID NO: 792910 - RNA, 20 nt, Artificial Sequence
  Synthetic
ugaacuugagagaugauuua

SEQ ID NO: 792911 - RNA, 20 nt, Artificial Sequence
  Synthetic
auguugccuuugaugauuua

SEQ ID NO: 792912 - RNA, 20 nt, Artificial Sequence
  Synthetic
aucucuucugaauugauuua

SEQ ID NO: 792913 - RNA, 20 nt, Artificial Sequence
  Synthetic
uguuggagaccauugauuua

SEQ ID NO: 792914 - RNA, 20 nt, Artificial Sequence
  Synthetic
uaugucucagucuugauuua

SEQ ID NO: 792915 - RNA, 20 nt, Artificial Sequence
  Synthetic
ccuguuugaacuuugauuua

SEQ ID NO: 792916 - RNA, 20 nt, Artificial Sequence
  Synthetic
augacauagccaaauauuua

SEQ ID NO: 792917 - RNA, 20 nt, Artificial Sequence
  Synthetic
uuaaaauggauaaauauuua

SEQ ID NO: 792918 - RNA, 20 nt, Artificial Sequence
  Synthetic
aaguaaucugucaauauuua

SEQ ID NO: 792919 - RNA, 20 nt, Artificial Sequence
  Synthetic
agaaaguauaaacauauuua

SEQ ID NO: 792920 - RNA, 20 nt, Artificial Sequence
  Synthetic
auccuaugcagucauauuua

SEQ ID NO: 792921 - RNA, 20 nt, Artificial Sequence
  Synthetic
auuuaucucaaggauauuua

SEQ ID NO: 792922 - RNA, 20 nt, Artificial Sequence
  Synthetic
auuuugcuuccugauauuua

SEQ ID NO: 792923 - RNA, 20 nt, Artificial Sequence
  Synthetic
uucaucacuuaauauauuua

SEQ ID NO: 792924 - RNA, 20 nt, Artificial Sequence
  Synthetic
auaguaggugcauauauuua

SEQ ID NO: 792925 - RNA, 20 nt, Artificial Sequence
  Synthetic
acaguagguauauauauuua

SEQ ID NO: 792926 - RNA, 20 nt, Artificial Sequence
  Synthetic
auaguagguauauauauuua

SEQ ID NO: 792927 - RNA, 20 nt, Artificial Sequence
  Synthetic
aauuuuauuguauauauuua

SEQ ID NO: 792928 - RNA, 20 nt, Artificial Sequence
  Synthetic
cuucuacuuagguauauuua

SEQ ID NO: 792929 - RNA, 20 nt, Artificial Sequence
  Synthetic
augauuuuuggaacuauuua

SEQ ID NO: 792930 - RNA, 20 nt, Artificial Sequence
  Synthetic
acauuuguuuuaacuauuua

SEQ ID NO: 792931 - RNA, 20 nt, Artificial Sequence
  Synthetic
cugauguuuugagcuauuua

SEQ ID NO: 792932 - RNA, 20 nt, Artificial Sequence
  Synthetic
uucugagcuacuucuauuua

SEQ ID NO: 792933 - RNA, 20 nt, Artificial Sequence
  Synthetic
aauaaaaccuaaaguauuua

SEQ ID NO: 792934 - RNA, 20 nt, Artificial Sequence
  Synthetic
aaucaaucaguaaguauuua

SEQ ID NO: 792935 - RNA, 20 nt, Artificial Sequence
  Synthetic
acagcuuuauuaaguauuua

SEQ ID NO: 792936 - RNA, 20 nt, Artificial Sequence
  Synthetic
aaauauaacugcaguauuua

SEQ ID NO: 792937 - RNA, 20 nt, Artificial Sequence
  Synthetic
aauuaauuuuuuaguauuua

SEQ ID NO: 792938 - RNA, 20 nt, Artificial Sequence
  Synthetic
uauccauauugagguauuua

SEQ ID NO: 792939 - RNA, 20 nt, Artificial Sequence
  Synthetic
aaaagggguuuagguauuua

SEQ ID NO: 792940 - RNA, 20 nt, Artificial Sequence
  Synthetic
accauauugacugguauuua

SEQ ID NO: 792941 - RNA, 20 nt, Artificial Sequence
  Synthetic
auacugaagaaauguauuua

SEQ ID NO: 792942 - RNA, 20 nt, Artificial Sequence
  Synthetic
auaguagguguauguauuua

SEQ ID NO: 792943 - RNA, 20 nt, Artificial Sequence
  Synthetic
cucauuauccacuguauuua

SEQ ID NO: 792944 - RNA, 20 nt, Artificial Sequence
  Synthetic
aauaaauguucaauuauuua

SEQ ID NO: 792945 - RNA, 20 nt, Artificial Sequence
  Synthetic
auuuguuuaaugauuauuua

SEQ ID NO: 792946 - RNA, 20 nt, Artificial Sequence
  Synthetic
aaaagauaacuuauuauuua

SEQ ID NO: 792947 - RNA, 20 nt, Artificial Sequence
  Synthetic
ucuaaccacuuccuuauuua

SEQ ID NO: 792948 - RNA, 20 nt, Artificial Sequence
  Synthetic
acuggcuuuggaguuauuua

SEQ ID NO: 792949 - RNA, 20 nt, Artificial Sequence
  Synthetic
uuuuaaauuguuguuauuua

SEQ ID NO: 792950 - RNA, 20 nt, Artificial Sequence
  Synthetic
acuuuuuggaaauuuauuua

SEQ ID NO: 792951 - RNA, 20 nt, Artificial Sequence
  Synthetic
uuuauucuucuauuuauuua

SEQ ID NO: 792952 - RNA, 20 nt, Artificial Sequence
  Synthetic
uauuguauuguauuuauuua

SEQ ID NO: 792953 - RNA, 20 nt, Artificial Sequence
  Synthetic
aaaaggauauucuuuauuua

SEQ ID NO: 792954 - RNA, 20 nt, Artificial Sequence
  Synthetic
aaaaaaaaaaaguuuauuua

SEQ ID NO: 792955 - RNA, 20 nt, Artificial Sequence
  Synthetic
acacaaaggaauuuuauuua

SEQ ID NO: 792956 - RNA, 20 nt, Artificial Sequence
  Synthetic
cuuucuuuaucuuuuauuua

SEQ ID NO: 792957 - RNA, 20 nt, Artificial Sequence
  Synthetic
cucuaugaccuuuuuauuua

SEQ ID NO: 792958 - RNA, 20 nt, Artificial Sequence
  Synthetic
ccgacaagacacaaacuuua

SEQ ID NO: 792959 - RNA, 20 nt, Artificial Sequence
  Synthetic
uaacuuccacucaaacuuua

SEQ ID NO: 792960 - RNA, 20 nt, Artificial Sequence
  Synthetic
aaggcagguccuaaacuuua

SEQ ID NO: 792961 - RNA, 20 nt, Artificial Sequence
  Synthetic
cuacaaacaauacaacuuua

SEQ ID NO: 792962 - RNA, 20 nt, Artificial Sequence
  Synthetic
cauuauauuaaucaacuuua

SEQ ID NO: 792963 - RNA, 20 nt, Artificial Sequence
  Synthetic
uuagugauuuuucaacuuua

SEQ ID NO: 792964 - RNA, 20 nt, Artificial Sequence
  Synthetic
uuuaugcauauggaacuuua

SEQ ID NO: 792965 - RNA, 20 nt, Artificial Sequence
  Synthetic
acuuugaaacccccacuuua

SEQ ID NO: 792966 - RNA, 20 nt, Artificial Sequence
  Synthetic
aaagagcuuaaagcacuuua

SEQ ID NO: 792967 - RNA, 20 nt, Artificial Sequence
  Synthetic
ucuguaauuucagcacuuua

SEQ ID NO: 792968 - RNA, 20 nt, Artificial Sequence
  Synthetic
cgacaaagaugaucacuuua

SEQ ID NO: 792969 - RNA, 20 nt, Artificial Sequence
  Synthetic
ugaaagaggagaagacuuua

SEQ ID NO: 792970 - RNA, 20 nt, Artificial Sequence
  Synthetic
aacuucaauuacagacuuua

SEQ ID NO: 792971 - RNA, 20 nt, Artificial Sequence
  Synthetic
ccuugaaaauucagacuuua

SEQ ID NO: 792972 - RNA, 20 nt, Artificial Sequence
  Synthetic
uagaacacaacaggacuuua

SEQ ID NO: 792973 - RNA, 20 nt, Artificial Sequence
  Synthetic
aaaaucaagcugggacuuua

SEQ ID NO: 792974 - RNA, 20 nt, Artificial Sequence
  Synthetic
ugucagaaccauugacuuua

SEQ ID NO: 792975 - RNA, 20 nt, Artificial Sequence
  Synthetic
auaguaacaugcauacuuua

SEQ ID NO: 792976 - RNA, 20 nt, Artificial Sequence
  Synthetic
cuuucauaugagauacuuua

SEQ ID NO: 792977 - RNA, 20 nt, Artificial Sequence
  Synthetic
uacucugcagcuguacuuua

SEQ ID NO: 792978 - RNA, 20 nt, Artificial Sequence
  Synthetic
agauuucaaaucuuacuuua

SEQ ID NO: 792979 - RNA, 20 nt, Artificial Sequence
  Synthetic
uccuuccucaccaaccuuua

SEQ ID NO: 792980 - RNA, 20 nt, Artificial Sequence
  Synthetic
uuuuccuggaguaaccuuua

SEQ ID NO: 792981 - RNA, 20 nt, Artificial Sequence
  Synthetic
uuuagucuucuugcccuuua

SEQ ID NO: 792982 - RNA, 20 nt, Artificial Sequence
  Synthetic
auuaggagauggggccuuua

SEQ ID NO: 792983 - RNA, 20 nt, Artificial Sequence
  Synthetic
augguuugaguaauccuuua

SEQ ID NO: 792984 - RNA, 20 nt, Artificial Sequence
  Synthetic
cacgagaagaauauccuuua

SEQ ID NO: 792985 - RNA, 20 nt, Artificial Sequence
  Synthetic
cuguuuuaaauccuccuuua

SEQ ID NO: 792986 - RNA, 20 nt, Artificial Sequence
  Synthetic
cagucuaugcauguccuuua

SEQ ID NO: 792987 - RNA, 20 nt, Artificial Sequence
  Synthetic
uuacuuuaaauuuuccuuua

SEQ ID NO: 792988 - RNA, 20 nt, Artificial Sequence
  Synthetic
uuuaucagucuuuuccuuua

SEQ ID NO: 792989 - RNA, 20 nt, Artificial Sequence
  Synthetic
ccaucugugguuuuccuuua

SEQ ID NO: 792990 - RNA, 20 nt, Artificial Sequence
  Synthetic
ccagauaaaaaaaagcuuua

SEQ ID NO: 792991 - RNA, 20 nt, Artificial Sequence
  Synthetic
uuaaucacauagaagcuuua

SEQ ID NO: 792992 - RNA, 20 nt, Artificial Sequence
  Synthetic
uaaacaaugguuaagcuuua

SEQ ID NO: 792993 - RNA, 20 nt, Artificial Sequence
  Synthetic
aaucagcuauuccagcuuua

SEQ ID NO: 792994 - RNA, 20 nt, Artificial Sequence
  Synthetic
cauuuaauuaucuagcuuua

SEQ ID NO: 792995 - RNA, 20 nt, Artificial Sequence
  Synthetic
aauuuugagaauuagcuuua

SEQ ID NO: 792996 - RNA, 20 nt, Artificial Sequence
  Synthetic
uuuaaaaaauaaaggcuuua

SEQ ID NO: 792997 - RNA, 20 nt, Artificial Sequence
  Synthetic
uuuuuccccucugggcuuua

SEQ ID NO: 792998 - RNA, 20 nt, Artificial Sequence
  Synthetic
aucaaguugcuaaugcuuua

SEQ ID NO: 792999 - RNA, 20 nt, Artificial Sequence
  Synthetic
acuagauauuuucugcuuua

SEQ ID NO: 793000 - RNA, 20 nt, Artificial Sequence
  Synthetic
acacacacacacaaucuuua

SEQ ID NO: 793001 - RNA, 20 nt, Artificial Sequence
  Synthetic
agacacuucuuucaucuuua

SEQ ID NO: 793002 - RNA, 20 nt, Artificial Sequence
  Synthetic
uacucauuucuggaucuuua

SEQ ID NO: 793003 - RNA, 20 nt, Artificial Sequence
  Synthetic
agugauaugggugaucuuua

SEQ ID NO: 793004 - RNA, 20 nt, Artificial Sequence
  Synthetic
cacccaccucuguaucuuua

SEQ ID NO: 793005 - RNA, 20 nt, Artificial Sequence
  Synthetic
agauucucuuguuaucuuua

SEQ ID NO: 793006 - RNA, 20 nt, Artificial Sequence
  Synthetic
cgaccuauaaaaccucuuua

SEQ ID NO: 793007 - RNA, 20 nt, Artificial Sequence
  Synthetic
acuugaacucauccucuuua

SEQ ID NO: 793008 - RNA, 20 nt, Artificial Sequence
  Synthetic
ugaugaaaaucaucucuuua

SEQ ID NO: 793009 - RNA, 20 nt, Artificial Sequence
  Synthetic
accugggcuuauucucuuua

SEQ ID NO: 793010 - RNA, 20 nt, Artificial Sequence
  Synthetic
aguauauugcuuggucuuua

SEQ ID NO: 793011 - RNA, 20 nt, Artificial Sequence
  Synthetic
acaacgugcauaugucuuua

SEQ ID NO: 793012 - RNA, 20 nt, Artificial Sequence
  Synthetic
uggggaaaagacugucuuua

SEQ ID NO: 793013 - RNA, 20 nt, Artificial Sequence
  Synthetic
aaacauucauacugucuuua

SEQ ID NO: 793014 - RNA, 20 nt, Artificial Sequence
  Synthetic
uacagcugcaugugucuuua

SEQ ID NO: 793015 - RNA, 20 nt, Artificial Sequence
  Synthetic
cagacagacacuugucuuua

SEQ ID NO: 793016 - RNA, 20 nt, Artificial Sequence
  Synthetic
auuuuugguacuugucuuua

SEQ ID NO: 793017 - RNA, 20 nt, Artificial Sequence
  Synthetic
auuaaguaaacaauucuuua

SEQ ID NO: 793018 - RNA, 20 nt, Artificial Sequence
  Synthetic
aaaaagauguggauucuuua

SEQ ID NO: 793019 - RNA, 20 nt, Artificial Sequence
  Synthetic
acagcuaauauuauucuuua

SEQ ID NO: 793020 - RNA, 20 nt, Artificial Sequence
  Synthetic
cugaugacuauuauucuuua

SEQ ID NO: 793021 - RNA, 20 nt, Artificial Sequence
  Synthetic
ucaaaauuuucacuucuuua

SEQ ID NO: 793022 - RNA, 20 nt, Artificial Sequence
  Synthetic
uaaugcuauugacuucuuua

SEQ ID NO: 793023 - RNA, 20 nt, Artificial Sequence
  Synthetic
uagagcuaugggcuucuuua

SEQ ID NO: 793024 - RNA, 20 nt, Artificial Sequence
  Synthetic
ucagguuuuggauuucuuua

SEQ ID NO: 793025 - RNA, 20 nt, Artificial Sequence
  Synthetic
auaauauagcuauuucuuua

SEQ ID NO: 793026 - RNA, 20 nt, Artificial Sequence
  Synthetic
uguugauucuuauuucuuua

SEQ ID NO: 793027 - RNA, 20 nt, Artificial Sequence
  Synthetic
caucugacuuucuuucuuua

SEQ ID NO: 793028 - RNA, 20 nt, Artificial Sequence
  Synthetic
augagaauuuuguuucuuua

SEQ ID NO: 793029 - RNA, 20 nt, Artificial Sequence
  Synthetic
aggcagcagaauuuucuuua

SEQ ID NO: 793030 - RNA, 20 nt, Artificial Sequence
  Synthetic
aagggacguuguuuucuuua

SEQ ID NO: 793031 - RNA, 20 nt, Artificial Sequence
  Synthetic
cauauucugguagaaguuua

SEQ ID NO: 793032 - RNA, 20 nt, Artificial Sequence
  Synthetic
uaucaaguaaacuaaguuua

SEQ ID NO: 793033 - RNA, 20 nt, Artificial Sequence
  Synthetic
uaauuuaucaacuaaguuua

SEQ ID NO: 793034 - RNA, 20 nt, Artificial Sequence
  Synthetic
acucugauucaguaaguuua

SEQ ID NO: 793035 - RNA, 20 nt, Artificial Sequence
  Synthetic
accagaacaguguaaguuua

SEQ ID NO: 793036 - RNA, 20 nt, Artificial Sequence
  Synthetic
aauaaauuuaacacaguuua

SEQ ID NO: 793037 - RNA, 20 nt, Artificial Sequence
  Synthetic
uaaauggguuaagcaguuua

SEQ ID NO: 793038 - RNA, 20 nt, Artificial Sequence
  Synthetic
ccuuauuuaaccucaguuua

SEQ ID NO: 793039 - RNA, 20 nt, Artificial Sequence
  Synthetic
cuuuaagaacggucaguuua

SEQ ID NO: 793040 - RNA, 20 nt, Artificial Sequence
  Synthetic
ucagaagguaaaagaguuua

SEQ ID NO: 793041 - RNA, 20 nt, Artificial Sequence
  Synthetic
uguagaaaaugaagaguuua

SEQ ID NO: 793042 - RNA, 20 nt, Artificial Sequence
  Synthetic
acaaggcuggauguaguuua

SEQ ID NO: 793043 - RNA, 20 nt, Artificial Sequence
  Synthetic
cagcuuucuucuuuaguuua

SEQ ID NO: 793044 - RNA, 20 nt, Artificial Sequence
  Synthetic
uucuggggaaaaaagguuua

SEQ ID NO: 793045 - RNA, 20 nt, Artificial Sequence
  Synthetic
uugugugaugccaagguuua

SEQ ID NO: 793046 - RNA, 20 nt, Artificial Sequence
  Synthetic
uacauuugggggcagguuua

SEQ ID NO: 793047 - RNA, 20 nt, Artificial Sequence
  Synthetic
acuaaauauuggcagguuua

SEQ ID NO: 793048 - RNA, 20 nt, Artificial Sequence
  Synthetic
aagagcugaugagagguuua

SEQ ID NO: 793049 - RNA, 20 nt, Artificial Sequence
  Synthetic
uuuagcagaguguagguuua

SEQ ID NO: 793050 - RNA, 20 nt, Artificial Sequence
  Synthetic
ugaaaaugcagaaggguuua

SEQ ID NO: 793051 - RNA, 20 nt, Artificial Sequence
  Synthetic
cagucaagaaugaggguuua

SEQ ID NO: 793052 - RNA, 20 nt, Artificial Sequence
  Synthetic
auaaaaacuuauaggguuua

SEQ ID NO: 793053 - RNA, 20 nt, Artificial Sequence
  Synthetic
aaaugcaaugcuuggguuua

SEQ ID NO: 793054 - RNA, 20 nt, Artificial Sequence
  Synthetic
auuguugaaaccaugguuua

SEQ ID NO: 793055 - RNA, 20 nt, Artificial Sequence
  Synthetic
cauuuuaaguaagugguuua

SEQ ID NO: 793056 - RNA, 20 nt, Artificial Sequence
  Synthetic
uuaucuaaguuggugguuua

SEQ ID NO: 793057 - RNA, 20 nt, Artificial Sequence
  Synthetic
uuagcuaugagaaauguuua

SEQ ID NO: 793058 - RNA, 20 nt, Artificial Sequence
  Synthetic
agucuuggguggaauguuua

SEQ ID NO: 793059 - RNA, 20 nt, Artificial Sequence
  Synthetic
ugaaauccucuuaauguuua

SEQ ID NO: 793060 - RNA, 20 nt, Artificial Sequence
  Synthetic
cuuugucuucuacauguuua

SEQ ID NO: 793061 - RNA, 20 nt, Artificial Sequence
  Synthetic
agguguucagagcauguuua

SEQ ID NO: 793062 - RNA, 20 nt, Artificial Sequence
  Synthetic
aagaaagcauuugauguuua

SEQ ID NO: 793063 - RNA, 20 nt, Artificial Sequence
  Synthetic
accauaaaacgcuauguuua

SEQ ID NO: 793064 - RNA, 20 nt, Artificial Sequence
  Synthetic
uuauuacauuguacuguuua

SEQ ID NO: 793065 - RNA, 20 nt, Artificial Sequence
  Synthetic
cuuucucuaccuccuguuua

SEQ ID NO: 793066 - RNA, 20 nt, Artificial Sequence
  Synthetic
uugcucaggaaagguguuua

SEQ ID NO: 793067 - RNA, 20 nt, Artificial Sequence
  Synthetic
ucucuucauauauguguuua

SEQ ID NO: 793068 - RNA, 20 nt, Artificial Sequence
  Synthetic
cauuaauauagcauuguuua

SEQ ID NO: 793069 - RNA, 20 nt, Artificial Sequence
  Synthetic
auacuuuaacauauuguuua

SEQ ID NO: 793070 - RNA, 20 nt, Artificial Sequence
  Synthetic
uuguuaugcaguauuguuua

SEQ ID NO: 793071 - RNA, 20 nt, Artificial Sequence
  Synthetic
uucugcuuuuaacuuguuua

SEQ ID NO: 793072 - RNA, 20 nt, Artificial Sequence
  Synthetic
cagaucuaagcaguuguuua

SEQ ID NO: 793073 - RNA, 20 nt, Artificial Sequence
  Synthetic
aauccagacacauuuguuua

SEQ ID NO: 793074 - RNA, 20 nt, Artificial Sequence
  Synthetic
aaaauaaggucaaaauuuua

SEQ ID NO: 793075 - RNA, 20 nt, Artificial Sequence
  Synthetic
caaaauauuugaaaauuuua

SEQ ID NO: 793076 - RNA, 20 nt, Artificial Sequence
  Synthetic
cucgauugguagaaauuuua

SEQ ID NO: 793077 - RNA, 20 nt, Artificial Sequence
  Synthetic
ucagggaacaguaaauuuua

SEQ ID NO: 793078 - RNA, 20 nt, Artificial Sequence
  Synthetic
uuauuauacuuuaaauuuua

SEQ ID NO: 793079 - RNA, 20 nt, Artificial Sequence
  Synthetic
uaaaucucacaucaauuuua

SEQ ID NO: 793080 - RNA, 20 nt, Artificial Sequence
  Synthetic
ucuugaaaauaucaauuuua

SEQ ID NO: 793081 - RNA, 20 nt, Artificial Sequence
  Synthetic
cuaauuuuuucagaauuuua

SEQ ID NO: 793082 - RNA, 20 nt, Artificial Sequence
  Synthetic
cuuuaagugggagaauuuua

SEQ ID NO: 793083 - RNA, 20 nt, Artificial Sequence
  Synthetic
ccacugcuauuagaauuuua

SEQ ID NO: 793084 - RNA, 20 nt, Artificial Sequence
  Synthetic
uauagccacauggaauuuua

SEQ ID NO: 793085 - RNA, 20 nt, Artificial Sequence
  Synthetic
auuuuuugguuggaauuuua

SEQ ID NO: 793086 - RNA, 20 nt, Artificial Sequence
  Synthetic
cuuuuaguauuugaauuuua

SEQ ID NO: 793087 - RNA, 20 nt, Artificial Sequence
  Synthetic
uuguucuuguucuaauuuua

SEQ ID NO: 793088 - RNA, 20 nt, Artificial Sequence
  Synthetic
uuugccauuuguuaauuuua

SEQ ID NO: 793089 - RNA, 20 nt, Artificial Sequence
  Synthetic
uacagaaaugacacauuuua

SEQ ID NO: 793090 - RNA, 20 nt, Artificial Sequence
  Synthetic
ugguacuuauugacauuuua

SEQ ID NO: 793091 - RNA, 20 nt, Artificial Sequence
  Synthetic
aagguuuaaacuacauuuua

SEQ ID NO: 793092 - RNA, 20 nt, Artificial Sequence
  Synthetic
aagcuuugcacaccauuuua

SEQ ID NO: 793093 - RNA, 20 nt, Artificial Sequence
  Synthetic
caauuuauccugccauuuua

SEQ ID NO: 793094 - RNA, 20 nt, Artificial Sequence
  Synthetic
auugcuccccaagcauuuua

SEQ ID NO: 793095 - RNA, 20 nt, Artificial Sequence
  Synthetic
acacuaugcugagcauuuua

SEQ ID NO: 793096 - RNA, 20 nt, Artificial Sequence
  Synthetic
aaauaaaaauaggcauuuua

SEQ ID NO: 793097 - RNA, 20 nt, Artificial Sequence
  Synthetic
auagauauauaaucauuuua

SEQ ID NO: 793098 - RNA, 20 nt, Artificial Sequence
  Synthetic
acauguuugaauucauuuua

SEQ ID NO: 793099 - RNA, 20 nt, Artificial Sequence
  Synthetic
aagucaccgauuucauuuua

SEQ ID NO: 793100 - RNA, 20 nt, Artificial Sequence
  Synthetic
cuuuugcugguuucauuuua

SEQ ID NO: 793101 - RNA, 20 nt, Artificial Sequence
  Synthetic
uacgcuacagaaagauuuua

SEQ ID NO: 793102 - RNA, 20 nt, Artificial Sequence
  Synthetic
agauuggaggcaagauuuua

SEQ ID NO: 793103 - RNA, 20 nt, Artificial Sequence
  Synthetic
uggaauaccuuaagauuuua

SEQ ID NO: 793104 - RNA, 20 nt, Artificial Sequence
  Synthetic
uacaucaggcagagauuuua

SEQ ID NO: 793105 - RNA, 20 nt, Artificial Sequence
  Synthetic
uuugagauggggagauuuua

SEQ ID NO: 793106 - RNA, 20 nt, Artificial Sequence
  Synthetic
cccuucauuuggagauuuua

SEQ ID NO: 793107 - RNA, 20 nt, Artificial Sequence
  Synthetic
acauucccuuaaggauuuua

SEQ ID NO: 793108 - RNA, 20 nt, Artificial Sequence
  Synthetic
agcaugguacagggauuuua

SEQ ID NO: 793109 - RNA, 20 nt, Artificial Sequence
  Synthetic
auguaagaaaucugauuuua

SEQ ID NO: 793110 - RNA, 20 nt, Artificial Sequence
  Synthetic
cuaacuugcuuuugauuuua

SEQ ID NO: 793111 - RNA, 20 nt, Artificial Sequence
  Synthetic
acacagcuaaaaauauuuua

SEQ ID NO: 793112 - RNA, 20 nt, Artificial Sequence
  Synthetic
acugcuuaucaaauauuuua

SEQ ID NO: 793113 - RNA, 20 nt, Artificial Sequence
  Synthetic
uaaaaaauuuccauauuuua

SEQ ID NO: 793114 - RNA, 20 nt, Artificial Sequence
  Synthetic
uaauauugugugauauuuua

SEQ ID NO: 793115 - RNA, 20 nt, Artificial Sequence
  Synthetic
aucaggaugcuacuauuuua

SEQ ID NO: 793116 - RNA, 20 nt, Artificial Sequence
  Synthetic
uuuaguugcacaguauuuua

SEQ ID NO: 793117 - RNA, 20 nt, Artificial Sequence
  Synthetic
cuaaacuauggaguauuuua

SEQ ID NO: 793118 - RNA, 20 nt, Artificial Sequence
  Synthetic
cguggcuguauaguauuuua

SEQ ID NO: 793119 - RNA, 20 nt, Artificial Sequence
  Synthetic
agaaucccacugguauuuua

SEQ ID NO: 793120 - RNA, 20 nt, Artificial Sequence
  Synthetic
acaaaaaguaaauuauuuua

SEQ ID NO: 793121 - RNA, 20 nt, Artificial Sequence
  Synthetic
caguaauaaaaaaacuuuua

SEQ ID NO: 793122 - RNA, 20 nt, Artificial Sequence
  Synthetic
caaguagucugcaacuuuua

SEQ ID NO: 793123 - RNA, 20 nt, Artificial Sequence
  Synthetic
uuucagguuucuaacuuuua

SEQ ID NO: 793124 - RNA, 20 nt, Artificial Sequence
  Synthetic
aguugugaaacagacuuuua

SEQ ID NO: 793125 - RNA, 20 nt, Artificial Sequence
  Synthetic
auaggaaugcuauacuuuua

SEQ ID NO: 793126 - RNA, 20 nt, Artificial Sequence
  Synthetic
augucugccugguacuuuua

SEQ ID NO: 793127 - RNA, 20 nt, Artificial Sequence
  Synthetic
uggauuauuacuuacuuuua

SEQ ID NO: 793128 - RNA, 20 nt, Artificial Sequence
  Synthetic
ccgauaauaccuaccuuuua

SEQ ID NO: 793129 - RNA, 20 nt, Artificial Sequence
  Synthetic
aaauguaauugccccuuuua

SEQ ID NO: 793130 - RNA, 20 nt, Artificial Sequence
  Synthetic
ccuaacugaucucccuuuua

SEQ ID NO: 793131 - RNA, 20 nt, Artificial Sequence
  Synthetic
caggacguccuucccuuuua

SEQ ID NO: 793132 - RNA, 20 nt, Artificial Sequence
  Synthetic
uggucacgucaggccuuuua

SEQ ID NO: 793133 - RNA, 20 nt, Artificial Sequence
  Synthetic
acuccugcuguggccuuuua

SEQ ID NO: 793134 - RNA, 20 nt, Artificial Sequence
  Synthetic
ugaaggaguugugccuuuua

SEQ ID NO: 793135 - RNA, 20 nt, Artificial Sequence
  Synthetic
caauacuuaccuuccuuuua

SEQ ID NO: 793136 - RNA, 20 nt, Artificial Sequence
  Synthetic
uuucauuugguuuccuuuua

SEQ ID NO: 793137 - RNA, 20 nt, Artificial Sequence
  Synthetic
agacaaauuauaagcuuuua

SEQ ID NO: 793138 - RNA, 20 nt, Artificial Sequence
  Synthetic
uuagucucuccacgcuuuua

SEQ ID NO: 793139 - RNA, 20 nt, Artificial Sequence
  Synthetic
cuugaguucaauggcuuuua

SEQ ID NO: 793140 - RNA, 20 nt, Artificial Sequence
  Synthetic
uuuuuuugcaauugcuuuua

SEQ ID NO: 793141 - RNA, 20 nt, Artificial Sequence
  Synthetic
aucuguuaagcuugcuuuua

SEQ ID NO: 793142 - RNA, 20 nt, Artificial Sequence
  Synthetic
caaaaccauucuugcuuuua

SEQ ID NO: 793143 - RNA, 20 nt, Artificial Sequence
  Synthetic
uuuuguuacauuugcuuuua

SEQ ID NO: 793144 - RNA, 20 nt, Artificial Sequence
  Synthetic
agauaggauucacucuuuua

SEQ ID NO: 793145 - RNA, 20 nt, Artificial Sequence
  Synthetic
uagggacugugacucuuuua

SEQ ID NO: 793146 - RNA, 20 nt, Artificial Sequence
  Synthetic
cuguuauuauuccucuuuua

SEQ ID NO: 793147 - RNA, 20 nt, Artificial Sequence
  Synthetic
uuccuucaggagcucuuuua

SEQ ID NO: 793148 - RNA, 20 nt, Artificial Sequence
  Synthetic
ugcauaccaauugucuuuua

SEQ ID NO: 793149 - RNA, 20 nt, Artificial Sequence
  Synthetic
uuuuuuguugucuucuuuua

SEQ ID NO: 793150 - RNA, 20 nt, Artificial Sequence
  Synthetic
cuaggcauccaguucuuuua

SEQ ID NO: 793151 - RNA, 20 nt, Artificial Sequence
  Synthetic
uaggccaaauguuucuuuua

SEQ ID NO: 793152 - RNA, 20 nt, Artificial Sequence
  Synthetic
uagggagcuauuuucuuuua

SEQ ID NO: 793153 - RNA, 20 nt, Artificial Sequence
  Synthetic
cagauuucuauuuucuuuua

SEQ ID NO: 793154 - RNA, 20 nt, Artificial Sequence
  Synthetic
auaucugaaacaaaguuuua

SEQ ID NO: 793155 - RNA, 20 nt, Artificial Sequence
  Synthetic
caacugauccugaaguuuua

SEQ ID NO: 793156 - RNA, 20 nt, Artificial Sequence
  Synthetic
uuuuaagucaauaaguuuua

SEQ ID NO: 793157 - RNA, 20 nt, Artificial Sequence
  Synthetic
uuauuauacucuaaguuuua

SEQ ID NO: 793158 - RNA, 20 nt, Artificial Sequence
  Synthetic
uaauuauacuuuaaguuuua

SEQ ID NO: 793159 - RNA, 20 nt, Artificial Sequence
  Synthetic
uuauuauacuuuaaguuuua

SEQ ID NO: 793160 - RNA, 20 nt, Artificial Sequence
  Synthetic
uuauucuacuuuaaguuuua

SEQ ID NO: 793161 - RNA, 20 nt, Artificial Sequence
  Synthetic
uuauuguacuuuaaguuuua

SEQ ID NO: 793162 - RNA, 20 nt, Artificial Sequence
  Synthetic
cucagugcuuuucaguuuua

SEQ ID NO: 793163 - RNA, 20 nt, Artificial Sequence
  Synthetic
aauaccuagaaauaguuuua

SEQ ID NO: 793164 - RNA, 20 nt, Artificial Sequence
  Synthetic
aguaggcacagauaguuuua

SEQ ID NO: 793165 - RNA, 20 nt, Artificial Sequence
  Synthetic
ucccuaaacauagcguuuua

SEQ ID NO: 793166 - RNA, 20 nt, Artificial Sequence
  Synthetic
uacuuauuaacuagguuuua

SEQ ID NO: 793167 - RNA, 20 nt, Artificial Sequence
  Synthetic
cugcuuguguggggguuuua

SEQ ID NO: 793168 - RNA, 20 nt, Artificial Sequence
  Synthetic
cugcuacaaaaaugguuuua

SEQ ID NO: 793169 - RNA, 20 nt, Artificial Sequence
  Synthetic
aaagauaaguugugguuuua

SEQ ID NO: 793170 - RNA, 20 nt, Artificial Sequence
  Synthetic
ccacccuuugcuugguuuua

SEQ ID NO: 793171 - RNA, 20 nt, Artificial Sequence
  Synthetic
aguuugacucuuauguuuua

SEQ ID NO: 793172 - RNA, 20 nt, Artificial Sequence
  Synthetic
uagucuuauagacuguuuua

SEQ ID NO: 793173 - RNA, 20 nt, Artificial Sequence
  Synthetic
uacucaacucugcuguuuua

SEQ ID NO: 793174 - RNA, 20 nt, Artificial Sequence
  Synthetic
ugaugcugaaagguguuuua

SEQ ID NO: 793175 - RNA, 20 nt, Artificial Sequence
  Synthetic
agucaauccaugguguuuua

SEQ ID NO: 793176 - RNA, 20 nt, Artificial Sequence
  Synthetic
uaaaauucauauuuguuuua

SEQ ID NO: 793177 - RNA, 20 nt, Artificial Sequence
  Synthetic
caguauaggauuuuguuuua

SEQ ID NO: 793178 - RNA, 20 nt, Artificial Sequence
  Synthetic
caccaaaaauaaaauuuuua

SEQ ID NO: 793179 - RNA, 20 nt, Artificial Sequence
  Synthetic
uauuugcaaaauaauuuuua

SEQ ID NO: 793180 - RNA, 20 nt, Artificial Sequence
  Synthetic
aguaaguaaauuaauuuuua

SEQ ID NO: 793181 - RNA, 20 nt, Artificial Sequence
  Synthetic
uagccaaucauuaauuuuua

SEQ ID NO: 793182 - RNA, 20 nt, Artificial Sequence
  Synthetic
ugaccuggauggcauuuuua

SEQ ID NO: 793183 - RNA, 20 nt, Artificial Sequence
  Synthetic
aaaaagaaacaucauuuuua

SEQ ID NO: 793184 - RNA, 20 nt, Artificial Sequence
  Synthetic
ccauacccuccucauuuuua

SEQ ID NO: 793185 - RNA, 20 nt, Artificial Sequence
  Synthetic
cacuuucaaguucauuuuua

SEQ ID NO: 793186 - RNA, 20 nt, Artificial Sequence
  Synthetic
acaaagcuaguucauuuuua

SEQ ID NO: 793187 - RNA, 20 nt, Artificial Sequence
  Synthetic
auuucaccacaagauuuuua

SEQ ID NO: 793188 - RNA, 20 nt, Artificial Sequence
  Synthetic
aacccacaccuagauuuuua

SEQ ID NO: 793189 - RNA, 20 nt, Artificial Sequence
  Synthetic
ugaaccuccuuagauuuuua

SEQ ID NO: 793190 - RNA, 20 nt, Artificial Sequence
  Synthetic
cuuggccugagugauuuuua

SEQ ID NO: 793191 - RNA, 20 nt, Artificial Sequence
  Synthetic
uuuuaaggaauugauuuuua

SEQ ID NO: 793192 - RNA, 20 nt, Artificial Sequence
  Synthetic
aaugggaucuaauauuuuua

SEQ ID NO: 793193 - RNA, 20 nt, Artificial Sequence
  Synthetic
uguuucuauuaauauuuuua

SEQ ID NO: 793194 - RNA, 20 nt, Artificial Sequence
  Synthetic
cacuaccguacauauuuuua

SEQ ID NO: 793195 - RNA, 20 nt, Artificial Sequence
  Synthetic
auauucauuuuauauuuuua

SEQ ID NO: 793196 - RNA, 20 nt, Artificial Sequence
  Synthetic
ucuauuagaugcuauuuuua

SEQ ID NO: 793197 - RNA, 20 nt, Artificial Sequence
  Synthetic
ucuuugucuaucuauuuuua

SEQ ID NO: 793198 - RNA, 20 nt, Artificial Sequence
  Synthetic
aaucuuuguucguauuuuua

SEQ ID NO: 793199 - RNA, 20 nt, Artificial Sequence
  Synthetic
auuuguauacuguauuuuua

SEQ ID NO: 793200 - RNA, 20 nt, Artificial Sequence
  Synthetic
aacaaaaaguuguauuuuua

SEQ ID NO: 793201 - RNA, 20 nt, Artificial Sequence
  Synthetic
uaugauaaauguuauuuuua

SEQ ID NO: 793202 - RNA, 20 nt, Artificial Sequence
  Synthetic
uuaaaugacaucccuuuuua

SEQ ID NO: 793203 - RNA, 20 nt, Artificial Sequence
  Synthetic
cugccaggaaauccuuuuua

SEQ ID NO: 793204 - RNA, 20 nt, Artificial Sequence
  Synthetic
caugaucucauuccuuuuua

SEQ ID NO: 793205 - RNA, 20 nt, Artificial Sequence
  Synthetic
uguuaauucauuccuuuuua

SEQ ID NO: 793206 - RNA, 20 nt, Artificial Sequence
  Synthetic
auguggcagguggcuuuuua

SEQ ID NO: 793207 - RNA, 20 nt, Artificial Sequence
  Synthetic
uccuuugcugaugcuuuuua

SEQ ID NO: 793208 - RNA, 20 nt, Artificial Sequence
  Synthetic
auuucaccagucucuuuuua

SEQ ID NO: 793209 - RNA, 20 nt, Artificial Sequence
  Synthetic
ccuccaucuuucucuuuuua

SEQ ID NO: 793210 - RNA, 20 nt, Artificial Sequence
  Synthetic
auuuuucaagagucuuuuua

SEQ ID NO: 793211 - RNA, 20 nt, Artificial Sequence
  Synthetic
aaaggaucucauucuuuuua

SEQ ID NO: 793212 - RNA, 20 nt, Artificial Sequence
  Synthetic
ccuagaauacuuucuuuuua

SEQ ID NO: 793213 - RNA, 20 nt, Artificial Sequence
  Synthetic
cuucauuauguuucuuuuua

SEQ ID NO: 793214 - RNA, 20 nt, Artificial Sequence
  Synthetic
caugauuuuguuaguuuuua

SEQ ID NO: 793215 - RNA, 20 nt, Artificial Sequence
  Synthetic
ugaauaaacugcuguuuuua

SEQ ID NO: 793216 - RNA, 20 nt, Artificial Sequence
  Synthetic
aaaaaccucacaauuuuuua

SEQ ID NO: 793217 - RNA, 20 nt, Artificial Sequence
  Synthetic
uaaccuugaauaauuuuuua

SEQ ID NO: 793218 - RNA, 20 nt, Artificial Sequence
  Synthetic
uucucuaaccuaauuuuuua

SEQ ID NO: 793219 - RNA, 20 nt, Artificial Sequence
  Synthetic
ucuuaaucuuuaauuuuuua

SEQ ID NO: 793220 - RNA, 20 nt, Artificial Sequence
  Synthetic
caugaacucaucauuuuuua

SEQ ID NO: 793221 - RNA, 20 nt, Artificial Sequence
  Synthetic
uucccaaaauugauuuuuua

SEQ ID NO: 793222 - RNA, 20 nt, Artificial Sequence
  Synthetic
auuucgguguuacuuuuuua

SEQ ID NO: 793223 - RNA, 20 nt, Artificial Sequence
  Synthetic
cacgaacgcauccuuuuuua

SEQ ID NO: 793224 - RNA, 20 nt, Artificial Sequence
  Synthetic
aaacaacucauccuuuuuua

SEQ ID NO: 793225 - RNA, 20 nt, Artificial Sequence
  Synthetic
caugaacucauccuuuuuua

SEQ ID NO: 793226 - RNA, 20 nt, Artificial Sequence
  Synthetic
cgugaacucauccuuuuuua

SEQ ID NO: 793227 - RNA, 20 nt, Artificial Sequence
  Synthetic
ugugaacucauccuuuuuua

SEQ ID NO: 793228 - RNA, 20 nt, Artificial Sequence
  Synthetic
caugaucucauccuuuuuua

SEQ ID NO: 793229 - RNA, 20 nt, Artificial Sequence
  Synthetic
cacgaacucauucuuuuuua

SEQ ID NO: 793230 - RNA, 20 nt, Artificial Sequence
  Synthetic
caugaacucauucuuuuuua

SEQ ID NO: 793231 - RNA, 20 nt, Artificial Sequence
  Synthetic
caugaacucguucuuuuuua

SEQ ID NO: 793232 - RNA, 20 nt, Artificial Sequence
  Synthetic
caugauuuuguucuuuuuua

SEQ ID NO: 793233 - RNA, 20 nt, Artificial Sequence
  Synthetic
cacacugcauuucuuuuuua

SEQ ID NO: 793234 - RNA, 20 nt, Artificial Sequence
  Synthetic
uuuaauucaggaguuuuuua

SEQ ID NO: 793235 - RNA, 20 nt, Artificial Sequence
  Synthetic
aacaaccucauuguuuuuua

SEQ ID NO: 793236 - RNA, 20 nt, Artificial Sequence
  Synthetic
ucuguccucuuuguuuuuua

SEQ ID NO: 793237 - RNA, 20 nt, Artificial Sequence
  Synthetic
augaacucaucauuuuuuua

SEQ ID NO: 793238 - RNA, 20 nt, Artificial Sequence
  Synthetic
acauucuuaucauuuuuuua

SEQ ID NO: 793239 - RNA, 20 nt, Artificial Sequence
  Synthetic
uuaaaaguuauauuuuuuua

SEQ ID NO: 793240 - RNA, 20 nt, Artificial Sequence
  Synthetic
auuaaacucugcuuuuuuua

SEQ ID NO: 793241 - RNA, 20 nt, Artificial Sequence
  Synthetic
augaucucauucuuuuuuua

SEQ ID NO: 793242 - RNA, 20 nt, Artificial Sequence
  Synthetic
uagccuuuaaauuuuuuuua

SEQ ID NO: 793243 - RNA, 20 nt, Artificial Sequence
  Synthetic
uuccucuaaccuuuuuuuua

SEQ ID NO: 793244 - RNA, 20 nt, Artificial Sequence
  Synthetic
aaaaaaaaaaaaaaaaaaac

SEQ ID NO: 793245 - RNA, 20 nt, Artificial Sequence
  Synthetic
uuaaaaaaaaaaaaaaaaac

SEQ ID NO: 793246 - RNA, 20 nt, Artificial Sequence
  Synthetic
aaaaaaauaaaaaaaaaaac

SEQ ID NO: 793247 - RNA, 20 nt, Artificial Sequence
  Synthetic
aaauaaauuaaaaaaaaaac

SEQ ID NO: 793248 - RNA, 20 nt, Artificial Sequence
  Synthetic
aucaguaaacagaaaaaaac

SEQ ID NO: 793249 - RNA, 20 nt, Artificial Sequence
  Synthetic
ucuacuaaaaauaaaaaaac

SEQ ID NO: 793250 - RNA, 20 nt, Artificial Sequence
  Synthetic
uuggcaguacuuaaaaaaac

SEQ ID NO: 793251 - RNA, 20 nt, Artificial Sequence
  Synthetic
aaaaacaagaaacaaaaaac

SEQ ID NO: 793252 - RNA, 20 nt, Artificial Sequence
  Synthetic
uuauauuaccaacaaaaaac

SEQ ID NO: 793253 - RNA, 20 nt, Artificial Sequence
  Synthetic
aagagaggauuacaaaaaac

SEQ ID NO: 793254 - RNA, 20 nt, Artificial Sequence
  Synthetic
aaacugaaaaagcaaaaaac

SEQ ID NO: 793255 - RNA, 20 nt, Artificial Sequence
  Synthetic
ugccuuguccuucaaaaaac

SEQ ID NO: 793256 - RNA, 20 nt, Artificial Sequence
  Synthetic
uguugaucuuuucaaaaaac

SEQ ID NO: 793257 - RNA, 20 nt, Artificial Sequence
  Synthetic
caggaaaaaaaagaaaaaac

SEQ ID NO: 793258 - RNA, 20 nt, Artificial Sequence
  Synthetic
ugaggcaggagggaaaaaac

SEQ ID NO: 793259 - RNA, 20 nt, Artificial Sequence
  Synthetic
uuggaacagagauaaaaaac

SEQ ID NO: 793260 - RNA, 20 nt, Artificial Sequence
  Synthetic
acauuacaaaaguaaaaaac

SEQ ID NO: 793261 - RNA, 20 nt, Artificial Sequence
  Synthetic
acacuuucagcuuaaaaaac

SEQ ID NO: 793262 - RNA, 20 nt, Artificial Sequence
  Synthetic
uaauuucaacguuaaaaaac

SEQ ID NO: 793263 - RNA, 20 nt, Artificial Sequence
  Synthetic
aagagacuagcaacaaaaac

SEQ ID NO: 793264 - RNA, 20 nt, Artificial Sequence
  Synthetic
uucauauaauacacaaaaac

SEQ ID NO: 793265 - RNA, 20 nt, Artificial Sequence
  Synthetic
aaaacuuuauuuacaaaaac

SEQ ID NO: 793266 - RNA, 20 nt, Artificial Sequence
  Synthetic
cucacugauucaccaaaaac

SEQ ID NO: 793267 - RNA, 20 nt, Artificial Sequence
  Synthetic
uauucauuauagccaaaaac

SEQ ID NO: 793268 - RNA, 20 nt, Artificial Sequence
  Synthetic
agccugaaaauuccaaaaac

SEQ ID NO: 793269 - RNA, 20 nt, Artificial Sequence
  Synthetic
ucugcucaaugggcaaaaac

SEQ ID NO: 793270 - RNA, 20 nt, Artificial Sequence
  Synthetic
cauacugaaugggcaaaaac

SEQ ID NO: 793271 - RNA, 20 nt, Artificial Sequence
  Synthetic
cuacaaccacaugcaaaaac

SEQ ID NO: 793272 - RNA, 20 nt, Artificial Sequence
  Synthetic
aagauaaagccugcaaaaac

SEQ ID NO: 793273 - RNA, 20 nt, Artificial Sequence
  Synthetic
aaaagagcaugugcaaaaac

SEQ ID NO: 793274 - RNA, 20 nt, Artificial Sequence
  Synthetic
augcuggaacuugcaaaaac

SEQ ID NO: 793275 - RNA, 20 nt, Artificial Sequence
  Synthetic
uuugcauaaaauucaaaaac

SEQ ID NO: 793276 - RNA, 20 nt, Artificial Sequence
  Synthetic
ucauaucaaaaaagaaaaac

SEQ ID NO: 793277 - RNA, 20 nt, Artificial Sequence
  Synthetic
uaccuguaguucagaaaaac

SEQ ID NO: 793278 - RNA, 20 nt, Artificial Sequence
  Synthetic
uaaacauggaaaggaaaaac

SEQ ID NO: 793279 - RNA, 20 nt, Artificial Sequence
  Synthetic
uaaauauggaaaggaaaaac

SEQ ID NO: 793280 - RNA, 20 nt, Artificial Sequence
  Synthetic
aacaaauggugcggaaaaac

SEQ ID NO: 793281 - RNA, 20 nt, Artificial Sequence
  Synthetic
caaguugaguggggaaaaac

SEQ ID NO: 793282 - RNA, 20 nt, Artificial Sequence
  Synthetic
aaugacaugaguggaaaaac

SEQ ID NO: 793283 - RNA, 20 nt, Artificial Sequence
  Synthetic
uaguggaaauuaugaaaaac

SEQ ID NO: 793284 - RNA, 20 nt, Artificial Sequence
  Synthetic
cuucaaaauuauugaaaaac

SEQ ID NO: 793285 - RNA, 20 nt, Artificial Sequence
  Synthetic
aagcuuacaaaaauaaaaac

SEQ ID NO: 793286 - RNA, 20 nt, Artificial Sequence
  Synthetic
uacgcuagcaacauaaaaac

SEQ ID NO: 793287 - RNA, 20 nt, Artificial Sequence
  Synthetic
cugaugcacaugauaaaaac

SEQ ID NO: 793288 - RNA, 20 nt, Artificial Sequence
  Synthetic
aggucuugccaauuaaaaac

SEQ ID NO: 793289 - RNA, 20 nt, Artificial Sequence
  Synthetic
uauccaaaagaauuaaaaac

SEQ ID NO: 793290 - RNA, 20 nt, Artificial Sequence
  Synthetic
ccaaagagaaaguuaaaaac

SEQ ID NO: 793291 - RNA, 20 nt, Artificial Sequence
  Synthetic
aggaaaaacaaaaacaaaac

SEQ ID NO: 793292 - RNA, 20 nt, Artificial Sequence
  Synthetic
aaaacaaaacaaaacaaaac

SEQ ID NO: 793293 - RNA, 20 nt, Artificial Sequence
  Synthetic
aagcacacacaaaacaaaac

SEQ ID NO: 793294 - RNA, 20 nt, Artificial Sequence
  Synthetic
aaaaagaaaagaaacaaaac

SEQ ID NO: 793295 - RNA, 20 nt, Artificial Sequence
  Synthetic
ucauagcucuccaacaaaac

SEQ ID NO: 793296 - RNA, 20 nt, Artificial Sequence
  Synthetic
cuccagcaagggaacaaaac

SEQ ID NO: 793297 - RNA, 20 nt, Artificial Sequence
  Synthetic
aaugaagauguccacaaaac

SEQ ID NO: 793298 - RNA, 20 nt, Artificial Sequence
  Synthetic
agcugguaggaagacaaaac

SEQ ID NO: 793299 - RNA, 20 nt, Artificial Sequence
  Synthetic
agaauccugauggacaaaac

SEQ ID NO: 793300 - RNA, 20 nt, Artificial Sequence
  Synthetic
uaguuuacagaugacaaaac

SEQ ID NO: 793301 - RNA, 20 nt, Artificial Sequence
  Synthetic
caaacaacccaguacaaaac

SEQ ID NO: 793302 - RNA, 20 nt, Artificial Sequence
  Synthetic
aaucaggauguuuacaaaac

SEQ ID NO: 793303 - RNA, 20 nt, Artificial Sequence
  Synthetic
cuauguuuuauuaccaaaac

SEQ ID NO: 793304 - RNA, 20 nt, Artificial Sequence
  Synthetic
aaaggccagaauuccaaaac

SEQ ID NO: 793305 - RNA, 20 nt, Artificial Sequence
  Synthetic
cacacauccuuuagcaaaac

SEQ ID NO: 793306 - RNA, 20 nt, Artificial Sequence
  Synthetic
caaauaaggagacgcaaaac

SEQ ID NO: 793307 - RNA, 20 nt, Artificial Sequence
  Synthetic
uaaacacuuguacgcaaaac

SEQ ID NO: 793308 - RNA, 20 nt, Artificial Sequence
  Synthetic
uucuaaagugaaggcaaaac

SEQ ID NO: 793309 - RNA, 20 nt, Artificial Sequence
  Synthetic
ucauacugaaugggcaaaac

SEQ ID NO: 793310 - RNA, 20 nt, Artificial Sequence
  Synthetic
uuucuacuuuagugcaaaac

SEQ ID NO: 793311 - RNA, 20 nt, Artificial Sequence
  Synthetic
auguugcuggaagucaaaac

SEQ ID NO: 793312 - RNA, 20 nt, Artificial Sequence
  Synthetic
aguggggaggacuucaaaac

SEQ ID NO: 793313 - RNA, 20 nt, Artificial Sequence
  Synthetic
uugacugcaccuuucaaaac

SEQ ID NO: 793314 - RNA, 20 nt, Artificial Sequence
  Synthetic
uaaaguuuuaagaagaaaac

SEQ ID NO: 793315 - RNA, 20 nt, Artificial Sequence
  Synthetic
acgcuauuauauaagaaaac

SEQ ID NO: 793316 - RNA, 20 nt, Artificial Sequence
  Synthetic
ugcuguaagugacagaaaac

SEQ ID NO: 793317 - RNA, 20 nt, Artificial Sequence
  Synthetic
uaaauucccucagagaaaac

SEQ ID NO: 793318 - RNA, 20 nt, Artificial Sequence
  Synthetic
uaacuguaucuagagaaaac

SEQ ID NO: 793319 - RNA, 20 nt, Artificial Sequence
  Synthetic
cauuuuauagacgagaaaac

SEQ ID NO: 793320 - RNA, 20 nt, Artificial Sequence
  Synthetic
caaaaucaaggggagaaaac

SEQ ID NO: 793321 - RNA, 20 nt, Artificial Sequence
  Synthetic
caguuacuaaaugagaaaac

SEQ ID NO: 793322 - RNA, 20 nt, Artificial Sequence
  Synthetic
uauuuuacuguugagaaaac

SEQ ID NO: 793323 - RNA, 20 nt, Artificial Sequence
  Synthetic
aguauuuacaccacgaaaac

SEQ ID NO: 793324 - RNA, 20 nt, Artificial Sequence
  Synthetic
caacauucgagcaggaaaac

SEQ ID NO: 793325 - RNA, 20 nt, Artificial Sequence
  Synthetic
caaaaguccaucaggaaaac

SEQ ID NO: 793326 - RNA, 20 nt, Artificial Sequence
  Synthetic
auaaauggugucgggaaaac

SEQ ID NO: 793327 - RNA, 20 nt, Artificial Sequence
  Synthetic
aaguuuuucaaugggaaaac

SEQ ID NO: 793328 - RNA, 20 nt, Artificial Sequence
  Synthetic
auaaauggugcugggaaaac

SEQ ID NO: 793329 - RNA, 20 nt, Artificial Sequence
  Synthetic
accaauggugcugggaaaac

SEQ ID NO: 793330 - RNA, 20 nt, Artificial Sequence
  Synthetic
auaaaugguguugggaaaac

SEQ ID NO: 793331 - RNA, 20 nt, Artificial Sequence
  Synthetic
uaagaauuaauguggaaaac

SEQ ID NO: 793332 - RNA, 20 nt, Artificial Sequence
  Synthetic
uacugaguaauaaugaaaac

SEQ ID NO: 793333 - RNA, 20 nt, Artificial Sequence
  Synthetic
cuuucuagcgguaugaaaac

SEQ ID NO: 793334 - RNA, 20 nt, Artificial Sequence
  Synthetic
acaagguaguuuaugaaaac

SEQ ID NO: 793335 - RNA, 20 nt, Artificial Sequence
  Synthetic
ucuuuggguccccugaaaac

SEQ ID NO: 793336 - RNA, 20 nt, Artificial Sequence
  Synthetic
uacccaaaauaauugaaaac

SEQ ID NO: 793337 - RNA, 20 nt, Artificial Sequence
  Synthetic
ucacagaacagaaauaaaac

SEQ ID NO: 793338 - RNA, 20 nt, Artificial Sequence
  Synthetic
aaagugacaaagaauaaaac

SEQ ID NO: 793339 - RNA, 20 nt, Artificial Sequence
  Synthetic
aaagcaagagagcauaaaac

SEQ ID NO: 793340 - RNA, 20 nt, Artificial Sequence
  Synthetic
uuaaaaguaccucauaaaac

SEQ ID NO: 793341 - RNA, 20 nt, Artificial Sequence
  Synthetic
agcaugcacagggauaaaac

SEQ ID NO: 793342 - RNA, 20 nt, Artificial Sequence
  Synthetic
agagccuguaacuauaaaac

SEQ ID NO: 793343 - RNA, 20 nt, Artificial Sequence
  Synthetic
auccacuucacuccuaaaac

SEQ ID NO: 793344 - RNA, 20 nt, Artificial Sequence
  Synthetic
aacuuaauugucucuaaaac

SEQ ID NO: 793345 - RNA, 20 nt, Artificial Sequence
  Synthetic
ugcaucaucuucaguaaaac

SEQ ID NO: 793346 - RNA, 20 nt, Artificial Sequence
  Synthetic
uguuuccagagugguaaaac

SEQ ID NO: 793347 - RNA, 20 nt, Artificial Sequence
  Synthetic
aauuuucucaucuguaaaac

SEQ ID NO: 793348 - RNA, 20 nt, Artificial Sequence
  Synthetic
ugcucggaaaauuguaaaac

SEQ ID NO: 793349 - RNA, 20 nt, Artificial Sequence
  Synthetic
uuuuucaguagaauuaaaac

SEQ ID NO: 793350 - RNA, 20 nt, Artificial Sequence
  Synthetic
uauugagauuauauuaaaac

SEQ ID NO: 793351 - RNA, 20 nt, Artificial Sequence
  Synthetic
uguuaucagauacuuaaaac

SEQ ID NO: 793352 - RNA, 20 nt, Artificial Sequence
  Synthetic
caagaguagcuccuuaaaac

SEQ ID NO: 793353 - RNA, 20 nt, Artificial Sequence
  Synthetic
cagaggcuggaucuuaaaac

SEQ ID NO: 793354 - RNA, 20 nt, Artificial Sequence
  Synthetic
agaauaucaagaguuaaaac

SEQ ID NO: 793355 - RNA, 20 nt, Artificial Sequence
  Synthetic
uauaauuccauuguuaaaac

SEQ ID NO: 793356 - RNA, 20 nt, Artificial Sequence
  Synthetic
accuucagagaaaaacaaac

SEQ ID NO: 793357 - RNA, 20 nt, Artificial Sequence
  Synthetic
cuucaguggcuaaaacaaac

SEQ ID NO: 793358 - RNA, 20 nt, Artificial Sequence
  Synthetic
acaaaacaaaacaaacaaac

SEQ ID NO: 793359 - RNA, 20 nt, Artificial Sequence
  Synthetic
auacaauacacacaacaaac

SEQ ID NO: 793360 - RNA, 20 nt, Artificial Sequence
  Synthetic
uucuuacccagaccacaaac

SEQ ID NO: 793361 - RNA, 20 nt, Artificial Sequence
  Synthetic
aauagugaaauaccacaaac

SEQ ID NO: 793362 - RNA, 20 nt, Artificial Sequence
  Synthetic
augauagcagaagcacaaac

SEQ ID NO: 793363 - RNA, 20 nt, Artificial Sequence
  Synthetic
cuucucaaaagaagacaaac

SEQ ID NO: 793364 - RNA, 20 nt, Artificial Sequence
  Synthetic
cauugcagcugaagacaaac

SEQ ID NO: 793365 - RNA, 20 nt, Artificial Sequence
  Synthetic
uguuguuugcaaggacaaac

SEQ ID NO: 793366 - RNA, 20 nt, Artificial Sequence
  Synthetic
uuuuccuuuaaguaccaaac

SEQ ID NO: 793367 - RNA, 20 nt, Artificial Sequence
  Synthetic
aauagccaacauauccaaac

SEQ ID NO: 793368 - RNA, 20 nt, Artificial Sequence
  Synthetic
auucagaaucauauccaaac

SEQ ID NO: 793369 - RNA, 20 nt, Artificial Sequence
  Synthetic
augugcccuucuuuccaaac

SEQ ID NO: 793370 - RNA, 20 nt, Artificial Sequence
  Synthetic
ugccaaaaggaaaagcaaac

SEQ ID NO: 793371 - RNA, 20 nt, Artificial Sequence
  Synthetic
aaucacagugagaagcaaac

SEQ ID NO: 793372 - RNA, 20 nt, Artificial Sequence
  Synthetic
agguuaaccauacagcaaac

SEQ ID NO: 793373 - RNA, 20 nt, Artificial Sequence
  Synthetic
aauaaauaccagcagcaaac

SEQ ID NO: 793374 - RNA, 20 nt, Artificial Sequence
  Synthetic
uacucuguaaaucagcaaac

SEQ ID NO: 793375 - RNA, 20 nt, Artificial Sequence
  Synthetic
uucagaaaauccuagcaaac

SEQ ID NO: 793376 - RNA, 20 nt, Artificial Sequence
  Synthetic
caaugaaggaaguagcaaac

SEQ ID NO: 793377 - RNA, 20 nt, Artificial Sequence
  Synthetic
uucaauuuaacuuagcaaac

SEQ ID NO: 793378 - RNA, 20 nt, Artificial Sequence
  Synthetic
aacagcccaguuuagcaaac

SEQ ID NO: 793379 - RNA, 20 nt, Artificial Sequence
  Synthetic
cuggugauacucaggcaaac

SEQ ID NO: 793380 - RNA, 20 nt, Artificial Sequence
  Synthetic
aagacauacaaauggcaaac

SEQ ID NO: 793381 - RNA, 20 nt, Artificial Sequence
  Synthetic
acagaauggggaaugcaaac

SEQ ID NO: 793382 - RNA, 20 nt, Artificial Sequence
  Synthetic
aacuauuuguuaaugcaaac

SEQ ID NO: 793383 - RNA, 20 nt, Artificial Sequence
  Synthetic
caaucaugucgucugcaaac

SEQ ID NO: 793384 - RNA, 20 nt, Artificial Sequence
  Synthetic
aaagacuuugaaaaucaaac

SEQ ID NO: 793385 - RNA, 20 nt, Artificial Sequence
  Synthetic
ccauccaggccaucucaaac

SEQ ID NO: 793386 - RNA, 20 nt, Artificial Sequence
  Synthetic
uauuuauuaaugagucaaac

SEQ ID NO: 793387 - RNA, 20 nt, Artificial Sequence
  Synthetic
acacuuaaacucugucaaac

SEQ ID NO: 793388 - RNA, 20 nt, Artificial Sequence
  Synthetic
uucacuaggaaaauucaaac

SEQ ID NO: 793389 - RNA, 20 nt, Artificial Sequence
  Synthetic
cugcccgacugccuucaaac

SEQ ID NO: 793390 - RNA, 20 nt, Artificial Sequence
  Synthetic
ccauaaaucaaaguucaaac

SEQ ID NO: 793391 - RNA, 20 nt, Artificial Sequence
  Synthetic
aauaaauauuaaguucaaac

SEQ ID NO: 793392 - RNA, 20 nt, Artificial Sequence
  Synthetic
ugauagcuuugauuucaaac

SEQ ID NO: 793393 - RNA, 20 nt, Artificial Sequence
  Synthetic
uucucaaaccucuuucaaac

SEQ ID NO: 793394 - RNA, 20 nt, Artificial Sequence
  Synthetic
uauaucuagacuuuucaaac

SEQ ID NO: 793395 - RNA, 20 nt, Artificial Sequence
  Synthetic
auauaaugaugaaaagaaac

SEQ ID NO: 793396 - RNA, 20 nt, Artificial Sequence
  Synthetic
augcagaauuggaaagaaac

SEQ ID NO: 793397 - RNA, 20 nt, Artificial Sequence
  Synthetic
aaagagaaauauaaagaaac

SEQ ID NO: 793398 - RNA, 20 nt, Artificial Sequence
  Synthetic
aaaaaauuguuuaaagaaac

SEQ ID NO: 793399 - RNA, 20 nt, Artificial Sequence
  Synthetic
auugaauugagucaagaaac

SEQ ID NO: 793400 - RNA, 20 nt, Artificial Sequence
  Synthetic
ccuuccagaggugaagaaac

SEQ ID NO: 793401 - RNA, 20 nt, Artificial Sequence
  Synthetic
aagauaggggcauaagaaac

SEQ ID NO: 793402 - RNA, 20 nt, Artificial Sequence
  Synthetic
aguagaaaaaacacagaaac

SEQ ID NO: 793403 - RNA, 20 nt, Artificial Sequence
  Synthetic
acaggagguucugcagaaac

SEQ ID NO: 793404 - RNA, 20 nt, Artificial Sequence
  Synthetic
agguguaugacaucagaaac

SEQ ID NO: 793405 - RNA, 20 nt, Artificial Sequence
  Synthetic
uguacuaccuuuucagaaac

SEQ ID NO: 793406 - RNA, 20 nt, Artificial Sequence
  Synthetic
caaauggcuaaaggagaaac

SEQ ID NO: 793407 - RNA, 20 nt, Artificial Sequence
  Synthetic
cagugcaguaaaggagaaac

SEQ ID NO: 793408 - RNA, 20 nt, Artificial Sequence
  Synthetic
aaagagccacauggagaaac

SEQ ID NO: 793409 - RNA, 20 nt, Artificial Sequence
  Synthetic
uggagaggauguggagaaac

SEQ ID NO: 793410 - RNA, 20 nt, Artificial Sequence
  Synthetic
uggugaggauguggagaaac

SEQ ID NO: 793411 - RNA, 20 nt, Artificial Sequence
  Synthetic
auugggacauggugagaaac

SEQ ID NO: 793412 - RNA, 20 nt, Artificial Sequence
  Synthetic
ucauguugggaaauagaaac

SEQ ID NO: 793413 - RNA, 20 nt, Artificial Sequence
  Synthetic
caauucuccugaauagaaac

SEQ ID NO: 793414 - RNA, 20 nt, Artificial Sequence
  Synthetic
auuuacugggaucuagaaac

SEQ ID NO: 793415 - RNA, 20 nt, Artificial Sequence
  Synthetic
uuuguauuuuuaguagaaac

SEQ ID NO: 793416 - RNA, 20 nt, Artificial Sequence
  Synthetic
uuuguauuuuugguagaaac

SEQ ID NO: 793417 - RNA, 20 nt, Artificial Sequence
  Synthetic
ccacugcucuucuuagaaac

SEQ ID NO: 793418 - RNA, 20 nt, Artificial Sequence
  Synthetic
cugaauucuauuuuagaaac

SEQ ID NO: 793419 - RNA, 20 nt, Artificial Sequence
  Synthetic
caaagauuaaaaugcgaaac

SEQ ID NO: 793420 - RNA, 20 nt, Artificial Sequence
  Synthetic
uucacauaagagcaggaaac

SEQ ID NO: 793421 - RNA, 20 nt, Artificial Sequence
  Synthetic
caaaggggagagcaggaaac

SEQ ID NO: 793422 - RNA, 20 nt, Artificial Sequence
  Synthetic
cauuaacugaaauaggaaac

SEQ ID NO: 793423 - RNA, 20 nt, Artificial Sequence
  Synthetic
cauaugcagaaaacggaaac

SEQ ID NO: 793424 - RNA, 20 nt, Artificial Sequence
  Synthetic
ucacaaucagagagggaaac

SEQ ID NO: 793425 - RNA, 20 nt, Artificial Sequence
  Synthetic
uuggggaaaaggagggaaac

SEQ ID NO: 793426 - RNA, 20 nt, Artificial Sequence
  Synthetic
uugagagaaaauagggaaac

SEQ ID NO: 793427 - RNA, 20 nt, Artificial Sequence
  Synthetic
aacaagaaaacaauggaaac

SEQ ID NO: 793428 - RNA, 20 nt, Artificial Sequence
  Synthetic
caguuuucucaccuggaaac

SEQ ID NO: 793429 - RNA, 20 nt, Artificial Sequence
  Synthetic
ugagauuuuugucuggaaac

SEQ ID NO: 793430 - RNA, 20 nt, Artificial Sequence
  Synthetic
auuugaauugagguggaaac

SEQ ID NO: 793431 - RNA, 20 nt, Artificial Sequence
  Synthetic
aaggguaaagacuuggaaac

SEQ ID NO: 793432 - RNA, 20 nt, Artificial Sequence
  Synthetic
cucacuagaacaaaugaaac

SEQ ID NO: 793433 - RNA, 20 nt, Artificial Sequence
  Synthetic
aaauacaaaucaaaugaaac

SEQ ID NO: 793434 - RNA, 20 nt, Artificial Sequence
  Synthetic
agcucaaguagaaaugaaac

SEQ ID NO: 793435 - RNA, 20 nt, Artificial Sequence
  Synthetic
acauuaaaaggcaaugaaac

SEQ ID NO: 793436 - RNA, 20 nt, Artificial Sequence
  Synthetic
cguauccagaggaaugaaac

SEQ ID NO: 793437 - RNA, 20 nt, Artificial Sequence
  Synthetic
aagaauaggguuaaugaaac

SEQ ID NO: 793438 - RNA, 20 nt, Artificial Sequence
  Synthetic
cacaaauacaaucaugaaac

SEQ ID NO: 793439 - RNA, 20 nt, Artificial Sequence
  Synthetic
caaaaaugcuaucaugaaac

SEQ ID NO: 793440 - RNA, 20 nt, Artificial Sequence
  Synthetic
cucauaguggaagaugaaac

SEQ ID NO: 793441 - RNA, 20 nt, Artificial Sequence
  Synthetic
agacaugaaagagaugaaac

SEQ ID NO: 793442 - RNA, 20 nt, Artificial Sequence
  Synthetic
uguagggacauggaugaaac

SEQ ID NO: 793443 - RNA, 20 nt, Artificial Sequence
  Synthetic
aagaccugugucuaugaaac

SEQ ID NO: 793444 - RNA, 20 nt, Artificial Sequence
  Synthetic
caucuacagaaaacugaaac

SEQ ID NO: 793445 - RNA, 20 nt, Artificial Sequence
  Synthetic
caacugauaucaacugaaac

SEQ ID NO: 793446 - RNA, 20 nt, Artificial Sequence
  Synthetic
ugaccaugggucacugaaac

SEQ ID NO: 793447 - RNA, 20 nt, Artificial Sequence
  Synthetic
aaggaauaaaugacugaaac

SEQ ID NO: 793448 - RNA, 20 nt, Artificial Sequence
  Synthetic
aauugaugacuuacugaaac

SEQ ID NO: 793449 - RNA, 20 nt, Artificial Sequence
  Synthetic
uauaaagaaauaccugaaac

SEQ ID NO: 793450 - RNA, 20 nt, Artificial Sequence
  Synthetic
ucagugguuguaccugaaac

SEQ ID NO: 793451 - RNA, 20 nt, Artificial Sequence
  Synthetic
cauacguagaaagcugaaac

SEQ ID NO: 793452 - RNA, 20 nt, Artificial Sequence
  Synthetic
cauauguagaaagcugaaac

SEQ ID NO: 793453 - RNA, 20 nt, Artificial Sequence
  Synthetic
cauauguagagagcugaaac

SEQ ID NO: 793454 - RNA, 20 nt, Artificial Sequence
  Synthetic
agauuauuuuauucugaaac

SEQ ID NO: 793455 - RNA, 20 nt, Artificial Sequence
  Synthetic
uaauaaugggguggugaaac

SEQ ID NO: 793456 - RNA, 20 nt, Artificial Sequence
  Synthetic
uuuacaaauaagugugaaac

SEQ ID NO: 793457 - RNA, 20 nt, Artificial Sequence
  Synthetic
aauaaaacuucuugugaaac

SEQ ID NO: 793458 - RNA, 20 nt, Artificial Sequence
  Synthetic
caguacauagcacuugaaac

SEQ ID NO: 793459 - RNA, 20 nt, Artificial Sequence
  Synthetic
caauggaaaauccuugaaac

SEQ ID NO: 793460 - RNA, 20 nt, Artificial Sequence
  Synthetic
aacaaacagcucuuugaaac

SEQ ID NO: 793461 - RNA, 20 nt, Artificial Sequence
  Synthetic
agcuaucugcaaaaauaaac

SEQ ID NO: 793462 - RNA, 20 nt, Artificial Sequence
  Synthetic
uuaaaauaguaaaaauaaac

SEQ ID NO: 793463 - RNA, 20 nt, Artificial Sequence
  Synthetic
uuucaaauauuaaaauaaac

SEQ ID NO: 793464 - RNA, 20 nt, Artificial Sequence
  Synthetic
cuugaggaagaagaauaaac

SEQ ID NO: 793465 - RNA, 20 nt, Artificial Sequence
  Synthetic
aauaaaauaaaauaauaaac

SEQ ID NO: 793466 - RNA, 20 nt, Artificial Sequence
  Synthetic
uggaggagagcauaauaaac

SEQ ID NO: 793467 - RNA, 20 nt, Artificial Sequence
  Synthetic
aaaggggaaugguaauaaac

SEQ ID NO: 793468 - RNA, 20 nt, Artificial Sequence
  Synthetic
caauauccuuuaucauaaac

SEQ ID NO: 793469 - RNA, 20 nt, Artificial Sequence
  Synthetic
ucuuuugucaauucauaaac

SEQ ID NO: 793470 - RNA, 20 nt, Artificial Sequence
  Synthetic
caagaauaacagggauaaac

SEQ ID NO: 793471 - RNA, 20 nt, Artificial Sequence
  Synthetic
ccaagccaaaaaauauaaac

SEQ ID NO: 793472 - RNA, 20 nt, Artificial Sequence
  Synthetic
cugugacaagaaauauaaac

SEQ ID NO: 793473 - RNA, 20 nt, Artificial Sequence
  Synthetic
cugcuaucaagaauauaaac

SEQ ID NO: 793474 - RNA, 20 nt, Artificial Sequence
  Synthetic
auugcaguuauccuauaaac

SEQ ID NO: 793475 - RNA, 20 nt, Artificial Sequence
  Synthetic
cagaagucaaaaguauaaac

SEQ ID NO: 793476 - RNA, 20 nt, Artificial Sequence
  Synthetic
uccaucuuuaaaaacuaaac

SEQ ID NO: 793477 - RNA, 20 nt, Artificial Sequence
  Synthetic
augaaagagauguccuaaac

SEQ ID NO: 793478 - RNA, 20 nt, Artificial Sequence
  Synthetic
ucauauccuguuugcuaaac

SEQ ID NO: 793479 - RNA, 20 nt, Artificial Sequence
  Synthetic
auauacuguggaaucuaaac

SEQ ID NO: 793480 - RNA, 20 nt, Artificial Sequence
  Synthetic
auuuauguuccucucuaaac

SEQ ID NO: 793481 - RNA, 20 nt, Artificial Sequence
  Synthetic
ccuuuauagaaauucuaaac

SEQ ID NO: 793482 - RNA, 20 nt, Artificial Sequence
  Synthetic
uacuuagcuuuauucuaaac

SEQ ID NO: 793483 - RNA, 20 nt, Artificial Sequence
  Synthetic
aaacaugugcuuuucuaaac

SEQ ID NO: 793484 - RNA, 20 nt, Artificial Sequence
  Synthetic
caaacaaggaaaaaguaaac

SEQ ID NO: 793485 - RNA, 20 nt, Artificial Sequence
  Synthetic
ccaucccccucaaaguaaac

SEQ ID NO: 793486 - RNA, 20 nt, Artificial Sequence
  Synthetic
ucuucuacagaacaguaaac

SEQ ID NO: 793487 - RNA, 20 nt, Artificial Sequence
  Synthetic
aaaacaaucauacaguaaac

SEQ ID NO: 793488 - RNA, 20 nt, Artificial Sequence
  Synthetic
cacaugaugcuacaguaaac

SEQ ID NO: 793489 - RNA, 20 nt, Artificial Sequence
  Synthetic
cugagaauccaccaguaaac

SEQ ID NO: 793490 - RNA, 20 nt, Artificial Sequence
  Synthetic
agacaaaaauaucaguaaac

SEQ ID NO: 793491 - RNA, 20 nt, Artificial Sequence
  Synthetic
acaaucuuaacagaguaaac

SEQ ID NO: 793492 - RNA, 20 nt, Artificial Sequence
  Synthetic
ucucugaauuucuaguaaac

SEQ ID NO: 793493 - RNA, 20 nt, Artificial Sequence
  Synthetic
auuucagauuguuaguaaac

SEQ ID NO: 793494 - RNA, 20 nt, Artificial Sequence
  Synthetic
uagaaagguagcagguaaac

SEQ ID NO: 793495 - RNA, 20 nt, Artificial Sequence
  Synthetic
uauuaaccuuaaauguaaac

SEQ ID NO: 793496 - RNA, 20 nt, Artificial Sequence
  Synthetic
cacuuguucuucauguaaac

SEQ ID NO: 793497 - RNA, 20 nt, Artificial Sequence
  Synthetic
auuaaacauuauauguaaac

SEQ ID NO: 793498 - RNA, 20 nt, Artificial Sequence
  Synthetic
ugugaggggaaacuguaaac

SEQ ID NO: 793499 - RNA, 20 nt, Artificial Sequence
  Synthetic
uuuuauagucuccuguaaac

SEQ ID NO: 793500 - RNA, 20 nt, Artificial Sequence
  Synthetic
agagauuugcgucuguaaac

SEQ ID NO: 793501 - RNA, 20 nt, Artificial Sequence
  Synthetic
uuuguaauuuaaaauuaaac

SEQ ID NO: 793502 - RNA, 20 nt, Artificial Sequence
  Synthetic
uuauauguguucaauuaaac

SEQ ID NO: 793503 - RNA, 20 nt, Artificial Sequence
  Synthetic
aagaguuauuggccuuaaac

SEQ ID NO: 793504 - RNA, 20 nt, Artificial Sequence
  Synthetic
aacacacugguggcuuaaac

SEQ ID NO: 793505 - RNA, 20 nt, Artificial Sequence
  Synthetic
cauaggaaagaaucuuaaac

SEQ ID NO: 793506 - RNA, 20 nt, Artificial Sequence
  Synthetic
aaaaacccaccuaguuaaac

SEQ ID NO: 793507 - RNA, 20 nt, Artificial Sequence
  Synthetic
aacaugugaucauguuaaac

SEQ ID NO: 793508 - RNA, 20 nt, Artificial Sequence
  Synthetic
cuuccacaaggcauuuaaac

SEQ ID NO: 793509 - RNA, 20 nt, Artificial Sequence
  Synthetic
agaagaacauucauuuaaac

SEQ ID NO: 793510 - RNA, 20 nt, Artificial Sequence
  Synthetic
aaauucgggacuguuuaaac

SEQ ID NO: 793511 - RNA, 20 nt, Artificial Sequence
  Synthetic
ugcagcauugauuuuuaaac

SEQ ID NO: 793512 - RNA, 20 nt, Artificial Sequence
  Synthetic
acuugcugacugaaaacaac

SEQ ID NO: 793513 - RNA, 20 nt, Artificial Sequence
  Synthetic
uugguguuugaccaaacaac

SEQ ID NO: 793514 - RNA, 20 nt, Artificial Sequence
  Synthetic
auuugaucugaucaaacaac

SEQ ID NO: 793515 - RNA, 20 nt, Artificial Sequence
  Synthetic
auuaaaaaucaggaaacaac

SEQ ID NO: 793516 - RNA, 20 nt, Artificial Sequence
  Synthetic
uuaaaaagucaggaaacaac

SEQ ID NO: 793517 - RNA, 20 nt, Artificial Sequence
  Synthetic
uucaaaagucaggaaacaac

SEQ ID NO: 793518 - RNA, 20 nt, Artificial Sequence
  Synthetic
uuuaaaagucaggaaacaac

SEQ ID NO: 793519 - RNA, 20 nt, Artificial Sequence
  Synthetic
agcaguucaagcuaaacaac

SEQ ID NO: 793520 - RNA, 20 nt, Artificial Sequence
  Synthetic
aacugaaacuuaccaacaac

SEQ ID NO: 793521 - RNA, 20 nt, Artificial Sequence
  Synthetic
caacugcauuuaucaacaac

SEQ ID NO: 793522 - RNA, 20 nt, Artificial Sequence
  Synthetic
cugagcauguccagaacaac

SEQ ID NO: 793523 - RNA, 20 nt, Artificial Sequence
  Synthetic
uaaacauggaaaggaacaac

SEQ ID NO: 793524 - RNA, 20 nt, Artificial Sequence
  Synthetic
uggcuaggaugaugaacaac

SEQ ID NO: 793525 - RNA, 20 nt, Artificial Sequence
  Synthetic
ccacauuuuaaaauaacaac

SEQ ID NO: 793526 - RNA, 20 nt, Artificial Sequence
  Synthetic
cagugugaagagguaacaac

SEQ ID NO: 793527 - RNA, 20 nt, Artificial Sequence
  Synthetic
acagacucuuagaacacaac

SEQ ID NO: 793528 - RNA, 20 nt, Artificial Sequence
  Synthetic
aguggaaacauaaccacaac

SEQ ID NO: 793529 - RNA, 20 nt, Artificial Sequence
  Synthetic
cccuccccccaccccacaac

SEQ ID NO: 793530 - RNA, 20 nt, Artificial Sequence
  Synthetic
cccucccccgaccccacaac

SEQ ID NO: 793531 - RNA, 20 nt, Artificial Sequence
  Synthetic
accucaucauaucccacaac

SEQ ID NO: 793532 - RNA, 20 nt, Artificial Sequence
  Synthetic
ccuuucucaagucccacaac

SEQ ID NO: 793533 - RNA, 20 nt, Artificial Sequence
  Synthetic
ccaguauucgauagcacaac

SEQ ID NO: 793534 - RNA, 20 nt, Artificial Sequence
  Synthetic
cuacuauuugauagcacaac

SEQ ID NO: 793535 - RNA, 20 nt, Artificial Sequence
  Synthetic
cuacuauuugcuagcacaac

SEQ ID NO: 793536 - RNA, 20 nt, Artificial Sequence
  Synthetic
aucauuaucaaaaucacaac

SEQ ID NO: 793537 - RNA, 20 nt, Artificial Sequence
  Synthetic
uggaguauaggcaucacaac

SEQ ID NO: 793538 - RNA, 20 nt, Artificial Sequence
  Synthetic
ucuggucaaauguagacaac

SEQ ID NO: 793539 - RNA, 20 nt, Artificial Sequence
  Synthetic
aguggauuuuaaacgacaac

SEQ ID NO: 793540 - RNA, 20 nt, Artificial Sequence
  Synthetic
aauuuuaucacaaggacaac

SEQ ID NO: 793541 - RNA, 20 nt, Artificial Sequence
  Synthetic
ucuucacauuucaggacaac

SEQ ID NO: 793542 - RNA, 20 nt, Artificial Sequence
  Synthetic
cuacuucuccuagggacaac

SEQ ID NO: 793543 - RNA, 20 nt, Artificial Sequence
  Synthetic
ugcaaggaguccgggacaac

SEQ ID NO: 793544 - RNA, 20 nt, Artificial Sequence
  Synthetic
acuuuuggcauuuggacaac

SEQ ID NO: 793545 - RNA, 20 nt, Artificial Sequence
  Synthetic
aaauuaaaacaaaugacaac

SEQ ID NO: 793546 - RNA, 20 nt, Artificial Sequence
  Synthetic
ucaaaguguugcaugacaac

SEQ ID NO: 793547 - RNA, 20 nt, Artificial Sequence
  Synthetic
uucauaaguaauaauacaac

SEQ ID NO: 793548 - RNA, 20 nt, Artificial Sequence
  Synthetic
uugauuaguuagcauacaac

SEQ ID NO: 793549 - RNA, 20 nt, Artificial Sequence
  Synthetic
cauaauggguugcauacaac

SEQ ID NO: 793550 - RNA, 20 nt, Artificial Sequence
  Synthetic
agcuuauugguagauacaac

SEQ ID NO: 793551 - RNA, 20 nt, Artificial Sequence
  Synthetic
aaugcucuuuucucuacaac

SEQ ID NO: 793552 - RNA, 20 nt, Artificial Sequence
  Synthetic
uccaaacauguuaguacaac

SEQ ID NO: 793553 - RNA, 20 nt, Artificial Sequence
  Synthetic
aaugcaaacguggguacaac

SEQ ID NO: 793554 - RNA, 20 nt, Artificial Sequence
  Synthetic
aacucgauuauuuuuacaac

SEQ ID NO: 793555 - RNA, 20 nt, Artificial Sequence
  Synthetic
ugugaagaccaaaaaccaac

SEQ ID NO: 793556 - RNA, 20 nt, Artificial Sequence
  Synthetic
uacauuacugauaaaccaac

SEQ ID NO: 793557 - RNA, 20 nt, Artificial Sequence
  Synthetic
ucuugggugccuaaaccaac

SEQ ID NO: 793558 - RNA, 20 nt, Artificial Sequence
  Synthetic
uaauuuacauucccaccaac

SEQ ID NO: 793559 - RNA, 20 nt, Artificial Sequence
  Synthetic
aagaauuggaagugaccaac

SEQ ID NO: 793560 - RNA, 20 nt, Artificial Sequence
  Synthetic
agugucauuaaaauaccaac

SEQ ID NO: 793561 - RNA, 20 nt, Artificial Sequence
  Synthetic
uagugaacauaguacccaac

SEQ ID NO: 793562 - RNA, 20 nt, Artificial Sequence
  Synthetic
ccuagccccccacccccaac

SEQ ID NO: 793563 - RNA, 20 nt, Artificial Sequence
  Synthetic
cugccccccaaucccccaac

SEQ ID NO: 793564 - RNA, 20 nt, Artificial Sequence
  Synthetic
cauucucauagucccccaac

SEQ ID NO: 793565 - RNA, 20 nt, Artificial Sequence
  Synthetic
aaaucaaauguuuagccaac

SEQ ID NO: 793566 - RNA, 20 nt, Artificial Sequence
  Synthetic
cuugccccccacccgccaac

SEQ ID NO: 793567 - RNA, 20 nt, Artificial Sequence
  Synthetic
aagacauagaaauggccaac

SEQ ID NO: 793568 - RNA, 20 nt, Artificial Sequence
  Synthetic
agccaccaugccuggccaac

SEQ ID NO: 793569 - RNA, 20 nt, Artificial Sequence
  Synthetic
uuucugcucuugucuccaac

SEQ ID NO: 793570 - RNA, 20 nt, Artificial Sequence
  Synthetic
uaauuuccaaccuguccaac

SEQ ID NO: 793571 - RNA, 20 nt, Artificial Sequence
  Synthetic
uagcuauagaaucuuccaac

SEQ ID NO: 793572 - RNA, 20 nt, Artificial Sequence
  Synthetic
uguuaauucugguuuccaac

SEQ ID NO: 793573 - RNA, 20 nt, Artificial Sequence
  Synthetic
uuugaaaaaaaaaaagcaac

SEQ ID NO: 793574 - RNA, 20 nt, Artificial Sequence
  Synthetic
uuaauuauuucaaaagcaac

SEQ ID NO: 793575 - RNA, 20 nt, Artificial Sequence
  Synthetic
ucaauucaaacuaaagcaac

SEQ ID NO: 793576 - RNA, 20 nt, Artificial Sequence
  Synthetic
aggguuuacucuaaagcaac

SEQ ID NO: 793577 - RNA, 20 nt, Artificial Sequence
  Synthetic
accugacaaaaacaagcaac

SEQ ID NO: 793578 - RNA, 20 nt, Artificial Sequence
  Synthetic
aaauggaacaauacagcaac

SEQ ID NO: 793579 - RNA, 20 nt, Artificial Sequence
  Synthetic
uagauaacaaucccagcaac

SEQ ID NO: 793580 - RNA, 20 nt, Artificial Sequence
  Synthetic
cuugauuuauuugcagcaac

SEQ ID NO: 793581 - RNA, 20 nt, Artificial Sequence
  Synthetic
uuauuuaucagcucagcaac

SEQ ID NO: 793582 - RNA, 20 nt, Artificial Sequence
  Synthetic
aaaagggucaauucagcaac

SEQ ID NO: 793583 - RNA, 20 nt, Artificial Sequence
  Synthetic
uaacagcaaacaguagcaac

SEQ ID NO: 793584 - RNA, 20 nt, Artificial Sequence
  Synthetic
uaauuaaauauaaucgcaac

SEQ ID NO: 793585 - RNA, 20 nt, Artificial Sequence
  Synthetic
cccuuuguggaacucgcaac

SEQ ID NO: 793586 - RNA, 20 nt, Artificial Sequence
  Synthetic
uugagaccagccuaggcaac

SEQ ID NO: 793587 - RNA, 20 nt, Artificial Sequence
  Synthetic
uuuuucagguggugggcaac

SEQ ID NO: 793588 - RNA, 20 nt, Artificial Sequence
  Synthetic
cagauuuauguaauggcaac

SEQ ID NO: 793589 - RNA, 20 nt, Artificial Sequence
  Synthetic
aggugugcucucauggcaac

SEQ ID NO: 793590 - RNA, 20 nt, Artificial Sequence
  Synthetic
agaauuucuguucuggcaac

SEQ ID NO: 793591 - RNA, 20 nt, Artificial Sequence
  Synthetic
cagaagagauaaaaugcaac

SEQ ID NO: 793592 - RNA, 20 nt, Artificial Sequence
  Synthetic
ucuucuucaauaaaugcaac

SEQ ID NO: 793593 - RNA, 20 nt, Artificial Sequence
  Synthetic
cauaugcagaagaaugcaac

SEQ ID NO: 793594 - RNA, 20 nt, Artificial Sequence
  Synthetic
uugugaggggcuaaugcaac

SEQ ID NO: 793595 - RNA, 20 nt, Artificial Sequence
  Synthetic
uguagcaacaugcaugcaac

SEQ ID NO: 793596 - RNA, 20 nt, Artificial Sequence
  Synthetic
uagucuccauacuaugcaac

SEQ ID NO: 793597 - RNA, 20 nt, Artificial Sequence
  Synthetic
cuaguauuugauagugcaac

SEQ ID NO: 793598 - RNA, 20 nt, Artificial Sequence
  Synthetic
uacucccuggguauugcaac

SEQ ID NO: 793599 - RNA, 20 nt, Artificial Sequence
  Synthetic
uucuaauucuaauuugcaac

SEQ ID NO: 793600 - RNA, 20 nt, Artificial Sequence
  Synthetic
aaaaagacgauuuuugcaac

SEQ ID NO: 793601 - RNA, 20 nt, Artificial Sequence
  Synthetic
ccaaugccaucaaaaucaac

SEQ ID NO: 793602 - RNA, 20 nt, Artificial Sequence
  Synthetic
acuugaguaaugcaaucaac

SEQ ID NO: 793603 - RNA, 20 nt, Artificial Sequence
  Synthetic
aguugcacauaagaaucaac

SEQ ID NO: 793604 - RNA, 20 nt, Artificial Sequence
  Synthetic
ugauuccaggacacaucaac

SEQ ID NO: 793605 - RNA, 20 nt, Artificial Sequence
  Synthetic
ccucaggugaccucaucaac

SEQ ID NO: 793606 - RNA, 20 nt, Artificial Sequence
  Synthetic
auugcaaugaagagaucaac

SEQ ID NO: 793607 - RNA, 20 nt, Artificial Sequence
  Synthetic
agaaaugaaauuagaucaac

SEQ ID NO: 793608 - RNA, 20 nt, Artificial Sequence
  Synthetic
caggagccgaugcgaucaac

SEQ ID NO: 793609 - RNA, 20 nt, Artificial Sequence
  Synthetic
aacauaguugcuauaucaac

SEQ ID NO: 793610 - RNA, 20 nt, Artificial Sequence
  Synthetic
uuuaacuuugucuuaucaac

SEQ ID NO: 793611 - RNA, 20 nt, Artificial Sequence
  Synthetic
caaaucucaauacacucaac

SEQ ID NO: 793612 - RNA, 20 nt, Artificial Sequence
  Synthetic
cugauauguugguccucaac

SEQ ID NO: 793613 - RNA, 20 nt, Artificial Sequence
  Synthetic
auucuuaauuuaugcucaac

SEQ ID NO: 793614 - RNA, 20 nt, Artificial Sequence
  Synthetic
aaacuguguucagagucaac

SEQ ID NO: 793615 - RNA, 20 nt, Artificial Sequence
  Synthetic
acccuaucaugagagucaac

SEQ ID NO: 793616 - RNA, 20 nt, Artificial Sequence
  Synthetic
ccuuaucauuccaugucaac

SEQ ID NO: 793617 - RNA, 20 nt, Artificial Sequence
  Synthetic
ugguagguguauaugucaac

SEQ ID NO: 793618 - RNA, 20 nt, Artificial Sequence
  Synthetic
aauaauauguccuugucaac

SEQ ID NO: 793619 - RNA, 20 nt, Artificial Sequence
  Synthetic
aauccacuuaauuauucaac

SEQ ID NO: 793620 - RNA, 20 nt, Artificial Sequence
  Synthetic
agcaaauuaaccacuucaac

SEQ ID NO: 793621 - RNA, 20 nt, Artificial Sequence
  Synthetic
aaaagggauaaaccuucaac

SEQ ID NO: 793622 - RNA, 20 nt, Artificial Sequence
  Synthetic
uacgcuauuugggcuucaac

SEQ ID NO: 793623 - RNA, 20 nt, Artificial Sequence
  Synthetic
ugguauccaguguguucaac

SEQ ID NO: 793624 - RNA, 20 nt, Artificial Sequence
  Synthetic
ugccauaaccccauuucaac

SEQ ID NO: 793625 - RNA, 20 nt, Artificial Sequence
  Synthetic
auaacucgcugucuuucaac

SEQ ID NO: 793626 - RNA, 20 nt, Artificial Sequence
  Synthetic
augugaagugagaaaagaac

SEQ ID NO: 793627 - RNA, 20 nt, Artificial Sequence
  Synthetic
auuuagcuuuagaaaagaac

SEQ ID NO: 793628 - RNA, 20 nt, Artificial Sequence
  Synthetic
uuuuuccccagugaaagaac

SEQ ID NO: 793629 - RNA, 20 nt, Artificial Sequence
  Synthetic
uauaaugacacauaaagaac

SEQ ID NO: 793630 - RNA, 20 nt, Artificial Sequence
  Synthetic
cauuauauugcauaaagaac

SEQ ID NO: 793631 - RNA, 20 nt, Artificial Sequence
  Synthetic
acaacuaguagcuaaagaac

SEQ ID NO: 793632 - RNA, 20 nt, Artificial Sequence
  Synthetic
aaaaguguguuugcaagaac

SEQ ID NO: 793633 - RNA, 20 nt, Artificial Sequence
  Synthetic
auaaaaauaguaagaagaac

SEQ ID NO: 793634 - RNA, 20 nt, Artificial Sequence
  Synthetic
caauuauguaacagaagaac

SEQ ID NO: 793635 - RNA, 20 nt, Artificial Sequence
  Synthetic
cuccacaacuaaggaagaac

SEQ ID NO: 793636 - RNA, 20 nt, Artificial Sequence
  Synthetic
uaaagucauggaugaagaac

SEQ ID NO: 793637 - RNA, 20 nt, Artificial Sequence
  Synthetic
auuucugcuuuaugaagaac

SEQ ID NO: 793638 - RNA, 20 nt, Artificial Sequence
  Synthetic
ugaagugagaccugaagaac

SEQ ID NO: 793639 - RNA, 20 nt, Artificial Sequence
  Synthetic
uguuagaaauucugaagaac

SEQ ID NO: 793640 - RNA, 20 nt, Artificial Sequence
  Synthetic
auucaugauuuuauaagaac

SEQ ID NO: 793641 - RNA, 20 nt, Artificial Sequence
  Synthetic
agaaacaguugccuaagaac

SEQ ID NO: 793642 - RNA, 20 nt, Artificial Sequence
  Synthetic
ugagacuaagcucuaagaac

SEQ ID NO: 793643 - RNA, 20 nt, Artificial Sequence
  Synthetic
aaaagcccaaugguaagaac

SEQ ID NO: 793644 - RNA, 20 nt, Artificial Sequence
  Synthetic
agaaggauguauguaagaac

SEQ ID NO: 793645 - RNA, 20 nt, Artificial Sequence
  Synthetic
uuaaguuccagccccagaac

SEQ ID NO: 793646 - RNA, 20 nt, Artificial Sequence
  Synthetic
cugggacacacgugcagaac

SEQ ID NO: 793647 - RNA, 20 nt, Artificial Sequence
  Synthetic
uucacuagcacagucagaac

SEQ ID NO: 793648 - RNA, 20 nt, Artificial Sequence
  Synthetic
ucuaucuucccacagagaac

SEQ ID NO: 793649 - RNA, 20 nt, Artificial Sequence
  Synthetic
ugauauccaggucagagaac

SEQ ID NO: 793650 - RNA, 20 nt, Artificial Sequence
  Synthetic
caaguauauaacuagagaac

SEQ ID NO: 793651 - RNA, 20 nt, Artificial Sequence
  Synthetic
uuacuuagaugcuagagaac

SEQ ID NO: 793652 - RNA, 20 nt, Artificial Sequence
  Synthetic
agaaaggagagagggagaac

SEQ ID NO: 793653 - RNA, 20 nt, Artificial Sequence
  Synthetic
auaaauggugcugggagaac

SEQ ID NO: 793654 - RNA, 20 nt, Artificial Sequence
  Synthetic
aguaggaaaagugggagaac

SEQ ID NO: 793655 - RNA, 20 nt, Artificial Sequence
  Synthetic
auaaucacaucauggagaac

SEQ ID NO: 793656 - RNA, 20 nt, Artificial Sequence
  Synthetic
uuggcacauuuuuggagaac

SEQ ID NO: 793657 - RNA, 20 nt, Artificial Sequence
  Synthetic
ucauuacacugcaugagaac

SEQ ID NO: 793658 - RNA, 20 nt, Artificial Sequence
  Synthetic
ugauuauaguauaugagaac

SEQ ID NO: 793659 - RNA, 20 nt, Artificial Sequence
  Synthetic
ugaacgcagacccugagaac

SEQ ID NO: 793660 - RNA, 20 nt, Artificial Sequence
  Synthetic
uuuguuuucucuuugagaac

SEQ ID NO: 793661 - RNA, 20 nt, Artificial Sequence
  Synthetic
ugcagcaacguggauagaac

SEQ ID NO: 793662 - RNA, 20 nt, Artificial Sequence
  Synthetic
ucuuguaaacuguauagaac

SEQ ID NO: 793663 - RNA, 20 nt, Artificial Sequence
  Synthetic
uuacuaucaauuuauagaac

SEQ ID NO: 793664 - RNA, 20 nt, Artificial Sequence
  Synthetic
agcaccauuuaaccuagaac

SEQ ID NO: 793665 - RNA, 20 nt, Artificial Sequence
  Synthetic
aauacauugauggcuagaac

SEQ ID NO: 793666 - RNA, 20 nt, Artificial Sequence
  Synthetic
cucucagaaaaacguagaac

SEQ ID NO: 793667 - RNA, 20 nt, Artificial Sequence
  Synthetic
uagcugauaaguguuagaac

SEQ ID NO: 793668 - RNA, 20 nt, Artificial Sequence
  Synthetic
uguggaagcaacuuuagaac

SEQ ID NO: 793669 - RNA, 20 nt, Artificial Sequence
  Synthetic
auccauaaucuagaacgaac

SEQ ID NO: 793670 - RNA, 20 nt, Artificial Sequence
  Synthetic
uacagagucagaagacgaac

SEQ ID NO: 793671 - RNA, 20 nt, Artificial Sequence
  Synthetic
augcuuggugagaaaggaac

SEQ ID NO: 793672 - RNA, 20 nt, Artificial Sequence
  Synthetic
cuuaauagguuggaaggaac

SEQ ID NO: 793673 - RNA, 20 nt, Artificial Sequence
  Synthetic
uaagcaagguuguaaggaac

SEQ ID NO: 793674 - RNA, 20 nt, Artificial Sequence
  Synthetic
aagcaaauuaacgcaggaac

SEQ ID NO: 793675 - RNA, 20 nt, Artificial Sequence
  Synthetic
uuguagaaguauucaggaac

SEQ ID NO: 793676 - RNA, 20 nt, Artificial Sequence
  Synthetic
ccagaggugcaaagaggaac

SEQ ID NO: 793677 - RNA, 20 nt, Artificial Sequence
  Synthetic
ccagagguacaaggaggaac

SEQ ID NO: 793678 - RNA, 20 nt, Artificial Sequence
  Synthetic
aaaauuuggaaaugaggaac

SEQ ID NO: 793679 - RNA, 20 nt, Artificial Sequence
  Synthetic
ccaaauccuucaugaggaac

SEQ ID NO: 793680 - RNA, 20 nt, Artificial Sequence
  Synthetic
auggacacaggaauaggaac

SEQ ID NO: 793681 - RNA, 20 nt, Artificial Sequence
  Synthetic
agaggcuaguguuuaggaac

SEQ ID NO: 793682 - RNA, 20 nt, Artificial Sequence
  Synthetic
caauuucucccauucggaac

SEQ ID NO: 793683 - RNA, 20 nt, Artificial Sequence
  Synthetic
acccauaaggcagagggaac

SEQ ID NO: 793684 - RNA, 20 nt, Artificial Sequence
  Synthetic
cuaaugaacugagagggaac

SEQ ID NO: 793685 - RNA, 20 nt, Artificial Sequence
  Synthetic
aaauagcagugagagggaac

SEQ ID NO: 793686 - RNA, 20 nt, Artificial Sequence
  Synthetic
aucuuaaaagccuagggaac

SEQ ID NO: 793687 - RNA, 20 nt, Artificial Sequence
  Synthetic
uaggaaacacuguagggaac

SEQ ID NO: 793688 - RNA, 20 nt, Artificial Sequence
  Synthetic
agauuacuaaucuggggaac

SEQ ID NO: 793689 - RNA, 20 nt, Artificial Sequence
  Synthetic
cuuuguuuaggaaugggaac

SEQ ID NO: 793690 - RNA, 20 nt, Artificial Sequence
  Synthetic
caagcaaacgaggugggaac

SEQ ID NO: 793691 - RNA, 20 nt, Artificial Sequence
  Synthetic
ugggauuacucugugggaac

SEQ ID NO: 793692 - RNA, 20 nt, Artificial Sequence
  Synthetic
cuucaugaacacuugggaac

SEQ ID NO: 793693 - RNA, 20 nt, Artificial Sequence
  Synthetic
auuaggaacuucuugggaac

SEQ ID NO: 793694 - RNA, 20 nt, Artificial Sequence
  Synthetic
aagcuguccaaagauggaac

SEQ ID NO: 793695 - RNA, 20 nt, Artificial Sequence
  Synthetic
ugcagcaacauggauggaac

SEQ ID NO: 793696 - RNA, 20 nt, Artificial Sequence
  Synthetic
ugcaacaucauggauggaac

SEQ ID NO: 793697 - RNA, 20 nt, Artificial Sequence
  Synthetic
ugcaacaucuuggauggaac

SEQ ID NO: 793698 - RNA, 20 nt, Artificial Sequence
  Synthetic
auguggaagugacuuggaac

SEQ ID NO: 793699 - RNA, 20 nt, Artificial Sequence
  Synthetic
uguggaagcaacuuuggaac

SEQ ID NO: 793700 - RNA, 20 nt, Artificial Sequence
  Synthetic
uccagagagugaaaaugaac

SEQ ID NO: 793701 - RNA, 20 nt, Artificial Sequence
  Synthetic
auagaucaaagacaaugaac

SEQ ID NO: 793702 - RNA, 20 nt, Artificial Sequence
  Synthetic
cugaggauauuacaaugaac

SEQ ID NO: 793703 - RNA, 20 nt, Artificial Sequence
  Synthetic
cgucuacugaaauaaugaac

SEQ ID NO: 793704 - RNA, 20 nt, Artificial Sequence
  Synthetic
cuggguaauuuauaaugaac

SEQ ID NO: 793705 - RNA, 20 nt, Artificial Sequence
  Synthetic
uuucagggaaaaacaugaac

SEQ ID NO: 793706 - RNA, 20 nt, Artificial Sequence
  Synthetic
cagauagaaccaacaugaac

SEQ ID NO: 793707 - RNA, 20 nt, Artificial Sequence
  Synthetic
auuuuaaauccaucaugaac

SEQ ID NO: 793708 - RNA, 20 nt, Artificial Sequence
  Synthetic
cugaaaugaacuagaugaac

SEQ ID NO: 793709 - RNA, 20 nt, Artificial Sequence
  Synthetic
aagagagaaugaugaugaac

SEQ ID NO: 793710 - RNA, 20 nt, Artificial Sequence
  Synthetic
acuccuuucaguugaugaac

SEQ ID NO: 793711 - RNA, 20 nt, Artificial Sequence
  Synthetic
ugugcauuuacucuaugaac

SEQ ID NO: 793712 - RNA, 20 nt, Artificial Sequence
  Synthetic
ucccaccucacauuaugaac

SEQ ID NO: 793713 - RNA, 20 nt, Artificial Sequence
  Synthetic
uuuaucauuaucuuaugaac

SEQ ID NO: 793714 - RNA, 20 nt, Artificial Sequence
  Synthetic
ucucaguccagccacugaac

SEQ ID NO: 793715 - RNA, 20 nt, Artificial Sequence
  Synthetic
caaguagaaaaauacugaac

SEQ ID NO: 793716 - RNA, 20 nt, Artificial Sequence
  Synthetic
cugcaaagaggugccugaac

SEQ ID NO: 793717 - RNA, 20 nt, Artificial Sequence
  Synthetic
ccaguccuacaguccugaac

SEQ ID NO: 793718 - RNA, 20 nt, Artificial Sequence
  Synthetic
uuguagggcagcagcugaac

SEQ ID NO: 793719 - RNA, 20 nt, Artificial Sequence
  Synthetic
aaaguauuaguuuucugaac

SEQ ID NO: 793720 - RNA, 20 nt, Artificial Sequence
  Synthetic
auucuuauuggacagugaac

SEQ ID NO: 793721 - RNA, 20 nt, Artificial Sequence
  Synthetic
aaaauugaugcagagugaac

SEQ ID NO: 793722 - RNA, 20 nt, Artificial Sequence
  Synthetic
aaacuaccaucagagugaac

SEQ ID NO: 793723 - RNA, 20 nt, Artificial Sequence
  Synthetic
aaacuaucaugagagugaac

SEQ ID NO: 793724 - RNA, 20 nt, Artificial Sequence
  Synthetic
uggaguacaguggagugaac

SEQ ID NO: 793725 - RNA, 20 nt, Artificial Sequence
  Synthetic
acauaaaagaaguagugaac

SEQ ID NO: 793726 - RNA, 20 nt, Artificial Sequence
  Synthetic
uuagaaggcuuuccgugaac

SEQ ID NO: 793727 - RNA, 20 nt, Artificial Sequence
  Synthetic
caucagucccugaggugaac

SEQ ID NO: 793728 - RNA, 20 nt, Artificial Sequence
  Synthetic
cuuucaguguuuaggugaac

SEQ ID NO: 793729 - RNA, 20 nt, Artificial Sequence
  Synthetic
agcugugacuaucggugaac

SEQ ID NO: 793730 - RNA, 20 nt, Artificial Sequence
  Synthetic
caaggaugagguaugugaac

SEQ ID NO: 793731 - RNA, 20 nt, Artificial Sequence
  Synthetic
ugacccuuagaacugugaac

SEQ ID NO: 793732 - RNA, 20 nt, Artificial Sequence
  Synthetic
cuuugguuaauacugugaac

SEQ ID NO: 793733 - RNA, 20 nt, Artificial Sequence
  Synthetic
uuuuauaaguuccauugaac

SEQ ID NO: 793734 - RNA, 20 nt, Artificial Sequence
  Synthetic
auuuuuuuagggcauugaac

SEQ ID NO: 793735 - RNA, 20 nt, Artificial Sequence
  Synthetic
ugcaacaacacggauugaac

SEQ ID NO: 793736 - RNA, 20 nt, Artificial Sequence
  Synthetic
uaaacaaaaaaccguugaac

SEQ ID NO: 793737 - RNA, 20 nt, Artificial Sequence
  Synthetic
caaaauugagaggguugaac

SEQ ID NO: 793738 - RNA, 20 nt, Artificial Sequence
  Synthetic
ucccagaacagacuuugaac

SEQ ID NO: 793739 - RNA, 20 nt, Artificial Sequence
  Synthetic
ucaaggcccugucuuugaac

SEQ ID NO: 793740 - RNA, 20 nt, Artificial Sequence
  Synthetic
uaaaauggcauuguuugaac

SEQ ID NO: 793741 - RNA, 20 nt, Artificial Sequence
  Synthetic
acuaaauagucaaaaauaac

SEQ ID NO: 793742 - RNA, 20 nt, Artificial Sequence
  Synthetic
ugcacaaauggaaaaauaac

SEQ ID NO: 793743 - RNA, 20 nt, Artificial Sequence
  Synthetic
ccaaaggucugaaaaauaac

SEQ ID NO: 793744 - RNA, 20 nt, Artificial Sequence
  Synthetic
ugaacauuugccaaaauaac

SEQ ID NO: 793745 - RNA, 20 nt, Artificial Sequence
  Synthetic
agcuuacaaagcaaaauaac

SEQ ID NO: 793746 - RNA, 20 nt, Artificial Sequence
  Synthetic
aaucucugcugcaaaauaac

SEQ ID NO: 793747 - RNA, 20 nt, Artificial Sequence
  Synthetic
cuuagagcaaggaaaauaac

SEQ ID NO: 793748 - RNA, 20 nt, Artificial Sequence
  Synthetic
caucuuguucugaaaauaac

SEQ ID NO: 793749 - RNA, 20 nt, Artificial Sequence
  Synthetic
ccauacaaaaguaaaauaac

SEQ ID NO: 793750 - RNA, 20 nt, Artificial Sequence
  Synthetic
cccugguuacuccaaauaac

SEQ ID NO: 793751 - RNA, 20 nt, Artificial Sequence
  Synthetic
agcauaaggaaggaaauaac

SEQ ID NO: 793752 - RNA, 20 nt, Artificial Sequence
  Synthetic
uaaagacagcguuaaauaac

SEQ ID NO: 793753 - RNA, 20 nt, Artificial Sequence
  Synthetic
uuuuagaaaggaacaauaac

SEQ ID NO: 793754 - RNA, 20 nt, Artificial Sequence
  Synthetic
ucccugaauagaccaauaac

SEQ ID NO: 793755 - RNA, 20 nt, Artificial Sequence
  Synthetic
ucucugaauagaccaauaac

SEQ ID NO: 793756 - RNA, 20 nt, Artificial Sequence
  Synthetic
uaaaguaacacaagaauaac

SEQ ID NO: 793757 - RNA, 20 nt, Artificial Sequence
  Synthetic
caaccuggugcuagaauaac

SEQ ID NO: 793758 - RNA, 20 nt, Artificial Sequence
  Synthetic
acagaagaauagcgaauaac

SEQ ID NO: 793759 - RNA, 20 nt, Artificial Sequence
  Synthetic
cuuaaaagaggaauaauaac

SEQ ID NO: 793760 - RNA, 20 nt, Artificial Sequence
  Synthetic
uuuuaaaucuacauaauaac

SEQ ID NO: 793761 - RNA, 20 nt, Artificial Sequence
  Synthetic
uuugcauguacgauaauaac

SEQ ID NO: 793762 - RNA, 20 nt, Artificial Sequence
  Synthetic
cagcugacgagacuaauaac

SEQ ID NO: 793763 - RNA, 20 nt, Artificial Sequence
  Synthetic
uuauaauaccagcuaauaac

SEQ ID NO: 793764 - RNA, 20 nt, Artificial Sequence
  Synthetic
aucauuuuauuucuaauaac

SEQ ID NO: 793765 - RNA, 20 nt, Artificial Sequence
  Synthetic
aacaucucacuuuuaauaac

SEQ ID NO: 793766 - RNA, 20 nt, Artificial Sequence
  Synthetic
cagcaauucuuuaacauaac

SEQ ID NO: 793767 - RNA, 20 nt, Artificial Sequence
  Synthetic
ucuaauacuuggcacauaac

SEQ ID NO: 793768 - RNA, 20 nt, Artificial Sequence
  Synthetic
aauaauucaacucacauaac

SEQ ID NO: 793769 - RNA, 20 nt, Artificial Sequence
  Synthetic
uaccauaucaaagccauaac

SEQ ID NO: 793770 - RNA, 20 nt, Artificial Sequence
  Synthetic
uuaauggauaaauucauaac

SEQ ID NO: 793771 - RNA, 20 nt, Artificial Sequence
  Synthetic
aguggaaaagaauucauaac

SEQ ID NO: 793772 - RNA, 20 nt, Artificial Sequence
  Synthetic
ucucagagcauuuucauaac

SEQ ID NO: 793773 - RNA, 20 nt, Artificial Sequence
  Synthetic
uugaaaaaaaaaaagauaac

SEQ ID NO: 793774 - RNA, 20 nt, Artificial Sequence
  Synthetic
ucaguugauaaacagauaac

SEQ ID NO: 793775 - RNA, 20 nt, Artificial Sequence
  Synthetic
acaagaaauuaacagauaac

SEQ ID NO: 793776 - RNA, 20 nt, Artificial Sequence
  Synthetic
uaaaaaugaaaucagauaac

SEQ ID NO: 793777 - RNA, 20 nt, Artificial Sequence
  Synthetic
aggaaauggaaauagauaac

SEQ ID NO: 793778 - RNA, 20 nt, Artificial Sequence
  Synthetic
aauaaucacaucaggauaac

SEQ ID NO: 793779 - RNA, 20 nt, Artificial Sequence
  Synthetic
ugcugugggcugaggauaac

SEQ ID NO: 793780 - RNA, 20 nt, Artificial Sequence
  Synthetic
aaaaauuaugauaggauaac

SEQ ID NO: 793781 - RNA, 20 nt, Artificial Sequence
  Synthetic
aguuugucaagaaugauaac

SEQ ID NO: 793782 - RNA, 20 nt, Artificial Sequence
  Synthetic
ucacguacucagcugauaac

SEQ ID NO: 793783 - RNA, 20 nt, Artificial Sequence
  Synthetic
acuucacggaaaaauauaac

SEQ ID NO: 793784 - RNA, 20 nt, Artificial Sequence
  Synthetic
uuuaagucaaagaauauaac

SEQ ID NO: 793785 - RNA, 20 nt, Artificial Sequence
  Synthetic
aucuuauuuuuacauauaac

SEQ ID NO: 793786 - RNA, 20 nt, Artificial Sequence
  Synthetic
uagcguugcaggcauauaac

SEQ ID NO: 793787 - RNA, 20 nt, Artificial Sequence
  Synthetic
uguugcauagcauauauaac

SEQ ID NO: 793788 - RNA, 20 nt, Artificial Sequence
  Synthetic
aaaauucauauuuauauaac

SEQ ID NO: 793789 - RNA, 20 nt, Artificial Sequence
  Synthetic
ccauuuuuaccuccuauaac

SEQ ID NO: 793790 - RNA, 20 nt, Artificial Sequence
  Synthetic
ccagcaaaagaaauuauaac

SEQ ID NO: 793791 - RNA, 20 nt, Artificial Sequence
  Synthetic
auaaaaaacgacauuauaac

SEQ ID NO: 793792 - RNA, 20 nt, Artificial Sequence
  Synthetic
auuauguauaauauuauaac

SEQ ID NO: 793793 - RNA, 20 nt, Artificial Sequence
  Synthetic
cagggcuuauucuuuauaac

SEQ ID NO: 793794 - RNA, 20 nt, Artificial Sequence
  Synthetic
agauacugcucuuuuauaac

SEQ ID NO: 793795 - RNA, 20 nt, Artificial Sequence
  Synthetic
aucccuaaaucuaaacuaac

SEQ ID NO: 793796 - RNA, 20 nt, Artificial Sequence
  Synthetic
aagaaacugcaucaacuaac

SEQ ID NO: 793797 - RNA, 20 nt, Artificial Sequence
  Synthetic
aagaaacugccucaacuaac

SEQ ID NO: 793798 - RNA, 20 nt, Artificial Sequence
  Synthetic
ucccagugacacagacuaac

SEQ ID NO: 793799 - RNA, 20 nt, Artificial Sequence
  Synthetic
cauuuguaacucagacuaac

SEQ ID NO: 793800 - RNA, 20 nt, Artificial Sequence
  Synthetic
aauagaaguugcuuacuaac

SEQ ID NO: 793801 - RNA, 20 nt, Artificial Sequence
  Synthetic
caaaauaaaaauaaccuaac

SEQ ID NO: 793802 - RNA, 20 nt, Artificial Sequence
  Synthetic
ccccaaagcacaacccuaac

SEQ ID NO: 793803 - RNA, 20 nt, Artificial Sequence
  Synthetic
uuuauaguagccauccuaac

SEQ ID NO: 793804 - RNA, 20 nt, Artificial Sequence
  Synthetic
uauauaauugcccuccuaac

SEQ ID NO: 793805 - RNA, 20 nt, Artificial Sequence
  Synthetic
aaagauauaucacagcuaac

SEQ ID NO: 793806 - RNA, 20 nt, Artificial Sequence
  Synthetic
aagauguacaaauagcuaac

SEQ ID NO: 793807 - RNA, 20 nt, Artificial Sequence
  Synthetic
ccuuccuugauuuagcuaac

SEQ ID NO: 793808 - RNA, 20 nt, Artificial Sequence
  Synthetic
cucaauggaacugcgcuaac

SEQ ID NO: 793809 - RNA, 20 nt, Artificial Sequence
  Synthetic
aaugugucucugaaucuaac

SEQ ID NO: 793810 - RNA, 20 nt, Artificial Sequence
  Synthetic
uuauucacuguuaaucuaac

SEQ ID NO: 793811 - RNA, 20 nt, Artificial Sequence
  Synthetic
ccagaaagcccuuaucuaac

SEQ ID NO: 793812 - RNA, 20 nt, Artificial Sequence
  Synthetic
cucuuccuuuagacucuaac

SEQ ID NO: 793813 - RNA, 20 nt, Artificial Sequence
  Synthetic
auauggugggacccucuaac

SEQ ID NO: 793814 - RNA, 20 nt, Artificial Sequence
  Synthetic
acuuauuccuccugucuaac

SEQ ID NO: 793815 - RNA, 20 nt, Artificial Sequence
  Synthetic
uuaaugaucaccauucuaac

SEQ ID NO: 793816 - RNA, 20 nt, Artificial Sequence
  Synthetic
uuuauaacagccauucuaac

SEQ ID NO: 793817 - RNA, 20 nt, Artificial Sequence
  Synthetic
uugauaauagccauucuaac

SEQ ID NO: 793818 - RNA, 20 nt, Artificial Sequence
  Synthetic
uuaaugaucgccauucuaac

SEQ ID NO: 793819 - RNA, 20 nt, Artificial Sequence
  Synthetic
ugaauguucgccauucuaac

SEQ ID NO: 793820 - RNA, 20 nt, Artificial Sequence
  Synthetic
uaaaugauugccauucuaac

SEQ ID NO: 793821 - RNA, 20 nt, Artificial Sequence
  Synthetic
ugaaugauugccauucuaac

SEQ ID NO: 793822 - RNA, 20 nt, Artificial Sequence
  Synthetic
uuaaugauugccauucuaac

SEQ ID NO: 793823 - RNA, 20 nt, Artificial Sequence
  Synthetic
uugauaauagucauucuaac

SEQ ID NO: 793824 - RNA, 20 nt, Artificial Sequence
  Synthetic
agccgucaagaaguucuaac

SEQ ID NO: 793825 - RNA, 20 nt, Artificial Sequence
  Synthetic
acacacucuaguguucuaac

SEQ ID NO: 793826 - RNA, 20 nt, Artificial Sequence
  Synthetic
uccuuccuagaaaaaguaac

SEQ ID NO: 793827 - RNA, 20 nt, Artificial Sequence
  Synthetic
aaaaauaugucaaaaguaac

SEQ ID NO: 793828 - RNA, 20 nt, Artificial Sequence
  Synthetic
aaauagccagaacaaguaac

SEQ ID NO: 793829 - RNA, 20 nt, Artificial Sequence
  Synthetic
auugucuuagcacaaguaac

SEQ ID NO: 793830 - RNA, 20 nt, Artificial Sequence
  Synthetic
uuaaaaaaagcugaaguaac

SEQ ID NO: 793831 - RNA, 20 nt, Artificial Sequence
  Synthetic
caauagaguuuaacaguaac

SEQ ID NO: 793832 - RNA, 20 nt, Artificial Sequence
  Synthetic
aaaauaauuuagacaguaac

SEQ ID NO: 793833 - RNA, 20 nt, Artificial Sequence
  Synthetic
ccagugcaaucuacaguaac

SEQ ID NO: 793834 - RNA, 20 nt, Artificial Sequence
  Synthetic
auggauucacugccaguaac

SEQ ID NO: 793835 - RNA, 20 nt, Artificial Sequence
  Synthetic
caauauguuuuugcaguaac

SEQ ID NO: 793836 - RNA, 20 nt, Artificial Sequence
  Synthetic
ugacaaagauguagaguaac

SEQ ID NO: 793837 - RNA, 20 nt, Artificial Sequence
  Synthetic
aguuuuguaagcuuaguaac

SEQ ID NO: 793838 - RNA, 20 nt, Artificial Sequence
  Synthetic
cuguuuucucauuuaguaac

SEQ ID NO: 793839 - RNA, 20 nt, Artificial Sequence
  Synthetic
aaaauuuuccaucacguaac

SEQ ID NO: 793840 - RNA, 20 nt, Artificial Sequence
  Synthetic
acccaggggcuccagguaac

SEQ ID NO: 793841 - RNA, 20 nt, Artificial Sequence
  Synthetic
augaacaguaaucagguaac

SEQ ID NO: 793842 - RNA, 20 nt, Artificial Sequence
  Synthetic
uacuuuucaggugagguaac

SEQ ID NO: 793843 - RNA, 20 nt, Artificial Sequence
  Synthetic
uuauuuaaaaacuagguaac

SEQ ID NO: 793844 - RNA, 20 nt, Artificial Sequence
  Synthetic
aauaaauuuagagggguaac

SEQ ID NO: 793845 - RNA, 20 nt, Artificial Sequence
  Synthetic
caacuuuggaacuggguaac

SEQ ID NO: 793846 - RNA, 20 nt, Artificial Sequence
  Synthetic
uuguggugucauuggguaac

SEQ ID NO: 793847 - RNA, 20 nt, Artificial Sequence
  Synthetic
ugggaggcuaacaugguaac

SEQ ID NO: 793848 - RNA, 20 nt, Artificial Sequence
  Synthetic
augaagaacuuauugguaac

SEQ ID NO: 793849 - RNA, 20 nt, Artificial Sequence
  Synthetic
uuucccucauuuuugguaac

SEQ ID NO: 793850 - RNA, 20 nt, Artificial Sequence
  Synthetic
ucaaacacuuuauauguaac

SEQ ID NO: 793851 - RNA, 20 nt, Artificial Sequence
  Synthetic
auuacuuugucuucuguaac

SEQ ID NO: 793852 - RNA, 20 nt, Artificial Sequence
  Synthetic
uuaaugaucgccauuguaac

SEQ ID NO: 793853 - RNA, 20 nt, Artificial Sequence
  Synthetic
caaaaauacaaaaaauuaac

SEQ ID NO: 793854 - RNA, 20 nt, Artificial Sequence
  Synthetic
caaagaauucaaaaauuaac

SEQ ID NO: 793855 - RNA, 20 nt, Artificial Sequence
  Synthetic
auauauguagaaaaauuaac

SEQ ID NO: 793856 - RNA, 20 nt, Artificial Sequence
  Synthetic
ucucgccagaauaaauuaac

SEQ ID NO: 793857 - RNA, 20 nt, Artificial Sequence
  Synthetic
caagagacagaauaauuaac

SEQ ID NO: 793858 - RNA, 20 nt, Artificial Sequence
  Synthetic
agaagaaaaaguuaauuaac

SEQ ID NO: 793859 - RNA, 20 nt, Artificial Sequence
  Synthetic
aaucuucugucugcauuaac

SEQ ID NO: 793860 - RNA, 20 nt, Artificial Sequence
  Synthetic
uggaaaaugaauagauuaac

SEQ ID NO: 793861 - RNA, 20 nt, Artificial Sequence
  Synthetic
uuaugaauagaaugauuaac

SEQ ID NO: 793862 - RNA, 20 nt, Artificial Sequence
  Synthetic
cuaucuucaaugugauuaac

SEQ ID NO: 793863 - RNA, 20 nt, Artificial Sequence
  Synthetic
uucguugaacaaauauuaac

SEQ ID NO: 793864 - RNA, 20 nt, Artificial Sequence
  Synthetic
ucuaaacauucaauauuaac

SEQ ID NO: 793865 - RNA, 20 nt, Artificial Sequence
  Synthetic
uuaguggcuaccauauuaac

SEQ ID NO: 793866 - RNA, 20 nt, Artificial Sequence
  Synthetic
agaggaaucauauuauuaac

SEQ ID NO: 793867 - RNA, 20 nt, Artificial Sequence
  Synthetic
augcaaaugagguuauuaac

SEQ ID NO: 793868 - RNA, 20 nt, Artificial Sequence
  Synthetic
aaaacaaguaucaacuuaac

SEQ ID NO: 793869 - RNA, 20 nt, Artificial Sequence
  Synthetic
uuuuaaaauauugacuuaac

SEQ ID NO: 793870 - RNA, 20 nt, Artificial Sequence
  Synthetic
aguacacuauuugacuuaac

SEQ ID NO: 793871 - RNA, 20 nt, Artificial Sequence
  Synthetic
aucauuugcauguacuuaac

SEQ ID NO: 793872 - RNA, 20 nt, Artificial Sequence
  Synthetic
cauauaucuacacccuuaac

SEQ ID NO: 793873 - RNA, 20 nt, Artificial Sequence
  Synthetic
uauuggagguggggcuuaac

SEQ ID NO: 793874 - RNA, 20 nt, Artificial Sequence
  Synthetic
agacuuuuggcuugcuuaac

SEQ ID NO: 793875 - RNA, 20 nt, Artificial Sequence
  Synthetic
cacaaaccaaaguaguuaac

SEQ ID NO: 793876 - RNA, 20 nt, Artificial Sequence
  Synthetic
ccagguucagcgagguuaac

SEQ ID NO: 793877 - RNA, 20 nt, Artificial Sequence
  Synthetic
aacaaugcucacugguuaac

SEQ ID NO: 793878 - RNA, 20 nt, Artificial Sequence
  Synthetic
aaaauaguacagugguuaac

SEQ ID NO: 793879 - RNA, 20 nt, Artificial Sequence
  Synthetic
ugcaggugaaauugguuaac

SEQ ID NO: 793880 - RNA, 20 nt, Artificial Sequence
  Synthetic
ucuuccaccccacuguuaac

SEQ ID NO: 793881 - RNA, 20 nt, Artificial Sequence
  Synthetic
aaaaagaaaacucuguuaac

SEQ ID NO: 793882 - RNA, 20 nt, Artificial Sequence
  Synthetic
aaaaaaaaaaauguguuaac

SEQ ID NO: 793883 - RNA, 20 nt, Artificial Sequence
  Synthetic
aaagcucaaaauguguuaac

SEQ ID NO: 793884 - RNA, 20 nt, Artificial Sequence
  Synthetic
uuuauagaaaacaauuuaac

SEQ ID NO: 793885 - RNA, 20 nt, Artificial Sequence
  Synthetic
caaggagcgcagaauuuaac

SEQ ID NO: 793886 - RNA, 20 nt, Artificial Sequence
  Synthetic
cauaaguuuuaacauuuaac

SEQ ID NO: 793887 - RNA, 20 nt, Artificial Sequence
  Synthetic
ugccaaugaauuacuuuaac

SEQ ID NO: 793888 - RNA, 20 nt, Artificial Sequence
  Synthetic
uuuuguugguagccuuuaac

SEQ ID NO: 793889 - RNA, 20 nt, Artificial Sequence
  Synthetic
uaucuacuuccaucuuuaac

SEQ ID NO: 793890 - RNA, 20 nt, Artificial Sequence
  Synthetic
uaaucugaagaauguuuaac

SEQ ID NO: 793891 - RNA, 20 nt, Artificial Sequence
  Synthetic
auauaauuauacauuuuaac

SEQ ID NO: 793892 - RNA, 20 nt, Artificial Sequence
  Synthetic
uggauauaagccauuuuaac

SEQ ID NO: 793893 - RNA, 20 nt, Artificial Sequence
  Synthetic
ccuuauaagcguauuuuaac

SEQ ID NO: 793894 - RNA, 20 nt, Artificial Sequence
  Synthetic
uaaaaaauucuucuuuuaac

SEQ ID NO: 793895 - RNA, 20 nt, Artificial Sequence
  Synthetic
acagccacaaaacaaaacac

SEQ ID NO: 793896 - RNA, 20 nt, Artificial Sequence
  Synthetic
uucuagaggaaacaaaacac

SEQ ID NO: 793897 - RNA, 20 nt, Artificial Sequence
  Synthetic
uaaauuaaggcucaaaacac

SEQ ID NO: 793898 - RNA, 20 nt, Artificial Sequence
  Synthetic
ucuuaaaaauaggaaaacac

SEQ ID NO: 793899 - RNA, 20 nt, Artificial Sequence
  Synthetic
auuuuuaccucugaaaacac

SEQ ID NO: 793900 - RNA, 20 nt, Artificial Sequence
  Synthetic
cauguccagagugaaaacac

SEQ ID NO: 793901 - RNA, 20 nt, Artificial Sequence
  Synthetic
cagagggcucauuaaaacac

SEQ ID NO: 793902 - RNA, 20 nt, Artificial Sequence
  Synthetic
auucuaucuuauuaaaacac

SEQ ID NO: 793903 - RNA, 20 nt, Artificial Sequence
  Synthetic
uggauauccaaaacaaacac

SEQ ID NO: 793904 - RNA, 20 nt, Artificial Sequence
  Synthetic
uauauuauuaagacaaacac

SEQ ID NO: 793905 - RNA, 20 nt, Artificial Sequence
  Synthetic
caauaaaauacagcaaacac

SEQ ID NO: 793906 - RNA, 20 nt, Artificial Sequence
  Synthetic
ucauagaguagaagaaacac

SEQ ID NO: 793907 - RNA, 20 nt, Artificial Sequence
  Synthetic
aauugaaaauccagaaacac

SEQ ID NO: 793908 - RNA, 20 nt, Artificial Sequence
  Synthetic
uaauacucauauagaaacac

SEQ ID NO: 793909 - RNA, 20 nt, Artificial Sequence
  Synthetic
uuuuuuuuuuauagaaacac

SEQ ID NO: 793910 - RNA, 20 nt, Artificial Sequence
  Synthetic
ucuuuaugcucuagaaacac

SEQ ID NO: 793911 - RNA, 20 nt, Artificial Sequence
  Synthetic
aaaaauaacaggggaaacac

SEQ ID NO: 793912 - RNA, 20 nt, Artificial Sequence
  Synthetic
ugugacaggcaaauaaacac

SEQ ID NO: 793913 - RNA, 20 nt, Artificial Sequence
  Synthetic
acuaaugcugcaauaaacac

SEQ ID NO: 793914 - RNA, 20 nt, Artificial Sequence
  Synthetic
cuuccaaagguaauaaacac

SEQ ID NO: 793915 - RNA, 20 nt, Artificial Sequence
  Synthetic
auaaaaaaagcaguaaacac

SEQ ID NO: 793916 - RNA, 20 nt, Artificial Sequence
  Synthetic
ccacuuguaaaauuaaacac

SEQ ID NO: 793917 - RNA, 20 nt, Artificial Sequence
  Synthetic
uuuucuaguugauuaaacac

SEQ ID NO: 793918 - RNA, 20 nt, Artificial Sequence
  Synthetic
agcaaauauauauacaacac

SEQ ID NO: 793919 - RNA, 20 nt, Artificial Sequence
  Synthetic
acauagacugagcccaacac

SEQ ID NO: 793920 - RNA, 20 nt, Artificial Sequence
  Synthetic
cacacuaguaaucccaacac

SEQ ID NO: 793921 - RNA, 20 nt, Artificial Sequence
  Synthetic
caccagacaggagccaacac

SEQ ID NO: 793922 - RNA, 20 nt, Artificial Sequence
  Synthetic
ccaggccccaccuccaacac

SEQ ID NO: 793923 - RNA, 20 nt, Artificial Sequence
  Synthetic
uuggccauagaaagcaacac

SEQ ID NO: 793924 - RNA, 20 nt, Artificial Sequence
  Synthetic
acuuuucuaauaagcaacac

SEQ ID NO: 793925 - RNA, 20 nt, Artificial Sequence
  Synthetic
ugacuccaaaagggcaacac

SEQ ID NO: 793926 - RNA, 20 nt, Artificial Sequence
  Synthetic
aggacauacaaaaucaacac

SEQ ID NO: 793927 - RNA, 20 nt, Artificial Sequence
  Synthetic
cucaguuuguggaucaacac

SEQ ID NO: 793928 - RNA, 20 nt, Artificial Sequence
  Synthetic
auuauauaugcacucaacac

SEQ ID NO: 793929 - RNA, 20 nt, Artificial Sequence
  Synthetic
cauacaaaaaucgucaacac

SEQ ID NO: 793930 - RNA, 20 nt, Artificial Sequence
  Synthetic
ucccuuuuucuauucaacac

SEQ ID NO: 793931 - RNA, 20 nt, Artificial Sequence
  Synthetic
uaaaggagaugcuucaacac

SEQ ID NO: 793932 - RNA, 20 nt, Artificial Sequence
  Synthetic
cuuaaucuuuuuuucaacac

SEQ ID NO: 793933 - RNA, 20 nt, Artificial Sequence
  Synthetic
acguaagugguaaagaacac

SEQ ID NO: 793934 - RNA, 20 nt, Artificial Sequence
  Synthetic
aauaaaaagugcaagaacac

SEQ ID NO: 793935 - RNA, 20 nt, Artificial Sequence
  Synthetic
cuacauugcugauagaacac

SEQ ID NO: 793936 - RNA, 20 nt, Artificial Sequence
  Synthetic
uuagcucugugauagaacac

SEQ ID NO: 793937 - RNA, 20 nt, Artificial Sequence
  Synthetic
ucugcucuaaaaaggaacac

SEQ ID NO: 793938 - RNA, 20 nt, Artificial Sequence
  Synthetic
ugagguuugcuggggaacac

SEQ ID NO: 793939 - RNA, 20 nt, Artificial Sequence
  Synthetic
cugcuucucuuuaugaacac

SEQ ID NO: 793940 - RNA, 20 nt, Artificial Sequence
  Synthetic
uuacauaucuaagugaacac

SEQ ID NO: 793941 - RNA, 20 nt, Artificial Sequence
  Synthetic
agugcuacucuguugaacac

SEQ ID NO: 793942 - RNA, 20 nt, Artificial Sequence
  Synthetic
aaauaagguagaaauaacac

SEQ ID NO: 793943 - RNA, 20 nt, Artificial Sequence
  Synthetic
ugagcuggaaaagauaacac

SEQ ID NO: 793944 - RNA, 20 nt, Artificial Sequence
  Synthetic
uagcaccagauauauaacac

SEQ ID NO: 793945 - RNA, 20 nt, Artificial Sequence
  Synthetic
acauacuugcuauauaacac

SEQ ID NO: 793946 - RNA, 20 nt, Artificial Sequence
  Synthetic
aagaaaauggcuuauaacac

SEQ ID NO: 793947 - RNA, 20 nt, Artificial Sequence
  Synthetic
cauccucagcaaacuaacac

SEQ ID NO: 793948 - RNA, 20 nt, Artificial Sequence
  Synthetic
uauccucagcaaacuaacac

SEQ ID NO: 793949 - RNA, 20 nt, Artificial Sequence
  Synthetic
caaucucagcaaacuaacac

SEQ ID NO: 793950 - RNA, 20 nt, Artificial Sequence
  Synthetic
cauucucagcaaacuaacac

SEQ ID NO: 793951 - RNA, 20 nt, Artificial Sequence
  Synthetic
cauucuuagcaaacuaacac

SEQ ID NO: 793952 - RNA, 20 nt, Artificial Sequence
  Synthetic
aauuuauaugcaccuaacac

SEQ ID NO: 793953 - RNA, 20 nt, Artificial Sequence
  Synthetic
aucuguuuuauuccuaacac

SEQ ID NO: 793954 - RNA, 20 nt, Artificial Sequence
  Synthetic
ugugcugcucugucuaacac

SEQ ID NO: 793955 - RNA, 20 nt, Artificial Sequence
  Synthetic
agaguuucacauucuaacac

SEQ ID NO: 793956 - RNA, 20 nt, Artificial Sequence
  Synthetic
caguccaauuaaaguaacac

SEQ ID NO: 793957 - RNA, 20 nt, Artificial Sequence
  Synthetic
ccaaacauccugaguaacac

SEQ ID NO: 793958 - RNA, 20 nt, Artificial Sequence
  Synthetic
caucccuucuucauuaacac

SEQ ID NO: 793959 - RNA, 20 nt, Artificial Sequence
  Synthetic
uuuaggacuaugauuaacac

SEQ ID NO: 793960 - RNA, 20 nt, Artificial Sequence
  Synthetic
auggucagccauauuaacac

SEQ ID NO: 793961 - RNA, 20 nt, Artificial Sequence
  Synthetic
aaugagucuaggaaacacac

SEQ ID NO: 793962 - RNA, 20 nt, Artificial Sequence
  Synthetic
caugugcaguagcaacacac

SEQ ID NO: 793963 - RNA, 20 nt, Artificial Sequence
  Synthetic
ugaagcccaguugaacacac

SEQ ID NO: 793964 - RNA, 20 nt, Artificial Sequence
  Synthetic
cccuggccuguugaacacac

SEQ ID NO: 793965 - RNA, 20 nt, Artificial Sequence
  Synthetic
uucaugucagaauaacacac

SEQ ID NO: 793966 - RNA, 20 nt, Artificial Sequence
  Synthetic
aucccuagaaucuaacacac

SEQ ID NO: 793967 - RNA, 20 nt, Artificial Sequence
  Synthetic
aagaggggaauaacacacac

SEQ ID NO: 793968 - RNA, 20 nt, Artificial Sequence
  Synthetic
ugaccccucaacacacacac

SEQ ID NO: 793969 - RNA, 20 nt, Artificial Sequence
  Synthetic
acacacacacacacacacac

SEQ ID NO: 793970 - RNA, 20 nt, Artificial Sequence
  Synthetic
acacacagacacacacacac

SEQ ID NO: 793971 - RNA, 20 nt, Artificial Sequence
  Synthetic
uucccuccagggacacacac

SEQ ID NO: 793972 - RNA, 20 nt, Artificial Sequence
  Synthetic
aaaaugaucccaccacacac

SEQ ID NO: 793973 - RNA, 20 nt, Artificial Sequence
  Synthetic
auuaagggcuucccacacac

SEQ ID NO: 793974 - RNA, 20 nt, Artificial Sequence
  Synthetic
ggaaggggaacaucacacac

SEQ ID NO: 793975 - RNA, 20 nt, Artificial Sequence
  Synthetic
uuguaaaacaugagacacac

SEQ ID NO: 793976 - RNA, 20 nt, Artificial Sequence
  Synthetic
aucaguaaaaugggacacac

SEQ ID NO: 793977 - RNA, 20 nt, Artificial Sequence
  Synthetic
uguucucaacccugacacac

SEQ ID NO: 793978 - RNA, 20 nt, Artificial Sequence
  Synthetic
acauuguuuaugugacacac

SEQ ID NO: 793979 - RNA, 20 nt, Artificial Sequence
  Synthetic
uggucucucccuugacacac

SEQ ID NO: 793980 - RNA, 20 nt, Artificial Sequence
  Synthetic
uuuuggcaugaaauacacac

SEQ ID NO: 793981 - RNA, 20 nt, Artificial Sequence
  Synthetic
uucuuaucuuugcuacacac

SEQ ID NO: 793982 - RNA, 20 nt, Artificial Sequence
  Synthetic
aaauauuaauugguacacac

SEQ ID NO: 793983 - RNA, 20 nt, Artificial Sequence
  Synthetic
auuugaacagaguuacacac

SEQ ID NO: 793984 - RNA, 20 nt, Artificial Sequence
  Synthetic
ugcccaacucucacccacac

SEQ ID NO: 793985 - RNA, 20 nt, Artificial Sequence
  Synthetic
uucucacuucaaucccacac

SEQ ID NO: 793986 - RNA, 20 nt, Artificial Sequence
  Synthetic
aaauuuuuucuuucccacac

SEQ ID NO: 793987 - RNA, 20 nt, Artificial Sequence
  Synthetic
uuggcuucccugggccacac

SEQ ID NO: 793988 - RNA, 20 nt, Artificial Sequence
  Synthetic
uuugccuuaucacuccacac

SEQ ID NO: 793989 - RNA, 20 nt, Artificial Sequence
  Synthetic
ucucugaagaaucuccacac

SEQ ID NO: 793990 - RNA, 20 nt, Artificial Sequence
  Synthetic
cuuuuuuuuuuuuuccacac

SEQ ID NO: 793991 - RNA, 20 nt, Artificial Sequence
  Synthetic
uuuagcuauauccagcacac

SEQ ID NO: 793992 - RNA, 20 nt, Artificial Sequence
  Synthetic
uuacaguuucaugagcacac

SEQ ID NO: 793993 - RNA, 20 nt, Artificial Sequence
  Synthetic
ucacacagggucaggcacac

SEQ ID NO: 793994 - RNA, 20 nt, Artificial Sequence
  Synthetic
aaccaauuucaccugcacac

SEQ ID NO: 793995 - RNA, 20 nt, Artificial Sequence
  Synthetic
ugaaaucugacacaucacac

SEQ ID NO: 793996 - RNA, 20 nt, Artificial Sequence
  Synthetic
aggcaagggcaagaucacac

SEQ ID NO: 793997 - RNA, 20 nt, Artificial Sequence
  Synthetic
auguuuuaaaaggaucacac

SEQ ID NO: 793998 - RNA, 20 nt, Artificial Sequence
  Synthetic
uuauucaggcaggaucacac

SEQ ID NO: 793999 - RNA, 20 nt, Artificial Sequence
  Synthetic
aggcaagucugaacucacac

SEQ ID NO: 794000 - RNA, 20 nt, Artificial Sequence
  Synthetic
ucucaacaggagacucacac

SEQ ID NO: 794001 - RNA, 20 nt, Artificial Sequence
  Synthetic
uuuucccuccugccucacac

SEQ ID NO: 794002 - RNA, 20 nt, Artificial Sequence
  Synthetic
augaagucuagagcucacac

SEQ ID NO: 794003 - RNA, 20 nt, Artificial Sequence
  Synthetic
auccauggccuugcucacac

SEQ ID NO: 794004 - RNA, 20 nt, Artificial Sequence
  Synthetic
ugcauucaaugacgucacac

SEQ ID NO: 794005 - RNA, 20 nt, Artificial Sequence
  Synthetic
aagagaggcaugugucacac

SEQ ID NO: 794006 - RNA, 20 nt, Artificial Sequence
  Synthetic
uuuagccauacuugucacac

SEQ ID NO: 794007 - RNA, 20 nt, Artificial Sequence
  Synthetic
agguaaauuauuauucacac

SEQ ID NO: 794008 - RNA, 20 nt, Artificial Sequence
  Synthetic
caguuguuaccucuucacac

SEQ ID NO: 794009 - RNA, 20 nt, Artificial Sequence
  Synthetic
augugaaguuuuaaagacac

SEQ ID NO: 794010 - RNA, 20 nt, Artificial Sequence
  Synthetic
uuuuugaguagagaagacac

SEQ ID NO: 794011 - RNA, 20 nt, Artificial Sequence
  Synthetic
cauuuugcaucugcagacac

SEQ ID NO: 794012 - RNA, 20 nt, Artificial Sequence
  Synthetic
uugcagcauauaucagacac

SEQ ID NO: 794013 - RNA, 20 nt, Artificial Sequence
  Synthetic
aagacaggaacaauagacac

SEQ ID NO: 794014 - RNA, 20 nt, Artificial Sequence
  Synthetic
uaaacugagguaauagacac

SEQ ID NO: 794015 - RNA, 20 nt, Artificial Sequence
  Synthetic
cgaugagaacacauagacac

SEQ ID NO: 794016 - RNA, 20 nt, Artificial Sequence
  Synthetic
cauuuagcauuagaggacac

SEQ ID NO: 794017 - RNA, 20 nt, Artificial Sequence
  Synthetic
aggguagggcuggaggacac

SEQ ID NO: 794018 - RNA, 20 nt, Artificial Sequence
  Synthetic
cucugaaaacacagggacac

SEQ ID NO: 794019 - RNA, 20 nt, Artificial Sequence
  Synthetic
agcccaugugacagggacac

SEQ ID NO: 794020 - RNA, 20 nt, Artificial Sequence
  Synthetic
acuguucauuccugggacac

SEQ ID NO: 794021 - RNA, 20 nt, Artificial Sequence
  Synthetic
agucauugauaaauggacac

SEQ ID NO: 794022 - RNA, 20 nt, Artificial Sequence
  Synthetic
caaugagaacacauggacac

SEQ ID NO: 794023 - RNA, 20 nt, Artificial Sequence
  Synthetic
cagugagaacacauggacac

SEQ ID NO: 794024 - RNA, 20 nt, Artificial Sequence
  Synthetic
caaugagaucacauggacac

SEQ ID NO: 794025 - RNA, 20 nt, Artificial Sequence
  Synthetic
caacgagagcccauggacac

SEQ ID NO: 794026 - RNA, 20 nt, Artificial Sequence
  Synthetic
caaugaaaacauauggacac

SEQ ID NO: 794027 - RNA, 20 nt, Artificial Sequence
  Synthetic
aaagaaaacaauguggacac

SEQ ID NO: 794028 - RNA, 20 nt, Artificial Sequence
  Synthetic
caaugagaacacuuggacac

SEQ ID NO: 794029 - RNA, 20 nt, Artificial Sequence
  Synthetic
uuucuauagcugaaugacac

SEQ ID NO: 794030 - RNA, 20 nt, Artificial Sequence
  Synthetic
uguugguauuuuaaugacac

SEQ ID NO: 794031 - RNA, 20 nt, Artificial Sequence
  Synthetic
auauaaguuucacaugacac

SEQ ID NO: 794032 - RNA, 20 nt, Artificial Sequence
  Synthetic
cuuccaucaccaccugacac

SEQ ID NO: 794033 - RNA, 20 nt, Artificial Sequence
  Synthetic
uacugugggacaagugacac

SEQ ID NO: 794034 - RNA, 20 nt, Artificial Sequence
  Synthetic
aaaaaaucauucagugacac

SEQ ID NO: 794035 - RNA, 20 nt, Artificial Sequence
  Synthetic
ucacuccauuggggugacac

SEQ ID NO: 794036 - RNA, 20 nt, Artificial Sequence
  Synthetic
aaaacggaccccugugacac

SEQ ID NO: 794037 - RNA, 20 nt, Artificial Sequence
  Synthetic
uacaugagauguuuugacac

SEQ ID NO: 794038 - RNA, 20 nt, Artificial Sequence
  Synthetic
cuuuccauuucaaaauacac

SEQ ID NO: 794039 - RNA, 20 nt, Artificial Sequence
  Synthetic
ugacugaacuugaaauacac

SEQ ID NO: 794040 - RNA, 20 nt, Artificial Sequence
  Synthetic
cauuuggaaaguaaauacac

SEQ ID NO: 794041 - RNA, 20 nt, Artificial Sequence
  Synthetic
acagagaacuuuaaauacac

SEQ ID NO: 794042 - RNA, 20 nt, Artificial Sequence
  Synthetic
ccuaucucuacacaauacac

SEQ ID NO: 794043 - RNA, 20 nt, Artificial Sequence
  Synthetic
uaaaagcaccaucaauacac

SEQ ID NO: 794044 - RNA, 20 nt, Artificial Sequence
  Synthetic
aacagagauuuuuaauacac

SEQ ID NO: 794045 - RNA, 20 nt, Artificial Sequence
  Synthetic
aaagacauccauccauacac

SEQ ID NO: 794046 - RNA, 20 nt, Artificial Sequence
  Synthetic
ugauacaauuuuagauacac

SEQ ID NO: 794047 - RNA, 20 nt, Artificial Sequence
  Synthetic
uuccauauaugaauauacac

SEQ ID NO: 794048 - RNA, 20 nt, Artificial Sequence
  Synthetic
augauaaacuauauauacac

SEQ ID NO: 794049 - RNA, 20 nt, Artificial Sequence
  Synthetic
aguaguuggggaaccuacac

SEQ ID NO: 794050 - RNA, 20 nt, Artificial Sequence
  Synthetic
cuccagcuuuacagcuacac

SEQ ID NO: 794051 - RNA, 20 nt, Artificial Sequence
  Synthetic
ucuuuuuagaagggcuacac

SEQ ID NO: 794052 - RNA, 20 nt, Artificial Sequence
  Synthetic
uugaagucuaugugcuacac

SEQ ID NO: 794053 - RNA, 20 nt, Artificial Sequence
  Synthetic
caaaacacccugcaguacac

SEQ ID NO: 794054 - RNA, 20 nt, Artificial Sequence
  Synthetic
ucacccaggcuggaguacac

SEQ ID NO: 794055 - RNA, 20 nt, Artificial Sequence
  Synthetic
auaaaacauuaugaguacac

SEQ ID NO: 794056 - RNA, 20 nt, Artificial Sequence
  Synthetic
auuuuuuauugcuaguacac

SEQ ID NO: 794057 - RNA, 20 nt, Artificial Sequence
  Synthetic
uuggagacagacacguacac

SEQ ID NO: 794058 - RNA, 20 nt, Artificial Sequence
  Synthetic
uacaagucacaugcguacac

SEQ ID NO: 794059 - RNA, 20 nt, Artificial Sequence
  Synthetic
aucagaagaugaggguacac

SEQ ID NO: 794060 - RNA, 20 nt, Artificial Sequence
  Synthetic
uaagauuaaauaggguacac

SEQ ID NO: 794061 - RNA, 20 nt, Artificial Sequence
  Synthetic
uugcuuaaagacuuguacac

SEQ ID NO: 794062 - RNA, 20 nt, Artificial Sequence
  Synthetic
uucauauaacaaaauuacac

SEQ ID NO: 794063 - RNA, 20 nt, Artificial Sequence
  Synthetic
agacugaauucccauuacac

SEQ ID NO: 794064 - RNA, 20 nt, Artificial Sequence
  Synthetic
agagccaugaaauauuacac

SEQ ID NO: 794065 - RNA, 20 nt, Artificial Sequence
  Synthetic
aauaauaaauaauauuacac

SEQ ID NO: 794066 - RNA, 20 nt, Artificial Sequence
  Synthetic
cacuugcccuuguauuacac

SEQ ID NO: 794067 - RNA, 20 nt, Artificial Sequence
  Synthetic
cccuaacucaguuauuacac

SEQ ID NO: 794068 - RNA, 20 nt, Artificial Sequence
  Synthetic
uaugccaguaccacuuacac

SEQ ID NO: 794069 - RNA, 20 nt, Artificial Sequence
  Synthetic
uuccccaccuucucuuacac

SEQ ID NO: 794070 - RNA, 20 nt, Artificial Sequence
  Synthetic
uacuguuuucauaguuacac

SEQ ID NO: 794071 - RNA, 20 nt, Artificial Sequence
  Synthetic
ucaagcugaaaauguuacac

SEQ ID NO: 794072 - RNA, 20 nt, Artificial Sequence
  Synthetic
ugcaaucaaagaauuuacac

SEQ ID NO: 794073 - RNA, 20 nt, Artificial Sequence
  Synthetic
agaugcucauugauuuacac

SEQ ID NO: 794074 - RNA, 20 nt, Artificial Sequence
  Synthetic
ugauuucucucucuuuacac

SEQ ID NO: 794075 - RNA, 20 nt, Artificial Sequence
  Synthetic
aaggauaguuucuuuuacac

SEQ ID NO: 794076 - RNA, 20 nt, Artificial Sequence
  Synthetic
uccaucauauuguuuuacac

SEQ ID NO: 794077 - RNA, 20 nt, Artificial Sequence
  Synthetic
uaucaaguuauuuuuuacac

SEQ ID NO: 794078 - RNA, 20 nt, Artificial Sequence
  Synthetic
aauuuaauuugccaaaccac

SEQ ID NO: 794079 - RNA, 20 nt, Artificial Sequence
  Synthetic
caagaaaucuuuuaaaccac

SEQ ID NO: 794080 - RNA, 20 nt, Artificial Sequence
  Synthetic
cacucaaguuaaagaaccac

SEQ ID NO: 794081 - RNA, 20 nt, Artificial Sequence
  Synthetic
cacuaaaguuugagaaccac

SEQ ID NO: 794082 - RNA, 20 nt, Artificial Sequence
  Synthetic
uuaucuaucaccugaaccac

SEQ ID NO: 794083 - RNA, 20 nt, Artificial Sequence
  Synthetic
augagauguucccuaaccac

SEQ ID NO: 794084 - RNA, 20 nt, Artificial Sequence
  Synthetic
caggauucuaaucuaaccac

SEQ ID NO: 794085 - RNA, 20 nt, Artificial Sequence
  Synthetic
agaagacauguuguaaccac

SEQ ID NO: 794086 - RNA, 20 nt, Artificial Sequence
  Synthetic
uacaucuaccagcacaccac

SEQ ID NO: 794087 - RNA, 20 nt, Artificial Sequence
  Synthetic
ucauggagauugcacaccac

SEQ ID NO: 794088 - RNA, 20 nt, Artificial Sequence
  Synthetic
acuccaaacgcucacaccac

SEQ ID NO: 794089 - RNA, 20 nt, Artificial Sequence
  Synthetic
aaauaacuuuuugacaccac

SEQ ID NO: 794090 - RNA, 20 nt, Artificial Sequence
  Synthetic
ucccugggacagagcaccac

SEQ ID NO: 794091 - RNA, 20 nt, Artificial Sequence
  Synthetic
auaagcagcuucaucaccac

SEQ ID NO: 794092 - RNA, 20 nt, Artificial Sequence
  Synthetic
acugaagaauaucucaccac

SEQ ID NO: 794093 - RNA, 20 nt, Artificial Sequence
  Synthetic
caagaaguaaaagucaccac

SEQ ID NO: 794094 - RNA, 20 nt, Artificial Sequence
  Synthetic
uguuuguuuucuuucaccac

SEQ ID NO: 794095 - RNA, 20 nt, Artificial Sequence
  Synthetic
aacagaggaaaacagaccac

SEQ ID NO: 794096 - RNA, 20 nt, Artificial Sequence
  Synthetic
aagggguggcuggagaccac

SEQ ID NO: 794097 - RNA, 20 nt, Artificial Sequence
  Synthetic
ucuugaguagcugagaccac

SEQ ID NO: 794098 - RNA, 20 nt, Artificial Sequence
  Synthetic
aguagccauguugagaccac

SEQ ID NO: 794099 - RNA, 20 nt, Artificial Sequence
  Synthetic
ucccgaguagcugggaccac

SEQ ID NO: 794100 - RNA, 20 nt, Artificial Sequence
  Synthetic
uccugaguagcugggaccac

SEQ ID NO: 794101 - RNA, 20 nt, Artificial Sequence
  Synthetic
auaugcuacuaaaugaccac

SEQ ID NO: 794102 - RNA, 20 nt, Artificial Sequence
  Synthetic
aggccaaggcgggugaccac

SEQ ID NO: 794103 - RNA, 20 nt, Artificial Sequence
  Synthetic
uucaugacuucgcauaccac

SEQ ID NO: 794104 - RNA, 20 nt, Artificial Sequence
  Synthetic
cccaugauucugccuaccac

SEQ ID NO: 794105 - RNA, 20 nt, Artificial Sequence
  Synthetic
acugaauacauuucuaccac

SEQ ID NO: 794106 - RNA, 20 nt, Artificial Sequence
  Synthetic
ccucacuaccucaguaccac

SEQ ID NO: 794107 - RNA, 20 nt, Artificial Sequence
  Synthetic
ucccgagcagcugguaccac

SEQ ID NO: 794108 - RNA, 20 nt, Artificial Sequence
  Synthetic
agcagggauguuuguaccac

SEQ ID NO: 794109 - RNA, 20 nt, Artificial Sequence
  Synthetic
cagcgagaccacgaacccac

SEQ ID NO: 794110 - RNA, 20 nt, Artificial Sequence
  Synthetic
caucuucuuccugaacccac

SEQ ID NO: 794111 - RNA, 20 nt, Artificial Sequence
  Synthetic
uaagcaagguaaacacccac

SEQ ID NO: 794112 - RNA, 20 nt, Artificial Sequence
  Synthetic
uuuggaaacugaguacccac

SEQ ID NO: 794113 - RNA, 20 nt, Artificial Sequence
  Synthetic
cuugacuucuguguacccac

SEQ ID NO: 794114 - RNA, 20 nt, Artificial Sequence
  Synthetic
uuccacaugcugucccccac

SEQ ID NO: 794115 - RNA, 20 nt, Artificial Sequence
  Synthetic
agacagcugagaagccccac

SEQ ID NO: 794116 - RNA, 20 nt, Artificial Sequence
  Synthetic
acuacauuucccagccccac

SEQ ID NO: 794117 - RNA, 20 nt, Artificial Sequence
  Synthetic
uacagcauuaaaauccccac

SEQ ID NO: 794118 - RNA, 20 nt, Artificial Sequence
  Synthetic
uauuuugaaaagcuccccac

SEQ ID NO: 794119 - RNA, 20 nt, Artificial Sequence
  Synthetic
ccccaacacagaguccccac

SEQ ID NO: 794120 - RNA, 20 nt, Artificial Sequence
  Synthetic
cccccacauagaguccccac

SEQ ID NO: 794121 - RNA, 20 nt, Artificial Sequence
  Synthetic
uuccuggaguaaaagcccac

SEQ ID NO: 794122 - RNA, 20 nt, Artificial Sequence
  Synthetic
acugaauauuuuaggcccac

SEQ ID NO: 794123 - RNA, 20 nt, Artificial Sequence
  Synthetic
auauuccuauuuaugcccac

SEQ ID NO: 794124 - RNA, 20 nt, Artificial Sequence
  Synthetic
aaucaucacaacaaucccac

SEQ ID NO: 794125 - RNA, 20 nt, Artificial Sequence
  Synthetic
cuuccuuaucagaaucccac

SEQ ID NO: 794126 - RNA, 20 nt, Artificial Sequence
  Synthetic
cuaguggaguuuaaucccac

SEQ ID NO: 794127 - RNA, 20 nt, Artificial Sequence
  Synthetic
agcacuuuggaauaucccac

SEQ ID NO: 794128 - RNA, 20 nt, Artificial Sequence
  Synthetic
uacuucuaguaauaucccac

SEQ ID NO: 794129 - RNA, 20 nt, Artificial Sequence
  Synthetic
aaaaagaaaugauaucccac

SEQ ID NO: 794130 - RNA, 20 nt, Artificial Sequence
  Synthetic
accucucugaccuaucccac

SEQ ID NO: 794131 - RNA, 20 nt, Artificial Sequence
  Synthetic
accuguguuuuuuaucccac

SEQ ID NO: 794132 - RNA, 20 nt, Artificial Sequence
  Synthetic
ugcaauaaucaaacucccac

SEQ ID NO: 794133 - RNA, 20 nt, Artificial Sequence
  Synthetic
ugauucaaaugaccucccac

SEQ ID NO: 794134 - RNA, 20 nt, Artificial Sequence
  Synthetic
augauuaaauuaccucccac

SEQ ID NO: 794135 - RNA, 20 nt, Artificial Sequence
  Synthetic
augauucaguuaccucccac

SEQ ID NO: 794136 - RNA, 20 nt, Artificial Sequence
  Synthetic
cuccugccaacgccucccac

SEQ ID NO: 794137 - RNA, 20 nt, Artificial Sequence
  Synthetic
cuucugauauuuucucccac

SEQ ID NO: 794138 - RNA, 20 nt, Artificial Sequence
  Synthetic
ccuuauuguuuacuucccac

SEQ ID NO: 794139 - RNA, 20 nt, Artificial Sequence
  Synthetic
uaauuguucuuuguucccac

SEQ ID NO: 794140 - RNA, 20 nt, Artificial Sequence
  Synthetic
uguucaagucaauuucccac

SEQ ID NO: 794141 - RNA, 20 nt, Artificial Sequence
  Synthetic
ccuuugucuccguuucccac

SEQ ID NO: 794142 - RNA, 20 nt, Artificial Sequence
  Synthetic
uucuacccaaauuuucccac

SEQ ID NO: 794143 - RNA, 20 nt, Artificial Sequence
  Synthetic
aggacgguaugaaaagccac

SEQ ID NO: 794144 - RNA, 20 nt, Artificial Sequence
  Synthetic
ucaaaaaaacccaaagccac

SEQ ID NO: 794145 - RNA, 20 nt, Artificial Sequence
  Synthetic
aagaaugagucccaagccac

SEQ ID NO: 794146 - RNA, 20 nt, Artificial Sequence
  Synthetic
aucauuguugcugaagccac

SEQ ID NO: 794147 - RNA, 20 nt, Artificial Sequence
  Synthetic
cugugguuugguuaagccac

SEQ ID NO: 794148 - RNA, 20 nt, Artificial Sequence
  Synthetic
ucauuuguuacaacagccac

SEQ ID NO: 794149 - RNA, 20 nt, Artificial Sequence
  Synthetic
cagaaaaauaguagagccac

SEQ ID NO: 794150 - RNA, 20 nt, Artificial Sequence
  Synthetic
cugucuaacacaggagccac

SEQ ID NO: 794151 - RNA, 20 nt, Artificial Sequence
  Synthetic
uugaauuguucaauagccac

SEQ ID NO: 794152 - RNA, 20 nt, Artificial Sequence
  Synthetic
uauccuaaaugaauagccac

SEQ ID NO: 794153 - RNA, 20 nt, Artificial Sequence
  Synthetic
cuuuaaaagaauauagccac

SEQ ID NO: 794154 - RNA, 20 nt, Artificial Sequence
  Synthetic
uuugaaaauagccuagccac

SEQ ID NO: 794155 - RNA, 20 nt, Artificial Sequence
  Synthetic
caccuaauuuugguagccac

SEQ ID NO: 794156 - RNA, 20 nt, Artificial Sequence
  Synthetic
agaugauucucuuuagccac

SEQ ID NO: 794157 - RNA, 20 nt, Artificial Sequence
  Synthetic
augaauuuugaucaggccac

SEQ ID NO: 794158 - RNA, 20 nt, Artificial Sequence
  Synthetic
cucaugguggugagggccac

SEQ ID NO: 794159 - RNA, 20 nt, Artificial Sequence
  Synthetic
uaguuauugcuuugggccac

SEQ ID NO: 794160 - RNA, 20 nt, Artificial Sequence
  Synthetic
cuaauucccuaaauggccac

SEQ ID NO: 794161 - RNA, 20 nt, Artificial Sequence
  Synthetic
uugcuaaggauaauggccac

SEQ ID NO: 794162 - RNA, 20 nt, Artificial Sequence
  Synthetic
ucuuugccauuaaaugccac

SEQ ID NO: 794163 - RNA, 20 nt, Artificial Sequence
  Synthetic
cuuucucuuuaauaugccac

SEQ ID NO: 794164 - RNA, 20 nt, Artificial Sequence
  Synthetic
acaggcuugccuuaugccac

SEQ ID NO: 794165 - RNA, 20 nt, Artificial Sequence
  Synthetic
auuaucaagccaacugccac

SEQ ID NO: 794166 - RNA, 20 nt, Artificial Sequence
  Synthetic
caucuacauuugucugccac

SEQ ID NO: 794167 - RNA, 20 nt, Artificial Sequence
  Synthetic
ugaacccaagacugugccac

SEQ ID NO: 794168 - RNA, 20 nt, Artificial Sequence
  Synthetic
ccucccuuugagguugccac

SEQ ID NO: 794169 - RNA, 20 nt, Artificial Sequence
  Synthetic
ugaaggcuuucuguugccac

SEQ ID NO: 794170 - RNA, 20 nt, Artificial Sequence
  Synthetic
auuugaaauacauuugccac

SEQ ID NO: 794171 - RNA, 20 nt, Artificial Sequence
  Synthetic
uuucuuguaguuaaauccac

SEQ ID NO: 794172 - RNA, 20 nt, Artificial Sequence
  Synthetic
ugugggagacccuaauccac

SEQ ID NO: 794173 - RNA, 20 nt, Artificial Sequence
  Synthetic
aauggucccaucuaauccac

SEQ ID NO: 794174 - RNA, 20 nt, Artificial Sequence
  Synthetic
cugcaguuucagacauccac

SEQ ID NO: 794175 - RNA, 20 nt, Artificial Sequence
  Synthetic
cccagccagcuaagauccac

SEQ ID NO: 794176 - RNA, 20 nt, Artificial Sequence
  Synthetic
uucucaaacuuuagcuccac

SEQ ID NO: 794177 - RNA, 20 nt, Artificial Sequence
  Synthetic
agagugaacauuaucuccac

SEQ ID NO: 794178 - RNA, 20 nt, Artificial Sequence
  Synthetic
cauuacuucuuggucuccac

SEQ ID NO: 794179 - RNA, 20 nt, Artificial Sequence
  Synthetic
uuggcaguuccauucuccac

SEQ ID NO: 794180 - RNA, 20 nt, Artificial Sequence
  Synthetic
acuuccugucagcaguccac

SEQ ID NO: 794181 - RNA, 20 nt, Artificial Sequence
  Synthetic
ugguguccauuacuguccac

SEQ ID NO: 794182 - RNA, 20 nt, Artificial Sequence
  Synthetic
aagaaccuucacaauuccac

SEQ ID NO: 794183 - RNA, 20 nt, Artificial Sequence
  Synthetic
caaugguauuuggauuccac

SEQ ID NO: 794184 - RNA, 20 nt, Artificial Sequence
  Synthetic
aaaauauuguaugauuccac

SEQ ID NO: 794185 - RNA, 20 nt, Artificial Sequence
  Synthetic
auaauguauucauauuccac

SEQ ID NO: 794186 - RNA, 20 nt, Artificial Sequence
  Synthetic
aucucuuucuacccuuccac

SEQ ID NO: 794187 - RNA, 20 nt, Artificial Sequence
  Synthetic
aaacugcuccguccuuccac

SEQ ID NO: 794188 - RNA, 20 nt, Artificial Sequence
  Synthetic
aaaggugcagacgcuuccac

SEQ ID NO: 794189 - RNA, 20 nt, Artificial Sequence
  Synthetic
uucuggaaccacaguuccac

SEQ ID NO: 794190 - RNA, 20 nt, Artificial Sequence
  Synthetic
cagggaccagauaguuccac

SEQ ID NO: 794191 - RNA, 20 nt, Artificial Sequence
  Synthetic
auuaacuaauuuaguuccac

SEQ ID NO: 794192 - RNA, 20 nt, Artificial Sequence
  Synthetic
cuaccacguagauguuccac

SEQ ID NO: 794193 - RNA, 20 nt, Artificial Sequence
  Synthetic
ccacaguucagcuuuuccac

SEQ ID NO: 794194 - RNA, 20 nt, Artificial Sequence
  Synthetic
uggggcugccagaaaagcac

SEQ ID NO: 794195 - RNA, 20 nt, Artificial Sequence
  Synthetic
aucuguguuuugaaaagcac

SEQ ID NO: 794196 - RNA, 20 nt, Artificial Sequence
  Synthetic
uagauuggguuuaaaagcac

SEQ ID NO: 794197 - RNA, 20 nt, Artificial Sequence
  Synthetic
uccucagcuucccaaagcac

SEQ ID NO: 794198 - RNA, 20 nt, Artificial Sequence
  Synthetic
ucucacaaucuagaaagcac

SEQ ID NO: 794199 - RNA, 20 nt, Artificial Sequence
  Synthetic
uaaaauuuuauugaaagcac

SEQ ID NO: 794200 - RNA, 20 nt, Artificial Sequence
  Synthetic
aagaacaaaauguaaagcac

SEQ ID NO: 794201 - RNA, 20 nt, Artificial Sequence
  Synthetic
aucuaucaugugccaagcac

SEQ ID NO: 794202 - RNA, 20 nt, Artificial Sequence
  Synthetic
agagcacuugguccaagcac

SEQ ID NO: 794203 - RNA, 20 nt, Artificial Sequence
  Synthetic
cacauuauauuuucaagcac

SEQ ID NO: 794204 - RNA, 20 nt, Artificial Sequence
  Synthetic
uauuuagacaagggaagcac

SEQ ID NO: 794205 - RNA, 20 nt, Artificial Sequence
  Synthetic
ccuagauaaaauggaagcac

SEQ ID NO: 794206 - RNA, 20 nt, Artificial Sequence
  Synthetic
uucaguuuugagugaagcac

SEQ ID NO: 794207 - RNA, 20 nt, Artificial Sequence
  Synthetic
uugucuagucaaauaagcac

SEQ ID NO: 794208 - RNA, 20 nt, Artificial Sequence
  Synthetic
aaguaauugcuuauaagcac

SEQ ID NO: 794209 - RNA, 20 nt, Artificial Sequence
  Synthetic
cacuaucaggagaacagcac

SEQ ID NO: 794210 - RNA, 20 nt, Artificial Sequence
  Synthetic
cacaaucacuagaacagcac

SEQ ID NO: 794211 - RNA, 20 nt, Artificial Sequence
  Synthetic
uaagguaauaugaacagcac

SEQ ID NO: 794212 - RNA, 20 nt, Artificial Sequence
  Synthetic
cccuuuagcauucacagcac

SEQ ID NO: 794213 - RNA, 20 nt, Artificial Sequence
  Synthetic
ccuucccaaucacccagcac

SEQ ID NO: 794214 - RNA, 20 nt, Artificial Sequence
  Synthetic
ugcucccuguaccccagcac

SEQ ID NO: 794215 - RNA, 20 nt, Artificial Sequence
  Synthetic
ugcuucacauuucccagcac

SEQ ID NO: 794216 - RNA, 20 nt, Artificial Sequence
  Synthetic
uaucauaagaacagcagcac

SEQ ID NO: 794217 - RNA, 20 nt, Artificial Sequence
  Synthetic
aauccccaacguggcagcac

SEQ ID NO: 794218 - RNA, 20 nt, Artificial Sequence
  Synthetic
aagccaguaagugucagcac

SEQ ID NO: 794219 - RNA, 20 nt, Artificial Sequence
  Synthetic
uuggaaugguaaacgagcac

SEQ ID NO: 794220 - RNA, 20 nt, Artificial Sequence
  Synthetic
cagaaugaauuuuggagcac

SEQ ID NO: 794221 - RNA, 20 nt, Artificial Sequence
  Synthetic
uaauaauaguuauugagcac

SEQ ID NO: 794222 - RNA, 20 nt, Artificial Sequence
  Synthetic
caggaggacuguuugagcac

SEQ ID NO: 794223 - RNA, 20 nt, Artificial Sequence
  Synthetic
ugaauacagggagauagcac

SEQ ID NO: 794224 - RNA, 20 nt, Artificial Sequence
  Synthetic
uauuccauauguuauagcac

SEQ ID NO: 794225 - RNA, 20 nt, Artificial Sequence
  Synthetic
acauaacaaucaucuagcac

SEQ ID NO: 794226 - RNA, 20 nt, Artificial Sequence
  Synthetic
ugugagcaggcuuguagcac

SEQ ID NO: 794227 - RNA, 20 nt, Artificial Sequence
  Synthetic
uuauuucagcugcuuagcac

SEQ ID NO: 794228 - RNA, 20 nt, Artificial Sequence
  Synthetic
acauuucagaguguuagcac

SEQ ID NO: 794229 - RNA, 20 nt, Artificial Sequence
  Synthetic
uuggggaaauaauuuagcac

SEQ ID NO: 794230 - RNA, 20 nt, Artificial Sequence
  Synthetic
acguaaauaauuuuuagcac

SEQ ID NO: 794231 - RNA, 20 nt, Artificial Sequence
  Synthetic
aagcgcaugccaccacgcac

SEQ ID NO: 794232 - RNA, 20 nt, Artificial Sequence
  Synthetic
aaaguugaggacaggcgcac

SEQ ID NO: 794233 - RNA, 20 nt, Artificial Sequence
  Synthetic
ugugauuacauugggcgcac

SEQ ID NO: 794234 - RNA, 20 nt, Artificial Sequence
  Synthetic
uaccacuacucagaaggcac

SEQ ID NO: 794235 - RNA, 20 nt, Artificial Sequence
  Synthetic
uaaaauggaagcacaggcac

SEQ ID NO: 794236 - RNA, 20 nt, Artificial Sequence
  Synthetic
ugguuucacgggccaggcac

SEQ ID NO: 794237 - RNA, 20 nt, Artificial Sequence
  Synthetic
uggaacuggguaagaggcac

SEQ ID NO: 794238 - RNA, 20 nt, Artificial Sequence
  Synthetic
uauccacuacagagaggcac

SEQ ID NO: 794239 - RNA, 20 nt, Artificial Sequence
  Synthetic
aacaaaaucuauggaggcac

SEQ ID NO: 794240 - RNA, 20 nt, Artificial Sequence
  Synthetic
cuuuauggcuaaauaggcac

SEQ ID NO: 794241 - RNA, 20 nt, Artificial Sequence
  Synthetic
ugagcuguguaaauaggcac

SEQ ID NO: 794242 - RNA, 20 nt, Artificial Sequence
  Synthetic
aggauaaccacaauaggcac

SEQ ID NO: 794243 - RNA, 20 nt, Artificial Sequence
  Synthetic
cuauuaucucuuauaggcac

SEQ ID NO: 794244 - RNA, 20 nt, Artificial Sequence
  Synthetic
ucugggguuuuuauaggcac

SEQ ID NO: 794245 - RNA, 20 nt, Artificial Sequence
  Synthetic
cugggcaccauucuaggcac

SEQ ID NO: 794246 - RNA, 20 nt, Artificial Sequence
  Synthetic
ccagggaauguucuaggcac

SEQ ID NO: 794247 - RNA, 20 nt, Artificial Sequence
  Synthetic
uucucugagaucaagggcac

SEQ ID NO: 794248 - RNA, 20 nt, Artificial Sequence
  Synthetic
ucauucuggcuggagggcac

SEQ ID NO: 794249 - RNA, 20 nt, Artificial Sequence
  Synthetic
agaggcaucuaguggggcac

SEQ ID NO: 794250 - RNA, 20 nt, Artificial Sequence
  Synthetic
cuucagugucuguggggcac

SEQ ID NO: 794251 - RNA, 20 nt, Artificial Sequence
  Synthetic
aaagcccuuagccugggcac

SEQ ID NO: 794252 - RNA, 20 nt, Artificial Sequence
  Synthetic
auaacacacugagugggcac

SEQ ID NO: 794253 - RNA, 20 nt, Artificial Sequence
  Synthetic
aaacaaaauguauauggcac

SEQ ID NO: 794254 - RNA, 20 nt, Artificial Sequence
  Synthetic
aacuaaacuaacuauggcac

SEQ ID NO: 794255 - RNA, 20 nt, Artificial Sequence
  Synthetic
aggcaaugaaaugcuggcac

SEQ ID NO: 794256 - RNA, 20 nt, Artificial Sequence
  Synthetic
ucccauuugucgucuggcac

SEQ ID NO: 794257 - RNA, 20 nt, Artificial Sequence
  Synthetic
uuuaaccaagggaguggcac

SEQ ID NO: 794258 - RNA, 20 nt, Artificial Sequence
  Synthetic
uagcuacaaaaugguggcac

SEQ ID NO: 794259 - RNA, 20 nt, Artificial Sequence
  Synthetic
ccaccugcaggugguggcac

SEQ ID NO: 794260 - RNA, 20 nt, Artificial Sequence
  Synthetic
uacagugguaaauguggcac

SEQ ID NO: 794261 - RNA, 20 nt, Artificial Sequence
  Synthetic
cuguacaggaaguguggcac

SEQ ID NO: 794262 - RNA, 20 nt, Artificial Sequence
  Synthetic
aguaaugaaauuauuggcac

SEQ ID NO: 794263 - RNA, 20 nt, Artificial Sequence
  Synthetic
auucugauccuacaaugcac

SEQ ID NO: 794264 - RNA, 20 nt, Artificial Sequence
  Synthetic
uagaguaugacugaaugcac

SEQ ID NO: 794265 - RNA, 20 nt, Artificial Sequence
  Synthetic
aaacauaacauuuaaugcac

SEQ ID NO: 794266 - RNA, 20 nt, Artificial Sequence
  Synthetic
ugcuguccacucacaugcac

SEQ ID NO: 794267 - RNA, 20 nt, Artificial Sequence
  Synthetic
ugcuguaaagauacaugcac

SEQ ID NO: 794268 - RNA, 20 nt, Artificial Sequence
  Synthetic
cuugccugagcagcaugcac

SEQ ID NO: 794269 - RNA, 20 nt, Artificial Sequence
  Synthetic
agaaagagcucagcaugcac

SEQ ID NO: 794270 - RNA, 20 nt, Artificial Sequence
  Synthetic
cuggguguggugguaugcac

SEQ ID NO: 794271 - RNA, 20 nt, Artificial Sequence
  Synthetic
uuuuaaccuugcuuaugcac

SEQ ID NO: 794272 - RNA, 20 nt, Artificial Sequence
  Synthetic
auauauauauauagcugcac

SEQ ID NO: 794273 - RNA, 20 nt, Artificial Sequence
  Synthetic
ucuucccuugucuucugcac

SEQ ID NO: 794274 - RNA, 20 nt, Artificial Sequence
  Synthetic
caaauauucccuccgugcac

SEQ ID NO: 794275 - RNA, 20 nt, Artificial Sequence
  Synthetic
ucaugacaucucaggugcac

SEQ ID NO: 794276 - RNA, 20 nt, Artificial Sequence
  Synthetic
aaaaacacacaguggugcac

SEQ ID NO: 794277 - RNA, 20 nt, Artificial Sequence
  Synthetic
aaagugaaaauaaugugcac

SEQ ID NO: 794278 - RNA, 20 nt, Artificial Sequence
  Synthetic
ucacaagagagcaugugcac

SEQ ID NO: 794279 - RNA, 20 nt, Artificial Sequence
  Synthetic
acauauguucuuaugugcac

SEQ ID NO: 794280 - RNA, 20 nt, Artificial Sequence
  Synthetic
ucucaaaugucagugugcac

SEQ ID NO: 794281 - RNA, 20 nt, Artificial Sequence
  Synthetic
aucaggaagcaaaauugcac

SEQ ID NO: 794282 - RNA, 20 nt, Artificial Sequence
  Synthetic
cauugguccuaaaauugcac

SEQ ID NO: 794283 - RNA, 20 nt, Artificial Sequence
  Synthetic
uucaauauuccacauugcac

SEQ ID NO: 794284 - RNA, 20 nt, Artificial Sequence
  Synthetic
uaccaggagcaccauugcac

SEQ ID NO: 794285 - RNA, 20 nt, Artificial Sequence
  Synthetic
augcaauuaggagauugcac

SEQ ID NO: 794286 - RNA, 20 nt, Artificial Sequence
  Synthetic
caaggugugguagauugcac

SEQ ID NO: 794287 - RNA, 20 nt, Artificial Sequence
  Synthetic
ccagguacagcauauugcac

SEQ ID NO: 794288 - RNA, 20 nt, Artificial Sequence
  Synthetic
uagagcuucaucuauugcac

SEQ ID NO: 794289 - RNA, 20 nt, Artificial Sequence
  Synthetic
ucagguuaggcaucuugcac

SEQ ID NO: 794290 - RNA, 20 nt, Artificial Sequence
  Synthetic
auucuccaaggauguugcac

SEQ ID NO: 794291 - RNA, 20 nt, Artificial Sequence
  Synthetic
uugcauccauguuguugcac

SEQ ID NO: 794292 - RNA, 20 nt, Artificial Sequence
  Synthetic
aaacagaucauccuuugcac

SEQ ID NO: 794293 - RNA, 20 nt, Artificial Sequence
  Synthetic
uucuguuccaaauuuugcac

SEQ ID NO: 794294 - RNA, 20 nt, Artificial Sequence
  Synthetic
aacuuugauggaaaaaucac

SEQ ID NO: 794295 - RNA, 20 nt, Artificial Sequence
  Synthetic
uagggacaaaagaaaaucac

SEQ ID NO: 794296 - RNA, 20 nt, Artificial Sequence
  Synthetic
caccagacacugaaaaucac

SEQ ID NO: 794297 - RNA, 20 nt, Artificial Sequence
  Synthetic
caucccuaguugaaaaucac

SEQ ID NO: 794298 - RNA, 20 nt, Artificial Sequence
  Synthetic
uuuuuaaaaaauuaaaucac

SEQ ID NO: 794299 - RNA, 20 nt, Artificial Sequence
  Synthetic
agauaagaaacuuaaaucac

SEQ ID NO: 794300 - RNA, 20 nt, Artificial Sequence
  Synthetic
uucaacagaacuuaaaucac

SEQ ID NO: 794301 - RNA, 20 nt, Artificial Sequence
  Synthetic
aaccaaagaaaaugaaucac

SEQ ID NO: 794302 - RNA, 20 nt, Artificial Sequence
  Synthetic
uaugugucacuuugaaucac

SEQ ID NO: 794303 - RNA, 20 nt, Artificial Sequence
  Synthetic
ccaaguucaaaaguaaucac

SEQ ID NO: 794304 - RNA, 20 nt, Artificial Sequence
  Synthetic
uaaauaagaaucuuaaucac

SEQ ID NO: 794305 - RNA, 20 nt, Artificial Sequence
  Synthetic
aauacuuucaucuuaaucac

SEQ ID NO: 794306 - RNA, 20 nt, Artificial Sequence
  Synthetic
uuugcaucaguguuaaucac

SEQ ID NO: 794307 - RNA, 20 nt, Artificial Sequence
  Synthetic
uuaaauuucaaaaacaucac

SEQ ID NO: 794308 - RNA, 20 nt, Artificial Sequence
  Synthetic
ccauguagugcaaacaucac

SEQ ID NO: 794309 - RNA, 20 nt, Artificial Sequence
  Synthetic
uggaaguaaggaaacaucac

SEQ ID NO: 794310 - RNA, 20 nt, Artificial Sequence
  Synthetic
aauaggaguaccaacaucac

SEQ ID NO: 794311 - RNA, 20 nt, Artificial Sequence
  Synthetic
ugugaguaaagagacaucac

SEQ ID NO: 794312 - RNA, 20 nt, Artificial Sequence
  Synthetic
cuauacaaugaguacaucac

SEQ ID NO: 794313 - RNA, 20 nt, Artificial Sequence
  Synthetic
ccucauaauguuuccaucac

SEQ ID NO: 794314 - RNA, 20 nt, Artificial Sequence
  Synthetic
cacacaguggauugcaucac

SEQ ID NO: 794315 - RNA, 20 nt, Artificial Sequence
  Synthetic
cuggaacucuccaucaucac

SEQ ID NO: 794316 - RNA, 20 nt, Artificial Sequence
  Synthetic
cagaauauuuucaucaucac

SEQ ID NO: 794317 - RNA, 20 nt, Artificial Sequence
  Synthetic
uccaacaccuuccucaucac

SEQ ID NO: 794318 - RNA, 20 nt, Artificial Sequence
  Synthetic
ccaugaccaugagucaucac

SEQ ID NO: 794319 - RNA, 20 nt, Artificial Sequence
  Synthetic
ccaggaccaaaugucaucac

SEQ ID NO: 794320 - RNA, 20 nt, Artificial Sequence
  Synthetic
auuuugacccuugucaucac

SEQ ID NO: 794321 - RNA, 20 nt, Artificial Sequence
  Synthetic
agagagaaaaccaagaucac

SEQ ID NO: 794322 - RNA, 20 nt, Artificial Sequence
  Synthetic
agcugaccuugagagaucac

SEQ ID NO: 794323 - RNA, 20 nt, Artificial Sequence
  Synthetic
uuauuagucauuaugaucac

SEQ ID NO: 794324 - RNA, 20 nt, Artificial Sequence
  Synthetic
ugagagacucacuugaucac

SEQ ID NO: 794325 - RNA, 20 nt, Artificial Sequence
  Synthetic
uaaaauaaugcaaauaucac

SEQ ID NO: 794326 - RNA, 20 nt, Artificial Sequence
  Synthetic
auaauuucucuaaauaucac

SEQ ID NO: 794327 - RNA, 20 nt, Artificial Sequence
  Synthetic
uuucucucuuggcauaucac

SEQ ID NO: 794328 - RNA, 20 nt, Artificial Sequence
  Synthetic
auuuuuauuaaucauaucac

SEQ ID NO: 794329 - RNA, 20 nt, Artificial Sequence
  Synthetic
uuuucaugacaucauaucac

SEQ ID NO: 794330 - RNA, 20 nt, Artificial Sequence
  Synthetic
augaaauuuauguauaucac

SEQ ID NO: 794331 - RNA, 20 nt, Artificial Sequence
  Synthetic
uucuuuauccagucuaucac

SEQ ID NO: 794332 - RNA, 20 nt, Artificial Sequence
  Synthetic
uaagugccagauucuaucac

SEQ ID NO: 794333 - RNA, 20 nt, Artificial Sequence
  Synthetic
agucacucuacaaguaucac

SEQ ID NO: 794334 - RNA, 20 nt, Artificial Sequence
  Synthetic
caaaaaaagcucauuaucac

SEQ ID NO: 794335 - RNA, 20 nt, Artificial Sequence
  Synthetic
uaaauuaaagauauuaucac

SEQ ID NO: 794336 - RNA, 20 nt, Artificial Sequence
  Synthetic
ugaacauuuucaguuaucac

SEQ ID NO: 794337 - RNA, 20 nt, Artificial Sequence
  Synthetic
aggcauuuggauguuaucac

SEQ ID NO: 794338 - RNA, 20 nt, Artificial Sequence
  Synthetic
aaccagguaagauuuaucac

SEQ ID NO: 794339 - RNA, 20 nt, Artificial Sequence
  Synthetic
aggaauuuggaacaacucac

SEQ ID NO: 794340 - RNA, 20 nt, Artificial Sequence
  Synthetic
acaagaaaauaguaacucac

SEQ ID NO: 794341 - RNA, 20 nt, Artificial Sequence
  Synthetic
uggcacacagcaacacucac

SEQ ID NO: 794342 - RNA, 20 nt, Artificial Sequence
  Synthetic
aauacugauaauccacucac

SEQ ID NO: 794343 - RNA, 20 nt, Artificial Sequence
  Synthetic
ugcagcauuaaagcacucac

SEQ ID NO: 794344 - RNA, 20 nt, Artificial Sequence
  Synthetic
cacugcauacucucacucac

SEQ ID NO: 794345 - RNA, 20 nt, Artificial Sequence
  Synthetic
caccgcauauucucacucac

SEQ ID NO: 794346 - RNA, 20 nt, Artificial Sequence
  Synthetic
caccacauguucucacucac

SEQ ID NO: 794347 - RNA, 20 nt, Artificial Sequence
  Synthetic
aaggacucaggaagacucac

SEQ ID NO: 794348 - RNA, 20 nt, Artificial Sequence
  Synthetic
acgagguuuaauugacucac

SEQ ID NO: 794349 - RNA, 20 nt, Artificial Sequence
  Synthetic
caucuuuguuuuauacucac

SEQ ID NO: 794350 - RNA, 20 nt, Artificial Sequence
  Synthetic
uuugccuacgcucuacucac

SEQ ID NO: 794351 - RNA, 20 nt, Artificial Sequence
  Synthetic
ccuucuaauucucuacucac

SEQ ID NO: 794352 - RNA, 20 nt, Artificial Sequence
  Synthetic
caccacauguucuuacucac

SEQ ID NO: 794353 - RNA, 20 nt, Artificial Sequence
  Synthetic
ucuggcuaaaccaaccucac

SEQ ID NO: 794354 - RNA, 20 nt, Artificial Sequence
  Synthetic
acucuuguagaugaccucac

SEQ ID NO: 794355 - RNA, 20 nt, Artificial Sequence
  Synthetic
uaucuacuauuauaccucac

SEQ ID NO: 794356 - RNA, 20 nt, Artificial Sequence
  Synthetic
aaaccaaacaaaacccucac

SEQ ID NO: 794357 - RNA, 20 nt, Artificial Sequence
  Synthetic
ucagcuuucucuccccucac

SEQ ID NO: 794358 - RNA, 20 nt, Artificial Sequence
  Synthetic
cacugcucucaacuccucac

SEQ ID NO: 794359 - RNA, 20 nt, Artificial Sequence
  Synthetic
aguggcuuucuaguccucac

SEQ ID NO: 794360 - RNA, 20 nt, Artificial Sequence
  Synthetic
ucagcuacccggaagcucac

SEQ ID NO: 794361 - RNA, 20 nt, Artificial Sequence
  Synthetic
agaacaacacaacagcucac

SEQ ID NO: 794362 - RNA, 20 nt, Artificial Sequence
  Synthetic
agcugacuaucacagcucac

SEQ ID NO: 794363 - RNA, 20 nt, Artificial Sequence
  Synthetic
cuuuccuuuccuccgcucac

SEQ ID NO: 794364 - RNA, 20 nt, Artificial Sequence
  Synthetic
uuuugauuuuacaggcucac

SEQ ID NO: 794365 - RNA, 20 nt, Artificial Sequence
  Synthetic
cugggacgcauguggcucac

SEQ ID NO: 794366 - RNA, 20 nt, Artificial Sequence
  Synthetic
ugugaacauuuuuugcucac

SEQ ID NO: 794367 - RNA, 20 nt, Artificial Sequence
  Synthetic
cuuuuccuucaaaaucucac

SEQ ID NO: 794368 - RNA, 20 nt, Artificial Sequence
  Synthetic
caguacccggcucaucucac

SEQ ID NO: 794369 - RNA, 20 nt, Artificial Sequence
  Synthetic
augauucaauuaccucucac

SEQ ID NO: 794370 - RNA, 20 nt, Artificial Sequence
  Synthetic
uggauauuacauucucucac

SEQ ID NO: 794371 - RNA, 20 nt, Artificial Sequence
  Synthetic
uuuucuuucucuucucucac

SEQ ID NO: 794372 - RNA, 20 nt, Artificial Sequence
  Synthetic
cuuucucuauuuucucucac

SEQ ID NO: 794373 - RNA, 20 nt, Artificial Sequence
  Synthetic
uccagguauucccuucucac

SEQ ID NO: 794374 - RNA, 20 nt, Artificial Sequence
  Synthetic
cucuaaacagagguucucac

SEQ ID NO: 794375 - RNA, 20 nt, Artificial Sequence
  Synthetic
aaaucuauaagaaaagucac

SEQ ID NO: 794376 - RNA, 20 nt, Artificial Sequence
  Synthetic
uuaaaaauacuaaaagucac

SEQ ID NO: 794377 - RNA, 20 nt, Artificial Sequence
  Synthetic
cauacagcacucaaagucac

SEQ ID NO: 794378 - RNA, 20 nt, Artificial Sequence
  Synthetic
uuugaacaugucaaagucac

SEQ ID NO: 794379 - RNA, 20 nt, Artificial Sequence
  Synthetic
ccccagaaaguuggagucac

SEQ ID NO: 794380 - RNA, 20 nt, Artificial Sequence
  Synthetic
auuaauuuuaaaauagucac

SEQ ID NO: 794381 - RNA, 20 nt, Artificial Sequence
  Synthetic
acuuagagccuuguagucac

SEQ ID NO: 794382 - RNA, 20 nt, Artificial Sequence
  Synthetic
aaaaguguaggaaaggucac

SEQ ID NO: 794383 - RNA, 20 nt, Artificial Sequence
  Synthetic
acuuucacuuuauaggucac

SEQ ID NO: 794384 - RNA, 20 nt, Artificial Sequence
  Synthetic
auauuauuucaaagggucac

SEQ ID NO: 794385 - RNA, 20 nt, Artificial Sequence
  Synthetic
ccaugaauaaauggggucac

SEQ ID NO: 794386 - RNA, 20 nt, Artificial Sequence
  Synthetic
cagcugcuguugugggucac

SEQ ID NO: 794387 - RNA, 20 nt, Artificial Sequence
  Synthetic
caaugagaacacauggucac

SEQ ID NO: 794388 - RNA, 20 nt, Artificial Sequence
  Synthetic
ucguguuaguggaaugucac

SEQ ID NO: 794389 - RNA, 20 nt, Artificial Sequence
  Synthetic
caacaauaaauuaaugucac

SEQ ID NO: 794390 - RNA, 20 nt, Artificial Sequence
  Synthetic
cuguacaggaagcaugucac

SEQ ID NO: 794391 - RNA, 20 nt, Artificial Sequence
  Synthetic
uguuuguuguuauaugucac

SEQ ID NO: 794392 - RNA, 20 nt, Artificial Sequence
  Synthetic
aagaauagugucuaugucac

SEQ ID NO: 794393 - RNA, 20 nt, Artificial Sequence
  Synthetic
auauugacuugaucugucac

SEQ ID NO: 794394 - RNA, 20 nt, Artificial Sequence
  Synthetic
uucuguaaauaaagugucac

SEQ ID NO: 794395 - RNA, 20 nt, Artificial Sequence
  Synthetic
cauaggcaaaccggugucac

SEQ ID NO: 794396 - RNA, 20 nt, Artificial Sequence
  Synthetic
cuccaguuagucugugucac

SEQ ID NO: 794397 - RNA, 20 nt, Artificial Sequence
  Synthetic
uuuuucacuugcauugucac

SEQ ID NO: 794398 - RNA, 20 nt, Artificial Sequence
  Synthetic
uacauguacaggcuugucac

SEQ ID NO: 794399 - RNA, 20 nt, Artificial Sequence
  Synthetic
caguuuauauuucuugucac

SEQ ID NO: 794400 - RNA, 20 nt, Artificial Sequence
  Synthetic
acaggguauccuguugucac

SEQ ID NO: 794401 - RNA, 20 nt, Artificial Sequence
  Synthetic
uacacaaauuaauuugucac

SEQ ID NO: 794402 - RNA, 20 nt, Artificial Sequence
  Synthetic
cuuucaaaaauaaaauucac

SEQ ID NO: 794403 - RNA, 20 nt, Artificial Sequence
  Synthetic
aaggcugaauggaaauucac

SEQ ID NO: 794404 - RNA, 20 nt, Artificial Sequence
  Synthetic
uggucaacugcccaauucac

SEQ ID NO: 794405 - RNA, 20 nt, Artificial Sequence
  Synthetic
uuuguuugaggucaauucac

SEQ ID NO: 794406 - RNA, 20 nt, Artificial Sequence
  Synthetic
aagauuaaguguuaauucac

SEQ ID NO: 794407 - RNA, 20 nt, Artificial Sequence
  Synthetic
cuuugucuccuugcauucac

SEQ ID NO: 794408 - RNA, 20 nt, Artificial Sequence
  Synthetic
cuauuguaaauaucauucac

SEQ ID NO: 794409 - RNA, 20 nt, Artificial Sequence
  Synthetic
ugaaaaauuuuaucauucac

SEQ ID NO: 794410 - RNA, 20 nt, Artificial Sequence
  Synthetic
aacuggauagugucauucac

SEQ ID NO: 794411 - RNA, 20 nt, Artificial Sequence
  Synthetic
augaucaguauuucauucac

SEQ ID NO: 794412 - RNA, 20 nt, Artificial Sequence
  Synthetic
auguaagguaacauauucac

SEQ ID NO: 794413 - RNA, 20 nt, Artificial Sequence
  Synthetic
agggagcacagcauauucac

SEQ ID NO: 794414 - RNA, 20 nt, Artificial Sequence
  Synthetic
ucaguuuuggaccuauucac

SEQ ID NO: 794415 - RNA, 20 nt, Artificial Sequence
  Synthetic
cucuggaucuuuguauucac

SEQ ID NO: 794416 - RNA, 20 nt, Artificial Sequence
  Synthetic
auacagauauuauuauucac

SEQ ID NO: 794417 - RNA, 20 nt, Artificial Sequence
  Synthetic
ucuaggucacauuuauucac

SEQ ID NO: 794418 - RNA, 20 nt, Artificial Sequence
  Synthetic
uuccuucuucauuuauucac

SEQ ID NO: 794419 - RNA, 20 nt, Artificial Sequence
  Synthetic
uaggguuacagaaacuucac

SEQ ID NO: 794420 - RNA, 20 nt, Artificial Sequence
  Synthetic
ugaugggcauagaacuucac

SEQ ID NO: 794421 - RNA, 20 nt, Artificial Sequence
  Synthetic
caaaugucagugaacuucac

SEQ ID NO: 794422 - RNA, 20 nt, Artificial Sequence
  Synthetic
aaaauccuucauaacuucac

SEQ ID NO: 794423 - RNA, 20 nt, Artificial Sequence
  Synthetic
cugagcugguuccacuucac

SEQ ID NO: 794424 - RNA, 20 nt, Artificial Sequence
  Synthetic
ucugauuuucagcacuucac

SEQ ID NO: 794425 - RNA, 20 nt, Artificial Sequence
  Synthetic
uuuugcuuuuuucacuucac

SEQ ID NO: 794426 - RNA, 20 nt, Artificial Sequence
  Synthetic
auacuggccaaugacuucac

SEQ ID NO: 794427 - RNA, 20 nt, Artificial Sequence
  Synthetic
cuuuaacaacaguacuucac

SEQ ID NO: 794428 - RNA, 20 nt, Artificial Sequence
  Synthetic
aauacgaccuauuacuucac

SEQ ID NO: 794429 - RNA, 20 nt, Artificial Sequence
  Synthetic
auccauuauauuuacuucac

SEQ ID NO: 794430 - RNA, 20 nt, Artificial Sequence
  Synthetic
uaccaucuguugcccuucac

SEQ ID NO: 794431 - RNA, 20 nt, Artificial Sequence
  Synthetic
cagcuuaaauucagcuucac

SEQ ID NO: 794432 - RNA, 20 nt, Artificial Sequence
  Synthetic
cucauucuccagagcuucac

SEQ ID NO: 794433 - RNA, 20 nt, Artificial Sequence
  Synthetic
uuuuggcaagacugcuucac

SEQ ID NO: 794434 - RNA, 20 nt, Artificial Sequence
  Synthetic
aggggcucuuccugcuucac

SEQ ID NO: 794435 - RNA, 20 nt, Artificial Sequence
  Synthetic
ccaaauaauagaaucuucac

SEQ ID NO: 794436 - RNA, 20 nt, Artificial Sequence
  Synthetic
aacagauuagacaucuucac

SEQ ID NO: 794437 - RNA, 20 nt, Artificial Sequence
  Synthetic
auuuuaaauaugaucuucac

SEQ ID NO: 794438 - RNA, 20 nt, Artificial Sequence
  Synthetic
cuugccaugucccucuucac

SEQ ID NO: 794439 - RNA, 20 nt, Artificial Sequence
  Synthetic
auuuuguucaaauucuucac

SEQ ID NO: 794440 - RNA, 20 nt, Artificial Sequence
  Synthetic
ucucauauagauuucuucac

SEQ ID NO: 794441 - RNA, 20 nt, Artificial Sequence
  Synthetic
uccuuaugcuguuucuucac

SEQ ID NO: 794442 - RNA, 20 nt, Artificial Sequence
  Synthetic
uauuucucaagaaaguucac

SEQ ID NO: 794443 - RNA, 20 nt, Artificial Sequence
  Synthetic
aagccuuagguuaaguucac

SEQ ID NO: 794444 - RNA, 20 nt, Artificial Sequence
  Synthetic
ccugggguuccaugguucac

SEQ ID NO: 794445 - RNA, 20 nt, Artificial Sequence
  Synthetic
uccuuuucuauuugguucac

SEQ ID NO: 794446 - RNA, 20 nt, Artificial Sequence
  Synthetic
aagucauggucacuguucac

SEQ ID NO: 794447 - RNA, 20 nt, Artificial Sequence
  Synthetic
ccaaauauuaaauuguucac

SEQ ID NO: 794448 - RNA, 20 nt, Artificial Sequence
  Synthetic
uucuuuucaucucauuucac

SEQ ID NO: 794449 - RNA, 20 nt, Artificial Sequence
  Synthetic
acuuaaaguagagauuucac

SEQ ID NO: 794450 - RNA, 20 nt, Artificial Sequence
  Synthetic
aggcauaauauauauuucac

SEQ ID NO: 794451 - RNA, 20 nt, Artificial Sequence
  Synthetic
cacagaucuggcuauuucac

SEQ ID NO: 794452 - RNA, 20 nt, Artificial Sequence
  Synthetic
aaaauuguggauuauuucac

SEQ ID NO: 794453 - RNA, 20 nt, Artificial Sequence
  Synthetic
uuacacaauuauuauuucac

SEQ ID NO: 794454 - RNA, 20 nt, Artificial Sequence
  Synthetic
uuuauguuagaggcuuucac

SEQ ID NO: 794455 - RNA, 20 nt, Artificial Sequence
  Synthetic
cccuuccuggcugcuuucac

SEQ ID NO: 794456 - RNA, 20 nt, Artificial Sequence
  Synthetic
accuaugcccacucuuucac

SEQ ID NO: 794457 - RNA, 20 nt, Artificial Sequence
  Synthetic
uuuaagcccuguucuuucac

SEQ ID NO: 794458 - RNA, 20 nt, Artificial Sequence
  Synthetic
aaaggaaaacaugguuucac

SEQ ID NO: 794459 - RNA, 20 nt, Artificial Sequence
  Synthetic
ccuauaauccuuuguuucac

SEQ ID NO: 794460 - RNA, 20 nt, Artificial Sequence
  Synthetic
uaaagguacagaauuuucac

SEQ ID NO: 794461 - RNA, 20 nt, Artificial Sequence
  Synthetic
uugauaaaagacauuuucac

SEQ ID NO: 794462 - RNA, 20 nt, Artificial Sequence
  Synthetic
ugggccauuugucuuuucac

SEQ ID NO: 794463 - RNA, 20 nt, Artificial Sequence
  Synthetic
ugaaugauaaaauuuuucac

SEQ ID NO: 794464 - RNA, 20 nt, Artificial Sequence
  Synthetic
ccugcguuuucauuuuucac

SEQ ID NO: 794465 - RNA, 20 nt, Artificial Sequence
  Synthetic
acccuccauggaaaaaagac

SEQ ID NO: 794466 - RNA, 20 nt, Artificial Sequence
  Synthetic
accugauuacacaaaaagac

SEQ ID NO: 794467 - RNA, 20 nt, Artificial Sequence
  Synthetic
aauuacuuugagaaaaagac

SEQ ID NO: 794468 - RNA, 20 nt, Artificial Sequence
  Synthetic
aaacgacauauccaaaagac

SEQ ID NO: 794469 - RNA, 20 nt, Artificial Sequence
  Synthetic
auggcuuauauccaaaagac

SEQ ID NO: 794470 - RNA, 20 nt, Artificial Sequence
  Synthetic
ucugagaggaagcaaaagac

SEQ ID NO: 794471 - RNA, 20 nt, Artificial Sequence
  Synthetic
ugccuccagaggcaaaagac

SEQ ID NO: 794472 - RNA, 20 nt, Artificial Sequence
  Synthetic
acauaccuaaaagaaaagac

SEQ ID NO: 794473 - RNA, 20 nt, Artificial Sequence
  Synthetic
agcaaggaaaucuaaaagac

SEQ ID NO: 794474 - RNA, 20 nt, Artificial Sequence
  Synthetic
uuaacauaaagguaaaagac

SEQ ID NO: 794475 - RNA, 20 nt, Artificial Sequence
  Synthetic
aucacagaauuguaaaagac

SEQ ID NO: 794476 - RNA, 20 nt, Artificial Sequence
  Synthetic
acuucauauucaacaaagac

SEQ ID NO: 794477 - RNA, 20 nt, Artificial Sequence
  Synthetic
ugggcucuaaauccaaagac

SEQ ID NO: 794478 - RNA, 20 nt, Artificial Sequence
  Synthetic
aacauggaacaugcaaagac

SEQ ID NO: 794479 - RNA, 20 nt, Artificial Sequence
  Synthetic
aaacucauaaaaucaaagac

SEQ ID NO: 794480 - RNA, 20 nt, Artificial Sequence
  Synthetic
cuuuuaauugaaagaaagac

SEQ ID NO: 794481 - RNA, 20 nt, Artificial Sequence
  Synthetic
cucuauguuguuagaaagac

SEQ ID NO: 794482 - RNA, 20 nt, Artificial Sequence
  Synthetic
accagaagaaaaggaaagac

SEQ ID NO: 794483 - RNA, 20 nt, Artificial Sequence
  Synthetic
ugguguaaguggggaaagac

SEQ ID NO: 794484 - RNA, 20 nt, Artificial Sequence
  Synthetic
aaguacaacagaauaaagac

SEQ ID NO: 794485 - RNA, 20 nt, Artificial Sequence
  Synthetic
uuuguaguuuuaguaaagac

SEQ ID NO: 794486 - RNA, 20 nt, Artificial Sequence
  Synthetic
uuacuauuuuuaguaaagac

SEQ ID NO: 794487 - RNA, 20 nt, Artificial Sequence
  Synthetic
aaugaacuuugcuuaaagac

SEQ ID NO: 794488 - RNA, 20 nt, Artificial Sequence
  Synthetic
uuacauaaucauuuaaagac

SEQ ID NO: 794489 - RNA, 20 nt, Artificial Sequence
  Synthetic
agcaggguguauuuaaagac

SEQ ID NO: 794490 - RNA, 20 nt, Artificial Sequence
  Synthetic
uacauauauauuuuaaagac

SEQ ID NO: 794491 - RNA, 20 nt, Artificial Sequence
  Synthetic
ucaucucgauuuuuaaagac

SEQ ID NO: 794492 - RNA, 20 nt, Artificial Sequence
  Synthetic
aacaaaagaaaaaacaagac

SEQ ID NO: 794493 - RNA, 20 nt, Artificial Sequence
  Synthetic
cuauuauuuuacaacaagac

SEQ ID NO: 794494 - RNA, 20 nt, Artificial Sequence
  Synthetic
uauugugaauagcacaagac

SEQ ID NO: 794495 - RNA, 20 nt, Artificial Sequence
  Synthetic
uuuaaaaacuggcacaagac

SEQ ID NO: 794496 - RNA, 20 nt, Artificial Sequence
  Synthetic
uuugaaaacuggcacaagac

SEQ ID NO: 794497 - RNA, 20 nt, Artificial Sequence
  Synthetic
cuugaaauuugcuacaagac

SEQ ID NO: 794498 - RNA, 20 nt, Artificial Sequence
  Synthetic
ucuuauauagggaccaagac

SEQ ID NO: 794499 - RNA, 20 nt, Artificial Sequence
  Synthetic
uaugaagaaauacccaagac

SEQ ID NO: 794500 - RNA, 20 nt, Artificial Sequence
  Synthetic
aaaaauuuaaaaagcaagac

SEQ ID NO: 794501 - RNA, 20 nt, Artificial Sequence
  Synthetic
cuuccccaaccuagcaagac

SEQ ID NO: 794502 - RNA, 20 nt, Artificial Sequence
  Synthetic
ccuugaaguauaggcaagac

SEQ ID NO: 794503 - RNA, 20 nt, Artificial Sequence
  Synthetic
augaucacaaggggcaagac

SEQ ID NO: 794504 - RNA, 20 nt, Artificial Sequence
  Synthetic
uaacaaaggauaaucaagac

SEQ ID NO: 794505 - RNA, 20 nt, Artificial Sequence
  Synthetic
aagugacaaccgaucaagac

SEQ ID NO: 794506 - RNA, 20 nt, Artificial Sequence
  Synthetic
ugggaacugcaauucaagac

SEQ ID NO: 794507 - RNA, 20 nt, Artificial Sequence
  Synthetic
uaggaggcucagaagaagac

SEQ ID NO: 794508 - RNA, 20 nt, Artificial Sequence
  Synthetic
acucugagauagaagaagac

SEQ ID NO: 794509 - RNA, 20 nt, Artificial Sequence
  Synthetic
uuaaacagaacuaagaagac

SEQ ID NO: 794510 - RNA, 20 nt, Artificial Sequence
  Synthetic
aauuggaggggucagaagac

SEQ ID NO: 794511 - RNA, 20 nt, Artificial Sequence
  Synthetic
ugaacauacaaugagaagac

SEQ ID NO: 794512 - RNA, 20 nt, Artificial Sequence
  Synthetic
ugagguuacagugagaagac

SEQ ID NO: 794513 - RNA, 20 nt, Artificial Sequence
  Synthetic
agauuauuuaguuagaagac

SEQ ID NO: 794514 - RNA, 20 nt, Artificial Sequence
  Synthetic
augaaauuauuuuagaagac

SEQ ID NO: 794515 - RNA, 20 nt, Artificial Sequence
  Synthetic
uauugacucauuccgaagac

SEQ ID NO: 794516 - RNA, 20 nt, Artificial Sequence
  Synthetic
agugagagaagcaggaagac

SEQ ID NO: 794517 - RNA, 20 nt, Artificial Sequence
  Synthetic
augaggaaaaggaggaagac

SEQ ID NO: 794518 - RNA, 20 nt, Artificial Sequence
  Synthetic
caagggagaaaugggaagac

SEQ ID NO: 794519 - RNA, 20 nt, Artificial Sequence
  Synthetic
auaaauggugcugggaagac

SEQ ID NO: 794520 - RNA, 20 nt, Artificial Sequence
  Synthetic
cagugagaggagcugaagac

SEQ ID NO: 794521 - RNA, 20 nt, Artificial Sequence
  Synthetic
ccuagaaggaaauugaagac

SEQ ID NO: 794522 - RNA, 20 nt, Artificial Sequence
  Synthetic
cauucauauaacuugaagac

SEQ ID NO: 794523 - RNA, 20 nt, Artificial Sequence
  Synthetic
uuuuuugcuuuuuugaagac

SEQ ID NO: 794524 - RNA, 20 nt, Artificial Sequence
  Synthetic
ccuuguuuauaaaauaagac

SEQ ID NO: 794525 - RNA, 20 nt, Artificial Sequence
  Synthetic
ucacagaggagaaauaagac

SEQ ID NO: 794526 - RNA, 20 nt, Artificial Sequence
  Synthetic
agaccaagaacagauaagac

SEQ ID NO: 794527 - RNA, 20 nt, Artificial Sequence
  Synthetic
aaguagaaacauuauaagac

SEQ ID NO: 794528 - RNA, 20 nt, Artificial Sequence
  Synthetic
ccccaauuuauaacuaagac

SEQ ID NO: 794529 - RNA, 20 nt, Artificial Sequence
  Synthetic
cccaauuagacuuguaagac

SEQ ID NO: 794530 - RNA, 20 nt, Artificial Sequence
  Synthetic
uuacaauccucuuguaagac

SEQ ID NO: 794531 - RNA, 20 nt, Artificial Sequence
  Synthetic
cugggugcauuuuguaagac

SEQ ID NO: 794532 - RNA, 20 nt, Artificial Sequence
  Synthetic
cuacaguaagcaaaacagac

SEQ ID NO: 794533 - RNA, 20 nt, Artificial Sequence
  Synthetic
agagaguaucacaaacagac

SEQ ID NO: 794534 - RNA, 20 nt, Artificial Sequence
  Synthetic
uuuguuagauacaaacagac

SEQ ID NO: 794535 - RNA, 20 nt, Artificial Sequence
  Synthetic
aaagcuaauuggaaacagac

SEQ ID NO: 794536 - RNA, 20 nt, Artificial Sequence
  Synthetic
ugauugacugauaaacagac

SEQ ID NO: 794537 - RNA, 20 nt, Artificial Sequence
  Synthetic
aaagggcgagagcaacagac

SEQ ID NO: 794538 - RNA, 20 nt, Artificial Sequence
  Synthetic
cuauaaagcuacacacagac

SEQ ID NO: 794539 - RNA, 20 nt, Artificial Sequence
  Synthetic
cccaauuaaaagacacagac

SEQ ID NO: 794540 - RNA, 20 nt, Artificial Sequence
  Synthetic
ugcaauuaaaagacacagac

SEQ ID NO: 794541 - RNA, 20 nt, Artificial Sequence
  Synthetic
ucaaaacaaaggacacagac

SEQ ID NO: 794542 - RNA, 20 nt, Artificial Sequence
  Synthetic
cguaacaaaauaccacagac

SEQ ID NO: 794543 - RNA, 20 nt, Artificial Sequence
  Synthetic
ccauuccggggggcacagac

SEQ ID NO: 794544 - RNA, 20 nt, Artificial Sequence
  Synthetic
accucagcggaaagacagac

SEQ ID NO: 794545 - RNA, 20 nt, Artificial Sequence
  Synthetic
caagaguaucaaggacagac

SEQ ID NO: 794546 - RNA, 20 nt, Artificial Sequence
  Synthetic
cagguggaugaaggacagac

SEQ ID NO: 794547 - RNA, 20 nt, Artificial Sequence
  Synthetic
agcguaggagcuggacagac

SEQ ID NO: 794548 - RNA, 20 nt, Artificial Sequence
  Synthetic
cagcagcaucccugacagac

SEQ ID NO: 794549 - RNA, 20 nt, Artificial Sequence
  Synthetic
uuuguauuuuuaguacagac

SEQ ID NO: 794550 - RNA, 20 nt, Artificial Sequence
  Synthetic
uuuuuauuuuuaguacagac

SEQ ID NO: 794551 - RNA, 20 nt, Artificial Sequence
  Synthetic
uuuguguuuuuaguacagac

SEQ ID NO: 794552 - RNA, 20 nt, Artificial Sequence
  Synthetic
uuuauuuuuuuaguacagac

SEQ ID NO: 794553 - RNA, 20 nt, Artificial Sequence
  Synthetic
aaaaaaaagcaaaaccagac

SEQ ID NO: 794554 - RNA, 20 nt, Artificial Sequence
  Synthetic
ucagcaguucgagaccagac

SEQ ID NO: 794555 - RNA, 20 nt, Artificial Sequence
  Synthetic
auaagucuguauacccagac

SEQ ID NO: 794556 - RNA, 20 nt, Artificial Sequence
  Synthetic
aaaauagccuuggcccagac

SEQ ID NO: 794557 - RNA, 20 nt, Artificial Sequence
  Synthetic
ucuugcuaugguucccagac

SEQ ID NO: 794558 - RNA, 20 nt, Artificial Sequence
  Synthetic
ucucacuuuguuucccagac

SEQ ID NO: 794559 - RNA, 20 nt, Artificial Sequence
  Synthetic
agucgaaggugcagccagac

SEQ ID NO: 794560 - RNA, 20 nt, Artificial Sequence
  Synthetic
uuucaccaucuuggccagac

SEQ ID NO: 794561 - RNA, 20 nt, Artificial Sequence
  Synthetic
cgugccacugcacuccagac

SEQ ID NO: 794562 - RNA, 20 nt, Artificial Sequence
  Synthetic
ucuguugcaauacuccagac

SEQ ID NO: 794563 - RNA, 20 nt, Artificial Sequence
  Synthetic
augagaauaauauuccagac

SEQ ID NO: 794564 - RNA, 20 nt, Artificial Sequence
  Synthetic
agaaauuucucucagcagac

SEQ ID NO: 794565 - RNA, 20 nt, Artificial Sequence
  Synthetic
ccccaugggaaagagcagac

SEQ ID NO: 794566 - RNA, 20 nt, Artificial Sequence
  Synthetic
aacauacgaauuuagcagac

SEQ ID NO: 794567 - RNA, 20 nt, Artificial Sequence
  Synthetic
aagcaggcagacaggcagac

SEQ ID NO: 794568 - RNA, 20 nt, Artificial Sequence
  Synthetic
aaccaagcaagcaggcagac

SEQ ID NO: 794569 - RNA, 20 nt, Artificial Sequence
  Synthetic
acuucuggaccauggcagac

SEQ ID NO: 794570 - RNA, 20 nt, Artificial Sequence
  Synthetic
cuuaccacuuuagugcagac

SEQ ID NO: 794571 - RNA, 20 nt, Artificial Sequence
  Synthetic
aaggagaauguucaucagac

SEQ ID NO: 794572 - RNA, 20 nt, Artificial Sequence
  Synthetic
ucacaagaaaaguaucagac

SEQ ID NO: 794573 - RNA, 20 nt, Artificial Sequence
  Synthetic
ucaugccuuuggacucagac

SEQ ID NO: 794574 - RNA, 20 nt, Artificial Sequence
  Synthetic
ccaucucacacccgucagac

SEQ ID NO: 794575 - RNA, 20 nt, Artificial Sequence
  Synthetic
ucauuuguucaaggucagac

SEQ ID NO: 794576 - RNA, 20 nt, Artificial Sequence
  Synthetic
uuagugaaaucaugucagac

SEQ ID NO: 794577 - RNA, 20 nt, Artificial Sequence
  Synthetic
accacagaaugaugucagac

SEQ ID NO: 794578 - RNA, 20 nt, Artificial Sequence
  Synthetic
uauaggcagagauuucagac

SEQ ID NO: 794579 - RNA, 20 nt, Artificial Sequence
  Synthetic
uuuuauuuuauuuuucagac

SEQ ID NO: 794580 - RNA, 20 nt, Artificial Sequence
  Synthetic
uugugauauagaaaagagac

SEQ ID NO: 794581 - RNA, 20 nt, Artificial Sequence
  Synthetic
uccaggaacagcaaagagac

SEQ ID NO: 794582 - RNA, 20 nt, Artificial Sequence
  Synthetic
cuaagcuuuagcaaagagac

SEQ ID NO: 794583 - RNA, 20 nt, Artificial Sequence
  Synthetic
cuacgcuuuagcaaagagac

SEQ ID NO: 794584 - RNA, 20 nt, Artificial Sequence
  Synthetic
ucauagaagauggaagagac

SEQ ID NO: 794585 - RNA, 20 nt, Artificial Sequence
  Synthetic
aacaauuauuuugaagagac

SEQ ID NO: 794586 - RNA, 20 nt, Artificial Sequence
  Synthetic
uuuguauuuuuaacagagac

SEQ ID NO: 794587 - RNA, 20 nt, Artificial Sequence
  Synthetic
aauugaaugaccacagagac

SEQ ID NO: 794588 - RNA, 20 nt, Artificial Sequence
  Synthetic
uaaaggagagugacagagac

SEQ ID NO: 794589 - RNA, 20 nt, Artificial Sequence
  Synthetic
accuuuucggcaccagagac

SEQ ID NO: 794590 - RNA, 20 nt, Artificial Sequence
  Synthetic
uauaaaggaaugccagagac

SEQ ID NO: 794591 - RNA, 20 nt, Artificial Sequence
  Synthetic
uuuguauuuuuagcagagac

SEQ ID NO: 794592 - RNA, 20 nt, Artificial Sequence
  Synthetic
caaugaaaccgggcagagac

SEQ ID NO: 794593 - RNA, 20 nt, Artificial Sequence
  Synthetic
uuuaagauauguucagagac

SEQ ID NO: 794594 - RNA, 20 nt, Artificial Sequence
  Synthetic
aaauaggaaauaagagagac

SEQ ID NO: 794595 - RNA, 20 nt, Artificial Sequence
  Synthetic
caaggauaugagggagagac

SEQ ID NO: 794596 - RNA, 20 nt, Artificial Sequence
  Synthetic
uggagaaagaauggagagac

SEQ ID NO: 794597 - RNA, 20 nt, Artificial Sequence
  Synthetic
uuuuucccccuaauagagac

SEQ ID NO: 794598 - RNA, 20 nt, Artificial Sequence
  Synthetic
uuuguauuuuuaauagagac

SEQ ID NO: 794599 - RNA, 20 nt, Artificial Sequence
  Synthetic
uuucuauuuuuacuagagac

SEQ ID NO: 794600 - RNA, 20 nt, Artificial Sequence
  Synthetic
uuuguauuuuaaguagagac

SEQ ID NO: 794601 - RNA, 20 nt, Artificial Sequence
  Synthetic
uuuguguuuucaguagagac

SEQ ID NO: 794602 - RNA, 20 nt, Artificial Sequence
  Synthetic
uuuguaucuuuaguagagac

SEQ ID NO: 794603 - RNA, 20 nt, Artificial Sequence
  Synthetic
uuuguaauuuuaguagagac

SEQ ID NO: 794604 - RNA, 20 nt, Artificial Sequence
  Synthetic
uuuguacuuuuaguagagac

SEQ ID NO: 794605 - RNA, 20 nt, Artificial Sequence
  Synthetic
uuugcauuuuuaguagagac

SEQ ID NO: 794606 - RNA, 20 nt, Artificial Sequence
  Synthetic
uucauauuuuuaguagagac

SEQ ID NO: 794607 - RNA, 20 nt, Artificial Sequence
  Synthetic
uuuauauuuuuaguagagac

SEQ ID NO: 794608 - RNA, 20 nt, Artificial Sequence
  Synthetic
uuuguauuuuuaguagagac

SEQ ID NO: 794609 - RNA, 20 nt, Artificial Sequence
  Synthetic
uuuuuauuuuuaguagagac

SEQ ID NO: 794610 - RNA, 20 nt, Artificial Sequence
  Synthetic
uuucuguuuuuaguagagac

SEQ ID NO: 794611 - RNA, 20 nt, Artificial Sequence
  Synthetic
cucguguuuuuaguagagac

SEQ ID NO: 794612 - RNA, 20 nt, Artificial Sequence
  Synthetic
uuuguguuuuuaguagagac

SEQ ID NO: 794613 - RNA, 20 nt, Artificial Sequence
  Synthetic
uuguauuuuuuaguagagac

SEQ ID NO: 794614 - RNA, 20 nt, Artificial Sequence
  Synthetic
uuguguuuuuuaguagagac

SEQ ID NO: 794615 - RNA, 20 nt, Artificial Sequence
  Synthetic
uuuguauuuuugguagagac

SEQ ID NO: 794616 - RNA, 20 nt, Artificial Sequence
  Synthetic
auacauuuuuauguagagac

SEQ ID NO: 794617 - RNA, 20 nt, Artificial Sequence
  Synthetic
uaugaagaaauacccgagac

SEQ ID NO: 794618 - RNA, 20 nt, Artificial Sequence
  Synthetic
acccacuauguccccgagac

SEQ ID NO: 794619 - RNA, 20 nt, Artificial Sequence
  Synthetic
uauaaagaacugcccgagac

SEQ ID NO: 794620 - RNA, 20 nt, Artificial Sequence
  Synthetic
uaugaagaaauagccgagac

SEQ ID NO: 794621 - RNA, 20 nt, Artificial Sequence
  Synthetic
aaccuucacacuuccgagac

SEQ ID NO: 794622 - RNA, 20 nt, Artificial Sequence
  Synthetic
augccuuuuguuuucgagac

SEQ ID NO: 794623 - RNA, 20 nt, Artificial Sequence
  Synthetic
auggauggauggaaggagac

SEQ ID NO: 794624 - RNA, 20 nt, Artificial Sequence
  Synthetic
aaacuaauggcaagggagac

SEQ ID NO: 794625 - RNA, 20 nt, Artificial Sequence
  Synthetic
uauuuacuucacagggagac

SEQ ID NO: 794626 - RNA, 20 nt, Artificial Sequence
  Synthetic
uuuuacuggagcagggagac

SEQ ID NO: 794627 - RNA, 20 nt, Artificial Sequence
  Synthetic
acuaugggucagagggagac

SEQ ID NO: 794628 - RNA, 20 nt, Artificial Sequence
  Synthetic
cugugaagagguagggagac

SEQ ID NO: 794629 - RNA, 20 nt, Artificial Sequence
  Synthetic
cuuuaguaaaaaugggagac

SEQ ID NO: 794630 - RNA, 20 nt, Artificial Sequence
  Synthetic
auucucuuugacugggagac

SEQ ID NO: 794631 - RNA, 20 nt, Artificial Sequence
  Synthetic
cucaaauguccuauggagac

SEQ ID NO: 794632 - RNA, 20 nt, Artificial Sequence
  Synthetic
uggauucuggggcuggagac

SEQ ID NO: 794633 - RNA, 20 nt, Artificial Sequence
  Synthetic
agcagcuaacugcuggagac

SEQ ID NO: 794634 - RNA, 20 nt, Artificial Sequence
  Synthetic
cuuuuuguuuuucuggagac

SEQ ID NO: 794635 - RNA, 20 nt, Artificial Sequence
  Synthetic
aauaagcuuucaguggagac

SEQ ID NO: 794636 - RNA, 20 nt, Artificial Sequence
  Synthetic
uuuuguacuuuaguggagac

SEQ ID NO: 794637 - RNA, 20 nt, Artificial Sequence
  Synthetic
uuuguaucuuuaguggagac

SEQ ID NO: 794638 - RNA, 20 nt, Artificial Sequence
  Synthetic
uuuguauuuuuaguggagac

SEQ ID NO: 794639 - RNA, 20 nt, Artificial Sequence
  Synthetic
uaaaauuuuuuuguggagac

SEQ ID NO: 794640 - RNA, 20 nt, Artificial Sequence
  Synthetic
uuccccuuuuuuuuggagac

SEQ ID NO: 794641 - RNA, 20 nt, Artificial Sequence
  Synthetic
uaaagaaagaggcaugagac

SEQ ID NO: 794642 - RNA, 20 nt, Artificial Sequence
  Synthetic
uauaaagaaauaccugagac

SEQ ID NO: 794643 - RNA, 20 nt, Artificial Sequence
  Synthetic
aauaaagacauaccugagac

SEQ ID NO: 794644 - RNA, 20 nt, Artificial Sequence
  Synthetic
uauaaagaacuaccugagac

SEQ ID NO: 794645 - RNA, 20 nt, Artificial Sequence
  Synthetic
auaaagaacuucccugagac

SEQ ID NO: 794646 - RNA, 20 nt, Artificial Sequence
  Synthetic
uauaacaaaaugccugagac

SEQ ID NO: 794647 - RNA, 20 nt, Artificial Sequence
  Synthetic
aauaaagaacugccugagac

SEQ ID NO: 794648 - RNA, 20 nt, Artificial Sequence
  Synthetic
uauaaagaacugccugagac

SEQ ID NO: 794649 - RNA, 20 nt, Artificial Sequence
  Synthetic
aacaaagacauaucugagac

SEQ ID NO: 794650 - RNA, 20 nt, Artificial Sequence
  Synthetic
cuucggaauguuucugagac

SEQ ID NO: 794651 - RNA, 20 nt, Artificial Sequence
  Synthetic
uggugcuggggaagugagac

SEQ ID NO: 794652 - RNA, 20 nt, Artificial Sequence
  Synthetic
cagaggccuggacuugagac

SEQ ID NO: 794653 - RNA, 20 nt, Artificial Sequence
  Synthetic
auguuaaauuuucuugagac

SEQ ID NO: 794654 - RNA, 20 nt, Artificial Sequence
  Synthetic
cgagaucaggaguuugagac

SEQ ID NO: 794655 - RNA, 20 nt, Artificial Sequence
  Synthetic
uucaugaauuauuuugagac

SEQ ID NO: 794656 - RNA, 20 nt, Artificial Sequence
  Synthetic
cuauuuauuuauuuugagac

SEQ ID NO: 794657 - RNA, 20 nt, Artificial Sequence
  Synthetic
uuauuuauuuauuuugagac

SEQ ID NO: 794658 - RNA, 20 nt, Artificial Sequence
  Synthetic
cuuauuuuuucuuuugagac

SEQ ID NO: 794659 - RNA, 20 nt, Artificial Sequence
  Synthetic
uuuguuuuuauuuuugagac

SEQ ID NO: 794660 - RNA, 20 nt, Artificial Sequence
  Synthetic
uucuguagaguuuuugagac

SEQ ID NO: 794661 - RNA, 20 nt, Artificial Sequence
  Synthetic
uuauauauauuuuuugagac

SEQ ID NO: 794662 - RNA, 20 nt, Artificial Sequence
  Synthetic
uuuguuuguuuuuuugagac

SEQ ID NO: 794663 - RNA, 20 nt, Artificial Sequence
  Synthetic
uuuuuuuuuuuuuuugagac

SEQ ID NO: 794664 - RNA, 20 nt, Artificial Sequence
  Synthetic
aaaaaagugugaaaauagac

SEQ ID NO: 794665 - RNA, 20 nt, Artificial Sequence
  Synthetic
aauguccaucaauaauagac

SEQ ID NO: 794666 - RNA, 20 nt, Artificial Sequence
  Synthetic
uauaacaaaauaccauagac

SEQ ID NO: 794667 - RNA, 20 nt, Artificial Sequence
  Synthetic
uauaaaauaaugccauagac

SEQ ID NO: 794668 - RNA, 20 nt, Artificial Sequence
  Synthetic
ugguagguagauagauagac

SEQ ID NO: 794669 - RNA, 20 nt, Artificial Sequence
  Synthetic
aauguccaacaaugauagac

SEQ ID NO: 794670 - RNA, 20 nt, Artificial Sequence
  Synthetic
aauguccgacaaugauagac

SEQ ID NO: 794671 - RNA, 20 nt, Artificial Sequence
  Synthetic
aaugcccaucaaugauagac

SEQ ID NO: 794672 - RNA, 20 nt, Artificial Sequence
  Synthetic
aauguccaucaaugauagac

SEQ ID NO: 794673 - RNA, 20 nt, Artificial Sequence
  Synthetic
aaugcucaucaaugauagac

SEQ ID NO: 794674 - RNA, 20 nt, Artificial Sequence
  Synthetic
aauguccaacagugauagac

SEQ ID NO: 794675 - RNA, 20 nt, Artificial Sequence
  Synthetic
aaugcccaccagugauagac

SEQ ID NO: 794676 - RNA, 20 nt, Artificial Sequence
  Synthetic
aaugcccaucagugauagac

SEQ ID NO: 794677 - RNA, 20 nt, Artificial Sequence
  Synthetic
aauguccaucagugauagac

SEQ ID NO: 794678 - RNA, 20 nt, Artificial Sequence
  Synthetic
uauuuuaaaugaauauagac

SEQ ID NO: 794679 - RNA, 20 nt, Artificial Sequence
  Synthetic
uauauggcauguuuauagac

SEQ ID NO: 794680 - RNA, 20 nt, Artificial Sequence
  Synthetic
cuuauuaggaagcacuagac

SEQ ID NO: 794681 - RNA, 20 nt, Artificial Sequence
  Synthetic
cuccauuuacagcacuagac

SEQ ID NO: 794682 - RNA, 20 nt, Artificial Sequence
  Synthetic
uaucucucccugcacuagac

SEQ ID NO: 794683 - RNA, 20 nt, Artificial Sequence
  Synthetic
cauuugcauguucacuagac

SEQ ID NO: 794684 - RNA, 20 nt, Artificial Sequence
  Synthetic
ucucauucugucaccuagac

SEQ ID NO: 794685 - RNA, 20 nt, Artificial Sequence
  Synthetic
aaaaggcaggcugccuagac

SEQ ID NO: 794686 - RNA, 20 nt, Artificial Sequence
  Synthetic
augcuuuaaaagagcuagac

SEQ ID NO: 794687 - RNA, 20 nt, Artificial Sequence
  Synthetic
uucauuuuauuuggcuagac

SEQ ID NO: 794688 - RNA, 20 nt, Artificial Sequence
  Synthetic
aacauuuuuuuuuucuagac

SEQ ID NO: 794689 - RNA, 20 nt, Artificial Sequence
  Synthetic
agcugugcauccaaguagac

SEQ ID NO: 794690 - RNA, 20 nt, Artificial Sequence
  Synthetic
cccagacucagcugguagac

SEQ ID NO: 794691 - RNA, 20 nt, Artificial Sequence
  Synthetic
uuuguauuuuuaguguagac

SEQ ID NO: 794692 - RNA, 20 nt, Artificial Sequence
  Synthetic
aaacacaauuucaauuagac

SEQ ID NO: 794693 - RNA, 20 nt, Artificial Sequence
  Synthetic
aaacccacauuguauuagac

SEQ ID NO: 794694 - RNA, 20 nt, Artificial Sequence
  Synthetic
uauagcuaaauaccuuagac

SEQ ID NO: 794695 - RNA, 20 nt, Artificial Sequence
  Synthetic
aaaguagaacucccuuagac

SEQ ID NO: 794696 - RNA, 20 nt, Artificial Sequence
  Synthetic
uaacuagaaauaucuuagac

SEQ ID NO: 794697 - RNA, 20 nt, Artificial Sequence
  Synthetic
aagagaagcaggaguuagac

SEQ ID NO: 794698 - RNA, 20 nt, Artificial Sequence
  Synthetic
ugauuuucaaaagguuagac

SEQ ID NO: 794699 - RNA, 20 nt, Artificial Sequence
  Synthetic
uucacaaagguaauuuagac

SEQ ID NO: 794700 - RNA, 20 nt, Artificial Sequence
  Synthetic
uggccacucuaucuuuagac

SEQ ID NO: 794701 - RNA, 20 nt, Artificial Sequence
  Synthetic
ccagccccccaccccacgac

SEQ ID NO: 794702 - RNA, 20 nt, Artificial Sequence
  Synthetic
cccuccccccaccccacgac

SEQ ID NO: 794703 - RNA, 20 nt, Artificial Sequence
  Synthetic
ccguccccucaccccacgac

SEQ ID NO: 794704 - RNA, 20 nt, Artificial Sequence
  Synthetic
aagcagcuaauagugacgac

SEQ ID NO: 794705 - RNA, 20 nt, Artificial Sequence
  Synthetic
cccucgccccaccccccgac

SEQ ID NO: 794706 - RNA, 20 nt, Artificial Sequence
  Synthetic
cuugccccccaccucgcgac

SEQ ID NO: 794707 - RNA, 20 nt, Artificial Sequence
  Synthetic
uuaaauuacaaguuugcgac

SEQ ID NO: 794708 - RNA, 20 nt, Artificial Sequence
  Synthetic
auaaaguggauuaaaucgac

SEQ ID NO: 794709 - RNA, 20 nt, Artificial Sequence
  Synthetic
cuaaccucccaccccucgac

SEQ ID NO: 794710 - RNA, 20 nt, Artificial Sequence
  Synthetic
agaaauuuaaggaaaaggac

SEQ ID NO: 794711 - RNA, 20 nt, Artificial Sequence
  Synthetic
acauauaugcagcaaaggac

SEQ ID NO: 794712 - RNA, 20 nt, Artificial Sequence
  Synthetic
uaaaaugugucucaaaggac

SEQ ID NO: 794713 - RNA, 20 nt, Artificial Sequence
  Synthetic
auaaugaaaguugaaaggac

SEQ ID NO: 794714 - RNA, 20 nt, Artificial Sequence
  Synthetic
cuauguuguggauaaaggac

SEQ ID NO: 794715 - RNA, 20 nt, Artificial Sequence
  Synthetic
aacauuaauauuuaaaggac

SEQ ID NO: 794716 - RNA, 20 nt, Artificial Sequence
  Synthetic
acagugaaaccaugaaggac

SEQ ID NO: 794717 - RNA, 20 nt, Artificial Sequence
  Synthetic
uggcauugaagaugaaggac

SEQ ID NO: 794718 - RNA, 20 nt, Artificial Sequence
  Synthetic
ugugguacugucauaaggac

SEQ ID NO: 794719 - RNA, 20 nt, Artificial Sequence
  Synthetic
uucaaccucuggauaaggac

SEQ ID NO: 794720 - RNA, 20 nt, Artificial Sequence
  Synthetic
cuaaaauuaaaacuaaggac

SEQ ID NO: 794721 - RNA, 20 nt, Artificial Sequence
  Synthetic
uuuuuauagaaacacaggac

SEQ ID NO: 794722 - RNA, 20 nt, Artificial Sequence
  Synthetic
ucacaacaaucccacaggac

SEQ ID NO: 794723 - RNA, 20 nt, Artificial Sequence
  Synthetic
aagaaaauuugguucaggac

SEQ ID NO: 794724 - RNA, 20 nt, Artificial Sequence
  Synthetic
uggggacaaauguucaggac

SEQ ID NO: 794725 - RNA, 20 nt, Artificial Sequence
  Synthetic
ugagguugaauagagaggac

SEQ ID NO: 794726 - RNA, 20 nt, Artificial Sequence
  Synthetic
uucuaaaugaaaaugaggac

SEQ ID NO: 794727 - RNA, 20 nt, Artificial Sequence
  Synthetic
auugaaagcuuccugaggac

SEQ ID NO: 794728 - RNA, 20 nt, Artificial Sequence
  Synthetic
aaggaagcaucucugaggac

SEQ ID NO: 794729 - RNA, 20 nt, Artificial Sequence
  Synthetic
cguuagccccaagugaggac

SEQ ID NO: 794730 - RNA, 20 nt, Artificial Sequence
  Synthetic
agagaggcaaaguugaggac

SEQ ID NO: 794731 - RNA, 20 nt, Artificial Sequence
  Synthetic
uauuuuuauuuuuugaggac

SEQ ID NO: 794732 - RNA, 20 nt, Artificial Sequence
  Synthetic
uuagauaccugcaguaggac

SEQ ID NO: 794733 - RNA, 20 nt, Artificial Sequence
  Synthetic
aaguguguguaagguaggac

SEQ ID NO: 794734 - RNA, 20 nt, Artificial Sequence
  Synthetic
uaaacauaaguugguaggac

SEQ ID NO: 794735 - RNA, 20 nt, Artificial Sequence
  Synthetic
ccaguucaggacuguaggac

SEQ ID NO: 794736 - RNA, 20 nt, Artificial Sequence
  Synthetic
aguaaucugucauuuaggac

SEQ ID NO: 794737 - RNA, 20 nt, Artificial Sequence
  Synthetic
uagguggaucacuuuaggac

SEQ ID NO: 794738 - RNA, 20 nt, Artificial Sequence
  Synthetic
agucugagcaaguuuaggac

SEQ ID NO: 794739 - RNA, 20 nt, Artificial Sequence
  Synthetic
uaauuuauauuguuuaggac

SEQ ID NO: 794740 - RNA, 20 nt, Artificial Sequence
  Synthetic
uuucaccauguuagccggac

SEQ ID NO: 794741 - RNA, 20 nt, Artificial Sequence
  Synthetic
auaacguacucccaucggac

SEQ ID NO: 794742 - RNA, 20 nt, Artificial Sequence
  Synthetic
auuccacagaucucucggac

SEQ ID NO: 794743 - RNA, 20 nt, Artificial Sequence
  Synthetic
auaggaauggauaaagggac

SEQ ID NO: 794744 - RNA, 20 nt, Artificial Sequence
  Synthetic
cauuuuuugugagaagggac

SEQ ID NO: 794745 - RNA, 20 nt, Artificial Sequence
  Synthetic
cccacacucuuuucagggac

SEQ ID NO: 794746 - RNA, 20 nt, Artificial Sequence
  Synthetic
cuugagagaaagagagggac

SEQ ID NO: 794747 - RNA, 20 nt, Artificial Sequence
  Synthetic
aguuaaugauacugagggac

SEQ ID NO: 794748 - RNA, 20 nt, Artificial Sequence
  Synthetic
ugaagcaggcuucuagggac

SEQ ID NO: 794749 - RNA, 20 nt, Artificial Sequence
  Synthetic
uuuguauuuuuaguagggac

SEQ ID NO: 794750 - RNA, 20 nt, Artificial Sequence
  Synthetic
aaaguccucgugguagggac

SEQ ID NO: 794751 - RNA, 20 nt, Artificial Sequence
  Synthetic
ucaaugggcaaaaacgggac

SEQ ID NO: 794752 - RNA, 20 nt, Artificial Sequence
  Synthetic
aggaaacgaagaaaggggac

SEQ ID NO: 794753 - RNA, 20 nt, Artificial Sequence
  Synthetic
augccuaacucugaggggac

SEQ ID NO: 794754 - RNA, 20 nt, Artificial Sequence
  Synthetic
cugucguggggugaggggac

SEQ ID NO: 794755 - RNA, 20 nt, Artificial Sequence
  Synthetic
auccuauaaaauuaggggac

SEQ ID NO: 794756 - RNA, 20 nt, Artificial Sequence
  Synthetic
aucugaagggcaagggggac

SEQ ID NO: 794757 - RNA, 20 nt, Artificial Sequence
  Synthetic
cuccaacuuucuggggggac

SEQ ID NO: 794758 - RNA, 20 nt, Artificial Sequence
  Synthetic
aaaaaaaaaaugauggggac

SEQ ID NO: 794759 - RNA, 20 nt, Artificial Sequence
  Synthetic
auguuguaaccacuggggac

SEQ ID NO: 794760 - RNA, 20 nt, Artificial Sequence
  Synthetic
accaagcugggaguggggac

SEQ ID NO: 794761 - RNA, 20 nt, Artificial Sequence
  Synthetic
aaauuguuugcaaaugggac

SEQ ID NO: 794762 - RNA, 20 nt, Artificial Sequence
  Synthetic
auaguuuauuacuaugggac

SEQ ID NO: 794763 - RNA, 20 nt, Artificial Sequence
  Synthetic
ccggcucaucucacugggac

SEQ ID NO: 794764 - RNA, 20 nt, Artificial Sequence
  Synthetic
auaaaugagcaaagugggac

SEQ ID NO: 794765 - RNA, 20 nt, Artificial Sequence
  Synthetic
uguuuuuuaaaguuugggac

SEQ ID NO: 794766 - RNA, 20 nt, Artificial Sequence
  Synthetic
cuaaguccagagaaauggac

SEQ ID NO: 794767 - RNA, 20 nt, Artificial Sequence
  Synthetic
uuauuaggaaggaaauggac

SEQ ID NO: 794768 - RNA, 20 nt, Artificial Sequence
  Synthetic
ugaucuccauuacaauggac

SEQ ID NO: 794769 - RNA, 20 nt, Artificial Sequence
  Synthetic
aaugacacaaucuaauggac

SEQ ID NO: 794770 - RNA, 20 nt, Artificial Sequence
  Synthetic
uaagaugccagaagauggac

SEQ ID NO: 794771 - RNA, 20 nt, Artificial Sequence
  Synthetic
auaauuauucugagauggac

SEQ ID NO: 794772 - RNA, 20 nt, Artificial Sequence
  Synthetic
aaugcccaucagugauggac

SEQ ID NO: 794773 - RNA, 20 nt, Artificial Sequence
  Synthetic
auggaaauuugaauauggac

SEQ ID NO: 794774 - RNA, 20 nt, Artificial Sequence
  Synthetic
cauaaaaucaaagacuggac

SEQ ID NO: 794775 - RNA, 20 nt, Artificial Sequence
  Synthetic
auuacaguagagagcuggac

SEQ ID NO: 794776 - RNA, 20 nt, Artificial Sequence
  Synthetic
cauuauauaaugugcuggac

SEQ ID NO: 794777 - RNA, 20 nt, Artificial Sequence
  Synthetic
agccaaaugggugucuggac

SEQ ID NO: 794778 - RNA, 20 nt, Artificial Sequence
  Synthetic
uuucucuaagaauucuggac

SEQ ID NO: 794779 - RNA, 20 nt, Artificial Sequence
  Synthetic
agaagaggauggaaguggac

SEQ ID NO: 794780 - RNA, 20 nt, Artificial Sequence
  Synthetic
ccaaacauccuauaguggac

SEQ ID NO: 794781 - RNA, 20 nt, Artificial Sequence
  Synthetic
aagacaauuuuuccguggac

SEQ ID NO: 794782 - RNA, 20 nt, Artificial Sequence
  Synthetic
ucuuuaagggagugguggac

SEQ ID NO: 794783 - RNA, 20 nt, Artificial Sequence
  Synthetic
agaccuuaugacauguggac

SEQ ID NO: 794784 - RNA, 20 nt, Artificial Sequence
  Synthetic
aaguuuucaacaaguuggac

SEQ ID NO: 794785 - RNA, 20 nt, Artificial Sequence
  Synthetic
agacuacagcacaguuggac

SEQ ID NO: 794786 - RNA, 20 nt, Artificial Sequence
  Synthetic
uaccauccuuccaguuggac

SEQ ID NO: 794787 - RNA, 20 nt, Artificial Sequence
  Synthetic
agaaaauacgaaguuuggac

SEQ ID NO: 794788 - RNA, 20 nt, Artificial Sequence
  Synthetic
ucuguuuuacuuguuuggac

SEQ ID NO: 794789 - RNA, 20 nt, Artificial Sequence
  Synthetic
ugcccugauagauuuuggac

SEQ ID NO: 794790 - RNA, 20 nt, Artificial Sequence
  Synthetic
ugguuuuuauuguuuuggac

SEQ ID NO: 794791 - RNA, 20 nt, Artificial Sequence
  Synthetic
augguaccaggaaaaaugac

SEQ ID NO: 794792 - RNA, 20 nt, Artificial Sequence
  Synthetic
auaauaauaucuaaaaugac

SEQ ID NO: 794793 - RNA, 20 nt, Artificial Sequence
  Synthetic
uccacguugcugcaaaugac

SEQ ID NO: 794794 - RNA, 20 nt, Artificial Sequence
  Synthetic
uccaagauguugcaaaugac

SEQ ID NO: 794795 - RNA, 20 nt, Artificial Sequence
  Synthetic
uccauguuguugcaaaugac

SEQ ID NO: 794796 - RNA, 20 nt, Artificial Sequence
  Synthetic
uccguguuguugcaaaugac

SEQ ID NO: 794797 - RNA, 20 nt, Artificial Sequence
  Synthetic
ugaauauugucucaaaugac

SEQ ID NO: 794798 - RNA, 20 nt, Artificial Sequence
  Synthetic
cagauauguagagaaaugac

SEQ ID NO: 794799 - RNA, 20 nt, Artificial Sequence
  Synthetic
aaucaucuuuaugaaaugac

SEQ ID NO: 794800 - RNA, 20 nt, Artificial Sequence
  Synthetic
uccauguugucauaaaugac

SEQ ID NO: 794801 - RNA, 20 nt, Artificial Sequence
  Synthetic
ucagugacacagacaaugac

SEQ ID NO: 794802 - RNA, 20 nt, Artificial Sequence
  Synthetic
uaagggaaauagacaaugac

SEQ ID NO: 794803 - RNA, 20 nt, Artificial Sequence
  Synthetic
agguuuuugacuccaaugac

SEQ ID NO: 794804 - RNA, 20 nt, Artificial Sequence
  Synthetic
ucuaguccacacucaaugac

SEQ ID NO: 794805 - RNA, 20 nt, Artificial Sequence
  Synthetic
ccugauugacaaagaaugac

SEQ ID NO: 794806 - RNA, 20 nt, Artificial Sequence
  Synthetic
agagauuaaaauugaaugac

SEQ ID NO: 794807 - RNA, 20 nt, Artificial Sequence
  Synthetic
agccauugaaaaauaaugac

SEQ ID NO: 794808 - RNA, 20 nt, Artificial Sequence
  Synthetic
uaguuaauagaaauaaugac

SEQ ID NO: 794809 - RNA, 20 nt, Artificial Sequence
  Synthetic
ccagcuaacaucauaaugac

SEQ ID NO: 794810 - RNA, 20 nt, Artificial Sequence
  Synthetic
ccagcuagcaucauaaugac

SEQ ID NO: 794811 - RNA, 20 nt, Artificial Sequence
  Synthetic
uacuucccugcuguaaugac

SEQ ID NO: 794812 - RNA, 20 nt, Artificial Sequence
  Synthetic
uccaugcaucacuuaaugac

SEQ ID NO: 794813 - RNA, 20 nt, Artificial Sequence
  Synthetic
aaauacaguaaguuaaugac

SEQ ID NO: 794814 - RNA, 20 nt, Artificial Sequence
  Synthetic
aacuuauaguuccacaugac

SEQ ID NO: 794815 - RNA, 20 nt, Artificial Sequence
  Synthetic
aauggccucacucacaugac

SEQ ID NO: 794816 - RNA, 20 nt, Artificial Sequence
  Synthetic
ugagauuaucugcccaugac

SEQ ID NO: 794817 - RNA, 20 nt, Artificial Sequence
  Synthetic
acuccuagcagugccaugac

SEQ ID NO: 794818 - RNA, 20 nt, Artificial Sequence
  Synthetic
cucuggagauaaagcaugac

SEQ ID NO: 794819 - RNA, 20 nt, Artificial Sequence
  Synthetic
uuucuaauaauuagcaugac

SEQ ID NO: 794820 - RNA, 20 nt, Artificial Sequence
  Synthetic
agacuguaguauggcaugac

SEQ ID NO: 794821 - RNA, 20 nt, Artificial Sequence
  Synthetic
ccuugugaaauguucaugac

SEQ ID NO: 794822 - RNA, 20 nt, Artificial Sequence
  Synthetic
uuggagggcuagaagaugac

SEQ ID NO: 794823 - RNA, 20 nt, Artificial Sequence
  Synthetic
agucucauguuggagaugac

SEQ ID NO: 794824 - RNA, 20 nt, Artificial Sequence
  Synthetic
ucccaaagcacugagaugac

SEQ ID NO: 794825 - RNA, 20 nt, Artificial Sequence
  Synthetic
uauaccuaaugcuagaugac

SEQ ID NO: 794826 - RNA, 20 nt, Artificial Sequence
  Synthetic
aaauaccuaauguagaugac

SEQ ID NO: 794827 - RNA, 20 nt, Artificial Sequence
  Synthetic
aagagagguagggggaugac

SEQ ID NO: 794828 - RNA, 20 nt, Artificial Sequence
  Synthetic
uaacugcuucuuuggaugac

SEQ ID NO: 794829 - RNA, 20 nt, Artificial Sequence
  Synthetic
ugcaacuaugaagugaugac

SEQ ID NO: 794830 - RNA, 20 nt, Artificial Sequence
  Synthetic
ucuaagauuaaggugaugac

SEQ ID NO: 794831 - RNA, 20 nt, Artificial Sequence
  Synthetic
ugucuguuaucugugaugac

SEQ ID NO: 794832 - RNA, 20 nt, Artificial Sequence
  Synthetic
aguucucaacuaaauaugac

SEQ ID NO: 794833 - RNA, 20 nt, Artificial Sequence
  Synthetic
agauaaucauaucauaugac

SEQ ID NO: 794834 - RNA, 20 nt, Artificial Sequence
  Synthetic
aagauaagcaaagauaugac

SEQ ID NO: 794835 - RNA, 20 nt, Artificial Sequence
  Synthetic
aaauaagggaaggauaugac

SEQ ID NO: 794836 - RNA, 20 nt, Artificial Sequence
  Synthetic
cuucucagaacuuauaugac

SEQ ID NO: 794837 - RNA, 20 nt, Artificial Sequence
  Synthetic
ucaaaaacuacaacuaugac

SEQ ID NO: 794838 - RNA, 20 nt, Artificial Sequence
  Synthetic
cauauccauucaucuaugac

SEQ ID NO: 794839 - RNA, 20 nt, Artificial Sequence
  Synthetic
acacaggagccugguaugac

SEQ ID NO: 794840 - RNA, 20 nt, Artificial Sequence
  Synthetic
cuuacauguuucauuaugac

SEQ ID NO: 794841 - RNA, 20 nt, Artificial Sequence
  Synthetic
cuugggauccuaguuaugac

SEQ ID NO: 794842 - RNA, 20 nt, Artificial Sequence
  Synthetic
aguauuugucauuuuaugac

SEQ ID NO: 794843 - RNA, 20 nt, Artificial Sequence
  Synthetic
uuucucuuucaaaaacugac

SEQ ID NO: 794844 - RNA, 20 nt, Artificial Sequence
  Synthetic
aggguucuuguaaaacugac

SEQ ID NO: 794845 - RNA, 20 nt, Artificial Sequence
  Synthetic
aagacugcucugaaacugac

SEQ ID NO: 794846 - RNA, 20 nt, Artificial Sequence
  Synthetic
caaaccaaaguagaacugac

SEQ ID NO: 794847 - RNA, 20 nt, Artificial Sequence
  Synthetic
aauauauuugaaacacugac

SEQ ID NO: 794848 - RNA, 20 nt, Artificial Sequence
  Synthetic
uauuuccaaauuccacugac

SEQ ID NO: 794849 - RNA, 20 nt, Artificial Sequence
  Synthetic
auggccacuguuuuacugac

SEQ ID NO: 794850 - RNA, 20 nt, Artificial Sequence
  Synthetic
uauagacacaaacaccugac

SEQ ID NO: 794851 - RNA, 20 nt, Artificial Sequence
  Synthetic
cuagccccccacccccugac

SEQ ID NO: 794852 - RNA, 20 nt, Artificial Sequence
  Synthetic
uuuaucuauaagccccugac

SEQ ID NO: 794853 - RNA, 20 nt, Artificial Sequence
  Synthetic
accagaaauacuggccugac

SEQ ID NO: 794854 - RNA, 20 nt, Artificial Sequence
  Synthetic
acaguaaaacuuauccugac

SEQ ID NO: 794855 - RNA, 20 nt, Artificial Sequence
  Synthetic
ugacccccgugccuccugac

SEQ ID NO: 794856 - RNA, 20 nt, Artificial Sequence
  Synthetic
auuuuaaagacaaagcugac

SEQ ID NO: 794857 - RNA, 20 nt, Artificial Sequence
  Synthetic
aagaagggagcuaagcugac

SEQ ID NO: 794858 - RNA, 20 nt, Artificial Sequence
  Synthetic
cugcagaacaccaggcugac

SEQ ID NO: 794859 - RNA, 20 nt, Artificial Sequence
  Synthetic
cuggaaagacacaugcugac

SEQ ID NO: 794860 - RNA, 20 nt, Artificial Sequence
  Synthetic
auuucagaggcugugcugac

SEQ ID NO: 794861 - RNA, 20 nt, Artificial Sequence
  Synthetic
cuucauaugucaaaucugac

SEQ ID NO: 794862 - RNA, 20 nt, Artificial Sequence
  Synthetic
aauguggcugcugaucugac

SEQ ID NO: 794863 - RNA, 20 nt, Artificial Sequence
  Synthetic
ugcccacauauuuaucugac

SEQ ID NO: 794864 - RNA, 20 nt, Artificial Sequence
  Synthetic
agcaugccuuguacucugac

SEQ ID NO: 794865 - RNA, 20 nt, Artificial Sequence
  Synthetic
ccaaaguaugguccucugac

SEQ ID NO: 794866 - RNA, 20 nt, Artificial Sequence
  Synthetic
acuuccaacuuuucucugac

SEQ ID NO: 794867 - RNA, 20 nt, Artificial Sequence
  Synthetic
uuuaacaaagccagucugac

SEQ ID NO: 794868 - RNA, 20 nt, Artificial Sequence
  Synthetic
acccaaguaaggagucugac

SEQ ID NO: 794869 - RNA, 20 nt, Artificial Sequence
  Synthetic
uuagugauagccauucugac

SEQ ID NO: 794870 - RNA, 20 nt, Artificial Sequence
  Synthetic
uugauaauaggcauucugac

SEQ ID NO: 794871 - RNA, 20 nt, Artificial Sequence
  Synthetic
ugccaugucuacuuucugac

SEQ ID NO: 794872 - RNA, 20 nt, Artificial Sequence
  Synthetic
ugcucucuaaauuuucugac

SEQ ID NO: 794873 - RNA, 20 nt, Artificial Sequence
  Synthetic
ugccagagagaaaaagugac

SEQ ID NO: 794874 - RNA, 20 nt, Artificial Sequence
  Synthetic
caagauagggaaaaagugac

SEQ ID NO: 794875 - RNA, 20 nt, Artificial Sequence
  Synthetic
uuacagugaguaaaagugac

SEQ ID NO: 794876 - RNA, 20 nt, Artificial Sequence
  Synthetic
uggaccaagcccaaagugac

SEQ ID NO: 794877 - RNA, 20 nt, Artificial Sequence
  Synthetic
uggagcugggagaaagugac

SEQ ID NO: 794878 - RNA, 20 nt, Artificial Sequence
  Synthetic
ucaauaaauaaagaagugac

SEQ ID NO: 794879 - RNA, 20 nt, Artificial Sequence
  Synthetic
acacccuaucacuaagugac

SEQ ID NO: 794880 - RNA, 20 nt, Artificial Sequence
  Synthetic
aauauuuuauucacagugac

SEQ ID NO: 794881 - RNA, 20 nt, Artificial Sequence
  Synthetic
augcuaaaaauaagagugac

SEQ ID NO: 794882 - RNA, 20 nt, Artificial Sequence
  Synthetic
ccuucagcuuuguuagugac

SEQ ID NO: 794883 - RNA, 20 nt, Artificial Sequence
  Synthetic
cuuuuaaugcauuuagugac

SEQ ID NO: 794884 - RNA, 20 nt, Artificial Sequence
  Synthetic
aucauaguucaaaaggugac

SEQ ID NO: 794885 - RNA, 20 nt, Artificial Sequence
  Synthetic
aggugauuuggucaggugac

SEQ ID NO: 794886 - RNA, 20 nt, Artificial Sequence
  Synthetic
uugcauuaaauuggggugac

SEQ ID NO: 794887 - RNA, 20 nt, Artificial Sequence
  Synthetic
ugcacuccagccugggugac

SEQ ID NO: 794888 - RNA, 20 nt, Artificial Sequence
  Synthetic
aauaucauaguuugggugac

SEQ ID NO: 794889 - RNA, 20 nt, Artificial Sequence
  Synthetic
aagcauuaaagcauggugac

SEQ ID NO: 794890 - RNA, 20 nt, Artificial Sequence
  Synthetic
aacuucucaucucuggugac

SEQ ID NO: 794891 - RNA, 20 nt, Artificial Sequence
  Synthetic
uaauugcucaagguggugac

SEQ ID NO: 794892 - RNA, 20 nt, Artificial Sequence
  Synthetic
aguauuugcccuuuggugac

SEQ ID NO: 794893 - RNA, 20 nt, Artificial Sequence
  Synthetic
ucugcauccugcaaugugac

SEQ ID NO: 794894 - RNA, 20 nt, Artificial Sequence
  Synthetic
uacugaagaguacaugugac

SEQ ID NO: 794895 - RNA, 20 nt, Artificial Sequence
  Synthetic
cucaggaauggccaugugac

SEQ ID NO: 794896 - RNA, 20 nt, Artificial Sequence
  Synthetic
ugcuuugccauccaugugac

SEQ ID NO: 794897 - RNA, 20 nt, Artificial Sequence
  Synthetic
cugaagacagauacugugac

SEQ ID NO: 794898 - RNA, 20 nt, Artificial Sequence
  Synthetic
ccaggcuggagugcugugac

SEQ ID NO: 794899 - RNA, 20 nt, Artificial Sequence
  Synthetic
ugcaggcacugugcugugac

SEQ ID NO: 794900 - RNA, 20 nt, Artificial Sequence
  Synthetic
ccugaagcuagcucugugac

SEQ ID NO: 794901 - RNA, 20 nt, Artificial Sequence
  Synthetic
agugauuuucguucugugac

SEQ ID NO: 794902 - RNA, 20 nt, Artificial Sequence
  Synthetic
cauuuaugaaaaugugugac

SEQ ID NO: 794903 - RNA, 20 nt, Artificial Sequence
  Synthetic
aauuuggggucuuuugugac

SEQ ID NO: 794904 - RNA, 20 nt, Artificial Sequence
  Synthetic
uugggggcaaauaaauugac

SEQ ID NO: 794905 - RNA, 20 nt, Artificial Sequence
  Synthetic
uguaacugcugacaauugac

SEQ ID NO: 794906 - RNA, 20 nt, Artificial Sequence
  Synthetic
agcacuuuccauucauugac

SEQ ID NO: 794907 - RNA, 20 nt, Artificial Sequence
  Synthetic
auuuugugucgaauauugac

SEQ ID NO: 794908 - RNA, 20 nt, Artificial Sequence
  Synthetic
aauuccagaaacauauugac

SEQ ID NO: 794909 - RNA, 20 nt, Artificial Sequence
  Synthetic
auguuagcucauauauugac

SEQ ID NO: 794910 - RNA, 20 nt, Artificial Sequence
  Synthetic
aaaccaagguauauauugac

SEQ ID NO: 794911 - RNA, 20 nt, Artificial Sequence
  Synthetic
caaacuaaaugucuauugac

SEQ ID NO: 794912 - RNA, 20 nt, Artificial Sequence
  Synthetic
auuuugugcaucaacuugac

SEQ ID NO: 794913 - RNA, 20 nt, Artificial Sequence
  Synthetic
uuccucuggaaacacuugac

SEQ ID NO: 794914 - RNA, 20 nt, Artificial Sequence
  Synthetic
caaaaggaagccaccuugac

SEQ ID NO: 794915 - RNA, 20 nt, Artificial Sequence
  Synthetic
caggcaugagccaccuugac

SEQ ID NO: 794916 - RNA, 20 nt, Artificial Sequence
  Synthetic
cuugccccucaccccuugac

SEQ ID NO: 794917 - RNA, 20 nt, Artificial Sequence
  Synthetic
acauacagaaacagcuugac

SEQ ID NO: 794918 - RNA, 20 nt, Artificial Sequence
  Synthetic
uacacauuuuuaggcuugac

SEQ ID NO: 794919 - RNA, 20 nt, Artificial Sequence
  Synthetic
cagucauaugauggcuugac

SEQ ID NO: 794920 - RNA, 20 nt, Artificial Sequence
  Synthetic
acaaaggauaaaugcuugac

SEQ ID NO: 794921 - RNA, 20 nt, Artificial Sequence
  Synthetic
cagggacaagaccucuugac

SEQ ID NO: 794922 - RNA, 20 nt, Artificial Sequence
  Synthetic
aaugaaaauuaaaaguugac

SEQ ID NO: 794923 - RNA, 20 nt, Artificial Sequence
  Synthetic
uacaagaggcuagaguugac

SEQ ID NO: 794924 - RNA, 20 nt, Artificial Sequence
  Synthetic
auaaugauuauauaguugac

SEQ ID NO: 794925 - RNA, 20 nt, Artificial Sequence
  Synthetic
auugugccucucuuguugac

SEQ ID NO: 794926 - RNA, 20 nt, Artificial Sequence
  Synthetic
ucucuuuaaaaaaauuugac

SEQ ID NO: 794927 - RNA, 20 nt, Artificial Sequence
  Synthetic
aagaacaaaugaaauuugac

SEQ ID NO: 794928 - RNA, 20 nt, Artificial Sequence
  Synthetic
ucaggcagccagcauuugac

SEQ ID NO: 794929 - RNA, 20 nt, Artificial Sequence
  Synthetic
acuucaccuuuucauuugac

SEQ ID NO: 794930 - RNA, 20 nt, Artificial Sequence
  Synthetic
uguuauuuuuuucauuugac

SEQ ID NO: 794931 - RNA, 20 nt, Artificial Sequence
  Synthetic
aaacaaaaaaaagauuugac

SEQ ID NO: 794932 - RNA, 20 nt, Artificial Sequence
  Synthetic
uugggcuucuaauauuugac

SEQ ID NO: 794933 - RNA, 20 nt, Artificial Sequence
  Synthetic
aguauuagcuucacuuugac

SEQ ID NO: 794934 - RNA, 20 nt, Artificial Sequence
  Synthetic
aguuuucaagcuccuuugac

SEQ ID NO: 794935 - RNA, 20 nt, Artificial Sequence
  Synthetic
cccaagaacuguccuuugac

SEQ ID NO: 794936 - RNA, 20 nt, Artificial Sequence
  Synthetic
uugacaauggaagcuuugac

SEQ ID NO: 794937 - RNA, 20 nt, Artificial Sequence
  Synthetic
uauauaaccaaggcuuugac

SEQ ID NO: 794938 - RNA, 20 nt, Artificial Sequence
  Synthetic
ugugucccauucucuuugac

SEQ ID NO: 794939 - RNA, 20 nt, Artificial Sequence
  Synthetic
auacacaauuucaguuugac

SEQ ID NO: 794940 - RNA, 20 nt, Artificial Sequence
  Synthetic
uuacuuucuugauguuugac

SEQ ID NO: 794941 - RNA, 20 nt, Artificial Sequence
  Synthetic
aacucuuucauaauuuugac

SEQ ID NO: 794942 - RNA, 20 nt, Artificial Sequence
  Synthetic
uaaaauaaaauaaaaaauac

SEQ ID NO: 794943 - RNA, 20 nt, Artificial Sequence
  Synthetic
uuucugagacacaaaaauac

SEQ ID NO: 794944 - RNA, 20 nt, Artificial Sequence
  Synthetic
aacaaaccugagaaaaauac

SEQ ID NO: 794945 - RNA, 20 nt, Artificial Sequence
  Synthetic
uagauuucagggaaaaauac

SEQ ID NO: 794946 - RNA, 20 nt, Artificial Sequence
  Synthetic
uagagggcugauaaaaauac

SEQ ID NO: 794947 - RNA, 20 nt, Artificial Sequence
  Synthetic
uugagcuccuuuaaaaauac

SEQ ID NO: 794948 - RNA, 20 nt, Artificial Sequence
  Synthetic
caguauuuauaacaaaauac

SEQ ID NO: 794949 - RNA, 20 nt, Artificial Sequence
  Synthetic
uggacagugcuggaaaauac

SEQ ID NO: 794950 - RNA, 20 nt, Artificial Sequence
  Synthetic
agccaccauacugaaaauac

SEQ ID NO: 794951 - RNA, 20 nt, Artificial Sequence
  Synthetic
accuuuuuaaaauaaaauac

SEQ ID NO: 794952 - RNA, 20 nt, Artificial Sequence
  Synthetic
aaaaauccucaauaaaauac

SEQ ID NO: 794953 - RNA, 20 nt, Artificial Sequence
  Synthetic
aaaacuccucaauaaaauac

SEQ ID NO: 794954 - RNA, 20 nt, Artificial Sequence
  Synthetic
agagaauacauauaaaauac

SEQ ID NO: 794955 - RNA, 20 nt, Artificial Sequence
  Synthetic
aggguugccuuauaaaauac

SEQ ID NO: 794956 - RNA, 20 nt, Artificial Sequence
  Synthetic
cacuaggacauuuaaaauac

SEQ ID NO: 794957 - RNA, 20 nt, Artificial Sequence
  Synthetic
cucuuuaaagauacaaauac

SEQ ID NO: 794958 - RNA, 20 nt, Artificial Sequence
  Synthetic
uaaauagacaauucaaauac

SEQ ID NO: 794959 - RNA, 20 nt, Artificial Sequence
  Synthetic
acaggccagaguucaaauac

SEQ ID NO: 794960 - RNA, 20 nt, Artificial Sequence
  Synthetic
uaaaugucacuuucaaauac

SEQ ID NO: 794961 - RNA, 20 nt, Artificial Sequence
  Synthetic
cauaagguuaaaagaaauac

SEQ ID NO: 794962 - RNA, 20 nt, Artificial Sequence
  Synthetic
agcuauaauagcagaaauac

SEQ ID NO: 794963 - RNA, 20 nt, Artificial Sequence
  Synthetic
ugaauaaguuggagaaauac

SEQ ID NO: 794964 - RNA, 20 nt, Artificial Sequence
  Synthetic
aauaacuuguaaggaaauac

SEQ ID NO: 794965 - RNA, 20 nt, Artificial Sequence
  Synthetic
caacguucugcaggaaauac

SEQ ID NO: 794966 - RNA, 20 nt, Artificial Sequence
  Synthetic
aaaagacugaugggaaauac

SEQ ID NO: 794967 - RNA, 20 nt, Artificial Sequence
  Synthetic
uuaaagcggcucugaaauac

SEQ ID NO: 794968 - RNA, 20 nt, Artificial Sequence
  Synthetic
uuuaauaagaauugaaauac

SEQ ID NO: 794969 - RNA, 20 nt, Artificial Sequence
  Synthetic
cuggaagaaaagauaaauac

SEQ ID NO: 794970 - RNA, 20 nt, Artificial Sequence
  Synthetic
aaaucauguccuauaaauac

SEQ ID NO: 794971 - RNA, 20 nt, Artificial Sequence
  Synthetic
ugguucaugaauguaaauac

SEQ ID NO: 794972 - RNA, 20 nt, Artificial Sequence
  Synthetic
agcaguguaauuuuaaauac

SEQ ID NO: 794973 - RNA, 20 nt, Artificial Sequence
  Synthetic
uggaguuagggaaacaauac

SEQ ID NO: 794974 - RNA, 20 nt, Artificial Sequence
  Synthetic
cugugcuucuuccacaauac

SEQ ID NO: 794975 - RNA, 20 nt, Artificial Sequence
  Synthetic
auguuagguuuuuacaauac

SEQ ID NO: 794976 - RNA, 20 nt, Artificial Sequence
  Synthetic
cuauugagcaaaaccaauac

SEQ ID NO: 794977 - RNA, 20 nt, Artificial Sequence
  Synthetic
aauauauaugcacccaauac

SEQ ID NO: 794978 - RNA, 20 nt, Artificial Sequence
  Synthetic
aauauuuaugcacccaauac

SEQ ID NO: 794979 - RNA, 20 nt, Artificial Sequence
  Synthetic
uguuucccuaacuccaauac

SEQ ID NO: 794980 - RNA, 20 nt, Artificial Sequence
  Synthetic
aaucaaugauguuucaauac

SEQ ID NO: 794981 - RNA, 20 nt, Artificial Sequence
  Synthetic
acauaauuauucaagaauac

SEQ ID NO: 794982 - RNA, 20 nt, Artificial Sequence
  Synthetic
acaaagaauuucuagaauac

SEQ ID NO: 794983 - RNA, 20 nt, Artificial Sequence
  Synthetic
ccuguugugcuaucgaauac

SEQ ID NO: 794984 - RNA, 20 nt, Artificial Sequence
  Synthetic
cauacauaccacaugaauac

SEQ ID NO: 794985 - RNA, 20 nt, Artificial Sequence
  Synthetic
uaccauuucaauaugaauac

SEQ ID NO: 794986 - RNA, 20 nt, Artificial Sequence
  Synthetic
uugcccaauaauuugaauac

SEQ ID NO: 794987 - RNA, 20 nt, Artificial Sequence
  Synthetic
uguaauauugauaauaauac

SEQ ID NO: 794988 - RNA, 20 nt, Artificial Sequence
  Synthetic
aggagaccuauagauaauac

SEQ ID NO: 794989 - RNA, 20 nt, Artificial Sequence
  Synthetic
uaauggugaauugauaauac

SEQ ID NO: 794990 - RNA, 20 nt, Artificial Sequence
  Synthetic
uaauaacaacucuauaauac

SEQ ID NO: 794991 - RNA, 20 nt, Artificial Sequence
  Synthetic
acuuaauccaauuauaauac

SEQ ID NO: 794992 - RNA, 20 nt, Artificial Sequence
  Synthetic
auuaaagucauuuauaauac

SEQ ID NO: 794993 - RNA, 20 nt, Artificial Sequence
  Synthetic
uguccuuaucaaacuaauac

SEQ ID NO: 794994 - RNA, 20 nt, Artificial Sequence
  Synthetic
ucgggaaaaucaucuaauac

SEQ ID NO: 794995 - RNA, 20 nt, Artificial Sequence
  Synthetic
uuauaugcauauuguaauac

SEQ ID NO: 794996 - RNA, 20 nt, Artificial Sequence
  Synthetic
uuauaugcguauuguaauac

SEQ ID NO: 794997 - RNA, 20 nt, Artificial Sequence
  Synthetic
uuaacguuaaaaauuaauac

SEQ ID NO: 794998 - RNA, 20 nt, Artificial Sequence
  Synthetic
uagcuuaaaauuaaacauac

SEQ ID NO: 794999 - RNA, 20 nt, Artificial Sequence
  Synthetic
aucaggacaaaucaacauac

SEQ ID NO: 795000 - RNA, 20 nt, Artificial Sequence
  Synthetic
aacagucacaauuaacauac

SEQ ID NO: 795001 - RNA, 20 nt, Artificial Sequence
  Synthetic
uuauuagcguauuaacauac

SEQ ID NO: 795002 - RNA, 20 nt, Artificial Sequence
  Synthetic
cucuauaauuuuuaacauac

SEQ ID NO: 795003 - RNA, 20 nt, Artificial Sequence
  Synthetic
aaguacauugauucacauac

SEQ ID NO: 795004 - RNA, 20 nt, Artificial Sequence
  Synthetic
agugagagagacagacauac

SEQ ID NO: 795005 - RNA, 20 nt, Artificial Sequence
  Synthetic
aagauaucucuuugacauac

SEQ ID NO: 795006 - RNA, 20 nt, Artificial Sequence
  Synthetic
uaucagauuuuucuacauac

SEQ ID NO: 795007 - RNA, 20 nt, Artificial Sequence
  Synthetic
aagauggcaacaguacauac

SEQ ID NO: 795008 - RNA, 20 nt, Artificial Sequence
  Synthetic
caaaaacgaccaguacauac

SEQ ID NO: 795009 - RNA, 20 nt, Artificial Sequence
  Synthetic
uaugguauuauaguacauac

SEQ ID NO: 795010 - RNA, 20 nt, Artificial Sequence
  Synthetic
caauaucauguaguacauac

SEQ ID NO: 795011 - RNA, 20 nt, Artificial Sequence
  Synthetic
aaucagacauuuguacauac

SEQ ID NO: 795012 - RNA, 20 nt, Artificial Sequence
  Synthetic
cugcucccacaguuacauac

SEQ ID NO: 795013 - RNA, 20 nt, Artificial Sequence
  Synthetic
ucucaaaaguguuuacauac

SEQ ID NO: 795014 - RNA, 20 nt, Artificial Sequence
  Synthetic
agagcauuccuccaccauac

SEQ ID NO: 795015 - RNA, 20 nt, Artificial Sequence
  Synthetic
uucauaacccuuucccauac

SEQ ID NO: 795016 - RNA, 20 nt, Artificial Sequence
  Synthetic
acaggcagucccagccauac

SEQ ID NO: 795017 - RNA, 20 nt, Artificial Sequence
  Synthetic
uacuggcagugaauccauac

SEQ ID NO: 795018 - RNA, 20 nt, Artificial Sequence
  Synthetic
ugaacugcugguauccauac

SEQ ID NO: 795019 - RNA, 20 nt, Artificial Sequence
  Synthetic
cauucccagacucuccauac

SEQ ID NO: 795020 - RNA, 20 nt, Artificial Sequence
  Synthetic
cuggcacucuugcagcauac

SEQ ID NO: 795021 - RNA, 20 nt, Artificial Sequence
  Synthetic
aaaagauuuguagagcauac

SEQ ID NO: 795022 - RNA, 20 nt, Artificial Sequence
  Synthetic
acacagauauaccugcauac

SEQ ID NO: 795023 - RNA, 20 nt, Artificial Sequence
  Synthetic
aaucuacuuagaaaucauac

SEQ ID NO: 795024 - RNA, 20 nt, Artificial Sequence
  Synthetic
uggaguuucagugcucauac

SEQ ID NO: 795025 - RNA, 20 nt, Artificial Sequence
  Synthetic
uccccuuuguccagucauac

SEQ ID NO: 795026 - RNA, 20 nt, Artificial Sequence
  Synthetic
cauugucaaaaaggucauac

SEQ ID NO: 795027 - RNA, 20 nt, Artificial Sequence
  Synthetic
cuguaucagugaugucauac

SEQ ID NO: 795028 - RNA, 20 nt, Artificial Sequence
  Synthetic
ccgucucacaccauucauac

SEQ ID NO: 795029 - RNA, 20 nt, Artificial Sequence
  Synthetic
auccauuuguauauucauac

SEQ ID NO: 795030 - RNA, 20 nt, Artificial Sequence
  Synthetic
aaaaugugguguauucauac

SEQ ID NO: 795031 - RNA, 20 nt, Artificial Sequence
  Synthetic
cuuauuuugaauguucauac

SEQ ID NO: 795032 - RNA, 20 nt, Artificial Sequence
  Synthetic
cuacauacagccuuucauac

SEQ ID NO: 795033 - RNA, 20 nt, Artificial Sequence
  Synthetic
cagauuuuucucuuucauac

SEQ ID NO: 795034 - RNA, 20 nt, Artificial Sequence
  Synthetic
cagaccauagcaaaagauac

SEQ ID NO: 795035 - RNA, 20 nt, Artificial Sequence
  Synthetic
agaaacagggugaaagauac

SEQ ID NO: 795036 - RNA, 20 nt, Artificial Sequence
  Synthetic
augucaauuuugaaagauac

SEQ ID NO: 795037 - RNA, 20 nt, Artificial Sequence
  Synthetic
aagaggccagaacaagauac

SEQ ID NO: 795038 - RNA, 20 nt, Artificial Sequence
  Synthetic
aauaccugagaggaagauac

SEQ ID NO: 795039 - RNA, 20 nt, Artificial Sequence
  Synthetic
aaucagacaguugaagauac

SEQ ID NO: 795040 - RNA, 20 nt, Artificial Sequence
  Synthetic
auuugaggaucaacagauac

SEQ ID NO: 795041 - RNA, 20 nt, Artificial Sequence
  Synthetic
ccaauuugagaaucagauac

SEQ ID NO: 795042 - RNA, 20 nt, Artificial Sequence
  Synthetic
ucauuuagagcaagagauac

SEQ ID NO: 795043 - RNA, 20 nt, Artificial Sequence
  Synthetic
auguuuucuuuuagagauac

SEQ ID NO: 795044 - RNA, 20 nt, Artificial Sequence
  Synthetic
uacaguguguucugagauac

SEQ ID NO: 795045 - RNA, 20 nt, Artificial Sequence
  Synthetic
ugccaagucuucauagauac

SEQ ID NO: 795046 - RNA, 20 nt, Artificial Sequence
  Synthetic
uuuguauuuuaaguagauac

SEQ ID NO: 795047 - RNA, 20 nt, Artificial Sequence
  Synthetic
agagaugguagaggggauac

SEQ ID NO: 795048 - RNA, 20 nt, Artificial Sequence
  Synthetic
uauauauauuuaugggauac

SEQ ID NO: 795049 - RNA, 20 nt, Artificial Sequence
  Synthetic
cucccaaguagcugggauac

SEQ ID NO: 795050 - RNA, 20 nt, Artificial Sequence
  Synthetic
cucccaaagugcugggauac

SEQ ID NO: 795051 - RNA, 20 nt, Artificial Sequence
  Synthetic
uacuuuacguucugggauac

SEQ ID NO: 795052 - RNA, 20 nt, Artificial Sequence
  Synthetic
uugagaagcaacauggauac

SEQ ID NO: 795053 - RNA, 20 nt, Artificial Sequence
  Synthetic
uuagcaaagggcauggauac

SEQ ID NO: 795054 - RNA, 20 nt, Artificial Sequence
  Synthetic
auacauaaaaguguggauac

SEQ ID NO: 795055 - RNA, 20 nt, Artificial Sequence
  Synthetic
uugcccauucaguaugauac

SEQ ID NO: 795056 - RNA, 20 nt, Artificial Sequence
  Synthetic
cauucuuuauguacugauac

SEQ ID NO: 795057 - RNA, 20 nt, Artificial Sequence
  Synthetic
uuacauauaugcucugauac

SEQ ID NO: 795058 - RNA, 20 nt, Artificial Sequence
  Synthetic
uuuucuuauguuauugauac

SEQ ID NO: 795059 - RNA, 20 nt, Artificial Sequence
  Synthetic
uaaguugaaauacuugauac

SEQ ID NO: 795060 - RNA, 20 nt, Artificial Sequence
  Synthetic
uacuugagauguuuugauac

SEQ ID NO: 795061 - RNA, 20 nt, Artificial Sequence
  Synthetic
uauauuuuucuuuuugauac

SEQ ID NO: 795062 - RNA, 20 nt, Artificial Sequence
  Synthetic
cacucaguuacuaaauauac

SEQ ID NO: 795063 - RNA, 20 nt, Artificial Sequence
  Synthetic
cucugaaagccacaauauac

SEQ ID NO: 795064 - RNA, 20 nt, Artificial Sequence
  Synthetic
caguacugcagauaauauac

SEQ ID NO: 795065 - RNA, 20 nt, Artificial Sequence
  Synthetic
uuauauuucaacuaauauac

SEQ ID NO: 795066 - RNA, 20 nt, Artificial Sequence
  Synthetic
auauauguauacacauauac

SEQ ID NO: 795067 - RNA, 20 nt, Artificial Sequence
  Synthetic
ucaaauacaagggcauauac

SEQ ID NO: 795068 - RNA, 20 nt, Artificial Sequence
  Synthetic
uacuauggcuuggcauauac

SEQ ID NO: 795069 - RNA, 20 nt, Artificial Sequence
  Synthetic
acugguucacacggauauac

SEQ ID NO: 795070 - RNA, 20 nt, Artificial Sequence
  Synthetic
aaugcccaucaaugauauac

SEQ ID NO: 795071 - RNA, 20 nt, Artificial Sequence
  Synthetic
aaauaguuucaaugauauac

SEQ ID NO: 795072 - RNA, 20 nt, Artificial Sequence
  Synthetic
agugcaagugugugauauac

SEQ ID NO: 795073 - RNA, 20 nt, Artificial Sequence
  Synthetic
aauuuuuuaaaaauauauac

SEQ ID NO: 795074 - RNA, 20 nt, Artificial Sequence
  Synthetic
uucaaauuagugguauauac

SEQ ID NO: 795075 - RNA, 20 nt, Artificial Sequence
  Synthetic
uacaauuagucauuauauac

SEQ ID NO: 795076 - RNA, 20 nt, Artificial Sequence
  Synthetic
ugugacuagugcuacuauac

SEQ ID NO: 795077 - RNA, 20 nt, Artificial Sequence
  Synthetic
auauuuaucaucagcuauac

SEQ ID NO: 795078 - RNA, 20 nt, Artificial Sequence
  Synthetic
cacgugcagguuugcuauac

SEQ ID NO: 795079 - RNA, 20 nt, Artificial Sequence
  Synthetic
uuuuaaaaacaucaguauac

SEQ ID NO: 795080 - RNA, 20 nt, Artificial Sequence
  Synthetic
uaauuuuguucagaguauac

SEQ ID NO: 795081 - RNA, 20 nt, Artificial Sequence
  Synthetic
ugacaacucccaagguauac

SEQ ID NO: 795082 - RNA, 20 nt, Artificial Sequence
  Synthetic
ugcauaaagaacugguauac

SEQ ID NO: 795083 - RNA, 20 nt, Artificial Sequence
  Synthetic
auucccucaccaguguauac

SEQ ID NO: 795084 - RNA, 20 nt, Artificial Sequence
  Synthetic
uuagcuuuaagaaauuauac

SEQ ID NO: 795085 - RNA, 20 nt, Artificial Sequence
  Synthetic
auacagucauuccauuauac

SEQ ID NO: 795086 - RNA, 20 nt, Artificial Sequence
  Synthetic
cuuaugaaaaaugauuauac

SEQ ID NO: 795087 - RNA, 20 nt, Artificial Sequence
  Synthetic
ucuacccacagaaguuauac

SEQ ID NO: 795088 - RNA, 20 nt, Artificial Sequence
  Synthetic
acaauccuauuaaguuauac

SEQ ID NO: 795089 - RNA, 20 nt, Artificial Sequence
  Synthetic
aaaccacaaauggguuauac

SEQ ID NO: 795090 - RNA, 20 nt, Artificial Sequence
  Synthetic
aucuuuaaagucuguuauac

SEQ ID NO: 795091 - RNA, 20 nt, Artificial Sequence
  Synthetic
cgagacuggauaauuuauac

SEQ ID NO: 795092 - RNA, 20 nt, Artificial Sequence
  Synthetic
ugagacugggucauuuauac

SEQ ID NO: 795093 - RNA, 20 nt, Artificial Sequence
  Synthetic
acacauuuugagcuuuauac

SEQ ID NO: 795094 - RNA, 20 nt, Artificial Sequence
  Synthetic
uucucauuuccauuuuauac

SEQ ID NO: 795095 - RNA, 20 nt, Artificial Sequence
  Synthetic
cuuagcucuguauuuuauac

SEQ ID NO: 795096 - RNA, 20 nt, Artificial Sequence
  Synthetic
accauauaaggcuuuuauac

SEQ ID NO: 795097 - RNA, 20 nt, Artificial Sequence
  Synthetic
cuacauuuuuauuuuuauac

SEQ ID NO: 795098 - RNA, 20 nt, Artificial Sequence
  Synthetic
uuucuuuccuuuuuuuauac

SEQ ID NO: 795099 - RNA, 20 nt, Artificial Sequence
  Synthetic
uguccaaguuaucaaacuac

SEQ ID NO: 795100 - RNA, 20 nt, Artificial Sequence
  Synthetic
uucauguacugggaaacuac

SEQ ID NO: 795101 - RNA, 20 nt, Artificial Sequence
  Synthetic
uaaaguauuuaauaaacuac

SEQ ID NO: 795102 - RNA, 20 nt, Artificial Sequence
  Synthetic
aauuagaauucuccaacuac

SEQ ID NO: 795103 - RNA, 20 nt, Artificial Sequence
  Synthetic
acuuaaaguuuugcaacuac

SEQ ID NO: 795104 - RNA, 20 nt, Artificial Sequence
  Synthetic
ccacccacacacucaacuac

SEQ ID NO: 795105 - RNA, 20 nt, Artificial Sequence
  Synthetic
aaauaccaguagagaacuac

SEQ ID NO: 795106 - RNA, 20 nt, Artificial Sequence
  Synthetic
ucccgaguagcaggaacuac

SEQ ID NO: 795107 - RNA, 20 nt, Artificial Sequence
  Synthetic
ucccaaguagauggaacuac

SEQ ID NO: 795108 - RNA, 20 nt, Artificial Sequence
  Synthetic
ucccuguuuuucugaacuac

SEQ ID NO: 795109 - RNA, 20 nt, Artificial Sequence
  Synthetic
uucuugguuaaucuaacuac

SEQ ID NO: 795110 - RNA, 20 nt, Artificial Sequence
  Synthetic
aaaacaauucaauacacuac

SEQ ID NO: 795111 - RNA, 20 nt, Artificial Sequence
  Synthetic
auuggaagaugcuacacuac

SEQ ID NO: 795112 - RNA, 20 nt, Artificial Sequence
  Synthetic
ugauccagcaaucccacuac

SEQ ID NO: 795113 - RNA, 20 nt, Artificial Sequence
  Synthetic
cgauacagcaauuccacuac

SEQ ID NO: 795114 - RNA, 20 nt, Artificial Sequence
  Synthetic
aaaaguacauuuuccacuac

SEQ ID NO: 795115 - RNA, 20 nt, Artificial Sequence
  Synthetic
ucccaaguagcagagacuac

SEQ ID NO: 795116 - RNA, 20 nt, Artificial Sequence
  Synthetic
ucccaaguagcugagacuac

SEQ ID NO: 795117 - RNA, 20 nt, Artificial Sequence
  Synthetic
ucccgagcaucuaggacuac

SEQ ID NO: 795118 - RNA, 20 nt, Artificial Sequence
  Synthetic
uccugaguagaugggacuac

SEQ ID NO: 795119 - RNA, 20 nt, Artificial Sequence
  Synthetic
uccagagcagcugggacuac

SEQ ID NO: 795120 - RNA, 20 nt, Artificial Sequence
  Synthetic
ucccgagcagcugggacuac

SEQ ID NO: 795121 - RNA, 20 nt, Artificial Sequence
  Synthetic
ccugccucagcugggacuac

SEQ ID NO: 795122 - RNA, 20 nt, Artificial Sequence
  Synthetic
ucccaaauagcugggacuac

SEQ ID NO: 795123 - RNA, 20 nt, Artificial Sequence
  Synthetic
ucccaaguagcugggacuac

SEQ ID NO: 795124 - RNA, 20 nt, Artificial Sequence
  Synthetic
uccagaguagcugggacuac

SEQ ID NO: 795125 - RNA, 20 nt, Artificial Sequence
  Synthetic
ucccgaguagcugggacuac

SEQ ID NO: 795126 - RNA, 20 nt, Artificial Sequence
  Synthetic
ucucgaguagcugggacuac

SEQ ID NO: 795127 - RNA, 20 nt, Artificial Sequence
  Synthetic
uccugaguagcugggacuac

SEQ ID NO: 795128 - RNA, 20 nt, Artificial Sequence
  Synthetic
ucuugaguagcugggacuac

SEQ ID NO: 795129 - RNA, 20 nt, Artificial Sequence
  Synthetic
ucccccguagcugggacuac

SEQ ID NO: 795130 - RNA, 20 nt, Artificial Sequence
  Synthetic
ucccagguagcugggacuac

SEQ ID NO: 795131 - RNA, 20 nt, Artificial Sequence
  Synthetic
uccuggguagcugggacuac

SEQ ID NO: 795132 - RNA, 20 nt, Artificial Sequence
  Synthetic
ucccauguagcugggacuac

SEQ ID NO: 795133 - RNA, 20 nt, Artificial Sequence
  Synthetic
ucccguguagcugggacuac

SEQ ID NO: 795134 - RNA, 20 nt, Artificial Sequence
  Synthetic
ucccaaguggcugggacuac

SEQ ID NO: 795135 - RNA, 20 nt, Artificial Sequence
  Synthetic
ucuuuaguggcugggacuac

SEQ ID NO: 795136 - RNA, 20 nt, Artificial Sequence
  Synthetic
uccugaguaucugggacuac

SEQ ID NO: 795137 - RNA, 20 nt, Artificial Sequence
  Synthetic
cuccugaguagugggacuac

SEQ ID NO: 795138 - RNA, 20 nt, Artificial Sequence
  Synthetic
accugcuccugaaugacuac

SEQ ID NO: 795139 - RNA, 20 nt, Artificial Sequence
  Synthetic
aauuugaaaucuaugacuac

SEQ ID NO: 795140 - RNA, 20 nt, Artificial Sequence
  Synthetic
aaaagccaaucuaugacuac

SEQ ID NO: 795141 - RNA, 20 nt, Artificial Sequence
  Synthetic
agaauaauaccacugacuac

SEQ ID NO: 795142 - RNA, 20 nt, Artificial Sequence
  Synthetic
uugaucuaguaaacuacuac

SEQ ID NO: 795143 - RNA, 20 nt, Artificial Sequence
  Synthetic
uggguagcugggacuacuac

SEQ ID NO: 795144 - RNA, 20 nt, Artificial Sequence
  Synthetic
ucccgaguagcugguacuac

SEQ ID NO: 795145 - RNA, 20 nt, Artificial Sequence
  Synthetic
cccugaguagcugguacuac

SEQ ID NO: 795146 - RNA, 20 nt, Artificial Sequence
  Synthetic
auaaggaaaggauguacuac

SEQ ID NO: 795147 - RNA, 20 nt, Artificial Sequence
  Synthetic
acugcugugaaauuuacuac

SEQ ID NO: 795148 - RNA, 20 nt, Artificial Sequence
  Synthetic
aacuacauaauauuuacuac

SEQ ID NO: 795149 - RNA, 20 nt, Artificial Sequence
  Synthetic
ugcuuuuccauuuuuacuac

SEQ ID NO: 795150 - RNA, 20 nt, Artificial Sequence
  Synthetic
uucguaggacagccaccuac

SEQ ID NO: 795151 - RNA, 20 nt, Artificial Sequence
  Synthetic
aaaauaaggcugagaccuac

SEQ ID NO: 795152 - RNA, 20 nt, Artificial Sequence
  Synthetic
auuuuuaucuuaugaccuac

SEQ ID NO: 795153 - RNA, 20 nt, Artificial Sequence
  Synthetic
auuaacuauagucacccuac

SEQ ID NO: 795154 - RNA, 20 nt, Artificial Sequence
  Synthetic
aaggaaaaauucuccccuac

SEQ ID NO: 795155 - RNA, 20 nt, Artificial Sequence
  Synthetic
ccagaggaucagaggccuac

SEQ ID NO: 795156 - RNA, 20 nt, Artificial Sequence
  Synthetic
uaacacacacuggggccuac

SEQ ID NO: 795157 - RNA, 20 nt, Artificial Sequence
  Synthetic
uugagucuagccuggccuac

SEQ ID NO: 795158 - RNA, 20 nt, Artificial Sequence
  Synthetic
cagagaggaagccugccuac

SEQ ID NO: 795159 - RNA, 20 nt, Artificial Sequence
  Synthetic
ugugcguuagaauugccuac

SEQ ID NO: 795160 - RNA, 20 nt, Artificial Sequence
  Synthetic
ucauugucccacucuccuac

SEQ ID NO: 795161 - RNA, 20 nt, Artificial Sequence
  Synthetic
uuucaccuuggagguccuac

SEQ ID NO: 795162 - RNA, 20 nt, Artificial Sequence
  Synthetic
uaggaaaucuuucaagcuac

SEQ ID NO: 795163 - RNA, 20 nt, Artificial Sequence
  Synthetic
acacuuauaaucccagcuac

SEQ ID NO: 795164 - RNA, 20 nt, Artificial Sequence
  Synthetic
gcgccuguagucccagcuac

SEQ ID NO: 795165 - RNA, 20 nt, Artificial Sequence
  Synthetic
aagaugggagccagagcuac

SEQ ID NO: 795166 - RNA, 20 nt, Artificial Sequence
  Synthetic
auauguuacauuugagcuac

SEQ ID NO: 795167 - RNA, 20 nt, Artificial Sequence
  Synthetic
aggaggaugggcauagcuac

SEQ ID NO: 795168 - RNA, 20 nt, Artificial Sequence
  Synthetic
acuguucaaucgguagcuac

SEQ ID NO: 795169 - RNA, 20 nt, Artificial Sequence
  Synthetic
ucccggguagcugaggcuac

SEQ ID NO: 795170 - RNA, 20 nt, Artificial Sequence
  Synthetic
aguggcaggaucucggcuac

SEQ ID NO: 795171 - RNA, 20 nt, Artificial Sequence
  Synthetic
agccaaaaugaaggggcuac

SEQ ID NO: 795172 - RNA, 20 nt, Artificial Sequence
  Synthetic
ucaggaguagcuggggcuac

SEQ ID NO: 795173 - RNA, 20 nt, Artificial Sequence
  Synthetic
uccugaguagcuggggcuac

SEQ ID NO: 795174 - RNA, 20 nt, Artificial Sequence
  Synthetic
ccuauuugugugaaugcuac

SEQ ID NO: 795175 - RNA, 20 nt, Artificial Sequence
  Synthetic
uuaccaccuggauaugcuac

SEQ ID NO: 795176 - RNA, 20 nt, Artificial Sequence
  Synthetic
auacauaauuacuaugcuac

SEQ ID NO: 795177 - RNA, 20 nt, Artificial Sequence
  Synthetic
agcaugaauuuuuaugcuac

SEQ ID NO: 795178 - RNA, 20 nt, Artificial Sequence
  Synthetic
uauuacuaugauagugcuac

SEQ ID NO: 795179 - RNA, 20 nt, Artificial Sequence
  Synthetic
caaagaagugauagugcuac

SEQ ID NO: 795180 - RNA, 20 nt, Artificial Sequence
  Synthetic
uaugcuuuuuaaugugcuac

SEQ ID NO: 795181 - RNA, 20 nt, Artificial Sequence
  Synthetic
auuuuuacuugauuugcuac

SEQ ID NO: 795182 - RNA, 20 nt, Artificial Sequence
  Synthetic
uuuauuucuggguuugcuac

SEQ ID NO: 795183 - RNA, 20 nt, Artificial Sequence
  Synthetic
uaaaaaaaggaaaaaucuac

SEQ ID NO: 795184 - RNA, 20 nt, Artificial Sequence
  Synthetic
acaucacuuuaauaaucuac

SEQ ID NO: 795185 - RNA, 20 nt, Artificial Sequence
  Synthetic
ucaaaacacugguaaucuac

SEQ ID NO: 795186 - RNA, 20 nt, Artificial Sequence
  Synthetic
cguaauuaguauuaaucuac

SEQ ID NO: 795187 - RNA, 20 nt, Artificial Sequence
  Synthetic
aaaugaaggcagacaucuac

SEQ ID NO: 795188 - RNA, 20 nt, Artificial Sequence
  Synthetic
uuguuuucagucauaucuac

SEQ ID NO: 795189 - RNA, 20 nt, Artificial Sequence
  Synthetic
uauauuucacuauuaucuac

SEQ ID NO: 795190 - RNA, 20 nt, Artificial Sequence
  Synthetic
ucagcagugccccacucuac

SEQ ID NO: 795191 - RNA, 20 nt, Artificial Sequence
  Synthetic
uuugggguuauauccucuac

SEQ ID NO: 795192 - RNA, 20 nt, Artificial Sequence
  Synthetic
acauaucuuugaaucucuac

SEQ ID NO: 795193 - RNA, 20 nt, Artificial Sequence
  Synthetic
aagaagugaaagaucucuac

SEQ ID NO: 795194 - RNA, 20 nt, Artificial Sequence
  Synthetic
aaaacccuguaguucucuac

SEQ ID NO: 795195 - RNA, 20 nt, Artificial Sequence
  Synthetic
uucuuacaucuguucucuac

SEQ ID NO: 795196 - RNA, 20 nt, Artificial Sequence
  Synthetic
accuugacucaaaagucuac

SEQ ID NO: 795197 - RNA, 20 nt, Artificial Sequence
  Synthetic
auauugacaguagagucuac

SEQ ID NO: 795198 - RNA, 20 nt, Artificial Sequence
  Synthetic
ucccaaguagccaggucuac

SEQ ID NO: 795199 - RNA, 20 nt, Artificial Sequence
  Synthetic
uagaaagucucuuggucuac

SEQ ID NO: 795200 - RNA, 20 nt, Artificial Sequence
  Synthetic
ugguaguaaauuaugucuac

SEQ ID NO: 795201 - RNA, 20 nt, Artificial Sequence
  Synthetic
aaauggcuaagauugucuac

SEQ ID NO: 795202 - RNA, 20 nt, Artificial Sequence
  Synthetic
augugacugguuuugucuac

SEQ ID NO: 795203 - RNA, 20 nt, Artificial Sequence
  Synthetic
aaauuuccaaauaauucuac

SEQ ID NO: 795204 - RNA, 20 nt, Artificial Sequence
  Synthetic
aguaaacaaagggauucuac

SEQ ID NO: 795205 - RNA, 20 nt, Artificial Sequence
  Synthetic
ccuuugacucaaccuucuac

SEQ ID NO: 795206 - RNA, 20 nt, Artificial Sequence
  Synthetic
ucuggaaucucaccuucuac

SEQ ID NO: 795207 - RNA, 20 nt, Artificial Sequence
  Synthetic
aaauggccagaggcuucuac

SEQ ID NO: 795208 - RNA, 20 nt, Artificial Sequence
  Synthetic
uuucuguaucuugcuucuac

SEQ ID NO: 795209 - RNA, 20 nt, Artificial Sequence
  Synthetic
uuccaaguuuacucuucuac

SEQ ID NO: 795210 - RNA, 20 nt, Artificial Sequence
  Synthetic
aguucucuauucuguucuac

SEQ ID NO: 795211 - RNA, 20 nt, Artificial Sequence
  Synthetic
ugaaguagggacaaaaguac

SEQ ID NO: 795212 - RNA, 20 nt, Artificial Sequence
  Synthetic
aaacaguucaguaaaaguac

SEQ ID NO: 795213 - RNA, 20 nt, Artificial Sequence
  Synthetic
uccucagccucccaaaguac

SEQ ID NO: 795214 - RNA, 20 nt, Artificial Sequence
  Synthetic
aagaagcuagaagaaaguac

SEQ ID NO: 795215 - RNA, 20 nt, Artificial Sequence
  Synthetic
cuaagguaacacacaaguac

SEQ ID NO: 795216 - RNA, 20 nt, Artificial Sequence
  Synthetic
accauucaggacacaaguac

SEQ ID NO: 795217 - RNA, 20 nt, Artificial Sequence
  Synthetic
aagcaaagagaugcaaguac

SEQ ID NO: 795218 - RNA, 20 nt, Artificial Sequence
  Synthetic
uaacuuaaaauaugaaguac

SEQ ID NO: 795219 - RNA, 20 nt, Artificial Sequence
  Synthetic
cugagagcucuuugaaguac

SEQ ID NO: 795220 - RNA, 20 nt, Artificial Sequence
  Synthetic
aaaaaauugacaauaaguac

SEQ ID NO: 795221 - RNA, 20 nt, Artificial Sequence
  Synthetic
auguaauaaaauauaaguac

SEQ ID NO: 795222 - RNA, 20 nt, Artificial Sequence
  Synthetic
uaaauauguacuuuaaguac

SEQ ID NO: 795223 - RNA, 20 nt, Artificial Sequence
  Synthetic
auaauuuaagugcacaguac

SEQ ID NO: 795224 - RNA, 20 nt, Artificial Sequence
  Synthetic
uaaaauccuuaauacaguac

SEQ ID NO: 795225 - RNA, 20 nt, Artificial Sequence
  Synthetic
aaauaauuaauauacaguac

SEQ ID NO: 795226 - RNA, 20 nt, Artificial Sequence
  Synthetic
accuuuuagauauacaguac

SEQ ID NO: 795227 - RNA, 20 nt, Artificial Sequence
  Synthetic
cuggggccacagaccaguac

SEQ ID NO: 795228 - RNA, 20 nt, Artificial Sequence
  Synthetic
aguaaagucacaugcaguac

SEQ ID NO: 795229 - RNA, 20 nt, Artificial Sequence
  Synthetic
cuguauauuaucugcaguac

SEQ ID NO: 795230 - RNA, 20 nt, Artificial Sequence
  Synthetic
ugaguuggugagugcaguac

SEQ ID NO: 795231 - RNA, 20 nt, Artificial Sequence
  Synthetic
auuuucauaauauucaguac

SEQ ID NO: 795232 - RNA, 20 nt, Artificial Sequence
  Synthetic
auggugcugccucagaguac

SEQ ID NO: 795233 - RNA, 20 nt, Artificial Sequence
  Synthetic
uauuacaguuuucagaguac

SEQ ID NO: 795234 - RNA, 20 nt, Artificial Sequence
  Synthetic
aauugaaauacugagaguac

SEQ ID NO: 795235 - RNA, 20 nt, Artificial Sequence
  Synthetic
uauuucuaggaaaggaguac

SEQ ID NO: 795236 - RNA, 20 nt, Artificial Sequence
  Synthetic
ccuugcagagucaggaguac

SEQ ID NO: 795237 - RNA, 20 nt, Artificial Sequence
  Synthetic
agagaaagauugaggaguac

SEQ ID NO: 795238 - RNA, 20 nt, Artificial Sequence
  Synthetic
ucccaaagugcugggaguac

SEQ ID NO: 795239 - RNA, 20 nt, Artificial Sequence
  Synthetic
aaaucaacuguuuauaguac

SEQ ID NO: 795240 - RNA, 20 nt, Artificial Sequence
  Synthetic
caugugacucaugcuaguac

SEQ ID NO: 795241 - RNA, 20 nt, Artificial Sequence
  Synthetic
uccacugucuucucuaguac

SEQ ID NO: 795242 - RNA, 20 nt, Artificial Sequence
  Synthetic
aaauaaauaauaaguaguac

SEQ ID NO: 795243 - RNA, 20 nt, Artificial Sequence
  Synthetic
acccuuguuuaacuuaguac

SEQ ID NO: 795244 - RNA, 20 nt, Artificial Sequence
  Synthetic
agugaggugugauuuaguac

SEQ ID NO: 795245 - RNA, 20 nt, Artificial Sequence
  Synthetic
cugaaguguaauauacguac

SEQ ID NO: 795246 - RNA, 20 nt, Artificial Sequence
  Synthetic
ugagauaaaugguaagguac

SEQ ID NO: 795247 - RNA, 20 nt, Artificial Sequence
  Synthetic
caaagagauggagcagguac

SEQ ID NO: 795248 - RNA, 20 nt, Artificial Sequence
  Synthetic
agagaauugacacuagguac

SEQ ID NO: 795249 - RNA, 20 nt, Artificial Sequence
  Synthetic
agauucccauuauucgguac

SEQ ID NO: 795250 - RNA, 20 nt, Artificial Sequence
  Synthetic
ccaauggggggaaaggguac

SEQ ID NO: 795251 - RNA, 20 nt, Artificial Sequence
  Synthetic
aaucaaaguugacaggguac

SEQ ID NO: 795252 - RNA, 20 nt, Artificial Sequence
  Synthetic
caggauacaaugggggguac

SEQ ID NO: 795253 - RNA, 20 nt, Artificial Sequence
  Synthetic
ucuguaaauuauugggguac

SEQ ID NO: 795254 - RNA, 20 nt, Artificial Sequence
  Synthetic
uaaccaaaacaacaugguac

SEQ ID NO: 795255 - RNA, 20 nt, Artificial Sequence
  Synthetic
aucaaagacaagcaugguac

SEQ ID NO: 795256 - RNA, 20 nt, Artificial Sequence
  Synthetic
uaaccaaaacagcaugguac

SEQ ID NO: 795257 - RNA, 20 nt, Artificial Sequence
  Synthetic
ucugacugaaaagaugguac

SEQ ID NO: 795258 - RNA, 20 nt, Artificial Sequence
  Synthetic
uucaaaauuuaauaugguac

SEQ ID NO: 795259 - RNA, 20 nt, Artificial Sequence
  Synthetic
uaagcaaaacagacugguac

SEQ ID NO: 795260 - RNA, 20 nt, Artificial Sequence
  Synthetic
uuucucucaguggcugguac

SEQ ID NO: 795261 - RNA, 20 nt, Artificial Sequence
  Synthetic
cauaaucuuuuugcugguac

SEQ ID NO: 795262 - RNA, 20 nt, Artificial Sequence
  Synthetic
aacaggcaacggauugguac

SEQ ID NO: 795263 - RNA, 20 nt, Artificial Sequence
  Synthetic
auuuagaagauaaaauguac

SEQ ID NO: 795264 - RNA, 20 nt, Artificial Sequence
  Synthetic
auagaacuaauauaauguac

SEQ ID NO: 795265 - RNA, 20 nt, Artificial Sequence
  Synthetic
uuaggaaaauccuaauguac

SEQ ID NO: 795266 - RNA, 20 nt, Artificial Sequence
  Synthetic
uacucuuccuaaacauguac

SEQ ID NO: 795267 - RNA, 20 nt, Artificial Sequence
  Synthetic
ugauguaauuuaacauguac

SEQ ID NO: 795268 - RNA, 20 nt, Artificial Sequence
  Synthetic
uaaaucuaucauacauguac

SEQ ID NO: 795269 - RNA, 20 nt, Artificial Sequence
  Synthetic
uauacagaggguacauguac

SEQ ID NO: 795270 - RNA, 20 nt, Artificial Sequence
  Synthetic
uucauuuaggaagcauguac

SEQ ID NO: 795271 - RNA, 20 nt, Artificial Sequence
  Synthetic
aaaaaugacuccucauguac

SEQ ID NO: 795272 - RNA, 20 nt, Artificial Sequence
  Synthetic
ccaguacuaauuucauguac

SEQ ID NO: 795273 - RNA, 20 nt, Artificial Sequence
  Synthetic
cugcuguuacagugauguac

SEQ ID NO: 795274 - RNA, 20 nt, Artificial Sequence
  Synthetic
acacauguauguauauguac

SEQ ID NO: 795275 - RNA, 20 nt, Artificial Sequence
  Synthetic
uuguuaauuccaguauguac

SEQ ID NO: 795276 - RNA, 20 nt, Artificial Sequence
  Synthetic
uccacacaaaauuuauguac

SEQ ID NO: 795277 - RNA, 20 nt, Artificial Sequence
  Synthetic
uuaauagaauguuuauguac

SEQ ID NO: 795278 - RNA, 20 nt, Artificial Sequence
  Synthetic
uuaucugaauuuuuauguac

SEQ ID NO: 795279 - RNA, 20 nt, Artificial Sequence
  Synthetic
uaaauugcaagagacuguac

SEQ ID NO: 795280 - RNA, 20 nt, Artificial Sequence
  Synthetic
aacaggucacugaccuguac

SEQ ID NO: 795281 - RNA, 20 nt, Artificial Sequence
  Synthetic
auauuuaucaucagcuguac

SEQ ID NO: 795282 - RNA, 20 nt, Artificial Sequence
  Synthetic
cacaguucugcaggcuguac

SEQ ID NO: 795283 - RNA, 20 nt, Artificial Sequence
  Synthetic
uacgguucugcaggcuguac

SEQ ID NO: 795284 - RNA, 20 nt, Artificial Sequence
  Synthetic
aguacagucacaugcuguac

SEQ ID NO: 795285 - RNA, 20 nt, Artificial Sequence
  Synthetic
uuuucuucuccaaucuguac

SEQ ID NO: 795286 - RNA, 20 nt, Artificial Sequence
  Synthetic
cauuccugccaacaguguac

SEQ ID NO: 795287 - RNA, 20 nt, Artificial Sequence
  Synthetic
cuaagagguacauaguguac

SEQ ID NO: 795288 - RNA, 20 nt, Artificial Sequence
  Synthetic
augcaauccacuguguguac

SEQ ID NO: 795289 - RNA, 20 nt, Artificial Sequence
  Synthetic
ugaagccuaagaaauuguac

SEQ ID NO: 795290 - RNA, 20 nt, Artificial Sequence
  Synthetic
uucaugagauguaauuguac

SEQ ID NO: 795291 - RNA, 20 nt, Artificial Sequence
  Synthetic
augaagucuuugcauuguac

SEQ ID NO: 795292 - RNA, 20 nt, Artificial Sequence
  Synthetic
aagagaugaugagauuguac

SEQ ID NO: 795293 - RNA, 20 nt, Artificial Sequence
  Synthetic
acuucuauucaguauuguac

SEQ ID NO: 795294 - RNA, 20 nt, Artificial Sequence
  Synthetic
aaucucucaguaaguuguac

SEQ ID NO: 795295 - RNA, 20 nt, Artificial Sequence
  Synthetic
caugauucugcagguuguac

SEQ ID NO: 795296 - RNA, 20 nt, Artificial Sequence
  Synthetic
uaccuuugcagagguuguac

SEQ ID NO: 795297 - RNA, 20 nt, Artificial Sequence
  Synthetic
aaugcuuuugaauuuuguac

SEQ ID NO: 795298 - RNA, 20 nt, Artificial Sequence
  Synthetic
uacuucggccaguuuuguac

SEQ ID NO: 795299 - RNA, 20 nt, Artificial Sequence
  Synthetic
ugguaugaauauuuuuguac

SEQ ID NO: 795300 - RNA, 20 nt, Artificial Sequence
  Synthetic
agaagcaucuuagaaauuac

SEQ ID NO: 795301 - RNA, 20 nt, Artificial Sequence
  Synthetic
cuauaccaaguaccaauuac

SEQ ID NO: 795302 - RNA, 20 nt, Artificial Sequence
  Synthetic
ccacaacacaugggaauuac

SEQ ID NO: 795303 - RNA, 20 nt, Artificial Sequence
  Synthetic
ucccaaagcgcuggaauuac

SEQ ID NO: 795304 - RNA, 20 nt, Artificial Sequence
  Synthetic
ucccaaagugcuggaauuac

SEQ ID NO: 795305 - RNA, 20 nt, Artificial Sequence
  Synthetic
uccuaaggugcuggaauuac

SEQ ID NO: 795306 - RNA, 20 nt, Artificial Sequence
  Synthetic
acucagagucccugaauuac

SEQ ID NO: 795307 - RNA, 20 nt, Artificial Sequence
  Synthetic
uuuucuaggugcugaauuac

SEQ ID NO: 795308 - RNA, 20 nt, Artificial Sequence
  Synthetic
aaaggagaccugugaauuac

SEQ ID NO: 795309 - RNA, 20 nt, Artificial Sequence
  Synthetic
acuauggcaaauugaauuac

SEQ ID NO: 795310 - RNA, 20 nt, Artificial Sequence
  Synthetic
cuaaccaacaucauaauuac

SEQ ID NO: 795311 - RNA, 20 nt, Artificial Sequence
  Synthetic
cucucuccaaacuuaauuac

SEQ ID NO: 795312 - RNA, 20 nt, Artificial Sequence
  Synthetic
uuuuucacaguaaccauuac

SEQ ID NO: 795313 - RNA, 20 nt, Artificial Sequence
  Synthetic
ugcacaaaauuaaccauuac

SEQ ID NO: 795314 - RNA, 20 nt, Artificial Sequence
  Synthetic
ugacccagcaaucccauuac

SEQ ID NO: 795315 - RNA, 20 nt, Artificial Sequence
  Synthetic
ugauccagcaaucccauuac

SEQ ID NO: 795316 - RNA, 20 nt, Artificial Sequence
  Synthetic
ugacccagccaucccauuac

SEQ ID NO: 795317 - RNA, 20 nt, Artificial Sequence
  Synthetic
uaacucagccaucccauuac

SEQ ID NO: 795318 - RNA, 20 nt, Artificial Sequence
  Synthetic
ugacccggccaucccauuac

SEQ ID NO: 795319 - RNA, 20 nt, Artificial Sequence
  Synthetic
caaccuagugaucccauuac

SEQ ID NO: 795320 - RNA, 20 nt, Artificial Sequence
  Synthetic
ugacccagcuaucccauuac

SEQ ID NO: 795321 - RNA, 20 nt, Artificial Sequence
  Synthetic
caacccagcaaugccauuac

SEQ ID NO: 795322 - RNA, 20 nt, Artificial Sequence
  Synthetic
agcucuguucaugccauuac

SEQ ID NO: 795323 - RNA, 20 nt, Artificial Sequence
  Synthetic
cauucagaagauuccauuac

SEQ ID NO: 795324 - RNA, 20 nt, Artificial Sequence
  Synthetic
auuuagaaagaaggcauuac

SEQ ID NO: 795325 - RNA, 20 nt, Artificial Sequence
  Synthetic
uaccgaguagcuggcauuac

SEQ ID NO: 795326 - RNA, 20 nt, Artificial Sequence
  Synthetic
uuugcaaaaaaaaucauuac

SEQ ID NO: 795327 - RNA, 20 nt, Artificial Sequence
  Synthetic
uuuugacugugacucauuac

SEQ ID NO: 795328 - RNA, 20 nt, Artificial Sequence
  Synthetic
uuauaaacaguagucauuac

SEQ ID NO: 795329 - RNA, 20 nt, Artificial Sequence
  Synthetic
ucccaaaaugccgagauuac

SEQ ID NO: 795330 - RNA, 20 nt, Artificial Sequence
  Synthetic
ucccaaguagcugagauuac

SEQ ID NO: 795331 - RNA, 20 nt, Artificial Sequence
  Synthetic
uccagaguagcugagauuac

SEQ ID NO: 795332 - RNA, 20 nt, Artificial Sequence
  Synthetic
ucccgaguagcugagauuac

SEQ ID NO: 795333 - RNA, 20 nt, Artificial Sequence
  Synthetic
ucccaaaacgcugagauuac

SEQ ID NO: 795334 - RNA, 20 nt, Artificial Sequence
  Synthetic
uccugaagcgcugagauuac

SEQ ID NO: 795335 - RNA, 20 nt, Artificial Sequence
  Synthetic
ucccaaagugcugagauuac

SEQ ID NO: 795336 - RNA, 20 nt, Artificial Sequence
  Synthetic
ucccaaaguguugagauuac

SEQ ID NO: 795337 - RNA, 20 nt, Artificial Sequence
  Synthetic
cagagcugagauuagauuac

SEQ ID NO: 795338 - RNA, 20 nt, Artificial Sequence
  Synthetic
augaauuugcuuuagauuac

SEQ ID NO: 795339 - RNA, 20 nt, Artificial Sequence
  Synthetic
ucccaaagugcugcgauuac

SEQ ID NO: 795340 - RNA, 20 nt, Artificial Sequence
  Synthetic
ucccaaagcacuaggauuac

SEQ ID NO: 795341 - RNA, 20 nt, Artificial Sequence
  Synthetic
ucccaaaguacuaggauuac

SEQ ID NO: 795342 - RNA, 20 nt, Artificial Sequence
  Synthetic
ucccaaguagcuaggauuac

SEQ ID NO: 795343 - RNA, 20 nt, Artificial Sequence
  Synthetic
ugccaaguagcuaggauuac

SEQ ID NO: 795344 - RNA, 20 nt, Artificial Sequence
  Synthetic
ucccaaagugcuaggauuac

SEQ ID NO: 795345 - RNA, 20 nt, Artificial Sequence
  Synthetic
ucccaaaguguuaggauuac

SEQ ID NO: 795346 - RNA, 20 nt, Artificial Sequence
  Synthetic
ucccaaagcacagggauuac

SEQ ID NO: 795347 - RNA, 20 nt, Artificial Sequence
  Synthetic
ucccaaagugcggggauuac

SEQ ID NO: 795348 - RNA, 20 nt, Artificial Sequence
  Synthetic
uccgaaagugcggggauuac

SEQ ID NO: 795349 - RNA, 20 nt, Artificial Sequence
  Synthetic
acaugacacauggggauuac

SEQ ID NO: 795350 - RNA, 20 nt, Artificial Sequence
  Synthetic
ucccgaguaacugggauuac

SEQ ID NO: 795351 - RNA, 20 nt, Artificial Sequence
  Synthetic
ucccaaaguacugggauuac

SEQ ID NO: 795352 - RNA, 20 nt, Artificial Sequence
  Synthetic
ucccagagaccugggauuac

SEQ ID NO: 795353 - RNA, 20 nt, Artificial Sequence
  Synthetic
ucccaaguaccugggauuac

SEQ ID NO: 795354 - RNA, 20 nt, Artificial Sequence
  Synthetic
ucccaaaguccugggauuac

SEQ ID NO: 795355 - RNA, 20 nt, Artificial Sequence
  Synthetic
ccccaaagagcugggauuac

SEQ ID NO: 795356 - RNA, 20 nt, Artificial Sequence
  Synthetic
uccugaauagcugggauuac

SEQ ID NO: 795357 - RNA, 20 nt, Artificial Sequence
  Synthetic
ucccaaguagcugggauuac

SEQ ID NO: 795358 - RNA, 20 nt, Artificial Sequence
  Synthetic
uuccaaguagcugggauuac

SEQ ID NO: 795359 - RNA, 20 nt, Artificial Sequence
  Synthetic
ugcuaaguagcugggauuac

SEQ ID NO: 795360 - RNA, 20 nt, Artificial Sequence
  Synthetic
uaccgaguagcugggauuac

SEQ ID NO: 795361 - RNA, 20 nt, Artificial Sequence
  Synthetic
ucccgaguagcugggauuac

SEQ ID NO: 795362 - RNA, 20 nt, Artificial Sequence
  Synthetic
uccugaguagcugggauuac

SEQ ID NO: 795363 - RNA, 20 nt, Artificial Sequence
  Synthetic
ucccuaguagcugggauuac

SEQ ID NO: 795364 - RNA, 20 nt, Artificial Sequence
  Synthetic
cucccgguagcugggauuac

SEQ ID NO: 795365 - RNA, 20 nt, Artificial Sequence
  Synthetic
ucccaaguggcugggauuac

SEQ ID NO: 795366 - RNA, 20 nt, Artificial Sequence
  Synthetic
uccagaguggcugggauuac

SEQ ID NO: 795367 - RNA, 20 nt, Artificial Sequence
  Synthetic
ucccgaguggcugggauuac

SEQ ID NO: 795368 - RNA, 20 nt, Artificial Sequence
  Synthetic
uccaaaaaugcugggauuac

SEQ ID NO: 795369 - RNA, 20 nt, Artificial Sequence
  Synthetic
acccaaagugcugggauuac

SEQ ID NO: 795370 - RNA, 20 nt, Artificial Sequence
  Synthetic
ccccaaagugcugggauuac

SEQ ID NO: 795371 - RNA, 20 nt, Artificial Sequence
  Synthetic
ucccaaagugcugggauuac

SEQ ID NO: 795372 - RNA, 20 nt, Artificial Sequence
  Synthetic
uuccaaagugcugggauuac

SEQ ID NO: 795373 - RNA, 20 nt, Artificial Sequence
  Synthetic
ucucaaagugcugggauuac

SEQ ID NO: 795374 - RNA, 20 nt, Artificial Sequence
  Synthetic
uccgaaagugcugggauuac

SEQ ID NO: 795375 - RNA, 20 nt, Artificial Sequence
  Synthetic
uccccaagugcugggauuac

SEQ ID NO: 795376 - RNA, 20 nt, Artificial Sequence
  Synthetic
ucccgaagugcugggauuac

SEQ ID NO: 795377 - RNA, 20 nt, Artificial Sequence
  Synthetic
ucccuaagugcugggauuac

SEQ ID NO: 795378 - RNA, 20 nt, Artificial Sequence
  Synthetic
ucccacagugcugggauuac

SEQ ID NO: 795379 - RNA, 20 nt, Artificial Sequence
  Synthetic
ucccagagugcugggauuac

SEQ ID NO: 795380 - RNA, 20 nt, Artificial Sequence
  Synthetic
ucccauagugcugggauuac

SEQ ID NO: 795381 - RNA, 20 nt, Artificial Sequence
  Synthetic
ucucaaauugcugggauuac

SEQ ID NO: 795382 - RNA, 20 nt, Artificial Sequence
  Synthetic
uccagaguugcugggauuac

SEQ ID NO: 795383 - RNA, 20 nt, Artificial Sequence
  Synthetic
ucccaaguaucugggauuac

SEQ ID NO: 795384 - RNA, 20 nt, Artificial Sequence
  Synthetic
ucccaaaguggugggauuac

SEQ ID NO: 795385 - RNA, 20 nt, Artificial Sequence
  Synthetic
ucccaaauccuugggauuac

SEQ ID NO: 795386 - RNA, 20 nt, Artificial Sequence
  Synthetic
ucccgaguaguugggauuac

SEQ ID NO: 795387 - RNA, 20 nt, Artificial Sequence
  Synthetic
ccccaaaguguugggauuac

SEQ ID NO: 795388 - RNA, 20 nt, Artificial Sequence
  Synthetic
ucccaaagcaccuggauuac

SEQ ID NO: 795389 - RNA, 20 nt, Artificial Sequence
  Synthetic
ucccaaagugcuuggauuac

SEQ ID NO: 795390 - RNA, 20 nt, Artificial Sequence
  Synthetic
uaaggcugaucuuggauuac

SEQ ID NO: 795391 - RNA, 20 nt, Artificial Sequence
  Synthetic
caauaaacagccaugauuac

SEQ ID NO: 795392 - RNA, 20 nt, Artificial Sequence
  Synthetic
ucaucuuuuuaaaauauuac

SEQ ID NO: 795393 - RNA, 20 nt, Artificial Sequence
  Synthetic
ucccaaauugcugauauuac

SEQ ID NO: 795394 - RNA, 20 nt, Artificial Sequence
  Synthetic
ccacugcaauggaguauuac

SEQ ID NO: 795395 - RNA, 20 nt, Artificial Sequence
  Synthetic
acaaagauuucuaguauuac

SEQ ID NO: 795396 - RNA, 20 nt, Artificial Sequence
  Synthetic
ucccaaagugcugguauuac

SEQ ID NO: 795397 - RNA, 20 nt, Artificial Sequence
  Synthetic
aauagggaaagauguauuac

SEQ ID NO: 795398 - RNA, 20 nt, Artificial Sequence
  Synthetic
uugagauuuauauguauuac

SEQ ID NO: 795399 - RNA, 20 nt, Artificial Sequence
  Synthetic
cucaagcucuuacuuauuac

SEQ ID NO: 795400 - RNA, 20 nt, Artificial Sequence
  Synthetic
uuuguuuuccaaaaacuuac

SEQ ID NO: 795401 - RNA, 20 nt, Artificial Sequence
  Synthetic
ugaagugaaaugaaacuuac

SEQ ID NO: 795402 - RNA, 20 nt, Artificial Sequence
  Synthetic
acaauuuuccauaaacuuac

SEQ ID NO: 795403 - RNA, 20 nt, Artificial Sequence
  Synthetic
ccuggaaauauuaaacuuac

SEQ ID NO: 795404 - RNA, 20 nt, Artificial Sequence
  Synthetic
cauuaagaauucuaacuuac

SEQ ID NO: 795405 - RNA, 20 nt, Artificial Sequence
  Synthetic
agugauggguucacacuuac

SEQ ID NO: 795406 - RNA, 20 nt, Artificial Sequence
  Synthetic
aucccagugcugacacuuac

SEQ ID NO: 795407 - RNA, 20 nt, Artificial Sequence
  Synthetic
ugaaauacauauacacuuac

SEQ ID NO: 795408 - RNA, 20 nt, Artificial Sequence
  Synthetic
uaagcaaagauuacacuuac

SEQ ID NO: 795409 - RNA, 20 nt, Artificial Sequence
  Synthetic
aagugauaacauauacuuac

SEQ ID NO: 795410 - RNA, 20 nt, Artificial Sequence
  Synthetic
auccuuguucugcuacuuac

SEQ ID NO: 795411 - RNA, 20 nt, Artificial Sequence
  Synthetic
uaaauuaagaaaguacuuac

SEQ ID NO: 795412 - RNA, 20 nt, Artificial Sequence
  Synthetic
acaccacauuauuuacuuac

SEQ ID NO: 795413 - RNA, 20 nt, Artificial Sequence
  Synthetic
uuugaauacugaccccuuac

SEQ ID NO: 795414 - RNA, 20 nt, Artificial Sequence
  Synthetic
ucuugugaaaauugccuuac

SEQ ID NO: 795415 - RNA, 20 nt, Artificial Sequence
  Synthetic
cugccuuccuaaguccuuac

SEQ ID NO: 795416 - RNA, 20 nt, Artificial Sequence
  Synthetic
aaccaugaagccuuccuuac

SEQ ID NO: 795417 - RNA, 20 nt, Artificial Sequence
  Synthetic
aaacaauuguccaagcuuac

SEQ ID NO: 795418 - RNA, 20 nt, Artificial Sequence
  Synthetic
uacaaggucaaacagcuuac

SEQ ID NO: 795419 - RNA, 20 nt, Artificial Sequence
  Synthetic
aacacucacuaauggcuuac

SEQ ID NO: 795420 - RNA, 20 nt, Artificial Sequence
  Synthetic
aguaagauuugaaaucuuac

SEQ ID NO: 795421 - RNA, 20 nt, Artificial Sequence
  Synthetic
uugccuuuuugguaucuuac

SEQ ID NO: 795422 - RNA, 20 nt, Artificial Sequence
  Synthetic
uguuuaccuauuuaucuuac

SEQ ID NO: 795423 - RNA, 20 nt, Artificial Sequence
  Synthetic
cguuuuccugcccgucuuac

SEQ ID NO: 795424 - RNA, 20 nt, Artificial Sequence
  Synthetic
ccaaucuggaaaggucuuac

SEQ ID NO: 795425 - RNA, 20 nt, Artificial Sequence
  Synthetic
uuuugcucugguugucuuac

SEQ ID NO: 795426 - RNA, 20 nt, Artificial Sequence
  Synthetic
agcuaagcuguaauucuuac

SEQ ID NO: 795427 - RNA, 20 nt, Artificial Sequence
  Synthetic
auauaauggccuauucuuac

SEQ ID NO: 795428 - RNA, 20 nt, Artificial Sequence
  Synthetic
aguaauuuuuguauucuuac

SEQ ID NO: 795429 - RNA, 20 nt, Artificial Sequence
  Synthetic
uaagggauauuuguucuuac

SEQ ID NO: 795430 - RNA, 20 nt, Artificial Sequence
  Synthetic
uauuuuccacgcuuucuuac

SEQ ID NO: 795431 - RNA, 20 nt, Artificial Sequence
  Synthetic
caaaccacucuaaaaguuac

SEQ ID NO: 795432 - RNA, 20 nt, Artificial Sequence
  Synthetic
uggaccugcaccaaaguuac

SEQ ID NO: 795433 - RNA, 20 nt, Artificial Sequence
  Synthetic
aagaccagugaacaaguuac

SEQ ID NO: 795434 - RNA, 20 nt, Artificial Sequence
  Synthetic
ucccuauuagaagaaguuac

SEQ ID NO: 795435 - RNA, 20 nt, Artificial Sequence
  Synthetic
aauagauuucaugaaguuac

SEQ ID NO: 795436 - RNA, 20 nt, Artificial Sequence
  Synthetic
ugaaauauuaaaacaguuac

SEQ ID NO: 795437 - RNA, 20 nt, Artificial Sequence
  Synthetic
uacauaaucacaacaguuac

SEQ ID NO: 795438 - RNA, 20 nt, Artificial Sequence
  Synthetic
aaacacuggaugacaguuac

SEQ ID NO: 795439 - RNA, 20 nt, Artificial Sequence
  Synthetic
aauguuucaaagucaguuac

SEQ ID NO: 795440 - RNA, 20 nt, Artificial Sequence
  Synthetic
cauuugucuguuucaguuac

SEQ ID NO: 795441 - RNA, 20 nt, Artificial Sequence
  Synthetic
aauguuaacugacgaguuac

SEQ ID NO: 795442 - RNA, 20 nt, Artificial Sequence
  Synthetic
aaggcuaaucagauaguuac

SEQ ID NO: 795443 - RNA, 20 nt, Artificial Sequence
  Synthetic
cucaugggucuuuuaguuac

SEQ ID NO: 795444 - RNA, 20 nt, Artificial Sequence
  Synthetic
ucaaccuugcugcucguuac

SEQ ID NO: 795445 - RNA, 20 nt, Artificial Sequence
  Synthetic
uguaaugggggaaagguuac

SEQ ID NO: 795446 - RNA, 20 nt, Artificial Sequence
  Synthetic
uuuaaaugcauugagguuac

SEQ ID NO: 795447 - RNA, 20 nt, Artificial Sequence
  Synthetic
ucccuaagcgcuaggguuac

SEQ ID NO: 795448 - RNA, 20 nt, Artificial Sequence
  Synthetic
uccugaguagcugggguuac

SEQ ID NO: 795449 - RNA, 20 nt, Artificial Sequence
  Synthetic
ucccaaagugcugggguuac

SEQ ID NO: 795450 - RNA, 20 nt, Artificial Sequence
  Synthetic
ugcacuccagccuggguuac

SEQ ID NO: 795451 - RNA, 20 nt, Artificial Sequence
  Synthetic
aauuuugauaguuugguuac

SEQ ID NO: 795452 - RNA, 20 nt, Artificial Sequence
  Synthetic
ucaaauggucuuuugguuac

SEQ ID NO: 795453 - RNA, 20 nt, Artificial Sequence
  Synthetic
cucuuaaauccaaauguuac

SEQ ID NO: 795454 - RNA, 20 nt, Artificial Sequence
  Synthetic
uucuugcacugcaauguuac

SEQ ID NO: 795455 - RNA, 20 nt, Artificial Sequence
  Synthetic
cuggugauaagagauguuac

SEQ ID NO: 795456 - RNA, 20 nt, Artificial Sequence
  Synthetic
aggucugaugcugauguuac

SEQ ID NO: 795457 - RNA, 20 nt, Artificial Sequence
  Synthetic
aucacuguugcauauguuac

SEQ ID NO: 795458 - RNA, 20 nt, Artificial Sequence
  Synthetic
aauuauaucacuuauguuac

SEQ ID NO: 795459 - RNA, 20 nt, Artificial Sequence
  Synthetic
acucuuuccuuagcuguuac

SEQ ID NO: 795460 - RNA, 20 nt, Artificial Sequence
  Synthetic
acauacuaaguagguguuac

SEQ ID NO: 795461 - RNA, 20 nt, Artificial Sequence
  Synthetic
uguuaauuauaauguguuac

SEQ ID NO: 795462 - RNA, 20 nt, Artificial Sequence
  Synthetic
aaaaaaaucugucuuguuac

SEQ ID NO: 795463 - RNA, 20 nt, Artificial Sequence
  Synthetic
cacaaauugugaguuguuac

SEQ ID NO: 795464 - RNA, 20 nt, Artificial Sequence
  Synthetic
cccuuuauuauuguuguuac

SEQ ID NO: 795465 - RNA, 20 nt, Artificial Sequence
  Synthetic
aagcuaacuaaauuuguuac

SEQ ID NO: 795466 - RNA, 20 nt, Artificial Sequence
  Synthetic
uguguguguucauuuguuac

SEQ ID NO: 795467 - RNA, 20 nt, Artificial Sequence
  Synthetic
ucaaggcacuugaaauuuac

SEQ ID NO: 795468 - RNA, 20 nt, Artificial Sequence
  Synthetic
aaaagcuuaucuaaauuuac

SEQ ID NO: 795469 - RNA, 20 nt, Artificial Sequence
  Synthetic
uacagucucuugcaauuuac

SEQ ID NO: 795470 - RNA, 20 nt, Artificial Sequence
  Synthetic
caggauccagaucaauuuac

SEQ ID NO: 795471 - RNA, 20 nt, Artificial Sequence
  Synthetic
ucagaaccauuggaauuuac

SEQ ID NO: 795472 - RNA, 20 nt, Artificial Sequence
  Synthetic
aaaucuuuaaaauaauuuac

SEQ ID NO: 795473 - RNA, 20 nt, Artificial Sequence
  Synthetic
uaagacaaaagaacauuuac

SEQ ID NO: 795474 - RNA, 20 nt, Artificial Sequence
  Synthetic
cacuagaagaggacauuuac

SEQ ID NO: 795475 - RNA, 20 nt, Artificial Sequence
  Synthetic
uuccuuuaugaaccauuuac

SEQ ID NO: 795476 - RNA, 20 nt, Artificial Sequence
  Synthetic
ucauucuuuccaccauuuac

SEQ ID NO: 795477 - RNA, 20 nt, Artificial Sequence
  Synthetic
uugaauauuuugccauuuac

SEQ ID NO: 795478 - RNA, 20 nt, Artificial Sequence
  Synthetic
ugaauucccauuccauuuac

SEQ ID NO: 795479 - RNA, 20 nt, Artificial Sequence
  Synthetic
ucccacuacagagcauuuac

SEQ ID NO: 795480 - RNA, 20 nt, Artificial Sequence
  Synthetic
aguuuuuagcugagauuuac

SEQ ID NO: 795481 - RNA, 20 nt, Artificial Sequence
  Synthetic
cccaaagugcugggauuuac

SEQ ID NO: 795482 - RNA, 20 nt, Artificial Sequence
  Synthetic
ccaugucauuggugauuuac

SEQ ID NO: 795483 - RNA, 20 nt, Artificial Sequence
  Synthetic
aggauguacaaaauauuuac

SEQ ID NO: 795484 - RNA, 20 nt, Artificial Sequence
  Synthetic
ugaacugccuaaauauuuac

SEQ ID NO: 795485 - RNA, 20 nt, Artificial Sequence
  Synthetic
uaaauggaucuaauauuuac

SEQ ID NO: 795486 - RNA, 20 nt, Artificial Sequence
  Synthetic
uaguaggugcauauauuuac

SEQ ID NO: 795487 - RNA, 20 nt, Artificial Sequence
  Synthetic
uaguagguauauauauuuac

SEQ ID NO: 795488 - RNA, 20 nt, Artificial Sequence
  Synthetic
aauuucucuuaacuauuuac

SEQ ID NO: 795489 - RNA, 20 nt, Artificial Sequence
  Synthetic
agcaugcacgguguauuuac

SEQ ID NO: 795490 - RNA, 20 nt, Artificial Sequence
  Synthetic
uguuccagccauuuauuuac

SEQ ID NO: 795491 - RNA, 20 nt, Artificial Sequence
  Synthetic
uuccaucaaaguuuauuuac

SEQ ID NO: 795492 - RNA, 20 nt, Artificial Sequence
  Synthetic
uacauuuaguagaacuuuac

SEQ ID NO: 795493 - RNA, 20 nt, Artificial Sequence
  Synthetic
aacaguuaauguuacuuuac

SEQ ID NO: 795494 - RNA, 20 nt, Artificial Sequence
  Synthetic
aauauuacaccuuccuuuac

SEQ ID NO: 795495 - RNA, 20 nt, Artificial Sequence
  Synthetic
cuugauaacauacucuuuac

SEQ ID NO: 795496 - RNA, 20 nt, Artificial Sequence
  Synthetic
ccuccuccuucagucuuuac

SEQ ID NO: 795497 - RNA, 20 nt, Artificial Sequence
  Synthetic
cuuuauucaaaagaguuuac

SEQ ID NO: 795498 - RNA, 20 nt, Artificial Sequence
  Synthetic
aucacaauauaaacguuuac

SEQ ID NO: 795499 - RNA, 20 nt, Artificial Sequence
  Synthetic
ucccaaagugcuggguuuac

SEQ ID NO: 795500 - RNA, 20 nt, Artificial Sequence
  Synthetic
caaagcuuccuaauguuuac

SEQ ID NO: 795501 - RNA, 20 nt, Artificial Sequence
  Synthetic
ccaggagacuuccuguuuac

SEQ ID NO: 795502 - RNA, 20 nt, Artificial Sequence
  Synthetic
acuaugucuuuccuguuuac

SEQ ID NO: 795503 - RNA, 20 nt, Artificial Sequence
  Synthetic
uaagaauuucugaauuuuac

SEQ ID NO: 795504 - RNA, 20 nt, Artificial Sequence
  Synthetic
cuaugggcauauaauuuuac

SEQ ID NO: 795505 - RNA, 20 nt, Artificial Sequence
  Synthetic
uuaaugucaaguaauuuuac

SEQ ID NO: 795506 - RNA, 20 nt, Artificial Sequence
  Synthetic
uauucuccuuuuaauuuuac

SEQ ID NO: 795507 - RNA, 20 nt, Artificial Sequence
  Synthetic
auacauuucucccauuuuac

SEQ ID NO: 795508 - RNA, 20 nt, Artificial Sequence
  Synthetic
auuuugaaaugccauuuuac

SEQ ID NO: 795509 - RNA, 20 nt, Artificial Sequence
  Synthetic
uuuuauuuuucucauuuuac

SEQ ID NO: 795510 - RNA, 20 nt, Artificial Sequence
  Synthetic
uugcugaaccuggauuuuac

SEQ ID NO: 795511 - RNA, 20 nt, Artificial Sequence
  Synthetic
uaacuugcuuuugauuuuac

SEQ ID NO: 795512 - RNA, 20 nt, Artificial Sequence
  Synthetic
aauuaaaagacauauuuuac

SEQ ID NO: 795513 - RNA, 20 nt, Artificial Sequence
  Synthetic
augaguaguaccuauuuuac

SEQ ID NO: 795514 - RNA, 20 nt, Artificial Sequence
  Synthetic
agaaaaaugauguauuuuac

SEQ ID NO: 795515 - RNA, 20 nt, Artificial Sequence
  Synthetic
cacaucccagauuauuuuac

SEQ ID NO: 795516 - RNA, 20 nt, Artificial Sequence
  Synthetic
ucuaucaacccuuauuuuac

SEQ ID NO: 795517 - RNA, 20 nt, Artificial Sequence
  Synthetic
auauguauuugaccuuuuac

SEQ ID NO: 795518 - RNA, 20 nt, Artificial Sequence
  Synthetic
uuauucuaaagagcuuuuac

SEQ ID NO: 795519 - RNA, 20 nt, Artificial Sequence
  Synthetic
ccucuccuggcugcuuuuac

SEQ ID NO: 795520 - RNA, 20 nt, Artificial Sequence
  Synthetic
agugacugaguuucuuuuac

SEQ ID NO: 795521 - RNA, 20 nt, Artificial Sequence
  Synthetic
uuuuguaaauaaaguuuuac

SEQ ID NO: 795522 - RNA, 20 nt, Artificial Sequence
  Synthetic
agaaaguuacucaguuuuac

SEQ ID NO: 795523 - RNA, 20 nt, Artificial Sequence
  Synthetic
ucaagcaauuuagguuuuac

SEQ ID NO: 795524 - RNA, 20 nt, Artificial Sequence
  Synthetic
auucaucuauauauuuuuac

SEQ ID NO: 795525 - RNA, 20 nt, Artificial Sequence
  Synthetic
uuucaguauucuauuuuuac

SEQ ID NO: 795526 - RNA, 20 nt, Artificial Sequence
  Synthetic
uuuguguggauguuuuuuac

SEQ ID NO: 795527 - RNA, 20 nt, Artificial Sequence
  Synthetic
ugucaccagaaccaaaaacc

SEQ ID NO: 795528 - RNA, 20 nt, Artificial Sequence
  Synthetic
uuuauggagaugcaaaaacc

SEQ ID NO: 795529 - RNA, 20 nt, Artificial Sequence
  Synthetic
uagaaagauuaauaaaaacc

SEQ ID NO: 795530 - RNA, 20 nt, Artificial Sequence
  Synthetic
cuaugcacaauauaaaaacc

SEQ ID NO: 795531 - RNA, 20 nt, Artificial Sequence
  Synthetic
uuauuauuucuauaaaaacc

SEQ ID NO: 795532 - RNA, 20 nt, Artificial Sequence
  Synthetic
cugguaccugcaacaaaacc

SEQ ID NO: 795533 - RNA, 20 nt, Artificial Sequence
  Synthetic
uccuacauccucacaaaacc

SEQ ID NO: 795534 - RNA, 20 nt, Artificial Sequence
  Synthetic
aaaguacuccucacaaaacc

SEQ ID NO: 795535 - RNA, 20 nt, Artificial Sequence
  Synthetic
aagagaacucugacaaaacc

SEQ ID NO: 795536 - RNA, 20 nt, Artificial Sequence
  Synthetic
agcauccugauaccaaaacc

SEQ ID NO: 795537 - RNA, 20 nt, Artificial Sequence
  Synthetic
aucauccugauaccaaaacc

SEQ ID NO: 795538 - RNA, 20 nt, Artificial Sequence
  Synthetic
uaccuugaagaaagaaaacc

SEQ ID NO: 795539 - RNA, 20 nt, Artificial Sequence
  Synthetic
ugcauucgugaaagaaaacc

SEQ ID NO: 795540 - RNA, 20 nt, Artificial Sequence
  Synthetic
uaacacaggaacagaaaacc

SEQ ID NO: 795541 - RNA, 20 nt, Artificial Sequence
  Synthetic
aaauuguccuacagaaaacc

SEQ ID NO: 795542 - RNA, 20 nt, Artificial Sequence
  Synthetic
ugugauuuauagagaaaacc

SEQ ID NO: 795543 - RNA, 20 nt, Artificial Sequence
  Synthetic
cuucuaccuacaugaaaacc

SEQ ID NO: 795544 - RNA, 20 nt, Artificial Sequence
  Synthetic
aucaauuaaagaugaaaacc

SEQ ID NO: 795545 - RNA, 20 nt, Artificial Sequence
  Synthetic
agacaggucaggugaaaacc

SEQ ID NO: 795546 - RNA, 20 nt, Artificial Sequence
  Synthetic
uauccuuaagggugaaaacc

SEQ ID NO: 795547 - RNA, 20 nt, Artificial Sequence
  Synthetic
ucuaucauugcucuaaaacc

SEQ ID NO: 795548 - RNA, 20 nt, Artificial Sequence
  Synthetic
aauaugaagucaguaaaacc

SEQ ID NO: 795549 - RNA, 20 nt, Artificial Sequence
  Synthetic
ugcauugggggcuuaaaacc

SEQ ID NO: 795550 - RNA, 20 nt, Artificial Sequence
  Synthetic
agcaagaugaaguuaaaacc

SEQ ID NO: 795551 - RNA, 20 nt, Artificial Sequence
  Synthetic
aucucugaguaguacaaacc

SEQ ID NO: 795552 - RNA, 20 nt, Artificial Sequence
  Synthetic
caggugcauaccaccaaacc

SEQ ID NO: 795553 - RNA, 20 nt, Artificial Sequence
  Synthetic
caggcgccugccaccaaacc

SEQ ID NO: 795554 - RNA, 20 nt, Artificial Sequence
  Synthetic
aucugacgaaaccccaaacc

SEQ ID NO: 795555 - RNA, 20 nt, Artificial Sequence
  Synthetic
ugcuccauauaaagcaaacc

SEQ ID NO: 795556 - RNA, 20 nt, Artificial Sequence
  Synthetic
accccauucaucagcaaacc

SEQ ID NO: 795557 - RNA, 20 nt, Artificial Sequence
  Synthetic
ugugguccucagggcaaacc

SEQ ID NO: 795558 - RNA, 20 nt, Artificial Sequence
  Synthetic
aucccuauacuuggcaaacc

SEQ ID NO: 795559 - RNA, 20 nt, Artificial Sequence
  Synthetic
aaggaagccaucugcaaacc

SEQ ID NO: 795560 - RNA, 20 nt, Artificial Sequence
  Synthetic
uaucaugggaugugcaaacc

SEQ ID NO: 795561 - RNA, 20 nt, Artificial Sequence
  Synthetic
uaaacucuuucuugcaaacc

SEQ ID NO: 795562 - RNA, 20 nt, Artificial Sequence
  Synthetic
auuuuucccugcaucaaacc

SEQ ID NO: 795563 - RNA, 20 nt, Artificial Sequence
  Synthetic
ccuuaaguucaauucaaacc

SEQ ID NO: 795564 - RNA, 20 nt, Artificial Sequence
  Synthetic
agacaguguguuuucaaacc

SEQ ID NO: 795565 - RNA, 20 nt, Artificial Sequence
  Synthetic
auaacaauggagaagaaacc

SEQ ID NO: 795566 - RNA, 20 nt, Artificial Sequence
  Synthetic
agaagggaacaacagaaacc

SEQ ID NO: 795567 - RNA, 20 nt, Artificial Sequence
  Synthetic
aggcuagaaguacagaaacc

SEQ ID NO: 795568 - RNA, 20 nt, Artificial Sequence
  Synthetic
ugagggcugcaucagaaacc

SEQ ID NO: 795569 - RNA, 20 nt, Artificial Sequence
  Synthetic
uaccaucucauugagaaacc

SEQ ID NO: 795570 - RNA, 20 nt, Artificial Sequence
  Synthetic
aauaucaaagccaggaaacc

SEQ ID NO: 795571 - RNA, 20 nt, Artificial Sequence
  Synthetic
uguuagaagcgugggaaacc

SEQ ID NO: 795572 - RNA, 20 nt, Artificial Sequence
  Synthetic
cauuaaaaggcaaugaaacc

SEQ ID NO: 795573 - RNA, 20 nt, Artificial Sequence
  Synthetic
aaucuuaucagagugaaacc

SEQ ID NO: 795574 - RNA, 20 nt, Artificial Sequence
  Synthetic
cuuuaaggaaucuugaaacc

SEQ ID NO: 795575 - RNA, 20 nt, Artificial Sequence
  Synthetic
uaauagugaugcaauaaacc

SEQ ID NO: 795576 - RNA, 20 nt, Artificial Sequence
  Synthetic
caauaugucaggaauaaacc

SEQ ID NO: 795577 - RNA, 20 nt, Artificial Sequence
  Synthetic
cacccucccaagacuaaacc

SEQ ID NO: 795578 - RNA, 20 nt, Artificial Sequence
  Synthetic
cacucucccaagacuaaacc

SEQ ID NO: 795579 - RNA, 20 nt, Artificial Sequence
  Synthetic
caccuucccaagacuaaacc

SEQ ID NO: 795580 - RNA, 20 nt, Artificial Sequence
  Synthetic
uguuuauaaacaccuaaacc

SEQ ID NO: 795581 - RNA, 20 nt, Artificial Sequence
  Synthetic
aauaauggugauucuaaacc

SEQ ID NO: 795582 - RNA, 20 nt, Artificial Sequence
  Synthetic
acugacauauugaguaaacc

SEQ ID NO: 795583 - RNA, 20 nt, Artificial Sequence
  Synthetic
uauuuuaaguaagguaaacc

SEQ ID NO: 795584 - RNA, 20 nt, Artificial Sequence
  Synthetic
ugcucaugauauuguaaacc

SEQ ID NO: 795585 - RNA, 20 nt, Artificial Sequence
  Synthetic
accaagccuugcauuaaacc

SEQ ID NO: 795586 - RNA, 20 nt, Artificial Sequence
  Synthetic
acccauuaaguaguuaaacc

SEQ ID NO: 795587 - RNA, 20 nt, Artificial Sequence
  Synthetic
uuuaguaagcccuuuaaacc

SEQ ID NO: 795588 - RNA, 20 nt, Artificial Sequence
  Synthetic
auuuuaaaauguuuuaaacc

SEQ ID NO: 795589 - RNA, 20 nt, Artificial Sequence
  Synthetic
ucaggagaucgagaacaacc

SEQ ID NO: 795590 - RNA, 20 nt, Artificial Sequence
  Synthetic
auugaauuuucaccacaacc

SEQ ID NO: 795591 - RNA, 20 nt, Artificial Sequence
  Synthetic
cacagauguuuaucacaacc

SEQ ID NO: 795592 - RNA, 20 nt, Artificial Sequence
  Synthetic
aauuacagucagucacaacc

SEQ ID NO: 795593 - RNA, 20 nt, Artificial Sequence
  Synthetic
aagaauagucuuucacaacc

SEQ ID NO: 795594 - RNA, 20 nt, Artificial Sequence
  Synthetic
aacugaaaagaaagacaacc

SEQ ID NO: 795595 - RNA, 20 nt, Artificial Sequence
  Synthetic
aaagaaucuguaagacaacc

SEQ ID NO: 795596 - RNA, 20 nt, Artificial Sequence
  Synthetic
uggccuauaugcagacaacc

SEQ ID NO: 795597 - RNA, 20 nt, Artificial Sequence
  Synthetic
aaaauuuuguaaugacaacc

SEQ ID NO: 795598 - RNA, 20 nt, Artificial Sequence
  Synthetic
acacugcagaaaaaccaacc

SEQ ID NO: 795599 - RNA, 20 nt, Artificial Sequence
  Synthetic
cauuccauacaacaccaacc

SEQ ID NO: 795600 - RNA, 20 nt, Artificial Sequence
  Synthetic
uuucaagaagaggaccaacc

SEQ ID NO: 795601 - RNA, 20 nt, Artificial Sequence
  Synthetic
ccacccccgccaccccaacc

SEQ ID NO: 795602 - RNA, 20 nt, Artificial Sequence
  Synthetic
aaaagauuguuuccccaacc

SEQ ID NO: 795603 - RNA, 20 nt, Artificial Sequence
  Synthetic
ugcgaccagccuggccaacc

SEQ ID NO: 795604 - RNA, 20 nt, Artificial Sequence
  Synthetic
uugaaaaaggcacuccaacc

SEQ ID NO: 795605 - RNA, 20 nt, Artificial Sequence
  Synthetic
cgugccacugcacuccaacc

SEQ ID NO: 795606 - RNA, 20 nt, Artificial Sequence
  Synthetic
uguaccauuguacuccaacc

SEQ ID NO: 795607 - RNA, 20 nt, Artificial Sequence
  Synthetic
auggaaaccauccuccaacc

SEQ ID NO: 795608 - RNA, 20 nt, Artificial Sequence
  Synthetic
ugugccacugcgcuccaacc

SEQ ID NO: 795609 - RNA, 20 nt, Artificial Sequence
  Synthetic
agcgccacuggauuccaacc

SEQ ID NO: 795610 - RNA, 20 nt, Artificial Sequence
  Synthetic
aaauguaaagcaaagcaacc

SEQ ID NO: 795611 - RNA, 20 nt, Artificial Sequence
  Synthetic
ccagaaguucaagagcaacc

SEQ ID NO: 795612 - RNA, 20 nt, Artificial Sequence
  Synthetic
cuuaucuaccuagagcaacc

SEQ ID NO: 795613 - RNA, 20 nt, Artificial Sequence
  Synthetic
cucaaaacauggcugcaacc

SEQ ID NO: 795614 - RNA, 20 nt, Artificial Sequence
  Synthetic
uaugagaagguuuugcaacc

SEQ ID NO: 795615 - RNA, 20 nt, Artificial Sequence
  Synthetic
ucaggagcuuaagaucaacc

SEQ ID NO: 795616 - RNA, 20 nt, Artificial Sequence
  Synthetic
uauaaaaaacaaucucaacc

SEQ ID NO: 795617 - RNA, 20 nt, Artificial Sequence
  Synthetic
ucaaauugaagcucucaacc

SEQ ID NO: 795618 - RNA, 20 nt, Artificial Sequence
  Synthetic
acuuuaguugguucucaacc

SEQ ID NO: 795619 - RNA, 20 nt, Artificial Sequence
  Synthetic
ugagauuggaaaggucaacc

SEQ ID NO: 795620 - RNA, 20 nt, Artificial Sequence
  Synthetic
aaaauuaacgaaauucaacc

SEQ ID NO: 795621 - RNA, 20 nt, Artificial Sequence
  Synthetic
acuugaaaacuuguucaacc

SEQ ID NO: 795622 - RNA, 20 nt, Artificial Sequence
  Synthetic
ugaaauaaaaagaaagaacc

SEQ ID NO: 795623 - RNA, 20 nt, Artificial Sequence
  Synthetic
aaagugaaauauaaagaacc

SEQ ID NO: 795624 - RNA, 20 nt, Artificial Sequence
  Synthetic
ucaugguaucauuaagaacc

SEQ ID NO: 795625 - RNA, 20 nt, Artificial Sequence
  Synthetic
agauuucaacucucagaacc

SEQ ID NO: 795626 - RNA, 20 nt, Artificial Sequence
  Synthetic
aaugacugauaaggagaacc

SEQ ID NO: 795627 - RNA, 20 nt, Artificial Sequence
  Synthetic
aaaugggauaggauagaacc

SEQ ID NO: 795628 - RNA, 20 nt, Artificial Sequence
  Synthetic
cuuugaucuccauuagaacc

SEQ ID NO: 795629 - RNA, 20 nt, Artificial Sequence
  Synthetic
uucuuccugauguuagaacc

SEQ ID NO: 795630 - RNA, 20 nt, Artificial Sequence
  Synthetic
aaugauugcaaagaggaacc

SEQ ID NO: 795631 - RNA, 20 nt, Artificial Sequence
  Synthetic
uggguaaaaauugaggaacc

SEQ ID NO: 795632 - RNA, 20 nt, Artificial Sequence
  Synthetic
ucagugaccuguuaggaacc

SEQ ID NO: 795633 - RNA, 20 nt, Artificial Sequence
  Synthetic
ccaaggguauuuuaggaacc

SEQ ID NO: 795634 - RNA, 20 nt, Artificial Sequence
  Synthetic
aaguuugauuaaagggaacc

SEQ ID NO: 795635 - RNA, 20 nt, Artificial Sequence
  Synthetic
cuggcagucaucuuggaacc

SEQ ID NO: 795636 - RNA, 20 nt, Artificial Sequence
  Synthetic
gcaggagaauggcaugaacc

SEQ ID NO: 795637 - RNA, 20 nt, Artificial Sequence
  Synthetic
uaugacagcguggaugaacc

SEQ ID NO: 795638 - RNA, 20 nt, Artificial Sequence
  Synthetic
aggcagaaauaauaugaacc

SEQ ID NO: 795639 - RNA, 20 nt, Artificial Sequence
  Synthetic
uuugacaauauguaugaacc

SEQ ID NO: 795640 - RNA, 20 nt, Artificial Sequence
  Synthetic
uauggcaccuucccugaacc

SEQ ID NO: 795641 - RNA, 20 nt, Artificial Sequence
  Synthetic
ccaguuaaccucgcugaacc

SEQ ID NO: 795642 - RNA, 20 nt, Artificial Sequence
  Synthetic
acaggcuucuuugcugaacc

SEQ ID NO: 795643 - RNA, 20 nt, Artificial Sequence
  Synthetic
agguaggggugaagugaacc

SEQ ID NO: 795644 - RNA, 20 nt, Artificial Sequence
  Synthetic
gcaggagaauggcgugaacc

SEQ ID NO: 795645 - RNA, 20 nt, Artificial Sequence
  Synthetic
auuuauuagcugugugaacc

SEQ ID NO: 795646 - RNA, 20 nt, Artificial Sequence
  Synthetic
gcaggagaaucacuugaacc

SEQ ID NO: 795647 - RNA, 20 nt, Artificial Sequence
  Synthetic
uaacauuuucagcuugaacc

SEQ ID NO: 795648 - RNA, 20 nt, Artificial Sequence
  Synthetic
acaggaggauagcuugaacc

SEQ ID NO: 795649 - RNA, 20 nt, Artificial Sequence
  Synthetic
gcaggagaaucgcuugaacc

SEQ ID NO: 795650 - RNA, 20 nt, Artificial Sequence
  Synthetic
gcaggagaauugcuugaacc

SEQ ID NO: 795651 - RNA, 20 nt, Artificial Sequence
  Synthetic
agagugcauuuaguugaacc

SEQ ID NO: 795652 - RNA, 20 nt, Artificial Sequence
  Synthetic
agccagcaaguauuugaacc

SEQ ID NO: 795653 - RNA, 20 nt, Artificial Sequence
  Synthetic
uuuauaaaggauuuugaacc

SEQ ID NO: 795654 - RNA, 20 nt, Artificial Sequence
  Synthetic
aucacauuuuaaaaauaacc

SEQ ID NO: 795655 - RNA, 20 nt, Artificial Sequence
  Synthetic
auuuuggacauaaaauaacc

SEQ ID NO: 795656 - RNA, 20 nt, Artificial Sequence
  Synthetic
ccaccccagaccaaauaacc

SEQ ID NO: 795657 - RNA, 20 nt, Artificial Sequence
  Synthetic
ucacaguccaaacaauaacc

SEQ ID NO: 795658 - RNA, 20 nt, Artificial Sequence
  Synthetic
agcaaccaaaacuaauaacc

SEQ ID NO: 795659 - RNA, 20 nt, Artificial Sequence
  Synthetic
uauaguacaauaucauaacc

SEQ ID NO: 795660 - RNA, 20 nt, Artificial Sequence
  Synthetic
ugaaacucucucucauaacc

SEQ ID NO: 795661 - RNA, 20 nt, Artificial Sequence
  Synthetic
aacuaaacaaauagauaacc

SEQ ID NO: 795662 - RNA, 20 nt, Artificial Sequence
  Synthetic
aggauuauuagaugauaacc

SEQ ID NO: 795663 - RNA, 20 nt, Artificial Sequence
  Synthetic
uauuuugcaaaguuauaacc

SEQ ID NO: 795664 - RNA, 20 nt, Artificial Sequence
  Synthetic
cucccauccaaguacuaacc

SEQ ID NO: 795665 - RNA, 20 nt, Artificial Sequence
  Synthetic
cugaccugauuucccuaacc

SEQ ID NO: 795666 - RNA, 20 nt, Artificial Sequence
  Synthetic
cacgccauugcacucuaacc

SEQ ID NO: 795667 - RNA, 20 nt, Artificial Sequence
  Synthetic
uaaaaaaagcugaaguaacc

SEQ ID NO: 795668 - RNA, 20 nt, Artificial Sequence
  Synthetic
uccuguuauuuggaguaacc

SEQ ID NO: 795669 - RNA, 20 nt, Artificial Sequence
  Synthetic
agaguagaaugauaguaacc

SEQ ID NO: 795670 - RNA, 20 nt, Artificial Sequence
  Synthetic
aaaucuccagguagguaacc

SEQ ID NO: 795671 - RNA, 20 nt, Artificial Sequence
  Synthetic
agucagcaucagugguaacc

SEQ ID NO: 795672 - RNA, 20 nt, Artificial Sequence
  Synthetic
uuucaaagugugugguaacc

SEQ ID NO: 795673 - RNA, 20 nt, Artificial Sequence
  Synthetic
uuuaaaccauggauguaacc

SEQ ID NO: 795674 - RNA, 20 nt, Artificial Sequence
  Synthetic
aaaaaauacaaaaauuaacc

SEQ ID NO: 795675 - RNA, 20 nt, Artificial Sequence
  Synthetic
aagagacagaauaauuaacc

SEQ ID NO: 795676 - RNA, 20 nt, Artificial Sequence
  Synthetic
uacaaaugaucccauuaacc

SEQ ID NO: 795677 - RNA, 20 nt, Artificial Sequence
  Synthetic
uuuuagucuguucauuaacc

SEQ ID NO: 795678 - RNA, 20 nt, Artificial Sequence
  Synthetic
acaaauuuuaggacuuaacc

SEQ ID NO: 795679 - RNA, 20 nt, Artificial Sequence
  Synthetic
aauacuuucagauguuaacc

SEQ ID NO: 795680 - RNA, 20 nt, Artificial Sequence
  Synthetic
uaaaccaaugaccuuuaacc

SEQ ID NO: 795681 - RNA, 20 nt, Artificial Sequence
  Synthetic
uugaagcaucuccuuuaacc

SEQ ID NO: 795682 - RNA, 20 nt, Artificial Sequence
  Synthetic
caggcgcccaccacaacacc

SEQ ID NO: 795683 - RNA, 20 nt, Artificial Sequence
  Synthetic
aauugaacaaugagaacacc

SEQ ID NO: 795684 - RNA, 20 nt, Artificial Sequence
  Synthetic
ccagcagcaucaugaacacc

SEQ ID NO: 795685 - RNA, 20 nt, Artificial Sequence
  Synthetic
aucauaaggaucuuaacacc

SEQ ID NO: 795686 - RNA, 20 nt, Artificial Sequence
  Synthetic
aacugguuuugauacacacc

SEQ ID NO: 795687 - RNA, 20 nt, Artificial Sequence
  Synthetic
caggcacccaccaccacacc

SEQ ID NO: 795688 - RNA, 20 nt, Artificial Sequence
  Synthetic
cuggugcccaccaccacacc

SEQ ID NO: 795689 - RNA, 20 nt, Artificial Sequence
  Synthetic
caggcucgcaccaccacacc

SEQ ID NO: 795690 - RNA, 20 nt, Artificial Sequence
  Synthetic
caggcacucaccaccacacc

SEQ ID NO: 795691 - RNA, 20 nt, Artificial Sequence
  Synthetic
caggcgagagccaccacacc

SEQ ID NO: 795692 - RNA, 20 nt, Artificial Sequence
  Synthetic
caggcaugagccaccacacc

SEQ ID NO: 795693 - RNA, 20 nt, Artificial Sequence
  Synthetic
caggcgugagccaccacacc

SEQ ID NO: 795694 - RNA, 20 nt, Artificial Sequence
  Synthetic
cagaugugagccaccacacc

SEQ ID NO: 795695 - RNA, 20 nt, Artificial Sequence
  Synthetic
caagugugagccaccacacc

SEQ ID NO: 795696 - RNA, 20 nt, Artificial Sequence
  Synthetic
cagacacaugccaccacacc

SEQ ID NO: 795697 - RNA, 20 nt, Artificial Sequence
  Synthetic
caggcgugugccaccacacc

SEQ ID NO: 795698 - RNA, 20 nt, Artificial Sequence
  Synthetic
caggcguacuccaccacacc

SEQ ID NO: 795699 - RNA, 20 nt, Artificial Sequence
  Synthetic
caggugcccacccccacacc

SEQ ID NO: 795700 - RNA, 20 nt, Artificial Sequence
  Synthetic
caggcgcccaccgccacacc

SEQ ID NO: 795701 - RNA, 20 nt, Artificial Sequence
  Synthetic
ucgcccaacagauccacacc

SEQ ID NO: 795702 - RNA, 20 nt, Artificial Sequence
  Synthetic
caggagccuaccagcacacc

SEQ ID NO: 795703 - RNA, 20 nt, Artificial Sequence
  Synthetic
uguauugauggcagcacacc

SEQ ID NO: 795704 - RNA, 20 nt, Artificial Sequence
  Synthetic
acuagaauaucgggcacacc

SEQ ID NO: 795705 - RNA, 20 nt, Artificial Sequence
  Synthetic
uaugcaacagugaucacacc

SEQ ID NO: 795706 - RNA, 20 nt, Artificial Sequence
  Synthetic
ugacucaaacaucucacacc

SEQ ID NO: 795707 - RNA, 20 nt, Artificial Sequence
  Synthetic
uacgucccuuccuucacacc

SEQ ID NO: 795708 - RNA, 20 nt, Artificial Sequence
  Synthetic
auuaaaaaaaaaaggacacc

SEQ ID NO: 795709 - RNA, 20 nt, Artificial Sequence
  Synthetic
aaugagaacacauggacacc

SEQ ID NO: 795710 - RNA, 20 nt, Artificial Sequence
  Synthetic
ugggucccucccaugacacc

SEQ ID NO: 795711 - RNA, 20 nt, Artificial Sequence
  Synthetic
aauuuucccagaaauacacc

SEQ ID NO: 795712 - RNA, 20 nt, Artificial Sequence
  Synthetic
auauucagugcacauacacc

SEQ ID NO: 795713 - RNA, 20 nt, Artificial Sequence
  Synthetic
auuucuguucagcauacacc

SEQ ID NO: 795714 - RNA, 20 nt, Artificial Sequence
  Synthetic
uuuacuauuugugauacacc

SEQ ID NO: 795715 - RNA, 20 nt, Artificial Sequence
  Synthetic
aaaugugguacauauacacc

SEQ ID NO: 795716 - RNA, 20 nt, Artificial Sequence
  Synthetic
auuucuguuggauauacacc

SEQ ID NO: 795717 - RNA, 20 nt, Artificial Sequence
  Synthetic
caugcaugagccacuacacc

SEQ ID NO: 795718 - RNA, 20 nt, Artificial Sequence
  Synthetic
uuucugaaaggcacuacacc

SEQ ID NO: 795719 - RNA, 20 nt, Artificial Sequence
  Synthetic
aaaauuucuaguuuuacacc

SEQ ID NO: 795720 - RNA, 20 nt, Artificial Sequence
  Synthetic
ccuucucucuuaaaaccacc

SEQ ID NO: 795721 - RNA, 20 nt, Artificial Sequence
  Synthetic
caaucagcaucaacaccacc

SEQ ID NO: 795722 - RNA, 20 nt, Artificial Sequence
  Synthetic
ccaguugaaucggcaccacc

SEQ ID NO: 795723 - RNA, 20 nt, Artificial Sequence
  Synthetic
ugagagauuuugucaccacc

SEQ ID NO: 795724 - RNA, 20 nt, Artificial Sequence
  Synthetic
ugagugauuuugucaccacc

SEQ ID NO: 795725 - RNA, 20 nt, Artificial Sequence
  Synthetic
accuaaccuacauuaccacc

SEQ ID NO: 795726 - RNA, 20 nt, Artificial Sequence
  Synthetic
auuuacaggcgugacccacc

SEQ ID NO: 795727 - RNA, 20 nt, Artificial Sequence
  Synthetic
cagucuugagccaccccacc

SEQ ID NO: 795728 - RNA, 20 nt, Artificial Sequence
  Synthetic
cuguaaccucugcccccacc

SEQ ID NO: 795729 - RNA, 20 nt, Artificial Sequence
  Synthetic
auuucacuguguugcccacc

SEQ ID NO: 795730 - RNA, 20 nt, Artificial Sequence
  Synthetic
ugauccaaucaccucccacc

SEQ ID NO: 795731 - RNA, 20 nt, Artificial Sequence
  Synthetic
ugauccagucaccucccacc

SEQ ID NO: 795732 - RNA, 20 nt, Artificial Sequence
  Synthetic
ugauucaauuaccucccacc

SEQ ID NO: 795733 - RNA, 20 nt, Artificial Sequence
  Synthetic
uuauggggacaugucccacc

SEQ ID NO: 795734 - RNA, 20 nt, Artificial Sequence
  Synthetic
aaaagcuuucccuucccacc

SEQ ID NO: 795735 - RNA, 20 nt, Artificial Sequence
  Synthetic
uguuguaaacagaagccacc

SEQ ID NO: 795736 - RNA, 20 nt, Artificial Sequence
  Synthetic
ccucgggugccuacgccacc

SEQ ID NO: 795737 - RNA, 20 nt, Artificial Sequence
  Synthetic
acaggugcucuggcgccacc

SEQ ID NO: 795738 - RNA, 20 nt, Artificial Sequence
  Synthetic
aguaggggaaacucgccacc

SEQ ID NO: 795739 - RNA, 20 nt, Artificial Sequence
  Synthetic
aacaagugaguuuggccacc

SEQ ID NO: 795740 - RNA, 20 nt, Artificial Sequence
  Synthetic
uaagggagaauaaauccacc

SEQ ID NO: 795741 - RNA, 20 nt, Artificial Sequence
  Synthetic
augauuccauuaccuccacc

SEQ ID NO: 795742 - RNA, 20 nt, Artificial Sequence
  Synthetic
augauucaguuaccuccacc

SEQ ID NO: 795743 - RNA, 20 nt, Artificial Sequence
  Synthetic
aagauccaauugccuccacc

SEQ ID NO: 795744 - RNA, 20 nt, Artificial Sequence
  Synthetic
aaguuugcccuuucuccacc

SEQ ID NO: 795745 - RNA, 20 nt, Artificial Sequence
  Synthetic
uguaaagagaagauuccacc

SEQ ID NO: 795746 - RNA, 20 nt, Artificial Sequence
  Synthetic
ugaaaugcccuuuuuccacc

SEQ ID NO: 795747 - RNA, 20 nt, Artificial Sequence
  Synthetic
ccucggccucccaaagcacc

SEQ ID NO: 795748 - RNA, 20 nt, Artificial Sequence
  Synthetic
cauaugcuaagcacagcacc

SEQ ID NO: 795749 - RNA, 20 nt, Artificial Sequence
  Synthetic
uuggcauucuucacagcacc

SEQ ID NO: 795750 - RNA, 20 nt, Artificial Sequence
  Synthetic
ugugaagaacugacagcacc

SEQ ID NO: 795751 - RNA, 20 nt, Artificial Sequence
  Synthetic
auccccaacguggcagcacc

SEQ ID NO: 795752 - RNA, 20 nt, Artificial Sequence
  Synthetic
uucccugaaaaugcagcacc

SEQ ID NO: 795753 - RNA, 20 nt, Artificial Sequence
  Synthetic
agagagaccuuaguagcacc

SEQ ID NO: 795754 - RNA, 20 nt, Artificial Sequence
  Synthetic
caggcaugagccaccgcacc

SEQ ID NO: 795755 - RNA, 20 nt, Artificial Sequence
  Synthetic
caggcgugagccaccgcacc

SEQ ID NO: 795756 - RNA, 20 nt, Artificial Sequence
  Synthetic
cgggcaugagccagcgcacc

SEQ ID NO: 795757 - RNA, 20 nt, Artificial Sequence
  Synthetic
uccuugcuuucucaggcacc

SEQ ID NO: 795758 - RNA, 20 nt, Artificial Sequence
  Synthetic
cccaauauucaugaggcacc

SEQ ID NO: 795759 - RNA, 20 nt, Artificial Sequence
  Synthetic
ccccacggugagagggcacc

SEQ ID NO: 795760 - RNA, 20 nt, Artificial Sequence
  Synthetic
uuaaaauguggcauggcacc

SEQ ID NO: 795761 - RNA, 20 nt, Artificial Sequence
  Synthetic
ucccugacccuuuuggcacc

SEQ ID NO: 795762 - RNA, 20 nt, Artificial Sequence
  Synthetic
cugcuuguugauaaugcacc

SEQ ID NO: 795763 - RNA, 20 nt, Artificial Sequence
  Synthetic
cagaggcacaccacugcacc

SEQ ID NO: 795764 - RNA, 20 nt, Artificial Sequence
  Synthetic
caggcaugagccacugcacc

SEQ ID NO: 795765 - RNA, 20 nt, Artificial Sequence
  Synthetic
uaggcgugagccacugcacc

SEQ ID NO: 795766 - RNA, 20 nt, Artificial Sequence
  Synthetic
caggugugagccacugcacc

SEQ ID NO: 795767 - RNA, 20 nt, Artificial Sequence
  Synthetic
acaggcugcgccacugcacc

SEQ ID NO: 795768 - RNA, 20 nt, Artificial Sequence
  Synthetic
cuagugugaggcacugcacc

SEQ ID NO: 795769 - RNA, 20 nt, Artificial Sequence
  Synthetic
augauucaauuaucugcacc

SEQ ID NO: 795770 - RNA, 20 nt, Artificial Sequence
  Synthetic
acucgugugaugggugcacc

SEQ ID NO: 795771 - RNA, 20 nt, Artificial Sequence
  Synthetic
cuucuuuauuugugugcacc

SEQ ID NO: 795772 - RNA, 20 nt, Artificial Sequence
  Synthetic
caggcgugaaacauugcacc

SEQ ID NO: 795773 - RNA, 20 nt, Artificial Sequence
  Synthetic
uaaggaaaguuucuugcacc

SEQ ID NO: 795774 - RNA, 20 nt, Artificial Sequence
  Synthetic
uuaggaucaacagaaucacc

SEQ ID NO: 795775 - RNA, 20 nt, Artificial Sequence
  Synthetic
cagcauacaucagaaucacc

SEQ ID NO: 795776 - RNA, 20 nt, Artificial Sequence
  Synthetic
ugaugugcaucagaaucacc

SEQ ID NO: 795777 - RNA, 20 nt, Artificial Sequence
  Synthetic
uccagagcacagacaucacc

SEQ ID NO: 795778 - RNA, 20 nt, Artificial Sequence
  Synthetic
cugacagcagcagcaucacc

SEQ ID NO: 795779 - RNA, 20 nt, Artificial Sequence
  Synthetic
ccagcagcaucagcaucacc

SEQ ID NO: 795780 - RNA, 20 nt, Artificial Sequence
  Synthetic
ccagcaugagugucaucacc

SEQ ID NO: 795781 - RNA, 20 nt, Artificial Sequence
  Synthetic
caacacuuguggagaucacc

SEQ ID NO: 795782 - RNA, 20 nt, Artificial Sequence
  Synthetic
ucuucaguguuaauaucacc

SEQ ID NO: 795783 - RNA, 20 nt, Artificial Sequence
  Synthetic
ccagcagcaucaguaucacc

SEQ ID NO: 795784 - RNA, 20 nt, Artificial Sequence
  Synthetic
cacuaucaucauuacucacc

SEQ ID NO: 795785 - RNA, 20 nt, Artificial Sequence
  Synthetic
caggcgugagccaccucacc

SEQ ID NO: 795786 - RNA, 20 nt, Artificial Sequence
  Synthetic
caggaagaggggcccucacc

SEQ ID NO: 795787 - RNA, 20 nt, Artificial Sequence
  Synthetic
caaccccugcccuccucacc

SEQ ID NO: 795788 - RNA, 20 nt, Artificial Sequence
  Synthetic
cugucucagcuuuccucacc

SEQ ID NO: 795789 - RNA, 20 nt, Artificial Sequence
  Synthetic
aauucaaggaucaucucacc

SEQ ID NO: 795790 - RNA, 20 nt, Artificial Sequence
  Synthetic
ugauccagucaccucucacc

SEQ ID NO: 795791 - RNA, 20 nt, Artificial Sequence
  Synthetic
ugagucaacaaucagucacc

SEQ ID NO: 795792 - RNA, 20 nt, Artificial Sequence
  Synthetic
caguauuuuaaugagucacc

SEQ ID NO: 795793 - RNA, 20 nt, Artificial Sequence
  Synthetic
cuggacaugaaauagucacc

SEQ ID NO: 795794 - RNA, 20 nt, Artificial Sequence
  Synthetic
caugucaguuuuuagucacc

SEQ ID NO: 795795 - RNA, 20 nt, Artificial Sequence
  Synthetic
uuucauaucccagcgucacc

SEQ ID NO: 795796 - RNA, 20 nt, Artificial Sequence
  Synthetic
uauuauuaacuauggucacc

SEQ ID NO: 795797 - RNA, 20 nt, Artificial Sequence
  Synthetic
uaacuauuaaauaugucacc

SEQ ID NO: 795798 - RNA, 20 nt, Artificial Sequence
  Synthetic
cagagucucacucugucacc

SEQ ID NO: 795799 - RNA, 20 nt, Artificial Sequence
  Synthetic
cggagucuagcucugucacc

SEQ ID NO: 795800 - RNA, 20 nt, Artificial Sequence
  Synthetic
cagagucucgcucugucacc

SEQ ID NO: 795801 - RNA, 20 nt, Artificial Sequence
  Synthetic
cugggucuugcucugucacc

SEQ ID NO: 795802 - RNA, 20 nt, Artificial Sequence
  Synthetic
uaaaaaguccacaauucacc

SEQ ID NO: 795803 - RNA, 20 nt, Artificial Sequence
  Synthetic
uaaaaauacaaacauucacc

SEQ ID NO: 795804 - RNA, 20 nt, Artificial Sequence
  Synthetic
cagugugcacaggauucacc

SEQ ID NO: 795805 - RNA, 20 nt, Artificial Sequence
  Synthetic
acgggagcaggcacuucacc

SEQ ID NO: 795806 - RNA, 20 nt, Artificial Sequence
  Synthetic
ucaucccagggcacuucacc

SEQ ID NO: 795807 - RNA, 20 nt, Artificial Sequence
  Synthetic
aggagcucucugccuucacc

SEQ ID NO: 795808 - RNA, 20 nt, Artificial Sequence
  Synthetic
uuguuuacagcgucuucacc

SEQ ID NO: 795809 - RNA, 20 nt, Artificial Sequence
  Synthetic
aauuuaaguaauaguucacc

SEQ ID NO: 795810 - RNA, 20 nt, Artificial Sequence
  Synthetic
aggguuucaccauguucacc

SEQ ID NO: 795811 - RNA, 20 nt, Artificial Sequence
  Synthetic
acagagucugcucuuucacc

SEQ ID NO: 795812 - RNA, 20 nt, Artificial Sequence
  Synthetic
aguacagacaggguuucacc

SEQ ID NO: 795813 - RNA, 20 nt, Artificial Sequence
  Synthetic
agggagggagggaaaagacc

SEQ ID NO: 795814 - RNA, 20 nt, Artificial Sequence
  Synthetic
uuuccagagaugaaaagacc

SEQ ID NO: 795815 - RNA, 20 nt, Artificial Sequence
  Synthetic
uauucacaauagcaaagacc

SEQ ID NO: 795816 - RNA, 20 nt, Artificial Sequence
  Synthetic
acauccagagaagaaagacc

SEQ ID NO: 795817 - RNA, 20 nt, Artificial Sequence
  Synthetic
agugcaacagucuaaagacc

SEQ ID NO: 795818 - RNA, 20 nt, Artificial Sequence
  Synthetic
ucuauacaguuuacaagacc

SEQ ID NO: 795819 - RNA, 20 nt, Artificial Sequence
  Synthetic
augaagaaauacccaagacc

SEQ ID NO: 795820 - RNA, 20 nt, Artificial Sequence
  Synthetic
aagucaaaagccccaagacc

SEQ ID NO: 795821 - RNA, 20 nt, Artificial Sequence
  Synthetic
cuuaggaaggcagcaagacc

SEQ ID NO: 795822 - RNA, 20 nt, Artificial Sequence
  Synthetic
ugugcucuaaaaugaagacc

SEQ ID NO: 795823 - RNA, 20 nt, Artificial Sequence
  Synthetic
aaggaaaggugcugaagacc

SEQ ID NO: 795824 - RNA, 20 nt, Artificial Sequence
  Synthetic
auauaaaauaaucuaagacc

SEQ ID NO: 795825 - RNA, 20 nt, Artificial Sequence
  Synthetic
uacugcagguaucuaagacc

SEQ ID NO: 795826 - RNA, 20 nt, Artificial Sequence
  Synthetic
caccucagauuucuaagacc

SEQ ID NO: 795827 - RNA, 20 nt, Artificial Sequence
  Synthetic
auacuuccuauuuuaagacc

SEQ ID NO: 795828 - RNA, 20 nt, Artificial Sequence
  Synthetic
aagugucccaaaaacagacc

SEQ ID NO: 795829 - RNA, 20 nt, Artificial Sequence
  Synthetic
cuccaaaagcuacacagacc

SEQ ID NO: 795830 - RNA, 20 nt, Artificial Sequence
  Synthetic
uauacauuauuccacagacc

SEQ ID NO: 795831 - RNA, 20 nt, Artificial Sequence
  Synthetic
augaaucuauuugacagacc

SEQ ID NO: 795832 - RNA, 20 nt, Artificial Sequence
  Synthetic
cuaauugagaaauacagacc

SEQ ID NO: 795833 - RNA, 20 nt, Artificial Sequence
  Synthetic
cucuauuuagaaaccagacc

SEQ ID NO: 795834 - RNA, 20 nt, Artificial Sequence
  Synthetic
ugaagaaaacaacccagacc

SEQ ID NO: 795835 - RNA, 20 nt, Artificial Sequence
  Synthetic
uucuucuugaggcccagacc

SEQ ID NO: 795836 - RNA, 20 nt, Artificial Sequence
  Synthetic
auuuuuuaaauucccagacc

SEQ ID NO: 795837 - RNA, 20 nt, Artificial Sequence
  Synthetic
auauauuacauagucagacc

SEQ ID NO: 795838 - RNA, 20 nt, Artificial Sequence
  Synthetic
aagugcuugaggaagagacc

SEQ ID NO: 795839 - RNA, 20 nt, Artificial Sequence
  Synthetic
caugucaagggagagagacc

SEQ ID NO: 795840 - RNA, 20 nt, Artificial Sequence
  Synthetic
cacgugucaagggagagacc

SEQ ID NO: 795841 - RNA, 20 nt, Artificial Sequence
  Synthetic
cgugugucaagggagagacc

SEQ ID NO: 795842 - RNA, 20 nt, Artificial Sequence
  Synthetic
auacugaggagcaggagacc

SEQ ID NO: 795843 - RNA, 20 nt, Artificial Sequence
  Synthetic
ccauggugcugcaugagacc

SEQ ID NO: 795844 - RNA, 20 nt, Artificial Sequence
  Synthetic
agaugaugcugacugagacc

SEQ ID NO: 795845 - RNA, 20 nt, Artificial Sequence
  Synthetic
aggcauccucaucugagacc

SEQ ID NO: 795846 - RNA, 20 nt, Artificial Sequence
  Synthetic
ugaauagaaguggugagacc

SEQ ID NO: 795847 - RNA, 20 nt, Artificial Sequence
  Synthetic
agggcagacugcuugagacc

SEQ ID NO: 795848 - RNA, 20 nt, Artificial Sequence
  Synthetic
acaauguaaaagaauagacc

SEQ ID NO: 795849 - RNA, 20 nt, Artificial Sequence
  Synthetic
uaaaagggaauucauagacc

SEQ ID NO: 795850 - RNA, 20 nt, Artificial Sequence
  Synthetic
agucugacaucauauagacc

SEQ ID NO: 795851 - RNA, 20 nt, Artificial Sequence
  Synthetic
uauaaauacuaaacuagacc

SEQ ID NO: 795852 - RNA, 20 nt, Artificial Sequence
  Synthetic
agcaccacugcacuccgacc

SEQ ID NO: 795853 - RNA, 20 nt, Artificial Sequence
  Synthetic
agagauacagugucucgacc

SEQ ID NO: 795854 - RNA, 20 nt, Artificial Sequence
  Synthetic
cagauaaaggucccaggacc

SEQ ID NO: 795855 - RNA, 20 nt, Artificial Sequence
  Synthetic
agucagaugcagccaggacc

SEQ ID NO: 795856 - RNA, 20 nt, Artificial Sequence
  Synthetic
auaucacgugguucaggacc

SEQ ID NO: 795857 - RNA, 20 nt, Artificial Sequence
  Synthetic
agucugacauuuucaggacc

SEQ ID NO: 795858 - RNA, 20 nt, Artificial Sequence
  Synthetic
aagguuaaaucaguaggacc

SEQ ID NO: 795859 - RNA, 20 nt, Artificial Sequence
  Synthetic
auaggggaugucuuaggacc

SEQ ID NO: 795860 - RNA, 20 nt, Artificial Sequence
  Synthetic
acagcagcagaagacggacc

SEQ ID NO: 795861 - RNA, 20 nt, Artificial Sequence
  Synthetic
uugcaugguugccagggacc

SEQ ID NO: 795862 - RNA, 20 nt, Artificial Sequence
  Synthetic
agaaguagagcaaggggacc

SEQ ID NO: 795863 - RNA, 20 nt, Artificial Sequence
  Synthetic
augggauuuuauaugggacc

SEQ ID NO: 795864 - RNA, 20 nt, Artificial Sequence
  Synthetic
ugaaauugucaagauggacc

SEQ ID NO: 795865 - RNA, 20 nt, Artificial Sequence
  Synthetic
ugucccaacauggauggacc

SEQ ID NO: 795866 - RNA, 20 nt, Artificial Sequence
  Synthetic
uccuaucuuucuccuggacc

SEQ ID NO: 795867 - RNA, 20 nt, Artificial Sequence
  Synthetic
ccuccagacaguccuggacc

SEQ ID NO: 795868 - RNA, 20 nt, Artificial Sequence
  Synthetic
acagcagucugaaguggacc

SEQ ID NO: 795869 - RNA, 20 nt, Artificial Sequence
  Synthetic
agacaauuuuuccguggacc

SEQ ID NO: 795870 - RNA, 20 nt, Artificial Sequence
  Synthetic
caaaaaugguuucguggacc

SEQ ID NO: 795871 - RNA, 20 nt, Artificial Sequence
  Synthetic
uaacagcauuugcaaugacc

SEQ ID NO: 795872 - RNA, 20 nt, Artificial Sequence
  Synthetic
cauucuaacauucaaugacc

SEQ ID NO: 795873 - RNA, 20 nt, Artificial Sequence
  Synthetic
caaaggucuggagaaugacc

SEQ ID NO: 795874 - RNA, 20 nt, Artificial Sequence
  Synthetic
auuucaaaucuuccaugacc

SEQ ID NO: 795875 - RNA, 20 nt, Artificial Sequence
  Synthetic
ccucuugcaucagcaugacc

SEQ ID NO: 795876 - RNA, 20 nt, Artificial Sequence
  Synthetic
aaagcaauaucagcaugacc

SEQ ID NO: 795877 - RNA, 20 nt, Artificial Sequence
  Synthetic
ucucaauaaagugcaugacc

SEQ ID NO: 795878 - RNA, 20 nt, Artificial Sequence
  Synthetic
ucaaagucuuauucaugacc

SEQ ID NO: 795879 - RNA, 20 nt, Artificial Sequence
  Synthetic
agcugucacauauuaugacc

SEQ ID NO: 795880 - RNA, 20 nt, Artificial Sequence
  Synthetic
cuauuuuuugaaaacugacc

SEQ ID NO: 795881 - RNA, 20 nt, Artificial Sequence
  Synthetic
acagucugugguuccugacc

SEQ ID NO: 795882 - RNA, 20 nt, Artificial Sequence
  Synthetic
aucagaccucuuggcugacc

SEQ ID NO: 795883 - RNA, 20 nt, Artificial Sequence
  Synthetic
auucugaagaaaaucugacc

SEQ ID NO: 795884 - RNA, 20 nt, Artificial Sequence
  Synthetic
auuucaagggauaucugacc

SEQ ID NO: 795885 - RNA, 20 nt, Artificial Sequence
  Synthetic
cucaaaccaguucucugacc

SEQ ID NO: 795886 - RNA, 20 nt, Artificial Sequence
  Synthetic
uaacuuuagauaaagugacc

SEQ ID NO: 795887 - RNA, 20 nt, Artificial Sequence
  Synthetic
caugugucaugggagugacc

SEQ ID NO: 795888 - RNA, 20 nt, Artificial Sequence
  Synthetic
caccuugcaucagcgugacc

SEQ ID NO: 795889 - RNA, 20 nt, Artificial Sequence
  Synthetic
auggggcuacagaggugacc

SEQ ID NO: 795890 - RNA, 20 nt, Artificial Sequence
  Synthetic
cucagggcucuugggugacc

SEQ ID NO: 795891 - RNA, 20 nt, Artificial Sequence
  Synthetic
aaaagagauagaaauugacc

SEQ ID NO: 795892 - RNA, 20 nt, Artificial Sequence
  Synthetic
uaagacaaaaucaauugacc

SEQ ID NO: 795893 - RNA, 20 nt, Artificial Sequence
  Synthetic
auuuuauuuaagaauugacc

SEQ ID NO: 795894 - RNA, 20 nt, Artificial Sequence
  Synthetic
augggcaugcauaauugacc

SEQ ID NO: 795895 - RNA, 20 nt, Artificial Sequence
  Synthetic
uauuuaugaaccacuugacc

SEQ ID NO: 795896 - RNA, 20 nt, Artificial Sequence
  Synthetic
uugcaaccuccuccuugacc

SEQ ID NO: 795897 - RNA, 20 nt, Artificial Sequence
  Synthetic
caauauucuguaucuugacc

SEQ ID NO: 795898 - RNA, 20 nt, Artificial Sequence
  Synthetic
agggcuucaccauguugacc

SEQ ID NO: 795899 - RNA, 20 nt, Artificial Sequence
  Synthetic
aggguuucaccauguugacc

SEQ ID NO: 795900 - RNA, 20 nt, Artificial Sequence
  Synthetic
acuagaaauaccauuugacc

SEQ ID NO: 795901 - RNA, 20 nt, Artificial Sequence
  Synthetic
aaagcauguaaacuuugacc

SEQ ID NO: 795902 - RNA, 20 nt, Artificial Sequence
  Synthetic
aaauagauuuuuaaaauacc

SEQ ID NO: 795903 - RNA, 20 nt, Artificial Sequence
  Synthetic
acguuuacaugccaaauacc

SEQ ID NO: 795904 - RNA, 20 nt, Artificial Sequence
  Synthetic
acuggaaucucucaaauacc

SEQ ID NO: 795905 - RNA, 20 nt, Artificial Sequence
  Synthetic
uaggcacauuuucaaauacc

SEQ ID NO: 795906 - RNA, 20 nt, Artificial Sequence
  Synthetic
cacacucauuuagaaauacc

SEQ ID NO: 795907 - RNA, 20 nt, Artificial Sequence
  Synthetic
aauccuuaucaugaaauacc

SEQ ID NO: 795908 - RNA, 20 nt, Artificial Sequence
  Synthetic
auaaagagaugugaaauacc

SEQ ID NO: 795909 - RNA, 20 nt, Artificial Sequence
  Synthetic
aauuggucacagccaauacc

SEQ ID NO: 795910 - RNA, 20 nt, Artificial Sequence
  Synthetic
agucucuaucugccaauacc

SEQ ID NO: 795911 - RNA, 20 nt, Artificial Sequence
  Synthetic
cccagugagaagggaauacc

SEQ ID NO: 795912 - RNA, 20 nt, Artificial Sequence
  Synthetic
auuugugccuuuugaauacc

SEQ ID NO: 795913 - RNA, 20 nt, Artificial Sequence
  Synthetic
auuaaucuuugacuaauacc

SEQ ID NO: 795914 - RNA, 20 nt, Artificial Sequence
  Synthetic
ucugacaaagggcuaauacc

SEQ ID NO: 795915 - RNA, 20 nt, Artificial Sequence
  Synthetic
uguguacuacgcuuaauacc

SEQ ID NO: 795916 - RNA, 20 nt, Artificial Sequence
  Synthetic
uugagcaucuaccacauacc

SEQ ID NO: 795917 - RNA, 20 nt, Artificial Sequence
  Synthetic
acgguacauccauacauacc

SEQ ID NO: 795918 - RNA, 20 nt, Artificial Sequence
  Synthetic
acaaaguccauauacauacc

SEQ ID NO: 795919 - RNA, 20 nt, Artificial Sequence
  Synthetic
aaucaacaauuuaccauacc

SEQ ID NO: 795920 - RNA, 20 nt, Artificial Sequence
  Synthetic
aaaaaacaaccagucauacc

SEQ ID NO: 795921 - RNA, 20 nt, Artificial Sequence
  Synthetic
agaaauaggauaaagauacc

SEQ ID NO: 795922 - RNA, 20 nt, Artificial Sequence
  Synthetic
aggucacauuugcagauacc

SEQ ID NO: 795923 - RNA, 20 nt, Artificial Sequence
  Synthetic
uacauaggugcauagauacc

SEQ ID NO: 795924 - RNA, 20 nt, Artificial Sequence
  Synthetic
uuucuuuauggauggauacc

SEQ ID NO: 795925 - RNA, 20 nt, Artificial Sequence
  Synthetic
ucaagacuuuuaaugauacc

SEQ ID NO: 795926 - RNA, 20 nt, Artificial Sequence
  Synthetic
aaacaagaagaacugauacc

SEQ ID NO: 795927 - RNA, 20 nt, Artificial Sequence
  Synthetic
cagucuucaucugugauacc

SEQ ID NO: 795928 - RNA, 20 nt, Artificial Sequence
  Synthetic
aauucuuuuggauauauacc

SEQ ID NO: 795929 - RNA, 20 nt, Artificial Sequence
  Synthetic
auuaauuucuaguauauacc

SEQ ID NO: 795930 - RNA, 20 nt, Artificial Sequence
  Synthetic
caggaccugugaccuauacc

SEQ ID NO: 795931 - RNA, 20 nt, Artificial Sequence
  Synthetic
cauaggacacuauuuauacc

SEQ ID NO: 795932 - RNA, 20 nt, Artificial Sequence
  Synthetic
uuuuggaagguagcacuacc

SEQ ID NO: 795933 - RNA, 20 nt, Artificial Sequence
  Synthetic
uguguacuaugcuuacuacc

SEQ ID NO: 795934 - RNA, 20 nt, Artificial Sequence
  Synthetic
uggacagguccuuuacuacc

SEQ ID NO: 795935 - RNA, 20 nt, Artificial Sequence
  Synthetic
uuuccuccauaaaaccuacc

SEQ ID NO: 795936 - RNA, 20 nt, Artificial Sequence
  Synthetic
augauccaaucacaccuacc

SEQ ID NO: 795937 - RNA, 20 nt, Artificial Sequence
  Synthetic
cacucagaaccucaccuacc

SEQ ID NO: 795938 - RNA, 20 nt, Artificial Sequence
  Synthetic
cucaccaugauguaccuacc

SEQ ID NO: 795939 - RNA, 20 nt, Artificial Sequence
  Synthetic
aucuguccugguuaccuacc

SEQ ID NO: 795940 - RNA, 20 nt, Artificial Sequence
  Synthetic
agccuguaaucccagcuacc

SEQ ID NO: 795941 - RNA, 20 nt, Artificial Sequence
  Synthetic
caccuguagucccagcuacc

SEQ ID NO: 795942 - RNA, 20 nt, Artificial Sequence
  Synthetic
ucacaucccauccagcuacc

SEQ ID NO: 795943 - RNA, 20 nt, Artificial Sequence
  Synthetic
cgccaguagccucagcuacc

SEQ ID NO: 795944 - RNA, 20 nt, Artificial Sequence
  Synthetic
uccccaccuguucagcuacc

SEQ ID NO: 795945 - RNA, 20 nt, Artificial Sequence
  Synthetic
auuagugagugguagcuacc

SEQ ID NO: 795946 - RNA, 20 nt, Artificial Sequence
  Synthetic
ugguuaccaugcucgcuacc

SEQ ID NO: 795947 - RNA, 20 nt, Artificial Sequence
  Synthetic
aucugcauugauuugcuacc

SEQ ID NO: 795948 - RNA, 20 nt, Artificial Sequence
  Synthetic
aauugaacauauuugcuacc

SEQ ID NO: 795949 - RNA, 20 nt, Artificial Sequence
  Synthetic
uucaguuuuuggucucuacc

SEQ ID NO: 795950 - RNA, 20 nt, Artificial Sequence
  Synthetic
auaugcauuuuuucucuacc

SEQ ID NO: 795951 - RNA, 20 nt, Artificial Sequence
  Synthetic
auucauuugauuggucuacc

SEQ ID NO: 795952 - RNA, 20 nt, Artificial Sequence
  Synthetic
ccuuucucuccuugucuacc

SEQ ID NO: 795953 - RNA, 20 nt, Artificial Sequence
  Synthetic
cucaucacugaguuucuacc

SEQ ID NO: 795954 - RNA, 20 nt, Artificial Sequence
  Synthetic
ucaccuuggcauuuucuacc

SEQ ID NO: 795955 - RNA, 20 nt, Artificial Sequence
  Synthetic
uuacauauuuuuuuucuacc

SEQ ID NO: 795956 - RNA, 20 nt, Artificial Sequence
  Synthetic
uuucauuucccaaaaguacc

SEQ ID NO: 795957 - RNA, 20 nt, Artificial Sequence
  Synthetic
auauuccccuuaaaaguacc

SEQ ID NO: 795958 - RNA, 20 nt, Artificial Sequence
  Synthetic
auucuuguaucccaaguacc

SEQ ID NO: 795959 - RNA, 20 nt, Artificial Sequence
  Synthetic
uugagcugccacuaaguacc

SEQ ID NO: 795960 - RNA, 20 nt, Artificial Sequence
  Synthetic
caaguagcaaaaucaguacc

SEQ ID NO: 795961 - RNA, 20 nt, Artificial Sequence
  Synthetic
cgguuacuaugcucaguacc

SEQ ID NO: 795962 - RNA, 20 nt, Artificial Sequence
  Synthetic
caugccaucaguauaguacc

SEQ ID NO: 795963 - RNA, 20 nt, Artificial Sequence
  Synthetic
caggaacagcgcuuaguacc

SEQ ID NO: 795964 - RNA, 20 nt, Artificial Sequence
  Synthetic
agguaccaugauuccguacc

SEQ ID NO: 795965 - RNA, 20 nt, Artificial Sequence
  Synthetic
uacauggauggaaagguacc

SEQ ID NO: 795966 - RNA, 20 nt, Artificial Sequence
  Synthetic
uaccuaguuaauaagguacc

SEQ ID NO: 795967 - RNA, 20 nt, Artificial Sequence
  Synthetic
aauucuguaagccagguacc

SEQ ID NO: 795968 - RNA, 20 nt, Artificial Sequence
  Synthetic
cagguuuuguugcagguacc

SEQ ID NO: 795969 - RNA, 20 nt, Artificial Sequence
  Synthetic
uugcacagagagaggguacc

SEQ ID NO: 795970 - RNA, 20 nt, Artificial Sequence
  Synthetic
ugacucagggcaaugguacc

SEQ ID NO: 795971 - RNA, 20 nt, Artificial Sequence
  Synthetic
agguacggaaucaugguacc

SEQ ID NO: 795972 - RNA, 20 nt, Artificial Sequence
  Synthetic
cugacugaaaagaugguacc

SEQ ID NO: 795973 - RNA, 20 nt, Artificial Sequence
  Synthetic
cagaaaggaaugcugguacc

SEQ ID NO: 795974 - RNA, 20 nt, Artificial Sequence
  Synthetic
uuuacugggagugugguacc

SEQ ID NO: 795975 - RNA, 20 nt, Artificial Sequence
  Synthetic
uucaacauuuaucauguacc

SEQ ID NO: 795976 - RNA, 20 nt, Artificial Sequence
  Synthetic
uuuuugugcccuuauguacc

SEQ ID NO: 795977 - RNA, 20 nt, Artificial Sequence
  Synthetic
ugcuggaaaguuuauguacc

SEQ ID NO: 795978 - RNA, 20 nt, Artificial Sequence
  Synthetic
auaugaagagccccuguacc

SEQ ID NO: 795979 - RNA, 20 nt, Artificial Sequence
  Synthetic
cuugauucaguagcuguacc

SEQ ID NO: 795980 - RNA, 20 nt, Artificial Sequence
  Synthetic
auaggaaaggaugcuguacc

SEQ ID NO: 795981 - RNA, 20 nt, Artificial Sequence
  Synthetic
cccgugcaauaugcuguacc

SEQ ID NO: 795982 - RNA, 20 nt, Artificial Sequence
  Synthetic
acacauaaauuaucuguacc

SEQ ID NO: 795983 - RNA, 20 nt, Artificial Sequence
  Synthetic
uuaaugccuugcucuguacc

SEQ ID NO: 795984 - RNA, 20 nt, Artificial Sequence
  Synthetic
uuccguaccuauuguguacc

SEQ ID NO: 795985 - RNA, 20 nt, Artificial Sequence
  Synthetic
aaagaaaaagaaauuguacc

SEQ ID NO: 795986 - RNA, 20 nt, Artificial Sequence
  Synthetic
cguaacugcugcauuguacc

SEQ ID NO: 795987 - RNA, 20 nt, Artificial Sequence
  Synthetic
acacucuuaagaguuguacc

SEQ ID NO: 795988 - RNA, 20 nt, Artificial Sequence
  Synthetic
aagaacuuuauuguuguacc

SEQ ID NO: 795989 - RNA, 20 nt, Artificial Sequence
  Synthetic
aaaaaauacaaaaaauuacc

SEQ ID NO: 795990 - RNA, 20 nt, Artificial Sequence
  Synthetic
uacaaaauacaaaaauuacc

SEQ ID NO: 795991 - RNA, 20 nt, Artificial Sequence
  Synthetic
uacugguguggaaaauuacc

SEQ ID NO: 795992 - RNA, 20 nt, Artificial Sequence
  Synthetic
ucuggccacaucaaauuacc

SEQ ID NO: 795993 - RNA, 20 nt, Artificial Sequence
  Synthetic
uauguauaccauaaauuacc

SEQ ID NO: 795994 - RNA, 20 nt, Artificial Sequence
  Synthetic
ucuuuucuuuauaaauuacc

SEQ ID NO: 795995 - RNA, 20 nt, Artificial Sequence
  Synthetic
agacuugaauaccaauuacc

SEQ ID NO: 795996 - RNA, 20 nt, Artificial Sequence
  Synthetic
ccucacagaaugcaauuacc

SEQ ID NO: 795997 - RNA, 20 nt, Artificial Sequence
  Synthetic
cuuucguacuuuuaauuacc

SEQ ID NO: 795998 - RNA, 20 nt, Artificial Sequence
  Synthetic
uaagaucuauauacauuacc

SEQ ID NO: 795999 - RNA, 20 nt, Artificial Sequence
  Synthetic
uucauugaauccccauuacc

SEQ ID NO: 796000 - RNA, 20 nt, Artificial Sequence
  Synthetic
agagcugagauuagauuacc

SEQ ID NO: 796001 - RNA, 20 nt, Artificial Sequence
  Synthetic
uuuuuauaccagauauuacc

SEQ ID NO: 796002 - RNA, 20 nt, Artificial Sequence
  Synthetic
auccuauaaaugcuauuacc

SEQ ID NO: 796003 - RNA, 20 nt, Artificial Sequence
  Synthetic
aaauuauaguuauuauuacc

SEQ ID NO: 796004 - RNA, 20 nt, Artificial Sequence
  Synthetic
uugaauacugaccccuuacc

SEQ ID NO: 796005 - RNA, 20 nt, Artificial Sequence
  Synthetic
uuccugugauaaaucuuacc

SEQ ID NO: 796006 - RNA, 20 nt, Artificial Sequence
  Synthetic
acaagaauucaaaaguuacc

SEQ ID NO: 796007 - RNA, 20 nt, Artificial Sequence
  Synthetic
ugcauuuccagcaaguuacc

SEQ ID NO: 796008 - RNA, 20 nt, Artificial Sequence
  Synthetic
ugcauuucuagcaaguuacc

SEQ ID NO: 796009 - RNA, 20 nt, Artificial Sequence
  Synthetic
uuuauguccaaucaguuacc

SEQ ID NO: 796010 - RNA, 20 nt, Artificial Sequence
  Synthetic
uauauaauauaauaguuacc

SEQ ID NO: 796011 - RNA, 20 nt, Artificial Sequence
  Synthetic
ccauuucuaucauaguuacc

SEQ ID NO: 796012 - RNA, 20 nt, Artificial Sequence
  Synthetic
ugaauuaaacagugguuacc

SEQ ID NO: 796013 - RNA, 20 nt, Artificial Sequence
  Synthetic
uaaaguugaaggauguuacc

SEQ ID NO: 796014 - RNA, 20 nt, Artificial Sequence
  Synthetic
ccacacauugcacuguuacc

SEQ ID NO: 796015 - RNA, 20 nt, Artificial Sequence
  Synthetic
cugucauuaucccuguuacc

SEQ ID NO: 796016 - RNA, 20 nt, Artificial Sequence
  Synthetic
ccucuugcaucaguguuacc

SEQ ID NO: 796017 - RNA, 20 nt, Artificial Sequence
  Synthetic
acauguucagguuuguuacc

SEQ ID NO: 796018 - RNA, 20 nt, Artificial Sequence
  Synthetic
acacauguugagcauuuacc

SEQ ID NO: 796019 - RNA, 20 nt, Artificial Sequence
  Synthetic
cauuuguuucugcauuuacc

SEQ ID NO: 796020 - RNA, 20 nt, Artificial Sequence
  Synthetic
cuuuuuuuguucuauuuacc

SEQ ID NO: 796021 - RNA, 20 nt, Artificial Sequence
  Synthetic
uuucuuuacuuuuauuuacc

SEQ ID NO: 796022 - RNA, 20 nt, Artificial Sequence
  Synthetic
uuuuccaugaaaacuuuacc

SEQ ID NO: 796023 - RNA, 20 nt, Artificial Sequence
  Synthetic
ccagaguccauugcuuuacc

SEQ ID NO: 796024 - RNA, 20 nt, Artificial Sequence
  Synthetic
ugaacagucauuucuuuacc

SEQ ID NO: 796025 - RNA, 20 nt, Artificial Sequence
  Synthetic
acugaugucagcaguuuacc

SEQ ID NO: 796026 - RNA, 20 nt, Artificial Sequence
  Synthetic
uuuuguuuuaauaguuuacc

SEQ ID NO: 796027 - RNA, 20 nt, Artificial Sequence
  Synthetic
uucuugaaucauguuuuacc

SEQ ID NO: 796028 - RNA, 20 nt, Artificial Sequence
  Synthetic
cccaugcuauucuuuuuacc

SEQ ID NO: 796029 - RNA, 20 nt, Artificial Sequence
  Synthetic
auuuuccaacaaaaaaaccc

SEQ ID NO: 796030 - RNA, 20 nt, Artificial Sequence
  Synthetic
uucuuucuccugaaaaaccc

SEQ ID NO: 796031 - RNA, 20 nt, Artificial Sequence
  Synthetic
uaauuauaauguaaaaaccc

SEQ ID NO: 796032 - RNA, 20 nt, Artificial Sequence
  Synthetic
ucacucucaaagcaaaaccc

SEQ ID NO: 796033 - RNA, 20 nt, Artificial Sequence
  Synthetic
ucuuuuauaacagaaaaccc

SEQ ID NO: 796034 - RNA, 20 nt, Artificial Sequence
  Synthetic
aaaguacuaccauaaaaccc

SEQ ID NO: 796035 - RNA, 20 nt, Artificial Sequence
  Synthetic
uuguaaacuagauaaaaccc

SEQ ID NO: 796036 - RNA, 20 nt, Artificial Sequence
  Synthetic
caauuuugugcuugaaaccc

SEQ ID NO: 796037 - RNA, 20 nt, Artificial Sequence
  Synthetic
agaaugguguaaguaaaccc

SEQ ID NO: 796038 - RNA, 20 nt, Artificial Sequence
  Synthetic
caggagaauggcguaaaccc

SEQ ID NO: 796039 - RNA, 20 nt, Artificial Sequence
  Synthetic
agaaaagaucaaaacaaccc

SEQ ID NO: 796040 - RNA, 20 nt, Artificial Sequence
  Synthetic
caggagaaccgcuucaaccc

SEQ ID NO: 796041 - RNA, 20 nt, Artificial Sequence
  Synthetic
ucagugcuggagcagaaccc

SEQ ID NO: 796042 - RNA, 20 nt, Artificial Sequence
  Synthetic
caggagaauggcgcgaaccc

SEQ ID NO: 796043 - RNA, 20 nt, Artificial Sequence
  Synthetic
cagaagaauugcucgaaccc

SEQ ID NO: 796044 - RNA, 20 nt, Artificial Sequence
  Synthetic
ugggagaguugcucgaaccc

SEQ ID NO: 796045 - RNA, 20 nt, Artificial Sequence
  Synthetic
auaauccaaaaauggaaccc

SEQ ID NO: 796046 - RNA, 20 nt, Artificial Sequence
  Synthetic
caggagaaucacuggaaccc

SEQ ID NO: 796047 - RNA, 20 nt, Artificial Sequence
  Synthetic
cagagcauuuacuggaaccc

SEQ ID NO: 796048 - RNA, 20 nt, Artificial Sequence
  Synthetic
caggagaauggcaugaaccc

SEQ ID NO: 796049 - RNA, 20 nt, Artificial Sequence
  Synthetic
uuauuaauaauacugaaccc

SEQ ID NO: 796050 - RNA, 20 nt, Artificial Sequence
  Synthetic
acaucgccuuuucugaaccc

SEQ ID NO: 796051 - RNA, 20 nt, Artificial Sequence
  Synthetic
uagaaggaucacgugaaccc

SEQ ID NO: 796052 - RNA, 20 nt, Artificial Sequence
  Synthetic
aaggagaauggcgugaaccc

SEQ ID NO: 796053 - RNA, 20 nt, Artificial Sequence
  Synthetic
caggagaauggcgugaaccc

SEQ ID NO: 796054 - RNA, 20 nt, Artificial Sequence
  Synthetic
caggaaaauggugugaaccc

SEQ ID NO: 796055 - RNA, 20 nt, Artificial Sequence
  Synthetic
cacaagaaucacuugaaccc

SEQ ID NO: 796056 - RNA, 20 nt, Artificial Sequence
  Synthetic
cagaagaaucacuugaaccc

SEQ ID NO: 796057 - RNA, 20 nt, Artificial Sequence
  Synthetic
caggagaaucacuugaaccc

SEQ ID NO: 796058 - RNA, 20 nt, Artificial Sequence
  Synthetic
uaggagaaucacuugaaccc

SEQ ID NO: 796059 - RNA, 20 nt, Artificial Sequence
  Synthetic
caggagaaucccuugaaccc

SEQ ID NO: 796060 - RNA, 20 nt, Artificial Sequence
  Synthetic
caggaggauuccuugaaccc

SEQ ID NO: 796061 - RNA, 20 nt, Artificial Sequence
  Synthetic
caggaggauagcuugaaccc

SEQ ID NO: 796062 - RNA, 20 nt, Artificial Sequence
  Synthetic
caggagaaucgcuugaaccc

SEQ ID NO: 796063 - RNA, 20 nt, Artificial Sequence
  Synthetic
ugggagaaucgcuugaaccc

SEQ ID NO: 796064 - RNA, 20 nt, Artificial Sequence
  Synthetic
caggggaaucgcuugaaccc

SEQ ID NO: 796065 - RNA, 20 nt, Artificial Sequence
  Synthetic
acagagaauugcuugaaccc

SEQ ID NO: 796066 - RNA, 20 nt, Artificial Sequence
  Synthetic
caggagaauugcuugaaccc

SEQ ID NO: 796067 - RNA, 20 nt, Artificial Sequence
  Synthetic
caugagaauugcuugaaccc

SEQ ID NO: 796068 - RNA, 20 nt, Artificial Sequence
  Synthetic
cacaagaaucucuugaaccc

SEQ ID NO: 796069 - RNA, 20 nt, Artificial Sequence
  Synthetic
caggagaaucauuugaaccc

SEQ ID NO: 796070 - RNA, 20 nt, Artificial Sequence
  Synthetic
caggagaaucguuugaaccc

SEQ ID NO: 796071 - RNA, 20 nt, Artificial Sequence
  Synthetic
uggagccaagguuugaaccc

SEQ ID NO: 796072 - RNA, 20 nt, Artificial Sequence
  Synthetic
uaggagaaucuuuugaaccc

SEQ ID NO: 796073 - RNA, 20 nt, Artificial Sequence
  Synthetic
uuagucuuggguuauaaccc

SEQ ID NO: 796074 - RNA, 20 nt, Artificial Sequence
  Synthetic
accaucucuaagucuaaccc

SEQ ID NO: 796075 - RNA, 20 nt, Artificial Sequence
  Synthetic
uauacaauugcaaguaaccc

SEQ ID NO: 796076 - RNA, 20 nt, Artificial Sequence
  Synthetic
ugggcgcacugggguaaccc

SEQ ID NO: 796077 - RNA, 20 nt, Artificial Sequence
  Synthetic
acucacucuagcauuaaccc

SEQ ID NO: 796078 - RNA, 20 nt, Artificial Sequence
  Synthetic
auugguuuggaccaacaccc

SEQ ID NO: 796079 - RNA, 20 nt, Artificial Sequence
  Synthetic
uauuguccuagcuaacaccc

SEQ ID NO: 796080 - RNA, 20 nt, Artificial Sequence
  Synthetic
uagcauuucuagacacaccc

SEQ ID NO: 796081 - RNA, 20 nt, Artificial Sequence
  Synthetic
aggcucgcaccaccacaccc

SEQ ID NO: 796082 - RNA, 20 nt, Artificial Sequence
  Synthetic
cauccguuggaggcacaccc

SEQ ID NO: 796083 - RNA, 20 nt, Artificial Sequence
  Synthetic
uaugaaugaucccaccaccc

SEQ ID NO: 796084 - RNA, 20 nt, Artificial Sequence
  Synthetic
caccacaaccucuaccaccc

SEQ ID NO: 796085 - RNA, 20 nt, Artificial Sequence
  Synthetic
acagggugugauggccaccc

SEQ ID NO: 796086 - RNA, 20 nt, Artificial Sequence
  Synthetic
ugugaauggcacugccaccc

SEQ ID NO: 796087 - RNA, 20 nt, Artificial Sequence
  Synthetic
agggucucacucugccaccc

SEQ ID NO: 796088 - RNA, 20 nt, Artificial Sequence
  Synthetic
cugaaguucaguugccaccc

SEQ ID NO: 796089 - RNA, 20 nt, Artificial Sequence
  Synthetic
cgugccacugcacuccaccc

SEQ ID NO: 796090 - RNA, 20 nt, Artificial Sequence
  Synthetic
caagagaaucucuuccaccc

SEQ ID NO: 796091 - RNA, 20 nt, Artificial Sequence
  Synthetic
ccccgaccaaugaagcaccc

SEQ ID NO: 796092 - RNA, 20 nt, Artificial Sequence
  Synthetic
uagcaaucucugaagcaccc

SEQ ID NO: 796093 - RNA, 20 nt, Artificial Sequence
  Synthetic
uggagucucacucugcaccc

SEQ ID NO: 796094 - RNA, 20 nt, Artificial Sequence
  Synthetic
uugggguuuuuuaaucaccc

SEQ ID NO: 796095 - RNA, 20 nt, Artificial Sequence
  Synthetic
uaugaaugaccccaucaccc

SEQ ID NO: 796096 - RNA, 20 nt, Artificial Sequence
  Synthetic
aauguguggugauaucaccc

SEQ ID NO: 796097 - RNA, 20 nt, Artificial Sequence
  Synthetic
auuaguauaauauaucaccc

SEQ ID NO: 796098 - RNA, 20 nt, Artificial Sequence
  Synthetic
agagucuugaucuaucaccc

SEQ ID NO: 796099 - RNA, 20 nt, Artificial Sequence
  Synthetic
augacuauuucuuaucaccc

SEQ ID NO: 796100 - RNA, 20 nt, Artificial Sequence
  Synthetic
ucacuagauuccacucaccc

SEQ ID NO: 796101 - RNA, 20 nt, Artificial Sequence
  Synthetic
cuccucuuauuuacucaccc

SEQ ID NO: 796102 - RNA, 20 nt, Artificial Sequence
  Synthetic
agagucuugcugggucaccc

SEQ ID NO: 796103 - RNA, 20 nt, Artificial Sequence
  Synthetic
ugaauuuaagcuggucaccc

SEQ ID NO: 796104 - RNA, 20 nt, Artificial Sequence
  Synthetic
acagagucucacugucaccc

SEQ ID NO: 796105 - RNA, 20 nt, Artificial Sequence
  Synthetic
uacaaaugauacugucaccc

SEQ ID NO: 796106 - RNA, 20 nt, Artificial Sequence
  Synthetic
agauucucacccugucaccc

SEQ ID NO: 796107 - RNA, 20 nt, Artificial Sequence
  Synthetic
agggucauacccugucaccc

SEQ ID NO: 796108 - RNA, 20 nt, Artificial Sequence
  Synthetic
uuuuccucacucugucaccc

SEQ ID NO: 796109 - RNA, 20 nt, Artificial Sequence
  Synthetic
aggaucucacucugucaccc

SEQ ID NO: 796110 - RNA, 20 nt, Artificial Sequence
  Synthetic
acagucucacucugucaccc

SEQ ID NO: 796111 - RNA, 20 nt, Artificial Sequence
  Synthetic
agagucucacucugucaccc

SEQ ID NO: 796112 - RNA, 20 nt, Artificial Sequence
  Synthetic
agggucucacucugucaccc

SEQ ID NO: 796113 - RNA, 20 nt, Artificial Sequence
  Synthetic
acagucuuacucugucaccc

SEQ ID NO: 796114 - RNA, 20 nt, Artificial Sequence
  Synthetic
acagucucgcucugucaccc

SEQ ID NO: 796115 - RNA, 20 nt, Artificial Sequence
  Synthetic
agagucucgcucugucaccc

SEQ ID NO: 796116 - RNA, 20 nt, Artificial Sequence
  Synthetic
agagucuugcucugucaccc

SEQ ID NO: 796117 - RNA, 20 nt, Artificial Sequence
  Synthetic
ugagucuugcucugucaccc

SEQ ID NO: 796118 - RNA, 20 nt, Artificial Sequence
  Synthetic
agagucucguucugucaccc

SEQ ID NO: 796119 - RNA, 20 nt, Artificial Sequence
  Synthetic
ucugucuauuucauucaccc

SEQ ID NO: 796120 - RNA, 20 nt, Artificial Sequence
  Synthetic
uuaaaugcaauuuuucaccc

SEQ ID NO: 796121 - RNA, 20 nt, Artificial Sequence
  Synthetic
cauggaaccacaaaagaccc

SEQ ID NO: 796122 - RNA, 20 nt, Artificial Sequence
  Synthetic
aagaagucucccuaagaccc

SEQ ID NO: 796123 - RNA, 20 nt, Artificial Sequence
  Synthetic
uacauugauagcagagaccc

SEQ ID NO: 796124 - RNA, 20 nt, Artificial Sequence
  Synthetic
agucagcaagcuggagaccc

SEQ ID NO: 796125 - RNA, 20 nt, Artificial Sequence
  Synthetic
aauacgggaacaauagaccc

SEQ ID NO: 796126 - RNA, 20 nt, Artificial Sequence
  Synthetic
cacuggagagcugaggaccc

SEQ ID NO: 796127 - RNA, 20 nt, Artificial Sequence
  Synthetic
ugaguugcagcaagggaccc

SEQ ID NO: 796128 - RNA, 20 nt, Artificial Sequence
  Synthetic
auguguugugggagggaccc

SEQ ID NO: 796129 - RNA, 20 nt, Artificial Sequence
  Synthetic
aggaauggcugcuuggaccc

SEQ ID NO: 796130 - RNA, 20 nt, Artificial Sequence
  Synthetic
uaguuauuuuuaaaugaccc

SEQ ID NO: 796131 - RNA, 20 nt, Artificial Sequence
  Synthetic
accagcuaccuuuaugaccc

SEQ ID NO: 796132 - RNA, 20 nt, Artificial Sequence
  Synthetic
uggaggugcugcacugaccc

SEQ ID NO: 796133 - RNA, 20 nt, Artificial Sequence
  Synthetic
ccucacaacuacccugaccc

SEQ ID NO: 796134 - RNA, 20 nt, Artificial Sequence
  Synthetic
ucacauaacaccagugaccc

SEQ ID NO: 796135 - RNA, 20 nt, Artificial Sequence
  Synthetic
ucuuucccauggggugaccc

SEQ ID NO: 796136 - RNA, 20 nt, Artificial Sequence
  Synthetic
uugcauuugcucugugaccc

SEQ ID NO: 796137 - RNA, 20 nt, Artificial Sequence
  Synthetic
caauuagauuuuugugaccc

SEQ ID NO: 796138 - RNA, 20 nt, Artificial Sequence
  Synthetic
uacaucaagguaauugaccc

SEQ ID NO: 796139 - RNA, 20 nt, Artificial Sequence
  Synthetic
caaggacacaaaaaauaccc

SEQ ID NO: 796140 - RNA, 20 nt, Artificial Sequence
  Synthetic
uccucuuaauggaaauaccc

SEQ ID NO: 796141 - RNA, 20 nt, Artificial Sequence
  Synthetic
aauaaccaguugcaauaccc

SEQ ID NO: 796142 - RNA, 20 nt, Artificial Sequence
  Synthetic
uaauaaugauuauaauaccc

SEQ ID NO: 796143 - RNA, 20 nt, Artificial Sequence
  Synthetic
uucugugaaaauagauaccc

SEQ ID NO: 796144 - RNA, 20 nt, Artificial Sequence
  Synthetic
auucuuugggauauauaccc

SEQ ID NO: 796145 - RNA, 20 nt, Artificial Sequence
  Synthetic
aacuuaugauacaacuaccc

SEQ ID NO: 796146 - RNA, 20 nt, Artificial Sequence
  Synthetic
ugcuuucucugacccuaccc

SEQ ID NO: 796147 - RNA, 20 nt, Artificial Sequence
  Synthetic
ucuuccucccuccccuaccc

SEQ ID NO: 796148 - RNA, 20 nt, Artificial Sequence
  Synthetic
uguaguagucccagcuaccc

SEQ ID NO: 796149 - RNA, 20 nt, Artificial Sequence
  Synthetic
auaaacaauuaauucuaccc

SEQ ID NO: 796150 - RNA, 20 nt, Artificial Sequence
  Synthetic
aacauccuuauauucuaccc

SEQ ID NO: 796151 - RNA, 20 nt, Artificial Sequence
  Synthetic
auuaugaauauuuaguaccc

SEQ ID NO: 796152 - RNA, 20 nt, Artificial Sequence
  Synthetic
acaaaauacaaaaauuaccc

SEQ ID NO: 796153 - RNA, 20 nt, Artificial Sequence
  Synthetic
uaagcucuuuaggcuuaccc

SEQ ID NO: 796154 - RNA, 20 nt, Artificial Sequence
  Synthetic
ccauuuucaguuaguuaccc

SEQ ID NO: 796155 - RNA, 20 nt, Artificial Sequence
  Synthetic
uuggcauauuuauguuaccc

SEQ ID NO: 796156 - RNA, 20 nt, Artificial Sequence
  Synthetic
agagucucacucuguuaccc

SEQ ID NO: 796157 - RNA, 20 nt, Artificial Sequence
  Synthetic
uaugucuggagaauuuaccc

SEQ ID NO: 796158 - RNA, 20 nt, Artificial Sequence
  Synthetic
uaccaucuuuuccuuuaccc

SEQ ID NO: 796159 - RNA, 20 nt, Artificial Sequence
  Synthetic
cagaaauuuuuacaaacccc

SEQ ID NO: 796160 - RNA, 20 nt, Artificial Sequence
  Synthetic
cuugacuucuguccaacccc

SEQ ID NO: 796161 - RNA, 20 nt, Artificial Sequence
  Synthetic
aguuucucagauucaacccc

SEQ ID NO: 796162 - RNA, 20 nt, Artificial Sequence
  Synthetic
ccagugaaccauggaacccc

SEQ ID NO: 796163 - RNA, 20 nt, Artificial Sequence
  Synthetic
cagucucguaucugaacccc

SEQ ID NO: 796164 - RNA, 20 nt, Artificial Sequence
  Synthetic
cacugcgugcagugaacccc

SEQ ID NO: 796165 - RNA, 20 nt, Artificial Sequence
  Synthetic
uaaucaugcuaccacacccc

SEQ ID NO: 796166 - RNA, 20 nt, Artificial Sequence
  Synthetic
aaaccauuugggcacacccc

SEQ ID NO: 796167 - RNA, 20 nt, Artificial Sequence
  Synthetic
ugccuuugagaggacacccc

SEQ ID NO: 796168 - RNA, 20 nt, Artificial Sequence
  Synthetic
augcugguagaacccacccc

SEQ ID NO: 796169 - RNA, 20 nt, Artificial Sequence
  Synthetic
aaauguggucuggggacccc

SEQ ID NO: 796170 - RNA, 20 nt, Artificial Sequence
  Synthetic
agaaugauggaaaugacccc

SEQ ID NO: 796171 - RNA, 20 nt, Artificial Sequence
  Synthetic
uaggagaaucacuugacccc

SEQ ID NO: 796172 - RNA, 20 nt, Artificial Sequence
  Synthetic
cugguggugauucauacccc

SEQ ID NO: 796173 - RNA, 20 nt, Artificial Sequence
  Synthetic
cccaccaugcccacuacccc

SEQ ID NO: 796174 - RNA, 20 nt, Artificial Sequence
  Synthetic
acaaaucacccagcuacccc

SEQ ID NO: 796175 - RNA, 20 nt, Artificial Sequence
  Synthetic
agaaaacaaaacaguacccc

SEQ ID NO: 796176 - RNA, 20 nt, Artificial Sequence
  Synthetic
ugugguggcuggcuuacccc

SEQ ID NO: 796177 - RNA, 20 nt, Artificial Sequence
  Synthetic
uuuggagugucagaaccccc

SEQ ID NO: 796178 - RNA, 20 nt, Artificial Sequence
  Synthetic
acacacacacacacaccccc

SEQ ID NO: 796179 - RNA, 20 nt, Artificial Sequence
  Synthetic
ucccaaaucaccccaccccc

SEQ ID NO: 796180 - RNA, 20 nt, Artificial Sequence
  Synthetic
ccaccuccaccuccaccccc

SEQ ID NO: 796181 - RNA, 20 nt, Artificial Sequence
  Synthetic
cucuacaucccccucccccc

SEQ ID NO: 796182 - RNA, 20 nt, Artificial Sequence
  Synthetic
uguaauccaagucagccccc

SEQ ID NO: 796183 - RNA, 20 nt, Artificial Sequence
  Synthetic
cagucacucaaccugccccc

SEQ ID NO: 796184 - RNA, 20 nt, Artificial Sequence
  Synthetic
uuucucauugcccugccccc

SEQ ID NO: 796185 - RNA, 20 nt, Artificial Sequence
  Synthetic
cacauucacauuuugccccc

SEQ ID NO: 796186 - RNA, 20 nt, Artificial Sequence
  Synthetic
uuuauuuucucaaauccccc

SEQ ID NO: 796187 - RNA, 20 nt, Artificial Sequence
  Synthetic
aauguguggcaaccuccccc

SEQ ID NO: 796188 - RNA, 20 nt, Artificial Sequence
  Synthetic
cccuuaagaucauguccccc

SEQ ID NO: 796189 - RNA, 20 nt, Artificial Sequence
  Synthetic
aagucucgcucuuguccccc

SEQ ID NO: 796190 - RNA, 20 nt, Artificial Sequence
  Synthetic
augauucaauuacuuccccc

SEQ ID NO: 796191 - RNA, 20 nt, Artificial Sequence
  Synthetic
uacaugaacauuuuuccccc

SEQ ID NO: 796192 - RNA, 20 nt, Artificial Sequence
  Synthetic
cuuuucaaaaaaccagcccc

SEQ ID NO: 796193 - RNA, 20 nt, Artificial Sequence
  Synthetic
uccugccccaccccagcccc

SEQ ID NO: 796194 - RNA, 20 nt, Artificial Sequence
  Synthetic
ugcuuccugcccccagcccc

SEQ ID NO: 796195 - RNA, 20 nt, Artificial Sequence
  Synthetic
uucgcccuauccccagcccc

SEQ ID NO: 796196 - RNA, 20 nt, Artificial Sequence
  Synthetic
uucccccuucgcccagcccc

SEQ ID NO: 796197 - RNA, 20 nt, Artificial Sequence
  Synthetic
cucaggcagcagccagcccc

SEQ ID NO: 796198 - RNA, 20 nt, Artificial Sequence
  Synthetic
uagacauaacugucagcccc

SEQ ID NO: 796199 - RNA, 20 nt, Artificial Sequence
  Synthetic
uuggucuggaauggagcccc

SEQ ID NO: 796200 - RNA, 20 nt, Artificial Sequence
  Synthetic
ucccuguuaccuggagcccc

SEQ ID NO: 796201 - RNA, 20 nt, Artificial Sequence
  Synthetic
uuccagcuucugguagcccc

SEQ ID NO: 796202 - RNA, 20 nt, Artificial Sequence
  Synthetic
uccuuccacaggcaggcccc

SEQ ID NO: 796203 - RNA, 20 nt, Artificial Sequence
  Synthetic
ucagagauggggcaggcccc

SEQ ID NO: 796204 - RNA, 20 nt, Artificial Sequence
  Synthetic
ugcuugcuugggcaggcccc

SEQ ID NO: 796205 - RNA, 20 nt, Artificial Sequence
  Synthetic
cgguggaaaucuuaggcccc

SEQ ID NO: 796206 - RNA, 20 nt, Artificial Sequence
  Synthetic
uuccaugguucacuggcccc

SEQ ID NO: 796207 - RNA, 20 nt, Artificial Sequence
  Synthetic
aagccacgaaaccuggcccc

SEQ ID NO: 796208 - RNA, 20 nt, Artificial Sequence
  Synthetic
cuguacuggucuguggcccc

SEQ ID NO: 796209 - RNA, 20 nt, Artificial Sequence
  Synthetic
uacacauacacuccugcccc

SEQ ID NO: 796210 - RNA, 20 nt, Artificial Sequence
  Synthetic
cagagaauuccccuugcccc

SEQ ID NO: 796211 - RNA, 20 nt, Artificial Sequence
  Synthetic
uagugcagagguuuugcccc

SEQ ID NO: 796212 - RNA, 20 nt, Artificial Sequence
  Synthetic
uuguaaucuccaaaaucccc

SEQ ID NO: 796213 - RNA, 20 nt, Artificial Sequence
  Synthetic
aguuaauuaagaaaaucccc

SEQ ID NO: 796214 - RNA, 20 nt, Artificial Sequence
  Synthetic
ugcauuuuaauagaaucccc

SEQ ID NO: 796215 - RNA, 20 nt, Artificial Sequence
  Synthetic
uuauaauccccauaaucccc

SEQ ID NO: 796216 - RNA, 20 nt, Artificial Sequence
  Synthetic
ugccaaucaaagccaucccc

SEQ ID NO: 796217 - RNA, 20 nt, Artificial Sequence
  Synthetic
agcaccacccuuccaucccc

SEQ ID NO: 796218 - RNA, 20 nt, Artificial Sequence
  Synthetic
uuguuuuucucuugaucccc

SEQ ID NO: 796219 - RNA, 20 nt, Artificial Sequence
  Synthetic
ucagcaacaauaguaucccc

SEQ ID NO: 796220 - RNA, 20 nt, Artificial Sequence
  Synthetic
aaacucccugaggccucccc

SEQ ID NO: 796221 - RNA, 20 nt, Artificial Sequence
  Synthetic
uuuucaacuggucucucccc

SEQ ID NO: 796222 - RNA, 20 nt, Artificial Sequence
  Synthetic
aauagcucaacugucucccc

SEQ ID NO: 796223 - RNA, 20 nt, Artificial Sequence
  Synthetic
ucacucucccacuucucccc

SEQ ID NO: 796224 - RNA, 20 nt, Artificial Sequence
  Synthetic
ccucucuucucuuucucccc

SEQ ID NO: 796225 - RNA, 20 nt, Artificial Sequence
  Synthetic
uccucccucuaguagucccc

SEQ ID NO: 796226 - RNA, 20 nt, Artificial Sequence
  Synthetic
auccuaaauccacugucccc

SEQ ID NO: 796227 - RNA, 20 nt, Artificial Sequence
  Synthetic
cagcaauugccaaauucccc

SEQ ID NO: 796228 - RNA, 20 nt, Artificial Sequence
  Synthetic
auagcuucauuccauucccc

SEQ ID NO: 796229 - RNA, 20 nt, Artificial Sequence
  Synthetic
acaauuguaacagauucccc

SEQ ID NO: 796230 - RNA, 20 nt, Artificial Sequence
  Synthetic
uuagaguugcucuauucccc

SEQ ID NO: 796231 - RNA, 20 nt, Artificial Sequence
  Synthetic
cuaaaagaagacacuucccc

SEQ ID NO: 796232 - RNA, 20 nt, Artificial Sequence
  Synthetic
ccaacagcacugacuucccc

SEQ ID NO: 796233 - RNA, 20 nt, Artificial Sequence
  Synthetic
ucuccuuccuagccuucccc

SEQ ID NO: 796234 - RNA, 20 nt, Artificial Sequence
  Synthetic
caguuggaagcugcuucccc

SEQ ID NO: 796235 - RNA, 20 nt, Artificial Sequence
  Synthetic
ucucuaacacccucuucccc

SEQ ID NO: 796236 - RNA, 20 nt, Artificial Sequence
  Synthetic
caccucccaccagguucccc

SEQ ID NO: 796237 - RNA, 20 nt, Artificial Sequence
  Synthetic
caauagccauacuguucccc

SEQ ID NO: 796238 - RNA, 20 nt, Artificial Sequence
  Synthetic
ccaaguucaugccuuucccc

SEQ ID NO: 796239 - RNA, 20 nt, Artificial Sequence
  Synthetic
acugcuaauguccuuucccc

SEQ ID NO: 796240 - RNA, 20 nt, Artificial Sequence
  Synthetic
aaacuucugugaguuucccc

SEQ ID NO: 796241 - RNA, 20 nt, Artificial Sequence
  Synthetic
aguaaugggcuaguuucccc

SEQ ID NO: 796242 - RNA, 20 nt, Artificial Sequence
  Synthetic
ucuccauuccaauuuucccc

SEQ ID NO: 796243 - RNA, 20 nt, Artificial Sequence
  Synthetic
agacuggcagcauuuucccc

SEQ ID NO: 796244 - RNA, 20 nt, Artificial Sequence
  Synthetic
ugaagaagcacuuuuucccc

SEQ ID NO: 796245 - RNA, 20 nt, Artificial Sequence
  Synthetic
auaagaaauauuuuuucccc

SEQ ID NO: 796246 - RNA, 20 nt, Artificial Sequence
  Synthetic
uggagugauuuuuuuucccc

SEQ ID NO: 796247 - RNA, 20 nt, Artificial Sequence
  Synthetic
aaaaaaaaaaaaaaaagccc

SEQ ID NO: 796248 - RNA, 20 nt, Artificial Sequence
  Synthetic
cuaccaaccaaaaaaagccc

SEQ ID NO: 796249 - RNA, 20 nt, Artificial Sequence
  Synthetic
cuuccaacaaagaaaagccc

SEQ ID NO: 796250 - RNA, 20 nt, Artificial Sequence
  Synthetic
acuuauuauaagaaaagccc

SEQ ID NO: 796251 - RNA, 20 nt, Artificial Sequence
  Synthetic
cauauauggcauaaaagccc

SEQ ID NO: 796252 - RNA, 20 nt, Artificial Sequence
  Synthetic
agaaaauaaguuaaaagccc

SEQ ID NO: 796253 - RNA, 20 nt, Artificial Sequence
  Synthetic
cuuucuaaaagcuaaagccc

SEQ ID NO: 796254 - RNA, 20 nt, Artificial Sequence
  Synthetic
uuuuauaauguuuaaagccc

SEQ ID NO: 796255 - RNA, 20 nt, Artificial Sequence
  Synthetic
uuuugaacauacugaagccc

SEQ ID NO: 796256 - RNA, 20 nt, Artificial Sequence
  Synthetic
caguaaaagcaccuaagccc

SEQ ID NO: 796257 - RNA, 20 nt, Artificial Sequence
  Synthetic
ugccuacauucuuuaagccc

SEQ ID NO: 796258 - RNA, 20 nt, Artificial Sequence
  Synthetic
agacugaccugcaacagccc

SEQ ID NO: 796259 - RNA, 20 nt, Artificial Sequence
  Synthetic
ugggacugauuccacagccc

SEQ ID NO: 796260 - RNA, 20 nt, Artificial Sequence
  Synthetic
cuuagguaaacauacagccc

SEQ ID NO: 796261 - RNA, 20 nt, Artificial Sequence
  Synthetic
agagcaaggguccccagccc

SEQ ID NO: 796262 - RNA, 20 nt, Artificial Sequence
  Synthetic
ugcuaccuacuucccagccc

SEQ ID NO: 796263 - RNA, 20 nt, Artificial Sequence
  Synthetic
cuccacauucucuccagccc

SEQ ID NO: 796264 - RNA, 20 nt, Artificial Sequence
  Synthetic
uggagucucgccugcagccc

SEQ ID NO: 796265 - RNA, 20 nt, Artificial Sequence
  Synthetic
uggguggaucacuucagccc

SEQ ID NO: 796266 - RNA, 20 nt, Artificial Sequence
  Synthetic
auccagcagaguuucagccc

SEQ ID NO: 796267 - RNA, 20 nt, Artificial Sequence
  Synthetic
ugaaccacgaggaagagccc

SEQ ID NO: 796268 - RNA, 20 nt, Artificial Sequence
  Synthetic
aaaauaaccucagagagccc

SEQ ID NO: 796269 - RNA, 20 nt, Artificial Sequence
  Synthetic
ccaauuugguaguagagccc

SEQ ID NO: 796270 - RNA, 20 nt, Artificial Sequence
  Synthetic
uggggggaucacccgagccc

SEQ ID NO: 796271 - RNA, 20 nt, Artificial Sequence
  Synthetic
ugaauggauuggaggagccc

SEQ ID NO: 796272 - RNA, 20 nt, Artificial Sequence
  Synthetic
agggaggaucaccugagccc

SEQ ID NO: 796273 - RNA, 20 nt, Artificial Sequence
  Synthetic
ugggaggaucaucugagccc

SEQ ID NO: 796274 - RNA, 20 nt, Artificial Sequence
  Synthetic
ugggauuaucgauugagccc

SEQ ID NO: 796275 - RNA, 20 nt, Artificial Sequence
  Synthetic
caggaggaucacuugagccc

SEQ ID NO: 796276 - RNA, 20 nt, Artificial Sequence
  Synthetic
ugggaggaucacuugagccc

SEQ ID NO: 796277 - RNA, 20 nt, Artificial Sequence
  Synthetic
caggagggucacuugagccc

SEQ ID NO: 796278 - RNA, 20 nt, Artificial Sequence
  Synthetic
uaggagaauuacuugagccc

SEQ ID NO: 796279 - RNA, 20 nt, Artificial Sequence
  Synthetic
caggagaaucgcuugagccc

SEQ ID NO: 796280 - RNA, 20 nt, Artificial Sequence
  Synthetic
caggaggaucgcuugagccc

SEQ ID NO: 796281 - RNA, 20 nt, Artificial Sequence
  Synthetic
aaggaggacugcuugagccc

SEQ ID NO: 796282 - RNA, 20 nt, Artificial Sequence
  Synthetic
uggguggacugcuugagccc

SEQ ID NO: 796283 - RNA, 20 nt, Artificial Sequence
  Synthetic
caggaggauugcuugagccc

SEQ ID NO: 796284 - RNA, 20 nt, Artificial Sequence
  Synthetic
cgggaggaucucuugagccc

SEQ ID NO: 796285 - RNA, 20 nt, Artificial Sequence
  Synthetic
ugggagaauuucuugagccc

SEQ ID NO: 796286 - RNA, 20 nt, Artificial Sequence
  Synthetic
uucaaaugagacccuagccc

SEQ ID NO: 796287 - RNA, 20 nt, Artificial Sequence
  Synthetic
cuuuaggaauuagcuagccc

SEQ ID NO: 796288 - RNA, 20 nt, Artificial Sequence
  Synthetic
caucuuugggcugcuagccc

SEQ ID NO: 796289 - RNA, 20 nt, Artificial Sequence
  Synthetic
uuuucucuaaucaguagccc

SEQ ID NO: 796290 - RNA, 20 nt, Artificial Sequence
  Synthetic
uaauugcugcaugguagccc

SEQ ID NO: 796291 - RNA, 20 nt, Artificial Sequence
  Synthetic
auaaauuucuccuuuagccc

SEQ ID NO: 796292 - RNA, 20 nt, Artificial Sequence
  Synthetic
cucaggugaugcgcccgccc

SEQ ID NO: 796293 - RNA, 20 nt, Artificial Sequence
  Synthetic
cacugcaaccucugccgccc

SEQ ID NO: 796294 - RNA, 20 nt, Artificial Sequence
  Synthetic
uugaguagcucauuccgccc

SEQ ID NO: 796295 - RNA, 20 nt, Artificial Sequence
  Synthetic
uuuuuccugccugaucgccc

SEQ ID NO: 796296 - RNA, 20 nt, Artificial Sequence
  Synthetic
acagucucgcucugucgccc

SEQ ID NO: 796297 - RNA, 20 nt, Artificial Sequence
  Synthetic
aaagucuugcucugucgccc

SEQ ID NO: 796298 - RNA, 20 nt, Artificial Sequence
  Synthetic
agaguuuugcucugucgccc

SEQ ID NO: 796299 - RNA, 20 nt, Artificial Sequence
  Synthetic
agggccucuuucugucgccc

SEQ ID NO: 796300 - RNA, 20 nt, Artificial Sequence
  Synthetic
gaguuuugcucuugucgccc

SEQ ID NO: 796301 - RNA, 20 nt, Artificial Sequence
  Synthetic
cuucagcucaggcaaggccc

SEQ ID NO: 796302 - RNA, 20 nt, Artificial Sequence
  Synthetic
cacguggaaacaacaggccc

SEQ ID NO: 796303 - RNA, 20 nt, Artificial Sequence
  Synthetic
ccccaccccacaacaggccc

SEQ ID NO: 796304 - RNA, 20 nt, Artificial Sequence
  Synthetic
cccgaccccacaacaggccc

SEQ ID NO: 796305 - RNA, 20 nt, Artificial Sequence
  Synthetic
ccccaccccacgacaggccc

SEQ ID NO: 796306 - RNA, 20 nt, Artificial Sequence
  Synthetic
ccucaccccacgacaggccc

SEQ ID NO: 796307 - RNA, 20 nt, Artificial Sequence
  Synthetic
ucccaccccucgacaggccc

SEQ ID NO: 796308 - RNA, 20 nt, Artificial Sequence
  Synthetic
ccucaccccuugacaggccc

SEQ ID NO: 796309 - RNA, 20 nt, Artificial Sequence
  Synthetic
aguuaucaaacuacaggccc

SEQ ID NO: 796310 - RNA, 20 nt, Artificial Sequence
  Synthetic
uucuuuaugcaagcaggccc

SEQ ID NO: 796311 - RNA, 20 nt, Artificial Sequence
  Synthetic
ucuuuuugagucucaggccc

SEQ ID NO: 796312 - RNA, 20 nt, Artificial Sequence
  Synthetic
cuccuuaagcuuucaggccc

SEQ ID NO: 796313 - RNA, 20 nt, Artificial Sequence
  Synthetic
ccccauccccugagaggccc

SEQ ID NO: 796314 - RNA, 20 nt, Artificial Sequence
  Synthetic
cccagcacuuugggaggccc

SEQ ID NO: 796315 - RNA, 20 nt, Artificial Sequence
  Synthetic
ugccuacgccaccagggccc

SEQ ID NO: 796316 - RNA, 20 nt, Artificial Sequence
  Synthetic
augguggaucaggggggccc

SEQ ID NO: 796317 - RNA, 20 nt, Artificial Sequence
  Synthetic
caccuccugauguggggccc

SEQ ID NO: 796318 - RNA, 20 nt, Artificial Sequence
  Synthetic
uggcagaucucggugggccc

SEQ ID NO: 796319 - RNA, 20 nt, Artificial Sequence
  Synthetic
ugacaugaucucuugggccc

SEQ ID NO: 796320 - RNA, 20 nt, Artificial Sequence
  Synthetic
augggaaugaaagauggccc

SEQ ID NO: 796321 - RNA, 20 nt, Artificial Sequence
  Synthetic
caagccacgaaaccuggccc

SEQ ID NO: 796322 - RNA, 20 nt, Artificial Sequence
  Synthetic
uccucauauguugcuggccc

SEQ ID NO: 796323 - RNA, 20 nt, Artificial Sequence
  Synthetic
cugagagccagcuguggccc

SEQ ID NO: 796324 - RNA, 20 nt, Artificial Sequence
  Synthetic
uucuucuuccaguguggccc

SEQ ID NO: 796325 - RNA, 20 nt, Artificial Sequence
  Synthetic
agcagauucccuuuuggccc

SEQ ID NO: 796326 - RNA, 20 nt, Artificial Sequence
  Synthetic
ugauuuuuucuuuuuggccc

SEQ ID NO: 796327 - RNA, 20 nt, Artificial Sequence
  Synthetic
aagguuaacuaaaaaugccc

SEQ ID NO: 796328 - RNA, 20 nt, Artificial Sequence
  Synthetic
uuaagaccucugacaugccc

SEQ ID NO: 796329 - RNA, 20 nt, Artificial Sequence
  Synthetic
cuacucauagacagaugccc

SEQ ID NO: 796330 - RNA, 20 nt, Artificial Sequence
  Synthetic
uuuaccuuuguuagaugccc

SEQ ID NO: 796331 - RNA, 20 nt, Artificial Sequence
  Synthetic
cagcugaaggauggaugccc

SEQ ID NO: 796332 - RNA, 20 nt, Artificial Sequence
  Synthetic
cagcaucucuggauaugccc

SEQ ID NO: 796333 - RNA, 20 nt, Artificial Sequence
  Synthetic
ugggucucaaugauaugccc

SEQ ID NO: 796334 - RNA, 20 nt, Artificial Sequence
  Synthetic
augugguuagcuaacugccc

SEQ ID NO: 796335 - RNA, 20 nt, Artificial Sequence
  Synthetic
cacugcaagcuccacugccc

SEQ ID NO: 796336 - RNA, 20 nt, Artificial Sequence
  Synthetic
acccucacugaauacugccc

SEQ ID NO: 796337 - RNA, 20 nt, Artificial Sequence
  Synthetic
augagccaccgcaccugccc

SEQ ID NO: 796338 - RNA, 20 nt, Artificial Sequence
  Synthetic
cuugugaaaucaggcugccc

SEQ ID NO: 796339 - RNA, 20 nt, Artificial Sequence
  Synthetic
aggaggcuagagggcugccc

SEQ ID NO: 796340 - RNA, 20 nt, Artificial Sequence
  Synthetic
ucuuccaagaaaugcugccc

SEQ ID NO: 796341 - RNA, 20 nt, Artificial Sequence
  Synthetic
aaagucuugcucugcugccc

SEQ ID NO: 796342 - RNA, 20 nt, Artificial Sequence
  Synthetic
uuaucuucccuuugcugccc

SEQ ID NO: 796343 - RNA, 20 nt, Artificial Sequence
  Synthetic
cucaaaugcuagaucugccc

SEQ ID NO: 796344 - RNA, 20 nt, Artificial Sequence
  Synthetic
uaucuuucuuuacucugccc

SEQ ID NO: 796345 - RNA, 20 nt, Artificial Sequence
  Synthetic
uugccucaaguucucugccc

SEQ ID NO: 796346 - RNA, 20 nt, Artificial Sequence
  Synthetic
aggcgugagccaccgugccc

SEQ ID NO: 796347 - RNA, 20 nt, Artificial Sequence
  Synthetic
auaggguuuggcaggugccc

SEQ ID NO: 796348 - RNA, 20 nt, Artificial Sequence
  Synthetic
ccuuuaauauaaaugugccc

SEQ ID NO: 796349 - RNA, 20 nt, Artificial Sequence
  Synthetic
auugcucuguaaaugugccc

SEQ ID NO: 796350 - RNA, 20 nt, Artificial Sequence
  Synthetic
agagucaugcuacauugccc

SEQ ID NO: 796351 - RNA, 20 nt, Artificial Sequence
  Synthetic
agaguccugcuccauugccc

SEQ ID NO: 796352 - RNA, 20 nt, Artificial Sequence
  Synthetic
cucucuggggaagauugccc

SEQ ID NO: 796353 - RNA, 20 nt, Artificial Sequence
  Synthetic
cuucuccugccugauugccc

SEQ ID NO: 796354 - RNA, 20 nt, Artificial Sequence
  Synthetic
uuucucuugccugauugccc

SEQ ID NO: 796355 - RNA, 20 nt, Artificial Sequence
  Synthetic
ugaaggucucugacuugccc

SEQ ID NO: 796356 - RNA, 20 nt, Artificial Sequence
  Synthetic
auuucagaggaaucuugccc

SEQ ID NO: 796357 - RNA, 20 nt, Artificial Sequence
  Synthetic
agagucucacucgguugccc

SEQ ID NO: 796358 - RNA, 20 nt, Artificial Sequence
  Synthetic
cucuguuuccaauguugccc

SEQ ID NO: 796359 - RNA, 20 nt, Artificial Sequence
  Synthetic
auggaaucuugcuguugccc

SEQ ID NO: 796360 - RNA, 20 nt, Artificial Sequence
  Synthetic
acaaucucacucuguugccc

SEQ ID NO: 796361 - RNA, 20 nt, Artificial Sequence
  Synthetic
agcaucucacucuguugccc

SEQ ID NO: 796362 - RNA, 20 nt, Artificial Sequence
  Synthetic
agggucucacucuguugccc

SEQ ID NO: 796363 - RNA, 20 nt, Artificial Sequence
  Synthetic
agagucuggcucuguugccc

SEQ ID NO: 796364 - RNA, 20 nt, Artificial Sequence
  Synthetic
agaaucuugcucuguugccc

SEQ ID NO: 796365 - RNA, 20 nt, Artificial Sequence
  Synthetic
agagucuugcucuguugccc

SEQ ID NO: 796366 - RNA, 20 nt, Artificial Sequence
  Synthetic
aggcucucacuguguugccc

SEQ ID NO: 796367 - RNA, 20 nt, Artificial Sequence
  Synthetic
agagucucacuguguugccc

SEQ ID NO: 796368 - RNA, 20 nt, Artificial Sequence
  Synthetic
ugacuuugaaacauuugccc

SEQ ID NO: 796369 - RNA, 20 nt, Artificial Sequence
  Synthetic
uaugaaagguuauuuugccc

SEQ ID NO: 796370 - RNA, 20 nt, Artificial Sequence
  Synthetic
uucaaacugucaaaaauccc

SEQ ID NO: 796371 - RNA, 20 nt, Artificial Sequence
  Synthetic
auuuuuauuuuaaaaauccc

SEQ ID NO: 796372 - RNA, 20 nt, Artificial Sequence
  Synthetic
auauacaaaaauaaaauccc

SEQ ID NO: 796373 - RNA, 20 nt, Artificial Sequence
  Synthetic
acuuggugaagacaaauccc

SEQ ID NO: 796374 - RNA, 20 nt, Artificial Sequence
  Synthetic
cauaggauccaucaaauccc

SEQ ID NO: 796375 - RNA, 20 nt, Artificial Sequence
  Synthetic
aaagauuggauucaaauccc

SEQ ID NO: 796376 - RNA, 20 nt, Artificial Sequence
  Synthetic
cugaacaauggagaaauccc

SEQ ID NO: 796377 - RNA, 20 nt, Artificial Sequence
  Synthetic
uuuuagaauuuugaaauccc

SEQ ID NO: 796378 - RNA, 20 nt, Artificial Sequence
  Synthetic
uguuggcauuuugaaauccc

SEQ ID NO: 796379 - RNA, 20 nt, Artificial Sequence
  Synthetic
uuccugcgacugccaauccc

SEQ ID NO: 796380 - RNA, 20 nt, Artificial Sequence
  Synthetic
ugggccucaagaagaauccc

SEQ ID NO: 796381 - RNA, 20 nt, Artificial Sequence
  Synthetic
uggcucacgccuguaauccc

SEQ ID NO: 796382 - RNA, 20 nt, Artificial Sequence
  Synthetic
uggcacaugccuguaauccc

SEQ ID NO: 796383 - RNA, 20 nt, Artificial Sequence
  Synthetic
uggcucaugccuguaauccc

SEQ ID NO: 796384 - RNA, 20 nt, Artificial Sequence
  Synthetic
aggaacaaugcacacauccc

SEQ ID NO: 796385 - RNA, 20 nt, Artificial Sequence
  Synthetic
cacugcaacuucgacauccc

SEQ ID NO: 796386 - RNA, 20 nt, Artificial Sequence
  Synthetic
agggacuucucugacauccc

SEQ ID NO: 796387 - RNA, 20 nt, Artificial Sequence
  Synthetic
aggauuaaacucuacauccc

SEQ ID NO: 796388 - RNA, 20 nt, Artificial Sequence
  Synthetic
aacauguugagcagcauccc

SEQ ID NO: 796389 - RNA, 20 nt, Artificial Sequence
  Synthetic
uugaaccagccuggcauccc

SEQ ID NO: 796390 - RNA, 20 nt, Artificial Sequence
  Synthetic
cacugcaagcucugcauccc

SEQ ID NO: 796391 - RNA, 20 nt, Artificial Sequence
  Synthetic
uugaaccagccuugcauccc

SEQ ID NO: 796392 - RNA, 20 nt, Artificial Sequence
  Synthetic
uugaaccagcuuugcauccc

SEQ ID NO: 796393 - RNA, 20 nt, Artificial Sequence
  Synthetic
cugggaaaaugaaucauccc

SEQ ID NO: 796394 - RNA, 20 nt, Artificial Sequence
  Synthetic
cagugagcuuagaucauccc

SEQ ID NO: 796395 - RNA, 20 nt, Artificial Sequence
  Synthetic
ucuaaaugucuucucauccc

SEQ ID NO: 796396 - RNA, 20 nt, Artificial Sequence
  Synthetic
aaaucagugguucucauccc

SEQ ID NO: 796397 - RNA, 20 nt, Artificial Sequence
  Synthetic
aaucaaguaggcuucauccc

SEQ ID NO: 796398 - RNA, 20 nt, Artificial Sequence
  Synthetic
aaaccauaucauuucauccc

SEQ ID NO: 796399 - RNA, 20 nt, Artificial Sequence
  Synthetic
uuuuuuuuugcaaagauccc

SEQ ID NO: 796400 - RNA, 20 nt, Artificial Sequence
  Synthetic
auaaaaaucaacaagauccc

SEQ ID NO: 796401 - RNA, 20 nt, Artificial Sequence
  Synthetic
uguguuuuugaagagauccc

SEQ ID NO: 796402 - RNA, 20 nt, Artificial Sequence
  Synthetic
ucaaaugaggacuagauccc

SEQ ID NO: 796403 - RNA, 20 nt, Artificial Sequence
  Synthetic
augcuaacgcugcugauccc

SEQ ID NO: 796404 - RNA, 20 nt, Artificial Sequence
  Synthetic
uuugguuguaaugugauccc

SEQ ID NO: 796405 - RNA, 20 nt, Artificial Sequence
  Synthetic
uuucaaguuacuuugauccc

SEQ ID NO: 796406 - RNA, 20 nt, Artificial Sequence
  Synthetic
caggaaguaacccauauccc

SEQ ID NO: 796407 - RNA, 20 nt, Artificial Sequence
  Synthetic
uggcaaacagugcauauccc

SEQ ID NO: 796408 - RNA, 20 nt, Artificial Sequence
  Synthetic
uauuuuaauuugcauauccc

SEQ ID NO: 796409 - RNA, 20 nt, Artificial Sequence
  Synthetic
accuuguucacucauauccc

SEQ ID NO: 796410 - RNA, 20 nt, Artificial Sequence
  Synthetic
uugaaacaaccuucuauccc

SEQ ID NO: 796411 - RNA, 20 nt, Artificial Sequence
  Synthetic
aggguauuuagcaguauccc

SEQ ID NO: 796412 - RNA, 20 nt, Artificial Sequence
  Synthetic
aagaagaaaaucaguauccc

SEQ ID NO: 796413 - RNA, 20 nt, Artificial Sequence
  Synthetic
acacuaagcuugaguauccc

SEQ ID NO: 796414 - RNA, 20 nt, Artificial Sequence
  Synthetic
ucuggggacaaaauuauccc

SEQ ID NO: 796415 - RNA, 20 nt, Artificial Sequence
  Synthetic
uggugggcaccuauuauccc

SEQ ID NO: 796416 - RNA, 20 nt, Artificial Sequence
  Synthetic
uucuucucaagacuuauccc

SEQ ID NO: 796417 - RNA, 20 nt, Artificial Sequence
  Synthetic
cucugccacuaguuuauccc

SEQ ID NO: 796418 - RNA, 20 nt, Artificial Sequence
  Synthetic
aaaguagaaagguuuauccc

SEQ ID NO: 796419 - RNA, 20 nt, Artificial Sequence
  Synthetic
accccuggcacccaacuccc

SEQ ID NO: 796420 - RNA, 20 nt, Artificial Sequence
  Synthetic
ugcauuucuuagcaacuccc

SEQ ID NO: 796421 - RNA, 20 nt, Artificial Sequence
  Synthetic
uucagaaucccucaacuccc

SEQ ID NO: 796422 - RNA, 20 nt, Artificial Sequence
  Synthetic
uugcaagauaaagaacuccc

SEQ ID NO: 796423 - RNA, 20 nt, Artificial Sequence
  Synthetic
aauucccauguauaacuccc

SEQ ID NO: 796424 - RNA, 20 nt, Artificial Sequence
  Synthetic
aucuugagauuuuaacuccc

SEQ ID NO: 796425 - RNA, 20 nt, Artificial Sequence
  Synthetic
ugacaguuuugaacacuccc

SEQ ID NO: 796426 - RNA, 20 nt, Artificial Sequence
  Synthetic
ugaguuguaauuccacuccc

SEQ ID NO: 796427 - RNA, 20 nt, Artificial Sequence
  Synthetic
uuuacuuaguuuccacuccc

SEQ ID NO: 796428 - RNA, 20 nt, Artificial Sequence
  Synthetic
cucucccaugacagacuccc

SEQ ID NO: 796429 - RNA, 20 nt, Artificial Sequence
  Synthetic
cacugcaaccuccgacuccc

SEQ ID NO: 796430 - RNA, 20 nt, Artificial Sequence
  Synthetic
caugggucucagggacuccc

SEQ ID NO: 796431 - RNA, 20 nt, Artificial Sequence
  Synthetic
cacugcaaccucugacuccc

SEQ ID NO: 796432 - RNA, 20 nt, Artificial Sequence
  Synthetic
uugaguuauauaauacuccc

SEQ ID NO: 796433 - RNA, 20 nt, Artificial Sequence
  Synthetic
cacugcaaccuccuacuccc

SEQ ID NO: 796434 - RNA, 20 nt, Artificial Sequence
  Synthetic
aagucccacaguguacuccc

SEQ ID NO: 796435 - RNA, 20 nt, Artificial Sequence
  Synthetic
ugggcuguccacuuacuccc

SEQ ID NO: 796436 - RNA, 20 nt, Artificial Sequence
  Synthetic
caccgcaaccuacaccuccc

SEQ ID NO: 796437 - RNA, 20 nt, Artificial Sequence
  Synthetic
cacugcaaccuccaccuccc

SEQ ID NO: 796438 - RNA, 20 nt, Artificial Sequence
  Synthetic
ucacugcaccuccaccuccc

SEQ ID NO: 796439 - RNA, 20 nt, Artificial Sequence
  Synthetic
cacugcaagcuccaccuccc

SEQ ID NO: 796440 - RNA, 20 nt, Artificial Sequence
  Synthetic
cacugcagccuugaccuccc

SEQ ID NO: 796441 - RNA, 20 nt, Artificial Sequence
  Synthetic
ucauuuccccuaccccuccc

SEQ ID NO: 796442 - RNA, 20 nt, Artificial Sequence
  Synthetic
agggagagacugccccuccc

SEQ ID NO: 796443 - RNA, 20 nt, Artificial Sequence
  Synthetic
aucuccaccugaucccuccc

SEQ ID NO: 796444 - RNA, 20 nt, Artificial Sequence
  Synthetic
ugcugccuuuacucccuccc

SEQ ID NO: 796445 - RNA, 20 nt, Artificial Sequence
  Synthetic
cucacagcugccucccuccc

SEQ ID NO: 796446 - RNA, 20 nt, Artificial Sequence
  Synthetic
uccucccaccucagccuccc

SEQ ID NO: 796447 - RNA, 20 nt, Artificial Sequence
  Synthetic
uucucaugccucagccuccc

SEQ ID NO: 796448 - RNA, 20 nt, Artificial Sequence
  Synthetic
cacugcaaacuccgccuccc

SEQ ID NO: 796449 - RNA, 20 nt, Artificial Sequence
  Synthetic
cacugcaaccuccgccuccc

SEQ ID NO: 796450 - RNA, 20 nt, Artificial Sequence
  Synthetic
cagugcaaccuccgccuccc

SEQ ID NO: 796451 - RNA, 20 nt, Artificial Sequence
  Synthetic
cacugcaagcuccgccuccc

SEQ ID NO: 796452 - RNA, 20 nt, Artificial Sequence
  Synthetic
cacugcaacuuccgccuccc

SEQ ID NO: 796453 - RNA, 20 nt, Artificial Sequence
  Synthetic
cacugcaaccacugccuccc

SEQ ID NO: 796454 - RNA, 20 nt, Artificial Sequence
  Synthetic
accacuucagccugccuccc

SEQ ID NO: 796455 - RNA, 20 nt, Artificial Sequence
  Synthetic
cacugcaacaucugccuccc

SEQ ID NO: 796456 - RNA, 20 nt, Artificial Sequence
  Synthetic
cacugcaaccucugccuccc

SEQ ID NO: 796457 - RNA, 20 nt, Artificial Sequence
  Synthetic
cacuacaagcucugccuccc

SEQ ID NO: 796458 - RNA, 20 nt, Artificial Sequence
  Synthetic
cacugcaagcucugccuccc

SEQ ID NO: 796459 - RNA, 20 nt, Artificial Sequence
  Synthetic
aucucacuauguugccuccc

SEQ ID NO: 796460 - RNA, 20 nt, Artificial Sequence
  Synthetic
uaaauucugcuucuccuccc

SEQ ID NO: 796461 - RNA, 20 nt, Artificial Sequence
  Synthetic
acacaggcacuuguccuccc

SEQ ID NO: 796462 - RNA, 20 nt, Artificial Sequence
  Synthetic
ugcauugcuaaccagcuccc

SEQ ID NO: 796463 - RNA, 20 nt, Artificial Sequence
  Synthetic
ugaccuaucuugcagcuccc

SEQ ID NO: 796464 - RNA, 20 nt, Artificial Sequence
  Synthetic
cuaacuuagacugggcuccc

SEQ ID NO: 796465 - RNA, 20 nt, Artificial Sequence
  Synthetic
auagcucuuggauggcuccc

SEQ ID NO: 796466 - RNA, 20 nt, Artificial Sequence
  Synthetic
aauagcacauguuugcuccc

SEQ ID NO: 796467 - RNA, 20 nt, Artificial Sequence
  Synthetic
uaagugcugcaaaaucuccc

SEQ ID NO: 796468 - RNA, 20 nt, Artificial Sequence
  Synthetic
uuuagauaaugaaaucuccc

SEQ ID NO: 796469 - RNA, 20 nt, Artificial Sequence
  Synthetic
uaagauaaagguaaucuccc

SEQ ID NO: 796470 - RNA, 20 nt, Artificial Sequence
  Synthetic
agauaaaacucccaucuccc

SEQ ID NO: 796471 - RNA, 20 nt, Artificial Sequence
  Synthetic
cacaaucgccuccaucuccc

SEQ ID NO: 796472 - RNA, 20 nt, Artificial Sequence
  Synthetic
cacugcagccuugaucuccc

SEQ ID NO: 796473 - RNA, 20 nt, Artificial Sequence
  Synthetic
acacuguaaauaacucuccc

SEQ ID NO: 796474 - RNA, 20 nt, Artificial Sequence
  Synthetic
ugggaggggcagucucuccc

SEQ ID NO: 796475 - RNA, 20 nt, Artificial Sequence
  Synthetic
acugcuuugcagagucuccc

SEQ ID NO: 796476 - RNA, 20 nt, Artificial Sequence
  Synthetic
cacugcaagcuccgucuccc

SEQ ID NO: 796477 - RNA, 20 nt, Artificial Sequence
  Synthetic
cacugcaaccucugucuccc

SEQ ID NO: 796478 - RNA, 20 nt, Artificial Sequence
  Synthetic
cacugcacccucugucuccc

SEQ ID NO: 796479 - RNA, 20 nt, Artificial Sequence
  Synthetic
ugauucuugcuuugucuccc

SEQ ID NO: 796480 - RNA, 20 nt, Artificial Sequence
  Synthetic
uuaccuucucuuauucuccc

SEQ ID NO: 796481 - RNA, 20 nt, Artificial Sequence
  Synthetic
aucacagcugcauuucuccc

SEQ ID NO: 796482 - RNA, 20 nt, Artificial Sequence
  Synthetic
ucuggaauugaaaaaguccc

SEQ ID NO: 796483 - RNA, 20 nt, Artificial Sequence
  Synthetic
aacaacaaugacuaaguccc

SEQ ID NO: 796484 - RNA, 20 nt, Artificial Sequence
  Synthetic
auucuugagucuagaguccc

SEQ ID NO: 796485 - RNA, 20 nt, Artificial Sequence
  Synthetic
ccaaagugcucuggaguccc

SEQ ID NO: 796486 - RNA, 20 nt, Artificial Sequence
  Synthetic
cacugaaaccuccgcguccc

SEQ ID NO: 796487 - RNA, 20 nt, Artificial Sequence
  Synthetic
cugugagccacaugcguccc

SEQ ID NO: 796488 - RNA, 20 nt, Artificial Sequence
  Synthetic
aguucucaaagggagguccc

SEQ ID NO: 796489 - RNA, 20 nt, Artificial Sequence
  Synthetic
caggagcuaugcuagguccc

SEQ ID NO: 796490 - RNA, 20 nt, Artificial Sequence
  Synthetic
augcugauucaguagguccc

SEQ ID NO: 796491 - RNA, 20 nt, Artificial Sequence
  Synthetic
ugaaggcaguaggggguccc

SEQ ID NO: 796492 - RNA, 20 nt, Artificial Sequence
  Synthetic
cccuaccccucccugguccc

SEQ ID NO: 796493 - RNA, 20 nt, Artificial Sequence
  Synthetic
aguagggggucccugguccc

SEQ ID NO: 796494 - RNA, 20 nt, Artificial Sequence
  Synthetic
cugcucuuugacaauguccc

SEQ ID NO: 796495 - RNA, 20 nt, Artificial Sequence
  Synthetic
cuuucuuucauugauguccc

SEQ ID NO: 796496 - RNA, 20 nt, Artificial Sequence
  Synthetic
ucuugacuguccucuguccc

SEQ ID NO: 796497 - RNA, 20 nt, Artificial Sequence
  Synthetic
uccccguggugcucuguccc

SEQ ID NO: 796498 - RNA, 20 nt, Artificial Sequence
  Synthetic
auuuaguuccuuaguguccc

SEQ ID NO: 796499 - RNA, 20 nt, Artificial Sequence
  Synthetic
ucaauaccaguguguguccc

SEQ ID NO: 796500 - RNA, 20 nt, Artificial Sequence
  Synthetic
ccuaaacccacucuuguccc

SEQ ID NO: 796501 - RNA, 20 nt, Artificial Sequence
  Synthetic
aauaauauacuucuuguccc

SEQ ID NO: 796502 - RNA, 20 nt, Artificial Sequence
  Synthetic
cauuucagauacuuuguccc

SEQ ID NO: 796503 - RNA, 20 nt, Artificial Sequence
  Synthetic
caacuauuuuguuuuguccc

SEQ ID NO: 796504 - RNA, 20 nt, Artificial Sequence
  Synthetic
uauuagaaaugcaaauuccc

SEQ ID NO: 796505 - RNA, 20 nt, Artificial Sequence
  Synthetic
ugcauuucuaucaaauuccc

SEQ ID NO: 796506 - RNA, 20 nt, Artificial Sequence
  Synthetic
uuaauuguuugagaauuccc

SEQ ID NO: 796507 - RNA, 20 nt, Artificial Sequence
  Synthetic
acugaacuucaggaauuccc

SEQ ID NO: 796508 - RNA, 20 nt, Artificial Sequence
  Synthetic
ccagccuuugguuaauuccc

SEQ ID NO: 796509 - RNA, 20 nt, Artificial Sequence
  Synthetic
ccagugccuagaacauuccc

SEQ ID NO: 796510 - RNA, 20 nt, Artificial Sequence
  Synthetic
uucuaagcaucaccauuccc

SEQ ID NO: 796511 - RNA, 20 nt, Artificial Sequence
  Synthetic
aagaccuggccuccauuccc

SEQ ID NO: 796512 - RNA, 20 nt, Artificial Sequence
  Synthetic
accuacugggcugcauuccc

SEQ ID NO: 796513 - RNA, 20 nt, Artificial Sequence
  Synthetic
ugccuuccucauucauuccc

SEQ ID NO: 796514 - RNA, 20 nt, Artificial Sequence
  Synthetic
cugccccucccuugauuccc

SEQ ID NO: 796515 - RNA, 20 nt, Artificial Sequence
  Synthetic
ugcuaaauaauaauauuccc

SEQ ID NO: 796516 - RNA, 20 nt, Artificial Sequence
  Synthetic
uucagucauacucuauuccc

SEQ ID NO: 796517 - RNA, 20 nt, Artificial Sequence
  Synthetic
ucuggcugcacaguauuccc

SEQ ID NO: 796518 - RNA, 20 nt, Artificial Sequence
  Synthetic
agugcaagcaguuuauuccc

SEQ ID NO: 796519 - RNA, 20 nt, Artificial Sequence
  Synthetic
aucucacaacugaacuuccc

SEQ ID NO: 796520 - RNA, 20 nt, Artificial Sequence
  Synthetic
auaaaaauaaguaacuuccc

SEQ ID NO: 796521 - RNA, 20 nt, Artificial Sequence
  Synthetic
cacugcaaacuacacuuccc

SEQ ID NO: 796522 - RNA, 20 nt, Artificial Sequence
  Synthetic
cacugcagccuugacuuccc

SEQ ID NO: 796523 - RNA, 20 nt, Artificial Sequence
  Synthetic
aaucugcagaccuccuuccc

SEQ ID NO: 796524 - RNA, 20 nt, Artificial Sequence
  Synthetic
ccaaauuucaauuccuuccc

SEQ ID NO: 796525 - RNA, 20 nt, Artificial Sequence
  Synthetic
auccaaucuuuuggcuuccc

SEQ ID NO: 796526 - RNA, 20 nt, Artificial Sequence
  Synthetic
ugaaagcuauuaaucuuccc

SEQ ID NO: 796527 - RNA, 20 nt, Artificial Sequence
  Synthetic
agaccuuaauucaucuuccc

SEQ ID NO: 796528 - RNA, 20 nt, Artificial Sequence
  Synthetic
cuuagcaaagauaucuuccc

SEQ ID NO: 796529 - RNA, 20 nt, Artificial Sequence
  Synthetic
uaucuguauugauucuuccc

SEQ ID NO: 796530 - RNA, 20 nt, Artificial Sequence
  Synthetic
cacuauuugcuuuucuuccc

SEQ ID NO: 796531 - RNA, 20 nt, Artificial Sequence
  Synthetic
uacuuuucuaauaaguuccc

SEQ ID NO: 796532 - RNA, 20 nt, Artificial Sequence
  Synthetic
cccaccccacaacaguuccc

SEQ ID NO: 796533 - RNA, 20 nt, Artificial Sequence
  Synthetic
uuucauauucuggaguuccc

SEQ ID NO: 796534 - RNA, 20 nt, Artificial Sequence
  Synthetic
auuucaagaugcugguuccc

SEQ ID NO: 796535 - RNA, 20 nt, Artificial Sequence
  Synthetic
uucagcggguacauguuccc

SEQ ID NO: 796536 - RNA, 20 nt, Artificial Sequence
  Synthetic
auguagaaaaauauguuccc

SEQ ID NO: 796537 - RNA, 20 nt, Artificial Sequence
  Synthetic
uugcccaaaaucguguuccc

SEQ ID NO: 796538 - RNA, 20 nt, Artificial Sequence
  Synthetic
agaagucccaacuuguuccc

SEQ ID NO: 796539 - RNA, 20 nt, Artificial Sequence
  Synthetic
uuuauagccuuaaauuuccc

SEQ ID NO: 796540 - RNA, 20 nt, Artificial Sequence
  Synthetic
cauggccauaacaauuuccc

SEQ ID NO: 796541 - RNA, 20 nt, Artificial Sequence
  Synthetic
aaaaauugagugaauuuccc

SEQ ID NO: 796542 - RNA, 20 nt, Artificial Sequence
  Synthetic
uuuuucuugccuaauuuccc

SEQ ID NO: 796543 - RNA, 20 nt, Artificial Sequence
  Synthetic
acaguaauggcuaauuuccc

SEQ ID NO: 796544 - RNA, 20 nt, Artificial Sequence
  Synthetic
ucuucacuugcccauuuccc

SEQ ID NO: 796545 - RNA, 20 nt, Artificial Sequence
  Synthetic
cacauucaaaagcauuuccc

SEQ ID NO: 796546 - RNA, 20 nt, Artificial Sequence
  Synthetic
cguacuugucagcauuuccc

SEQ ID NO: 796547 - RNA, 20 nt, Artificial Sequence
  Synthetic
auaaguaaaauuuauuuccc

SEQ ID NO: 796548 - RNA, 20 nt, Artificial Sequence
  Synthetic
ucccuaacuccuacuuuccc

SEQ ID NO: 796549 - RNA, 20 nt, Artificial Sequence
  Synthetic
auugggagacugccuuuccc

SEQ ID NO: 796550 - RNA, 20 nt, Artificial Sequence
  Synthetic
acuugcuguauagcuuuccc

SEQ ID NO: 796551 - RNA, 20 nt, Artificial Sequence
  Synthetic
cuugcucaggaagguuuccc

SEQ ID NO: 796552 - RNA, 20 nt, Artificial Sequence
  Synthetic
aacugaucaugagguuuccc

SEQ ID NO: 796553 - RNA, 20 nt, Artificial Sequence
  Synthetic
aacagcucucuauguuuccc

SEQ ID NO: 796554 - RNA, 20 nt, Artificial Sequence
  Synthetic
uguacaacuuuauguuuccc

SEQ ID NO: 796555 - RNA, 20 nt, Artificial Sequence
  Synthetic
uugaucuugaacuguuuccc

SEQ ID NO: 796556 - RNA, 20 nt, Artificial Sequence
  Synthetic
auugaacauuuuuguuuccc

SEQ ID NO: 796557 - RNA, 20 nt, Artificial Sequence
  Synthetic
caaugucccuucauuuuccc

SEQ ID NO: 796558 - RNA, 20 nt, Artificial Sequence
  Synthetic
uauaucuuggagauuuuccc

SEQ ID NO: 796559 - RNA, 20 nt, Artificial Sequence
  Synthetic
agaaguuagcaacuuuuccc

SEQ ID NO: 796560 - RNA, 20 nt, Artificial Sequence
  Synthetic
uuugauauuuugcuuuuccc

SEQ ID NO: 796561 - RNA, 20 nt, Artificial Sequence
  Synthetic
uauuuucugccucuuuuccc

SEQ ID NO: 796562 - RNA, 20 nt, Artificial Sequence
  Synthetic
uccuauguaucaguuuuccc

SEQ ID NO: 796563 - RNA, 20 nt, Artificial Sequence
  Synthetic
cuucuuuucuauguuuuccc

SEQ ID NO: 796564 - RNA, 20 nt, Artificial Sequence
  Synthetic
caagaaauuuuuuuuuuccc

SEQ ID NO: 796565 - RNA, 20 nt, Artificial Sequence
  Synthetic
aucuguaaaauccaaaagcc

SEQ ID NO: 796566 - RNA, 20 nt, Artificial Sequence
  Synthetic
aaaacacuuaaucaaaagcc

SEQ ID NO: 796567 - RNA, 20 nt, Artificial Sequence
  Synthetic
uuuuagagagaguaaaagcc

SEQ ID NO: 796568 - RNA, 20 nt, Artificial Sequence
  Synthetic
aaugaggaacuguaaaagcc

SEQ ID NO: 796569 - RNA, 20 nt, Artificial Sequence
  Synthetic
uucuuuucauuguaaaagcc

SEQ ID NO: 796570 - RNA, 20 nt, Artificial Sequence
  Synthetic
auaaagggaacaacaaagcc

SEQ ID NO: 796571 - RNA, 20 nt, Artificial Sequence
  Synthetic
aucauccugauaccaaagcc

SEQ ID NO: 796572 - RNA, 20 nt, Artificial Sequence
  Synthetic
aucauucugauaccaaagcc

SEQ ID NO: 796573 - RNA, 20 nt, Artificial Sequence
  Synthetic
aauacccugaucccaaagcc

SEQ ID NO: 796574 - RNA, 20 nt, Artificial Sequence
  Synthetic
cuaucccauuggccaaagcc

SEQ ID NO: 796575 - RNA, 20 nt, Artificial Sequence
  Synthetic
aacgucuuuccuccaaagcc

SEQ ID NO: 796576 - RNA, 20 nt, Artificial Sequence
  Synthetic
uuauauguaauaucaaagcc

SEQ ID NO: 796577 - RNA, 20 nt, Artificial Sequence
  Synthetic
aaaucaguguucucaaagcc

SEQ ID NO: 796578 - RNA, 20 nt, Artificial Sequence
  Synthetic
aucgagguaugaagaaagcc

SEQ ID NO: 796579 - RNA, 20 nt, Artificial Sequence
  Synthetic
caggcuugcaggggaaagcc

SEQ ID NO: 796580 - RNA, 20 nt, Artificial Sequence
  Synthetic
aaggagggagauggaaagcc

SEQ ID NO: 796581 - RNA, 20 nt, Artificial Sequence
  Synthetic
aagggcggggaaugaaagcc

SEQ ID NO: 796582 - RNA, 20 nt, Artificial Sequence
  Synthetic
ucuacuuuaugaugaaagcc

SEQ ID NO: 796583 - RNA, 20 nt, Artificial Sequence
  Synthetic
uugaauuaaccacuaaagcc

SEQ ID NO: 796584 - RNA, 20 nt, Artificial Sequence
  Synthetic
auauuucggaauuuaaagcc

SEQ ID NO: 796585 - RNA, 20 nt, Artificial Sequence
  Synthetic
aaauagguagagaacaagcc

SEQ ID NO: 796586 - RNA, 20 nt, Artificial Sequence
  Synthetic
ucaggaguucaagacaagcc

SEQ ID NO: 796587 - RNA, 20 nt, Artificial Sequence
  Synthetic
aauuuaaugugauacaagcc

SEQ ID NO: 796588 - RNA, 20 nt, Artificial Sequence
  Synthetic
auaccagcaaguuacaagcc

SEQ ID NO: 796589 - RNA, 20 nt, Artificial Sequence
  Synthetic
caggcaugcaccaccaagcc

SEQ ID NO: 796590 - RNA, 20 nt, Artificial Sequence
  Synthetic
uaggcgugcaccaccaagcc

SEQ ID NO: 796591 - RNA, 20 nt, Artificial Sequence
  Synthetic
cagaugccugccaccaagcc

SEQ ID NO: 796592 - RNA, 20 nt, Artificial Sequence
  Synthetic
ugccucuaaucuaccaagcc

SEQ ID NO: 796593 - RNA, 20 nt, Artificial Sequence
  Synthetic
cuucugcauccugccaagcc

SEQ ID NO: 796594 - RNA, 20 nt, Artificial Sequence
  Synthetic
caagcaacugccagcaagcc

SEQ ID NO: 796595 - RNA, 20 nt, Artificial Sequence
  Synthetic
uucuuugccuuuaucaagcc

SEQ ID NO: 796596 - RNA, 20 nt, Artificial Sequence
  Synthetic
ugcaccacugcacucaagcc

SEQ ID NO: 796597 - RNA, 20 nt, Artificial Sequence
  Synthetic
ccaaauguguaucucaagcc

SEQ ID NO: 796598 - RNA, 20 nt, Artificial Sequence
  Synthetic
cauuuugcaggaaagaagcc

SEQ ID NO: 796599 - RNA, 20 nt, Artificial Sequence
  Synthetic
aggcaccuaaaccagaagcc

SEQ ID NO: 796600 - RNA, 20 nt, Artificial Sequence
  Synthetic
aguugaauaaagcagaagcc

SEQ ID NO: 796601 - RNA, 20 nt, Artificial Sequence
  Synthetic
acauggccagagcagaagcc

SEQ ID NO: 796602 - RNA, 20 nt, Artificial Sequence
  Synthetic
agcuuaacagaugagaagcc

SEQ ID NO: 796603 - RNA, 20 nt, Artificial Sequence
  Synthetic
uccuuugaacuuucgaagcc

SEQ ID NO: 796604 - RNA, 20 nt, Artificial Sequence
  Synthetic
ugcuuagaaagcaggaagcc

SEQ ID NO: 796605 - RNA, 20 nt, Artificial Sequence
  Synthetic
aggaaggaagucaggaagcc

SEQ ID NO: 796606 - RNA, 20 nt, Artificial Sequence
  Synthetic
uuuugguaagucaggaagcc

SEQ ID NO: 796607 - RNA, 20 nt, Artificial Sequence
  Synthetic
acaaaacaacaguggaagcc

SEQ ID NO: 796608 - RNA, 20 nt, Artificial Sequence
  Synthetic
uucaaaaaaucaaugaagcc

SEQ ID NO: 796609 - RNA, 20 nt, Artificial Sequence
  Synthetic
augcucaugaauaugaagcc

SEQ ID NO: 796610 - RNA, 20 nt, Artificial Sequence
  Synthetic
caggagaaucacuugaagcc

SEQ ID NO: 796611 - RNA, 20 nt, Artificial Sequence
  Synthetic
caggagaauugcuugaagcc

SEQ ID NO: 796612 - RNA, 20 nt, Artificial Sequence
  Synthetic
uaggaguauugcuugaagcc

SEQ ID NO: 796613 - RNA, 20 nt, Artificial Sequence
  Synthetic
uccuuugaacuuuugaagcc

SEQ ID NO: 796614 - RNA, 20 nt, Artificial Sequence
  Synthetic
uauacuaaaugaaauaagcc

SEQ ID NO: 796615 - RNA, 20 nt, Artificial Sequence
  Synthetic
uguguuaaaugaaauaagcc

SEQ ID NO: 796616 - RNA, 20 nt, Artificial Sequence
  Synthetic
acuauauuuaauaauaagcc

SEQ ID NO: 796617 - RNA, 20 nt, Artificial Sequence
  Synthetic
uuuaaaguuaauuauaagcc

SEQ ID NO: 796618 - RNA, 20 nt, Artificial Sequence
  Synthetic
ucuucagggaaaacuaagcc

SEQ ID NO: 796619 - RNA, 20 nt, Artificial Sequence
  Synthetic
ugaggaguauucucuaagcc

SEQ ID NO: 796620 - RNA, 20 nt, Artificial Sequence
  Synthetic
uucaggagcucuuguaagcc

SEQ ID NO: 796621 - RNA, 20 nt, Artificial Sequence
  Synthetic
ucauaagccuccauuaagcc

SEQ ID NO: 796622 - RNA, 20 nt, Artificial Sequence
  Synthetic
aagaaggaaaaacuuaagcc

SEQ ID NO: 796623 - RNA, 20 nt, Artificial Sequence
  Synthetic
aaccaauucccccaacagcc

SEQ ID NO: 796624 - RNA, 20 nt, Artificial Sequence
  Synthetic
cccggaguucaagaacagcc

SEQ ID NO: 796625 - RNA, 20 nt, Artificial Sequence
  Synthetic
ucaggagcucgagaacagcc

SEQ ID NO: 796626 - RNA, 20 nt, Artificial Sequence
  Synthetic
aaaggaguuugagaacagcc

SEQ ID NO: 796627 - RNA, 20 nt, Artificial Sequence
  Synthetic
cuaguugccaaauaacagcc

SEQ ID NO: 796628 - RNA, 20 nt, Artificial Sequence
  Synthetic
uaaaagauauacacacagcc

SEQ ID NO: 796629 - RNA, 20 nt, Artificial Sequence
  Synthetic
ugguaagaaagaccacagcc

SEQ ID NO: 796630 - RNA, 20 nt, Artificial Sequence
  Synthetic
auuuuaauauucucacagcc

SEQ ID NO: 796631 - RNA, 20 nt, Artificial Sequence
  Synthetic
cacaccacugcacuacagcc

SEQ ID NO: 796632 - RNA, 20 nt, Artificial Sequence
  Synthetic
cgcaccacugcacuacagcc

SEQ ID NO: 796633 - RNA, 20 nt, Artificial Sequence
  Synthetic
ugugccacugcacuacagcc

SEQ ID NO: 796634 - RNA, 20 nt, Artificial Sequence
  Synthetic
cagagaccacuuuuacagcc

SEQ ID NO: 796635 - RNA, 20 nt, Artificial Sequence
  Synthetic
ccaggaguucaaaaccagcc

SEQ ID NO: 796636 - RNA, 20 nt, Artificial Sequence
  Synthetic
ucaagaguucgaaaccagcc

SEQ ID NO: 796637 - RNA, 20 nt, Artificial Sequence
  Synthetic
ucaggaguucgaaaccagcc

SEQ ID NO: 796638 - RNA, 20 nt, Artificial Sequence
  Synthetic
uucuguauguugaaccagcc

SEQ ID NO: 796639 - RNA, 20 nt, Artificial Sequence
  Synthetic
uuaggaguucgacaccagcc

SEQ ID NO: 796640 - RNA, 20 nt, Artificial Sequence
  Synthetic
ccaggaguccaagaccagcc

SEQ ID NO: 796641 - RNA, 20 nt, Artificial Sequence
  Synthetic
ucaagaguucaagaccagcc

SEQ ID NO: 796642 - RNA, 20 nt, Artificial Sequence
  Synthetic
ccaggaguucaagaccagcc

SEQ ID NO: 796643 - RNA, 20 nt, Artificial Sequence
  Synthetic
ucaggaguucaagaccagcc

SEQ ID NO: 796644 - RNA, 20 nt, Artificial Sequence
  Synthetic
ucaggaguuuaagaccagcc

SEQ ID NO: 796645 - RNA, 20 nt, Artificial Sequence
  Synthetic
ucaggaguuccagaccagcc

SEQ ID NO: 796646 - RNA, 20 nt, Artificial Sequence
  Synthetic
ucaggaguccgagaccagcc

SEQ ID NO: 796647 - RNA, 20 nt, Artificial Sequence
  Synthetic
ucagaaguucgagaccagcc

SEQ ID NO: 796648 - RNA, 20 nt, Artificial Sequence
  Synthetic
ccaggaguucgagaccagcc

SEQ ID NO: 796649 - RNA, 20 nt, Artificial Sequence
  Synthetic
ucaggaguucgagaccagcc

SEQ ID NO: 796650 - RNA, 20 nt, Artificial Sequence
  Synthetic
cuaggaguucgagaccagcc

SEQ ID NO: 796651 - RNA, 20 nt, Artificial Sequence
  Synthetic
ucaggauuucgagaccagcc

SEQ ID NO: 796652 - RNA, 20 nt, Artificial Sequence
  Synthetic
ucaggaguuggagaccagcc

SEQ ID NO: 796653 - RNA, 20 nt, Artificial Sequence
  Synthetic
ucagguauuugagaccagcc

SEQ ID NO: 796654 - RNA, 20 nt, Artificial Sequence
  Synthetic
ucagaaguuugagaccagcc

SEQ ID NO: 796655 - RNA, 20 nt, Artificial Sequence
  Synthetic
ccaagaguuugagaccagcc

SEQ ID NO: 796656 - RNA, 20 nt, Artificial Sequence
  Synthetic
ucaagaguuugagaccagcc

SEQ ID NO: 796657 - RNA, 20 nt, Artificial Sequence
  Synthetic
ccaggaguuugagaccagcc

SEQ ID NO: 796658 - RNA, 20 nt, Artificial Sequence
  Synthetic
ucaggaguuugagaccagcc

SEQ ID NO: 796659 - RNA, 20 nt, Artificial Sequence
  Synthetic
ucaggaguucuagaccagcc

SEQ ID NO: 796660 - RNA, 20 nt, Artificial Sequence
  Synthetic
ucaggaguuugcgaccagcc

SEQ ID NO: 796661 - RNA, 20 nt, Artificial Sequence
  Synthetic
ucaggaguucaauaccagcc

SEQ ID NO: 796662 - RNA, 20 nt, Artificial Sequence
  Synthetic
ccaggaguuggauaccagcc

SEQ ID NO: 796663 - RNA, 20 nt, Artificial Sequence
  Synthetic
ccaccuaguauauaccagcc

SEQ ID NO: 796664 - RNA, 20 nt, Artificial Sequence
  Synthetic
augagucaccacacccagcc

SEQ ID NO: 796665 - RNA, 20 nt, Artificial Sequence
  Synthetic
cgcgccacugcaccccagcc

SEQ ID NO: 796666 - RNA, 20 nt, Artificial Sequence
  Synthetic
cgcaccauugcaccccagcc

SEQ ID NO: 796667 - RNA, 20 nt, Artificial Sequence
  Synthetic
uuuuguauuucugcccagcc

SEQ ID NO: 796668 - RNA, 20 nt, Artificial Sequence
  Synthetic
ccaggaguccauucccagcc

SEQ ID NO: 796669 - RNA, 20 nt, Artificial Sequence
  Synthetic
ccaggaguucgaggccagcc

SEQ ID NO: 796670 - RNA, 20 nt, Artificial Sequence
  Synthetic
aaaaaauugaugggccagcc

SEQ ID NO: 796671 - RNA, 20 nt, Artificial Sequence
  Synthetic
aguuaagaagugggccagcc

SEQ ID NO: 796672 - RNA, 20 nt, Artificial Sequence
  Synthetic
aaaccaacugaaauccagcc

SEQ ID NO: 796673 - RNA, 20 nt, Artificial Sequence
  Synthetic
uuuguuuuggauauccagcc

SEQ ID NO: 796674 - RNA, 20 nt, Artificial Sequence
  Synthetic
cacgacacuccacuccagcc

SEQ ID NO: 796675 - RNA, 20 nt, Artificial Sequence
  Synthetic
caugccacuccacuccagcc

SEQ ID NO: 796676 - RNA, 20 nt, Artificial Sequence
  Synthetic
ccugccacuccacuccagcc

SEQ ID NO: 796677 - RNA, 20 nt, Artificial Sequence
  Synthetic
ccugucacagcacuccagcc

SEQ ID NO: 796678 - RNA, 20 nt, Artificial Sequence
  Synthetic
cgcgccaccgcacuccagcc

SEQ ID NO: 796679 - RNA, 20 nt, Artificial Sequence
  Synthetic
ugugccaccgcacuccagcc

SEQ ID NO: 796680 - RNA, 20 nt, Artificial Sequence
  Synthetic
agcaccacugcacuccagcc

SEQ ID NO: 796681 - RNA, 20 nt, Artificial Sequence
  Synthetic
cgcaccacugcacuccagcc

SEQ ID NO: 796682 - RNA, 20 nt, Artificial Sequence
  Synthetic
ugcaccacugcacuccagcc

SEQ ID NO: 796683 - RNA, 20 nt, Artificial Sequence
  Synthetic
cucaccacugcacuccagcc

SEQ ID NO: 796684 - RNA, 20 nt, Artificial Sequence
  Synthetic
cagaccacugcacuccagcc

SEQ ID NO: 796685 - RNA, 20 nt, Artificial Sequence
  Synthetic
caagccacugcacuccagcc

SEQ ID NO: 796686 - RNA, 20 nt, Artificial Sequence
  Synthetic
cacgccacugcacuccagcc

SEQ ID NO: 796687 - RNA, 20 nt, Artificial Sequence
  Synthetic
cccgccacugcacuccagcc

SEQ ID NO: 796688 - RNA, 20 nt, Artificial Sequence
  Synthetic
cgcgccacugcacuccagcc

SEQ ID NO: 796689 - RNA, 20 nt, Artificial Sequence
  Synthetic
ugcgccacugcacuccagcc

SEQ ID NO: 796690 - RNA, 20 nt, Artificial Sequence
  Synthetic
caggccacugcacuccagcc

SEQ ID NO: 796691 - RNA, 20 nt, Artificial Sequence
  Synthetic
caugccacugcacuccagcc

SEQ ID NO: 796692 - RNA, 20 nt, Artificial Sequence
  Synthetic
ccugccacugcacuccagcc

SEQ ID NO: 796693 - RNA, 20 nt, Artificial Sequence
  Synthetic
cgugccacugcacuccagcc

SEQ ID NO: 796694 - RNA, 20 nt, Artificial Sequence
  Synthetic
ugugccacugcacuccagcc

SEQ ID NO: 796695 - RNA, 20 nt, Artificial Sequence
  Synthetic
cgcagcacugcacuccagcc

SEQ ID NO: 796696 - RNA, 20 nt, Artificial Sequence
  Synthetic
cauugcacugcacuccagcc

SEQ ID NO: 796697 - RNA, 20 nt, Artificial Sequence
  Synthetic
cgagucacugcacuccagcc

SEQ ID NO: 796698 - RNA, 20 nt, Artificial Sequence
  Synthetic
caugucacugcacuccagcc

SEQ ID NO: 796699 - RNA, 20 nt, Artificial Sequence
  Synthetic
cacaccgcugcacuccagcc

SEQ ID NO: 796700 - RNA, 20 nt, Artificial Sequence
  Synthetic
cgcaccgcugcacuccagcc

SEQ ID NO: 796701 - RNA, 20 nt, Artificial Sequence
  Synthetic
cgcgccgcugcacuccagcc

SEQ ID NO: 796702 - RNA, 20 nt, Artificial Sequence
  Synthetic
caugccgcugcacuccagcc

SEQ ID NO: 796703 - RNA, 20 nt, Artificial Sequence
  Synthetic
cgcacugcugcacuccagcc

SEQ ID NO: 796704 - RNA, 20 nt, Artificial Sequence
  Synthetic
ugcaacauugcacuccagcc

SEQ ID NO: 796705 - RNA, 20 nt, Artificial Sequence
  Synthetic
cacaccauugcacuccagcc

SEQ ID NO: 796706 - RNA, 20 nt, Artificial Sequence
  Synthetic
cgcaccauugcacuccagcc

SEQ ID NO: 796707 - RNA, 20 nt, Artificial Sequence
  Synthetic
ugcaccauugcacuccagcc

SEQ ID NO: 796708 - RNA, 20 nt, Artificial Sequence
  Synthetic
ugcgccauugcacuccagcc

SEQ ID NO: 796709 - RNA, 20 nt, Artificial Sequence
  Synthetic
cuggccauugcacuccagcc

SEQ ID NO: 796710 - RNA, 20 nt, Artificial Sequence
  Synthetic
caugccauugcacuccagcc

SEQ ID NO: 796711 - RNA, 20 nt, Artificial Sequence
  Synthetic
cgugccauugcacuccagcc

SEQ ID NO: 796712 - RNA, 20 nt, Artificial Sequence
  Synthetic
ugugccauugcacuccagcc

SEQ ID NO: 796713 - RNA, 20 nt, Artificial Sequence
  Synthetic
cgcgcuguugcacuccagcc

SEQ ID NO: 796714 - RNA, 20 nt, Artificial Sequence
  Synthetic
ccacugcacucacuccagcc

SEQ ID NO: 796715 - RNA, 20 nt, Artificial Sequence
  Synthetic
ugcgccaccucacuccagcc

SEQ ID NO: 796716 - RNA, 20 nt, Artificial Sequence
  Synthetic
agcagauuuucacuccagcc

SEQ ID NO: 796717 - RNA, 20 nt, Artificial Sequence
  Synthetic
caugccgcuauacuccagcc

SEQ ID NO: 796718 - RNA, 20 nt, Artificial Sequence
  Synthetic
cgcgccacuguacuccagcc

SEQ ID NO: 796719 - RNA, 20 nt, Artificial Sequence
  Synthetic
caugccaguguacuccagcc

SEQ ID NO: 796720 - RNA, 20 nt, Artificial Sequence
  Synthetic
cgcaccauuguacuccagcc

SEQ ID NO: 796721 - RNA, 20 nt, Artificial Sequence
  Synthetic
cgugccauuguacuccagcc

SEQ ID NO: 796722 - RNA, 20 nt, Artificial Sequence
  Synthetic
caugccacugcccuccagcc

SEQ ID NO: 796723 - RNA, 20 nt, Artificial Sequence
  Synthetic
uuauugcuuuuccuccagcc

SEQ ID NO: 796724 - RNA, 20 nt, Artificial Sequence
  Synthetic
ugcaccacugcgcuccagcc

SEQ ID NO: 796725 - RNA, 20 nt, Artificial Sequence
  Synthetic
ugugccauugcgcuccagcc

SEQ ID NO: 796726 - RNA, 20 nt, Artificial Sequence
  Synthetic
cgcgccacugugcuccagcc

SEQ ID NO: 796727 - RNA, 20 nt, Artificial Sequence
  Synthetic
uccaccacugcauuccagcc

SEQ ID NO: 796728 - RNA, 20 nt, Artificial Sequence
  Synthetic
cucaccacugcauuccagcc

SEQ ID NO: 796729 - RNA, 20 nt, Artificial Sequence
  Synthetic
cacgccacugcauuccagcc

SEQ ID NO: 796730 - RNA, 20 nt, Artificial Sequence
  Synthetic
ugcgccacugcauuccagcc

SEQ ID NO: 796731 - RNA, 20 nt, Artificial Sequence
  Synthetic
ugugccauugcauuccagcc

SEQ ID NO: 796732 - RNA, 20 nt, Artificial Sequence
  Synthetic
cacaccacuguauuccagcc

SEQ ID NO: 796733 - RNA, 20 nt, Artificial Sequence
  Synthetic
uauuauuuaaaauagcagcc

SEQ ID NO: 796734 - RNA, 20 nt, Artificial Sequence
  Synthetic
uugaagaaacaguagcagcc

SEQ ID NO: 796735 - RNA, 20 nt, Artificial Sequence
  Synthetic
cauauuccaagauggcagcc

SEQ ID NO: 796736 - RNA, 20 nt, Artificial Sequence
  Synthetic
accaauacauauuggcagcc

SEQ ID NO: 796737 - RNA, 20 nt, Artificial Sequence
  Synthetic
ucaacaagucagaugcagcc

SEQ ID NO: 796738 - RNA, 20 nt, Artificial Sequence
  Synthetic
auagaaucucaacugcagcc

SEQ ID NO: 796739 - RNA, 20 nt, Artificial Sequence
  Synthetic
cgugccacugcacugcagcc

SEQ ID NO: 796740 - RNA, 20 nt, Artificial Sequence
  Synthetic
uuuucuggaucacugcagcc

SEQ ID NO: 796741 - RNA, 20 nt, Artificial Sequence
  Synthetic
agugauucuaacgugcagcc

SEQ ID NO: 796742 - RNA, 20 nt, Artificial Sequence
  Synthetic
aaaaaauaaacugugcagcc

SEQ ID NO: 796743 - RNA, 20 nt, Artificial Sequence
  Synthetic
caagucccaacugugcagcc

SEQ ID NO: 796744 - RNA, 20 nt, Artificial Sequence
  Synthetic
aaagauaauccuuugcagcc

SEQ ID NO: 796745 - RNA, 20 nt, Artificial Sequence
  Synthetic
acaaauacaaaaaaucagcc

SEQ ID NO: 796746 - RNA, 20 nt, Artificial Sequence
  Synthetic
cuaaaaauacaaaaucagcc

SEQ ID NO: 796747 - RNA, 20 nt, Artificial Sequence
  Synthetic
auuauauagccaaaucagcc

SEQ ID NO: 796748 - RNA, 20 nt, Artificial Sequence
  Synthetic
ccaggaguuugagaucagcc

SEQ ID NO: 796749 - RNA, 20 nt, Artificial Sequence
  Synthetic
uugggaguuugagaucagcc

SEQ ID NO: 796750 - RNA, 20 nt, Artificial Sequence
  Synthetic
augaaaaggaaugaucagcc

SEQ ID NO: 796751 - RNA, 20 nt, Artificial Sequence
  Synthetic
aaccauaaggaaacucagcc

SEQ ID NO: 796752 - RNA, 20 nt, Artificial Sequence
  Synthetic
uaucucagguccacucagcc

SEQ ID NO: 796753 - RNA, 20 nt, Artificial Sequence
  Synthetic
ucuugcuuugucacucagcc

SEQ ID NO: 796754 - RNA, 20 nt, Artificial Sequence
  Synthetic
caucugagaccaccucagcc

SEQ ID NO: 796755 - RNA, 20 nt, Artificial Sequence
  Synthetic
aaaaaaauaaaaucucagcc

SEQ ID NO: 796756 - RNA, 20 nt, Artificial Sequence
  Synthetic
uaauacagugguucucagcc

SEQ ID NO: 796757 - RNA, 20 nt, Artificial Sequence
  Synthetic
uccacauuugccagucagcc

SEQ ID NO: 796758 - RNA, 20 nt, Artificial Sequence
  Synthetic
auaggcugaaacauucagcc

SEQ ID NO: 796759 - RNA, 20 nt, Artificial Sequence
  Synthetic
agaaaagggugcauucagcc

SEQ ID NO: 796760 - RNA, 20 nt, Artificial Sequence
  Synthetic
cauaccacugcacuucagcc

SEQ ID NO: 796761 - RNA, 20 nt, Artificial Sequence
  Synthetic
uaaaaauuaggcuuucagcc

SEQ ID NO: 796762 - RNA, 20 nt, Artificial Sequence
  Synthetic
auccaggaacauuuucagcc

SEQ ID NO: 796763 - RNA, 20 nt, Artificial Sequence
  Synthetic
aaugauuaggaaaaagagcc

SEQ ID NO: 796764 - RNA, 20 nt, Artificial Sequence
  Synthetic
acuaauugcagcaaagagcc

SEQ ID NO: 796765 - RNA, 20 nt, Artificial Sequence
  Synthetic
uuacauguaaauaaagagcc

SEQ ID NO: 796766 - RNA, 20 nt, Artificial Sequence
  Synthetic
caguaaagcaaaacagagcc

SEQ ID NO: 796767 - RNA, 20 nt, Artificial Sequence
  Synthetic
cacuauaaaagcacagagcc

SEQ ID NO: 796768 - RNA, 20 nt, Artificial Sequence
  Synthetic
ugaaugaaauagacagagcc

SEQ ID NO: 796769 - RNA, 20 nt, Artificial Sequence
  Synthetic
ccagaaggaagaucagagcc

SEQ ID NO: 796770 - RNA, 20 nt, Artificial Sequence
  Synthetic
aggggcaauuguggagagcc

SEQ ID NO: 796771 - RNA, 20 nt, Artificial Sequence
  Synthetic
uuuacugggcagauagagcc

SEQ ID NO: 796772 - RNA, 20 nt, Artificial Sequence
  Synthetic
agauuaaauuugauagagcc

SEQ ID NO: 796773 - RNA, 20 nt, Artificial Sequence
  Synthetic
caaaugggcugguuagagcc

SEQ ID NO: 796774 - RNA, 20 nt, Artificial Sequence
  Synthetic
ucaggaguuacagacgagcc

SEQ ID NO: 796775 - RNA, 20 nt, Artificial Sequence
  Synthetic
ccaggaguucgagacgagcc

SEQ ID NO: 796776 - RNA, 20 nt, Artificial Sequence
  Synthetic
aacaaaacaaaacaggagcc

SEQ ID NO: 796777 - RNA, 20 nt, Artificial Sequence
  Synthetic
augaauggauuggaggagcc

SEQ ID NO: 796778 - RNA, 20 nt, Artificial Sequence
  Synthetic
aauauuuuggaauaggagcc

SEQ ID NO: 796779 - RNA, 20 nt, Artificial Sequence
  Synthetic
auaaaugaaaacucggagcc

SEQ ID NO: 796780 - RNA, 20 nt, Artificial Sequence
  Synthetic
auuaaauaaaucagggagcc

SEQ ID NO: 796781 - RNA, 20 nt, Artificial Sequence
  Synthetic
ucgagggguucuggggagcc

SEQ ID NO: 796782 - RNA, 20 nt, Artificial Sequence
  Synthetic
ucaggcuuauaucuggagcc

SEQ ID NO: 796783 - RNA, 20 nt, Artificial Sequence
  Synthetic
cacaugucaaggguggagcc

SEQ ID NO: 796784 - RNA, 20 nt, Artificial Sequence
  Synthetic
cauauuuuccauguggagcc

SEQ ID NO: 796785 - RNA, 20 nt, Artificial Sequence
  Synthetic
cugcuguuuggcuuggagcc

SEQ ID NO: 796786 - RNA, 20 nt, Artificial Sequence
  Synthetic
cagucccagugagaugagcc

SEQ ID NO: 796787 - RNA, 20 nt, Artificial Sequence
  Synthetic
uggaauaauaaggaugagcc

SEQ ID NO: 796788 - RNA, 20 nt, Artificial Sequence
  Synthetic
uggaggugggguuaugagcc

SEQ ID NO: 796789 - RNA, 20 nt, Artificial Sequence
  Synthetic
uguaagugaggaagugagcc

SEQ ID NO: 796790 - RNA, 20 nt, Artificial Sequence
  Synthetic
aaggagcucgugauugagcc

SEQ ID NO: 796791 - RNA, 20 nt, Artificial Sequence
  Synthetic
ucugcucccucccuugagcc

SEQ ID NO: 796792 - RNA, 20 nt, Artificial Sequence
  Synthetic
ugguauguccuucuugagcc

SEQ ID NO: 796793 - RNA, 20 nt, Artificial Sequence
  Synthetic
agugaaaucuuguuugagcc

SEQ ID NO: 796794 - RNA, 20 nt, Artificial Sequence
  Synthetic
aaaaaaaaaaacaaauagcc

SEQ ID NO: 796795 - RNA, 20 nt, Artificial Sequence
  Synthetic
aagucaaucuacaaauagcc

SEQ ID NO: 796796 - RNA, 20 nt, Artificial Sequence
  Synthetic
uuaaacaguuacuaauagcc

SEQ ID NO: 796797 - RNA, 20 nt, Artificial Sequence
  Synthetic
uaagaauaacuugcauagcc

SEQ ID NO: 796798 - RNA, 20 nt, Artificial Sequence
  Synthetic
uggcugagccucagauagcc

SEQ ID NO: 796799 - RNA, 20 nt, Artificial Sequence
  Synthetic
aaaaauacagauagauagcc

SEQ ID NO: 796800 - RNA, 20 nt, Artificial Sequence
  Synthetic
agauagauagauagauagcc

SEQ ID NO: 796801 - RNA, 20 nt, Artificial Sequence
  Synthetic
acacuguagucuagauagcc

SEQ ID NO: 796802 - RNA, 20 nt, Artificial Sequence
  Synthetic
auaugcuguaccauauagcc

SEQ ID NO: 796803 - RNA, 20 nt, Artificial Sequence
  Synthetic
uaaaaauacaaaaacuagcc

SEQ ID NO: 796804 - RNA, 20 nt, Artificial Sequence
  Synthetic
uccacaacugccaacuagcc

SEQ ID NO: 796805 - RNA, 20 nt, Artificial Sequence
  Synthetic
ucagaaguucgagacuagcc

SEQ ID NO: 796806 - RNA, 20 nt, Artificial Sequence
  Synthetic
aguagcugggacuacuagcc

SEQ ID NO: 796807 - RNA, 20 nt, Artificial Sequence
  Synthetic
ugagccacuacacucuagcc

SEQ ID NO: 796808 - RNA, 20 nt, Artificial Sequence
  Synthetic
cacaccacugcacucuagcc

SEQ ID NO: 796809 - RNA, 20 nt, Artificial Sequence
  Synthetic
ugcaccacugcacucuagcc

SEQ ID NO: 796810 - RNA, 20 nt, Artificial Sequence
  Synthetic
ugugccacugcacucuagcc

SEQ ID NO: 796811 - RNA, 20 nt, Artificial Sequence
  Synthetic
cucuugcuccugcucuagcc

SEQ ID NO: 796812 - RNA, 20 nt, Artificial Sequence
  Synthetic
acuugaagcuuucucuagcc

SEQ ID NO: 796813 - RNA, 20 nt, Artificial Sequence
  Synthetic
ccagaaguuugagucuagcc

SEQ ID NO: 796814 - RNA, 20 nt, Artificial Sequence
  Synthetic
auucuuuuguucuucuagcc

SEQ ID NO: 796815 - RNA, 20 nt, Artificial Sequence
  Synthetic
ugaaccuaaaguuucuagcc

SEQ ID NO: 796816 - RNA, 20 nt, Artificial Sequence
  Synthetic
caucagccucccaaguagcc

SEQ ID NO: 796817 - RNA, 20 nt, Artificial Sequence
  Synthetic
cuucagccuacugaguagcc

SEQ ID NO: 796818 - RNA, 20 nt, Artificial Sequence
  Synthetic
aagugaaaacaauaguagcc

SEQ ID NO: 796819 - RNA, 20 nt, Artificial Sequence
  Synthetic
aaacucuaggggguguagcc

SEQ ID NO: 796820 - RNA, 20 nt, Artificial Sequence
  Synthetic
aaaaaaaaaaaaaauuagcc

SEQ ID NO: 796821 - RNA, 20 nt, Artificial Sequence
  Synthetic
aauacaaaaaaaaauuagcc

SEQ ID NO: 796822 - RNA, 20 nt, Artificial Sequence
  Synthetic
aaauacaaaaaaaauuagcc

SEQ ID NO: 796823 - RNA, 20 nt, Artificial Sequence
  Synthetic
aaaaauaaaaaaaauuagcc

SEQ ID NO: 796824 - RNA, 20 nt, Artificial Sequence
  Synthetic
aaaacacaaaaaaauuagcc

SEQ ID NO: 796825 - RNA, 20 nt, Artificial Sequence
  Synthetic
aaaauacaaaaaaauuagcc

SEQ ID NO: 796826 - RNA, 20 nt, Artificial Sequence
  Synthetic
aaaaaauaaaaaaauuagcc

SEQ ID NO: 796827 - RNA, 20 nt, Artificial Sequence
  Synthetic
aaaaacacaaaaaauuagcc

SEQ ID NO: 796828 - RNA, 20 nt, Artificial Sequence
  Synthetic
aaaaauacaaaaaauuagcc

SEQ ID NO: 796829 - RNA, 20 nt, Artificial Sequence
  Synthetic
uaaaauacaaaaaauuagcc

SEQ ID NO: 796830 - RNA, 20 nt, Artificial Sequence
  Synthetic
aaagauacaaaaaauuagcc

SEQ ID NO: 796831 - RNA, 20 nt, Artificial Sequence
  Synthetic
aaaaaaagaaaaaauuagcc

SEQ ID NO: 796832 - RNA, 20 nt, Artificial Sequence
  Synthetic
aaaaauagaaaaaauuagcc

SEQ ID NO: 796833 - RNA, 20 nt, Artificial Sequence
  Synthetic
cuaaaaauaaaaaauuagcc

SEQ ID NO: 796834 - RNA, 20 nt, Artificial Sequence
  Synthetic
aaaaauauaaaaaauuagcc

SEQ ID NO: 796835 - RNA, 20 nt, Artificial Sequence
  Synthetic
aaauuuuuaaaaaauuagcc

SEQ ID NO: 796836 - RNA, 20 nt, Artificial Sequence
  Synthetic
uaaaaacacaaaaauuagcc

SEQ ID NO: 796837 - RNA, 20 nt, Artificial Sequence
  Synthetic
ugaaaacacaaaaauuagcc

SEQ ID NO: 796838 - RNA, 20 nt, Artificial Sequence
  Synthetic
uaaaaauacaaaaauuagcc

SEQ ID NO: 796839 - RNA, 20 nt, Artificial Sequence
  Synthetic
uuaaaauacaaaaauuagcc

SEQ ID NO: 796840 - RNA, 20 nt, Artificial Sequence
  Synthetic
uaaagauacaaaaauuagcc

SEQ ID NO: 796841 - RNA, 20 nt, Artificial Sequence
  Synthetic
uaaauauacaaaaauuagcc

SEQ ID NO: 796842 - RNA, 20 nt, Artificial Sequence
  Synthetic
uaaaaacagaaaaauuagcc

SEQ ID NO: 796843 - RNA, 20 nt, Artificial Sequence
  Synthetic
uaaaaauagaaaaauuagcc

SEQ ID NO: 796844 - RNA, 20 nt, Artificial Sequence
  Synthetic
uaaaaauauaaaaauuagcc

SEQ ID NO: 796845 - RNA, 20 nt, Artificial Sequence
  Synthetic
auacaaaaacaaaauuagcc

SEQ ID NO: 796846 - RNA, 20 nt, Artificial Sequence
  Synthetic
aaaaauacacaaaauuagcc

SEQ ID NO: 796847 - RNA, 20 nt, Artificial Sequence
  Synthetic
cuaaaaauacaaaauuagcc

SEQ ID NO: 796848 - RNA, 20 nt, Artificial Sequence
  Synthetic
cuuaaaauacaaaauuagcc

SEQ ID NO: 796849 - RNA, 20 nt, Artificial Sequence
  Synthetic
cuaaaaguacaaaauuagcc

SEQ ID NO: 796850 - RNA, 20 nt, Artificial Sequence
  Synthetic
uaaaaauaugaaaauuagcc

SEQ ID NO: 796851 - RNA, 20 nt, Artificial Sequence
  Synthetic
uuuuauauauaaaauuagcc

SEQ ID NO: 796852 - RNA, 20 nt, Artificial Sequence
  Synthetic
augaugaugcugaauuagcc

SEQ ID NO: 796853 - RNA, 20 nt, Artificial Sequence
  Synthetic
aaaaauacaaaacauuagcc

SEQ ID NO: 796854 - RNA, 20 nt, Artificial Sequence
  Synthetic
cagugaugauuugauuagcc

SEQ ID NO: 796855 - RNA, 20 nt, Artificial Sequence
  Synthetic
uguguucaaagcccuuagcc

SEQ ID NO: 796856 - RNA, 20 nt, Artificial Sequence
  Synthetic
ugucuccauaccucuuagcc

SEQ ID NO: 796857 - RNA, 20 nt, Artificial Sequence
  Synthetic
auaauuguuuaaaguuagcc

SEQ ID NO: 796858 - RNA, 20 nt, Artificial Sequence
  Synthetic
uucagccucccaaguuagcc

SEQ ID NO: 796859 - RNA, 20 nt, Artificial Sequence
  Synthetic
aggguuucaccauguuagcc

SEQ ID NO: 796860 - RNA, 20 nt, Artificial Sequence
  Synthetic
acauguuauauauguuagcc

SEQ ID NO: 796861 - RNA, 20 nt, Artificial Sequence
  Synthetic
aggguuucaccguguuagcc

SEQ ID NO: 796862 - RNA, 20 nt, Artificial Sequence
  Synthetic
ugugccacugcacuuuagcc

SEQ ID NO: 796863 - RNA, 20 nt, Artificial Sequence
  Synthetic
caagcaugcgccaacacgcc

SEQ ID NO: 796864 - RNA, 20 nt, Artificial Sequence
  Synthetic
uccucccacauccacacgcc

SEQ ID NO: 796865 - RNA, 20 nt, Artificial Sequence
  Synthetic
caggcguggugguacacgcc

SEQ ID NO: 796866 - RNA, 20 nt, Artificial Sequence
  Synthetic
caggcacccaccaccacgcc

SEQ ID NO: 796867 - RNA, 20 nt, Artificial Sequence
  Synthetic
caggcgcccaccaccacgcc

SEQ ID NO: 796868 - RNA, 20 nt, Artificial Sequence
  Synthetic
uaggcgcccaccaccacgcc

SEQ ID NO: 796869 - RNA, 20 nt, Artificial Sequence
  Synthetic
cagccaugcaccaccacgcc

SEQ ID NO: 796870 - RNA, 20 nt, Artificial Sequence
  Synthetic
caggcaugcaccaccacgcc

SEQ ID NO: 796871 - RNA, 20 nt, Artificial Sequence
  Synthetic
uaggcaugcaccaccacgcc

SEQ ID NO: 796872 - RNA, 20 nt, Artificial Sequence
  Synthetic
cagaugugcaccaccacgcc

SEQ ID NO: 796873 - RNA, 20 nt, Artificial Sequence
  Synthetic
caggcguguaccaccacgcc

SEQ ID NO: 796874 - RNA, 20 nt, Artificial Sequence
  Synthetic
uaugcaugagccaccacgcc

SEQ ID NO: 796875 - RNA, 20 nt, Artificial Sequence
  Synthetic
caggcgugagccaccacgcc

SEQ ID NO: 796876 - RNA, 20 nt, Artificial Sequence
  Synthetic
uaggcacccgccaccacgcc

SEQ ID NO: 796877 - RNA, 20 nt, Artificial Sequence
  Synthetic
caggcgcccgccaccacgcc

SEQ ID NO: 796878 - RNA, 20 nt, Artificial Sequence
  Synthetic
uaggcgcccgccaccacgcc

SEQ ID NO: 796879 - RNA, 20 nt, Artificial Sequence
  Synthetic
caggugcccgccaccacgcc

SEQ ID NO: 796880 - RNA, 20 nt, Artificial Sequence
  Synthetic
caggcaugcgccaccacgcc

SEQ ID NO: 796881 - RNA, 20 nt, Artificial Sequence
  Synthetic
uaagugucugccaccacgcc

SEQ ID NO: 796882 - RNA, 20 nt, Artificial Sequence
  Synthetic
cagacaugugccaccacgcc

SEQ ID NO: 796883 - RNA, 20 nt, Artificial Sequence
  Synthetic
caggcaugcagcaccacgcc

SEQ ID NO: 796884 - RNA, 20 nt, Artificial Sequence
  Synthetic
caggcacccacuaccacgcc

SEQ ID NO: 796885 - RNA, 20 nt, Artificial Sequence
  Synthetic
caggcaaguacuaccacgcc

SEQ ID NO: 796886 - RNA, 20 nt, Artificial Sequence
  Synthetic
aauuugucaugagccacgcc

SEQ ID NO: 796887 - RNA, 20 nt, Artificial Sequence
  Synthetic
caggcaugcaccgccacgcc

SEQ ID NO: 796888 - RNA, 20 nt, Artificial Sequence
  Synthetic
caggcgccugccagcacgcc

SEQ ID NO: 796889 - RNA, 20 nt, Artificial Sequence
  Synthetic
uaauaaaaugauugcacgcc

SEQ ID NO: 796890 - RNA, 20 nt, Artificial Sequence
  Synthetic
caggcaaccgccaucacgcc

SEQ ID NO: 796891 - RNA, 20 nt, Artificial Sequence
  Synthetic
caggcgugagccacuacgcc

SEQ ID NO: 796892 - RNA, 20 nt, Artificial Sequence
  Synthetic
ccggcacaugccacuacgcc

SEQ ID NO: 796893 - RNA, 20 nt, Artificial Sequence
  Synthetic
ugacccaaaaaccucccgcc

SEQ ID NO: 796894 - RNA, 20 nt, Artificial Sequence
  Synthetic
cuugccacugcucucccgcc

SEQ ID NO: 796895 - RNA, 20 nt, Artificial Sequence
  Synthetic
ucacugcaaccucugccgcc

SEQ ID NO: 796896 - RNA, 20 nt, Artificial Sequence
  Synthetic
caggcaugagccacagcgcc

SEQ ID NO: 796897 - RNA, 20 nt, Artificial Sequence
  Synthetic
augcuguuuuaaugagcgcc

SEQ ID NO: 796898 - RNA, 20 nt, Artificial Sequence
  Synthetic
cagguaugagccaccgcgcc

SEQ ID NO: 796899 - RNA, 20 nt, Artificial Sequence
  Synthetic
caggcgugagccaccgcgcc

SEQ ID NO: 796900 - RNA, 20 nt, Artificial Sequence
  Synthetic
caggugugagccaccgcgcc

SEQ ID NO: 796901 - RNA, 20 nt, Artificial Sequence
  Synthetic
aggcguugagccaccgcgcc

SEQ ID NO: 796902 - RNA, 20 nt, Artificial Sequence
  Synthetic
caggcgugaggcaccgcgcc

SEQ ID NO: 796903 - RNA, 20 nt, Artificial Sequence
  Synthetic
caggcaugagccacugcgcc

SEQ ID NO: 796904 - RNA, 20 nt, Artificial Sequence
  Synthetic
caggcgugagccacugcgcc

SEQ ID NO: 796905 - RNA, 20 nt, Artificial Sequence
  Synthetic
caggugccugccacugcgcc

SEQ ID NO: 796906 - RNA, 20 nt, Artificial Sequence
  Synthetic
caggcaugagcuacugcgcc

SEQ ID NO: 796907 - RNA, 20 nt, Artificial Sequence
  Synthetic
caggugugagccauugcgcc

SEQ ID NO: 796908 - RNA, 20 nt, Artificial Sequence
  Synthetic
caggggcacacuaccucgcc

SEQ ID NO: 796909 - RNA, 20 nt, Artificial Sequence
  Synthetic
cagagucucacucugucgcc

SEQ ID NO: 796910 - RNA, 20 nt, Artificial Sequence
  Synthetic
cggagucucacucugucgcc

SEQ ID NO: 796911 - RNA, 20 nt, Artificial Sequence
  Synthetic
cgaagucucgcucugucgcc

SEQ ID NO: 796912 - RNA, 20 nt, Artificial Sequence
  Synthetic
uagagucuugcucugucgcc

SEQ ID NO: 796913 - RNA, 20 nt, Artificial Sequence
  Synthetic
caggcuucugaaccuucgcc

SEQ ID NO: 796914 - RNA, 20 nt, Artificial Sequence
  Synthetic
ucagaggacauuuguucgcc

SEQ ID NO: 796915 - RNA, 20 nt, Artificial Sequence
  Synthetic
ucaaauguagugguuucgcc

SEQ ID NO: 796916 - RNA, 20 nt, Artificial Sequence
  Synthetic
cucugggaauguaaaaggcc

SEQ ID NO: 796917 - RNA, 20 nt, Artificial Sequence
  Synthetic
augccauuuccauaaaggcc

SEQ ID NO: 796918 - RNA, 20 nt, Artificial Sequence
  Synthetic
cauaacuaaauuacaaggcc

SEQ ID NO: 796919 - RNA, 20 nt, Artificial Sequence
  Synthetic
cuugagguccuuggaaggcc

SEQ ID NO: 796920 - RNA, 20 nt, Artificial Sequence
  Synthetic
aauucugcagaaugaaggcc

SEQ ID NO: 796921 - RNA, 20 nt, Artificial Sequence
  Synthetic
aaaaaaaugagaaacaggcc

SEQ ID NO: 796922 - RNA, 20 nt, Artificial Sequence
  Synthetic
uccaguguguucaacaggcc

SEQ ID NO: 796923 - RNA, 20 nt, Artificial Sequence
  Synthetic
auuauucaagaauacaggcc

SEQ ID NO: 796924 - RNA, 20 nt, Artificial Sequence
  Synthetic
cugcgccacugcaccaggcc

SEQ ID NO: 796925 - RNA, 20 nt, Artificial Sequence
  Synthetic
ucaagaauacaggccaggcc

SEQ ID NO: 796926 - RNA, 20 nt, Artificial Sequence
  Synthetic
ugguguuuuauggccaggcc

SEQ ID NO: 796927 - RNA, 20 nt, Artificial Sequence
  Synthetic
auauacauaauuuccaggcc

SEQ ID NO: 796928 - RNA, 20 nt, Artificial Sequence
  Synthetic
agauacuuaauuuccaggcc

SEQ ID NO: 796929 - RNA, 20 nt, Artificial Sequence
  Synthetic
uugcauaaaagaagcaggcc

SEQ ID NO: 796930 - RNA, 20 nt, Artificial Sequence
  Synthetic
aagcucuuguaaggcaggcc

SEQ ID NO: 796931 - RNA, 20 nt, Artificial Sequence
  Synthetic
uaagaagucuccugcaggcc

SEQ ID NO: 796932 - RNA, 20 nt, Artificial Sequence
  Synthetic
ugcagcaguuacgucaggcc

SEQ ID NO: 796933 - RNA, 20 nt, Artificial Sequence
  Synthetic
uuguacuggaaguucaggcc

SEQ ID NO: 796934 - RNA, 20 nt, Artificial Sequence
  Synthetic
ucuccuuaagcuuucaggcc

SEQ ID NO: 796935 - RNA, 20 nt, Artificial Sequence
  Synthetic
cuaaaccuuccaaagaggcc

SEQ ID NO: 796936 - RNA, 20 nt, Artificial Sequence
  Synthetic
uuuagaaacucuaagaggcc

SEQ ID NO: 796937 - RNA, 20 nt, Artificial Sequence
  Synthetic
ucaucaagugggcagaggcc

SEQ ID NO: 796938 - RNA, 20 nt, Artificial Sequence
  Synthetic
aaaaaguaaaaggagaggcc

SEQ ID NO: 796939 - RNA, 20 nt, Artificial Sequence
  Synthetic
aaccucaaagagaggaggcc

SEQ ID NO: 796940 - RNA, 20 nt, Artificial Sequence
  Synthetic
ucccagcacuuugggaggcc

SEQ ID NO: 796941 - RNA, 20 nt, Artificial Sequence
  Synthetic
ucucagcguuuugggaggcc

SEQ ID NO: 796942 - RNA, 20 nt, Artificial Sequence
  Synthetic
ucagauuguuuuuggaggcc

SEQ ID NO: 796943 - RNA, 20 nt, Artificial Sequence
  Synthetic
caggcggaucaccugaggcc

SEQ ID NO: 796944 - RNA, 20 nt, Artificial Sequence
  Synthetic
aguagagcuaggcugaggcc

SEQ ID NO: 796945 - RNA, 20 nt, Artificial Sequence
  Synthetic
aaaaaaagaauggugaggcc

SEQ ID NO: 796946 - RNA, 20 nt, Artificial Sequence
  Synthetic
ugggcagaucacuugaggcc

SEQ ID NO: 796947 - RNA, 20 nt, Artificial Sequence
  Synthetic
uggguggaucacuugaggcc

SEQ ID NO: 796948 - RNA, 20 nt, Artificial Sequence
  Synthetic
uuuuccuaucccuugaggcc

SEQ ID NO: 796949 - RNA, 20 nt, Artificial Sequence
  Synthetic
caagaggauugcuugaggcc

SEQ ID NO: 796950 - RNA, 20 nt, Artificial Sequence
  Synthetic
ugggaggauuguuugaggcc

SEQ ID NO: 796951 - RNA, 20 nt, Artificial Sequence
  Synthetic
uaaaauaagauaaauaggcc

SEQ ID NO: 796952 - RNA, 20 nt, Artificial Sequence
  Synthetic
aaagauaauauaaauaggcc

SEQ ID NO: 796953 - RNA, 20 nt, Artificial Sequence
  Synthetic
aaaacaaaaaagaauaggcc

SEQ ID NO: 796954 - RNA, 20 nt, Artificial Sequence
  Synthetic
auucuugcugaagauaggcc

SEQ ID NO: 796955 - RNA, 20 nt, Artificial Sequence
  Synthetic
cuugaggugagggauaggcc

SEQ ID NO: 796956 - RNA, 20 nt, Artificial Sequence
  Synthetic
uuuccacagaucucuaggcc

SEQ ID NO: 796957 - RNA, 20 nt, Artificial Sequence
  Synthetic
augcauaaggcuucuaggcc

SEQ ID NO: 796958 - RNA, 20 nt, Artificial Sequence
  Synthetic
cuaauucauuaaaguaggcc

SEQ ID NO: 796959 - RNA, 20 nt, Artificial Sequence
  Synthetic
auggauuguuggauuaggcc

SEQ ID NO: 796960 - RNA, 20 nt, Artificial Sequence
  Synthetic
agcagcacugcaguccggcc

SEQ ID NO: 796961 - RNA, 20 nt, Artificial Sequence
  Synthetic
uuuaagauccauuuccggcc

SEQ ID NO: 796962 - RNA, 20 nt, Artificial Sequence
  Synthetic
uugaaaagagcauugcggcc

SEQ ID NO: 796963 - RNA, 20 nt, Artificial Sequence
  Synthetic
uaaaacagcauguugcggcc

SEQ ID NO: 796964 - RNA, 20 nt, Artificial Sequence
  Synthetic
caucccacauacucucggcc

SEQ ID NO: 796965 - RNA, 20 nt, Artificial Sequence
  Synthetic
uuacacaucuaccaagggcc

SEQ ID NO: 796966 - RNA, 20 nt, Artificial Sequence
  Synthetic
augcaaaacuuagcagggcc

SEQ ID NO: 796967 - RNA, 20 nt, Artificial Sequence
  Synthetic
ccaauguuggaggcagggcc

SEQ ID NO: 796968 - RNA, 20 nt, Artificial Sequence
  Synthetic
ugaaaagagcaaucagggcc

SEQ ID NO: 796969 - RNA, 20 nt, Artificial Sequence
  Synthetic
aagauuuuugauucagggcc

SEQ ID NO: 796970 - RNA, 20 nt, Artificial Sequence
  Synthetic
aaaaacuaauguagagggcc

SEQ ID NO: 796971 - RNA, 20 nt, Artificial Sequence
  Synthetic
ugacucagcagaggagggcc

SEQ ID NO: 796972 - RNA, 20 nt, Artificial Sequence
  Synthetic
auuauauaagaaaacgggcc

SEQ ID NO: 796973 - RNA, 20 nt, Artificial Sequence
  Synthetic
aaaacaugguuucacgggcc

SEQ ID NO: 796974 - RNA, 20 nt, Artificial Sequence
  Synthetic
aaaaauccagaaaaggggcc

SEQ ID NO: 796975 - RNA, 20 nt, Artificial Sequence
  Synthetic
cgugccauuugggaggggcc

SEQ ID NO: 796976 - RNA, 20 nt, Artificial Sequence
  Synthetic
caugagauuugggaggggcc

SEQ ID NO: 796977 - RNA, 20 nt, Artificial Sequence
  Synthetic
uaagauacuaacuaggggcc

SEQ ID NO: 796978 - RNA, 20 nt, Artificial Sequence
  Synthetic
aacaguucugaaguggggcc

SEQ ID NO: 796979 - RNA, 20 nt, Artificial Sequence
  Synthetic
aacaguuuugaaguggggcc

SEQ ID NO: 796980 - RNA, 20 nt, Artificial Sequence
  Synthetic
ccaauguuggagguggggcc

SEQ ID NO: 796981 - RNA, 20 nt, Artificial Sequence
  Synthetic
ccaguguuggagguggggcc

SEQ ID NO: 796982 - RNA, 20 nt, Artificial Sequence
  Synthetic
ccaauguuggugguggggcc

SEQ ID NO: 796983 - RNA, 20 nt, Artificial Sequence
  Synthetic
agaaaaggcgauguggggcc

SEQ ID NO: 796984 - RNA, 20 nt, Artificial Sequence
  Synthetic
caaguguuggacuuggggcc

SEQ ID NO: 796985 - RNA, 20 nt, Artificial Sequence
  Synthetic
uuaaugaaaauaaaugggcc

SEQ ID NO: 796986 - RNA, 20 nt, Artificial Sequence
  Synthetic
uaaaauucauaucaugggcc

SEQ ID NO: 796987 - RNA, 20 nt, Artificial Sequence
  Synthetic
uuuuaucuucucuaugggcc

SEQ ID NO: 796988 - RNA, 20 nt, Artificial Sequence
  Synthetic
aaaauauuuauguaugggcc

SEQ ID NO: 796989 - RNA, 20 nt, Artificial Sequence
  Synthetic
uuaaagaaaucuuaugggcc

SEQ ID NO: 796990 - RNA, 20 nt, Artificial Sequence
  Synthetic
auacaaaaaucagcugggcc

SEQ ID NO: 796991 - RNA, 20 nt, Artificial Sequence
  Synthetic
aaauugacaucaucugggcc

SEQ ID NO: 796992 - RNA, 20 nt, Artificial Sequence
  Synthetic
caacuagaaaacucugggcc

SEQ ID NO: 796993 - RNA, 20 nt, Artificial Sequence
  Synthetic
uagcaggggggcucugggcc

SEQ ID NO: 796994 - RNA, 20 nt, Artificial Sequence
  Synthetic
uaaauagagaauucugggcc

SEQ ID NO: 796995 - RNA, 20 nt, Artificial Sequence
  Synthetic
ugaauugcaggcagugggcc

SEQ ID NO: 796996 - RNA, 20 nt, Artificial Sequence
  Synthetic
uaaaaaagaaagagugggcc

SEQ ID NO: 796997 - RNA, 20 nt, Artificial Sequence
  Synthetic
acagggagucugggugggcc

SEQ ID NO: 796998 - RNA, 20 nt, Artificial Sequence
  Synthetic
cugccucccucuugugggcc

SEQ ID NO: 796999 - RNA, 20 nt, Artificial Sequence
  Synthetic
aaaauguccuugcuugggcc

SEQ ID NO: 797000 - RNA, 20 nt, Artificial Sequence
  Synthetic
cucacccauuaucuugggcc

SEQ ID NO: 797001 - RNA, 20 nt, Artificial Sequence
  Synthetic
cuuacaugugguguugggcc

SEQ ID NO: 797002 - RNA, 20 nt, Artificial Sequence
  Synthetic
uuuugcagaagaaaauggcc

SEQ ID NO: 797003 - RNA, 20 nt, Artificial Sequence
  Synthetic
aauuuaaaggcuaaauggcc

SEQ ID NO: 797004 - RNA, 20 nt, Artificial Sequence
  Synthetic
aaaaaccaacuuaaauggcc

SEQ ID NO: 797005 - RNA, 20 nt, Artificial Sequence
  Synthetic
aacaaaaggaaauaauggcc

SEQ ID NO: 797006 - RNA, 20 nt, Artificial Sequence
  Synthetic
aacugauuugggacauggcc

SEQ ID NO: 797007 - RNA, 20 nt, Artificial Sequence
  Synthetic
uuaaagauccacccauggcc

SEQ ID NO: 797008 - RNA, 20 nt, Artificial Sequence
  Synthetic
uaguuuuaauuugcauggcc

SEQ ID NO: 797009 - RNA, 20 nt, Artificial Sequence
  Synthetic
agaaaaguagauucauggcc

SEQ ID NO: 797010 - RNA, 20 nt, Artificial Sequence
  Synthetic
aagaaauacuugagauggcc

SEQ ID NO: 797011 - RNA, 20 nt, Artificial Sequence
  Synthetic
ccucccuguuugagauggcc

SEQ ID NO: 797012 - RNA, 20 nt, Artificial Sequence
  Synthetic
uacccaguaaugggauggcc

SEQ ID NO: 797013 - RNA, 20 nt, Artificial Sequence
  Synthetic
ugagcaaugguaauauggcc

SEQ ID NO: 797014 - RNA, 20 nt, Artificial Sequence
  Synthetic
auccaugguguuuuauggcc

SEQ ID NO: 797015 - RNA, 20 nt, Artificial Sequence
  Synthetic
uaaaaauaaaaaaacuggcc

SEQ ID NO: 797016 - RNA, 20 nt, Artificial Sequence
  Synthetic
cugauaaggagaaccuggcc

SEQ ID NO: 797017 - RNA, 20 nt, Artificial Sequence
  Synthetic
uucuuuacucugcccuggcc

SEQ ID NO: 797018 - RNA, 20 nt, Artificial Sequence
  Synthetic
cuugccugauugcccuggcc

SEQ ID NO: 797019 - RNA, 20 nt, Artificial Sequence
  Synthetic
augagccacugcgccuggcc

SEQ ID NO: 797020 - RNA, 20 nt, Artificial Sequence
  Synthetic
uccccuguuaaugccuggcc

SEQ ID NO: 797021 - RNA, 20 nt, Artificial Sequence
  Synthetic
uaguauuggaaguccuggcc

SEQ ID NO: 797022 - RNA, 20 nt, Artificial Sequence
  Synthetic
ugauucaaaaauuccuggcc

SEQ ID NO: 797023 - RNA, 20 nt, Artificial Sequence
  Synthetic
ucuuuggcaaaaagcuggcc

SEQ ID NO: 797024 - RNA, 20 nt, Artificial Sequence
  Synthetic
cuuaagauuaagagcuggcc

SEQ ID NO: 797025 - RNA, 20 nt, Artificial Sequence
  Synthetic
uaaaaaacagcaaucuggcc

SEQ ID NO: 797026 - RNA, 20 nt, Artificial Sequence
  Synthetic
augagccaccgcaucuggcc

SEQ ID NO: 797027 - RNA, 20 nt, Artificial Sequence
  Synthetic
ugagucuuagguaucuggcc

SEQ ID NO: 797028 - RNA, 20 nt, Artificial Sequence
  Synthetic
uagaaugaaucacucuggcc

SEQ ID NO: 797029 - RNA, 20 nt, Artificial Sequence
  Synthetic
cuuuauuuuagagucuggcc

SEQ ID NO: 797030 - RNA, 20 nt, Artificial Sequence
  Synthetic
aauuauaccaaguucuggcc

SEQ ID NO: 797031 - RNA, 20 nt, Artificial Sequence
  Synthetic
uaguguuggaaguucuggcc

SEQ ID NO: 797032 - RNA, 20 nt, Artificial Sequence
  Synthetic
aaguauuuaauucaguggcc

SEQ ID NO: 797033 - RNA, 20 nt, Artificial Sequence
  Synthetic
agagaagccucagaguggcc

SEQ ID NO: 797034 - RNA, 20 nt, Artificial Sequence
  Synthetic
auaaaacaagacagguggcc

SEQ ID NO: 797035 - RNA, 20 nt, Artificial Sequence
  Synthetic
auaguauaaauauuguggcc

SEQ ID NO: 797036 - RNA, 20 nt, Artificial Sequence
  Synthetic
auaaagauguauuuguggcc

SEQ ID NO: 797037 - RNA, 20 nt, Artificial Sequence
  Synthetic
uaaaaauacaaaaauuggcc

SEQ ID NO: 797038 - RNA, 20 nt, Artificial Sequence
  Synthetic
auuuugaagguaaauuggcc

SEQ ID NO: 797039 - RNA, 20 nt, Artificial Sequence
  Synthetic
aaaaauaauaauaauuggcc

SEQ ID NO: 797040 - RNA, 20 nt, Artificial Sequence
  Synthetic
aagaauagaagguauuggcc

SEQ ID NO: 797041 - RNA, 20 nt, Artificial Sequence
  Synthetic
uaauaugauguguauuggcc

SEQ ID NO: 797042 - RNA, 20 nt, Artificial Sequence
  Synthetic
ugacucagcugggcuuggcc

SEQ ID NO: 797043 - RNA, 20 nt, Artificial Sequence
  Synthetic
uugaaccaccaugcuuggcc

SEQ ID NO: 797044 - RNA, 20 nt, Artificial Sequence
  Synthetic
caagaauaccaaucuuggcc

SEQ ID NO: 797045 - RNA, 20 nt, Artificial Sequence
  Synthetic
aggguuucaccaucuuggcc

SEQ ID NO: 797046 - RNA, 20 nt, Artificial Sequence
  Synthetic
caaaaaaaauuaucuuggcc

SEQ ID NO: 797047 - RNA, 20 nt, Artificial Sequence
  Synthetic
auuacagauaacucuuggcc

SEQ ID NO: 797048 - RNA, 20 nt, Artificial Sequence
  Synthetic
auuguuaaaagaaguuggcc

SEQ ID NO: 797049 - RNA, 20 nt, Artificial Sequence
  Synthetic
uuaaaauuauccaguuggcc

SEQ ID NO: 797050 - RNA, 20 nt, Artificial Sequence
  Synthetic
cggguuccauuacguuggcc

SEQ ID NO: 797051 - RNA, 20 nt, Artificial Sequence
  Synthetic
aggguuucaccagguuggcc

SEQ ID NO: 797052 - RNA, 20 nt, Artificial Sequence
  Synthetic
cuaagaguuauggguuggcc

SEQ ID NO: 797053 - RNA, 20 nt, Artificial Sequence
  Synthetic
aggguuugacaauguuggcc

SEQ ID NO: 797054 - RNA, 20 nt, Artificial Sequence
  Synthetic
cgggauucaccauguuggcc

SEQ ID NO: 797055 - RNA, 20 nt, Artificial Sequence
  Synthetic
agggguucaccauguuggcc

SEQ ID NO: 797056 - RNA, 20 nt, Artificial Sequence
  Synthetic
uguauuucaccauguuggcc

SEQ ID NO: 797057 - RNA, 20 nt, Artificial Sequence
  Synthetic
agaguuucaccauguuggcc

SEQ ID NO: 797058 - RNA, 20 nt, Artificial Sequence
  Synthetic
aagguuucaccauguuggcc

SEQ ID NO: 797059 - RNA, 20 nt, Artificial Sequence
  Synthetic
aggguuucaccauguuggcc

SEQ ID NO: 797060 - RNA, 20 nt, Artificial Sequence
  Synthetic
agaguuucgccauguuggcc

SEQ ID NO: 797061 - RNA, 20 nt, Artificial Sequence
  Synthetic
aggguuucacuauguuggcc

SEQ ID NO: 797062 - RNA, 20 nt, Artificial Sequence
  Synthetic
cugcacacuagguguuggcc

SEQ ID NO: 797063 - RNA, 20 nt, Artificial Sequence
  Synthetic
aggguuucacuguguuggcc

SEQ ID NO: 797064 - RNA, 20 nt, Artificial Sequence
  Synthetic
uggguuucaccuuguuggcc

SEQ ID NO: 797065 - RNA, 20 nt, Artificial Sequence
  Synthetic
ugggguuucaccauuuggcc

SEQ ID NO: 797066 - RNA, 20 nt, Artificial Sequence
  Synthetic
uuguacauguauauuuggcc

SEQ ID NO: 797067 - RNA, 20 nt, Artificial Sequence
  Synthetic
acucuccagaguauuuggcc

SEQ ID NO: 797068 - RNA, 20 nt, Artificial Sequence
  Synthetic
aaaaguuuuccucuuuggcc

SEQ ID NO: 797069 - RNA, 20 nt, Artificial Sequence
  Synthetic
uuuuucaauuccguuuggcc

SEQ ID NO: 797070 - RNA, 20 nt, Artificial Sequence
  Synthetic
uaauauuggaaguuuuggcc

SEQ ID NO: 797071 - RNA, 20 nt, Artificial Sequence
  Synthetic
uaaagaacauguuuuuggcc

SEQ ID NO: 797072 - RNA, 20 nt, Artificial Sequence
  Synthetic
aaauaagaaauuuuuuggcc

SEQ ID NO: 797073 - RNA, 20 nt, Artificial Sequence
  Synthetic
caaaaaaaaaaaaaaaugcc

SEQ ID NO: 797074 - RNA, 20 nt, Artificial Sequence
  Synthetic
caaguggcucaaaaaaugcc

SEQ ID NO: 797075 - RNA, 20 nt, Artificial Sequence
  Synthetic
aucuaaucuuuaaaaaugcc

SEQ ID NO: 797076 - RNA, 20 nt, Artificial Sequence
  Synthetic
agaauacuuggcaaaaugcc

SEQ ID NO: 797077 - RNA, 20 nt, Artificial Sequence
  Synthetic
agugauaacauccaaaugcc

SEQ ID NO: 797078 - RNA, 20 nt, Artificial Sequence
  Synthetic
auuuuguguuugcaaaugcc

SEQ ID NO: 797079 - RNA, 20 nt, Artificial Sequence
  Synthetic
cagaagugacccacaaugcc

SEQ ID NO: 797080 - RNA, 20 nt, Artificial Sequence
  Synthetic
uccuccucuuuuacaaugcc

SEQ ID NO: 797081 - RNA, 20 nt, Artificial Sequence
  Synthetic
uaaaucaugggaagaaugcc

SEQ ID NO: 797082 - RNA, 20 nt, Artificial Sequence
  Synthetic
uaaguguaugauauaaugcc

SEQ ID NO: 797083 - RNA, 20 nt, Artificial Sequence
  Synthetic
ccaacucauucuuuaaugcc

SEQ ID NO: 797084 - RNA, 20 nt, Artificial Sequence
  Synthetic
uguuauuacuuuuuaaugcc

SEQ ID NO: 797085 - RNA, 20 nt, Artificial Sequence
  Synthetic
caggcgugagccaacaugcc

SEQ ID NO: 797086 - RNA, 20 nt, Artificial Sequence
  Synthetic
cugaguauaacacacaugcc

SEQ ID NO: 797087 - RNA, 20 nt, Artificial Sequence
  Synthetic
agagggcucacucacaugcc

SEQ ID NO: 797088 - RNA, 20 nt, Artificial Sequence
  Synthetic
caggugcccaccaccaugcc

SEQ ID NO: 797089 - RNA, 20 nt, Artificial Sequence
  Synthetic
uaggugcccaccaccaugcc

SEQ ID NO: 797090 - RNA, 20 nt, Artificial Sequence
  Synthetic
caggugugcaccaccaugcc

SEQ ID NO: 797091 - RNA, 20 nt, Artificial Sequence
  Synthetic
caggcguaagccaccaugcc

SEQ ID NO: 797092 - RNA, 20 nt, Artificial Sequence
  Synthetic
caggcaugagccaccaugcc

SEQ ID NO: 797093 - RNA, 20 nt, Artificial Sequence
  Synthetic
cagacgugagccaccaugcc

SEQ ID NO: 797094 - RNA, 20 nt, Artificial Sequence
  Synthetic
caggcgugagccaccaugcc

SEQ ID NO: 797095 - RNA, 20 nt, Artificial Sequence
  Synthetic
caggugugagccaccaugcc

SEQ ID NO: 797096 - RNA, 20 nt, Artificial Sequence
  Synthetic
caggcgcccgccaccaugcc

SEQ ID NO: 797097 - RNA, 20 nt, Artificial Sequence
  Synthetic
caggugcccgccaccaugcc

SEQ ID NO: 797098 - RNA, 20 nt, Artificial Sequence
  Synthetic
caggcgcgcgccaccaugcc

SEQ ID NO: 797099 - RNA, 20 nt, Artificial Sequence
  Synthetic
caggcaugcgccaccaugcc

SEQ ID NO: 797100 - RNA, 20 nt, Artificial Sequence
  Synthetic
caggcacaugccaccaugcc

SEQ ID NO: 797101 - RNA, 20 nt, Artificial Sequence
  Synthetic
caggcaccugccaccaugcc

SEQ ID NO: 797102 - RNA, 20 nt, Artificial Sequence
  Synthetic
cagacacgugccaccaugcc

SEQ ID NO: 797103 - RNA, 20 nt, Artificial Sequence
  Synthetic
caggugcgugccaccaugcc

SEQ ID NO: 797104 - RNA, 20 nt, Artificial Sequence
  Synthetic
cagacgugagcuaccaugcc

SEQ ID NO: 797105 - RNA, 20 nt, Artificial Sequence
  Synthetic
caggcgugagcuaccaugcc

SEQ ID NO: 797106 - RNA, 20 nt, Artificial Sequence
  Synthetic
caggugccugcuaccaugcc

SEQ ID NO: 797107 - RNA, 20 nt, Artificial Sequence
  Synthetic
uaaggcucugaacccaugcc

SEQ ID NO: 797108 - RNA, 20 nt, Artificial Sequence
  Synthetic
uaacuaucauucuccaugcc

SEQ ID NO: 797109 - RNA, 20 nt, Artificial Sequence
  Synthetic
aggguguuuugcagcaugcc

SEQ ID NO: 797110 - RNA, 20 nt, Artificial Sequence
  Synthetic
auuuugcucauucucaugcc

SEQ ID NO: 797111 - RNA, 20 nt, Artificial Sequence
  Synthetic
accccaagucuguucaugcc

SEQ ID NO: 797112 - RNA, 20 nt, Artificial Sequence
  Synthetic
ucuggaagaaagaagaugcc

SEQ ID NO: 797113 - RNA, 20 nt, Artificial Sequence
  Synthetic
uaaucccauccacagaugcc

SEQ ID NO: 797114 - RNA, 20 nt, Artificial Sequence
  Synthetic
aggggcacaggacagaugcc

SEQ ID NO: 797115 - RNA, 20 nt, Artificial Sequence
  Synthetic
acugacuuuucucagaugcc

SEQ ID NO: 797116 - RNA, 20 nt, Artificial Sequence
  Synthetic
uuucuuuuaaaagagaugcc

SEQ ID NO: 797117 - RNA, 20 nt, Artificial Sequence
  Synthetic
auaucugaggaaaugaugcc

SEQ ID NO: 797118 - RNA, 20 nt, Artificial Sequence
  Synthetic
ucuggugaaugcaugaugcc

SEQ ID NO: 797119 - RNA, 20 nt, Artificial Sequence
  Synthetic
auuucaaacagaaauaugcc

SEQ ID NO: 797120 - RNA, 20 nt, Artificial Sequence
  Synthetic
uuaaaucaauuaaauaugcc

SEQ ID NO: 797121 - RNA, 20 nt, Artificial Sequence
  Synthetic
ucugaacuuggccauaugcc

SEQ ID NO: 797122 - RNA, 20 nt, Artificial Sequence
  Synthetic
acagcaucucuggauaugcc

SEQ ID NO: 797123 - RNA, 20 nt, Artificial Sequence
  Synthetic
ugaaguacaugauauaugcc

SEQ ID NO: 797124 - RNA, 20 nt, Artificial Sequence
  Synthetic
uuggguaccuauuauaugcc

SEQ ID NO: 797125 - RNA, 20 nt, Artificial Sequence
  Synthetic
aggaaggaacuuuauaugcc

SEQ ID NO: 797126 - RNA, 20 nt, Artificial Sequence
  Synthetic
uuuagggccuuuuauaugcc

SEQ ID NO: 797127 - RNA, 20 nt, Artificial Sequence
  Synthetic
caggcauuugccacuaugcc

SEQ ID NO: 797128 - RNA, 20 nt, Artificial Sequence
  Synthetic
caggcacugcagacuaugcc

SEQ ID NO: 797129 - RNA, 20 nt, Artificial Sequence
  Synthetic
caggcacugcacgcuaugcc

SEQ ID NO: 797130 - RNA, 20 nt, Artificial Sequence
  Synthetic
acacauuagaaauguaugcc

SEQ ID NO: 797131 - RNA, 20 nt, Artificial Sequence
  Synthetic
ccuuuaaauaaaauuaugcc

SEQ ID NO: 797132 - RNA, 20 nt, Artificial Sequence
  Synthetic
cuugcuccugaaaaacugcc

SEQ ID NO: 797133 - RNA, 20 nt, Artificial Sequence
  Synthetic
uuugcaaagcauaaacugcc

SEQ ID NO: 797134 - RNA, 20 nt, Artificial Sequence
  Synthetic
aggaacauagggccacugcc

SEQ ID NO: 797135 - RNA, 20 nt, Artificial Sequence
  Synthetic
ucacugcaagcuccacugcc

SEQ ID NO: 797136 - RNA, 20 nt, Artificial Sequence
  Synthetic
aacauguuuugagcacugcc

SEQ ID NO: 797137 - RNA, 20 nt, Artificial Sequence
  Synthetic
uggauacuaugcucacugcc

SEQ ID NO: 797138 - RNA, 20 nt, Artificial Sequence
  Synthetic
uggucacaacaaagacugcc

SEQ ID NO: 797139 - RNA, 20 nt, Artificial Sequence
  Synthetic
ugggcagguccacgacugcc

SEQ ID NO: 797140 - RNA, 20 nt, Artificial Sequence
  Synthetic
ucugcagggcaaauacugcc

SEQ ID NO: 797141 - RNA, 20 nt, Artificial Sequence
  Synthetic
aauauuaauucccuacugcc

SEQ ID NO: 797142 - RNA, 20 nt, Artificial Sequence
  Synthetic
uccuuccuucccuuacugcc

SEQ ID NO: 797143 - RNA, 20 nt, Artificial Sequence
  Synthetic
ucaggaguucgagaccugcc

SEQ ID NO: 797144 - RNA, 20 nt, Artificial Sequence
  Synthetic
caggcgugagccacccugcc

SEQ ID NO: 797145 - RNA, 20 nt, Artificial Sequence
  Synthetic
cagucuuuucucucccugcc

SEQ ID NO: 797146 - RNA, 20 nt, Artificial Sequence
  Synthetic
cucgccucugauucccugcc

SEQ ID NO: 797147 - RNA, 20 nt, Artificial Sequence
  Synthetic
ucucucucuuuuucccugcc

SEQ ID NO: 797148 - RNA, 20 nt, Artificial Sequence
  Synthetic
uaguuaacuuggugccugcc

SEQ ID NO: 797149 - RNA, 20 nt, Artificial Sequence
  Synthetic
auuuacaauacuugccugcc

SEQ ID NO: 797150 - RNA, 20 nt, Artificial Sequence
  Synthetic
cccuuggucuccauccugcc

SEQ ID NO: 797151 - RNA, 20 nt, Artificial Sequence
  Synthetic
cgcgccacugcacuccugcc

SEQ ID NO: 797152 - RNA, 20 nt, Artificial Sequence
  Synthetic
uacauagugaagaagcugcc

SEQ ID NO: 797153 - RNA, 20 nt, Artificial Sequence
  Synthetic
accuagcuuuuucagcugcc

SEQ ID NO: 797154 - RNA, 20 nt, Artificial Sequence
  Synthetic
acauuccucagagagcugcc

SEQ ID NO: 797155 - RNA, 20 nt, Artificial Sequence
  Synthetic
aaaauacaauauuagcugcc

SEQ ID NO: 797156 - RNA, 20 nt, Artificial Sequence
  Synthetic
ccacacagggaaaggcugcc

SEQ ID NO: 797157 - RNA, 20 nt, Artificial Sequence
  Synthetic
auuguaugcuguaggcugcc

SEQ ID NO: 797158 - RNA, 20 nt, Artificial Sequence
  Synthetic
agaugcuaagcugggcugcc

SEQ ID NO: 797159 - RNA, 20 nt, Artificial Sequence
  Synthetic
cauaagacuucuuggcugcc

SEQ ID NO: 797160 - RNA, 20 nt, Artificial Sequence
  Synthetic
aacacguaauaaaugcugcc

SEQ ID NO: 797161 - RNA, 20 nt, Artificial Sequence
  Synthetic
ugagaaagcucagugcugcc

SEQ ID NO: 797162 - RNA, 20 nt, Artificial Sequence
  Synthetic
ugaaagugacuuuaucugcc

SEQ ID NO: 797163 - RNA, 20 nt, Artificial Sequence
  Synthetic
caucugagaccaccucugcc

SEQ ID NO: 797164 - RNA, 20 nt, Artificial Sequence
  Synthetic
cauacaauguucccucugcc

SEQ ID NO: 797165 - RNA, 20 nt, Artificial Sequence
  Synthetic
cacagucuguucccucugcc

SEQ ID NO: 797166 - RNA, 20 nt, Artificial Sequence
  Synthetic
uugcccuuguuuccucugcc

SEQ ID NO: 797167 - RNA, 20 nt, Artificial Sequence
  Synthetic
uagaauaauaaagcucugcc

SEQ ID NO: 797168 - RNA, 20 nt, Artificial Sequence
  Synthetic
ugaucaguccagucucugcc

SEQ ID NO: 797169 - RNA, 20 nt, Artificial Sequence
  Synthetic
uuuuugguugugucucugcc

SEQ ID NO: 797170 - RNA, 20 nt, Artificial Sequence
  Synthetic
uugucuguugugucucugcc

SEQ ID NO: 797171 - RNA, 20 nt, Artificial Sequence
  Synthetic
uuuuuuguugugucucugcc

SEQ ID NO: 797172 - RNA, 20 nt, Artificial Sequence
  Synthetic
ccaagcuuuuuuucucugcc

SEQ ID NO: 797173 - RNA, 20 nt, Artificial Sequence
  Synthetic
aaccuagaaauaugucugcc

SEQ ID NO: 797174 - RNA, 20 nt, Artificial Sequence
  Synthetic
auguuuggccucugucugcc

SEQ ID NO: 797175 - RNA, 20 nt, Artificial Sequence
  Synthetic
cucccauuucucugucugcc

SEQ ID NO: 797176 - RNA, 20 nt, Artificial Sequence
  Synthetic
augauauaaaccauucugcc

SEQ ID NO: 797177 - RNA, 20 nt, Artificial Sequence
  Synthetic
cccugcagcaaacuucugcc

SEQ ID NO: 797178 - RNA, 20 nt, Artificial Sequence
  Synthetic
cucugcagcaaacuucugcc

SEQ ID NO: 797179 - RNA, 20 nt, Artificial Sequence
  Synthetic
uccugcagcagacuucugcc

SEQ ID NO: 797180 - RNA, 20 nt, Artificial Sequence
  Synthetic
ugguucuugagccuucugcc

SEQ ID NO: 797181 - RNA, 20 nt, Artificial Sequence
  Synthetic
ccccucucggaauuucugcc

SEQ ID NO: 797182 - RNA, 20 nt, Artificial Sequence
  Synthetic
ugcugaaaaaccuuucugcc

SEQ ID NO: 797183 - RNA, 20 nt, Artificial Sequence
  Synthetic
aagccaaggaguuuucugcc

SEQ ID NO: 797184 - RNA, 20 nt, Artificial Sequence
  Synthetic
agagagagaggggaagugcc

SEQ ID NO: 797185 - RNA, 20 nt, Artificial Sequence
  Synthetic
cugugccuaagcuaagugcc

SEQ ID NO: 797186 - RNA, 20 nt, Artificial Sequence
  Synthetic
agugaucuuuuaacagugcc

SEQ ID NO: 797187 - RNA, 20 nt, Artificial Sequence
  Synthetic
cucucaauauacacagugcc

SEQ ID NO: 797188 - RNA, 20 nt, Artificial Sequence
  Synthetic
cagcacuuccuagcagugcc

SEQ ID NO: 797189 - RNA, 20 nt, Artificial Sequence
  Synthetic
cuggcauagucugcagugcc

SEQ ID NO: 797190 - RNA, 20 nt, Artificial Sequence
  Synthetic
cuggcauagcgugcagugcc

SEQ ID NO: 797191 - RNA, 20 nt, Artificial Sequence
  Synthetic
acacuuguaauaucagugcc

SEQ ID NO: 797192 - RNA, 20 nt, Artificial Sequence
  Synthetic
uaaaguacagacauagugcc

SEQ ID NO: 797193 - RNA, 20 nt, Artificial Sequence
  Synthetic
agcaaaaauaguauagugcc

SEQ ID NO: 797194 - RNA, 20 nt, Artificial Sequence
  Synthetic
uaugucauuaauguagugcc

SEQ ID NO: 797195 - RNA, 20 nt, Artificial Sequence
  Synthetic
aacagcuugcaccacgugcc

SEQ ID NO: 797196 - RNA, 20 nt, Artificial Sequence
  Synthetic
caagcaugagccaccgugcc

SEQ ID NO: 797197 - RNA, 20 nt, Artificial Sequence
  Synthetic
caggccugagccaccgugcc

SEQ ID NO: 797198 - RNA, 20 nt, Artificial Sequence
  Synthetic
caggcgugagccaccgugcc

SEQ ID NO: 797199 - RNA, 20 nt, Artificial Sequence
  Synthetic
agaacauuuacaaaggugcc

SEQ ID NO: 797200 - RNA, 20 nt, Artificial Sequence
  Synthetic
aucagagauuuaaaggugcc

SEQ ID NO: 797201 - RNA, 20 nt, Artificial Sequence
  Synthetic
aaagcacagagcccggugcc

SEQ ID NO: 797202 - RNA, 20 nt, Artificial Sequence
  Synthetic
uugccugggaguugggugcc

SEQ ID NO: 797203 - RNA, 20 nt, Artificial Sequence
  Synthetic
ucauaaaauauaaaugugcc

SEQ ID NO: 797204 - RNA, 20 nt, Artificial Sequence
  Synthetic
cccugacacuggaaugugcc

SEQ ID NO: 797205 - RNA, 20 nt, Artificial Sequence
  Synthetic
uaaagauggucuaaugugcc

SEQ ID NO: 797206 - RNA, 20 nt, Artificial Sequence
  Synthetic
aucugauguuuucaugugcc

SEQ ID NO: 797207 - RNA, 20 nt, Artificial Sequence
  Synthetic
uugaaggcuuacuaugugcc

SEQ ID NO: 797208 - RNA, 20 nt, Artificial Sequence
  Synthetic
uuccaugaacuuuaugugcc

SEQ ID NO: 797209 - RNA, 20 nt, Artificial Sequence
  Synthetic
uauguacuuaacacugugcc

SEQ ID NO: 797210 - RNA, 20 nt, Artificial Sequence
  Synthetic
caggugugagccacugugcc

SEQ ID NO: 797211 - RNA, 20 nt, Artificial Sequence
  Synthetic
aagcagcacggcccugugcc

SEQ ID NO: 797212 - RNA, 20 nt, Artificial Sequence
  Synthetic
cuagucaaucagccugugcc

SEQ ID NO: 797213 - RNA, 20 nt, Artificial Sequence
  Synthetic
acccaccaucaggcugugcc

SEQ ID NO: 797214 - RNA, 20 nt, Artificial Sequence
  Synthetic
aguauuugacuuucugugcc

SEQ ID NO: 797215 - RNA, 20 nt, Artificial Sequence
  Synthetic
aauauuugucuuucugugcc

SEQ ID NO: 797216 - RNA, 20 nt, Artificial Sequence
  Synthetic
agcugguacugaggugugcc

SEQ ID NO: 797217 - RNA, 20 nt, Artificial Sequence
  Synthetic
cauucaccccucugugugcc

SEQ ID NO: 797218 - RNA, 20 nt, Artificial Sequence
  Synthetic
cccuaaauuuuaauugugcc

SEQ ID NO: 797219 - RNA, 20 nt, Artificial Sequence
  Synthetic
cauaagcugucccuugugcc

SEQ ID NO: 797220 - RNA, 20 nt, Artificial Sequence
  Synthetic
ugcugaaccuuuguugugcc

SEQ ID NO: 797221 - RNA, 20 nt, Artificial Sequence
  Synthetic
cuuacugcugucuuugugcc

SEQ ID NO: 797222 - RNA, 20 nt, Artificial Sequence
  Synthetic
aaauaaucgaguuuugugcc

SEQ ID NO: 797223 - RNA, 20 nt, Artificial Sequence
  Synthetic
acaguuauuauuuuugugcc

SEQ ID NO: 797224 - RNA, 20 nt, Artificial Sequence
  Synthetic
ugaguaucuauuaaauugcc

SEQ ID NO: 797225 - RNA, 20 nt, Artificial Sequence
  Synthetic
uaauaugcauagcaauugcc

SEQ ID NO: 797226 - RNA, 20 nt, Artificial Sequence
  Synthetic
ugagcuucugcugaauugcc

SEQ ID NO: 797227 - RNA, 20 nt, Artificial Sequence
  Synthetic
caaaagcugucaacauugcc

SEQ ID NO: 797228 - RNA, 20 nt, Artificial Sequence
  Synthetic
uaguugcccaugacauugcc

SEQ ID NO: 797229 - RNA, 20 nt, Artificial Sequence
  Synthetic
aaaguuugagaagcauugcc

SEQ ID NO: 797230 - RNA, 20 nt, Artificial Sequence
  Synthetic
uugaccaagaugauauugcc

SEQ ID NO: 797231 - RNA, 20 nt, Artificial Sequence
  Synthetic
cggccuacuguuauauugcc

SEQ ID NO: 797232 - RNA, 20 nt, Artificial Sequence
  Synthetic
ugagcaauggggcuauugcc

SEQ ID NO: 797233 - RNA, 20 nt, Artificial Sequence
  Synthetic
uauugcugaauaguauugcc

SEQ ID NO: 797234 - RNA, 20 nt, Artificial Sequence
  Synthetic
cuuucuucaucccacuugcc

SEQ ID NO: 797235 - RNA, 20 nt, Artificial Sequence
  Synthetic
ugacugaaaacauacuugcc

SEQ ID NO: 797236 - RNA, 20 nt, Artificial Sequence
  Synthetic
cagucgugagccaccuugcc

SEQ ID NO: 797237 - RNA, 20 nt, Artificial Sequence
  Synthetic
aaaaguuuucagaccuugcc

SEQ ID NO: 797238 - RNA, 20 nt, Artificial Sequence
  Synthetic
acucccagguaacccuugcc

SEQ ID NO: 797239 - RNA, 20 nt, Artificial Sequence
  Synthetic
cuccucuaaaaagccuugcc

SEQ ID NO: 797240 - RNA, 20 nt, Artificial Sequence
  Synthetic
uuuuuuccaaauuccuugcc

SEQ ID NO: 797241 - RNA, 20 nt, Artificial Sequence
  Synthetic
ugcauuuucauaagcuugcc

SEQ ID NO: 797242 - RNA, 20 nt, Artificial Sequence
  Synthetic
agcugaauuccuugcuugcc

SEQ ID NO: 797243 - RNA, 20 nt, Artificial Sequence
  Synthetic
uguuacuuguuucucuugcc

SEQ ID NO: 797244 - RNA, 20 nt, Artificial Sequence
  Synthetic
uaauuguuauacuucuugcc

SEQ ID NO: 797245 - RNA, 20 nt, Artificial Sequence
  Synthetic
uuauuagaaaucuucuugcc

SEQ ID NO: 797246 - RNA, 20 nt, Artificial Sequence
  Synthetic
caaauaguugcaugguugcc

SEQ ID NO: 797247 - RNA, 20 nt, Artificial Sequence
  Synthetic
agacuggacuggugguugcc

SEQ ID NO: 797248 - RNA, 20 nt, Artificial Sequence
  Synthetic
cuugugcacaguauguugcc

SEQ ID NO: 797249 - RNA, 20 nt, Artificial Sequence
  Synthetic
uggagucucgcacuguugcc

SEQ ID NO: 797250 - RNA, 20 nt, Artificial Sequence
  Synthetic
uagaaggacacucuguugcc

SEQ ID NO: 797251 - RNA, 20 nt, Artificial Sequence
  Synthetic
uggaguuucgcucuguugcc

SEQ ID NO: 797252 - RNA, 20 nt, Artificial Sequence
  Synthetic
cagagucuggcucuguugcc

SEQ ID NO: 797253 - RNA, 20 nt, Artificial Sequence
  Synthetic
cagaguguugcucuguugcc

SEQ ID NO: 797254 - RNA, 20 nt, Artificial Sequence
  Synthetic
uggagucuuucucuguugcc

SEQ ID NO: 797255 - RNA, 20 nt, Artificial Sequence
  Synthetic
aauuguaaguuaguguugcc

SEQ ID NO: 797256 - RNA, 20 nt, Artificial Sequence
  Synthetic
uucuaacauugcguguugcc

SEQ ID NO: 797257 - RNA, 20 nt, Artificial Sequence
  Synthetic
aaagauacaaaaaauuugcc

SEQ ID NO: 797258 - RNA, 20 nt, Artificial Sequence
  Synthetic
uaaaaauacaaaaauuugcc

SEQ ID NO: 797259 - RNA, 20 nt, Artificial Sequence
  Synthetic
aaauguuuaaugaauuugcc

SEQ ID NO: 797260 - RNA, 20 nt, Artificial Sequence
  Synthetic
cacaguuuaaguaauuugcc

SEQ ID NO: 797261 - RNA, 20 nt, Artificial Sequence
  Synthetic
cacagaugguggcauuugcc

SEQ ID NO: 797262 - RNA, 20 nt, Artificial Sequence
  Synthetic
uaauauuuggcauauuugcc

SEQ ID NO: 797263 - RNA, 20 nt, Artificial Sequence
  Synthetic
acagacuaagauccuuugcc

SEQ ID NO: 797264 - RNA, 20 nt, Artificial Sequence
  Synthetic
uuuguuguauacucuuugcc

SEQ ID NO: 797265 - RNA, 20 nt, Artificial Sequence
  Synthetic
uuccuuguagugucuuugcc

SEQ ID NO: 797266 - RNA, 20 nt, Artificial Sequence
  Synthetic
uuuuuuguugugucuuugcc

SEQ ID NO: 797267 - RNA, 20 nt, Artificial Sequence
  Synthetic
agacaugggacuucuuugcc

SEQ ID NO: 797268 - RNA, 20 nt, Artificial Sequence
  Synthetic
ugugcuccagcuucuuugcc

SEQ ID NO: 797269 - RNA, 20 nt, Artificial Sequence
  Synthetic
cuuagugagagcaguuugcc

SEQ ID NO: 797270 - RNA, 20 nt, Artificial Sequence
  Synthetic
ucaggaugagagaguuugcc

SEQ ID NO: 797271 - RNA, 20 nt, Artificial Sequence
  Synthetic
auuauuuguaauaguuugcc

SEQ ID NO: 797272 - RNA, 20 nt, Artificial Sequence
  Synthetic
uuugauauuuuuauuuugcc

SEQ ID NO: 797273 - RNA, 20 nt, Artificial Sequence
  Synthetic
cauaaaaugauacuuuugcc

SEQ ID NO: 797274 - RNA, 20 nt, Artificial Sequence
  Synthetic
acaacaacacagcaaaaucc

SEQ ID NO: 797275 - RNA, 20 nt, Artificial Sequence
  Synthetic
cucuucuuuaugcaaaaucc

SEQ ID NO: 797276 - RNA, 20 nt, Artificial Sequence
  Synthetic
cagcauaguucucaaaaucc

SEQ ID NO: 797277 - RNA, 20 nt, Artificial Sequence
  Synthetic
auuugccuuugggaaaaucc

SEQ ID NO: 797278 - RNA, 20 nt, Artificial Sequence
  Synthetic
acuuuauaaauugaaaaucc

SEQ ID NO: 797279 - RNA, 20 nt, Artificial Sequence
  Synthetic
uuaauuguauaauaaaaucc

SEQ ID NO: 797280 - RNA, 20 nt, Artificial Sequence
  Synthetic
auguaauucuaauaaaaucc

SEQ ID NO: 797281 - RNA, 20 nt, Artificial Sequence
  Synthetic
aguugugggguauaaaaucc

SEQ ID NO: 797282 - RNA, 20 nt, Artificial Sequence
  Synthetic
ugcacuccccuguaaaaucc

SEQ ID NO: 797283 - RNA, 20 nt, Artificial Sequence
  Synthetic
ucacucucacuaccaaaucc

SEQ ID NO: 797284 - RNA, 20 nt, Artificial Sequence
  Synthetic
uuaauauaaaguucaaaucc

SEQ ID NO: 797285 - RNA, 20 nt, Artificial Sequence
  Synthetic
caaaggcucuaaagaaaucc

SEQ ID NO: 797286 - RNA, 20 nt, Artificial Sequence
  Synthetic
uuguucagaaagagaaaucc

SEQ ID NO: 797287 - RNA, 20 nt, Artificial Sequence
  Synthetic
auuggcacauaaauaaaucc

SEQ ID NO: 797288 - RNA, 20 nt, Artificial Sequence
  Synthetic
agaggaguuggauuaaaucc

SEQ ID NO: 797289 - RNA, 20 nt, Artificial Sequence
  Synthetic
agcucucagauuuuaaaucc

SEQ ID NO: 797290 - RNA, 20 nt, Artificial Sequence
  Synthetic
cuuuaauccuaaaacaaucc

SEQ ID NO: 797291 - RNA, 20 nt, Artificial Sequence
  Synthetic
cacaagccccuucacaaucc

SEQ ID NO: 797292 - RNA, 20 nt, Artificial Sequence
  Synthetic
uuuuugaagaauuccaaucc

SEQ ID NO: 797293 - RNA, 20 nt, Artificial Sequence
  Synthetic
uggaaaagggcaagcaaucc

SEQ ID NO: 797294 - RNA, 20 nt, Artificial Sequence
  Synthetic
uugcuuucuaugugcaaucc

SEQ ID NO: 797295 - RNA, 20 nt, Artificial Sequence
  Synthetic
uugaauuuuacuugcaaucc

SEQ ID NO: 797296 - RNA, 20 nt, Artificial Sequence
  Synthetic
agccauuaggcucucaaucc

SEQ ID NO: 797297 - RNA, 20 nt, Artificial Sequence
  Synthetic
aagagacaaauauagaaucc

SEQ ID NO: 797298 - RNA, 20 nt, Artificial Sequence
  Synthetic
uugaaucucuacaggaaucc

SEQ ID NO: 797299 - RNA, 20 nt, Artificial Sequence
  Synthetic
ugagauuugccaaugaaucc

SEQ ID NO: 797300 - RNA, 20 nt, Artificial Sequence
  Synthetic
ucaaaaaaaucaaugaaucc

SEQ ID NO: 797301 - RNA, 20 nt, Artificial Sequence
  Synthetic
uucaaaaaaucaaugaaucc

SEQ ID NO: 797302 - RNA, 20 nt, Artificial Sequence
  Synthetic
caggaggauggcaugaaucc

SEQ ID NO: 797303 - RNA, 20 nt, Artificial Sequence
  Synthetic
agaacuuacuuuaugaaucc

SEQ ID NO: 797304 - RNA, 20 nt, Artificial Sequence
  Synthetic
aagauuaugucacugaaucc

SEQ ID NO: 797305 - RNA, 20 nt, Artificial Sequence
  Synthetic
cacuaccgcuuucugaaucc

SEQ ID NO: 797306 - RNA, 20 nt, Artificial Sequence
  Synthetic
uguuaacaaauggugaaucc

SEQ ID NO: 797307 - RNA, 20 nt, Artificial Sequence
  Synthetic
caggagaaucacuugaaucc

SEQ ID NO: 797308 - RNA, 20 nt, Artificial Sequence
  Synthetic
ucuacuguugccuugaaucc

SEQ ID NO: 797309 - RNA, 20 nt, Artificial Sequence
  Synthetic
agccugcuggguuugaaucc

SEQ ID NO: 797310 - RNA, 20 nt, Artificial Sequence
  Synthetic
agcagucaccaaaauaaucc

SEQ ID NO: 797311 - RNA, 20 nt, Artificial Sequence
  Synthetic
agaaggcaagagaauaaucc

SEQ ID NO: 797312 - RNA, 20 nt, Artificial Sequence
  Synthetic
uauuuuccuuauaauaaucc

SEQ ID NO: 797313 - RNA, 20 nt, Artificial Sequence
  Synthetic
ucuauaaugaugcauaaucc

SEQ ID NO: 797314 - RNA, 20 nt, Artificial Sequence
  Synthetic
auacacauuuaguauaaucc

SEQ ID NO: 797315 - RNA, 20 nt, Artificial Sequence
  Synthetic
uaggaauggacuacuaaucc

SEQ ID NO: 797316 - RNA, 20 nt, Artificial Sequence
  Synthetic
acacugucccagucuaaucc

SEQ ID NO: 797317 - RNA, 20 nt, Artificial Sequence
  Synthetic
cucaucuagaacuguaaucc

SEQ ID NO: 797318 - RNA, 20 nt, Artificial Sequence
  Synthetic
cuggcucaugccuguaaucc

SEQ ID NO: 797319 - RNA, 20 nt, Artificial Sequence
  Synthetic
aacacuagccucuguaaucc

SEQ ID NO: 797320 - RNA, 20 nt, Artificial Sequence
  Synthetic
auucuucucaaaauuaaucc

SEQ ID NO: 797321 - RNA, 20 nt, Artificial Sequence
  Synthetic
uugagagagaugauuaaucc

SEQ ID NO: 797322 - RNA, 20 nt, Artificial Sequence
  Synthetic
caucaccuagguauuaaucc

SEQ ID NO: 797323 - RNA, 20 nt, Artificial Sequence
  Synthetic
uaggaagauaauuuuaaucc

SEQ ID NO: 797324 - RNA, 20 nt, Artificial Sequence
  Synthetic
agggauaucaucaaacaucc

SEQ ID NO: 797325 - RNA, 20 nt, Artificial Sequence
  Synthetic
uacucaucaacccaacaucc

SEQ ID NO: 797326 - RNA, 20 nt, Artificial Sequence
  Synthetic
cagcuaauaggaacacaucc

SEQ ID NO: 797327 - RNA, 20 nt, Artificial Sequence
  Synthetic
uagguguccaugacacaucc

SEQ ID NO: 797328 - RNA, 20 nt, Artificial Sequence
  Synthetic
ugacuacaugucucacaucc

SEQ ID NO: 797329 - RNA, 20 nt, Artificial Sequence
  Synthetic
ugacucugugucucacaucc

SEQ ID NO: 797330 - RNA, 20 nt, Artificial Sequence
  Synthetic
ugacuccauuucucacaucc

SEQ ID NO: 797331 - RNA, 20 nt, Artificial Sequence
  Synthetic
agacuucugccuggacaucc

SEQ ID NO: 797332 - RNA, 20 nt, Artificial Sequence
  Synthetic
ccacccugccauguacaucc

SEQ ID NO: 797333 - RNA, 20 nt, Artificial Sequence
  Synthetic
auauuuuuucaauuacaucc

SEQ ID NO: 797334 - RNA, 20 nt, Artificial Sequence
  Synthetic
aucauuuugaucuuacaucc

SEQ ID NO: 797335 - RNA, 20 nt, Artificial Sequence
  Synthetic
ucaagagaucgacaccaucc

SEQ ID NO: 797336 - RNA, 20 nt, Artificial Sequence
  Synthetic
ucaggagaucgacaccaucc

SEQ ID NO: 797337 - RNA, 20 nt, Artificial Sequence
  Synthetic
ucaggagauugacaccaucc

SEQ ID NO: 797338 - RNA, 20 nt, Artificial Sequence
  Synthetic
auguagauacaucaccaucc

SEQ ID NO: 797339 - RNA, 20 nt, Artificial Sequence
  Synthetic
ucaagagaucaagaccaucc

SEQ ID NO: 797340 - RNA, 20 nt, Artificial Sequence
  Synthetic
uccggagaucaagaccaucc

SEQ ID NO: 797341 - RNA, 20 nt, Artificial Sequence
  Synthetic
ucaggagauagagaccaucc

SEQ ID NO: 797342 - RNA, 20 nt, Artificial Sequence
  Synthetic
ucaggagaccgagaccaucc

SEQ ID NO: 797343 - RNA, 20 nt, Artificial Sequence
  Synthetic
ucaagaaaucgagaccaucc

SEQ ID NO: 797344 - RNA, 20 nt, Artificial Sequence
  Synthetic
ucaggaaaucgagaccaucc

SEQ ID NO: 797345 - RNA, 20 nt, Artificial Sequence
  Synthetic
ucaagagaucgagaccaucc

SEQ ID NO: 797346 - RNA, 20 nt, Artificial Sequence
  Synthetic
ucaggagaucgagaccaucc

SEQ ID NO: 797347 - RNA, 20 nt, Artificial Sequence
  Synthetic
ucaggagcucgagaccaucc

SEQ ID NO: 797348 - RNA, 20 nt, Artificial Sequence
  Synthetic
ucaggaguucgagaccaucc

SEQ ID NO: 797349 - RNA, 20 nt, Artificial Sequence
  Synthetic
uugggagauggagaccaucc

SEQ ID NO: 797350 - RNA, 20 nt, Artificial Sequence
  Synthetic
ucagaagauugagaccaucc

SEQ ID NO: 797351 - RNA, 20 nt, Artificial Sequence
  Synthetic
ucaagagauugagaccaucc

SEQ ID NO: 797352 - RNA, 20 nt, Artificial Sequence
  Synthetic
ucaggagauugagaccaucc

SEQ ID NO: 797353 - RNA, 20 nt, Artificial Sequence
  Synthetic
ucaggagaucgggaccaucc

SEQ ID NO: 797354 - RNA, 20 nt, Artificial Sequence
  Synthetic
uacauuuuauguuaccaucc

SEQ ID NO: 797355 - RNA, 20 nt, Artificial Sequence
  Synthetic
ugggaggccagagcccaucc

SEQ ID NO: 797356 - RNA, 20 nt, Artificial Sequence
  Synthetic
ccucuauaggaaggccaucc

SEQ ID NO: 797357 - RNA, 20 nt, Artificial Sequence
  Synthetic
ucaccuuaaaaaugccaucc

SEQ ID NO: 797358 - RNA, 20 nt, Artificial Sequence
  Synthetic
acuacauuuucccuccaucc

SEQ ID NO: 797359 - RNA, 20 nt, Artificial Sequence
  Synthetic
ccucaagggauccuccaucc

SEQ ID NO: 797360 - RNA, 20 nt, Artificial Sequence
  Synthetic
ccuucuuucccaaagcaucc

SEQ ID NO: 797361 - RNA, 20 nt, Artificial Sequence
  Synthetic
uguuauuuuucaaagcaucc

SEQ ID NO: 797362 - RNA, 20 nt, Artificial Sequence
  Synthetic
aaccaauauuccuagcaucc

SEQ ID NO: 797363 - RNA, 20 nt, Artificial Sequence
  Synthetic
ugugauuauuauuagcaucc

SEQ ID NO: 797364 - RNA, 20 nt, Artificial Sequence
  Synthetic
uuuuguguucacaggcaucc

SEQ ID NO: 797365 - RNA, 20 nt, Artificial Sequence
  Synthetic
aacuuggggaaaaugcaucc

SEQ ID NO: 797366 - RNA, 20 nt, Artificial Sequence
  Synthetic
cagacugcgggacugcaucc

SEQ ID NO: 797367 - RNA, 20 nt, Artificial Sequence
  Synthetic
ucugcagcuauucugcaucc

SEQ ID NO: 797368 - RNA, 20 nt, Artificial Sequence
  Synthetic
agaacuuccuagaaucaucc

SEQ ID NO: 797369 - RNA, 20 nt, Artificial Sequence
  Synthetic
aaagagaugugcuaucaucc

SEQ ID NO: 797370 - RNA, 20 nt, Artificial Sequence
  Synthetic
uauccaccuuggacucaucc

SEQ ID NO: 797371 - RNA, 20 nt, Artificial Sequence
  Synthetic
cuguacccaaguccucaucc

SEQ ID NO: 797372 - RNA, 20 nt, Artificial Sequence
  Synthetic
ucuucucagaggucucaucc

SEQ ID NO: 797373 - RNA, 20 nt, Artificial Sequence
  Synthetic
acuuuuauugggucucaucc

SEQ ID NO: 797374 - RNA, 20 nt, Artificial Sequence
  Synthetic
agggucucacucugucaucc

SEQ ID NO: 797375 - RNA, 20 nt, Artificial Sequence
  Synthetic
acugucucacucugucaucc

SEQ ID NO: 797376 - RNA, 20 nt, Artificial Sequence
  Synthetic
uuucuaacauggugucaucc

SEQ ID NO: 797377 - RNA, 20 nt, Artificial Sequence
  Synthetic
agagucucgcuuugucaucc

SEQ ID NO: 797378 - RNA, 20 nt, Artificial Sequence
  Synthetic
uuaugaucaccgcuucaucc

SEQ ID NO: 797379 - RNA, 20 nt, Artificial Sequence
  Synthetic
uccuauccugcuguucaucc

SEQ ID NO: 797380 - RNA, 20 nt, Artificial Sequence
  Synthetic
aaguaacauaaguuucaucc

SEQ ID NO: 797381 - RNA, 20 nt, Artificial Sequence
  Synthetic
auaauugaaugcuaagaucc

SEQ ID NO: 797382 - RNA, 20 nt, Artificial Sequence
  Synthetic
ugggagauaagguaagaucc

SEQ ID NO: 797383 - RNA, 20 nt, Artificial Sequence
  Synthetic
ccucacauugccacagaucc

SEQ ID NO: 797384 - RNA, 20 nt, Artificial Sequence
  Synthetic
ccaucaucaggcacagaucc

SEQ ID NO: 797385 - RNA, 20 nt, Artificial Sequence
  Synthetic
caugcuuagcaaccagaucc

SEQ ID NO: 797386 - RNA, 20 nt, Artificial Sequence
  Synthetic
agugguaauuugugagaucc

SEQ ID NO: 797387 - RNA, 20 nt, Artificial Sequence
  Synthetic
cuccacccuagaguagaucc

SEQ ID NO: 797388 - RNA, 20 nt, Artificial Sequence
  Synthetic
aaauggugguuauuagaucc

SEQ ID NO: 797389 - RNA, 20 nt, Artificial Sequence
  Synthetic
uuugcuauccguggggaucc

SEQ ID NO: 797390 - RNA, 20 nt, Artificial Sequence
  Synthetic
agauauaaggcaaaugaucc

SEQ ID NO: 797391 - RNA, 20 nt, Artificial Sequence
  Synthetic
uaauuuuuggcaaaugaucc

SEQ ID NO: 797392 - RNA, 20 nt, Artificial Sequence
  Synthetic
uuaucaagcaaaacugaucc

SEQ ID NO: 797393 - RNA, 20 nt, Artificial Sequence
  Synthetic
cagaauuagaauacugaucc

SEQ ID NO: 797394 - RNA, 20 nt, Artificial Sequence
  Synthetic
caauaaccaaacagugaucc

SEQ ID NO: 797395 - RNA, 20 nt, Artificial Sequence
  Synthetic
ucacccccauuucuugaucc

SEQ ID NO: 797396 - RNA, 20 nt, Artificial Sequence
  Synthetic
auggggaaaacaguugaucc

SEQ ID NO: 797397 - RNA, 20 nt, Artificial Sequence
  Synthetic
ucaacuuuuauuuuugaucc

SEQ ID NO: 797398 - RNA, 20 nt, Artificial Sequence
  Synthetic
caagugguucauaaauaucc

SEQ ID NO: 797399 - RNA, 20 nt, Artificial Sequence
  Synthetic
aaagauggcacuaaauaucc

SEQ ID NO: 797400 - RNA, 20 nt, Artificial Sequence
  Synthetic
cagaauucauguaaauaucc

SEQ ID NO: 797401 - RNA, 20 nt, Artificial Sequence
  Synthetic
caaaauuucaaucaauaucc

SEQ ID NO: 797402 - RNA, 20 nt, Artificial Sequence
  Synthetic
uugugucaaugucaauaucc

SEQ ID NO: 797403 - RNA, 20 nt, Artificial Sequence
  Synthetic
cccacccacucauaauaucc

SEQ ID NO: 797404 - RNA, 20 nt, Artificial Sequence
  Synthetic
uaauacaacucuacauaucc

SEQ ID NO: 797405 - RNA, 20 nt, Artificial Sequence
  Synthetic
uugcagccuguagcauaucc

SEQ ID NO: 797406 - RNA, 20 nt, Artificial Sequence
  Synthetic
cauauuuuugaugcauaucc

SEQ ID NO: 797407 - RNA, 20 nt, Artificial Sequence
  Synthetic
uuuuacccagacagauaucc

SEQ ID NO: 797408 - RNA, 20 nt, Artificial Sequence
  Synthetic
auggaaaugucuagauaucc

SEQ ID NO: 797409 - RNA, 20 nt, Artificial Sequence
  Synthetic
uaaaaauaaauuagauaucc

SEQ ID NO: 797410 - RNA, 20 nt, Artificial Sequence
  Synthetic
uugccaaaccucugauaucc

SEQ ID NO: 797411 - RNA, 20 nt, Artificial Sequence
  Synthetic
aauuagaaaaacauauaucc

SEQ ID NO: 797412 - RNA, 20 nt, Artificial Sequence
  Synthetic
cagcaucacgccauauaucc

SEQ ID NO: 797413 - RNA, 20 nt, Artificial Sequence
  Synthetic
caucaucaugcacuauaucc

SEQ ID NO: 797414 - RNA, 20 nt, Artificial Sequence
  Synthetic
ucuauuuaucaucuauaucc

SEQ ID NO: 797415 - RNA, 20 nt, Artificial Sequence
  Synthetic
uuagcaaccaaauuauaucc

SEQ ID NO: 797416 - RNA, 20 nt, Artificial Sequence
  Synthetic
cuuucagcuucuuuauaucc

SEQ ID NO: 797417 - RNA, 20 nt, Artificial Sequence
  Synthetic
augcuuguauacaacuaucc

SEQ ID NO: 797418 - RNA, 20 nt, Artificial Sequence
  Synthetic
uaauaauuugaacacuaucc

SEQ ID NO: 797419 - RNA, 20 nt, Artificial Sequence
  Synthetic
cucaaguaauucuccuaucc

SEQ ID NO: 797420 - RNA, 20 nt, Artificial Sequence
  Synthetic
uuguggucacaaagcuaucc

SEQ ID NO: 797421 - RNA, 20 nt, Artificial Sequence
  Synthetic
aaagacagcuuuggcuaucc

SEQ ID NO: 797422 - RNA, 20 nt, Artificial Sequence
  Synthetic
ugugucuagaaaugcuaucc

SEQ ID NO: 797423 - RNA, 20 nt, Artificial Sequence
  Synthetic
agagagagauggaucuaucc

SEQ ID NO: 797424 - RNA, 20 nt, Artificial Sequence
  Synthetic
uucuuguuauaggucuaucc

SEQ ID NO: 797425 - RNA, 20 nt, Artificial Sequence
  Synthetic
auagauuuucauugguaucc

SEQ ID NO: 797426 - RNA, 20 nt, Artificial Sequence
  Synthetic
agcuacuugucaguguaucc

SEQ ID NO: 797427 - RNA, 20 nt, Artificial Sequence
  Synthetic
cuguaccccccauuguaucc

SEQ ID NO: 797428 - RNA, 20 nt, Artificial Sequence
  Synthetic
auaucuugucagaauuaucc

SEQ ID NO: 797429 - RNA, 20 nt, Artificial Sequence
  Synthetic
cacucugcaggauauuaucc

SEQ ID NO: 797430 - RNA, 20 nt, Artificial Sequence
  Synthetic
cacucuucagguuauuaucc

SEQ ID NO: 797431 - RNA, 20 nt, Artificial Sequence
  Synthetic
agcugcuacccaaguuaucc

SEQ ID NO: 797432 - RNA, 20 nt, Artificial Sequence
  Synthetic
ucucugaggacagguuaucc

SEQ ID NO: 797433 - RNA, 20 nt, Artificial Sequence
  Synthetic
ucuguaaucuuccuuuaucc

SEQ ID NO: 797434 - RNA, 20 nt, Artificial Sequence
  Synthetic
ucacugcagccucaaacucc

SEQ ID NO: 797435 - RNA, 20 nt, Artificial Sequence
  Synthetic
ccaggcugaucucaaacucc

SEQ ID NO: 797436 - RNA, 20 nt, Artificial Sequence
  Synthetic
ccaggcuggucucaaacucc

SEQ ID NO: 797437 - RNA, 20 nt, Artificial Sequence
  Synthetic
agaggauguauggaaacucc

SEQ ID NO: 797438 - RNA, 20 nt, Artificial Sequence
  Synthetic
uacugccuaggugaaacucc

SEQ ID NO: 797439 - RNA, 20 nt, Artificial Sequence
  Synthetic
ccaggcugguauccaacucc

SEQ ID NO: 797440 - RNA, 20 nt, Artificial Sequence
  Synthetic
ucacuguaaccuccaacucc

SEQ ID NO: 797441 - RNA, 20 nt, Artificial Sequence
  Synthetic
ugccuuaugggugcaacucc

SEQ ID NO: 797442 - RNA, 20 nt, Artificial Sequence
  Synthetic
ucuacuaaauccagaacucc

SEQ ID NO: 797443 - RNA, 20 nt, Artificial Sequence
  Synthetic
ucacugcagccucgaacucc

SEQ ID NO: 797444 - RNA, 20 nt, Artificial Sequence
  Synthetic
ccaggcuggccucgaacucc

SEQ ID NO: 797445 - RNA, 20 nt, Artificial Sequence
  Synthetic
ccaggcucgucucgaacucc

SEQ ID NO: 797446 - RNA, 20 nt, Artificial Sequence
  Synthetic
ccagacuggucucgaacucc

SEQ ID NO: 797447 - RNA, 20 nt, Artificial Sequence
  Synthetic
ccaggcuggucucgaacucc

SEQ ID NO: 797448 - RNA, 20 nt, Artificial Sequence
  Synthetic
ugguaucuuacaggaacucc

SEQ ID NO: 797449 - RNA, 20 nt, Artificial Sequence
  Synthetic
cacugagagucaggaacucc

SEQ ID NO: 797450 - RNA, 20 nt, Artificial Sequence
  Synthetic
cccagcagaaucugaacucc

SEQ ID NO: 797451 - RNA, 20 nt, Artificial Sequence
  Synthetic
ccaagcuggucuugaacucc

SEQ ID NO: 797452 - RNA, 20 nt, Artificial Sequence
  Synthetic
ccaggcuggucuugaacucc

SEQ ID NO: 797453 - RNA, 20 nt, Artificial Sequence
  Synthetic
ugaggcuggucuugaacucc

SEQ ID NO: 797454 - RNA, 20 nt, Artificial Sequence
  Synthetic
ccaggcuguucuugaacucc

SEQ ID NO: 797455 - RNA, 20 nt, Artificial Sequence
  Synthetic
ccaggcugguuuugaacucc

SEQ ID NO: 797456 - RNA, 20 nt, Artificial Sequence
  Synthetic
cugggcuggacucuaacucc

SEQ ID NO: 797457 - RNA, 20 nt, Artificial Sequence
  Synthetic
ccuuuuuaccauuuaacucc

SEQ ID NO: 797458 - RNA, 20 nt, Artificial Sequence
  Synthetic
ucaacauuuacaaacacucc

SEQ ID NO: 797459 - RNA, 20 nt, Artificial Sequence
  Synthetic
aucuugggccuggacacucc

SEQ ID NO: 797460 - RNA, 20 nt, Artificial Sequence
  Synthetic
cacuggcugugguccacucc

SEQ ID NO: 797461 - RNA, 20 nt, Artificial Sequence
  Synthetic
uggggaaaaaaaaucacucc

SEQ ID NO: 797462 - RNA, 20 nt, Artificial Sequence
  Synthetic
ucaaguuucucaaucacucc

SEQ ID NO: 797463 - RNA, 20 nt, Artificial Sequence
  Synthetic
ugauccagcaaccucacucc

SEQ ID NO: 797464 - RNA, 20 nt, Artificial Sequence
  Synthetic
auuugugguccaaagacucc

SEQ ID NO: 797465 - RNA, 20 nt, Artificial Sequence
  Synthetic
aacauuccacccaagacucc

SEQ ID NO: 797466 - RNA, 20 nt, Artificial Sequence
  Synthetic
agggccaacaccuagacucc

SEQ ID NO: 797467 - RNA, 20 nt, Artificial Sequence
  Synthetic
ccgggcugggaauggacucc

SEQ ID NO: 797468 - RNA, 20 nt, Artificial Sequence
  Synthetic
agacuuuggacuuggacucc

SEQ ID NO: 797469 - RNA, 20 nt, Artificial Sequence
  Synthetic
ccaggcuggucuuggacucc

SEQ ID NO: 797470 - RNA, 20 nt, Artificial Sequence
  Synthetic
uugagcaccuccuauacucc

SEQ ID NO: 797471 - RNA, 20 nt, Artificial Sequence
  Synthetic
cacuggaugugggcuacucc

SEQ ID NO: 797472 - RNA, 20 nt, Artificial Sequence
  Synthetic
ucauauagaauugcuacucc

SEQ ID NO: 797473 - RNA, 20 nt, Artificial Sequence
  Synthetic
caugagacagaaucuacucc

SEQ ID NO: 797474 - RNA, 20 nt, Artificial Sequence
  Synthetic
uguucacuccacuguacucc

SEQ ID NO: 797475 - RNA, 20 nt, Artificial Sequence
  Synthetic
aaugccuuaaagguuacucc

SEQ ID NO: 797476 - RNA, 20 nt, Artificial Sequence
  Synthetic
cucccaaaauauguuacucc

SEQ ID NO: 797477 - RNA, 20 nt, Artificial Sequence
  Synthetic
aaccugugggcuuuuacucc

SEQ ID NO: 797478 - RNA, 20 nt, Artificial Sequence
  Synthetic
acuaagaaugcccaaccucc

SEQ ID NO: 797479 - RNA, 20 nt, Artificial Sequence
  Synthetic
ucucggcucgcugaaccucc

SEQ ID NO: 797480 - RNA, 20 nt, Artificial Sequence
  Synthetic
ucacagcaaccuccaccucc

SEQ ID NO: 797481 - RNA, 20 nt, Artificial Sequence
  Synthetic
ucaccgcaaccuccaccucc

SEQ ID NO: 797482 - RNA, 20 nt, Artificial Sequence
  Synthetic
ucacugcaaccuccaccucc

SEQ ID NO: 797483 - RNA, 20 nt, Artificial Sequence
  Synthetic
cucacugcaccuccaccucc

SEQ ID NO: 797484 - RNA, 20 nt, Artificial Sequence
  Synthetic
ucaccgcaagcuccaccucc

SEQ ID NO: 797485 - RNA, 20 nt, Artificial Sequence
  Synthetic
ucacugcaagcuccaccucc

SEQ ID NO: 797486 - RNA, 20 nt, Artificial Sequence
  Synthetic
uuacugccgccuugaccucc

SEQ ID NO: 797487 - RNA, 20 nt, Artificial Sequence
  Synthetic
auacuucuggcgcuaccucc

SEQ ID NO: 797488 - RNA, 20 nt, Artificial Sequence
  Synthetic
ucacugcaacuucuaccucc

SEQ ID NO: 797489 - RNA, 20 nt, Artificial Sequence
  Synthetic
uacuuuauaaaauuaccucc

SEQ ID NO: 797490 - RNA, 20 nt, Artificial Sequence
  Synthetic
cacuguuuucauuuaccucc

SEQ ID NO: 797491 - RNA, 20 nt, Artificial Sequence
  Synthetic
uuuuaaauccacgacccucc

SEQ ID NO: 797492 - RNA, 20 nt, Artificial Sequence
  Synthetic
caggacccgaaggacccucc

SEQ ID NO: 797493 - RNA, 20 nt, Artificial Sequence
  Synthetic
ugcaaccucugucccccucc

SEQ ID NO: 797494 - RNA, 20 nt, Artificial Sequence
  Synthetic
ucucauuagugguccccucc

SEQ ID NO: 797495 - RNA, 20 nt, Artificial Sequence
  Synthetic
ugaguuucuacaagcccucc

SEQ ID NO: 797496 - RNA, 20 nt, Artificial Sequence
  Synthetic
ucacugcaaccucucccucc

SEQ ID NO: 797497 - RNA, 20 nt, Artificial Sequence
  Synthetic
ucucuaccuuccuucccucc

SEQ ID NO: 797498 - RNA, 20 nt, Artificial Sequence
  Synthetic
aucuuuuaacaaaagccucc

SEQ ID NO: 797499 - RNA, 20 nt, Artificial Sequence
  Synthetic
auaauucagucacagccucc

SEQ ID NO: 797500 - RNA, 20 nt, Artificial Sequence
  Synthetic
auccucccaccucagccucc

SEQ ID NO: 797501 - RNA, 20 nt, Artificial Sequence
  Synthetic
auucugguaccucagccucc

SEQ ID NO: 797502 - RNA, 20 nt, Artificial Sequence
  Synthetic
auucuccugccucagccucc

SEQ ID NO: 797503 - RNA, 20 nt, Artificial Sequence
  Synthetic
ucacugcaaacuccgccucc

SEQ ID NO: 797504 - RNA, 20 nt, Artificial Sequence
  Synthetic
ucacagcaaccuccgccucc

SEQ ID NO: 797505 - RNA, 20 nt, Artificial Sequence
  Synthetic
ucacugcaaccuccgccucc

SEQ ID NO: 797506 - RNA, 20 nt, Artificial Sequence
  Synthetic
ucgcugcaaccuccgccucc

SEQ ID NO: 797507 - RNA, 20 nt, Artificial Sequence
  Synthetic
ucagugcaaccuccgccucc

SEQ ID NO: 797508 - RNA, 20 nt, Artificial Sequence
  Synthetic
ucacugcagccuccgccucc

SEQ ID NO: 797509 - RNA, 20 nt, Artificial Sequence
  Synthetic
ucacugcaagcuccgccucc

SEQ ID NO: 797510 - RNA, 20 nt, Artificial Sequence
  Synthetic
cagcuucuggggaggccucc

SEQ ID NO: 797511 - RNA, 20 nt, Artificial Sequence
  Synthetic
uucauuugucuaaugccucc

SEQ ID NO: 797512 - RNA, 20 nt, Artificial Sequence
  Synthetic
ucaccacaaccuaugccucc

SEQ ID NO: 797513 - RNA, 20 nt, Artificial Sequence
  Synthetic
ucacugcaaccacugccucc

SEQ ID NO: 797514 - RNA, 20 nt, Artificial Sequence
  Synthetic
ucacugcaacaucugccucc

SEQ ID NO: 797515 - RNA, 20 nt, Artificial Sequence
  Synthetic
ucacugcaaacucugccucc

SEQ ID NO: 797516 - RNA, 20 nt, Artificial Sequence
  Synthetic
aacauggcuacucugccucc

SEQ ID NO: 797517 - RNA, 20 nt, Artificial Sequence
  Synthetic
ucacagcaaccucugccucc

SEQ ID NO: 797518 - RNA, 20 nt, Artificial Sequence
  Synthetic
ucacugcaaccucugccucc

SEQ ID NO: 797519 - RNA, 20 nt, Artificial Sequence
  Synthetic
uuacugcaaccucugccucc

SEQ ID NO: 797520 - RNA, 20 nt, Artificial Sequence
  Synthetic
ucacugcagccucugccucc

SEQ ID NO: 797521 - RNA, 20 nt, Artificial Sequence
  Synthetic
ucacugcaagcucugccucc

SEQ ID NO: 797522 - RNA, 20 nt, Artificial Sequence
  Synthetic
ucacugcaaccuuugccucc

SEQ ID NO: 797523 - RNA, 20 nt, Artificial Sequence
  Synthetic
auugccauggaaaauccucc

SEQ ID NO: 797524 - RNA, 20 nt, Artificial Sequence
  Synthetic
uugaaauucaggaauccucc

SEQ ID NO: 797525 - RNA, 20 nt, Artificial Sequence
  Synthetic
ucagacuucagagauccucc

SEQ ID NO: 797526 - RNA, 20 nt, Artificial Sequence
  Synthetic
aacugauuauaaacuccucc

SEQ ID NO: 797527 - RNA, 20 nt, Artificial Sequence
  Synthetic
uguuccuuggccacuccucc

SEQ ID NO: 797528 - RNA, 20 nt, Artificial Sequence
  Synthetic
ucugcuccucucucuccucc

SEQ ID NO: 797529 - RNA, 20 nt, Artificial Sequence
  Synthetic
uuuuuccuacuuaguccucc

SEQ ID NO: 797530 - RNA, 20 nt, Artificial Sequence
  Synthetic
cauuuagcauaagguccucc

SEQ ID NO: 797531 - RNA, 20 nt, Artificial Sequence
  Synthetic
cauuuaguauaauguccucc

SEQ ID NO: 797532 - RNA, 20 nt, Artificial Sequence
  Synthetic
cacuuaaccuaauguccucc

SEQ ID NO: 797533 - RNA, 20 nt, Artificial Sequence
  Synthetic
aucuucuuaaggcuuccucc

SEQ ID NO: 797534 - RNA, 20 nt, Artificial Sequence
  Synthetic
auuuuaccaucuguuccucc

SEQ ID NO: 797535 - RNA, 20 nt, Artificial Sequence
  Synthetic
cuucggugccucuuuccucc

SEQ ID NO: 797536 - RNA, 20 nt, Artificial Sequence
  Synthetic
uggguaaauaauuuuccucc

SEQ ID NO: 797537 - RNA, 20 nt, Artificial Sequence
  Synthetic
ccacuaugaguaaaagcucc

SEQ ID NO: 797538 - RNA, 20 nt, Artificial Sequence
  Synthetic
agaaggaaagcaacagcucc

SEQ ID NO: 797539 - RNA, 20 nt, Artificial Sequence
  Synthetic
ccuuucaaaaaaccagcucc

SEQ ID NO: 797540 - RNA, 20 nt, Artificial Sequence
  Synthetic
uggaugacuccaccagcucc

SEQ ID NO: 797541 - RNA, 20 nt, Artificial Sequence
  Synthetic
cuuuucaaaagaccagcucc

SEQ ID NO: 797542 - RNA, 20 nt, Artificial Sequence
  Synthetic
ucucuucuuccuccagcucc

SEQ ID NO: 797543 - RNA, 20 nt, Artificial Sequence
  Synthetic
ccauuucuaggcucagcucc

SEQ ID NO: 797544 - RNA, 20 nt, Artificial Sequence
  Synthetic
cagcaugcaagcagagcucc

SEQ ID NO: 797545 - RNA, 20 nt, Artificial Sequence
  Synthetic
ccgggaccuagcauagcucc

SEQ ID NO: 797546 - RNA, 20 nt, Artificial Sequence
  Synthetic
caccaaaacuuuauagcucc

SEQ ID NO: 797547 - RNA, 20 nt, Artificial Sequence
  Synthetic
aagcagccugaccuagcucc

SEQ ID NO: 797548 - RNA, 20 nt, Artificial Sequence
  Synthetic
cuaggaaaagcccuagcucc

SEQ ID NO: 797549 - RNA, 20 nt, Artificial Sequence
  Synthetic
aucuucaucuagguagcucc

SEQ ID NO: 797550 - RNA, 20 nt, Artificial Sequence
  Synthetic
caggcgugagccaccgcucc

SEQ ID NO: 797551 - RNA, 20 nt, Artificial Sequence
  Synthetic
acugagauggggaaggcucc

SEQ ID NO: 797552 - RNA, 20 nt, Artificial Sequence
  Synthetic
ugguaccauuuagaggcucc

SEQ ID NO: 797553 - RNA, 20 nt, Artificial Sequence
  Synthetic
cagcagugcugggaggcucc

SEQ ID NO: 797554 - RNA, 20 nt, Artificial Sequence
  Synthetic
caggcgugagccacggcucc

SEQ ID NO: 797555 - RNA, 20 nt, Artificial Sequence
  Synthetic
cccuaagacccaggggcucc

SEQ ID NO: 797556 - RNA, 20 nt, Artificial Sequence
  Synthetic
augugaaaucuuggggcucc

SEQ ID NO: 797557 - RNA, 20 nt, Artificial Sequence
  Synthetic
uucaauuaccucugggcucc

SEQ ID NO: 797558 - RNA, 20 nt, Artificial Sequence
  Synthetic
ucacaaaaucugugggcucc

SEQ ID NO: 797559 - RNA, 20 nt, Artificial Sequence
  Synthetic
acaagcccuuuaauggcucc

SEQ ID NO: 797560 - RNA, 20 nt, Artificial Sequence
  Synthetic
cuuuucaaaaaacuggcucc

SEQ ID NO: 797561 - RNA, 20 nt, Artificial Sequence
  Synthetic
acaggcauuugcuuggcucc

SEQ ID NO: 797562 - RNA, 20 nt, Artificial Sequence
  Synthetic
auagaagaaagaaaugcucc

SEQ ID NO: 797563 - RNA, 20 nt, Artificial Sequence
  Synthetic
acuucucaaggcaaugcucc

SEQ ID NO: 797564 - RNA, 20 nt, Artificial Sequence
  Synthetic
augauauagccuaaugcucc

SEQ ID NO: 797565 - RNA, 20 nt, Artificial Sequence
  Synthetic
ucagacaaaauaacugcucc

SEQ ID NO: 797566 - RNA, 20 nt, Artificial Sequence
  Synthetic
ucuggaaagcgaucugcucc

SEQ ID NO: 797567 - RNA, 20 nt, Artificial Sequence
  Synthetic
aaaacauaucauucugcucc

SEQ ID NO: 797568 - RNA, 20 nt, Artificial Sequence
  Synthetic
acuacacugcuuauugcucc

SEQ ID NO: 797569 - RNA, 20 nt, Artificial Sequence
  Synthetic
caaacauaucauuuugcucc

SEQ ID NO: 797570 - RNA, 20 nt, Artificial Sequence
  Synthetic
agaaucagauaaaaaucucc

SEQ ID NO: 797571 - RNA, 20 nt, Artificial Sequence
  Synthetic
uaaugcgcauacaaaucucc

SEQ ID NO: 797572 - RNA, 20 nt, Artificial Sequence
  Synthetic
aagacucuucucaaaucucc

SEQ ID NO: 797573 - RNA, 20 nt, Artificial Sequence
  Synthetic
cucuuaaaggcacaaucucc

SEQ ID NO: 797574 - RNA, 20 nt, Artificial Sequence
  Synthetic
aggcacccgagggaaucucc

SEQ ID NO: 797575 - RNA, 20 nt, Artificial Sequence
  Synthetic
uuagcuccacuggaaucucc

SEQ ID NO: 797576 - RNA, 20 nt, Artificial Sequence
  Synthetic
uuagagcugaaaacaucucc

SEQ ID NO: 797577 - RNA, 20 nt, Artificial Sequence
  Synthetic
cuuugugaaacuacaucucc

SEQ ID NO: 797578 - RNA, 20 nt, Artificial Sequence
  Synthetic
ucacugcaacuuccaucucc

SEQ ID NO: 797579 - RNA, 20 nt, Artificial Sequence
  Synthetic
ccucuuucuuuaucaucucc

SEQ ID NO: 797580 - RNA, 20 nt, Artificial Sequence
  Synthetic
uguuaaauuuccucaucucc

SEQ ID NO: 797581 - RNA, 20 nt, Artificial Sequence
  Synthetic
agaucucucccuucaucucc

SEQ ID NO: 797582 - RNA, 20 nt, Artificial Sequence
  Synthetic
ugcaguuuaguaagaucucc

SEQ ID NO: 797583 - RNA, 20 nt, Artificial Sequence
  Synthetic
agaaugacuuccugaucucc

SEQ ID NO: 797584 - RNA, 20 nt, Artificial Sequence
  Synthetic
agggcaaaaauccuaucucc

SEQ ID NO: 797585 - RNA, 20 nt, Artificial Sequence
  Synthetic
caucaauuggcuguaucucc

SEQ ID NO: 797586 - RNA, 20 nt, Artificial Sequence
  Synthetic
aaacauuggagaaacucucc

SEQ ID NO: 797587 - RNA, 20 nt, Artificial Sequence
  Synthetic
agucacacgaccaacucucc

SEQ ID NO: 797588 - RNA, 20 nt, Artificial Sequence
  Synthetic
cacuucauguuuaacucucc

SEQ ID NO: 797589 - RNA, 20 nt, Artificial Sequence
  Synthetic
uuaacuuauuaggacucucc

SEQ ID NO: 797590 - RNA, 20 nt, Artificial Sequence
  Synthetic
ucauauccacuucccucucc

SEQ ID NO: 797591 - RNA, 20 nt, Artificial Sequence
  Synthetic
uauguuuuaacaagcucucc

SEQ ID NO: 797592 - RNA, 20 nt, Artificial Sequence
  Synthetic
aacuaaguaauaagcucucc

SEQ ID NO: 797593 - RNA, 20 nt, Artificial Sequence
  Synthetic
uuuguugugaccagcucucc

SEQ ID NO: 797594 - RNA, 20 nt, Artificial Sequence
  Synthetic
ccaagguauugucucucucc

SEQ ID NO: 797595 - RNA, 20 nt, Artificial Sequence
  Synthetic
cuagcauccauucucucucc

SEQ ID NO: 797596 - RNA, 20 nt, Artificial Sequence
  Synthetic
uggguuguaagauucucucc

SEQ ID NO: 797597 - RNA, 20 nt, Artificial Sequence
  Synthetic
ccuguaaacaggaagucucc

SEQ ID NO: 797598 - RNA, 20 nt, Artificial Sequence
  Synthetic
cacuacccuucccagucucc

SEQ ID NO: 797599 - RNA, 20 nt, Artificial Sequence
  Synthetic
aaucagaaaggccagucucc

SEQ ID NO: 797600 - RNA, 20 nt, Artificial Sequence
  Synthetic
uuuuugaucugucagucucc

SEQ ID NO: 797601 - RNA, 20 nt, Artificial Sequence
  Synthetic
cagcaauuagcaaggucucc

SEQ ID NO: 797602 - RNA, 20 nt, Artificial Sequence
  Synthetic
uauuuugagacagggucucc

SEQ ID NO: 797603 - RNA, 20 nt, Artificial Sequence
  Synthetic
acaauggggaaaaugucucc

SEQ ID NO: 797604 - RNA, 20 nt, Artificial Sequence
  Synthetic
agaauagugagaaugucucc

SEQ ID NO: 797605 - RNA, 20 nt, Artificial Sequence
  Synthetic
acauucccaaacaugucucc

SEQ ID NO: 797606 - RNA, 20 nt, Artificial Sequence
  Synthetic
acaauggggaagaugucucc

SEQ ID NO: 797607 - RNA, 20 nt, Artificial Sequence
  Synthetic
ucacugcaaccucugucucc

SEQ ID NO: 797608 - RNA, 20 nt, Artificial Sequence
  Synthetic
ucuggagggccucugucucc

SEQ ID NO: 797609 - RNA, 20 nt, Artificial Sequence
  Synthetic
aauaugguagaauauucucc

SEQ ID NO: 797610 - RNA, 20 nt, Artificial Sequence
  Synthetic
uuuaccuucucuuauucucc

SEQ ID NO: 797611 - RNA, 20 nt, Artificial Sequence
  Synthetic
auagguuuaucuccuucucc

SEQ ID NO: 797612 - RNA, 20 nt, Artificial Sequence
  Synthetic
augugauuacuagcuucucc

SEQ ID NO: 797613 - RNA, 20 nt, Artificial Sequence
  Synthetic
ucugcagcaagugcuucucc

SEQ ID NO: 797614 - RNA, 20 nt, Artificial Sequence
  Synthetic
cuagauuggggaaguucucc

SEQ ID NO: 797615 - RNA, 20 nt, Artificial Sequence
  Synthetic
cuagguuggggaaguucucc

SEQ ID NO: 797616 - RNA, 20 nt, Artificial Sequence
  Synthetic
aaguaucaguucaguucucc

SEQ ID NO: 797617 - RNA, 20 nt, Artificial Sequence
  Synthetic
ugagacuauuuauguucucc

SEQ ID NO: 797618 - RNA, 20 nt, Artificial Sequence
  Synthetic
uuucucaugcugauuucucc

SEQ ID NO: 797619 - RNA, 20 nt, Artificial Sequence
  Synthetic
ugcacuguaaauauuucucc

SEQ ID NO: 797620 - RNA, 20 nt, Artificial Sequence
  Synthetic
cacuuacaccauauuucucc

SEQ ID NO: 797621 - RNA, 20 nt, Artificial Sequence
  Synthetic
ugccuucccagacuuucucc

SEQ ID NO: 797622 - RNA, 20 nt, Artificial Sequence
  Synthetic
cauacaaaaacccuuucucc

SEQ ID NO: 797623 - RNA, 20 nt, Artificial Sequence
  Synthetic
aaagcuaucuugcuuucucc

SEQ ID NO: 797624 - RNA, 20 nt, Artificial Sequence
  Synthetic
ugucucuccauucuuucucc

SEQ ID NO: 797625 - RNA, 20 nt, Artificial Sequence
  Synthetic
aauuuuauucuucuuucucc

SEQ ID NO: 797626 - RNA, 20 nt, Artificial Sequence
  Synthetic
aauucagccaaauuuucucc

SEQ ID NO: 797627 - RNA, 20 nt, Artificial Sequence
  Synthetic
aacagccuuaaauuuucucc

SEQ ID NO: 797628 - RNA, 20 nt, Artificial Sequence
  Synthetic
aguuuguauuuauuuucucc

SEQ ID NO: 797629 - RNA, 20 nt, Artificial Sequence
  Synthetic
cguuuucccaucuuuucucc

SEQ ID NO: 797630 - RNA, 20 nt, Artificial Sequence
  Synthetic
ccuucagcucucuuuucucc

SEQ ID NO: 797631 - RNA, 20 nt, Artificial Sequence
  Synthetic
aaauugccaaaaaaaagucc

SEQ ID NO: 797632 - RNA, 20 nt, Artificial Sequence
  Synthetic
cuacaaaccaaaaaaagucc

SEQ ID NO: 797633 - RNA, 20 nt, Artificial Sequence
  Synthetic
accuuggacucccaaagucc

SEQ ID NO: 797634 - RNA, 20 nt, Artificial Sequence
  Synthetic
cacacaccagucucaagucc

SEQ ID NO: 797635 - RNA, 20 nt, Artificial Sequence
  Synthetic
caacauaguauuggaagucc

SEQ ID NO: 797636 - RNA, 20 nt, Artificial Sequence
  Synthetic
ugauguggacgaugaagucc

SEQ ID NO: 797637 - RNA, 20 nt, Artificial Sequence
  Synthetic
ugauacgaacacugaagucc

SEQ ID NO: 797638 - RNA, 20 nt, Artificial Sequence
  Synthetic
uaagacuacuguaacagucc

SEQ ID NO: 797639 - RNA, 20 nt, Artificial Sequence
  Synthetic
agcauuuugugucacagucc

SEQ ID NO: 797640 - RNA, 20 nt, Artificial Sequence
  Synthetic
uauaaccccauccucagucc

SEQ ID NO: 797641 - RNA, 20 nt, Artificial Sequence
  Synthetic
uccaugccucaucucagucc

SEQ ID NO: 797642 - RNA, 20 nt, Artificial Sequence
  Synthetic
uuaccaaccaaaaagagucc

SEQ ID NO: 797643 - RNA, 20 nt, Artificial Sequence
  Synthetic
uugagaauaaagaagagucc

SEQ ID NO: 797644 - RNA, 20 nt, Artificial Sequence
  Synthetic
aacuuuaauaaugagagucc

SEQ ID NO: 797645 - RNA, 20 nt, Artificial Sequence
  Synthetic
ugguuuacaagugagagucc

SEQ ID NO: 797646 - RNA, 20 nt, Artificial Sequence
  Synthetic
agcaaauuuguugagagucc

SEQ ID NO: 797647 - RNA, 20 nt, Artificial Sequence
  Synthetic
uacucccugaacuagagucc

SEQ ID NO: 797648 - RNA, 20 nt, Artificial Sequence
  Synthetic
uuggugauugcaaggagucc

SEQ ID NO: 797649 - RNA, 20 nt, Artificial Sequence
  Synthetic
agguuaucuggcaggagucc

SEQ ID NO: 797650 - RNA, 20 nt, Artificial Sequence
  Synthetic
agauguuagcauaggagucc

SEQ ID NO: 797651 - RNA, 20 nt, Artificial Sequence
  Synthetic
ugggcagaucacuggagucc

SEQ ID NO: 797652 - RNA, 20 nt, Artificial Sequence
  Synthetic
cacuuaugauucaugagucc

SEQ ID NO: 797653 - RNA, 20 nt, Artificial Sequence
  Synthetic
cuucugggauuucugagucc

SEQ ID NO: 797654 - RNA, 20 nt, Artificial Sequence
  Synthetic
caggcagaucacuugagucc

SEQ ID NO: 797655 - RNA, 20 nt, Artificial Sequence
  Synthetic
ugggggggaaaaaguagucc

SEQ ID NO: 797656 - RNA, 20 nt, Artificial Sequence
  Synthetic
ucguuauuaaaauguagucc

SEQ ID NO: 797657 - RNA, 20 nt, Artificial Sequence
  Synthetic
aaagcaaguuaguguagucc

SEQ ID NO: 797658 - RNA, 20 nt, Artificial Sequence
  Synthetic
auaauuguuaaacuuagucc

SEQ ID NO: 797659 - RNA, 20 nt, Artificial Sequence
  Synthetic
uauuuaacauuuuuuagucc

SEQ ID NO: 797660 - RNA, 20 nt, Artificial Sequence
  Synthetic
cccauaacccccacacgucc

SEQ ID NO: 797661 - RNA, 20 nt, Artificial Sequence
  Synthetic
aggcggccgccaccacgucc

SEQ ID NO: 797662 - RNA, 20 nt, Artificial Sequence
  Synthetic
ucaggagaucgagaccgucc

SEQ ID NO: 797663 - RNA, 20 nt, Artificial Sequence
  Synthetic
auguuccccuuccugcgucc

SEQ ID NO: 797664 - RNA, 20 nt, Artificial Sequence
  Synthetic
caacaaaaaaacccaggucc

SEQ ID NO: 797665 - RNA, 20 nt, Artificial Sequence
  Synthetic
caucucacugaagcaggucc

SEQ ID NO: 797666 - RNA, 20 nt, Artificial Sequence
  Synthetic
uaguucucaaagggaggucc

SEQ ID NO: 797667 - RNA, 20 nt, Artificial Sequence
  Synthetic
ccaggagcuaugcuaggucc

SEQ ID NO: 797668 - RNA, 20 nt, Artificial Sequence
  Synthetic
caugaagaaaugguaggucc

SEQ ID NO: 797669 - RNA, 20 nt, Artificial Sequence
  Synthetic
ucaguccugaaaaggggucc

SEQ ID NO: 797670 - RNA, 20 nt, Artificial Sequence
  Synthetic
aggcuaaguugaaugggucc

SEQ ID NO: 797671 - RNA, 20 nt, Artificial Sequence
  Synthetic
auuuggucuggggugggucc

SEQ ID NO: 797672 - RNA, 20 nt, Artificial Sequence
  Synthetic
agaauuucuuucaauggucc

SEQ ID NO: 797673 - RNA, 20 nt, Artificial Sequence
  Synthetic
uacuagagaguuaauggucc

SEQ ID NO: 797674 - RNA, 20 nt, Artificial Sequence
  Synthetic
aacaaucuggggccuggucc

SEQ ID NO: 797675 - RNA, 20 nt, Artificial Sequence
  Synthetic
ugacuuuucccuccuggucc

SEQ ID NO: 797676 - RNA, 20 nt, Artificial Sequence
  Synthetic
ucuagcccugguccuggucc

SEQ ID NO: 797677 - RNA, 20 nt, Artificial Sequence
  Synthetic
aaugccaauacugcuggucc

SEQ ID NO: 797678 - RNA, 20 nt, Artificial Sequence
  Synthetic
cucaauggaaccucuggucc

SEQ ID NO: 797679 - RNA, 20 nt, Artificial Sequence
  Synthetic
uuuuugcucacagguggucc

SEQ ID NO: 797680 - RNA, 20 nt, Artificial Sequence
  Synthetic
aaugaacauauagguggucc

SEQ ID NO: 797681 - RNA, 20 nt, Artificial Sequence
  Synthetic
uauuucuuaaaauguggucc

SEQ ID NO: 797682 - RNA, 20 nt, Artificial Sequence
  Synthetic
cccuagaauauaauuggucc

SEQ ID NO: 797683 - RNA, 20 nt, Artificial Sequence
  Synthetic
caaaaauauuguauuggucc

SEQ ID NO: 797684 - RNA, 20 nt, Artificial Sequence
  Synthetic
ccagugaugacauuuggucc

SEQ ID NO: 797685 - RNA, 20 nt, Artificial Sequence
  Synthetic
auugaaauuugaaaaugucc

SEQ ID NO: 797686 - RNA, 20 nt, Artificial Sequence
  Synthetic
acaguaucauuagaaugucc

SEQ ID NO: 797687 - RNA, 20 nt, Artificial Sequence
  Synthetic
agauaauuaucaucaugucc

SEQ ID NO: 797688 - RNA, 20 nt, Artificial Sequence
  Synthetic
agggaaucugccagaugucc

SEQ ID NO: 797689 - RNA, 20 nt, Artificial Sequence
  Synthetic
aaguguuggaagggaugucc

SEQ ID NO: 797690 - RNA, 20 nt, Artificial Sequence
  Synthetic
auggaaacuccuggaugucc

SEQ ID NO: 797691 - RNA, 20 nt, Artificial Sequence
  Synthetic
augaagggaaaaauaugucc

SEQ ID NO: 797692 - RNA, 20 nt, Artificial Sequence
  Synthetic
cauuaauccauuguaugucc

SEQ ID NO: 797693 - RNA, 20 nt, Artificial Sequence
  Synthetic
cccuuuugggaaaacugucc

SEQ ID NO: 797694 - RNA, 20 nt, Artificial Sequence
  Synthetic
ucaagagaucgagacugucc

SEQ ID NO: 797695 - RNA, 20 nt, Artificial Sequence
  Synthetic
aaaacaacaaaguacugucc

SEQ ID NO: 797696 - RNA, 20 nt, Artificial Sequence
  Synthetic
aucacuuuuuuaaucugucc

SEQ ID NO: 797697 - RNA, 20 nt, Artificial Sequence
  Synthetic
caacagugugaugucugucc

SEQ ID NO: 797698 - RNA, 20 nt, Artificial Sequence
  Synthetic
uaaaggacucauuucugucc

SEQ ID NO: 797699 - RNA, 20 nt, Artificial Sequence
  Synthetic
cagaguacccuggagugucc

SEQ ID NO: 797700 - RNA, 20 nt, Artificial Sequence
  Synthetic
acugaagaaaaugagugucc

SEQ ID NO: 797701 - RNA, 20 nt, Artificial Sequence
  Synthetic
auggaaaagccuaggugucc

SEQ ID NO: 797702 - RNA, 20 nt, Artificial Sequence
  Synthetic
uggagguauagauggugucc

SEQ ID NO: 797703 - RNA, 20 nt, Artificial Sequence
  Synthetic
uaaguguuuagaaugugucc

SEQ ID NO: 797704 - RNA, 20 nt, Artificial Sequence
  Synthetic
cucacccuguugaugugucc

SEQ ID NO: 797705 - RNA, 20 nt, Artificial Sequence
  Synthetic
uugggaggguguaugugucc

SEQ ID NO: 797706 - RNA, 20 nt, Artificial Sequence
  Synthetic
cuauccacugagcugugucc

SEQ ID NO: 797707 - RNA, 20 nt, Artificial Sequence
  Synthetic
aaaagaaaugcagugugucc

SEQ ID NO: 797708 - RNA, 20 nt, Artificial Sequence
  Synthetic
ugcuugcuagauuugugucc

SEQ ID NO: 797709 - RNA, 20 nt, Artificial Sequence
  Synthetic
auuuguuacaagaauugucc

SEQ ID NO: 797710 - RNA, 20 nt, Artificial Sequence
  Synthetic
cacuggaagaagaauugucc

SEQ ID NO: 797711 - RNA, 20 nt, Artificial Sequence
  Synthetic
aaugccuauuauaauugucc

SEQ ID NO: 797712 - RNA, 20 nt, Artificial Sequence
  Synthetic
aaagauagauuagauugucc

SEQ ID NO: 797713 - RNA, 20 nt, Artificial Sequence
  Synthetic
uuucccuugccugauugucc

SEQ ID NO: 797714 - RNA, 20 nt, Artificial Sequence
  Synthetic
agagauuaaauauauugucc

SEQ ID NO: 797715 - RNA, 20 nt, Artificial Sequence
  Synthetic
uuaacuuaaguuacuugucc

SEQ ID NO: 797716 - RNA, 20 nt, Artificial Sequence
  Synthetic
aacucauagguugcuugucc

SEQ ID NO: 797717 - RNA, 20 nt, Artificial Sequence
  Synthetic
aaauuauguggaucuugucc

SEQ ID NO: 797718 - RNA, 20 nt, Artificial Sequence
  Synthetic
agaggcuaagugaguugucc

SEQ ID NO: 797719 - RNA, 20 nt, Artificial Sequence
  Synthetic
aggguuucaccauguugucc

SEQ ID NO: 797720 - RNA, 20 nt, Artificial Sequence
  Synthetic
cucucuuuccccuguugucc

SEQ ID NO: 797721 - RNA, 20 nt, Artificial Sequence
  Synthetic
uugauuggagaguguugucc

SEQ ID NO: 797722 - RNA, 20 nt, Artificial Sequence
  Synthetic
uucuuaacaguuauuugucc

SEQ ID NO: 797723 - RNA, 20 nt, Artificial Sequence
  Synthetic
auacuaccaaagcuuugucc

SEQ ID NO: 797724 - RNA, 20 nt, Artificial Sequence
  Synthetic
caugacugcuugguuugucc

SEQ ID NO: 797725 - RNA, 20 nt, Artificial Sequence
  Synthetic
aaagaaauaaacuuuugucc

SEQ ID NO: 797726 - RNA, 20 nt, Artificial Sequence
  Synthetic
aauucugauucaaaaauucc

SEQ ID NO: 797727 - RNA, 20 nt, Artificial Sequence
  Synthetic
uuucuugguaacaaaauucc

SEQ ID NO: 797728 - RNA, 20 nt, Artificial Sequence
  Synthetic
cuacccaauacgaaaauucc

SEQ ID NO: 797729 - RNA, 20 nt, Artificial Sequence
  Synthetic
uauauuugcauacaaauucc

SEQ ID NO: 797730 - RNA, 20 nt, Artificial Sequence
  Synthetic
augaagcacaaucaaauucc

SEQ ID NO: 797731 - RNA, 20 nt, Artificial Sequence
  Synthetic
aaaucuacaaaauaaauucc

SEQ ID NO: 797732 - RNA, 20 nt, Artificial Sequence
  Synthetic
cacacagggacauaaauucc

SEQ ID NO: 797733 - RNA, 20 nt, Artificial Sequence
  Synthetic
agaaaaaauggauaaauucc

SEQ ID NO: 797734 - RNA, 20 nt, Artificial Sequence
  Synthetic
aaaaaggucuguacaauucc

SEQ ID NO: 797735 - RNA, 20 nt, Artificial Sequence
  Synthetic
uauguaauaaagccaauucc

SEQ ID NO: 797736 - RNA, 20 nt, Artificial Sequence
  Synthetic
cuguaccugcugccaauucc

SEQ ID NO: 797737 - RNA, 20 nt, Artificial Sequence
  Synthetic
uuuucugguuuuccaauucc

SEQ ID NO: 797738 - RNA, 20 nt, Artificial Sequence
  Synthetic
cauuauuuguaaagaauucc

SEQ ID NO: 797739 - RNA, 20 nt, Artificial Sequence
  Synthetic
ccagucaucaggagaauucc

SEQ ID NO: 797740 - RNA, 20 nt, Artificial Sequence
  Synthetic
auccuuuagaacugaauucc

SEQ ID NO: 797741 - RNA, 20 nt, Artificial Sequence
  Synthetic
agugguugacauugaauucc

SEQ ID NO: 797742 - RNA, 20 nt, Artificial Sequence
  Synthetic
ucguggcagccuugaauucc

SEQ ID NO: 797743 - RNA, 20 nt, Artificial Sequence
  Synthetic
uuuaugcaccuuugaauucc

SEQ ID NO: 797744 - RNA, 20 nt, Artificial Sequence
  Synthetic
auggucauuuuccuaauucc

SEQ ID NO: 797745 - RNA, 20 nt, Artificial Sequence
  Synthetic
aauuugggcaaaaacauucc

SEQ ID NO: 797746 - RNA, 20 nt, Artificial Sequence
  Synthetic
uucugauaauaaaacauucc

SEQ ID NO: 797747 - RNA, 20 nt, Artificial Sequence
  Synthetic
acccugaucuuuaacauucc

SEQ ID NO: 797748 - RNA, 20 nt, Artificial Sequence
  Synthetic
ccacagcaccagcacauucc

SEQ ID NO: 797749 - RNA, 20 nt, Artificial Sequence
  Synthetic
ugugcaagcucagacauucc

SEQ ID NO: 797750 - RNA, 20 nt, Artificial Sequence
  Synthetic
ugaugguugccugacauucc

SEQ ID NO: 797751 - RNA, 20 nt, Artificial Sequence
  Synthetic
agaggaaauggauacauucc

SEQ ID NO: 797752 - RNA, 20 nt, Artificial Sequence
  Synthetic
cauuauuugaaaaccauucc

SEQ ID NO: 797753 - RNA, 20 nt, Artificial Sequence
  Synthetic
agucaugaggcccccauucc

SEQ ID NO: 797754 - RNA, 20 nt, Artificial Sequence
  Synthetic
aaagaccuggccuccauucc

SEQ ID NO: 797755 - RNA, 20 nt, Artificial Sequence
  Synthetic
uaugaaaaacauuccauucc

SEQ ID NO: 797756 - RNA, 20 nt, Artificial Sequence
  Synthetic
auguaggggcaaagcauucc

SEQ ID NO: 797757 - RNA, 20 nt, Artificial Sequence
  Synthetic
auuuggggaaagagcauucc

SEQ ID NO: 797758 - RNA, 20 nt, Artificial Sequence
  Synthetic
cucagcuauucuaucauucc

SEQ ID NO: 797759 - RNA, 20 nt, Artificial Sequence
  Synthetic
uucauuucuauucucauucc

SEQ ID NO: 797760 - RNA, 20 nt, Artificial Sequence
  Synthetic
caaagacauacagucauucc

SEQ ID NO: 797761 - RNA, 20 nt, Artificial Sequence
  Synthetic
cuggaacaaauuaagauucc

SEQ ID NO: 797762 - RNA, 20 nt, Artificial Sequence
  Synthetic
cuaagcuggucucagauucc

SEQ ID NO: 797763 - RNA, 20 nt, Artificial Sequence
  Synthetic
uuuuaggugccugagauucc

SEQ ID NO: 797764 - RNA, 20 nt, Artificial Sequence
  Synthetic
uuaaguuccuuauagauucc

SEQ ID NO: 797765 - RNA, 20 nt, Artificial Sequence
  Synthetic
uguuaucuguuaaggauucc

SEQ ID NO: 797766 - RNA, 20 nt, Artificial Sequence
  Synthetic
auuuccaaugcuuggauucc

SEQ ID NO: 797767 - RNA, 20 nt, Artificial Sequence
  Synthetic
ucucuaccacagaugauucc

SEQ ID NO: 797768 - RNA, 20 nt, Artificial Sequence
  Synthetic
ugagaagauuacuugauucc

SEQ ID NO: 797769 - RNA, 20 nt, Artificial Sequence
  Synthetic
uguggaaacuaguugauucc

SEQ ID NO: 797770 - RNA, 20 nt, Artificial Sequence
  Synthetic
uuaaggcugaaaaauauucc

SEQ ID NO: 797771 - RNA, 20 nt, Artificial Sequence
  Synthetic
uaagaacagugaaauauucc

SEQ ID NO: 797772 - RNA, 20 nt, Artificial Sequence
  Synthetic
acaucuugaaaacauauucc

SEQ ID NO: 797773 - RNA, 20 nt, Artificial Sequence
  Synthetic
aaugcauauguucauauucc

SEQ ID NO: 797774 - RNA, 20 nt, Artificial Sequence
  Synthetic
ccaaaaugugcauauauucc

SEQ ID NO: 797775 - RNA, 20 nt, Artificial Sequence
  Synthetic
uaaguacacaaguauauucc

SEQ ID NO: 797776 - RNA, 20 nt, Artificial Sequence
  Synthetic
aaauacugcuucacuauucc

SEQ ID NO: 797777 - RNA, 20 nt, Artificial Sequence
  Synthetic
uuuuaaaacucaucuauucc

SEQ ID NO: 797778 - RNA, 20 nt, Artificial Sequence
  Synthetic
augcuaaugaucucuauucc

SEQ ID NO: 797779 - RNA, 20 nt, Artificial Sequence
  Synthetic
acaacucaaagagguauucc

SEQ ID NO: 797780 - RNA, 20 nt, Artificial Sequence
  Synthetic
agaaagacgaaggguauucc

SEQ ID NO: 797781 - RNA, 20 nt, Artificial Sequence
  Synthetic
ugugugacaaguauuauucc

SEQ ID NO: 797782 - RNA, 20 nt, Artificial Sequence
  Synthetic
cagcaaucacucuuuauucc

SEQ ID NO: 797783 - RNA, 20 nt, Artificial Sequence
  Synthetic
cauguauauagguuuauucc

SEQ ID NO: 797784 - RNA, 20 nt, Artificial Sequence
  Synthetic
aauggacaagcaaaacuucc

SEQ ID NO: 797785 - RNA, 20 nt, Artificial Sequence
  Synthetic
ugccuuggcugcaaacuucc

SEQ ID NO: 797786 - RNA, 20 nt, Artificial Sequence
  Synthetic
ugggauuauuuacaacuucc

SEQ ID NO: 797787 - RNA, 20 nt, Artificial Sequence
  Synthetic
cuaggaauggguuaacuucc

SEQ ID NO: 797788 - RNA, 20 nt, Artificial Sequence
  Synthetic
ugucaaacauuuuaacuucc

SEQ ID NO: 797789 - RNA, 20 nt, Artificial Sequence
  Synthetic
accaaaaaagaaacacuucc

SEQ ID NO: 797790 - RNA, 20 nt, Artificial Sequence
  Synthetic
agcauucccaauccacuucc

SEQ ID NO: 797791 - RNA, 20 nt, Artificial Sequence
  Synthetic
acuauguguuaggcacuucc

SEQ ID NO: 797792 - RNA, 20 nt, Artificial Sequence
  Synthetic
ucacugcagccucgacuucc

SEQ ID NO: 797793 - RNA, 20 nt, Artificial Sequence
  Synthetic
acucuccuacugguacuucc

SEQ ID NO: 797794 - RNA, 20 nt, Artificial Sequence
  Synthetic
cugauacaaauuguacuucc

SEQ ID NO: 797795 - RNA, 20 nt, Artificial Sequence
  Synthetic
aaaacaaguuaguuacuucc

SEQ ID NO: 797796 - RNA, 20 nt, Artificial Sequence
  Synthetic
cugggauauggguuacuucc

SEQ ID NO: 797797 - RNA, 20 nt, Artificial Sequence
  Synthetic
ucaggagaaugguuacuucc

SEQ ID NO: 797798 - RNA, 20 nt, Artificial Sequence
  Synthetic
cccuucuuuuuccaccuucc

SEQ ID NO: 797799 - RNA, 20 nt, Artificial Sequence
  Synthetic
uuuaucucacugcaccuucc

SEQ ID NO: 797800 - RNA, 20 nt, Artificial Sequence
  Synthetic
uuuccagacaucacccuucc

SEQ ID NO: 797801 - RNA, 20 nt, Artificial Sequence
  Synthetic
auuuuuacauaaagccuucc

SEQ ID NO: 797802 - RNA, 20 nt, Artificial Sequence
  Synthetic
cacuuagcauaaugccuucc

SEQ ID NO: 797803 - RNA, 20 nt, Artificial Sequence
  Synthetic
uuacuuaaaaacugccuucc

SEQ ID NO: 797804 - RNA, 20 nt, Artificial Sequence
  Synthetic
cuccuaaggaugauccuucc

SEQ ID NO: 797805 - RNA, 20 nt, Artificial Sequence
  Synthetic
ugaaauuggaagcuccuucc

SEQ ID NO: 797806 - RNA, 20 nt, Artificial Sequence
  Synthetic
uuuuaaccacuauuccuucc

SEQ ID NO: 797807 - RNA, 20 nt, Artificial Sequence
  Synthetic
uguuuucacugaaagcuucc

SEQ ID NO: 797808 - RNA, 20 nt, Artificial Sequence
  Synthetic
ccucccaacuaccagcuucc

SEQ ID NO: 797809 - RNA, 20 nt, Artificial Sequence
  Synthetic
aaguucuuucuccagcuucc

SEQ ID NO: 797810 - RNA, 20 nt, Artificial Sequence
  Synthetic
acccuccuaccucagcuucc

SEQ ID NO: 797811 - RNA, 20 nt, Artificial Sequence
  Synthetic
caucuugaagcagagcuucc

SEQ ID NO: 797812 - RNA, 20 nt, Artificial Sequence
  Synthetic
acagaguccagugagcuucc

SEQ ID NO: 797813 - RNA, 20 nt, Artificial Sequence
  Synthetic
ucacugcaaccuccgcuucc

SEQ ID NO: 797814 - RNA, 20 nt, Artificial Sequence
  Synthetic
cagcugcaaauuuggcuucc

SEQ ID NO: 797815 - RNA, 20 nt, Artificial Sequence
  Synthetic
ucccuuucccuccugcuucc

SEQ ID NO: 797816 - RNA, 20 nt, Artificial Sequence
  Synthetic
ucuuuggguaagcugcuucc

SEQ ID NO: 797817 - RNA, 20 nt, Artificial Sequence
  Synthetic
cccugaccccuugugcuucc

SEQ ID NO: 797818 - RNA, 20 nt, Artificial Sequence
  Synthetic
uuaccaccuauaaaucuucc

SEQ ID NO: 797819 - RNA, 20 nt, Artificial Sequence
  Synthetic
cuggugagggccccucuucc

SEQ ID NO: 797820 - RNA, 20 nt, Artificial Sequence
  Synthetic
uguucugccacuccucuucc

SEQ ID NO: 797821 - RNA, 20 nt, Artificial Sequence
  Synthetic
augcuagcuaucucucuucc

SEQ ID NO: 797822 - RNA, 20 nt, Artificial Sequence
  Synthetic
ccuccuucugguucucuucc

SEQ ID NO: 797823 - RNA, 20 nt, Artificial Sequence
  Synthetic
uuuuauguuuuaagucuucc

SEQ ID NO: 797824 - RNA, 20 nt, Artificial Sequence
  Synthetic
cagaugaugugcagucuucc

SEQ ID NO: 797825 - RNA, 20 nt, Artificial Sequence
  Synthetic
uacaugccauuccgucuucc

SEQ ID NO: 797826 - RNA, 20 nt, Artificial Sequence
  Synthetic
cacaucuuugccauucuucc

SEQ ID NO: 797827 - RNA, 20 nt, Artificial Sequence
  Synthetic
ucagagauucaacuucuucc

SEQ ID NO: 797828 - RNA, 20 nt, Artificial Sequence
  Synthetic
ucagggauucaacuucuucc

SEQ ID NO: 797829 - RNA, 20 nt, Artificial Sequence
  Synthetic
agcaggcaguggcuucuucc

SEQ ID NO: 797830 - RNA, 20 nt, Artificial Sequence
  Synthetic
uaauucuuauuuguucuucc

SEQ ID NO: 797831 - RNA, 20 nt, Artificial Sequence
  Synthetic
ucagggauucgauuucuucc

SEQ ID NO: 797832 - RNA, 20 nt, Artificial Sequence
  Synthetic
aagauacuaauuuuucuucc

SEQ ID NO: 797833 - RNA, 20 nt, Artificial Sequence
  Synthetic
uugguaagguuaaaaguucc

SEQ ID NO: 797834 - RNA, 20 nt, Artificial Sequence
  Synthetic
auuuaaaauauuaaaguucc

SEQ ID NO: 797835 - RNA, 20 nt, Artificial Sequence
  Synthetic
aagauucacaccacaguucc

SEQ ID NO: 797836 - RNA, 20 nt, Artificial Sequence
  Synthetic
ucacugcuuccuccaguucc

SEQ ID NO: 797837 - RNA, 20 nt, Artificial Sequence
  Synthetic
ugugggagcagggcaguucc

SEQ ID NO: 797838 - RNA, 20 nt, Artificial Sequence
  Synthetic
ucuuccacaaaaucaguucc

SEQ ID NO: 797839 - RNA, 20 nt, Artificial Sequence
  Synthetic
cuggagguaaaaagaguucc

SEQ ID NO: 797840 - RNA, 20 nt, Artificial Sequence
  Synthetic
agagguugcuacagaguucc

SEQ ID NO: 797841 - RNA, 20 nt, Artificial Sequence
  Synthetic
acagaguacgccagaguucc

SEQ ID NO: 797842 - RNA, 20 nt, Artificial Sequence
  Synthetic
ccauuccaggcccuaguucc

SEQ ID NO: 797843 - RNA, 20 nt, Artificial Sequence
  Synthetic
uagugauguaauuuaguucc

SEQ ID NO: 797844 - RNA, 20 nt, Artificial Sequence
  Synthetic
cugguuucuauccagguucc

SEQ ID NO: 797845 - RNA, 20 nt, Artificial Sequence
  Synthetic
cgauuauauuagcagguucc

SEQ ID NO: 797846 - RNA, 20 nt, Artificial Sequence
  Synthetic
uuuucgucuuuugagguucc

SEQ ID NO: 797847 - RNA, 20 nt, Artificial Sequence
  Synthetic
augcugaugcugcugguucc

SEQ ID NO: 797848 - RNA, 20 nt, Artificial Sequence
  Synthetic
ucguucucaaaucugguucc

SEQ ID NO: 797849 - RNA, 20 nt, Artificial Sequence
  Synthetic
auccaugggggauugguucc

SEQ ID NO: 797850 - RNA, 20 nt, Artificial Sequence
  Synthetic
uggacauuuggauugguucc

SEQ ID NO: 797851 - RNA, 20 nt, Artificial Sequence
  Synthetic
agccaggcugaaaauguucc

SEQ ID NO: 797852 - RNA, 20 nt, Artificial Sequence
  Synthetic
uuguucucugucaauguucc

SEQ ID NO: 797853 - RNA, 20 nt, Artificial Sequence
  Synthetic
uaccagcaaaccacuguucc

SEQ ID NO: 797854 - RNA, 20 nt, Artificial Sequence
  Synthetic
ccauugaguggcacuguucc

SEQ ID NO: 797855 - RNA, 20 nt, Artificial Sequence
  Synthetic
cugguacuaagcgcuguucc

SEQ ID NO: 797856 - RNA, 20 nt, Artificial Sequence
  Synthetic
agaugugaauaugcuguucc

SEQ ID NO: 797857 - RNA, 20 nt, Artificial Sequence
  Synthetic
accagucucuuugcuguucc

SEQ ID NO: 797858 - RNA, 20 nt, Artificial Sequence
  Synthetic
cuauuugaaugaucuguucc

SEQ ID NO: 797859 - RNA, 20 nt, Artificial Sequence
  Synthetic
cugacccaaaauucuguucc

SEQ ID NO: 797860 - RNA, 20 nt, Artificial Sequence
  Synthetic
cauuuccuuauuucuguucc

SEQ ID NO: 797861 - RNA, 20 nt, Artificial Sequence
  Synthetic
caaguaggggagaguguucc

SEQ ID NO: 797862 - RNA, 20 nt, Artificial Sequence
  Synthetic
uuugcccaaaaucguguucc

SEQ ID NO: 797863 - RNA, 20 nt, Artificial Sequence
  Synthetic
uucuaucucgcugguguucc

SEQ ID NO: 797864 - RNA, 20 nt, Artificial Sequence
  Synthetic
ucuuuucuuaaauguguucc

SEQ ID NO: 797865 - RNA, 20 nt, Artificial Sequence
  Synthetic
cuuccagaauuauguguucc

SEQ ID NO: 797866 - RNA, 20 nt, Artificial Sequence
  Synthetic
uccacuuacaccauuguucc

SEQ ID NO: 797867 - RNA, 20 nt, Artificial Sequence
  Synthetic
aaauaauuuccaaaauuucc

SEQ ID NO: 797868 - RNA, 20 nt, Artificial Sequence
  Synthetic
uuccugggaauaaaauuucc

SEQ ID NO: 797869 - RNA, 20 nt, Artificial Sequence
  Synthetic
uaagguuuuaugaaauuucc

SEQ ID NO: 797870 - RNA, 20 nt, Artificial Sequence
  Synthetic
uacagcugaaggcaauuucc

SEQ ID NO: 797871 - RNA, 20 nt, Artificial Sequence
  Synthetic
uuguaucaacaucaauuucc

SEQ ID NO: 797872 - RNA, 20 nt, Artificial Sequence
  Synthetic
uuguguuaauaucaauuucc

SEQ ID NO: 797873 - RNA, 20 nt, Artificial Sequence
  Synthetic
cauaggaggucagaauuucc

SEQ ID NO: 797874 - RNA, 20 nt, Artificial Sequence
  Synthetic
uuaauccuucaugaauuucc

SEQ ID NO: 797875 - RNA, 20 nt, Artificial Sequence
  Synthetic
caauaauuugaauaauuucc

SEQ ID NO: 797876 - RNA, 20 nt, Artificial Sequence
  Synthetic
aagugauauacauaauuucc

SEQ ID NO: 797877 - RNA, 20 nt, Artificial Sequence
  Synthetic
aacaaagauacuuaauuucc

SEQ ID NO: 797878 - RNA, 20 nt, Artificial Sequence
  Synthetic
uaggguuggucuuaauuucc

SEQ ID NO: 797879 - RNA, 20 nt, Artificial Sequence
  Synthetic
ugaaaacuucuggcauuucc

SEQ ID NO: 797880 - RNA, 20 nt, Artificial Sequence
  Synthetic
agauuauuuuauucauuucc

SEQ ID NO: 797881 - RNA, 20 nt, Artificial Sequence
  Synthetic
aaucccauaucuagauuucc

SEQ ID NO: 797882 - RNA, 20 nt, Artificial Sequence
  Synthetic
aaucccuaaaaaggauuucc

SEQ ID NO: 797883 - RNA, 20 nt, Artificial Sequence
  Synthetic
uucuuaccuuuaggauuucc

SEQ ID NO: 797884 - RNA, 20 nt, Artificial Sequence
  Synthetic
cauccaaauaauggauuucc

SEQ ID NO: 797885 - RNA, 20 nt, Artificial Sequence
  Synthetic
uaaggcuaguaaugauuucc

SEQ ID NO: 797886 - RNA, 20 nt, Artificial Sequence
  Synthetic
aaaauuaaaaaaauauuucc

SEQ ID NO: 797887 - RNA, 20 nt, Artificial Sequence
  Synthetic
ugagacuucuuaauauuucc

SEQ ID NO: 797888 - RNA, 20 nt, Artificial Sequence
  Synthetic
ccaguaaguuuaauauuucc

SEQ ID NO: 797889 - RNA, 20 nt, Artificial Sequence
  Synthetic
auuauuuaacguauauuucc

SEQ ID NO: 797890 - RNA, 20 nt, Artificial Sequence
  Synthetic
uuuuuccaugcccuauuucc

SEQ ID NO: 797891 - RNA, 20 nt, Artificial Sequence
  Synthetic
cucuaucuuagucuauuucc

SEQ ID NO: 797892 - RNA, 20 nt, Artificial Sequence
  Synthetic
uuuaaaaaggauguauuucc

SEQ ID NO: 797893 - RNA, 20 nt, Artificial Sequence
  Synthetic
auacaaugacuauuauuucc

SEQ ID NO: 797894 - RNA, 20 nt, Artificial Sequence
  Synthetic
uugcuggaucucuuauuucc

SEQ ID NO: 797895 - RNA, 20 nt, Artificial Sequence
  Synthetic
uaauuuauaauuuuauuucc

SEQ ID NO: 797896 - RNA, 20 nt, Artificial Sequence
  Synthetic
auagcuauauuuuuauuucc

SEQ ID NO: 797897 - RNA, 20 nt, Artificial Sequence
  Synthetic
uaugaggaaauaaacuuucc

SEQ ID NO: 797898 - RNA, 20 nt, Artificial Sequence
  Synthetic
agagaguuaaguaacuuucc

SEQ ID NO: 797899 - RNA, 20 nt, Artificial Sequence
  Synthetic
ccuacacuuucccacuuucc

SEQ ID NO: 797900 - RNA, 20 nt, Artificial Sequence
  Synthetic
aguaguugcccauacuuucc

SEQ ID NO: 797901 - RNA, 20 nt, Artificial Sequence
  Synthetic
acuaucugagauuacuuucc

SEQ ID NO: 797902 - RNA, 20 nt, Artificial Sequence
  Synthetic
uaucacaagguuuacuuucc

SEQ ID NO: 797903 - RNA, 20 nt, Artificial Sequence
  Synthetic
cugacuucaguccccuuucc

SEQ ID NO: 797904 - RNA, 20 nt, Artificial Sequence
  Synthetic
uucaucuccaaagccuuucc

SEQ ID NO: 797905 - RNA, 20 nt, Artificial Sequence
  Synthetic
auacauagauacuccuuucc

SEQ ID NO: 797906 - RNA, 20 nt, Artificial Sequence
  Synthetic
uggauauuuagcuccuuucc

SEQ ID NO: 797907 - RNA, 20 nt, Artificial Sequence
  Synthetic
aacaccucugcuuccuuucc

SEQ ID NO: 797908 - RNA, 20 nt, Artificial Sequence
  Synthetic
aacuacaucauuggcuuucc

SEQ ID NO: 797909 - RNA, 20 nt, Artificial Sequence
  Synthetic
agggaaacuuguugcuuucc

SEQ ID NO: 797910 - RNA, 20 nt, Artificial Sequence
  Synthetic
ucaaggcaauacaucuuucc

SEQ ID NO: 797911 - RNA, 20 nt, Artificial Sequence
  Synthetic
uaagcuauguuuaucuuucc

SEQ ID NO: 797912 - RNA, 20 nt, Artificial Sequence
  Synthetic
caaucucaucaucucuuucc

SEQ ID NO: 797913 - RNA, 20 nt, Artificial Sequence
  Synthetic
aguuucagagcagucuuucc

SEQ ID NO: 797914 - RNA, 20 nt, Artificial Sequence
  Synthetic
aguuuuuuaguggucuuucc

SEQ ID NO: 797915 - RNA, 20 nt, Artificial Sequence
  Synthetic
uaccucucuccauucuuucc

SEQ ID NO: 797916 - RNA, 20 nt, Artificial Sequence
  Synthetic
aaugugaaacauuucuuucc

SEQ ID NO: 797917 - RNA, 20 nt, Artificial Sequence
  Synthetic
caguuaagguauuucuuucc

SEQ ID NO: 797918 - RNA, 20 nt, Artificial Sequence
  Synthetic
ugcacuuuaaaacaguuucc

SEQ ID NO: 797919 - RNA, 20 nt, Artificial Sequence
  Synthetic
ugccaagguuuucaguuucc

SEQ ID NO: 797920 - RNA, 20 nt, Artificial Sequence
  Synthetic
caguaguguuuguaguuucc

SEQ ID NO: 797921 - RNA, 20 nt, Artificial Sequence
  Synthetic
caaaauauaggcagguuucc

SEQ ID NO: 797922 - RNA, 20 nt, Artificial Sequence
  Synthetic
uaauagauauguggguuucc

SEQ ID NO: 797923 - RNA, 20 nt, Artificial Sequence
  Synthetic
aggaaggcaaaaugguuucc

SEQ ID NO: 797924 - RNA, 20 nt, Artificial Sequence
  Synthetic
uuuauacucaaaugguuucc

SEQ ID NO: 797925 - RNA, 20 nt, Artificial Sequence
  Synthetic
acaucaauuuccugguuucc

SEQ ID NO: 797926 - RNA, 20 nt, Artificial Sequence
  Synthetic
cauuuuaggcucugguuucc

SEQ ID NO: 797927 - RNA, 20 nt, Artificial Sequence
  Synthetic
uuuaccuaucagugguuucc

SEQ ID NO: 797928 - RNA, 20 nt, Artificial Sequence
  Synthetic
cuaaaauacccuugguuucc

SEQ ID NO: 797929 - RNA, 20 nt, Artificial Sequence
  Synthetic
acaugaacuuuuugguuucc

SEQ ID NO: 797930 - RNA, 20 nt, Artificial Sequence
  Synthetic
auuaugugaaauauguuucc

SEQ ID NO: 797931 - RNA, 20 nt, Artificial Sequence
  Synthetic
ccauuuuuguuccuguuucc

SEQ ID NO: 797932 - RNA, 20 nt, Artificial Sequence
  Synthetic
uaggaggguuguguguuucc

SEQ ID NO: 797933 - RNA, 20 nt, Artificial Sequence
  Synthetic
ucauuuuguucauuguuucc

SEQ ID NO: 797934 - RNA, 20 nt, Artificial Sequence
  Synthetic
uuuguauguauuuuguuucc

SEQ ID NO: 797935 - RNA, 20 nt, Artificial Sequence
  Synthetic
caucauccaacaaauuuucc

SEQ ID NO: 797936 - RNA, 20 nt, Artificial Sequence
  Synthetic
ugauauucaugaaauuuucc

SEQ ID NO: 797937 - RNA, 20 nt, Artificial Sequence
  Synthetic
auuuaaaauucuaauuuucc

SEQ ID NO: 797938 - RNA, 20 nt, Artificial Sequence
  Synthetic
uauuaucguucccauuuucc

SEQ ID NO: 797939 - RNA, 20 nt, Artificial Sequence
  Synthetic
cugaaacuuugccauuuucc

SEQ ID NO: 797940 - RNA, 20 nt, Artificial Sequence
  Synthetic
cuaaagccaucagauuuucc

SEQ ID NO: 797941 - RNA, 20 nt, Artificial Sequence
  Synthetic
ugaucuacuugagauuuucc

SEQ ID NO: 797942 - RNA, 20 nt, Artificial Sequence
  Synthetic
auguauaguuaugauuuucc

SEQ ID NO: 797943 - RNA, 20 nt, Artificial Sequence
  Synthetic
uauguguacacauauuuucc

SEQ ID NO: 797944 - RNA, 20 nt, Artificial Sequence
  Synthetic
acagucagcaccuauuuucc

SEQ ID NO: 797945 - RNA, 20 nt, Artificial Sequence
  Synthetic
cuuuuuacguuguauuuucc

SEQ ID NO: 797946 - RNA, 20 nt, Artificial Sequence
  Synthetic
uauuaauuuuauuauuuucc

SEQ ID NO: 797947 - RNA, 20 nt, Artificial Sequence
  Synthetic
uagaauugucuuacuuuucc

SEQ ID NO: 797948 - RNA, 20 nt, Artificial Sequence
  Synthetic
ucuaggaugaucccuuuucc

SEQ ID NO: 797949 - RNA, 20 nt, Artificial Sequence
  Synthetic
uuuauguaaaugccuuuucc

SEQ ID NO: 797950 - RNA, 20 nt, Artificial Sequence
  Synthetic
ugagugucugcagcuuuucc

SEQ ID NO: 797951 - RNA, 20 nt, Artificial Sequence
  Synthetic
uuuaguugcugcucuuuucc

SEQ ID NO: 797952 - RNA, 20 nt, Artificial Sequence
  Synthetic
auauaauugcuuucuuuucc

SEQ ID NO: 797953 - RNA, 20 nt, Artificial Sequence
  Synthetic
ugcauauuaacaaguuuucc

SEQ ID NO: 797954 - RNA, 20 nt, Artificial Sequence
  Synthetic
agauggcaucuuaguuuucc

SEQ ID NO: 797955 - RNA, 20 nt, Artificial Sequence
  Synthetic
uuuuagaaguuugguuuucc

SEQ ID NO: 797956 - RNA, 20 nt, Artificial Sequence
  Synthetic
uuuauaugcaaauguuuucc

SEQ ID NO: 797957 - RNA, 20 nt, Artificial Sequence
  Synthetic
aucuuauuuggauguuuucc

SEQ ID NO: 797958 - RNA, 20 nt, Artificial Sequence
  Synthetic
ccuaucccugucauuuuucc

SEQ ID NO: 797959 - RNA, 20 nt, Artificial Sequence
  Synthetic
ucaaaaaguuggauuuuucc

SEQ ID NO: 797960 - RNA, 20 nt, Artificial Sequence
  Synthetic
aggaugacuccccuuuuucc

SEQ ID NO: 797961 - RNA, 20 nt, Artificial Sequence
  Synthetic
aaaaguuuccuucuuuuucc

SEQ ID NO: 797962 - RNA, 20 nt, Artificial Sequence
  Synthetic
cuucucuuguucguuuuucc

SEQ ID NO: 797963 - RNA, 20 nt, Artificial Sequence
  Synthetic
aaucucaaagaauuuuuucc

SEQ ID NO: 797964 - RNA, 20 nt, Artificial Sequence
  Synthetic
ucacucucuuacuuuuuucc

SEQ ID NO: 797965 - RNA, 20 nt, Artificial Sequence
  Synthetic
ccuuuaugacauuuuuuucc

SEQ ID NO: 797966 - RNA, 20 nt, Artificial Sequence
  Synthetic
uuuagcccaucuuuuuuucc

SEQ ID NO: 797967 - RNA, 20 nt, Artificial Sequence
  Synthetic
caguuuuuucuuuuuuuucc

SEQ ID NO: 797968 - RNA, 20 nt, Artificial Sequence
  Synthetic
uuuacagcauuuuuuuuucc

SEQ ID NO: 797969 - RNA, 20 nt, Artificial Sequence
  Synthetic
uagauauuuuuuuuuuuucc

SEQ ID NO: 797970 - RNA, 20 nt, Artificial Sequence
  Synthetic
aauggaaagaaaaaaaaagc

SEQ ID NO: 797971 - RNA, 20 nt, Artificial Sequence
  Synthetic
ugcaaacaaaauaaaaaagc

SEQ ID NO: 797972 - RNA, 20 nt, Artificial Sequence
  Synthetic
aauucuaacucccaaaaagc

SEQ ID NO: 797973 - RNA, 20 nt, Artificial Sequence
  Synthetic
uuauuucuuuggcaaaaagc

SEQ ID NO: 797974 - RNA, 20 nt, Artificial Sequence
  Synthetic
auuguuugcucucaaaaagc

SEQ ID NO: 797975 - RNA, 20 nt, Artificial Sequence
  Synthetic
uucuuugggggugaaaaagc

SEQ ID NO: 797976 - RNA, 20 nt, Artificial Sequence
  Synthetic
auauaccugcaauaaaaagc

SEQ ID NO: 797977 - RNA, 20 nt, Artificial Sequence
  Synthetic
uuagaggcagaauaaaaagc

SEQ ID NO: 797978 - RNA, 20 nt, Artificial Sequence
  Synthetic
acuuaugggugauaaaaagc

SEQ ID NO: 797979 - RNA, 20 nt, Artificial Sequence
  Synthetic
cuuaaccaauggacaaaagc

SEQ ID NO: 797980 - RNA, 20 nt, Artificial Sequence
  Synthetic
cauacugaaugggcaaaagc

SEQ ID NO: 797981 - RNA, 20 nt, Artificial Sequence
  Synthetic
agaggaauuuucucaaaagc

SEQ ID NO: 797982 - RNA, 20 nt, Artificial Sequence
  Synthetic
uguaggaagacuucaaaagc

SEQ ID NO: 797983 - RNA, 20 nt, Artificial Sequence
  Synthetic
auaucagaacuuucaaaagc

SEQ ID NO: 797984 - RNA, 20 nt, Artificial Sequence
  Synthetic
caaggcucucuuucaaaagc

SEQ ID NO: 797985 - RNA, 20 nt, Artificial Sequence
  Synthetic
aauuucauccaaggaaaagc

SEQ ID NO: 797986 - RNA, 20 nt, Artificial Sequence
  Synthetic
aaauuaagucucugaaaagc

SEQ ID NO: 797987 - RNA, 20 nt, Artificial Sequence
  Synthetic
ucuuaaaggaugcuaaaagc

SEQ ID NO: 797988 - RNA, 20 nt, Artificial Sequence
  Synthetic
ugcaggcaggcucuaaaagc

SEQ ID NO: 797989 - RNA, 20 nt, Artificial Sequence
  Synthetic
agauaagugcauguaaaagc

SEQ ID NO: 797990 - RNA, 20 nt, Artificial Sequence
  Synthetic
aaauuuucauuauuaaaagc

SEQ ID NO: 797991 - RNA, 20 nt, Artificial Sequence
  Synthetic
aacauguagacaaacaaagc

SEQ ID NO: 797992 - RNA, 20 nt, Artificial Sequence
  Synthetic
uuuagcuuuauaaacaaagc

SEQ ID NO: 797993 - RNA, 20 nt, Artificial Sequence
  Synthetic
cuuauaaauaucaacaaagc

SEQ ID NO: 797994 - RNA, 20 nt, Artificial Sequence
  Synthetic
cuaagcaaaaagaacaaagc

SEQ ID NO: 797995 - RNA, 20 nt, Artificial Sequence
  Synthetic
cuaagccaaaagaacaaagc

SEQ ID NO: 797996 - RNA, 20 nt, Artificial Sequence
  Synthetic
cugagccaaaagaacaaagc

SEQ ID NO: 797997 - RNA, 20 nt, Artificial Sequence
  Synthetic
cuaaguaaaaugaacaaagc

SEQ ID NO: 797998 - RNA, 20 nt, Artificial Sequence
  Synthetic
cuaagcaagaauaacaaagc

SEQ ID NO: 797999 - RNA, 20 nt, Artificial Sequence
  Synthetic
ucaaaucaaugccacaaagc

SEQ ID NO: 798000 - RNA, 20 nt, Artificial Sequence
  Synthetic
uggagaugguuuuacaaagc

SEQ ID NO: 798001 - RNA, 20 nt, Artificial Sequence
  Synthetic
caucauucugauaccaaagc

SEQ ID NO: 798002 - RNA, 20 nt, Artificial Sequence
  Synthetic
agcuaggcauauaccaaagc

SEQ ID NO: 798003 - RNA, 20 nt, Artificial Sequence
  Synthetic
aaguuaaaaugccccaaagc

SEQ ID NO: 798004 - RNA, 20 nt, Artificial Sequence
  Synthetic
aaacgucuuuccuccaaagc

SEQ ID NO: 798005 - RNA, 20 nt, Artificial Sequence
  Synthetic
caagguucucuaagcaaagc

SEQ ID NO: 798006 - RNA, 20 nt, Artificial Sequence
  Synthetic
uauucagaagacagcaaagc

SEQ ID NO: 798007 - RNA, 20 nt, Artificial Sequence
  Synthetic
uucacagcaguaggcaaagc

SEQ ID NO: 798008 - RNA, 20 nt, Artificial Sequence
  Synthetic
uuucaccauauuggcaaagc

SEQ ID NO: 798009 - RNA, 20 nt, Artificial Sequence
  Synthetic
ucaucccugggaugcaaagc

SEQ ID NO: 798010 - RNA, 20 nt, Artificial Sequence
  Synthetic
ucaaccaaucagcucaaagc

SEQ ID NO: 798011 - RNA, 20 nt, Artificial Sequence
  Synthetic
acugugaagcucuucaaagc

SEQ ID NO: 798012 - RNA, 20 nt, Artificial Sequence
  Synthetic
cuaacuucuccaaagaaagc

SEQ ID NO: 798013 - RNA, 20 nt, Artificial Sequence
  Synthetic
auagcucugaaucagaaagc

SEQ ID NO: 798014 - RNA, 20 nt, Artificial Sequence
  Synthetic
aaaugccuacaagagaaagc

SEQ ID NO: 798015 - RNA, 20 nt, Artificial Sequence
  Synthetic
caacccaaggaagagaaagc

SEQ ID NO: 798016 - RNA, 20 nt, Artificial Sequence
  Synthetic
aaauccccacaggagaaagc

SEQ ID NO: 798017 - RNA, 20 nt, Artificial Sequence
  Synthetic
aaggcaacugcuuagaaagc

SEQ ID NO: 798018 - RNA, 20 nt, Artificial Sequence
  Synthetic
caaaaucagcaaaggaaagc

SEQ ID NO: 798019 - RNA, 20 nt, Artificial Sequence
  Synthetic
uuacaaauggaaaggaaagc

SEQ ID NO: 798020 - RNA, 20 nt, Artificial Sequence
  Synthetic
aggaagagaggaaggaaagc

SEQ ID NO: 798021 - RNA, 20 nt, Artificial Sequence
  Synthetic
uacaggcaggggaggaaagc

SEQ ID NO: 798022 - RNA, 20 nt, Artificial Sequence
  Synthetic
aauauaucuucggggaaagc

SEQ ID NO: 798023 - RNA, 20 nt, Artificial Sequence
  Synthetic
aaccaagacacugggaaagc

SEQ ID NO: 798024 - RNA, 20 nt, Artificial Sequence
  Synthetic
ccaaaaugaagaaugaaagc

SEQ ID NO: 798025 - RNA, 20 nt, Artificial Sequence
  Synthetic
acaaugugaagaaugaaagc

SEQ ID NO: 798026 - RNA, 20 nt, Artificial Sequence
  Synthetic
uuuaugggauaagugaaagc

SEQ ID NO: 798027 - RNA, 20 nt, Artificial Sequence
  Synthetic
caacccccaaucuugaaagc

SEQ ID NO: 798028 - RNA, 20 nt, Artificial Sequence
  Synthetic
auccauauuggaaauaaagc

SEQ ID NO: 798029 - RNA, 20 nt, Artificial Sequence
  Synthetic
aaugcuggagagaauaaagc

SEQ ID NO: 798030 - RNA, 20 nt, Artificial Sequence
  Synthetic
auuuuugugcaccauaaagc

SEQ ID NO: 798031 - RNA, 20 nt, Artificial Sequence
  Synthetic
auauuuuaaaaggauaaagc

SEQ ID NO: 798032 - RNA, 20 nt, Artificial Sequence
  Synthetic
ugaagggacauggauaaagc

SEQ ID NO: 798033 - RNA, 20 nt, Artificial Sequence
  Synthetic
aaagaccuugcugauaaagc

SEQ ID NO: 798034 - RNA, 20 nt, Artificial Sequence
  Synthetic
cugaggagcaaaacuaaagc

SEQ ID NO: 798035 - RNA, 20 nt, Artificial Sequence
  Synthetic
uacgugcuuucuccuaaagc

SEQ ID NO: 798036 - RNA, 20 nt, Artificial Sequence
  Synthetic
uaacauuugcuuucuaaagc

SEQ ID NO: 798037 - RNA, 20 nt, Artificial Sequence
  Synthetic
aaugugcaguguguuaaagc

SEQ ID NO: 798038 - RNA, 20 nt, Artificial Sequence
  Synthetic
uagaauaaauucuuuaaagc

SEQ ID NO: 798039 - RNA, 20 nt, Artificial Sequence
  Synthetic
uccacugaaagguuuaaagc

SEQ ID NO: 798040 - RNA, 20 nt, Artificial Sequence
  Synthetic
aguuauuagaauuuuaaagc

SEQ ID NO: 798041 - RNA, 20 nt, Artificial Sequence
  Synthetic
caaaguuggcauuuuaaagc

SEQ ID NO: 798042 - RNA, 20 nt, Artificial Sequence
  Synthetic
uuagaauuaauuuuuaaagc

SEQ ID NO: 798043 - RNA, 20 nt, Artificial Sequence
  Synthetic
uucuaaaauucuaaacaagc

SEQ ID NO: 798044 - RNA, 20 nt, Artificial Sequence
  Synthetic
ugcucugaagauuaacaagc

SEQ ID NO: 798045 - RNA, 20 nt, Artificial Sequence
  Synthetic
aauagguauauuuaacaagc

SEQ ID NO: 798046 - RNA, 20 nt, Artificial Sequence
  Synthetic
aaaaaugcuccaacacaagc

SEQ ID NO: 798047 - RNA, 20 nt, Artificial Sequence
  Synthetic
cguaaaacccccacacaagc

SEQ ID NO: 798048 - RNA, 20 nt, Artificial Sequence
  Synthetic
cacuuucuccuuacacaagc

SEQ ID NO: 798049 - RNA, 20 nt, Artificial Sequence
  Synthetic
uguaacaaauuaccacaagc

SEQ ID NO: 798050 - RNA, 20 nt, Artificial Sequence
  Synthetic
acuuaaagaccuagacaagc

SEQ ID NO: 798051 - RNA, 20 nt, Artificial Sequence
  Synthetic
auuuucugagaaauacaagc

SEQ ID NO: 798052 - RNA, 20 nt, Artificial Sequence
  Synthetic
aaaacccaccaaaaccaagc

SEQ ID NO: 798053 - RNA, 20 nt, Artificial Sequence
  Synthetic
uagaaguaaggagaccaagc

SEQ ID NO: 798054 - RNA, 20 nt, Artificial Sequence
  Synthetic
acguggaaggggacccaagc

SEQ ID NO: 798055 - RNA, 20 nt, Artificial Sequence
  Synthetic
uuuucccugagcccccaagc

SEQ ID NO: 798056 - RNA, 20 nt, Artificial Sequence
  Synthetic
ucucacccugcugcccaagc

SEQ ID NO: 798057 - RNA, 20 nt, Artificial Sequence
  Synthetic
auguugcuaugugcccaagc

SEQ ID NO: 798058 - RNA, 20 nt, Artificial Sequence
  Synthetic
aucuuucuauccauccaagc

SEQ ID NO: 798059 - RNA, 20 nt, Artificial Sequence
  Synthetic
uugguugccauucuccaagc

SEQ ID NO: 798060 - RNA, 20 nt, Artificial Sequence
  Synthetic
aaugggaaccaaaagcaagc

SEQ ID NO: 798061 - RNA, 20 nt, Artificial Sequence
  Synthetic
uacagggugaacaagcaagc

SEQ ID NO: 798062 - RNA, 20 nt, Artificial Sequence
  Synthetic
aaaagaaaaaccaagcaagc

SEQ ID NO: 798063 - RNA, 20 nt, Artificial Sequence
  Synthetic
aagauuuacagucagcaagc

SEQ ID NO: 798064 - RNA, 20 nt, Artificial Sequence
  Synthetic
uuucacuauguugggcaagc

SEQ ID NO: 798065 - RNA, 20 nt, Artificial Sequence
  Synthetic
ucccaaagcaaaaugcaagc

SEQ ID NO: 798066 - RNA, 20 nt, Artificial Sequence
  Synthetic
uaguuggaaagaaugcaagc

SEQ ID NO: 798067 - RNA, 20 nt, Artificial Sequence
  Synthetic
auauacuucuuuaugcaagc

SEQ ID NO: 798068 - RNA, 20 nt, Artificial Sequence
  Synthetic
aguaucacagaccugcaagc

SEQ ID NO: 798069 - RNA, 20 nt, Artificial Sequence
  Synthetic
ucaaaugaaaguuugcaagc

SEQ ID NO: 798070 - RNA, 20 nt, Artificial Sequence
  Synthetic
ugcagcauauaaaaucaagc

SEQ ID NO: 798071 - RNA, 20 nt, Artificial Sequence
  Synthetic
uuauaugccagagaucaagc

SEQ ID NO: 798072 - RNA, 20 nt, Artificial Sequence
  Synthetic
uugcauaccagcuaucaagc

SEQ ID NO: 798073 - RNA, 20 nt, Artificial Sequence
  Synthetic
agcaguucucccccucaagc

SEQ ID NO: 798074 - RNA, 20 nt, Artificial Sequence
  Synthetic
ucucauucuggggcucaagc

SEQ ID NO: 798075 - RNA, 20 nt, Artificial Sequence
  Synthetic
uauguaucggaaucucaagc

SEQ ID NO: 798076 - RNA, 20 nt, Artificial Sequence
  Synthetic
agcacugagcuuucucaagc

SEQ ID NO: 798077 - RNA, 20 nt, Artificial Sequence
  Synthetic
cuagauuguaaaagucaagc

SEQ ID NO: 798078 - RNA, 20 nt, Artificial Sequence
  Synthetic
ugacuaaaguuuagucaagc

SEQ ID NO: 798079 - RNA, 20 nt, Artificial Sequence
  Synthetic
aaauguuaguuaggucaagc

SEQ ID NO: 798080 - RNA, 20 nt, Artificial Sequence
  Synthetic
uuucuccacguuggucaagc

SEQ ID NO: 798081 - RNA, 20 nt, Artificial Sequence
  Synthetic
aaggugaaaauuugucaagc

SEQ ID NO: 798082 - RNA, 20 nt, Artificial Sequence
  Synthetic
cuucccacuuaauuucaagc

SEQ ID NO: 798083 - RNA, 20 nt, Artificial Sequence
  Synthetic
aggauuugcauaaaagaagc

SEQ ID NO: 798084 - RNA, 20 nt, Artificial Sequence
  Synthetic
cauuuuccaggcaaagaagc

SEQ ID NO: 798085 - RNA, 20 nt, Artificial Sequence
  Synthetic
aaguuauacguucaagaagc

SEQ ID NO: 798086 - RNA, 20 nt, Artificial Sequence
  Synthetic
caacuacugugugaagaagc

SEQ ID NO: 798087 - RNA, 20 nt, Artificial Sequence
  Synthetic
uucacuucauuugaagaagc

SEQ ID NO: 798088 - RNA, 20 nt, Artificial Sequence
  Synthetic
auaauugagcaaacagaagc

SEQ ID NO: 798089 - RNA, 20 nt, Artificial Sequence
  Synthetic
ugcaggcaaggcacagaagc

SEQ ID NO: 798090 - RNA, 20 nt, Artificial Sequence
  Synthetic
caccuggggcuaccagaagc

SEQ ID NO: 798091 - RNA, 20 nt, Artificial Sequence
  Synthetic
uuugagaagacagcagaagc

SEQ ID NO: 798092 - RNA, 20 nt, Artificial Sequence
  Synthetic
accggcgaaauagcagaagc

SEQ ID NO: 798093 - RNA, 20 nt, Artificial Sequence
  Synthetic
uguuguuauguggcagaagc

SEQ ID NO: 798094 - RNA, 20 nt, Artificial Sequence
  Synthetic
cagguggagacaucagaagc

SEQ ID NO: 798095 - RNA, 20 nt, Artificial Sequence
  Synthetic
cauaacauauggucagaagc

SEQ ID NO: 798096 - RNA, 20 nt, Artificial Sequence
  Synthetic
uggaggauuaaaagagaagc

SEQ ID NO: 798097 - RNA, 20 nt, Artificial Sequence
  Synthetic
cuuuaaguaggaagagaagc

SEQ ID NO: 798098 - RNA, 20 nt, Artificial Sequence
  Synthetic
ccacagaaaggcagagaagc

SEQ ID NO: 798099 - RNA, 20 nt, Artificial Sequence
  Synthetic
agagagagagagagagaagc

SEQ ID NO: 798100 - RNA, 20 nt, Artificial Sequence
  Synthetic
aaaaagggagugagagaagc

SEQ ID NO: 798101 - RNA, 20 nt, Artificial Sequence
  Synthetic
augcuaucauugggagaagc

SEQ ID NO: 798102 - RNA, 20 nt, Artificial Sequence
  Synthetic
ucaaaaagauuccuagaagc

SEQ ID NO: 798103 - RNA, 20 nt, Artificial Sequence
  Synthetic
auaccuggccuucuagaagc

SEQ ID NO: 798104 - RNA, 20 nt, Artificial Sequence
  Synthetic
ucaagagagggcuuagaagc

SEQ ID NO: 798105 - RNA, 20 nt, Artificial Sequence
  Synthetic
auucucaaaaucuuagaagc

SEQ ID NO: 798106 - RNA, 20 nt, Artificial Sequence
  Synthetic
agcuauaauguagccgaagc

SEQ ID NO: 798107 - RNA, 20 nt, Artificial Sequence
  Synthetic
cuaaaaggcaaaaaggaagc

SEQ ID NO: 798108 - RNA, 20 nt, Artificial Sequence
  Synthetic
uuugaaaagcagaaggaagc

SEQ ID NO: 798109 - RNA, 20 nt, Artificial Sequence
  Synthetic
cugcagguuguacaggaagc

SEQ ID NO: 798110 - RNA, 20 nt, Artificial Sequence
  Synthetic
cccuucuccagccaggaagc

SEQ ID NO: 798111 - RNA, 20 nt, Artificial Sequence
  Synthetic
aucaaguugagaagggaagc

SEQ ID NO: 798112 - RNA, 20 nt, Artificial Sequence
  Synthetic
aacuuaacuuucagggaagc

SEQ ID NO: 798113 - RNA, 20 nt, Artificial Sequence
  Synthetic
ugugcagagaguugggaagc

SEQ ID NO: 798114 - RNA, 20 nt, Artificial Sequence
  Synthetic
aucccagcacuuugggaagc

SEQ ID NO: 798115 - RNA, 20 nt, Artificial Sequence
  Synthetic
auauaagugaaaauggaagc

SEQ ID NO: 798116 - RNA, 20 nt, Artificial Sequence
  Synthetic
auugcaggcuuaauggaagc

SEQ ID NO: 798117 - RNA, 20 nt, Artificial Sequence
  Synthetic
uugcagagcaggcuggaagc

SEQ ID NO: 798118 - RNA, 20 nt, Artificial Sequence
  Synthetic
caacaggugaguuuggaagc

SEQ ID NO: 798119 - RNA, 20 nt, Artificial Sequence
  Synthetic
cccuuauaaaauaaugaagc

SEQ ID NO: 798120 - RNA, 20 nt, Artificial Sequence
  Synthetic
acaguucacccucaugaagc

SEQ ID NO: 798121 - RNA, 20 nt, Artificial Sequence
  Synthetic
uguaaggacauggaugaagc

SEQ ID NO: 798122 - RNA, 20 nt, Artificial Sequence
  Synthetic
ugcacggacauggaugaagc

SEQ ID NO: 798123 - RNA, 20 nt, Artificial Sequence
  Synthetic
ugaagggacauggaugaagc

SEQ ID NO: 798124 - RNA, 20 nt, Artificial Sequence
  Synthetic
ugcagggacauggaugaagc

SEQ ID NO: 798125 - RNA, 20 nt, Artificial Sequence
  Synthetic
uguagggacauggaugaagc

SEQ ID NO: 798126 - RNA, 20 nt, Artificial Sequence
  Synthetic
uguagggacguggaugaagc

SEQ ID NO: 798127 - RNA, 20 nt, Artificial Sequence
  Synthetic
uaacaguaauccuaugaagc

SEQ ID NO: 798128 - RNA, 20 nt, Artificial Sequence
  Synthetic
uuagaccaucucacugaagc

SEQ ID NO: 798129 - RNA, 20 nt, Artificial Sequence
  Synthetic
ucccccuucuccccugaagc

SEQ ID NO: 798130 - RNA, 20 nt, Artificial Sequence
  Synthetic
cuaacuugggaggcugaagc

SEQ ID NO: 798131 - RNA, 20 nt, Artificial Sequence
  Synthetic
ugauuaacaagggcugaagc

SEQ ID NO: 798132 - RNA, 20 nt, Artificial Sequence
  Synthetic
aauagugcugaugcugaagc

SEQ ID NO: 798133 - RNA, 20 nt, Artificial Sequence
  Synthetic
uggcaagcagaaggugaagc

SEQ ID NO: 798134 - RNA, 20 nt, Artificial Sequence
  Synthetic
ugugcugggaaaugugaagc

SEQ ID NO: 798135 - RNA, 20 nt, Artificial Sequence
  Synthetic
auccuccaaaacauugaagc

SEQ ID NO: 798136 - RNA, 20 nt, Artificial Sequence
  Synthetic
aacaauggccagaaauaagc

SEQ ID NO: 798137 - RNA, 20 nt, Artificial Sequence
  Synthetic
caacaaaucacaagauaagc

SEQ ID NO: 798138 - RNA, 20 nt, Artificial Sequence
  Synthetic
uagcucuuugucagauaagc

SEQ ID NO: 798139 - RNA, 20 nt, Artificial Sequence
  Synthetic
accauuuccuaauuauaagc

SEQ ID NO: 798140 - RNA, 20 nt, Artificial Sequence
  Synthetic
uuucaugagagauuauaagc

SEQ ID NO: 798141 - RNA, 20 nt, Artificial Sequence
  Synthetic
auuacagagaacaacuaagc

SEQ ID NO: 798142 - RNA, 20 nt, Artificial Sequence
  Synthetic
cuauccuacugugacuaagc

SEQ ID NO: 798143 - RNA, 20 nt, Artificial Sequence
  Synthetic
aacauaagcacucccuaagc

SEQ ID NO: 798144 - RNA, 20 nt, Artificial Sequence
  Synthetic
uuucgccacauugccuaagc

SEQ ID NO: 798145 - RNA, 20 nt, Artificial Sequence
  Synthetic
ucucauucuguugccuaagc

SEQ ID NO: 798146 - RNA, 20 nt, Artificial Sequence
  Synthetic
uauauacuuuuuuccuaagc

SEQ ID NO: 798147 - RNA, 20 nt, Artificial Sequence
  Synthetic
uggcauaguagaugcuaagc

SEQ ID NO: 798148 - RNA, 20 nt, Artificial Sequence
  Synthetic
cggaauuaagguugcuaagc

SEQ ID NO: 798149 - RNA, 20 nt, Artificial Sequence
  Synthetic
uaguguuuugaaaucuaagc

SEQ ID NO: 798150 - RNA, 20 nt, Artificial Sequence
  Synthetic
aaugacuaagggaucuaagc

SEQ ID NO: 798151 - RNA, 20 nt, Artificial Sequence
  Synthetic
uagauuaucugaaaguaagc

SEQ ID NO: 798152 - RNA, 20 nt, Artificial Sequence
  Synthetic
cgaaagacacagaaguaagc

SEQ ID NO: 798153 - RNA, 20 nt, Artificial Sequence
  Synthetic
aacauaugcccucaguaagc

SEQ ID NO: 798154 - RNA, 20 nt, Artificial Sequence
  Synthetic
auuaaucauuuucaguaagc

SEQ ID NO: 798155 - RNA, 20 nt, Artificial Sequence
  Synthetic
aaacuguaauuuuaguaagc

SEQ ID NO: 798156 - RNA, 20 nt, Artificial Sequence
  Synthetic
caucaugauaucagguaagc

SEQ ID NO: 798157 - RNA, 20 nt, Artificial Sequence
  Synthetic
aaucaugccaagugguaagc

SEQ ID NO: 798158 - RNA, 20 nt, Artificial Sequence
  Synthetic
uuucagaaaagaauguaagc

SEQ ID NO: 798159 - RNA, 20 nt, Artificial Sequence
  Synthetic
agggcucaguaaguguaagc

SEQ ID NO: 798160 - RNA, 20 nt, Artificial Sequence
  Synthetic
agaguauggaccuuguaagc

SEQ ID NO: 798161 - RNA, 20 nt, Artificial Sequence
  Synthetic
accuuuuaagugaauuaagc

SEQ ID NO: 798162 - RNA, 20 nt, Artificial Sequence
  Synthetic
uacacauaaaacaguuaagc

SEQ ID NO: 798163 - RNA, 20 nt, Artificial Sequence
  Synthetic
uaacagccuuaguguuaagc

SEQ ID NO: 798164 - RNA, 20 nt, Artificial Sequence
  Synthetic
cugugaagcugaauuuaagc

SEQ ID NO: 798165 - RNA, 20 nt, Artificial Sequence
  Synthetic
cacaaauaagucauuuaagc

SEQ ID NO: 798166 - RNA, 20 nt, Artificial Sequence
  Synthetic
agaaaaagugcuauuuaagc

SEQ ID NO: 798167 - RNA, 20 nt, Artificial Sequence
  Synthetic
accuuuaagucuuuuuaagc

SEQ ID NO: 798168 - RNA, 20 nt, Artificial Sequence
  Synthetic
uuaauuaacaacaaaacagc

SEQ ID NO: 798169 - RNA, 20 nt, Artificial Sequence
  Synthetic
uacugaagagagaaaacagc

SEQ ID NO: 798170 - RNA, 20 nt, Artificial Sequence
  Synthetic
uuccccauacaccaaacagc

SEQ ID NO: 798171 - RNA, 20 nt, Artificial Sequence
  Synthetic
cuggugucuuuccaaacagc

SEQ ID NO: 798172 - RNA, 20 nt, Artificial Sequence
  Synthetic
agauucugccacuaaacagc

SEQ ID NO: 798173 - RNA, 20 nt, Artificial Sequence
  Synthetic
aucacaaauuguacaacagc

SEQ ID NO: 798174 - RNA, 20 nt, Artificial Sequence
  Synthetic
aaguggagagugagaacagc

SEQ ID NO: 798175 - RNA, 20 nt, Artificial Sequence
  Synthetic
cgauaaaagacaugaacagc

SEQ ID NO: 798176 - RNA, 20 nt, Artificial Sequence
  Synthetic
augguaccgggaugaacagc

SEQ ID NO: 798177 - RNA, 20 nt, Artificial Sequence
  Synthetic
ugcauaaaaauaugaacagc

SEQ ID NO: 798178 - RNA, 20 nt, Artificial Sequence
  Synthetic
aguacaucucaucuaacagc

SEQ ID NO: 798179 - RNA, 20 nt, Artificial Sequence
  Synthetic
auuuauaguauucuaacagc

SEQ ID NO: 798180 - RNA, 20 nt, Artificial Sequence
  Synthetic
cauugcuaaauaguaacagc

SEQ ID NO: 798181 - RNA, 20 nt, Artificial Sequence
  Synthetic
auaauaauaauuguaacagc

SEQ ID NO: 798182 - RNA, 20 nt, Artificial Sequence
  Synthetic
auacuuguuagaaacacagc

SEQ ID NO: 798183 - RNA, 20 nt, Artificial Sequence
  Synthetic
uugucagagauaaacacagc

SEQ ID NO: 798184 - RNA, 20 nt, Artificial Sequence
  Synthetic
uccagcagagagaacacagc

SEQ ID NO: 798185 - RNA, 20 nt, Artificial Sequence
  Synthetic
acuaaauaccaacacacagc

SEQ ID NO: 798186 - RNA, 20 nt, Artificial Sequence
  Synthetic
caccauaucuaacacacagc

SEQ ID NO: 798187 - RNA, 20 nt, Artificial Sequence
  Synthetic
caaacaggagcugacacagc

SEQ ID NO: 798188 - RNA, 20 nt, Artificial Sequence
  Synthetic
aaaaguuuuaaauacacagc

SEQ ID NO: 798189 - RNA, 20 nt, Artificial Sequence
  Synthetic
uucaccauaaccaccacagc

SEQ ID NO: 798190 - RNA, 20 nt, Artificial Sequence
  Synthetic
caggcgccugccaccacagc

SEQ ID NO: 798191 - RNA, 20 nt, Artificial Sequence
  Synthetic
cccuccccccaccccacagc

SEQ ID NO: 798192 - RNA, 20 nt, Artificial Sequence
  Synthetic
uggcuucuuugagccacagc

SEQ ID NO: 798193 - RNA, 20 nt, Artificial Sequence
  Synthetic
aauccauaaaaggccacagc

SEQ ID NO: 798194 - RNA, 20 nt, Artificial Sequence
  Synthetic
cuguugcccugggccacagc

SEQ ID NO: 798195 - RNA, 20 nt, Artificial Sequence
  Synthetic
uucacuacuuuuagcacagc

SEQ ID NO: 798196 - RNA, 20 nt, Artificial Sequence
  Synthetic
uuugccaacgaaggcacagc

SEQ ID NO: 798197 - RNA, 20 nt, Artificial Sequence
  Synthetic
cacaucuucucaggcacagc

SEQ ID NO: 798198 - RNA, 20 nt, Artificial Sequence
  Synthetic
ugaacuggaagaaucacagc

SEQ ID NO: 798199 - RNA, 20 nt, Artificial Sequence
  Synthetic
acauaccaauuaaagacagc

SEQ ID NO: 798200 - RNA, 20 nt, Artificial Sequence
  Synthetic
aaaagagagaggaagacagc

SEQ ID NO: 798201 - RNA, 20 nt, Artificial Sequence
  Synthetic
uagacuucggugaagacagc

SEQ ID NO: 798202 - RNA, 20 nt, Artificial Sequence
  Synthetic
aaguauuaaauuaagacagc

SEQ ID NO: 798203 - RNA, 20 nt, Artificial Sequence
  Synthetic
ugggcagauaaacagacagc

SEQ ID NO: 798204 - RNA, 20 nt, Artificial Sequence
  Synthetic
aaagcaaacaacgagacagc

SEQ ID NO: 798205 - RNA, 20 nt, Artificial Sequence
  Synthetic
ugguccaccaaauagacagc

SEQ ID NO: 798206 - RNA, 20 nt, Artificial Sequence
  Synthetic
uggagguccuacaggacagc

SEQ ID NO: 798207 - RNA, 20 nt, Artificial Sequence
  Synthetic
cagggauaaacugggacagc

SEQ ID NO: 798208 - RNA, 20 nt, Artificial Sequence
  Synthetic
ucucucagauaucugacagc

SEQ ID NO: 798209 - RNA, 20 nt, Artificial Sequence
  Synthetic
agcuauaacagguugacagc

SEQ ID NO: 798210 - RNA, 20 nt, Artificial Sequence
  Synthetic
uuuaagcagaggaauacagc

SEQ ID NO: 798211 - RNA, 20 nt, Artificial Sequence
  Synthetic
cugccuugugaagauacagc

SEQ ID NO: 798212 - RNA, 20 nt, Artificial Sequence
  Synthetic
cugguagacaggacuacagc

SEQ ID NO: 798213 - RNA, 20 nt, Artificial Sequence
  Synthetic
ucugguugauguccuacagc

SEQ ID NO: 798214 - RNA, 20 nt, Artificial Sequence
  Synthetic
ccacuauuuaaagcuacagc

SEQ ID NO: 798215 - RNA, 20 nt, Artificial Sequence
  Synthetic
cuucaacuaacaucuacagc

SEQ ID NO: 798216 - RNA, 20 nt, Artificial Sequence
  Synthetic
uaagcagaagcaaguacagc

SEQ ID NO: 798217 - RNA, 20 nt, Artificial Sequence
  Synthetic
ugcagggguugaauuacagc

SEQ ID NO: 798218 - RNA, 20 nt, Artificial Sequence
  Synthetic
acguuuccugucauuacagc

SEQ ID NO: 798219 - RNA, 20 nt, Artificial Sequence
  Synthetic
caaugcauagcucuuacagc

SEQ ID NO: 798220 - RNA, 20 nt, Artificial Sequence
  Synthetic
ucugugcuccccaaaccagc

SEQ ID NO: 798221 - RNA, 20 nt, Artificial Sequence
  Synthetic
aguuagcaaagcaaaccagc

SEQ ID NO: 798222 - RNA, 20 nt, Artificial Sequence
  Synthetic
ugaaaauauggaacaccagc

SEQ ID NO: 798223 - RNA, 20 nt, Artificial Sequence
  Synthetic
ugaccuagggagacaccagc

SEQ ID NO: 798224 - RNA, 20 nt, Artificial Sequence
  Synthetic
accaaacagcaggcaccagc

SEQ ID NO: 798225 - RNA, 20 nt, Artificial Sequence
  Synthetic
uacauugugauuucaccagc

SEQ ID NO: 798226 - RNA, 20 nt, Artificial Sequence
  Synthetic
ugaucuuaacauuuaccagc

SEQ ID NO: 798227 - RNA, 20 nt, Artificial Sequence
  Synthetic
cgccaggauucaaacccagc

SEQ ID NO: 798228 - RNA, 20 nt, Artificial Sequence
  Synthetic
cauaugugucucaacccagc

SEQ ID NO: 798229 - RNA, 20 nt, Artificial Sequence
  Synthetic
aagaaucuccugaacccagc

SEQ ID NO: 798230 - RNA, 20 nt, Artificial Sequence
  Synthetic
cguaagcuaccacacccagc

SEQ ID NO: 798231 - RNA, 20 nt, Artificial Sequence
  Synthetic
cugaauuagagacacccagc

SEQ ID NO: 798232 - RNA, 20 nt, Artificial Sequence
  Synthetic
caacagagaaggcacccagc

SEQ ID NO: 798233 - RNA, 20 nt, Artificial Sequence
  Synthetic
uucgcucuuguugccccagc

SEQ ID NO: 798234 - RNA, 20 nt, Artificial Sequence
  Synthetic
acccuucuaggcugcccagc

SEQ ID NO: 798235 - RNA, 20 nt, Artificial Sequence
  Synthetic
augacagacauaaucccagc

SEQ ID NO: 798236 - RNA, 20 nt, Artificial Sequence
  Synthetic
acugggagacaccucccagc

SEQ ID NO: 798237 - RNA, 20 nt, Artificial Sequence
  Synthetic
uaggccaugauggucccagc

SEQ ID NO: 798238 - RNA, 20 nt, Artificial Sequence
  Synthetic
aauaaagaacuugucccagc

SEQ ID NO: 798239 - RNA, 20 nt, Artificial Sequence
  Synthetic
ucucuaucuucaaagccagc

SEQ ID NO: 798240 - RNA, 20 nt, Artificial Sequence
  Synthetic
ucaaacagaagaaagccagc

SEQ ID NO: 798241 - RNA, 20 nt, Artificial Sequence
  Synthetic
ugcagagagggcaagccagc

SEQ ID NO: 798242 - RNA, 20 nt, Artificial Sequence
  Synthetic
agugauaaaaugaagccagc

SEQ ID NO: 798243 - RNA, 20 nt, Artificial Sequence
  Synthetic
cugcucucuucagagccagc

SEQ ID NO: 798244 - RNA, 20 nt, Artificial Sequence
  Synthetic
caccugcugcucaggccagc

SEQ ID NO: 798245 - RNA, 20 nt, Artificial Sequence
  Synthetic
uauugagaggugaggccagc

SEQ ID NO: 798246 - RNA, 20 nt, Artificial Sequence
  Synthetic
ucucuucucuucuggccagc

SEQ ID NO: 798247 - RNA, 20 nt, Artificial Sequence
  Synthetic
cugcauuuucaaaugccagc

SEQ ID NO: 798248 - RNA, 20 nt, Artificial Sequence
  Synthetic
acucccuuagccaugccagc

SEQ ID NO: 798249 - RNA, 20 nt, Artificial Sequence
  Synthetic
agauacagaauauugccagc

SEQ ID NO: 798250 - RNA, 20 nt, Artificial Sequence
  Synthetic
aguguuuuuuaacauccagc

SEQ ID NO: 798251 - RNA, 20 nt, Artificial Sequence
  Synthetic
acugcacuucccuauccagc

SEQ ID NO: 798252 - RNA, 20 nt, Artificial Sequence
  Synthetic
ucuuccaauacaacuccagc

SEQ ID NO: 798253 - RNA, 20 nt, Artificial Sequence
  Synthetic
ucgcaccacugcacuccagc

SEQ ID NO: 798254 - RNA, 20 nt, Artificial Sequence
  Synthetic
ucacaccauugcacuccagc

SEQ ID NO: 798255 - RNA, 20 nt, Artificial Sequence
  Synthetic
ucgcaccauugcacuccagc

SEQ ID NO: 798256 - RNA, 20 nt, Artificial Sequence
  Synthetic
uaacuuuguaggacuccagc

SEQ ID NO: 798257 - RNA, 20 nt, Artificial Sequence
  Synthetic
aucuugaacaucccuccagc

SEQ ID NO: 798258 - RNA, 20 nt, Artificial Sequence
  Synthetic
cucgacccagaaaguccagc

SEQ ID NO: 798259 - RNA, 20 nt, Artificial Sequence
  Synthetic
aucuuccccugaaguccagc

SEQ ID NO: 798260 - RNA, 20 nt, Artificial Sequence
  Synthetic
cuuagugguggauguccagc

SEQ ID NO: 798261 - RNA, 20 nt, Artificial Sequence
  Synthetic
aaaagggaaaaguguccagc

SEQ ID NO: 798262 - RNA, 20 nt, Artificial Sequence
  Synthetic
uccaaaaucaagauuccagc

SEQ ID NO: 798263 - RNA, 20 nt, Artificial Sequence
  Synthetic
caucugagcucccuuccagc

SEQ ID NO: 798264 - RNA, 20 nt, Artificial Sequence
  Synthetic
ucucuaacuucauuuccagc

SEQ ID NO: 798265 - RNA, 20 nt, Artificial Sequence
  Synthetic
accuaccuuugcaaagcagc

SEQ ID NO: 798266 - RNA, 20 nt, Artificial Sequence
  Synthetic
uaacaucgaaagaaagcagc

SEQ ID NO: 798267 - RNA, 20 nt, Artificial Sequence
  Synthetic
cuuuguaucacagaagcagc

SEQ ID NO: 798268 - RNA, 20 nt, Artificial Sequence
  Synthetic
uaaucaaggcccuaagcagc

SEQ ID NO: 798269 - RNA, 20 nt, Artificial Sequence
  Synthetic
cagugacccacaacagcagc

SEQ ID NO: 798270 - RNA, 20 nt, Artificial Sequence
  Synthetic
ccaguagcacuaccagcagc

SEQ ID NO: 798271 - RNA, 20 nt, Artificial Sequence
  Synthetic
uuggguauauacccagcagc

SEQ ID NO: 798272 - RNA, 20 nt, Artificial Sequence
  Synthetic
uuaguugguaaagcagcagc

SEQ ID NO: 798273 - RNA, 20 nt, Artificial Sequence
  Synthetic
agcaguaggugagcagcagc

SEQ ID NO: 798274 - RNA, 20 nt, Artificial Sequence
  Synthetic
cugcaaggccuuggagcagc

SEQ ID NO: 798275 - RNA, 20 nt, Artificial Sequence
  Synthetic
cucccgcuggccugagcagc

SEQ ID NO: 798276 - RNA, 20 nt, Artificial Sequence
  Synthetic
aguguugcugccugagcagc

SEQ ID NO: 798277 - RNA, 20 nt, Artificial Sequence
  Synthetic
ucugcaguaccuugagcagc

SEQ ID NO: 798278 - RNA, 20 nt, Artificial Sequence
  Synthetic
cuauuauuuaaaauagcagc

SEQ ID NO: 798279 - RNA, 20 nt, Artificial Sequence
  Synthetic
uuagggugagaaauagcagc

SEQ ID NO: 798280 - RNA, 20 nt, Artificial Sequence
  Synthetic
ccagcagcacuccuagcagc

SEQ ID NO: 798281 - RNA, 20 nt, Artificial Sequence
  Synthetic
aacuguauucaaguagcagc

SEQ ID NO: 798282 - RNA, 20 nt, Artificial Sequence
  Synthetic
auugaagaaacaguagcagc

SEQ ID NO: 798283 - RNA, 20 nt, Artificial Sequence
  Synthetic
cuugagggaugaguagcagc

SEQ ID NO: 798284 - RNA, 20 nt, Artificial Sequence
  Synthetic
uauuucuuaaauuuagcagc

SEQ ID NO: 798285 - RNA, 20 nt, Artificial Sequence
  Synthetic
ccuuccuuuuacuacgcagc

SEQ ID NO: 798286 - RNA, 20 nt, Artificial Sequence
  Synthetic
ugggagggaguaaaggcagc

SEQ ID NO: 798287 - RNA, 20 nt, Artificial Sequence
  Synthetic
cuguaaccucacaaggcagc

SEQ ID NO: 798288 - RNA, 20 nt, Artificial Sequence
  Synthetic
aagcaccuucacaaggcagc

SEQ ID NO: 798289 - RNA, 20 nt, Artificial Sequence
  Synthetic
uuagcuuaagagaaggcagc

SEQ ID NO: 798290 - RNA, 20 nt, Artificial Sequence
  Synthetic
ucuaggcuggagaaggcagc

SEQ ID NO: 798291 - RNA, 20 nt, Artificial Sequence
  Synthetic
auuauauaguuacaggcagc

SEQ ID NO: 798292 - RNA, 20 nt, Artificial Sequence
  Synthetic
aaggguaucggauaggcagc

SEQ ID NO: 798293 - RNA, 20 nt, Artificial Sequence
  Synthetic
caugauguggugcgggcagc

SEQ ID NO: 798294 - RNA, 20 nt, Artificial Sequence
  Synthetic
ugcacuccagcuugggcagc

SEQ ID NO: 798295 - RNA, 20 nt, Artificial Sequence
  Synthetic
cuccucuccaaaauggcagc

SEQ ID NO: 798296 - RNA, 20 nt, Artificial Sequence
  Synthetic
cuucuucuucacauggcagc

SEQ ID NO: 798297 - RNA, 20 nt, Artificial Sequence
  Synthetic
aacacauucuacauggcagc

SEQ ID NO: 798298 - RNA, 20 nt, Artificial Sequence
  Synthetic
cucugcugauagcuggcagc

SEQ ID NO: 798299 - RNA, 20 nt, Artificial Sequence
  Synthetic
auuacagauacagaugcagc

SEQ ID NO: 798300 - RNA, 20 nt, Artificial Sequence
  Synthetic
ugcagcaacauggaugcagc

SEQ ID NO: 798301 - RNA, 20 nt, Artificial Sequence
  Synthetic
uguaggaacauggaugcagc

SEQ ID NO: 798302 - RNA, 20 nt, Artificial Sequence
  Synthetic
uauugaauagaugaugcagc

SEQ ID NO: 798303 - RNA, 20 nt, Artificial Sequence
  Synthetic
uggggaguucucccugcagc

SEQ ID NO: 798304 - RNA, 20 nt, Artificial Sequence
  Synthetic
cacucauucuuaucugcagc

SEQ ID NO: 798305 - RNA, 20 nt, Artificial Sequence
  Synthetic
cguuccuuucugggugcagc

SEQ ID NO: 798306 - RNA, 20 nt, Artificial Sequence
  Synthetic
aauugauuuugacuugcagc

SEQ ID NO: 798307 - RNA, 20 nt, Artificial Sequence
  Synthetic
uguaguugcuggcuugcagc

SEQ ID NO: 798308 - RNA, 20 nt, Artificial Sequence
  Synthetic
uaaagauaauccuuugcagc

SEQ ID NO: 798309 - RNA, 20 nt, Artificial Sequence
  Synthetic
ugaaaauacaaaaaaucagc

SEQ ID NO: 798310 - RNA, 20 nt, Artificial Sequence
  Synthetic
uacaaauacaaaaaaucagc

SEQ ID NO: 798311 - RNA, 20 nt, Artificial Sequence
  Synthetic
cuaaaaauacaaaaaucagc

SEQ ID NO: 798312 - RNA, 20 nt, Artificial Sequence
  Synthetic
cuaaaauuacaaaaaucagc

SEQ ID NO: 798313 - RNA, 20 nt, Artificial Sequence
  Synthetic
aaauucguuagaaaaucagc

SEQ ID NO: 798314 - RNA, 20 nt, Artificial Sequence
  Synthetic
uuggaauaaauaaaaucagc

SEQ ID NO: 798315 - RNA, 20 nt, Artificial Sequence
  Synthetic
auacucacaucagaaucagc

SEQ ID NO: 798316 - RNA, 20 nt, Artificial Sequence
  Synthetic
augauucagauuucaucagc

SEQ ID NO: 798317 - RNA, 20 nt, Artificial Sequence
  Synthetic
aaaacuaugucaauaucagc

SEQ ID NO: 798318 - RNA, 20 nt, Artificial Sequence
  Synthetic
ucagauccaauuauaucagc

SEQ ID NO: 798319 - RNA, 20 nt, Artificial Sequence
  Synthetic
aggcagaauagcaacucagc

SEQ ID NO: 798320 - RNA, 20 nt, Artificial Sequence
  Synthetic
uaaaagaaaaauaacucagc

SEQ ID NO: 798321 - RNA, 20 nt, Artificial Sequence
  Synthetic
acaguggccuuuaacucagc

SEQ ID NO: 798322 - RNA, 20 nt, Artificial Sequence
  Synthetic
auaaaaaccccagacucagc

SEQ ID NO: 798323 - RNA, 20 nt, Artificial Sequence
  Synthetic
uguaccuugacugacucagc

SEQ ID NO: 798324 - RNA, 20 nt, Artificial Sequence
  Synthetic
uuuuucuauguauacucagc

SEQ ID NO: 798325 - RNA, 20 nt, Artificial Sequence
  Synthetic
ucuccuucuccugccucagc

SEQ ID NO: 798326 - RNA, 20 nt, Artificial Sequence
  Synthetic
uauguaaaucuuugcucagc

SEQ ID NO: 798327 - RNA, 20 nt, Artificial Sequence
  Synthetic
cucguauuccucaucucagc

SEQ ID NO: 798328 - RNA, 20 nt, Artificial Sequence
  Synthetic
ucugucaguuguaucucagc

SEQ ID NO: 798329 - RNA, 20 nt, Artificial Sequence
  Synthetic
aucacuggaaggcucucagc

SEQ ID NO: 798330 - RNA, 20 nt, Artificial Sequence
  Synthetic
ucugucagcugugucucagc

SEQ ID NO: 798331 - RNA, 20 nt, Artificial Sequence
  Synthetic
cucaaaagaucauucucagc

SEQ ID NO: 798332 - RNA, 20 nt, Artificial Sequence
  Synthetic
aguaaguggcauaagucagc

SEQ ID NO: 798333 - RNA, 20 nt, Artificial Sequence
  Synthetic
agacagagguuacagucagc

SEQ ID NO: 798334 - RNA, 20 nt, Artificial Sequence
  Synthetic
cucagagccacaaggucagc

SEQ ID NO: 798335 - RNA, 20 nt, Artificial Sequence
  Synthetic
uggagugggaaguggucagc

SEQ ID NO: 798336 - RNA, 20 nt, Artificial Sequence
  Synthetic
uaauauucaaaaaauucagc

SEQ ID NO: 798337 - RNA, 20 nt, Artificial Sequence
  Synthetic
uaaucagccuuucauucagc

SEQ ID NO: 798338 - RNA, 20 nt, Artificial Sequence
  Synthetic
aauucucucauagauucagc

SEQ ID NO: 798339 - RNA, 20 nt, Artificial Sequence
  Synthetic
acuuuuauuuuagauucagc

SEQ ID NO: 798340 - RNA, 20 nt, Artificial Sequence
  Synthetic
cauuaauaaaaauauucagc

SEQ ID NO: 798341 - RNA, 20 nt, Artificial Sequence
  Synthetic
cucuucaaaucauauucagc

SEQ ID NO: 798342 - RNA, 20 nt, Artificial Sequence
  Synthetic
ucagaaccagagccuucagc

SEQ ID NO: 798343 - RNA, 20 nt, Artificial Sequence
  Synthetic
agcuucuuacagaguucagc

SEQ ID NO: 798344 - RNA, 20 nt, Artificial Sequence
  Synthetic
auaaucuugaugaguucagc

SEQ ID NO: 798345 - RNA, 20 nt, Artificial Sequence
  Synthetic
aaagaagguugaauuucagc

SEQ ID NO: 798346 - RNA, 20 nt, Artificial Sequence
  Synthetic
uucaucuaguucauuucagc

SEQ ID NO: 798347 - RNA, 20 nt, Artificial Sequence
  Synthetic
aguuuuucuugucuuucagc

SEQ ID NO: 798348 - RNA, 20 nt, Artificial Sequence
  Synthetic
ucuccccuacagguuucagc

SEQ ID NO: 798349 - RNA, 20 nt, Artificial Sequence
  Synthetic
auauaauuuacuguuucagc

SEQ ID NO: 798350 - RNA, 20 nt, Artificial Sequence
  Synthetic
accucggccucacaaagagc

SEQ ID NO: 798351 - RNA, 20 nt, Artificial Sequence
  Synthetic
aggcuauugagaccaagagc

SEQ ID NO: 798352 - RNA, 20 nt, Artificial Sequence
  Synthetic
auagguagucuagcaagagc

SEQ ID NO: 798353 - RNA, 20 nt, Artificial Sequence
  Synthetic
uuuucucuuccaucaagagc

SEQ ID NO: 798354 - RNA, 20 nt, Artificial Sequence
  Synthetic
augaacagccacagaagagc

SEQ ID NO: 798355 - RNA, 20 nt, Artificial Sequence
  Synthetic
ugcuuauguuugagaagagc

SEQ ID NO: 798356 - RNA, 20 nt, Artificial Sequence
  Synthetic
uaagaaacauguagaagagc

SEQ ID NO: 798357 - RNA, 20 nt, Artificial Sequence
  Synthetic
agaaacuauaaaggaagagc

SEQ ID NO: 798358 - RNA, 20 nt, Artificial Sequence
  Synthetic
uuaaaagggcaaggaagagc

SEQ ID NO: 798359 - RNA, 20 nt, Artificial Sequence
  Synthetic
uacaugauggacugaagagc

SEQ ID NO: 798360 - RNA, 20 nt, Artificial Sequence
  Synthetic
auuguucauuagugaagagc

SEQ ID NO: 798361 - RNA, 20 nt, Artificial Sequence
  Synthetic
aacuucuuaagauuaagagc

SEQ ID NO: 798362 - RNA, 20 nt, Artificial Sequence
  Synthetic
aaaacaaguaaguuaagagc

SEQ ID NO: 798363 - RNA, 20 nt, Artificial Sequence
  Synthetic
aauucuuaguuguuaagagc

SEQ ID NO: 798364 - RNA, 20 nt, Artificial Sequence
  Synthetic
uguauaauggagcacagagc

SEQ ID NO: 798365 - RNA, 20 nt, Artificial Sequence
  Synthetic
cuuccccuacaucacagagc

SEQ ID NO: 798366 - RNA, 20 nt, Artificial Sequence
  Synthetic
cauagagucuaucacagagc

SEQ ID NO: 798367 - RNA, 20 nt, Artificial Sequence
  Synthetic
ugcuacauuuaagccagagc

SEQ ID NO: 798368 - RNA, 20 nt, Artificial Sequence
  Synthetic
cucaugguggaaggcagagc

SEQ ID NO: 798369 - RNA, 20 nt, Artificial Sequence
  Synthetic
uacaaguuaaguggcagagc

SEQ ID NO: 798370 - RNA, 20 nt, Artificial Sequence
  Synthetic
uucaugcaugcaugcagagc

SEQ ID NO: 798371 - RNA, 20 nt, Artificial Sequence
  Synthetic
agcucucccacuugcagagc

SEQ ID NO: 798372 - RNA, 20 nt, Artificial Sequence
  Synthetic
caugagaacaaaaagagagc

SEQ ID NO: 798373 - RNA, 20 nt, Artificial Sequence
  Synthetic
agcagaagcaggaagagagc

SEQ ID NO: 798374 - RNA, 20 nt, Artificial Sequence
  Synthetic
agacuaagaaugaagagagc

SEQ ID NO: 798375 - RNA, 20 nt, Artificial Sequence
  Synthetic
aaggugagauuccagagagc

SEQ ID NO: 798376 - RNA, 20 nt, Artificial Sequence
  Synthetic
ugagaauuacaguagagagc

SEQ ID NO: 798377 - RNA, 20 nt, Artificial Sequence
  Synthetic
cauuaaagugaaaggagagc

SEQ ID NO: 798378 - RNA, 20 nt, Artificial Sequence
  Synthetic
augacuuuggaggggagagc

SEQ ID NO: 798379 - RNA, 20 nt, Artificial Sequence
  Synthetic
aauaacuaaagugggagagc

SEQ ID NO: 798380 - RNA, 20 nt, Artificial Sequence
  Synthetic
uaauacaguaauuggagagc

SEQ ID NO: 798381 - RNA, 20 nt, Artificial Sequence
  Synthetic
uuggcaggagauuggagagc

SEQ ID NO: 798382 - RNA, 20 nt, Artificial Sequence
  Synthetic
aagaauucacuuuggagagc

SEQ ID NO: 798383 - RNA, 20 nt, Artificial Sequence
  Synthetic
accaugagauccaugagagc

SEQ ID NO: 798384 - RNA, 20 nt, Artificial Sequence
  Synthetic
auauuuggcugcaugagagc

SEQ ID NO: 798385 - RNA, 20 nt, Artificial Sequence
  Synthetic
augacugcacauaugagagc

SEQ ID NO: 798386 - RNA, 20 nt, Artificial Sequence
  Synthetic
cuaugccacuguaugagagc

SEQ ID NO: 798387 - RNA, 20 nt, Artificial Sequence
  Synthetic
uguuauuccugucugagagc

SEQ ID NO: 798388 - RNA, 20 nt, Artificial Sequence
  Synthetic
ucaaacugccaccauagagc

SEQ ID NO: 798389 - RNA, 20 nt, Artificial Sequence
  Synthetic
agacaaagaugaucuagagc

SEQ ID NO: 798390 - RNA, 20 nt, Artificial Sequence
  Synthetic
uauuccuuccagaguagagc

SEQ ID NO: 798391 - RNA, 20 nt, Artificial Sequence
  Synthetic
aaaucacagaauauuagagc

SEQ ID NO: 798392 - RNA, 20 nt, Artificial Sequence
  Synthetic
ccaagcauugaccuuagagc

SEQ ID NO: 798393 - RNA, 20 nt, Artificial Sequence
  Synthetic
acugaggcaaguguuagagc

SEQ ID NO: 798394 - RNA, 20 nt, Artificial Sequence
  Synthetic
ucacaguccugauuuagagc

SEQ ID NO: 798395 - RNA, 20 nt, Artificial Sequence
  Synthetic
cguaagccacaacaccgagc

SEQ ID NO: 798396 - RNA, 20 nt, Artificial Sequence
  Synthetic
ucaacaaauggauaccgagc

SEQ ID NO: 798397 - RNA, 20 nt, Artificial Sequence
  Synthetic
caaacaaaaauuuaaggagc

SEQ ID NO: 798398 - RNA, 20 nt, Artificial Sequence
  Synthetic
aaacaaaacaaaacaggagc

SEQ ID NO: 798399 - RNA, 20 nt, Artificial Sequence
  Synthetic
caagaccucuugacaggagc

SEQ ID NO: 798400 - RNA, 20 nt, Artificial Sequence
  Synthetic
ugaaggauguuaccaggagc

SEQ ID NO: 798401 - RNA, 20 nt, Artificial Sequence
  Synthetic
uugccaaugaauccaggagc

SEQ ID NO: 798402 - RNA, 20 nt, Artificial Sequence
  Synthetic
aaaucaaugaauccaggagc

SEQ ID NO: 798403 - RNA, 20 nt, Artificial Sequence
  Synthetic
cccccaaauguaucaggagc

SEQ ID NO: 798404 - RNA, 20 nt, Artificial Sequence
  Synthetic
caggaacuagagucaggagc

SEQ ID NO: 798405 - RNA, 20 nt, Artificial Sequence
  Synthetic
uccagcagucauucaggagc

SEQ ID NO: 798406 - RNA, 20 nt, Artificial Sequence
  Synthetic
cccaguagucauucaggagc

SEQ ID NO: 798407 - RNA, 20 nt, Artificial Sequence
  Synthetic
ccagagauacaaagaggagc

SEQ ID NO: 798408 - RNA, 20 nt, Artificial Sequence
  Synthetic
ccagagguacaaagaggagc

SEQ ID NO: 798409 - RNA, 20 nt, Artificial Sequence
  Synthetic
aaaugaggacacagaggagc

SEQ ID NO: 798410 - RNA, 20 nt, Artificial Sequence
  Synthetic
aaggagcagcccagaggagc

SEQ ID NO: 798411 - RNA, 20 nt, Artificial Sequence
  Synthetic
cugccauuuuggagaggagc

SEQ ID NO: 798412 - RNA, 20 nt, Artificial Sequence
  Synthetic
uaggcaggaggaggaggagc

SEQ ID NO: 798413 - RNA, 20 nt, Artificial Sequence
  Synthetic
ugggaaaaauacugaggagc

SEQ ID NO: 798414 - RNA, 20 nt, Artificial Sequence
  Synthetic
uugccaccucaacuaggagc

SEQ ID NO: 798415 - RNA, 20 nt, Artificial Sequence
  Synthetic
auguguuagguuuuaggagc

SEQ ID NO: 798416 - RNA, 20 nt, Artificial Sequence
  Synthetic
agaguuugccuggacggagc

SEQ ID NO: 798417 - RNA, 20 nt, Artificial Sequence
  Synthetic
cggaggaaaggaaagggagc

SEQ ID NO: 798418 - RNA, 20 nt, Artificial Sequence
  Synthetic
uuucaaaggggcaagggagc

SEQ ID NO: 798419 - RNA, 20 nt, Artificial Sequence
  Synthetic
aaacuagauaagcagggagc

SEQ ID NO: 798420 - RNA, 20 nt, Artificial Sequence
  Synthetic
uucuuuuugugugggggagc

SEQ ID NO: 798421 - RNA, 20 nt, Artificial Sequence
  Synthetic
auuccugggacacugggagc

SEQ ID NO: 798422 - RNA, 20 nt, Artificial Sequence
  Synthetic
uagauuuguguccugggagc

SEQ ID NO: 798423 - RNA, 20 nt, Artificial Sequence
  Synthetic
uacaggcugccucugggagc

SEQ ID NO: 798424 - RNA, 20 nt, Artificial Sequence
  Synthetic
cuguauguaacugugggagc

SEQ ID NO: 798425 - RNA, 20 nt, Artificial Sequence
  Synthetic
uuaguaugucuuuugggagc

SEQ ID NO: 798426 - RNA, 20 nt, Artificial Sequence
  Synthetic
uccagccugggcaauggagc

SEQ ID NO: 798427 - RNA, 20 nt, Artificial Sequence
  Synthetic
ugcagcaacuugaauggagc

SEQ ID NO: 798428 - RNA, 20 nt, Artificial Sequence
  Synthetic
ugcagcaacauggauggagc

SEQ ID NO: 798429 - RNA, 20 nt, Artificial Sequence
  Synthetic
ugcagcaacuuugauggagc

SEQ ID NO: 798430 - RNA, 20 nt, Artificial Sequence
  Synthetic
aguacugagagauauggagc

SEQ ID NO: 798431 - RNA, 20 nt, Artificial Sequence
  Synthetic
ugugacagggacacuggagc

SEQ ID NO: 798432 - RNA, 20 nt, Artificial Sequence
  Synthetic
uggauguuuuuuacuggagc

SEQ ID NO: 798433 - RNA, 20 nt, Artificial Sequence
  Synthetic
uuggaaaagugagcuggagc

SEQ ID NO: 798434 - RNA, 20 nt, Artificial Sequence
  Synthetic
cuccaaaaggacucuggagc

SEQ ID NO: 798435 - RNA, 20 nt, Artificial Sequence
  Synthetic
uuucaaggcuacuguggagc

SEQ ID NO: 798436 - RNA, 20 nt, Artificial Sequence
  Synthetic
uagccaguaauuauuggagc

SEQ ID NO: 798437 - RNA, 20 nt, Artificial Sequence
  Synthetic
uugaagcuuaagcuuggagc

SEQ ID NO: 798438 - RNA, 20 nt, Artificial Sequence
  Synthetic
aguagaaaacagaaaugagc

SEQ ID NO: 798439 - RNA, 20 nt, Artificial Sequence
  Synthetic
uuagcaaaugguaaaugagc

SEQ ID NO: 798440 - RNA, 20 nt, Artificial Sequence
  Synthetic
caugaggcaggucaaugagc

SEQ ID NO: 798441 - RNA, 20 nt, Artificial Sequence
  Synthetic
agggcauugccuccaugagc

SEQ ID NO: 798442 - RNA, 20 nt, Artificial Sequence
  Synthetic
uuugugguaggaagaugagc

SEQ ID NO: 798443 - RNA, 20 nt, Artificial Sequence
  Synthetic
ccagucccagugagaugagc

SEQ ID NO: 798444 - RNA, 20 nt, Artificial Sequence
  Synthetic
cuuugaccaucaugaugagc

SEQ ID NO: 798445 - RNA, 20 nt, Artificial Sequence
  Synthetic
aagcacauauaaauaugagc

SEQ ID NO: 798446 - RNA, 20 nt, Artificial Sequence
  Synthetic
auagcuagucagauaugagc

SEQ ID NO: 798447 - RNA, 20 nt, Artificial Sequence
  Synthetic
aaugaauuugguuuaugagc

SEQ ID NO: 798448 - RNA, 20 nt, Artificial Sequence
  Synthetic
aaagaggaaagaaacugagc

SEQ ID NO: 798449 - RNA, 20 nt, Artificial Sequence
  Synthetic
uguaauaaaugccacugagc

SEQ ID NO: 798450 - RNA, 20 nt, Artificial Sequence
  Synthetic
augacaagaaacuacugagc

SEQ ID NO: 798451 - RNA, 20 nt, Artificial Sequence
  Synthetic
aaaagugaaaucuccugagc

SEQ ID NO: 798452 - RNA, 20 nt, Artificial Sequence
  Synthetic
aacaguaggccguccugagc

SEQ ID NO: 798453 - RNA, 20 nt, Artificial Sequence
  Synthetic
ccauccuacuguggcugagc

SEQ ID NO: 798454 - RNA, 20 nt, Artificial Sequence
  Synthetic
cugccuuucuguggcugagc

SEQ ID NO: 798455 - RNA, 20 nt, Artificial Sequence
  Synthetic
uaacuagaugacugcugagc

SEQ ID NO: 798456 - RNA, 20 nt, Artificial Sequence
  Synthetic
uugaaauucacccucugagc

SEQ ID NO: 798457 - RNA, 20 nt, Artificial Sequence
  Synthetic
aacugauuggaaaagugagc

SEQ ID NO: 798458 - RNA, 20 nt, Artificial Sequence
  Synthetic
aggcagagguugcagugagc

SEQ ID NO: 798459 - RNA, 20 nt, Artificial Sequence
  Synthetic
cucauauugugauggugagc

SEQ ID NO: 798460 - RNA, 20 nt, Artificial Sequence
  Synthetic
auaaggaaaugaaugugagc

SEQ ID NO: 798461 - RNA, 20 nt, Artificial Sequence
  Synthetic
caaaaugugaaugugugagc

SEQ ID NO: 798462 - RNA, 20 nt, Artificial Sequence
  Synthetic
cauauuagauaauauugagc

SEQ ID NO: 798463 - RNA, 20 nt, Artificial Sequence
  Synthetic
uauugauuaauauauugagc

SEQ ID NO: 798464 - RNA, 20 nt, Artificial Sequence
  Synthetic
cagagaaggaacccuugagc

SEQ ID NO: 798465 - RNA, 20 nt, Artificial Sequence
  Synthetic
acugaaaacucuccuugagc

SEQ ID NO: 798466 - RNA, 20 nt, Artificial Sequence
  Synthetic
agagaauaugaaucuugagc

SEQ ID NO: 798467 - RNA, 20 nt, Artificial Sequence
  Synthetic
ucacaaaaauaauguugagc

SEQ ID NO: 798468 - RNA, 20 nt, Artificial Sequence
  Synthetic
ccuuccucagcaguuugagc

SEQ ID NO: 798469 - RNA, 20 nt, Artificial Sequence
  Synthetic
ugauaguugagauuuugagc

SEQ ID NO: 798470 - RNA, 20 nt, Artificial Sequence
  Synthetic
agcuuuaggguauuuugagc

SEQ ID NO: 798471 - RNA, 20 nt, Artificial Sequence
  Synthetic
cuugucucaaacuuuugagc

SEQ ID NO: 798472 - RNA, 20 nt, Artificial Sequence
  Synthetic
uucaguauaaauuuuugagc

SEQ ID NO: 798473 - RNA, 20 nt, Artificial Sequence
  Synthetic
uacaaaaaaaaaaaaauagc

SEQ ID NO: 798474 - RNA, 20 nt, Artificial Sequence
  Synthetic
uaaaaauacaaaaaaauagc

SEQ ID NO: 798475 - RNA, 20 nt, Artificial Sequence
  Synthetic
ucaacuuccuugaaaauagc

SEQ ID NO: 798476 - RNA, 20 nt, Artificial Sequence
  Synthetic
aaaaaaaaaaaagaaauagc

SEQ ID NO: 798477 - RNA, 20 nt, Artificial Sequence
  Synthetic
uuuuuuucauuuuaaauagc

SEQ ID NO: 798478 - RNA, 20 nt, Artificial Sequence
  Synthetic
caaacccuacucucaauagc

SEQ ID NO: 798479 - RNA, 20 nt, Artificial Sequence
  Synthetic
agucuuguggagggaauagc

SEQ ID NO: 798480 - RNA, 20 nt, Artificial Sequence
  Synthetic
cccacugauuuuggaauagc

SEQ ID NO: 798481 - RNA, 20 nt, Artificial Sequence
  Synthetic
caggagcugcaaaacauagc

SEQ ID NO: 798482 - RNA, 20 nt, Artificial Sequence
  Synthetic
aauggaaacccaaacauagc

SEQ ID NO: 798483 - RNA, 20 nt, Artificial Sequence
  Synthetic
aagaacaaguugaacauagc

SEQ ID NO: 798484 - RNA, 20 nt, Artificial Sequence
  Synthetic
uagguauaagaucacauagc

SEQ ID NO: 798485 - RNA, 20 nt, Artificial Sequence
  Synthetic
accccuuaugcucacauagc

SEQ ID NO: 798486 - RNA, 20 nt, Artificial Sequence
  Synthetic
cacauuuguuaguacauagc

SEQ ID NO: 798487 - RNA, 20 nt, Artificial Sequence
  Synthetic
cucugaggcagcaccauagc

SEQ ID NO: 798488 - RNA, 20 nt, Artificial Sequence
  Synthetic
cuuuuagcauaugccauagc

SEQ ID NO: 798489 - RNA, 20 nt, Artificial Sequence
  Synthetic
auauuuguguucagcauagc

SEQ ID NO: 798490 - RNA, 20 nt, Artificial Sequence
  Synthetic
ccuagggcuuaacgcauagc

SEQ ID NO: 798491 - RNA, 20 nt, Artificial Sequence
  Synthetic
acaugaaaacaucagauagc

SEQ ID NO: 798492 - RNA, 20 nt, Artificial Sequence
  Synthetic
caauaagucagggagauagc

SEQ ID NO: 798493 - RNA, 20 nt, Artificial Sequence
  Synthetic
uagauagauagauagauagc

SEQ ID NO: 798494 - RNA, 20 nt, Artificial Sequence
  Synthetic
agauguguggaguagauagc

SEQ ID NO: 798495 - RNA, 20 nt, Artificial Sequence
  Synthetic
auacccaguaaugggauagc

SEQ ID NO: 798496 - RNA, 20 nt, Artificial Sequence
  Synthetic
auaaacggugcugggauagc

SEQ ID NO: 798497 - RNA, 20 nt, Artificial Sequence
  Synthetic
caugcuguucucaugauagc

SEQ ID NO: 798498 - RNA, 20 nt, Artificial Sequence
  Synthetic
aaaauagcucugcugauagc

SEQ ID NO: 798499 - RNA, 20 nt, Artificial Sequence
  Synthetic
caaagcuguuuggugauagc

SEQ ID NO: 798500 - RNA, 20 nt, Artificial Sequence
  Synthetic
cccacuuccagcuugauagc

SEQ ID NO: 798501 - RNA, 20 nt, Artificial Sequence
  Synthetic
uggugugggauguugauagc

SEQ ID NO: 798502 - RNA, 20 nt, Artificial Sequence
  Synthetic
uauuuuuucauuucuauagc

SEQ ID NO: 798503 - RNA, 20 nt, Artificial Sequence
  Synthetic
cucuagcaacacaguauagc

SEQ ID NO: 798504 - RNA, 20 nt, Artificial Sequence
  Synthetic
auuuaaauuaauaguauagc

SEQ ID NO: 798505 - RNA, 20 nt, Artificial Sequence
  Synthetic
agauuuauccacgguauagc

SEQ ID NO: 798506 - RNA, 20 nt, Artificial Sequence
  Synthetic
cguuucuaccaaaaacuagc

SEQ ID NO: 798507 - RNA, 20 nt, Artificial Sequence
  Synthetic
ccugcaugaaacaaacuagc

SEQ ID NO: 798508 - RNA, 20 nt, Artificial Sequence
  Synthetic
aaaaugcuuccacaacuagc

SEQ ID NO: 798509 - RNA, 20 nt, Artificial Sequence
  Synthetic
uucuagugaaacagacuagc

SEQ ID NO: 798510 - RNA, 20 nt, Artificial Sequence
  Synthetic
uaaauaaaauagagacuagc

SEQ ID NO: 798511 - RNA, 20 nt, Artificial Sequence
  Synthetic
uuaaggaacugaaaccuagc

SEQ ID NO: 798512 - RNA, 20 nt, Artificial Sequence
  Synthetic
caacaacaacucuaccuagc

SEQ ID NO: 798513 - RNA, 20 nt, Artificial Sequence
  Synthetic
aaguuuugugaguaccuagc

SEQ ID NO: 798514 - RNA, 20 nt, Artificial Sequence
  Synthetic
ccaagaccucaugcccuagc

SEQ ID NO: 798515 - RNA, 20 nt, Artificial Sequence
  Synthetic
uuuuuacucuuauagcuagc

SEQ ID NO: 798516 - RNA, 20 nt, Artificial Sequence
  Synthetic
augagacacacagggcuagc

SEQ ID NO: 798517 - RNA, 20 nt, Artificial Sequence
  Synthetic
aaauaugauagaaugcuagc

SEQ ID NO: 798518 - RNA, 20 nt, Artificial Sequence
  Synthetic
ccugucauuaugaugcuagc

SEQ ID NO: 798519 - RNA, 20 nt, Artificial Sequence
  Synthetic
uccugggauuucuugcuagc

SEQ ID NO: 798520 - RNA, 20 nt, Artificial Sequence
  Synthetic
caguuugugugggcucuagc

SEQ ID NO: 798521 - RNA, 20 nt, Artificial Sequence
  Synthetic
agaacuaaccaaguucuagc

SEQ ID NO: 798522 - RNA, 20 nt, Artificial Sequence
  Synthetic
cagaaaauacaaaaaguagc

SEQ ID NO: 798523 - RNA, 20 nt, Artificial Sequence
  Synthetic
uuuggaaaggcuaaaguagc

SEQ ID NO: 798524 - RNA, 20 nt, Artificial Sequence
  Synthetic
accuuagccucccaaguagc

SEQ ID NO: 798525 - RNA, 20 nt, Artificial Sequence
  Synthetic
uaaaauauauaucaaguagc

SEQ ID NO: 798526 - RNA, 20 nt, Artificial Sequence
  Synthetic
accucagccuccuaaguagc

SEQ ID NO: 798527 - RNA, 20 nt, Artificial Sequence
  Synthetic
acaaguccuaagacaguagc

SEQ ID NO: 798528 - RNA, 20 nt, Artificial Sequence
  Synthetic
ugccucugucuuccaguagc

SEQ ID NO: 798529 - RNA, 20 nt, Artificial Sequence
  Synthetic
ucucugccuucugcaguagc

SEQ ID NO: 798530 - RNA, 20 nt, Artificial Sequence
  Synthetic
ucagccuccucccgaguagc

SEQ ID NO: 798531 - RNA, 20 nt, Artificial Sequence
  Synthetic
accucaggcucccgaguagc

SEQ ID NO: 798532 - RNA, 20 nt, Artificial Sequence
  Synthetic
ugccucagccuccgaguagc

SEQ ID NO: 798533 - RNA, 20 nt, Artificial Sequence
  Synthetic
cuguuugccaaaugaguagc

SEQ ID NO: 798534 - RNA, 20 nt, Artificial Sequence
  Synthetic
accucagccuccugaguagc

SEQ ID NO: 798535 - RNA, 20 nt, Artificial Sequence
  Synthetic
aucucagccuccugaguagc

SEQ ID NO: 798536 - RNA, 20 nt, Artificial Sequence
  Synthetic
cacuaaauucuuugaguagc

SEQ ID NO: 798537 - RNA, 20 nt, Artificial Sequence
  Synthetic
aguggacagcauuuaguagc

SEQ ID NO: 798538 - RNA, 20 nt, Artificial Sequence
  Synthetic
augccuuuuuaaaacguagc

SEQ ID NO: 798539 - RNA, 20 nt, Artificial Sequence
  Synthetic
agugucacaauuugcguagc

SEQ ID NO: 798540 - RNA, 20 nt, Artificial Sequence
  Synthetic
acaauacauagaaagguagc

SEQ ID NO: 798541 - RNA, 20 nt, Artificial Sequence
  Synthetic
ugccucagccucccgguagc

SEQ ID NO: 798542 - RNA, 20 nt, Artificial Sequence
  Synthetic
ucucagaugccugggguagc

SEQ ID NO: 798543 - RNA, 20 nt, Artificial Sequence
  Synthetic
accucagccuccuggguagc

SEQ ID NO: 798544 - RNA, 20 nt, Artificial Sequence
  Synthetic
accucagcuuccuggguagc

SEQ ID NO: 798545 - RNA, 20 nt, Artificial Sequence
  Synthetic
aauuagccgggcaugguagc

SEQ ID NO: 798546 - RNA, 20 nt, Artificial Sequence
  Synthetic
accucagacucccauguagc

SEQ ID NO: 798547 - RNA, 20 nt, Artificial Sequence
  Synthetic
uauuauuauucccauguagc

SEQ ID NO: 798548 - RNA, 20 nt, Artificial Sequence
  Synthetic
uucaggauuuuguauguagc

SEQ ID NO: 798549 - RNA, 20 nt, Artificial Sequence
  Synthetic
aacuauaugcuaacuguagc

SEQ ID NO: 798550 - RNA, 20 nt, Artificial Sequence
  Synthetic
cugugagaaaauguuguagc

SEQ ID NO: 798551 - RNA, 20 nt, Artificial Sequence
  Synthetic
aagcaaagaauuuuuguagc

SEQ ID NO: 798552 - RNA, 20 nt, Artificial Sequence
  Synthetic
uacaaaaaaaaaaaauuagc

SEQ ID NO: 798553 - RNA, 20 nt, Artificial Sequence
  Synthetic
aaauacaaaaaaaaauuagc

SEQ ID NO: 798554 - RNA, 20 nt, Artificial Sequence
  Synthetic
aaaauacaaaaaaaauuagc

SEQ ID NO: 798555 - RNA, 20 nt, Artificial Sequence
  Synthetic
uaaaaauaaaaaaaauuagc

SEQ ID NO: 798556 - RNA, 20 nt, Artificial Sequence
  Synthetic
aaaaacacaaaaaaauuagc

SEQ ID NO: 798557 - RNA, 20 nt, Artificial Sequence
  Synthetic
aaaaauacaaaaaaauuagc

SEQ ID NO: 798558 - RNA, 20 nt, Artificial Sequence
  Synthetic
cugaaaauaaaaaaauuagc

SEQ ID NO: 798559 - RNA, 20 nt, Artificial Sequence
  Synthetic
uaaaaacacaaaaaauuagc

SEQ ID NO: 798560 - RNA, 20 nt, Artificial Sequence
  Synthetic
aaaaaauacaaaaaauuagc

SEQ ID NO: 798561 - RNA, 20 nt, Artificial Sequence
  Synthetic
uaaaaauacaaaaaauuagc

SEQ ID NO: 798562 - RNA, 20 nt, Artificial Sequence
  Synthetic
uuaaaauacaaaaaauuagc

SEQ ID NO: 798563 - RNA, 20 nt, Artificial Sequence
  Synthetic
caaaaaaagaaaaaauuagc

SEQ ID NO: 798564 - RNA, 20 nt, Artificial Sequence
  Synthetic
uaaaaauauaaaaaauuagc

SEQ ID NO: 798565 - RNA, 20 nt, Artificial Sequence
  Synthetic
ccaaaaauacaaaaauuagc

SEQ ID NO: 798566 - RNA, 20 nt, Artificial Sequence
  Synthetic
cuaaaaauacaaaaauuagc

SEQ ID NO: 798567 - RNA, 20 nt, Artificial Sequence
  Synthetic
cuaaauauacaaaaauuagc

SEQ ID NO: 798568 - RNA, 20 nt, Artificial Sequence
  Synthetic
cuaaaacuacaaaaauuagc

SEQ ID NO: 798569 - RNA, 20 nt, Artificial Sequence
  Synthetic
uaaaaauaccaaaaauuagc

SEQ ID NO: 798570 - RNA, 20 nt, Artificial Sequence
  Synthetic
cuaaaaacagaaaaauuagc

SEQ ID NO: 798571 - RNA, 20 nt, Artificial Sequence
  Synthetic
cuaaaaauauaaaaauuagc

SEQ ID NO: 798572 - RNA, 20 nt, Artificial Sequence
  Synthetic
aauacaaaaacaaaauuagc

SEQ ID NO: 798573 - RNA, 20 nt, Artificial Sequence
  Synthetic
uaaaaauacacaaaauuagc

SEQ ID NO: 798574 - RNA, 20 nt, Artificial Sequence
  Synthetic
acuaaaaauacaaaauuagc

SEQ ID NO: 798575 - RNA, 20 nt, Artificial Sequence
  Synthetic
cuaaaaauaguaaaauuagc

SEQ ID NO: 798576 - RNA, 20 nt, Artificial Sequence
  Synthetic
acuaauuauaaugcauuagc

SEQ ID NO: 798577 - RNA, 20 nt, Artificial Sequence
  Synthetic
aaaauuuaacuuucauuagc

SEQ ID NO: 798578 - RNA, 20 nt, Artificial Sequence
  Synthetic
aaguuugcucugugauuagc

SEQ ID NO: 798579 - RNA, 20 nt, Artificial Sequence
  Synthetic
cuauuuuaagugugauuagc

SEQ ID NO: 798580 - RNA, 20 nt, Artificial Sequence
  Synthetic
aaaauauauuaaauauuagc

SEQ ID NO: 798581 - RNA, 20 nt, Artificial Sequence
  Synthetic
cacuacuaagugauauuagc

SEQ ID NO: 798582 - RNA, 20 nt, Artificial Sequence
  Synthetic
aagcuggcucugguauuagc

SEQ ID NO: 798583 - RNA, 20 nt, Artificial Sequence
  Synthetic
agcuuuucaaaguuauuagc

SEQ ID NO: 798584 - RNA, 20 nt, Artificial Sequence
  Synthetic
auaaaaauaaaaaacuuagc

SEQ ID NO: 798585 - RNA, 20 nt, Artificial Sequence
  Synthetic
uaaaaauacaaaaacuuagc

SEQ ID NO: 798586 - RNA, 20 nt, Artificial Sequence
  Synthetic
cuaaaaaugcaaaacuuagc

SEQ ID NO: 798587 - RNA, 20 nt, Artificial Sequence
  Synthetic
aaccaauauagaaacuuagc

SEQ ID NO: 798588 - RNA, 20 nt, Artificial Sequence
  Synthetic
uguaaucccagcuacuuagc

SEQ ID NO: 798589 - RNA, 20 nt, Artificial Sequence
  Synthetic
auauaggaauauagcuuagc

SEQ ID NO: 798590 - RNA, 20 nt, Artificial Sequence
  Synthetic
ucaagccaguggaucuuagc

SEQ ID NO: 798591 - RNA, 20 nt, Artificial Sequence
  Synthetic
acuguguggcagcucuuagc

SEQ ID NO: 798592 - RNA, 20 nt, Artificial Sequence
  Synthetic
cucuagcuggaagucuuagc

SEQ ID NO: 798593 - RNA, 20 nt, Artificial Sequence
  Synthetic
caaaaaaaaaaaaaguuagc

SEQ ID NO: 798594 - RNA, 20 nt, Artificial Sequence
  Synthetic
aaaugaaauaaaaaguuagc

SEQ ID NO: 798595 - RNA, 20 nt, Artificial Sequence
  Synthetic
uuguauucauauaaguuagc

SEQ ID NO: 798596 - RNA, 20 nt, Artificial Sequence
  Synthetic
auauagagauauaaguuagc

SEQ ID NO: 798597 - RNA, 20 nt, Artificial Sequence
  Synthetic
ccugucauuaugauguuagc

SEQ ID NO: 798598 - RNA, 20 nt, Artificial Sequence
  Synthetic
uguagacaguggcuguuagc

SEQ ID NO: 798599 - RNA, 20 nt, Artificial Sequence
  Synthetic
agaaaagaaaacguguuagc

SEQ ID NO: 798600 - RNA, 20 nt, Artificial Sequence
  Synthetic
auuaggccagcuguguuagc

SEQ ID NO: 798601 - RNA, 20 nt, Artificial Sequence
  Synthetic
agaauggauguuguguuagc

SEQ ID NO: 798602 - RNA, 20 nt, Artificial Sequence
  Synthetic
cauuuaagaaacaauuuagc

SEQ ID NO: 798603 - RNA, 20 nt, Artificial Sequence
  Synthetic
uuuccaaguuuagauuuagc

SEQ ID NO: 798604 - RNA, 20 nt, Artificial Sequence
  Synthetic
cacagagauucugauuuagc

SEQ ID NO: 798605 - RNA, 20 nt, Artificial Sequence
  Synthetic
aguacaguugcauauuuagc

SEQ ID NO: 798606 - RNA, 20 nt, Artificial Sequence
  Synthetic
auucagaaaugcucuuuagc

SEQ ID NO: 798607 - RNA, 20 nt, Artificial Sequence
  Synthetic
cucccaagcuccaguuuagc

SEQ ID NO: 798608 - RNA, 20 nt, Artificial Sequence
  Synthetic
cuuuauuugccuaguuuagc

SEQ ID NO: 798609 - RNA, 20 nt, Artificial Sequence
  Synthetic
uucaacauacaaauuuuagc

SEQ ID NO: 798610 - RNA, 20 nt, Artificial Sequence
  Synthetic
uguggaauuuacauuuuagc

SEQ ID NO: 798611 - RNA, 20 nt, Artificial Sequence
  Synthetic
acagacaauggacuuuuagc

SEQ ID NO: 798612 - RNA, 20 nt, Artificial Sequence
  Synthetic
aacuucaauuuaaaaaacgc

SEQ ID NO: 798613 - RNA, 20 nt, Artificial Sequence
  Synthetic
ccagugaaaaaugaaaacgc

SEQ ID NO: 798614 - RNA, 20 nt, Artificial Sequence
  Synthetic
uugaguagaugagcaaacgc

SEQ ID NO: 798615 - RNA, 20 nt, Artificial Sequence
  Synthetic
uaaauacacagaguaaacgc

SEQ ID NO: 798616 - RNA, 20 nt, Artificial Sequence
  Synthetic
cucuauacaaaugccaacgc

SEQ ID NO: 798617 - RNA, 20 nt, Artificial Sequence
  Synthetic
aauaugauacauuauaacgc

SEQ ID NO: 798618 - RNA, 20 nt, Artificial Sequence
  Synthetic
aaucauaagcaaauuaacgc

SEQ ID NO: 798619 - RNA, 20 nt, Artificial Sequence
  Synthetic
uauccuaagcacguuaacgc

SEQ ID NO: 798620 - RNA, 20 nt, Artificial Sequence
  Synthetic
ugagcccacugagaccacgc

SEQ ID NO: 798621 - RNA, 20 nt, Artificial Sequence
  Synthetic
uugccucuuagugcgcacgc

SEQ ID NO: 798622 - RNA, 20 nt, Artificial Sequence
  Synthetic
uaaagauuauuuucucacgc

SEQ ID NO: 798623 - RNA, 20 nt, Artificial Sequence
  Synthetic
caaugagaacaccuggacgc

SEQ ID NO: 798624 - RNA, 20 nt, Artificial Sequence
  Synthetic
agacucucaggcaccaccgc

SEQ ID NO: 798625 - RNA, 20 nt, Artificial Sequence
  Synthetic
uuuaaaaauaacuauaccgc

SEQ ID NO: 798626 - RNA, 20 nt, Artificial Sequence
  Synthetic
ucuuucaaaauguguaccgc

SEQ ID NO: 798627 - RNA, 20 nt, Artificial Sequence
  Synthetic
aaugcuggcaucccccccgc

SEQ ID NO: 798628 - RNA, 20 nt, Artificial Sequence
  Synthetic
uguccagaguugguucccgc

SEQ ID NO: 798629 - RNA, 20 nt, Artificial Sequence
  Synthetic
caucuucuucacaaggccgc

SEQ ID NO: 798630 - RNA, 20 nt, Artificial Sequence
  Synthetic
ugucaacuuggcugggccgc

SEQ ID NO: 798631 - RNA, 20 nt, Artificial Sequence
  Synthetic
caaugaaaacauauggccgc

SEQ ID NO: 798632 - RNA, 20 nt, Artificial Sequence
  Synthetic
uuccaugauuuugaugccgc

SEQ ID NO: 798633 - RNA, 20 nt, Artificial Sequence
  Synthetic
acuuuucuagcucuguccgc

SEQ ID NO: 798634 - RNA, 20 nt, Artificial Sequence
  Synthetic
aucccagccucccaaagcgc

SEQ ID NO: 798635 - RNA, 20 nt, Artificial Sequence
  Synthetic
aaaacacuuggacacagcgc

SEQ ID NO: 798636 - RNA, 20 nt, Artificial Sequence
  Synthetic
caagcagaucgcuugagcgc

SEQ ID NO: 798637 - RNA, 20 nt, Artificial Sequence
  Synthetic
uaucugcccaugacuggcgc

SEQ ID NO: 798638 - RNA, 20 nt, Artificial Sequence
  Synthetic
aggcacaugccaccaugcgc

SEQ ID NO: 798639 - RNA, 20 nt, Artificial Sequence
  Synthetic
cuuuuuaaugccaggugcgc

SEQ ID NO: 798640 - RNA, 20 nt, Artificial Sequence
  Synthetic
ccucagcuugcuaggugcgc

SEQ ID NO: 798641 - RNA, 20 nt, Artificial Sequence
  Synthetic
agcagcccugccugcaucgc

SEQ ID NO: 798642 - RNA, 20 nt, Artificial Sequence
  Synthetic
agucguguagccaucaucgc

SEQ ID NO: 798643 - RNA, 20 nt, Artificial Sequence
  Synthetic
cagcuucccgauaagaucgc

SEQ ID NO: 798644 - RNA, 20 nt, Artificial Sequence
  Synthetic
agcaaauggauaaaacucgc

SEQ ID NO: 798645 - RNA, 20 nt, Artificial Sequence
  Synthetic
cacugcaaucucugccucgc

SEQ ID NO: 798646 - RNA, 20 nt, Artificial Sequence
  Synthetic
agugaaugguucuaucucgc

SEQ ID NO: 798647 - RNA, 20 nt, Artificial Sequence
  Synthetic
cagagaugagaaguugucgc

SEQ ID NO: 798648 - RNA, 20 nt, Artificial Sequence
  Synthetic
aggggcucuuccuacuucgc

SEQ ID NO: 798649 - RNA, 20 nt, Artificial Sequence
  Synthetic
uccugcuucugcuauuucgc

SEQ ID NO: 798650 - RNA, 20 nt, Artificial Sequence
  Synthetic
cucaaauguagugguuucgc

SEQ ID NO: 798651 - RNA, 20 nt, Artificial Sequence
  Synthetic
cuugagggugggguuuucgc

SEQ ID NO: 798652 - RNA, 20 nt, Artificial Sequence
  Synthetic
aauggaaaacaaaaaaaggc

SEQ ID NO: 798653 - RNA, 20 nt, Artificial Sequence
  Synthetic
uucaucuauaugaaaaaggc

SEQ ID NO: 798654 - RNA, 20 nt, Artificial Sequence
  Synthetic
uaguuaugaaauaaaaaggc

SEQ ID NO: 798655 - RNA, 20 nt, Artificial Sequence
  Synthetic
cuguaacaaauucaaaaggc

SEQ ID NO: 798656 - RNA, 20 nt, Artificial Sequence
  Synthetic
aggaguauggaagaaaaggc

SEQ ID NO: 798657 - RNA, 20 nt, Artificial Sequence
  Synthetic
acaaccuuuacagaaaaggc

SEQ ID NO: 798658 - RNA, 20 nt, Artificial Sequence
  Synthetic
caucuaaugcuggaaaaggc

SEQ ID NO: 798659 - RNA, 20 nt, Artificial Sequence
  Synthetic
cggugucaggaugaaaaggc

SEQ ID NO: 798660 - RNA, 20 nt, Artificial Sequence
  Synthetic
auucugcugaaauaaaaggc

SEQ ID NO: 798661 - RNA, 20 nt, Artificial Sequence
  Synthetic
aaauggaaagccuaaaaggc

SEQ ID NO: 798662 - RNA, 20 nt, Artificial Sequence
  Synthetic
caugcauuacuuuaaaaggc

SEQ ID NO: 798663 - RNA, 20 nt, Artificial Sequence
  Synthetic
ccugggaauuaaccaaaggc

SEQ ID NO: 798664 - RNA, 20 nt, Artificial Sequence
  Synthetic
uuucacuaaaaaucaaaggc

SEQ ID NO: 798665 - RNA, 20 nt, Artificial Sequence
  Synthetic
uucaauucaagcucaaaggc

SEQ ID NO: 798666 - RNA, 20 nt, Artificial Sequence
  Synthetic
caguuuuuugcgucaaaggc

SEQ ID NO: 798667 - RNA, 20 nt, Artificial Sequence
  Synthetic
uuuucagaaguuucaaaggc

SEQ ID NO: 798668 - RNA, 20 nt, Artificial Sequence
  Synthetic
uggucgaggaaaggaaaggc

SEQ ID NO: 798669 - RNA, 20 nt, Artificial Sequence
  Synthetic
aagaggcauugaggaaaggc

SEQ ID NO: 798670 - RNA, 20 nt, Artificial Sequence
  Synthetic
aagaguaaacuuggaaaggc

SEQ ID NO: 798671 - RNA, 20 nt, Artificial Sequence
  Synthetic
uuauucccucacauaaaggc

SEQ ID NO: 798672 - RNA, 20 nt, Artificial Sequence
  Synthetic
accauuuuuuagauaaaggc

SEQ ID NO: 798673 - RNA, 20 nt, Artificial Sequence
  Synthetic
aguguugacuuuauaaaggc

SEQ ID NO: 798674 - RNA, 20 nt, Artificial Sequence
  Synthetic
accauuuagaugguaaaggc

SEQ ID NO: 798675 - RNA, 20 nt, Artificial Sequence
  Synthetic
aacagaaauggcaacaaggc

SEQ ID NO: 798676 - RNA, 20 nt, Artificial Sequence
  Synthetic
aagagagacaugaacaaggc

SEQ ID NO: 798677 - RNA, 20 nt, Artificial Sequence
  Synthetic
aaauggcaagauaacaaggc

SEQ ID NO: 798678 - RNA, 20 nt, Artificial Sequence
  Synthetic
accaaagcaaaucacaaggc

SEQ ID NO: 798679 - RNA, 20 nt, Artificial Sequence
  Synthetic
aaagcaaggcaagacaaggc

SEQ ID NO: 798680 - RNA, 20 nt, Artificial Sequence
  Synthetic
uuguuuggagaugacaaggc

SEQ ID NO: 798681 - RNA, 20 nt, Artificial Sequence
  Synthetic
acacuuugggaggccaaggc

SEQ ID NO: 798682 - RNA, 20 nt, Artificial Sequence
  Synthetic
ucaucccugggaugcaaggc

SEQ ID NO: 798683 - RNA, 20 nt, Artificial Sequence
  Synthetic
ucauccuugggaugcaaggc

SEQ ID NO: 798684 - RNA, 20 nt, Artificial Sequence
  Synthetic
aauaugaaaagcaucaaggc

SEQ ID NO: 798685 - RNA, 20 nt, Artificial Sequence
  Synthetic
cauugaaaaucugucaaggc

SEQ ID NO: 798686 - RNA, 20 nt, Artificial Sequence
  Synthetic
uucaacagaagaaagaaggc

SEQ ID NO: 798687 - RNA, 20 nt, Artificial Sequence
  Synthetic
aaugaaaacauugagaaggc

SEQ ID NO: 798688 - RNA, 20 nt, Artificial Sequence
  Synthetic
uaaaauagguugucgaaggc

SEQ ID NO: 798689 - RNA, 20 nt, Artificial Sequence
  Synthetic
agagaggaaaucaggaaggc

SEQ ID NO: 798690 - RNA, 20 nt, Artificial Sequence
  Synthetic
agagagaagcgggggaaggc

SEQ ID NO: 798691 - RNA, 20 nt, Artificial Sequence
  Synthetic
ugugguuaaagucugaaggc

SEQ ID NO: 798692 - RNA, 20 nt, Artificial Sequence
  Synthetic
agcagggucagagugaaggc

SEQ ID NO: 798693 - RNA, 20 nt, Artificial Sequence
  Synthetic
cuuacagucucuuugaaggc

SEQ ID NO: 798694 - RNA, 20 nt, Artificial Sequence
  Synthetic
agagagcuugggaauaaggc

SEQ ID NO: 798695 - RNA, 20 nt, Artificial Sequence
  Synthetic
uuauaaaagccuaauaaggc

SEQ ID NO: 798696 - RNA, 20 nt, Artificial Sequence
  Synthetic
uugacucuuaauucuaaggc

SEQ ID NO: 798697 - RNA, 20 nt, Artificial Sequence
  Synthetic
cuuccccaaucuaguaaggc

SEQ ID NO: 798698 - RNA, 20 nt, Artificial Sequence
  Synthetic
auuagaagcucuuguaaggc

SEQ ID NO: 798699 - RNA, 20 nt, Artificial Sequence
  Synthetic
uuggaauuccuaauuaaggc

SEQ ID NO: 798700 - RNA, 20 nt, Artificial Sequence
  Synthetic
cauaugagauacuuuaaggc

SEQ ID NO: 798701 - RNA, 20 nt, Artificial Sequence
  Synthetic
uaaaaaaaugagaaacaggc

SEQ ID NO: 798702 - RNA, 20 nt, Artificial Sequence
  Synthetic
aggugaccucaucaacaggc

SEQ ID NO: 798703 - RNA, 20 nt, Artificial Sequence
  Synthetic
aaauaugcugaggaacaggc

SEQ ID NO: 798704 - RNA, 20 nt, Artificial Sequence
  Synthetic
ugcuccguccuuccacaggc

SEQ ID NO: 798705 - RNA, 20 nt, Artificial Sequence
  Synthetic
acauguucuuacucacaggc

SEQ ID NO: 798706 - RNA, 20 nt, Artificial Sequence
  Synthetic
aggaaaauucgcagacaggc

SEQ ID NO: 798707 - RNA, 20 nt, Artificial Sequence
  Synthetic
aggcagacaggcagacaggc

SEQ ID NO: 798708 - RNA, 20 nt, Artificial Sequence
  Synthetic
ucuuugacugggagacaggc

SEQ ID NO: 798709 - RNA, 20 nt, Artificial Sequence
  Synthetic
agcggcucugaaauacaggc

SEQ ID NO: 798710 - RNA, 20 nt, Artificial Sequence
  Synthetic
auaagaauugaaauacaggc

SEQ ID NO: 798711 - RNA, 20 nt, Artificial Sequence
  Synthetic
ugggagccagagcuacaggc

SEQ ID NO: 798712 - RNA, 20 nt, Artificial Sequence
  Synthetic
uagccacagggaguacaggc

SEQ ID NO: 798713 - RNA, 20 nt, Artificial Sequence
  Synthetic
ugaaauauaaauguacaggc

SEQ ID NO: 798714 - RNA, 20 nt, Artificial Sequence
  Synthetic
uccuggcugcuuuuacaggc

SEQ ID NO: 798715 - RNA, 20 nt, Artificial Sequence
  Synthetic
caauggagaagaaaccaggc

SEQ ID NO: 798716 - RNA, 20 nt, Artificial Sequence
  Synthetic
ucucgcucugucaaccaggc

SEQ ID NO: 798717 - RNA, 20 nt, Artificial Sequence
  Synthetic
aguguaaugaauaaccaggc

SEQ ID NO: 798718 - RNA, 20 nt, Artificial Sequence
  Synthetic
agucugcucuuucaccaggc

SEQ ID NO: 798719 - RNA, 20 nt, Artificial Sequence
  Synthetic
acuuucuaaguggaccaggc

SEQ ID NO: 798720 - RNA, 20 nt, Artificial Sequence
  Synthetic
uuucaucaaguugaccaggc

SEQ ID NO: 798721 - RNA, 20 nt, Artificial Sequence
  Synthetic
cuucaccauguugaccaggc

SEQ ID NO: 798722 - RNA, 20 nt, Artificial Sequence
  Synthetic
uuucaccauguugaccaggc

SEQ ID NO: 798723 - RNA, 20 nt, Artificial Sequence
  Synthetic
uuuggccauguugaccaggc

SEQ ID NO: 798724 - RNA, 20 nt, Artificial Sequence
  Synthetic
ucucacccuguaacccaggc

SEQ ID NO: 798725 - RNA, 20 nt, Artificial Sequence
  Synthetic
uuugcucuuguaacccaggc

SEQ ID NO: 798726 - RNA, 20 nt, Artificial Sequence
  Synthetic
ucuugcuccaucacccaggc

SEQ ID NO: 798727 - RNA, 20 nt, Artificial Sequence
  Synthetic
ucuugaucuaucacccaggc

SEQ ID NO: 798728 - RNA, 20 nt, Artificial Sequence
  Synthetic
ucucacuacgucacccaggc

SEQ ID NO: 798729 - RNA, 20 nt, Artificial Sequence
  Synthetic
ucuugcugggucacccaggc

SEQ ID NO: 798730 - RNA, 20 nt, Artificial Sequence
  Synthetic
ucucacccugucacccaggc

SEQ ID NO: 798731 - RNA, 20 nt, Artificial Sequence
  Synthetic
ucauacccugucacccaggc

SEQ ID NO: 798732 - RNA, 20 nt, Artificial Sequence
  Synthetic
ccucacucugucacccaggc

SEQ ID NO: 798733 - RNA, 20 nt, Artificial Sequence
  Synthetic
ucucacucugucacccaggc

SEQ ID NO: 798734 - RNA, 20 nt, Artificial Sequence
  Synthetic
ucuagcucugucacccaggc

SEQ ID NO: 798735 - RNA, 20 nt, Artificial Sequence
  Synthetic
ucucgcucugucacccaggc

SEQ ID NO: 798736 - RNA, 20 nt, Artificial Sequence
  Synthetic
ccuugcucugucacccaggc

SEQ ID NO: 798737 - RNA, 20 nt, Artificial Sequence
  Synthetic
ucuugcucugucacccaggc

SEQ ID NO: 798738 - RNA, 20 nt, Artificial Sequence
  Synthetic
uuuugcucugucacccaggc

SEQ ID NO: 798739 - RNA, 20 nt, Artificial Sequence
  Synthetic
ucucguucugucacccaggc

SEQ ID NO: 798740 - RNA, 20 nt, Artificial Sequence
  Synthetic
ucucacugugucacccaggc

SEQ ID NO: 798741 - RNA, 20 nt, Artificial Sequence
  Synthetic
ucucacuuugucacccaggc

SEQ ID NO: 798742 - RNA, 20 nt, Artificial Sequence
  Synthetic
uuugcuuuugucacccaggc

SEQ ID NO: 798743 - RNA, 20 nt, Artificial Sequence
  Synthetic
ucucgcuguguuacccaggc

SEQ ID NO: 798744 - RNA, 20 nt, Artificial Sequence
  Synthetic
cucgcucugucaccccaggc

SEQ ID NO: 798745 - RNA, 20 nt, Artificial Sequence
  Synthetic
cucgcucuugucccccaggc

SEQ ID NO: 798746 - RNA, 20 nt, Artificial Sequence
  Synthetic
ugaccugcaacagcccaggc

SEQ ID NO: 798747 - RNA, 20 nt, Artificial Sequence
  Synthetic
ucuugcucagucgcccaggc

SEQ ID NO: 798748 - RNA, 20 nt, Artificial Sequence
  Synthetic
ucucacucugucgcccaggc

SEQ ID NO: 798749 - RNA, 20 nt, Artificial Sequence
  Synthetic
ucucccucugucgcccaggc

SEQ ID NO: 798750 - RNA, 20 nt, Artificial Sequence
  Synthetic
ucucgcucugucgcccaggc

SEQ ID NO: 798751 - RNA, 20 nt, Artificial Sequence
  Synthetic
uuucgcucugucgcccaggc

SEQ ID NO: 798752 - RNA, 20 nt, Artificial Sequence
  Synthetic
ucuggcucugucgcccaggc

SEQ ID NO: 798753 - RNA, 20 nt, Artificial Sequence
  Synthetic
ucuugcucugucgcccaggc

SEQ ID NO: 798754 - RNA, 20 nt, Artificial Sequence
  Synthetic
uuuugcucugucgcccaggc

SEQ ID NO: 798755 - RNA, 20 nt, Artificial Sequence
  Synthetic
ccucuuucugucgcccaggc

SEQ ID NO: 798756 - RNA, 20 nt, Artificial Sequence
  Synthetic
uucgcucgugucgcccaggc

SEQ ID NO: 798757 - RNA, 20 nt, Artificial Sequence
  Synthetic
uuugcucuugucgcccaggc

SEQ ID NO: 798758 - RNA, 20 nt, Artificial Sequence
  Synthetic
ucucgcucuuucgcccaggc

SEQ ID NO: 798759 - RNA, 20 nt, Artificial Sequence
  Synthetic
uucacucuugcugcccaggc

SEQ ID NO: 798760 - RNA, 20 nt, Artificial Sequence
  Synthetic
uccugcuccauugcccaggc

SEQ ID NO: 798761 - RNA, 20 nt, Artificial Sequence
  Synthetic
ucucacucgguugcccaggc

SEQ ID NO: 798762 - RNA, 20 nt, Artificial Sequence
  Synthetic
uuucaccauguugcccaggc

SEQ ID NO: 798763 - RNA, 20 nt, Artificial Sequence
  Synthetic
uuugaccauguugcccaggc

SEQ ID NO: 798764 - RNA, 20 nt, Artificial Sequence
  Synthetic
ccuugccauguugcccaggc

SEQ ID NO: 798765 - RNA, 20 nt, Artificial Sequence
  Synthetic
uuuugccauguugcccaggc

SEQ ID NO: 798766 - RNA, 20 nt, Artificial Sequence
  Synthetic
ucucacuauguugcccaggc

SEQ ID NO: 798767 - RNA, 20 nt, Artificial Sequence
  Synthetic
ugucauuauguugcccaggc

SEQ ID NO: 798768 - RNA, 20 nt, Artificial Sequence
  Synthetic
aaucuugcuguugcccaggc

SEQ ID NO: 798769 - RNA, 20 nt, Artificial Sequence
  Synthetic
ucucacucuguugcccaggc

SEQ ID NO: 798770 - RNA, 20 nt, Artificial Sequence
  Synthetic
ucucgcucuguugcccaggc

SEQ ID NO: 798771 - RNA, 20 nt, Artificial Sequence
  Synthetic
ucuugcucuguugcccaggc

SEQ ID NO: 798772 - RNA, 20 nt, Artificial Sequence
  Synthetic
ucucacuguguugcccaggc

SEQ ID NO: 798773 - RNA, 20 nt, Artificial Sequence
  Synthetic
uucacucuuguugcccaggc

SEQ ID NO: 798774 - RNA, 20 nt, Artificial Sequence
  Synthetic
uucgcucuuguugcccaggc

SEQ ID NO: 798775 - RNA, 20 nt, Artificial Sequence
  Synthetic
uuugcucuuguugcccaggc

SEQ ID NO: 798776 - RNA, 20 nt, Artificial Sequence
  Synthetic
cacuauguugccucccaggc

SEQ ID NO: 798777 - RNA, 20 nt, Artificial Sequence
  Synthetic
aggcacuuguccucccaggc

SEQ ID NO: 798778 - RNA, 20 nt, Artificial Sequence
  Synthetic
ucuugcuuugucucccaggc

SEQ ID NO: 798779 - RNA, 20 nt, Artificial Sequence
  Synthetic
auacagauagauagccaggc

SEQ ID NO: 798780 - RNA, 20 nt, Artificial Sequence
  Synthetic
cuucaccauguuagccaggc

SEQ ID NO: 798781 - RNA, 20 nt, Artificial Sequence
  Synthetic
uggagucucugucgccaggc

SEQ ID NO: 798782 - RNA, 20 nt, Artificial Sequence
  Synthetic
uuucgccaugcuggccaggc

SEQ ID NO: 798783 - RNA, 20 nt, Artificial Sequence
  Synthetic
uuucacuaugguggccaggc

SEQ ID NO: 798784 - RNA, 20 nt, Artificial Sequence
  Synthetic
uuucaucaccuuggccaggc

SEQ ID NO: 798785 - RNA, 20 nt, Artificial Sequence
  Synthetic
uuucaccaucuuggccaggc

SEQ ID NO: 798786 - RNA, 20 nt, Artificial Sequence
  Synthetic
uuucaccacguuggccaggc

SEQ ID NO: 798787 - RNA, 20 nt, Artificial Sequence
  Synthetic
uuuuaccacguuggccaggc

SEQ ID NO: 798788 - RNA, 20 nt, Artificial Sequence
  Synthetic
uuccauuacguuggccaggc

SEQ ID NO: 798789 - RNA, 20 nt, Artificial Sequence
  Synthetic
uuucaccagguuggccaggc

SEQ ID NO: 798790 - RNA, 20 nt, Artificial Sequence
  Synthetic
uuucaccauguuggccaggc

SEQ ID NO: 798791 - RNA, 20 nt, Artificial Sequence
  Synthetic
uuuuaccauguuggccaggc

SEQ ID NO: 798792 - RNA, 20 nt, Artificial Sequence
  Synthetic
uuucgccauguuggccaggc

SEQ ID NO: 798793 - RNA, 20 nt, Artificial Sequence
  Synthetic
uuuugccauguuggccaggc

SEQ ID NO: 798794 - RNA, 20 nt, Artificial Sequence
  Synthetic
uuucgucauguuggccaggc

SEQ ID NO: 798795 - RNA, 20 nt, Artificial Sequence
  Synthetic
uuucaugauguuggccaggc

SEQ ID NO: 798796 - RNA, 20 nt, Artificial Sequence
  Synthetic
uuucacuauguuggccaggc

SEQ ID NO: 798797 - RNA, 20 nt, Artificial Sequence
  Synthetic
uuucacuguguuggccaggc

SEQ ID NO: 798798 - RNA, 20 nt, Artificial Sequence
  Synthetic
uuucaccuuguuggccaggc

SEQ ID NO: 798799 - RNA, 20 nt, Artificial Sequence
  Synthetic
ucaucccugggaugccaggc

SEQ ID NO: 798800 - RNA, 20 nt, Artificial Sequence
  Synthetic
cagcuauucugcauccaggc

SEQ ID NO: 798801 - RNA, 20 nt, Artificial Sequence
  Synthetic
ucucacucugucauccaggc

SEQ ID NO: 798802 - RNA, 20 nt, Artificial Sequence
  Synthetic
uuucacuauguuguccaggc

SEQ ID NO: 798803 - RNA, 20 nt, Artificial Sequence
  Synthetic
uguugcuauguuguccaggc

SEQ ID NO: 798804 - RNA, 20 nt, Artificial Sequence
  Synthetic
cugggaaaauuauuccaggc

SEQ ID NO: 798805 - RNA, 20 nt, Artificial Sequence
  Synthetic
ucucucuauguuuuccaggc

SEQ ID NO: 798806 - RNA, 20 nt, Artificial Sequence
  Synthetic
cagaagacagcaaagcaggc

SEQ ID NO: 798807 - RNA, 20 nt, Artificial Sequence
  Synthetic
ucacagaccugcaagcaggc

SEQ ID NO: 798808 - RNA, 20 nt, Artificial Sequence
  Synthetic
agaaaggcagagaagcaggc

SEQ ID NO: 798809 - RNA, 20 nt, Artificial Sequence
  Synthetic
ucucuucagagccagcaggc

SEQ ID NO: 798810 - RNA, 20 nt, Artificial Sequence
  Synthetic
cucccacuugcagagcaggc

SEQ ID NO: 798811 - RNA, 20 nt, Artificial Sequence
  Synthetic
uaccaaggcagauggcaggc

SEQ ID NO: 798812 - RNA, 20 nt, Artificial Sequence
  Synthetic
aagagccaagaaaugcaggc

SEQ ID NO: 798813 - RNA, 20 nt, Artificial Sequence
  Synthetic
aauaggaaaugccugcaggc

SEQ ID NO: 798814 - RNA, 20 nt, Artificial Sequence
  Synthetic
ucuggccagggcaaucaggc

SEQ ID NO: 798815 - RNA, 20 nt, Artificial Sequence
  Synthetic
ucuggccagggcgaucaggc

SEQ ID NO: 798816 - RNA, 20 nt, Artificial Sequence
  Synthetic
uuucaccauaaugaucaggc

SEQ ID NO: 798817 - RNA, 20 nt, Artificial Sequence
  Synthetic
uuucaccacguugaucaggc

SEQ ID NO: 798818 - RNA, 20 nt, Artificial Sequence
  Synthetic
uugcuccauguugaucaggc

SEQ ID NO: 798819 - RNA, 20 nt, Artificial Sequence
  Synthetic
ucucgcucugucacucaggc

SEQ ID NO: 798820 - RNA, 20 nt, Artificial Sequence
  Synthetic
ucuggcucugucacucaggc

SEQ ID NO: 798821 - RNA, 20 nt, Artificial Sequence
  Synthetic
ucucgcugugucgcucaggc

SEQ ID NO: 798822 - RNA, 20 nt, Artificial Sequence
  Synthetic
uuucuuccucgaucucaggc

SEQ ID NO: 798823 - RNA, 20 nt, Artificial Sequence
  Synthetic
aauauaugacugucucaggc

SEQ ID NO: 798824 - RNA, 20 nt, Artificial Sequence
  Synthetic
aggggugugauuucucaggc

SEQ ID NO: 798825 - RNA, 20 nt, Artificial Sequence
  Synthetic
uuucaccauguuagucaggc

SEQ ID NO: 798826 - RNA, 20 nt, Artificial Sequence
  Synthetic
uuucagcaugucggucaggc

SEQ ID NO: 798827 - RNA, 20 nt, Artificial Sequence
  Synthetic
cacaguucuaagggucaggc

SEQ ID NO: 798828 - RNA, 20 nt, Artificial Sequence
  Synthetic
cuucaccauguuggucaggc

SEQ ID NO: 798829 - RNA, 20 nt, Artificial Sequence
  Synthetic
uuucaccauguuggucaggc

SEQ ID NO: 798830 - RNA, 20 nt, Artificial Sequence
  Synthetic
uuucgccauguuggucaggc

SEQ ID NO: 798831 - RNA, 20 nt, Artificial Sequence
  Synthetic
uuucuccauguuggucaggc

SEQ ID NO: 798832 - RNA, 20 nt, Artificial Sequence
  Synthetic
uuucaucauguuggucaggc

SEQ ID NO: 798833 - RNA, 20 nt, Artificial Sequence
  Synthetic
uaguaugcaguuauucaggc

SEQ ID NO: 798834 - RNA, 20 nt, Artificial Sequence
  Synthetic
agcucuaauuuacuucaggc

SEQ ID NO: 798835 - RNA, 20 nt, Artificial Sequence
  Synthetic
uuuugcuacauauuucaggc

SEQ ID NO: 798836 - RNA, 20 nt, Artificial Sequence
  Synthetic
uuaaggauuaucaaagaggc

SEQ ID NO: 798837 - RNA, 20 nt, Artificial Sequence
  Synthetic
cuagagaauuuucaagaggc

SEQ ID NO: 798838 - RNA, 20 nt, Artificial Sequence
  Synthetic
uuaauauaagaggaagaggc

SEQ ID NO: 798839 - RNA, 20 nt, Artificial Sequence
  Synthetic
aagaacuaagcugaagaggc

SEQ ID NO: 798840 - RNA, 20 nt, Artificial Sequence
  Synthetic
agaaccagagucacagaggc

SEQ ID NO: 798841 - RNA, 20 nt, Artificial Sequence
  Synthetic
agcuacuggaagacagaggc

SEQ ID NO: 798842 - RNA, 20 nt, Artificial Sequence
  Synthetic
cuugcauuauuuacagaggc

SEQ ID NO: 798843 - RNA, 20 nt, Artificial Sequence
  Synthetic
caguauucaaaaccagaggc

SEQ ID NO: 798844 - RNA, 20 nt, Artificial Sequence
  Synthetic
uuuuuauagauaccagaggc

SEQ ID NO: 798845 - RNA, 20 nt, Artificial Sequence
  Synthetic
acuacucgggaggcagaggc

SEQ ID NO: 798846 - RNA, 20 nt, Artificial Sequence
  Synthetic
agaagaaguagaucagaggc

SEQ ID NO: 798847 - RNA, 20 nt, Artificial Sequence
  Synthetic
ugucgaaagccaagagaggc

SEQ ID NO: 798848 - RNA, 20 nt, Artificial Sequence
  Synthetic
aacccauuuucuggagaggc

SEQ ID NO: 798849 - RNA, 20 nt, Artificial Sequence
  Synthetic
cagaggaaaaacugagaggc

SEQ ID NO: 798850 - RNA, 20 nt, Artificial Sequence
  Synthetic
auauuccagaaucuagaggc

SEQ ID NO: 798851 - RNA, 20 nt, Artificial Sequence
  Synthetic
agaauauauauucuagaggc

SEQ ID NO: 798852 - RNA, 20 nt, Artificial Sequence
  Synthetic
uguguauuuuuaguagaggc

SEQ ID NO: 798853 - RNA, 20 nt, Artificial Sequence
  Synthetic
uuuuuuuuuuugguagaggc

SEQ ID NO: 798854 - RNA, 20 nt, Artificial Sequence
  Synthetic
aaucuccaacucuuagaggc

SEQ ID NO: 798855 - RNA, 20 nt, Artificial Sequence
  Synthetic
uuuauuuacagaaacgaggc

SEQ ID NO: 798856 - RNA, 20 nt, Artificial Sequence
  Synthetic
uuuuaaucaagucacgaggc

SEQ ID NO: 798857 - RNA, 20 nt, Artificial Sequence
  Synthetic
cacuuuggggaggccgaggc

SEQ ID NO: 798858 - RNA, 20 nt, Artificial Sequence
  Synthetic
gcacuuugggaggccgaggc

SEQ ID NO: 798859 - RNA, 20 nt, Artificial Sequence
  Synthetic
ugaggugcugcaaaggaggc

SEQ ID NO: 798860 - RNA, 20 nt, Artificial Sequence
  Synthetic
agaauggagagacaggaggc

SEQ ID NO: 798861 - RNA, 20 nt, Artificial Sequence
  Synthetic
ccucaacuggagcaggaggc

SEQ ID NO: 798862 - RNA, 20 nt, Artificial Sequence
  Synthetic
ucauuggucggggaggaggc

SEQ ID NO: 798863 - RNA, 20 nt, Artificial Sequence
  Synthetic
uaagauaauuuuuaggaggc

SEQ ID NO: 798864 - RNA, 20 nt, Artificial Sequence
  Synthetic
caggcccacaagagggaggc

SEQ ID NO: 798865 - RNA, 20 nt, Artificial Sequence
  Synthetic
agcccaaaaauuagggaggc

SEQ ID NO: 798866 - RNA, 20 nt, Artificial Sequence
  Synthetic
uaaaauugcacuggggaggc

SEQ ID NO: 798867 - RNA, 20 nt, Artificial Sequence
  Synthetic
aguguguguguaugggaggc

SEQ ID NO: 798868 - RNA, 20 nt, Artificial Sequence
  Synthetic
cuagaaucauccugggaggc

SEQ ID NO: 798869 - RNA, 20 nt, Artificial Sequence
  Synthetic
auuccagcgcuuugggaggc

SEQ ID NO: 798870 - RNA, 20 nt, Artificial Sequence
  Synthetic
aucucagcguuuugggaggc

SEQ ID NO: 798871 - RNA, 20 nt, Artificial Sequence
  Synthetic
augugaaaugccauggaggc

SEQ ID NO: 798872 - RNA, 20 nt, Artificial Sequence
  Synthetic
aauagacagagccuggaggc

SEQ ID NO: 798873 - RNA, 20 nt, Artificial Sequence
  Synthetic
ucacucacaguucuggaggc

SEQ ID NO: 798874 - RNA, 20 nt, Artificial Sequence
  Synthetic
uuucucacaguucuggaggc

SEQ ID NO: 798875 - RNA, 20 nt, Artificial Sequence
  Synthetic
uugcuuauaguucuggaggc

SEQ ID NO: 798876 - RNA, 20 nt, Artificial Sequence
  Synthetic
uuucucaccguucuggaggc

SEQ ID NO: 798877 - RNA, 20 nt, Artificial Sequence
  Synthetic
cuuuggaucagaguggaggc

SEQ ID NO: 798878 - RNA, 20 nt, Artificial Sequence
  Synthetic
ugucacaagugaguggaggc

SEQ ID NO: 798879 - RNA, 20 nt, Artificial Sequence
  Synthetic
ugauuuccaauguuggaggc

SEQ ID NO: 798880 - RNA, 20 nt, Artificial Sequence
  Synthetic
uaauaaaaaauuuuggaggc

SEQ ID NO: 798881 - RNA, 20 nt, Artificial Sequence
  Synthetic
aucagauuguuuuuggaggc

SEQ ID NO: 798882 - RNA, 20 nt, Artificial Sequence
  Synthetic
cuugaugaggcuaaugaggc

SEQ ID NO: 798883 - RNA, 20 nt, Artificial Sequence
  Synthetic
aaacuuacaaaucaugaggc

SEQ ID NO: 798884 - RNA, 20 nt, Artificial Sequence
  Synthetic
uucagaaacuaagaugaggc

SEQ ID NO: 798885 - RNA, 20 nt, Artificial Sequence
  Synthetic
ccauuuuaagaggaugaggc

SEQ ID NO: 798886 - RNA, 20 nt, Artificial Sequence
  Synthetic
ugaaauguauccuaugaggc

SEQ ID NO: 798887 - RNA, 20 nt, Artificial Sequence
  Synthetic
aggauuugggaagcugaggc

SEQ ID NO: 798888 - RNA, 20 nt, Artificial Sequence
  Synthetic
ccuguagucccagcugaggc

SEQ ID NO: 798889 - RNA, 20 nt, Artificial Sequence
  Synthetic
ucuacucaggaggcugaggc

SEQ ID NO: 798890 - RNA, 20 nt, Artificial Sequence
  Synthetic
agcuacucggaggcugaggc

SEQ ID NO: 798891 - RNA, 20 nt, Artificial Sequence
  Synthetic
agcuaccgggaggcugaggc

SEQ ID NO: 798892 - RNA, 20 nt, Artificial Sequence
  Synthetic
gcuacucgggaggcugaggc

SEQ ID NO: 798893 - RNA, 20 nt, Artificial Sequence
  Synthetic
acacuuugggaggcugaggc

SEQ ID NO: 798894 - RNA, 20 nt, Artificial Sequence
  Synthetic
ccacuuugggaggcugaggc

SEQ ID NO: 798895 - RNA, 20 nt, Artificial Sequence
  Synthetic
gcacuuugggaggcugaggc

SEQ ID NO: 798896 - RNA, 20 nt, Artificial Sequence
  Synthetic
gugcuuugggaggcugaggc

SEQ ID NO: 798897 - RNA, 20 nt, Artificial Sequence
  Synthetic
uuguuuugggaggcugaggc

SEQ ID NO: 798898 - RNA, 20 nt, Artificial Sequence
  Synthetic
ucucacuuuuuugcugaggc

SEQ ID NO: 798899 - RNA, 20 nt, Artificial Sequence
  Synthetic
acaacugaccugugugaggc

SEQ ID NO: 798900 - RNA, 20 nt, Artificial Sequence
  Synthetic
aaguacaaaggccuugaggc

SEQ ID NO: 798901 - RNA, 20 nt, Artificial Sequence
  Synthetic
cuacuuuuuuuucuugaggc

SEQ ID NO: 798902 - RNA, 20 nt, Artificial Sequence
  Synthetic
auuaagaaagauguugaggc

SEQ ID NO: 798903 - RNA, 20 nt, Artificial Sequence
  Synthetic
auaaaauaagauaaauaggc

SEQ ID NO: 798904 - RNA, 20 nt, Artificial Sequence
  Synthetic
uuuagaacuggguaauaggc

SEQ ID NO: 798905 - RNA, 20 nt, Artificial Sequence
  Synthetic
cuuuuauggucaagauaggc

SEQ ID NO: 798906 - RNA, 20 nt, Artificial Sequence
  Synthetic
uaggaaugggagagauaggc

SEQ ID NO: 798907 - RNA, 20 nt, Artificial Sequence
  Synthetic
cccuuguaggagggauaggc

SEQ ID NO: 798908 - RNA, 20 nt, Artificial Sequence
  Synthetic
aaaacuggcaaaauauaggc

SEQ ID NO: 798909 - RNA, 20 nt, Artificial Sequence
  Synthetic
aaagugcuaggauuauaggc

SEQ ID NO: 798910 - RNA, 20 nt, Artificial Sequence
  Synthetic
cagagacuacguaccuaggc

SEQ ID NO: 798911 - RNA, 20 nt, Artificial Sequence
  Synthetic
uuucaguaaggacccuaggc

SEQ ID NO: 798912 - RNA, 20 nt, Artificial Sequence
  Synthetic
ucucacucuguccccuaggc

SEQ ID NO: 798913 - RNA, 20 nt, Artificial Sequence
  Synthetic
ucucacuauguugccuaggc

SEQ ID NO: 798914 - RNA, 20 nt, Artificial Sequence
  Synthetic
ucucacucuguugccuaggc

SEQ ID NO: 798915 - RNA, 20 nt, Artificial Sequence
  Synthetic
uuucaccaaguuggcuaggc

SEQ ID NO: 798916 - RNA, 20 nt, Artificial Sequence
  Synthetic
aaaggaacaguauucuaggc

SEQ ID NO: 798917 - RNA, 20 nt, Artificial Sequence
  Synthetic
aagaguacaguugaguaggc

SEQ ID NO: 798918 - RNA, 20 nt, Artificial Sequence
  Synthetic
aucucugggcucagguaggc

SEQ ID NO: 798919 - RNA, 20 nt, Artificial Sequence
  Synthetic
aauacuuuccaaauguaggc

SEQ ID NO: 798920 - RNA, 20 nt, Artificial Sequence
  Synthetic
agggagagagagauguaggc

SEQ ID NO: 798921 - RNA, 20 nt, Artificial Sequence
  Synthetic
auucuaagugcccuguaggc

SEQ ID NO: 798922 - RNA, 20 nt, Artificial Sequence
  Synthetic
uuuuucagugaaguguaggc

SEQ ID NO: 798923 - RNA, 20 nt, Artificial Sequence
  Synthetic
ugaagaagugcaaauuaggc

SEQ ID NO: 798924 - RNA, 20 nt, Artificial Sequence
  Synthetic
ccuagccagagcaauuaggc

SEQ ID NO: 798925 - RNA, 20 nt, Artificial Sequence
  Synthetic
aguggagaugucaauuaggc

SEQ ID NO: 798926 - RNA, 20 nt, Artificial Sequence
  Synthetic
aauuuucuguuuuauuaggc

SEQ ID NO: 798927 - RNA, 20 nt, Artificial Sequence
  Synthetic
uuuuagguaucugcuuaggc

SEQ ID NO: 798928 - RNA, 20 nt, Artificial Sequence
  Synthetic
cagauacgaaguaguuaggc

SEQ ID NO: 798929 - RNA, 20 nt, Artificial Sequence
  Synthetic
caaaauaaugaaauuuaggc

SEQ ID NO: 798930 - RNA, 20 nt, Artificial Sequence
  Synthetic
auaaagugguaaauuuaggc

SEQ ID NO: 798931 - RNA, 20 nt, Artificial Sequence
  Synthetic
cgaacaugaauaauuuaggc

SEQ ID NO: 798932 - RNA, 20 nt, Artificial Sequence
  Synthetic
uauaaauucauuauuuaggc

SEQ ID NO: 798933 - RNA, 20 nt, Artificial Sequence
  Synthetic
caggcgugagccaccacggc

SEQ ID NO: 798934 - RNA, 20 nt, Artificial Sequence
  Synthetic
cucaaacuuuaauguacggc

SEQ ID NO: 798935 - RNA, 20 nt, Artificial Sequence
  Synthetic
uuugcucuugucgccccggc

SEQ ID NO: 798936 - RNA, 20 nt, Artificial Sequence
  Synthetic
cgugagccaccacgcccggc

SEQ ID NO: 798937 - RNA, 20 nt, Artificial Sequence
  Synthetic
uuuagaacugaauucccggc

SEQ ID NO: 798938 - RNA, 20 nt, Artificial Sequence
  Synthetic
acauacaaauuuuagccggc

SEQ ID NO: 798939 - RNA, 20 nt, Artificial Sequence
  Synthetic
acuuuagagaagaauccggc

SEQ ID NO: 798940 - RNA, 20 nt, Artificial Sequence
  Synthetic
cuuuaagauccauuuccggc

SEQ ID NO: 798941 - RNA, 20 nt, Artificial Sequence
  Synthetic
aagugaggaggagaagcggc

SEQ ID NO: 798942 - RNA, 20 nt, Artificial Sequence
  Synthetic
aagcaauacagggcagcggc

SEQ ID NO: 798943 - RNA, 20 nt, Artificial Sequence
  Synthetic
uggcaugauuuugcagcggc

SEQ ID NO: 798944 - RNA, 20 nt, Artificial Sequence
  Synthetic
uuaaaacagcauguugcggc

SEQ ID NO: 798945 - RNA, 20 nt, Artificial Sequence
  Synthetic
cuaaagagaguaaaaucggc

SEQ ID NO: 798946 - RNA, 20 nt, Artificial Sequence
  Synthetic
uuugcugccgcuggcucggc

SEQ ID NO: 798947 - RNA, 20 nt, Artificial Sequence
  Synthetic
uuauccacucauuggucggc

SEQ ID NO: 798948 - RNA, 20 nt, Artificial Sequence
  Synthetic
uauaaaacaucaauuucggc

SEQ ID NO: 798949 - RNA, 20 nt, Artificial Sequence
  Synthetic
auuuucuucugcaaaagggc

SEQ ID NO: 798950 - RNA, 20 nt, Artificial Sequence
  Synthetic
aguaaaaaaguacaaagggc

SEQ ID NO: 798951 - RNA, 20 nt, Artificial Sequence
  Synthetic
uuaucagcaaaagaaagggc

SEQ ID NO: 798952 - RNA, 20 nt, Artificial Sequence
  Synthetic
uuaaaugaucuagcaagggc

SEQ ID NO: 798953 - RNA, 20 nt, Artificial Sequence
  Synthetic
acuauuaccaccucaagggc

SEQ ID NO: 798954 - RNA, 20 nt, Artificial Sequence
  Synthetic
uuaaguugugauucaagggc

SEQ ID NO: 798955 - RNA, 20 nt, Artificial Sequence
  Synthetic
aaugaugagaugagaagggc

SEQ ID NO: 798956 - RNA, 20 nt, Artificial Sequence
  Synthetic
aggaggauauagugaagggc

SEQ ID NO: 798957 - RNA, 20 nt, Artificial Sequence
  Synthetic
cucugggagcuccuaagggc

SEQ ID NO: 798958 - RNA, 20 nt, Artificial Sequence
  Synthetic
caauggugguugcuaagggc

SEQ ID NO: 798959 - RNA, 20 nt, Artificial Sequence
  Synthetic
aaaaacaucacguuaagggc

SEQ ID NO: 798960 - RNA, 20 nt, Artificial Sequence
  Synthetic
agaacacauagacacagggc

SEQ ID NO: 798961 - RNA, 20 nt, Artificial Sequence
  Synthetic
cuggucuguggccccagggc

SEQ ID NO: 798962 - RNA, 20 nt, Artificial Sequence
  Synthetic
cucacugcaccuuccagggc

SEQ ID NO: 798963 - RNA, 20 nt, Artificial Sequence
  Synthetic
auuaauuuuuaaagcagggc

SEQ ID NO: 798964 - RNA, 20 nt, Artificial Sequence
  Synthetic
auagauugggaaugcagggc

SEQ ID NO: 798965 - RNA, 20 nt, Artificial Sequence
  Synthetic
uuucaaaaaccuaucagggc

SEQ ID NO: 798966 - RNA, 20 nt, Artificial Sequence
  Synthetic
uuacugugaaaagucagggc

SEQ ID NO: 798967 - RNA, 20 nt, Artificial Sequence
  Synthetic
ucaaaugagaguuucagggc

SEQ ID NO: 798968 - RNA, 20 nt, Artificial Sequence
  Synthetic
aaaauaauuaugcagagggc

SEQ ID NO: 798969 - RNA, 20 nt, Artificial Sequence
  Synthetic
acuggaucauaaaggagggc

SEQ ID NO: 798970 - RNA, 20 nt, Artificial Sequence
  Synthetic
uuugggaggccaaggagggc

SEQ ID NO: 798971 - RNA, 20 nt, Artificial Sequence
  Synthetic
uuaucccuggugaggagggc

SEQ ID NO: 798972 - RNA, 20 nt, Artificial Sequence
  Synthetic
ugauaaaaagcagggagggc

SEQ ID NO: 798973 - RNA, 20 nt, Artificial Sequence
  Synthetic
acugugaaauagaugagggc

SEQ ID NO: 798974 - RNA, 20 nt, Artificial Sequence
  Synthetic
auauuaacugcucugagggc

SEQ ID NO: 798975 - RNA, 20 nt, Artificial Sequence
  Synthetic
auucucuaaguagguagggc

SEQ ID NO: 798976 - RNA, 20 nt, Artificial Sequence
  Synthetic
cuuuggaugaaggguagggc

SEQ ID NO: 798977 - RNA, 20 nt, Artificial Sequence
  Synthetic
uuuagagaagagcuuagggc

SEQ ID NO: 798978 - RNA, 20 nt, Artificial Sequence
  Synthetic
ugcugguuucauuuuagggc

SEQ ID NO: 798979 - RNA, 20 nt, Artificial Sequence
  Synthetic
accauucuugcuuuuagggc

SEQ ID NO: 798980 - RNA, 20 nt, Artificial Sequence
  Synthetic
uucaggagcucuuuuagggc

SEQ ID NO: 798981 - RNA, 20 nt, Artificial Sequence
  Synthetic
uauuauauaagaaaacgggc

SEQ ID NO: 798982 - RNA, 20 nt, Artificial Sequence
  Synthetic
caaaaauaaaauucacgggc

SEQ ID NO: 798983 - RNA, 20 nt, Artificial Sequence
  Synthetic
ucucgcacuguugcccgggc

SEQ ID NO: 798984 - RNA, 20 nt, Artificial Sequence
  Synthetic
ucuggcucuguugcccgggc

SEQ ID NO: 798985 - RNA, 20 nt, Artificial Sequence
  Synthetic
agaaaucuuaugggccgggc

SEQ ID NO: 798986 - RNA, 20 nt, Artificial Sequence
  Synthetic
uuucaccauguuggccgggc

SEQ ID NO: 798987 - RNA, 20 nt, Artificial Sequence
  Synthetic
uuucagaagacacaaggggc

SEQ ID NO: 798988 - RNA, 20 nt, Artificial Sequence
  Synthetic
aacaucaggauguaaggggc

SEQ ID NO: 798989 - RNA, 20 nt, Artificial Sequence
  Synthetic
aaaucaaugaagccaggggc

SEQ ID NO: 798990 - RNA, 20 nt, Artificial Sequence
  Synthetic
uaucagugguuuccaggggc

SEQ ID NO: 798991 - RNA, 20 nt, Artificial Sequence
  Synthetic
cagaaguuugcugcaggggc

SEQ ID NO: 798992 - RNA, 20 nt, Artificial Sequence
  Synthetic
auuuuaaauagugcaggggc

SEQ ID NO: 798993 - RNA, 20 nt, Artificial Sequence
  Synthetic
uuuuuccauggaucaggggc

SEQ ID NO: 798994 - RNA, 20 nt, Artificial Sequence
  Synthetic
uugcguugggucucaggggc

SEQ ID NO: 798995 - RNA, 20 nt, Artificial Sequence
  Synthetic
uauauuuuaaaaagaggggc

SEQ ID NO: 798996 - RNA, 20 nt, Artificial Sequence
  Synthetic
acauguaacagcagaggggc

SEQ ID NO: 798997 - RNA, 20 nt, Artificial Sequence
  Synthetic
cugggaaucaagggaggggc

SEQ ID NO: 798998 - RNA, 20 nt, Artificial Sequence
  Synthetic
acuccaucuugaauaggggc

SEQ ID NO: 798999 - RNA, 20 nt, Artificial Sequence
  Synthetic
cuaaugggugggcuaggggc

SEQ ID NO: 799000 - RNA, 20 nt, Artificial Sequence
  Synthetic
cagaagauggauguaggggc

SEQ ID NO: 799001 - RNA, 20 nt, Artificial Sequence
  Synthetic
agaacggucaguuuaggggc

SEQ ID NO: 799002 - RNA, 20 nt, Artificial Sequence
  Synthetic
aggacugucaauuagggggc

SEQ ID NO: 799003 - RNA, 20 nt, Artificial Sequence
  Synthetic
ugguucucaaaauggggggc

SEQ ID NO: 799004 - RNA, 20 nt, Artificial Sequence
  Synthetic
ccugucgugggguggggggc

SEQ ID NO: 799005 - RNA, 20 nt, Artificial Sequence
  Synthetic
uuaaugcccuuccugggggc

SEQ ID NO: 799006 - RNA, 20 nt, Artificial Sequence
  Synthetic
uugguugucacauugggggc

SEQ ID NO: 799007 - RNA, 20 nt, Artificial Sequence
  Synthetic
cucccccgaggauugggggc

SEQ ID NO: 799008 - RNA, 20 nt, Artificial Sequence
  Synthetic
aaauccugaaaaaauggggc

SEQ ID NO: 799009 - RNA, 20 nt, Artificial Sequence
  Synthetic
uauccaaugugaaauggggc

SEQ ID NO: 799010 - RNA, 20 nt, Artificial Sequence
  Synthetic
acggucuucagagauggggc

SEQ ID NO: 799011 - RNA, 20 nt, Artificial Sequence
  Synthetic
caaaaagcaaaaacuggggc

SEQ ID NO: 799012 - RNA, 20 nt, Artificial Sequence
  Synthetic
aagugcaaaggcccuggggc

SEQ ID NO: 799013 - RNA, 20 nt, Artificial Sequence
  Synthetic
agugagaguguugcuggggc

SEQ ID NO: 799014 - RNA, 20 nt, Artificial Sequence
  Synthetic
aucuaagcugcaaguggggc

SEQ ID NO: 799015 - RNA, 20 nt, Artificial Sequence
  Synthetic
uccaggggcugggguggggc

SEQ ID NO: 799016 - RNA, 20 nt, Artificial Sequence
  Synthetic
auagugguggggcuuggggc

SEQ ID NO: 799017 - RNA, 20 nt, Artificial Sequence
  Synthetic
agauggaccagcaaaugggc

SEQ ID NO: 799018 - RNA, 20 nt, Artificial Sequence
  Synthetic
aaauaaagccucaaaugggc

SEQ ID NO: 799019 - RNA, 20 nt, Artificial Sequence
  Synthetic
uggcaucuggagaaaugggc

SEQ ID NO: 799020 - RNA, 20 nt, Artificial Sequence
  Synthetic
acacagaguaaucaaugggc

SEQ ID NO: 799021 - RNA, 20 nt, Artificial Sequence
  Synthetic
ucauuuaaagaguaaugggc

SEQ ID NO: 799022 - RNA, 20 nt, Artificial Sequence
  Synthetic
cacucgcaaagcccaugggc

SEQ ID NO: 799023 - RNA, 20 nt, Artificial Sequence
  Synthetic
ucuucaugccucccaugggc

SEQ ID NO: 799024 - RNA, 20 nt, Artificial Sequence
  Synthetic
cuaaugaacucagcaugggc

SEQ ID NO: 799025 - RNA, 20 nt, Artificial Sequence
  Synthetic
aguugggaugugguaugggc

SEQ ID NO: 799026 - RNA, 20 nt, Artificial Sequence
  Synthetic
uaaaauauuuauguaugggc

SEQ ID NO: 799027 - RNA, 20 nt, Artificial Sequence
  Synthetic
auuaaagaaaucuuaugggc

SEQ ID NO: 799028 - RNA, 20 nt, Artificial Sequence
  Synthetic
uguucaucuaggcacugggc

SEQ ID NO: 799029 - RNA, 20 nt, Artificial Sequence
  Synthetic
cuugggcuucaagccugggc

SEQ ID NO: 799030 - RNA, 20 nt, Artificial Sequence
  Synthetic
agggcuuuuggggccugggc

SEQ ID NO: 799031 - RNA, 20 nt, Artificial Sequence
  Synthetic
ugcugucuuugugccugggc

SEQ ID NO: 799032 - RNA, 20 nt, Artificial Sequence
  Synthetic
aagagaagaaugagcugggc

SEQ ID NO: 799033 - RNA, 20 nt, Artificial Sequence
  Synthetic
uuucaccauguuggcugggc

SEQ ID NO: 799034 - RNA, 20 nt, Artificial Sequence
  Synthetic
caggagcccuacaucugggc

SEQ ID NO: 799035 - RNA, 20 nt, Artificial Sequence
  Synthetic
aaaauugacaucaucugggc

SEQ ID NO: 799036 - RNA, 20 nt, Artificial Sequence
  Synthetic
uugacuugcuugaucugggc

SEQ ID NO: 799037 - RNA, 20 nt, Artificial Sequence
  Synthetic
ucaacuagaaaacucugggc

SEQ ID NO: 799038 - RNA, 20 nt, Artificial Sequence
  Synthetic
ucaguuuccaaacucugggc

SEQ ID NO: 799039 - RNA, 20 nt, Artificial Sequence
  Synthetic
uagauuccuucucucugggc

SEQ ID NO: 799040 - RNA, 20 nt, Artificial Sequence
  Synthetic
uuaaauagagaauucugggc

SEQ ID NO: 799041 - RNA, 20 nt, Artificial Sequence
  Synthetic
caaauaggcauauucugggc

SEQ ID NO: 799042 - RNA, 20 nt, Artificial Sequence
  Synthetic
uuuucaaugauguucugggc

SEQ ID NO: 799043 - RNA, 20 nt, Artificial Sequence
  Synthetic
uugaaaauaaagcagugggc

SEQ ID NO: 799044 - RNA, 20 nt, Artificial Sequence
  Synthetic
cuccacccagcaaggugggc

SEQ ID NO: 799045 - RNA, 20 nt, Artificial Sequence
  Synthetic
auuucacagauggggugggc

SEQ ID NO: 799046 - RNA, 20 nt, Artificial Sequence
  Synthetic
ucucacucugucaugugggc

SEQ ID NO: 799047 - RNA, 20 nt, Artificial Sequence
  Synthetic
uuuccaacaugauauugggc

SEQ ID NO: 799048 - RNA, 20 nt, Artificial Sequence
  Synthetic
ucacaaaugcuugcuugggc

SEQ ID NO: 799049 - RNA, 20 nt, Artificial Sequence
  Synthetic
aagugugaaauuuguugggc

SEQ ID NO: 799050 - RNA, 20 nt, Artificial Sequence
  Synthetic
uuucaagaugagauuugggc

SEQ ID NO: 799051 - RNA, 20 nt, Artificial Sequence
  Synthetic
cucagaaaaaugauuugggc

SEQ ID NO: 799052 - RNA, 20 nt, Artificial Sequence
  Synthetic
aucaaucuacagcaaauggc

SEQ ID NO: 799053 - RNA, 20 nt, Artificial Sequence
  Synthetic
aaauccuguaaauaaauggc

SEQ ID NO: 799054 - RNA, 20 nt, Artificial Sequence
  Synthetic
auagcagggaacuaaauggc

SEQ ID NO: 799055 - RNA, 20 nt, Artificial Sequence
  Synthetic
uggucaaaucacacaauggc

SEQ ID NO: 799056 - RNA, 20 nt, Artificial Sequence
  Synthetic
aaagcuaccaagggaauggc

SEQ ID NO: 799057 - RNA, 20 nt, Artificial Sequence
  Synthetic
cucuguagaaguggaauggc

SEQ ID NO: 799058 - RNA, 20 nt, Artificial Sequence
  Synthetic
auuuuguuucaaugaauggc

SEQ ID NO: 799059 - RNA, 20 nt, Artificial Sequence
  Synthetic
uuacuucccaagugaauggc

SEQ ID NO: 799060 - RNA, 20 nt, Artificial Sequence
  Synthetic
caaguucuuaucauaauggc

SEQ ID NO: 799061 - RNA, 20 nt, Artificial Sequence
  Synthetic
acucaagcuucaguaauggc

SEQ ID NO: 799062 - RNA, 20 nt, Artificial Sequence
  Synthetic
cucauuaauagaaacauggc

SEQ ID NO: 799063 - RNA, 20 nt, Artificial Sequence
  Synthetic
uuauugaauggccacauggc

SEQ ID NO: 799064 - RNA, 20 nt, Artificial Sequence
  Synthetic
ucucaguucuaauacauggc

SEQ ID NO: 799065 - RNA, 20 nt, Artificial Sequence
  Synthetic
ugcaucaucugguacauggc

SEQ ID NO: 799066 - RNA, 20 nt, Artificial Sequence
  Synthetic
uguuauguuuuuaccauggc

SEQ ID NO: 799067 - RNA, 20 nt, Artificial Sequence
  Synthetic
uuuaaagauccacccauggc

SEQ ID NO: 799068 - RNA, 20 nt, Artificial Sequence
  Synthetic
aagaggggaagacccauggc

SEQ ID NO: 799069 - RNA, 20 nt, Artificial Sequence
  Synthetic
uggcuccuuuuagccauggc

SEQ ID NO: 799070 - RNA, 20 nt, Artificial Sequence
  Synthetic
caccuaugugaggccauggc

SEQ ID NO: 799071 - RNA, 20 nt, Artificial Sequence
  Synthetic
uggccccuuuuauccauggc

SEQ ID NO: 799072 - RNA, 20 nt, Artificial Sequence
  Synthetic
aguggacagugaagcauggc

SEQ ID NO: 799073 - RNA, 20 nt, Artificial Sequence
  Synthetic
aggguuuggccaaucauggc

SEQ ID NO: 799074 - RNA, 20 nt, Artificial Sequence
  Synthetic
uuggcaaaacuacucauggc

SEQ ID NO: 799075 - RNA, 20 nt, Artificial Sequence
  Synthetic
uugguuuuaaaucucauggc

SEQ ID NO: 799076 - RNA, 20 nt, Artificial Sequence
  Synthetic
uaaaaauauuuagucauggc

SEQ ID NO: 799077 - RNA, 20 nt, Artificial Sequence
  Synthetic
uauuuaccaaggcagauggc

SEQ ID NO: 799078 - RNA, 20 nt, Artificial Sequence
  Synthetic
auacccaguaaugggauggc

SEQ ID NO: 799079 - RNA, 20 nt, Artificial Sequence
  Synthetic
agacaugaugcugggauggc

SEQ ID NO: 799080 - RNA, 20 nt, Artificial Sequence
  Synthetic
ccauguuccuuugggauggc

SEQ ID NO: 799081 - RNA, 20 nt, Artificial Sequence
  Synthetic
uacauauugucaaauauggc

SEQ ID NO: 799082 - RNA, 20 nt, Artificial Sequence
  Synthetic
aacacgaagaucaauauggc

SEQ ID NO: 799083 - RNA, 20 nt, Artificial Sequence
  Synthetic
cauaagcaaauggauauggc

SEQ ID NO: 799084 - RNA, 20 nt, Artificial Sequence
  Synthetic
ugaggguggaaugguauggc

SEQ ID NO: 799085 - RNA, 20 nt, Artificial Sequence
  Synthetic
uguuuugguuccuguauggc

SEQ ID NO: 799086 - RNA, 20 nt, Artificial Sequence
  Synthetic
auggaggaagugauuauggc

SEQ ID NO: 799087 - RNA, 20 nt, Artificial Sequence
  Synthetic
aagcuguucucacuuauggc

SEQ ID NO: 799088 - RNA, 20 nt, Artificial Sequence
  Synthetic
accacuuccuuauuuauggc

SEQ ID NO: 799089 - RNA, 20 nt, Artificial Sequence
  Synthetic
aaaauauaguauuuuauggc

SEQ ID NO: 799090 - RNA, 20 nt, Artificial Sequence
  Synthetic
cuaaaaauaaaaaaacuggc

SEQ ID NO: 799091 - RNA, 20 nt, Artificial Sequence
  Synthetic
auggugucgggaaaacuggc

SEQ ID NO: 799092 - RNA, 20 nt, Artificial Sequence
  Synthetic
ugggucacaguaaaacuggc

SEQ ID NO: 799093 - RNA, 20 nt, Artificial Sequence
  Synthetic
cuauccugauccuaacuggc

SEQ ID NO: 799094 - RNA, 20 nt, Artificial Sequence
  Synthetic
agacaggagccaacacuggc

SEQ ID NO: 799095 - RNA, 20 nt, Artificial Sequence
  Synthetic
uucaagaucaaggcacuggc

SEQ ID NO: 799096 - RNA, 20 nt, Artificial Sequence
  Synthetic
ugcagucagagaucacuggc

SEQ ID NO: 799097 - RNA, 20 nt, Artificial Sequence
  Synthetic
uauuuuacaacaagacuggc

SEQ ID NO: 799098 - RNA, 20 nt, Artificial Sequence
  Synthetic
ugaaaccaugaaggacuggc

SEQ ID NO: 799099 - RNA, 20 nt, Artificial Sequence
  Synthetic
uguuucgaaacaggacuggc

SEQ ID NO: 799100 - RNA, 20 nt, Artificial Sequence
  Synthetic
auuuauaacaaaauacuggc

SEQ ID NO: 799101 - RNA, 20 nt, Artificial Sequence
  Synthetic
ccugagaggaagauacuggc

SEQ ID NO: 799102 - RNA, 20 nt, Artificial Sequence
  Synthetic
agguccuaaggaaaccuggc

SEQ ID NO: 799103 - RNA, 20 nt, Artificial Sequence
  Synthetic
ugacaacagaaagcccuggc

SEQ ID NO: 799104 - RNA, 20 nt, Artificial Sequence
  Synthetic
uucacuguuguugcccuggc

SEQ ID NO: 799105 - RNA, 20 nt, Artificial Sequence
  Synthetic
uaauauucucacagccuggc

SEQ ID NO: 799106 - RNA, 20 nt, Artificial Sequence
  Synthetic
caugauaaagaaggccuggc

SEQ ID NO: 799107 - RNA, 20 nt, Artificial Sequence
  Synthetic
uguuggugguggggccuggc

SEQ ID NO: 799108 - RNA, 20 nt, Artificial Sequence
  Synthetic
cuucugcugaauugccuggc

SEQ ID NO: 799109 - RNA, 20 nt, Artificial Sequence
  Synthetic
ucuuucuccagcuuccuggc

SEQ ID NO: 799110 - RNA, 20 nt, Artificial Sequence
  Synthetic
cagccucccaugcagcuggc

SEQ ID NO: 799111 - RNA, 20 nt, Artificial Sequence
  Synthetic
ucuuaagauuaagagcuggc

SEQ ID NO: 799112 - RNA, 20 nt, Artificial Sequence
  Synthetic
accuucaucugagagcuggc

SEQ ID NO: 799113 - RNA, 20 nt, Artificial Sequence
  Synthetic
cuuuuuaaaacguagcuggc

SEQ ID NO: 799114 - RNA, 20 nt, Artificial Sequence
  Synthetic
acuuagcugggcaugcuggc

SEQ ID NO: 799115 - RNA, 20 nt, Artificial Sequence
  Synthetic
aauuagccgggcgugcuggc

SEQ ID NO: 799116 - RNA, 20 nt, Artificial Sequence
  Synthetic
acugggcuagacaaucuggc

SEQ ID NO: 799117 - RNA, 20 nt, Artificial Sequence
  Synthetic
uuaaaaaacagcaaucuggc

SEQ ID NO: 799118 - RNA, 20 nt, Artificial Sequence
  Synthetic
uuuaaaagaucacaucuggc

SEQ ID NO: 799119 - RNA, 20 nt, Artificial Sequence
  Synthetic
caugagccaccgcaucuggc

SEQ ID NO: 799120 - RNA, 20 nt, Artificial Sequence
  Synthetic
agcucuggcuggcaucuggc

SEQ ID NO: 799121 - RNA, 20 nt, Artificial Sequence
  Synthetic
cauuacacagguuaucuggc

SEQ ID NO: 799122 - RNA, 20 nt, Artificial Sequence
  Synthetic
uuagaaugaaucacucuggc

SEQ ID NO: 799123 - RNA, 20 nt, Artificial Sequence
  Synthetic
ucauacaggagagcucuggc

SEQ ID NO: 799124 - RNA, 20 nt, Artificial Sequence
  Synthetic
acaaacauuuugucucuggc

SEQ ID NO: 799125 - RNA, 20 nt, Artificial Sequence
  Synthetic
acuuuauuuuagagucuggc

SEQ ID NO: 799126 - RNA, 20 nt, Artificial Sequence
  Synthetic
uuuuuuucuuaaugucuggc

SEQ ID NO: 799127 - RNA, 20 nt, Artificial Sequence
  Synthetic
ucuugcucugucauucuggc

SEQ ID NO: 799128 - RNA, 20 nt, Artificial Sequence
  Synthetic
augggcgauucccuucuggc

SEQ ID NO: 799129 - RNA, 20 nt, Artificial Sequence
  Synthetic
aauguaaauaugcuucuggc

SEQ ID NO: 799130 - RNA, 20 nt, Artificial Sequence
  Synthetic
agagguacuugucuucuggc

SEQ ID NO: 799131 - RNA, 20 nt, Artificial Sequence
  Synthetic
ugaguggggcaauuucuggc

SEQ ID NO: 799132 - RNA, 20 nt, Artificial Sequence
  Synthetic
cuuaagugucugaaaguggc

SEQ ID NO: 799133 - RNA, 20 nt, Artificial Sequence
  Synthetic
aguaagugugguaaaguggc

SEQ ID NO: 799134 - RNA, 20 nt, Artificial Sequence
  Synthetic
accucagccucccaaguggc

SEQ ID NO: 799135 - RNA, 20 nt, Artificial Sequence
  Synthetic
auccugaccaaagaaguggc

SEQ ID NO: 799136 - RNA, 20 nt, Artificial Sequence
  Synthetic
caccagcagcaagaaguggc

SEQ ID NO: 799137 - RNA, 20 nt, Artificial Sequence
  Synthetic
cucaaagacaaggaaguggc

SEQ ID NO: 799138 - RNA, 20 nt, Artificial Sequence
  Synthetic
aaacccuauggggaaguggc

SEQ ID NO: 799139 - RNA, 20 nt, Artificial Sequence
  Synthetic
uaugaaucuaaaacaguggc

SEQ ID NO: 799140 - RNA, 20 nt, Artificial Sequence
  Synthetic
aauuagccaggcgcaguggc

SEQ ID NO: 799141 - RNA, 20 nt, Artificial Sequence
  Synthetic
ccaggcuggagugcaguggc

SEQ ID NO: 799142 - RNA, 20 nt, Artificial Sequence
  Synthetic
caaggagugaccagaguggc

SEQ ID NO: 799143 - RNA, 20 nt, Artificial Sequence
  Synthetic
ugaauauagacaggaguggc

SEQ ID NO: 799144 - RNA, 20 nt, Artificial Sequence
  Synthetic
uuagccauggcuggaguggc

SEQ ID NO: 799145 - RNA, 20 nt, Artificial Sequence
  Synthetic
uuauccauggcuggaguggc

SEQ ID NO: 799146 - RNA, 20 nt, Artificial Sequence
  Synthetic
ccaggcuggaguggaguggc

SEQ ID NO: 799147 - RNA, 20 nt, Artificial Sequence
  Synthetic
accuucacuggcugaguggc

SEQ ID NO: 799148 - RNA, 20 nt, Artificial Sequence
  Synthetic
cauuuuccuacuugaguggc

SEQ ID NO: 799149 - RNA, 20 nt, Artificial Sequence
  Synthetic
aagggugaauuuauaguggc

SEQ ID NO: 799150 - RNA, 20 nt, Artificial Sequence
  Synthetic
aagagagugaaacuaguggc

SEQ ID NO: 799151 - RNA, 20 nt, Artificial Sequence
  Synthetic
ccagagcccccaguaguggc

SEQ ID NO: 799152 - RNA, 20 nt, Artificial Sequence
  Synthetic
aagaugaggggcguaguggc

SEQ ID NO: 799153 - RNA, 20 nt, Artificial Sequence
  Synthetic
uuaggcauuguguuaguggc

SEQ ID NO: 799154 - RNA, 20 nt, Artificial Sequence
  Synthetic
ugcagacucuucuacguggc

SEQ ID NO: 799155 - RNA, 20 nt, Artificial Sequence
  Synthetic
caccuucuucacaagguggc

SEQ ID NO: 799156 - RNA, 20 nt, Artificial Sequence
  Synthetic
ccaccuucuucacagguggc

SEQ ID NO: 799157 - RNA, 20 nt, Artificial Sequence
  Synthetic
aauuagcugggcacgguggc

SEQ ID NO: 799158 - RNA, 20 nt, Artificial Sequence
  Synthetic
ucaccuccacagacgguggc

SEQ ID NO: 799159 - RNA, 20 nt, Artificial Sequence
  Synthetic
uuaaaccuuaaagggguggc

SEQ ID NO: 799160 - RNA, 20 nt, Artificial Sequence
  Synthetic
acauuccugguugggguggc

SEQ ID NO: 799161 - RNA, 20 nt, Artificial Sequence
  Synthetic
aauuagccagacaugguggc

SEQ ID NO: 799162 - RNA, 20 nt, Artificial Sequence
  Synthetic
aauuagccaggcaugguggc

SEQ ID NO: 799163 - RNA, 20 nt, Artificial Sequence
  Synthetic
aauuagccgggcaugguggc

SEQ ID NO: 799164 - RNA, 20 nt, Artificial Sequence
  Synthetic
aacuggccgggcaugguggc

SEQ ID NO: 799165 - RNA, 20 nt, Artificial Sequence
  Synthetic
aauuagcugggcaugguggc

SEQ ID NO: 799166 - RNA, 20 nt, Artificial Sequence
  Synthetic
aaacaaacaggagugguggc

SEQ ID NO: 799167 - RNA, 20 nt, Artificial Sequence
  Synthetic
aauuagccaggcgugguggc

SEQ ID NO: 799168 - RNA, 20 nt, Artificial Sequence
  Synthetic
aauuagccgggcgugguggc

SEQ ID NO: 799169 - RNA, 20 nt, Artificial Sequence
  Synthetic
aauuagcugggcgugguggc

SEQ ID NO: 799170 - RNA, 20 nt, Artificial Sequence
  Synthetic
aauuagccaugcgugguggc

SEQ ID NO: 799171 - RNA, 20 nt, Artificial Sequence
  Synthetic
cuuugggagagggugguggc

SEQ ID NO: 799172 - RNA, 20 nt, Artificial Sequence
  Synthetic
uguucuuaugaugugguggc

SEQ ID NO: 799173 - RNA, 20 nt, Artificial Sequence
  Synthetic
aaugagccagcugugguggc

SEQ ID NO: 799174 - RNA, 20 nt, Artificial Sequence
  Synthetic
aauuagccgggcuugguggc

SEQ ID NO: 799175 - RNA, 20 nt, Artificial Sequence
  Synthetic
ucaaauaagcuguugguggc

SEQ ID NO: 799176 - RNA, 20 nt, Artificial Sequence
  Synthetic
aauuugccagguuugguggc

SEQ ID NO: 799177 - RNA, 20 nt, Artificial Sequence
  Synthetic
cauuuucagcagcauguggc

SEQ ID NO: 799178 - RNA, 20 nt, Artificial Sequence
  Synthetic
agaugacauucugauguggc

SEQ ID NO: 799179 - RNA, 20 nt, Artificial Sequence
  Synthetic
agaaaggauucuuauguggc

SEQ ID NO: 799180 - RNA, 20 nt, Artificial Sequence
  Synthetic
augucuucagcaacuguggc

SEQ ID NO: 799181 - RNA, 20 nt, Artificial Sequence
  Synthetic
agucaagagaugacuguggc

SEQ ID NO: 799182 - RNA, 20 nt, Artificial Sequence
  Synthetic
auuaaaauaugagguguggc

SEQ ID NO: 799183 - RNA, 20 nt, Artificial Sequence
  Synthetic
ccaugguguguguguguggc

SEQ ID NO: 799184 - RNA, 20 nt, Artificial Sequence
  Synthetic
uuucauuacaugcuuguggc

SEQ ID NO: 799185 - RNA, 20 nt, Artificial Sequence
  Synthetic
uauaaagauguauuuguggc

SEQ ID NO: 799186 - RNA, 20 nt, Artificial Sequence
  Synthetic
cguucucauuuauuuguggc

SEQ ID NO: 799187 - RNA, 20 nt, Artificial Sequence
  Synthetic
agaaugcugucaaaauuggc

SEQ ID NO: 799188 - RNA, 20 nt, Artificial Sequence
  Synthetic
aaaaagaaagaugaauuggc

SEQ ID NO: 799189 - RNA, 20 nt, Artificial Sequence
  Synthetic
aaaaaauaauaauaauuggc

SEQ ID NO: 799190 - RNA, 20 nt, Artificial Sequence
  Synthetic
ccacagcauaaaacauuggc

SEQ ID NO: 799191 - RNA, 20 nt, Artificial Sequence
  Synthetic
uaaaacuuauacccauuggc

SEQ ID NO: 799192 - RNA, 20 nt, Artificial Sequence
  Synthetic
uacccuuuccccccauuggc

SEQ ID NO: 799193 - RNA, 20 nt, Artificial Sequence
  Synthetic
aaauauguuguugcauuggc

SEQ ID NO: 799194 - RNA, 20 nt, Artificial Sequence
  Synthetic
uuuuccuucaguucauuggc

SEQ ID NO: 799195 - RNA, 20 nt, Artificial Sequence
  Synthetic
cacucucccaagagauuggc

SEQ ID NO: 799196 - RNA, 20 nt, Artificial Sequence
  Synthetic
auuagugacuaaauauuggc

SEQ ID NO: 799197 - RNA, 20 nt, Artificial Sequence
  Synthetic
ucaauaauuaggguauuggc

SEQ ID NO: 799198 - RNA, 20 nt, Artificial Sequence
  Synthetic
auaugugaaagaaacuuggc

SEQ ID NO: 799199 - RNA, 20 nt, Artificial Sequence
  Synthetic
auuucaugugucaacuuggc

SEQ ID NO: 799200 - RNA, 20 nt, Artificial Sequence
  Synthetic
agaaucugaaggaacuuggc

SEQ ID NO: 799201 - RNA, 20 nt, Artificial Sequence
  Synthetic
aauucaaauguuaacuuggc

SEQ ID NO: 799202 - RNA, 20 nt, Artificial Sequence
  Synthetic
auuuuauguguuaacuuggc

SEQ ID NO: 799203 - RNA, 20 nt, Artificial Sequence
  Synthetic
aguaucuaugaagacuuggc

SEQ ID NO: 799204 - RNA, 20 nt, Artificial Sequence
  Synthetic
aaaaauaaauacuacuuggc

SEQ ID NO: 799205 - RNA, 20 nt, Artificial Sequence
  Synthetic
uuuucuuuucuuaccuuggc

SEQ ID NO: 799206 - RNA, 20 nt, Artificial Sequence
  Synthetic
uucaucuuucccuccuuggc

SEQ ID NO: 799207 - RNA, 20 nt, Artificial Sequence
  Synthetic
uauuuaaaauaguccuuggc

SEQ ID NO: 799208 - RNA, 20 nt, Artificial Sequence
  Synthetic
cugacucagcugggcuuggc

SEQ ID NO: 799209 - RNA, 20 nt, Artificial Sequence
  Synthetic
aguaguauuaacugcuuggc

SEQ ID NO: 799210 - RNA, 20 nt, Artificial Sequence
  Synthetic
acacacaccaagugcuuggc

SEQ ID NO: 799211 - RNA, 20 nt, Artificial Sequence
  Synthetic
uuuaacaagaggcucuuggc

SEQ ID NO: 799212 - RNA, 20 nt, Artificial Sequence
  Synthetic
uccuaugguuuucucuuggc

SEQ ID NO: 799213 - RNA, 20 nt, Artificial Sequence
  Synthetic
ucagagaugcaagucuuggc

SEQ ID NO: 799214 - RNA, 20 nt, Artificial Sequence
  Synthetic
aaucaacauaucaaguuggc

SEQ ID NO: 799215 - RNA, 20 nt, Artificial Sequence
  Synthetic
aauauugugaguaaguuggc

SEQ ID NO: 799216 - RNA, 20 nt, Artificial Sequence
  Synthetic
cuucuauauuguaaguuggc

SEQ ID NO: 799217 - RNA, 20 nt, Artificial Sequence
  Synthetic
uaauaucauaaucaguuggc

SEQ ID NO: 799218 - RNA, 20 nt, Artificial Sequence
  Synthetic
auaauaacguaagaguuggc

SEQ ID NO: 799219 - RNA, 20 nt, Artificial Sequence
  Synthetic
ucaggaaaacaggaguuggc

SEQ ID NO: 799220 - RNA, 20 nt, Artificial Sequence
  Synthetic
aaccagugggaggcguuggc

SEQ ID NO: 799221 - RNA, 20 nt, Artificial Sequence
  Synthetic
agaaaauaauagggguuggc

SEQ ID NO: 799222 - RNA, 20 nt, Artificial Sequence
  Synthetic
caggguuucaccauguuggc

SEQ ID NO: 799223 - RNA, 20 nt, Artificial Sequence
  Synthetic
ugggguuucaccauguuggc

SEQ ID NO: 799224 - RNA, 20 nt, Artificial Sequence
  Synthetic
cggaguuuugccauguuggc

SEQ ID NO: 799225 - RNA, 20 nt, Artificial Sequence
  Synthetic
acaggaauccaucuguuggc

SEQ ID NO: 799226 - RNA, 20 nt, Artificial Sequence
  Synthetic
auuaaaaugaaaguguuggc

SEQ ID NO: 799227 - RNA, 20 nt, Artificial Sequence
  Synthetic
aaacaauuaagaaauuuggc

SEQ ID NO: 799228 - RNA, 20 nt, Artificial Sequence
  Synthetic
uucuucaaaagccauuuggc

SEQ ID NO: 799229 - RNA, 20 nt, Artificial Sequence
  Synthetic
ccacccacgugaccuuuggc

SEQ ID NO: 799230 - RNA, 20 nt, Artificial Sequence
  Synthetic
aggauauggacaucuuuggc

SEQ ID NO: 799231 - RNA, 20 nt, Artificial Sequence
  Synthetic
cuuaugaaacuuaguuuggc

SEQ ID NO: 799232 - RNA, 20 nt, Artificial Sequence
  Synthetic
cuuaugaagcuuaguuuggc

SEQ ID NO: 799233 - RNA, 20 nt, Artificial Sequence
  Synthetic
auagccucauaggguuuggc

SEQ ID NO: 799234 - RNA, 20 nt, Artificial Sequence
  Synthetic
agaauuugagaugguuuggc

SEQ ID NO: 799235 - RNA, 20 nt, Artificial Sequence
  Synthetic
aagauagguaacauuuuggc

SEQ ID NO: 799236 - RNA, 20 nt, Artificial Sequence
  Synthetic
auuucuaaaaguguuuuggc

SEQ ID NO: 799237 - RNA, 20 nt, Artificial Sequence
  Synthetic
ucacuccuuuuuguuuuggc

SEQ ID NO: 799238 - RNA, 20 nt, Artificial Sequence
  Synthetic
uuaggaaaacuauuuuuggc

SEQ ID NO: 799239 - RNA, 20 nt, Artificial Sequence
  Synthetic
cuaaagaacauguuuuuggc

SEQ ID NO: 799240 - RNA, 20 nt, Artificial Sequence
  Synthetic
uaaauaagaaauuuuuuggc

SEQ ID NO: 799241 - RNA, 20 nt, Artificial Sequence
  Synthetic
accuuggccuccaaaaaugc

SEQ ID NO: 799242 - RNA, 20 nt, Artificial Sequence
  Synthetic
aaauauuagaagaaaaaugc

SEQ ID NO: 799243 - RNA, 20 nt, Artificial Sequence
  Synthetic
auuaaaaaacagaaaaaugc

SEQ ID NO: 799244 - RNA, 20 nt, Artificial Sequence
  Synthetic
aagagucaucauaaaaaugc

SEQ ID NO: 799245 - RNA, 20 nt, Artificial Sequence
  Synthetic
uuuccuccgaagcaaaaugc

SEQ ID NO: 799246 - RNA, 20 nt, Artificial Sequence
  Synthetic
cuuuagauauuucaaaaugc

SEQ ID NO: 799247 - RNA, 20 nt, Artificial Sequence
  Synthetic
auuuuugaccaagaaaaugc

SEQ ID NO: 799248 - RNA, 20 nt, Artificial Sequence
  Synthetic
acaagucacagugaaaaugc

SEQ ID NO: 799249 - RNA, 20 nt, Artificial Sequence
  Synthetic
uauauuuuagacuaaaaugc

SEQ ID NO: 799250 - RNA, 20 nt, Artificial Sequence
  Synthetic
aacacuuguccuuaaaaugc

SEQ ID NO: 799251 - RNA, 20 nt, Artificial Sequence
  Synthetic
uaaagaacugcuuaaaaugc

SEQ ID NO: 799252 - RNA, 20 nt, Artificial Sequence
  Synthetic
uuuuauuucuguuaaaaugc

SEQ ID NO: 799253 - RNA, 20 nt, Artificial Sequence
  Synthetic
agacaggcaauuacaaaugc

SEQ ID NO: 799254 - RNA, 20 nt, Artificial Sequence
  Synthetic
agaaaagggauaccaaaugc

SEQ ID NO: 799255 - RNA, 20 nt, Artificial Sequence
  Synthetic
agguaaugaaauccaaaugc

SEQ ID NO: 799256 - RNA, 20 nt, Artificial Sequence
  Synthetic
uaauaaauaauagcaaaugc

SEQ ID NO: 799257 - RNA, 20 nt, Artificial Sequence
  Synthetic
aaacuaaacucugcaaaugc

SEQ ID NO: 799258 - RNA, 20 nt, Artificial Sequence
  Synthetic
agauaaaguaaaucaaaugc

SEQ ID NO: 799259 - RNA, 20 nt, Artificial Sequence
  Synthetic
ucaaauauccugucaaaugc

SEQ ID NO: 799260 - RNA, 20 nt, Artificial Sequence
  Synthetic
auaaaaaauaguucaaaugc

SEQ ID NO: 799261 - RNA, 20 nt, Artificial Sequence
  Synthetic
auauaucugcugagaaaugc

SEQ ID NO: 799262 - RNA, 20 nt, Artificial Sequence
  Synthetic
aaccauugugugagaaaugc

SEQ ID NO: 799263 - RNA, 20 nt, Artificial Sequence
  Synthetic
agauauccaaguggaaaugc

SEQ ID NO: 799264 - RNA, 20 nt, Artificial Sequence
  Synthetic
aaugucucaaugugaaaugc

SEQ ID NO: 799265 - RNA, 20 nt, Artificial Sequence
  Synthetic
acauuccagaauauaaaugc

SEQ ID NO: 799266 - RNA, 20 nt, Artificial Sequence
  Synthetic
uaaaccuggcaacuaaaugc

SEQ ID NO: 799267 - RNA, 20 nt, Artificial Sequence
  Synthetic
ucaauggcuucccuaaaugc

SEQ ID NO: 799268 - RNA, 20 nt, Artificial Sequence
  Synthetic
agaauuagaaauuuaaaugc

SEQ ID NO: 799269 - RNA, 20 nt, Artificial Sequence
  Synthetic
agcucaaggccuuuaaaugc

SEQ ID NO: 799270 - RNA, 20 nt, Artificial Sequence
  Synthetic
cugguguuugaaaacaaugc

SEQ ID NO: 799271 - RNA, 20 nt, Artificial Sequence
  Synthetic
caaauuuuaaucaacaaugc

SEQ ID NO: 799272 - RNA, 20 nt, Artificial Sequence
  Synthetic
uggguguauuuaaccaaugc

SEQ ID NO: 799273 - RNA, 20 nt, Artificial Sequence
  Synthetic
agucaaaagacacccaaugc

SEQ ID NO: 799274 - RNA, 20 nt, Artificial Sequence
  Synthetic
uuguggauucuugccaaugc

SEQ ID NO: 799275 - RNA, 20 nt, Artificial Sequence
  Synthetic
acucagucugauggcaaugc

SEQ ID NO: 799276 - RNA, 20 nt, Artificial Sequence
  Synthetic
cauccugaaaaacucaaugc

SEQ ID NO: 799277 - RNA, 20 nt, Artificial Sequence
  Synthetic
caaucaggguaaaagaaugc

SEQ ID NO: 799278 - RNA, 20 nt, Artificial Sequence
  Synthetic
uagcucagcaugaagaaugc

SEQ ID NO: 799279 - RNA, 20 nt, Artificial Sequence
  Synthetic
uacuuuaaaagugagaaugc

SEQ ID NO: 799280 - RNA, 20 nt, Artificial Sequence
  Synthetic
uucaaagaagaauagaaugc

SEQ ID NO: 799281 - RNA, 20 nt, Artificial Sequence
  Synthetic
aucaggauccagaggaaugc

SEQ ID NO: 799282 - RNA, 20 nt, Artificial Sequence
  Synthetic
uuacuuaucuggaggaaugc

SEQ ID NO: 799283 - RNA, 20 nt, Artificial Sequence
  Synthetic
ugguuuaauuucuggaaugc

SEQ ID NO: 799284 - RNA, 20 nt, Artificial Sequence
  Synthetic
uuuaguuuaaaaaugaaugc

SEQ ID NO: 799285 - RNA, 20 nt, Artificial Sequence
  Synthetic
acacauuucugugugaaugc

SEQ ID NO: 799286 - RNA, 20 nt, Artificial Sequence
  Synthetic
aaguauaguguaaauaaugc

SEQ ID NO: 799287 - RNA, 20 nt, Artificial Sequence
  Synthetic
agugacaagauucauaaugc

SEQ ID NO: 799288 - RNA, 20 nt, Artificial Sequence
  Synthetic
uguccuuagcaaacuaaugc

SEQ ID NO: 799289 - RNA, 20 nt, Artificial Sequence
  Synthetic
uagaacagcagaacuaaugc

SEQ ID NO: 799290 - RNA, 20 nt, Artificial Sequence
  Synthetic
cuacugcugucuccuaaugc

SEQ ID NO: 799291 - RNA, 20 nt, Artificial Sequence
  Synthetic
aacaugucagcaucuaaugc

SEQ ID NO: 799292 - RNA, 20 nt, Artificial Sequence
  Synthetic
uauaugaauaauucuaaugc

SEQ ID NO: 799293 - RNA, 20 nt, Artificial Sequence
  Synthetic
uggaagaagcuggguaaugc

SEQ ID NO: 799294 - RNA, 20 nt, Artificial Sequence
  Synthetic
uggagcucaagugguaaugc

SEQ ID NO: 799295 - RNA, 20 nt, Artificial Sequence
  Synthetic
uauccuaagugaauuaaugc

SEQ ID NO: 799296 - RNA, 20 nt, Artificial Sequence
  Synthetic
auccaaugacugauuaaugc

SEQ ID NO: 799297 - RNA, 20 nt, Artificial Sequence
  Synthetic
auucaauaaauuauuaaugc

SEQ ID NO: 799298 - RNA, 20 nt, Artificial Sequence
  Synthetic
aaaggguauauucaacaugc

SEQ ID NO: 799299 - RNA, 20 nt, Artificial Sequence
  Synthetic
cugagccccucauaacaugc

SEQ ID NO: 799300 - RNA, 20 nt, Artificial Sequence
  Synthetic
cacaguugcugaagacaugc

SEQ ID NO: 799301 - RNA, 20 nt, Artificial Sequence
  Synthetic
cguagguuuuggccccaugc

SEQ ID NO: 799302 - RNA, 20 nt, Artificial Sequence
  Synthetic
ucuugcucuauuccccaugc

SEQ ID NO: 799303 - RNA, 20 nt, Artificial Sequence
  Synthetic
aucuggaauggggcccaugc

SEQ ID NO: 799304 - RNA, 20 nt, Artificial Sequence
  Synthetic
aguagagaaaaaagccaugc

SEQ ID NO: 799305 - RNA, 20 nt, Artificial Sequence
  Synthetic
uagguaugcgugggccaugc

SEQ ID NO: 799306 - RNA, 20 nt, Artificial Sequence
  Synthetic
ucuucuuaaacaugccaugc

SEQ ID NO: 799307 - RNA, 20 nt, Artificial Sequence
  Synthetic
uauguauacaugugccaugc

SEQ ID NO: 799308 - RNA, 20 nt, Artificial Sequence
  Synthetic
uauguaugcaugugccaugc

SEQ ID NO: 799309 - RNA, 20 nt, Artificial Sequence
  Synthetic
acaacugcaaucauccaugc

SEQ ID NO: 799310 - RNA, 20 nt, Artificial Sequence
  Synthetic
uaucguauuccuauccaugc

SEQ ID NO: 799311 - RNA, 20 nt, Artificial Sequence
  Synthetic
uacaaauuguaccagcaugc

SEQ ID NO: 799312 - RNA, 20 nt, Artificial Sequence
  Synthetic
cauuuuccuucccagcaugc

SEQ ID NO: 799313 - RNA, 20 nt, Artificial Sequence
  Synthetic
aaaaaauuagcugggcaugc

SEQ ID NO: 799314 - RNA, 20 nt, Artificial Sequence
  Synthetic
aaaaacuuagcugggcaugc

SEQ ID NO: 799315 - RNA, 20 nt, Artificial Sequence
  Synthetic
auauuaaauauguggcaugc

SEQ ID NO: 799316 - RNA, 20 nt, Artificial Sequence
  Synthetic
augaagcaguucaugcaugc

SEQ ID NO: 799317 - RNA, 20 nt, Artificial Sequence
  Synthetic
uuauugugugcauugcaugc

SEQ ID NO: 799318 - RNA, 20 nt, Artificial Sequence
  Synthetic
caggagcucugcuugcaugc

SEQ ID NO: 799319 - RNA, 20 nt, Artificial Sequence
  Synthetic
uauuugauugaaaaucaugc

SEQ ID NO: 799320 - RNA, 20 nt, Artificial Sequence
  Synthetic
ugaagccaacuugaucaugc

SEQ ID NO: 799321 - RNA, 20 nt, Artificial Sequence
  Synthetic
uuacccuauggauaucaugc

SEQ ID NO: 799322 - RNA, 20 nt, Artificial Sequence
  Synthetic
ccaggugaugacacucaugc

SEQ ID NO: 799323 - RNA, 20 nt, Artificial Sequence
  Synthetic
aaauaagagauggcucaugc

SEQ ID NO: 799324 - RNA, 20 nt, Artificial Sequence
  Synthetic
aucugaaagaugucucaugc

SEQ ID NO: 799325 - RNA, 20 nt, Artificial Sequence
  Synthetic
agauugccacaaauucaugc

SEQ ID NO: 799326 - RNA, 20 nt, Artificial Sequence
  Synthetic
accaaauacaguuuucaugc

SEQ ID NO: 799327 - RNA, 20 nt, Artificial Sequence
  Synthetic
aucaucuaaguaaaagaugc

SEQ ID NO: 799328 - RNA, 20 nt, Artificial Sequence
  Synthetic
caagauccuuccaaagaugc

SEQ ID NO: 799329 - RNA, 20 nt, Artificial Sequence
  Synthetic
uggccaaucagccaagaugc

SEQ ID NO: 799330 - RNA, 20 nt, Artificial Sequence
  Synthetic
ccccccuaauuucaagaugc

SEQ ID NO: 799331 - RNA, 20 nt, Artificial Sequence
  Synthetic
agaagaaagacugaagaugc

SEQ ID NO: 799332 - RNA, 20 nt, Artificial Sequence
  Synthetic
agucaggaaacaacagaugc

SEQ ID NO: 799333 - RNA, 20 nt, Artificial Sequence
  Synthetic
agucaggcaacaacagaugc

SEQ ID NO: 799334 - RNA, 20 nt, Artificial Sequence
  Synthetic
agucaaaaaauaccagaugc

SEQ ID NO: 799335 - RNA, 20 nt, Artificial Sequence
  Synthetic
uuagauaaauauccagaugc

SEQ ID NO: 799336 - RNA, 20 nt, Artificial Sequence
  Synthetic
aagaguugaaaaagagaugc

SEQ ID NO: 799337 - RNA, 20 nt, Artificial Sequence
  Synthetic
uuuucuuuuaaaagagaugc

SEQ ID NO: 799338 - RNA, 20 nt, Artificial Sequence
  Synthetic
aaagagagagagagagaugc

SEQ ID NO: 799339 - RNA, 20 nt, Artificial Sequence
  Synthetic
aaggaaacaaaucgagaugc

SEQ ID NO: 799340 - RNA, 20 nt, Artificial Sequence
  Synthetic
uuuggugacugaauagaugc

SEQ ID NO: 799341 - RNA, 20 nt, Artificial Sequence
  Synthetic
accucauuuucccuagaugc

SEQ ID NO: 799342 - RNA, 20 nt, Artificial Sequence
  Synthetic
cccagaagcugaguagaugc

SEQ ID NO: 799343 - RNA, 20 nt, Artificial Sequence
  Synthetic
caaggugaaacauuagaugc

SEQ ID NO: 799344 - RNA, 20 nt, Artificial Sequence
  Synthetic
caggauugacuuggcgaugc

SEQ ID NO: 799345 - RNA, 20 nt, Artificial Sequence
  Synthetic
uaggauugacuuggcgaugc

SEQ ID NO: 799346 - RNA, 20 nt, Artificial Sequence
  Synthetic
aaaguguuccuaaaggaugc

SEQ ID NO: 799347 - RNA, 20 nt, Artificial Sequence
  Synthetic
uuuuuaucaugaauggaugc

SEQ ID NO: 799348 - RNA, 20 nt, Artificial Sequence
  Synthetic
cuuugguaucagaaugaugc

SEQ ID NO: 799349 - RNA, 20 nt, Artificial Sequence
  Synthetic
aaaacaaaacaacaugaugc

SEQ ID NO: 799350 - RNA, 20 nt, Artificial Sequence
  Synthetic
cuguauuuaagacaugaugc

SEQ ID NO: 799351 - RNA, 20 nt, Artificial Sequence
  Synthetic
aaaagauaugcagaugaugc

SEQ ID NO: 799352 - RNA, 20 nt, Artificial Sequence
  Synthetic
cuuugguaucaggaugaugc

SEQ ID NO: 799353 - RNA, 20 nt, Artificial Sequence
  Synthetic
uuuugguaucaggaugaugc

SEQ ID NO: 799354 - RNA, 20 nt, Artificial Sequence
  Synthetic
cacaguaacaaauaugaugc

SEQ ID NO: 799355 - RNA, 20 nt, Artificial Sequence
  Synthetic
agucaggaaacaacugaugc

SEQ ID NO: 799356 - RNA, 20 nt, Artificial Sequence
  Synthetic
ugggguagauugccugaugc

SEQ ID NO: 799357 - RNA, 20 nt, Artificial Sequence
  Synthetic
aacuauaacauagcugaugc

SEQ ID NO: 799358 - RNA, 20 nt, Artificial Sequence
  Synthetic
uuccuagguuaugcugaugc

SEQ ID NO: 799359 - RNA, 20 nt, Artificial Sequence
  Synthetic
uaagucuucuauucugaugc

SEQ ID NO: 799360 - RNA, 20 nt, Artificial Sequence
  Synthetic
auacauauagaaggugaugc

SEQ ID NO: 799361 - RNA, 20 nt, Artificial Sequence
  Synthetic
ucucacguuuguggugaugc

SEQ ID NO: 799362 - RNA, 20 nt, Artificial Sequence
  Synthetic
ccauggggccagauugaugc

SEQ ID NO: 799363 - RNA, 20 nt, Artificial Sequence
  Synthetic
cugauagacuugcuugaugc

SEQ ID NO: 799364 - RNA, 20 nt, Artificial Sequence
  Synthetic
aaagaauccagguuugaugc

SEQ ID NO: 799365 - RNA, 20 nt, Artificial Sequence
  Synthetic
ucaccuggaaauuuugaugc

SEQ ID NO: 799366 - RNA, 20 nt, Artificial Sequence
  Synthetic
caaggcacugccaaauaugc

SEQ ID NO: 799367 - RNA, 20 nt, Artificial Sequence
  Synthetic
caugcauacaauaaauaugc

SEQ ID NO: 799368 - RNA, 20 nt, Artificial Sequence
  Synthetic
accaagccuucacaauaugc

SEQ ID NO: 799369 - RNA, 20 nt, Artificial Sequence
  Synthetic
uggccaccaugagaauaugc

SEQ ID NO: 799370 - RNA, 20 nt, Artificial Sequence
  Synthetic
cacuauucaaaauaauaugc

SEQ ID NO: 799371 - RNA, 20 nt, Artificial Sequence
  Synthetic
uaggcuuugugauaauaugc

SEQ ID NO: 799372 - RNA, 20 nt, Artificial Sequence
  Synthetic
uuucuguuauugccauaugc

SEQ ID NO: 799373 - RNA, 20 nt, Artificial Sequence
  Synthetic
aucuagcaguuucuauaugc

SEQ ID NO: 799374 - RNA, 20 nt, Artificial Sequence
  Synthetic
auagcuauauauguauaugc

SEQ ID NO: 799375 - RNA, 20 nt, Artificial Sequence
  Synthetic
cuuuggcucuguuuauaugc

SEQ ID NO: 799376 - RNA, 20 nt, Artificial Sequence
  Synthetic
cguugguucuguuuauaugc

SEQ ID NO: 799377 - RNA, 20 nt, Artificial Sequence
  Synthetic
ugcauuucacaucacuaugc

SEQ ID NO: 799378 - RNA, 20 nt, Artificial Sequence
  Synthetic
uuuagaagaaguaccuaugc

SEQ ID NO: 799379 - RNA, 20 nt, Artificial Sequence
  Synthetic
uagcuugaaauuggcuaugc

SEQ ID NO: 799380 - RNA, 20 nt, Artificial Sequence
  Synthetic
uaauuaagacagugcuaugc

SEQ ID NO: 799381 - RNA, 20 nt, Artificial Sequence
  Synthetic
uacuaguauauaaucuaugc

SEQ ID NO: 799382 - RNA, 20 nt, Artificial Sequence
  Synthetic
augaccugagaucucuaugc

SEQ ID NO: 799383 - RNA, 20 nt, Artificial Sequence
  Synthetic
uugagccacagcugguaugc

SEQ ID NO: 799384 - RNA, 20 nt, Artificial Sequence
  Synthetic
agcauaguaauuauguaugc

SEQ ID NO: 799385 - RNA, 20 nt, Artificial Sequence
  Synthetic
agggauuuaucccuguaugc

SEQ ID NO: 799386 - RNA, 20 nt, Artificial Sequence
  Synthetic
aaugagauaauggcuuaugc

SEQ ID NO: 799387 - RNA, 20 nt, Artificial Sequence
  Synthetic
auaauagaaaggaguuaugc

SEQ ID NO: 799388 - RNA, 20 nt, Artificial Sequence
  Synthetic
uggaaaaauauacguuaugc

SEQ ID NO: 799389 - RNA, 20 nt, Artificial Sequence
  Synthetic
aaacaccugcugcguuaugc

SEQ ID NO: 799390 - RNA, 20 nt, Artificial Sequence
  Synthetic
cagugcuucacaauuuaugc

SEQ ID NO: 799391 - RNA, 20 nt, Artificial Sequence
  Synthetic
auauccagauuuauuuaugc

SEQ ID NO: 799392 - RNA, 20 nt, Artificial Sequence
  Synthetic
aacccucucaaaguuuaugc

SEQ ID NO: 799393 - RNA, 20 nt, Artificial Sequence
  Synthetic
uucuaauacauuguuuaugc

SEQ ID NO: 799394 - RNA, 20 nt, Artificial Sequence
  Synthetic
acuauaguguagaaaacugc

SEQ ID NO: 799395 - RNA, 20 nt, Artificial Sequence
  Synthetic
uggcuuucacuucaaacugc

SEQ ID NO: 799396 - RNA, 20 nt, Artificial Sequence
  Synthetic
acaaccaacucugaaacugc

SEQ ID NO: 799397 - RNA, 20 nt, Artificial Sequence
  Synthetic
uauucaguuuccucaacugc

SEQ ID NO: 799398 - RNA, 20 nt, Artificial Sequence
  Synthetic
ucguucugcuucugaacugc

SEQ ID NO: 799399 - RNA, 20 nt, Artificial Sequence
  Synthetic
aauauuagccauugaacugc

SEQ ID NO: 799400 - RNA, 20 nt, Artificial Sequence
  Synthetic
acaaaacaaaguugaacugc

SEQ ID NO: 799401 - RNA, 20 nt, Artificial Sequence
  Synthetic
ugucuguagcagcuaacugc

SEQ ID NO: 799402 - RNA, 20 nt, Artificial Sequence
  Synthetic
cacuagaugccucuaacugc

SEQ ID NO: 799403 - RNA, 20 nt, Artificial Sequence
  Synthetic
aguuaaauuauauuaacugc

SEQ ID NO: 799404 - RNA, 20 nt, Artificial Sequence
  Synthetic
aggaacacuuaacacacugc

SEQ ID NO: 799405 - RNA, 20 nt, Artificial Sequence
  Synthetic
ugcuuguacuaggacacugc

SEQ ID NO: 799406 - RNA, 20 nt, Artificial Sequence
  Synthetic
ugaugaaagguggacacugc

SEQ ID NO: 799407 - RNA, 20 nt, Artificial Sequence
  Synthetic
aacaucuaucuguacacugc

SEQ ID NO: 799408 - RNA, 20 nt, Artificial Sequence
  Synthetic
acggaacauuuguacacugc

SEQ ID NO: 799409 - RNA, 20 nt, Artificial Sequence
  Synthetic
cccuuucuguugaccacugc

SEQ ID NO: 799410 - RNA, 20 nt, Artificial Sequence
  Synthetic
ugauccagcaaucccacugc

SEQ ID NO: 799411 - RNA, 20 nt, Artificial Sequence
  Synthetic
ucauuacuauccuccacugc

SEQ ID NO: 799412 - RNA, 20 nt, Artificial Sequence
  Synthetic
cuucuaagagggggcacugc

SEQ ID NO: 799413 - RNA, 20 nt, Artificial Sequence
  Synthetic
uaauaacuauuugucacugc

SEQ ID NO: 799414 - RNA, 20 nt, Artificial Sequence
  Synthetic
aagggaaguauauucacugc

SEQ ID NO: 799415 - RNA, 20 nt, Artificial Sequence
  Synthetic
ucuugguuuuucuucacugc

SEQ ID NO: 799416 - RNA, 20 nt, Artificial Sequence
  Synthetic
cuggucacaacaaagacugc

SEQ ID NO: 799417 - RNA, 20 nt, Artificial Sequence
  Synthetic
uaacauuuaacuaagacugc

SEQ ID NO: 799418 - RNA, 20 nt, Artificial Sequence
  Synthetic
uaaauccaaaauaggacugc

SEQ ID NO: 799419 - RNA, 20 nt, Artificial Sequence
  Synthetic
agaaggugaagagggacugc

SEQ ID NO: 799420 - RNA, 20 nt, Artificial Sequence
  Synthetic
caagggcuaacguggacugc

SEQ ID NO: 799421 - RNA, 20 nt, Artificial Sequence
  Synthetic
agcccuuaaucaaugacugc

SEQ ID NO: 799422 - RNA, 20 nt, Artificial Sequence
  Synthetic
accugcuccugaaugacugc

SEQ ID NO: 799423 - RNA, 20 nt, Artificial Sequence
  Synthetic
auuagcugaaacuugacugc

SEQ ID NO: 799424 - RNA, 20 nt, Artificial Sequence
  Synthetic
caaaaaaaugccaauacugc

SEQ ID NO: 799425 - RNA, 20 nt, Artificial Sequence
  Synthetic
auuuuagauuggaauacugc

SEQ ID NO: 799426 - RNA, 20 nt, Artificial Sequence
  Synthetic
cuagaagucuuauauacugc

SEQ ID NO: 799427 - RNA, 20 nt, Artificial Sequence
  Synthetic
uagggugccuguccuacugc

SEQ ID NO: 799428 - RNA, 20 nt, Artificial Sequence
  Synthetic
uuaugaaauuuuauuacugc

SEQ ID NO: 799429 - RNA, 20 nt, Artificial Sequence
  Synthetic
augaggagguaauuuacugc

SEQ ID NO: 799430 - RNA, 20 nt, Artificial Sequence
  Synthetic
cuucugaugucuccaccugc

SEQ ID NO: 799431 - RNA, 20 nt, Artificial Sequence
  Synthetic
ccaccagcccuuccaccugc

SEQ ID NO: 799432 - RNA, 20 nt, Artificial Sequence
  Synthetic
uaggaagcccauucaccugc

SEQ ID NO: 799433 - RNA, 20 nt, Artificial Sequence
  Synthetic
acagagacuacaugaccugc

SEQ ID NO: 799434 - RNA, 20 nt, Artificial Sequence
  Synthetic
auccauaugcuuuuaccugc

SEQ ID NO: 799435 - RNA, 20 nt, Artificial Sequence
  Synthetic
ccuucccaccucaccccugc

SEQ ID NO: 799436 - RNA, 20 nt, Artificial Sequence
  Synthetic
auaaagucugacaucccugc

SEQ ID NO: 799437 - RNA, 20 nt, Artificial Sequence
  Synthetic
aaaagauuaugacucccugc

SEQ ID NO: 799438 - RNA, 20 nt, Artificial Sequence
  Synthetic
uagacugucugacucccugc

SEQ ID NO: 799439 - RNA, 20 nt, Artificial Sequence
  Synthetic
cucagugaggcuuucccugc

SEQ ID NO: 799440 - RNA, 20 nt, Artificial Sequence
  Synthetic
uaacaaucaucugagccugc

SEQ ID NO: 799441 - RNA, 20 nt, Artificial Sequence
  Synthetic
ucacugcaaccuccgccugc

SEQ ID NO: 799442 - RNA, 20 nt, Artificial Sequence
  Synthetic
agccaccgugccgggccugc

SEQ ID NO: 799443 - RNA, 20 nt, Artificial Sequence
  Synthetic
cagcaggaguaugggccugc

SEQ ID NO: 799444 - RNA, 20 nt, Artificial Sequence
  Synthetic
aaaaagggcuuguggccugc

SEQ ID NO: 799445 - RNA, 20 nt, Artificial Sequence
  Synthetic
aagaccagaucccugccugc

SEQ ID NO: 799446 - RNA, 20 nt, Artificial Sequence
  Synthetic
acuuaaacguuccugccugc

SEQ ID NO: 799447 - RNA, 20 nt, Artificial Sequence
  Synthetic
uuccaaaccuggcugccugc

SEQ ID NO: 799448 - RNA, 20 nt, Artificial Sequence
  Synthetic
cacugaaagaugcugccugc

SEQ ID NO: 799449 - RNA, 20 nt, Artificial Sequence
  Synthetic
agaguuuagaaagugccugc

SEQ ID NO: 799450 - RNA, 20 nt, Artificial Sequence
  Synthetic
acuggucuuuuaucuccugc

SEQ ID NO: 799451 - RNA, 20 nt, Artificial Sequence
  Synthetic
ucacuuaagaagucuccugc

SEQ ID NO: 799452 - RNA, 20 nt, Artificial Sequence
  Synthetic
acuguucacuggucuccugc

SEQ ID NO: 799453 - RNA, 20 nt, Artificial Sequence
  Synthetic
auggguuggucucuuccugc

SEQ ID NO: 799454 - RNA, 20 nt, Artificial Sequence
  Synthetic
cauucagucuuucuuccugc

SEQ ID NO: 799455 - RNA, 20 nt, Artificial Sequence
  Synthetic
uuucucuucagaaaagcugc

SEQ ID NO: 799456 - RNA, 20 nt, Artificial Sequence
  Synthetic
agugauuuaaaacaagcugc

SEQ ID NO: 799457 - RNA, 20 nt, Artificial Sequence
  Synthetic
cuuucuuauccacaagcugc

SEQ ID NO: 799458 - RNA, 20 nt, Artificial Sequence
  Synthetic
uucacuucuauucaagcugc

SEQ ID NO: 799459 - RNA, 20 nt, Artificial Sequence
  Synthetic
ugcauaaauuguacagcugc

SEQ ID NO: 799460 - RNA, 20 nt, Artificial Sequence
  Synthetic
auacuucugaccccagcugc

SEQ ID NO: 799461 - RNA, 20 nt, Artificial Sequence
  Synthetic
aaacuggguugcccagcugc

SEQ ID NO: 799462 - RNA, 20 nt, Artificial Sequence
  Synthetic
ccuaauuguucugcagcugc

SEQ ID NO: 799463 - RNA, 20 nt, Artificial Sequence
  Synthetic
aacauuccucagagagcugc

SEQ ID NO: 799464 - RNA, 20 nt, Artificial Sequence
  Synthetic
uguuagaaucacugagcugc

SEQ ID NO: 799465 - RNA, 20 nt, Artificial Sequence
  Synthetic
cacaucaggaggugagcugc

SEQ ID NO: 799466 - RNA, 20 nt, Artificial Sequence
  Synthetic
agaugggaccaucuagcugc

SEQ ID NO: 799467 - RNA, 20 nt, Artificial Sequence
  Synthetic
cccaagcagguugccgcugc

SEQ ID NO: 799468 - RNA, 20 nt, Artificial Sequence
  Synthetic
uuuuggggagugaaggcugc

SEQ ID NO: 799469 - RNA, 20 nt, Artificial Sequence
  Synthetic
cucauuaaaacacaggcugc

SEQ ID NO: 799470 - RNA, 20 nt, Artificial Sequence
  Synthetic
ugcacuccagccugggcugc

SEQ ID NO: 799471 - RNA, 20 nt, Artificial Sequence
  Synthetic
uguugaccacugcuggcugc

SEQ ID NO: 799472 - RNA, 20 nt, Artificial Sequence
  Synthetic
agaaucugagaaguggcugc

SEQ ID NO: 799473 - RNA, 20 nt, Artificial Sequence
  Synthetic
cugauuuuuuacuuggcugc

SEQ ID NO: 799474 - RNA, 20 nt, Artificial Sequence
  Synthetic
ccauaagacuucuuggcugc

SEQ ID NO: 799475 - RNA, 20 nt, Artificial Sequence
  Synthetic
agaguguuccauuuggcugc

SEQ ID NO: 799476 - RNA, 20 nt, Artificial Sequence
  Synthetic
ucuaauuggcaaaaugcugc

SEQ ID NO: 799477 - RNA, 20 nt, Artificial Sequence
  Synthetic
ugugagugcuuuaaugcugc

SEQ ID NO: 799478 - RNA, 20 nt, Artificial Sequence
  Synthetic
ccauguagaacagaugcugc

SEQ ID NO: 799479 - RNA, 20 nt, Artificial Sequence
  Synthetic
uuuugguaucaggaugcugc

SEQ ID NO: 799480 - RNA, 20 nt, Artificial Sequence
  Synthetic
ccagguguucaugaugcugc

SEQ ID NO: 799481 - RNA, 20 nt, Artificial Sequence
  Synthetic
ccaggugauacugaugcugc

SEQ ID NO: 799482 - RNA, 20 nt, Artificial Sequence
  Synthetic
auaagugaugcugaugcugc

SEQ ID NO: 799483 - RNA, 20 nt, Artificial Sequence
  Synthetic
ccaggugaugcugaugcugc

SEQ ID NO: 799484 - RNA, 20 nt, Artificial Sequence
  Synthetic
aauaauaauuguuaugcugc

SEQ ID NO: 799485 - RNA, 20 nt, Artificial Sequence
  Synthetic
agucaggaacccucugcugc

SEQ ID NO: 799486 - RNA, 20 nt, Artificial Sequence
  Synthetic
uccaggcagaagucugcugc

SEQ ID NO: 799487 - RNA, 20 nt, Artificial Sequence
  Synthetic
agcuaguugagcagugcugc

SEQ ID NO: 799488 - RNA, 20 nt, Artificial Sequence
  Synthetic
ccagcugcuaggagugcugc

SEQ ID NO: 799489 - RNA, 20 nt, Artificial Sequence
  Synthetic
ucagacguugcuggugcugc

SEQ ID NO: 799490 - RNA, 20 nt, Artificial Sequence
  Synthetic
cucucaugaaaaugugcugc

SEQ ID NO: 799491 - RNA, 20 nt, Artificial Sequence
  Synthetic
uaagcuuuuucaugugcugc

SEQ ID NO: 799492 - RNA, 20 nt, Artificial Sequence
  Synthetic
uaagcuuuuugaugugcugc

SEQ ID NO: 799493 - RNA, 20 nt, Artificial Sequence
  Synthetic
caagaaaaauauauugcugc

SEQ ID NO: 799494 - RNA, 20 nt, Artificial Sequence
  Synthetic
uaaagacauagccuugcugc

SEQ ID NO: 799495 - RNA, 20 nt, Artificial Sequence
  Synthetic
uuccugccacuucuugcugc

SEQ ID NO: 799496 - RNA, 20 nt, Artificial Sequence
  Synthetic
uccaggcagaaguuugcugc

SEQ ID NO: 799497 - RNA, 20 nt, Artificial Sequence
  Synthetic
ccaaagugccuguuugcugc

SEQ ID NO: 799498 - RNA, 20 nt, Artificial Sequence
  Synthetic
uccccagacaccaaaucugc

SEQ ID NO: 799499 - RNA, 20 nt, Artificial Sequence
  Synthetic
augcauaguauuccaucugc

SEQ ID NO: 799500 - RNA, 20 nt, Artificial Sequence
  Synthetic
auuuugaaucauguaucugc

SEQ ID NO: 799501 - RNA, 20 nt, Artificial Sequence
  Synthetic
auccugggcugaaacucugc

SEQ ID NO: 799502 - RNA, 20 nt, Artificial Sequence
  Synthetic
caaguuggaaaacacucugc

SEQ ID NO: 799503 - RNA, 20 nt, Artificial Sequence
  Synthetic
ccucaugaacaaaccucugc

SEQ ID NO: 799504 - RNA, 20 nt, Artificial Sequence
  Synthetic
cauugucaaacguccucugc

SEQ ID NO: 799505 - RNA, 20 nt, Artificial Sequence
  Synthetic
aacaugacauguggcucugc

SEQ ID NO: 799506 - RNA, 20 nt, Artificial Sequence
  Synthetic
cuuucaaugguuggcucugc

SEQ ID NO: 799507 - RNA, 20 nt, Artificial Sequence
  Synthetic
aaaaaugacaacaucucugc

SEQ ID NO: 799508 - RNA, 20 nt, Artificial Sequence
  Synthetic
cucauggaaaaccucucugc

SEQ ID NO: 799509 - RNA, 20 nt, Artificial Sequence
  Synthetic
ccaacuucuugccucucugc

SEQ ID NO: 799510 - RNA, 20 nt, Artificial Sequence
  Synthetic
aaagggaaagcucucucugc

SEQ ID NO: 799511 - RNA, 20 nt, Artificial Sequence
  Synthetic
uccagcuguguucucucugc

SEQ ID NO: 799512 - RNA, 20 nt, Artificial Sequence
  Synthetic
auccuuucaagugucucugc

SEQ ID NO: 799513 - RNA, 20 nt, Artificial Sequence
  Synthetic
ugcuagucaucauucucugc

SEQ ID NO: 799514 - RNA, 20 nt, Artificial Sequence
  Synthetic
caaagaaaguuauucucugc

SEQ ID NO: 799515 - RNA, 20 nt, Artificial Sequence
  Synthetic
uggcaaaaauucaagucugc

SEQ ID NO: 799516 - RNA, 20 nt, Artificial Sequence
  Synthetic
acccucugcugcaggucugc

SEQ ID NO: 799517 - RNA, 20 nt, Artificial Sequence
  Synthetic
cuacccaaaguauggucugc

SEQ ID NO: 799518 - RNA, 20 nt, Artificial Sequence
  Synthetic
ucaggcauuaaaaugucugc

SEQ ID NO: 799519 - RNA, 20 nt, Artificial Sequence
  Synthetic
cacuucugcucacauucugc

SEQ ID NO: 799520 - RNA, 20 nt, Artificial Sequence
  Synthetic
uucugaugguuacauucugc

SEQ ID NO: 799521 - RNA, 20 nt, Artificial Sequence
  Synthetic
uaauuggcugacgauucugc

SEQ ID NO: 799522 - RNA, 20 nt, Artificial Sequence
  Synthetic
uaaucgauucaugauucugc

SEQ ID NO: 799523 - RNA, 20 nt, Artificial Sequence
  Synthetic
cuuggcuuugacuauucugc

SEQ ID NO: 799524 - RNA, 20 nt, Artificial Sequence
  Synthetic
uauuaucugguaacuucugc

SEQ ID NO: 799525 - RNA, 20 nt, Artificial Sequence
  Synthetic
ugcauucaugaaccuucugc

SEQ ID NO: 799526 - RNA, 20 nt, Artificial Sequence
  Synthetic
ugcuguucugcagcuucugc

SEQ ID NO: 799527 - RNA, 20 nt, Artificial Sequence
  Synthetic
cucaagucuaguucuucugc

SEQ ID NO: 799528 - RNA, 20 nt, Artificial Sequence
  Synthetic
uguuauuucuuuucuucugc

SEQ ID NO: 799529 - RNA, 20 nt, Artificial Sequence
  Synthetic
cggaaccucagaaguucugc

SEQ ID NO: 799530 - RNA, 20 nt, Artificial Sequence
  Synthetic
uacuuggcucacaguucugc

SEQ ID NO: 799531 - RNA, 20 nt, Artificial Sequence
  Synthetic
cuuuugacuuacgguucugc

SEQ ID NO: 799532 - RNA, 20 nt, Artificial Sequence
  Synthetic
uauuuggcucaugguucugc

SEQ ID NO: 799533 - RNA, 20 nt, Artificial Sequence
  Synthetic
uaauuggcugaugguucugc

SEQ ID NO: 799534 - RNA, 20 nt, Artificial Sequence
  Synthetic
ugcaaaugguuauguucugc

SEQ ID NO: 799535 - RNA, 20 nt, Artificial Sequence
  Synthetic
uagggauguccaauuucugc

SEQ ID NO: 799536 - RNA, 20 nt, Artificial Sequence
  Synthetic
cuuauugccucaauuucugc

SEQ ID NO: 799537 - RNA, 20 nt, Artificial Sequence
  Synthetic
aaucaaaucagaauuucugc

SEQ ID NO: 799538 - RNA, 20 nt, Artificial Sequence
  Synthetic
aaccuuggagacauuucugc

SEQ ID NO: 799539 - RNA, 20 nt, Artificial Sequence
  Synthetic
ucuuuuguauauauuucugc

SEQ ID NO: 799540 - RNA, 20 nt, Artificial Sequence
  Synthetic
uuguaauagccacuuucugc

SEQ ID NO: 799541 - RNA, 20 nt, Artificial Sequence
  Synthetic
ugguacugcagccuuucugc

SEQ ID NO: 799542 - RNA, 20 nt, Artificial Sequence
  Synthetic
cacugcauagcuguuucugc

SEQ ID NO: 799543 - RNA, 20 nt, Artificial Sequence
  Synthetic
ugaggcauuucuguuucugc

SEQ ID NO: 799544 - RNA, 20 nt, Artificial Sequence
  Synthetic
uuuggguuuuuuuuuucugc

SEQ ID NO: 799545 - RNA, 20 nt, Artificial Sequence
  Synthetic
ccucggccuccccaaagugc

SEQ ID NO: 799546 - RNA, 20 nt, Artificial Sequence
  Synthetic
accucagacucccaaagugc

SEQ ID NO: 799547 - RNA, 20 nt, Artificial Sequence
  Synthetic
accucagccucccaaagugc

SEQ ID NO: 799548 - RNA, 20 nt, Artificial Sequence
  Synthetic
acuucagccucccaaagugc

SEQ ID NO: 799549 - RNA, 20 nt, Artificial Sequence
  Synthetic
acguaggccucccaaagugc

SEQ ID NO: 799550 - RNA, 20 nt, Artificial Sequence
  Synthetic
uccacggccucccaaagugc

SEQ ID NO: 799551 - RNA, 20 nt, Artificial Sequence
  Synthetic
accucggccucccaaagugc

SEQ ID NO: 799552 - RNA, 20 nt, Artificial Sequence
  Synthetic
aucucggccucccaaagugc

SEQ ID NO: 799553 - RNA, 20 nt, Artificial Sequence
  Synthetic
auccuggccucccaaagugc

SEQ ID NO: 799554 - RNA, 20 nt, Artificial Sequence
  Synthetic
accuuggccucccaaagugc

SEQ ID NO: 799555 - RNA, 20 nt, Artificial Sequence
  Synthetic
uccuuggccucccaaagugc

SEQ ID NO: 799556 - RNA, 20 nt, Artificial Sequence
  Synthetic
acuucugccucccaaagugc

SEQ ID NO: 799557 - RNA, 20 nt, Artificial Sequence
  Synthetic
auuucggccucucaaagugc

SEQ ID NO: 799558 - RNA, 20 nt, Artificial Sequence
  Synthetic
accuuggucucucaaagugc

SEQ ID NO: 799559 - RNA, 20 nt, Artificial Sequence
  Synthetic
accucagccuccgaaagugc

SEQ ID NO: 799560 - RNA, 20 nt, Artificial Sequence
  Synthetic
accucagccuccuaaagugc

SEQ ID NO: 799561 - RNA, 20 nt, Artificial Sequence
  Synthetic
aaaauauucaauuaaagugc

SEQ ID NO: 799562 - RNA, 20 nt, Artificial Sequence
  Synthetic
accuuggccucccgaagugc

SEQ ID NO: 799563 - RNA, 20 nt, Artificial Sequence
  Synthetic
caggcacugcuaggaagugc

SEQ ID NO: 799564 - RNA, 20 nt, Artificial Sequence
  Synthetic
ugucugugucacugaagugc

SEQ ID NO: 799565 - RNA, 20 nt, Artificial Sequence
  Synthetic
uauaaauaaccuauaagugc

SEQ ID NO: 799566 - RNA, 20 nt, Artificial Sequence
  Synthetic
ucuguuuuuaaucuaagugc

SEQ ID NO: 799567 - RNA, 20 nt, Artificial Sequence
  Synthetic
acaaagacagcaguaagugc

SEQ ID NO: 799568 - RNA, 20 nt, Artificial Sequence
  Synthetic
aucuuagccucccacagugc

SEQ ID NO: 799569 - RNA, 20 nt, Artificial Sequence
  Synthetic
cacagaguuccucacagugc

SEQ ID NO: 799570 - RNA, 20 nt, Artificial Sequence
  Synthetic
aauguuacaauggacagugc

SEQ ID NO: 799571 - RNA, 20 nt, Artificial Sequence
  Synthetic
aguggucauauugccagugc

SEQ ID NO: 799572 - RNA, 20 nt, Artificial Sequence
  Synthetic
uauuuuuucagaagcagugc

SEQ ID NO: 799573 - RNA, 20 nt, Artificial Sequence
  Synthetic
acacuuaaacacagcagugc

SEQ ID NO: 799574 - RNA, 20 nt, Artificial Sequence
  Synthetic
ugcagcugcaacugcagugc

SEQ ID NO: 799575 - RNA, 20 nt, Artificial Sequence
  Synthetic
cuugcucuuaacaucagugc

SEQ ID NO: 799576 - RNA, 20 nt, Artificial Sequence
  Synthetic
agaggaauugcaaagagugc

SEQ ID NO: 799577 - RNA, 20 nt, Artificial Sequence
  Synthetic
ucccaaagcgcugggagugc

SEQ ID NO: 799578 - RNA, 20 nt, Artificial Sequence
  Synthetic
agauguuuaucugugagugc

SEQ ID NO: 799579 - RNA, 20 nt, Artificial Sequence
  Synthetic
agacuggcuuucuugagugc

SEQ ID NO: 799580 - RNA, 20 nt, Artificial Sequence
  Synthetic
auuucuauuuuaaauagugc

SEQ ID NO: 799581 - RNA, 20 nt, Artificial Sequence
  Synthetic
ugucuuugaaugaauagugc

SEQ ID NO: 799582 - RNA, 20 nt, Artificial Sequence
  Synthetic
caagaaagccagucuagugc

SEQ ID NO: 799583 - RNA, 20 nt, Artificial Sequence
  Synthetic
accuuggccugacaacgugc

SEQ ID NO: 799584 - RNA, 20 nt, Artificial Sequence
  Synthetic
agguucagggguacacgugc

SEQ ID NO: 799585 - RNA, 20 nt, Artificial Sequence
  Synthetic
acaggccugagccaccgugc

SEQ ID NO: 799586 - RNA, 20 nt, Artificial Sequence
  Synthetic
aaaaaauuagccgggcgugc

SEQ ID NO: 799587 - RNA, 20 nt, Artificial Sequence
  Synthetic
agaucuuuguugaaaggugc

SEQ ID NO: 799588 - RNA, 20 nt, Artificial Sequence
  Synthetic
aguuaucuuagacaaggugc

SEQ ID NO: 799589 - RNA, 20 nt, Artificial Sequence
  Synthetic
ucaaugcagguagaaggugc

SEQ ID NO: 799590 - RNA, 20 nt, Artificial Sequence
  Synthetic
uuauacacuuuggaaggugc

SEQ ID NO: 799591 - RNA, 20 nt, Artificial Sequence
  Synthetic
aaguagcacauugaaggugc

SEQ ID NO: 799592 - RNA, 20 nt, Artificial Sequence
  Synthetic
acaucuaccuccuaaggugc

SEQ ID NO: 799593 - RNA, 20 nt, Artificial Sequence
  Synthetic
aaucaggaaacaacaggugc

SEQ ID NO: 799594 - RNA, 20 nt, Artificial Sequence
  Synthetic
agucaggaaacaacaggugc

SEQ ID NO: 799595 - RNA, 20 nt, Artificial Sequence
  Synthetic
cuggccugagcagcaggugc

SEQ ID NO: 799596 - RNA, 20 nt, Artificial Sequence
  Synthetic
agucaggaaacaucaggugc

SEQ ID NO: 799597 - RNA, 20 nt, Artificial Sequence
  Synthetic
ucacucauugagcuaggugc

SEQ ID NO: 799598 - RNA, 20 nt, Artificial Sequence
  Synthetic
cccuacucaauaaacggugc

SEQ ID NO: 799599 - RNA, 20 nt, Artificial Sequence
  Synthetic
cccuauuuaauaaacggugc

SEQ ID NO: 799600 - RNA, 20 nt, Artificial Sequence
  Synthetic
aaugaccaguuaaugggugc

SEQ ID NO: 799601 - RNA, 20 nt, Artificial Sequence
  Synthetic
uuuaaugagcgccugggugc

SEQ ID NO: 799602 - RNA, 20 nt, Artificial Sequence
  Synthetic
aucagaugguuucugggugc

SEQ ID NO: 799603 - RNA, 20 nt, Artificial Sequence
  Synthetic
cccuauuuaauaaauggugc

SEQ ID NO: 799604 - RNA, 20 nt, Artificial Sequence
  Synthetic
cccuauucaguaaauggugc

SEQ ID NO: 799605 - RNA, 20 nt, Artificial Sequence
  Synthetic
uccucuucaaccaauggugc

SEQ ID NO: 799606 - RNA, 20 nt, Artificial Sequence
  Synthetic
caauucagaagagauggugc

SEQ ID NO: 799607 - RNA, 20 nt, Artificial Sequence
  Synthetic
uucacuuggagugauggugc

SEQ ID NO: 799608 - RNA, 20 nt, Artificial Sequence
  Synthetic
ugccugacauuagguggugc

SEQ ID NO: 799609 - RNA, 20 nt, Artificial Sequence
  Synthetic
uuuucauaaagugguggugc

SEQ ID NO: 799610 - RNA, 20 nt, Artificial Sequence
  Synthetic
uaacacucaugauguggugc

SEQ ID NO: 799611 - RNA, 20 nt, Artificial Sequence
  Synthetic
ugguccaguaacuuuggugc

SEQ ID NO: 799612 - RNA, 20 nt, Artificial Sequence
  Synthetic
uuuuaauaaaacaaaugugc

SEQ ID NO: 799613 - RNA, 20 nt, Artificial Sequence
  Synthetic
aucuuggccucccaaugugc

SEQ ID NO: 799614 - RNA, 20 nt, Artificial Sequence
  Synthetic
uuguacaacauagaaugugc

SEQ ID NO: 799615 - RNA, 20 nt, Artificial Sequence
  Synthetic
acagacucccaggaaugugc

SEQ ID NO: 799616 - RNA, 20 nt, Artificial Sequence
  Synthetic
ugagucauuauauaaugugc

SEQ ID NO: 799617 - RNA, 20 nt, Artificial Sequence
  Synthetic
aaacagaaaauaacaugugc

SEQ ID NO: 799618 - RNA, 20 nt, Artificial Sequence
  Synthetic
agcucuaggggcacaugugc

SEQ ID NO: 799619 - RNA, 20 nt, Artificial Sequence
  Synthetic
acgaaaaauggcacaugugc

SEQ ID NO: 799620 - RNA, 20 nt, Artificial Sequence
  Synthetic
agauucaggaauacaugugc

SEQ ID NO: 799621 - RNA, 20 nt, Artificial Sequence
  Synthetic
aaguucagggguacaugugc

SEQ ID NO: 799622 - RNA, 20 nt, Artificial Sequence
  Synthetic
aaguuccgugguacaugugc

SEQ ID NO: 799623 - RNA, 20 nt, Artificial Sequence
  Synthetic
ccgggcguaguggcaugugc

SEQ ID NO: 799624 - RNA, 20 nt, Artificial Sequence
  Synthetic
cuaagcaccuacucaugugc

SEQ ID NO: 799625 - RNA, 20 nt, Artificial Sequence
  Synthetic
cuggcauuuagaagaugugc

SEQ ID NO: 799626 - RNA, 20 nt, Artificial Sequence
  Synthetic
auaggguuauucagaugugc

SEQ ID NO: 799627 - RNA, 20 nt, Artificial Sequence
  Synthetic
acuuggccucugagaugugc

SEQ ID NO: 799628 - RNA, 20 nt, Artificial Sequence
  Synthetic
ucugagaaagauagaugugc

SEQ ID NO: 799629 - RNA, 20 nt, Artificial Sequence
  Synthetic
auacuuauauucugaugugc

SEQ ID NO: 799630 - RNA, 20 nt, Artificial Sequence
  Synthetic
cuccucagauuauuaugugc

SEQ ID NO: 799631 - RNA, 20 nt, Artificial Sequence
  Synthetic
uuauauuauauuuuaugugc

SEQ ID NO: 799632 - RNA, 20 nt, Artificial Sequence
  Synthetic
uucaugagggugaacugugc

SEQ ID NO: 799633 - RNA, 20 nt, Artificial Sequence
  Synthetic
caguaugcaaggcacugugc

SEQ ID NO: 799634 - RNA, 20 nt, Artificial Sequence
  Synthetic
cagaggagcaggcacugugc

SEQ ID NO: 799635 - RNA, 20 nt, Artificial Sequence
  Synthetic
uuaaaaugauguaccugugc

SEQ ID NO: 799636 - RNA, 20 nt, Artificial Sequence
  Synthetic
uuaguuauuauugccugugc

SEQ ID NO: 799637 - RNA, 20 nt, Artificial Sequence
  Synthetic
aacacugaagguuccugugc

SEQ ID NO: 799638 - RNA, 20 nt, Artificial Sequence
  Synthetic
uccacuucagacugcugugc

SEQ ID NO: 799639 - RNA, 20 nt, Artificial Sequence
  Synthetic
auauguaaagugcucugugc

SEQ ID NO: 799640 - RNA, 20 nt, Artificial Sequence
  Synthetic
augagaggcaagaagugugc

SEQ ID NO: 799641 - RNA, 20 nt, Artificial Sequence
  Synthetic
uuauuuguuaaacagugugc

SEQ ID NO: 799642 - RNA, 20 nt, Artificial Sequence
  Synthetic
ugaucaaaaccacagugugc

SEQ ID NO: 799643 - RNA, 20 nt, Artificial Sequence
  Synthetic
uuucuucacggacagugugc

SEQ ID NO: 799644 - RNA, 20 nt, Artificial Sequence
  Synthetic
aaguucaggagcacgugugc

SEQ ID NO: 799645 - RNA, 20 nt, Artificial Sequence
  Synthetic
cgcaauaaacauacgugugc

SEQ ID NO: 799646 - RNA, 20 nt, Artificial Sequence
  Synthetic
uggcaggcaagagcgugugc

SEQ ID NO: 799647 - RNA, 20 nt, Artificial Sequence
  Synthetic
uaaaaauuagccgggugugc

SEQ ID NO: 799648 - RNA, 20 nt, Artificial Sequence
  Synthetic
uugggaagguguaugugugc

SEQ ID NO: 799649 - RNA, 20 nt, Artificial Sequence
  Synthetic
cacuguucuggacauugugc

SEQ ID NO: 799650 - RNA, 20 nt, Artificial Sequence
  Synthetic
agggcauccuugucuugugc

SEQ ID NO: 799651 - RNA, 20 nt, Artificial Sequence
  Synthetic
auagauccuaaaauuugugc

SEQ ID NO: 799652 - RNA, 20 nt, Artificial Sequence
  Synthetic
uagcugcuuagaauuugugc

SEQ ID NO: 799653 - RNA, 20 nt, Artificial Sequence
  Synthetic
aauuuucaggcuuuuugugc

SEQ ID NO: 799654 - RNA, 20 nt, Artificial Sequence
  Synthetic
auuauggaaaaaaaaauugc

SEQ ID NO: 799655 - RNA, 20 nt, Artificial Sequence
  Synthetic
caaaggagaauaaaaauugc

SEQ ID NO: 799656 - RNA, 20 nt, Artificial Sequence
  Synthetic
auagagucuauuaaaauugc

SEQ ID NO: 799657 - RNA, 20 nt, Artificial Sequence
  Synthetic
accucggccucucaaauugc

SEQ ID NO: 799658 - RNA, 20 nt, Artificial Sequence
  Synthetic
cuguguuaggaaacaauugc

SEQ ID NO: 799659 - RNA, 20 nt, Artificial Sequence
  Synthetic
uuuuugguugugacaauugc

SEQ ID NO: 799660 - RNA, 20 nt, Artificial Sequence
  Synthetic
agauaugugguuacaauugc

SEQ ID NO: 799661 - RNA, 20 nt, Artificial Sequence
  Synthetic
caggggaauuuggcaauugc

SEQ ID NO: 799662 - RNA, 20 nt, Artificial Sequence
  Synthetic
auguccaagagugcaauugc

SEQ ID NO: 799663 - RNA, 20 nt, Artificial Sequence
  Synthetic
uucuuuggucacagaauugc

SEQ ID NO: 799664 - RNA, 20 nt, Artificial Sequence
  Synthetic
uagcuauaaaauuuaauugc

SEQ ID NO: 799665 - RNA, 20 nt, Artificial Sequence
  Synthetic
uucaguauguuuaacauugc

SEQ ID NO: 799666 - RNA, 20 nt, Artificial Sequence
  Synthetic
cuggucucccgucacauugc

SEQ ID NO: 799667 - RNA, 20 nt, Artificial Sequence
  Synthetic
auacccaguaauggcauugc

SEQ ID NO: 799668 - RNA, 20 nt, Artificial Sequence
  Synthetic
uucuuacuguuguucauugc

SEQ ID NO: 799669 - RNA, 20 nt, Artificial Sequence
  Synthetic
agccauacuuguuucauugc

SEQ ID NO: 799670 - RNA, 20 nt, Artificial Sequence
  Synthetic
auaccaaguaaugagauugc

SEQ ID NO: 799671 - RNA, 20 nt, Artificial Sequence
  Synthetic
acacccagaaaugggauugc

SEQ ID NO: 799672 - RNA, 20 nt, Artificial Sequence
  Synthetic
auaaccaauaaugggauugc

SEQ ID NO: 799673 - RNA, 20 nt, Artificial Sequence
  Synthetic
augcccaauaaugggauugc

SEQ ID NO: 799674 - RNA, 20 nt, Artificial Sequence
  Synthetic
auaaccaguaaugggauugc

SEQ ID NO: 799675 - RNA, 20 nt, Artificial Sequence
  Synthetic
auauccaguaaugggauugc

SEQ ID NO: 799676 - RNA, 20 nt, Artificial Sequence
  Synthetic
auaugcaguaaugggauugc

SEQ ID NO: 799677 - RNA, 20 nt, Artificial Sequence
  Synthetic
auacucaguaaugggauugc

SEQ ID NO: 799678 - RNA, 20 nt, Artificial Sequence
  Synthetic
ucccaaugugcugggauugc

SEQ ID NO: 799679 - RNA, 20 nt, Artificial Sequence
  Synthetic
auacccggaagugggauugc

SEQ ID NO: 799680 - RNA, 20 nt, Artificial Sequence
  Synthetic
auacccagcagugggauugc

SEQ ID NO: 799681 - RNA, 20 nt, Artificial Sequence
  Synthetic
augcccaguagugggauugc

SEQ ID NO: 799682 - RNA, 20 nt, Artificial Sequence
  Synthetic
caaaacaaacacuggauugc

SEQ ID NO: 799683 - RNA, 20 nt, Artificial Sequence
  Synthetic
caggaauaaagagugauugc

SEQ ID NO: 799684 - RNA, 20 nt, Artificial Sequence
  Synthetic
uguucuagccucuugauugc

SEQ ID NO: 799685 - RNA, 20 nt, Artificial Sequence
  Synthetic
auggaucauucacauauugc

SEQ ID NO: 799686 - RNA, 20 nt, Artificial Sequence
  Synthetic
uuuagccaaucggauauugc

SEQ ID NO: 799687 - RNA, 20 nt, Artificial Sequence
  Synthetic
cgacauggcuauacuauugc

SEQ ID NO: 799688 - RNA, 20 nt, Artificial Sequence
  Synthetic
aaucuuuuagcugcuauugc

SEQ ID NO: 799689 - RNA, 20 nt, Artificial Sequence
  Synthetic
uuuuuuuuccuuucuauugc

SEQ ID NO: 799690 - RNA, 20 nt, Artificial Sequence
  Synthetic
aaaaauaguuuucguauugc

SEQ ID NO: 799691 - RNA, 20 nt, Artificial Sequence
  Synthetic
cuuugggaucaggguauugc

SEQ ID NO: 799692 - RNA, 20 nt, Artificial Sequence
  Synthetic
agcuuucugccuuguauugc

SEQ ID NO: 799693 - RNA, 20 nt, Artificial Sequence
  Synthetic
uaaauauaagaguuuauugc

SEQ ID NO: 799694 - RNA, 20 nt, Artificial Sequence
  Synthetic
aacugccugcuuuuuauugc

SEQ ID NO: 799695 - RNA, 20 nt, Artificial Sequence
  Synthetic
uuaaaauuauacaaacuugc

SEQ ID NO: 799696 - RNA, 20 nt, Artificial Sequence
  Synthetic
uuacaaagcagcaaacuugc

SEQ ID NO: 799697 - RNA, 20 nt, Artificial Sequence
  Synthetic
uugaagagggcugaacuugc

SEQ ID NO: 799698 - RNA, 20 nt, Artificial Sequence
  Synthetic
uuuggguucaacuaacuugc

SEQ ID NO: 799699 - RNA, 20 nt, Artificial Sequence
  Synthetic
aguaucaccugguaacuugc

SEQ ID NO: 799700 - RNA, 20 nt, Artificial Sequence
  Synthetic
aguccaggcuuguaacuugc

SEQ ID NO: 799701 - RNA, 20 nt, Artificial Sequence
  Synthetic
aaggcccuaccuccacuugc

SEQ ID NO: 799702 - RNA, 20 nt, Artificial Sequence
  Synthetic
uguccauauuuuucacuugc

SEQ ID NO: 799703 - RNA, 20 nt, Artificial Sequence
  Synthetic
agaaaaacgagcugacuugc

SEQ ID NO: 799704 - RNA, 20 nt, Artificial Sequence
  Synthetic
auccugguucaaauacuugc

SEQ ID NO: 799705 - RNA, 20 nt, Artificial Sequence
  Synthetic
accugaaauggcauacuugc

SEQ ID NO: 799706 - RNA, 20 nt, Artificial Sequence
  Synthetic
ugggcuaugugcuuacuugc

SEQ ID NO: 799707 - RNA, 20 nt, Artificial Sequence
  Synthetic
auacugccugcccaccuugc

SEQ ID NO: 799708 - RNA, 20 nt, Artificial Sequence
  Synthetic
ccuuuccuugcccaccuugc

SEQ ID NO: 799709 - RNA, 20 nt, Artificial Sequence
  Synthetic
ugauuaugucacuaccuugc

SEQ ID NO: 799710 - RNA, 20 nt, Artificial Sequence
  Synthetic
ugcagauggaagacccuugc

SEQ ID NO: 799711 - RNA, 20 nt, Artificial Sequence
  Synthetic
uugcccaaagaggcccuugc

SEQ ID NO: 799712 - RNA, 20 nt, Artificial Sequence
  Synthetic
aaaaggcccuuugcccuugc

SEQ ID NO: 799713 - RNA, 20 nt, Artificial Sequence
  Synthetic
auccaguuuuguucccuugc

SEQ ID NO: 799714 - RNA, 20 nt, Artificial Sequence
  Synthetic
auuuugagauaaagccuugc

SEQ ID NO: 799715 - RNA, 20 nt, Artificial Sequence
  Synthetic
uuccaucuuuauguccuugc

SEQ ID NO: 799716 - RNA, 20 nt, Artificial Sequence
  Synthetic
ugccuuuuaauguuccuugc

SEQ ID NO: 799717 - RNA, 20 nt, Artificial Sequence
  Synthetic
auuucuggauauuuccuugc

SEQ ID NO: 799718 - RNA, 20 nt, Artificial Sequence
  Synthetic
cuuguuaaaacacagcuugc

SEQ ID NO: 799719 - RNA, 20 nt, Artificial Sequence
  Synthetic
acuuauaucaaagagcuugc

SEQ ID NO: 799720 - RNA, 20 nt, Artificial Sequence
  Synthetic
uuaccaugaauggagcuugc

SEQ ID NO: 799721 - RNA, 20 nt, Artificial Sequence
  Synthetic
uuagaauguuucuagcuugc

SEQ ID NO: 799722 - RNA, 20 nt, Artificial Sequence
  Synthetic
uagaugcaaaacaggcuugc

SEQ ID NO: 799723 - RNA, 20 nt, Artificial Sequence
  Synthetic
aucugcagacacaggcuugc

SEQ ID NO: 799724 - RNA, 20 nt, Artificial Sequence
  Synthetic
auaaaauuagccaggcuugc

SEQ ID NO: 799725 - RNA, 20 nt, Artificial Sequence
  Synthetic
caugaagcuuuuaaucuugc

SEQ ID NO: 799726 - RNA, 20 nt, Artificial Sequence
  Synthetic
accuuuucuaccuaucuugc

SEQ ID NO: 799727 - RNA, 20 nt, Artificial Sequence
  Synthetic
cacaggaaaaaaagucuugc

SEQ ID NO: 799728 - RNA, 20 nt, Artificial Sequence
  Synthetic
aagccaguuaucagucuugc

SEQ ID NO: 799729 - RNA, 20 nt, Artificial Sequence
  Synthetic
auucauuugcucagucuugc

SEQ ID NO: 799730 - RNA, 20 nt, Artificial Sequence
  Synthetic
uuuuggagacagagucuugc

SEQ ID NO: 799731 - RNA, 20 nt, Artificial Sequence
  Synthetic
cagauaaugaauggucuugc

SEQ ID NO: 799732 - RNA, 20 nt, Artificial Sequence
  Synthetic
agguuaggacuuugucuugc

SEQ ID NO: 799733 - RNA, 20 nt, Artificial Sequence
  Synthetic
aggaccaugugucuucuugc

SEQ ID NO: 799734 - RNA, 20 nt, Artificial Sequence
  Synthetic
aaccucugacauguucuugc

SEQ ID NO: 799735 - RNA, 20 nt, Artificial Sequence
  Synthetic
auaaaaagcuaauuucuugc

SEQ ID NO: 799736 - RNA, 20 nt, Artificial Sequence
  Synthetic
cauacagcuaaguuucuugc

SEQ ID NO: 799737 - RNA, 20 nt, Artificial Sequence
  Synthetic
auagaguuguauuuucuugc

SEQ ID NO: 799738 - RNA, 20 nt, Artificial Sequence
  Synthetic
aacaaauucagcaaaguugc

SEQ ID NO: 799739 - RNA, 20 nt, Artificial Sequence
  Synthetic
aggcuagccuucaaaguugc

SEQ ID NO: 799740 - RNA, 20 nt, Artificial Sequence
  Synthetic
cacaaguuuaguaaaguugc

SEQ ID NO: 799741 - RNA, 20 nt, Artificial Sequence
  Synthetic
auuuuuccuauugcaguugc

SEQ ID NO: 799742 - RNA, 20 nt, Artificial Sequence
  Synthetic
agguuagccuucagaguugc

SEQ ID NO: 799743 - RNA, 20 nt, Artificial Sequence
  Synthetic
agagaaaaauggagaguugc

SEQ ID NO: 799744 - RNA, 20 nt, Artificial Sequence
  Synthetic
uacacucuuuacugaguugc

SEQ ID NO: 799745 - RNA, 20 nt, Artificial Sequence
  Synthetic
uagguuuacuuauuaguugc

SEQ ID NO: 799746 - RNA, 20 nt, Artificial Sequence
  Synthetic
aauaacuucucagacguugc

SEQ ID NO: 799747 - RNA, 20 nt, Artificial Sequence
  Synthetic
ugaguagaauuuuacguugc

SEQ ID NO: 799748 - RNA, 20 nt, Artificial Sequence
  Synthetic
cuccacuccuuuggcguugc

SEQ ID NO: 799749 - RNA, 20 nt, Artificial Sequence
  Synthetic
cauggcugugguaagguugc

SEQ ID NO: 799750 - RNA, 20 nt, Artificial Sequence
  Synthetic
auacccaggagugagguugc

SEQ ID NO: 799751 - RNA, 20 nt, Artificial Sequence
  Synthetic
cccuucccuugcuggguugc

SEQ ID NO: 799752 - RNA, 20 nt, Artificial Sequence
  Synthetic
cacaauucauuuuggguugc

SEQ ID NO: 799753 - RNA, 20 nt, Artificial Sequence
  Synthetic
cauccuccuccugugguugc

SEQ ID NO: 799754 - RNA, 20 nt, Artificial Sequence
  Synthetic
uauuggucaaggaauguugc

SEQ ID NO: 799755 - RNA, 20 nt, Artificial Sequence
  Synthetic
aagauagaucagcauguugc

SEQ ID NO: 799756 - RNA, 20 nt, Artificial Sequence
  Synthetic
aaguucucaggggauguugc

SEQ ID NO: 799757 - RNA, 20 nt, Artificial Sequence
  Synthetic
ccagauggugcugauguugc

SEQ ID NO: 799758 - RNA, 20 nt, Artificial Sequence
  Synthetic
ugagauuccucauauguugc

SEQ ID NO: 799759 - RNA, 20 nt, Artificial Sequence
  Synthetic
caaugauguggguauguugc

SEQ ID NO: 799760 - RNA, 20 nt, Artificial Sequence
  Synthetic
aucacaauaaaaacuguugc

SEQ ID NO: 799761 - RNA, 20 nt, Artificial Sequence
  Synthetic
uauuuuuuuuauacuguugc

SEQ ID NO: 799762 - RNA, 20 nt, Artificial Sequence
  Synthetic
cauccagccugggcuguugc

SEQ ID NO: 799763 - RNA, 20 nt, Artificial Sequence
  Synthetic
uugacuuuuuauucuguugc

SEQ ID NO: 799764 - RNA, 20 nt, Artificial Sequence
  Synthetic
uuuuugagugagaguguugc

SEQ ID NO: 799765 - RNA, 20 nt, Artificial Sequence
  Synthetic
cugacucuuggcuguguugc

SEQ ID NO: 799766 - RNA, 20 nt, Artificial Sequence
  Synthetic
uuauguuacccauuuguugc

SEQ ID NO: 799767 - RNA, 20 nt, Artificial Sequence
  Synthetic
ccugugccagguuuuguugc

SEQ ID NO: 799768 - RNA, 20 nt, Artificial Sequence
  Synthetic
cauuuuuaaugcaaauuugc

SEQ ID NO: 799769 - RNA, 20 nt, Artificial Sequence
  Synthetic
uaaucacaucugaaauuugc

SEQ ID NO: 799770 - RNA, 20 nt, Artificial Sequence
  Synthetic
caccacagcugggaauuugc

SEQ ID NO: 799771 - RNA, 20 nt, Artificial Sequence
  Synthetic
cuggaguaucugccauuugc

SEQ ID NO: 799772 - RNA, 20 nt, Artificial Sequence
  Synthetic
cuguacucacuugcauuugc

SEQ ID NO: 799773 - RNA, 20 nt, Artificial Sequence
  Synthetic
uauguauuauuuucauuugc

SEQ ID NO: 799774 - RNA, 20 nt, Artificial Sequence
  Synthetic
acauuuacaaccagauuugc

SEQ ID NO: 799775 - RNA, 20 nt, Artificial Sequence
  Synthetic
accucacuacauuuauuugc

SEQ ID NO: 799776 - RNA, 20 nt, Artificial Sequence
  Synthetic
aaguguuguuuaaacuuugc

SEQ ID NO: 799777 - RNA, 20 nt, Artificial Sequence
  Synthetic
agcauugugcugaacuuugc

SEQ ID NO: 799778 - RNA, 20 nt, Artificial Sequence
  Synthetic
cacagacuaagauccuuugc

SEQ ID NO: 799779 - RNA, 20 nt, Artificial Sequence
  Synthetic
cacuuuugcuccuccuuugc

SEQ ID NO: 799780 - RNA, 20 nt, Artificial Sequence
  Synthetic
cugaacauuugguccuuugc

SEQ ID NO: 799781 - RNA, 20 nt, Artificial Sequence
  Synthetic
aaugagaucauguccuuugc

SEQ ID NO: 799782 - RNA, 20 nt, Artificial Sequence
  Synthetic
aaugaguucguguccuuugc

SEQ ID NO: 799783 - RNA, 20 nt, Artificial Sequence
  Synthetic
ccucuucugcuuuccuuugc

SEQ ID NO: 799784 - RNA, 20 nt, Artificial Sequence
  Synthetic
cauaauggacaaagcuuugc

SEQ ID NO: 799785 - RNA, 20 nt, Artificial Sequence
  Synthetic
cucugcccuuguggcuuugc

SEQ ID NO: 799786 - RNA, 20 nt, Artificial Sequence
  Synthetic
ucauucuuguggcucuuugc

SEQ ID NO: 799787 - RNA, 20 nt, Artificial Sequence
  Synthetic
auuauuucuaaguucuuugc

SEQ ID NO: 799788 - RNA, 20 nt, Artificial Sequence
  Synthetic
uguuauugguugagguuugc

SEQ ID NO: 799789 - RNA, 20 nt, Artificial Sequence
  Synthetic
cuccaccccuguggguuugc

SEQ ID NO: 799790 - RNA, 20 nt, Artificial Sequence
  Synthetic
aaauguuaaaagugguuugc

SEQ ID NO: 799791 - RNA, 20 nt, Artificial Sequence
  Synthetic
agcaguaagcauguguuugc

SEQ ID NO: 799792 - RNA, 20 nt, Artificial Sequence
  Synthetic
auuaauaaaaaaaauuuugc

SEQ ID NO: 799793 - RNA, 20 nt, Artificial Sequence
  Synthetic
agugauuugaugcauuuugc

SEQ ID NO: 799794 - RNA, 20 nt, Artificial Sequence
  Synthetic
acaggugaacugcauuuugc

SEQ ID NO: 799795 - RNA, 20 nt, Artificial Sequence
  Synthetic
ccaaguuuuaaucauuuugc

SEQ ID NO: 799796 - RNA, 20 nt, Artificial Sequence
  Synthetic
aaaugucuuuuauauuuugc

SEQ ID NO: 799797 - RNA, 20 nt, Artificial Sequence
  Synthetic
cagagucucugugcuuuugc

SEQ ID NO: 799798 - RNA, 20 nt, Artificial Sequence
  Synthetic
auuucaaauuuaucuuuugc

SEQ ID NO: 799799 - RNA, 20 nt, Artificial Sequence
  Synthetic
ccaguuauaauuucuuuugc

SEQ ID NO: 799800 - RNA, 20 nt, Artificial Sequence
  Synthetic
ccauuuagcuguuguuuugc

SEQ ID NO: 799801 - RNA, 20 nt, Artificial Sequence
  Synthetic
ucaucaauauuaauuuuugc

SEQ ID NO: 799802 - RNA, 20 nt, Artificial Sequence
  Synthetic
aggcacuauacuauuuuugc

SEQ ID NO: 799803 - RNA, 20 nt, Artificial Sequence
  Synthetic
uuuugaugaucuauuuuugc

SEQ ID NO: 799804 - RNA, 20 nt, Artificial Sequence
  Synthetic
acugagaagcaaaaaaaauc

SEQ ID NO: 799805 - RNA, 20 nt, Artificial Sequence
  Synthetic
accacaaagagaaaaaaauc

SEQ ID NO: 799806 - RNA, 20 nt, Artificial Sequence
  Synthetic
cugacgcagagaaaaaaauc

SEQ ID NO: 799807 - RNA, 20 nt, Artificial Sequence
  Synthetic
aaaauauuuagaaaaaaauc

SEQ ID NO: 799808 - RNA, 20 nt, Artificial Sequence
  Synthetic
cuggaaacaauaaaaaaauc

SEQ ID NO: 799809 - RNA, 20 nt, Artificial Sequence
  Synthetic
aaaaaaagagacaaaaaauc

SEQ ID NO: 799810 - RNA, 20 nt, Artificial Sequence
  Synthetic
auguauaaauagaaaaaauc

SEQ ID NO: 799811 - RNA, 20 nt, Artificial Sequence
  Synthetic
agacagcacacacaaaaauc

SEQ ID NO: 799812 - RNA, 20 nt, Artificial Sequence
  Synthetic
aaggaaaaaggagaaaaauc

SEQ ID NO: 799813 - RNA, 20 nt, Artificial Sequence
  Synthetic
auuuucucagaauaaaaauc

SEQ ID NO: 799814 - RNA, 20 nt, Artificial Sequence
  Synthetic
agcagucuugaauaaaaauc

SEQ ID NO: 799815 - RNA, 20 nt, Artificial Sequence
  Synthetic
caaccaucuaacuaaaaauc

SEQ ID NO: 799816 - RNA, 20 nt, Artificial Sequence
  Synthetic
aauggcgaucauuaaaaauc

SEQ ID NO: 799817 - RNA, 20 nt, Artificial Sequence
  Synthetic
cacacacacacaccaaaauc

SEQ ID NO: 799818 - RNA, 20 nt, Artificial Sequence
  Synthetic
cuugcuggaaaugcaaaauc

SEQ ID NO: 799819 - RNA, 20 nt, Artificial Sequence
  Synthetic
uugaaaggaaugucaaaauc

SEQ ID NO: 799820 - RNA, 20 nt, Artificial Sequence
  Synthetic
aaaaccaggaugucaaaauc

SEQ ID NO: 799821 - RNA, 20 nt, Artificial Sequence
  Synthetic
uauaaacuacuuucaaaauc

SEQ ID NO: 799822 - RNA, 20 nt, Artificial Sequence
  Synthetic
aucugaauuaucagaaaauc

SEQ ID NO: 799823 - RNA, 20 nt, Artificial Sequence
  Synthetic
cucuccaauucaugaaaauc

SEQ ID NO: 799824 - RNA, 20 nt, Artificial Sequence
  Synthetic
auuacauauccaauaaaauc

SEQ ID NO: 799825 - RNA, 20 nt, Artificial Sequence
  Synthetic
aagaauccuagaauaaaauc

SEQ ID NO: 799826 - RNA, 20 nt, Artificial Sequence
  Synthetic
uuaaacuguauaauaaaauc

SEQ ID NO: 799827 - RNA, 20 nt, Artificial Sequence
  Synthetic
agaucaucuggaguaaaauc

SEQ ID NO: 799828 - RNA, 20 nt, Artificial Sequence
  Synthetic
uauguaaaugaauuaaaauc

SEQ ID NO: 799829 - RNA, 20 nt, Artificial Sequence
  Synthetic
cagagacucagauuaaaauc

SEQ ID NO: 799830 - RNA, 20 nt, Artificial Sequence
  Synthetic
uaauuauaaaacuuaaaauc

SEQ ID NO: 799831 - RNA, 20 nt, Artificial Sequence
  Synthetic
cuugagaucuuguuaaaauc

SEQ ID NO: 799832 - RNA, 20 nt, Artificial Sequence
  Synthetic
uccguuaaguauuuaaaauc

SEQ ID NO: 799833 - RNA, 20 nt, Artificial Sequence
  Synthetic
uccuugcccauuuuaaaauc

SEQ ID NO: 799834 - RNA, 20 nt, Artificial Sequence
  Synthetic
cauuuauucucucacaaauc

SEQ ID NO: 799835 - RNA, 20 nt, Artificial Sequence
  Synthetic
cccuggaaaagcuacaaauc

SEQ ID NO: 799836 - RNA, 20 nt, Artificial Sequence
  Synthetic
caggucuccuuccccaaauc

SEQ ID NO: 799837 - RNA, 20 nt, Artificial Sequence
  Synthetic
uaaugugaagacuccaaauc

SEQ ID NO: 799838 - RNA, 20 nt, Artificial Sequence
  Synthetic
aaagacccuauuuccaaauc

SEQ ID NO: 799839 - RNA, 20 nt, Artificial Sequence
  Synthetic
cagagcaauuaaagcaaauc

SEQ ID NO: 799840 - RNA, 20 nt, Artificial Sequence
  Synthetic
aggcaaagagccagcaaauc

SEQ ID NO: 799841 - RNA, 20 nt, Artificial Sequence
  Synthetic
cauuguggaauaaucaaauc

SEQ ID NO: 799842 - RNA, 20 nt, Artificial Sequence
  Synthetic
uaauguguaaugaucaaauc

SEQ ID NO: 799843 - RNA, 20 nt, Artificial Sequence
  Synthetic
cauuguguaaugaucaaauc

SEQ ID NO: 799844 - RNA, 20 nt, Artificial Sequence
  Synthetic
augccagucguucucaaauc

SEQ ID NO: 799845 - RNA, 20 nt, Artificial Sequence
  Synthetic
caucuuaaaagagucaaauc

SEQ ID NO: 799846 - RNA, 20 nt, Artificial Sequence
  Synthetic
uaagucuggagggucaaauc

SEQ ID NO: 799847 - RNA, 20 nt, Artificial Sequence
  Synthetic
auaugacugauuuucaaauc

SEQ ID NO: 799848 - RNA, 20 nt, Artificial Sequence
  Synthetic
aaguaaaagaaaaagaaauc

SEQ ID NO: 799849 - RNA, 20 nt, Artificial Sequence
  Synthetic
uuggugagguuaaagaaauc

SEQ ID NO: 799850 - RNA, 20 nt, Artificial Sequence
  Synthetic
ugagcuccuaagaagaaauc

SEQ ID NO: 799851 - RNA, 20 nt, Artificial Sequence
  Synthetic
uuuugggagagacagaaauc

SEQ ID NO: 799852 - RNA, 20 nt, Artificial Sequence
  Synthetic
uauauauaaauacagaaauc

SEQ ID NO: 799853 - RNA, 20 nt, Artificial Sequence
  Synthetic
uaucuaaauuuccagaaauc

SEQ ID NO: 799854 - RNA, 20 nt, Artificial Sequence
  Synthetic
uagauagauagauagaaauc

SEQ ID NO: 799855 - RNA, 20 nt, Artificial Sequence
  Synthetic
uucaaaguauaguagaaauc

SEQ ID NO: 799856 - RNA, 20 nt, Artificial Sequence
  Synthetic
ugggcaggccccaggaaauc

SEQ ID NO: 799857 - RNA, 20 nt, Artificial Sequence
  Synthetic
aauguauuuugggggaaauc

SEQ ID NO: 799858 - RNA, 20 nt, Artificial Sequence
  Synthetic
aaugcuggcacugggaaauc

SEQ ID NO: 799859 - RNA, 20 nt, Artificial Sequence
  Synthetic
uuuuccauggcaaugaaauc

SEQ ID NO: 799860 - RNA, 20 nt, Artificial Sequence
  Synthetic
uacagauuacuacugaaauc

SEQ ID NO: 799861 - RNA, 20 nt, Artificial Sequence
  Synthetic
caaaugagaacucugaaauc

SEQ ID NO: 799862 - RNA, 20 nt, Artificial Sequence
  Synthetic
aaucaaguacuugugaaauc

SEQ ID NO: 799863 - RNA, 20 nt, Artificial Sequence
  Synthetic
uuacaucaagauuugaaauc

SEQ ID NO: 799864 - RNA, 20 nt, Artificial Sequence
  Synthetic
aguuagaggacuuugaaauc

SEQ ID NO: 799865 - RNA, 20 nt, Artificial Sequence
  Synthetic
cauucuaagucuuugaaauc

SEQ ID NO: 799866 - RNA, 20 nt, Artificial Sequence
  Synthetic
cucuaugaggucaauaaauc

SEQ ID NO: 799867 - RNA, 20 nt, Artificial Sequence
  Synthetic
uauuuaauccuucauaaauc

SEQ ID NO: 799868 - RNA, 20 nt, Artificial Sequence
  Synthetic
aaggugcagugagauaaauc

SEQ ID NO: 799869 - RNA, 20 nt, Artificial Sequence
  Synthetic
caaaauauuggggauaaauc

SEQ ID NO: 799870 - RNA, 20 nt, Artificial Sequence
  Synthetic
uauaaagucugauauaaauc

SEQ ID NO: 799871 - RNA, 20 nt, Artificial Sequence
  Synthetic
acuuucauuuucuauaaauc

SEQ ID NO: 799872 - RNA, 20 nt, Artificial Sequence
  Synthetic
cuguacaguuuuacuaaauc

SEQ ID NO: 799873 - RNA, 20 nt, Artificial Sequence
  Synthetic
uuguguuauuuaccuaaauc

SEQ ID NO: 799874 - RNA, 20 nt, Artificial Sequence
  Synthetic
ucuuucaaaaaugcuaaauc

SEQ ID NO: 799875 - RNA, 20 nt, Artificial Sequence
  Synthetic
uuauuuuuauuugcuaaauc

SEQ ID NO: 799876 - RNA, 20 nt, Artificial Sequence
  Synthetic
aaaauggguaauucuaaauc

SEQ ID NO: 799877 - RNA, 20 nt, Artificial Sequence
  Synthetic
uucagguucuuggguaaauc

SEQ ID NO: 799878 - RNA, 20 nt, Artificial Sequence
  Synthetic
acauaagucugauguaaauc

SEQ ID NO: 799879 - RNA, 20 nt, Artificial Sequence
  Synthetic
aaucauucucugauuaaauc

SEQ ID NO: 799880 - RNA, 20 nt, Artificial Sequence
  Synthetic
ugagggcuacauuuuaaauc

SEQ ID NO: 799881 - RNA, 20 nt, Artificial Sequence
  Synthetic
auauuuguuuuaaaacaauc

SEQ ID NO: 799882 - RNA, 20 nt, Artificial Sequence
  Synthetic
aggauucaaauacaacaauc

SEQ ID NO: 799883 - RNA, 20 nt, Artificial Sequence
  Synthetic
uguugcuauggauaacaauc

SEQ ID NO: 799884 - RNA, 20 nt, Artificial Sequence
  Synthetic
acugaaaugugauaacaauc

SEQ ID NO: 799885 - RNA, 20 nt, Artificial Sequence
  Synthetic
ccuuagccaugcuaacaauc

SEQ ID NO: 799886 - RNA, 20 nt, Artificial Sequence
  Synthetic
ccuucacagacuccacaauc

SEQ ID NO: 799887 - RNA, 20 nt, Artificial Sequence
  Synthetic
cccaaaggcccuccacaauc

SEQ ID NO: 799888 - RNA, 20 nt, Artificial Sequence
  Synthetic
aaaaucaaaaaggcacaauc

SEQ ID NO: 799889 - RNA, 20 nt, Artificial Sequence
  Synthetic
uuaggguugaggucacaauc

SEQ ID NO: 799890 - RNA, 20 nt, Artificial Sequence
  Synthetic
aaguuuuggccaggacaauc

SEQ ID NO: 799891 - RNA, 20 nt, Artificial Sequence
  Synthetic
ucagagucugacugacaauc

SEQ ID NO: 799892 - RNA, 20 nt, Artificial Sequence
  Synthetic
uuaaaagaagcccuacaauc

SEQ ID NO: 799893 - RNA, 20 nt, Artificial Sequence
  Synthetic
uggauuucuggguuacaauc

SEQ ID NO: 799894 - RNA, 20 nt, Artificial Sequence
  Synthetic
aguuuauuuccuuuacaauc

SEQ ID NO: 799895 - RNA, 20 nt, Artificial Sequence
  Synthetic
acaacuaaaaaaccccaauc

SEQ ID NO: 799896 - RNA, 20 nt, Artificial Sequence
  Synthetic
aauuugucucaaccccaauc

SEQ ID NO: 799897 - RNA, 20 nt, Artificial Sequence
  Synthetic
aauguagcucagccccaauc

SEQ ID NO: 799898 - RNA, 20 nt, Artificial Sequence
  Synthetic
uucucaguggguagccaauc

SEQ ID NO: 799899 - RNA, 20 nt, Artificial Sequence
  Synthetic
uugagacaaauuggccaauc

SEQ ID NO: 799900 - RNA, 20 nt, Artificial Sequence
  Synthetic
ucucauuguccauuccaauc

SEQ ID NO: 799901 - RNA, 20 nt, Artificial Sequence
  Synthetic
aaacauuacguuaagcaauc

SEQ ID NO: 799902 - RNA, 20 nt, Artificial Sequence
  Synthetic
aacauuaaaaaacagcaauc

SEQ ID NO: 799903 - RNA, 20 nt, Artificial Sequence
  Synthetic
cucuagaauagaaggcaauc

SEQ ID NO: 799904 - RNA, 20 nt, Artificial Sequence
  Synthetic
aggaaucuagagaggcaauc

SEQ ID NO: 799905 - RNA, 20 nt, Artificial Sequence
  Synthetic
aaguccuggccagggcaauc

SEQ ID NO: 799906 - RNA, 20 nt, Artificial Sequence
  Synthetic
aaguucuggccagggcaauc

SEQ ID NO: 799907 - RNA, 20 nt, Artificial Sequence
  Synthetic
ugcaguggcgcagugcaauc

SEQ ID NO: 799908 - RNA, 20 nt, Artificial Sequence
  Synthetic
uauauagaugaauugcaauc

SEQ ID NO: 799909 - RNA, 20 nt, Artificial Sequence
  Synthetic
cuaaaaaugcagaaucaauc

SEQ ID NO: 799910 - RNA, 20 nt, Artificial Sequence
  Synthetic
ucauuauaacaacaucaauc

SEQ ID NO: 799911 - RNA, 20 nt, Artificial Sequence
  Synthetic
auacuaauaaugccucaauc

SEQ ID NO: 799912 - RNA, 20 nt, Artificial Sequence
  Synthetic
agauucuccuuuggucaauc

SEQ ID NO: 799913 - RNA, 20 nt, Artificial Sequence
  Synthetic
ccugucauucuuugucaauc

SEQ ID NO: 799914 - RNA, 20 nt, Artificial Sequence
  Synthetic
uuaagagaagaauuucaauc

SEQ ID NO: 799915 - RNA, 20 nt, Artificial Sequence
  Synthetic
auguaaugugaguuucaauc

SEQ ID NO: 799916 - RNA, 20 nt, Artificial Sequence
  Synthetic
cagaaaugacccaaagaauc

SEQ ID NO: 799917 - RNA, 20 nt, Artificial Sequence
  Synthetic
acuucugagaucaaagaauc

SEQ ID NO: 799918 - RNA, 20 nt, Artificial Sequence
  Synthetic
uaauuccuuauacaagaauc

SEQ ID NO: 799919 - RNA, 20 nt, Artificial Sequence
  Synthetic
cauaacuuuagagaagaauc

SEQ ID NO: 799920 - RNA, 20 nt, Artificial Sequence
  Synthetic
uagaauacuagggaagaauc

SEQ ID NO: 799921 - RNA, 20 nt, Artificial Sequence
  Synthetic
aagcuaauaaaugaagaauc

SEQ ID NO: 799922 - RNA, 20 nt, Artificial Sequence
  Synthetic
uguagcaaauaaacagaauc

SEQ ID NO: 799923 - RNA, 20 nt, Artificial Sequence
  Synthetic
agcuguuuaguggcagaauc

SEQ ID NO: 799924 - RNA, 20 nt, Artificial Sequence
  Synthetic
cuucccauuuuggcagaauc

SEQ ID NO: 799925 - RNA, 20 nt, Artificial Sequence
  Synthetic
ucauucuguaaaucagaauc

SEQ ID NO: 799926 - RNA, 20 nt, Artificial Sequence
  Synthetic
aaaauaaaugauucagaauc

SEQ ID NO: 799927 - RNA, 20 nt, Artificial Sequence
  Synthetic
cuggucagguacagagaauc

SEQ ID NO: 799928 - RNA, 20 nt, Artificial Sequence
  Synthetic
agagagagagagagagaauc

SEQ ID NO: 799929 - RNA, 20 nt, Artificial Sequence
  Synthetic
uggcucuuaaugggagaauc

SEQ ID NO: 799930 - RNA, 20 nt, Artificial Sequence
  Synthetic
aauaaaccugugauagaauc

SEQ ID NO: 799931 - RNA, 20 nt, Artificial Sequence
  Synthetic
uuuucccuuauccuagaauc

SEQ ID NO: 799932 - RNA, 20 nt, Artificial Sequence
  Synthetic
ucauagaaauacguagaauc

SEQ ID NO: 799933 - RNA, 20 nt, Artificial Sequence
  Synthetic
aggaacuugcuuuacgaauc

SEQ ID NO: 799934 - RNA, 20 nt, Artificial Sequence
  Synthetic
acauucuuggcaauggaauc

SEQ ID NO: 799935 - RNA, 20 nt, Artificial Sequence
  Synthetic
uuugcuuguaugauggaauc

SEQ ID NO: 799936 - RNA, 20 nt, Artificial Sequence
  Synthetic
aagaucaaggggcuggaauc

SEQ ID NO: 799937 - RNA, 20 nt, Artificial Sequence
  Synthetic
aauaacuaaagguuggaauc

SEQ ID NO: 799938 - RNA, 20 nt, Artificial Sequence
  Synthetic
aguggcaaucuguuggaauc

SEQ ID NO: 799939 - RNA, 20 nt, Artificial Sequence
  Synthetic
cuucacaaguugaaugaauc

SEQ ID NO: 799940 - RNA, 20 nt, Artificial Sequence
  Synthetic
ugaaguaacccagaugaauc

SEQ ID NO: 799941 - RNA, 20 nt, Artificial Sequence
  Synthetic
uguagggacauggaugaauc

SEQ ID NO: 799942 - RNA, 20 nt, Artificial Sequence
  Synthetic
aagaacuuacuuuaugaauc

SEQ ID NO: 799943 - RNA, 20 nt, Artificial Sequence
  Synthetic
caggacuugcuuuaugaauc

SEQ ID NO: 799944 - RNA, 20 nt, Artificial Sequence
  Synthetic
uuaagcugauaaacugaauc

SEQ ID NO: 799945 - RNA, 20 nt, Artificial Sequence
  Synthetic
aaaccacaugccacugaauc

SEQ ID NO: 799946 - RNA, 20 nt, Artificial Sequence
  Synthetic
uaacuuguuguuccugaauc

SEQ ID NO: 799947 - RNA, 20 nt, Artificial Sequence
  Synthetic
cauacuucacaugcugaauc

SEQ ID NO: 799948 - RNA, 20 nt, Artificial Sequence
  Synthetic
augagaugcagcucugaauc

SEQ ID NO: 799949 - RNA, 20 nt, Artificial Sequence
  Synthetic
auguuaacaaauggugaauc

SEQ ID NO: 799950 - RNA, 20 nt, Artificial Sequence
  Synthetic
acaaaagcugauggugaauc

SEQ ID NO: 799951 - RNA, 20 nt, Artificial Sequence
  Synthetic
ugauugaaauuuugugaauc

SEQ ID NO: 799952 - RNA, 20 nt, Artificial Sequence
  Synthetic
auuuccucaucucuugaauc

SEQ ID NO: 799953 - RNA, 20 nt, Artificial Sequence
  Synthetic
ugccccagacauuuugaauc

SEQ ID NO: 799954 - RNA, 20 nt, Artificial Sequence
  Synthetic
uuaauuccuguaaaauaauc

SEQ ID NO: 799955 - RNA, 20 nt, Artificial Sequence
  Synthetic
aacacuuuauacaaauaauc

SEQ ID NO: 799956 - RNA, 20 nt, Artificial Sequence
  Synthetic
agagggacagaugcauaauc

SEQ ID NO: 799957 - RNA, 20 nt, Artificial Sequence
  Synthetic
ucuauucacagugcauaauc

SEQ ID NO: 799958 - RNA, 20 nt, Artificial Sequence
  Synthetic
auagcaguagaaagauaauc

SEQ ID NO: 799959 - RNA, 20 nt, Artificial Sequence
  Synthetic
augauaauuacuagauaauc

SEQ ID NO: 799960 - RNA, 20 nt, Artificial Sequence
  Synthetic
ugauuucuucauugauaauc

SEQ ID NO: 799961 - RNA, 20 nt, Artificial Sequence
  Synthetic
uagaacuuugauguauaauc

SEQ ID NO: 799962 - RNA, 20 nt, Artificial Sequence
  Synthetic
uucucaaagcauuuauaauc

SEQ ID NO: 799963 - RNA, 20 nt, Artificial Sequence
  Synthetic
uggcauaaaauaaacuaauc

SEQ ID NO: 799964 - RNA, 20 nt, Artificial Sequence
  Synthetic
aagaguucagaagacuaauc

SEQ ID NO: 799965 - RNA, 20 nt, Artificial Sequence
  Synthetic
uucugguaccugaccuaauc

SEQ ID NO: 799966 - RNA, 20 nt, Artificial Sequence
  Synthetic
uaagagaaugugaccuaauc

SEQ ID NO: 799967 - RNA, 20 nt, Artificial Sequence
  Synthetic
uucuaguugaaaugcuaauc

SEQ ID NO: 799968 - RNA, 20 nt, Artificial Sequence
  Synthetic
auuuaugguaauuucuaauc

SEQ ID NO: 799969 - RNA, 20 nt, Artificial Sequence
  Synthetic
uuacuuauuccuuucuaauc

SEQ ID NO: 799970 - RNA, 20 nt, Artificial Sequence
  Synthetic
uaacuuguauguuucuaauc

SEQ ID NO: 799971 - RNA, 20 nt, Artificial Sequence
  Synthetic
uuuagaauacagaaguaauc

SEQ ID NO: 799972 - RNA, 20 nt, Artificial Sequence
  Synthetic
agaaauccaccgaaguaauc

SEQ ID NO: 799973 - RNA, 20 nt, Artificial Sequence
  Synthetic
agguugaaugaacaguaauc

SEQ ID NO: 799974 - RNA, 20 nt, Artificial Sequence
  Synthetic
auacuuuuaaggagguaauc

SEQ ID NO: 799975 - RNA, 20 nt, Artificial Sequence
  Synthetic
uuuaaacauacaugguaauc

SEQ ID NO: 799976 - RNA, 20 nt, Artificial Sequence
  Synthetic
uugauaauaguuugguaauc

SEQ ID NO: 799977 - RNA, 20 nt, Artificial Sequence
  Synthetic
ucucaucuagaacuguaauc

SEQ ID NO: 799978 - RNA, 20 nt, Artificial Sequence
  Synthetic
aaacauaaguugcauuaauc

SEQ ID NO: 799979 - RNA, 20 nt, Artificial Sequence
  Synthetic
augcaucuggaggauuaauc

SEQ ID NO: 799980 - RNA, 20 nt, Artificial Sequence
  Synthetic
uauuacaauaccacuuaauc

SEQ ID NO: 799981 - RNA, 20 nt, Artificial Sequence
  Synthetic
ugauuuccucuuccuuaauc

SEQ ID NO: 799982 - RNA, 20 nt, Artificial Sequence
  Synthetic
aauguaucuaguucuuaauc

SEQ ID NO: 799983 - RNA, 20 nt, Artificial Sequence
  Synthetic
ugugccacauuuucuuaauc

SEQ ID NO: 799984 - RNA, 20 nt, Artificial Sequence
  Synthetic
uauguuuugaaauguuaauc

SEQ ID NO: 799985 - RNA, 20 nt, Artificial Sequence
  Synthetic
aauaaauauuuauuuuaauc

SEQ ID NO: 799986 - RNA, 20 nt, Artificial Sequence
  Synthetic
auaucauguuguaaaacauc

SEQ ID NO: 799987 - RNA, 20 nt, Artificial Sequence
  Synthetic
uuaaaaagucaggaaacauc

SEQ ID NO: 799988 - RNA, 20 nt, Artificial Sequence
  Synthetic
aauuauuaagaggaaacauc

SEQ ID NO: 799989 - RNA, 20 nt, Artificial Sequence
  Synthetic
ugacccaggguauaaacauc

SEQ ID NO: 799990 - RNA, 20 nt, Artificial Sequence
  Synthetic
cagcugauccuuuaaacauc

SEQ ID NO: 799991 - RNA, 20 nt, Artificial Sequence
  Synthetic
aagguuuugaacacaacauc

SEQ ID NO: 799992 - RNA, 20 nt, Artificial Sequence
  Synthetic
ucugaaauauugacaacauc

SEQ ID NO: 799993 - RNA, 20 nt, Artificial Sequence
  Synthetic
acagcuucuauuacaacauc

SEQ ID NO: 799994 - RNA, 20 nt, Artificial Sequence
  Synthetic
uagaacccucccccaacauc

SEQ ID NO: 799995 - RNA, 20 nt, Artificial Sequence
  Synthetic
cgguagcuacuggcaacauc

SEQ ID NO: 799996 - RNA, 20 nt, Artificial Sequence
  Synthetic
agucuagaaauaagaacauc

SEQ ID NO: 799997 - RNA, 20 nt, Artificial Sequence
  Synthetic
cuccaacuccucugaacauc

SEQ ID NO: 799998 - RNA, 20 nt, Artificial Sequence
  Synthetic
aauucaauaugaauaacauc

SEQ ID NO: 799999 - RNA, 20 nt, Artificial Sequence
  Synthetic
uagugcaauuuaauaacauc

SEQ ID NO: 800000 - RNA, 20 nt, Artificial Sequence
  Synthetic
auguuugggagaguaacauc

SEQ ID NO: 800001 - RNA, 20 nt, Artificial Sequence
  Synthetic
cuagcauuuuucuuaacauc

SEQ ID NO: 800002 - RNA, 20 nt, Artificial Sequence
  Synthetic
auaaaaggaaaaaacacauc

SEQ ID NO: 800003 - RNA, 20 nt, Artificial Sequence
  Synthetic
uggacaacucugaacacauc

SEQ ID NO: 800004 - RNA, 20 nt, Artificial Sequence
  Synthetic
auucuaauuaaagacacauc

SEQ ID NO: 800005 - RNA, 20 nt, Artificial Sequence
  Synthetic
cauacauugagaaccacauc

SEQ ID NO: 800006 - RNA, 20 nt, Artificial Sequence
  Synthetic
caagguugaggggccacauc

SEQ ID NO: 800007 - RNA, 20 nt, Artificial Sequence
  Synthetic
ucuauuuuuauggccacauc

SEQ ID NO: 800008 - RNA, 20 nt, Artificial Sequence
  Synthetic
ugaugaaauacugccacauc

SEQ ID NO: 800009 - RNA, 20 nt, Artificial Sequence
  Synthetic
uuuagaauauuugccacauc

SEQ ID NO: 800010 - RNA, 20 nt, Artificial Sequence
  Synthetic
uuuggaaagaagggcacauc

SEQ ID NO: 800011 - RNA, 20 nt, Artificial Sequence
  Synthetic
uaauuauuuacaaucacauc

SEQ ID NO: 800012 - RNA, 20 nt, Artificial Sequence
  Synthetic
caauguguaauaaucacauc

SEQ ID NO: 800013 - RNA, 20 nt, Artificial Sequence
  Synthetic
aauuuuuaaaagaucacauc

SEQ ID NO: 800014 - RNA, 20 nt, Artificial Sequence
  Synthetic
ugucuguguuuuaucacauc

SEQ ID NO: 800015 - RNA, 20 nt, Artificial Sequence
  Synthetic
auuuuguauuacgucacauc

SEQ ID NO: 800016 - RNA, 20 nt, Artificial Sequence
  Synthetic
cacucaaaaagagagacauc

SEQ ID NO: 800017 - RNA, 20 nt, Artificial Sequence
  Synthetic
uuuugcauuucauagacauc

SEQ ID NO: 800018 - RNA, 20 nt, Artificial Sequence
  Synthetic
aagauccuauucuagacauc

SEQ ID NO: 800019 - RNA, 20 nt, Artificial Sequence
  Synthetic
ucuaagaaucauaggacauc

SEQ ID NO: 800020 - RNA, 20 nt, Artificial Sequence
  Synthetic
uggcaggugcccuggacauc

SEQ ID NO: 800021 - RNA, 20 nt, Artificial Sequence
  Synthetic
uggaucccucccaugacauc

SEQ ID NO: 800022 - RNA, 20 nt, Artificial Sequence
  Synthetic
uccaaauaccgaaauacauc

SEQ ID NO: 800023 - RNA, 20 nt, Artificial Sequence
  Synthetic
caguggagcuucaauacauc

SEQ ID NO: 800024 - RNA, 20 nt, Artificial Sequence
  Synthetic
uuuguacauuguaauacauc

SEQ ID NO: 800025 - RNA, 20 nt, Artificial Sequence
  Synthetic
uucucuccuccugauacauc

SEQ ID NO: 800026 - RNA, 20 nt, Artificial Sequence
  Synthetic
aguucuugguuuacuacauc

SEQ ID NO: 800027 - RNA, 20 nt, Artificial Sequence
  Synthetic
acauauauuugaccuacauc

SEQ ID NO: 800028 - RNA, 20 nt, Artificial Sequence
  Synthetic
ucucgcaggagcccuacauc

SEQ ID NO: 800029 - RNA, 20 nt, Artificial Sequence
  Synthetic
caugaaccuuacuguacauc

SEQ ID NO: 800030 - RNA, 20 nt, Artificial Sequence
  Synthetic
aauuaaggcuauaaaccauc

SEQ ID NO: 800031 - RNA, 20 nt, Artificial Sequence
  Synthetic
uccaucuaccacccaccauc

SEQ ID NO: 800032 - RNA, 20 nt, Artificial Sequence
  Synthetic
ccagcaacaucagcaccauc

SEQ ID NO: 800033 - RNA, 20 nt, Artificial Sequence
  Synthetic
cagcaggagaugucaccauc

SEQ ID NO: 800034 - RNA, 20 nt, Artificial Sequence
  Synthetic
uggaaguugauuucaccauc

SEQ ID NO: 800035 - RNA, 20 nt, Artificial Sequence
  Synthetic
agagaugguguuucaccauc

SEQ ID NO: 800036 - RNA, 20 nt, Artificial Sequence
  Synthetic
cauaucuauuaaauaccauc

SEQ ID NO: 800037 - RNA, 20 nt, Artificial Sequence
  Synthetic
cuuuuaaaguugcuaccauc

SEQ ID NO: 800038 - RNA, 20 nt, Artificial Sequence
  Synthetic
agccuaaaacauuuaccauc

SEQ ID NO: 800039 - RNA, 20 nt, Artificial Sequence
  Synthetic
cagaguuggaaagacccauc

SEQ ID NO: 800040 - RNA, 20 nt, Artificial Sequence
  Synthetic
uugggccaauuucucccauc

SEQ ID NO: 800041 - RNA, 20 nt, Artificial Sequence
  Synthetic
ugcagcuagauggucccauc

SEQ ID NO: 800042 - RNA, 20 nt, Artificial Sequence
  Synthetic
aauucucccaugaagccauc

SEQ ID NO: 800043 - RNA, 20 nt, Artificial Sequence
  Synthetic
aguucagcagugcagccauc

SEQ ID NO: 800044 - RNA, 20 nt, Artificial Sequence
  Synthetic
augacgaauuuugagccauc

SEQ ID NO: 800045 - RNA, 20 nt, Artificial Sequence
  Synthetic
agaucgagaaagaggccauc

SEQ ID NO: 800046 - RNA, 20 nt, Artificial Sequence
  Synthetic
cuaaaaugcaugaugccauc

SEQ ID NO: 800047 - RNA, 20 nt, Artificial Sequence
  Synthetic
agauuucaaggacugccauc

SEQ ID NO: 800048 - RNA, 20 nt, Artificial Sequence
  Synthetic
cccuacauuuuauugccauc

SEQ ID NO: 800049 - RNA, 20 nt, Artificial Sequence
  Synthetic
aauucagcugugaauccauc

SEQ ID NO: 800050 - RNA, 20 nt, Artificial Sequence
  Synthetic
aauucggcugugaauccauc

SEQ ID NO: 800051 - RNA, 20 nt, Artificial Sequence
  Synthetic
auuuagcugggccauccauc

SEQ ID NO: 800052 - RNA, 20 nt, Artificial Sequence
  Synthetic
ucuuucuucuauacuccauc

SEQ ID NO: 800053 - RNA, 20 nt, Artificial Sequence
  Synthetic
ccaugcuaucacccuccauc

SEQ ID NO: 800054 - RNA, 20 nt, Artificial Sequence
  Synthetic
uuccagaaauaaucuccauc

SEQ ID NO: 800055 - RNA, 20 nt, Artificial Sequence
  Synthetic
aaaaaccaaauuucuccauc

SEQ ID NO: 800056 - RNA, 20 nt, Artificial Sequence
  Synthetic
uacaugcuguuuucuccauc

SEQ ID NO: 800057 - RNA, 20 nt, Artificial Sequence
  Synthetic
aggugaaacaaaaguccauc

SEQ ID NO: 800058 - RNA, 20 nt, Artificial Sequence
  Synthetic
cugagcucuuaggguccauc

SEQ ID NO: 800059 - RNA, 20 nt, Artificial Sequence
  Synthetic
uuaucccaguuuuguccauc

SEQ ID NO: 800060 - RNA, 20 nt, Artificial Sequence
  Synthetic
uuccauugaguucuuccauc

SEQ ID NO: 800061 - RNA, 20 nt, Artificial Sequence
  Synthetic
ucagggacuuuucuuccauc

SEQ ID NO: 800062 - RNA, 20 nt, Artificial Sequence
  Synthetic
uuuauggugugaguuccauc

SEQ ID NO: 800063 - RNA, 20 nt, Artificial Sequence
  Synthetic
auauuuuguaaauaagcauc

SEQ ID NO: 800064 - RNA, 20 nt, Artificial Sequence
  Synthetic
cugaugguuuuauaagcauc

SEQ ID NO: 800065 - RNA, 20 nt, Artificial Sequence
  Synthetic
aaauuucuuaaaacagcauc

SEQ ID NO: 800066 - RNA, 20 nt, Artificial Sequence
  Synthetic
uucacaaccucaccagcauc

SEQ ID NO: 800067 - RNA, 20 nt, Artificial Sequence
  Synthetic
ccccuacccuucccagcauc

SEQ ID NO: 800068 - RNA, 20 nt, Artificial Sequence
  Synthetic
uuuaacccccacgcagcauc

SEQ ID NO: 800069 - RNA, 20 nt, Artificial Sequence
  Synthetic
uucuaaaaugccagagcauc

SEQ ID NO: 800070 - RNA, 20 nt, Artificial Sequence
  Synthetic
aacauugugaaaauagcauc

SEQ ID NO: 800071 - RNA, 20 nt, Artificial Sequence
  Synthetic
uccacauccuugcuagcauc

SEQ ID NO: 800072 - RNA, 20 nt, Artificial Sequence
  Synthetic
auuaucuuuuaaguagcauc

SEQ ID NO: 800073 - RNA, 20 nt, Artificial Sequence
  Synthetic
cuuagcaggaagguagcauc

SEQ ID NO: 800074 - RNA, 20 nt, Artificial Sequence
  Synthetic
uuaguugauaaauuagcauc

SEQ ID NO: 800075 - RNA, 20 nt, Artificial Sequence
  Synthetic
aaaguucuggacuuagcauc

SEQ ID NO: 800076 - RNA, 20 nt, Artificial Sequence
  Synthetic
caggcaugagccaccgcauc

SEQ ID NO: 800077 - RNA, 20 nt, Artificial Sequence
  Synthetic
uaggugugagccaccgcauc

SEQ ID NO: 800078 - RNA, 20 nt, Artificial Sequence
  Synthetic
agaucuagcaaucccgcauc

SEQ ID NO: 800079 - RNA, 20 nt, Artificial Sequence
  Synthetic
caugcuaaauuugaggcauc

SEQ ID NO: 800080 - RNA, 20 nt, Artificial Sequence
  Synthetic
caguuuuccauaugggcauc

SEQ ID NO: 800081 - RNA, 20 nt, Artificial Sequence
  Synthetic
caaauuuucuuaauggcauc

SEQ ID NO: 800082 - RNA, 20 nt, Artificial Sequence
  Synthetic
ugaauuuucuucauggcauc

SEQ ID NO: 800083 - RNA, 20 nt, Artificial Sequence
  Synthetic
uguugaugcucuguggcauc

SEQ ID NO: 800084 - RNA, 20 nt, Artificial Sequence
  Synthetic
caacuuggggaaaaugcauc

SEQ ID NO: 800085 - RNA, 20 nt, Artificial Sequence
  Synthetic
uauuggaaaguuucugcauc

SEQ ID NO: 800086 - RNA, 20 nt, Artificial Sequence
  Synthetic
aaugaaucugagggugcauc

SEQ ID NO: 800087 - RNA, 20 nt, Artificial Sequence
  Synthetic
acucaacaucgucaaucauc

SEQ ID NO: 800088 - RNA, 20 nt, Artificial Sequence
  Synthetic
uaacaccuuacagaaucauc

SEQ ID NO: 800089 - RNA, 20 nt, Artificial Sequence
  Synthetic
caaauauaugcauaaucauc

SEQ ID NO: 800090 - RNA, 20 nt, Artificial Sequence
  Synthetic
uaaaauguugccacaucauc

SEQ ID NO: 800091 - RNA, 20 nt, Artificial Sequence
  Synthetic
cuuucaaaauugacaucauc

SEQ ID NO: 800092 - RNA, 20 nt, Artificial Sequence
  Synthetic
uaggccucacauacaucauc

SEQ ID NO: 800093 - RNA, 20 nt, Artificial Sequence
  Synthetic
ucguguauucuuccaucauc

SEQ ID NO: 800094 - RNA, 20 nt, Artificial Sequence
  Synthetic
caugcauuuccagcaucauc

SEQ ID NO: 800095 - RNA, 20 nt, Artificial Sequence
  Synthetic
aaacaccuuucagcaucauc

SEQ ID NO: 800096 - RNA, 20 nt, Artificial Sequence
  Synthetic
ucugccuagaaugcaucauc

SEQ ID NO: 800097 - RNA, 20 nt, Artificial Sequence
  Synthetic
ugagaggugacuggaucauc

SEQ ID NO: 800098 - RNA, 20 nt, Artificial Sequence
  Synthetic
agugggauugcuggaucauc

SEQ ID NO: 800099 - RNA, 20 nt, Artificial Sequence
  Synthetic
uuuggauuccaaauaucauc

SEQ ID NO: 800100 - RNA, 20 nt, Artificial Sequence
  Synthetic
ugguugaaaaacuacucauc

SEQ ID NO: 800101 - RNA, 20 nt, Artificial Sequence
  Synthetic
auuuuucuuggaagcucauc

SEQ ID NO: 800102 - RNA, 20 nt, Artificial Sequence
  Synthetic
aggugguagauuagcucauc

SEQ ID NO: 800103 - RNA, 20 nt, Artificial Sequence
  Synthetic
caagauuauuaucucucauc

SEQ ID NO: 800104 - RNA, 20 nt, Artificial Sequence
  Synthetic
agcuauuauugucucucauc

SEQ ID NO: 800105 - RNA, 20 nt, Artificial Sequence
  Synthetic
caccuagaaguagucucauc

SEQ ID NO: 800106 - RNA, 20 nt, Artificial Sequence
  Synthetic
aguuucaaaaaguucucauc

SEQ ID NO: 800107 - RNA, 20 nt, Artificial Sequence
  Synthetic
uggaauuuauuuuucucauc

SEQ ID NO: 800108 - RNA, 20 nt, Artificial Sequence
  Synthetic
uaucucugggcgaggucauc

SEQ ID NO: 800109 - RNA, 20 nt, Artificial Sequence
  Synthetic
aaggcugaaggcuggucauc

SEQ ID NO: 800110 - RNA, 20 nt, Artificial Sequence
  Synthetic
agcagaggaguuuggucauc

SEQ ID NO: 800111 - RNA, 20 nt, Artificial Sequence
  Synthetic
ugcuuguguugcaugucauc

SEQ ID NO: 800112 - RNA, 20 nt, Artificial Sequence
  Synthetic
uuuguucuuuaguugucauc

SEQ ID NO: 800113 - RNA, 20 nt, Artificial Sequence
  Synthetic
cugccuugcaguuugucauc

SEQ ID NO: 800114 - RNA, 20 nt, Artificial Sequence
  Synthetic
aaucaauuuggaaauucauc

SEQ ID NO: 800115 - RNA, 20 nt, Artificial Sequence
  Synthetic
uauguuugguagaauucauc

SEQ ID NO: 800116 - RNA, 20 nt, Artificial Sequence
  Synthetic
uucaucaacuguaauucauc

SEQ ID NO: 800117 - RNA, 20 nt, Artificial Sequence
  Synthetic
cuguuacccccagauucauc

SEQ ID NO: 800118 - RNA, 20 nt, Artificial Sequence
  Synthetic
cuugccuguaauuauucauc

SEQ ID NO: 800119 - RNA, 20 nt, Artificial Sequence
  Synthetic
agcucugcuuguacuucauc

SEQ ID NO: 800120 - RNA, 20 nt, Artificial Sequence
  Synthetic
ucucccagagcuccuucauc

SEQ ID NO: 800121 - RNA, 20 nt, Artificial Sequence
  Synthetic
cgauaagucauuaguucauc

SEQ ID NO: 800122 - RNA, 20 nt, Artificial Sequence
  Synthetic
uacagaaaaccagguucauc

SEQ ID NO: 800123 - RNA, 20 nt, Artificial Sequence
  Synthetic
uuuuugcaucgauguucauc

SEQ ID NO: 800124 - RNA, 20 nt, Artificial Sequence
  Synthetic
uuuucgcauugauguucauc

SEQ ID NO: 800125 - RNA, 20 nt, Artificial Sequence
  Synthetic
cagucuauuugcauuucauc

SEQ ID NO: 800126 - RNA, 20 nt, Artificial Sequence
  Synthetic
agaaacuuauuuguuucauc

SEQ ID NO: 800127 - RNA, 20 nt, Artificial Sequence
  Synthetic
ucugagcuuguauuuucauc

SEQ ID NO: 800128 - RNA, 20 nt, Artificial Sequence
  Synthetic
cuacauguauuuuuuucauc

SEQ ID NO: 800129 - RNA, 20 nt, Artificial Sequence
  Synthetic
cuguguuuuuuuuuuucauc

SEQ ID NO: 800130 - RNA, 20 nt, Artificial Sequence
  Synthetic
auaauaaugaaaaaaagauc

SEQ ID NO: 800131 - RNA, 20 nt, Artificial Sequence
  Synthetic
cuaagguuuggaaaaagauc

SEQ ID NO: 800132 - RNA, 20 nt, Artificial Sequence
  Synthetic
aaacuauugcagaaaagauc

SEQ ID NO: 800133 - RNA, 20 nt, Artificial Sequence
  Synthetic
caaauuacuaauaaaagauc

SEQ ID NO: 800134 - RNA, 20 nt, Artificial Sequence
  Synthetic
uccuaacucauucaaagauc

SEQ ID NO: 800135 - RNA, 20 nt, Artificial Sequence
  Synthetic
ucuuuuuaaggggaaagauc

SEQ ID NO: 800136 - RNA, 20 nt, Artificial Sequence
  Synthetic
ucuuuaacuucuuaaagauc

SEQ ID NO: 800137 - RNA, 20 nt, Artificial Sequence
  Synthetic
ugccuggaauguuaaagauc

SEQ ID NO: 800138 - RNA, 20 nt, Artificial Sequence
  Synthetic
uaauauauuugcacaagauc

SEQ ID NO: 800139 - RNA, 20 nt, Artificial Sequence
  Synthetic
ugagugaguucuccaagauc

SEQ ID NO: 800140 - RNA, 20 nt, Artificial Sequence
  Synthetic
acaaguggagggagaagauc

SEQ ID NO: 800141 - RNA, 20 nt, Artificial Sequence
  Synthetic
ccauuuucuuagggaagauc

SEQ ID NO: 800142 - RNA, 20 nt, Artificial Sequence
  Synthetic
augaugaguaugugaagauc

SEQ ID NO: 800143 - RNA, 20 nt, Artificial Sequence
  Synthetic
augggcaacuuaauaagauc

SEQ ID NO: 800144 - RNA, 20 nt, Artificial Sequence
  Synthetic
uaagggaaaaggcacagauc

SEQ ID NO: 800145 - RNA, 20 nt, Artificial Sequence
  Synthetic
auggucauuaggcacagauc

SEQ ID NO: 800146 - RNA, 20 nt, Artificial Sequence
  Synthetic
cucuuugaagaaagcagauc

SEQ ID NO: 800147 - RNA, 20 nt, Artificial Sequence
  Synthetic
aggggaaaucccaucagauc

SEQ ID NO: 800148 - RNA, 20 nt, Artificial Sequence
  Synthetic
uaauguauagugaucagauc

SEQ ID NO: 800149 - RNA, 20 nt, Artificial Sequence
  Synthetic
uaaaaguacacagucagauc

SEQ ID NO: 800150 - RNA, 20 nt, Artificial Sequence
  Synthetic
ugugcagugacuuucagauc

SEQ ID NO: 800151 - RNA, 20 nt, Artificial Sequence
  Synthetic
caguuaaauuugaagagauc

SEQ ID NO: 800152 - RNA, 20 nt, Artificial Sequence
  Synthetic
aggagaugaagggagagauc

SEQ ID NO: 800153 - RNA, 20 nt, Artificial Sequence
  Synthetic
uuguauuuuuaguagagauc

SEQ ID NO: 800154 - RNA, 20 nt, Artificial Sequence
  Synthetic
ugaaaucuaagcaggagauc

SEQ ID NO: 800155 - RNA, 20 nt, Artificial Sequence
  Synthetic
aaaguacaguucuggagauc

SEQ ID NO: 800156 - RNA, 20 nt, Artificial Sequence
  Synthetic
ugagugaguucucugagauc

SEQ ID NO: 800157 - RNA, 20 nt, Artificial Sequence
  Synthetic
uagaguuuucaagugagauc

SEQ ID NO: 800158 - RNA, 20 nt, Artificial Sequence
  Synthetic
cgggcggaucacuugagauc

SEQ ID NO: 800159 - RNA, 20 nt, Artificial Sequence
  Synthetic
auaauaauauuaaauagauc

SEQ ID NO: 800160 - RNA, 20 nt, Artificial Sequence
  Synthetic
ucuacugaugucuauagauc

SEQ ID NO: 800161 - RNA, 20 nt, Artificial Sequence
  Synthetic
caaaaauuaagcccuagauc

SEQ ID NO: 800162 - RNA, 20 nt, Artificial Sequence
  Synthetic
agaauuacaaaaaguagauc

SEQ ID NO: 800163 - RNA, 20 nt, Artificial Sequence
  Synthetic
agcuucugauucaguagauc

SEQ ID NO: 800164 - RNA, 20 nt, Artificial Sequence
  Synthetic
agaauaagcagagguagauc

SEQ ID NO: 800165 - RNA, 20 nt, Artificial Sequence
  Synthetic
aauuaucuggaacuuagauc

SEQ ID NO: 800166 - RNA, 20 nt, Artificial Sequence
  Synthetic
uucuuuugaaaauuuagauc

SEQ ID NO: 800167 - RNA, 20 nt, Artificial Sequence
  Synthetic
uguacaaguggcccacgauc

SEQ ID NO: 800168 - RNA, 20 nt, Artificial Sequence
  Synthetic
aaguucuggccagggcgauc

SEQ ID NO: 800169 - RNA, 20 nt, Artificial Sequence
  Synthetic
uggagugcaauggugcgauc

SEQ ID NO: 800170 - RNA, 20 nt, Artificial Sequence
  Synthetic
cauaaaguccagugucgauc

SEQ ID NO: 800171 - RNA, 20 nt, Artificial Sequence
  Synthetic
cuuuuaagaguauuucgauc

SEQ ID NO: 800172 - RNA, 20 nt, Artificial Sequence
  Synthetic
uucuauuaaugagaaggauc

SEQ ID NO: 800173 - RNA, 20 nt, Artificial Sequence
  Synthetic
uuaucucugagaccaggauc

SEQ ID NO: 800174 - RNA, 20 nt, Artificial Sequence
  Synthetic
acauagcugcugggaggauc

SEQ ID NO: 800175 - RNA, 20 nt, Artificial Sequence
  Synthetic
acuggcagauagauaggauc

SEQ ID NO: 800176 - RNA, 20 nt, Artificial Sequence
  Synthetic
cugaauugaagcaagggauc

SEQ ID NO: 800177 - RNA, 20 nt, Artificial Sequence
  Synthetic
ucugugagacagaagggauc

SEQ ID NO: 800178 - RNA, 20 nt, Artificial Sequence
  Synthetic
uucugaauuuuacagggauc

SEQ ID NO: 800179 - RNA, 20 nt, Artificial Sequence
  Synthetic
aaugccugcaggcagggauc

SEQ ID NO: 800180 - RNA, 20 nt, Artificial Sequence
  Synthetic
cacacguccugggagggauc

SEQ ID NO: 800181 - RNA, 20 nt, Artificial Sequence
  Synthetic
cuugacguagcagugggauc

SEQ ID NO: 800182 - RNA, 20 nt, Artificial Sequence
  Synthetic
cuuugccuggcuuugggauc

SEQ ID NO: 800183 - RNA, 20 nt, Artificial Sequence
  Synthetic
aaaagaagggaaaauggauc

SEQ ID NO: 800184 - RNA, 20 nt, Artificial Sequence
  Synthetic
agacaauuuuuccauggauc

SEQ ID NO: 800185 - RNA, 20 nt, Artificial Sequence
  Synthetic
ugcagggacauagauggauc

SEQ ID NO: 800186 - RNA, 20 nt, Artificial Sequence
  Synthetic
agcgauuccucugauggauc

SEQ ID NO: 800187 - RNA, 20 nt, Artificial Sequence
  Synthetic
acuccagaaaguacuggauc

SEQ ID NO: 800188 - RNA, 20 nt, Artificial Sequence
  Synthetic
agggaaaauggaucuggauc

SEQ ID NO: 800189 - RNA, 20 nt, Artificial Sequence
  Synthetic
uuuccuccaaaugguggauc

SEQ ID NO: 800190 - RNA, 20 nt, Artificial Sequence
  Synthetic
cagucagagacacuuggauc

SEQ ID NO: 800191 - RNA, 20 nt, Artificial Sequence
  Synthetic
uuauuuaaacauuuuggauc

SEQ ID NO: 800192 - RNA, 20 nt, Artificial Sequence
  Synthetic
uaauaguauauacaaugauc

SEQ ID NO: 800193 - RNA, 20 nt, Artificial Sequence
  Synthetic
uuggagguaucagaaugauc

SEQ ID NO: 800194 - RNA, 20 nt, Artificial Sequence
  Synthetic
aggguuucaccauaaugauc

SEQ ID NO: 800195 - RNA, 20 nt, Artificial Sequence
  Synthetic
auaaaaauaggaacaugauc

SEQ ID NO: 800196 - RNA, 20 nt, Artificial Sequence
  Synthetic
uaguuuaccuagagaugauc

SEQ ID NO: 800197 - RNA, 20 nt, Artificial Sequence
  Synthetic
ucaaagcuauaacuaugauc

SEQ ID NO: 800198 - RNA, 20 nt, Artificial Sequence
  Synthetic
ucauuaucuugccuaugauc

SEQ ID NO: 800199 - RNA, 20 nt, Artificial Sequence
  Synthetic
acuuugagugcuguaugauc

SEQ ID NO: 800200 - RNA, 20 nt, Artificial Sequence
  Synthetic
uucucuuaaagauacugauc

SEQ ID NO: 800201 - RNA, 20 nt, Artificial Sequence
  Synthetic
cuaaaaacauucaccugauc

SEQ ID NO: 800202 - RNA, 20 nt, Artificial Sequence
  Synthetic
auauguuagccaggcugauc

SEQ ID NO: 800203 - RNA, 20 nt, Artificial Sequence
  Synthetic
ccauccccgugaugcugauc

SEQ ID NO: 800204 - RNA, 20 nt, Artificial Sequence
  Synthetic
aaaaggaauuaauagugauc

SEQ ID NO: 800205 - RNA, 20 nt, Artificial Sequence
  Synthetic
acucccgaccucaggugauc

SEQ ID NO: 800206 - RNA, 20 nt, Artificial Sequence
  Synthetic
ccuaaguauaucuggugauc

SEQ ID NO: 800207 - RNA, 20 nt, Artificial Sequence
  Synthetic
cauauaauuuuuuggugauc

SEQ ID NO: 800208 - RNA, 20 nt, Artificial Sequence
  Synthetic
acauuccuggggcugugauc

SEQ ID NO: 800209 - RNA, 20 nt, Artificial Sequence
  Synthetic
agauaccuucaucugugauc

SEQ ID NO: 800210 - RNA, 20 nt, Artificial Sequence
  Synthetic
agaagugccagagugugauc

SEQ ID NO: 800211 - RNA, 20 nt, Artificial Sequence
  Synthetic
aagaaaaauauugugugauc

SEQ ID NO: 800212 - RNA, 20 nt, Artificial Sequence
  Synthetic
cuguuguacaauuugugauc

SEQ ID NO: 800213 - RNA, 20 nt, Artificial Sequence
  Synthetic
ucaaaaagcccuuugugauc

SEQ ID NO: 800214 - RNA, 20 nt, Artificial Sequence
  Synthetic
ugcucaauaggaaauugauc

SEQ ID NO: 800215 - RNA, 20 nt, Artificial Sequence
  Synthetic
uaccuaccuguaaauugauc

SEQ ID NO: 800216 - RNA, 20 nt, Artificial Sequence
  Synthetic
agaaauucacaucauugauc

SEQ ID NO: 800217 - RNA, 20 nt, Artificial Sequence
  Synthetic
aggauggcugcugauugauc

SEQ ID NO: 800218 - RNA, 20 nt, Artificial Sequence
  Synthetic
uuguuuugacuugcuugauc

SEQ ID NO: 800219 - RNA, 20 nt, Artificial Sequence
  Synthetic
aguagaucuaacauuugauc

SEQ ID NO: 800220 - RNA, 20 nt, Artificial Sequence
  Synthetic
acaagugaugauauuugauc

SEQ ID NO: 800221 - RNA, 20 nt, Artificial Sequence
  Synthetic
ucugaaaaugaauuuugauc

SEQ ID NO: 800222 - RNA, 20 nt, Artificial Sequence
  Synthetic
auuucccaaagaaaaauauc

SEQ ID NO: 800223 - RNA, 20 nt, Artificial Sequence
  Synthetic
aggagguugaguaaaauauc

SEQ ID NO: 800224 - RNA, 20 nt, Artificial Sequence
  Synthetic
auuuauaguuuuaaaauauc

SEQ ID NO: 800225 - RNA, 20 nt, Artificial Sequence
  Synthetic
auuguuuuaaaacaaauauc

SEQ ID NO: 800226 - RNA, 20 nt, Artificial Sequence
  Synthetic
uuauuugugucacaaauauc

SEQ ID NO: 800227 - RNA, 20 nt, Artificial Sequence
  Synthetic
auaauguuugaccaaauauc

SEQ ID NO: 800228 - RNA, 20 nt, Artificial Sequence
  Synthetic
uugagacauguucaaauauc

SEQ ID NO: 800229 - RNA, 20 nt, Artificial Sequence
  Synthetic
accuuuaacacugaaauauc

SEQ ID NO: 800230 - RNA, 20 nt, Artificial Sequence
  Synthetic
auuugcaucauaccaauauc

SEQ ID NO: 800231 - RNA, 20 nt, Artificial Sequence
  Synthetic
cacaaagguuauccaauauc

SEQ ID NO: 800232 - RNA, 20 nt, Artificial Sequence
  Synthetic
agagcagcaauuccaauauc

SEQ ID NO: 800233 - RNA, 20 nt, Artificial Sequence
  Synthetic
aguggacauuuagcaauauc

SEQ ID NO: 800234 - RNA, 20 nt, Artificial Sequence
  Synthetic
uaaggaauuacuagaauauc

SEQ ID NO: 800235 - RNA, 20 nt, Artificial Sequence
  Synthetic
uaagaacucaguggaauauc

SEQ ID NO: 800236 - RNA, 20 nt, Artificial Sequence
  Synthetic
uggaaaauuucaugaauauc

SEQ ID NO: 800237 - RNA, 20 nt, Artificial Sequence
  Synthetic
ccagaccaucugugaauauc

SEQ ID NO: 800238 - RNA, 20 nt, Artificial Sequence
  Synthetic
uaaaacaggcauugaauauc

SEQ ID NO: 800239 - RNA, 20 nt, Artificial Sequence
  Synthetic
aaagguauuuuaauaauauc

SEQ ID NO: 800240 - RNA, 20 nt, Artificial Sequence
  Synthetic
uuauuacaguuucuaauauc

SEQ ID NO: 800241 - RNA, 20 nt, Artificial Sequence
  Synthetic
uucuagacaauaguaauauc

SEQ ID NO: 800242 - RNA, 20 nt, Artificial Sequence
  Synthetic
uggguacuaggcuuaauauc

SEQ ID NO: 800243 - RNA, 20 nt, Artificial Sequence
  Synthetic
acgaaaagcucucacauauc

SEQ ID NO: 800244 - RNA, 20 nt, Artificial Sequence
  Synthetic
uaaaaucuguauuacauauc

SEQ ID NO: 800245 - RNA, 20 nt, Artificial Sequence
  Synthetic
aggauauuuuauaccauauc

SEQ ID NO: 800246 - RNA, 20 nt, Artificial Sequence
  Synthetic
uccagcacuauauccauauc

SEQ ID NO: 800247 - RNA, 20 nt, Artificial Sequence
  Synthetic
uucaaaaucuucuccauauc

SEQ ID NO: 800248 - RNA, 20 nt, Artificial Sequence
  Synthetic
acuauaaagggauucauauc

SEQ ID NO: 800249 - RNA, 20 nt, Artificial Sequence
  Synthetic
aacugugcauuuacgauauc

SEQ ID NO: 800250 - RNA, 20 nt, Artificial Sequence
  Synthetic
uaucagaccaaaucgauauc

SEQ ID NO: 800251 - RNA, 20 nt, Artificial Sequence
  Synthetic
auuguucuaagauggauauc

SEQ ID NO: 800252 - RNA, 20 nt, Artificial Sequence
  Synthetic
agauuaaaaacaaugauauc

SEQ ID NO: 800253 - RNA, 20 nt, Artificial Sequence
  Synthetic
uguuauaaaagaaugauauc

SEQ ID NO: 800254 - RNA, 20 nt, Artificial Sequence
  Synthetic
aauuagucaaggaugauauc

SEQ ID NO: 800255 - RNA, 20 nt, Artificial Sequence
  Synthetic
uaaggagacuuacugauauc

SEQ ID NO: 800256 - RNA, 20 nt, Artificial Sequence
  Synthetic
aacugauaaauggugauauc

SEQ ID NO: 800257 - RNA, 20 nt, Artificial Sequence
  Synthetic
uuaaaugcucaauugauauc

SEQ ID NO: 800258 - RNA, 20 nt, Artificial Sequence
  Synthetic
uuucuguaacaguugauauc

SEQ ID NO: 800259 - RNA, 20 nt, Artificial Sequence
  Synthetic
ccagugucuugguugauauc

SEQ ID NO: 800260 - RNA, 20 nt, Artificial Sequence
  Synthetic
cuuuuauugacuuugauauc

SEQ ID NO: 800261 - RNA, 20 nt, Artificial Sequence
  Synthetic
uucaaauuguaaaauauauc

SEQ ID NO: 800262 - RNA, 20 nt, Artificial Sequence
  Synthetic
cuggccaucuacaauauauc

SEQ ID NO: 800263 - RNA, 20 nt, Artificial Sequence
  Synthetic
aauugccuauucaauauauc

SEQ ID NO: 800264 - RNA, 20 nt, Artificial Sequence
  Synthetic
ccugaagaaaggaauauauc

SEQ ID NO: 800265 - RNA, 20 nt, Artificial Sequence
  Synthetic
cacuaauuuaugcauauauc

SEQ ID NO: 800266 - RNA, 20 nt, Artificial Sequence
  Synthetic
aauaauauguuggauauauc

SEQ ID NO: 800267 - RNA, 20 nt, Artificial Sequence
  Synthetic
uacauauauauauauauauc

SEQ ID NO: 800268 - RNA, 20 nt, Artificial Sequence
  Synthetic
uagggaaagagagcuauauc

SEQ ID NO: 800269 - RNA, 20 nt, Artificial Sequence
  Synthetic
aaucauuuccuaaguauauc

SEQ ID NO: 800270 - RNA, 20 nt, Artificial Sequence
  Synthetic
uuuguuuuauuguguauauc

SEQ ID NO: 800271 - RNA, 20 nt, Artificial Sequence
  Synthetic
auguguuacuuuuguauauc

SEQ ID NO: 800272 - RNA, 20 nt, Artificial Sequence
  Synthetic
uaguucaggaaaauuauauc

SEQ ID NO: 800273 - RNA, 20 nt, Artificial Sequence
  Synthetic
ucuggggaugaaauuauauc

SEQ ID NO: 800274 - RNA, 20 nt, Artificial Sequence
  Synthetic
cauauuauaauaauuauauc

SEQ ID NO: 800275 - RNA, 20 nt, Artificial Sequence
  Synthetic
aaggagauagggguuauauc

SEQ ID NO: 800276 - RNA, 20 nt, Artificial Sequence
  Synthetic
acugaggaugggguuauauc

SEQ ID NO: 800277 - RNA, 20 nt, Artificial Sequence
  Synthetic
acauacucuguauuuauauc

SEQ ID NO: 800278 - RNA, 20 nt, Artificial Sequence
  Synthetic
ugaaaaauuuuuuuuauauc

SEQ ID NO: 800279 - RNA, 20 nt, Artificial Sequence
  Synthetic
agcaggccauuaaaacuauc

SEQ ID NO: 800280 - RNA, 20 nt, Artificial Sequence
  Synthetic
uaugagaaaaagaaacuauc

SEQ ID NO: 800281 - RNA, 20 nt, Artificial Sequence
  Synthetic
aaagcuccaguggaacuauc

SEQ ID NO: 800282 - RNA, 20 nt, Artificial Sequence
  Synthetic
ccaaaucugaaauaacuauc

SEQ ID NO: 800283 - RNA, 20 nt, Artificial Sequence
  Synthetic
auuucuuaaauuuaacuauc

SEQ ID NO: 800284 - RNA, 20 nt, Artificial Sequence
  Synthetic
ucaaaguccuuagcacuauc

SEQ ID NO: 800285 - RNA, 20 nt, Artificial Sequence
  Synthetic
aaauguucaacaucacuauc

SEQ ID NO: 800286 - RNA, 20 nt, Artificial Sequence
  Synthetic
ugaucucaugauucacuauc

SEQ ID NO: 800287 - RNA, 20 nt, Artificial Sequence
  Synthetic
caugagacuuauucacuauc

SEQ ID NO: 800288 - RNA, 20 nt, Artificial Sequence
  Synthetic
uggguacuauguucacuauc

SEQ ID NO: 800289 - RNA, 20 nt, Artificial Sequence
  Synthetic
uucuuaguuaauagacuauc

SEQ ID NO: 800290 - RNA, 20 nt, Artificial Sequence
  Synthetic
ugcaauggguauagacuauc

SEQ ID NO: 800291 - RNA, 20 nt, Artificial Sequence
  Synthetic
aaauacaacaaaauacuauc

SEQ ID NO: 800292 - RNA, 20 nt, Artificial Sequence
  Synthetic
aacccaaaauauuuacuauc

SEQ ID NO: 800293 - RNA, 20 nt, Artificial Sequence
  Synthetic
cuccauuucaaaaaccuauc

SEQ ID NO: 800294 - RNA, 20 nt, Artificial Sequence
  Synthetic
agacugagaaacuaccuauc

SEQ ID NO: 800295 - RNA, 20 nt, Artificial Sequence
  Synthetic
uaaccccucauuuaccuauc

SEQ ID NO: 800296 - RNA, 20 nt, Artificial Sequence
  Synthetic
aaaaagacacuauugcuauc

SEQ ID NO: 800297 - RNA, 20 nt, Artificial Sequence
  Synthetic
aagccaguccaaaaucuauc

SEQ ID NO: 800298 - RNA, 20 nt, Artificial Sequence
  Synthetic
uguuuuugcccuccucuauc

SEQ ID NO: 800299 - RNA, 20 nt, Artificial Sequence
  Synthetic
aagaaucuagaaugucuauc

SEQ ID NO: 800300 - RNA, 20 nt, Artificial Sequence
  Synthetic
uucuauucagagauucuauc

SEQ ID NO: 800301 - RNA, 20 nt, Artificial Sequence
  Synthetic
cccuaggaaauaaaaguauc

SEQ ID NO: 800302 - RNA, 20 nt, Artificial Sequence
  Synthetic
augaucuuccuuaaaguauc

SEQ ID NO: 800303 - RNA, 20 nt, Artificial Sequence
  Synthetic
caucauauuguuaaaguauc

SEQ ID NO: 800304 - RNA, 20 nt, Artificial Sequence
  Synthetic
aguaaguaguucacaguauc

SEQ ID NO: 800305 - RNA, 20 nt, Artificial Sequence
  Synthetic
uuauacaacacuacaguauc

SEQ ID NO: 800306 - RNA, 20 nt, Artificial Sequence
  Synthetic
ucaauaucuauugcaguauc

SEQ ID NO: 800307 - RNA, 20 nt, Artificial Sequence
  Synthetic
auauagcagacaagaguauc

SEQ ID NO: 800308 - RNA, 20 nt, Artificial Sequence
  Synthetic
uagaaauuugaauuaguauc

SEQ ID NO: 800309 - RNA, 20 nt, Artificial Sequence
  Synthetic
aacaaauaucccuuaguauc

SEQ ID NO: 800310 - RNA, 20 nt, Artificial Sequence
  Synthetic
agccaaaggcauuuaguauc

SEQ ID NO: 800311 - RNA, 20 nt, Artificial Sequence
  Synthetic
uagagggauuuuuuaguauc

SEQ ID NO: 800312 - RNA, 20 nt, Artificial Sequence
  Synthetic
uccagaaaauugaagguauc

SEQ ID NO: 800313 - RNA, 20 nt, Artificial Sequence
  Synthetic
uugaaugagucuuagguauc

SEQ ID NO: 800314 - RNA, 20 nt, Artificial Sequence
  Synthetic
uuuuccuuacuuuagguauc

SEQ ID NO: 800315 - RNA, 20 nt, Artificial Sequence
  Synthetic
aaguuaugaacauggguauc

SEQ ID NO: 800316 - RNA, 20 nt, Artificial Sequence
  Synthetic
aaugggggugaguggguauc

SEQ ID NO: 800317 - RNA, 20 nt, Artificial Sequence
  Synthetic
ucagcuggagucuugguauc

SEQ ID NO: 800318 - RNA, 20 nt, Artificial Sequence
  Synthetic
cucugccaggcuuugguauc

SEQ ID NO: 800319 - RNA, 20 nt, Artificial Sequence
  Synthetic
cucugccagguuuugguauc

SEQ ID NO: 800320 - RNA, 20 nt, Artificial Sequence
  Synthetic
cuuugccagguuuugguauc

SEQ ID NO: 800321 - RNA, 20 nt, Artificial Sequence
  Synthetic
aaccugcccccaaauguauc

SEQ ID NO: 800322 - RNA, 20 nt, Artificial Sequence
  Synthetic
agcccuucaugaaauguauc

SEQ ID NO: 800323 - RNA, 20 nt, Artificial Sequence
  Synthetic
uucugccuuuacaauguauc

SEQ ID NO: 800324 - RNA, 20 nt, Artificial Sequence
  Synthetic
uauagagcaccugauguauc

SEQ ID NO: 800325 - RNA, 20 nt, Artificial Sequence
  Synthetic
acuagauagaaauauguauc

SEQ ID NO: 800326 - RNA, 20 nt, Artificial Sequence
  Synthetic
uuuagaagaauauauguauc

SEQ ID NO: 800327 - RNA, 20 nt, Artificial Sequence
  Synthetic
uauauaaguuucuauguauc

SEQ ID NO: 800328 - RNA, 20 nt, Artificial Sequence
  Synthetic
uauguauauugaacuguauc

SEQ ID NO: 800329 - RNA, 20 nt, Artificial Sequence
  Synthetic
aauaauuguaauucuguauc

SEQ ID NO: 800330 - RNA, 20 nt, Artificial Sequence
  Synthetic
uuuagcauuaaccguguauc

SEQ ID NO: 800331 - RNA, 20 nt, Artificial Sequence
  Synthetic
caggaaguacaauuuguauc

SEQ ID NO: 800332 - RNA, 20 nt, Artificial Sequence
  Synthetic
acucacgacaaaaaauuauc

SEQ ID NO: 800333 - RNA, 20 nt, Artificial Sequence
  Synthetic
aaaaaauuuuaaaaauuauc

SEQ ID NO: 800334 - RNA, 20 nt, Artificial Sequence
  Synthetic
cuuaauugugcaaaauuauc

SEQ ID NO: 800335 - RNA, 20 nt, Artificial Sequence
  Synthetic
ugauagaaaugcaaauuauc

SEQ ID NO: 800336 - RNA, 20 nt, Artificial Sequence
  Synthetic
cuuguuuuucuagaauuauc

SEQ ID NO: 800337 - RNA, 20 nt, Artificial Sequence
  Synthetic
agacaagugaaggaauuauc

SEQ ID NO: 800338 - RNA, 20 nt, Artificial Sequence
  Synthetic
uagggugaaagggaauuauc

SEQ ID NO: 800339 - RNA, 20 nt, Artificial Sequence
  Synthetic
auuaugaagguugaauuauc

SEQ ID NO: 800340 - RNA, 20 nt, Artificial Sequence
  Synthetic
auuuuaaguguguaauuauc

SEQ ID NO: 800341 - RNA, 20 nt, Artificial Sequence
  Synthetic
uauaaauuguuuuaauuauc

SEQ ID NO: 800342 - RNA, 20 nt, Artificial Sequence
  Synthetic
cuuuuauagcaaccauuauc

SEQ ID NO: 800343 - RNA, 20 nt, Artificial Sequence
  Synthetic
auggauuuguauccauuauc

SEQ ID NO: 800344 - RNA, 20 nt, Artificial Sequence
  Synthetic
cuccuaaacuuuccauuauc

SEQ ID NO: 800345 - RNA, 20 nt, Artificial Sequence
  Synthetic
uuccuaaacuuuccauuauc

SEQ ID NO: 800346 - RNA, 20 nt, Artificial Sequence
  Synthetic
uguuccagguccucauuauc

SEQ ID NO: 800347 - RNA, 20 nt, Artificial Sequence
  Synthetic
cugcaagaccauucauuauc

SEQ ID NO: 800348 - RNA, 20 nt, Artificial Sequence
  Synthetic
ugugaaacuuacugauuauc

SEQ ID NO: 800349 - RNA, 20 nt, Artificial Sequence
  Synthetic
uucucucccaaucuauuauc

SEQ ID NO: 800350 - RNA, 20 nt, Artificial Sequence
  Synthetic
cuuuuccauauucuauuauc

SEQ ID NO: 800351 - RNA, 20 nt, Artificial Sequence
  Synthetic
uugcagaugguaguauuauc

SEQ ID NO: 800352 - RNA, 20 nt, Artificial Sequence
  Synthetic
cuguucaaguccuuauuauc

SEQ ID NO: 800353 - RNA, 20 nt, Artificial Sequence
  Synthetic
cagguaccaugcuuauuauc

SEQ ID NO: 800354 - RNA, 20 nt, Artificial Sequence
  Synthetic
cagcaggguagagacuuauc

SEQ ID NO: 800355 - RNA, 20 nt, Artificial Sequence
  Synthetic
uaauaugcagaauacuuauc

SEQ ID NO: 800356 - RNA, 20 nt, Artificial Sequence
  Synthetic
aaucugagaauuuacuuauc

SEQ ID NO: 800357 - RNA, 20 nt, Artificial Sequence
  Synthetic
auguuguaauuuuacuuauc

SEQ ID NO: 800358 - RNA, 20 nt, Artificial Sequence
  Synthetic
cccacagucuuggccuuauc

SEQ ID NO: 800359 - RNA, 20 nt, Artificial Sequence
  Synthetic
uuagcaucuacguccuuauc

SEQ ID NO: 800360 - RNA, 20 nt, Artificial Sequence
  Synthetic
uauuccacaagaugcuuauc

SEQ ID NO: 800361 - RNA, 20 nt, Artificial Sequence
  Synthetic
uggcagguacuaugcuuauc

SEQ ID NO: 800362 - RNA, 20 nt, Artificial Sequence
  Synthetic
ccaacuccugcgaucuuauc

SEQ ID NO: 800363 - RNA, 20 nt, Artificial Sequence
  Synthetic
auuguugauuacuucuuauc

SEQ ID NO: 800364 - RNA, 20 nt, Artificial Sequence
  Synthetic
aggauuuuccuaaaguuauc

SEQ ID NO: 800365 - RNA, 20 nt, Artificial Sequence
  Synthetic
ugcauuucuaacaaguuauc

SEQ ID NO: 800366 - RNA, 20 nt, Artificial Sequence
  Synthetic
aaacuaguauggaaguuauc

SEQ ID NO: 800367 - RNA, 20 nt, Artificial Sequence
  Synthetic
cacauggacauggaguuauc

SEQ ID NO: 800368 - RNA, 20 nt, Artificial Sequence
  Synthetic
aauauuucacaugaguuauc

SEQ ID NO: 800369 - RNA, 20 nt, Artificial Sequence
  Synthetic
uaauucuggaacuaguuauc

SEQ ID NO: 800370 - RNA, 20 nt, Artificial Sequence
  Synthetic
ugauucuguaagguguuauc

SEQ ID NO: 800371 - RNA, 20 nt, Artificial Sequence
  Synthetic
aaacaaagguuuuuguuauc

SEQ ID NO: 800372 - RNA, 20 nt, Artificial Sequence
  Synthetic
agucuuauaaaaaauuuauc

SEQ ID NO: 800373 - RNA, 20 nt, Artificial Sequence
  Synthetic
aacucaaucuuaaauuuauc

SEQ ID NO: 800374 - RNA, 20 nt, Artificial Sequence
  Synthetic
aaugagccuuugaauuuauc

SEQ ID NO: 800375 - RNA, 20 nt, Artificial Sequence
  Synthetic
uaaaucaaacuccauuuauc

SEQ ID NO: 800376 - RNA, 20 nt, Artificial Sequence
  Synthetic
cacuuuucaguccauuuauc

SEQ ID NO: 800377 - RNA, 20 nt, Artificial Sequence
  Synthetic
auuugcagcagagauuuauc

SEQ ID NO: 800378 - RNA, 20 nt, Artificial Sequence
  Synthetic
aaguugggaagggauuuauc

SEQ ID NO: 800379 - RNA, 20 nt, Artificial Sequence
  Synthetic
uugaaagcauucucuuuauc

SEQ ID NO: 800380 - RNA, 20 nt, Artificial Sequence
  Synthetic
auaaaaauuuuuucuuuauc

SEQ ID NO: 800381 - RNA, 20 nt, Artificial Sequence
  Synthetic
cgcacaauuuauaguuuauc

SEQ ID NO: 800382 - RNA, 20 nt, Artificial Sequence
  Synthetic
caacuuacaauggguuuauc

SEQ ID NO: 800383 - RNA, 20 nt, Artificial Sequence
  Synthetic
caacguaugauggguuuauc

SEQ ID NO: 800384 - RNA, 20 nt, Artificial Sequence
  Synthetic
caauuuaugauggguuuauc

SEQ ID NO: 800385 - RNA, 20 nt, Artificial Sequence
  Synthetic
cuucuuuugaagauuuuauc

SEQ ID NO: 800386 - RNA, 20 nt, Artificial Sequence
  Synthetic
uuuuguagcugccuuuuauc

SEQ ID NO: 800387 - RNA, 20 nt, Artificial Sequence
  Synthetic
cgagaucuguugguuuuauc

SEQ ID NO: 800388 - RNA, 20 nt, Artificial Sequence
  Synthetic
augauauagaauuuuuuauc

SEQ ID NO: 800389 - RNA, 20 nt, Artificial Sequence
  Synthetic
uagacuacuguuuuuuuauc

SEQ ID NO: 800390 - RNA, 20 nt, Artificial Sequence
  Synthetic
ccuuaaagcuuuuuuuuauc

SEQ ID NO: 800391 - RNA, 20 nt, Artificial Sequence
  Synthetic
uuuaaucaacuagaaaacuc

SEQ ID NO: 800392 - RNA, 20 nt, Artificial Sequence
  Synthetic
auuugagcuccauaaaacuc

SEQ ID NO: 800393 - RNA, 20 nt, Artificial Sequence
  Synthetic
ucauaaccagagacaaacuc

SEQ ID NO: 800394 - RNA, 20 nt, Artificial Sequence
  Synthetic
agaggacugaaaucaaacuc

SEQ ID NO: 800395 - RNA, 20 nt, Artificial Sequence
  Synthetic
ucucaaauguagucaaacuc

SEQ ID NO: 800396 - RNA, 20 nt, Artificial Sequence
  Synthetic
uggagccacgauucaaacuc

SEQ ID NO: 800397 - RNA, 20 nt, Artificial Sequence
  Synthetic
acugacuuggauucaaacuc

SEQ ID NO: 800398 - RNA, 20 nt, Artificial Sequence
  Synthetic
accaacugacacagaaacuc

SEQ ID NO: 800399 - RNA, 20 nt, Artificial Sequence
  Synthetic
agcuaguaaaucagaaacuc

SEQ ID NO: 800400 - RNA, 20 nt, Artificial Sequence
  Synthetic
cuggcaaaagucagaaacuc

SEQ ID NO: 800401 - RNA, 20 nt, Artificial Sequence
  Synthetic
cacugacauaguagaaacuc

SEQ ID NO: 800402 - RNA, 20 nt, Artificial Sequence
  Synthetic
uugauauaagguagaaacuc

SEQ ID NO: 800403 - RNA, 20 nt, Artificial Sequence
  Synthetic
uggagggcuuguagaaacuc

SEQ ID NO: 800404 - RNA, 20 nt, Artificial Sequence
  Synthetic
caggaaaguaugggaaacuc

SEQ ID NO: 800405 - RNA, 20 nt, Artificial Sequence
  Synthetic
cuuuaucccuugggaaacuc

SEQ ID NO: 800406 - RNA, 20 nt, Artificial Sequence
  Synthetic
aucaucccaaacugaaacuc

SEQ ID NO: 800407 - RNA, 20 nt, Artificial Sequence
  Synthetic
aguguuagaaugugaaacuc

SEQ ID NO: 800408 - RNA, 20 nt, Artificial Sequence
  Synthetic
cccagaggcaaccuaaacuc

SEQ ID NO: 800409 - RNA, 20 nt, Artificial Sequence
  Synthetic
uuccugaaguugcuaaacuc

SEQ ID NO: 800410 - RNA, 20 nt, Artificial Sequence
  Synthetic
agagcacugaaauuaaacuc

SEQ ID NO: 800411 - RNA, 20 nt, Artificial Sequence
  Synthetic
cagaaucacgauuuaaacuc

SEQ ID NO: 800412 - RNA, 20 nt, Artificial Sequence
  Synthetic
acaccuuguucuuuaaacuc

SEQ ID NO: 800413 - RNA, 20 nt, Artificial Sequence
  Synthetic
ugcugauauuuuuacaacuc

SEQ ID NO: 800414 - RNA, 20 nt, Artificial Sequence
  Synthetic
ccaccggcgggaaccaacuc

SEQ ID NO: 800415 - RNA, 20 nt, Artificial Sequence
  Synthetic
ucauccauaagcagcaacuc

SEQ ID NO: 800416 - RNA, 20 nt, Artificial Sequence
  Synthetic
ugggucccuugcugcaacuc

SEQ ID NO: 800417 - RNA, 20 nt, Artificial Sequence
  Synthetic
auaaccacuucacucaacuc

SEQ ID NO: 800418 - RNA, 20 nt, Artificial Sequence
  Synthetic
agccugacagugcucaacuc

SEQ ID NO: 800419 - RNA, 20 nt, Artificial Sequence
  Synthetic
cccagcccaauaaagaacuc

SEQ ID NO: 800420 - RNA, 20 nt, Artificial Sequence
  Synthetic
ucaagcuggggcaagaacuc

SEQ ID NO: 800421 - RNA, 20 nt, Artificial Sequence
  Synthetic
aaaauucguuuuaagaacuc

SEQ ID NO: 800422 - RNA, 20 nt, Artificial Sequence
  Synthetic
uggagcagcucacagaacuc

SEQ ID NO: 800423 - RNA, 20 nt, Artificial Sequence
  Synthetic
aucuacuaaauccagaacuc

SEQ ID NO: 800424 - RNA, 20 nt, Artificial Sequence
  Synthetic
cacauuuauuuagagaacuc

SEQ ID NO: 800425 - RNA, 20 nt, Artificial Sequence
  Synthetic
ccuuaagcaaucccgaacuc

SEQ ID NO: 800426 - RNA, 20 nt, Artificial Sequence
  Synthetic
ccauuuuuuucaaggaacuc

SEQ ID NO: 800427 - RNA, 20 nt, Artificial Sequence
  Synthetic
acauuuugaaucaggaacuc

SEQ ID NO: 800428 - RNA, 20 nt, Artificial Sequence
  Synthetic
caaaacugaaauaggaacuc

SEQ ID NO: 800429 - RNA, 20 nt, Artificial Sequence
  Synthetic
cuaguuaaaagaaugaacuc

SEQ ID NO: 800430 - RNA, 20 nt, Artificial Sequence
  Synthetic
uucacagcgccccugaacuc

SEQ ID NO: 800431 - RNA, 20 nt, Artificial Sequence
  Synthetic
caaugaugagaugugaacuc

SEQ ID NO: 800432 - RNA, 20 nt, Artificial Sequence
  Synthetic
cacgagaaucacuugaacuc

SEQ ID NO: 800433 - RNA, 20 nt, Artificial Sequence
  Synthetic
caggagaaucacuugaacuc

SEQ ID NO: 800434 - RNA, 20 nt, Artificial Sequence
  Synthetic
aucaggcuggccuugaacuc

SEQ ID NO: 800435 - RNA, 20 nt, Artificial Sequence
  Synthetic
cccaggcuguucuugaacuc

SEQ ID NO: 800436 - RNA, 20 nt, Artificial Sequence
  Synthetic
aaaggauagcauuugaacuc

SEQ ID NO: 800437 - RNA, 20 nt, Artificial Sequence
  Synthetic
uaaaaccuguauuugaacuc

SEQ ID NO: 800438 - RNA, 20 nt, Artificial Sequence
  Synthetic
aacaaauaagcacauaacuc

SEQ ID NO: 800439 - RNA, 20 nt, Artificial Sequence
  Synthetic
uucaugucagaagauaacuc

SEQ ID NO: 800440 - RNA, 20 nt, Artificial Sequence
  Synthetic
uccacagguauuucuaacuc

SEQ ID NO: 800441 - RNA, 20 nt, Artificial Sequence
  Synthetic
uauuccaaguaaaguaacuc

SEQ ID NO: 800442 - RNA, 20 nt, Artificial Sequence
  Synthetic
cauuguaagugaaguaacuc

SEQ ID NO: 800443 - RNA, 20 nt, Artificial Sequence
  Synthetic
acaucagagcuaaguaacuc

SEQ ID NO: 800444 - RNA, 20 nt, Artificial Sequence
  Synthetic
cuaguuaucuguuguaacuc

SEQ ID NO: 800445 - RNA, 20 nt, Artificial Sequence
  Synthetic
uuugaauuucagauuaacuc

SEQ ID NO: 800446 - RNA, 20 nt, Artificial Sequence
  Synthetic
aucauaacgcugguuaacuc

SEQ ID NO: 800447 - RNA, 20 nt, Artificial Sequence
  Synthetic
aaauguagcacuuuuaacuc

SEQ ID NO: 800448 - RNA, 20 nt, Artificial Sequence
  Synthetic
aauaaacagccaaaacacuc

SEQ ID NO: 800449 - RNA, 20 nt, Artificial Sequence
  Synthetic
ccaucacuuugcuaacacuc

SEQ ID NO: 800450 - RNA, 20 nt, Artificial Sequence
  Synthetic
uaauuuaaaaauuaacacuc

SEQ ID NO: 800451 - RNA, 20 nt, Artificial Sequence
  Synthetic
ucauuugacaacagacacuc

SEQ ID NO: 800452 - RNA, 20 nt, Artificial Sequence
  Synthetic
auauuuuauguaugacacuc

SEQ ID NO: 800453 - RNA, 20 nt, Artificial Sequence
  Synthetic
aaaaaguuuuugugacacuc

SEQ ID NO: 800454 - RNA, 20 nt, Artificial Sequence
  Synthetic
ucucaaccuuagcuacacuc

SEQ ID NO: 800455 - RNA, 20 nt, Artificial Sequence
  Synthetic
aagccuaggaaacaccacuc

SEQ ID NO: 800456 - RNA, 20 nt, Artificial Sequence
  Synthetic
uuauaacaaauguaccacuc

SEQ ID NO: 800457 - RNA, 20 nt, Artificial Sequence
  Synthetic
accuguaaucccagccacuc

SEQ ID NO: 800458 - RNA, 20 nt, Artificial Sequence
  Synthetic
ucaacaugggccugccacuc

SEQ ID NO: 800459 - RNA, 20 nt, Artificial Sequence
  Synthetic
uguaacauuacacagcacuc

SEQ ID NO: 800460 - RNA, 20 nt, Artificial Sequence
  Synthetic
cgccuguaaucccagcacuc

SEQ ID NO: 800461 - RNA, 20 nt, Artificial Sequence
  Synthetic
cuguucucucaucagcacuc

SEQ ID NO: 800462 - RNA, 20 nt, Artificial Sequence
  Synthetic
uauaucugcccuuagcacuc

SEQ ID NO: 800463 - RNA, 20 nt, Artificial Sequence
  Synthetic
aagaucacaccacugcacuc

SEQ ID NO: 800464 - RNA, 20 nt, Artificial Sequence
  Synthetic
uccuagaggguggugcacuc

SEQ ID NO: 800465 - RNA, 20 nt, Artificial Sequence
  Synthetic
uauucuuaaacauugcacuc

SEQ ID NO: 800466 - RNA, 20 nt, Artificial Sequence
  Synthetic
uagcccccuaaaaaucacuc

SEQ ID NO: 800467 - RNA, 20 nt, Artificial Sequence
  Synthetic
aauguuagaaugaaucacuc

SEQ ID NO: 800468 - RNA, 20 nt, Artificial Sequence
  Synthetic
aauguucaaauauaucacuc

SEQ ID NO: 800469 - RNA, 20 nt, Artificial Sequence
  Synthetic
aauucagcagaagcucacuc

SEQ ID NO: 800470 - RNA, 20 nt, Artificial Sequence
  Synthetic
caauuuugaucugcucacuc

SEQ ID NO: 800471 - RNA, 20 nt, Artificial Sequence
  Synthetic
uaugcuuccuaaucucacuc

SEQ ID NO: 800472 - RNA, 20 nt, Artificial Sequence
  Synthetic
ucugaucauuguagucacuc

SEQ ID NO: 800473 - RNA, 20 nt, Artificial Sequence
  Synthetic
agucucuuuguaggucacuc

SEQ ID NO: 800474 - RNA, 20 nt, Artificial Sequence
  Synthetic
aauguucaauuaugucacuc

SEQ ID NO: 800475 - RNA, 20 nt, Artificial Sequence
  Synthetic
auuugagaaagacuucacuc

SEQ ID NO: 800476 - RNA, 20 nt, Artificial Sequence
  Synthetic
auaaugccucuucuucacuc

SEQ ID NO: 800477 - RNA, 20 nt, Artificial Sequence
  Synthetic
cucauuauuaaaguucacuc

SEQ ID NO: 800478 - RNA, 20 nt, Artificial Sequence
  Synthetic
accaagagccauuuucacuc

SEQ ID NO: 800479 - RNA, 20 nt, Artificial Sequence
  Synthetic
cccacuggucauuuucacuc

SEQ ID NO: 800480 - RNA, 20 nt, Artificial Sequence
  Synthetic
ccuccccaguguuuucacuc

SEQ ID NO: 800481 - RNA, 20 nt, Artificial Sequence
  Synthetic
aggcaagauuaaaaagacuc

SEQ ID NO: 800482 - RNA, 20 nt, Artificial Sequence
  Synthetic
ucuaauacauacaaagacuc

SEQ ID NO: 800483 - RNA, 20 nt, Artificial Sequence
  Synthetic
caugaacuuuauaaagacuc

SEQ ID NO: 800484 - RNA, 20 nt, Artificial Sequence
  Synthetic
uacagagauuaguaagacuc

SEQ ID NO: 800485 - RNA, 20 nt, Artificial Sequence
  Synthetic
ucaaggacaaccacagacuc

SEQ ID NO: 800486 - RNA, 20 nt, Artificial Sequence
  Synthetic
uuuugcaaaguaucagacuc

SEQ ID NO: 800487 - RNA, 20 nt, Artificial Sequence
  Synthetic
aaagacuacaccucagacuc

SEQ ID NO: 800488 - RNA, 20 nt, Artificial Sequence
  Synthetic
agagauuaggugagagacuc

SEQ ID NO: 800489 - RNA, 20 nt, Artificial Sequence
  Synthetic
uggggucacgauauagacuc

SEQ ID NO: 800490 - RNA, 20 nt, Artificial Sequence
  Synthetic
acuaucucuugccuagacuc

SEQ ID NO: 800491 - RNA, 20 nt, Artificial Sequence
  Synthetic
ucuauuuuuaauguagacuc

SEQ ID NO: 800492 - RNA, 20 nt, Artificial Sequence
  Synthetic
aucaaguuaugcaacgacuc

SEQ ID NO: 800493 - RNA, 20 nt, Artificial Sequence
  Synthetic
uucugccugcugaccgacuc

SEQ ID NO: 800494 - RNA, 20 nt, Artificial Sequence
  Synthetic
uacaggcagagaaaggacuc

SEQ ID NO: 800495 - RNA, 20 nt, Artificial Sequence
  Synthetic
cugaucuagaguaaggacuc

SEQ ID NO: 800496 - RNA, 20 nt, Artificial Sequence
  Synthetic
ugacuagggcaagaggacuc

SEQ ID NO: 800497 - RNA, 20 nt, Artificial Sequence
  Synthetic
agguuuaagggagaggacuc

SEQ ID NO: 800498 - RNA, 20 nt, Artificial Sequence
  Synthetic
aauuuuaggauugaggacuc

SEQ ID NO: 800499 - RNA, 20 nt, Artificial Sequence
  Synthetic
agaagcuggaauuaggacuc

SEQ ID NO: 800500 - RNA, 20 nt, Artificial Sequence
  Synthetic
ccugguaaagcaauggacuc

SEQ ID NO: 800501 - RNA, 20 nt, Artificial Sequence
  Synthetic
uguccuauuuccaaugacuc

SEQ ID NO: 800502 - RNA, 20 nt, Artificial Sequence
  Synthetic
ccuccuuugcuuuaugacuc

SEQ ID NO: 800503 - RNA, 20 nt, Artificial Sequence
  Synthetic
auaaaguuccuuccugacuc

SEQ ID NO: 800504 - RNA, 20 nt, Artificial Sequence
  Synthetic
uucacccacacuucugacuc

SEQ ID NO: 800505 - RNA, 20 nt, Artificial Sequence
  Synthetic
cuuuccugccucugugacuc

SEQ ID NO: 800506 - RNA, 20 nt, Artificial Sequence
  Synthetic
uggcaugggcugcuugacuc

SEQ ID NO: 800507 - RNA, 20 nt, Artificial Sequence
  Synthetic
agauuaugaggauuugacuc

SEQ ID NO: 800508 - RNA, 20 nt, Artificial Sequence
  Synthetic
cuggugcuacgaaaauacuc

SEQ ID NO: 800509 - RNA, 20 nt, Artificial Sequence
  Synthetic
aaaaaccaggccaaauacuc

SEQ ID NO: 800510 - RNA, 20 nt, Artificial Sequence
  Synthetic
agauguguaaugaaauacuc

SEQ ID NO: 800511 - RNA, 20 nt, Artificial Sequence
  Synthetic
uagaaaaaauacuaauacuc

SEQ ID NO: 800512 - RNA, 20 nt, Artificial Sequence
  Synthetic
ugaaaaugcagcuaauacuc

SEQ ID NO: 800513 - RNA, 20 nt, Artificial Sequence
  Synthetic
uggcaucacacaacauacuc

SEQ ID NO: 800514 - RNA, 20 nt, Artificial Sequence
  Synthetic
uaauggcuuuagacauacuc

SEQ ID NO: 800515 - RNA, 20 nt, Artificial Sequence
  Synthetic
uuacaaggcacuacauacuc

SEQ ID NO: 800516 - RNA, 20 nt, Artificial Sequence
  Synthetic
uagucaucaugcagauacuc

SEQ ID NO: 800517 - RNA, 20 nt, Artificial Sequence
  Synthetic
uuucaguuccaaggauacuc

SEQ ID NO: 800518 - RNA, 20 nt, Artificial Sequence
  Synthetic
agcuucugcuggugauacuc

SEQ ID NO: 800519 - RNA, 20 nt, Artificial Sequence
  Synthetic
ucagcucaaauguuauacuc

SEQ ID NO: 800520 - RNA, 20 nt, Artificial Sequence
  Synthetic
accuauaaucccaacuacuc

SEQ ID NO: 800521 - RNA, 20 nt, Artificial Sequence
  Synthetic
cgccuguagucccacuacuc

SEQ ID NO: 800522 - RNA, 20 nt, Artificial Sequence
  Synthetic
caagggagagaggacuacuc

SEQ ID NO: 800523 - RNA, 20 nt, Artificial Sequence
  Synthetic
gccuguaguaccagcuacuc

SEQ ID NO: 800524 - RNA, 20 nt, Artificial Sequence
  Synthetic
cccuguagccccagcuacuc

SEQ ID NO: 800525 - RNA, 20 nt, Artificial Sequence
  Synthetic
ucccguaaucccagcuacuc

SEQ ID NO: 800526 - RNA, 20 nt, Artificial Sequence
  Synthetic
accuguaaucccagcuacuc

SEQ ID NO: 800527 - RNA, 20 nt, Artificial Sequence
  Synthetic
gccuguaaucccagcuacuc

SEQ ID NO: 800528 - RNA, 20 nt, Artificial Sequence
  Synthetic
uccuguaaucccagcuacuc

SEQ ID NO: 800529 - RNA, 20 nt, Artificial Sequence
  Synthetic
cucuguaaucccagcuacuc

SEQ ID NO: 800530 - RNA, 20 nt, Artificial Sequence
  Synthetic
accuguagucccagcuacuc

SEQ ID NO: 800531 - RNA, 20 nt, Artificial Sequence
  Synthetic
gccuguagucccagcuacuc

SEQ ID NO: 800532 - RNA, 20 nt, Artificial Sequence
  Synthetic
aucuguagucccagcuacuc

SEQ ID NO: 800533 - RNA, 20 nt, Artificial Sequence
  Synthetic
ugaagggacaucagcuacuc

SEQ ID NO: 800534 - RNA, 20 nt, Artificial Sequence
  Synthetic
accuguaaucucagcuacuc

SEQ ID NO: 800535 - RNA, 20 nt, Artificial Sequence
  Synthetic
ucauuuuggcugggcuacuc

SEQ ID NO: 800536 - RNA, 20 nt, Artificial Sequence
  Synthetic
auuuguucuuauugcuacuc

SEQ ID NO: 800537 - RNA, 20 nt, Artificial Sequence
  Synthetic
cggcuuuaccagcucuacuc

SEQ ID NO: 800538 - RNA, 20 nt, Artificial Sequence
  Synthetic
auccuugaguuccaguacuc

SEQ ID NO: 800539 - RNA, 20 nt, Artificial Sequence
  Synthetic
uggguuuucuucuaguacuc

SEQ ID NO: 800540 - RNA, 20 nt, Artificial Sequence
  Synthetic
aaguacuacgacagguacuc

SEQ ID NO: 800541 - RNA, 20 nt, Artificial Sequence
  Synthetic
cuggacacuccaggguacuc

SEQ ID NO: 800542 - RNA, 20 nt, Artificial Sequence
  Synthetic
uaaauauauguaauguacuc

SEQ ID NO: 800543 - RNA, 20 nt, Artificial Sequence
  Synthetic
uauguucuuuuucuguacuc

SEQ ID NO: 800544 - RNA, 20 nt, Artificial Sequence
  Synthetic
uuaaugguuaauguguacuc

SEQ ID NO: 800545 - RNA, 20 nt, Artificial Sequence
  Synthetic
aaggaauaauccuuguacuc

SEQ ID NO: 800546 - RNA, 20 nt, Artificial Sequence
  Synthetic
uugggggaauuuacuuacuc

SEQ ID NO: 800547 - RNA, 20 nt, Artificial Sequence
  Synthetic
caauuucucauuucuuacuc

SEQ ID NO: 800548 - RNA, 20 nt, Artificial Sequence
  Synthetic
uuagcgauucuggguuacuc

SEQ ID NO: 800549 - RNA, 20 nt, Artificial Sequence
  Synthetic
uccuacucagacuguuacuc

SEQ ID NO: 800550 - RNA, 20 nt, Artificial Sequence
  Synthetic
uuagagagagucuguuacuc

SEQ ID NO: 800551 - RNA, 20 nt, Artificial Sequence
  Synthetic
ugugauuuccuguguuacuc

SEQ ID NO: 800552 - RNA, 20 nt, Artificial Sequence
  Synthetic
aaaguauccuuaauuuacuc

SEQ ID NO: 800553 - RNA, 20 nt, Artificial Sequence
  Synthetic
agaugaggccuauuuuacuc

SEQ ID NO: 800554 - RNA, 20 nt, Artificial Sequence
  Synthetic
aaaauauuaaccuuuuacuc

SEQ ID NO: 800555 - RNA, 20 nt, Artificial Sequence
  Synthetic
caaaaucuauucaaaaccuc

SEQ ID NO: 800556 - RNA, 20 nt, Artificial Sequence
  Synthetic
cuaucuccccucuaaaccuc

SEQ ID NO: 800557 - RNA, 20 nt, Artificial Sequence
  Synthetic
caauuagcuuuuucaaccuc

SEQ ID NO: 800558 - RNA, 20 nt, Artificial Sequence
  Synthetic
cugaucugguuaggaaccuc

SEQ ID NO: 800559 - RNA, 20 nt, Artificial Sequence
  Synthetic
ucucagcucaauggaaccuc

SEQ ID NO: 800560 - RNA, 20 nt, Artificial Sequence
  Synthetic
aaaauauuaggacuaaccuc

SEQ ID NO: 800561 - RNA, 20 nt, Artificial Sequence
  Synthetic
uagcuucaggaauuaaccuc

SEQ ID NO: 800562 - RNA, 20 nt, Artificial Sequence
  Synthetic
ugauuucaacaagacaccuc

SEQ ID NO: 800563 - RNA, 20 nt, Artificial Sequence
  Synthetic
caaauuuuaacagacaccuc

SEQ ID NO: 800564 - RNA, 20 nt, Artificial Sequence
  Synthetic
uuucugaugucauacaccuc

SEQ ID NO: 800565 - RNA, 20 nt, Artificial Sequence
  Synthetic
caguauaguaagggcaccuc

SEQ ID NO: 800566 - RNA, 20 nt, Artificial Sequence
  Synthetic
ccaguuccucuuugcaccuc

SEQ ID NO: 800567 - RNA, 20 nt, Artificial Sequence
  Synthetic
agccuuuauucccucaccuc

SEQ ID NO: 800568 - RNA, 20 nt, Artificial Sequence
  Synthetic
ugggccuguuucuucaccuc

SEQ ID NO: 800569 - RNA, 20 nt, Artificial Sequence
  Synthetic
ccaaaaucccaguucaccuc

SEQ ID NO: 800570 - RNA, 20 nt, Artificial Sequence
  Synthetic
acaucuguagucaagaccuc

SEQ ID NO: 800571 - RNA, 20 nt, Artificial Sequence
  Synthetic
agcauggcuggggagaccuc

SEQ ID NO: 800572 - RNA, 20 nt, Artificial Sequence
  Synthetic
caaacuucagacuagaccuc

SEQ ID NO: 800573 - RNA, 20 nt, Artificial Sequence
  Synthetic
auuuuugccuccuagaccuc

SEQ ID NO: 800574 - RNA, 20 nt, Artificial Sequence
  Synthetic
uggucuagaucuccgaccuc

SEQ ID NO: 800575 - RNA, 20 nt, Artificial Sequence
  Synthetic
cuucauccucauaugaccuc

SEQ ID NO: 800576 - RNA, 20 nt, Artificial Sequence
  Synthetic
cgucuguaacuccugaccuc

SEQ ID NO: 800577 - RNA, 20 nt, Artificial Sequence
  Synthetic
agucucgaacuucugaccuc

SEQ ID NO: 800578 - RNA, 20 nt, Artificial Sequence
  Synthetic
cuggugaaaaaagugaccuc

SEQ ID NO: 800579 - RNA, 20 nt, Artificial Sequence
  Synthetic
uuuuaucaccaugugaccuc

SEQ ID NO: 800580 - RNA, 20 nt, Artificial Sequence
  Synthetic
uggguggaucacuugaccuc

SEQ ID NO: 800581 - RNA, 20 nt, Artificial Sequence
  Synthetic
auaugucauuucaauaccuc

SEQ ID NO: 800582 - RNA, 20 nt, Artificial Sequence
  Synthetic
aauaccuaacauuauaccuc

SEQ ID NO: 800583 - RNA, 20 nt, Artificial Sequence
  Synthetic
ucuugccacuuuuauaccuc

SEQ ID NO: 800584 - RNA, 20 nt, Artificial Sequence
  Synthetic
ucacgugauccuucuaccuc

SEQ ID NO: 800585 - RNA, 20 nt, Artificial Sequence
  Synthetic
cacuaacuaucaaguaccuc

SEQ ID NO: 800586 - RNA, 20 nt, Artificial Sequence
  Synthetic
ccaguuccuccuuguaccuc

SEQ ID NO: 800587 - RNA, 20 nt, Artificial Sequence
  Synthetic
ccagcuccucuuuguaccuc

SEQ ID NO: 800588 - RNA, 20 nt, Artificial Sequence
  Synthetic
aauaucuucuacauuaccuc

SEQ ID NO: 800589 - RNA, 20 nt, Artificial Sequence
  Synthetic
auuaagaaagugguuaccuc

SEQ ID NO: 800590 - RNA, 20 nt, Artificial Sequence
  Synthetic
acacacucuuauuaacccuc

SEQ ID NO: 800591 - RNA, 20 nt, Artificial Sequence
  Synthetic
cuaacaguggucccacccuc

SEQ ID NO: 800592 - RNA, 20 nt, Artificial Sequence
  Synthetic
aaaaugcaaauagcacccuc

SEQ ID NO: 800593 - RNA, 20 nt, Artificial Sequence
  Synthetic
accuacuuaggaggacccuc

SEQ ID NO: 800594 - RNA, 20 nt, Artificial Sequence
  Synthetic
aaaccugaacauguacccuc

SEQ ID NO: 800595 - RNA, 20 nt, Artificial Sequence
  Synthetic
uugggaaguucuucccccuc

SEQ ID NO: 800596 - RNA, 20 nt, Artificial Sequence
  Synthetic
uuuuuuauuuuuucccccuc

SEQ ID NO: 800597 - RNA, 20 nt, Artificial Sequence
  Synthetic
acaaugacugugggccccuc

SEQ ID NO: 800598 - RNA, 20 nt, Artificial Sequence
  Synthetic
uagggccuugggcuccccuc

SEQ ID NO: 800599 - RNA, 20 nt, Artificial Sequence
  Synthetic
uccuaaucugccuuccccuc

SEQ ID NO: 800600 - RNA, 20 nt, Artificial Sequence
  Synthetic
uacucaauuuuuuuccccuc

SEQ ID NO: 800601 - RNA, 20 nt, Artificial Sequence
  Synthetic
cuguguuuuaaugagcccuc

SEQ ID NO: 800602 - RNA, 20 nt, Artificial Sequence
  Synthetic
acaaaauuuauuuagcccuc

SEQ ID NO: 800603 - RNA, 20 nt, Artificial Sequence
  Synthetic
cagaaaagauguaugcccuc

SEQ ID NO: 800604 - RNA, 20 nt, Artificial Sequence
  Synthetic
cuuuuugacuugcugcccuc

SEQ ID NO: 800605 - RNA, 20 nt, Artificial Sequence
  Synthetic
agugcaucucaugugcccuc

SEQ ID NO: 800606 - RNA, 20 nt, Artificial Sequence
  Synthetic
agagauacaaacuugcccuc

SEQ ID NO: 800607 - RNA, 20 nt, Artificial Sequence
  Synthetic
auaauuagaauguugcccuc

SEQ ID NO: 800608 - RNA, 20 nt, Artificial Sequence
  Synthetic
agaagauugcuuaaucccuc

SEQ ID NO: 800609 - RNA, 20 nt, Artificial Sequence
  Synthetic
cuuccauuuuuauaucccuc

SEQ ID NO: 800610 - RNA, 20 nt, Artificial Sequence
  Synthetic
ucucuauuuagaugucccuc

SEQ ID NO: 800611 - RNA, 20 nt, Artificial Sequence
  Synthetic
uuuuagcauauuugucccuc

SEQ ID NO: 800612 - RNA, 20 nt, Artificial Sequence
  Synthetic
cuuacccucuaacuucccuc

SEQ ID NO: 800613 - RNA, 20 nt, Artificial Sequence
  Synthetic
uuucaacuucugguucccuc

SEQ ID NO: 800614 - RNA, 20 nt, Artificial Sequence
  Synthetic
ucauuuauuuucuuucccuc

SEQ ID NO: 800615 - RNA, 20 nt, Artificial Sequence
  Synthetic
uuuuguuuugguuuucccuc

SEQ ID NO: 800616 - RNA, 20 nt, Artificial Sequence
  Synthetic
uaaaagccaguagaagccuc

SEQ ID NO: 800617 - RNA, 20 nt, Artificial Sequence
  Synthetic
ucagcguuauccacagccuc

SEQ ID NO: 800618 - RNA, 20 nt, Artificial Sequence
  Synthetic
uauaauucagucacagccuc

SEQ ID NO: 800619 - RNA, 20 nt, Artificial Sequence
  Synthetic
ccacuacccuucacagccuc

SEQ ID NO: 800620 - RNA, 20 nt, Artificial Sequence
  Synthetic
uugaguaagauuacagccuc

SEQ ID NO: 800621 - RNA, 20 nt, Artificial Sequence
  Synthetic
aagcaccacagcccagccuc

SEQ ID NO: 800622 - RNA, 20 nt, Artificial Sequence
  Synthetic
ccacuauccuucccagccuc

SEQ ID NO: 800623 - RNA, 20 nt, Artificial Sequence
  Synthetic
ccuacacucuucccagccuc

SEQ ID NO: 800624 - RNA, 20 nt, Artificial Sequence
  Synthetic
aacauuaaggugucagccuc

SEQ ID NO: 800625 - RNA, 20 nt, Artificial Sequence
  Synthetic
cuacuucuggugagagccuc

SEQ ID NO: 800626 - RNA, 20 nt, Artificial Sequence
  Synthetic
cagagaucuugaauagccuc

SEQ ID NO: 800627 - RNA, 20 nt, Artificial Sequence
  Synthetic
uucaacacacugcuagccuc

SEQ ID NO: 800628 - RNA, 20 nt, Artificial Sequence
  Synthetic
acacuacccuuuguagccuc

SEQ ID NO: 800629 - RNA, 20 nt, Artificial Sequence
  Synthetic
ccaugugauccgcccgccuc

SEQ ID NO: 800630 - RNA, 20 nt, Artificial Sequence
  Synthetic
augguuuaaccaaaggccuc

SEQ ID NO: 800631 - RNA, 20 nt, Artificial Sequence
  Synthetic
cagucucaaguccaggccuc

SEQ ID NO: 800632 - RNA, 20 nt, Artificial Sequence
  Synthetic
cgcauggcuucagaggccuc

SEQ ID NO: 800633 - RNA, 20 nt, Artificial Sequence
  Synthetic
uuggcuccuggggaggccuc

SEQ ID NO: 800634 - RNA, 20 nt, Artificial Sequence
  Synthetic
cacauggcuggggaggccuc

SEQ ID NO: 800635 - RNA, 20 nt, Artificial Sequence
  Synthetic
agcauggcuggggaggccuc

SEQ ID NO: 800636 - RNA, 20 nt, Artificial Sequence
  Synthetic
ugcauggcuggggaggccuc

SEQ ID NO: 800637 - RNA, 20 nt, Artificial Sequence
  Synthetic
aauauggcuggggaggccuc

SEQ ID NO: 800638 - RNA, 20 nt, Artificial Sequence
  Synthetic
uguguggcuggggaggccuc

SEQ ID NO: 800639 - RNA, 20 nt, Artificial Sequence
  Synthetic
ucagcuucuggggaggccuc

SEQ ID NO: 800640 - RNA, 20 nt, Artificial Sequence
  Synthetic
ucuguuucuggggaggccuc

SEQ ID NO: 800641 - RNA, 20 nt, Artificial Sequence
  Synthetic
auuuugccuuccuaggccuc

SEQ ID NO: 800642 - RNA, 20 nt, Artificial Sequence
  Synthetic
cacauggcuggguaggccuc

SEQ ID NO: 800643 - RNA, 20 nt, Artificial Sequence
  Synthetic
auguuuuccuuuuaggccuc

SEQ ID NO: 800644 - RNA, 20 nt, Artificial Sequence
  Synthetic
caacuucucaugagggccuc

SEQ ID NO: 800645 - RNA, 20 nt, Artificial Sequence
  Synthetic
uuugggggaaaucuggccuc

SEQ ID NO: 800646 - RNA, 20 nt, Artificial Sequence
  Synthetic
agcagaaacagaaaugccuc

SEQ ID NO: 800647 - RNA, 20 nt, Artificial Sequence
  Synthetic
auaaaagaaaggaaugccuc

SEQ ID NO: 800648 - RNA, 20 nt, Artificial Sequence
  Synthetic
aaucugauuucaacugccuc

SEQ ID NO: 800649 - RNA, 20 nt, Artificial Sequence
  Synthetic
uacuugagugucacugccuc

SEQ ID NO: 800650 - RNA, 20 nt, Artificial Sequence
  Synthetic
cauuauauacaggcugccuc

SEQ ID NO: 800651 - RNA, 20 nt, Artificial Sequence
  Synthetic
ucaagugauucucgugccuc

SEQ ID NO: 800652 - RNA, 20 nt, Artificial Sequence
  Synthetic
aucugucuugauggugccuc

SEQ ID NO: 800653 - RNA, 20 nt, Artificial Sequence
  Synthetic
aauguccuguauggugccuc

SEQ ID NO: 800654 - RNA, 20 nt, Artificial Sequence
  Synthetic
uuuuccauuugaugugccuc

SEQ ID NO: 800655 - RNA, 20 nt, Artificial Sequence
  Synthetic
uauuucauuuacauugccuc

SEQ ID NO: 800656 - RNA, 20 nt, Artificial Sequence
  Synthetic
uuucuaaaaagacuugccuc

SEQ ID NO: 800657 - RNA, 20 nt, Artificial Sequence
  Synthetic
ccucacccgucuuuugccuc

SEQ ID NO: 800658 - RNA, 20 nt, Artificial Sequence
  Synthetic
uuccccagcccccaauccuc

SEQ ID NO: 800659 - RNA, 20 nt, Artificial Sequence
  Synthetic
uaaacagcuucugaauccuc

SEQ ID NO: 800660 - RNA, 20 nt, Artificial Sequence
  Synthetic
uucuaagcuauaacauccuc

SEQ ID NO: 800661 - RNA, 20 nt, Artificial Sequence
  Synthetic
ccacgacccuucccauccuc

SEQ ID NO: 800662 - RNA, 20 nt, Artificial Sequence
  Synthetic
cauuagaaauauagauccuc

SEQ ID NO: 800663 - RNA, 20 nt, Artificial Sequence
  Synthetic
ccaguaggccucugauccuc

SEQ ID NO: 800664 - RNA, 20 nt, Artificial Sequence
  Synthetic
acacuuaacauaguauccuc

SEQ ID NO: 800665 - RNA, 20 nt, Artificial Sequence
  Synthetic
aggcuggucuugaacuccuc

SEQ ID NO: 800666 - RNA, 20 nt, Artificial Sequence
  Synthetic
aucauaucacauaacuccuc

SEQ ID NO: 800667 - RNA, 20 nt, Artificial Sequence
  Synthetic
auuuacucagccuacuccuc

SEQ ID NO: 800668 - RNA, 20 nt, Artificial Sequence
  Synthetic
cagcacagugccugcuccuc

SEQ ID NO: 800669 - RNA, 20 nt, Artificial Sequence
  Synthetic
acauucugggcucucuccuc

SEQ ID NO: 800670 - RNA, 20 nt, Artificial Sequence
  Synthetic
ccaucucuguaguucuccuc

SEQ ID NO: 800671 - RNA, 20 nt, Artificial Sequence
  Synthetic
ugguuaagaucuuucuccuc

SEQ ID NO: 800672 - RNA, 20 nt, Artificial Sequence
  Synthetic
ugaaaaaguuugagguccuc

SEQ ID NO: 800673 - RNA, 20 nt, Artificial Sequence
  Synthetic
uucgaguguucaauguccuc

SEQ ID NO: 800674 - RNA, 20 nt, Artificial Sequence
  Synthetic
ucauuguaucacauguccuc

SEQ ID NO: 800675 - RNA, 20 nt, Artificial Sequence
  Synthetic
aaagacauugcccuguccuc

SEQ ID NO: 800676 - RNA, 20 nt, Artificial Sequence
  Synthetic
uuuucugggguucuguccuc

SEQ ID NO: 800677 - RNA, 20 nt, Artificial Sequence
  Synthetic
cuuuaaauuuuauuguccuc

SEQ ID NO: 800678 - RNA, 20 nt, Artificial Sequence
  Synthetic
uucuuucuucuaaauuccuc

SEQ ID NO: 800679 - RNA, 20 nt, Artificial Sequence
  Synthetic
uuaguagucuauaauuccuc

SEQ ID NO: 800680 - RNA, 20 nt, Artificial Sequence
  Synthetic
ugaaauuuaccuaauuccuc

SEQ ID NO: 800681 - RNA, 20 nt, Artificial Sequence
  Synthetic
uucugacuccugcauuccuc

SEQ ID NO: 800682 - RNA, 20 nt, Artificial Sequence
  Synthetic
aggcaguguggcgauuccuc

SEQ ID NO: 800683 - RNA, 20 nt, Artificial Sequence
  Synthetic
agucaguguggcgauuccuc

SEQ ID NO: 800684 - RNA, 20 nt, Artificial Sequence
  Synthetic
agucgguguggcgauuccuc

SEQ ID NO: 800685 - RNA, 20 nt, Artificial Sequence
  Synthetic
ucucuuuggacauauuccuc

SEQ ID NO: 800686 - RNA, 20 nt, Artificial Sequence
  Synthetic
uagaaugauuucuauuccuc

SEQ ID NO: 800687 - RNA, 20 nt, Artificial Sequence
  Synthetic
acugguauacgaccuuccuc

SEQ ID NO: 800688 - RNA, 20 nt, Artificial Sequence
  Synthetic
uugcugucuguuccuuccuc

SEQ ID NO: 800689 - RNA, 20 nt, Artificial Sequence
  Synthetic
cuagaagaggcauguuccuc

SEQ ID NO: 800690 - RNA, 20 nt, Artificial Sequence
  Synthetic
agaaacacugugauuuccuc

SEQ ID NO: 800691 - RNA, 20 nt, Artificial Sequence
  Synthetic
uaagcaauuuuucuuuccuc

SEQ ID NO: 800692 - RNA, 20 nt, Artificial Sequence
  Synthetic
ucuucuguauucguuuccuc

SEQ ID NO: 800693 - RNA, 20 nt, Artificial Sequence
  Synthetic
uauucucaaaauguuuccuc

SEQ ID NO: 800694 - RNA, 20 nt, Artificial Sequence
  Synthetic
ccccauugcuuguuuuccuc

SEQ ID NO: 800695 - RNA, 20 nt, Artificial Sequence
  Synthetic
auguauucaaccuaaagcuc

SEQ ID NO: 800696 - RNA, 20 nt, Artificial Sequence
  Synthetic
uuguuucucagguaaagcuc

SEQ ID NO: 800697 - RNA, 20 nt, Artificial Sequence
  Synthetic
cauuugaaaauaccaagcuc

SEQ ID NO: 800698 - RNA, 20 nt, Artificial Sequence
  Synthetic
aacuucuuaaugccaagcuc

SEQ ID NO: 800699 - RNA, 20 nt, Artificial Sequence
  Synthetic
uauaauauagccagaagcuc

SEQ ID NO: 800700 - RNA, 20 nt, Artificial Sequence
  Synthetic
uacuuucaaggcagaagcuc

SEQ ID NO: 800701 - RNA, 20 nt, Artificial Sequence
  Synthetic
ucuaaugugcagcgaagcuc

SEQ ID NO: 800702 - RNA, 20 nt, Artificial Sequence
  Synthetic
aaaaacuuccagugaagcuc

SEQ ID NO: 800703 - RNA, 20 nt, Artificial Sequence
  Synthetic
cugauuaauagcauaagcuc

SEQ ID NO: 800704 - RNA, 20 nt, Artificial Sequence
  Synthetic
auuaaugucuuaguaagcuc

SEQ ID NO: 800705 - RNA, 20 nt, Artificial Sequence
  Synthetic
uggcugaauaggaacagcuc

SEQ ID NO: 800706 - RNA, 20 nt, Artificial Sequence
  Synthetic
auauuugguugucacagcuc

SEQ ID NO: 800707 - RNA, 20 nt, Artificial Sequence
  Synthetic
agcucucaaacugacagcuc

SEQ ID NO: 800708 - RNA, 20 nt, Artificial Sequence
  Synthetic
uaaaacaauuuauacagcuc

SEQ ID NO: 800709 - RNA, 20 nt, Artificial Sequence
  Synthetic
aagaagccaaaguacagcuc

SEQ ID NO: 800710 - RNA, 20 nt, Artificial Sequence
  Synthetic
cagugaaguggaaccagcuc

SEQ ID NO: 800711 - RNA, 20 nt, Artificial Sequence
  Synthetic
acauuucauguccccagcuc

SEQ ID NO: 800712 - RNA, 20 nt, Artificial Sequence
  Synthetic
acuaauaaauaagccagcuc

SEQ ID NO: 800713 - RNA, 20 nt, Artificial Sequence
  Synthetic
aggggaagagcugccagcuc

SEQ ID NO: 800714 - RNA, 20 nt, Artificial Sequence
  Synthetic
ugccugguaagaagcagcuc

SEQ ID NO: 800715 - RNA, 20 nt, Artificial Sequence
  Synthetic
ccuuguccucauagcagcuc

SEQ ID NO: 800716 - RNA, 20 nt, Artificial Sequence
  Synthetic
aaggcagcucucugcagcuc

SEQ ID NO: 800717 - RNA, 20 nt, Artificial Sequence
  Synthetic
ucaggacuuaaacucagcuc

SEQ ID NO: 800718 - RNA, 20 nt, Artificial Sequence
  Synthetic
caggagggaaaagucagcuc

SEQ ID NO: 800719 - RNA, 20 nt, Artificial Sequence
  Synthetic
ccacguucuagcuucagcuc

SEQ ID NO: 800720 - RNA, 20 nt, Artificial Sequence
  Synthetic
uagaugcuggacaagagcuc

SEQ ID NO: 800721 - RNA, 20 nt, Artificial Sequence
  Synthetic
acccucauacaggagagcuc

SEQ ID NO: 800722 - RNA, 20 nt, Artificial Sequence
  Synthetic
acauuuuuaaaauagagcuc

SEQ ID NO: 800723 - RNA, 20 nt, Artificial Sequence
  Synthetic
uauccagaggccuagagcuc

SEQ ID NO: 800724 - RNA, 20 nt, Artificial Sequence
  Synthetic
agcaaauauuauucgagcuc

SEQ ID NO: 800725 - RNA, 20 nt, Artificial Sequence
  Synthetic
ccuuccugaagaaggagcuc

SEQ ID NO: 800726 - RNA, 20 nt, Artificial Sequence
  Synthetic
ugauccugaugaaggagcuc

SEQ ID NO: 800727 - RNA, 20 nt, Artificial Sequence
  Synthetic
aaucaagagaucuggagcuc

SEQ ID NO: 800728 - RNA, 20 nt, Artificial Sequence
  Synthetic
ucugacaggagguggagcuc

SEQ ID NO: 800729 - RNA, 20 nt, Artificial Sequence
  Synthetic
uggguggguugcaugagcuc

SEQ ID NO: 800730 - RNA, 20 nt, Artificial Sequence
  Synthetic
auagaugaggugaugagcuc

SEQ ID NO: 800731 - RNA, 20 nt, Artificial Sequence
  Synthetic
agucuccaaccccugagcuc

SEQ ID NO: 800732 - RNA, 20 nt, Artificial Sequence
  Synthetic
ucuuaccaugugcugagcuc

SEQ ID NO: 800733 - RNA, 20 nt, Artificial Sequence
  Synthetic
uacuagccacgugugagcuc

SEQ ID NO: 800734 - RNA, 20 nt, Artificial Sequence
  Synthetic
ugugaacaaauauugagcuc

SEQ ID NO: 800735 - RNA, 20 nt, Artificial Sequence
  Synthetic
caggaggaucacuugagcuc

SEQ ID NO: 800736 - RNA, 20 nt, Artificial Sequence
  Synthetic
ugggcagauugcuugagcuc

SEQ ID NO: 800737 - RNA, 20 nt, Artificial Sequence
  Synthetic
ugggaggaucauuugagcuc

SEQ ID NO: 800738 - RNA, 20 nt, Artificial Sequence
  Synthetic
aaaaggcaucugacuagcuc

SEQ ID NO: 800739 - RNA, 20 nt, Artificial Sequence
  Synthetic
aguuucugauuuacuagcuc

SEQ ID NO: 800740 - RNA, 20 nt, Artificial Sequence
  Synthetic
ugaaacacauaugcuagcuc

SEQ ID NO: 800741 - RNA, 20 nt, Artificial Sequence
  Synthetic
uuagcuccugccuguagcuc

SEQ ID NO: 800742 - RNA, 20 nt, Artificial Sequence
  Synthetic
aaaggaacagaaguuagcuc

SEQ ID NO: 800743 - RNA, 20 nt, Artificial Sequence
  Synthetic
auuaauaacuucuuuagcuc

SEQ ID NO: 800744 - RNA, 20 nt, Artificial Sequence
  Synthetic
ucaucucuugauggacgcuc

SEQ ID NO: 800745 - RNA, 20 nt, Artificial Sequence
  Synthetic
acaugcuuauugauacgcuc

SEQ ID NO: 800746 - RNA, 20 nt, Artificial Sequence
  Synthetic
agagucucgcugugucgcuc

SEQ ID NO: 800747 - RNA, 20 nt, Artificial Sequence
  Synthetic
cuucucccaaugaaaggcuc

SEQ ID NO: 800748 - RNA, 20 nt, Artificial Sequence
  Synthetic
aggugagggaauaaaggcuc

SEQ ID NO: 800749 - RNA, 20 nt, Artificial Sequence
  Synthetic
aauuaucccucugaaggcuc

SEQ ID NO: 800750 - RNA, 20 nt, Artificial Sequence
  Synthetic
auuaaagcacucacaggcuc

SEQ ID NO: 800751 - RNA, 20 nt, Artificial Sequence
  Synthetic
caccaaaauaauccaggcuc

SEQ ID NO: 800752 - RNA, 20 nt, Artificial Sequence
  Synthetic
ugccucaaccauccaggcuc

SEQ ID NO: 800753 - RNA, 20 nt, Artificial Sequence
  Synthetic
accuagagaugaucaggcuc

SEQ ID NO: 800754 - RNA, 20 nt, Artificial Sequence
  Synthetic
acagcagugcugggaggcuc

SEQ ID NO: 800755 - RNA, 20 nt, Artificial Sequence
  Synthetic
agccaccaacuccuaggcuc

SEQ ID NO: 800756 - RNA, 20 nt, Artificial Sequence
  Synthetic
uguggcaacauuuuaggcuc

SEQ ID NO: 800757 - RNA, 20 nt, Artificial Sequence
  Synthetic
ugcacauagcaggggggcuc

SEQ ID NO: 800758 - RNA, 20 nt, Artificial Sequence
  Synthetic
ccugccacuacugggggcuc

SEQ ID NO: 800759 - RNA, 20 nt, Artificial Sequence
  Synthetic
ugaguugccaggaugggcuc

SEQ ID NO: 800760 - RNA, 20 nt, Artificial Sequence
  Synthetic
auuugcagauaccugggcuc

SEQ ID NO: 800761 - RNA, 20 nt, Artificial Sequence
  Synthetic
acuucgacaucccugggcuc

SEQ ID NO: 800762 - RNA, 20 nt, Artificial Sequence
  Synthetic
aaccuccaccuccugggcuc

SEQ ID NO: 800763 - RNA, 20 nt, Artificial Sequence
  Synthetic
uuccuuucaucucugggcuc

SEQ ID NO: 800764 - RNA, 20 nt, Artificial Sequence
  Synthetic
agcuagauaaacuugggcuc

SEQ ID NO: 800765 - RNA, 20 nt, Artificial Sequence
  Synthetic
ugcagcaaagagccuggcuc

SEQ ID NO: 800766 - RNA, 20 nt, Artificial Sequence
  Synthetic
caggcccggcacgguggcuc

SEQ ID NO: 800767 - RNA, 20 nt, Artificial Sequence
  Synthetic
uaggcugggcgcgguggcuc

SEQ ID NO: 800768 - RNA, 20 nt, Artificial Sequence
  Synthetic
uugguacgggucuguggcuc

SEQ ID NO: 800769 - RNA, 20 nt, Artificial Sequence
  Synthetic
uggggcucaucucuuggcuc

SEQ ID NO: 800770 - RNA, 20 nt, Artificial Sequence
  Synthetic
aaaaaaagacuucuuggcuc

SEQ ID NO: 800771 - RNA, 20 nt, Artificial Sequence
  Synthetic
acaauaagacuucuuggcuc

SEQ ID NO: 800772 - RNA, 20 nt, Artificial Sequence
  Synthetic
aacuggggacgaguuggcuc

SEQ ID NO: 800773 - RNA, 20 nt, Artificial Sequence
  Synthetic
auaaugguuacuuuuggcuc

SEQ ID NO: 800774 - RNA, 20 nt, Artificial Sequence
  Synthetic
cagcuuuguucuuuuggcuc

SEQ ID NO: 800775 - RNA, 20 nt, Artificial Sequence
  Synthetic
ugacaaucauaaaaaugcuc

SEQ ID NO: 800776 - RNA, 20 nt, Artificial Sequence
  Synthetic
cuagucuaugauaaaugcuc

SEQ ID NO: 800777 - RNA, 20 nt, Artificial Sequence
  Synthetic
ugguuucacuguaaaugcuc

SEQ ID NO: 800778 - RNA, 20 nt, Artificial Sequence
  Synthetic
agcuuuagaaaccaaugcuc

SEQ ID NO: 800779 - RNA, 20 nt, Artificial Sequence
  Synthetic
aaccucugacuauaaugcuc

SEQ ID NO: 800780 - RNA, 20 nt, Artificial Sequence
  Synthetic
aagcaaaauaguuaaugcuc

SEQ ID NO: 800781 - RNA, 20 nt, Artificial Sequence
  Synthetic
uuuaacaauuccagaugcuc

SEQ ID NO: 800782 - RNA, 20 nt, Artificial Sequence
  Synthetic
caauauuaucuaauaugcuc

SEQ ID NO: 800783 - RNA, 20 nt, Artificial Sequence
  Synthetic
augaauugugucauaugcuc

SEQ ID NO: 800784 - RNA, 20 nt, Artificial Sequence
  Synthetic
agcaggaagcagauaugcuc

SEQ ID NO: 800785 - RNA, 20 nt, Artificial Sequence
  Synthetic
uggaaaggcuagauaugcuc

SEQ ID NO: 800786 - RNA, 20 nt, Artificial Sequence
  Synthetic
uuuauuuguguuauaugcuc

SEQ ID NO: 800787 - RNA, 20 nt, Artificial Sequence
  Synthetic
aaacagagaggauuaugcuc

SEQ ID NO: 800788 - RNA, 20 nt, Artificial Sequence
  Synthetic
cuucaguuuauguuaugcuc

SEQ ID NO: 800789 - RNA, 20 nt, Artificial Sequence
  Synthetic
agcaagucacuuaacugcuc

SEQ ID NO: 800790 - RNA, 20 nt, Artificial Sequence
  Synthetic
uugucagccuuugacugcuc

SEQ ID NO: 800791 - RNA, 20 nt, Artificial Sequence
  Synthetic
cuuggguuaacauacugcuc

SEQ ID NO: 800792 - RNA, 20 nt, Artificial Sequence
  Synthetic
accuguagucccagcugcuc

SEQ ID NO: 800793 - RNA, 20 nt, Artificial Sequence
  Synthetic
agcaccagcaccugcugcuc

SEQ ID NO: 800794 - RNA, 20 nt, Artificial Sequence
  Synthetic
aagcuaaugcccugcugcuc

SEQ ID NO: 800795 - RNA, 20 nt, Artificial Sequence
  Synthetic
auuucuccuucucucugcuc

SEQ ID NO: 800796 - RNA, 20 nt, Artificial Sequence
  Synthetic
uugguagcuuuucucugcuc

SEQ ID NO: 800797 - RNA, 20 nt, Artificial Sequence
  Synthetic
ccucccccuggcuucugcuc

SEQ ID NO: 800798 - RNA, 20 nt, Artificial Sequence
  Synthetic
cauugugggccaaagugcuc

SEQ ID NO: 800799 - RNA, 20 nt, Artificial Sequence
  Synthetic
ugcauuucuagcaagugcuc

SEQ ID NO: 800800 - RNA, 20 nt, Artificial Sequence
  Synthetic
agcugggauuacaggugcuc

SEQ ID NO: 800801 - RNA, 20 nt, Artificial Sequence
  Synthetic
aggcucuaugcuaggugcuc

SEQ ID NO: 800802 - RNA, 20 nt, Artificial Sequence
  Synthetic
acugguacuucucugugcuc

SEQ ID NO: 800803 - RNA, 20 nt, Artificial Sequence
  Synthetic
cccaggugaugucugugcuc

SEQ ID NO: 800804 - RNA, 20 nt, Artificial Sequence
  Synthetic
caggauuaauaugugugcuc

SEQ ID NO: 800805 - RNA, 20 nt, Artificial Sequence
  Synthetic
auaagauuuggugugugcuc

SEQ ID NO: 800806 - RNA, 20 nt, Artificial Sequence
  Synthetic
uucaugacaauguugugcuc

SEQ ID NO: 800807 - RNA, 20 nt, Artificial Sequence
  Synthetic
uuucuccugccuaauugcuc

SEQ ID NO: 800808 - RNA, 20 nt, Artificial Sequence
  Synthetic
uggaguuuagugcauugcuc

SEQ ID NO: 800809 - RNA, 20 nt, Artificial Sequence
  Synthetic
ugaucgguugucacuugcuc

SEQ ID NO: 800810 - RNA, 20 nt, Artificial Sequence
  Synthetic
uucacaaaaaggacuugcuc

SEQ ID NO: 800811 - RNA, 20 nt, Artificial Sequence
  Synthetic
agcaguuaagugacuugcuc

SEQ ID NO: 800812 - RNA, 20 nt, Artificial Sequence
  Synthetic
aacagaauugggccuugcuc

SEQ ID NO: 800813 - RNA, 20 nt, Artificial Sequence
  Synthetic
uugagacuuucuccuugcuc

SEQ ID NO: 800814 - RNA, 20 nt, Artificial Sequence
  Synthetic
cuugaacagacuucuugcuc

SEQ ID NO: 800815 - RNA, 20 nt, Artificial Sequence
  Synthetic
ugcaggacucaaaguugcuc

SEQ ID NO: 800816 - RNA, 20 nt, Artificial Sequence
  Synthetic
accccaucuuuccguugcuc

SEQ ID NO: 800817 - RNA, 20 nt, Artificial Sequence
  Synthetic
ugcuauauaugucuuugcuc

SEQ ID NO: 800818 - RNA, 20 nt, Artificial Sequence
  Synthetic
cccauuuugagcuuuugcuc

SEQ ID NO: 800819 - RNA, 20 nt, Artificial Sequence
  Synthetic
acuaagaagacuuuuugcuc

SEQ ID NO: 800820 - RNA, 20 nt, Artificial Sequence
  Synthetic
aaucuuaaccagaaaaucuc

SEQ ID NO: 800821 - RNA, 20 nt, Artificial Sequence
  Synthetic
ucuaaaugagcuaaaaucuc

SEQ ID NO: 800822 - RNA, 20 nt, Artificial Sequence
  Synthetic
aauuuuaaaaguaaaaucuc

SEQ ID NO: 800823 - RNA, 20 nt, Artificial Sequence
  Synthetic
uuugacaggugagaaaucuc

SEQ ID NO: 800824 - RNA, 20 nt, Artificial Sequence
  Synthetic
aacucugguauauaaaucuc

SEQ ID NO: 800825 - RNA, 20 nt, Artificial Sequence
  Synthetic
uuggcagcauauuaaaucuc

SEQ ID NO: 800826 - RNA, 20 nt, Artificial Sequence
  Synthetic
uuuauaaauuacccaaucuc

SEQ ID NO: 800827 - RNA, 20 nt, Artificial Sequence
  Synthetic
ugcaugcucaccucaaucuc

SEQ ID NO: 800828 - RNA, 20 nt, Artificial Sequence
  Synthetic
acacaacggaccagaaucuc

SEQ ID NO: 800829 - RNA, 20 nt, Artificial Sequence
  Synthetic
acaccacauaccagaaucuc

SEQ ID NO: 800830 - RNA, 20 nt, Artificial Sequence
  Synthetic
uguuagaaaugcagaaucuc

SEQ ID NO: 800831 - RNA, 20 nt, Artificial Sequence
  Synthetic
uccaacuaaaucagaaucuc

SEQ ID NO: 800832 - RNA, 20 nt, Artificial Sequence
  Synthetic
uccucaucuccaggaaucuc

SEQ ID NO: 800833 - RNA, 20 nt, Artificial Sequence
  Synthetic
cauacagcuugaggaaucuc

SEQ ID NO: 800834 - RNA, 20 nt, Artificial Sequence
  Synthetic
cucacuuucuaaaacaucuc

SEQ ID NO: 800835 - RNA, 20 nt, Artificial Sequence
  Synthetic
cucucugguugucacaucuc

SEQ ID NO: 800836 - RNA, 20 nt, Artificial Sequence
  Synthetic
cuuuuuccacaugacaucuc

SEQ ID NO: 800837 - RNA, 20 nt, Artificial Sequence
  Synthetic
caauaagaaacuaccaucuc

SEQ ID NO: 800838 - RNA, 20 nt, Artificial Sequence
  Synthetic
uaauuacucaaaagcaucuc

SEQ ID NO: 800839 - RNA, 20 nt, Artificial Sequence
  Synthetic
uggcccucagacagcaucuc

SEQ ID NO: 800840 - RNA, 20 nt, Artificial Sequence
  Synthetic
accuacugaaucagcaucuc

SEQ ID NO: 800841 - RNA, 20 nt, Artificial Sequence
  Synthetic
cagcgacaacuucucaucuc

SEQ ID NO: 800842 - RNA, 20 nt, Artificial Sequence
  Synthetic
cuuuauuuuccuuucaucuc

SEQ ID NO: 800843 - RNA, 20 nt, Artificial Sequence
  Synthetic
cagaggcuauucaagaucuc

SEQ ID NO: 800844 - RNA, 20 nt, Artificial Sequence
  Synthetic
agguggugauggaagaucuc

SEQ ID NO: 800845 - RNA, 20 nt, Artificial Sequence
  Synthetic
auaagagcuucacagaucuc

SEQ ID NO: 800846 - RNA, 20 nt, Artificial Sequence
  Synthetic
caacauugaaggcagaucuc

SEQ ID NO: 800847 - RNA, 20 nt, Artificial Sequence
  Synthetic
aaucaguugaaucagaucuc

SEQ ID NO: 800848 - RNA, 20 nt, Artificial Sequence
  Synthetic
aguaccugcauagagaucuc

SEQ ID NO: 800849 - RNA, 20 nt, Artificial Sequence
  Synthetic
ucagugcuguuggagaucuc

SEQ ID NO: 800850 - RNA, 20 nt, Artificial Sequence
  Synthetic
ugucuuucuuccucgaucuc

SEQ ID NO: 800851 - RNA, 20 nt, Artificial Sequence
  Synthetic
accaaauagaaaaggaucuc

SEQ ID NO: 800852 - RNA, 20 nt, Artificial Sequence
  Synthetic
agccaugauuacaggaucuc

SEQ ID NO: 800853 - RNA, 20 nt, Artificial Sequence
  Synthetic
aaucagcaugggaugaucuc

SEQ ID NO: 800854 - RNA, 20 nt, Artificial Sequence
  Synthetic
uauuuauuuucccugaucuc

SEQ ID NO: 800855 - RNA, 20 nt, Artificial Sequence
  Synthetic
ucaacuggaucucugaucuc

SEQ ID NO: 800856 - RNA, 20 nt, Artificial Sequence
  Synthetic
cuacuccuauuucugaucuc

SEQ ID NO: 800857 - RNA, 20 nt, Artificial Sequence
  Synthetic
cuucccaccugcuugaucuc

SEQ ID NO: 800858 - RNA, 20 nt, Artificial Sequence
  Synthetic
uaacauacaauuuugaucuc

SEQ ID NO: 800859 - RNA, 20 nt, Artificial Sequence
  Synthetic
caaauaaaaugaaauaucuc

SEQ ID NO: 800860 - RNA, 20 nt, Artificial Sequence
  Synthetic
uuguacacagacaauaucuc

SEQ ID NO: 800861 - RNA, 20 nt, Artificial Sequence
  Synthetic
ugaauggguccuaauaucuc

SEQ ID NO: 800862 - RNA, 20 nt, Artificial Sequence
  Synthetic
augggaucugacacuaucuc

SEQ ID NO: 800863 - RNA, 20 nt, Artificial Sequence
  Synthetic
acacuuuuauccacuaucuc

SEQ ID NO: 800864 - RNA, 20 nt, Artificial Sequence
  Synthetic
ucuuucuuuuccacuaucuc

SEQ ID NO: 800865 - RNA, 20 nt, Artificial Sequence
  Synthetic
uuucucaaauguccuaucuc

SEQ ID NO: 800866 - RNA, 20 nt, Artificial Sequence
  Synthetic
acgauucaaguagcuaucuc

SEQ ID NO: 800867 - RNA, 20 nt, Artificial Sequence
  Synthetic
uccauuuaaauagguaucuc

SEQ ID NO: 800868 - RNA, 20 nt, Artificial Sequence
  Synthetic
ucuuugcauccuuguaucuc

SEQ ID NO: 800869 - RNA, 20 nt, Artificial Sequence
  Synthetic
ccagcuccucuuuguaucuc

SEQ ID NO: 800870 - RNA, 20 nt, Artificial Sequence
  Synthetic
ugauuuagcaaucuuaucuc

SEQ ID NO: 800871 - RNA, 20 nt, Artificial Sequence
  Synthetic
accaauaaaauaaaacucuc

SEQ ID NO: 800872 - RNA, 20 nt, Artificial Sequence
  Synthetic
caguagacauaagaacucuc

SEQ ID NO: 800873 - RNA, 20 nt, Artificial Sequence
  Synthetic
uggaaaguuacuuaacucuc

SEQ ID NO: 800874 - RNA, 20 nt, Artificial Sequence
  Synthetic
auauggaucaugacacucuc

SEQ ID NO: 800875 - RNA, 20 nt, Artificial Sequence
  Synthetic
ccuuuaucucugacacucuc

SEQ ID NO: 800876 - RNA, 20 nt, Artificial Sequence
  Synthetic
caauccuggucuacacucuc

SEQ ID NO: 800877 - RNA, 20 nt, Artificial Sequence
  Synthetic
caaguuguccuuccacucuc

SEQ ID NO: 800878 - RNA, 20 nt, Artificial Sequence
  Synthetic
acucccauacccucacucuc

SEQ ID NO: 800879 - RNA, 20 nt, Artificial Sequence
  Synthetic
ucucucucucucucacucuc

SEQ ID NO: 800880 - RNA, 20 nt, Artificial Sequence
  Synthetic
uccaguucauuuucacucuc

SEQ ID NO: 800881 - RNA, 20 nt, Artificial Sequence
  Synthetic
uauuggaaauggagacucuc

SEQ ID NO: 800882 - RNA, 20 nt, Artificial Sequence
  Synthetic
uaaugcuggcuuugacucuc

SEQ ID NO: 800883 - RNA, 20 nt, Artificial Sequence
  Synthetic
acacauacauauauacucuc

SEQ ID NO: 800884 - RNA, 20 nt, Artificial Sequence
  Synthetic
agccuaaaauauuuacucuc

SEQ ID NO: 800885 - RNA, 20 nt, Artificial Sequence
  Synthetic
cuguguauauaucaccucuc

SEQ ID NO: 800886 - RNA, 20 nt, Artificial Sequence
  Synthetic
ugaaauucuauugaccucuc

SEQ ID NO: 800887 - RNA, 20 nt, Artificial Sequence
  Synthetic
cuuuauuuccagccccucuc

SEQ ID NO: 800888 - RNA, 20 nt, Artificial Sequence
  Synthetic
acaauaagucucucccucuc

SEQ ID NO: 800889 - RNA, 20 nt, Artificial Sequence
  Synthetic
ucuguucugcccagccucuc

SEQ ID NO: 800890 - RNA, 20 nt, Artificial Sequence
  Synthetic
cacugcgaccuccgccucuc

SEQ ID NO: 800891 - RNA, 20 nt, Artificial Sequence
  Synthetic
aucacacaccggggccucuc

SEQ ID NO: 800892 - RNA, 20 nt, Artificial Sequence
  Synthetic
ugugucccagacugccucuc

SEQ ID NO: 800893 - RNA, 20 nt, Artificial Sequence
  Synthetic
aguccaauagucugccucuc

SEQ ID NO: 800894 - RNA, 20 nt, Artificial Sequence
  Synthetic
cacugcaacuucugccucuc

SEQ ID NO: 800895 - RNA, 20 nt, Artificial Sequence
  Synthetic
cuaauauguuucugccucuc

SEQ ID NO: 800896 - RNA, 20 nt, Artificial Sequence
  Synthetic
ccucacacaugcauccucuc

SEQ ID NO: 800897 - RNA, 20 nt, Artificial Sequence
  Synthetic
uaacuccgucaucuccucuc

SEQ ID NO: 800898 - RNA, 20 nt, Artificial Sequence
  Synthetic
ucaaauauguccuuccucuc

SEQ ID NO: 800899 - RNA, 20 nt, Artificial Sequence
  Synthetic
ccagccaguaucuuccucuc

SEQ ID NO: 800900 - RNA, 20 nt, Artificial Sequence
  Synthetic
cuguacuucaaagagcucuc

SEQ ID NO: 800901 - RNA, 20 nt, Artificial Sequence
  Synthetic
cauuguuaaaccuagcucuc

SEQ ID NO: 800902 - RNA, 20 nt, Artificial Sequence
  Synthetic
aaagcaaaagccccgcucuc

SEQ ID NO: 800903 - RNA, 20 nt, Artificial Sequence
  Synthetic
uuaagggcacuuucgcucuc

SEQ ID NO: 800904 - RNA, 20 nt, Artificial Sequence
  Synthetic
uccucugacccucugcucuc

SEQ ID NO: 800905 - RNA, 20 nt, Artificial Sequence
  Synthetic
uuuauagagggucugcucuc

SEQ ID NO: 800906 - RNA, 20 nt, Artificial Sequence
  Synthetic
uuuuauuggagagugcucuc

SEQ ID NO: 800907 - RNA, 20 nt, Artificial Sequence
  Synthetic
caagcugaggaaaaucucuc

SEQ ID NO: 800908 - RNA, 20 nt, Artificial Sequence
  Synthetic
agguugaacuauaaucucuc

SEQ ID NO: 800909 - RNA, 20 nt, Artificial Sequence
  Synthetic
agaagaaauugagaucucuc

SEQ ID NO: 800910 - RNA, 20 nt, Artificial Sequence
  Synthetic
uaauauuacaaugaucucuc

SEQ ID NO: 800911 - RNA, 20 nt, Artificial Sequence
  Synthetic
agacuuccugcauaucucuc

SEQ ID NO: 800912 - RNA, 20 nt, Artificial Sequence
  Synthetic
agccuaaaaagguaucucuc

SEQ ID NO: 800913 - RNA, 20 nt, Artificial Sequence
  Synthetic
aaaaggacauguuaucucuc

SEQ ID NO: 800914 - RNA, 20 nt, Artificial Sequence
  Synthetic
agggagcgauccacucucuc

SEQ ID NO: 800915 - RNA, 20 nt, Artificial Sequence
  Synthetic
acuacacuaucagcucucuc

SEQ ID NO: 800916 - RNA, 20 nt, Artificial Sequence
  Synthetic
caaauuuaaaaaucucucuc

SEQ ID NO: 800917 - RNA, 20 nt, Artificial Sequence
  Synthetic
aauaugugugggagucucuc

SEQ ID NO: 800918 - RNA, 20 nt, Artificial Sequence
  Synthetic
caucuuaucuugggucucuc

SEQ ID NO: 800919 - RNA, 20 nt, Artificial Sequence
  Synthetic
caauuugcagagugucucuc

SEQ ID NO: 800920 - RNA, 20 nt, Artificial Sequence
  Synthetic
cuuuaugaaacuugucucuc

SEQ ID NO: 800921 - RNA, 20 nt, Artificial Sequence
  Synthetic
auguaauuuuccauucucuc

SEQ ID NO: 800922 - RNA, 20 nt, Artificial Sequence
  Synthetic
uucacuuuacauauucucuc

SEQ ID NO: 800923 - RNA, 20 nt, Artificial Sequence
  Synthetic
aaguaacauuaacuucucuc

SEQ ID NO: 800924 - RNA, 20 nt, Artificial Sequence
  Synthetic
cucucuagauuccuucucuc

SEQ ID NO: 800925 - RNA, 20 nt, Artificial Sequence
  Synthetic
uucugaguuuuuguucucuc

SEQ ID NO: 800926 - RNA, 20 nt, Artificial Sequence
  Synthetic
cuccugucacuuuuucucuc

SEQ ID NO: 800927 - RNA, 20 nt, Artificial Sequence
  Synthetic
agcaacuucagcaaagucuc

SEQ ID NO: 800928 - RNA, 20 nt, Artificial Sequence
  Synthetic
aauaucaugcaucaagucuc

SEQ ID NO: 800929 - RNA, 20 nt, Artificial Sequence
  Synthetic
uccuccuugugggaagucuc

SEQ ID NO: 800930 - RNA, 20 nt, Artificial Sequence
  Synthetic
uauggcagugaauaagucuc

SEQ ID NO: 800931 - RNA, 20 nt, Artificial Sequence
  Synthetic
caggaaaauuggacagucuc

SEQ ID NO: 800932 - RNA, 20 nt, Artificial Sequence
  Synthetic
ucuuccucuaaaccagucuc

SEQ ID NO: 800933 - RNA, 20 nt, Artificial Sequence
  Synthetic
cuuuauaaacacccagucuc

SEQ ID NO: 800934 - RNA, 20 nt, Artificial Sequence
  Synthetic
uuuagaaauuacccagucuc

SEQ ID NO: 800935 - RNA, 20 nt, Artificial Sequence
  Synthetic
uucauaaauuacccagucuc

SEQ ID NO: 800936 - RNA, 20 nt, Artificial Sequence
  Synthetic
uuuauaaauuacccagucuc

SEQ ID NO: 800937 - RNA, 20 nt, Artificial Sequence
  Synthetic
uuuguaaauuacccagucuc

SEQ ID NO: 800938 - RNA, 20 nt, Artificial Sequence
  Synthetic
cucauccauuacccagucuc

SEQ ID NO: 800939 - RNA, 20 nt, Artificial Sequence
  Synthetic
aaauaaauuaccccagucuc

SEQ ID NO: 800940 - RNA, 20 nt, Artificial Sequence
  Synthetic
uuuauaaauugcccagucuc

SEQ ID NO: 800941 - RNA, 20 nt, Artificial Sequence
  Synthetic
uuuguaaauugcccagucuc

SEQ ID NO: 800942 - RNA, 20 nt, Artificial Sequence
  Synthetic
uguauaaauuauccagucuc

SEQ ID NO: 800943 - RNA, 20 nt, Artificial Sequence
  Synthetic
augcugcugcugucagucuc

SEQ ID NO: 800944 - RNA, 20 nt, Artificial Sequence
  Synthetic
uacuauuccucaagagucuc

SEQ ID NO: 800945 - RNA, 20 nt, Artificial Sequence
  Synthetic
cugauuuuaaucugagucuc

SEQ ID NO: 800946 - RNA, 20 nt, Artificial Sequence
  Synthetic
auucucucuuuuugagucuc

SEQ ID NO: 800947 - RNA, 20 nt, Artificial Sequence
  Synthetic
aggaaacucccucuagucuc

SEQ ID NO: 800948 - RNA, 20 nt, Artificial Sequence
  Synthetic
acaaaacacaucaucgucuc

SEQ ID NO: 800949 - RNA, 20 nt, Artificial Sequence
  Synthetic
aauuguuuuaucaaggucuc

SEQ ID NO: 800950 - RNA, 20 nt, Artificial Sequence
  Synthetic
cgccuguaaucccaggucuc

SEQ ID NO: 800951 - RNA, 20 nt, Artificial Sequence
  Synthetic
uaaugaacaaaauaggucuc

SEQ ID NO: 800952 - RNA, 20 nt, Artificial Sequence
  Synthetic
cauucuuaaaauggggucuc

SEQ ID NO: 800953 - RNA, 20 nt, Artificial Sequence
  Synthetic
agaaccacugcaugggucuc

SEQ ID NO: 800954 - RNA, 20 nt, Artificial Sequence
  Synthetic
uguugguugcguugggucuc

SEQ ID NO: 800955 - RNA, 20 nt, Artificial Sequence
  Synthetic
cucugugauucuauggucuc

SEQ ID NO: 800956 - RNA, 20 nt, Artificial Sequence
  Synthetic
ccaucuaggcugcuggucuc

SEQ ID NO: 800957 - RNA, 20 nt, Artificial Sequence
  Synthetic
aaaugaauuuauaaugucuc

SEQ ID NO: 800958 - RNA, 20 nt, Artificial Sequence
  Synthetic
ccaacaaauguacaugucuc

SEQ ID NO: 800959 - RNA, 20 nt, Artificial Sequence
  Synthetic
cuauggguuuuucaugucuc

SEQ ID NO: 800960 - RNA, 20 nt, Artificial Sequence
  Synthetic
aacucaaaaaacacugucuc

SEQ ID NO: 800961 - RNA, 20 nt, Artificial Sequence
  Synthetic
auauaauauaugacugucuc

SEQ ID NO: 800962 - RNA, 20 nt, Artificial Sequence
  Synthetic
uuucaauauuguugugucuc

SEQ ID NO: 800963 - RNA, 20 nt, Artificial Sequence
  Synthetic
uguauuuaaauccuugucuc

SEQ ID NO: 800964 - RNA, 20 nt, Artificial Sequence
  Synthetic
ugaacucacauccuugucuc

SEQ ID NO: 800965 - RNA, 20 nt, Artificial Sequence
  Synthetic
ccuucaugugcaguugucuc

SEQ ID NO: 800966 - RNA, 20 nt, Artificial Sequence
  Synthetic
caucuauccuaauuugucuc

SEQ ID NO: 800967 - RNA, 20 nt, Artificial Sequence
  Synthetic
acuuggggaucauuugucuc

SEQ ID NO: 800968 - RNA, 20 nt, Artificial Sequence
  Synthetic
ccuuauccugaguuugucuc

SEQ ID NO: 800969 - RNA, 20 nt, Artificial Sequence
  Synthetic
uuccacaaacauuuugucuc

SEQ ID NO: 800970 - RNA, 20 nt, Artificial Sequence
  Synthetic
auuagaaaugccaaauucuc

SEQ ID NO: 800971 - RNA, 20 nt, Artificial Sequence
  Synthetic
uguuagagaugcaaauucuc

SEQ ID NO: 800972 - RNA, 20 nt, Artificial Sequence
  Synthetic
uauuagaaaaguaaauucuc

SEQ ID NO: 800973 - RNA, 20 nt, Artificial Sequence
  Synthetic
uuagcauguucccaauucuc

SEQ ID NO: 800974 - RNA, 20 nt, Artificial Sequence
  Synthetic
auguaucuggaagaauucuc

SEQ ID NO: 800975 - RNA, 20 nt, Artificial Sequence
  Synthetic
ugugagcaaugugaauucuc

SEQ ID NO: 800976 - RNA, 20 nt, Artificial Sequence
  Synthetic
acaacuuaaauguaauucuc

SEQ ID NO: 800977 - RNA, 20 nt, Artificial Sequence
  Synthetic
ugacuagccauguaauucuc

SEQ ID NO: 800978 - RNA, 20 nt, Artificial Sequence
  Synthetic
augcaguaaauuuaauucuc

SEQ ID NO: 800979 - RNA, 20 nt, Artificial Sequence
  Synthetic
acauuuaagacaacauucuc

SEQ ID NO: 800980 - RNA, 20 nt, Artificial Sequence
  Synthetic
uucugagauugcacauucuc

SEQ ID NO: 800981 - RNA, 20 nt, Artificial Sequence
  Synthetic
aagaugaaaaauacauucuc

SEQ ID NO: 800982 - RNA, 20 nt, Artificial Sequence
  Synthetic
caauucauuuuuacauucuc

SEQ ID NO: 800983 - RNA, 20 nt, Artificial Sequence
  Synthetic
augguuuucaaaucauucuc

SEQ ID NO: 800984 - RNA, 20 nt, Artificial Sequence
  Synthetic
ugcuguuuuaauucauucuc

SEQ ID NO: 800985 - RNA, 20 nt, Artificial Sequence
  Synthetic
acuuauggaauuagauucuc

SEQ ID NO: 800986 - RNA, 20 nt, Artificial Sequence
  Synthetic
uuuuguccaucaggauucuc

SEQ ID NO: 800987 - RNA, 20 nt, Artificial Sequence
  Synthetic
uauaauuggaucugauucuc

SEQ ID NO: 800988 - RNA, 20 nt, Artificial Sequence
  Synthetic
cuugaaccacagugauucuc

SEQ ID NO: 800989 - RNA, 20 nt, Artificial Sequence
  Synthetic
uccaaaggggaaauauucuc

SEQ ID NO: 800990 - RNA, 20 nt, Artificial Sequence
  Synthetic
caauugcaagugauauucuc

SEQ ID NO: 800991 - RNA, 20 nt, Artificial Sequence
  Synthetic
uaaacauguuuuauauucuc

SEQ ID NO: 800992 - RNA, 20 nt, Artificial Sequence
  Synthetic
uuaaaaaaauuccuauucuc

SEQ ID NO: 800993 - RNA, 20 nt, Artificial Sequence
  Synthetic
cuucauuacaugguauucuc

SEQ ID NO: 800994 - RNA, 20 nt, Artificial Sequence
  Synthetic
uuugcaaauauauuauucuc

SEQ ID NO: 800995 - RNA, 20 nt, Artificial Sequence
  Synthetic
ccuacugugccacacuucuc

SEQ ID NO: 800996 - RNA, 20 nt, Artificial Sequence
  Synthetic
cauuuugcuuuucacuucuc

SEQ ID NO: 800997 - RNA, 20 nt, Artificial Sequence
  Synthetic
ucaucuucagaagacuucuc

SEQ ID NO: 800998 - RNA, 20 nt, Artificial Sequence
  Synthetic
auaaugagaucagacuucuc

SEQ ID NO: 800999 - RNA, 20 nt, Artificial Sequence
  Synthetic
cauaugccaauggacuucuc

SEQ ID NO: 801000 - RNA, 20 nt, Artificial Sequence
  Synthetic
cauaaaggaacugacuucuc

SEQ ID NO: 801001 - RNA, 20 nt, Artificial Sequence
  Synthetic
ucuauacucauuuacuucuc

SEQ ID NO: 801002 - RNA, 20 nt, Artificial Sequence
  Synthetic
cauuuaaaaaaauccuucuc

SEQ ID NO: 801003 - RNA, 20 nt, Artificial Sequence
  Synthetic
cucaaacaaaaguccuucuc

SEQ ID NO: 801004 - RNA, 20 nt, Artificial Sequence
  Synthetic
uaauauucuauuuccuucuc

SEQ ID NO: 801005 - RNA, 20 nt, Artificial Sequence
  Synthetic
ucuugucucucaagcuucuc

SEQ ID NO: 801006 - RNA, 20 nt, Artificial Sequence
  Synthetic
cauaaggagcucagcuucuc

SEQ ID NO: 801007 - RNA, 20 nt, Artificial Sequence
  Synthetic
cuuuucucguuuggcuucuc

SEQ ID NO: 801008 - RNA, 20 nt, Artificial Sequence
  Synthetic
aucucauuaauaaucuucuc

SEQ ID NO: 801009 - RNA, 20 nt, Artificial Sequence
  Synthetic
uuuaugccacacaucuucuc

SEQ ID NO: 801010 - RNA, 20 nt, Artificial Sequence
  Synthetic
acucagaucauuaucuucuc

SEQ ID NO: 801011 - RNA, 20 nt, Artificial Sequence
  Synthetic
aaaagguuauugcucuucuc

SEQ ID NO: 801012 - RNA, 20 nt, Artificial Sequence
  Synthetic
uuuuuuucuuuugucuucuc

SEQ ID NO: 801013 - RNA, 20 nt, Artificial Sequence
  Synthetic
uaauuuuuccuauucuucuc

SEQ ID NO: 801014 - RNA, 20 nt, Artificial Sequence
  Synthetic
ucaacaauaucuuucuucuc

SEQ ID NO: 801015 - RNA, 20 nt, Artificial Sequence
  Synthetic
cucuccaggucuuucuucuc

SEQ ID NO: 801016 - RNA, 20 nt, Artificial Sequence
  Synthetic
ugcaucucuaacaaguucuc

SEQ ID NO: 801017 - RNA, 20 nt, Artificial Sequence
  Synthetic
uucuucucucuguaguucuc

SEQ ID NO: 801018 - RNA, 20 nt, Artificial Sequence
  Synthetic
uuuggcugagggagguucuc

SEQ ID NO: 801019 - RNA, 20 nt, Artificial Sequence
  Synthetic
auuauuguucauagguucuc

SEQ ID NO: 801020 - RNA, 20 nt, Artificial Sequence
  Synthetic
uuuguuuuuuaaugguucuc

SEQ ID NO: 801021 - RNA, 20 nt, Artificial Sequence
  Synthetic
agauacugucaaauguucuc

SEQ ID NO: 801022 - RNA, 20 nt, Artificial Sequence
  Synthetic
aaaccuagauaaauguucuc

SEQ ID NO: 801023 - RNA, 20 nt, Artificial Sequence
  Synthetic
uguagaacauuaauguucuc

SEQ ID NO: 801024 - RNA, 20 nt, Artificial Sequence
  Synthetic
uagccuucuuugauguucuc

SEQ ID NO: 801025 - RNA, 20 nt, Artificial Sequence
  Synthetic
aagauagcaugauuguucuc

SEQ ID NO: 801026 - RNA, 20 nt, Artificial Sequence
  Synthetic
agguugugagccuuguucuc

SEQ ID NO: 801027 - RNA, 20 nt, Artificial Sequence
  Synthetic
aaguuucucaacaauuucuc

SEQ ID NO: 801028 - RNA, 20 nt, Artificial Sequence
  Synthetic
uuuuuuuuuucacauuucuc

SEQ ID NO: 801029 - RNA, 20 nt, Artificial Sequence
  Synthetic
cacugggagucccauuucuc

SEQ ID NO: 801030 - RNA, 20 nt, Artificial Sequence
  Synthetic
auauuaccuguccauuucuc

SEQ ID NO: 801031 - RNA, 20 nt, Artificial Sequence
  Synthetic
aauuuugauuuucauuucuc

SEQ ID NO: 801032 - RNA, 20 nt, Artificial Sequence
  Synthetic
auugucuuuucagauuucuc

SEQ ID NO: 801033 - RNA, 20 nt, Artificial Sequence
  Synthetic
agaaaaauacuugauuucuc

SEQ ID NO: 801034 - RNA, 20 nt, Artificial Sequence
  Synthetic
cuuaguaguaaauauuucuc

SEQ ID NO: 801035 - RNA, 20 nt, Artificial Sequence
  Synthetic
agauagcagauauauuucuc

SEQ ID NO: 801036 - RNA, 20 nt, Artificial Sequence
  Synthetic
augaaccugauauauuucuc

SEQ ID NO: 801037 - RNA, 20 nt, Artificial Sequence
  Synthetic
uaaaauccauucuauuucuc

SEQ ID NO: 801038 - RNA, 20 nt, Artificial Sequence
  Synthetic
uguauauuucuuuauuucuc

SEQ ID NO: 801039 - RNA, 20 nt, Artificial Sequence
  Synthetic
cuugagaaggaaacuuucuc

SEQ ID NO: 801040 - RNA, 20 nt, Artificial Sequence
  Synthetic
cuuagcaacuucacuuucuc

SEQ ID NO: 801041 - RNA, 20 nt, Artificial Sequence
  Synthetic
uauuuacuaguuacuuucuc

SEQ ID NO: 801042 - RNA, 20 nt, Artificial Sequence
  Synthetic
cguuuaauauugccuuucuc

SEQ ID NO: 801043 - RNA, 20 nt, Artificial Sequence
  Synthetic
ugaguaacuccuccuuucuc

SEQ ID NO: 801044 - RNA, 20 nt, Artificial Sequence
  Synthetic
uugaaacauuuuucuuucuc

SEQ ID NO: 801045 - RNA, 20 nt, Artificial Sequence
  Synthetic
cauggugugggaaguuucuc

SEQ ID NO: 801046 - RNA, 20 nt, Artificial Sequence
  Synthetic
aauucuauaaugaguuucuc

SEQ ID NO: 801047 - RNA, 20 nt, Artificial Sequence
  Synthetic
aaggaaagcugucguuucuc

SEQ ID NO: 801048 - RNA, 20 nt, Artificial Sequence
  Synthetic
ucaauuucuccuuguuucuc

SEQ ID NO: 801049 - RNA, 20 nt, Artificial Sequence
  Synthetic
agugcacaugaaauuuucuc

SEQ ID NO: 801050 - RNA, 20 nt, Artificial Sequence
  Synthetic
uugagugcaaccauuuucuc

SEQ ID NO: 801051 - RNA, 20 nt, Artificial Sequence
  Synthetic
uacaagauccuucuuuucuc

SEQ ID NO: 801052 - RNA, 20 nt, Artificial Sequence
  Synthetic
acuuugccaugaguuuucuc

SEQ ID NO: 801053 - RNA, 20 nt, Artificial Sequence
  Synthetic
aauuaccaaaagguuuucuc

SEQ ID NO: 801054 - RNA, 20 nt, Artificial Sequence
  Synthetic
uucaguuucuggguuuucuc

SEQ ID NO: 801055 - RNA, 20 nt, Artificial Sequence
  Synthetic
aacauggacugauuuuucuc

SEQ ID NO: 801056 - RNA, 20 nt, Artificial Sequence
  Synthetic
acaugaucaauauuuuucuc

SEQ ID NO: 801057 - RNA, 20 nt, Artificial Sequence
  Synthetic
acgucuccuguauuuuucuc

SEQ ID NO: 801058 - RNA, 20 nt, Artificial Sequence
  Synthetic
uacucuacccacuuuuucuc

SEQ ID NO: 801059 - RNA, 20 nt, Artificial Sequence
  Synthetic
aguaaucuagucuuuuucuc

SEQ ID NO: 801060 - RNA, 20 nt, Artificial Sequence
  Synthetic
ccccauugcuuguuuuucuc

SEQ ID NO: 801061 - RNA, 20 nt, Artificial Sequence
  Synthetic
auggcaaucauuaaaaaguc

SEQ ID NO: 801062 - RNA, 20 nt, Artificial Sequence
  Synthetic
aaggcgaucauuaaaaaguc

SEQ ID NO: 801063 - RNA, 20 nt, Artificial Sequence
  Synthetic
auggcgaucauuaaaaaguc

SEQ ID NO: 801064 - RNA, 20 nt, Artificial Sequence
  Synthetic
auggugaucauuaaaaaguc

SEQ ID NO: 801065 - RNA, 20 nt, Artificial Sequence
  Synthetic
uaaauaucaucacaaaaguc

SEQ ID NO: 801066 - RNA, 20 nt, Artificial Sequence
  Synthetic
aguuaagcaagccaaaaguc

SEQ ID NO: 801067 - RNA, 20 nt, Artificial Sequence
  Synthetic
aaaaaaucagggcaaaaguc

SEQ ID NO: 801068 - RNA, 20 nt, Artificial Sequence
  Synthetic
auggcgaacauucaaaaguc

SEQ ID NO: 801069 - RNA, 20 nt, Artificial Sequence
  Synthetic
auggcaaucauucaaaaguc

SEQ ID NO: 801070 - RNA, 20 nt, Artificial Sequence
  Synthetic
auuucuuacugugaaaaguc

SEQ ID NO: 801071 - RNA, 20 nt, Artificial Sequence
  Synthetic
auggcaaucauuuaaaaguc

SEQ ID NO: 801072 - RNA, 20 nt, Artificial Sequence
  Synthetic
agauuugaaaaaacaaaguc

SEQ ID NO: 801073 - RNA, 20 nt, Artificial Sequence
  Synthetic
uuaguaacuggcacaaaguc

SEQ ID NO: 801074 - RNA, 20 nt, Artificial Sequence
  Synthetic
uuauaccauuggacaaaguc

SEQ ID NO: 801075 - RNA, 20 nt, Artificial Sequence
  Synthetic
auuaacagggauacaaaguc

SEQ ID NO: 801076 - RNA, 20 nt, Artificial Sequence
  Synthetic
ugccucugauucccaaaguc

SEQ ID NO: 801077 - RNA, 20 nt, Artificial Sequence
  Synthetic
cucagcucaguuucaaaguc

SEQ ID NO: 801078 - RNA, 20 nt, Artificial Sequence
  Synthetic
aagaaggaaagaagaaaguc

SEQ ID NO: 801079 - RNA, 20 nt, Artificial Sequence
  Synthetic
uuaauucccuggagaaaguc

SEQ ID NO: 801080 - RNA, 20 nt, Artificial Sequence
  Synthetic
uuggagaaaaugagaaaguc

SEQ ID NO: 801081 - RNA, 20 nt, Artificial Sequence
  Synthetic
ugauagaauuauagaaaguc

SEQ ID NO: 801082 - RNA, 20 nt, Artificial Sequence
  Synthetic
aagagggcagccugaaaguc

SEQ ID NO: 801083 - RNA, 20 nt, Artificial Sequence
  Synthetic
caugagcuuuguuuaaaguc

SEQ ID NO: 801084 - RNA, 20 nt, Artificial Sequence
  Synthetic
agcaguugcauauacaaguc

SEQ ID NO: 801085 - RNA, 20 nt, Artificial Sequence
  Synthetic
cagguuuaaaagaccaaguc

SEQ ID NO: 801086 - RNA, 20 nt, Artificial Sequence
  Synthetic
aauuugcuaaggagcaaguc

SEQ ID NO: 801087 - RNA, 20 nt, Artificial Sequence
  Synthetic
ugauuaacuuccugcaaguc

SEQ ID NO: 801088 - RNA, 20 nt, Artificial Sequence
  Synthetic
ucuggagaaauacucaaguc

SEQ ID NO: 801089 - RNA, 20 nt, Artificial Sequence
  Synthetic
auaucuaaguccuucaaguc

SEQ ID NO: 801090 - RNA, 20 nt, Artificial Sequence
  Synthetic
agaaaauaagcauagaaguc

SEQ ID NO: 801091 - RNA, 20 nt, Artificial Sequence
  Synthetic
uccugguacauauagaaguc

SEQ ID NO: 801092 - RNA, 20 nt, Artificial Sequence
  Synthetic
cucauauaaaacuagaaguc

SEQ ID NO: 801093 - RNA, 20 nt, Artificial Sequence
  Synthetic
uagaggugguauuagaaguc

SEQ ID NO: 801094 - RNA, 20 nt, Artificial Sequence
  Synthetic
uauugcagaguggcgaaguc

SEQ ID NO: 801095 - RNA, 20 nt, Artificial Sequence
  Synthetic
aggcaggaaggaaggaaguc

SEQ ID NO: 801096 - RNA, 20 nt, Artificial Sequence
  Synthetic
uuccugcaagucaggaaguc

SEQ ID NO: 801097 - RNA, 20 nt, Artificial Sequence
  Synthetic
uugucaccaagagggaaguc

SEQ ID NO: 801098 - RNA, 20 nt, Artificial Sequence
  Synthetic
acacuagcugcauggaaguc

SEQ ID NO: 801099 - RNA, 20 nt, Artificial Sequence
  Synthetic
cugcaugcaugcaugaaguc

SEQ ID NO: 801100 - RNA, 20 nt, Artificial Sequence
  Synthetic
aauguaggcuugaugaaguc

SEQ ID NO: 801101 - RNA, 20 nt, Artificial Sequence
  Synthetic
cuggaaaggggacugaaguc

SEQ ID NO: 801102 - RNA, 20 nt, Artificial Sequence
  Synthetic
uggguggaucaccugaaguc

SEQ ID NO: 801103 - RNA, 20 nt, Artificial Sequence
  Synthetic
uuauaguauaguuugaaguc

SEQ ID NO: 801104 - RNA, 20 nt, Artificial Sequence
  Synthetic
uuguaguauaguuugaaguc

SEQ ID NO: 801105 - RNA, 20 nt, Artificial Sequence
  Synthetic
cuuuaguauaguuugaaguc

SEQ ID NO: 801106 - RNA, 20 nt, Artificial Sequence
  Synthetic
aaccaaaaagaaaauaaguc

SEQ ID NO: 801107 - RNA, 20 nt, Artificial Sequence
  Synthetic
auuuuaaguuuaccuaaguc

SEQ ID NO: 801108 - RNA, 20 nt, Artificial Sequence
  Synthetic
uagaaaguuaucucuaaguc

SEQ ID NO: 801109 - RNA, 20 nt, Artificial Sequence
  Synthetic
cuuccaaauuauucuaaguc

SEQ ID NO: 801110 - RNA, 20 nt, Artificial Sequence
  Synthetic
agaauggagagagguaaguc

SEQ ID NO: 801111 - RNA, 20 nt, Artificial Sequence
  Synthetic
agacagauuuuugguaaguc

SEQ ID NO: 801112 - RNA, 20 nt, Artificial Sequence
  Synthetic
uuaguuuuuucuuguaaguc

SEQ ID NO: 801113 - RNA, 20 nt, Artificial Sequence
  Synthetic
uaucuguaggcagaacaguc

SEQ ID NO: 801114 - RNA, 20 nt, Artificial Sequence
  Synthetic
uugagaaaggcuucacaguc

SEQ ID NO: 801115 - RNA, 20 nt, Artificial Sequence
  Synthetic
ucaggaguucaagaccaguc

SEQ ID NO: 801116 - RNA, 20 nt, Artificial Sequence
  Synthetic
ccaggaguucgagaccaguc

SEQ ID NO: 801117 - RNA, 20 nt, Artificial Sequence
  Synthetic
ccagaaguuugagaccaguc

SEQ ID NO: 801118 - RNA, 20 nt, Artificial Sequence
  Synthetic
aagaaucaccucacccaguc

SEQ ID NO: 801119 - RNA, 20 nt, Artificial Sequence
  Synthetic
ucucgcucugucacccaguc

SEQ ID NO: 801120 - RNA, 20 nt, Artificial Sequence
  Synthetic
cugggaggugucucccaguc

SEQ ID NO: 801121 - RNA, 20 nt, Artificial Sequence
  Synthetic
uuucaccauguuggccaguc

SEQ ID NO: 801122 - RNA, 20 nt, Artificial Sequence
  Synthetic
aaacagagucaucuccaguc

SEQ ID NO: 801123 - RNA, 20 nt, Artificial Sequence
  Synthetic
cacucauccuagaagcaguc

SEQ ID NO: 801124 - RNA, 20 nt, Artificial Sequence
  Synthetic
uuuacuuuauugcagcaguc

SEQ ID NO: 801125 - RNA, 20 nt, Artificial Sequence
  Synthetic
uucugggcaucagagcaguc

SEQ ID NO: 801126 - RNA, 20 nt, Artificial Sequence
  Synthetic
ugauguugaugcuagcaguc

SEQ ID NO: 801127 - RNA, 20 nt, Artificial Sequence
  Synthetic
cgauuuaaacucaggcaguc

SEQ ID NO: 801128 - RNA, 20 nt, Artificial Sequence
  Synthetic
auguuuuauauauggcaguc

SEQ ID NO: 801129 - RNA, 20 nt, Artificial Sequence
  Synthetic
aagaaggacauuuugcaguc

SEQ ID NO: 801130 - RNA, 20 nt, Artificial Sequence
  Synthetic
uaaucuauucaccaucaguc

SEQ ID NO: 801131 - RNA, 20 nt, Artificial Sequence
  Synthetic
aucaaugucaggcaucaguc

SEQ ID NO: 801132 - RNA, 20 nt, Artificial Sequence
  Synthetic
aaaaagaacaaagaucaguc

SEQ ID NO: 801133 - RNA, 20 nt, Artificial Sequence
  Synthetic
ucaggcguuugagaucaguc

SEQ ID NO: 801134 - RNA, 20 nt, Artificial Sequence
  Synthetic
ucucacucugucacucaguc

SEQ ID NO: 801135 - RNA, 20 nt, Artificial Sequence
  Synthetic
ccucugagaccaccucaguc

SEQ ID NO: 801136 - RNA, 20 nt, Artificial Sequence
  Synthetic
cagaagagaugaccucaguc

SEQ ID NO: 801137 - RNA, 20 nt, Artificial Sequence
  Synthetic
accuuuuccucuccucaguc

SEQ ID NO: 801138 - RNA, 20 nt, Artificial Sequence
  Synthetic
aucaucaaaauuccucaguc

SEQ ID NO: 801139 - RNA, 20 nt, Artificial Sequence
  Synthetic
uuucuccauguugcucaguc

SEQ ID NO: 801140 - RNA, 20 nt, Artificial Sequence
  Synthetic
acaguuugggggucucaguc

SEQ ID NO: 801141 - RNA, 20 nt, Artificial Sequence
  Synthetic
ucaaaccaucguagucaguc

SEQ ID NO: 801142 - RNA, 20 nt, Artificial Sequence
  Synthetic
ccaucaagugauggucaguc

SEQ ID NO: 801143 - RNA, 20 nt, Artificial Sequence
  Synthetic
uuauuugcuuuucuucaguc

SEQ ID NO: 801144 - RNA, 20 nt, Artificial Sequence
  Synthetic
cauugcuaucaauuucaguc

SEQ ID NO: 801145 - RNA, 20 nt, Artificial Sequence
  Synthetic
uagguaaguuuuuaagaguc

SEQ ID NO: 801146 - RNA, 20 nt, Artificial Sequence
  Synthetic
uuuuuuuuugaggcagaguc

SEQ ID NO: 801147 - RNA, 20 nt, Artificial Sequence
  Synthetic
acaaucuaccuugcagaguc

SEQ ID NO: 801148 - RNA, 20 nt, Artificial Sequence
  Synthetic
aaaucugcaguuagagaguc

SEQ ID NO: 801149 - RNA, 20 nt, Artificial Sequence
  Synthetic
ugcugccaguauggagaguc

SEQ ID NO: 801150 - RNA, 20 nt, Artificial Sequence
  Synthetic
aagucaggacagugagaguc

SEQ ID NO: 801151 - RNA, 20 nt, Artificial Sequence
  Synthetic
uuguuacaggaacuagaguc

SEQ ID NO: 801152 - RNA, 20 nt, Artificial Sequence
  Synthetic
uuacaaagcacucuagaguc

SEQ ID NO: 801153 - RNA, 20 nt, Artificial Sequence
  Synthetic
aucccaaauuucuuagaguc

SEQ ID NO: 801154 - RNA, 20 nt, Artificial Sequence
  Synthetic
uuaaacuuuauuuuagaguc

SEQ ID NO: 801155 - RNA, 20 nt, Artificial Sequence
  Synthetic
ucuugcuauuuugccgaguc

SEQ ID NO: 801156 - RNA, 20 nt, Artificial Sequence
  Synthetic
auuggugauugcaaggaguc

SEQ ID NO: 801157 - RNA, 20 nt, Artificial Sequence
  Synthetic
caagaugaaaacagggaguc

SEQ ID NO: 801158 - RNA, 20 nt, Artificial Sequence
  Synthetic
cacuacaaagucauggaguc

SEQ ID NO: 801159 - RNA, 20 nt, Artificial Sequence
  Synthetic
ucuuuuuuugagauggaguc

SEQ ID NO: 801160 - RNA, 20 nt, Artificial Sequence
  Synthetic
aaagaaugaacucuggaguc

SEQ ID NO: 801161 - RNA, 20 nt, Artificial Sequence
  Synthetic
acuaucuaaagaaaugaguc

SEQ ID NO: 801162 - RNA, 20 nt, Artificial Sequence
  Synthetic
aguccauuggcauaugaguc

SEQ ID NO: 801163 - RNA, 20 nt, Artificial Sequence
  Synthetic
uuuaaugaauacuaugaguc

SEQ ID NO: 801164 - RNA, 20 nt, Artificial Sequence
  Synthetic
uuacaaggagaagcugaguc

SEQ ID NO: 801165 - RNA, 20 nt, Artificial Sequence
  Synthetic
uccugucuaccagcugaguc

SEQ ID NO: 801166 - RNA, 20 nt, Artificial Sequence
  Synthetic
acacuuugggaggcugaguc

SEQ ID NO: 801167 - RNA, 20 nt, Artificial Sequence
  Synthetic
aucugaagccaaucugaguc

SEQ ID NO: 801168 - RNA, 20 nt, Artificial Sequence
  Synthetic
auaccuuugcguugugaguc

SEQ ID NO: 801169 - RNA, 20 nt, Artificial Sequence
  Synthetic
ucaagugagagacuugaguc

SEQ ID NO: 801170 - RNA, 20 nt, Artificial Sequence
  Synthetic
agaguaugggcucuugaguc

SEQ ID NO: 801171 - RNA, 20 nt, Artificial Sequence
  Synthetic
cagaaucaaauauaauaguc

SEQ ID NO: 801172 - RNA, 20 nt, Artificial Sequence
  Synthetic
aacauccagaauucauaguc

SEQ ID NO: 801173 - RNA, 20 nt, Artificial Sequence
  Synthetic
auauaccacuuacuauaguc

SEQ ID NO: 801174 - RNA, 20 nt, Artificial Sequence
  Synthetic
aaccucagguaauuauaguc

SEQ ID NO: 801175 - RNA, 20 nt, Artificial Sequence
  Synthetic
agaaacuaugguuuauaguc

SEQ ID NO: 801176 - RNA, 20 nt, Artificial Sequence
  Synthetic
acuuuugaauaggacuaguc

SEQ ID NO: 801177 - RNA, 20 nt, Artificial Sequence
  Synthetic
aaauuuauauuuaucuaguc

SEQ ID NO: 801178 - RNA, 20 nt, Artificial Sequence
  Synthetic
aaaaggauagaagucuaguc

SEQ ID NO: 801179 - RNA, 20 nt, Artificial Sequence
  Synthetic
aacauuauuucauaguaguc

SEQ ID NO: 801180 - RNA, 20 nt, Artificial Sequence
  Synthetic
aaauguacacauggguaguc

SEQ ID NO: 801181 - RNA, 20 nt, Artificial Sequence
  Synthetic
uaacuuuuaaaccuguaguc

SEQ ID NO: 801182 - RNA, 20 nt, Artificial Sequence
  Synthetic
cuuccauuuccaaauuaguc

SEQ ID NO: 801183 - RNA, 20 nt, Artificial Sequence
  Synthetic
ugagcagucauaaauuaguc

SEQ ID NO: 801184 - RNA, 20 nt, Artificial Sequence
  Synthetic
cccuuuuuucuucauuaguc

SEQ ID NO: 801185 - RNA, 20 nt, Artificial Sequence
  Synthetic
aauaaugccucugauuaguc

SEQ ID NO: 801186 - RNA, 20 nt, Artificial Sequence
  Synthetic
caaaagugaguguauuaguc

SEQ ID NO: 801187 - RNA, 20 nt, Artificial Sequence
  Synthetic
ucuuuucuucuuuauuaguc

SEQ ID NO: 801188 - RNA, 20 nt, Artificial Sequence
  Synthetic
cgggugguacuaucuuaguc

SEQ ID NO: 801189 - RNA, 20 nt, Artificial Sequence
  Synthetic
ugcccuguacucucuuaguc

SEQ ID NO: 801190 - RNA, 20 nt, Artificial Sequence
  Synthetic
ugucagcccuugucuuaguc

SEQ ID NO: 801191 - RNA, 20 nt, Artificial Sequence
  Synthetic
augagaauaauuucuuaguc

SEQ ID NO: 801192 - RNA, 20 nt, Artificial Sequence
  Synthetic
agggguuaaaaacuuuaguc

SEQ ID NO: 801193 - RNA, 20 nt, Artificial Sequence
  Synthetic
ugcuugacuaaacuuuaguc

SEQ ID NO: 801194 - RNA, 20 nt, Artificial Sequence
  Synthetic
cagauuucauuaguuuaguc

SEQ ID NO: 801195 - RNA, 20 nt, Artificial Sequence
  Synthetic
aguaacagcuggguuuaguc

SEQ ID NO: 801196 - RNA, 20 nt, Artificial Sequence
  Synthetic
auaaaacuaacauuuuaguc

SEQ ID NO: 801197 - RNA, 20 nt, Artificial Sequence
  Synthetic
uacuugcucauuuuuuaguc

SEQ ID NO: 801198 - RNA, 20 nt, Artificial Sequence
  Synthetic
caaguggcaauaacaacguc

SEQ ID NO: 801199 - RNA, 20 nt, Artificial Sequence
  Synthetic
aaaguaauuugacuaacguc

SEQ ID NO: 801200 - RNA, 20 nt, Artificial Sequence
  Synthetic
caggcggccgccaccacguc

SEQ ID NO: 801201 - RNA, 20 nt, Artificial Sequence
  Synthetic
ugggacuacaggcccacguc

SEQ ID NO: 801202 - RNA, 20 nt, Artificial Sequence
  Synthetic
ugggcgcgguggcucacguc

SEQ ID NO: 801203 - RNA, 20 nt, Artificial Sequence
  Synthetic
caggcaugugccacgacguc

SEQ ID NO: 801204 - RNA, 20 nt, Artificial Sequence
  Synthetic
accauucauuguugaccguc

SEQ ID NO: 801205 - RNA, 20 nt, Artificial Sequence
  Synthetic
aauucagcugugaauccguc

SEQ ID NO: 801206 - RNA, 20 nt, Artificial Sequence
  Synthetic
aauucggcugugaauccguc

SEQ ID NO: 801207 - RNA, 20 nt, Artificial Sequence
  Synthetic
cugcauugagcaaguccguc

SEQ ID NO: 801208 - RNA, 20 nt, Artificial Sequence
  Synthetic
uuagcaaccuuaauuccguc

SEQ ID NO: 801209 - RNA, 20 nt, Artificial Sequence
  Synthetic
aaaaguagaaugacagcguc

SEQ ID NO: 801210 - RNA, 20 nt, Artificial Sequence
  Synthetic
acaggggcaggacuugcguc

SEQ ID NO: 801211 - RNA, 20 nt, Artificial Sequence
  Synthetic
uuucagaauuugaagucguc

SEQ ID NO: 801212 - RNA, 20 nt, Artificial Sequence
  Synthetic
aagaauucccauuugucguc

SEQ ID NO: 801213 - RNA, 20 nt, Artificial Sequence
  Synthetic
aaacaagaauugaaaagguc

SEQ ID NO: 801214 - RNA, 20 nt, Artificial Sequence
  Synthetic
aguguccuauguaaaagguc

SEQ ID NO: 801215 - RNA, 20 nt, Artificial Sequence
  Synthetic
auggagaauagucaaagguc

SEQ ID NO: 801216 - RNA, 20 nt, Artificial Sequence
  Synthetic
agguucgucugggaaagguc

SEQ ID NO: 801217 - RNA, 20 nt, Artificial Sequence
  Synthetic
ugagcuuuuuuuucaagguc

SEQ ID NO: 801218 - RNA, 20 nt, Artificial Sequence
  Synthetic
uuuuagugaagaagaagguc

SEQ ID NO: 801219 - RNA, 20 nt, Artificial Sequence
  Synthetic
uucuaagaacuuagaagguc

SEQ ID NO: 801220 - RNA, 20 nt, Artificial Sequence
  Synthetic
aaaugaauaaaaauaagguc

SEQ ID NO: 801221 - RNA, 20 nt, Artificial Sequence
  Synthetic
uuguugauauuuauaagguc

SEQ ID NO: 801222 - RNA, 20 nt, Artificial Sequence
  Synthetic
ucacaaguaaucuuaagguc

SEQ ID NO: 801223 - RNA, 20 nt, Artificial Sequence
  Synthetic
acugugacucauuacagguc

SEQ ID NO: 801224 - RNA, 20 nt, Artificial Sequence
  Synthetic
auaacuugcauagccagguc

SEQ ID NO: 801225 - RNA, 20 nt, Artificial Sequence
  Synthetic
uuucucaaucacuccagguc

SEQ ID NO: 801226 - RNA, 20 nt, Artificial Sequence
  Synthetic
auaaaacaaaugugcagguc

SEQ ID NO: 801227 - RNA, 20 nt, Artificial Sequence
  Synthetic
cagguuagggaaaucagguc

SEQ ID NO: 801228 - RNA, 20 nt, Artificial Sequence
  Synthetic
uuaucuauucccaagagguc

SEQ ID NO: 801229 - RNA, 20 nt, Artificial Sequence
  Synthetic
aaaggaaagcagaagagguc

SEQ ID NO: 801230 - RNA, 20 nt, Artificial Sequence
  Synthetic
agucaguugguugagagguc

SEQ ID NO: 801231 - RNA, 20 nt, Artificial Sequence
  Synthetic
agugggcggaccacgagguc

SEQ ID NO: 801232 - RNA, 20 nt, Artificial Sequence
  Synthetic
agcagguggaucacgagguc

SEQ ID NO: 801233 - RNA, 20 nt, Artificial Sequence
  Synthetic
aaaauguguuaaccgagguc

SEQ ID NO: 801234 - RNA, 20 nt, Artificial Sequence
  Synthetic
ugggcggaacacucgagguc

SEQ ID NO: 801235 - RNA, 20 nt, Artificial Sequence
  Synthetic
caggcuuauuucaggagguc

SEQ ID NO: 801236 - RNA, 20 nt, Artificial Sequence
  Synthetic
agcuucuaauuggggagguc

SEQ ID NO: 801237 - RNA, 20 nt, Artificial Sequence
  Synthetic
uuagcugcaacaaugagguc

SEQ ID NO: 801238 - RNA, 20 nt, Artificial Sequence
  Synthetic
agcggguggaucaugagguc

SEQ ID NO: 801239 - RNA, 20 nt, Artificial Sequence
  Synthetic
cgggcgcaucaccugagguc

SEQ ID NO: 801240 - RNA, 20 nt, Artificial Sequence
  Synthetic
agggcagaucaccugagguc

SEQ ID NO: 801241 - RNA, 20 nt, Artificial Sequence
  Synthetic
ugggcagaucaccugagguc

SEQ ID NO: 801242 - RNA, 20 nt, Artificial Sequence
  Synthetic
caaacggaucaccugagguc

SEQ ID NO: 801243 - RNA, 20 nt, Artificial Sequence
  Synthetic
caggcggaucaccugagguc

SEQ ID NO: 801244 - RNA, 20 nt, Artificial Sequence
  Synthetic
ugggcggaucaccugagguc

SEQ ID NO: 801245 - RNA, 20 nt, Artificial Sequence
  Synthetic
cagguggaucaccugagguc

SEQ ID NO: 801246 - RNA, 20 nt, Artificial Sequence
  Synthetic
aggguggaucaccugagguc

SEQ ID NO: 801247 - RNA, 20 nt, Artificial Sequence
  Synthetic
uggguggaucaccugagguc

SEQ ID NO: 801248 - RNA, 20 nt, Artificial Sequence
  Synthetic
cagccugaucaccugagguc

SEQ ID NO: 801249 - RNA, 20 nt, Artificial Sequence
  Synthetic
cggguguaucaccugagguc

SEQ ID NO: 801250 - RNA, 20 nt, Artificial Sequence
  Synthetic
ugggcagaucaucugagguc

SEQ ID NO: 801251 - RNA, 20 nt, Artificial Sequence
  Synthetic
uggauggaucaucugagguc

SEQ ID NO: 801252 - RNA, 20 nt, Artificial Sequence
  Synthetic
uuuacacuccuucugagguc

SEQ ID NO: 801253 - RNA, 20 nt, Artificial Sequence
  Synthetic
uggguggaacacuugagguc

SEQ ID NO: 801254 - RNA, 20 nt, Artificial Sequence
  Synthetic
agggcagaucacuugagguc

SEQ ID NO: 801255 - RNA, 20 nt, Artificial Sequence
  Synthetic
cgggcagaucacuugagguc

SEQ ID NO: 801256 - RNA, 20 nt, Artificial Sequence
  Synthetic
cugacggaucacuugagguc

SEQ ID NO: 801257 - RNA, 20 nt, Artificial Sequence
  Synthetic
caggcggaucacuugagguc

SEQ ID NO: 801258 - RNA, 20 nt, Artificial Sequence
  Synthetic
ugggcggaucacuugagguc

SEQ ID NO: 801259 - RNA, 20 nt, Artificial Sequence
  Synthetic
cagguggaucacuugagguc

SEQ ID NO: 801260 - RNA, 20 nt, Artificial Sequence
  Synthetic
uagguggaucacuugagguc

SEQ ID NO: 801261 - RNA, 20 nt, Artificial Sequence
  Synthetic
cgggcacaucauuugagguc

SEQ ID NO: 801262 - RNA, 20 nt, Artificial Sequence
  Synthetic
caggcagaucauuugagguc

SEQ ID NO: 801263 - RNA, 20 nt, Artificial Sequence
  Synthetic
ucaguuucaaagucuagguc

SEQ ID NO: 801264 - RNA, 20 nt, Artificial Sequence
  Synthetic
ugaugcugauucaguagguc

SEQ ID NO: 801265 - RNA, 20 nt, Artificial Sequence
  Synthetic
acucauagguucuguagguc

SEQ ID NO: 801266 - RNA, 20 nt, Artificial Sequence
  Synthetic
aaugauguauuuuaccgguc

SEQ ID NO: 801267 - RNA, 20 nt, Artificial Sequence
  Synthetic
ugguugugcgacgugcgguc

SEQ ID NO: 801268 - RNA, 20 nt, Artificial Sequence
  Synthetic
auuuuugcaugaggucgguc

SEQ ID NO: 801269 - RNA, 20 nt, Artificial Sequence
  Synthetic
uggguuucagcaugucgguc

SEQ ID NO: 801270 - RNA, 20 nt, Artificial Sequence
  Synthetic
uuccuggugccaaaaggguc

SEQ ID NO: 801271 - RNA, 20 nt, Artificial Sequence
  Synthetic
auuauuaaaugagaaggguc

SEQ ID NO: 801272 - RNA, 20 nt, Artificial Sequence
  Synthetic
uguucacaguucuaaggguc

SEQ ID NO: 801273 - RNA, 20 nt, Artificial Sequence
  Synthetic
auacucaggcaaacaggguc

SEQ ID NO: 801274 - RNA, 20 nt, Artificial Sequence
  Synthetic
aauaauaaucacacaggguc

SEQ ID NO: 801275 - RNA, 20 nt, Artificial Sequence
  Synthetic
aggcgggugaccacaggguc

SEQ ID NO: 801276 - RNA, 20 nt, Artificial Sequence
  Synthetic
aaacagugguuaccaggguc

SEQ ID NO: 801277 - RNA, 20 nt, Artificial Sequence
  Synthetic
ccauucuugcugccaggguc

SEQ ID NO: 801278 - RNA, 20 nt, Artificial Sequence
  Synthetic
cugugugaagaagcaggguc

SEQ ID NO: 801279 - RNA, 20 nt, Artificial Sequence
  Synthetic
cuauugcucaaaggaggguc

SEQ ID NO: 801280 - RNA, 20 nt, Artificial Sequence
  Synthetic
uucaguccugaaaagggguc

SEQ ID NO: 801281 - RNA, 20 nt, Artificial Sequence
  Synthetic
ccccggaagcacaagggguc

SEQ ID NO: 801282 - RNA, 20 nt, Artificial Sequence
  Synthetic
uugagagcugucuagggguc

SEQ ID NO: 801283 - RNA, 20 nt, Artificial Sequence
  Synthetic
aaacugggauuaacgggguc

SEQ ID NO: 801284 - RNA, 20 nt, Artificial Sequence
  Synthetic
accuucagggagacgggguc

SEQ ID NO: 801285 - RNA, 20 nt, Artificial Sequence
  Synthetic
agucaggaggcacggggguc

SEQ ID NO: 801286 - RNA, 20 nt, Artificial Sequence
  Synthetic
uaugguagacacaugggguc

SEQ ID NO: 801287 - RNA, 20 nt, Artificial Sequence
  Synthetic
caaggaauaaaagugggguc

SEQ ID NO: 801288 - RNA, 20 nt, Artificial Sequence
  Synthetic
cuggggacuguggugggguc

SEQ ID NO: 801289 - RNA, 20 nt, Artificial Sequence
  Synthetic
cgcucuaccauugugggguc

SEQ ID NO: 801290 - RNA, 20 nt, Artificial Sequence
  Synthetic
ccagggccuguugugggguc

SEQ ID NO: 801291 - RNA, 20 nt, Artificial Sequence
  Synthetic
agccuaggccuacauggguc

SEQ ID NO: 801292 - RNA, 20 nt, Artificial Sequence
  Synthetic
auuuuuucuuuaucuggguc

SEQ ID NO: 801293 - RNA, 20 nt, Artificial Sequence
  Synthetic
uuagucauuuguucuggguc

SEQ ID NO: 801294 - RNA, 20 nt, Artificial Sequence
  Synthetic
ugagacuagaggaguggguc

SEQ ID NO: 801295 - RNA, 20 nt, Artificial Sequence
  Synthetic
ucagaaagcgguaguggguc

SEQ ID NO: 801296 - RNA, 20 nt, Artificial Sequence
  Synthetic
aaagaaaagacagguggguc

SEQ ID NO: 801297 - RNA, 20 nt, Artificial Sequence
  Synthetic
aaagugcucuucuguggguc

SEQ ID NO: 801298 - RNA, 20 nt, Artificial Sequence
  Synthetic
cuaaaacagagauuuggguc

SEQ ID NO: 801299 - RNA, 20 nt, Artificial Sequence
  Synthetic
cuauccuucaaagaaugguc

SEQ ID NO: 801300 - RNA, 20 nt, Artificial Sequence
  Synthetic
ucagaugaguccccaugguc

SEQ ID NO: 801301 - RNA, 20 nt, Artificial Sequence
  Synthetic
uucucauggugcuuaugguc

SEQ ID NO: 801302 - RNA, 20 nt, Artificial Sequence
  Synthetic
uugagccaccccaccugguc

SEQ ID NO: 801303 - RNA, 20 nt, Artificial Sequence
  Synthetic
cuccucauaccauccugguc

SEQ ID NO: 801304 - RNA, 20 nt, Artificial Sequence
  Synthetic
uauauuuuuauuuccugguc

SEQ ID NO: 801305 - RNA, 20 nt, Artificial Sequence
  Synthetic
ucaccuuggccaggcugguc

SEQ ID NO: 801306 - RNA, 20 nt, Artificial Sequence
  Synthetic
uaagggccaaagcucugguc

SEQ ID NO: 801307 - RNA, 20 nt, Artificial Sequence
  Synthetic
uuucaaaucauucucugguc

SEQ ID NO: 801308 - RNA, 20 nt, Artificial Sequence
  Synthetic
uggagaaugucuuagugguc

SEQ ID NO: 801309 - RNA, 20 nt, Artificial Sequence
  Synthetic
uaagcugaaaggacgugguc

SEQ ID NO: 801310 - RNA, 20 nt, Artificial Sequence
  Synthetic
cucacuuuauuauggugguc

SEQ ID NO: 801311 - RNA, 20 nt, Artificial Sequence
  Synthetic
aaaagcuguucauugugguc

SEQ ID NO: 801312 - RNA, 20 nt, Artificial Sequence
  Synthetic
uuuauaaccuguuugugguc

SEQ ID NO: 801313 - RNA, 20 nt, Artificial Sequence
  Synthetic
uaaaaacagaaaaauugguc

SEQ ID NO: 801314 - RNA, 20 nt, Artificial Sequence
  Synthetic
ucauucuuuugaaauugguc

SEQ ID NO: 801315 - RNA, 20 nt, Artificial Sequence
  Synthetic
acauucuauaggaauugguc

SEQ ID NO: 801316 - RNA, 20 nt, Artificial Sequence
  Synthetic
uauuuaagaaauaauugguc

SEQ ID NO: 801317 - RNA, 20 nt, Artificial Sequence
  Synthetic
agagcuccaugacauugguc

SEQ ID NO: 801318 - RNA, 20 nt, Artificial Sequence
  Synthetic
aauauuuuucuuucuugguc

SEQ ID NO: 801319 - RNA, 20 nt, Artificial Sequence
  Synthetic
ugguugaaaagaaguugguc

SEQ ID NO: 801320 - RNA, 20 nt, Artificial Sequence
  Synthetic
aaauacugauuaaguugguc

SEQ ID NO: 801321 - RNA, 20 nt, Artificial Sequence
  Synthetic
aguuucugugucaguugguc

SEQ ID NO: 801322 - RNA, 20 nt, Artificial Sequence
  Synthetic
caggguuucacauguugguc

SEQ ID NO: 801323 - RNA, 20 nt, Artificial Sequence
  Synthetic
aggguuucaccauguugguc

SEQ ID NO: 801324 - RNA, 20 nt, Artificial Sequence
  Synthetic
agaguuucuccauguugguc

SEQ ID NO: 801325 - RNA, 20 nt, Artificial Sequence
  Synthetic
acgguuucuccauguugguc

SEQ ID NO: 801326 - RNA, 20 nt, Artificial Sequence
  Synthetic
auugaauaaauaauuugguc

SEQ ID NO: 801327 - RNA, 20 nt, Artificial Sequence
  Synthetic
ugccagccacuucuuugguc

SEQ ID NO: 801328 - RNA, 20 nt, Artificial Sequence
  Synthetic
aucauggauggauuuugguc

SEQ ID NO: 801329 - RNA, 20 nt, Artificial Sequence
  Synthetic
aaaccuuuuuuuuuuugguc

SEQ ID NO: 801330 - RNA, 20 nt, Artificial Sequence
  Synthetic
aguuccugauucaaaauguc

SEQ ID NO: 801331 - RNA, 20 nt, Artificial Sequence
  Synthetic
agagagaaaauuaaaauguc

SEQ ID NO: 801332 - RNA, 20 nt, Artificial Sequence
  Synthetic
aguacuagaauuaaaauguc

SEQ ID NO: 801333 - RNA, 20 nt, Artificial Sequence
  Synthetic
aaacuagaucuccaaauguc

SEQ ID NO: 801334 - RNA, 20 nt, Artificial Sequence
  Synthetic
aagggacauuuggaaauguc

SEQ ID NO: 801335 - RNA, 20 nt, Artificial Sequence
  Synthetic
aaguuaaaauucacaauguc

SEQ ID NO: 801336 - RNA, 20 nt, Artificial Sequence
  Synthetic
ugauaguucacuacaauguc

SEQ ID NO: 801337 - RNA, 20 nt, Artificial Sequence
  Synthetic
uuauugugaagaccaauguc

SEQ ID NO: 801338 - RNA, 20 nt, Artificial Sequence
  Synthetic
aguaucaauuaaucaauguc

SEQ ID NO: 801339 - RNA, 20 nt, Artificial Sequence
  Synthetic
aaccaaaaagaaagaauguc

SEQ ID NO: 801340 - RNA, 20 nt, Artificial Sequence
  Synthetic
cuuuaaaaacuacgaauguc

SEQ ID NO: 801341 - RNA, 20 nt, Artificial Sequence
  Synthetic
ccaccccaaccaggaauguc

SEQ ID NO: 801342 - RNA, 20 nt, Artificial Sequence
  Synthetic
acauuauucugaggaauguc

SEQ ID NO: 801343 - RNA, 20 nt, Artificial Sequence
  Synthetic
ccaauucuucuuugaauguc

SEQ ID NO: 801344 - RNA, 20 nt, Artificial Sequence
  Synthetic
aaccagcaccaccuaauguc

SEQ ID NO: 801345 - RNA, 20 nt, Artificial Sequence
  Synthetic
cauuucucauagcuaauguc

SEQ ID NO: 801346 - RNA, 20 nt, Artificial Sequence
  Synthetic
aggagacauuugguaauguc

SEQ ID NO: 801347 - RNA, 20 nt, Artificial Sequence
  Synthetic
uucauuuuuuucuuaauguc

SEQ ID NO: 801348 - RNA, 20 nt, Artificial Sequence
  Synthetic
cgaucuucauuguuaauguc

SEQ ID NO: 801349 - RNA, 20 nt, Artificial Sequence
  Synthetic
aauauaugcucuuuaauguc

SEQ ID NO: 801350 - RNA, 20 nt, Artificial Sequence
  Synthetic
uucuaacgccaaaacauguc

SEQ ID NO: 801351 - RNA, 20 nt, Artificial Sequence
  Synthetic
caaacacaggcacacauguc

SEQ ID NO: 801352 - RNA, 20 nt, Artificial Sequence
  Synthetic
cucuuuuuuggauacauguc

SEQ ID NO: 801353 - RNA, 20 nt, Artificial Sequence
  Synthetic
caggcgccugccaccauguc

SEQ ID NO: 801354 - RNA, 20 nt, Artificial Sequence
  Synthetic
auuagagaaaaaugcauguc

SEQ ID NO: 801355 - RNA, 20 nt, Artificial Sequence
  Synthetic
aaguuuuuauucaucauguc

SEQ ID NO: 801356 - RNA, 20 nt, Artificial Sequence
  Synthetic
uaaacacaauguaucauguc

SEQ ID NO: 801357 - RNA, 20 nt, Artificial Sequence
  Synthetic
uuauaauaaauauucauguc

SEQ ID NO: 801358 - RNA, 20 nt, Artificial Sequence
  Synthetic
ugaagauagauauucauguc

SEQ ID NO: 801359 - RNA, 20 nt, Artificial Sequence
  Synthetic
uuucagcagcaaaagauguc

SEQ ID NO: 801360 - RNA, 20 nt, Artificial Sequence
  Synthetic
uauguuggaagcaagauguc

SEQ ID NO: 801361 - RNA, 20 nt, Artificial Sequence
  Synthetic
acuuucaguuauaagauguc

SEQ ID NO: 801362 - RNA, 20 nt, Artificial Sequence
  Synthetic
uggaguucggaggagauguc

SEQ ID NO: 801363 - RNA, 20 nt, Artificial Sequence
  Synthetic
aaguggaagcgggagauguc

SEQ ID NO: 801364 - RNA, 20 nt, Artificial Sequence
  Synthetic
uauuuuaaaauacugauguc

SEQ ID NO: 801365 - RNA, 20 nt, Artificial Sequence
  Synthetic
cggguggaucaucugauguc

SEQ ID NO: 801366 - RNA, 20 nt, Artificial Sequence
  Synthetic
aguguuuagguucugauguc

SEQ ID NO: 801367 - RNA, 20 nt, Artificial Sequence
  Synthetic
uucccaggaagggugauguc

SEQ ID NO: 801368 - RNA, 20 nt, Artificial Sequence
  Synthetic
uggguggaccacuugauguc

SEQ ID NO: 801369 - RNA, 20 nt, Artificial Sequence
  Synthetic
acauguggcauucauauguc

SEQ ID NO: 801370 - RNA, 20 nt, Artificial Sequence
  Synthetic
aauuucuucucagauauguc

SEQ ID NO: 801371 - RNA, 20 nt, Artificial Sequence
  Synthetic
uucuagaaaacaacuauguc

SEQ ID NO: 801372 - RNA, 20 nt, Artificial Sequence
  Synthetic
auaaguagcacagcuauguc

SEQ ID NO: 801373 - RNA, 20 nt, Artificial Sequence
  Synthetic
uuauuuaggaacucuauguc

SEQ ID NO: 801374 - RNA, 20 nt, Artificial Sequence
  Synthetic
agaaguuaaauggguauguc

SEQ ID NO: 801375 - RNA, 20 nt, Artificial Sequence
  Synthetic
cggcuuaaauuuuguauguc

SEQ ID NO: 801376 - RNA, 20 nt, Artificial Sequence
  Synthetic
uuaucugcucuaauuauguc

SEQ ID NO: 801377 - RNA, 20 nt, Artificial Sequence
  Synthetic
agagucagucuuauuauguc

SEQ ID NO: 801378 - RNA, 20 nt, Artificial Sequence
  Synthetic
cuaaaaaauuauuuuauguc

SEQ ID NO: 801379 - RNA, 20 nt, Artificial Sequence
  Synthetic
uucauugauuacuaacuguc

SEQ ID NO: 801380 - RNA, 20 nt, Artificial Sequence
  Synthetic
uuaagagaagcaacacuguc

SEQ ID NO: 801381 - RNA, 20 nt, Artificial Sequence
  Synthetic
ccaucuauacaccuacuguc

SEQ ID NO: 801382 - RNA, 20 nt, Artificial Sequence
  Synthetic
ugcuuuuuguuucuacuguc

SEQ ID NO: 801383 - RNA, 20 nt, Artificial Sequence
  Synthetic
caaaacaacaaaguacuguc

SEQ ID NO: 801384 - RNA, 20 nt, Artificial Sequence
  Synthetic
ucuggaauugccuaccuguc

SEQ ID NO: 801385 - RNA, 20 nt, Artificial Sequence
  Synthetic
uuauacuugcuuuaccuguc

SEQ ID NO: 801386 - RNA, 20 nt, Artificial Sequence
  Synthetic
aacacacacugaggccuguc

SEQ ID NO: 801387 - RNA, 20 nt, Artificial Sequence
  Synthetic
aucacacacuggggccuguc

SEQ ID NO: 801388 - RNA, 20 nt, Artificial Sequence
  Synthetic
uugucccauuuuauccuguc

SEQ ID NO: 801389 - RNA, 20 nt, Artificial Sequence
  Synthetic
aaaaaauguucccuccuguc

SEQ ID NO: 801390 - RNA, 20 nt, Artificial Sequence
  Synthetic
ugccaguguuggcuccuguc

SEQ ID NO: 801391 - RNA, 20 nt, Artificial Sequence
  Synthetic
uauuccuuaaguuuccuguc

SEQ ID NO: 801392 - RNA, 20 nt, Artificial Sequence
  Synthetic
uguuauuuccuguagcuguc

SEQ ID NO: 801393 - RNA, 20 nt, Artificial Sequence
  Synthetic
agauuugaaguauggcuguc

SEQ ID NO: 801394 - RNA, 20 nt, Artificial Sequence
  Synthetic
ucucuuuuuauuuggcuguc

SEQ ID NO: 801395 - RNA, 20 nt, Artificial Sequence
  Synthetic
aaguauuucuugaaucuguc

SEQ ID NO: 801396 - RNA, 20 nt, Artificial Sequence
  Synthetic
uaaaauuaacuucaucuguc

SEQ ID NO: 801397 - RNA, 20 nt, Artificial Sequence
  Synthetic
uugauucaugcauaucuguc

SEQ ID NO: 801398 - RNA, 20 nt, Artificial Sequence
  Synthetic
aacucuccaggauaucuguc

SEQ ID NO: 801399 - RNA, 20 nt, Artificial Sequence
  Synthetic
caaaugcuguucucucuguc

SEQ ID NO: 801400 - RNA, 20 nt, Artificial Sequence
  Synthetic
ccuucucuggcuucucuguc

SEQ ID NO: 801401 - RNA, 20 nt, Artificial Sequence
  Synthetic
auagcaugagccagucuguc

SEQ ID NO: 801402 - RNA, 20 nt, Artificial Sequence
  Synthetic
cuuaaugaacauuuucuguc

SEQ ID NO: 801403 - RNA, 20 nt, Artificial Sequence
  Synthetic
ccauuacacuguuuucuguc

SEQ ID NO: 801404 - RNA, 20 nt, Artificial Sequence
  Synthetic
auacugucugugaaaguguc

SEQ ID NO: 801405 - RNA, 20 nt, Artificial Sequence
  Synthetic
cuagagucuaguaaaguguc

SEQ ID NO: 801406 - RNA, 20 nt, Artificial Sequence
  Synthetic
uagacagaguuccaaguguc

SEQ ID NO: 801407 - RNA, 20 nt, Artificial Sequence
  Synthetic
uugaaagacagugaaguguc

SEQ ID NO: 801408 - RNA, 20 nt, Artificial Sequence
  Synthetic
cugaugguuuuauaaguguc

SEQ ID NO: 801409 - RNA, 20 nt, Artificial Sequence
  Synthetic
cuagcaccuuccacaguguc

SEQ ID NO: 801410 - RNA, 20 nt, Artificial Sequence
  Synthetic
ucgauuaauagaccaguguc

SEQ ID NO: 801411 - RNA, 20 nt, Artificial Sequence
  Synthetic
uccaggcacauuccaguguc

SEQ ID NO: 801412 - RNA, 20 nt, Artificial Sequence
  Synthetic
aggaaguggcuggcaguguc

SEQ ID NO: 801413 - RNA, 20 nt, Artificial Sequence
  Synthetic
uuaaggaacuccucaguguc

SEQ ID NO: 801414 - RNA, 20 nt, Artificial Sequence
  Synthetic
aaccugugauuuucaguguc

SEQ ID NO: 801415 - RNA, 20 nt, Artificial Sequence
  Synthetic
ugugggaaaagcauaguguc

SEQ ID NO: 801416 - RNA, 20 nt, Artificial Sequence
  Synthetic
aucucuggguggauaguguc

SEQ ID NO: 801417 - RNA, 20 nt, Artificial Sequence
  Synthetic
ugaucaccuacuauaguguc

SEQ ID NO: 801418 - RNA, 20 nt, Artificial Sequence
  Synthetic
ccuugcuuuauuguaguguc

SEQ ID NO: 801419 - RNA, 20 nt, Artificial Sequence
  Synthetic
aaaaaacucagauuaguguc

SEQ ID NO: 801420 - RNA, 20 nt, Artificial Sequence
  Synthetic
aagucugagaucaagguguc

SEQ ID NO: 801421 - RNA, 20 nt, Artificial Sequence
  Synthetic
uucacaggcauccagguguc

SEQ ID NO: 801422 - RNA, 20 nt, Artificial Sequence
  Synthetic
ucaugcuaugauucgguguc

SEQ ID NO: 801423 - RNA, 20 nt, Artificial Sequence
  Synthetic
acagaagccaaauggguguc

SEQ ID NO: 801424 - RNA, 20 nt, Artificial Sequence
  Synthetic
ccuauuuaauaaaugguguc

SEQ ID NO: 801425 - RNA, 20 nt, Artificial Sequence
  Synthetic
aaaagucauccugugguguc

SEQ ID NO: 801426 - RNA, 20 nt, Artificial Sequence
  Synthetic
aggcucuggcauuugguguc

SEQ ID NO: 801427 - RNA, 20 nt, Artificial Sequence
  Synthetic
auaccagcagauuugguguc

SEQ ID NO: 801428 - RNA, 20 nt, Artificial Sequence
  Synthetic
uagauggccauuuugguguc

SEQ ID NO: 801429 - RNA, 20 nt, Artificial Sequence
  Synthetic
uauccuuaaacaaauguguc

SEQ ID NO: 801430 - RNA, 20 nt, Artificial Sequence
  Synthetic
aaguggguguucaauguguc

SEQ ID NO: 801431 - RNA, 20 nt, Artificial Sequence
  Synthetic
uagggggaaaugaauguguc

SEQ ID NO: 801432 - RNA, 20 nt, Artificial Sequence
  Synthetic
ugggugaggagcgauguguc

SEQ ID NO: 801433 - RNA, 20 nt, Artificial Sequence
  Synthetic
ugucaaugaaaugauguguc

SEQ ID NO: 801434 - RNA, 20 nt, Artificial Sequence
  Synthetic
cugagcucuuaguauguguc

SEQ ID NO: 801435 - RNA, 20 nt, Artificial Sequence
  Synthetic
auacugcucagaacuguguc

SEQ ID NO: 801436 - RNA, 20 nt, Artificial Sequence
  Synthetic
uaggagugagccacuguguc

SEQ ID NO: 801437 - RNA, 20 nt, Artificial Sequence
  Synthetic
uuuuggagcugcucuguguc

SEQ ID NO: 801438 - RNA, 20 nt, Artificial Sequence
  Synthetic
ucaaaaacauccaguguguc

SEQ ID NO: 801439 - RNA, 20 nt, Artificial Sequence
  Synthetic
auuaggggaagcuguguguc

SEQ ID NO: 801440 - RNA, 20 nt, Artificial Sequence
  Synthetic
ugaacauuuugaauuguguc

SEQ ID NO: 801441 - RNA, 20 nt, Artificial Sequence
  Synthetic
caagugugagccauuguguc

SEQ ID NO: 801442 - RNA, 20 nt, Artificial Sequence
  Synthetic
aauauuuuucauuuuguguc

SEQ ID NO: 801443 - RNA, 20 nt, Artificial Sequence
  Synthetic
ugcuauggacuuuuuguguc

SEQ ID NO: 801444 - RNA, 20 nt, Artificial Sequence
  Synthetic
uuugaaggguuuuuuguguc

SEQ ID NO: 801445 - RNA, 20 nt, Artificial Sequence
  Synthetic
uuaugauauuagaaauuguc

SEQ ID NO: 801446 - RNA, 20 nt, Artificial Sequence
  Synthetic
aaaaucugacuccaauuguc

SEQ ID NO: 801447 - RNA, 20 nt, Artificial Sequence
  Synthetic
uuucaagauauagaauuguc

SEQ ID NO: 801448 - RNA, 20 nt, Artificial Sequence
  Synthetic
ugaucaauuauuccauuguc

SEQ ID NO: 801449 - RNA, 20 nt, Artificial Sequence
  Synthetic
uucuuuucuacugcauuguc

SEQ ID NO: 801450 - RNA, 20 nt, Artificial Sequence
  Synthetic
acaucagcagauucauuguc

SEQ ID NO: 801451 - RNA, 20 nt, Artificial Sequence
  Synthetic
acaaacaugcacagauuguc

SEQ ID NO: 801452 - RNA, 20 nt, Artificial Sequence
  Synthetic
acauugugauuuuuauuguc

SEQ ID NO: 801453 - RNA, 20 nt, Artificial Sequence
  Synthetic
caagaaguaaaauacuuguc

SEQ ID NO: 801454 - RNA, 20 nt, Artificial Sequence
  Synthetic
aaaagagaaaacuacuuguc

SEQ ID NO: 801455 - RNA, 20 nt, Artificial Sequence
  Synthetic
aaaucaucagguuacuuguc

SEQ ID NO: 801456 - RNA, 20 nt, Artificial Sequence
  Synthetic
aagaaccacagcagcuuguc

SEQ ID NO: 801457 - RNA, 20 nt, Artificial Sequence
  Synthetic
cuggauaauuauuucuuguc

SEQ ID NO: 801458 - RNA, 20 nt, Artificial Sequence
  Synthetic
uagggagaaauaaaguuguc

SEQ ID NO: 801459 - RNA, 20 nt, Artificial Sequence
  Synthetic
aaauauucuacccaguuguc

SEQ ID NO: 801460 - RNA, 20 nt, Artificial Sequence
  Synthetic
acauuuucucagcaguuguc

SEQ ID NO: 801461 - RNA, 20 nt, Artificial Sequence
  Synthetic
cuuaugaaaaugcaguuguc

SEQ ID NO: 801462 - RNA, 20 nt, Artificial Sequence
  Synthetic
cagacaacaauguaguuguc

SEQ ID NO: 801463 - RNA, 20 nt, Artificial Sequence
  Synthetic
uguaauuccagcacguuguc

SEQ ID NO: 801464 - RNA, 20 nt, Artificial Sequence
  Synthetic
aaaaguggucucugguuguc

SEQ ID NO: 801465 - RNA, 20 nt, Artificial Sequence
  Synthetic
uugacuucagccauguuguc

SEQ ID NO: 801466 - RNA, 20 nt, Artificial Sequence
  Synthetic
ugauggcuuucuauguuguc

SEQ ID NO: 801467 - RNA, 20 nt, Artificial Sequence
  Synthetic
cggagucucgcucuguuguc

SEQ ID NO: 801468 - RNA, 20 nt, Artificial Sequence
  Synthetic
uucuuucaguucguguuguc

SEQ ID NO: 801469 - RNA, 20 nt, Artificial Sequence
  Synthetic
auguguccauuuguguuguc

SEQ ID NO: 801470 - RNA, 20 nt, Artificial Sequence
  Synthetic
auuuuacguuuuguguuguc

SEQ ID NO: 801471 - RNA, 20 nt, Artificial Sequence
  Synthetic
cagacaacuacauuguuguc

SEQ ID NO: 801472 - RNA, 20 nt, Artificial Sequence
  Synthetic
agcacuaaaaaacauuuguc

SEQ ID NO: 801473 - RNA, 20 nt, Artificial Sequence
  Synthetic
aguuuacuuguucauuuguc

SEQ ID NO: 801474 - RNA, 20 nt, Artificial Sequence
  Synthetic
uuuguuuuagcugauuuguc

SEQ ID NO: 801475 - RNA, 20 nt, Artificial Sequence
  Synthetic
uucacaaaucaguauuuguc

SEQ ID NO: 801476 - RNA, 20 nt, Artificial Sequence
  Synthetic
uguuuuaaagaguauuuguc

SEQ ID NO: 801477 - RNA, 20 nt, Artificial Sequence
  Synthetic
cgcuuuuuguuuccuuuguc

SEQ ID NO: 801478 - RNA, 20 nt, Artificial Sequence
  Synthetic
uuucuugugauaucuuuguc

SEQ ID NO: 801479 - RNA, 20 nt, Artificial Sequence
  Synthetic
uuaaauauucuuauuuuguc

SEQ ID NO: 801480 - RNA, 20 nt, Artificial Sequence
  Synthetic
aaacagaaaauccuuuuguc

SEQ ID NO: 801481 - RNA, 20 nt, Artificial Sequence
  Synthetic
ccacauugcuuguuuuuguc

SEQ ID NO: 801482 - RNA, 20 nt, Artificial Sequence
  Synthetic
cuccauugcuuguuuuuguc

SEQ ID NO: 801483 - RNA, 20 nt, Artificial Sequence
  Synthetic
ccccguugcuuguuuuuguc

SEQ ID NO: 801484 - RNA, 20 nt, Artificial Sequence
  Synthetic
ccccauuucuuguuuuuguc

SEQ ID NO: 801485 - RNA, 20 nt, Artificial Sequence
  Synthetic
cccauuucuuguuuuuuguc

SEQ ID NO: 801486 - RNA, 20 nt, Artificial Sequence
  Synthetic
uauuuaauuguaaaaaauuc

SEQ ID NO: 801487 - RNA, 20 nt, Artificial Sequence
  Synthetic
aaauuaaauuuaaaaaauuc

SEQ ID NO: 801488 - RNA, 20 nt, Artificial Sequence
  Synthetic
aacccagcaugcaaaaauuc

SEQ ID NO: 801489 - RNA, 20 nt, Artificial Sequence
  Synthetic
aaagaaaaggagaaaaauuc

SEQ ID NO: 801490 - RNA, 20 nt, Artificial Sequence
  Synthetic
cgaugucagaggaaaaauuc

SEQ ID NO: 801491 - RNA, 20 nt, Artificial Sequence
  Synthetic
uauauauacaagcaaaauuc

SEQ ID NO: 801492 - RNA, 20 nt, Artificial Sequence
  Synthetic
uguuacucuaagcaaaauuc

SEQ ID NO: 801493 - RNA, 20 nt, Artificial Sequence
  Synthetic
aguuugauugcucaaaauuc

SEQ ID NO: 801494 - RNA, 20 nt, Artificial Sequence
  Synthetic
cacaucccccuugaaaauuc

SEQ ID NO: 801495 - RNA, 20 nt, Artificial Sequence
  Synthetic
uaacaagauuuugaaaauuc

SEQ ID NO: 801496 - RNA, 20 nt, Artificial Sequence
  Synthetic
aguuauggaagauaaaauuc

SEQ ID NO: 801497 - RNA, 20 nt, Artificial Sequence
  Synthetic
aucauguaugacuaaaauuc

SEQ ID NO: 801498 - RNA, 20 nt, Artificial Sequence
  Synthetic
aagggggcuuucuaaaauuc

SEQ ID NO: 801499 - RNA, 20 nt, Artificial Sequence
  Synthetic
aaaaaauuguaguaaaauuc

SEQ ID NO: 801500 - RNA, 20 nt, Artificial Sequence
  Synthetic
ccacauaucuauuaaaauuc

SEQ ID NO: 801501 - RNA, 20 nt, Artificial Sequence
  Synthetic
uagacuagggucacaaauuc

SEQ ID NO: 801502 - RNA, 20 nt, Artificial Sequence
  Synthetic
uaaaaacaauuuccaaauuc

SEQ ID NO: 801503 - RNA, 20 nt, Artificial Sequence
  Synthetic
augugucucuuuccaaauuc

SEQ ID NO: 801504 - RNA, 20 nt, Artificial Sequence
  Synthetic
cuugcuagaaaugcaaauuc

SEQ ID NO: 801505 - RNA, 20 nt, Artificial Sequence
  Synthetic
agaggcagagcuucaaauuc

SEQ ID NO: 801506 - RNA, 20 nt, Artificial Sequence
  Synthetic
aaucauaagaauagaaauuc

SEQ ID NO: 801507 - RNA, 20 nt, Artificial Sequence
  Synthetic
ugggcucaagggggaaauuc

SEQ ID NO: 801508 - RNA, 20 nt, Artificial Sequence
  Synthetic
uuuggcuggauaugaaauuc

SEQ ID NO: 801509 - RNA, 20 nt, Artificial Sequence
  Synthetic
aaaccaaauuucugaaauuc

SEQ ID NO: 801510 - RNA, 20 nt, Artificial Sequence
  Synthetic
ucauaguuuaugugaaauuc

SEQ ID NO: 801511 - RNA, 20 nt, Artificial Sequence
  Synthetic
auugucaugagaauaaauuc

SEQ ID NO: 801512 - RNA, 20 nt, Artificial Sequence
  Synthetic
cacacauacuguguaaauuc

SEQ ID NO: 801513 - RNA, 20 nt, Artificial Sequence
  Synthetic
cauuuaggaacaaacaauuc

SEQ ID NO: 801514 - RNA, 20 nt, Artificial Sequence
  Synthetic
uaagaacucacaaacaauuc

SEQ ID NO: 801515 - RNA, 20 nt, Artificial Sequence
  Synthetic
cuuguucagcaugacaauuc

SEQ ID NO: 801516 - RNA, 20 nt, Artificial Sequence
  Synthetic
cuucucuuuuacuacaauuc

SEQ ID NO: 801517 - RNA, 20 nt, Artificial Sequence
  Synthetic
uuccuuaaggaugccaauuc

SEQ ID NO: 801518 - RNA, 20 nt, Artificial Sequence
  Synthetic
caaaaguucaguagcaauuc

SEQ ID NO: 801519 - RNA, 20 nt, Artificial Sequence
  Synthetic
uuuguacauguuggcaauuc

SEQ ID NO: 801520 - RNA, 20 nt, Artificial Sequence
  Synthetic
aggcccacugccugcaauuc

SEQ ID NO: 801521 - RNA, 20 nt, Artificial Sequence
  Synthetic
auacauuuuuaaaucaauuc

SEQ ID NO: 801522 - RNA, 20 nt, Artificial Sequence
  Synthetic
uuuacagcacaucucaauuc

SEQ ID NO: 801523 - RNA, 20 nt, Artificial Sequence
  Synthetic
uagaucccauuugucaauuc

SEQ ID NO: 801524 - RNA, 20 nt, Artificial Sequence
  Synthetic
agaacuuugacuuucaauuc

SEQ ID NO: 801525 - RNA, 20 nt, Artificial Sequence
  Synthetic
uguaaaaaggaaaagaauuc

SEQ ID NO: 801526 - RNA, 20 nt, Artificial Sequence
  Synthetic
cuaaauuucucuaagaauuc

SEQ ID NO: 801527 - RNA, 20 nt, Artificial Sequence
  Synthetic
uuugcugagacacagaauuc

SEQ ID NO: 801528 - RNA, 20 nt, Artificial Sequence
  Synthetic
aguaaaguggaagagaauuc

SEQ ID NO: 801529 - RNA, 20 nt, Artificial Sequence
  Synthetic
uguguuuaaauagagaauuc

SEQ ID NO: 801530 - RNA, 20 nt, Artificial Sequence
  Synthetic
uggguuaacuuagagaauuc

SEQ ID NO: 801531 - RNA, 20 nt, Artificial Sequence
  Synthetic
uuuucucauggcuagaauuc

SEQ ID NO: 801532 - RNA, 20 nt, Artificial Sequence
  Synthetic
accuuuggaagguagaauuc

SEQ ID NO: 801533 - RNA, 20 nt, Artificial Sequence
  Synthetic
cauaguuaugcuuagaauuc

SEQ ID NO: 801534 - RNA, 20 nt, Artificial Sequence
  Synthetic
agaaauaaugacaggaauuc

SEQ ID NO: 801535 - RNA, 20 nt, Artificial Sequence
  Synthetic
ucugagaucuacaggaauuc

SEQ ID NO: 801536 - RNA, 20 nt, Artificial Sequence
  Synthetic
aauguguacucugggaauuc

SEQ ID NO: 801537 - RNA, 20 nt, Artificial Sequence
  Synthetic
aagaacccuaaguggaauuc

SEQ ID NO: 801538 - RNA, 20 nt, Artificial Sequence
  Synthetic
uccaacccguuuuggaauuc

SEQ ID NO: 801539 - RNA, 20 nt, Artificial Sequence
  Synthetic
aaaaaaagaucaaugaauuc

SEQ ID NO: 801540 - RNA, 20 nt, Artificial Sequence
  Synthetic
aagugccagacuaugaauuc

SEQ ID NO: 801541 - RNA, 20 nt, Artificial Sequence
  Synthetic
uugcaaauggcacugaauuc

SEQ ID NO: 801542 - RNA, 20 nt, Artificial Sequence
  Synthetic
agucacauucuugugaauuc

SEQ ID NO: 801543 - RNA, 20 nt, Artificial Sequence
  Synthetic
cucuauauuauauugaauuc

SEQ ID NO: 801544 - RNA, 20 nt, Artificial Sequence
  Synthetic
cagacagaucacuugaauuc

SEQ ID NO: 801545 - RNA, 20 nt, Artificial Sequence
  Synthetic
aaagaaaaaaaaaauaauuc

SEQ ID NO: 801546 - RNA, 20 nt, Artificial Sequence
  Synthetic
ugaguguucaaaaauaauuc

SEQ ID NO: 801547 - RNA, 20 nt, Artificial Sequence
  Synthetic
agacugaauucaaauaauuc

SEQ ID NO: 801548 - RNA, 20 nt, Artificial Sequence
  Synthetic
auuuuauccauugauaauuc

SEQ ID NO: 801549 - RNA, 20 nt, Artificial Sequence
  Synthetic
aaucaucagagauauaauuc

SEQ ID NO: 801550 - RNA, 20 nt, Artificial Sequence
  Synthetic
ucugggcaagaguauaauuc

SEQ ID NO: 801551 - RNA, 20 nt, Artificial Sequence
  Synthetic
aaugggagccauuauaauuc

SEQ ID NO: 801552 - RNA, 20 nt, Artificial Sequence
  Synthetic
augagcaugugaccuaauuc

SEQ ID NO: 801553 - RNA, 20 nt, Artificial Sequence
  Synthetic
ugcugaauuuucccuaauuc

SEQ ID NO: 801554 - RNA, 20 nt, Artificial Sequence
  Synthetic
caauggaaugcugcuaauuc

SEQ ID NO: 801555 - RNA, 20 nt, Artificial Sequence
  Synthetic
cuggaucaguauucuaauuc

SEQ ID NO: 801556 - RNA, 20 nt, Artificial Sequence
  Synthetic
uauucuaagugaaguaauuc

SEQ ID NO: 801557 - RNA, 20 nt, Artificial Sequence
  Synthetic
uuuucucuacccaguaauuc

SEQ ID NO: 801558 - RNA, 20 nt, Artificial Sequence
  Synthetic
aaugaaagaggauguaauuc

SEQ ID NO: 801559 - RNA, 20 nt, Artificial Sequence
  Synthetic
cagcaccauuucuguaauuc

SEQ ID NO: 801560 - RNA, 20 nt, Artificial Sequence
  Synthetic
aaaauucuugaaauuaauuc

SEQ ID NO: 801561 - RNA, 20 nt, Artificial Sequence
  Synthetic
uacuuucucuacauuaauuc

SEQ ID NO: 801562 - RNA, 20 nt, Artificial Sequence
  Synthetic
uucuuagcaacuauuaauuc

SEQ ID NO: 801563 - RNA, 20 nt, Artificial Sequence
  Synthetic
uguucacaaggucuuaauuc

SEQ ID NO: 801564 - RNA, 20 nt, Artificial Sequence
  Synthetic
acacaccaaaauguuaauuc

SEQ ID NO: 801565 - RNA, 20 nt, Artificial Sequence
  Synthetic
ucaaaagagaaauuuaauuc

SEQ ID NO: 801566 - RNA, 20 nt, Artificial Sequence
  Synthetic
cagaauaaauuauuuaauuc

SEQ ID NO: 801567 - RNA, 20 nt, Artificial Sequence
  Synthetic
aauggcaugccuuuuaauuc

SEQ ID NO: 801568 - RNA, 20 nt, Artificial Sequence
  Synthetic
cacaauuuagaacaacauuc

SEQ ID NO: 801569 - RNA, 20 nt, Artificial Sequence
  Synthetic
cuaaagucaguauaacauuc

SEQ ID NO: 801570 - RNA, 20 nt, Artificial Sequence
  Synthetic
uaauugacaguuacacauuc

SEQ ID NO: 801571 - RNA, 20 nt, Artificial Sequence
  Synthetic
uguucugagcccucacauuc

SEQ ID NO: 801572 - RNA, 20 nt, Artificial Sequence
  Synthetic
ucuucuuaaaagucacauuc

SEQ ID NO: 801573 - RNA, 20 nt, Artificial Sequence
  Synthetic
aggcucaaauggagacauuc

SEQ ID NO: 801574 - RNA, 20 nt, Artificial Sequence
  Synthetic
ccaugcuccucuagacauuc

SEQ ID NO: 801575 - RNA, 20 nt, Artificial Sequence
  Synthetic
ccuuauauaucaggacauuc

SEQ ID NO: 801576 - RNA, 20 nt, Artificial Sequence
  Synthetic
ucuccuuuugauggacauuc

SEQ ID NO: 801577 - RNA, 20 nt, Artificial Sequence
  Synthetic
caauucauacauugacauuc

SEQ ID NO: 801578 - RNA, 20 nt, Artificial Sequence
  Synthetic
auuugcuaaaaacuacauuc

SEQ ID NO: 801579 - RNA, 20 nt, Artificial Sequence
  Synthetic
uuucugugugucuuacauuc

SEQ ID NO: 801580 - RNA, 20 nt, Artificial Sequence
  Synthetic
ugcaccuguuucuuacauuc

SEQ ID NO: 801581 - RNA, 20 nt, Artificial Sequence
  Synthetic
uauuauuauacuuuacauuc

SEQ ID NO: 801582 - RNA, 20 nt, Artificial Sequence
  Synthetic
ucauuauuugaaaaccauuc

SEQ ID NO: 801583 - RNA, 20 nt, Artificial Sequence
  Synthetic
uugcaugaagucaaccauuc

SEQ ID NO: 801584 - RNA, 20 nt, Artificial Sequence
  Synthetic
caaauuuaucaccaccauuc

SEQ ID NO: 801585 - RNA, 20 nt, Artificial Sequence
  Synthetic
aaaucugggaaauaccauuc

SEQ ID NO: 801586 - RNA, 20 nt, Artificial Sequence
  Synthetic
aaaccuaggcaauaccauuc

SEQ ID NO: 801587 - RNA, 20 nt, Artificial Sequence
  Synthetic
uguuauucaugcuaccauuc

SEQ ID NO: 801588 - RNA, 20 nt, Artificial Sequence
  Synthetic
cucuugaggcauuaccauuc

SEQ ID NO: 801589 - RNA, 20 nt, Artificial Sequence
  Synthetic
aaaccuaggcauuaccauuc

SEQ ID NO: 801590 - RNA, 20 nt, Artificial Sequence
  Synthetic
ucauauaucccuauccauuc

SEQ ID NO: 801591 - RNA, 20 nt, Artificial Sequence
  Synthetic
ugcuacuuaauuuuccauuc

SEQ ID NO: 801592 - RNA, 20 nt, Artificial Sequence
  Synthetic
aauagcaugauuuuccauuc

SEQ ID NO: 801593 - RNA, 20 nt, Artificial Sequence
  Synthetic
agagaaaaggaagagcauuc

SEQ ID NO: 801594 - RNA, 20 nt, Artificial Sequence
  Synthetic
agacaucaaaaauagcauuc

SEQ ID NO: 801595 - RNA, 20 nt, Artificial Sequence
  Synthetic
caaaaauacugcaugcauuc

SEQ ID NO: 801596 - RNA, 20 nt, Artificial Sequence
  Synthetic
aauauuuacaucaugcauuc

SEQ ID NO: 801597 - RNA, 20 nt, Artificial Sequence
  Synthetic
acaaagcugaccaaucauuc

SEQ ID NO: 801598 - RNA, 20 nt, Artificial Sequence
  Synthetic
aaauauguacagaaucauuc

SEQ ID NO: 801599 - RNA, 20 nt, Artificial Sequence
  Synthetic
auguuuuuaaaagaucauuc

SEQ ID NO: 801600 - RNA, 20 nt, Artificial Sequence
  Synthetic
uauuuuuaaacagaucauuc

SEQ ID NO: 801601 - RNA, 20 nt, Artificial Sequence
  Synthetic
auucugcugcucccucauuc

SEQ ID NO: 801602 - RNA, 20 nt, Artificial Sequence
  Synthetic
uagauccuccagccucauuc

SEQ ID NO: 801603 - RNA, 20 nt, Artificial Sequence
  Synthetic
cugaucuaugugucucauuc

SEQ ID NO: 801604 - RNA, 20 nt, Artificial Sequence
  Synthetic
uaaggguacuauucucauuc

SEQ ID NO: 801605 - RNA, 20 nt, Artificial Sequence
  Synthetic
ucugacuccacuucucauuc

SEQ ID NO: 801606 - RNA, 20 nt, Artificial Sequence
  Synthetic
ucuugauugcuuucucauuc

SEQ ID NO: 801607 - RNA, 20 nt, Artificial Sequence
  Synthetic
ucucuucuuuuuucucauuc

SEQ ID NO: 801608 - RNA, 20 nt, Artificial Sequence
  Synthetic
aaaacuaaauaaagucauuc

SEQ ID NO: 801609 - RNA, 20 nt, Artificial Sequence
  Synthetic
agcccucuaugaagucauuc

SEQ ID NO: 801610 - RNA, 20 nt, Artificial Sequence
  Synthetic
uauuuauccagcagucauuc

SEQ ID NO: 801611 - RNA, 20 nt, Artificial Sequence
  Synthetic
uauguacccaguagucauuc

SEQ ID NO: 801612 - RNA, 20 nt, Artificial Sequence
  Synthetic
caagaguaggaaggucauuc

SEQ ID NO: 801613 - RNA, 20 nt, Artificial Sequence
  Synthetic
agggucuugcucugucauuc

SEQ ID NO: 801614 - RNA, 20 nt, Artificial Sequence
  Synthetic
uuucuucaaagcauucauuc

SEQ ID NO: 801615 - RNA, 20 nt, Artificial Sequence
  Synthetic
ucaguccucuaccuucauuc

SEQ ID NO: 801616 - RNA, 20 nt, Artificial Sequence
  Synthetic
aaucuuuuaucaguucauuc

SEQ ID NO: 801617 - RNA, 20 nt, Artificial Sequence
  Synthetic
uuacucuuaaaauuucauuc

SEQ ID NO: 801618 - RNA, 20 nt, Artificial Sequence
  Synthetic
aaauuuggguaguuucauuc

SEQ ID NO: 801619 - RNA, 20 nt, Artificial Sequence
  Synthetic
uaauuuuugacuuuucauuc

SEQ ID NO: 801620 - RNA, 20 nt, Artificial Sequence
  Synthetic
aguccuauggaaaaagauuc

SEQ ID NO: 801621 - RNA, 20 nt, Artificial Sequence
  Synthetic
agcuaaacaaacuaagauuc

SEQ ID NO: 801622 - RNA, 20 nt, Artificial Sequence
  Synthetic
ucuggaacaaauuaagauuc

SEQ ID NO: 801623 - RNA, 20 nt, Artificial Sequence
  Synthetic
uauugugaagaaacagauuc

SEQ ID NO: 801624 - RNA, 20 nt, Artificial Sequence
  Synthetic
cugcaauacauuccagauuc

SEQ ID NO: 801625 - RNA, 20 nt, Artificial Sequence
  Synthetic
agugagagaaugucagauuc

SEQ ID NO: 801626 - RNA, 20 nt, Artificial Sequence
  Synthetic
uaaucagggcauucagauuc

SEQ ID NO: 801627 - RNA, 20 nt, Artificial Sequence
  Synthetic
ugaaugcgucccagagauuc

SEQ ID NO: 801628 - RNA, 20 nt, Artificial Sequence
  Synthetic
uagcugugucccagagauuc

SEQ ID NO: 801629 - RNA, 20 nt, Artificial Sequence
  Synthetic
uucauucaacaaggagauuc

SEQ ID NO: 801630 - RNA, 20 nt, Artificial Sequence
  Synthetic
ccaaaugcaguaggagauuc

SEQ ID NO: 801631 - RNA, 20 nt, Artificial Sequence
  Synthetic
auagaauuaaagggagauuc

SEQ ID NO: 801632 - RNA, 20 nt, Artificial Sequence
  Synthetic
aguaaauuaggaugagauuc

SEQ ID NO: 801633 - RNA, 20 nt, Artificial Sequence
  Synthetic
cagauaucuuuuugagauuc

SEQ ID NO: 801634 - RNA, 20 nt, Artificial Sequence
  Synthetic
uagguuuauggcauagauuc

SEQ ID NO: 801635 - RNA, 20 nt, Artificial Sequence
  Synthetic
uuuagguuccucauagauuc

SEQ ID NO: 801636 - RNA, 20 nt, Artificial Sequence
  Synthetic
uuaauguuguugauagauuc

SEQ ID NO: 801637 - RNA, 20 nt, Artificial Sequence
  Synthetic
uuuaaguuccuuauagauuc

SEQ ID NO: 801638 - RNA, 20 nt, Artificial Sequence
  Synthetic
augaaagucagucuagauuc

SEQ ID NO: 801639 - RNA, 20 nt, Artificial Sequence
  Synthetic
uuggaguucauuguagauuc

SEQ ID NO: 801640 - RNA, 20 nt, Artificial Sequence
  Synthetic
uuugaguucauuguagauuc

SEQ ID NO: 801641 - RNA, 20 nt, Artificial Sequence
  Synthetic
uuuaaguuccuuguagauuc

SEQ ID NO: 801642 - RNA, 20 nt, Artificial Sequence
  Synthetic
uuugaguucuuuguagauuc

SEQ ID NO: 801643 - RNA, 20 nt, Artificial Sequence
  Synthetic
ucaacuuugauuuuagauuc

SEQ ID NO: 801644 - RNA, 20 nt, Artificial Sequence
  Synthetic
uucaaguguauuuuagauuc

SEQ ID NO: 801645 - RNA, 20 nt, Artificial Sequence
  Synthetic
uauuuuuauugaaacgauuc

SEQ ID NO: 801646 - RNA, 20 nt, Artificial Sequence
  Synthetic
cucccaaguucaagcgauuc

SEQ ID NO: 801647 - RNA, 20 nt, Artificial Sequence
  Synthetic
cacuucuauuuuagcgauuc

SEQ ID NO: 801648 - RNA, 20 nt, Artificial Sequence
  Synthetic
aggaaauuugguuaggauuc

SEQ ID NO: 801649 - RNA, 20 nt, Artificial Sequence
  Synthetic
uuuaucuguucaagggauuc

SEQ ID NO: 801650 - RNA, 20 nt, Artificial Sequence
  Synthetic
uggaugaaaguaugggauuc

SEQ ID NO: 801651 - RNA, 20 nt, Artificial Sequence
  Synthetic
aucagggguaagugggauuc

SEQ ID NO: 801652 - RNA, 20 nt, Artificial Sequence
  Synthetic
aaugagagguacauggauuc

SEQ ID NO: 801653 - RNA, 20 nt, Artificial Sequence
  Synthetic
uagcuugaugucauggauuc

SEQ ID NO: 801654 - RNA, 20 nt, Artificial Sequence
  Synthetic
auaguagagccacuggauuc

SEQ ID NO: 801655 - RNA, 20 nt, Artificial Sequence
  Synthetic
aaagacuugccucuggauuc

SEQ ID NO: 801656 - RNA, 20 nt, Artificial Sequence
  Synthetic
ugguccuuuaucaaugauuc

SEQ ID NO: 801657 - RNA, 20 nt, Artificial Sequence
  Synthetic
cuuauaaauuucaaugauuc

SEQ ID NO: 801658 - RNA, 20 nt, Artificial Sequence
  Synthetic
auauauauaugucaugauuc

SEQ ID NO: 801659 - RNA, 20 nt, Artificial Sequence
  Synthetic
aagcuagaaacuucugauuc

SEQ ID NO: 801660 - RNA, 20 nt, Artificial Sequence
  Synthetic
uuagggguugcuagugauuc

SEQ ID NO: 801661 - RNA, 20 nt, Artificial Sequence
  Synthetic
cugaguuuaaaucgugauuc

SEQ ID NO: 801662 - RNA, 20 nt, Artificial Sequence
  Synthetic
ugcuuauuaugauuugauuc

SEQ ID NO: 801663 - RNA, 20 nt, Artificial Sequence
  Synthetic
acgcaaaagauuuuugauuc

SEQ ID NO: 801664 - RNA, 20 nt, Artificial Sequence
  Synthetic
aucaugauggaaaaauauuc

SEQ ID NO: 801665 - RNA, 20 nt, Artificial Sequence
  Synthetic
auagaauuaaacaaauauuc

SEQ ID NO: 801666 - RNA, 20 nt, Artificial Sequence
  Synthetic
uuugugaugaauaaauauuc

SEQ ID NO: 801667 - RNA, 20 nt, Artificial Sequence
  Synthetic
agagaaaaaaauuaauauuc

SEQ ID NO: 801668 - RNA, 20 nt, Artificial Sequence
  Synthetic
auagguggauuuuaauauuc

SEQ ID NO: 801669 - RNA, 20 nt, Artificial Sequence
  Synthetic
aaauauguguacacauauuc

SEQ ID NO: 801670 - RNA, 20 nt, Artificial Sequence
  Synthetic
cacaaggcaggcccauauuc

SEQ ID NO: 801671 - RNA, 20 nt, Artificial Sequence
  Synthetic
cacugauauaagccauauuc

SEQ ID NO: 801672 - RNA, 20 nt, Artificial Sequence
  Synthetic
uauuccaaauaggcauauuc

SEQ ID NO: 801673 - RNA, 20 nt, Artificial Sequence
  Synthetic
uagggcucagaugcauauuc

SEQ ID NO: 801674 - RNA, 20 nt, Artificial Sequence
  Synthetic
aggagcuacaagucauauuc

SEQ ID NO: 801675 - RNA, 20 nt, Artificial Sequence
  Synthetic
aauuaguggacuucauauuc

SEQ ID NO: 801676 - RNA, 20 nt, Artificial Sequence
  Synthetic
auauucugacuuucauauuc

SEQ ID NO: 801677 - RNA, 20 nt, Artificial Sequence
  Synthetic
agaaugugccucagauauuc

SEQ ID NO: 801678 - RNA, 20 nt, Artificial Sequence
  Synthetic
uaaucaaaggggagauauuc

SEQ ID NO: 801679 - RNA, 20 nt, Artificial Sequence
  Synthetic
accauuguagauagauauuc

SEQ ID NO: 801680 - RNA, 20 nt, Artificial Sequence
  Synthetic
acuauuuuugcuggauauuc

SEQ ID NO: 801681 - RNA, 20 nt, Artificial Sequence
  Synthetic
ucaguauuucgaugauauuc

SEQ ID NO: 801682 - RNA, 20 nt, Artificial Sequence
  Synthetic
uauacagauacuugauauuc

SEQ ID NO: 801683 - RNA, 20 nt, Artificial Sequence
  Synthetic
uuuuaacuccuuauauauuc

SEQ ID NO: 801684 - RNA, 20 nt, Artificial Sequence
  Synthetic
uucauaaaaaaacuauauuc

SEQ ID NO: 801685 - RNA, 20 nt, Artificial Sequence
  Synthetic
cuagaucagauguuauauuc

SEQ ID NO: 801686 - RNA, 20 nt, Artificial Sequence
  Synthetic
cuaacccugcauuuauauuc

SEQ ID NO: 801687 - RNA, 20 nt, Artificial Sequence
  Synthetic
auuuucucucauuuauauuc

SEQ ID NO: 801688 - RNA, 20 nt, Artificial Sequence
  Synthetic
caauuuuccugaaacuauuc

SEQ ID NO: 801689 - RNA, 20 nt, Artificial Sequence
  Synthetic
aucugccucugucacuauuc

SEQ ID NO: 801690 - RNA, 20 nt, Artificial Sequence
  Synthetic
aucagcauuucugacuauuc

SEQ ID NO: 801691 - RNA, 20 nt, Artificial Sequence
  Synthetic
aaaccuaggaaauacuauuc

SEQ ID NO: 801692 - RNA, 20 nt, Artificial Sequence
  Synthetic
cucccgaaauauuccuauuc

SEQ ID NO: 801693 - RNA, 20 nt, Artificial Sequence
  Synthetic
cuguguuuguaaagcuauuc

SEQ ID NO: 801694 - RNA, 20 nt, Artificial Sequence
  Synthetic
accuguaaucccagcuauuc

SEQ ID NO: 801695 - RNA, 20 nt, Artificial Sequence
  Synthetic
cuuggaaugaauggcuauuc

SEQ ID NO: 801696 - RNA, 20 nt, Artificial Sequence
  Synthetic
aucugggcacccaucuauuc

SEQ ID NO: 801697 - RNA, 20 nt, Artificial Sequence
  Synthetic
uuaaccuaguuucucuauuc

SEQ ID NO: 801698 - RNA, 20 nt, Artificial Sequence
  Synthetic
aacucguuauuggucuauuc

SEQ ID NO: 801699 - RNA, 20 nt, Artificial Sequence
  Synthetic
agccuguuauuggucuauuc

SEQ ID NO: 801700 - RNA, 20 nt, Artificial Sequence
  Synthetic
aacuuguuauuggucuauuc

SEQ ID NO: 801701 - RNA, 20 nt, Artificial Sequence
  Synthetic
cuuuggagaaaugucuauuc

SEQ ID NO: 801702 - RNA, 20 nt, Artificial Sequence
  Synthetic
uuuaucaucugugucuauuc

SEQ ID NO: 801703 - RNA, 20 nt, Artificial Sequence
  Synthetic
ucaguguuuuucuucuauuc

SEQ ID NO: 801704 - RNA, 20 nt, Artificial Sequence
  Synthetic
auagaacccaguuucuauuc

SEQ ID NO: 801705 - RNA, 20 nt, Artificial Sequence
  Synthetic
aaaagauuuauuuucuauuc

SEQ ID NO: 801706 - RNA, 20 nt, Artificial Sequence
  Synthetic
aagugacugcuuuucuauuc

SEQ ID NO: 801707 - RNA, 20 nt, Artificial Sequence
  Synthetic
uggcacuuuucacaguauuc

SEQ ID NO: 801708 - RNA, 20 nt, Artificial Sequence
  Synthetic
augugaaugaaagaguauuc

SEQ ID NO: 801709 - RNA, 20 nt, Artificial Sequence
  Synthetic
ugcauauuucuaauguauuc

SEQ ID NO: 801710 - RNA, 20 nt, Artificial Sequence
  Synthetic
uucugguucuuaauguauuc

SEQ ID NO: 801711 - RNA, 20 nt, Artificial Sequence
  Synthetic
cccaucagugugcuguauuc

SEQ ID NO: 801712 - RNA, 20 nt, Artificial Sequence
  Synthetic
accaucagugugguguauuc

SEQ ID NO: 801713 - RNA, 20 nt, Artificial Sequence
  Synthetic
uacugaacauuuguguauuc

SEQ ID NO: 801714 - RNA, 20 nt, Artificial Sequence
  Synthetic
uauuagggucucuuguauuc

SEQ ID NO: 801715 - RNA, 20 nt, Artificial Sequence
  Synthetic
aaacaguuuaguuuguauuc

SEQ ID NO: 801716 - RNA, 20 nt, Artificial Sequence
  Synthetic
uaaagauacaaaaauuauuc

SEQ ID NO: 801717 - RNA, 20 nt, Artificial Sequence
  Synthetic
agugauaaggcaaauuauuc

SEQ ID NO: 801718 - RNA, 20 nt, Artificial Sequence
  Synthetic
uugagcucacucaauuauuc

SEQ ID NO: 801719 - RNA, 20 nt, Artificial Sequence
  Synthetic
uuacugaguuuuaauuauuc

SEQ ID NO: 801720 - RNA, 20 nt, Artificial Sequence
  Synthetic
cauuuggucaaacauuauuc

SEQ ID NO: 801721 - RNA, 20 nt, Artificial Sequence
  Synthetic
uauuuggucaaacauuauuc

SEQ ID NO: 801722 - RNA, 20 nt, Artificial Sequence
  Synthetic
ugagguaggcaguauuauuc

SEQ ID NO: 801723 - RNA, 20 nt, Artificial Sequence
  Synthetic
auaaugaaucauuauuauuc

SEQ ID NO: 801724 - RNA, 20 nt, Artificial Sequence
  Synthetic
uuuuguagauauuauuauuc

SEQ ID NO: 801725 - RNA, 20 nt, Artificial Sequence
  Synthetic
uuuaaaaaaaaaacuuauuc

SEQ ID NO: 801726 - RNA, 20 nt, Artificial Sequence
  Synthetic
aguccucucccaacuuauuc

SEQ ID NO: 801727 - RNA, 20 nt, Artificial Sequence
  Synthetic
ccuucuaugaacacuuauuc

SEQ ID NO: 801728 - RNA, 20 nt, Artificial Sequence
  Synthetic
uaguuacacacuucuuauuc

SEQ ID NO: 801729 - RNA, 20 nt, Artificial Sequence
  Synthetic
uuuccccaguuaauuuauuc

SEQ ID NO: 801730 - RNA, 20 nt, Artificial Sequence
  Synthetic
uuuccuauugacauuuauuc

SEQ ID NO: 801731 - RNA, 20 nt, Artificial Sequence
  Synthetic
uucuacacagcuauuuauuc

SEQ ID NO: 801732 - RNA, 20 nt, Artificial Sequence
  Synthetic
ugguaaggaagacuuuauuc

SEQ ID NO: 801733 - RNA, 20 nt, Artificial Sequence
  Synthetic
uucaaccaauuacuuuauuc

SEQ ID NO: 801734 - RNA, 20 nt, Artificial Sequence
  Synthetic
cucucccuugcucuuuauuc

SEQ ID NO: 801735 - RNA, 20 nt, Artificial Sequence
  Synthetic
caaguuuaaauucuuuauuc

SEQ ID NO: 801736 - RNA, 20 nt, Artificial Sequence
  Synthetic
agcuuuacucuuguuuauuc

SEQ ID NO: 801737 - RNA, 20 nt, Artificial Sequence
  Synthetic
uuuauaguuuguuuuuauuc

SEQ ID NO: 801738 - RNA, 20 nt, Artificial Sequence
  Synthetic
aaaaaaaagauuuuuuauuc

SEQ ID NO: 801739 - RNA, 20 nt, Artificial Sequence
  Synthetic
acacaacauagaaaaacuuc

SEQ ID NO: 801740 - RNA, 20 nt, Artificial Sequence
  Synthetic
uauggaccauugaaaacuuc

SEQ ID NO: 801741 - RNA, 20 nt, Artificial Sequence
  Synthetic
cuuguuaaauguaaaacuuc

SEQ ID NO: 801742 - RNA, 20 nt, Artificial Sequence
  Synthetic
caaauaugccuuaaaacuuc

SEQ ID NO: 801743 - RNA, 20 nt, Artificial Sequence
  Synthetic
ccaggcuagacucaaacuuc

SEQ ID NO: 801744 - RNA, 20 nt, Artificial Sequence
  Synthetic
ccagacuggucucaaacuuc

SEQ ID NO: 801745 - RNA, 20 nt, Artificial Sequence
  Synthetic
acuuaccccuucuaaacuuc

SEQ ID NO: 801746 - RNA, 20 nt, Artificial Sequence
  Synthetic
acccagaguuuagcaacuuc

SEQ ID NO: 801747 - RNA, 20 nt, Artificial Sequence
  Synthetic
uaaauaaauacugcaacuuc

SEQ ID NO: 801748 - RNA, 20 nt, Artificial Sequence
  Synthetic
aaucuuagacguucaacuuc

SEQ ID NO: 801749 - RNA, 20 nt, Artificial Sequence
  Synthetic
accaaaaggaaaagaacuuc

SEQ ID NO: 801750 - RNA, 20 nt, Artificial Sequence
  Synthetic
aacucauucaugagaacuuc

SEQ ID NO: 801751 - RNA, 20 nt, Artificial Sequence
  Synthetic
cucacucucuggggaacuuc

SEQ ID NO: 801752 - RNA, 20 nt, Artificial Sequence
  Synthetic
aaauagugaacaugaacuuc

SEQ ID NO: 801753 - RNA, 20 nt, Artificial Sequence
  Synthetic
caggguggcaacugaacuuc

SEQ ID NO: 801754 - RNA, 20 nt, Artificial Sequence
  Synthetic
uuagcccagcagugaacuuc

SEQ ID NO: 801755 - RNA, 20 nt, Artificial Sequence
  Synthetic
ccagguugcucuugaacuuc

SEQ ID NO: 801756 - RNA, 20 nt, Artificial Sequence
  Synthetic
aaugacugauguauaacuuc

SEQ ID NO: 801757 - RNA, 20 nt, Artificial Sequence
  Synthetic
caagcuuuucuccuaacuuc

SEQ ID NO: 801758 - RNA, 20 nt, Artificial Sequence
  Synthetic
uaauuaucuuguguaacuuc

SEQ ID NO: 801759 - RNA, 20 nt, Artificial Sequence
  Synthetic
cccuauuuuucauuaacuuc

SEQ ID NO: 801760 - RNA, 20 nt, Artificial Sequence
  Synthetic
aguuuccaauuugacacuuc

SEQ ID NO: 801761 - RNA, 20 nt, Artificial Sequence
  Synthetic
uugcuugauuuugacacuuc

SEQ ID NO: 801762 - RNA, 20 nt, Artificial Sequence
  Synthetic
uguuccagaaaucccacuuc

SEQ ID NO: 801763 - RNA, 20 nt, Artificial Sequence
  Synthetic
caauacaccuuucccacuuc

SEQ ID NO: 801764 - RNA, 20 nt, Artificial Sequence
  Synthetic
uguuaggaaagauccacuuc

SEQ ID NO: 801765 - RNA, 20 nt, Artificial Sequence
  Synthetic
ugauccaauaauuccacuuc

SEQ ID NO: 801766 - RNA, 20 nt, Artificial Sequence
  Synthetic
cauaaacuuuccagcacuuc

SEQ ID NO: 801767 - RNA, 20 nt, Artificial Sequence
  Synthetic
cuaaugucaaauaucacuuc

SEQ ID NO: 801768 - RNA, 20 nt, Artificial Sequence
  Synthetic
aggaauaaauguaucacuuc

SEQ ID NO: 801769 - RNA, 20 nt, Artificial Sequence
  Synthetic
uuuuaccaaaugcucacuuc

SEQ ID NO: 801770 - RNA, 20 nt, Artificial Sequence
  Synthetic
aguuugugauauuucacuuc

SEQ ID NO: 801771 - RNA, 20 nt, Artificial Sequence
  Synthetic
aacucauugucucagacuuc

SEQ ID NO: 801772 - RNA, 20 nt, Artificial Sequence
  Synthetic
agagaagcccuuucgacuuc

SEQ ID NO: 801773 - RNA, 20 nt, Artificial Sequence
  Synthetic
aaucagaguacuuggacuuc

SEQ ID NO: 801774 - RNA, 20 nt, Artificial Sequence
  Synthetic
acugauugacauaugacuuc

SEQ ID NO: 801775 - RNA, 20 nt, Artificial Sequence
  Synthetic
uuugucaucuuucugacuuc

SEQ ID NO: 801776 - RNA, 20 nt, Artificial Sequence
  Synthetic
uaguguuuccaagauacuuc

SEQ ID NO: 801777 - RNA, 20 nt, Artificial Sequence
  Synthetic
ugccaucuuggauauacuuc

SEQ ID NO: 801778 - RNA, 20 nt, Artificial Sequence
  Synthetic
aaaccuuuaaaaccuacuuc

SEQ ID NO: 801779 - RNA, 20 nt, Artificial Sequence
  Synthetic
augucacuggcaucuacuuc

SEQ ID NO: 801780 - RNA, 20 nt, Artificial Sequence
  Synthetic
uaaauaaucauuucuacuuc

SEQ ID NO: 801781 - RNA, 20 nt, Artificial Sequence
  Synthetic
acagagacaguuucuacuuc

SEQ ID NO: 801782 - RNA, 20 nt, Artificial Sequence
  Synthetic
uuaauuuaucuaaguacuuc

SEQ ID NO: 801783 - RNA, 20 nt, Artificial Sequence
  Synthetic
auuguucuggcuaguacuuc

SEQ ID NO: 801784 - RNA, 20 nt, Artificial Sequence
  Synthetic
augaccccaugaauuacuuc

SEQ ID NO: 801785 - RNA, 20 nt, Artificial Sequence
  Synthetic
uuauacacagccauuacuuc

SEQ ID NO: 801786 - RNA, 20 nt, Artificial Sequence
  Synthetic
aucuaauuuuauguuacuuc

SEQ ID NO: 801787 - RNA, 20 nt, Artificial Sequence
  Synthetic
aucuauagguauuuuacuuc

SEQ ID NO: 801788 - RNA, 20 nt, Artificial Sequence
  Synthetic
ugcucucuccuuccaccuuc

SEQ ID NO: 801789 - RNA, 20 nt, Artificial Sequence
  Synthetic
ugauguucuaugucaccuuc

SEQ ID NO: 801790 - RNA, 20 nt, Artificial Sequence
  Synthetic
auggaaaauuauggaccuuc

SEQ ID NO: 801791 - RNA, 20 nt, Artificial Sequence
  Synthetic
caguuggggaggugaccuuc

SEQ ID NO: 801792 - RNA, 20 nt, Artificial Sequence
  Synthetic
cuuccuuaaagguuaccuuc

SEQ ID NO: 801793 - RNA, 20 nt, Artificial Sequence
  Synthetic
uuuugcaagguuuuaccuuc

SEQ ID NO: 801794 - RNA, 20 nt, Artificial Sequence
  Synthetic
aauuuagucauuaacccuuc

SEQ ID NO: 801795 - RNA, 20 nt, Artificial Sequence
  Synthetic
acuucagacaaggccccuuc

SEQ ID NO: 801796 - RNA, 20 nt, Artificial Sequence
  Synthetic
auaaucagcuugagcccuuc

SEQ ID NO: 801797 - RNA, 20 nt, Artificial Sequence
  Synthetic
caaaaauccuagggcccuuc

SEQ ID NO: 801798 - RNA, 20 nt, Artificial Sequence
  Synthetic
uaauuuuccccacucccuuc

SEQ ID NO: 801799 - RNA, 20 nt, Artificial Sequence
  Synthetic
cuucaacugucagucccuuc

SEQ ID NO: 801800 - RNA, 20 nt, Artificial Sequence
  Synthetic
ugggaugggcgauucccuuc

SEQ ID NO: 801801 - RNA, 20 nt, Artificial Sequence
  Synthetic
uguggcaacagaaagccuuc

SEQ ID NO: 801802 - RNA, 20 nt, Artificial Sequence
  Synthetic
auccuagggacauggccuuc

SEQ ID NO: 801803 - RNA, 20 nt, Artificial Sequence
  Synthetic
augaagcacguauggccuuc

SEQ ID NO: 801804 - RNA, 20 nt, Artificial Sequence
  Synthetic
uuagaaaaucaaaugccuuc

SEQ ID NO: 801805 - RNA, 20 nt, Artificial Sequence
  Synthetic
cuauauuuccuucugccuuc

SEQ ID NO: 801806 - RNA, 20 nt, Artificial Sequence
  Synthetic
agguuuagacaugugccuuc

SEQ ID NO: 801807 - RNA, 20 nt, Artificial Sequence
  Synthetic
aaggcuaggguauugccuuc

SEQ ID NO: 801808 - RNA, 20 nt, Artificial Sequence
  Synthetic
aggauuauucucuugccuuc

SEQ ID NO: 801809 - RNA, 20 nt, Artificial Sequence
  Synthetic
cugcauaauauuuugccuuc

SEQ ID NO: 801810 - RNA, 20 nt, Artificial Sequence
  Synthetic
augacaaaaaaaaauccuuc

SEQ ID NO: 801811 - RNA, 20 nt, Artificial Sequence
  Synthetic
uuuucaggaagcaauccuuc

SEQ ID NO: 801812 - RNA, 20 nt, Artificial Sequence
  Synthetic
uaauauuuauuuaauccuuc

SEQ ID NO: 801813 - RNA, 20 nt, Artificial Sequence
  Synthetic
uuuucuuaucaucauccuuc

SEQ ID NO: 801814 - RNA, 20 nt, Artificial Sequence
  Synthetic
cagcuguuuguauauccuuc

SEQ ID NO: 801815 - RNA, 20 nt, Artificial Sequence
  Synthetic
cuguguuucucagcuccuuc

SEQ ID NO: 801816 - RNA, 20 nt, Artificial Sequence
  Synthetic
aggcauucaucuucuccuuc

SEQ ID NO: 801817 - RNA, 20 nt, Artificial Sequence
  Synthetic
uaugccacaaguucuccuuc

SEQ ID NO: 801818 - RNA, 20 nt, Artificial Sequence
  Synthetic
aauuccaccuucaguccuuc

SEQ ID NO: 801819 - RNA, 20 nt, Artificial Sequence
  Synthetic
uagaaccuggaggguccuuc

SEQ ID NO: 801820 - RNA, 20 nt, Artificial Sequence
  Synthetic
cuguguccauucauuccuuc

SEQ ID NO: 801821 - RNA, 20 nt, Artificial Sequence
  Synthetic
ccauguuuagugauuccuuc

SEQ ID NO: 801822 - RNA, 20 nt, Artificial Sequence
  Synthetic
uuuuuaaccacuauuccuuc

SEQ ID NO: 801823 - RNA, 20 nt, Artificial Sequence
  Synthetic
ccauguuuagcgcuuccuuc

SEQ ID NO: 801824 - RNA, 20 nt, Artificial Sequence
  Synthetic
ccaggcucugaucuuccuuc

SEQ ID NO: 801825 - RNA, 20 nt, Artificial Sequence
  Synthetic
uuuugcccauaagaagcuuc

SEQ ID NO: 801826 - RNA, 20 nt, Artificial Sequence
  Synthetic
uuuauucucccuuaagcuuc

SEQ ID NO: 801827 - RNA, 20 nt, Artificial Sequence
  Synthetic
cuaaggaaagacacagcuuc

SEQ ID NO: 801828 - RNA, 20 nt, Artificial Sequence
  Synthetic
uccuugccucuuccagcuuc

SEQ ID NO: 801829 - RNA, 20 nt, Artificial Sequence
  Synthetic
accagcaucuacucagcuuc

SEQ ID NO: 801830 - RNA, 20 nt, Artificial Sequence
  Synthetic
ccagucacagagcuagcuuc

SEQ ID NO: 801831 - RNA, 20 nt, Artificial Sequence
  Synthetic
ugaaguauagaguuagcuuc

SEQ ID NO: 801832 - RNA, 20 nt, Artificial Sequence
  Synthetic
caguugcugaaacaggcuuc

SEQ ID NO: 801833 - RNA, 20 nt, Artificial Sequence
  Synthetic
cagagaagcaggcaggcuuc

SEQ ID NO: 801834 - RNA, 20 nt, Artificial Sequence
  Synthetic
ucuccuucuguggaggcuuc

SEQ ID NO: 801835 - RNA, 20 nt, Artificial Sequence
  Synthetic
aacacacccucuggggcuuc

SEQ ID NO: 801836 - RNA, 20 nt, Artificial Sequence
  Synthetic
caagugcuuggcugggcuuc

SEQ ID NO: 801837 - RNA, 20 nt, Artificial Sequence
  Synthetic
uuuuccaaaauaauggcuuc

SEQ ID NO: 801838 - RNA, 20 nt, Artificial Sequence
  Synthetic
aaaaggaucacacuggcuuc

SEQ ID NO: 801839 - RNA, 20 nt, Artificial Sequence
  Synthetic
aagacagauuaccuggcuuc

SEQ ID NO: 801840 - RNA, 20 nt, Artificial Sequence
  Synthetic
accguuacugacaaugcuuc

SEQ ID NO: 801841 - RNA, 20 nt, Artificial Sequence
  Synthetic
uguauuauauccaaugcuuc

SEQ ID NO: 801842 - RNA, 20 nt, Artificial Sequence
  Synthetic
aagaaauguaaauaugcuuc

SEQ ID NO: 801843 - RNA, 20 nt, Artificial Sequence
  Synthetic
acuuuaaaaauauaugcuuc

SEQ ID NO: 801844 - RNA, 20 nt, Artificial Sequence
  Synthetic
aggagaugcugcuaugcuuc

SEQ ID NO: 801845 - RNA, 20 nt, Artificial Sequence
  Synthetic
uuuaguaucacuuaugcuuc

SEQ ID NO: 801846 - RNA, 20 nt, Artificial Sequence
  Synthetic
auagucucaugaccugcuuc

SEQ ID NO: 801847 - RNA, 20 nt, Artificial Sequence
  Synthetic
cucccuuucccuccugcuuc

SEQ ID NO: 801848 - RNA, 20 nt, Artificial Sequence
  Synthetic
uguauguaugaaucugcuuc

SEQ ID NO: 801849 - RNA, 20 nt, Artificial Sequence
  Synthetic
aaaacaaucugaucugcuuc

SEQ ID NO: 801850 - RNA, 20 nt, Artificial Sequence
  Synthetic
uccacuguugauucugcuuc

SEQ ID NO: 801851 - RNA, 20 nt, Artificial Sequence
  Synthetic
ucccugaccccuugugcuuc

SEQ ID NO: 801852 - RNA, 20 nt, Artificial Sequence
  Synthetic
augagaaugcuuugugcuuc

SEQ ID NO: 801853 - RNA, 20 nt, Artificial Sequence
  Synthetic
cuaaaacaaaacauugcuuc

SEQ ID NO: 801854 - RNA, 20 nt, Artificial Sequence
  Synthetic
uuucuagaagucauugcuuc

SEQ ID NO: 801855 - RNA, 20 nt, Artificial Sequence
  Synthetic
aaaguuuuauuacuugcuuc

SEQ ID NO: 801856 - RNA, 20 nt, Artificial Sequence
  Synthetic
auaucuuuguuucuugcuuc

SEQ ID NO: 801857 - RNA, 20 nt, Artificial Sequence
  Synthetic
caaccucaggugguugcuuc

SEQ ID NO: 801858 - RNA, 20 nt, Artificial Sequence
  Synthetic
uuauccauauucuuugcuuc

SEQ ID NO: 801859 - RNA, 20 nt, Artificial Sequence
  Synthetic
cugaauauuuaguuugcuuc

SEQ ID NO: 801860 - RNA, 20 nt, Artificial Sequence
  Synthetic
cuccucugcucaaaaucuuc

SEQ ID NO: 801861 - RNA, 20 nt, Artificial Sequence
  Synthetic
uggguaaacugaaaaucuuc

SEQ ID NO: 801862 - RNA, 20 nt, Artificial Sequence
  Synthetic
uuagaacauucgaaaucuuc

SEQ ID NO: 801863 - RNA, 20 nt, Artificial Sequence
  Synthetic
cauuuuuaaacuaaaucuuc

SEQ ID NO: 801864 - RNA, 20 nt, Artificial Sequence
  Synthetic
uaauuuugccaccaaucuuc

SEQ ID NO: 801865 - RNA, 20 nt, Artificial Sequence
  Synthetic
aaugccgauguauaaucuuc

SEQ ID NO: 801866 - RNA, 20 nt, Artificial Sequence
  Synthetic
cauaacagcccuuaaucuuc

SEQ ID NO: 801867 - RNA, 20 nt, Artificial Sequence
  Synthetic
uuuuauaccuguccaucuuc

SEQ ID NO: 801868 - RNA, 20 nt, Artificial Sequence
  Synthetic
uucuuuucuauugcaucuuc

SEQ ID NO: 801869 - RNA, 20 nt, Artificial Sequence
  Synthetic
uuuguuuacaucucaucuuc

SEQ ID NO: 801870 - RNA, 20 nt, Artificial Sequence
  Synthetic
uaacuucaacaaagaucuuc

SEQ ID NO: 801871 - RNA, 20 nt, Artificial Sequence
  Synthetic
aguaacuugugaagaucuuc

SEQ ID NO: 801872 - RNA, 20 nt, Artificial Sequence
  Synthetic
cuguugcaccucagaucuuc

SEQ ID NO: 801873 - RNA, 20 nt, Artificial Sequence
  Synthetic
uagauauuagcuugaucuuc

SEQ ID NO: 801874 - RNA, 20 nt, Artificial Sequence
  Synthetic
uagauguuaguuugaucuuc

SEQ ID NO: 801875 - RNA, 20 nt, Artificial Sequence
  Synthetic
ugggcuggcugaauaucuuc

SEQ ID NO: 801876 - RNA, 20 nt, Artificial Sequence
  Synthetic
aagguaauuaauauaucuuc

SEQ ID NO: 801877 - RNA, 20 nt, Artificial Sequence
  Synthetic
ugacaugaauaucuaucuuc

SEQ ID NO: 801878 - RNA, 20 nt, Artificial Sequence
  Synthetic
uuaaauauuagcuuaucuuc

SEQ ID NO: 801879 - RNA, 20 nt, Artificial Sequence
  Synthetic
caaguuggaaaacacucuuc

SEQ ID NO: 801880 - RNA, 20 nt, Artificial Sequence
  Synthetic
cuauguacuaggcacucuuc

SEQ ID NO: 801881 - RNA, 20 nt, Artificial Sequence
  Synthetic
aagaacuugaacuacucuuc

SEQ ID NO: 801882 - RNA, 20 nt, Artificial Sequence
  Synthetic
cacugagaucaucccucuuc

SEQ ID NO: 801883 - RNA, 20 nt, Artificial Sequence
  Synthetic
agacauacuugucccucuuc

SEQ ID NO: 801884 - RNA, 20 nt, Artificial Sequence
  Synthetic
ugaugaauaaacagcucuuc

SEQ ID NO: 801885 - RNA, 20 nt, Artificial Sequence
  Synthetic
cuucuccuuaauagcucuuc

SEQ ID NO: 801886 - RNA, 20 nt, Artificial Sequence
  Synthetic
uuggugacaagcugcucuuc

SEQ ID NO: 801887 - RNA, 20 nt, Artificial Sequence
  Synthetic
ucaguuucuguaaucucuuc

SEQ ID NO: 801888 - RNA, 20 nt, Artificial Sequence
  Synthetic
uauuggcccccacucucuuc

SEQ ID NO: 801889 - RNA, 20 nt, Artificial Sequence
  Synthetic
agaagacugcuccucucuuc

SEQ ID NO: 801890 - RNA, 20 nt, Artificial Sequence
  Synthetic
aaauaaaaaucucucucuuc

SEQ ID NO: 801891 - RNA, 20 nt, Artificial Sequence
  Synthetic
aaaaugaaaucauucucuuc

SEQ ID NO: 801892 - RNA, 20 nt, Artificial Sequence
  Synthetic
ucuaacuccugcuucucuuc

SEQ ID NO: 801893 - RNA, 20 nt, Artificial Sequence
  Synthetic
uucuuugcucucuucucuuc

SEQ ID NO: 801894 - RNA, 20 nt, Artificial Sequence
  Synthetic
acuuaucaggucuucucuuc

SEQ ID NO: 801895 - RNA, 20 nt, Artificial Sequence
  Synthetic
ccccuacucuaguucucuuc

SEQ ID NO: 801896 - RNA, 20 nt, Artificial Sequence
  Synthetic
ucuuacacaauuuucucuuc

SEQ ID NO: 801897 - RNA, 20 nt, Artificial Sequence
  Synthetic
uggaccuuaauuuucucuuc

SEQ ID NO: 801898 - RNA, 20 nt, Artificial Sequence
  Synthetic
ucuuugggaaauaagucuuc

SEQ ID NO: 801899 - RNA, 20 nt, Artificial Sequence
  Synthetic
ucagaugaugugcagucuuc

SEQ ID NO: 801900 - RNA, 20 nt, Artificial Sequence
  Synthetic
agcuggggaucagagucuuc

SEQ ID NO: 801901 - RNA, 20 nt, Artificial Sequence
  Synthetic
aauauuauucuaccgucuuc

SEQ ID NO: 801902 - RNA, 20 nt, Artificial Sequence
  Synthetic
ucauuuuguguauggucuuc

SEQ ID NO: 801903 - RNA, 20 nt, Artificial Sequence
  Synthetic
acuacacaaaauaugucuuc

SEQ ID NO: 801904 - RNA, 20 nt, Artificial Sequence
  Synthetic
aauguuucccuacugucuuc

SEQ ID NO: 801905 - RNA, 20 nt, Artificial Sequence
  Synthetic
aaagacucucaccugucuuc

SEQ ID NO: 801906 - RNA, 20 nt, Artificial Sequence
  Synthetic
cuucagagguacuugucuuc

SEQ ID NO: 801907 - RNA, 20 nt, Artificial Sequence
  Synthetic
cuauauauguuuuugucuuc

SEQ ID NO: 801908 - RNA, 20 nt, Artificial Sequence
  Synthetic
ugcacaagaaacaauucuuc

SEQ ID NO: 801909 - RNA, 20 nt, Artificial Sequence
  Synthetic
ugaagcuuucccaauucuuc

SEQ ID NO: 801910 - RNA, 20 nt, Artificial Sequence
  Synthetic
uaucuuugacugaauucuuc

SEQ ID NO: 801911 - RNA, 20 nt, Artificial Sequence
  Synthetic
uucaaauuuguuaauucuuc

SEQ ID NO: 801912 - RNA, 20 nt, Artificial Sequence
  Synthetic
uauucuuagugucauucuuc

SEQ ID NO: 801913 - RNA, 20 nt, Artificial Sequence
  Synthetic
ugcacuacaaaggauucuuc

SEQ ID NO: 801914 - RNA, 20 nt, Artificial Sequence
  Synthetic
acaucuucuguaacuucuuc

SEQ ID NO: 801915 - RNA, 20 nt, Artificial Sequence
  Synthetic
aaauugugauauacuucuuc

SEQ ID NO: 801916 - RNA, 20 nt, Artificial Sequence
  Synthetic
uggggaaaaagugcuucuuc

SEQ ID NO: 801917 - RNA, 20 nt, Artificial Sequence
  Synthetic
ucucacugagcaucuucuuc

SEQ ID NO: 801918 - RNA, 20 nt, Artificial Sequence
  Synthetic
agcauggugacugguucuuc

SEQ ID NO: 801919 - RNA, 20 nt, Artificial Sequence
  Synthetic
uugucuuguucauguucuuc

SEQ ID NO: 801920 - RNA, 20 nt, Artificial Sequence
  Synthetic
uguacagauagauguucuuc

SEQ ID NO: 801921 - RNA, 20 nt, Artificial Sequence
  Synthetic
cucugaccugccuguucuuc

SEQ ID NO: 801922 - RNA, 20 nt, Artificial Sequence
  Synthetic
auacaagauuuuuguucuuc

SEQ ID NO: 801923 - RNA, 20 nt, Artificial Sequence
  Synthetic
uuuuuaugcaucauuucuuc

SEQ ID NO: 801924 - RNA, 20 nt, Artificial Sequence
  Synthetic
cuuaaagagcugauuucuuc

SEQ ID NO: 801925 - RNA, 20 nt, Artificial Sequence
  Synthetic
ccugauauauuccuuucuuc

SEQ ID NO: 801926 - RNA, 20 nt, Artificial Sequence
  Synthetic
ucuuaauauacucuuucuuc

SEQ ID NO: 801927 - RNA, 20 nt, Artificial Sequence
  Synthetic
ucuuuaauagcaguuucuuc

SEQ ID NO: 801928 - RNA, 20 nt, Artificial Sequence
  Synthetic
uguuugcuuuggguuucuuc

SEQ ID NO: 801929 - RNA, 20 nt, Artificial Sequence
  Synthetic
cucuuaucucuauuuucuuc

SEQ ID NO: 801930 - RNA, 20 nt, Artificial Sequence
  Synthetic
uucauacacuccuuuucuuc

SEQ ID NO: 801931 - RNA, 20 nt, Artificial Sequence
  Synthetic
ucccgucuuuccuuuucuuc

SEQ ID NO: 801932 - RNA, 20 nt, Artificial Sequence
  Synthetic
cuuuguuauuucuuuucuuc

SEQ ID NO: 801933 - RNA, 20 nt, Artificial Sequence
  Synthetic
uauaauuucagguuuucuuc

SEQ ID NO: 801934 - RNA, 20 nt, Artificial Sequence
  Synthetic
uaaaguacaucaaaaaguuc

SEQ ID NO: 801935 - RNA, 20 nt, Artificial Sequence
  Synthetic
aaaggucuuugucaaaguuc

SEQ ID NO: 801936 - RNA, 20 nt, Artificial Sequence
  Synthetic
aggagaagaaaugaaaguuc

SEQ ID NO: 801937 - RNA, 20 nt, Artificial Sequence
  Synthetic
ucuugcuugagaccaaguuc

SEQ ID NO: 801938 - RNA, 20 nt, Artificial Sequence
  Synthetic
aacugggauuuaagaaguuc

SEQ ID NO: 801939 - RNA, 20 nt, Artificial Sequence
  Synthetic
ucaguuuauuugagaaguuc

SEQ ID NO: 801940 - RNA, 20 nt, Artificial Sequence
  Synthetic
agguaguucucaggaaguuc

SEQ ID NO: 801941 - RNA, 20 nt, Artificial Sequence
  Synthetic
caguauuguacuggaaguuc

SEQ ID NO: 801942 - RNA, 20 nt, Artificial Sequence
  Synthetic
caacauaguguuggaaguuc

SEQ ID NO: 801943 - RNA, 20 nt, Artificial Sequence
  Synthetic
uagacaggaggaauaaguuc

SEQ ID NO: 801944 - RNA, 20 nt, Artificial Sequence
  Synthetic
uuuuaauuauacuuaaguuc

SEQ ID NO: 801945 - RNA, 20 nt, Artificial Sequence
  Synthetic
ugaacaacuuucuuaaguuc

SEQ ID NO: 801946 - RNA, 20 nt, Artificial Sequence
  Synthetic
uuaaauuauacuuuaaguuc

SEQ ID NO: 801947 - RNA, 20 nt, Artificial Sequence
  Synthetic
cauuauuauacuuuaaguuc

SEQ ID NO: 801948 - RNA, 20 nt, Artificial Sequence
  Synthetic
uauuauuauacuuuaaguuc

SEQ ID NO: 801949 - RNA, 20 nt, Artificial Sequence
  Synthetic
uuuaauuuuacuuuaaguuc

SEQ ID NO: 801950 - RNA, 20 nt, Artificial Sequence
  Synthetic
uuaacuuuuauuuuaaguuc

SEQ ID NO: 801951 - RNA, 20 nt, Artificial Sequence
  Synthetic
auuuuuucacuuuuaaguuc

SEQ ID NO: 801952 - RNA, 20 nt, Artificial Sequence
  Synthetic
aaacugcuugaaaacaguuc

SEQ ID NO: 801953 - RNA, 20 nt, Artificial Sequence
  Synthetic
aauguauucacucacaguuc

SEQ ID NO: 801954 - RNA, 20 nt, Artificial Sequence
  Synthetic
aauguauuggcucacaguuc

SEQ ID NO: 801955 - RNA, 20 nt, Artificial Sequence
  Synthetic
uacaucauuucucacaguuc

SEQ ID NO: 801956 - RNA, 20 nt, Artificial Sequence
  Synthetic
aaucuuauuucucacaguuc

SEQ ID NO: 801957 - RNA, 20 nt, Artificial Sequence
  Synthetic
agucuguugucuuacaguuc

SEQ ID NO: 801958 - RNA, 20 nt, Artificial Sequence
  Synthetic
cuuuaggguucacccaguuc

SEQ ID NO: 801959 - RNA, 20 nt, Artificial Sequence
  Synthetic
caagccacguauuccaguuc

SEQ ID NO: 801960 - RNA, 20 nt, Artificial Sequence
  Synthetic
aaauguauuucuugcaguuc

SEQ ID NO: 801961 - RNA, 20 nt, Artificial Sequence
  Synthetic
accaagagaaguugcaguuc

SEQ ID NO: 801962 - RNA, 20 nt, Artificial Sequence
  Synthetic
acggaauccauccucaguuc

SEQ ID NO: 801963 - RNA, 20 nt, Artificial Sequence
  Synthetic
auauuuagcaaucucaguuc

SEQ ID NO: 801964 - RNA, 20 nt, Artificial Sequence
  Synthetic
aacuuaauuucuuucaguuc

SEQ ID NO: 801965 - RNA, 20 nt, Artificial Sequence
  Synthetic
uugcaagaugagaagaguuc

SEQ ID NO: 801966 - RNA, 20 nt, Artificial Sequence
  Synthetic
aucacguauuaccagaguuc

SEQ ID NO: 801967 - RNA, 20 nt, Artificial Sequence
  Synthetic
ucuagauucuaguagaguuc

SEQ ID NO: 801968 - RNA, 20 nt, Artificial Sequence
  Synthetic
cugcuguggaaaaggaguuc

SEQ ID NO: 801969 - RNA, 20 nt, Artificial Sequence
  Synthetic
ucacuugaauucaggaguuc

SEQ ID NO: 801970 - RNA, 20 nt, Artificial Sequence
  Synthetic
agaucacuuauagggaguuc

SEQ ID NO: 801971 - RNA, 20 nt, Artificial Sequence
  Synthetic
ucagauuuucaggggaguuc

SEQ ID NO: 801972 - RNA, 20 nt, Artificial Sequence
  Synthetic
cucuuuuucuaacugaguuc

SEQ ID NO: 801973 - RNA, 20 nt, Artificial Sequence
  Synthetic
agugcauuuugccugaguuc

SEQ ID NO: 801974 - RNA, 20 nt, Artificial Sequence
  Synthetic
uaaauaugccuaaauaguuc

SEQ ID NO: 801975 - RNA, 20 nt, Artificial Sequence
  Synthetic
acaaaacuccauaauaguuc

SEQ ID NO: 801976 - RNA, 20 nt, Artificial Sequence
  Synthetic
acucuuuuuuaacauaguuc

SEQ ID NO: 801977 - RNA, 20 nt, Artificial Sequence
  Synthetic
cauggauggcuccauaguuc

SEQ ID NO: 801978 - RNA, 20 nt, Artificial Sequence
  Synthetic
ccaaugauuaucucuaguuc

SEQ ID NO: 801979 - RNA, 20 nt, Artificial Sequence
  Synthetic
cuuucuuaagacuguaguuc

SEQ ID NO: 801980 - RNA, 20 nt, Artificial Sequence
  Synthetic
uaaaaaggaagaauuaguuc

SEQ ID NO: 801981 - RNA, 20 nt, Artificial Sequence
  Synthetic
uagaaaggaagaauuaguuc

SEQ ID NO: 801982 - RNA, 20 nt, Artificial Sequence
  Synthetic
aauugcuugaacauuaguuc

SEQ ID NO: 801983 - RNA, 20 nt, Artificial Sequence
  Synthetic
cacuacauauucauuaguuc

SEQ ID NO: 801984 - RNA, 20 nt, Artificial Sequence
  Synthetic
aaacuugaguuuuaacguuc

SEQ ID NO: 801985 - RNA, 20 nt, Artificial Sequence
  Synthetic
accaagauugcaguacguuc

SEQ ID NO: 801986 - RNA, 20 nt, Artificial Sequence
  Synthetic
uauuauuauacuuuacguuc

SEQ ID NO: 801987 - RNA, 20 nt, Artificial Sequence
  Synthetic
accuuuauuucucaccguuc

SEQ ID NO: 801988 - RNA, 20 nt, Artificial Sequence
  Synthetic
agggccucagcugaccguuc

SEQ ID NO: 801989 - RNA, 20 nt, Artificial Sequence
  Synthetic
uacucguuacugguccguuc

SEQ ID NO: 801990 - RNA, 20 nt, Artificial Sequence
  Synthetic
uuggaggagaagaggcguuc

SEQ ID NO: 801991 - RNA, 20 nt, Artificial Sequence
  Synthetic
aauauucucaaaccucguuc

SEQ ID NO: 801992 - RNA, 20 nt, Artificial Sequence
  Synthetic
caagaaaauauguuucguuc

SEQ ID NO: 801993 - RNA, 20 nt, Artificial Sequence
  Synthetic
aauaaauaugaucaagguuc

SEQ ID NO: 801994 - RNA, 20 nt, Artificial Sequence
  Synthetic
uagucaaaaauaacagguuc

SEQ ID NO: 801995 - RNA, 20 nt, Artificial Sequence
  Synthetic
cacagcauauucacagguuc

SEQ ID NO: 801996 - RNA, 20 nt, Artificial Sequence
  Synthetic
uuuuauaugggaccagguuc

SEQ ID NO: 801997 - RNA, 20 nt, Artificial Sequence
  Synthetic
aaccuccgcgucccagguuc

SEQ ID NO: 801998 - RNA, 20 nt, Artificial Sequence
  Synthetic
ccaaacacugaucuagguuc

SEQ ID NO: 801999 - RNA, 20 nt, Artificial Sequence
  Synthetic
agauuccuuuugguagguuc

SEQ ID NO: 802000 - RNA, 20 nt, Artificial Sequence
  Synthetic
auaacuuuuaaauuagguuc

SEQ ID NO: 802001 - RNA, 20 nt, Artificial Sequence
  Synthetic
aacagggacagauuagguuc

SEQ ID NO: 802002 - RNA, 20 nt, Artificial Sequence
  Synthetic
cucaaacagugugaggguuc

SEQ ID NO: 802003 - RNA, 20 nt, Artificial Sequence
  Synthetic
cagacaaaacuguaggguuc

SEQ ID NO: 802004 - RNA, 20 nt, Artificial Sequence
  Synthetic
uauggaguauuuuaggguuc

SEQ ID NO: 802005 - RNA, 20 nt, Artificial Sequence
  Synthetic
ucuuuuuugagaugggguuc

SEQ ID NO: 802006 - RNA, 20 nt, Artificial Sequence
  Synthetic
uauguuuguuacauggguuc

SEQ ID NO: 802007 - RNA, 20 nt, Artificial Sequence
  Synthetic
aaccuccgccugcuggguuc

SEQ ID NO: 802008 - RNA, 20 nt, Artificial Sequence
  Synthetic
uaaauuuacccaguggguuc

SEQ ID NO: 802009 - RNA, 20 nt, Artificial Sequence
  Synthetic
uuugccugaaauaaugguuc

SEQ ID NO: 802010 - RNA, 20 nt, Artificial Sequence
  Synthetic
cacuuaaacccauaugguuc

SEQ ID NO: 802011 - RNA, 20 nt, Artificial Sequence
  Synthetic
ugagaagauuccuaugguuc

SEQ ID NO: 802012 - RNA, 20 nt, Artificial Sequence
  Synthetic
auuuauccaccuuaugguuc

SEQ ID NO: 802013 - RNA, 20 nt, Artificial Sequence
  Synthetic
cauuguaauacaucugguuc

SEQ ID NO: 802014 - RNA, 20 nt, Artificial Sequence
  Synthetic
uuacgguugaagugugguuc

SEQ ID NO: 802015 - RNA, 20 nt, Artificial Sequence
  Synthetic
uaaucucauccucuugguuc

SEQ ID NO: 802016 - RNA, 20 nt, Artificial Sequence
  Synthetic
uuaacaucuagucuugguuc

SEQ ID NO: 802017 - RNA, 20 nt, Artificial Sequence
  Synthetic
acauuaagaaaauuugguuc

SEQ ID NO: 802018 - RNA, 20 nt, Artificial Sequence
  Synthetic
uuuuaaauacaguuugguuc

SEQ ID NO: 802019 - RNA, 20 nt, Artificial Sequence
  Synthetic
ugggcaauuauaaaauguuc

SEQ ID NO: 802020 - RNA, 20 nt, Artificial Sequence
  Synthetic
aaacuuaaccuaaaauguuc

SEQ ID NO: 802021 - RNA, 20 nt, Artificial Sequence
  Synthetic
ugcccaaaauguaaauguuc

SEQ ID NO: 802022 - RNA, 20 nt, Artificial Sequence
  Synthetic
uuuugggucagagaauguuc

SEQ ID NO: 802023 - RNA, 20 nt, Artificial Sequence
  Synthetic
ugccuaaauuauucauguuc

SEQ ID NO: 802024 - RNA, 20 nt, Artificial Sequence
  Synthetic
ucaaaguacacaagauguuc

SEQ ID NO: 802025 - RNA, 20 nt, Artificial Sequence
  Synthetic
aagauauacuuuagauguuc

SEQ ID NO: 802026 - RNA, 20 nt, Artificial Sequence
  Synthetic
caggagcagcacggauguuc

SEQ ID NO: 802027 - RNA, 20 nt, Artificial Sequence
  Synthetic
ucugaagugaugggauguuc

SEQ ID NO: 802028 - RNA, 20 nt, Artificial Sequence
  Synthetic
uagaauuuucaaugauguuc

SEQ ID NO: 802029 - RNA, 20 nt, Artificial Sequence
  Synthetic
ucuuguucaagaugauguuc

SEQ ID NO: 802030 - RNA, 20 nt, Artificial Sequence
  Synthetic
uuuggcagagacauauguuc

SEQ ID NO: 802031 - RNA, 20 nt, Artificial Sequence
  Synthetic
ugcucguuacugguauguuc

SEQ ID NO: 802032 - RNA, 20 nt, Artificial Sequence
  Synthetic
uaaggcuucccauuauguuc

SEQ ID NO: 802033 - RNA, 20 nt, Artificial Sequence
  Synthetic
agcuugguuucauuauguuc

SEQ ID NO: 802034 - RNA, 20 nt, Artificial Sequence
  Synthetic
ucuaugggacaacacuguuc

SEQ ID NO: 802035 - RNA, 20 nt, Artificial Sequence
  Synthetic
aaacuuauuucucacuguuc

SEQ ID NO: 802036 - RNA, 20 nt, Artificial Sequence
  Synthetic
ucaauuugcucugacuguuc

SEQ ID NO: 802037 - RNA, 20 nt, Artificial Sequence
  Synthetic
ucuguauuuuccuacuguuc

SEQ ID NO: 802038 - RNA, 20 nt, Artificial Sequence
  Synthetic
agccuguucaaagucuguuc

SEQ ID NO: 802039 - RNA, 20 nt, Artificial Sequence
  Synthetic
uauggggaaauguucuguuc

SEQ ID NO: 802040 - RNA, 20 nt, Artificial Sequence
  Synthetic
ugauggcagaauuucuguuc

SEQ ID NO: 802041 - RNA, 20 nt, Artificial Sequence
  Synthetic
agucuuuuuauuuucuguuc

SEQ ID NO: 802042 - RNA, 20 nt, Artificial Sequence
  Synthetic
agagaugauaugaaguguuc

SEQ ID NO: 802043 - RNA, 20 nt, Artificial Sequence
  Synthetic
cccuucugagaacaguguuc

SEQ ID NO: 802044 - RNA, 20 nt, Artificial Sequence
  Synthetic
uuccguuuggccagguguuc

SEQ ID NO: 802045 - RNA, 20 nt, Artificial Sequence
  Synthetic
uuauugggaggaugguguuc

SEQ ID NO: 802046 - RNA, 20 nt, Artificial Sequence
  Synthetic
uugcuucuucuaugguguuc

SEQ ID NO: 802047 - RNA, 20 nt, Artificial Sequence
  Synthetic
auuuuuuaaaagugguguuc

SEQ ID NO: 802048 - RNA, 20 nt, Artificial Sequence
  Synthetic
ucaauaaugguaauguguuc

SEQ ID NO: 802049 - RNA, 20 nt, Artificial Sequence
  Synthetic
ccccuugaggcucuguguuc

SEQ ID NO: 802050 - RNA, 20 nt, Artificial Sequence
  Synthetic
ccauugauuacuguguguuc

SEQ ID NO: 802051 - RNA, 20 nt, Artificial Sequence
  Synthetic
aaucaauguuuuguguguuc

SEQ ID NO: 802052 - RNA, 20 nt, Artificial Sequence
  Synthetic
cauaagaacaaaaauuguuc

SEQ ID NO: 802053 - RNA, 20 nt, Artificial Sequence
  Synthetic
acaauuuaagucaauuguuc

SEQ ID NO: 802054 - RNA, 20 nt, Artificial Sequence
  Synthetic
uuccagaaaaauaauuguuc

SEQ ID NO: 802055 - RNA, 20 nt, Artificial Sequence
  Synthetic
ucuuucuuaucuaauuguuc

SEQ ID NO: 802056 - RNA, 20 nt, Artificial Sequence
  Synthetic
uuuuucauggaccauuguuc

SEQ ID NO: 802057 - RNA, 20 nt, Artificial Sequence
  Synthetic
uauucaagauaauauuguuc

SEQ ID NO: 802058 - RNA, 20 nt, Artificial Sequence
  Synthetic
caagguaacgaaacuuguuc

SEQ ID NO: 802059 - RNA, 20 nt, Artificial Sequence
  Synthetic
ccaaguccaguuacuuguuc

SEQ ID NO: 802060 - RNA, 20 nt, Artificial Sequence
  Synthetic
uugugacccguaucuuguuc

SEQ ID NO: 802061 - RNA, 20 nt, Artificial Sequence
  Synthetic
uuauacuuuauuucuuguuc

SEQ ID NO: 802062 - RNA, 20 nt, Artificial Sequence
  Synthetic
uuauuuuuaaccaguuguuc

SEQ ID NO: 802063 - RNA, 20 nt, Artificial Sequence
  Synthetic
uacucugcugucaguuguuc

SEQ ID NO: 802064 - RNA, 20 nt, Artificial Sequence
  Synthetic
uaaaauuuagucauuuguuc

SEQ ID NO: 802065 - RNA, 20 nt, Artificial Sequence
  Synthetic
caauuucuguugauuuguuc

SEQ ID NO: 802066 - RNA, 20 nt, Artificial Sequence
  Synthetic
aguaaaauaaauguuuguuc

SEQ ID NO: 802067 - RNA, 20 nt, Artificial Sequence
  Synthetic
aaauguugucuauuuuguuc

SEQ ID NO: 802068 - RNA, 20 nt, Artificial Sequence
  Synthetic
aaaaaaaaaaaaaaaauuuc

SEQ ID NO: 802069 - RNA, 20 nt, Artificial Sequence
  Synthetic
cagggguuuguaaaaauuuc

SEQ ID NO: 802070 - RNA, 20 nt, Artificial Sequence
  Synthetic
caacagacaaagaaaauuuc

SEQ ID NO: 802071 - RNA, 20 nt, Artificial Sequence
  Synthetic
auuauaucuucuaaaauuuc

SEQ ID NO: 802072 - RNA, 20 nt, Artificial Sequence
  Synthetic
cugugugcuauucaaauuuc

SEQ ID NO: 802073 - RNA, 20 nt, Artificial Sequence
  Synthetic
cugaaaguauuucaaauuuc

SEQ ID NO: 802074 - RNA, 20 nt, Artificial Sequence
  Synthetic
aaauguuuaauagaaauuuc

SEQ ID NO: 802075 - RNA, 20 nt, Artificial Sequence
  Synthetic
ucuaguuucuuugaaauuuc

SEQ ID NO: 802076 - RNA, 20 nt, Artificial Sequence
  Synthetic
ugcugguuaaauuaaauuuc

SEQ ID NO: 802077 - RNA, 20 nt, Artificial Sequence
  Synthetic
agcugcugaucaccaauuuc

SEQ ID NO: 802078 - RNA, 20 nt, Artificial Sequence
  Synthetic
acguugaguggggcaauuuc

SEQ ID NO: 802079 - RNA, 20 nt, Artificial Sequence
  Synthetic
uuguuuaugaucucaauuuc

SEQ ID NO: 802080 - RNA, 20 nt, Artificial Sequence
  Synthetic
uucucuuuugauucaauuuc

SEQ ID NO: 802081 - RNA, 20 nt, Artificial Sequence
  Synthetic
agagaggucaauagaauuuc

SEQ ID NO: 802082 - RNA, 20 nt, Artificial Sequence
  Synthetic
cuaaugggagaaggaauuuc

SEQ ID NO: 802083 - RNA, 20 nt, Artificial Sequence
  Synthetic
cuuguucucgauugaauuuc

SEQ ID NO: 802084 - RNA, 20 nt, Artificial Sequence
  Synthetic
uaaaaaaaaaacauaauuuc

SEQ ID NO: 802085 - RNA, 20 nt, Artificial Sequence
  Synthetic
aaacaauaaagcauaauuuc

SEQ ID NO: 802086 - RNA, 20 nt, Artificial Sequence
  Synthetic
auaacuuccucuauaauuuc

SEQ ID NO: 802087 - RNA, 20 nt, Artificial Sequence
  Synthetic
auguaaaauugacuaauuuc

SEQ ID NO: 802088 - RNA, 20 nt, Artificial Sequence
  Synthetic
ucaauuaucucauuaauuuc

SEQ ID NO: 802089 - RNA, 20 nt, Artificial Sequence
  Synthetic
agaagaaauugauuaauuuc

SEQ ID NO: 802090 - RNA, 20 nt, Artificial Sequence
  Synthetic
cacuuucuuuucuuaauuuc

SEQ ID NO: 802091 - RNA, 20 nt, Artificial Sequence
  Synthetic
uacuuaacuuaguuaauuuc

SEQ ID NO: 802092 - RNA, 20 nt, Artificial Sequence
  Synthetic
aaucccaugugguuaauuuc

SEQ ID NO: 802093 - RNA, 20 nt, Artificial Sequence
  Synthetic
aaauuaccuucuuuaauuuc

SEQ ID NO: 802094 - RNA, 20 nt, Artificial Sequence
  Synthetic
uuuaaaauauguuuaauuuc

SEQ ID NO: 802095 - RNA, 20 nt, Artificial Sequence
  Synthetic
agcacaaugaugaacauuuc

SEQ ID NO: 802096 - RNA, 20 nt, Artificial Sequence
  Synthetic
caagagucuaugaacauuuc

SEQ ID NO: 802097 - RNA, 20 nt, Artificial Sequence
  Synthetic
auggucacgugacacauuuc

SEQ ID NO: 802098 - RNA, 20 nt, Artificial Sequence
  Synthetic
cuugcagaggcucacauuuc

SEQ ID NO: 802099 - RNA, 20 nt, Artificial Sequence
  Synthetic
ucaacauuucuucacauuuc

SEQ ID NO: 802100 - RNA, 20 nt, Artificial Sequence
  Synthetic
cuauuauucuucuacauuuc

SEQ ID NO: 802101 - RNA, 20 nt, Artificial Sequence
  Synthetic
uggaaaaaaauguacauuuc

SEQ ID NO: 802102 - RNA, 20 nt, Artificial Sequence
  Synthetic
cuccuuauuauuuacauuuc

SEQ ID NO: 802103 - RNA, 20 nt, Artificial Sequence
  Synthetic
acccccaccacuaccauuuc

SEQ ID NO: 802104 - RNA, 20 nt, Artificial Sequence
  Synthetic
uaauccagcaaucccauuuc

SEQ ID NO: 802105 - RNA, 20 nt, Artificial Sequence
  Synthetic
ccaagccucacucccauuuc

SEQ ID NO: 802106 - RNA, 20 nt, Artificial Sequence
  Synthetic
cagaaaguagaagccauuuc

SEQ ID NO: 802107 - RNA, 20 nt, Artificial Sequence
  Synthetic
cccagcaaguaugccauuuc

SEQ ID NO: 802108 - RNA, 20 nt, Artificial Sequence
  Synthetic
agaccuuuaagauccauuuc

SEQ ID NO: 802109 - RNA, 20 nt, Artificial Sequence
  Synthetic
aaaaaauaaggauccauuuc

SEQ ID NO: 802110 - RNA, 20 nt, Artificial Sequence
  Synthetic
aggaacaaauucuccauuuc

SEQ ID NO: 802111 - RNA, 20 nt, Artificial Sequence
  Synthetic
caucuuccuuuaagcauuuc

SEQ ID NO: 802112 - RNA, 20 nt, Artificial Sequence
  Synthetic
aauuauuuuccuagcauuuc

SEQ ID NO: 802113 - RNA, 20 nt, Artificial Sequence
  Synthetic
cugaaaacaacaggcauuuc

SEQ ID NO: 802114 - RNA, 20 nt, Artificial Sequence
  Synthetic
augaugauauaaaucauuuc

SEQ ID NO: 802115 - RNA, 20 nt, Artificial Sequence
  Synthetic
auguauguuuuacucauuuc

SEQ ID NO: 802116 - RNA, 20 nt, Artificial Sequence
  Synthetic
cuaaauuaaagagucauuuc

SEQ ID NO: 802117 - RNA, 20 nt, Artificial Sequence
  Synthetic
aauauguacuuauucauuuc

SEQ ID NO: 802118 - RNA, 20 nt, Artificial Sequence
  Synthetic
aaaugcccauucuucauuuc

SEQ ID NO: 802119 - RNA, 20 nt, Artificial Sequence
  Synthetic
aaaauagacuuguucauuuc

SEQ ID NO: 802120 - RNA, 20 nt, Artificial Sequence
  Synthetic
agaucuauucauuucauuuc

SEQ ID NO: 802121 - RNA, 20 nt, Artificial Sequence
  Synthetic
ugacuagaaguaaagauuuc

SEQ ID NO: 802122 - RNA, 20 nt, Artificial Sequence
  Synthetic
uacaaaaugaaccagauuuc

SEQ ID NO: 802123 - RNA, 20 nt, Artificial Sequence
  Synthetic
aagaugaagagggagauuuc

SEQ ID NO: 802124 - RNA, 20 nt, Artificial Sequence
  Synthetic
uauuuuugaaaauagauuuc

SEQ ID NO: 802125 - RNA, 20 nt, Artificial Sequence
  Synthetic
cuucauccuuuguagauuuc

SEQ ID NO: 802126 - RNA, 20 nt, Artificial Sequence
  Synthetic
cuuugaggaauaucgauuuc

SEQ ID NO: 802127 - RNA, 20 nt, Artificial Sequence
  Synthetic
uacuucagaauauggauuuc

SEQ ID NO: 802128 - RNA, 20 nt, Artificial Sequence
  Synthetic
uugcuuucugcuuggauuuc

SEQ ID NO: 802129 - RNA, 20 nt, Artificial Sequence
  Synthetic
auuuggaacauuuggauuuc

SEQ ID NO: 802130 - RNA, 20 nt, Artificial Sequence
  Synthetic
auaaucuacaacaugauuuc

SEQ ID NO: 802131 - RNA, 20 nt, Artificial Sequence
  Synthetic
ugguugugagccaugauuuc

SEQ ID NO: 802132 - RNA, 20 nt, Artificial Sequence
  Synthetic
uguguguguugggugauuuc

SEQ ID NO: 802133 - RNA, 20 nt, Artificial Sequence
  Synthetic
aacaaacaauaugugauuuc

SEQ ID NO: 802134 - RNA, 20 nt, Artificial Sequence
  Synthetic
uuaauaggcauugugauuuc

SEQ ID NO: 802135 - RNA, 20 nt, Artificial Sequence
  Synthetic
aacauaaccauauugauuuc

SEQ ID NO: 802136 - RNA, 20 nt, Artificial Sequence
  Synthetic
uaauccccauucuugauuuc

SEQ ID NO: 802137 - RNA, 20 nt, Artificial Sequence
  Synthetic
cauuaggccacuuugauuuc

SEQ ID NO: 802138 - RNA, 20 nt, Artificial Sequence
  Synthetic
ucucacugaccuuugauuuc

SEQ ID NO: 802139 - RNA, 20 nt, Artificial Sequence
  Synthetic
aaagcaaaguuuuugauuuc

SEQ ID NO: 802140 - RNA, 20 nt, Artificial Sequence
  Synthetic
aucuugagaacaaauauuuc

SEQ ID NO: 802141 - RNA, 20 nt, Artificial Sequence
  Synthetic
uuccugaauaggaauauuuc

SEQ ID NO: 802142 - RNA, 20 nt, Artificial Sequence
  Synthetic
ucaacaauucuuaauauuuc

SEQ ID NO: 802143 - RNA, 20 nt, Artificial Sequence
  Synthetic
aguucguuuuuuaauauuuc

SEQ ID NO: 802144 - RNA, 20 nt, Artificial Sequence
  Synthetic
uuagguuuacaacauauuuc

SEQ ID NO: 802145 - RNA, 20 nt, Artificial Sequence
  Synthetic
aaaguaaaugaacauauuuc

SEQ ID NO: 802146 - RNA, 20 nt, Artificial Sequence
  Synthetic
ugaauuuugcuacauauuuc

SEQ ID NO: 802147 - RNA, 20 nt, Artificial Sequence
  Synthetic
aaacaucagauucauauuuc

SEQ ID NO: 802148 - RNA, 20 nt, Artificial Sequence
  Synthetic
uuaaagcuucucuauauuuc

SEQ ID NO: 802149 - RNA, 20 nt, Artificial Sequence
  Synthetic
uuucaaagaugguauauuuc

SEQ ID NO: 802150 - RNA, 20 nt, Artificial Sequence
  Synthetic
aacauacugaagacuauuuc

SEQ ID NO: 802151 - RNA, 20 nt, Artificial Sequence
  Synthetic
uacauuuugagaucuauuuc

SEQ ID NO: 802152 - RNA, 20 nt, Artificial Sequence
  Synthetic
uugacuugggccucuauuuc

SEQ ID NO: 802153 - RNA, 20 nt, Artificial Sequence
  Synthetic
accaacuuaaucaguauuuc

SEQ ID NO: 802154 - RNA, 20 nt, Artificial Sequence
  Synthetic
aauguuaaaggugguauuuc

SEQ ID NO: 802155 - RNA, 20 nt, Artificial Sequence
  Synthetic
aauguuuuacaauguauuuc

SEQ ID NO: 802156 - RNA, 20 nt, Artificial Sequence
  Synthetic
auauauuuuugauguauuuc

SEQ ID NO: 802157 - RNA, 20 nt, Artificial Sequence
  Synthetic
aagugagccugguguauuuc

SEQ ID NO: 802158 - RNA, 20 nt, Artificial Sequence
  Synthetic
uauuuuaaaacuuguauuuc

SEQ ID NO: 802159 - RNA, 20 nt, Artificial Sequence
  Synthetic
augauaaccauuuguauuuc

SEQ ID NO: 802160 - RNA, 20 nt, Artificial Sequence
  Synthetic
acauguaagagaauuauuuc

SEQ ID NO: 802161 - RNA, 20 nt, Artificial Sequence
  Synthetic
ucaauuauuaacauuauuuc

SEQ ID NO: 802162 - RNA, 20 nt, Artificial Sequence
  Synthetic
auaaccugaaccauuauuuc

SEQ ID NO: 802163 - RNA, 20 nt, Artificial Sequence
  Synthetic
uguuauucagucauuauuuc

SEQ ID NO: 802164 - RNA, 20 nt, Artificial Sequence
  Synthetic
uaccugauggagauuauuuc

SEQ ID NO: 802165 - RNA, 20 nt, Artificial Sequence
  Synthetic
ugaaguauguaccuuauuuc

SEQ ID NO: 802166 - RNA, 20 nt, Artificial Sequence
  Synthetic
auuugccaccagcuuauuuc

SEQ ID NO: 802167 - RNA, 20 nt, Artificial Sequence
  Synthetic
aagaucaacaggcuuauuuc

SEQ ID NO: 802168 - RNA, 20 nt, Artificial Sequence
  Synthetic
auaggaggagaaguuauuuc

SEQ ID NO: 802169 - RNA, 20 nt, Artificial Sequence
  Synthetic
acaucucuugagguuauuuc

SEQ ID NO: 802170 - RNA, 20 nt, Artificial Sequence
  Synthetic
uaaugugaaacuguuauuuc

SEQ ID NO: 802171 - RNA, 20 nt, Artificial Sequence
  Synthetic
caaugacucaguguuauuuc

SEQ ID NO: 802172 - RNA, 20 nt, Artificial Sequence
  Synthetic
uuugagaggcaauuuauuuc

SEQ ID NO: 802173 - RNA, 20 nt, Artificial Sequence
  Synthetic
uuuugcacaccauuuauuuc

SEQ ID NO: 802174 - RNA, 20 nt, Artificial Sequence
  Synthetic
auaugaauggucuuuauuuc

SEQ ID NO: 802175 - RNA, 20 nt, Artificial Sequence
  Synthetic
uuuaugauugucuuuauuuc

SEQ ID NO: 802176 - RNA, 20 nt, Artificial Sequence
  Synthetic
uccauuuguuucuuuauuuc

SEQ ID NO: 802177 - RNA, 20 nt, Artificial Sequence
  Synthetic
aguuuaugaugguuuauuuc

SEQ ID NO: 802178 - RNA, 20 nt, Artificial Sequence
  Synthetic
ugagcucaaauuuuuauuuc

SEQ ID NO: 802179 - RNA, 20 nt, Artificial Sequence
  Synthetic
uacaagucauuuaaacuuuc

SEQ ID NO: 802180 - RNA, 20 nt, Artificial Sequence
  Synthetic
caccugugacuccaacuuuc

SEQ ID NO: 802181 - RNA, 20 nt, Artificial Sequence
  Synthetic
aauuuauucaaauaacuuuc

SEQ ID NO: 802182 - RNA, 20 nt, Artificial Sequence
  Synthetic
cauuuugguguguaacuuuc

SEQ ID NO: 802183 - RNA, 20 nt, Artificial Sequence
  Synthetic
agaugaggaacuuaacuuuc

SEQ ID NO: 802184 - RNA, 20 nt, Artificial Sequence
  Synthetic
auuacuacacaaacacuuuc

SEQ ID NO: 802185 - RNA, 20 nt, Artificial Sequence
  Synthetic
ccauucuccacaucacuuuc

SEQ ID NO: 802186 - RNA, 20 nt, Artificial Sequence
  Synthetic
ccauucuccccaucacuuuc

SEQ ID NO: 802187 - RNA, 20 nt, Artificial Sequence
  Synthetic
acuuuuuagugaucacuuuc

SEQ ID NO: 802188 - RNA, 20 nt, Artificial Sequence
  Synthetic
agucacaucacccgacuuuc

SEQ ID NO: 802189 - RNA, 20 nt, Artificial Sequence
  Synthetic
augagcuguauaggacuuuc

SEQ ID NO: 802190 - RNA, 20 nt, Artificial Sequence
  Synthetic
aauguuuuggcuugacuuuc

SEQ ID NO: 802191 - RNA, 20 nt, Artificial Sequence
  Synthetic
aggccagauccaguacuuuc

SEQ ID NO: 802192 - RNA, 20 nt, Artificial Sequence
  Synthetic
uuuuuccccucuuuacuuuc

SEQ ID NO: 802193 - RNA, 20 nt, Artificial Sequence
  Synthetic
uauaagguaacccaccuuuc

SEQ ID NO: 802194 - RNA, 20 nt, Artificial Sequence
  Synthetic
auggaaugugugcaccuuuc

SEQ ID NO: 802195 - RNA, 20 nt, Artificial Sequence
  Synthetic
auuauaauaauauaccuuuc

SEQ ID NO: 802196 - RNA, 20 nt, Artificial Sequence
  Synthetic
uuaauuguauuaacccuuuc

SEQ ID NO: 802197 - RNA, 20 nt, Artificial Sequence
  Synthetic
ccuuuuuacuucucccuuuc

SEQ ID NO: 802198 - RNA, 20 nt, Artificial Sequence
  Synthetic
uccucuuucucaagccuuuc

SEQ ID NO: 802199 - RNA, 20 nt, Artificial Sequence
  Synthetic
uccuccugccccagccuuuc

SEQ ID NO: 802200 - RNA, 20 nt, Artificial Sequence
  Synthetic
uacccuccccuuagccuuuc

SEQ ID NO: 802201 - RNA, 20 nt, Artificial Sequence
  Synthetic
agaaucugagcaugccuuuc

SEQ ID NO: 802202 - RNA, 20 nt, Artificial Sequence
  Synthetic
acauuucucaucugccuuuc

SEQ ID NO: 802203 - RNA, 20 nt, Artificial Sequence
  Synthetic
uacuacaaccucugccuuuc

SEQ ID NO: 802204 - RNA, 20 nt, Artificial Sequence
  Synthetic
aauauacagacaauccuuuc

SEQ ID NO: 802205 - RNA, 20 nt, Artificial Sequence
  Synthetic
ugucuuucguauauccuuuc

SEQ ID NO: 802206 - RNA, 20 nt, Artificial Sequence
  Synthetic
agguguucaaguauccuuuc

SEQ ID NO: 802207 - RNA, 20 nt, Artificial Sequence
  Synthetic
acuuuuucucaauuccuuuc

SEQ ID NO: 802208 - RNA, 20 nt, Artificial Sequence
  Synthetic
uuaaaauguauuuuccuuuc

SEQ ID NO: 802209 - RNA, 20 nt, Artificial Sequence
  Synthetic
ucuaguucuaacaagcuuuc

SEQ ID NO: 802210 - RNA, 20 nt, Artificial Sequence
  Synthetic
acucaucuccuuaagcuuuc

SEQ ID NO: 802211 - RNA, 20 nt, Artificial Sequence
  Synthetic
uuuauugauguugagcuuuc

SEQ ID NO: 802212 - RNA, 20 nt, Artificial Sequence
  Synthetic
cuacaauauaucaggcuuuc

SEQ ID NO: 802213 - RNA, 20 nt, Artificial Sequence
  Synthetic
ccuguuagauaagggcuuuc

SEQ ID NO: 802214 - RNA, 20 nt, Artificial Sequence
  Synthetic
auuugaaaagaauggcuuuc

SEQ ID NO: 802215 - RNA, 20 nt, Artificial Sequence
  Synthetic
ucucuucuaccauggcuuuc

SEQ ID NO: 802216 - RNA, 20 nt, Artificial Sequence
  Synthetic
ucccaccccacacugcuuuc

SEQ ID NO: 802217 - RNA, 20 nt, Artificial Sequence
  Synthetic
cucugaaauuugcugcuuuc

SEQ ID NO: 802218 - RNA, 20 nt, Artificial Sequence
  Synthetic
cuuucucagaaucugcuuuc

SEQ ID NO: 802219 - RNA, 20 nt, Artificial Sequence
  Synthetic
uccaagucagcucugcuuuc

SEQ ID NO: 802220 - RNA, 20 nt, Artificial Sequence
  Synthetic
acugagaauuaauugcuuuc

SEQ ID NO: 802221 - RNA, 20 nt, Artificial Sequence
  Synthetic
aagggaaacuuguugcuuuc

SEQ ID NO: 802222 - RNA, 20 nt, Artificial Sequence
  Synthetic
auaaaggguuauuugcuuuc

SEQ ID NO: 802223 - RNA, 20 nt, Artificial Sequence
  Synthetic
ugagugagugguuugcuuuc

SEQ ID NO: 802224 - RNA, 20 nt, Artificial Sequence
  Synthetic
aagaccaagccaaaucuuuc

SEQ ID NO: 802225 - RNA, 20 nt, Artificial Sequence
  Synthetic
cauuaccuauggaaucuuuc

SEQ ID NO: 802226 - RNA, 20 nt, Artificial Sequence
  Synthetic
caaaaaaugucucaucuuuc

SEQ ID NO: 802227 - RNA, 20 nt, Artificial Sequence
  Synthetic
aagucagucugucaucuuuc

SEQ ID NO: 802228 - RNA, 20 nt, Artificial Sequence
  Synthetic
cagucuaggcaauaucuuuc

SEQ ID NO: 802229 - RNA, 20 nt, Artificial Sequence
  Synthetic
aauaauuuuuucuaucuuuc

SEQ ID NO: 802230 - RNA, 20 nt, Artificial Sequence
  Synthetic
acacaaaauugaacucuuuc

SEQ ID NO: 802231 - RNA, 20 nt, Artificial Sequence
  Synthetic
ugugcaugcugagcucuuuc

SEQ ID NO: 802232 - RNA, 20 nt, Artificial Sequence
  Synthetic
acauguagaguaucucuuuc

SEQ ID NO: 802233 - RNA, 20 nt, Artificial Sequence
  Synthetic
acugauagaaacucucuuuc

SEQ ID NO: 802234 - RNA, 20 nt, Artificial Sequence
  Synthetic
acugacuagccaugucuuuc

SEQ ID NO: 802235 - RNA, 20 nt, Artificial Sequence
  Synthetic
acucaagaaugcugucuuuc

SEQ ID NO: 802236 - RNA, 20 nt, Artificial Sequence
  Synthetic
ucaaguggcaucugucuuuc

SEQ ID NO: 802237 - RNA, 20 nt, Artificial Sequence
  Synthetic
uauagacaacuaauucuuuc

SEQ ID NO: 802238 - RNA, 20 nt, Artificial Sequence
  Synthetic
accuucacuuauguucuuuc

SEQ ID NO: 802239 - RNA, 20 nt, Artificial Sequence
  Synthetic
uccauagauuuuguucuuuc

SEQ ID NO: 802240 - RNA, 20 nt, Artificial Sequence
  Synthetic
ugaauuucaaaauuucuuuc

SEQ ID NO: 802241 - RNA, 20 nt, Artificial Sequence
  Synthetic
accucaagacauuuucuuuc

SEQ ID NO: 802242 - RNA, 20 nt, Artificial Sequence
  Synthetic
caggaaaauggcaaaguuuc

SEQ ID NO: 802243 - RNA, 20 nt, Artificial Sequence
  Synthetic
cagaaacucaggaaaguuuc

SEQ ID NO: 802244 - RNA, 20 nt, Artificial Sequence
  Synthetic
ccuuuaggggugaaaguuuc

SEQ ID NO: 802245 - RNA, 20 nt, Artificial Sequence
  Synthetic
uuccuuuucuuuaaaguuuc

SEQ ID NO: 802246 - RNA, 20 nt, Artificial Sequence
  Synthetic
auuuaacugcucuaaguuuc

SEQ ID NO: 802247 - RNA, 20 nt, Artificial Sequence
  Synthetic
uuaagacaaaaguaaguuuc

SEQ ID NO: 802248 - RNA, 20 nt, Artificial Sequence
  Synthetic
ccuccaugauuguaaguuuc

SEQ ID NO: 802249 - RNA, 20 nt, Artificial Sequence
  Synthetic
acauaguuuucuuaaguuuc

SEQ ID NO: 802250 - RNA, 20 nt, Artificial Sequence
  Synthetic
aaaaauaguucaccaguuuc

SEQ ID NO: 802251 - RNA, 20 nt, Artificial Sequence
  Synthetic
uuuuuaaagcacccaguuuc

SEQ ID NO: 802252 - RNA, 20 nt, Artificial Sequence
  Synthetic
aacuuuguauuuccaguuuc

SEQ ID NO: 802253 - RNA, 20 nt, Artificial Sequence
  Synthetic
aggcuaagacaugcaguuuc

SEQ ID NO: 802254 - RNA, 20 nt, Artificial Sequence
  Synthetic
aggcuaaaacauucaguuuc

SEQ ID NO: 802255 - RNA, 20 nt, Artificial Sequence
  Synthetic
agcagggcucuuucaguuuc

SEQ ID NO: 802256 - RNA, 20 nt, Artificial Sequence
  Synthetic
ucauggcauguuucaguuuc

SEQ ID NO: 802257 - RNA, 20 nt, Artificial Sequence
  Synthetic
agcauucaaaugagaguuuc

SEQ ID NO: 802258 - RNA, 20 nt, Artificial Sequence
  Synthetic
uuauaugcucucauaguuuc

SEQ ID NO: 802259 - RNA, 20 nt, Artificial Sequence
  Synthetic
aauaaaaauaaccuaguuuc

SEQ ID NO: 802260 - RNA, 20 nt, Artificial Sequence
  Synthetic
uuuaaagaguuuguaguuuc

SEQ ID NO: 802261 - RNA, 20 nt, Artificial Sequence
  Synthetic
uuuuuguaguuuuuaguuuc

SEQ ID NO: 802262 - RNA, 20 nt, Artificial Sequence
  Synthetic
uuaagagaauuuggcguuuc

SEQ ID NO: 802263 - RNA, 20 nt, Artificial Sequence
  Synthetic
agaccuacugcaaagguuuc

SEQ ID NO: 802264 - RNA, 20 nt, Artificial Sequence
  Synthetic
uaaaaagacuuaaagguuuc

SEQ ID NO: 802265 - RNA, 20 nt, Artificial Sequence
  Synthetic
cuggugacauucaagguuuc

SEQ ID NO: 802266 - RNA, 20 nt, Artificial Sequence
  Synthetic
aucauaaaaaugcagguuuc

SEQ ID NO: 802267 - RNA, 20 nt, Artificial Sequence
  Synthetic
uugacuucaucugagguuuc

SEQ ID NO: 802268 - RNA, 20 nt, Artificial Sequence
  Synthetic
auaaaggccucugagguuuc

SEQ ID NO: 802269 - RNA, 20 nt, Artificial Sequence
  Synthetic
uuuugagcagccacgguuuc

SEQ ID NO: 802270 - RNA, 20 nt, Artificial Sequence
  Synthetic
ccacuuugagcugcgguuuc

SEQ ID NO: 802271 - RNA, 20 nt, Artificial Sequence
  Synthetic
accuucaauccuaggguuuc

SEQ ID NO: 802272 - RNA, 20 nt, Artificial Sequence
  Synthetic
cauucaagauaauggguuuc

SEQ ID NO: 802273 - RNA, 20 nt, Artificial Sequence
  Synthetic
auuuuugcaugcuggguuuc

SEQ ID NO: 802274 - RNA, 20 nt, Artificial Sequence
  Synthetic
agggaggcaaguuggguuuc

SEQ ID NO: 802275 - RNA, 20 nt, Artificial Sequence
  Synthetic
uaguuugagguuuggguuuc

SEQ ID NO: 802276 - RNA, 20 nt, Artificial Sequence
  Synthetic
cuaugauucucuaugguuuc

SEQ ID NO: 802277 - RNA, 20 nt, Artificial Sequence
  Synthetic
ucuagaguuuuuaugguuuc

SEQ ID NO: 802278 - RNA, 20 nt, Artificial Sequence
  Synthetic
cugaaaauuuaauugguuuc

SEQ ID NO: 802279 - RNA, 20 nt, Artificial Sequence
  Synthetic
cuuuugaugacuuugguuuc

SEQ ID NO: 802280 - RNA, 20 nt, Artificial Sequence
  Synthetic
cacuuugacuacgauguuuc

SEQ ID NO: 802281 - RNA, 20 nt, Artificial Sequence
  Synthetic
aaacccagucaauauguuuc

SEQ ID NO: 802282 - RNA, 20 nt, Artificial Sequence
  Synthetic
auuuaaggaaauacuguuuc

SEQ ID NO: 802283 - RNA, 20 nt, Artificial Sequence
  Synthetic
uguguuuaugaggcuguuuc

SEQ ID NO: 802284 - RNA, 20 nt, Artificial Sequence
  Synthetic
agcauagcaacaucuguuuc

SEQ ID NO: 802285 - RNA, 20 nt, Artificial Sequence
  Synthetic
uacuaugggaauucuguuuc

SEQ ID NO: 802286 - RNA, 20 nt, Artificial Sequence
  Synthetic
ucaugucauuuuucuguuuc

SEQ ID NO: 802287 - RNA, 20 nt, Artificial Sequence
  Synthetic
uuuuuuuuuuuaaguguuuc

SEQ ID NO: 802288 - RNA, 20 nt, Artificial Sequence
  Synthetic
uuaaguguuucagguguuuc

SEQ ID NO: 802289 - RNA, 20 nt, Artificial Sequence
  Synthetic
uuugagccucuagguguuuc

SEQ ID NO: 802290 - RNA, 20 nt, Artificial Sequence
  Synthetic
cuuuugaaaaaauguguuuc

SEQ ID NO: 802291 - RNA, 20 nt, Artificial Sequence
  Synthetic
cuuuuaccaaacuguguuuc

SEQ ID NO: 802292 - RNA, 20 nt, Artificial Sequence
  Synthetic
uucccaaaacccuguguuuc

SEQ ID NO: 802293 - RNA, 20 nt, Artificial Sequence
  Synthetic
cuguccucuggcauuguuuc

SEQ ID NO: 802294 - RNA, 20 nt, Artificial Sequence
  Synthetic
aguuacuauuuucuuguuuc

SEQ ID NO: 802295 - RNA, 20 nt, Artificial Sequence
  Synthetic
uaauaugaaauuguuguuuc

SEQ ID NO: 802296 - RNA, 20 nt, Artificial Sequence
  Synthetic
caaacuuuacaaaaauuuuc

SEQ ID NO: 802297 - RNA, 20 nt, Artificial Sequence
  Synthetic
ucucuuagcaguaaauuuuc

SEQ ID NO: 802298 - RNA, 20 nt, Artificial Sequence
  Synthetic
ucauauaguuuuaaauuuuc

SEQ ID NO: 802299 - RNA, 20 nt, Artificial Sequence
  Synthetic
agaaaaaaaauccaauuuuc

SEQ ID NO: 802300 - RNA, 20 nt, Artificial Sequence
  Synthetic
uuccgguuuuuggaauuuuc

SEQ ID NO: 802301 - RNA, 20 nt, Artificial Sequence
  Synthetic
acuuaaagugcauaauuuuc

SEQ ID NO: 802302 - RNA, 20 nt, Artificial Sequence
  Synthetic
cacaacucuuucuaauuuuc

SEQ ID NO: 802303 - RNA, 20 nt, Artificial Sequence
  Synthetic
auuaacuuuucuuaauuuuc

SEQ ID NO: 802304 - RNA, 20 nt, Artificial Sequence
  Synthetic
aaauacaaagaaacauuuuc

SEQ ID NO: 802305 - RNA, 20 nt, Artificial Sequence
  Synthetic
caagucacuuccacauuuuc

SEQ ID NO: 802306 - RNA, 20 nt, Artificial Sequence
  Synthetic
aaagucgcuuccacauuuuc

SEQ ID NO: 802307 - RNA, 20 nt, Artificial Sequence
  Synthetic
cacuugauguucacauuuuc

SEQ ID NO: 802308 - RNA, 20 nt, Artificial Sequence
  Synthetic
aaacacagucugacauuuuc

SEQ ID NO: 802309 - RNA, 20 nt, Artificial Sequence
  Synthetic
uuuguaaauuacccauuuuc

SEQ ID NO: 802310 - RNA, 20 nt, Artificial Sequence
  Synthetic
cuuuguagccugccauuuuc

SEQ ID NO: 802311 - RNA, 20 nt, Artificial Sequence
  Synthetic
auuccgggugcugcauuuuc

SEQ ID NO: 802312 - RNA, 20 nt, Artificial Sequence
  Synthetic
auacaaauuaaaucauuuuc

SEQ ID NO: 802313 - RNA, 20 nt, Artificial Sequence
  Synthetic
ugcugcuuucuaucauuuuc

SEQ ID NO: 802314 - RNA, 20 nt, Artificial Sequence
  Synthetic
agaaaauggcccucauuuuc

SEQ ID NO: 802315 - RNA, 20 nt, Artificial Sequence
  Synthetic
cgauguauagaaagauuuuc

SEQ ID NO: 802316 - RNA, 20 nt, Artificial Sequence
  Synthetic
ugcggccucaucagauuuuc

SEQ ID NO: 802317 - RNA, 20 nt, Artificial Sequence
  Synthetic
caagccuuuuucagauuuuc

SEQ ID NO: 802318 - RNA, 20 nt, Artificial Sequence
  Synthetic
cuaacuuguuuuggauuuuc

SEQ ID NO: 802319 - RNA, 20 nt, Artificial Sequence
  Synthetic
uucaguuuucauugauuuuc

SEQ ID NO: 802320 - RNA, 20 nt, Artificial Sequence
  Synthetic
uagugaaucuaaauauuuuc

SEQ ID NO: 802321 - RNA, 20 nt, Artificial Sequence
  Synthetic
agaaaauaagaacuauuuuc

SEQ ID NO: 802322 - RNA, 20 nt, Artificial Sequence
  Synthetic
auuauguuauuacuauuuuc

SEQ ID NO: 802323 - RNA, 20 nt, Artificial Sequence
  Synthetic
acccuuuugaggcuauuuuc

SEQ ID NO: 802324 - RNA, 20 nt, Artificial Sequence
  Synthetic
auacaugccaaaguauuuuc

SEQ ID NO: 802325 - RNA, 20 nt, Artificial Sequence
  Synthetic
cugucuuaaucaguauuuuc

SEQ ID NO: 802326 - RNA, 20 nt, Artificial Sequence
  Synthetic
cauuauuacucaguauuuuc

SEQ ID NO: 802327 - RNA, 20 nt, Artificial Sequence
  Synthetic
agcuuugcagaauuauuuuc

SEQ ID NO: 802328 - RNA, 20 nt, Artificial Sequence
  Synthetic
cuuuuuagauuguuauuuuc

SEQ ID NO: 802329 - RNA, 20 nt, Artificial Sequence
  Synthetic
acaugaaauuggaacuuuuc

SEQ ID NO: 802330 - RNA, 20 nt, Artificial Sequence
  Synthetic
cucauaccuacucacuuuuc

SEQ ID NO: 802331 - RNA, 20 nt, Artificial Sequence
  Synthetic
cccaacucugaggacuuuuc

SEQ ID NO: 802332 - RNA, 20 nt, Artificial Sequence
  Synthetic
aaucuuaucguugacuuuuc

SEQ ID NO: 802333 - RNA, 20 nt, Artificial Sequence
  Synthetic
acaauaaauguuuacuuuuc

SEQ ID NO: 802334 - RNA, 20 nt, Artificial Sequence
  Synthetic
cuggucuuuuuucccuuuuc

SEQ ID NO: 802335 - RNA, 20 nt, Artificial Sequence
  Synthetic
ugguuuuugugcuccuuuuc

SEQ ID NO: 802336 - RNA, 20 nt, Artificial Sequence
  Synthetic
agcagaauuccuuccuuuuc

SEQ ID NO: 802337 - RNA, 20 nt, Artificial Sequence
  Synthetic
uaauuuuagaguuccuuuuc

SEQ ID NO: 802338 - RNA, 20 nt, Artificial Sequence
  Synthetic
uuuuuuguuauuuccuuuuc

SEQ ID NO: 802339 - RNA, 20 nt, Artificial Sequence
  Synthetic
ucuuacuuaauaagcuuuuc

SEQ ID NO: 802340 - RNA, 20 nt, Artificial Sequence
  Synthetic
uaaaucuuucuaagcuuuuc

SEQ ID NO: 802341 - RNA, 20 nt, Artificial Sequence
  Synthetic
aaggaaaaccagugcuuuuc

SEQ ID NO: 802342 - RNA, 20 nt, Artificial Sequence
  Synthetic
uuuuuccaaacgugcuuuuc

SEQ ID NO: 802343 - RNA, 20 nt, Artificial Sequence
  Synthetic
agcaaguugcauugcuuuuc

SEQ ID NO: 802344 - RNA, 20 nt, Artificial Sequence
  Synthetic
uauuccucuuuuugcuuuuc

SEQ ID NO: 802345 - RNA, 20 nt, Artificial Sequence
  Synthetic
aucuaccuacucaucuuuuc

SEQ ID NO: 802346 - RNA, 20 nt, Artificial Sequence
  Synthetic
ucaacucccacacucuuuuc

SEQ ID NO: 802347 - RNA, 20 nt, Artificial Sequence
  Synthetic
cuccuaaugcaggucuuuuc

SEQ ID NO: 802348 - RNA, 20 nt, Artificial Sequence
  Synthetic
ugucuaucuucuuucuuuuc

SEQ ID NO: 802349 - RNA, 20 nt, Artificial Sequence
  Synthetic
auaacaaaucuuuucuuuuc

SEQ ID NO: 802350 - RNA, 20 nt, Artificial Sequence
  Synthetic
uuaagggcuucuaaguuuuc

SEQ ID NO: 802351 - RNA, 20 nt, Artificial Sequence
  Synthetic
auacucauucagcaguuuuc

SEQ ID NO: 802352 - RNA, 20 nt, Artificial Sequence
  Synthetic
uucuugguaaaucaguuuuc

SEQ ID NO: 802353 - RNA, 20 nt, Artificial Sequence
  Synthetic
uuucaggcaauucaguuuuc

SEQ ID NO: 802354 - RNA, 20 nt, Artificial Sequence
  Synthetic
ucuccuuccguucaguuuuc

SEQ ID NO: 802355 - RNA, 20 nt, Artificial Sequence
  Synthetic
uggauuauucaugaguuuuc

SEQ ID NO: 802356 - RNA, 20 nt, Artificial Sequence
  Synthetic
cugauauugacauaguuuuc

SEQ ID NO: 802357 - RNA, 20 nt, Artificial Sequence
  Synthetic
ucccugcuuaucuaguuuuc

SEQ ID NO: 802358 - RNA, 20 nt, Artificial Sequence
  Synthetic
uugguuaaggaaagguuuuc

SEQ ID NO: 802359 - RNA, 20 nt, Artificial Sequence
  Synthetic
cauagcugaugcugguuuuc

SEQ ID NO: 802360 - RNA, 20 nt, Artificial Sequence
  Synthetic
caaaaccuguauugguuuuc

SEQ ID NO: 802361 - RNA, 20 nt, Artificial Sequence
  Synthetic
uuaguaaagauuugguuuuc

SEQ ID NO: 802362 - RNA, 20 nt, Artificial Sequence
  Synthetic
uuuuuagaaguuugguuuuc

SEQ ID NO: 802363 - RNA, 20 nt, Artificial Sequence
  Synthetic
auggaaggaauaauguuuuc

SEQ ID NO: 802364 - RNA, 20 nt, Artificial Sequence
  Synthetic
agguuaguuuugauguuuuc

SEQ ID NO: 802365 - RNA, 20 nt, Artificial Sequence
  Synthetic
uagauaaggaguauguuuuc

SEQ ID NO: 802366 - RNA, 20 nt, Artificial Sequence
  Synthetic
cucauccaggcccuguuuuc

SEQ ID NO: 802367 - RNA, 20 nt, Artificial Sequence
  Synthetic
acguuggguucucuguuuuc

SEQ ID NO: 802368 - RNA, 20 nt, Artificial Sequence
  Synthetic
auuuauuggugucuguuuuc

SEQ ID NO: 802369 - RNA, 20 nt, Artificial Sequence
  Synthetic
uaaguggccauucuguuuuc

SEQ ID NO: 802370 - RNA, 20 nt, Artificial Sequence
  Synthetic
aagaaaugugauguguuuuc

SEQ ID NO: 802371 - RNA, 20 nt, Artificial Sequence
  Synthetic
aaacuaaaauauguguuuuc

SEQ ID NO: 802372 - RNA, 20 nt, Artificial Sequence
  Synthetic
uaugcuuaaguguuguuuuc

SEQ ID NO: 802373 - RNA, 20 nt, Artificial Sequence
  Synthetic
ugcagaaaugauuuguuuuc

SEQ ID NO: 802374 - RNA, 20 nt, Artificial Sequence
  Synthetic
ugcguuuccucuuuguuuuc

SEQ ID NO: 802375 - RNA, 20 nt, Artificial Sequence
  Synthetic
auacacuguauuuuguuuuc

SEQ ID NO: 802376 - RNA, 20 nt, Artificial Sequence
  Synthetic
auuuaaauugccaauuuuuc

SEQ ID NO: 802377 - RNA, 20 nt, Artificial Sequence
  Synthetic
auuuuaaaauaagauuuuuc

SEQ ID NO: 802378 - RNA, 20 nt, Artificial Sequence
  Synthetic
agacauguuugugauuuuuc

SEQ ID NO: 802379 - RNA, 20 nt, Artificial Sequence
  Synthetic
aaauucugauuugauuuuuc

SEQ ID NO: 802380 - RNA, 20 nt, Artificial Sequence
  Synthetic
caccugaacaauuauuuuuc

SEQ ID NO: 802381 - RNA, 20 nt, Artificial Sequence
  Synthetic
uguguugagauuuauuuuuc

SEQ ID NO: 802382 - RNA, 20 nt, Artificial Sequence
  Synthetic
agaggaccucaaacuuuuuc

SEQ ID NO: 802383 - RNA, 20 nt, Artificial Sequence
  Synthetic
ugcauuuuuuaaacuuuuuc

SEQ ID NO: 802384 - RNA, 20 nt, Artificial Sequence
  Synthetic
aaggcccuuaugacuuuuuc

SEQ ID NO: 802385 - RNA, 20 nt, Artificial Sequence
  Synthetic
uuucaagacauuacuuuuuc

SEQ ID NO: 802386 - RNA, 20 nt, Artificial Sequence
  Synthetic
cuaccucauucagcuuuuuc

SEQ ID NO: 802387 - RNA, 20 nt, Artificial Sequence
  Synthetic
ccucacuaaggcucuuuuuc

SEQ ID NO: 802388 - RNA, 20 nt, Artificial Sequence
  Synthetic
cuucaauccacaaguuuuuc

SEQ ID NO: 802389 - RNA, 20 nt, Artificial Sequence
  Synthetic
uaaaaaucaggaaguuuuuc

SEQ ID NO: 802390 - RNA, 20 nt, Artificial Sequence
  Synthetic
caggcaccaggcaguuuuuc

SEQ ID NO: 802391 - RNA, 20 nt, Artificial Sequence
  Synthetic
uguccagcauugaguuuuuc

SEQ ID NO: 802392 - RNA, 20 nt, Artificial Sequence
  Synthetic
ugaagggcacuugguuuuuc

SEQ ID NO: 802393 - RNA, 20 nt, Artificial Sequence
  Synthetic
acugucauccaguguuuuuc

SEQ ID NO: 802394 - RNA, 20 nt, Artificial Sequence
  Synthetic
ccuuuuuuggaguguuuuuc

SEQ ID NO: 802395 - RNA, 20 nt, Artificial Sequence
  Synthetic
aacugaaaaauguguuuuuc

SEQ ID NO: 802396 - RNA, 20 nt, Artificial Sequence
  Synthetic
cuuucaaauucuuguuuuuc

SEQ ID NO: 802397 - RNA, 20 nt, Artificial Sequence
  Synthetic
aguaagccaauuuguuuuuc

SEQ ID NO: 802398 - RNA, 20 nt, Artificial Sequence
  Synthetic
aauauuauucuaauuuuuuc

SEQ ID NO: 802399 - RNA, 20 nt, Artificial Sequence
  Synthetic
aaaacagaugacauuuuuuc

SEQ ID NO: 802400 - RNA, 20 nt, Artificial Sequence
  Synthetic
acuuccagccccauuuuuuc

SEQ ID NO: 802401 - RNA, 20 nt, Artificial Sequence
  Synthetic
caugaacucaucauuuuuuc

SEQ ID NO: 802402 - RNA, 20 nt, Artificial Sequence
  Synthetic
agaaguaauaugauuuuuuc

SEQ ID NO: 802403 - RNA, 20 nt, Artificial Sequence
  Synthetic
uuugagauauauauuuuuuc

SEQ ID NO: 802404 - RNA, 20 nt, Artificial Sequence
  Synthetic
aaauauauauauauuuuuuc

SEQ ID NO: 802405 - RNA, 20 nt, Artificial Sequence
  Synthetic
uacccauuaguuauuuuuuc

SEQ ID NO: 802406 - RNA, 20 nt, Artificial Sequence
  Synthetic
cauaaucucauucuuuuuuc

SEQ ID NO: 802407 - RNA, 20 nt, Artificial Sequence
  Synthetic
uuuaaaaauuaauuuuuuuc

SEQ ID NO: 802408 - RNA, 20 nt, Artificial Sequence
  Synthetic
caugaggagucauuuuuuuc

SEQ ID NO: 802409 - RNA, 20 nt, Artificial Sequence
  Synthetic
acuaugugaauauuuuuuuc

SEQ ID NO: 802410 - RNA, 20 nt, Artificial Sequence
  Synthetic
caaaacaagguauuuuuuuc

SEQ ID NO: 802411 - RNA, 20 nt, Artificial Sequence
  Synthetic
aacaacauucucuuuuuuuc

SEQ ID NO: 802412 - RNA, 20 nt, Artificial Sequence
  Synthetic
uuuuuuuuuuucuuuuuuuc

SEQ ID NO: 802413 - RNA, 20 nt, Artificial Sequence
  Synthetic
uuuguaaugacuuuuuuuuc

SEQ ID NO: 802414 - RNA, 20 nt, Artificial Sequence
  Synthetic
uuuuacagcauuuuuuuuuc

SEQ ID NO: 802415 - RNA, 20 nt, Artificial Sequence
  Synthetic
uuuguuuuuuuuuuuuuuuc

SEQ ID NO: 802416 - RNA, 20 nt, Artificial Sequence
  Synthetic
uuuuuuuuuuuuuuuuuuuc

SEQ ID NO: 802417 - RNA, 20 nt, Artificial Sequence
  Synthetic
aaaaaaaaaaaaaaaaaaag

SEQ ID NO: 802418 - RNA, 20 nt, Artificial Sequence
  Synthetic
cucaaaaaaaaaaaaaaaag

SEQ ID NO: 802419 - RNA, 20 nt, Artificial Sequence
  Synthetic
aguaaaaaaaaaaaaaaaag

SEQ ID NO: 802420 - RNA, 20 nt, Artificial Sequence
  Synthetic
aacuuaaaaaaaaaaaaaag

SEQ ID NO: 802421 - RNA, 20 nt, Artificial Sequence
  Synthetic
agggggaaaaaaaaaaaaag

SEQ ID NO: 802422 - RNA, 20 nt, Artificial Sequence
  Synthetic
uuuuaaaaagaaaaaaaaag

SEQ ID NO: 802423 - RNA, 20 nt, Artificial Sequence
  Synthetic
auacagaccacaaaaaaaag

SEQ ID NO: 802424 - RNA, 20 nt, Artificial Sequence
  Synthetic
acccugucuccaaaaaaaag

SEQ ID NO: 802425 - RNA, 20 nt, Artificial Sequence
  Synthetic
uaagaacuuggaaaaaaaag

SEQ ID NO: 802426 - RNA, 20 nt, Artificial Sequence
  Synthetic
uuacugucacacaaaaaaag

SEQ ID NO: 802427 - RNA, 20 nt, Artificial Sequence
  Synthetic
cguuugugaugcaaaaaaag

SEQ ID NO: 802428 - RNA, 20 nt, Artificial Sequence
  Synthetic
uagcuugaugggaaaaaaag

SEQ ID NO: 802429 - RNA, 20 nt, Artificial Sequence
  Synthetic
acagagacuacuaaaaaaag

SEQ ID NO: 802430 - RNA, 20 nt, Artificial Sequence
  Synthetic
aaaacugaguaacaaaaaag

SEQ ID NO: 802431 - RNA, 20 nt, Artificial Sequence
  Synthetic
augggcagaacucaaaaaag

SEQ ID NO: 802432 - RNA, 20 nt, Artificial Sequence
  Synthetic
ugacaaaacaaagaaaaaag

SEQ ID NO: 802433 - RNA, 20 nt, Artificial Sequence
  Synthetic
uauaauuucaaagaaaaaag

SEQ ID NO: 802434 - RNA, 20 nt, Artificial Sequence
  Synthetic
agcugucagacagaaaaaag

SEQ ID NO: 802435 - RNA, 20 nt, Artificial Sequence
  Synthetic
aaccucacaagagaaaaaag

SEQ ID NO: 802436 - RNA, 20 nt, Artificial Sequence
  Synthetic
cuucaucagugagaaaaaag

SEQ ID NO: 802437 - RNA, 20 nt, Artificial Sequence
  Synthetic
augcuucauauugaaaaaag

SEQ ID NO: 802438 - RNA, 20 nt, Artificial Sequence
  Synthetic
cagaugacuuuuuaaaaaag

SEQ ID NO: 802439 - RNA, 20 nt, Artificial Sequence
  Synthetic
uuguaacgugcaacaaaaag

SEQ ID NO: 802440 - RNA, 20 nt, Artificial Sequence
  Synthetic
aucacaaagccgacaaaaag

SEQ ID NO: 802441 - RNA, 20 nt, Artificial Sequence
  Synthetic
uucuccagaaaagcaaaaag

SEQ ID NO: 802442 - RNA, 20 nt, Artificial Sequence
  Synthetic
aacaaaagaagggcaaaaag

SEQ ID NO: 802443 - RNA, 20 nt, Artificial Sequence
  Synthetic
caaggaaaaaaaucaaaaag

SEQ ID NO: 802444 - RNA, 20 nt, Artificial Sequence
  Synthetic
caaacaaccccaucaaaaag

SEQ ID NO: 802445 - RNA, 20 nt, Artificial Sequence
  Synthetic
aucacauugccuucaaaaag

SEQ ID NO: 802446 - RNA, 20 nt, Artificial Sequence
  Synthetic
uaauuuauuuaaagaaaaag

SEQ ID NO: 802447 - RNA, 20 nt, Artificial Sequence
  Synthetic
ucuccgagaggcagaaaaag

SEQ ID NO: 802448 - RNA, 20 nt, Artificial Sequence
  Synthetic
uacuaauauuagagaaaaag

SEQ ID NO: 802449 - RNA, 20 nt, Artificial Sequence
  Synthetic
cuaaaguaagggagaaaaag

SEQ ID NO: 802450 - RNA, 20 nt, Artificial Sequence
  Synthetic
cacaauuuccugagaaaaag

SEQ ID NO: 802451 - RNA, 20 nt, Artificial Sequence
  Synthetic
auuccaaucaauagaaaaag

SEQ ID NO: 802452 - RNA, 20 nt, Artificial Sequence
  Synthetic
aaguuaaauuuuagaaaaag

SEQ ID NO: 802453 - RNA, 20 nt, Artificial Sequence
  Synthetic
aucugcagcaaaggaaaaag

SEQ ID NO: 802454 - RNA, 20 nt, Artificial Sequence
  Synthetic
caaaaucauaaaggaaaaag

SEQ ID NO: 802455 - RNA, 20 nt, Artificial Sequence
  Synthetic
auggcauauuugggaaaaag

SEQ ID NO: 802456 - RNA, 20 nt, Artificial Sequence
  Synthetic
acucuugucccuggaaaaag

SEQ ID NO: 802457 - RNA, 20 nt, Artificial Sequence
  Synthetic
ugaucauacaaaauaaaaag

SEQ ID NO: 802458 - RNA, 20 nt, Artificial Sequence
  Synthetic
ugaauuuagaauauaaaaag

SEQ ID NO: 802459 - RNA, 20 nt, Artificial Sequence
  Synthetic
uacaugaguguuauaaaaag

SEQ ID NO: 802460 - RNA, 20 nt, Artificial Sequence
  Synthetic
uuggaaaacagccuaaaaag

SEQ ID NO: 802461 - RNA, 20 nt, Artificial Sequence
  Synthetic
uuaaaaaaaaauuuaaaaag

SEQ ID NO: 802462 - RNA, 20 nt, Artificial Sequence
  Synthetic
uuaggaaaacauuuaaaaag

SEQ ID NO: 802463 - RNA, 20 nt, Artificial Sequence
  Synthetic
uaaccuugaaaggacaaaag

SEQ ID NO: 802464 - RNA, 20 nt, Artificial Sequence
  Synthetic
aauauuaaagaggacaaaag

SEQ ID NO: 802465 - RNA, 20 nt, Artificial Sequence
  Synthetic
cccauguugagggacaaaag

SEQ ID NO: 802466 - RNA, 20 nt, Artificial Sequence
  Synthetic
caaaucugaauggacaaaag

SEQ ID NO: 802467 - RNA, 20 nt, Artificial Sequence
  Synthetic
augaaacgagaauacaaaag

SEQ ID NO: 802468 - RNA, 20 nt, Artificial Sequence
  Synthetic
acaugcucaacauacaaaag

SEQ ID NO: 802469 - RNA, 20 nt, Artificial Sequence
  Synthetic
aaaaaaaugcuuuacaaaag

SEQ ID NO: 802470 - RNA, 20 nt, Artificial Sequence
  Synthetic
uaguuucucuguaccaaaag

SEQ ID NO: 802471 - RNA, 20 nt, Artificial Sequence
  Synthetic
auauggaacuaccccaaaag

SEQ ID NO: 802472 - RNA, 20 nt, Artificial Sequence
  Synthetic
cgggacaguuuucccaaaag

SEQ ID NO: 802473 - RNA, 20 nt, Artificial Sequence
  Synthetic
ccaacagaaauagccaaaag

SEQ ID NO: 802474 - RNA, 20 nt, Artificial Sequence
  Synthetic
caaacaaccccauccaaaag

SEQ ID NO: 802475 - RNA, 20 nt, Artificial Sequence
  Synthetic
cugcaaaggaggagcaaaag

SEQ ID NO: 802476 - RNA, 20 nt, Artificial Sequence
  Synthetic
aggaggagaaugagcaaaag

SEQ ID NO: 802477 - RNA, 20 nt, Artificial Sequence
  Synthetic
agaauauaaaauagcaaaag

SEQ ID NO: 802478 - RNA, 20 nt, Artificial Sequence
  Synthetic
uggggcauguagggcaaaag

SEQ ID NO: 802479 - RNA, 20 nt, Artificial Sequence
  Synthetic
uuuacucuuuccaucaaaag

SEQ ID NO: 802480 - RNA, 20 nt, Artificial Sequence
  Synthetic
agggcaagaaagaucaaaag

SEQ ID NO: 802481 - RNA, 20 nt, Artificial Sequence
  Synthetic
aaugaaaccauacucaaaag

SEQ ID NO: 802482 - RNA, 20 nt, Artificial Sequence
  Synthetic
auuucuaauccucucaaaag

SEQ ID NO: 802483 - RNA, 20 nt, Artificial Sequence
  Synthetic
uccuuggaguucuucaaaag

SEQ ID NO: 802484 - RNA, 20 nt, Artificial Sequence
  Synthetic
ucuuuucaaaguuucaaaag

SEQ ID NO: 802485 - RNA, 20 nt, Artificial Sequence
  Synthetic
uguuauuuaaaaaagaaaag

SEQ ID NO: 802486 - RNA, 20 nt, Artificial Sequence
  Synthetic
uuuaagauagaaaagaaaag

SEQ ID NO: 802487 - RNA, 20 nt, Artificial Sequence
  Synthetic
auuacuuguggcaagaaaag

SEQ ID NO: 802488 - RNA, 20 nt, Artificial Sequence
  Synthetic
uccucaauucagcagaaaag

SEQ ID NO: 802489 - RNA, 20 nt, Artificial Sequence
  Synthetic
aagugugauugcuagaaaag

SEQ ID NO: 802490 - RNA, 20 nt, Artificial Sequence
  Synthetic
aaaacaugaaucuagaaaag

SEQ ID NO: 802491 - RNA, 20 nt, Artificial Sequence
  Synthetic
aagccuagaagguagaaaag

SEQ ID NO: 802492 - RNA, 20 nt, Artificial Sequence
  Synthetic
agacuugggggguagaaaag

SEQ ID NO: 802493 - RNA, 20 nt, Artificial Sequence
  Synthetic
ugagaaaacagaaggaaaag

SEQ ID NO: 802494 - RNA, 20 nt, Artificial Sequence
  Synthetic
cuuuuucugagaaggaaaag

SEQ ID NO: 802495 - RNA, 20 nt, Artificial Sequence
  Synthetic
uuuuauaagaagaggaaaag

SEQ ID NO: 802496 - RNA, 20 nt, Artificial Sequence
  Synthetic
augucaaguaagaggaaaag

SEQ ID NO: 802497 - RNA, 20 nt, Artificial Sequence
  Synthetic
auucuaaacaauaggaaaag

SEQ ID NO: 802498 - RNA, 20 nt, Artificial Sequence
  Synthetic
caccauucgaguaggaaaag

SEQ ID NO: 802499 - RNA, 20 nt, Artificial Sequence
  Synthetic
agguauucaguuaggaaaag

SEQ ID NO: 802500 - RNA, 20 nt, Artificial Sequence
  Synthetic
aguucuuugcuggggaaaag

SEQ ID NO: 802501 - RNA, 20 nt, Artificial Sequence
  Synthetic
acaagaauuuuggggaaaag

SEQ ID NO: 802502 - RNA, 20 nt, Artificial Sequence
  Synthetic
augcuauuaccugggaaaag

SEQ ID NO: 802503 - RNA, 20 nt, Artificial Sequence
  Synthetic
uuaggcuuaucauggaaaag

SEQ ID NO: 802504 - RNA, 20 nt, Artificial Sequence
  Synthetic
cuacaggaauccuggaaaag

SEQ ID NO: 802505 - RNA, 20 nt, Artificial Sequence
  Synthetic
cggaaaagaaaaaugaaaag

SEQ ID NO: 802506 - RNA, 20 nt, Artificial Sequence
  Synthetic
aaaagaacugaaaugaaaag

SEQ ID NO: 802507 - RNA, 20 nt, Artificial Sequence
  Synthetic
acaucaaaaucaaugaaaag

SEQ ID NO: 802508 - RNA, 20 nt, Artificial Sequence
  Synthetic
ugaccuuucuacaugaaaag

SEQ ID NO: 802509 - RNA, 20 nt, Artificial Sequence
  Synthetic
caaagauuagugaugaaaag

SEQ ID NO: 802510 - RNA, 20 nt, Artificial Sequence
  Synthetic
ucaugguuucauaugaaaag

SEQ ID NO: 802511 - RNA, 20 nt, Artificial Sequence
  Synthetic
agcacggagagacugaaaag

SEQ ID NO: 802512 - RNA, 20 nt, Artificial Sequence
  Synthetic
aguauuucaguccugaaaag

SEQ ID NO: 802513 - RNA, 20 nt, Artificial Sequence
  Synthetic
ugggaaggggagcugaaaag

SEQ ID NO: 802514 - RNA, 20 nt, Artificial Sequence
  Synthetic
uagugcgaggaucugaaaag

SEQ ID NO: 802515 - RNA, 20 nt, Artificial Sequence
  Synthetic
aaagcagcagcucugaaaag

SEQ ID NO: 802516 - RNA, 20 nt, Artificial Sequence
  Synthetic
uuugagacauauuugaaaag

SEQ ID NO: 802517 - RNA, 20 nt, Artificial Sequence
  Synthetic
agauaaaaaauuuugaaaag

SEQ ID NO: 802518 - RNA, 20 nt, Artificial Sequence
  Synthetic
acugcucaaggaaauaaaag

SEQ ID NO: 802519 - RNA, 20 nt, Artificial Sequence
  Synthetic
ugguaaaggugaaauaaaag

SEQ ID NO: 802520 - RNA, 20 nt, Artificial Sequence
  Synthetic
acaaagcaaggcaauaaaag

SEQ ID NO: 802521 - RNA, 20 nt, Artificial Sequence
  Synthetic
uuaauuacaaggaauaaaag

SEQ ID NO: 802522 - RNA, 20 nt, Artificial Sequence
  Synthetic
aagaaaugacauaauaaaag

SEQ ID NO: 802523 - RNA, 20 nt, Artificial Sequence
  Synthetic
caagguaagggagauaaaag

SEQ ID NO: 802524 - RNA, 20 nt, Artificial Sequence
  Synthetic
acuccagccauggauaaaag

SEQ ID NO: 802525 - RNA, 20 nt, Artificial Sequence
  Synthetic
aaauaauauucauauaaaag

SEQ ID NO: 802526 - RNA, 20 nt, Artificial Sequence
  Synthetic
uuauuccugagguauaaaag

SEQ ID NO: 802527 - RNA, 20 nt, Artificial Sequence
  Synthetic
cgaagcuguuauccuaaaag

SEQ ID NO: 802528 - RNA, 20 nt, Artificial Sequence
  Synthetic
uaacuucaucuugcuaaaag

SEQ ID NO: 802529 - RNA, 20 nt, Artificial Sequence
  Synthetic
augaguaguagcaguaaaag

SEQ ID NO: 802530 - RNA, 20 nt, Artificial Sequence
  Synthetic
auagaaugugcagguaaaag

SEQ ID NO: 802531 - RNA, 20 nt, Artificial Sequence
  Synthetic
uuucguuaccuugguaaaag

SEQ ID NO: 802532 - RNA, 20 nt, Artificial Sequence
  Synthetic
aaauuuccuggcuguaaaag

SEQ ID NO: 802533 - RNA, 20 nt, Artificial Sequence
  Synthetic
cacauguucucacuuaaaag

SEQ ID NO: 802534 - RNA, 20 nt, Artificial Sequence
  Synthetic
aauaauccccaccuuaaaag

SEQ ID NO: 802535 - RNA, 20 nt, Artificial Sequence
  Synthetic
ucauguauuuaccuuaaaag

SEQ ID NO: 802536 - RNA, 20 nt, Artificial Sequence
  Synthetic
uguuuugaaucccuuaaaag

SEQ ID NO: 802537 - RNA, 20 nt, Artificial Sequence
  Synthetic
uaugacucuguccuuaaaag

SEQ ID NO: 802538 - RNA, 20 nt, Artificial Sequence
  Synthetic
aagcagcaacagcuuaaaag

SEQ ID NO: 802539 - RNA, 20 nt, Artificial Sequence
  Synthetic
ugcauguucucgcuuaaaag

SEQ ID NO: 802540 - RNA, 20 nt, Artificial Sequence
  Synthetic
aaaaggacauugguuaaaag

SEQ ID NO: 802541 - RNA, 20 nt, Artificial Sequence
  Synthetic
auguaucaaaauguuaaaag

SEQ ID NO: 802542 - RNA, 20 nt, Artificial Sequence
  Synthetic
caaauacaaaaguuuaaaag

SEQ ID NO: 802543 - RNA, 20 nt, Artificial Sequence
  Synthetic
uaccauagaaauuuuaaaag

SEQ ID NO: 802544 - RNA, 20 nt, Artificial Sequence
  Synthetic
aaucugauauauuuuaaaag

SEQ ID NO: 802545 - RNA, 20 nt, Artificial Sequence
  Synthetic
uaaaaaaaauuuuuuaaaag

SEQ ID NO: 802546 - RNA, 20 nt, Artificial Sequence
  Synthetic
agcuuccauaaaaaacaaag

SEQ ID NO: 802547 - RNA, 20 nt, Artificial Sequence
  Synthetic
auuaaccccgaaaaacaaag

SEQ ID NO: 802548 - RNA, 20 nt, Artificial Sequence
  Synthetic
ucaucauccagaaaacaaag

SEQ ID NO: 802549 - RNA, 20 nt, Artificial Sequence
  Synthetic
agaaauuggcccaaacaaag

SEQ ID NO: 802550 - RNA, 20 nt, Artificial Sequence
  Synthetic
uuuauucuuuuuaaacaaag

SEQ ID NO: 802551 - RNA, 20 nt, Artificial Sequence
  Synthetic
cuugaauaggaagaacaaag

SEQ ID NO: 802552 - RNA, 20 nt, Artificial Sequence
  Synthetic
cacaguguggaagaacaaag

SEQ ID NO: 802553 - RNA, 20 nt, Artificial Sequence
  Synthetic
acuuauaagugagaacaaag

SEQ ID NO: 802554 - RNA, 20 nt, Artificial Sequence
  Synthetic
aaagaucguugagaacaaag

SEQ ID NO: 802555 - RNA, 20 nt, Artificial Sequence
  Synthetic
agaaucuugaaauaacaaag

SEQ ID NO: 802556 - RNA, 20 nt, Artificial Sequence
  Synthetic
agacugaaccccacacaaag

SEQ ID NO: 802557 - RNA, 20 nt, Artificial Sequence
  Synthetic
uucaacucaaacccacaaag

SEQ ID NO: 802558 - RNA, 20 nt, Artificial Sequence
  Synthetic
cuguugcgaguuccacaaag

SEQ ID NO: 802559 - RNA, 20 nt, Artificial Sequence
  Synthetic
auauagugcugagcacaaag

SEQ ID NO: 802560 - RNA, 20 nt, Artificial Sequence
  Synthetic
accaauggaauaagacaaag

SEQ ID NO: 802561 - RNA, 20 nt, Artificial Sequence
  Synthetic
uguguggagcuaagacaaag

SEQ ID NO: 802562 - RNA, 20 nt, Artificial Sequence
  Synthetic
aguagggagaggggacaaag

SEQ ID NO: 802563 - RNA, 20 nt, Artificial Sequence
  Synthetic
uccaguaugacuggacaaag

SEQ ID NO: 802564 - RNA, 20 nt, Artificial Sequence
  Synthetic
uuaacauaagagauacaaag

SEQ ID NO: 802565 - RNA, 20 nt, Artificial Sequence
  Synthetic
auucuaccagagauacaaag

SEQ ID NO: 802566 - RNA, 20 nt, Artificial Sequence
  Synthetic
uucaucagagggcuacaaag

SEQ ID NO: 802567 - RNA, 20 nt, Artificial Sequence
  Synthetic
uacagcuaugugcuacaaag

SEQ ID NO: 802568 - RNA, 20 nt, Artificial Sequence
  Synthetic
auucuaccagagguacaaag

SEQ ID NO: 802569 - RNA, 20 nt, Artificial Sequence
  Synthetic
uauuuuugcugcuuacaaag

SEQ ID NO: 802570 - RNA, 20 nt, Artificial Sequence
  Synthetic
cacuuggaguucuuacaaag

SEQ ID NO: 802571 - RNA, 20 nt, Artificial Sequence
  Synthetic
aguccuaauagaccccaaag

SEQ ID NO: 802572 - RNA, 20 nt, Artificial Sequence
  Synthetic
uuuucaguuucagcccaaag

SEQ ID NO: 802573 - RNA, 20 nt, Artificial Sequence
  Synthetic
uuuuucuucuuugcccaaag

SEQ ID NO: 802574 - RNA, 20 nt, Artificial Sequence
  Synthetic
ccugccucagccucccaaag

SEQ ID NO: 802575 - RNA, 20 nt, Artificial Sequence
  Synthetic
cucaccuuggccucccaaag

SEQ ID NO: 802576 - RNA, 20 nt, Artificial Sequence
  Synthetic
aaggggaacuugagccaaag

SEQ ID NO: 802577 - RNA, 20 nt, Artificial Sequence
  Synthetic
ucuaaugugccaggccaaag

SEQ ID NO: 802578 - RNA, 20 nt, Artificial Sequence
  Synthetic
aggucucugggaggccaaag

SEQ ID NO: 802579 - RNA, 20 nt, Artificial Sequence
  Synthetic
cuaggcuaaaccuuccaaag

SEQ ID NO: 802580 - RNA, 20 nt, Artificial Sequence
  Synthetic
uaaguccuucauuuccaaag

SEQ ID NO: 802581 - RNA, 20 nt, Artificial Sequence
  Synthetic
aucaaaacuacaaagcaaag

SEQ ID NO: 802582 - RNA, 20 nt, Artificial Sequence
  Synthetic
aaucaugguggaaagcaaag

SEQ ID NO: 802583 - RNA, 20 nt, Artificial Sequence
  Synthetic
ucaacaacuaauaagcaaag

SEQ ID NO: 802584 - RNA, 20 nt, Artificial Sequence
  Synthetic
cugugaaagcagcagcaaag

SEQ ID NO: 802585 - RNA, 20 nt, Artificial Sequence
  Synthetic
agauggggaaaagagcaaag

SEQ ID NO: 802586 - RNA, 20 nt, Artificial Sequence
  Synthetic
auuaauauaaaugagcaaag

SEQ ID NO: 802587 - RNA, 20 nt, Artificial Sequence
  Synthetic
aggagaagugcugagcaaag

SEQ ID NO: 802588 - RNA, 20 nt, Artificial Sequence
  Synthetic
aagcaguaagcaaggcaaag

SEQ ID NO: 802589 - RNA, 20 nt, Artificial Sequence
  Synthetic
aaccaugguggaaggcaaag

SEQ ID NO: 802590 - RNA, 20 nt, Artificial Sequence
  Synthetic
cuaaggggacagaggcaaag

SEQ ID NO: 802591 - RNA, 20 nt, Artificial Sequence
  Synthetic
auucauggugaagggcaaag

SEQ ID NO: 802592 - RNA, 20 nt, Artificial Sequence
  Synthetic
uuaugaggcauagggcaaag

SEQ ID NO: 802593 - RNA, 20 nt, Artificial Sequence
  Synthetic
aaaauccuucucuggcaaag

SEQ ID NO: 802594 - RNA, 20 nt, Artificial Sequence
  Synthetic
ucuuccuuggcuuggcaaag

SEQ ID NO: 802595 - RNA, 20 nt, Artificial Sequence
  Synthetic
agucaagugcugcugcaaag

SEQ ID NO: 802596 - RNA, 20 nt, Artificial Sequence
  Synthetic
auucuaccagaggugcaaag

SEQ ID NO: 802597 - RNA, 20 nt, Artificial Sequence
  Synthetic
ucuuuguauauauugcaaag

SEQ ID NO: 802598 - RNA, 20 nt, Artificial Sequence
  Synthetic
uuauuuugugaaaaucaaag

SEQ ID NO: 802599 - RNA, 20 nt, Artificial Sequence
  Synthetic
aacuaacccugaaaucaaag

SEQ ID NO: 802600 - RNA, 20 nt, Artificial Sequence
  Synthetic
acuauauaccuaaaucaaag

SEQ ID NO: 802601 - RNA, 20 nt, Artificial Sequence
  Synthetic
aaaagagaaaagaaucaaag

SEQ ID NO: 802602 - RNA, 20 nt, Artificial Sequence
  Synthetic
acagguuauaggaaucaaag

SEQ ID NO: 802603 - RNA, 20 nt, Artificial Sequence
  Synthetic
cuuuuuuuuuuuaaucaaag

SEQ ID NO: 802604 - RNA, 20 nt, Artificial Sequence
  Synthetic
uggaaggaaauacaucaaag

SEQ ID NO: 802605 - RNA, 20 nt, Artificial Sequence
  Synthetic
cauuaccuuacaacucaaag

SEQ ID NO: 802606 - RNA, 20 nt, Artificial Sequence
  Synthetic
cagugaugaguaacucaaag

SEQ ID NO: 802607 - RNA, 20 nt, Artificial Sequence
  Synthetic
uacuauuacaaagcucaaag

SEQ ID NO: 802608 - RNA, 20 nt, Artificial Sequence
  Synthetic
ccugaaaccgcagcucaaag

SEQ ID NO: 802609 - RNA, 20 nt, Artificial Sequence
  Synthetic
cuccuuuccuucucucaaag

SEQ ID NO: 802610 - RNA, 20 nt, Artificial Sequence
  Synthetic
cauuucuacuauucucaaag

SEQ ID NO: 802611 - RNA, 20 nt, Artificial Sequence
  Synthetic
uccuaacuuguuucucaaag

SEQ ID NO: 802612 - RNA, 20 nt, Artificial Sequence
  Synthetic
uagaaggauuagagucaaag

SEQ ID NO: 802613 - RNA, 20 nt, Artificial Sequence
  Synthetic
agaaacugaagaauucaaag

SEQ ID NO: 802614 - RNA, 20 nt, Artificial Sequence
  Synthetic
uaaaaugaguuaauucaaag

SEQ ID NO: 802615 - RNA, 20 nt, Artificial Sequence
  Synthetic
uauuauauucacauucaaag

SEQ ID NO: 802616 - RNA, 20 nt, Artificial Sequence
  Synthetic
aauaaauaguucauucaaag

SEQ ID NO: 802617 - RNA, 20 nt, Artificial Sequence
  Synthetic
caguaauuuuagauucaaag

SEQ ID NO: 802618 - RNA, 20 nt, Artificial Sequence
  Synthetic
auaaaagaggugguucaaag

SEQ ID NO: 802619 - RNA, 20 nt, Artificial Sequence
  Synthetic
aagagaaugcacuuucaaag

SEQ ID NO: 802620 - RNA, 20 nt, Artificial Sequence
  Synthetic
aguuaguuauucuuucaaag

SEQ ID NO: 802621 - RNA, 20 nt, Artificial Sequence
  Synthetic
caaaagagaagguuucaaag

SEQ ID NO: 802622 - RNA, 20 nt, Artificial Sequence
  Synthetic
agauacacuaaaaaagaaag

SEQ ID NO: 802623 - RNA, 20 nt, Artificial Sequence
  Synthetic
cugaaauuaagaaaagaaag

SEQ ID NO: 802624 - RNA, 20 nt, Artificial Sequence
  Synthetic
augcaaaacggaaaagaaag

SEQ ID NO: 802625 - RNA, 20 nt, Artificial Sequence
  Synthetic
uagggaaacgacaaagaaag

SEQ ID NO: 802626 - RNA, 20 nt, Artificial Sequence
  Synthetic
aucaaaaaauacaaagaaag

SEQ ID NO: 802627 - RNA, 20 nt, Artificial Sequence
  Synthetic
aaaacgauugucaaagaaag

SEQ ID NO: 802628 - RNA, 20 nt, Artificial Sequence
  Synthetic
aaaaaaaagaagaaagaaag

SEQ ID NO: 802629 - RNA, 20 nt, Artificial Sequence
  Synthetic
ucacugucgaggaaagaaag

SEQ ID NO: 802630 - RNA, 20 nt, Artificial Sequence
  Synthetic
ccuggagaugauaaagaaag

SEQ ID NO: 802631 - RNA, 20 nt, Artificial Sequence
  Synthetic
ugggaauaauaacaagaaag

SEQ ID NO: 802632 - RNA, 20 nt, Artificial Sequence
  Synthetic
aaagucuuucaucaagaaag

SEQ ID NO: 802633 - RNA, 20 nt, Artificial Sequence
  Synthetic
aagugaaggaaagaagaaag

SEQ ID NO: 802634 - RNA, 20 nt, Artificial Sequence
  Synthetic
uggugagguugugaagaaag

SEQ ID NO: 802635 - RNA, 20 nt, Artificial Sequence
  Synthetic
agaaaaaaauuugaagaaag

SEQ ID NO: 802636 - RNA, 20 nt, Artificial Sequence
  Synthetic
ugaacacaggaauaagaaag

SEQ ID NO: 802637 - RNA, 20 nt, Artificial Sequence
  Synthetic
cucacuauaucauaagaaag

SEQ ID NO: 802638 - RNA, 20 nt, Artificial Sequence
  Synthetic
uuucuaauuuuauaagaaag

SEQ ID NO: 802639 - RNA, 20 nt, Artificial Sequence
  Synthetic
uuguauaagguguaagaaag

SEQ ID NO: 802640 - RNA, 20 nt, Artificial Sequence
  Synthetic
ugauucuauacuuaagaaag

SEQ ID NO: 802641 - RNA, 20 nt, Artificial Sequence
  Synthetic
acaauauauugcacagaaag

SEQ ID NO: 802642 - RNA, 20 nt, Artificial Sequence
  Synthetic
uaaaaauugaucacagaaag

SEQ ID NO: 802643 - RNA, 20 nt, Artificial Sequence
  Synthetic
ucuccugaagucacagaaag

SEQ ID NO: 802644 - RNA, 20 nt, Artificial Sequence
  Synthetic
aagacuagcaagacagaaag

SEQ ID NO: 802645 - RNA, 20 nt, Artificial Sequence
  Synthetic
ccagccugggcgacagaaag

SEQ ID NO: 802646 - RNA, 20 nt, Artificial Sequence
  Synthetic
uauaugagagauacagaaag

SEQ ID NO: 802647 - RNA, 20 nt, Artificial Sequence
  Synthetic
uuuugaacagaagcagaaag

SEQ ID NO: 802648 - RNA, 20 nt, Artificial Sequence
  Synthetic
cuguacuuacaaucagaaag

SEQ ID NO: 802649 - RNA, 20 nt, Artificial Sequence
  Synthetic
aaaaaaaacccaucagaaag

SEQ ID NO: 802650 - RNA, 20 nt, Artificial Sequence
  Synthetic
aaaaagaccccaucagaaag

SEQ ID NO: 802651 - RNA, 20 nt, Artificial Sequence
  Synthetic
uuucgccgggauucagaaag

SEQ ID NO: 802652 - RNA, 20 nt, Artificial Sequence
  Synthetic
auaucauuauaaagagaaag

SEQ ID NO: 802653 - RNA, 20 nt, Artificial Sequence
  Synthetic
aagguuuuaugaagagaaag

SEQ ID NO: 802654 - RNA, 20 nt, Artificial Sequence
  Synthetic
aacaccaaagagagagaaag

SEQ ID NO: 802655 - RNA, 20 nt, Artificial Sequence
  Synthetic
auugagagagagagagaaag

SEQ ID NO: 802656 - RNA, 20 nt, Artificial Sequence
  Synthetic
ucaaaaucagugagagaaag

SEQ ID NO: 802657 - RNA, 20 nt, Artificial Sequence
  Synthetic
accucugaagaucgagaaag

SEQ ID NO: 802658 - RNA, 20 nt, Artificial Sequence
  Synthetic
acgcauuuuggaggagaaag

SEQ ID NO: 802659 - RNA, 20 nt, Artificial Sequence
  Synthetic
aaauaaauacuaugagaaag

SEQ ID NO: 802660 - RNA, 20 nt, Artificial Sequence
  Synthetic
augauugagaauugagaaag

SEQ ID NO: 802661 - RNA, 20 nt, Artificial Sequence
  Synthetic
accagaaaggcuugagaaag

SEQ ID NO: 802662 - RNA, 20 nt, Artificial Sequence
  Synthetic
uuugcagugccaauagaaag

SEQ ID NO: 802663 - RNA, 20 nt, Artificial Sequence
  Synthetic
uaaagaaauugaauagaaag

SEQ ID NO: 802664 - RNA, 20 nt, Artificial Sequence
  Synthetic
aauuugugauucauagaaag

SEQ ID NO: 802665 - RNA, 20 nt, Artificial Sequence
  Synthetic
aaugccccacagauagaaag

SEQ ID NO: 802666 - RNA, 20 nt, Artificial Sequence
  Synthetic
acaacugcacagauagaaag

SEQ ID NO: 802667 - RNA, 20 nt, Artificial Sequence
  Synthetic
auguauacuucuauagaaag

SEQ ID NO: 802668 - RNA, 20 nt, Artificial Sequence
  Synthetic
cuuaaaaguccucuagaaag

SEQ ID NO: 802669 - RNA, 20 nt, Artificial Sequence
  Synthetic
cagugauagguucuagaaag

SEQ ID NO: 802670 - RNA, 20 nt, Artificial Sequence
  Synthetic
uaggauaaacaaguagaaag

SEQ ID NO: 802671 - RNA, 20 nt, Artificial Sequence
  Synthetic
uucugucuucaaguagaaag

SEQ ID NO: 802672 - RNA, 20 nt, Artificial Sequence
  Synthetic
augugucacacuguagaaag

SEQ ID NO: 802673 - RNA, 20 nt, Artificial Sequence
  Synthetic
aaggaaaacaauuuagaaag

SEQ ID NO: 802674 - RNA, 20 nt, Artificial Sequence
  Synthetic
ucuaauagaaguuuagaaag

SEQ ID NO: 802675 - RNA, 20 nt, Artificial Sequence
  Synthetic
uguuaaaagccaaaggaaag

SEQ ID NO: 802676 - RNA, 20 nt, Artificial Sequence
  Synthetic
ucaaaaucagcaaaggaaag

SEQ ID NO: 802677 - RNA, 20 nt, Artificial Sequence
  Synthetic
aauagaaggggaaaggaaag

SEQ ID NO: 802678 - RNA, 20 nt, Artificial Sequence
  Synthetic
ucaaauugggggaaggaaag

SEQ ID NO: 802679 - RNA, 20 nt, Artificial Sequence
  Synthetic
agaaacuuuagucaggaaag

SEQ ID NO: 802680 - RNA, 20 nt, Artificial Sequence
  Synthetic
aggagaaguacugaggaaag

SEQ ID NO: 802681 - RNA, 20 nt, Artificial Sequence
  Synthetic
ugggguggagggacggaaag

SEQ ID NO: 802682 - RNA, 20 nt, Artificial Sequence
  Synthetic
aaaaaagaauuaagggaaag

SEQ ID NO: 802683 - RNA, 20 nt, Artificial Sequence
  Synthetic
acaugaauaaagagggaaag

SEQ ID NO: 802684 - RNA, 20 nt, Artificial Sequence
  Synthetic
cuuugacucucaggggaaag

SEQ ID NO: 802685 - RNA, 20 nt, Artificial Sequence
  Synthetic
uugguauaagugggggaaag

SEQ ID NO: 802686 - RNA, 20 nt, Artificial Sequence
  Synthetic
aguccccuauaaugggaaag

SEQ ID NO: 802687 - RNA, 20 nt, Artificial Sequence
  Synthetic
auuuaggggaggugggaaag

SEQ ID NO: 802688 - RNA, 20 nt, Artificial Sequence
  Synthetic
aagaauugggguugggaaag

SEQ ID NO: 802689 - RNA, 20 nt, Artificial Sequence
  Synthetic
auugugugagguauggaaag

SEQ ID NO: 802690 - RNA, 20 nt, Artificial Sequence
  Synthetic
ccauucacuccccuggaaag

SEQ ID NO: 802691 - RNA, 20 nt, Artificial Sequence
  Synthetic
cgaacugagaagcuggaaag

SEQ ID NO: 802692 - RNA, 20 nt, Artificial Sequence
  Synthetic
cuugugagagaucuggaaag

SEQ ID NO: 802693 - RNA, 20 nt, Artificial Sequence
  Synthetic
uuuuuuucuucauuggaaag

SEQ ID NO: 802694 - RNA, 20 nt, Artificial Sequence
  Synthetic
ucauuuccuuauuuggaaag

SEQ ID NO: 802695 - RNA, 20 nt, Artificial Sequence
  Synthetic
aguaaaaucagaaaugaaag

SEQ ID NO: 802696 - RNA, 20 nt, Artificial Sequence
  Synthetic
uugguaaugggaaaugaaag

SEQ ID NO: 802697 - RNA, 20 nt, Artificial Sequence
  Synthetic
uuaucagcaugaaaugaaag

SEQ ID NO: 802698 - RNA, 20 nt, Artificial Sequence
  Synthetic
aauacuuaugacaaugaaag

SEQ ID NO: 802699 - RNA, 20 nt, Artificial Sequence
  Synthetic
uuuucaaaggagaaugaaag

SEQ ID NO: 802700 - RNA, 20 nt, Artificial Sequence
  Synthetic
aagcugguugcuaaugaaag

SEQ ID NO: 802701 - RNA, 20 nt, Artificial Sequence
  Synthetic
aauaaacacuguaaugaaag

SEQ ID NO: 802702 - RNA, 20 nt, Artificial Sequence
  Synthetic
caguuucuuuagcaugaaag

SEQ ID NO: 802703 - RNA, 20 nt, Artificial Sequence
  Synthetic
ucuucuccauaagaugaaag

SEQ ID NO: 802704 - RNA, 20 nt, Artificial Sequence
  Synthetic
ugaagaugaagagaugaaag

SEQ ID NO: 802705 - RNA, 20 nt, Artificial Sequence
  Synthetic
caagaaauacuugaugaaag

SEQ ID NO: 802706 - RNA, 20 nt, Artificial Sequence
  Synthetic
agaacucuauacuaugaaag

SEQ ID NO: 802707 - RNA, 20 nt, Artificial Sequence
  Synthetic
aagaaaaauggaacugaaag

SEQ ID NO: 802708 - RNA, 20 nt, Artificial Sequence
  Synthetic
auauuuuaaaagacugaaag

SEQ ID NO: 802709 - RNA, 20 nt, Artificial Sequence
  Synthetic
acaugaagaggugcugaaag

SEQ ID NO: 802710 - RNA, 20 nt, Artificial Sequence
  Synthetic
agagcuuaagugucugaaag

SEQ ID NO: 802711 - RNA, 20 nt, Artificial Sequence
  Synthetic
ugucaagcagaaggugaaag

SEQ ID NO: 802712 - RNA, 20 nt, Artificial Sequence
  Synthetic
cggaauguagggggugaaag

SEQ ID NO: 802713 - RNA, 20 nt, Artificial Sequence
  Synthetic
acaaugauuaauggugaaag

SEQ ID NO: 802714 - RNA, 20 nt, Artificial Sequence
  Synthetic
ugcuaauuaaaaugugaaag

SEQ ID NO: 802715 - RNA, 20 nt, Artificial Sequence
  Synthetic
uuuugagauuacugugaaag

SEQ ID NO: 802716 - RNA, 20 nt, Artificial Sequence
  Synthetic
aacuuucagagaauugaaag

SEQ ID NO: 802717 - RNA, 20 nt, Artificial Sequence
  Synthetic
aauaaaaggagaauugaaag

SEQ ID NO: 802718 - RNA, 20 nt, Artificial Sequence
  Synthetic
cauuuuuuaaucguugaaag

SEQ ID NO: 802719 - RNA, 20 nt, Artificial Sequence
  Synthetic
acuuuugacagauuugaaag

SEQ ID NO: 802720 - RNA, 20 nt, Artificial Sequence
  Synthetic
caaaaaggccuguuugaaag

SEQ ID NO: 802721 - RNA, 20 nt, Artificial Sequence
  Synthetic
ugaugugaguguuuugaaag

SEQ ID NO: 802722 - RNA, 20 nt, Artificial Sequence
  Synthetic
agaaauuggccaaaauaaag

SEQ ID NO: 802723 - RNA, 20 nt, Artificial Sequence
  Synthetic
uuuaucacauuaaaauaaag

SEQ ID NO: 802724 - RNA, 20 nt, Artificial Sequence
  Synthetic
acaggaggguagaaauaaag

SEQ ID NO: 802725 - RNA, 20 nt, Artificial Sequence
  Synthetic
caaacacaggggaaauaaag

SEQ ID NO: 802726 - RNA, 20 nt, Artificial Sequence
  Synthetic
auggaaguuaauaaauaaag

SEQ ID NO: 802727 - RNA, 20 nt, Artificial Sequence
  Synthetic
uuuuaaaaagguaaauaaag

SEQ ID NO: 802728 - RNA, 20 nt, Artificial Sequence
  Synthetic
ugguuaagaaaucaauaaag

SEQ ID NO: 802729 - RNA, 20 nt, Artificial Sequence
  Synthetic
agcuuuuuaugucaauaaag

SEQ ID NO: 802730 - RNA, 20 nt, Artificial Sequence
  Synthetic
auaauguaacaugaauaaag

SEQ ID NO: 802731 - RNA, 20 nt, Artificial Sequence
  Synthetic
caugaauaaaaauaauaaag

SEQ ID NO: 802732 - RNA, 20 nt, Artificial Sequence
  Synthetic
caguaacaacaauaauaaag

SEQ ID NO: 802733 - RNA, 20 nt, Artificial Sequence
  Synthetic
uuuaaacuauuauaauaaag

SEQ ID NO: 802734 - RNA, 20 nt, Artificial Sequence
  Synthetic
aauacuaugcagccauaaag

SEQ ID NO: 802735 - RNA, 20 nt, Artificial Sequence
  Synthetic
ucuauuauaaauccauaaag

SEQ ID NO: 802736 - RNA, 20 nt, Artificial Sequence
  Synthetic
agagccagcuaggcauaaag

SEQ ID NO: 802737 - RNA, 20 nt, Artificial Sequence
  Synthetic
acaaggaaaugggcauaaag

SEQ ID NO: 802738 - RNA, 20 nt, Artificial Sequence
  Synthetic
ucaggaaggacugcauaaag

SEQ ID NO: 802739 - RNA, 20 nt, Artificial Sequence
  Synthetic
acacaugaucccucauaaag

SEQ ID NO: 802740 - RNA, 20 nt, Artificial Sequence
  Synthetic
uacggagagaauucauaaag

SEQ ID NO: 802741 - RNA, 20 nt, Artificial Sequence
  Synthetic
aaguccuuguuuucauaaag

SEQ ID NO: 802742 - RNA, 20 nt, Artificial Sequence
  Synthetic
aacuauuucaaaagauaaag

SEQ ID NO: 802743 - RNA, 20 nt, Artificial Sequence
  Synthetic
cacaagaaaaaaugauaaag

SEQ ID NO: 802744 - RNA, 20 nt, Artificial Sequence
  Synthetic
cacaauaaaaaaugauaaag

SEQ ID NO: 802745 - RNA, 20 nt, Artificial Sequence
  Synthetic
ugcaauaaaaaaugauaaag

SEQ ID NO: 802746 - RNA, 20 nt, Artificial Sequence
  Synthetic
aauagaaacagaauauaaag

SEQ ID NO: 802747 - RNA, 20 nt, Artificial Sequence
  Synthetic
agcagaaaaagcauauaaag

SEQ ID NO: 802748 - RNA, 20 nt, Artificial Sequence
  Synthetic
uuuuugcaaaugauauaaag

SEQ ID NO: 802749 - RNA, 20 nt, Artificial Sequence
  Synthetic
acaaccuugcuuauauaaag

SEQ ID NO: 802750 - RNA, 20 nt, Artificial Sequence
  Synthetic
caguuuauucagcuauaaag

SEQ ID NO: 802751 - RNA, 20 nt, Artificial Sequence
  Synthetic
cuuguuuuuugucuauaaag

SEQ ID NO: 802752 - RNA, 20 nt, Artificial Sequence
  Synthetic
uuuagcuuuuuucuauaaag

SEQ ID NO: 802753 - RNA, 20 nt, Artificial Sequence
  Synthetic
acucuuuuggaaaacuaaag

SEQ ID NO: 802754 - RNA, 20 nt, Artificial Sequence
  Synthetic
auaaguuagaauaacuaaag

SEQ ID NO: 802755 - RNA, 20 nt, Artificial Sequence
  Synthetic
uguagucccagccacuaaag

SEQ ID NO: 802756 - RNA, 20 nt, Artificial Sequence
  Synthetic
caggccagucugcacuaaag

SEQ ID NO: 802757 - RNA, 20 nt, Artificial Sequence
  Synthetic
ucaagcaauacauacuaaag

SEQ ID NO: 802758 - RNA, 20 nt, Artificial Sequence
  Synthetic
aggugguucucuuccuaaag

SEQ ID NO: 802759 - RNA, 20 nt, Artificial Sequence
  Synthetic
uucaagagaccaagcuaaag

SEQ ID NO: 802760 - RNA, 20 nt, Artificial Sequence
  Synthetic
ucauuaaagcgaagcuaaag

SEQ ID NO: 802761 - RNA, 20 nt, Artificial Sequence
  Synthetic
aguauguuggccugcuaaag

SEQ ID NO: 802762 - RNA, 20 nt, Artificial Sequence
  Synthetic
ucuguuucgguuugcuaaag

SEQ ID NO: 802763 - RNA, 20 nt, Artificial Sequence
  Synthetic
aacaaagggccauucuaaag

SEQ ID NO: 802764 - RNA, 20 nt, Artificial Sequence
  Synthetic
auauauuuuaucuucuaaag

SEQ ID NO: 802765 - RNA, 20 nt, Artificial Sequence
  Synthetic
uuuuauuaaucuuucuaaag

SEQ ID NO: 802766 - RNA, 20 nt, Artificial Sequence
  Synthetic
accuaaacaguuuucuaaag

SEQ ID NO: 802767 - RNA, 20 nt, Artificial Sequence
  Synthetic
aaguagacagaaaaguaaag

SEQ ID NO: 802768 - RNA, 20 nt, Artificial Sequence
  Synthetic
aauggggccugaaaguaaag

SEQ ID NO: 802769 - RNA, 20 nt, Artificial Sequence
  Synthetic
uggguguuuauaaaguaaag

SEQ ID NO: 802770 - RNA, 20 nt, Artificial Sequence
  Synthetic
aucacuuucuguaaguaaag

SEQ ID NO: 802771 - RNA, 20 nt, Artificial Sequence
  Synthetic
auguauucauaucaguaaag

SEQ ID NO: 802772 - RNA, 20 nt, Artificial Sequence
  Synthetic
aaaauuacucaugaguaaag

SEQ ID NO: 802773 - RNA, 20 nt, Artificial Sequence
  Synthetic
agaauaagcccugaguaaag

SEQ ID NO: 802774 - RNA, 20 nt, Artificial Sequence
  Synthetic
auaaaagguaagagguaaag

SEQ ID NO: 802775 - RNA, 20 nt, Artificial Sequence
  Synthetic
aaaacuucgaguagguaaag

SEQ ID NO: 802776 - RNA, 20 nt, Artificial Sequence
  Synthetic
uaaaguauuuaaggguaaag

SEQ ID NO: 802777 - RNA, 20 nt, Artificial Sequence
  Synthetic
cuugaguaagugugguaaag

SEQ ID NO: 802778 - RNA, 20 nt, Artificial Sequence
  Synthetic
ucauuuucuuaucuguaaag

SEQ ID NO: 802779 - RNA, 20 nt, Artificial Sequence
  Synthetic
ccauuuacuccucuguaaag

SEQ ID NO: 802780 - RNA, 20 nt, Artificial Sequence
  Synthetic
ugugcuuuuauuuuguaaag

SEQ ID NO: 802781 - RNA, 20 nt, Artificial Sequence
  Synthetic
aauauuuggaagaauuaaag

SEQ ID NO: 802782 - RNA, 20 nt, Artificial Sequence
  Synthetic
ugaaaaauucuacauuaaag

SEQ ID NO: 802783 - RNA, 20 nt, Artificial Sequence
  Synthetic
aauuaaaaacaccauuaaag

SEQ ID NO: 802784 - RNA, 20 nt, Artificial Sequence
  Synthetic
aaauuuugcuuugauuaaag

SEQ ID NO: 802785 - RNA, 20 nt, Artificial Sequence
  Synthetic
acaagaaaggaauauuaaag

SEQ ID NO: 802786 - RNA, 20 nt, Artificial Sequence
  Synthetic
aacacagcuggauauuaaag

SEQ ID NO: 802787 - RNA, 20 nt, Artificial Sequence
  Synthetic
uaaaaagaguguuauuaaag

SEQ ID NO: 802788 - RNA, 20 nt, Artificial Sequence
  Synthetic
auacagggcaaaacuuaaag

SEQ ID NO: 802789 - RNA, 20 nt, Artificial Sequence
  Synthetic
aagaacuuuaaaccuuaaag

SEQ ID NO: 802790 - RNA, 20 nt, Artificial Sequence
  Synthetic
aagaagaaaugggcuuaaag

SEQ ID NO: 802791 - RNA, 20 nt, Artificial Sequence
  Synthetic
uuucugucuauugcuuaaag

SEQ ID NO: 802792 - RNA, 20 nt, Artificial Sequence
  Synthetic
agcaaacaaaaaucuuaaag

SEQ ID NO: 802793 - RNA, 20 nt, Artificial Sequence
  Synthetic
acuucuuucucacguuaaag

SEQ ID NO: 802794 - RNA, 20 nt, Artificial Sequence
  Synthetic
uguaugcuuuucuguuaaag

SEQ ID NO: 802795 - RNA, 20 nt, Artificial Sequence
  Synthetic
aaaagagaauguuguuaaag

SEQ ID NO: 802796 - RNA, 20 nt, Artificial Sequence
  Synthetic
acaugauaaaagauuuaaag

SEQ ID NO: 802797 - RNA, 20 nt, Artificial Sequence
  Synthetic
aauagguuuaguauuuaaag

SEQ ID NO: 802798 - RNA, 20 nt, Artificial Sequence
  Synthetic
uggagguagggccuuuaaag

SEQ ID NO: 802799 - RNA, 20 nt, Artificial Sequence
  Synthetic
uagaauuuuaucuuuuaaag

SEQ ID NO: 802800 - RNA, 20 nt, Artificial Sequence
  Synthetic
uacuacuuuacaaaaacaag

SEQ ID NO: 802801 - RNA, 20 nt, Artificial Sequence
  Synthetic
agaacaaagaggaaaacaag

SEQ ID NO: 802802 - RNA, 20 nt, Artificial Sequence
  Synthetic
acuguucaaaugaaaacaag

SEQ ID NO: 802803 - RNA, 20 nt, Artificial Sequence
  Synthetic
cugauacauacagaaacaag

SEQ ID NO: 802804 - RNA, 20 nt, Artificial Sequence
  Synthetic
uugauuauaugcuaaacaag

SEQ ID NO: 802805 - RNA, 20 nt, Artificial Sequence
  Synthetic
cuauuaaucaauccaacaag

SEQ ID NO: 802806 - RNA, 20 nt, Artificial Sequence
  Synthetic
aaagggaucaauucaacaag

SEQ ID NO: 802807 - RNA, 20 nt, Artificial Sequence
  Synthetic
ugauggaagauaagaacaag

SEQ ID NO: 802808 - RNA, 20 nt, Artificial Sequence
  Synthetic
uucuacaagaacagaacaag

SEQ ID NO: 802809 - RNA, 20 nt, Artificial Sequence
  Synthetic
aacaaaugaccucgaacaag

SEQ ID NO: 802810 - RNA, 20 nt, Artificial Sequence
  Synthetic
ugcuucaugagaggaacaag

SEQ ID NO: 802811 - RNA, 20 nt, Artificial Sequence
  Synthetic
aaagaguacaguugaacaag

SEQ ID NO: 802812 - RNA, 20 nt, Artificial Sequence
  Synthetic
aggaaauagaaaauaacaag

SEQ ID NO: 802813 - RNA, 20 nt, Artificial Sequence
  Synthetic
auuaguucccuuauaacaag

SEQ ID NO: 802814 - RNA, 20 nt, Artificial Sequence
  Synthetic
uaguggagaguuauaacaag

SEQ ID NO: 802815 - RNA, 20 nt, Artificial Sequence
  Synthetic
aaggccacaaagcuaacaag

SEQ ID NO: 802816 - RNA, 20 nt, Artificial Sequence
  Synthetic
uguaugaaaauucuaacaag

SEQ ID NO: 802817 - RNA, 20 nt, Artificial Sequence
  Synthetic
cuaaaugacaauguaacaag

SEQ ID NO: 802818 - RNA, 20 nt, Artificial Sequence
  Synthetic
caaaaccaaaaauuaacaag

SEQ ID NO: 802819 - RNA, 20 nt, Artificial Sequence
  Synthetic
acaaaagacagauuaacaag

SEQ ID NO: 802820 - RNA, 20 nt, Artificial Sequence
  Synthetic
acuggaggguggaacacaag

SEQ ID NO: 802821 - RNA, 20 nt, Artificial Sequence
  Synthetic
auaaggcugacagacacaag

SEQ ID NO: 802822 - RNA, 20 nt, Artificial Sequence
  Synthetic
acagacugaaacuacacaag

SEQ ID NO: 802823 - RNA, 20 nt, Artificial Sequence
  Synthetic
cuaucccuuuucuacacaag

SEQ ID NO: 802824 - RNA, 20 nt, Artificial Sequence
  Synthetic
cauuguuccaggcccacaag

SEQ ID NO: 802825 - RNA, 20 nt, Artificial Sequence
  Synthetic
ccucaccccggaagcacaag

SEQ ID NO: 802826 - RNA, 20 nt, Artificial Sequence
  Synthetic
cuaguauuugauagcacaag

SEQ ID NO: 802827 - RNA, 20 nt, Artificial Sequence
  Synthetic
acuuagcuaacgggcacaag

SEQ ID NO: 802828 - RNA, 20 nt, Artificial Sequence
  Synthetic
acuuggccaacuggcacaag

SEQ ID NO: 802829 - RNA, 20 nt, Artificial Sequence
  Synthetic
uagucauacaugaucacaag

SEQ ID NO: 802830 - RNA, 20 nt, Artificial Sequence
  Synthetic
ccauuuagaacuuucacaag

SEQ ID NO: 802831 - RNA, 20 nt, Artificial Sequence
  Synthetic
ucaaccaucauuaagacaag

SEQ ID NO: 802832 - RNA, 20 nt, Artificial Sequence
  Synthetic
agaauuuuggcacagacaag

SEQ ID NO: 802833 - RNA, 20 nt, Artificial Sequence
  Synthetic
agacuuaucaggcagacaag

SEQ ID NO: 802834 - RNA, 20 nt, Artificial Sequence
  Synthetic
uaaaagucuauauagacaag

SEQ ID NO: 802835 - RNA, 20 nt, Artificial Sequence
  Synthetic
auucaaugaaaaucgacaag

SEQ ID NO: 802836 - RNA, 20 nt, Artificial Sequence
  Synthetic
cuaauacaacugaggacaag

SEQ ID NO: 802837 - RNA, 20 nt, Artificial Sequence
  Synthetic
acaauaauaaaggggacaag

SEQ ID NO: 802838 - RNA, 20 nt, Artificial Sequence
  Synthetic
ucucugaucucauggacaag

SEQ ID NO: 802839 - RNA, 20 nt, Artificial Sequence
  Synthetic
caaaaccaaaaauugacaag

SEQ ID NO: 802840 - RNA, 20 nt, Artificial Sequence
  Synthetic
uuuuuucagaaauugacaag

SEQ ID NO: 802841 - RNA, 20 nt, Artificial Sequence
  Synthetic
cucaaaagaagacauacaag

SEQ ID NO: 802842 - RNA, 20 nt, Artificial Sequence
  Synthetic
aaucaaagaggagauacaag

SEQ ID NO: 802843 - RNA, 20 nt, Artificial Sequence
  Synthetic
caugagaccaaauauacaag

SEQ ID NO: 802844 - RNA, 20 nt, Artificial Sequence
  Synthetic
uuuuucuuagaauauacaag

SEQ ID NO: 802845 - RNA, 20 nt, Artificial Sequence
  Synthetic
auucaucugacuuauacaag

SEQ ID NO: 802846 - RNA, 20 nt, Artificial Sequence
  Synthetic
aaauaugugcugccuacaag

SEQ ID NO: 802847 - RNA, 20 nt, Artificial Sequence
  Synthetic
uuccaagcucauucuacaag

SEQ ID NO: 802848 - RNA, 20 nt, Artificial Sequence
  Synthetic
uugagaucgauuucuacaag

SEQ ID NO: 802849 - RNA, 20 nt, Artificial Sequence
  Synthetic
auagacuggagcuguacaag

SEQ ID NO: 802850 - RNA, 20 nt, Artificial Sequence
  Synthetic
aauucaaaagcaauuacaag

SEQ ID NO: 802851 - RNA, 20 nt, Artificial Sequence
  Synthetic
agaugguuuauaauuacaag

SEQ ID NO: 802852 - RNA, 20 nt, Artificial Sequence
  Synthetic
ugcauguucucacuuacaag

SEQ ID NO: 802853 - RNA, 20 nt, Artificial Sequence
  Synthetic
ccaguguuuaauuuuacaag

SEQ ID NO: 802854 - RNA, 20 nt, Artificial Sequence
  Synthetic
aaugagaacuacaaaccaag

SEQ ID NO: 802855 - RNA, 20 nt, Artificial Sequence
  Synthetic
uauaaauuauagaaaccaag

SEQ ID NO: 802856 - RNA, 20 nt, Artificial Sequence
  Synthetic
ucugcccuguggaaaccaag

SEQ ID NO: 802857 - RNA, 20 nt, Artificial Sequence
  Synthetic
acuuuucuuccugaaccaag

SEQ ID NO: 802858 - RNA, 20 nt, Artificial Sequence
  Synthetic
cuauacuuuggguaaccaag

SEQ ID NO: 802859 - RNA, 20 nt, Artificial Sequence
  Synthetic
ucuguuagcuaaccaccaag

SEQ ID NO: 802860 - RNA, 20 nt, Artificial Sequence
  Synthetic
auauuuuuaccuccaccaag

SEQ ID NO: 802861 - RNA, 20 nt, Artificial Sequence
  Synthetic
aucaugaggauggcaccaag

SEQ ID NO: 802862 - RNA, 20 nt, Artificial Sequence
  Synthetic
aggccauuuuugucaccaag

SEQ ID NO: 802863 - RNA, 20 nt, Artificial Sequence
  Synthetic
aaacucagcucuggaccaag

SEQ ID NO: 802864 - RNA, 20 nt, Artificial Sequence
  Synthetic
uucaugaggacaguaccaag

SEQ ID NO: 802865 - RNA, 20 nt, Artificial Sequence
  Synthetic
aguaucagugaccacccaag

SEQ ID NO: 802866 - RNA, 20 nt, Artificial Sequence
  Synthetic
cgaagaucauaagacccaag

SEQ ID NO: 802867 - RNA, 20 nt, Artificial Sequence
  Synthetic
cacugcuccucauacccaag

SEQ ID NO: 802868 - RNA, 20 nt, Artificial Sequence
  Synthetic
uuggagguguccuacccaag

SEQ ID NO: 802869 - RNA, 20 nt, Artificial Sequence
  Synthetic
acaaaaacucuaaccccaag

SEQ ID NO: 802870 - RNA, 20 nt, Artificial Sequence
  Synthetic
uugugccuuagccccccaag

SEQ ID NO: 802871 - RNA, 20 nt, Artificial Sequence
  Synthetic
uccugcaucagccucccaag

SEQ ID NO: 802872 - RNA, 20 nt, Artificial Sequence
  Synthetic
auuuccaauaagcucccaag

SEQ ID NO: 802873 - RNA, 20 nt, Artificial Sequence
  Synthetic
aaacauuaucuauucccaag

SEQ ID NO: 802874 - RNA, 20 nt, Artificial Sequence
  Synthetic
agaugcuuagcaaagccaag

SEQ ID NO: 802875 - RNA, 20 nt, Artificial Sequence
  Synthetic
aaugcaccuggucagccaag

SEQ ID NO: 802876 - RNA, 20 nt, Artificial Sequence
  Synthetic
acugaagucagggagccaag

SEQ ID NO: 802877 - RNA, 20 nt, Artificial Sequence
  Synthetic
uuacagguaguugagccaag

SEQ ID NO: 802878 - RNA, 20 nt, Artificial Sequence
  Synthetic
agugaagauuucuagccaag

SEQ ID NO: 802879 - RNA, 20 nt, Artificial Sequence
  Synthetic
acaucuggaagggggccaag

SEQ ID NO: 802880 - RNA, 20 nt, Artificial Sequence
  Synthetic
uacaucacauguuggccaag

SEQ ID NO: 802881 - RNA, 20 nt, Artificial Sequence
  Synthetic
agauaagcaguggugccaag

SEQ ID NO: 802882 - RNA, 20 nt, Artificial Sequence
  Synthetic
aaccagaauugaaauccaag

SEQ ID NO: 802883 - RNA, 20 nt, Artificial Sequence
  Synthetic
cacaaaggcaugaauccaag

SEQ ID NO: 802884 - RNA, 20 nt, Artificial Sequence
  Synthetic
agucucauuagauauccaag

SEQ ID NO: 802885 - RNA, 20 nt, Artificial Sequence
  Synthetic
cucuuuguaagaacuccaag

SEQ ID NO: 802886 - RNA, 20 nt, Artificial Sequence
  Synthetic
aggaagaacagggcuccaag

SEQ ID NO: 802887 - RNA, 20 nt, Artificial Sequence
  Synthetic
ucccaguucugaucuccaag

SEQ ID NO: 802888 - RNA, 20 nt, Artificial Sequence
  Synthetic
uguucugcaggcucuccaag

SEQ ID NO: 802889 - RNA, 20 nt, Artificial Sequence
  Synthetic
uuuaugaaugcuucuccaag

SEQ ID NO: 802890 - RNA, 20 nt, Artificial Sequence
  Synthetic
uugugcugaauaauuccaag

SEQ ID NO: 802891 - RNA, 20 nt, Artificial Sequence
  Synthetic
cagagagaauguauuccaag

SEQ ID NO: 802892 - RNA, 20 nt, Artificial Sequence
  Synthetic
cuggaggauucacuuccaag

SEQ ID NO: 802893 - RNA, 20 nt, Artificial Sequence
  Synthetic
aggaauuuagauguuccaag

SEQ ID NO: 802894 - RNA, 20 nt, Artificial Sequence
  Synthetic
caacaugauuuauuuccaag

SEQ ID NO: 802895 - RNA, 20 nt, Artificial Sequence
  Synthetic
auucagaauaccuuuccaag

SEQ ID NO: 802896 - RNA, 20 nt, Artificial Sequence
  Synthetic
uuacaacugaagaaagcaag

SEQ ID NO: 802897 - RNA, 20 nt, Artificial Sequence
  Synthetic
uuuauuuuauauaaagcaag

SEQ ID NO: 802898 - RNA, 20 nt, Artificial Sequence
  Synthetic
uuaaaacauaaagaagcaag

SEQ ID NO: 802899 - RNA, 20 nt, Artificial Sequence
  Synthetic
uaauauaagcaggaagcaag

SEQ ID NO: 802900 - RNA, 20 nt, Artificial Sequence
  Synthetic
auucucaggaauuaagcaag

SEQ ID NO: 802901 - RNA, 20 nt, Artificial Sequence
  Synthetic
ugaagaucucuuuaagcaag

SEQ ID NO: 802902 - RNA, 20 nt, Artificial Sequence
  Synthetic
uuagcuuauuaaacagcaag

SEQ ID NO: 802903 - RNA, 20 nt, Artificial Sequence
  Synthetic
cucagagugcagccagcaag

SEQ ID NO: 802904 - RNA, 20 nt, Artificial Sequence
  Synthetic
auuguauuauaagcagcaag

SEQ ID NO: 802905 - RNA, 20 nt, Artificial Sequence
  Synthetic
cuaggacagcaugcagcaag

SEQ ID NO: 802906 - RNA, 20 nt, Artificial Sequence
  Synthetic
cauuuaagaaguagagcaag

SEQ ID NO: 802907 - RNA, 20 nt, Artificial Sequence
  Synthetic
caaaagaugucaggagcaag

SEQ ID NO: 802908 - RNA, 20 nt, Artificial Sequence
  Synthetic
uauguaagcaaaugagcaag

SEQ ID NO: 802909 - RNA, 20 nt, Artificial Sequence
  Synthetic
aguggaaucuagugagcaag

SEQ ID NO: 802910 - RNA, 20 nt, Artificial Sequence
  Synthetic
agcaggcaguauugagcaag

SEQ ID NO: 802911 - RNA, 20 nt, Artificial Sequence
  Synthetic
aucacauagcugguagcaag

SEQ ID NO: 802912 - RNA, 20 nt, Artificial Sequence
  Synthetic
uugagacaggcauuagcaag

SEQ ID NO: 802913 - RNA, 20 nt, Artificial Sequence
  Synthetic
aagugguuagaaaaggcaag
